United States Patent Application Publication US 2025/0311734 A1 - sequence listing, part 10

SEQ ID NO: 39659 - protein, 480 aa, Synthetic construct
NGTMMQYFEWYLPNDGNHWNRLNSDASNLKSKGITAVWIPPAWKGASQNDVGYGAYDLYDLGEFNQKGTVRTKYGTRSQLQAAVTSLKNNGIQVYGDVVMNHKGGADATEMVRAVEVNPNNRNQEVTGEYTIEAWTRFDFPGRGNTHSSFKWRWYHFDGVDWDQSRRLNNRIYKFRGHGKAWDWEVDVEFGNYDYLMYADYDMDHPEVVNELRNWGVWYTNTLGLDGFRIDAVKHIKYSFTRDWINHVRSATGKNMFAVAEFWKNDLGAIENYLQKTNWNHSVFDVPLHYNLYNASKSGGNYDMRNIFNGTVVQRHPSHAVTFVDNHDSQPEEALESFVEEWFKPLAYALTLTREQGYPSVFYGDYYGIPTHGVPAMRSKIDPILEARQKYAYGPQHDYLDHPDVIGWTREGDSSHPKSGLATLITDGPGGSKRMYAGLKNAGETWYDITGNRSDTVKIGSDGWGEFHVNDGSVSIYVQK

SEQ ID NO: 39660 - protein, 480 aa, Bacillus sp.
NGTMMQYFEWYLPNDGNHWNRLNSDASNLKSKGITAVWIPPAWKGASQNDVGYGAYDLYDLGEFNQKGTVRTKYGTRSQLQAAVTSLKNNGIQVYGDVVMNHKGGADATEMVRAVEVNPNNRNQEVTGEYTIEAWTRFDFPGRGNTHSSFKWRWYHFDGVDWDQSRRLNNRIYKFRGHGKAWDWEVDTEFGNYDYLMYADYDMDHPEVVNELRNWGVWYTNTLGLDGFRIDAVKHIKYSFTRDWINHVRSATGKNMFAVAEFWKNDLGAIENYLQKTNWNHSVFDVPLHYNLYNASKSQGNYDMRNIFNGTVVQRHPSHAVTFVDNHDSQPEEALESFVETWFKPLAYALTLTREQGYPSVFYGDYYGIPTHGVPAMRSKIDPILEARQKYAYGPQHDYLDHPDVIGWTREGDSSHPKSGLATLITDGPGGSKRMYAGLKNAGETWYDITGNRSDTVKIGSDGWGEFHVNDGSVSIYVQK

SEQ ID NO: 39661 - protein, 480 aa, Bacillus sp.
NGTMMQYFEWYLPNDGNHWNRLNSDASNLKSKGITAVWIPPAWKGASQNDVGYGAYDLYDLGEFNQKGTVRTKYGTRSQLQAAVTSLKNNGIQVYGDVVMNHKGGADATEMVRAVEVNPNNRNQEVTGEYTIEAWTRFDFPGRGNTHSSFKWRWYHFDGVDWDQSRRLNNRIYKFRGHGKAWDWEVDGEFGNYDYLMYADYDMDHPEVVNELRNWGVWYTNTLGLDGFRIDAVKHIKYSFTRDWINHVRSATGKNMFAVAEFWKNDLGAIENYLQKTNWNHSVFDVPLHYNLYNASKSGGNYDMRNIFNGTVVQRHPSHAVTFVDNHDSQPEEALESFVEEWFKPLAYALTLTREQGYPSVFYGDYYGIPTHGVPAMRSKIDPILEARQKYAYGPQHDYLDHPDVIGWTREGDSSHPKSGLATLITDGPGGSKRMYAGLKNAGETWYDITGNRSDTVKIGSDGWGEFHVNDGSVSIYVQK

SEQ ID NO: 39662 - protein, 480 aa, Bacillus sp.
NGTMMQYFEWYLPNDGNHWNRLNSDASNLKSKGITAVWIPPAWKGASQNDVGYGAYDLYDLGEFNQKGTVRTKYGTRSQLQAAVTSLKNNGIQVYGDVVMNHKGGADATEMVRAVEVNPNNRNQEVTGEYTIEAWTRFDFPGRGNTHSSFKWRWYHFDGVDWDQSRNLTNRIYKFRGHGKAWDWEVDTEFGNYDYLMYADYDMDHPEVVNELRNWGVWYTNTLGLDGFRIDAVKHIKYSFTRDWINHVRSATGKNMFAVAEFWKNDLGAIENYLQKTNWNHSVFDVPLHYNLYNASKSGGNYDMRNIFNGTVVQRHPSNAVTFVDNHDSQPEEALESFVEEWFKPLAYALTLTREQGYPSVFYGDYYGIPTHGVPAMRSKIDPILEARQKYAYGPQHDYLDHPDVIGWTREGDSSHPKSGLATLITDGPGGSKRMYAGLKNAGETWYDITGNRSDTVKIGSDGWGEFHVNDGSVSIYVQK

SEQ ID NO: 39663 - protein, 480 aa, Bacillus sp.
NGTMMQYFEWYLPNDGNHWNRLNSDASNLKSKGITAVWIPPAWKGASQNDVGYGAYDLYDLGEFNQKGTVRTKYGTRSQLQAAVTSLKNNGIQVYGDVVMNHKGGADATEMVRAVEVNPNNRNQEVTGEYTIEAWTRFDFPGRGNTHSSFKWRWYHFDGVDWDQSRRLNNRIYKFRGHGKAWDWEVDTEFGNYDYLMYADYDMDHPEVVNELRNWGVWYTNTLGLDGFRIDAVKHIKESFTRDWINHVRSATGKNMFAVAEFWKNDLGAIENYLQKTNWNHSVFDVPLHYNLYNASKSGGNYDMRNIFNGTVVQRHPSHAVTFVDNHDSQPEEALESFVEEWFKPLAYALTLTREQGYPSVFYGDYYGIPTHGVPAMRSKIDPILEARQKYAYGPQHDYLDHPDVIGWTREGDSSHPKSGLATLITDGPGGSKRMYAGLKNAGETWYDITGNRSDTVKIGSDGWGEFHVNDGSVSIYVQK

SEQ ID NO: 39664 - protein, 480 aa, Synthetic construct
NGTMMQYFEWYLPNDGNHWNRLNSDASNLKSKGITAVWIPPAWKGASQNDVGYGAYDLYDLGEFNQKGTVRTKYGTRSQLQAAVTSLKNNGIQVYGDVVMNHKGGADATEMVRAVEVNPNNRNQEVTGEYTIEAWTRFDFPGRGNTHSSFKWRWYHFDGVDWDQSRRLNNRIYKFRGHGKAWDWEVDTEFGNYDYLMYADHDMDHPEVVNELRNWGVWYTNTLGLDGFRIDAVKHIKYSFTRDWINHVRSATGKNMFAVAEFWKNDLGAIENYLQKTNWNHSVFDVPLHYNLYNASKSGGNYDMRNIFNGTVVQRHPSHAVTFVDNHDSQPEEALESFVEEWFKPLAYALTLTREQGYPSVFYGDYYGIPTHGVPAMRSKIDPILEARQKYAYGPQHDYLDHPDVIGWTREGDSSHPKSGLATLITDGPGGSKRMYAGLKNAGETWYDITGNRSDTVKIGSDGWGEFHVNDGSVSIYVQK

SEQ ID NO: 39665 - protein, 480 aa, Bacillus sp.
NGTMMQYFEWYLPNDGNHWNRLNSDASNLKSKGITAVWIPPAWKGASQNDVGYGAYDLYDLGEFNQKGTVRTKYGTRSQLQAAVTSLKNNGIQVYGDVVMNHKGGADATEMVRAVEVNPNNRNQEVTGEYTIEAWTRFDFPGRGNTHSSFKWRWYHFDGVDWDQSREFQNRIYKFRGHGKAWDWEVDTEFGNYDYLMYADYDMDHPEVVNELRNWGVWYTNTLGLDGFRIDAVKHIKYSFTRDWINHVRSATGKNMFAVAEFWKNDLGAIENYLQKTNWNHSVFDVPLHYNLYNASKSGGNYDMRNIFNGTVVQRHPSHAVTFVDNHDSQPEEALESFVEEWFKPLAYALTLTREQGYPSVFYGDYYGIPTHGVPAMRSKIDPILEARQKYAYGPQHDYLDHPDVIGWTREGDSSHPKSGLATLITDGPGGSKRMYAGLKNAGETWYDITGNRSDTVKIGSDGWGEFHVNDGSVSIYVQK

SEQ ID NO: 39666 - protein, 480 aa, Bacillus sp.
NGTMMQYFEWYLPNDGNHWNRLNSDASNLKSKGITAVWIPPAWKGASQNDVGYGAYDLYDLGEFNQKGTVRTKYGTRSQLQAAVTSLKNNGIQVYGDVVMNHKGGADATEMVRAVEVNPNNRNQEVTGEYTIEAWTRFDFPGRGNTHSSFKWRWYHFDGVDWDQSRRLNNRIYKFRGHGKAWDWEVDTEFGNYDYLMYADYDMDHPEVVNELRNWGVWYTNTLGLDGFRIDAVKHIKYSFTRDWINHVRSATGKNMFAVAEFWKNDLGAIENYLQKTAWNHSVFDVPLHYNLYNASKSGGNYDMRNIFNGTVVQRHPSHAVTFVDNHDSQPEEALESFVEEWFKPLAYALTLTREQGYPSVFYGDYYGIPTHGVPAMRSKIDPILEARQKYAYGPQHDYLDHPDVIGWTREGDSSHPKSGLATLITDGPGGSKRMYAGLKNAGETWYDITGNRSDTVKIGSDGWGEFHVNDGSVSIYVQK

SEQ ID NO: 39667 - protein, 480 aa, Synthetic construct
NGTMMQYFEWYLPNDGNHWNRLNSDASNLKSKGITAVWIPPAWKGASQNDVGYGAYDLYDLGEFNQKGTVRTKYGTRSQLQAAVTSLKNNGIQVYGDVVMNHKGGADATEMVRAVEVNPNNRNQEVTGEYTIEAWTRFDFPGRGNTHSSFKWRWYHFDGVDWDQSRRSNNRIYKFRGHGKAWDWEVDTEFGNYDYLMYADYDMDHPEVVNELRNWGVWYTNTLGLDGFRIDAVKHIKYSFTRDWINHVRSATGKNMFAVAEFWKNDLGAIENYLQKTNWNHSVFDVPLHYNLYNASKSGGNYDMRNIFNGTVVQRHPSHAVTFVDNHDSQPEEALESFVEEWFKPLAYALTLTREQGYPSVFYGDYYGIPTHGVPAMRSKIDPILEARQKYAYGPQHDYLDHPDVIGWTREGDSSHPKSGLATLITDGPGGSKRMYAGLKNAGETWYDITGNRSDTVKIGSDGWGEFHVNDGSVSIYVQK

SEQ ID NO: 39668 - protein, 480 aa, Synthetic construct
NGTMMQYFEWYLPNDGNHWNRLNSDASNLKSKGITAVWIPPAWKGASQNDVGYGAYDLYDLGEFNQKGTVRTKYGTRSQLQAAVTSLKNNGIQVYGDVVMNHKGGADATEMVRAVEVNPNNRNQEVTGEYTIEAWTRFDFPGRGNTHSSFKWRWYHFDGVDWDQSRRLNNRIYKFRGHGKAWDWEVDTENGNYDYLMYADIDMDHPEVVNELRNWGVWYTNTLGLDGFRIDAVKHIKYSFTRDWINHVRSATGKNMFAVAEFWKNDLGAIENYLQKTNWNHSVFDVPLHYNLYNASKSGGNYDMRNIFNGTVVQRHPSHAVTFVDNHDSQPEEALESFVEEWFKPLAYALTLTREQGYPSVFYGDYYGIPTHGVPAMRSKIDPILEARQKYAYGPQHDYLDHPDVIGWTREGDSSHPKSGLATLITDGPGGSKRMYAGLANAGETWYDITGNRSDTVKIGSDGWGEFHVNDGSVSIYVQK

SEQ ID NO: 39669 - protein, 480 aa, Synthetic construct
NGTMMQYFEWYLPNDGNHWNRLNSDASNLKSKGITAVWIPPAWKGASQNDVGYGAYDLYDLGEFNQKGTVRTKYGTRSQLQAAVTSLKNNGIQVYGDVVMNHKGGADATEMVRAVEVNPNNRNQEVTGEYTIEAWTRFDFPGRGNTHSSFKWRWYHFDGSDWDQSRRLNNRIYKFRGHGKAWDWEVDTEFGNYDYLMYADYDMDHPEVVNELRNWGVWYTNTLGLDGFRIDAVKHIKYSFTRDWINHVRSATGKNMFAVAEFWKNDLGAIENYLQKTNWNHSVFDVPLHYNLYNASKSGGNYDMRNIFNGTVVQRHPSHAVTFVDNHDSQPEEALESFVEEWFKPLAYALTLTREQGYPSVFYGDYYGIPTHGVPAMRSKIDPILEARQKYAYGPQHDYLDHPDVIGWTREGDSSHPKSGLATLITDGPGGSKRMYAGLKNAGETWYDITGNRSDTVKIGSDGWGEFHVNDGSVSIYVQK

SEQ ID NO: 39670 - protein, 480 aa, Synthetic construct
NGTMMQYFEWYLPNDGNHWNRLNSDASNLKSKGITAVWIPPAWKGASQNDVGYGAYDLYDLGEFNQKGTVRTKYGTRSQLQAAVTSLKNNGIQVYGDVVMNHKGGADATEMVRAVEVNPNNRNQEVTGEYTIEAWTRFDFPGRGNTHSSFKWRWYHFDGVDWDQSRRLNNRIYKFRGHGKAWDWEVDTEFGNYDYLMYADYDMDHPEVVNELRNWGVWYTNTLGLDGFRIDAVKHIKYSFTRDWINHVRSATGKNMFAVAEFWANDLGAIENYLQKTNWNHSVFDVPLHYNLYNASKSGGNYDMRNIFNGTVVQRHPSHAVTFVDNHDSQPEEALESFVEEWFKPLAYALTLTREQGYPSVFYGDYYGIPTHGVPAMRSKIDPILEARQKYAYGPQHDYLDHPDVIGWTREGDSSHPKSGLATLITDGPGGSKRMYAGLKNAGETWYDITGNRSDTVKIGSDGWGEFHVNDGSVSIYVQK

SEQ ID NO: 39671 - protein, 480 aa, Bacillus sp.
NGTMMQYFEWYLPNDGNHWNRLNSDASNLKSKGITAVWIPPAWKGASQNDVGYGAYDLYDLGEFNQKGTVRTKYGTRSQLQAAVTSLKNNGIQVYGDVVMNHKGGADATEMVRAVEVNPNNRNQEVTGEYTIEAWTRFDFPGRGNTHSSFKWRWYHFDGVDWDQSRSLNNRIYKFRGHGKAWDWEVDTEFGNYDYLMYADYDMDHPEVVNELRNWGVWYTNTLGLDGFRIDAVKHIKYSFTRDWINHVRSATGKNMFAVAEFWKNDLGAIENYLQKTNWNHSVFDVPLHYNLYNASKSGGNYDMRNIFNGTVVQRHPSHAVTFVDNHDSQPEEALESFVEEWFKPLAYALTLTREQGYPSVFYGDYYGIPTHGVPAMRSKIDPILEARQKYAYGPQHDYLDHPDVIGWTREGDSSHPKSGLATLITDGPGGSKRMYAGLKNAGETWYDITGNRSDTVKIGSDGWGEFHVNDGSVSIYVQK

SEQ ID NO: 39672 - protein, 480 aa, Bacillus sp.
NGTMMQYFEWYLPNDGNHWNRLNSDASNLKSKGITAVWIPPAWKAASQNDVGYGAYDLYDLGEFNQKGTVRTKYGTRSQLQAAVTSLKNNGIQVYGDVVMNHKGGADATEMVRAVEVNPNNRNQEVTGEYTIEAWTRFDFPGRGNTHSSFKWRWYHFDGVDWDQSRRVSNRIYKFRGHGKAWDWEVDTEFGNYDYLMYADYDMDHPEVVNELRNWGVWYTNTLGLDGFRIDAVKHIKYSFTRDWINHVRSATGKNMFAVAEFWKNDLGAIENYLQKTNWNHSVFDVPLHYNLYNASKSGGNYDMRNIFNGTVVQRHPSHAVTFVDNHDSQPEEALESFVEEWFKPLAYALTLTREQGYPSVFYGDYYGIPTHGVPAMRSKIDPILEARQKYAYGPQHDYLDHPDVIGWTREGDSSHPKSGLATLITDGPGGSKRMYAGLKNAGETWYDITGNRSDTVKIGSDGWGEFHVNDGSVSIYVQK

SEQ ID NO: 39673 - protein, 480 aa, Bacillus sp.
NGTMMQYFEWYLPNDGNHWNRLNSDASNLKSKGITAVWIPPAWKGASQNDVGYGAYDLYDLGEFNQKGTVRTKYGTRSQLQAAVTSLKNNGIQVYGDVVMNHKGGADATEMVRAVEVNPNNRNQEVTGEYTIEAWTRFDFPGRGNTHSSFKWRWYHFDGVDWDQSRRLNNRIYKFRGHGKAWDWEVDTEFGNYDYLMYADYDMDHPEVVNELRNWGVWYTNTLGLDGFRIDAVKHIKYSFTRDWINHVRSATGKNMFAVAEFWKNDLGAIENYLQKTNWNHSVFDVPLHYNLYNASKSGGNYDMRNIFNGTVVQRHPRHAVTFVDNHDSQPEEALESFVEEWFKPLAYALTLTREQGYPSVFYGDYYGIPTHGVPAMRSKIDPILEARQKYAYGPQHDYLDHPDVIGWTREGDSSHPKSGLATLITDGPGGSKRMYAGLKNAGETWYDITGNRSDTVKIGSDGWGEFHVNDGSVSIYVQK

SEQ ID NO: 39674 - protein, 480 aa, Bacillus sp.
NGTMMQYFEWYLPNDGNHWNRLNSDASNLKSKGITAVWIPPAWKGASQNDVGYGAYDLYDLGEFNQKGTVRTKYGTRSQLQAAVTSLKNNGIQVYGDVVMNHKGGADATEMVRAVEVNPNNRNQEVTGEYTIEAWTRFDFPGRGNTHSSFKWRWYHFDGVDWDQSRRLDNRIYKFRGHGKAWDWEVDTEFGNYDYLMYADYDMDHPEVVNELRNWGVWYTNTLGLDGFRIDAVKHIKYSFTRDWINHVRSATGKNMFAVAEFWKNDLGAIENYLQKTNWNHSVFDVPLHYNLYNASKSGGNYDMRNIFNGTVVQRHPSHAVTFVDNHDSQPEEALESFVEEWFKPLAYALTLTREQGYPSVFYGDYYGIPTHGVPAMRSKIDPILEARQKYAYGPQHDYLDHPDVIGWTREGDSSHPKSGLATLITDGPGGSKRMYAGLKNAGETWYDITGNRSDTVKIGSDGWGEFHVNDGSVSIYVQK

SEQ ID NO: 39675 - protein, 480 aa, Bacillus sp.
NGTMMQYFEWYLPNDGNHWNRLNSDASNLKSKGITAVWIPPAWKAVSQNDVGYGAYDLYDLGEFNQKGTVRTKYGTRSQLQAAVTSLKNNGIQVYGDVVMNHKGGADATEMVRAVEVNPNNRNQEVTGEYTIEAWTRFDFPGRGNTHSSFKWRWYHFDGVDWDQSRELSNRIYKFRGHGKAWDWEVDTEFGNYDYLMYADYDMDHPEVVNELRNWGVWYTNTLGLDGFRIDAVKHIKYSFTRDWINHVRSATGKNMFAVAEFWKNDLGAIENYLQKTNWNHSVFDVPLHYNLYNASKSGGNYDMRNIFNGTVVQRHPSHAVTFVDNHDSQPEEALESFVETWFKPLAYALTLTREQGYPSVFYGDYYGIPTHGVPAMRSKIDPILEARQKYAYGPQHDYLDHPDVIGWTREGDSSHPKSGLATLITDGPGGSKRMYAGLKNAGETWYDITGNRSDTVKIGSDGWGEFHVNDASVSIYVQK

SEQ ID NO: 39676 - protein, 480 aa, Synthetic construct
NGTMMQYFEWYLPNDGNHWNRLNSDASNLKSKGITAVWIPPAWKGASQNDVGYGAYDLYDLGEFNQKGTVRTKYGTRSQLQAAVTSLKNNGIQVYGDVVMNHKGGADATEMVRAVEVNPNNRNQVVTGEYTIEAWTRFDFPGRGNTHSSFKWRWYHFDGVDWDQSRRLNNRIYKFRGHGKAWDWEVDTENGNYDYLMYADIDMDHPEVVNELRNWGVWYTNTLGLDGFRIDAVKHIKYSFTRDWINHVRSATGKNMFAVAEFWKNDLGAIENYLQKTNWNHSVFDVPLHYNLYNASKSGGNYDMRNIFNGTVVQRHPSHAVTFVDNHDSQPEEALESFVEEWFKPLAYALTLTREQGYPSVFYGDYYGIPTHGVPAMRSKIDPILEARQKYAYGPQHDYLDHPDVIGWTREGDSSHPKSGLATLITDGPGGSKRMYAGLKNAGETWYDITGNRSDTVKIGSDGWGEFHVNDGSVSIYVQK

SEQ ID NO: 39677 - protein, 480 aa, Bacillus sp.
NGTMMQYFEWYLPNDGNHWNRLNSDASNLKSKGITAVWIPPAWKAASQNDVGYGAYDLYDLGEFNQKGTVRTKYGTRSQLQAAVTSLKNNGIQVYGDVVMNHKGGADATEMVRAVEVNPNNRNQEVTGEYTIEAWTRFDFPGRGNTHSSFKWRWYHFDGVDWDQSRETSNRIYKFRGHGKAWDWEVDTEFGNYDYLMYADYDMDHPEVVNELRNWGVWYTNTLGLDGFRIDAVKHIKYSFTRDWINHVRSATGKNMFAVAEFWKNDLGAIENYLQKTNWNHSVFDVPLHYNLYNASKSGGNYDMRNIFNGTVVQRHPSHAVTFVDNHDSQPEEALESFVEEWFKPLAYALTLTREQGYPSVFYGDYYGIPTHGVPAMRSKIDPILEARQKYAYGPQHDYLDHPDVIGWTREGDSSHPKSGLATLITDGPGGSKRMYAGLKNAGETWYDITGNRSDTVKIGSDGWGEFHVNDGSVSIYVQK

SEQ ID NO: 39678 - protein, 480 aa, Bacillus sp.
NGTMMQYFEWYLPNDGNHWNRLNSDASNLKSKGITAVWIPPAWKGASQNDVGYGAYDLYDLGEFNQKGTVRTKYGTRSQLQAAVTSLKNNGIQVYGDVVMNHKGGADATEMVRAVEVNPNNRNQEVTGEYTIEAWTRFDFPGRGNTHSSFKWRWYHFDGVDWDQSRRLNNRIYKFRGHGKAWDWEVDTEFGNYDYLMYADYDMDHPEVVNELRNWGVWYTNTLGLDGFRIDAVKHIKYSFTRDWINHVRSATGKNMFAVAEFWKNDLGAIENYLQKTNWNHSVFDVPLHYNLYNASKSGGNYDMRNIFNGTVVQRHPSHAVTFVDNHDSQPEEALESFVEGWFKPLAYALTLTREQGYPSVFYGDYYGIPTHGVPAMRSKIDPILEARQKYAYGPQHDYLDHPDVIGWTREGDSSHPKSGLATLITDGPGGSKRMYAGLKNAGETWYDITGNRSDTVKIGSDGWGEFHVNDGSVSIYVQK

SEQ ID NO: 39679 - protein, 480 aa, Bacillus sp.
NGTMMQYFEWYLPNDGNHWNRLNSDASNLKSKGITAVWIPPAWKGASQNDVGYGAYDLYDLGEFNQKGTVRTKYGTRSQLQAAVTSLKNNGIQVYGDVVMNHKGGADATEMVRAVEVNPNNRNQEVTGEYTIEAWTRFDFPGRGNTHSSFKWRWYHFDGVDWDQSRQTDNRIYKFRGHGKAWDWEVDTEFGNYDYLMYADYDMDHPEVVNELRNWGVWYTNTLGLDGFRIDAVKHIKYSFTRDWINHVRSATGKNMFAVAEFWKNDLGAIENYLQKTNWNHSVFDVPLHYNLYNASKSGGNYDMRNIFNGTVVQRHPSHAVTFVDNHDSQPEEALESFVEEWFKPLAYALTLTREQGYPSVFYGDYYGIPTHGVPAMRSKIDPILEARQKYAYGPQHDYLDHPDVIGWTREGDSSHPKSGLATLITDGPGGSKRMYAGLKNAGETWYDITGNRSDTVKIGSDGWGEFHVNDGSVSIYVQK

SEQ ID NO: 39680 - protein, 480 aa, Bacillus sp.
NGTMMQYFEWYLPNDGNHWNRLNSDASNLKSKGITAVWIPPAWKGASQNDVGYGAYDLYDLGEFNQKGTVRTKYGTRSQLQAAVTSLKNNGIQVYGDVVMNHKGGADATEMVRAVEVNPNNRNQEVTGEYTIEAWTRFDFPGRGNTHSSFKWRWYHFDGVDWDQSRRLNNRIYKFRGHGKAWDWEVDTEFGNYDYLMYADYDMDHPEVVNELRNWGVWYTNTLGLDGFRIDAVKHIKYSFTRDWINHVRSATGKNMFAVAEFWKNDLGAIENYLQKTNWNHSVFDVPLHNNLYNASKSGGNYDMRNIFNGTVVQRHPSHAVTFVDNHDSQPEEALESFVEEWFKPLAYALTLTREQGYPSVFYGDYYGIPTHGVPAMRSKIDPILEARQKYAYGPQHDYLDHPDVIGWTREGDSSHPKSGLATLITDGPGGSKRMYAGLKNAGETWYDITGNRSDTVKIGSDGWGEFHVNDGSVSIYVQK

SEQ ID NO: 39681 - protein, 480 aa, Synthetic construct
NGTMMQYFEWYLPNDGNHWNRLNSDASNLKSKGITAVWIPPAWKGASQNDVGYGAYDLYDLGEFNQKGTVRTKYGTRSQLQAAVTSLKNNGIQVYGDVVMNHKGGADATEMVRAVEVNPNNRNQEVTGEYTIEAWTRFDFPGRGNTHSSFKWRWYHFDGVDWDQSRRLNNRIYKFRGHGKAWDWEVDTENGNYDYLMYADIDMDHPEVVNELRNWGVWYTNTLGLDGFRIDAVKHIKYSFTRDWINHVRSATGKNMFAVGEFWKNDLGAIENYLQKTNWNHSVFDVPLHYNLYNASKSGGNYDMRNIFNGTVVQRHPSHAVTFVDNHDSQPEEALESFVEEWFKPLAYALTLTREQGYPSVFYGDYYGIPTHGVPAMRSKIDPILEARQKYAYGPQHDYLDHPDVIGWTREGDSSHPKSGLATLITDGPGGSKRMYAGLKNAGETWYDITGNRSDTVKIGSDGWGEFHVNDGSVSIYVQK

SEQ ID NO: 39682 - protein, 480 aa, Bacillus sp.
NGTMMQYFEWYLPNDGNHWNRLNSDASNLKSKGIIAVWIPPAWKGLSQNDVGYGAYDLYDLGEFNQKGTVRTKYGTRSQLQAAVTSLKNNGIQVYGDVVMNHKGGADATEMVRAVEVNPNNRNQEVTGEYTIEAWTRFDFPGRGNTHSSFKWRWYHFDGVDWDQSRDFNNRIYKFRGHGKAWDWEVDTEFGNYDYLMYADYDMDHPEVVNELRNWGVWYTNTLGLDGFRIDAVKHIKYSFTRDWINHVRSATGKNMFAVAEFWKNDLGAIENYLQKTNWNHSVFDVPLHYNLYNASKSGGNYDMRNIFNGTVVQRHPSHAVTFVDNHDSQPEEALESFVEEWFKPLAYALTLTREQGYPSVFYGDYYGIPTHGVPAMRSKIDPILEARQKYAYGPQHDYLDHPDVIGWTREGDSSHPKSGLATLITDGPGGSKRMYAGLKNAGETWYDITGNRSDTVKIGSDGWGEFHVNDGSVSIYVQK

SEQ ID NO: 39683 - protein, 480 aa, Synthetic construct
NGTMMQYFEWYLPNDGNHWNRLNSDASNLKSKGITAVWIPPAWKGTSQNDVGYGAYDLYDLGEFNQKGTVRTKYGTRSQLQAAVTSLKNNGIQVYGDVVMNHKGGADATEMVRAVEVNPNNRNQEVTGEYTIEAWTRFDFPGRGNTHSSFKWRWYHFDGVDWDQSRQLNNRIYKFRGHGKAWDWEVDTEFGNYDYLMYADYDMDHPEVVNELRNWGVWYTNTLGLDGFRIDAVKHIKYSFTRDWINHVRSATGKNMFAVAEFWKNDLGAIENYLQKTNWNHSVFDVPLHYNLYNASKSGGNYDMRNIFNGTVVQRHPSHAVTFVDNHDSQPEEALESFVEEWFKPLAYALTLTREQGYPSVFYGDYYGIPTHGVPAMRSKIDPILEARQKYAYGPQHDYLDHPDVIGWTREGDSSHPKSGLATLITDGPGGSKRMYAGLKNAGETWYDITGNRSDTVKIGSDGWGEFHVNDGSVSIYVQK

SEQ ID NO: 39684 - protein, 480 aa, Bacillus sp.
NGTMMQYFEWYLPNDGNHWNRLNSDASNLKSKGITAVWIPPAWKGASQNDVGYGAYDLYDLGEFNQKGTVRTKYGTRSQLQAAVTSLKNNGIQVYGDVVMNHKGGADATEMVRAVEVNPNNRNQEVTGEYTIEAWTRFDFPGRGNTHSSFKWRWYHFDGVDWDQSRRLNNRIYKFRGHGKAWDWEVDTEFGNYDYLMYADYDMDHPEVVNELRNWGVWYTNTLGLDGFRIDAVKHIKYSFMRDWINHVRSATGKNMFAVAEFWKNDLGAIENYLQKTNWNHSVFDVPLHYNLYNASKSGGNYDMRNIFNGTVVQRHPSHAVTFVDNHDSQPEEALESFVEEWFKPLAYALTLTREQGYPSVFYGDYYGIPTHGVPAMRSKIDPILEARQKYAYGPQHDYLDHPDVIGWTREGDSSHPKSGLATLITDGPGGSKRMYAGLKNAGETWYDITGNRSDTVKIGSDGWGEFHVNDGSVSIYVQK

SEQ ID NO: 39685 - protein, 480 aa, Bacillus sp.
NGTMMQYFEWYLPNDGNHWNRLNSDASNLKSKGITAVWIPPAWKGASQNDVGYGAYDLYDLGEFNQKGTVRTKYGTRSQLQAAVTSLKNNGIQVYGDVVMNHKGGADATEMVRAVEVNPNNRNQEVTGEYTIEAWTRFDFPGRGNTHSSFKWRWYHFDGVDWDQSRRLNNRIYKFRGHGKAWDWEVDTEFGNYDYLMYADYDMDHPEVVNELRNWGVWYTNTLGLDGFRIDAVKHIKGSFTRDWINHVRSATGKNMFAVAEFWKNDLGAIENYLQKTNWNHSVFDVPLHYNLYNASKSGGNYDMRNIFNGTVVQRHPSHAVTFVDNHDSQPEEALESFVEEWFKPLAYALTLTREQGYPSVFYGDYYGIPTHGVPAMRSKIDPILEARQKYAYGPQHDYLDHPDVIGWTREGDSSHPKSGLATLITDGPGGSKRMYAGLKNAGETWYDITGNRSDTVKIGSDGWGEFHVNDGSVSIYVQK

SEQ ID NO: 39686 - protein, 480 aa, Bacillus sp.
NGTMMQYFEWYLPNDGNHWNRLNSDASNLKSKGITAVWIPPAWKGFSQNDVGYGAYDLYDLGEFNQKGTVRTKYGTRSQLQAAVTSLKNNGIQVYGDVVMNHKGGADATEMVRAVEVNPNNRNQEVTGEYTIEAWTRFDFPGRGNTHSSFKWRWYHFDGVDWDQSRRLNNRIYKFRGHGKAWDWEVDTEFGNYDYLMYADYDMDHPEVVNELRNWGVWYTNTLGLDGFRIDAVKHIKYSFTRDWINHVRSATGKNMFAVAEFWKNDLGAIENYLQKTNWNHSVFDVPLHYNLYNASKSGGNYDMRNIFNGTVVQRHPSHAVTFVDNHDSQPEEALESFVEEWFKPLAYALTLTREQGYPSVFYGDYYGIPTHGVPAMRSKIDPILEARQKYAYGPQHDYLDHPDVIGWTREGDSSHPKSGLATLITDGPGGSKRMYAGLKNAGETWYDITGNRSDTVKIGSDGWGEFHVNDGSVSIYVQK

SEQ ID NO: 39687 - protein, 480 aa, Synthetic construct
NGTMMQYFEWYLPNDGNHWNRLNSDASNLKSKGITAVWIPPAWKGASQNDVGYGAYDLYDLGEFNQKGTVRTKYGTRSQLQAAVTSLKNNGIQVYGDVVMNHKGGADATEMVRAVEVNPNNRNQEVTGEYTIEAWTRFDFPGRGNTHSSFKWRWYHFDGVDWDQSRRLNNRIYKFRGHGKAWDWEVDTEFGNYDYLMYADYDMDHPEVVNELRNWGVWYTNTLGLDGFRIDAVKHIKYSFTRDWINHVRSATGKNMFAVAEFWRNDLGWIENYLQKTNWNHSVFDVPLHYNLYNASKSGGNYDMRNIFNGTVVQRHPSHAVTFVDNHDSQPEEALESFVEEWFKPLAYALTLTREQGYPSVFYGDYYGIPTHGVPAMRSKIDPILEARQKYAYGPQHDYLDHPDVIGWTREGDSSHPKSGLATLITDGPGGSKRMYAGLKNAGETWYDITGNRSDTVKIGSDGWGEFHVNDGSVSIYVQK

SEQ ID NO: 39688 - protein, 480 aa, Bacillus sp.
NGTMMQYFEWYLPNDGNHWNRLNSDASNLKSKGITAVWIPPAWKGASQNDVGYGAYDLYDLGEFNQKGTVRTKYGTRSQLQAAVTSLKNNGIQVYGDVVMNHKGGADATEMVRAVEVNPNNRNQEVTGEYTIEAWTRFDFPGRGNTHSSFKWRWYHFDGVDWDQSRRLNNRIYKFRGHGKAWDWEVDTEFGNYDYLMYADYDMDHPEVVNELRNWGVWYTNTLGLDGFRIDAVKHIKYSFTRDWINHVRSATGKNMFAVAEFWKNDLGAIENYLQKTNWNHSVFDVPLHYNLYNASKSGGNYDMRNIFNGTVVQRHPSHAVTFVDNHDSQPEEALESFVDPWFKPLAYALTLTREQGYPSVFYGDYYGIPTHGVPAMRSKIDPILEARQKYAYGPQHDYLDHPDVIGWTREGDSSHPKSGLATLITDGPGGSKRMYAGLKNAGETWYDITGNRSDTVKIGSDGWGEFHVNDGSVSIYVQK

SEQ ID NO: 39689 - protein, 480 aa, Bacillus sp.
NGTMMQYFEWYLPNDGNHWNRLNSDASNLKSKGITAVWIPPAWKGASQNDVGYGAYDLYDLGEFNQKGTVRTKYGTRSQLQAAVTSLKNNGIQVYGDVVMNHKGGADATEMVRAVEVNPNNRNQEVTGEYTIEAWTRFDFPGRGNTHSSFKWRWYHFDGVDWDQSRQFTNRIYKFRGHGKAWDWEVDTEFGNYDYLMYADYDMDHPEVVNELRNWGVWYTNTLGLDGFRIDAVKHIKYSFTRDWINHVRSATGKNMFAVAEFWKNDLGAIENYLQKTNWNHSVFDVPLHYNLYNASKSGGNYDMRNIFNGTVVQRHPSHAVTFVDNHDSQPEEALESFVEEWFKPLAYALTLTREQGYPSVFYGDYYGIPTHGVPAMRSKIDPILEARQKYAYGPQHDYLDHPDVIGWTREGDSSHPKSGLATLITDGPGGSKRMYAGLKNAGETWYDITGNRSDTVKIGSDGWGEFHVNDGSVSIYVQK

SEQ ID NO: 39690 - protein, 480 aa, Bacillus sp.
NGTMMQYFEWYLPNDGNHWNRLNSDASNLKSKGITAVWIPPAWKGASQNDVGYGAYDLYDLGEFNQKGTVRTKYGTRSQLQAAVTSLKNNGIQVYGDVVMNHKGGADATEMVRAVEVNPNNRNQEVTGEYTIEAWTRFDFPGRGNTHSSFKWRWYHFDGVDWDQSRRLNNRIYKFRGHGKAWDWEVDTEFGNYDYLMYADYDMDHPEVVNELRNWGVWYTNTLGLDGFRIDAVKHIKYSFTRDWINHVRSATGKNMFAVAEFWKNDLGAIENYLQKTGWNHSVFDVPLHYNLYNASKSGGNYDMRNIFNGTVVQRHPSHAVTFVDNHDSQPEEALESFVEEWFKPLAYALTLTREQGYPSVFYGDYYGIPTHGVPAMRSKIDPILEARQKYAYGPQHDYLDHPDVIGWTREGDSSHPKSGLATLITDGPGGSKRMYAGLKNAGETWYDITGNRSDTVKIGSDGWGEFHVNDGSVSIYVQK

SEQ ID NO: 39691 - protein, 480 aa, Bacillus sp.
NGTMMQYFEWYLPNDGNHWNRLNSDASNLKSKGITAVWIPPAWKGISQNDVGYGAYDLYDLGEFNQKGTVRTKYGTRSQLQAAVTSLKNNGIQVYGDVVMNHKGGADATEMVRAVEVNPNNRNQEVTGEYTIEAWTRFDFPGRGNTHSSFKWRWYHFDGVDWDQSRKVHNRIYKFRGHGKAWDWEVDTEFGNYDYLMYADYDMDHPEVVNELRNWGVWYTNTLGLDGFRIDAVKHIKYSFTRDWINHVRSATGKNMFAVAEFWKNDLGAIENYLQKTNWNHSVFDVPLHYNLYNASKSGGNYDMRNIFNGTVVQRHPSHAVTFVDNHDSQPEEALESFVEEWFKPLAYALTLTREQGYPSVFYGDYYGIPTHGVPAMRSKIDPILEARQKYAYGPQHDYLDHPDVIGWTREGDSSHPKSGLATLITDGPGGSKRMYAGLKNAGKTWYDITGNRSDTVKIGSDGWGEFHVNDGSVSIYVQK

SEQ ID NO: 39692 - protein, 480 aa, Synthetic construct
NGTMMQYFEWYLPNDGNHWNRLNSDASNLKSKGITAVWIPPAWKGASQNDVGYGAYDLYDLGEFNQKGTVRTKYGTRSQLQAAVTSLKNNGIQVYGDVVMNHKGGADATEMVRAVEVNPNNRNQEVTGEYTIEAWTRFDFPGRGNTHSSFKWRWYHFDGVDWDQSRRLNNRIYKFRGHGKAWDWEVDTENGNYDYLMYADIDMDHPEVVNELRNWGVWYTNTLGLDGFRIDAVKHIKYSFTRDWINHVRSATGKNMFAVAEFWKNDLGAIENYLQKTNWNHSVFDVPLHYNLYNASKSGGNYDMRNIFNGTVVQRHPSHAVTFVDNHDSQPEEALESFVEEWFKPLAYALTLTREQGYPSVFYGDYYGIPTHGVPAMRSKIDPILEARQKYAYGAQHDYLDHPDVIGWTREGDSSHPKSGLATLITDGPGGSKRMYAGLKNAGETWYDITGNRSDTVKIGSDGWGEFHVNDGSVSIYVQK

SEQ ID NO: 39693 - protein, 480 aa, Bacillus sp.
NGTMMQYFEWYLPNDGNHWNRLNSDASNLKSKGITAVWIPPAWKGVSQNDVGYGAYDLYDLGEFNQKGTVRTKYGTRSQLQAAVTSLKNNGIQVYGDVVMNHKGGADATEMVRAVEVNPNNRNQEVTGEYTIEAWTRFDFPGRGNTHSSFKWRWYHFDGVDWDQSRQLSNRIYKFRGHGKAWDWEVDTEFGNYDYLMYVDYDMDHPEVVNELRNWGVWYTNTLGLDGFRIDAVKHIKYSFTRDWINHVRSATGKNMFAVAEFWKNDLGAIENYLQKTNWNHSVFDVPLHYNLYNASKSGGNYDMRNIFNGTVVQRHPSHAVTFVDNHDSQPEEALESFVEEWFKPLAYALTLTREQGYPSVFYGDYYGIPTHGVPAMRSKIDPILEARQKYAYGPQHDYLDHPDVIGWTREGDSSHPKSGLATLITDGPGGSKRMYAGLKNAGETWYDITGNRSDTVKIGSDGWGEFHVNDGSVSIYVQK

SEQ ID NO: 39694 - protein, 480 aa, Synthetic construct
NGTMMQYFEWYLPNDGNHWNRLNSDASNLKSKGITAVWIPPAWKGASQNDVGYGAYDLYDLGEFNQKGTVRTKYGTRSQLQAAVTSLKNNGIQVYGDVVMNHKGGADATEMVRAVEVNPNNRNQEVTGEYTIEAWTRFDFPGRGNTHSSFKWRWYHFDGVDWDQSRRLNNRIYKFRGHGKAWDWEVDTENGNYDYLMYADIDMDHPEVVNELRNWGVWYTNTLGLDGFRIDAVKHIKYSFTRDWINHVRSATGKNMFAVAEFWKNDLGAIENYLQKTNWNHSVFDVPLHYNLYNASKSGGNYDMRNIFNGTVVQRHPSHAVTFVDNHDSQPEEALESFVEEWFKPLAYALTLTREQGYPSVFYGDYYGIPTHGVPAMRSKIDPILEARQKYAYGPQHDYLDHPDVIGWTREGDSSHPKSGLATLITDGPGGSKRMYAGLKNAGETWYDITGNRSDKVKIGSDGWGEFHVNDGSVSIYVQK

SEQ ID NO: 39695 - protein, 480 aa, Bacillus sp.
NGTMMQYFEWYLPNDGNHWNRLNSDASNLKSKGITAVWIPPAWKGASQNDVGYGAYDLYDLGEFNQKGTVRTKYGTRSQLQAAVTSLKNNGIQVYGDVVMNHKGGADATEMVRAVEVNPNNRNQEVTGEYTIEAWTRFDFPGRGNTHSSFKWRWYHFDGVDWDQSRRLNNRIYKFRGHGKAWDWEVDTEFGNYDYLMYADYDMDHPEVVNELRNWGVWYTNTLGLDGFRIDAVKHIKYSFTRDWINHVRSATGKNMFAVAEFWKNDLGYIENYLQKTNWNHSVFDVPLHYNLYNASKSGGNYDMRNIFNGTVVQRHPSHAVTFVDNHDSQPEEALESFVEEWFKPLAYALTLTREQGYPSVFYGDYYGIPTHGVPAMRSKIDPILEARQKYAYGPQHDYLDHPDVIGWTREGDSSHPKSGLATLITDGPGGSKRMYAGLKNAGETWYDITGNRSDTVKIGSDGWGEFHVNDGSVSIYVQK

SEQ ID NO: 39696 - protein, 480 aa, Synthetic construct
NGTMMQYFEWYLPNDGNHWNRLNSDASNLKSKGITAVWIPPAWKGASQNDVGYGAYDLYDLGEFNQKGTVRTKYGTRSQLQAAVTSLKNNGIQVYGDVVMNHKGGADATEMVRAVEVNPNNRNQEVTGEYTIEAWTRFDFPGRGNTHSSFKWRWYHFDGVDWDQSRRLNNRIYKFRGHGKAWDWEVDTENGNYDYLMYADYDLDHPESVNELRNWGVWYTNTLGLDGFRIDAVKHIKYSFTRDWINHVRSATGKNMFAVAEFWKNDLGAIENYLQKTNWNHSVFDVPLHYNLYNASKSGGNYDMRNIFNGTVVQRHPSHAVTFVDNHDSQPEEALESFVEEWFKPLAYALTLTREQGYPSVFYGDYYGIPTHGVPAMRSKIDPILEARQKYAYGPQHDYLDHPDVIGWTREGDSSHPKSGLATLITDGPGGSKRMYAGLKNAGETWYDITGNRSDTVKIGSDGWGEFHVNDGSVSIYVQK

SEQ ID NO: 39697 - protein, 479 aa, Bacillus sp.
NGTMMQYFEWYLPNDGNHWNRLNSDASNLKSKGITAVWIPPAWKGASQNDVGYGAYDLYDLGEFNQKGTVRTKYGTRSQLQAAVTSLKNNGIQVYGDVVMNHKGGADATEMVRAVEVNPNNRNQEVTGEYTIEAWTRFDFPGRGNTHSSFKWRWYHFDGVDWDQSRQLNRIYKFRGHGKAWDWEVDTEFGNYDYLMYADYDMDHPEVVNELRNWGVWYTNTLGLDGFRIDAVKHIKYSFTRDWINHVRSATGKNMFAVAEFWKNDLGAIENYLQKTNWNHSVFDVPLHYNLYNASKSGGNYDMRNIFNGTVVQRHPSHAVTFVDNHDSQPEEALESFVEEWFKPLAYALTLTREQGYPSVFYGDYYGIPTHGVPAMRSKIDPILEARQKYAYGPQHDYLDHPDVIGWTREGDSSHPKSGLATLITDGPGGSKRMYAGLKNAGETWYDITGNRSDTVKIGSDGWGEFHVNDGSVSIYVQK

SEQ ID NO: 39698 - protein, 480 aa, Bacillus sp.
NGTMMQYFEWYLPNDGNHWNRLNSDASNLKSKGITAVWIPPAWKGASQNDVGYGAYDLYDLGEFNQKGTVRTKYGTRSQLQAAVTSLKNNGIQVYGDVVMNHKGGADATEMVRAVEVNPNNRNQEVTGEYTIEAWTQFDFPGRGNTHSSFKWRWYHFDGVDWDQSRRLNNRIYKFRGHGKAWDWEVDTEFGNYDYLMYADYDMDHPEVVNELRNWGVWYTNTLGLDGFRIDAVKHIKYSFTRDWINHVRSATGKNMFAVAEFWKNDLGAIENYLQKTNWNHSVFDVPLHYNLYNASKSGGNYDMRNIFNGTVVQRHPSHAVTFVDNHDSQPEEALESFVEEWFKPLAYALTLTREQGYPSVFYGDYYGIPTHGVPAMRSKIDPILEARQKYAYGPQHDYLDHPDVIGWTREGDSSHPKSGLATLITDGPGGSKRMYAGLKNAGETWYDITGNRSDTVKIGSDGWGEFHVNDGSVSIYVQK

SEQ ID NO: 39699 - protein, 480 aa, Synthetic construct
NGTMMQYFEWYLPNDGNHWNRLNSDASNLKSKGITAVWIPPAWKGASQNDVGYGAYDLYDLGEFNQKGTVRTKYGTRSQLQAAVTSLKNNGIQVYGDVVMNHKGGADATEMVRAVEVNPNNRNQEVTGEYTIEAWTRFDFPGRGNTHSSFKWRWYHFDGVDWDQSRRLNNRIYKFRGHGKAWDWEVDTEFGNYDYLMYADYDVDHPEVVNELRNWGVWYTNTLGLDGFRIDAVKHIKYSFTRDWINHVRSATGKNMFAVAEFWKNDLGAIENYLQKTNWNHSVFDVPLHYNLYNASKSGGNYDMRNIFNGTVVQRHPSHAVTFVDNHDSQPEEALESFVEEWFKPLAYALTLTREQGYPSVFYGDYYGIPTHGVPAMRSKIDPILEARQKYAYGPQHDYLDHPDVIGWTREGDSSHPKSGLATLITDGPGGSKRMYAGLKNAGETWYDITGNRSDTVKIGSDGWGEFHVNDGSVSIYVQK

SEQ ID NO: 39700 - protein, 480 aa, Synthetic construct
NGTMMQYFEWYLPNDGNHWNRLNSDASNLKSKGITAVWIPPAWKGASQNDVGYGAYDLYDLGEFNQKGTVRTKYGTRSQLQAAVTSLKNNGIQVYGDVVMNHKGGADATEMVRAVEVNPNNRNQEVTGEYTIEAWTRFDFPGRGNTHSSFKWRWYHFDGVDWDQSRRLNNRIYKFRGHGKAWDWEVDTEFGNYDYLMYADYDMDHPEVVNELRNWGVWYTNTLGLDGFRIDAVKHIKYSFTRDWINHVRSATGKNMFAVAEFWKNDLGGIENYLQKTNWNHSVFDVPLHYNLYNASKSGGNYDMRNIFNGTVVQRHPSHAVTFVDNHDSQPEEALESFVEEWFKPLAYALTLTREQGYPSVFYGDYYGIPTHGVPAMRSKIDPILEARQKYAYGPQHDYLDHPDVIGWTREGDSSHPKSGLATLITDGPGGSKRMYAGLKNAGETWYDITGNRSDTVKIGSDGWGEFHVNDGSVSIYVQK

SEQ ID NO: 39701 - protein, 480 aa, Bacillus sp.
NGTMMQYFEWYLPNDGNHWNRLNSDASNLKSKGITAVWIPPAWKGASQNDVGYGAYDLYDLGEFNQKGTVRTKYGTRSQLQAAVTSLKNNGIQVYGDVVMNHKGGADATEMVRAVEVNPNNRNQEVTGEYTIEAWTRFDFPGRGNTHSSFKWRWYHFDGVDWDQSRRLNNRIYKFRGHGKAWDWEVDTEFGNYDYLMYADYDMDHPEVVNELRNWGVWYTNTLGLDGFRIDAVKHIKYSFTRDWINHVRSATGKNMFAVAEFWKNDLGAIENYLQKTNWNHSVFDVPLHYNLYNASKSGGNYDMRSIFNGTVVQRHPSHAVTFVDNHDSQPEEALESFVEEWFKPLAYALTLTREQGYPSVFYGDYYGIPTHGVPAMRSKIDPILEARQKYAYGPQHDYLDHPDVIGWTREGDSSHPKSGLATLITDGPGGSKRMYAGLKNAGETWYDITGNRSDTVKIGSDGWGEFHVNDGSVSIYVQK

SEQ ID NO: 39702 - protein, 480 aa, Synthetic construct
NGTMMQYFEWYLPNDGNHWNRLNSDASNLKSKGITAVWIPPAWKGASQNDVGYGAYDLYDLGEFNQKGTVRTKYGTRSQLQAAVTSLKNNGIQVYGDVVMNHKGGADATEMVRAVEVNPNNRNQEVTGEYTIEAWTRFDFPGRGNTHSSFKWRWYHFDGVDWDQSRRLNNRIYKFRGHGKAWDWEVDTENGNYDYLMYADIDMDHPEVVNELRNWGVWYTNTLGLDGFRIDAVKHIKYSFTRDWINHVRSATGKNMFAVAEFWKNDLGAIENYLQKTNWNHSVFDVPLHYNLYNASKSGGNYDMRNIFNGTVVQRHPSHAVTFVDNHDSQPEEALESFVEEWFKPLAYALTLTREQGYPSVFYGDYYGIPTHGVPAMRSKIDPILEARQKYAYGPQHDYLDHPDVVGWTREGDSSHPKSGLATLITDGPGGSKRMYAGLKNAGETWYDITGNRSDTVKIGSDGWGEFHVNDGSVSIYVQK

SEQ ID NO: 39703 - protein, 480 aa, Bacillus sp.
NGTMMQYFEWYLPNDGNHWNRLNSDASNLKSKGITAVWIPPAWKAASQNDVGYGAYDLYDLGEFNQKGTVRTKYGTRSQLQAAVTSLKNNGIQVYGDVVMNHKGGADATEMVRAVEVNPNNRNQEVTGEYTIEAWTRFDFPGRGNTHSSFKWRWYHFDGVDWDQSRELSNRIYKFRGHGKAWDWEVDTEFGNYDYLMYADYDMDHPEVVNELRNWGVWYTNTLGLDGFRIDAVKHIKYSFTRDWINHVRSATGKNMFAVAEFWKNDLGAIENYLQKTNWNHSVFDVPLHYNLYNASKSGGNYDMRNIFNGTVVQRHPSHAVTFVDNHDSQPEEALESFVEEWFKPLAYALTLTREQGYPSVFYGDYYGIPTHGVPAMRSKIDPILEARQKYAYGPQHDYLDHPDVIGWTREGDSSHPKSGLATLITDGPGGSKRMYAGLKNAGETWYDITGNRSDTVKIGSDGWGEFHVNDGSVSIYVQK

SEQ ID NO: 39704 - protein, 480 aa, Bacillus sp.
NGTMMQYFEWYLPNDGNHWNRLNSDASNLKSKGITAVWIPPAWKGASQNDVGYGAYDLYDLGEFNQKGTVRTKYGTRSQLQAAVTSLKNNGIQVYGDVVMNHKGGADATEMVRAVEVNPNNRNQEVTGEYTIEAWTRFDFPGRGNTHSSFKWRWYHFDGVDWDQSRQLTNRIYKFRGHGKAWDWEVDTEFGNYDYLMYADYDMDHPEVVNELRNWGVWYTNTLGLDGFRIDAVKHIKYSFTRDWINHVRSATGKNMFAVAEFWKNDLGAIENYLQKTNWNHSVFDVPLHYNLYNASKSGGNYDMRNIFNGTVVQRHPSHAVTFVDNHDSQPEEALESFVEEWFKPLAYALTLTREQGYPSVFYGDYYGIPTHGVPAMRSKIDPILEARQKYAYGPQHDYLDHPDVIGWTREGDSSHPKSGLATLITDGPGGSKRMYAGLKNAGETWYDITGNRSDTVKIGSDGWGEFHVNDGSVSIYVQK

SEQ ID NO: 39705 - protein, 480 aa, Bacillus sp.
NGTMMQYFEWYLPNDGNHWNRLNSDASNLKSKGITAVWIPPAWKGASQNDVGYGAYDLYDLGEFNQKGTVRTKYGTRSQLQAAVTSLKNNGIQVYGDVVMNHKGGADATEMVRAVEVNPNNRNQEVTGEYTIEAWTRFDFPGRGNTHSSFKWRWYHFDGVDWDQSRNVNNRIYKFRGHGKAWDWEVDTEFGNYDYLMYADYDMDHPEVVNELRNWGVWYTNTLGLDGFRIDAVKHIKYSFTRDWINHVRSATGKNMFAVAEFWKNDLGAIENYLQKTNWNHSVFDVPLHYNLYNASKSGGNYDMRNIFNGTVVQRHPSHAVTFVDNHDSQPEEALESFVETWFKPLAYALTLTREQGYPSVFYGDYYGIPTHGVPAMRSKIDPILEARQKYAYGPQHDYLDHPDVIGWTREGDSSHPKSGLATLITDGPGGSKRMYAGLKNAGETWYDITGNRSDTVKIGSDGWGEFHVNDASVSIYVQK

SEQ ID NO: 39706 - protein, 480 aa, Bacillus sp.
NGTMMQYFEWYLPNDGNHWNRLNSDASNLKSKGITAVWIPPAWKGASQNDVGYGAYDLYDLGEFNQKGTVRTKYGTRSQLQAAVTSLKNNGIQVYGDVVMNHKGGADATEMVRAVEVNPNNRNQEVTGEYTIEAWTRFDFPGRGNTHSSFKWRWYHFDGVDWDQSRRLNNRIYKFRGHGKAWDWEVDTEFGNYDYLMYADYDMDHPEVVNELRNWGVWYTNTLGLDGFRIDAVKHIKYSFTRDWINHVRSATGKNMFAVAEFWKNDLGAIENYLQKTNWNHSVFDVPLHYNLYNASQSGGNYDMRNIFNGTVVQRHPSHAVTFVDNHDSQPEEALESFVEEWFKPLAYALTLTREQGYPSVFYGDYYGIPTHGVPAMRSKIDPILEARQKYAYGPQHDYLDHPDVIGWTREGDSSHPKSGLATLITDGPGGSKRMYAGLKNAGETWYDITGNRSDTVKIGSDGWGEFHVNDGSVSIYVQK

SEQ ID NO: 39707 - protein, 480 aa, Synthetic construct
NGTMMQYFEWYLPNDGNHWNRLNSDASNLKSKGITAVWIPPAWKGASQNDVGYGAYDLYDLGEFNQKGTVRTKYGTRSQLQAAVTSLKNNGIQVYGDVVMNHKGGADATEMVRAVEVNPNNRNQEVTGEYTIEAWTRFDFPGRGNTHSSFKWRWFHFDGVDWDQSRRLNNRIYKFRGHGKAWDWEVDTENGNYDYLMYADIDMDHPEVVNELRNWGVWYTNTLGLDGFRIDAVKHIKYSFTRDWINHVRSATGKNMFAVAEFWKNDLGAIENYLQKTNWNHSVFDVPLHYNLYNASKSGGNYDMRNIFNGTVVQRHPSHAVTFVDNHDSQPEEALESFVEEWFKPLAYALTLTREQGYPSVFYGDYYGIPTHGVPAMRSKIDPILEARQKYAYGPQHDYLDHPDVIGWTREGDSSHPKSGLATLITDGPGGSKRMYAGLKNAGETWYDITGNRSDTVKIGSDGWGEFHVNDGSVSIYVQK

SEQ ID NO: 39708 - protein, 480 aa, Synthetic construct
NGTMMQYFEWYLPNDGNHWNRLNSDASNLKSKGITAVWIPPAWKGASQNDVGYGAYDLYDLGEFNQKGTVRTKYGTRSQLQAAVTSLKNNGIQVYGDVVMNHKGGADATEMVRAVEVNPNNRNQEVTGEYTIEAWTRFDFPGRGNTHSSFKWRWYHFDGVDWDQSRRLNNRIYKFRGHGKAWDWEVDTENGNYDYLMYADIDMDHPEVVNELRNWGVWYTNTLGLDGFRIDAVKHIKYSFTRDWINHVRSATGKNMFAVAEFWKNDLGAIENYLQKTNWNHSVFDVPLHYNLYNASKSGGNYDMRNIFNGTVVQRHPSHAVTFVDNHDSQPEEALESFVEEWFKPLAYALTLTREQGYPSVFYGDYYGIPTHGVPAMRSKIDPILEARQKYAYGPQHDYLDHPDVIGWTREGDSSHPKSGLATLITDGPGGSKRMYAGLQNAGETWYDITGNRSDTVKIGSDGWGEFHVNDGSVSIYVQK

SEQ ID NO: 39709 - protein, 480 aa, Synthetic construct
NGTMMQYFEWYLPNDGNHWNRLNSDASNLKSKGITAVWIPPAWKGASQNDVGYGAYDLYDLGEFNQKGTVRTKYGTRSQLQAAVTSLKNNGIQVYGDVVMNHKGGADATEMVRAVEVNPNNRNQEVTGEYTIEAWTRFDFPGRGNTHSSFKWRWYHFDGVDWDQSRRLNNRIYKFRGHGKAWDWEVDTENGNYDYLMYADIDMDHPEVVNELRNWGVWYTNTLGLDGFRIDAVKHIKYSFTRDWINHVRSATGKNMFAVAEFWKNDLGAIENYLQKTNWNHSVFDVPLHYNLYNASKSGGNYDMRNIFNGTVVQRHPSHAVTFVDNHDSQPEEALESFVEEWFKPLAYALTLTREQGYPSVFYGDYYGIPTHGVPAMRSKIDPILEARQKYAYGPQHDYLDHPDVIGWTREGDSSHPKSGLATLITDGPGGSKRMYAGLKHAGETWYDITGNRSDTVKIGSDGWGEFHVNDGSVSIYVQK

SEQ ID NO: 39710 - protein, 480 aa, Synthetic construct
NGTMMQYFEWYLPNDGNHWNRLNSDASNLKSKGITAVWIPPAWKGASQNDVGYGAYDLYDLGEFNQKGTVRTKYGTRSQLQAAVTSLKNNGIQVYGDVVMNHKGGADATEMVRAVEVNPNNRNQEVTGEYTIEAWTRFDFPGRGNTHSSFKWRWYHFDGVDWDQSRRLNNRIYKFRGHGKAWDWEVDTENGNYDYLMYADIDMDHPEVVNELRNWGVWYTNTLGLDGFRIDAVKHIKYSFTRDWINHVRSATGKNMFAVAEFWKNDLGAIENYLQKTNWNHSVFDVPLHYNLYNASKSGGNYDMRNIFNGTVVQRHPSHAVTFVDNHDSQPEEALESFVEEWFKPLAYALTLTREQGYPSVFYGDYYGIPTHGVPAMRSKIDPILEARQKYAYGPQHDYLDHPDVIGWTREGDSSHPKSGLATLITDGPGGSKRMYAGRKNAGETWYDITGNRSDTVKIGSDGWGEFHVNDGSVSIYVQK

SEQ ID NO: 39711 - protein, 480 aa, Bacillus sp.
NGTMMQYFEWYLPNDGNHWNRLNSDASNLKSKGITAVWIPPAWKGASQNDVGYGAYDLYDLGEFNQKGTVRTKYGTRSQLQAAVTSLKNNGIQVYGDVVMNHKGGADATEMVRAVEVNPNNRNQEVTGEYTIEAWTRFDFPGRGNTHSSFKWRWYHFDGVDWDQSRRLNNRIYKFRGHGKAWDWEVDTEFGNYDYLMYADYDMDHPEVVNELRNWGVWYTNTLGLDGFRIDAVKHIKYSFTRDWINHVRSATGKNMFAVAEFWKNDLGIIENYLQKTNWNHSVFDVPLHYNLYNASKSGGNYDMRNIFNGTVVQRHPSHAVTFVDNHDSQPEEALESFVEEWFKPLAYALTLTREQGYPSVFYGDYYGIPTHGVPAMRSKIDPILEARQKYAYGPQHDYLDHPDVIGWTREGDSSHPKSGLATLITDGPGGSKRMYAGLKNAGETWYDITGNRSDTVKIGSDGWGEFHVNDGSVSIYVQK

SEQ ID NO: 39712 - protein, 480 aa, Synthetic construct
NGTMMQYFEWYLPNDGNHWNRLNSDASNLKSKGITAVWIPPAWKAASQNDVGYGAYDLYDLGEFNQKGTVRTKYGTRSQLQAAVTSLKNNGIQVYGDVVMNHKGGADATEMVRAVEVNPNNRNQEVTGEYTIEAWTRFDFPGRGNTHSSFKWRWYHFDGVDWDQSREVSNRIYKFRGHGKAWDWEVDTEFGNYDYLMYADYDMDHPEVVNELRNWGVWYTNTLGLDGFRIDAVKHIKYSFTRDWINHVRSATGKNMFAVAEFWKNDLGAIENYLQKTNWNHSVFDVPLHYNLYNASKSGGNYDMRNIFNGTVVQRHPSHAVTFVDNHDSQPEEALESFVEEWFKPLAYALTLTREQGYPSVFYGDYYGIPTHGVPAMRSKIDPILEARQKYAYGPQHDYLDHPDVIGWTREGDSSHPKSGLATLITDGPGGSKRMYAGLKNAGETWYDITGNRSDTVKIGSDGWGEFHVNDGSVSIYVQK

SEQ ID NO: 39713 - protein, 480 aa, Synthetic construct
NGTMMQYFEWYLPNDGNHWNRLNSDASNLKSKGITAVWIPPAWKGASQNDVGYGAYDLYDLGEFNQKGTVRTKYGTRSQLQAAVTSLKNNGIQVYGDVVMNHKGGADATEMVRAVEVNPNNRNQEVTGEYTIEAWTRFDFPGRGNTHSSFKWRWYHFDGVDWDQSRRLNNRIYKFRGHGKAWDWEVDTEFGNYDYLMYADYDMDHPEVVNELRNWGVWYTNTLGLDGFRIDAVKHIKYSFTRDWINHVRSATGKNMFAVAEFWKNDLGAIENYLQKTNWNHSVFDVPLHYNLYNASKSGGNYDMRLIFNGTVVQRHPSHAVTFVDNHDSQPEEALESFVEEWFKPLAYALTLTREQGYPSVFYGDYYGIPTHGVPAMRSKIDPILEARQKYAYGPQHDYLDHPDVIGWTREGDSSHPKSGLATLITDGPGGSKRMYAGLKNAGETWYDITGNRSDTVKIGSDGWGEFHVNDGSVSIYVQK

SEQ ID NO: 39714 - protein, 480 aa, Bacillus sp.
NGTMMQYFEWYLPNDGNHWNRLNSDASNLKSKGITAVWIPPAWKGASQNDVGYGAYDLYDLGEFNQKGTVRTKYGTRSQLQAAVTSLKNNGIQVYGDVVMNHKGGADATEMVRAVEVNPNNRNQEVTGEYTIEAWTRFDFPGRGNTHSSFKWRWYHFDGVDWDQSRRLNNRIYKFRGHGKAWDWEVDTEFGNYDYLMYADYDMDHPEVVNELRNWGVWYTNTLGLDGFRIDAVKHIKYSFTRDWINHVRSATGKNMFAVAEFWRNDLGAIENYLQKTNWNHSVFDVPLHYNLYNASKSGGNYDMRNIFNGTVVQRHPSHAVTFVDNHDSQPEEALESFVEEWFKPLAYALTLTREQGYPSVFYGDYYGIPTHGVPAMRSKIDPILEARQKYAYGPQHDYLDHPDVIGWTREGDSSHPKSGLATLITDGPGGSKRMYAGLKNAGETWYDITGNRSDTVKIGSDGWGEFHVNDGSVSIYVQK

SEQ ID NO: 39715 - protein, 480 aa, Synthetic construct
NGTMMQYFEWYLPNDGNHWNRLNSDASNLKSKGITAVWIPPAWKGASQNDVGYGAYDLYDLGEFNQKGTVRTKYGTRSQLQAAVTSLKNNGIQVYGDVVMNHKGGADATEMVRAVEVNPNNRNQEVTGEYTIEAWTRFDFPGRGNTHSSFKWRWYHFDGVDWDQSRRLNNRIYKFRGHGKAWDWEVDTENGNYDYLMYADIDMDHPEVVNELRNWGVWYTNTLGLDGFRIDAVKHIKYSFTRDWINHVRSATGKNMFAVAEFWKNDLGAIENYLQKTNWNHSVFDVPLHYNLYNASKSGGNYDMRNIFNGTVVQRHPSHAVTFVDNHDSQPEEALESFVEEWFKPLAYALTLTREQGYPSVFYGDYYGIPTHGVPAMRSKIDPILEARQKYAYGPQHDYLDHPDVIGWTREGDSSHPKSGLATLITDGPGGSKRMYAGLKNAGETWYDITGNRSDTVKIGSDGYGEFHVNDGSVSIYVQK

SEQ ID NO: 39716 - protein, 480 aa, Bacillus sp.
NGTMMQYFEWYLPNDGNHWNRLNSDASNLKSKGITAVWIPPAWKGASQNDVGYGAYDLYDLGEFNQKGTVRTKYGTRSQLQAAVTSLKNNGIQVYGDVVMNHKGGADATEMVRAVEVNPNNRNQEVTGEYTIEAWTRFDFPGRGNTHSSFKWGWYHFDGVDWDQSRRLNNRIYKFRGHGKAWDWEVDTEFGNYDYLMYADYDMDHPEVVNELRNWGVWYTNTLGLDGFRIDAVKHIKYSFTRDWINHVRSATGKNMFAVAEFWKNDLGAIENYLQKTNWNHSVFDVPLHYNLYNASKSGGNYDMRNIFNGTVVQRHPSHAVTFVDNHDSQPEEALESFVEEWFKPLAYALTLTREQGYPSVFYGDYYGIPTHGVPAMRSKIDPILEARQKYAYGPQHDYLDHPDVIGWTREGDSSHPKSGLATLITDGPGGSKRMYAGLKNAGETWYDITGNRSDTVKIGSDGWGEFHVNDGSVSIYVQK

SEQ ID NO: 39717 - protein, 480 aa, Synthetic construct
NGTMMQYFEWYLPNDGNHWNRLNSDASNLKSKGITAVWIPPAWKGVSQNDVGYGAYDLYDLGEFNQKGTVRTKYGTRSQLQAAVTSLKNNGIQVYGDVVMNHKGGADATEMVRAVEVNPNNRNQEVTGEYTIEAWTRFDFPGRGNTHSSFKWRWYHFDGVDWDQSRQTNNRIYKFRGHGKAWDWEVDTEFGNYDYLMYADYDMDHPEVVNELRNWGVWYTNTLGLDGFRIDAVKHIKYSFTRDWINHVRSATGKNMFAVAEFWKNDLGAIENYLQKTNWNHSVFDVPLHYNLYNASKSGGNYDMRNIFNGTVVQRHPSHAVTFVDNHDSQPEEALESFVEEWFKPLAYALTLTREQGYPSVFYGDYYGIPTHGVPAMRSKIDPILEARQKYAYGPQHDYLDHPDVIGWTREGDSSHPKSGLATLITDGPGGSKRMYAGLKNAGETWYDITGNRSDTVKIGSDGWGEFHVNDGSVSIYVQK

SEQ ID NO: 39718 - protein, 480 aa, Synthetic construct
NGTMMQYFEWYLPNDGNHWNRLNSDASNLKSKGITAVWIPPAWKGASQNDVGYGAYDLYDLGEFNQKGTVRTKYGTRSQLQAAVTSLKNNGIQVYGDVVMNHKGGADATEMVRAVEVNPNNRNQEVTGEYTIEAWTRFDFPGRGNTHSSFKWRWYHFDGVDWDQSRRLNNRIYKFRGHGKAWDWEVDTEFGNYDYLMYADYDMDHPEVVNELRNWGVWYTNTLGLDGFRIDAVKHIKISFTRDWINHVRSATGKNMFAVAEFWKNDLGAIENYLQKTNWNHSVFDVPLHYNLYNASKSGGNYDMRNIFNGTVVQRHPSHAVTFVDNHDSQPEEALESFVEEWFKPLAYALTLTREQGYPSVFYGDYYGIPTHGVPAMRSKIDPILEARQKYAYGPQHDYLDHPDVIGWTREGDSSHPKSGLATLITDGPGGSKRMYAGLKNAGETWYDITGNRSDTVKIGSDGWGEFHVNDGSVSIYVQK

SEQ ID NO: 39719 - protein, 480 aa, Synthetic construct
NGTMMQYFEWYLPNDGNHWNRLNSDASNLKSKGITAVWIPPAWKGASQNDVGYGAYDLYDLGEFNQKGTVRTKYGTRSQLQAAVTSLKNNGIQVYGDVVMNHKGGADATEMVRAVEVNPNNRNQEVTGEYTIEAWTRFDFPGRGNTHSSFKWRWYHFDGVDWDQSRRLNNRIYKFRGHGKAWDWEVDTENGNYDYLMYADIDMDHPEVVNELRNWGVWYTNTLGLDGFRIDAVKHIKYSFTRDWINHVRSATGKNLFAVAEFWKNDLGAIENYLQKTNWNHSVFDVPLHYNLYNASKSGGNYDMRNIFNGTVVQRHPSHAVTFVDNHDSQPEEALESFVEEWFKPLAYALTLTREQGYPSVFYGDYYGIPTHGVPAMRSKIDPILEARQKYAYGPQHDYLDHPDVIGWTREGDSSHPKSGLATLITDGPGGSKRMYAGLKNAGETWYDITGNRSDTVKIGSDGWGEFHVNDGSVSIYVQK

SEQ ID NO: 39720 - protein, 480 aa, Synthetic construct
NGTMMQYFEWYLPNDGNHWNRLNSDASNLKSKGITAVWIPPAWKGASQNDVGYGAYDLYDLGEFNQKGTVRTKYGTRSQLQAAVTSLKNNGIQVYGDVVMNHKGGADATEMVRAVEVNPNNRNQEVTGEYTIEAWTRFDFPGRGNTHSSFKWRWYHFDGVDWDQSRRLNNRIYKFRGHGKAWDWEVDTENGNYDYLMYADIDMDHPEVVNELRNWGVWYTNTLGLDGFRIDAVKHIKYSFTRDWINHVRSATGKNMFAVAEFWKNDLGAIENYLQKTNWNHSVFDVPLHYNLYNASKSGGNYDMRNIFNGTVVQRHPSHAVTFVDNHDSQPEEALESFVEEWFKPLAYALTLTREQGYPSVFYGDYYGIPTHGVPAMRSKIDPILEARQKYAYGPQHDYLDNPDVIGWTREGDSSHPKSGLATLITDGPGGSKRMYAGLKNAGETWYDITGNRSDTVKIGSDGWGEFHVNDGSVSIYVQK

SEQ ID NO: 39721 - protein, 480 aa, Bacillus sp.
NGTMMQYFEWYLPNDGNHWNRLNSDASNLKSKGITAVWIPPAWKGASQNDVGYGAYDLYDLGEFNQKGTVRTKYGTRSQLQAAVTSLKNNGIQVYGDVVMNHKGGADATEMVRAVEVNPNNRNQEVTGEYTIEAWTRFDFPGRGNTHSSFKWRWYHFDGVDWDQSRRLNNRIYKFRGHGKAWDWEVDTEFGNYDYLMYADYDMDHPEVVNELRNWGVWYTNTLGLDGFRIDAVKHIKYSFTRDWINHVRSATGKNMFAVAEFWKNDLGAIENYLQKTNWNHSVFDVPLHYNLYNASKSGGNYDMRNIFNGTVVQRHPSHAVTFVDNHDSQPEEALESFVEEWFKPLAYALTLTREQGYPSVFYGDYYGIPTHGVPAMRSKIDPILEARQKYAYGPQHDYVDHPDVIGWTREGDSSHPKSGLATLITDGPGGSKRMYAGLKNAGETWYDITGNRSDTVKIGSDGWGEFHVNDGSVSIYVQK

SEQ ID NO: 39722 - protein, 480 aa, Synthetic construct
NGTMMQYFEWYLPNDGNHWNRLNSDASNLKSKGITAVWIPPAWKGASQNDVGYGAYDLYDLGEFNQKGTVRTKYGTRSQLQAAVTSLKNNGIQVYGDVVMNHKGGADATEMVRAVEVNPNNRNQEVTGEYTIEAWTRFDFPGRGNTHSSFKWRWYHFDGVDWDHSRRFNNRIYKFRGHGKAWDWEVDTEFGNYDYLMYADYDMDHPEVVNELRNWGVWYTNTLGLDGFRIDAVKHIKYSFTRDWINHVRSATGKNMFAVAEFWKNDLGAIENYLQKTNWNHSVFDVPLHYNLYNASKSGGNYDMRNIFNGTVVQRHPSHAVTFVDNHDSQPEEALESFVEEWFKPLAYALTLTREQGYPSVFYGDYYGIPTHGVPAMRSKIDPILEARQKYAYGPQHDYLDHPDVIGWTREGDSSHPKSGLATLITDGPGGSKRMYAGLKNAGETWYDITGNRSDTVKIGSDGWGEFHVNDGSVSIYVQK

SEQ ID NO: 39723 - protein, 480 aa, Bacillus sp.
NGTMMQYFEWYLPNDGNHWNRLNSDASNLKSKGITAVWIPPAWKGASQNDVGYGAYDLYDLGEFNQKGTVRTKYGTRSQLQAAVTSLKNNGIQVYGDVVMNHKGGADATEMVRAVEVNPNNRNQEVTGEYTIEAWTRFDFPGRGNTHSSFKWRWYHFDGVDWDQSRRLNNRIYKFRGHGKAWDWEVDTEFGNYDYLMYADYDMDHPEVVNELRNWGVWYTNTLGLDGFRIDAVKHIKYSFTRDWINHVRSATGKNMFAVAEFWKNDLGAIENYLQKTNWNHSVFDVPLHYNLYGASKSGGNYDMRNIFNGTVVQRHPSHAVTFVDNHDSQPEEALESFVEEWFKPLAYALTLTREQGYPSVFYGDYYGIPTHGVPAMRSKIDPILEARQKYAYGPQHDYLDHPDVIGWTREGDSSHPKSGLATLITDGPGGSKRMYAGLKNAGETWYDITGNRSDTVKIGSDGWGEFHVNDGSVSIYVQK

SEQ ID NO: 39724 - protein, 480 aa, Synthetic construct
NGTMMQYFEWYLPNDGNHWNRLNSDASNLKSKGITAVWIPPAWKGASQNDVGYGAYDLYDLGEFNQKGTVRTKYGTRSQLQAAVTSLKNNGIQVYGDVVMNHKGGADATEMVRAVEVNPNNRNQEVTGEYTIEAWTRFDFPGRGNTHSSFKWRWYHFDGVDWDQSRELDNRIYKFRGHGKAWDWEVDTEFGNYDYLMYADYDMDHPEVVNELRNWGVWYTNTLGLDGFRIDAVKHIKYSFTRDWINHVRSATGKNMFAVAEFWKNDLGAIENYLQKTNWNHSVFDVPLHYNLYNASKSGGNYDMRNIFNGTVVQRHPSHAVTFVDNHDSQPEEALESFVEEWFKPLAYALTLTREQGYPSVFYGDYYGIPTHGVPAMRSKIDPILEARQKYAYGPQHDYLDHPDVIGWTREGDSSHPKSGLATLITDGPGGSKRMYAGLKNAGETWYDITGNRSDTVKIGSDGWGEFHVNDGSVSIYVQK

SEQ ID NO: 39725 - protein, 480 aa, Synthetic construct
NGTMMQYFEWYLPNDGNHWNRLNSDASNLKSKGITAVWIPPAWKGASQNDVGYGAYDLYDLGEFNQKGTVRTKYGTRSQLQAAVTSLKNNGIQVYGDVVMNHKGGADATEMVRAVEVNPNNRNQEVTGEYTIEAWTRFDFPGRGNTHSSFKWRWYHFDGVDWDQSRRLNNRIYKFRGHGKAWDWEVDTEFGNYDYLMYADYDMDHPEVVNELRNWGVWYTNTLGLDGFRIDAVKHIKYSFTRDWINHVRSATGKNMFAVAEFWKNDLGAIENYLQKTNWNHSVFDVPLHYNLYNASKSGGNYDMRNIFNGTVVQRHPSHAVTFVDNHDSQPEEALESFVEEWFKPLAYALTLTREQGYPSVFYGDYYGIPTHGVPAMRSKIDPILSARQKYAYGPQHDYLDHPDVIGWTREGDSSHPKSGLATLITDGPGGSKRMYAGLKNAGETWYDITGNRSDTVKIGSDGWGEFHVNDGSVSIYVQK

SEQ ID NO: 39726 - protein, 480 aa, Bacillus sp.
NGTMMQYFEWYLPNDGNHWNRLNSDASNLKSKGITAVWIPPAWKGASQNDVGYGAYDLYDLGEFNQKGTVRTKYGTRSQLQAAVTSLKNNGIQVYGDVVMNHKGGADATEMVGAVEVNPNNRNQEVTGEYTIEAWTRFDFPGRGNTHSSFKWRWYHFDGVDWDQSRRLNNRIYKFRGHGKAWDWEVDTEFGNYDYLMYADYDMDHPEVVNELRNWGVWYTNTLGLDGFRIDAVKHIKYSFTRDWINHVRSATGKNMFAVAEFWKNDLGAIENYLQKTNWNHSVFDVPLHYNLYNASKSGGNYDMRNIFNGTVVQRHPSHAVTFVDNHDSQPEEALESFVEEWFKPLAYALTLTREQGYPSVFYGDYYGIPTHGVPAMRSKIDPILEARQKYAYGPQHDYLDHPDVIGWTREGDSSHPKSGLATLITDGPGGSKRMYAGLKNAGETWYDITGNRSDTVKIGSDGWGEFHVNDGSVSIYVQK

SEQ ID NO: 39727 - protein, 480 aa, Bacillus sp.
NGTMMQYFEWYLPNDGNHWNRLNSDASNLKSKGITAVWIPPAWKGASQNDVGYGAYDLYDLGEFNQKGTVRTKYGTRSQLQAAVTSLKNNGIQVYGDVVMNHKGGADATEMVRAVEVNPNNRNQEVTGEYTIEAWTRFDFPGRGNTHSSFKWRWYHFDGVDWDQSRRLNNRIYKFRGHGKAWDWEVDTEFGNYDYLMYADYDMDHPEVVNELRTWGVWYTNTLGLDGFRIDAVKHIKYSFTRDWINHVRSATGKNMFAVAEFWKNDLGAIENYLQKTNWNHSVFDVPLHYNLYNASKSGGNYDMRNIFNGTVVQRHPSHAVTFVDNHDSQPEEALESFVEEWFKPLAYALTLTREQGYPSVFYGDYYGIPTHGVPAMRSKIDPILEARQKYAYGPQHDYLDHPDVIGWTREGDSSHPKSGLATLITDGPGGSKRMYAGLKNAGETWYDITGNRSDTVKIGSDGWGEFHVNDGSVSIYVQK

SEQ ID NO: 39728 - protein, 480 aa, Bacillus sp.
NGTMMQYFEWYLPNDGNHWNRLNSDASNLKSKGITAVWIPPAWKGASQNDVGYGAYDLYDLGEFNQKGTVRTKYGTRSQLQAAVTSLKNNGIQVYGDVVMNHKGGADATEMVRAVEVNPNNRNQEVTGEYTIEAWTRFDFPGRGNTHSSFKWRWYHFDGVDWDQSRRLNNRIYKFRGHGKAWDWEVDTEFGNYDYLMYADYDMDHPEVVNELRNWGVWYTNTLGLDGFRIDAVKHIKYSFTRDWINHVRSATGKNMFAVAEFWKNDLGAIENYLQKTNWNHSVFDVPLHYNLYNASKSGGNYDMRNIFNGTVVQRHPSHAVTFVDNHDSQPEEALESFVETWFKPLAYALTLTREQGYPSVFYGDYYGIPTHGVPAMRSKIDPILEARQKYAYGPQHDYLDHPDVIGWTREGDSSHPKSGLATLITDGPGGSKRMYAGLKNAGETWYDITGNRSDTVKIGSDGWGEFHVNKGSVSIYVQK

SEQ ID NO: 39729 - protein, 480 aa, Bacillus sp.
NGTMMQYFEWYLPNDGNHWNRLNSDASNLKSKGITAVWIPPAWKSASQNDVGYGAYDLYDLGEFNQKGTVRTKYGTRSQLQAAVTSLKNNGIQVYGDVVMNHKGGADATEMVRAVEVNPNNRNQEVTGEYTIEAWTRFDFPGRGNTHSSFKWRWYHFDGVDWDQSRKLDNRIYKFRGHGKAWDWEVDTEFGNYDYLMYADYDMDHPEVVNELRNWGVWYTNTLGLDGFRIDAVKHIKYSFTRDWINHVRSATGKNMFAVAEFWKNDLGAIENYLQKTNWNHSVFDVPLHYNLYNASKSGGNYDMRNIFNGTVVQRHPSHAVTFVDNHDSQPEEALESFVEEWFKPLAYALTLTREQGYPSVFYGDYYGIPTHGVPAMRSKIDPILEARQKYAYGPQHDYLDHPDVIGWTREGDSSHPKSGLATLITDGPGGSKRMYAGLKNAGETWYDITGNRSDTVKIGSDGWGEFHVNDGSVSIYVQK

SEQ ID NO: 39730 - protein, 480 aa, Synthetic construct
NGTMMQYFEWYLPNDGNHWNRLNSDASNLKSKGITAVWIPPAWKGASQNDVGYGAYDLYDLGEFNQKGTVRTKYGTRSQLQAAVTSLKNNGIQVYGDVVMNHKGGADATEMVRAVEVNPNNRNQEVTGEYTIEAWTRFDFPGRGNTHSSFKWRWYHFDGVDWDQSRRLNNRIYKFRGHGKAWDWEVDTENGNYDYLMYADIDMDHPEVVNELRNWGVWYTNTLGLDGFRIDAVKHIKYSFTRDWINHVRSATGKNMFAVAEFWKNDLGAIENYLQKTNWNHSVFDVPLHYNLYNASKSGGNYDMRNIFNGTVVQRHPSHAVTFVDNHDSQPEEALESFVEEWFKPLAYALTLTREQGYPSVFYGDYYGIPTHGVPAMRSKIDPLLEARQKYAYGPQHDYLDHPDVIGWTREGDSSHPKSGLATLITDGPGGSKRMYAGLKNAGETWYDITGNRSDTVKIGSDGWGEFHVNDGSVSIYVQK

SEQ ID NO: 39731 - protein, 480 aa, Bacillus sp.
NGTMMQYFEWYLPNDGNHWNRLNSDASNLKSKGITAVWIPPAWKAASQNDVGYGAYDLYDLGEFNQKGTVRTKYGTRSQLQAAVTSLKNNGIQVYGDVVMNHKGGADATEMVRAVEVNPNNRNQEVTGEYTIEAWTRFDFPGRGNTHSSFKWRWYHFDGVDWDQSRDFSNRIYKFRGHGKAWDWEVDTEFGNYDYLMYADYDMDHPEVVNELRNWGVWYTNTLGLDGFRIDAVKHIKYSFTRDWINHVRSATGKNMFAVAEFWKNDLGAIENYLQKTNWNHSVFDVPLHYNLYNASKSGGNYDMRNIFNGTVVQRHPSHAVTFVDNHDSQPEEALESFVEEWFKPLAYALTLTREQGYPSVFYGDYYGIPTHGVPAMRSKIDPILEARQKYAYGPQHDYLDHPDVIGWTREGDSSHPKSGLATLITDGPGGSKRMYAGLKNAGETWYDITGNRSDTVKIGSDGWGEFHVNDGSVSIYVQK

SEQ ID NO: 39732 - protein, 480 aa, Synthetic construct
NGTMMQYFEWYLPNDGNHWNRLNSDASNLKSKGITAVWIPPAWKGASQNDVGYGAYDLYDLGEFNQKGTVRTKYGTRSQLQAAVTSLKNNGIQVYGDVVMNHKGGADATEMVRAVEVNPNNRNQEVTGEYTIEAWTRFDFPGRGNTHSSFKWRWYHFDGVDWDQSRRLNNRIYKFRGHGKAWDWEVDTEFGNYDYLMYADYDMDHPEVVSELRNWGVWYTNTLGLDGFRIDAVKHIKYSFTRDWINHVRSATGKNMFAVAEFWKNDLGAIENYLQKTNWNHSVFDVPLHYNLYNASKSGGNYDMRNIFNGTVVQRHPSHAVTFVDNHDSQPEEALESFVEEWFKPLAYALTLTREQGYPSVFYGDYYGIPTHGVPAMRSKIDPILEARQKYAYGPQHDYLDHPDVIGWTREGDSSHPKSGLATLITDGPGGSKRMYAGLKNAGETWYDITGNRSDTVKIGSDGWGEFHVNDGSVSIYVQK

SEQ ID NO: 39733 - protein, 480 aa, Bacillus sp.
NGTMMQYFEWYLPNDGNHWNRLNSDASNLKSKGITAVWIPPAWKGASQNDVGYGAYDLYDLGEFNQKGTVRTKYGTRSQLQAAVTSLKNNGIQVYGDVVMNHKGGADATEMVRAVEVNPNNRNQEVTGEYTIEAWTRFDFPGRGNTHSSFKWRWYHFDGVDWDQSRRLNNRIYKFRGHGKAWDWEVDTEFGNYDYLMYADYDMDHPEVVNELRNWGVWYTNTLGLDGFRIDAVKHIKYSFTRDWINHVRSATGKNMFAVAEFWINDLGAIENYLQKTNWNHSVFDVPLHYNLYNASKSGGNYDMRNIFNGTVVQRHPSHAVTFVDNHDSQPEEALESFVEEWFKPLAYALTLTREQGYPSVFYGDYYGIPTHGVPAMRSKIDPILEARQKYAYGPQHDYLDHPDVIGWTREGDSSHPKSGLATLITDGPGGSKRMYAGLKNAGETWYDITGNRSDTVKIGSDGWGEFHVNDGSVSIYVQK

SEQ ID NO: 39734 - protein, 480 aa, Synthetic construct
NGTMMQYFEWYLPNDGNHWNRLNSDASNLKSKGITAVWIPPAWKGASQNDVGYGAYDLYDLGEFNQKGTVRTKYGTRSQLQAAVTSLKNNGIQVYGDVVMNHKGGADATEMVRAVEVNPNNRNQEVTGEYTIEAWTRFDFPGRGNTHSSFKWRWYHFDGVDWDQSRRLNNRIYKFRGHGKAWDWEVDTENGNYDYLMYADIDMDHPEVVNELRNWGVWYTNTLGLDGFRIDAVKHIKYSFTRDWINHVRSATGKNMFAVAEFWKNDLGAIENYLQKTNWNHSVFDVPLHYNLYNASKSGGNYDMRNIFNGTVVQRHPSHAVTFVDNHDSQPEEALESFVEEWFKPLAYALTLTREQGYPSVFYGDYYGIPTHGVPAMRSKIDPILEARQKYAYGPQHDYLDHPDVIGWTREGDSTHPKSGLATLITDGPGGSKRMYAGLKNAGETWYDITGNRSDTVKIGSDGWGEFHVNDGSVSIYVQK

SEQ ID NO: 39735 - protein, 480 aa, Bacillus sp.
NGTMMQYFEWYLPNDGNHWNRLNSDASNLKSKGITAVWIPPAWKGASQNDVGYGAYDLYDLGEFNQKGTVRTKYGTRSQLQAAVTSLKNNGIQVYGDVVMNHKGGADATEMVRAVEVNPNNRNQEVTGEYTIEAWTRFDFPGRGNTHSSFKWRWYHFDGVDWDQSRDVNNRIYKFRGHGKAWDWEVDTEFGNYDYLMYADYDMDHPEVVNELRNWGVWYTNTLGLDGFRIDAVKHIKYSFTRDWINHVRSATGKNMFAVAEFWKNDLGAIENYLQKTNWNHSVFDVPLHYNLYNASKSGGNYDMRNIFNGTVVQRHPSHAVTFVDNHDSQPEEALESFVEEWFKPLAYALTLTREQGYPSVFYGDYYGIPTHGVPAMRSKIDPILEARQKYAYGPQHDYLDHPDVIGWTREGDSSHPKSGLATLITDGPGGSKRMYAGLKNAGETWYDITGNRSDTVKIGSDGWGEFHVNDGSVSIYVQK

SEQ ID NO: 39736 - protein, 480 aa, Bacillus sp.
NGTMMQYFEWYLPNDGNHWNRLNSDASNLKSKGITAVWIPPAWKGVSQNDVGYGAYDLYDLGEFNQKGTVRTKYGTRSQLQAAVTSLKNNGIQVYGDVVMNHKGGADATEMVRAVEVNPNNRNQEVTGEYTIEAWTRFDFPGRGNTHSSFKWRWYHFDGVDWDQSRDLNNRIYKFRGHGKAWDWEVDTEFGNYDYLMYADYDMDHPEVVNELRNWGVWYTNTLGLDGFRIDAVKHIKYSFTRDWINHVRSATGKNMFAVAEFWKNDLGAIENYLQKTNWNHSVFDVPLHYNLYNASKSGGNYDMRNIFNGTVVQRHPSHAVTFVDNHDSQPEEALESFVEEWFKPLAYALTLTREQGYPSVFYGDYYGIPTHGVPAMRSKIDPILEARQKYAYGPQHDYLDHPDVIGWTREGDSSHPKSGLATLITDGPGGSKRMYAGLKNAGETWYDITGNRSDTVKIGSDGWGEFHVNDGSVSIYVQK

SEQ ID NO: 39737 - protein, 480 aa, Bacillus sp.
NGTMMQYFEWYLPNDGNHWNRLNSDASNLKSKGITAVWIPPAWKGTSQNDVGYGAYDLYDLGEFNQKGTVRTKYGTRSQLQAAVTSLKNNGIQVYGDVVMNHKGGADATEMVRAVEVNPNNRNQEVTGEYTIEAWTRFDFPGRGNTHSSFKWRWYHFDGVDWDQSRRLNNRIYKFRGHGKAWDWEVDTEFGNYDYLMYADYDMDHPEVVNELRNWGVWYTNTLGLDGFRIDAVKHIKYSFTRDWINHVRSATGKNMFAVAEFWKNDLGAIENYLQKTNWNHSVFDVPLHYNLYNASKSGGNYDMRNIFNGTVVQRHPSHAVTFVDNHDSQPEEALESFVEEWFKPLAYALTLTREQGYPSVFYGDYYGIPTHGVPAMRSKIDPILEARQKYAYGPQHDYLDHPDVIGWTREGDSSHPKSGLATLITDGPGGSKRMYAGLKNAGETWYDITGNRSDTVKIGSDGWGEFHVNDGSVSIYVQK

SEQ ID NO: 39738 - protein, 480 aa, Synthetic construct
NGTMMQYFEWYLPNDGNHWNRLNSDASNLKSKGITAVWIPPAWKGASQNDVGYGAYDLYDLGEFNQKGTVRTKYGTRSQLQAAVTSLKNNGIQVYGDVVMNHKGGADATEMVRAVEVNPNNRNQEVTGEYTIEAWTRFDFPGRGNTHSSFKWRWYHFDGVDWDQSRRLNNRIYKFRGHGKAWDWEVDTENGNYDYLMYADIDMDHPEVVNELRNWGVWYTNTLGLDGFRIDAVKHIKYSFTRDWINHVRSATGKNMFAVAEFWKNDLGAIENYLQKTNWNHSVFDVPLHYNLYNASKSGGNYDMRNIFNGTVVQRHPSHAVTFVDNHDSQPEEALESFVEEWFKPLAYALTLTREQGYPSVFYGDYYGIPTHGVPAMRSKIDPILEARQKYAYGPQHDYLDHPDVIGWTREGDSSHPKSGLATLITDGPGGSKRMYAGLKNAGETWYDITGNRSDTVKIGSDGWGEFPVNDGSVSIYVQK

SEQ ID NO: 39739 - protein, 480 aa, Bacillus sp.
NGTMMQYFEWYLPNDGNHWNRLNSDASNLKSKGITAVWIPPAWKATSQNDVGYGAYDLYDLGEFNQKGTVRTKYGTRSQLQAAVTSLKNNGIQVYGDVVMNHKGGADATEMVRAVEVNPNNRNQEVTGEYTIEAWTRFDFPGRGNTHSSFKWRWYHFDGVDWDQSRQINNRIYKFRGHGKAWDWEVDTEFGNYDYLMYADYDMDHPEVVNELRNWGVWYTNTLGLDGFRIDAVKHIKYSFTRDWINHVRSATGKNMFAVAEFWKNDLGAIENYLQKTNWNHSVFDVPLHYNLYNASKSGGNYDMRNIFNGTVVQRHPSHAVTFVDNHDSQPEEALESFVEEWFKPLAYALTLTREQGYPSVFYGDYYGIPTHGVPAMRSKIDPILEARQKYAYGPQHDYLDHPDVIGWTREGDSSHPKSGLATLITDGPGGSKRMYAGLKNAGETWYDITGNRSDTVKIGSDGWGEFHVNDGSVSIYVQK

SEQ ID NO: 39740 - protein, 480 aa, Bacillus sp.
NGTMMQYFEWYLPNDGNHWNRLNSDASNLKSKGITAVWIPPAWKGASQNDVGYGAYDLYDLGEFNQKGTVRTKYGTRSQLQAAVTSLKNNGIQVYGDVVMNHKGGADATEMVRAVEVNPNNRNQEVTGEYTIEAWTRFDFPGRGNTHSSFKWRWYHFDGVDWDQSRRLNNRIYKFRGHGKAWDWEVDTEFGNYDYLMYADYDMDHPEVVNELRNWGVWYTNTLGLDGFRIDAVKHIKYSFTRDWINHVRSATGKNMFAVAEFWKNDLGAIENYLQKTNWNHSVFDVPLHYNLYNASKSGGNYDMRNIFNGTVVQRHPSHAVTFVDNHDSQPEEALESFVEAWFKPLAYALTLTREQGYPSVFYGDYYGIPTHGVPAMRSKIDPILEARQKYAYGPQHDYLDHPDVIGWTREGDSSHPKSGLATLITDGPGGSKRMYAGLKNAGETWYDITGNRSDTVKIGSDGWGEFHVNDGSVSIYVQK

SEQ ID NO: 39741 - protein, 480 aa, Synthetic construct
NGTMMQYFEWYLPNDGNHWNRLNSDASNLKSKGITAVWIPPAWKGASQNDVGYGAYDLYDLGEFNQKGTVRTKYGTRSQLQAAVTSLKNNGIQVYGDVVMNHKGGADATEMVRAVEVNPNNRNQEVTGEYTIEAWTRFDFPGRGNTHSSFKWRWYHFDGVDWDQSRNLDNRIYKFRGHGKAWDWEVDTEFGNYDYLMYADYDMDHPEVVNELRNWGVWYTNTLGLDGFRIDAVKHIKYSFTRDWINHVRSATGKNMFAVAEFWKNDLGAIENYLQKTNWNHSVFDVPLHYNLYNASKSGGNYDMRNIFNGTVVQRHPSHAVTFVDNHDSQPEEALESFVEEWFKPLAYALTLTREQGYPSVFYGDYYGIPTHGVPAMRSKIDPILEARQKYAYGPQHDYLDHPDVIGWTREGDSSHPKSGLATLITDGPGGSKRMYAGLKNAGETWYDITGNRSDTVKIGSDGWGEFHVNDGSVSIYVQK

SEQ ID NO: 39742 - protein, 480 aa, Bacillus sp.
NGTMMQYFEWYLPNDGNHWNRLNSDASNLKSKGITAVWIPPAWKGSSQNDVGYGAYDLYDLGEFNQKGTVRTKYGTRSQLQAAVTSLKNNGIQVYGDVVMNHKGGADATEMVRAVEVNPNNRNQEVTGEYTIEAWTRFDFPGRGNTHSSFKWRWYHFDGVDWDQSRRLNNRIYKFRGHGKAWDWEVDTEFGNYDYLMYADYDMDHPEVVNELRNWGVWYTNTLGLDGFRIDAVKHIKYSFTRDWINHVRSATGKNMFAVAEFWKNDLGAIENYLQKTNWNHSVFDVPLHYNLYNASKSGGNYDMRNIFNGTVVQRHPSHAVTFVDNHDSQPEEALESFVEEWFKPLAYALTLTREQGYPSVFYGDYYGIPTHGVPAMRSKIDPILEARQKYAYGPQHDYLDHPDVIGWTREGDSSHPKSGLATLITDGPGGSKRMYAGLKNAGETWYDITGNRSDTVKIGSDGWGEFHVNDGSVSIYVQK

SEQ ID NO: 39743 - protein, 480 aa, Bacillus sp.
NGTMMQYFEWYLPNDGNHWNRLNSDASNLKSKGITAVWIPPAWKGASQNDVGYGAYDLYDLGEFNQKGTVRTKYGTRSQLQAAVTSLKNNGIQVYGDVVMNHKGGADATEMVRAVEVNPNNRNQEVTGEYTIEAWTRFDFPGRGNTHSSFKWRWYHFDGVDWDQSRRTSNRIYKFRGHGKAWDWEVDTEFGNYDYLMYVDYDMDHPEVVNELRNWGVWYTNTLGLDGFRIDAVKHIKYSFTRDWINHVRKATGKNMFAVAEFWKNDLGAIENYLQKTNWNHSVFDVPLHYNLYNASKSGGNYDMRNIFNGTVVQRHPSHAVTFVDNHDSQPEEALESFVEEWFKPLAYALTLTREQGYPSVFYGDYYGIPTHGVPAMRSKIDPILEARQKYAYGPQHDYLDHPDVIGWTREGDSSHPKSGLATLITDGPGGSKRMYAGLKNAGETWYDITGNRSDTVKIGSDGWGEFHVNDGSVSIYVQK

SEQ ID NO: 39744 - protein, 480 aa, Synthetic construct
NGTMMQYFEWYLPNDGNHWNRLNSDASNLKSKGITAVWIPPAWKGASQNDVGYGAYDVYDLGEFNQKGTVRTKYGTRSQLQAAVTSLKNNGIQVYGDVVMNHKGGADATEMVRAVEVNPNNRNQEVTGEYTIEAWTRFDFPGRGNTHSSFKWRWYHFDGVDWDQSRRLNNRIYKFRGHGKAWDWEVDTENGNYDYLMYADYDMDHPEVVNELRNWGVWYTNTLGLDGFRIDAVKHIKYSFTRDWINHVRSATGKNMFAVAEFWKNDLGAIENYLQKTNWNHSVFDVPLHYNLYNASKSGGNYDMRNIFNGTVVQRHPSHAVTFVDNHDSQPEEALESFVEEWFKPLAYALTLTREQGYPSVFYGDYYGIPTHGVPAMRSKIDPILEARQKYAYGPQHDYLDHPDVIGWTREGDSSHPKSGLATLITDGPGGSKRMYAGLKNAGETWYDITGNRSDTVKIGSDGWGEFHVNDGSVSIYVQK

SEQ ID NO: 39745 - protein, 480 aa, Bacillus sp.
NGTMMQYFEWYLPNDGNHWNRLNSDASNLKSKGITAVWIPPAWKGASQNDVGYGAYDLYDLGEFNQKGTVRTKYGTRSQLQAAVTSLKNNGIQVYGDVVMNHKGGADATEMVRAVEVNPNNRNQEVTGEYTIEAWTRFTFPGRGNTHSSFKWRWYHFDGVDWDQSRRLNNRIYKFRGHGKAWDWEVDTEFGNYDYLMYADYDMDHPEVVNELRNWGVWYTNTLGLDGFRIDAVKHIKYSFTRDWINHVRSATGKNMFAVAEFWKNDLGAIENYLQKTNWNHSVFDVPLHYNLYNASKSGGNYDMRNIFNGTVVQRHPSHAVTFVDNHDSQPEEALESFVEEWFKPLAYALTLTREQGYPSVFYGDYYGIPTHGVPAMRSKIDPILEARQKYAYGPQHDYLDHPDVIGWTREGDSSHPKSGLATLITDGPGGSKRMYAGLKNAGETWYDITGNRSDTVKIGSDGWGEFHVNDGSVSIYVQK

SEQ ID NO: 39746 - protein, 480 aa, Synthetic construct
NGTMMQYFEWYLPNDGNHWNRLNSDASNLKSKGITAVWIPPAWKGASQNDVGYGAYDLYDLGEFNQKGTVRTKYGTRSQLQAAVTSLKNNGIQVYGDVVMNHKGGADATEMVRAVEVNPNNRNQEVTGEYTIEAWTRFDFPGRGNTHSSFKWRWYHFDGVDWDQSRQVNNRIYKFRGHGKAWDWEVDTEFGNYDYLMYADYDMDHPEVVNELRNWGVWYTNTLGLDGFRIDAVKHIKYSFTRDWINHVRSATGKNMFAVAEFWKNDLGAIENYLQKTNWNHSVFDVPLHYNLYNASKSGGNYDMRNIFNGTVVQRHPSHAVTFVDNHDSQPEEALESFVEEWFKPLAYALTLTREQGYPSVFYGDYYGIPTHGVPAMRSKIDPILEARQKYAYGPQHDYLDHPDVIGWTREGDSSHPKSGLATLITDGPGGSKRMYAGLKNAGETWYDITGNRSDTVKIGSDGWGEFHVNDGSVSIYVQK

SEQ ID NO: 39747 - protein, 480 aa, Synthetic construct
NGTMMQYFEWYLPNDGNHWNRLNSDASNLKSKGITAVWIPPAWKGASQNDVGYGAYDLYDLGEFNQKGTVRTKYGTRSQLQAAVTSLKNNGIQVYGDVVMNHKGGADATEMVRAVEVNPNNRNQEVTGEYTIEAWTRFDFPGRGNTHSSFKWRWYHFDGVDWDQSRRLNNRIYKFRGHGKAWDWEVDTEFGNYDYLMYADYDMDHPEVVGELRNWGVWYTNTLGLDGFRIDAVKHIKYSFTRDWINHVRSATGKNMFAVAEFWKNDLGAIENYLQKTNWNHSVFDVPLHYNLYNASKSGGNYDMRNIFNGTVVQRHPSHAVTFVDNHDSQPEEALESFVEEWFKPLAYALTLTREQGYPSVFYGDYYGIPTHGVPAMRSKIDPILEARQKYAYGPQHDYLDHPDVIGWTREGDSSHPKSGLATLITDGPGGSKRMYAGLKNAGETWYDITGNRSDTVKIGSDGWGEFHVNDGSVSIYVQK

SEQ ID NO: 39748 - protein, 480 aa, Bacillus sp.
NGTMMQYFEWYLPNDGNHWNRLNSDASNLKSKGITAVWIPPAWKGASQNDVGYGAYDLYDLGEFNQKGTVRTKYGTRSQLQAAVTSLKNNGIQVYGDVVMNHKGGADATEMVRAVEVNPNNRNQEVTGEYTIEAWTRFDFPGRGNTHSSFKWRWYHFDGGDWDQSRRLNNRIYKFRGHGKAWDWEVDTEFGNYDYLMYADYDMDHPEVVNELRNWGVWYTNTLGLDGFRIDAVKHIKYSFTRDWINHVRSATGKNMFAVAEFWKNDLGAIENYLQKTNWNHSVFDVPLHYNLYNASKSGGNYDMRNIFNGTVVQRHPSHAVTFVDNHDSQPEEALESFVEEWFKPLAYALTLTREQGYPSVFYGDYYGIPTHGVPAMRSKIDPILEARQKYAYGPQHDYLDHPDVIGWTREGDSSHPKSGLATLITDGPGGSKRMYAGLKNAGETWYDITGNRSDTVKIGSDGWGEFHVNDGSVSIYVQK

SEQ ID NO: 39749 - protein, 480 aa, Bacillus sp.
NGTMMQYFEWYLPNDGNHWNRLNSDASNLKSKGITAVWIPPAWKGASQNDVGYGAYDLYDLGEFNQKGTVRTKYGTRSQLQAAVTSLKNNGIQVYGDVVMNHKGGADATEMVRAVEVNPNNRNQEVTGEYTIEAWTRFDFPGRGNTHSSFKWRWYHFDGVDWDQSRRLNNRIYKFRGHGKAWDWEVDTEFGNYDYLMYADYDMDHPEVVNELRNWGVWYTNTLGLDGFRIDAVKHIKYSFTRDWINHVRSATGKNMFAVAEFWVNDLGAIENYLQKTNWNHSVFDVPLHYNLYNASKSGGNYDMRNIFNGTVVQRHPSHAVTFVDNHDSQPEEALESFVEEWFKPLAYALTLTREQGYPSVFYGDYYGIPTHGVPAMRSKIDPILEARQKYAYGPQHDYLDHPDVIGWTREGDSSHPKSGLATLITDGPGGSKRMYAGLKNAGETWYDITGNRSDTVKIGSDGWGEFHVNDGSVSIYVQK

SEQ ID NO: 39750 - protein, 480 aa, Bacillus sp.
NGTMMQYFEWYLPNDGNHWNRLNSDASNLKSKGITAVWIPPAWKGASQNDVGYGAYDLYDLGEFNQKGTVRTKYGTRSQLQAAVTSLKNNGIQVYGDVVMNHKGGADATEMVRAVEVNPNNRNQEVTGEYTIEAWTRFDFPGRGNTHSSFKWRWYHFDGVDWDQSRRLNNRIYKFRGHGKAWDWEVDTEFGNYDYLMYADYDMDHPEVVNELRNWGVWYTNTLGLDGFRIDAVKHIKYSFTRDWINHVRSATGKNMFAVAEFWKNDLGAIENYLQKTNWNHSVFDVPLHYNLYNASKSGGNYDMRNIFNGTVVQRHPSHAVTFVSNHDSQPEEALESFVEEWFKPLAYALTLTREQGYPSVFYGDYYGIPTHGVPAMRSKIDPILEARQKYAYGPQHDYLDHPDVIGWTREGDSSHPKSGLATLITDGPGGSKRMYAGLKNAGETWYDITGNRSDTVKIGSDGWGEFHVNDGSVSIYVQK

SEQ ID NO: 39751 - protein, 480 aa, Synthetic construct
NGTMMQYFEWYLPNDGNHWNRLNSDASNLKSKGITAVWIPPAWKGASQNDVGYGAYDLYDLGEFNQKGTVRTKYGTRSQLQAAVTSLKNNGIQVYGDVVMNHKGGADATEMVRAVEVNPNNRNQEVTGDYTIEAWTRFDFPGRGNTHSSFKWRWYHFDGVDWDQSRRLNNRIYKFRGHGKAWDWEVDTENGNYDYLMYADIDMDHPEVVNELRNWGVWYTNTLGLDGFRIDAVKHIKYSFTRDWINHVRSATGKNMFAVAEFWKNDLGAIENYLQKTNWNHSVFDVPLHYNLYNASKSGGNYDMRNIFNGTVVQRHPSHAVTFVDNHDSQPEEALESFVEEWFKPLAYALTLTREQGYPSVFYGDYYGIPTHGVPAMRSKIDPILEARQKYAYGPQHDYLDHPDVIGWTREGDSSHPKSGLATLITDGPGGSKRMYAGLKNAGETWYDITGNRSDTVKIGSDGWGEFHVNDGSVSIYVQK

SEQ ID NO: 39752 - protein, 480 aa, Bacillus sp.
NGTMMQYFEWYLPNDGNHWNRLNSDASNLKSKGITAVWIPPAWKGASQNDVGYGAYDLYDLGEFNQKGTVRTKYGTRSQLQAAVTSLKNNGIQVYGDVVMNHKGGADATEMVRAVEVNPNNRNQEVTGEYTIEAWTRFDFPGRGNTHSSFKWRWYHFDGVDWDQSRRLNNRIYKFRGHGKAWDWEVDTEFGNYDYLMYADYDMDHPEVVNELRNWGVWYTNTLGLDGFRIDAVKHIKYSFTRDWINHVRSATGKNMFAVAEFWKNDLGAIENYLQKTNWNHSVFDVPLHYNLYNASKSGGNYDMRNIFNGTVVQRHPSHAVTFVDNHDSQPEEALESFVEEWFKPLAYALTLTREQGYPSVFYGDYYGIPTHGVPAMRSKIDPILNARQKYAYGPQHDYLDHPDVIGWTREGDSSHPKSGLATLITDGPGGSKRMYAGLKNAGETWYDITGNRSDTVKIGSDGWGEFHVNDGSVSIYVQK

SEQ ID NO: 39753 - protein, 480 aa, Synthetic construct
NGTMMQYFEWYLPNDGNHWNRLNSDASNLKSKGITAVWIPPAWKGASQNDVGYGAYDLYDLGEFNQKGTVRTKYGTRSQLQAAVTSLKNNGIQVYGDVVMNHKGGADATEMVRAVEVNPNNRNQEVTGEYTIEAWTRFDFPGRGNTHSSFKWRWYHFDGVDWDQSRRVDNRIYKFRGHGKAWDWEVDTEFGNYDYLMYADYDMDHPEVVNELRNWGVWYTNTLGLDGFRIDAVKHIKYSFTRDWINHVRSATGKNMFAVAEFWKNDLGAIENYLQKTNWNHSVFDVPLHYNLYNASKSGGNYDMRNIFNGTVVQRHPSHAVTFVDNHDSQPEEALESFVEEWFKPLAYALTLTREQGYPSVFYGDYYGIPTHGVPAMRSKIDPILEARQKYAYGPQHDYLDHPDVIGWTREGDSSHPKSGLATLITDGPGGSKRMYAGLKNAGETWYDITGNRSDTVKIGSDGWGEFHVNDGSVSIYVQK

SEQ ID NO: 39754 - protein, 480 aa, Bacillus sp.
NGTMMQYFEWYLPNDGNHWNRLNSDASNLKSKGITAVWIPPAWKGASQNDVGYGAYDLYDLGEFNQKGTVRTKYGTRSQLQAAVTSLKNNGIQVYGDVVMNHKGGADATEMVPAVEVNPNNRNQEVTGEYTIEAWTRFDFPGRGNTHSSFKWRWYHFDGVDWDQSRRLNNRIYKFRGHGKAWDWEVDTEFGNYDYLMYADYDMDHPEVVNELRNWGVWYTNTLGLDGFRIDAVKHIKYSFTRDWINHVRSATGKNMFAVAEFWKNDLGAIENYLQKTNWNHSVFDVPLHYNLYNASKSGGNYDMRNIFNGTVVQRHPSHAVTFVDNHDSQPEEALESFVETWFKPLAYALTLTREQGYPSVFYGDYYGIPTHGVPAMRSKIDPILEARQKYAYGPQHDYLDHPDVIGWTREGDSSHPKSGLATLITDGPGGSKRMYAGLKNAGETWYDITGNRSDTVKIGSDGWGEFHVNDASVSIYVQK

SEQ ID NO: 39755 - protein, 480 aa, Bacillus sp.
NGTMMQYFEWYLPNDGNHWNRLNSDASNLKSKGITAVWIPPAWKGASQNDVGYGAYDLYDLGEFNQKGTVRTKYGTRSQLQAAVTSLKNNGIQVYGDVVMNHKGGADATEMVRAVEVNPNNRNQEVTGEYTIEAWTRFDFPGRGNTHSSFKWRWYHFDGVDWDQSRRLNNRIYKFRGHGKAWDWEVDTEFGNYDYLMYADYDMDHPEVVNELRNWGVWYTNTLGLDGFRIDAVKHIKYSFTRDWINHVRSATGKNMFAVAEFWKNDLGMIENYLQKTNWNHSVFDVPLHYNLYNASKSGGNYDMRNIFNGTVVQRHPSHAVTFVDNHDSQPEEALESFVEEWFKPLAYALTLTREQGYPSVFYGDYYGIPTHGVPAMRSKIDPILEARQKYAYGPQHDYLDHPDVIGWTREGDSSHPKSGLATLITDGPGGSKRMYAGLKNAGETWYDITGNRSDTVKIGSDGWGEFHVNDGSVSIYVQK

SEQ ID NO: 39756 - protein, 480 aa, Bacillus sp.
NGTMMQYFEWYLPNDGNHWNRLNSDASNLKSKGITAVWIPPAWKGTSQNDVGYGAYDLYDLGEFNQKGTVRTKYGTRSQLQAAVTSLKNNGIQVYGDVVMNHKGGADATEMVRAVEVNPNNRNQEVTGEYTIEAWTRFDFPGRGNTHSSFKWRWYHFDGVDWDQSRRTSNRIYKFRGHGKAWDWEVDTEFGNYDYLMYTDYDMDHPEVVNELRNWGVWYTNTLGLDGFRIDAVKHIKYSFTRDWINHVRSATGKNMFAVAEFWKNDLGAIENYLQKTNWNHSVFDVPLHYNLYNASKSGGNYDMRNIFNGTVVQRHPSHAVTFVDNHDSQPEEALESFVEEWFKPLAYALTLTREQGYPSVFYGDYYGIPTHGVPAMRSKIDPILEARQKYAYGPQHDYLDHPDVIGWTREGDSSHPKSGLATLITDGPGGSKRMYAGLKNAGETWYDITGNRSDTVKIGSDGWGEFHVNDGSVSIYVQK

SEQ ID NO: 39757 - protein, 480 aa, Bacillus sp.
NGTMMQYFEWYLPNDGNHWNRLNSDASNLKSKGITAVWIPPAWKGASQNDVGYGAYDLYDLGEFNQKGTVRTKYGTRSQLQAAVTSLKNNGIQVYGDVVMNHKGGADATEMVRAVEVNPNNRNQEVTGEYTIEAWTRFDFPGRGNTHSSFKWRWYHFDGVDWDQSRYLNNRIYKFRGHGKAWDWEVDTEFGNYDYLMYADYDMDHPEVVNELRNWGVWYTNTLGLDGFRIDAVKHIKYSFTRDWINHVRSATGKNMFAVAEFWKNDLGAIENYLQKTNWNHSVFDVPLHYNLYNASKSGGNYDMRNIFNGTVVQRHPSHAVTFVDNHDSQPEEALESFVEEWFKPLAYALTLTREQGYPSVFYGDYYGIPTHGVPAMRSKIDPILEARQKYAYGPQHDYLDHPDVIGWTREGDSSHPKSGLATLITDGPGGSKRMYAGLKNAGETWYDITGNRSDTVKIGSDGWGEFHVNDGSVSIYVQK

SEQ ID NO: 39758 - protein, 480 aa, Synthetic construct
NGTMMQYFEWYLPNDGNHWNRLNSDASNLKSKGITAVWIPPAWKGISQNDVGYGAYDLYDLGEFNQKGTVRTKYGTRSQLQAAVTSLKNNGIQVYGDVVMNHKGGADATEMVRAVEVNPNNRNQEVTGEYTIEAWTRFDFPGRGNTHSSFKWRWYHFDGVDWDQSREFNNRIYKFRGHGKAWDWEVDTEFGNYDYLMYADYDMDHPEVVNELRNWGVWYTNTLGLDGFRIDAVKHIKYSFTRDWINHVRSATGKNMFAVAEFWKNDLGAIENYLQKTNWNHSVFDVPLHYNLYNASKSGGNYDMRNIFNGTVVQRHPSHAVTFVDNHDSQPEEALESFVEEWFKPLAYALTLTREQGYPSVFYGDYYGIPTHGVPAMRSKIDPILEARQKYAYGPQHDYLDHPDVIGWTREGDSSHPKSGLATLITDGPGGSKRMYAGLKNAGETWYDITGNRSDTVKIGSDGWGEFHVNDGSVSIYVQK

SEQ ID NO: 39759 - protein, 480 aa, Synthetic construct
NGTMMQYFEWYLPNDGNHWNRLNSDASNLKSKGITAVWIPPAWKGASQNDVGYGAYDLYDLGEFNQKGTVRTKYGTRSQLQAAVTSLKNNGIQVYGDVVMNHKGGADATEMVRAVEVNPNNRNQEVTGEYTIEAWTRFDFPGRGNTHSSFKWRWYHFDGVDWDQSRETTNRIYKFRGHGKAWDWEVDTEFGNYDYLMYADYDMDHPEVVNELRNWGVWYTNTLGLDGFRIDAVKHIKYSFTRDWINHVRSATGKNMFAVAEFWKNDLGAIENYLQKTNWNHSVFDVPLHYNLYNASKSGGNYDMRNIFNGTVVQRHPSHAVTFVDNHDSQPEEALESFVEEWFKPLAYALTLTREQGYPSVFYGDYYGIPTHGVPAMRSKIDPILEARQKYAYGPQHDYLDHPDVIGWTREGDSSHPKSGLATLITDGPGGSKRMYAGLKNAGETWYDITGNRSDTVKIGSDGWGEFHVNDGSVSIYVQK

SEQ ID NO: 39760 - protein, 480 aa, Bacillus sp.
NGTMMQYFEWYLPNDGNHWNRLNSDASNLKSKGITAVWIPPAWKGASQNDVGYGAYDLYDLGEFNQKGTVRTKYGTRSQLQAAVTSLKNNGIQVYGDVVMNHKGGADATEMVRAVEVNPNNRNQEVTGEYTIEAWTRFDFPGRGNTHSSFKWRWYHFDGVDWDQSRRLNNRIYKFRGHGKAWDWEVDTEFGNYDYLMYADYDMDHPEVVNELRNWGVWYTNTLGLDGFRIDAVKHIKYSFTRDWINHVRSATGKNMFAVAEFWKNDLGAIENYLQKTNWNHSVFDVPLHYNLYNASKSGGNYDMRNIFNGTVVQRHPSHAVTFVDNHDSQPEEALESFVEEWFKPLAYALTLTREQGYPSVFYGDYYGIPTHGVPAMRSKIDPILMARQKYAYGPQHDYLDHPDVIGWTREGDSSHPKSGLATLITDGPGGSKRMYAGLKNAGETWYDITGNRSDTVKIGSDGWGEFHVNDGSVSIYVQK

SEQ ID NO: 39761 - protein, 480 aa, Bacillus sp.
NGTMMQYFEWYLPNDGNHWNRLNSDASNLKSKGITAVWIPPAWKGASQNDVGYGAYDLYDLGEFNQKGTVRTKYGTRSQLQAAVTSLKNNGIQVYGDVVMNHKGGADATEMVRAVEVNPNNRNQEVTGEYTIEAWTRFDFPGRGNTHSSFKWRWYHFDGVDWDQSRRLNNRIYKFRGHGKAWDWEVDTEFGNYDYLMYADYDMDHPEVVNELRNWGVWYTNTLGLDGFRIDAVKHIKYSFTRDWINHVRSATGKNMFAVAEFWKNDLGAIENYLQKTRWNHSVFDVPLHYNLYNASKSGGNYDMRNIFNGTVVQRHPSHAVTFVDNHDSQPEEALESFVEEWFKPLAYALTLTREQGYPSVFYGDYYGIPTHGVPAMRSKIDPILEARQKYAYGPQHDYLDHPDVIGWTREGDSSHPKSGLATLITDGPGGSKRMYAGLKNAGETWYDITGNRSDTVKIGSDGWGEFHVNDGSVSIYVQK

SEQ ID NO: 39762 - protein, 480 aa, Synthetic construct
NGTMMQYFEWYLPNDGNHWNRLNSDASNLKSKGITAVWIPPAWKGASQNDVGYGAYDLYDLGEFNQKGTVRTKYGTRSQLQAAVTSLKNNGIQVYGDVVMNHKGGADATEMVRAVEVNPNNRNQEVTGEYTIEAWTRFDFPGRGNTHSSFKWRWYHFDGVDWDQSRRLNNRIYKFRGHGKAWDWEVDTENGNYDYLMYADIDMDHPEVVNELRNWGVWYTNTLGLDGFRIDAVKHIKYSFTRDWINHVRSATGKNMFAVAEFWKNDLGAIENYLQYTNWNHSVFDVPLHYNLYNASKSGGNYDMRNIFNGTVVQRHPSHAVTFVDNHDSQPEEALESFVEEWFKPLAYALTLTREQGYPSVFYGDYYGIPTHGVPAMRSKIDPILEARQKYAYGPQHDYLDHPDVIGWTREGDSSHPKSGLATLITDGPGGSKRMYAGLKNAGETWYDITGNRSDTVKIGSDGWGEFHVNDGSVSIYVQK

SEQ ID NO: 39763 - protein, 480 aa, Synthetic construct
NGTMMQYFEWYLPNDGNHWNRLNSDASNLKSKGITAVWTPPAWKGASQNDVGYGAYDLYDLGEFNQKGTVRTKYGTRSQLQAAVTSLKNNGIQVYGDVVMNHKGGADATEMVRAVEVNPNNRNQEVTGEYTIEAWTRFDFPGRGNTHSSFKWRWYHFDGVDWDQSRRLNNRIYKFRGHGKAWDWEVDTENGNYDYLMYADIDMDHPEVVNELRNWGVWYTNTLGLDGFRIDAVKHIKYSFTRDWINHVRSATGKNMFAVAEFWKNDLGAIENYLQKTNWNHSVFDVPLHYNLYNASKSGGNYDMRNIFNGTVVQRHPSHAVTFVDNHDSQPEEALESFVEEWFKPLAYALTLTREQGYPSVFYGDYYGIPTHGVPAMRSKIDPILEARQKYAYGPQHDYLDHPDVIGWTREGDSSHPKSGLATLITDGPGGSKRMYAGLKNAGETWYDITGNRSDTVKIGSDGWGEFHVNDGSVSIYVQK

SEQ ID NO: 39764 - protein, 480 aa, Bacillus sp.
NGTMMQYFEWYLPNDGNHWNRLNSDASNLKSKGITAVWIPPAWKGASQNDVGYGAYDLYDLGEFNQKGTVRTKYGTRSQLQAAVTSLKNNGIQVYGDVVMNHKGGADATEMVRAVEVNPNNRNQEVTGEYTIEAWTRFDFPGRGNTHSSFKWRWYHFDGVDWDQSRDFDNRIYKFRGHGKAWDWEVDTEFGNYDYLMYADYDMDHPEVVNELRNWGVWYTNTLGLDGFRIDAVKHIKYSFTRDWINHVRSATGKNMFAVAEFWKNDLGAIENYLQKTNWNHSVFDVPLHYNLYNASKSGGNYDMRNIFNGTVVQRHPSHAVTFVDNHDSQPEEALESFVEEWFKPLAYALTLTREQGYPSVFYGDYYGIPTHGVPAMRSKIDPILEARQKYAYGPQHDYLDHPDVIGWTREGDSSHPKSGLATLITDGPGGSKRMYAGLKNAGETWYDITGNRSDTVKIGSDGWGEFHVNDGSVSIYVQK

SEQ ID NO: 39765 - protein, 480 aa, Bacillus sp.
NGTMMQYFEWYLPNDGNHWNRLNSDASNLKSKGITAVWIPPAWKGASQNDVGYGAYDLYDLGEFNQKGTVRTKYGTRSQLQAAVTSLKNNGIQVYGDVVMNHKGGADATEMVRAVEVNPNNRNQEVTGEYTIEAWTRFDFPGRGNTHSSFKWRWYHFDGVDWDQSRRFDNRIYKFRGHGKAWDWEVDTEFGNYDYLMYADYDMDHPEVVNELRNWGVWYTNTLGLDGFRIDAVKHIKYSFTRDWINHVRSATGKNMFAVAEFWKNDLGAIENYLQKTNWNHSVFDVPLHYNLYNASKSGGNYDMRNIFNGTVVQRHPSHAVTFVDNHDSQPEEALESFVEEWFKPLAYALTLTREQGYPSVFYGDYYGIPTHGVPAMRSKIDPILEARQKYAYGPQHDYLDHPDVIGWTREGDSSHPKSGLATLITDGPGGSKRMYAGLKNAGETWYDITGNRSDTVKIGSDGWGEFHVNDGSVSIYVQK

SEQ ID NO: 39766 - protein, 480 aa, Synthetic construct
NGTMMQYFEWYLPNDGNHWNRLNSDASNLKSKGITAVWIPPAWKGASQNDVGYGAYDLYDLGEFNQKGTVRTKYGTRSQLQAAVTSLKNNGIQVYGDVVMNHKGGADATEMVRAVEVNPNNRNQEVTGEYTIEAWTRFDFPGRGNTHSSFKWRWYHFDGVDWDQSRRLNNRIYKFRGHGKAWDWEVDTENGNYDYLMYADIDMDHPEVVNELRNWGVWYTNTLGLDGFRIDAVKHIKYSFTRDWINHVRSATGKNMFAVAEFWKNDLGAIENYLQKTNWNHSVFDVPLHYNFYNASKSGGNYDMRNIFNGTVVQRHPSHAVTFVDNHDSQPEEALESFVEEWFKPLAYALTLTREQGYPSVFYGDYYGIPTHGVPAMRSKIDPILEARQKYAYGPQHDYLDHPDVIGWTREGDSSHPKSGLATLITDGPGGSKRMYAGLKNAGETWYDITGNRSDTVKIGSDGWGEFHVNDGSVSIYVQK

SEQ ID NO: 39767 - protein, 480 aa, Synthetic construct
NGTMMQYFEWYLPNDGNHWNRLNSDASNLKSKGITAVWIPPAWKGASQNDVGYGAYDLYDLGEFNQKGTVRTKYGTRSQLQAAVTSLKNNGIQVYGDVVMNHKGGADATEMVRAVEVNPNNRNQEVTGEYTIEAWTRFDFPGRGNTHSSFKWRWYHFDGVDWDQSRRLNNRIYKFRGHGKAWDWEVDDEFGNYDYLMYADIDMDHPEVVNELRNWGVWYTNTLGLDGFRIDAVKHIKYSFTRDWINHVRSATGKNMFAVAEFWKNDLGAIENYLQKTNWNHSVFDVPLHYNLYNASKSGGNYDMRNIFNGTVVQRHPSHAVTFVDNHDSQPEEALESFVEEWFKPLAYALTLTREQGYPSVFYGDYYGIPTHGVPAMRSKIDPILEARQKYAYGPQHDYLDHPDVIGWTREGDSSHPKSGLATLITDGPGGSKRMYAGLKNAGETWYDITGNRSDTVKIGSDGWGEFHVNDGSVSIYVQK

SEQ ID NO: 39768 - protein, 480 aa, Bacillus sp.
NGTMMQYFEWYLPNDGNHWNRLNSDASNLKSKGITAVWIPPAWKATSQNDVGYGAYDLYDLGEFNQKGTVRTKYGTRSQLQAAVTSLKNNGIQVYGDVVMNHKGGADATEMVRAVEVNPNNRNQEVTGEYTIEAWTRFDFPGRGNTHSSFKWRWYHFDGVDWDQSRDLSNRIYKFRGHGKAWDWEVDTEFGNYDYLMYADYDMDHPEVVNELRNWGVWYTNTLGLDGFRIDAVKHIKYSFTRDWINHVRSATGKNMFAVAEFWKNDLGAIENYLQKTNWNHSVFDVPLHYNLYNASKSGGNYDMRNIFNGTVVQRHPSHAVTFVDNHDSQPEEALESFVEEWFKPLAYALTLTREQGYPSVFYGDYYGIPTHGVPAMRSKIDPILEARQKYAYGPQHDYLDHPDVIGWTREGDSSHPKSGLATLITDGPGGSKRMYAGLKNAGETWYDITGNRSDTVKIGSDGWGEFHVNDGSVSIYVQK

SEQ ID NO: 39769 - protein, 480 aa, Bacillus sp.
NGTMMQYFEWYLPNDGNHWNRLNSDASNLKSKGITAVWIPPAWKGASQNDVGYGAYDLYDLGEFNQKGTVRTKYGTRSQLQAAVTSLKNNGIQVYGDVVMNHKGGADATEMVRAVEVNPNNRNQEVTGEYTIEAWTRFDFPGRGNTHSSFKWRWYHFDGVDWDQSRRLYNRIYKFRGHGKAWDWEVDTEFGNYDYLMYADYDMDHPEVVNELRNWGVWYTNTLGLDGFRIDAVKHIKYSFTRDWINHVRSATGKNMFAVAEFWKNDLGAIENYLQKTNWNHSVFDVPLHYNLYNASKSGGNYDMRNIFNGTVVQRHPSHAVTFVDNHDSQPEEALESFVEEWFKPLAYALTLTREQGYPSVFYGDYYGIPTHGVPAMRSKIDPILEARQKYAYGPQHDYLDHPDVIGWTREGDSSHPKSGLATLITDGPGGSKRMYAGLKNAGETWYDITGNRSDTVKIGSDGWGEFHVNDGSVSIYVQK

SEQ ID NO: 39770 - protein, 480 aa, Bacillus sp.
NGTMMQYFEWYLPNDGNHWNRLNSDASNLKSKGITAVWIPPAWKGASQNDVGYGAYDLYDLGEFNQKGTVRTKYGTRSQLQAAVTSLKNNGIQVYGDVVMNHKGGADATEMVPAVEVNPNNRNQEVTGEYTIEAWTRFDFPGRGNTHSSFKWRWYHFDGVDWDQSRRLNNRIYKFRGHGKAWDWEVDTEFGNYDYLMYADYDMDHPEVVNELRNWGVWYTNTLGLDGFRIDAVKHIKYSFTRDWINHVRSATGKNMFAVAEFWKNDLGAIENYLQKTNWNHSVFDVPLHYNLYNASKSGGNYDMRNIFNGTVVQRHPSHAVTFVDNHDSQPEEALESFVEEWFKPLAYALTLTREQGYPSVFYGDYYGIPTHGVPAMRSKIDPILEARQKYAYGPQHDYLDHPDVIGWTREGDSSHPKSGLATLITDGPGGSKRMYAGLKNAGETWYDITGNRSDTVKIGSDGWGEFHVNDGSVSIYVQK

SEQ ID NO: 39771 - protein, 480 aa, Bacillus sp.
NGTMMQYFEWYLPNDGNHWNRLNSDASNLKSKGITAVWIPPAWKGASQNDVGYGAYDLYDLGEFNQKGTVRTKYGTRSQLQAAVTSLKNNGIQVYGDVVMNHKGGADATEMVRAVEVNPNNRNQEVTGEYTIEAWTRFDFPGRGNTHSSFKWRWYHFDGVDWDQSRRLNNRIYKFRGHGKAWDWEVDTEFGNYDYLMYADYDMDHPEVVNELRNWGVWYTNTLGLDGFRIDAVKHIKYSFTRDWINHVRSATGKNMFAVAEFWKNDLGAIENYLQKTNWNHSVFDVPLHYNLYNASKSGGNYDMRDIFNGTVVQRHPSHAVTFVDNHDSQPEEALESFVEEWFKPLAYALTLTREQGYPSVFYGDYYGIPTHGVPAMRSKIDPILEARQKYAYGPQHDYLDHPDVIGWTREGDSSHPKSGLATLITDGPGGSKRMYAGLKNAGETWYDITGNRSDTVKIGSDGWGEFHVNDGSVSIYVQK

SEQ ID NO: 39772 - protein, 480 aa, Bacillus sp.
NGTMMQYFEWYLPNDGNHWNRLNSDASNLKSKGITAVWIPPAWKGVSQNDVGYGAYDLYDLGEFNQKGTVRTKYGTRSQLQAAVTSLKNNGIQVYGDVVMNHKGGADATEMVRAVEVNPNNRNQEVTGEYTIEAWTRFDFPGRGNTHSSFKWRWYHFDGVDWDQSRRLNNRIYKFRGHGKAWDWEVDTEFGNYDYLMYADYDMDHPEVVNELRNWGVWYTNTLGLDGFRIDAVKHIKYSFTRDWINHVRSATGKNMFAVAEFWKNDLGAIENYLQKTNWNHSVFDVPLHYNLYNASKSGGNYDMRNIFNGTVVQRHPSHAVTFVDNHDSQPEEALESFVEEWFKPLAYALTLTREQGYPSVFYGDYYGIPTHGVPAMRSKIDPILEARQKYAYGPQHDYLDHPDVIGWTREGDSSHPKSGLATLITDGPGGSKRMYAGLKNAGETWYDITGNRSDTVKIGSDGWGEFHVNDGSVSIYVQK

SEQ ID NO: 39773 - protein, 480 aa, Bacillus sp.
NGTMMQYFEWYLPNDGNHWNRLNSDASNLKSKGITAVWIPPAWKATSQNDVGYGAYDLYDLGEFNQKGTVRTKYGTRSQLQAAVTSLKNNGIQVYGDVVMNHKGGADATEMVRAVEVNPNNRNQEVTGEYTIEAWTRFDFPGRGNTHSSFKWRWYHFDGVDWDQSRELSNRIYKFRGHGKAWDWEVDTEFGNYDYLMYADYDMDHPEVVNELRNWGVWYTNTLGLDGFRIDAVKHIKYSFTRDWINHVRSATGKNMFAVAEFWKNDLGAIENYLQKTNWNHSVFDVPLHYNLYNASKSGGNYDMRNIFNGTVVQRHPSHAVTFVDNHDSQPEEALESFVEEWFKPLAYALTLTREQGYPSVFYGDYYGIPTHGVPAMRSKIDPILEARQKYAYGPQHDYLDHPDVIGWTREGDSSHPKSGLATLITDGPGGSKRMYAGLKNAGETWYDITGNRSDTVKIGSDGWGEFHVNDGSVSIYVQK

SEQ ID NO: 39774 - protein, 480 aa, Bacillus sp.
NGTMMQYFEWYLPNDGNHWNRLNSDASNLKSKGITAVWIPPAWKGASQNDVGYGAYDLYDLGEFNQKGTVRTKYGTRSQLQAAVTSLKNNGIQVYGDVVMNHKGGADATEMVRAVEVNPNNRNQEVTGEYTIEAWTRFDFPGRGNTHSSFKWRWYHFDGVDWDQSRVLNNRIYKFRGHGKAWDWEVDTEFGNYDYLMYADYDMDHPEVVNELRNWGVWYTNTLGLDGFRIDAVKHIKYSFTRDWINHVRSATGKNMFAVAEFWKNDLGAIENYLQKTNWNHSVFDVPLHYNLYNASKSGGNYDMRNIFNGTVVQRHPSHAVTFVDNHDSQPEEALESFVEEWFKPLAYALTLTREQGYPSVFYGDYYGIPTHGVPAMRSKIDPILEARQKYAYGPQHDYLDHPDVIGWTREGDSSHPKSGLATLITDGPGGSKRMYAGLKNAGETWYDITGNRSDTVKIGSDGWGEFHVNDGSVSIYVQK

SEQ ID NO: 39775 - protein, 480 aa, Synthetic construct
NGTMMQYFEWYLPNDGNHWNRLNSDASNLKSKGITAVWIPPAWKGASQNDVGYGAYDLYDLGEFNQKGTVRTKYGTRSQLQAAVTSLKNNGIQVYGDVVMNHKGGADATEMVRAVEVNPNNRNQEVTGEYTIEAWTRFDFPGRGNTHSSFKWRWYHFDGVDWDQSRRLNNRIYKFRGHGKAWDWEVDTENGNYDYLMYADIDMDHPEVVNELRNWGVWYTNTLGLDGFRIDAVKHIKYSFTRDWINHVRSATGKNMFAVAEFWKNDLGAIENYLQKTNWNHSVFDVPLHYNLYNASKSGGNYDMRNIFNGTVVQRHPSHAVTFVDNHDSQPEEALESFVEEWFKPLAYALTLTREQGYPSVFYGDYYGIPTHGVPAMRSKIDPILEARQKYAYGPQHDYLDHPDVIGWTREGDSSHPKSGLATLITDGPGGSKRMYAGLKNAGETWYDITGNRSDTVKIGSDGWGEFHVNDGSVSIWVQK

SEQ ID NO: 39776 - protein, 480 aa, Bacillus sp.
NGTMMQYFEWYLPNDGNHWNRLNSDASNLKSKGITAVWIPPAWKAASQNDVGYGAYDLYDLGEFNQKGTVRTKYGTRSQLQAAVTSLKNNGIQVYGDVVMNHKGGADATEMVRAVEVNPNNRNQEVTGEYTIEAWTRFDFPGRGNTHSSFKWRWYHFDGVDWDQSRNLSNRIYKFRGHGKAWDWEVDTEFGNYDYLMYADYDMDHPEVVNELRNWGVWYTNTLGLDGFRIDAVKHIKYSFTRDWINHVRSATGKNMFAVAEFWKNDLGAIENYLQKTNWNHSVFDVPLHYNLYNASKSGGNYDMRNIFNGTVVQRHPSHAVTFVDNHDSQPEEALESFVEEWFKPLAYALTLTREQGYPSVFYGDYYGIPTHGVPAMRSKIDPILEARQKYAYGPQHDYLDHPDVIGWTREGDSSHPKSGLATLITDGPGGSKRMYAGLKNAGETWYDITGNRSDTVKIGSDGWGEFHVNDGSVSIYVQK

SEQ ID NO: 39777 - protein, 480 aa, Synthetic construct
NGTMMQYFEWYLPNDGNHWNRLNSDASNLKSKGITAVWIPPAWKGASQNDVGYGAYDLYDLGEFNQKGTVRTKYGTRSQLQAAVTSLKNNGIQVYGDVVMNHKGGADATEMVRAVEVNPNNRNQEVTGEYTIEAWTRFDFPGRGTTHSSFKWRWYHFDGVDWDQSRRLNNRIYKFRGHGKAWDWEVDTENGNYDYLMYADIDMDHPEVVNELRNWGVWYTNTLGLDGFRIDAVKHIKYSFTRDWINHVRSATGKNMFAVAEFWKNDLGAIENYLQKTNWNHSVFDVPLHYNLYNASKSGGNYDMRNIFNGTVVQRHPSHAVTFVDNHDSQPEEALESFVEEWFKPLAYALTLTREQGYPSVFYGDYYGIPTHGVPAMRSKIDPILEARQKYAYGPQHDYLDHPDVIGWTREGDSSHPKSGLATLITDGPGGSKRMYAGLKNAGETWYDITGNRSDTVKIGSDGWGEFHVNDGSVSIYVQK

SEQ ID NO: 39778 - protein, 480 aa, Bacillus sp.
NGTMMQYFEWYLPNDGNHWNRLNSDASNLKSKGITAVWIPPAWKGASQNDVGYGAYDLYDLGEFNQKGTVRTKYGTRSQLQAAVTSLKNNGIQVYGDVVMNHKGGADATEMVRAVEVNPNNRNQEVTQEYTIEAWTRFDFPGRGNTHSSFKWRWYHFDGVDWDQSRRLNNRIYKFRGHGKAWDWEVDTEFGNYDYLMYADYDMDHPEVVNELRNWGVWYTNTLGLDGFRIDAVKHIKYSFTRDWINHVRSATGKNMFAVAEFWKNDLGAIENYLQKTNWNHSVFDVPLHYNLYNASKSGGNYDMRNIFNGTVVQRHPSHAVTFVDNHDSQPEEALESFVEEWFKPLAYALTLTREQGYPSVFYGDYYGIPTHGVPAMRSKIDPILEARQKYAYGPQHDYLDHPDVIGWTREGDSSHPKSGLATLITDGPGGSKRMYAGLKNAGETWYDITGNRSDTVKIGSDGWGEFHVNDGSVSIYVQK

SEQ ID NO: 39779 - protein, 480 aa, Bacillus sp.
NGTMMQYFEWYLPNDGNHWNRLNSDASNLKSKGITAVWIPPAWKGASQNDVGYGAYDLYDLGEFNQKGTVRTKYGTRSQLQAAVTSLKNNGIQVYGDVVMNHKGGADATEMVRAVEVNPNNRNQEVTGEYTIEAWTRFDFPGRGNTHSSFKWRWYHFDGVDWDQSRRLNNRIYKFRGHGKAWDWEVDTEFGNYDYLMYADYDMDHPEVVNELRNWGVWYTNTLGLDGFRIDAVKHIKYSFTRDWINHVRSATGKNMFAVAEFWKNDLGAIENYLQKTNWNHSVFDVPLHYNLYNASKSGGNYDMRNIFNGTVVQRHPSQAVTFVDNHDSQPEEALESFVEEWFKPLAYALTLTREQGYPSVFYGDYYGIPTHGVPAMRSKIDPILEARQKYAYGPQHDYLDHPDVIGWTREGDSSHPKSGLATLITDGPGGSKRMYAGLKNAGETWYDITGNRSDTVKIGSDGWGEFHVNDGSVSIYVQK

SEQ ID NO: 39780 - protein, 480 aa, Synthetic construct
NGTMMQYFEWYLPNDGNHWNRLNSDASNLKSKGITAVWIPPAWKGASQNDVGYGAYDLYDLGEFNQKGTVRTKYGTRSQLQAAVTSLKNNGIQVYGDVVMNHKGGADATEMVRAVEVNPNNRNQEVTGEYTIEAWTRFDFPGRGNTHSSFKWRWYHFDGVDWDQSRRLNNRIYKFRGHGKAWDWEVDTENGNYDYLMYADIDMDHPEVVNELRNWGVWYTNTLGLDGFRIDAVKHIKYSFTRDWINHVRSATGKNMFAVAEFWKNDLGAIENYLQKTNWNHSVFDVPLHYNLYNASKSGGNYDMRNIFNGTVVQRHPSHAVTFVDNHDSQPEEALESFVEEWFKPLAYALTLTREQGYPSVFYGDYYGIPTHGVPAMRSKIDPILEARQKYAYGPQHDYLDHPDVIGWTREGDSSHPKSGLATLITDGPGGSKRMYAGLKNAGETWYDITGNRSDTVKIGSDGNGEFHVNDGSVSIYVQK

SEQ ID NO: 39781 - protein, 480 aa, Bacillus sp.
NGTMMQYFEWYLPNDGNHWNRLNSDASNLKSKGITAVWIPPAWKGASQNDVGYGAYDLYDLGEFNQKGTVRTKYGTRSQLQAAVTSLKNNGIQVYGDVVMNHKGGADATEMVRAVEVNPNNRNQEVTGEYTIEAWTRFDFPGRGNTHSSFKWRWYHFDGVDWDQSRRLNNRIYKFRGHGKAWDWEVDTEFGNYDYLMYADYDMDHPEVVNELRNWGVWYTNTLGLDGFRIDAVKHIKYSFTRDWINHVRSATGKNMFAVAEFWKNDLGAIENYLQKTNWNHSVFDVPLHYNLYNASKSGGNYDMRNIFNGTVVQRHPSHAVTFVDNHDSQPEEALESFVEEWFKPLAYALTLTREQGYPSVFYGDYYGIPTHGVPAMRSKIDPILAARQKYAYGPQHDYLDHPDVIGWTREGDSSHPKSGLATLITDGPGGSKRMYAGLKNAGETWYDITGNRSDTVKIGSDGWGEFHVNDGSVSIYVQK

SEQ ID NO: 39782 - protein, 480 aa, Bacillus sp.
NGTMMQYFEWYLPNDGNHWNRLNSDASNLKSKGITAVWIPPAWKGASQNDVGYGAYDLYDLGEFNQKGTVRTKYGTRSQLQAAVTSLKNNGIQVYGDVVMNHKGGADATEMVRAVEVNPNNRNQEVTGEYTIEAWTRFDFPGRGNTHSSFKWRWYHFDGVDWDQSRRLNNRIYKFRGHGKAWDWEVDTEFGNYDYLMYADYDMDHPEVVNELRNWGVWYTNTLGLDGFRIDAVKHIKYSFTRDWINHVRSATGKNMFAVAEFWKNDLGAIENYLQKTHWNHSVFDVPLHYNLYNASKSGGNYDMRNIFNGTVVQRHPSHAVTFVDNHDSQPEEALESFVEEWFKPLAYALTLTREQGYPSVFYGDYYGIPTHGVPAMRSKIDPILEARQKYAYGPQHDYLDHPDVIGWTREGDSSHPKSGLATLITDGPGGSKRMYAGLKNAGETWYDITGNRSDTVKIGSDGWGEFHVNDGSVSIYVQK

SEQ ID NO: 39783 - protein, 480 aa, Bacillus sp.
NGTMMQYFEWYLPNDGNHWNRLNSDASNLKSKGITAVWIPPAWKGASQNDVGYGAYDLYDLGEFNQKGTVRTKYGTRSQLQAAVTSLKNNGIQVYGDVVMNHKGGADATEMVRAVEVNPNNRNQEVTGEYTIEAWTRFDFPGRGNTHSSFKWRWYHFDGVDWDQSRQFNNRIYKFRGHGKAWDWEVDTEFGNYDYLMYADYDMDHPEVVNELRNWGVWYTNTLGLDGFRIDAVKHIKYSFTRDWINHVRSATGKNMFAVAEFWKNDLGAIENYLQKTNWNHSVFDVPLHYNLYNASKSGGNYDMRNIFNGTVVQRHPSHAVTFVDNHDSQPEEALESFVEEWFKPLAYALTLTREQGYPSVFYGDYYGIPTHGVPAMRSKIDPILEARQKYAYGPQHDYLDHPDVIGWTREGDSSHPKSGLATLITDGPGGSKRMYAGLKNAGETWYDITGNRSDTVKIGSDGWGEFHVNDGSVSIYVQK

SEQ ID NO: 39784 - protein, 480 aa, Bacillus sp.
NGTMMQYFEWYLPNDGNHWNRLNSDASNLKSKGITAVWIPPAWKGASQNDVGYGAYDLYDLGEFNQKGTVRTKYGTRSQLQAAVTSLKNNGIQVYGDVVMNHKGGADATEMVRAVEVNPNNRNQEVTGEYTIEAWTRFDFPGRGNTHSSFKWRWYHFDGVDFDMSRELSNRIYKFRGHGKAWDWEVDTEFGNYDYLMYADYDMDHPEVVNELRNWGVWYTNTLGLDGFRIDAVKHIKYSFTRDWINHVRSATGKNMFAVAEFWKNDLGAIENYLQKTNWNHSVFDVPLHYNLYNASKSGGNYDMRNIFNGTVVQRHPSHAVTFVDNHDSQPEEALESFVEEWFKPLAYALTLTREQGYPSVFYGDYYGIPTHGVPAMRSKIDPILEARQKYAYGPQHDYLDHPDVIGWTREGDSSHPKSGLATLITDGPGGSKRMYAGLKNAGETWYDITGNRSDTVKIGSDGWGEFHVNDGSVSIYVQK

SEQ ID NO: 39785 - protein, 480 aa, Synthetic construct
NGTMMQYFEWYLPNDGNHWNRLNSDASNLKSKGITAVWIPPAWKGASQNDVGYGAYDLYDLGEFNQKGTVRTKYGTRSQLQAAVTSLKNNGIQVYGDVVMNHKGGADATEMVRAVEVNPNNRNQEVTGEYTIEAWTRFDFPGRGNTHSSFKWRWYHFDGVDWDQSRRTSNRIYKFRGHGKAWDWEVDTEFGNYDYLMYVDYDMDHPEVVNELRNWGVWYTNTLGLDGFRIDAVKHIKYSFTRDWINHVRSATGKNMFAVAEFWKNDLGAIENYLQKTNWNHSVFDVPLHYNLYNASKSGGNYDMRNIFNGTVVQRHPSHAVTFVDNHDSQPEEALESFVEEWFKPLAYALTLTREQGYPSVFYGDYYGIPTHGVPAMRSKIDPILEARQKYAYGPQHDYLDHPDVIGWTREGDSSHPKSGLATLITDGPGGSKRMYAGLKNAGETWYDITGNRSDTVKIGSDGWGEFHVNDGSVSIYVQK

SEQ ID NO: 39786 - protein, 480 aa, Synthetic construct
NGTMMQYFEWYLPNDGNHWNRLNSDASNLKSKGITAVWIPPAWKGASQNDVGYGAYDLYDLGEFNQKGTVRTKYGTRSQLQAAVTSLKNNGIQVYGDVVMNHKGGADATEMVRAVEVNPNNRNQEVTGEYTIEAWTRFDFPGRGNTHSSFKWRWYHFDGVDWDQSRRLNNRIYKFRGHGKAWDWEVDTEFGNYDYLMYADYDMDHPEVVNELRNWGVWYTNTLGLDGFRIDAVKHIKYSFTRDWINHVRSATGKNMFAVAEFWMNDLGAIENYLQKTNWNHSVFDVPLHYNLYNASKSGGNYDMRNIFNGTVVQRHPSHAVTFVDNHDSQPEEALESFVEEWFKPLAYALTLTREQGYPSVFYGDYYGIPTHGVPAMRSKIDPILEARQKYAYGPQHDYLDHPDVIGWTREGDSSHPKSGLATLITDGPGGSKRMYAGLKNAGETWYDITGNRSDTVKIGSDGWGEFHVNDGSVSIYVQK

SEQ ID NO: 39787 - protein, 480 aa, Bacillus sp.
NGTMMQYFEWYLPNDGNHWNRLNSDASNLKSKGITAVWIPPAWKGASQNDVGYGAYDLYDLGEFNQKGTVRTKYGTRSQLQAAVTSLKNNGIQVYGDVVMNHKGGADATEMVRAVEVNPNNRNQEVTGEYTIEAWTRFDFPGRGNTHSSFKWRWYHFDGVDWDQSRQFYNRIYKFRGHGKAWDWEVDTEFGNYDYLMYADYDMDHPEVVNELRNWGVWYTNTLGLDGFRIDAVKHIKYSFTRDWINHVRSATGKNMFAVAEFWKNDLGAIENYLQKTNWNHSVFDVPLHYNLYNASKSGGNYDMRNIFNGTVVQRHPSHAVTFVDNHDSQPEEALESFVEEWFKPLAYALTLTREQGYPSVFYGDYYGIPTHGVPAMRSKIDPILEARQKYAYGPQHDYLDHPDVIGWTREGDSSHPKSGLATLITDGPGGSKRMYAGLKNAGETWYDITGNRSDTVKIGSDGWGEFHVNDGSVSIYVQK

SEQ ID NO: 39788 - protein, 480 aa, Bacillus sp.
NGTMMQYFEWYLPNDGNHWNRLNSDASNLKSKGITAVWIPPAWKGTSQNDVGYGAYDLYDLGEFNQKGTVRTKYGTRSQLQAAVTSLKNNGIQVYGDVVMNHKGGADATEMVRAVEVNPNNRNQEVTGEYTIEAWTRFDFPGRGNTHSSFKWRWYHFDGVDWDQSRDLDNRIYKFRGHGKAWDWEVDTEFGNYDYLMYADYDMDHPEVVNELRNWGVWYTNTLGLDGFRIDAVKHIKYSFTRDWINHVRSATGKNMFAVAEFWKNDLGAIENYLQKTNWNHSVFDVPLHYNLYNASKSGGNYDMRNIFNGTVVQRHPSHAVTFVDNHDSQPEEALESFVEEWFKPLAYALTLTREQGYPSVFYGDYYGIPTHGVPAMRSKIDPILEARQKYAYGPQHDYLDHPDVIGWTREGDSSHPKSGLATLITDGPGGSKRMYAGLKNAGETWYDITGNRSDTVKIGSDGWGEFHVNDGSVSIYVQK

SEQ ID NO: 39789 - protein, 480 aa, Bacillus sp.
NGTMMQYFEWYLPNDGNHWNRLNSDASNLKSKGITAVWIPPAWKGASQNDVGYGAYDLYDLGEFNQKGTVRTKYGTRSQLQAAVTSLKNNGIQVYGDVVMNHKGGADATEMVRAVEVNPNNRNQEVTGEYTIEAWTRFDFPGRGNTHSSFKWRWYHFDGVDWDQSRRLNNRIYKFRGHGKAWDWEVDTEFGNYDYLMYADYDMDHPEVVNELRNWGVWYTNTLGLDGFRIDAVKHIKYSFTRDWINHVRSATGKNMFAVAEFWKNDLGAIENYLRKTNWNHSVFDVPLHYNLYNASKSGGNYDMRNIFNGTVVQRHPSHAVTFVDNHDSQPEEALESFVEEWFKPLAYALTLTREQGYPSVFYGDYYGIPTHGVPAMRSKIDPILEARQKYAYGPQHDYLDHPDVIGWTREGDSSHPKSGLATLITDGPGGSKRMYAGLKNAGETWYDITGNRSDTVKIGSDGWGEFHVNDGSVSIYVQK

SEQ ID NO: 39790 - protein, 480 aa, Synthetic construct
NGTMMQYFEWYLPNDGNHWNRLNSDASNLKSKGITAVWIPPAWKGASQNDVGYGAYDLYDLGEFNQKGTVRTKYGTRSQLQAAVTSLKNNGIQVYGDVVMNHKGGADATEMVRAVEVNPNNRNQEVTGEYTIEAWTRFDFPGRGNTHSSFKWRWYHFDGVDWDQSRRLNNRIYKFRGHGKAWDWEVDTEFGNYDYLMYADYDWDHPEVVNELRNWGVWYTNTLGLDGFRIDAVKHIKYSFTRDWINHVRSATGKNMFAVAEFWKNDLGAIENYLQKTNWNHSVFDVPLHYNLYNASKSGGNYDMRNIFNGTVVQRHPSHAVTFVDNHDSQPEEALESFVEEWFKPLAYALTLTREQGYPSVFYGDYYGIPTHGVPAMRSKIDPILEARQKYAYGPQHDYLDHPDVIGWTREGDSSHPKSGLATLITDGPGGSKRMYAGLKNAGETWYDITGNRSDTVKIGSDGWGEFHVNDGSVSIYVQK

SEQ ID NO: 39791 - protein, 480 aa, Bacillus sp.
NGTMMQYFEWYLPNDGNHWNRLNSDASNLKSKGITAVWIPPAWKAASQNDVGYGAYDLYDLGEFNQKGTVRTKYGTRSQLQAAVTSLKNNGIQVYGDVVMNHKGGADATEMVRAVEVNPNNRNQEVTGEYTIEAWTRFDFPGRGNTHSSFKWRWYHFDGVDWDQSRQLSNRIYKFRGHGKAWDWEVDTEFGNYDYLMYADYDMDHPEVVNELRNWGVWYTNTLGLDGFRIDAVKHIKYSFTRDWINHVRSATGKNMFAVAEFWKNDLGAIENYLQKTNWNHSVFDVPLHYNLYNASKSGGNYDMRNIFNGTVVQRHPSHAVTFVDNHDSQPEEALESFVEEWFKPLAYALTLTREQGYPSVFYGDYYGIPTHGVPAMRSKIDPILEARQKYAYGPQHDYLDHPDVIGWTREGDSSHPKSGLATLITDGPGGSKRMYAGLKNAGETWYDITGNRSDTVKIGSDGWGEFHVNDGSVSIYVQK

SEQ ID NO: 39792 - protein, 480 aa, Synthetic construct
NGTMMQYFEWYLPNDGNHWNRLNSDASNLKSKGITAVWIPPAWKGASQNDVGYGAYDLYDLGEFNQKGTVRTKYGTRSQLQAAVTSLKNNGIQVYGDVVMNHKGGADATEMVRAVEVNPNNRNQEVTGEYTIEAWTRFDFPGRGNTHSSFKWRWYHFDGVDWDQSRPLNNRIYKFRGHGKAWDWEVDTEFGNYDYLMYADYDMDHPEVVNELRNWGVWYTNTLGLDGFRIDAVKHIKYSFTRDWINHVRSATGKNMFAVAEFWKNDLGAIENYLQKTNWNHSVFDVPLHYNLYNASKSGGNYDMRNIFNGTVVQRHPSHAVTFVDNHDSQPEEALESFVEEWFKPLAYALTLTREQGYPSVFYGDYYGIPTHGVPAMRSKIDPILEARQKYAYGPQHDYLDHPDVIGWTREGDSSHPKSGLATLITDGPGGSKRMYAGLKNAGETWYDITGNRSDTVKIGSDGWGEFHVNDGSVSIYVQK

SEQ ID NO: 39793 - protein, 480 aa, Synthetic construct
NGTMMQYFEWYLPNDGNHWNRLNSDASNLKSKGITAVWIPPAWKGASQNDVGYGAYNLYDLGEFNQKGTVRTKYGTRSQLQAAVTSLKNNGIQVYGDVVMNHKGGADATEMVRAVEVNPNNRNQEVTGEYTIEAWTRFDFPGRGNTHSSFKWRWYHFDGVDWDQSRRLNNRIYKFRGHGKAWDWEVDTENGNYDYLMYADIDMDHPEVVNELRNWGVWYTNTLGLDGFRIDAVKHIKYSFTRDWINHVRSATGKNMFAVAEFWKNDLGAIENYLQKTNWNHSVFDVPLHYNLYNASKSGGNYDMRNIFNGTVVQRHPSHAVTFVDNHDSQPEEALESFVEEWFKPLAYALTLTREQGYPSVFYGDYYGIPTHGVPAMRSKIDPILEARQKYAYGPQHDYLDHPDVIGWTREGDSSHPKSGLATLITDGPGGSKRMYAGLKNAGETWYDITGNRSDTVKIGSDGWGEFHVNDGSVSIYVQK

SEQ ID NO: 39794 - protein, 480 aa, Bacillus sp.
NGTMMQYFEWYLPNDGNHWNRLNSDASNLKSKGITAVWIPPAWKGASQNDVGYGAYDLYDLGEFNQKGTVRTKYGTRSQLQAAVTSLKNNGIQVYGDVVMNHKGGADATEMVSAVEVNPNNRNQEVTGEYTIEAWTRFDFPGRGNTHSSFKWRWYHFDGVDWDQSRRLNNRIYKFRGHGKAWDWEVDTEFGNYDYLMYADYDMDHPEVVNELRNWGVWYTNTLGLDGFRIDAVKHIKYSFTRDWINHVRSATGKNMFAVAEFWKNDLGAIENYLQKTNWNHSVFDVPLHYNLYNASKSGGNYDMRNIFNGTVVQRHPSHAVTFVDNHDSQPEEALESFVEEWFKPLAYALTLTREQGYPSVFYGDYYGIPTHGVPAMRSKIDPILEARQKYAYGPQHDYLDHPDVIGWTREGDSSHPKSGLATLITDGPGGSKRMYAGLKNAGETWYDITGNRSDTVKIGSDGWGEFHVNDGSVSIYVQK

SEQ ID NO: 39795 - protein, 480 aa, Bacillus sp.
NGTMMQYFEWYLPNDGNHWNRLDSDASNLKSKGITAVWIPPAWKGASQNDVGYGAYDLYDLGEFNQKGTVRTKYGTRSQLQAAVTSLKNNGIQVYGDVVMNHKSGADATEMVRPVEVNPNNRNQEVTGEYTIEAWTRFDFPGRGNTHSSFKWRWYHFDGVDWDQSRDVSNRIYKFRGHGKAWDWEVDTEFGNYDYLMYADYDMDHPEVVNELRNWGVWYTNTLGLDGFRIDAVKHIKYSFTRDWINHVRSATGKNMFAVAEFWKNDLGAIENYLQKTNWNHSVFDVPLHYNLYNASKSGGNYDMRNIFNGTVVQRHPSHAVTFVDNHDSQPEEALESFVEEWFKPLAYALTLTREQGYPSVFYGDYYGIPTHGVPAMRSKIDPILEARQKYAYGPQHDYLDHPDVIGWTREGDSSHPKSGLATLITDGPGGSKRMYAGLKNAGETWYDITGNRSDTVKIGSDGWGEFHVNDGSVSIYVQK

SEQ ID NO: 39796 - protein, 480 aa, Bacillus sp.
NGTMMQYFEWYLPNDGNHWNRLNSDASNLKSKGITAVWIPPAWKGASQNDVGYGAYDLYDLGEFNQKGTVRTKYGTRSQLQAAVTSLKNNGIQVYGDVVMNHKGGADATEMVRAVEVNPNNRNQEVTGEYTIEAWTRFDFPGRGNTHSSFKWRWYHFDGVDWDQSRRLNNRIYKFRGHGKAWDWEVDTEFGNYDYLMYADYDMDHPEVVNELRNWGVWYTNTLGLDGFRIDAVKHIKYSFTRDWINHVRSATGKNMFAVAEFWGNDLGAIENYLQKTNWNHSVFDVPLHYNLYNASKSGGNYDMRNIFNGTVVQRHPSHAVTFVDNHDSQPEEALESFVEEWFKPLAYALTLTREQGYPSVFYGDYYGIPTHGVPAMRSKIDPILEARQKYAYGPQHDYLDHPDVIGWTREGDSSHPKSGLATLITDGPGGSKRMYAGLKNAGETWYDITGNRSDTVKIGSDGWGEFHVNDGSVSIYVQK

SEQ ID NO: 39797 - protein, 480 aa, Bacillus sp.
NGTMMQYFEWYLPNDGNHWNRLNSDASNLKSKGITAVWIPPAWKGASQNDVGYGAYDLYDLGEFNQKGTVRTKYGTRSQLQAAVTSLKNNGIQVYGDVVMNHKGGADATEMVRAVEVNPNNRNQEVTGEYTIEAWTRFDFPGRGNTHSSFKWRWYHFDGVDWDQSRRLNNRIYKFRGHGKAWDWEVDMEFGNYDYLMYADYDMDHPEVVNELRNWGVWYTNTLGLDGFRIDAVKHIKYSFTRDWINHVRSATGKNMFAVAEFWKNDLGAIENYLQKTNWNHSVFDVPLHYNLYNASKSGGNYDMRNIFNGTVVQRHPSHAVTFVDNHDSQPEEALESFVEEWFKPLAYALTLTREQGYPSVFYGDYYGIPTHGVPAMRSKIDPILEARQKYAYGPQHDYLDHPDVIGWTREGDSSHPKSGLATLITDGPGGSKRMYAGLKNAGETWYDITGNRSDTVKIGSDGWGEFHVNDGSVSIYVQK

SEQ ID NO: 39798 - protein, 480 aa, Synthetic construct
NGTMMQYFEWYLPNDGNHWNRLNSDASNLKSKGITAVWIPPAWKGASQNDVGYGAYDLYDLGEFNQKGTVRTKYGTRSQLQAAVTSLKNNGIQVYGDVVMNHKGGADATEMVRAVEVNPNNRNQEVTGEYTIEAWTRFDFPGRGNTHSSFKWRWYHFDGVDWDQSRRLNNRIYKFRGHGKAWDWEVDTENGNYDYLMYADIDMDHPEVVNELRNWGVWYTNTLGLDGFRIDAVKHIKYSFTRDWINHVRSATGKNMFAVAEFWKNDLGAIENYLQKTNWNHSVFDVPLHYNLYNASKSGGNYDMRNIFNGTVVQRHPSHAVTFVDNHDSQPEEALESFVEEWFKPLAYALTLTREQGYPSVFYGDYYGIPTHGVPAMRSKIDPILEARQKYAYGPQHDYLDHPDIIGWTREGDSSHPKSGLATLITDGPGGSKRMYAGLKNAGETWYDITGNRSDTVKIGSDGWGEFHVNDGSVSIYVQK

SEQ ID NO: 39799 - protein, 480 aa, Bacillus sp.
NGTMMQYFEWYLPNDGNHWNRLNSDASNLKSKGITAVWIPPAWKGASQNDVGYGAYDLYDLGEFNQKGTVRTKYGTRSQLQAAVTSLKNNGIQVYGDVVMNHKGGADATEMVRAVEVNPNNRNQEVTGEYTIEAWTRFDFPGRGNTHSSFKWRWYHFDGVDWDQSRMLNNRIYKFRGHGKAWDWEVDTEFGNYDYLMYADYDMDHPEVVNELRNWGVWYTNTLGLDGFRIDAVKHIKYSFTRDWINHVRSATGKNMFAVAEFWKNDLGAIENYLQKTNWNHSVFDVPLHYNLYNASKSGGNYDMRNIFNGTVVQRHPSHAVTFVDNHDSQPEEALESFVEEWFKPLAYALTLTREQGYPSVFYGDYYGIPTHGVPAMRSKIDPILEARQKYAYGPQHDYLDHPDVIGWTREGDSSHPKSGLATLITDGPGGSKRMYAGLKNAGETWYDITGNRSDTVKIGSDGWGEFHVNDGSVSIYVQK

SEQ ID NO: 39800 - protein, 480 aa, Bacillus sp.
NGTMMQYFEWYLPNDGNHWNRLNSDASNLKSKGITAVWIPPAWKGASQNDVGYGAYDLYDLGEFNQKGTVRTKYGTRSQLQAAVTSLKNNGIQVYGDVVMNHKGGADATEMVRAVEVNPNNRNQEVTGEYTIEAWTRFDFPGRGNTHSSFKWRWYHFDGVDWDQSRKVSNRIYKFRGHGKAWDWEVDTEFGNYDYLMYTDYDMDHPEVVNELRNWGVWYTNTLGLDGFRIDAVKHIKYSFTRDWINHVRSATGKNMFAVAEFWKNDLGAIENYLQKTNWNHSVFDVPLHYNLYNASKSGGNYDMRNIFNGTVVQRHPSHAVTFVDNHDSQPEEALESFVEEWFKPLAYALTLTREQGYPSVFYGDYYGIPTHGVPAMRSKIDPILEARQKYAYGPQHDYLDHPDVIGWTREGDSSHPKSGLATFITDGPGGSKRMYAGLKNAGETWYDITGNRSDTVKIGSDGWGEFHVNDGSVSIYVQK

SEQ ID NO: 39801 - protein, 480 aa, Bacillus sp.
NGTMMQYFEWYLPNDGNHWNRLNSDASNLKSKGITAVWIPPAWKGASQNDVGYGAYDLYDLGEFNQKGTVRTKYGTRSQLQDAVTSLKNNGIQVYGDVVMNHKGGADATEMVRAVEVNPNNRNQEVTGEYTIEAWTRFDFPGRGNTHSSFKWRWYHFDGVDWDQSRRLNNRIYKFRGHGKAWDWEVDTEFGNYDYLMYADYDMDHPEVVNELRNWGVWYTNTLGLDGFRIDAVKHIKYSFTRDWINHVRSATGKNMFAVAEFWKNDLGAIENYLQKTNWNHSVFDVPLHYNLYNASKSGGNYDMRNIFNGTVVQSHPMHAVTFVDNHDSQPEEALESFVEEWFKPLAYALTLTREQGYPSVFYGDYYGIPTHGVPAMRSKIDPILEARQKYAYGPQHDYLDHPDVIGWTREGDSSHPKSGLATLITDGPGGSKRMYAGLKNAGETWYDITGNRSDTVKIGSDGWGEFHVNDGSVSIYVQK

SEQ ID NO: 39802 - protein, 480 aa, Bacillus sp.
NGTMMQYFEWYLPNDGNHWNRLNSDASNLKSKGITAVWIPPAWKGASQNDVGYGAYDLYDLGEFNQKGTVRTKYGTRSQLQAAVTSLKNNGIQVYGDVVMNHKGGADATEMVRAVEVNPNNRNQEVTGEYTIEAWTRFDFPGRGNTHSSFKWRWYHFDGVDWDQSRRLNNRIYKFRGHGKAWDWEVDTEFGNYDYLMYADYDMDHPEVVNELRNWGVWYTNTLGLDGFRIDAVKHIKYSFTRDWINHVRNATGKNMFAVAEFWKNDLGAIENYLQKTNWNHSVFDVPLHYNLYNASKSGGNYDMRNIFNGTVVQRHPSHAVTFVDNHDSQPEEALESFVEEWFKPLAYALTLTREQGYPSVFYGDYYGIPTHGVPAMRSKIDPILEARQKYAYGPQHDYLDHPDVIGWTREGDSSHPKSGLATLITDGPGGSKRMYAGLKNAGETWYDITGNRSDTVKIGSDGWGEFHVNDGSVSIYVQK

SEQ ID NO: 39803 - protein, 480 aa, Bacillus sp.
NGTMMQYFEWYLPNDGNHWNRLNSDASNLKSKGITAVWIPPAWKGASQNDVGYGAYDLYDLGEFNQKGTVRTKYGTRSQLQAAVTSLKNNGIQVYGDVVMNHKGGADATEMVRAVEVNPNNRNQEVTGEYTIEAWTRFDFPGRGNTHSSFKWRWYHFDGVDWDQSRDFNNRIYKFRGHGKAWDWEVDTEFGNYDYLMYADYDMDHPEVVNELRNWGVWYTNTLGLDGFRIDAVKHIKYSFTRDWINHVRSATGKNMFAVAEFWKNDLGAIENYLQKTNWNHSVFDVPLHYNLYNASKSGGNYDMRNIFNGTVVQRHPSHAVTFVDNHDSQPEEALESFVEEWFKPLAYALTLTREQGYPSVFYGDYYGIPTHGVPAMRSKIDPILEARQKYAYGPQHDYLDHPDVIGWTREGDSSHPKSGLATLITDGPGGSKRMYAGLKNAGETWYDITGNRSDTVKIGSDGWGEFHVNDGSVSIYVQK

SEQ ID NO: 39804 - protein, 480 aa, Bacillus sp.
NGTMMQYFEWYLPNDGNHWNRLNSDASNLKSKGITAVWIPPAWKGPSQNDVGYGAYDLYDLGEFNQKGTVRTKYGTRSQLQAAVTSLKNNGIQVYGDVVMNHKGGADATEMVRAVEVNPNNRNQEVTGEYTIEAWTRFDFPGRGNTHSSFKWRWYHFDGVDWDQSRQLDNRIYKFRGHGKAWDWEVDTEFGNYDYLMYADYDMDHPEVVNELRNWGVWYTNTLGLDGFRIDAVKHIKYSFTRDWINHVRSATGKNMFAVAEFWKNDLGAIENYLQKTNWNHSVFDVPLHYNLYNASKSGGNYDMRNIFNGTVVQRHPSHAVTFVDNHDSQPEEALESFVEEWFKPLAYALTLTREQGYPSVFYGDYYGIPTHGVPAMRSKIDPILEARQKYAYGPQHDYLDHPDVIGWTREGDSSHPKSGLATLITDGPGGSKRMYAGLKNAGETWYDITGNRSDTVKIGSDGWGEFHVNDGSVSIYVQK

SEQ ID NO: 39805 - protein, 480 aa, Synthetic construct
NGTMMQYFEWYLPNDGNHWNRLNSDASNLKSKGITAVWIPPAWKGASQNDVGYGAYDLYDLGEFNQKGTVRTKYGTRSQLQAAVTSLKNNGIQVYGDVVMNHKGGADATEMVRAVEVNPNNRNQEVTGEYTIEAWTRFDFPGRGNTHSSFKWRWYHFDGVDWDQSRRLNNRIYKFRGHGKAWDWEVDTEFGNYDYLMYADYDMDHPEVVNELRNWGVWYTNTLGLDGFRIDAVKHIKYSFTRDWINHVRSATGKNMFAVAEFWKNDLGAIENYLQKTNWNHSVFDVPLHYNLYNASKSGGNYDMRNIFNGTVVQRHPSWAVTFVDNHDSQPEEALESFVEEWFKPLAYALTLTREQGYPSVFYGDYYGIPTHGVPAMRSKIDPILEARQKYAYGPQHDYLDHPDVIGWTREGDSSHPKSGLATLITDGPGGSKRMYAGLKNAGETWYDITGNRSDTVKIGSDGWGEFHVNDGSVSIYVQK

SEQ ID NO: 39806 - protein, 480 aa, Bacillus sp.
NGTMMQYFEWYLPNDGNHWNRLNSDASNLKSKGITAVWIPPAWKGASQNDVGYGAYDLYDLGEFNQKGTVRTKYGTRSQLQAAVTSLKNNGIQVYGDVVMNHKGGADATEMVRAVEVNPNNRNQEVTGEYTIEAWTRFDFPGRGNTHSSFKWRWYHFDGVDWDQSRRLNNRIYKFRGHGKAWDWEVDTEFGNYDYLMYADYDMDHPEVVNELRNWGVWYTNTLGLDGFRIDAVKHIKYSFTRDWINHVRSATGKNMFAVAEFWKNDLGAIENYLQKTNWNHSVFDVPLHYNLYNASKSGGNYDMRNIFNGTVVQRHPSHAVTFVDNHDSQPEEALESFVEEWFKPLAYALTLTREQGYPSVFYGDYYGIPTHGVPAMRSKIDPILEARQKYAYGPQHDYLDHPDVIGWTREGDSSHPKSGLATLITDGPGGSKRMYAGLKNAGETWYDITGNRSDTVKIGSDGWGEFHVNDGSVSIYVQK

SEQ ID NO: 39807 - protein, 480 aa, Bacillus sp.
NGTMMQYFEWYLPNDGNHWNRLNSDASNLKSKGITAVWIPPAWKGASQNDVGYGAYDLYDLGEFNQKGTVRTKYGTRSQLQAAVTSLKNNGIQVYGDVVMNHKGGADATEMVRAVEVNPNNRNQEVTGEYTIEAWTRFDFPGRGNTHSSFKWRWYHFDGVDWDQSRRLNNRIYKFRGHGKAWDWEVDTEFGNYDYLMYADYDMDHPEVVNELRNWGVWYTNTLGLDGFRIDAVKHIKPSFTRDWINHVRSATGKNMFAVAEFWKNDLGAIENYLQKTNWNHSVFDVPLHYNLYNASKSGGNYDMRNIFNGTVVQRHPSHAVTFVDNHDSQPEEALESFVEEWFKPLAYALTLTREQGYPSVFYGDYYGIPTHGVPAMRSKIDPILEARQKYAYGPQHDYLDHPDVIGWTREGDSSHPKSGLATLITDGPGGSKRMYAGLKNAGETWYDITGNRSDTVKIGSDGWGEFHVNDGSVSIYVQK

SEQ ID NO: 39808 - protein, 480 aa, Synthetic construct
NGTMMQYFEWYLPNDGNHWNRLNSDASNLKSKGITAVWIPPAWKGASQNDVGYGAYDLYDLGEFNQKGTVRTKYGTRSQLQAAVTSLKNNGIQVYGDVVMNHKGGADATEMVRAVEVNPNNRNQEVTGEYTIEAWTRFDFPGRGNTHSSFKWRWYHFDGVDWDQSRRLNNRIYKFRGHGKAWDWEVDTENGNYDYLMYADIDMDHPEVVNELRNWGVWYTNTLGLDGFRIDAVKHIKYSFTRDWINHVRSATGKNMFAVAEFWKNDLGAIENYLQKTNWNHSVFDVPLHYNLYNASKSGGNYDMRNIFNGTVVQRHPSHAVTFVDNHDSQPEEALESFVEEWFKPLAYALTLTREQGYPSVFYGDYYGIPTHGVPAMRSKIDPILEARQKYAYGPQHDYLDHHDVIGWTREGDSSHPKSGLATLITDGPGGSKRMYAGLKNAGETWYDITGNRSDTVKIGSDGWGEFHVNDGSVSIYVQK

SEQ ID NO: 39809 - protein, 480 aa, Synthetic construct
NGTMMQYFEWYLPNDGNHWNRLNSDASNLKSKGITAVWIPPAWKGASQNDVGYGAYDLYDLGEFNQKGTVRTKYGTRSQLQAAVTSLKNNGIQVYGDVVMNHKGGADATEMVRAVEVNPNNRNQEVTGEYTIEAWTRFDFPGRGNTHSSFKWRWYHFDGVDWDQSRRLNNRIYKFRGHGKAWDWEVDTEFGNYDYLMYADYDMDHPEVVNELRNWGVWYTNTLGLDGFRIDAVKHIKYSFTRDWINHVRSATGKNMFAVAEFWKNDLGAIENYLQKTNWNHSVFDVPLHYNLYNASKSGGNYDMREIFNGTVVQRHPSHAVTFVDNHDSQPEEALESFVEEWFKPLAYALTLTREQGYPSVFYGDYYGIPTHGVPAMRSKIDPILEARQKYAYGPQHDYLDHPDVIGWTREGDSSHPKSGLATLITDGPGGSKRMYAGLKNAGETWYDITGNRSDTVKIGSDGWGEFHVNDGSVSIYVQK

SEQ ID NO: 39810 - protein, 480 aa, Bacillus sp.
NGTMMQYFEWYLPNDGNHWNRLNSDASNLKSKGITAVWIPPAWKGASQNDVGYGAYDLYDLGEFNQKGTVRTKYGTRSQLQAAVTSLKNNGIQVYGDVVMNHKGGADATEMVRAVEVNPNNRNQEVTGEYTIEAWTRFDFPGRGNTHSSFKWRWYHFDGVDWDQSRRLNNRIYKFRGHGKAWDWEVDTEFGNYDYLMYADYDMDHPEVVNELRGWGVWYTNTLGLDGFRIDAVKHIKYSFTRDWINHVRSATGKNMFAVAEFWKNDLGAIENYLQKTNWNHSVFDVPLHYNLYNASKSGGNYDMRNIFNGTVVQRHPSHAVTFVDNHDSQPEEALESFVEEWFKPLAYALTLTREQGYPSVFYGDYYGIPTHGVPAMRSKIDPILEARQKYAYGPQHDYLDHPDVIGWTREGDSSHPKSGLATLITDGPGGSKRMYAGLKNAGETWYDITGNRSDTVKIGSDGWGEFHVNDGSVSIYVQK

SEQ ID NO: 39811 - protein, 480 aa, Bacillus sp.
NGTMMQYFEWYLPNDGNHWNRLNSDASNLKSKGITAVWIPPAWKGASQNDVGYGAYDLYDLGEFNQKGTVRTKYGTRSQLQAAVTSLKNNGIQVYGDVVMNHKGGADATEMVRAVEVNPNNRNQEVTGEYTIEAWTRFDFPGRGNTHSSFKWRWYHFDGVDWDQSRRLNNRIYKFRGHGKAWDWEVDTEFGNYDYLMYADYDMDHPEVVNELRNWGVWYTNTLGLDGFRIDAVKHIKYSFTRDWINHVRSATGKNMFAVAEFWKNDLGAIENYLQKTNWNHSVFDVPLHYNLYNASKSGGNYDMRNIFNGTVVQRHPSHAVTFVANHDSQPEEALESFVEEWFKPLAYALTLTREQGYPSVFYGDYYGIPTHGVPAMRSKIDPILEARQKYAYGPQHDYLDHPDVIGWTREGDSSHPKSGLATLITDGPGGSKRMYAGLKNAGETWYDITGNRSDTVKIGSDGWGEFHVNDGSVSIYVQK

SEQ ID NO: 39812 - protein, 480 aa, Bacillus sp.
NGTMMQYFEWYLPNDGNHWNRLNSDASNLKSKGITAVWIPPAWKGASQNDVGYGAYDLYDLGEFNQKGTVRTKYGTRSQLQAAVTSLKNNGIQVYGDVVMNHKGGADATEMVRAVEVNPNNRNQEVTGEYTIEAWTRFDFPGRGNTHSSFKWRWYHFDGVDWDQSRRLNNRIYKFRGHGKAWDWEVDTEFGNYDYLMYADYDMDHPEVVNELRNWGVWYTNTLGLDGFRIDAVKHIKTSFTRDWINHVRSATGKNMFAVAEFWKNDLGAIENYLQKTNWNHSVFDVPLHYNLYNASKSGGNYDMRNIFNGTVVQRHPSHAVTFVDNHDSQPEEALESFVEEWFKPLAYALTLTREQGYPSVFYGDYYGIPTHGVPAMRSKIDPILEARQKYAYGPQHDYLDHPDVIGWTREGDSSHPKSGLATLITDGPGGSKRMYAGLKNAGETWYDITGNRSDTVKIGSDGWGEFHVNDGSVSIYVQK

SEQ ID NO: 39813 - protein, 480 aa, Synthetic construct
NGTMMQYFEWYLPNDGNHWNRLNSDASNLKSKGITAVWIPPAWKGASQNDVGYGAYDLYDLGEFNQKGTVRTKYGTRSQLQAAVTSLKNNGIQVYGDVVMNHKGGADATEMVRAVEVNPNNRNQEVTGEYTIEAWTRFDFPGRGNTHSSFKWRWYHFDGVDWDQSRRLNNRIYKFRGHGKAWDWEVDTENGNYDYLMYADIDMDHPEVANELRNWGVWYTNTLGLDGFRIDAVKHIKYSFTRDWINHVRSATGKNMFAVAEFWKNDLGAIENYLQKTNWNHSVFDVPLHYNLYNASKSGGNYDMRNIFNGTVVQRHPSHAVTFVDNHDSQPEEALESFVEEWFKPLAYALTLTREQGYPSVFYGDYYGIPTHGVPAMRSKIDPILEARQKYAYGPQHDYLDHPDVIGWTREGDSSHPKSGLATLITDGPGGSKRMYAGLKNAGETWYDITGNRSDTVKIGSDGWGEFHVNDGSVSIYVQK

SEQ ID NO: 39814 - protein, 480 aa, Synthetic construct
NGTMMQYFEWYLPNDGNHWNRLNSDASNLKSKGITAVWIPPAWKGASQNDVGYGAYDLYDLGEFNQKGTVRTKYGTRSQLQAAVTSLKNNGIQVYGDVVMNHKGGADATEMVRAVEVNPNNRNQEVTGEYTIEAWTRFDFPGRGNTHSSFKWRWYHFDGVDWDQSRRLNNRIYKFRGHGKAWDWEVDTEFGNYDYLMYADYDMDHPEVVNELRNWGVWYTNTLGLDGFRIDAVKHIKYSFTRDWINHVRSATGKNMFAVAEFWKNDLGAIENYLQKTNWNHSVFDVPLHYNLYKASKSGGNYDMRNIFNGTVVQRHPSHAVTFVDNHDSQPEEALESFVEEWFKPLAYALTLTREQGYPSVFYGDYYGIPTHGVPAMRSKIDPILEARQKYAYGPQHDYLDHPDVIGWTREGDSSHPKSGLATLITDGPGGSKRMYAGLKNAGETWYDITGNRSDTVKIGSDGWGEFHVNDGSVSIYVQK

SEQ ID NO: 39815 - protein, 480 aa, Bacillus sp.
NGTMMQYFEWYLPNDGNHWNRLNSDASNLKSKGITAVWIPPAWKGASQNDVGYGAYDLYDLGEFNQKGTVRTKYGTRSQLQAAVTSLKNNGIQVYGDVVMNHKGGADATEMVRAVEVNPNNRNQEVTGEYTIEAWTRFDFPGRGNTHSSFKWRWYHFDGVDWDQSRRLNNRIYKFRGHGKAWDWEVDTEFGNYDYLMYADYDMDHPEVVNELRNWGVWYTNTLGLDGFRIDAVKHIKYSFTRDWINHVRSATGKNMFAVAEFWNNDLGMIENYLQKTNWNHSVFDVPLHYNLYNASKSGGNYDMRNIFNGTVVQRHPSHAVTFVDNHDSQPEEALESFVEEWFKPLAYALTLTREQGYPSVFYGDYYGIPTHGVPAMRSKIDPILEARQKYAYGPQHDYLDHPDVIGWTREGDSSHPKSGLATLITDGPGGSKRMYAGLKNAGETWYDITGNRSDTVKIGSDGWGEFHVNDGSVSIYVQK

SEQ ID NO: 39816 - protein, 480 aa, Bacillus sp.
NGTMMQYFEWYLPNDGNHWNRLNSDASNLKSKGITAVWIPPAWKGASQNDVGYGAYDLYDLGEFNQKGTVRTKYGTRSQLQAAVTSLKNNGIQVYGDVVMNHKGGADATEMVRAVEVNPNNRNQEVTGEYTIEAWTRFDFPGRGNTHSSFKWRWYHFDGVDWDQSRTLNNRIYKFRGHGKAWDWEVDTEFGNYDYLMYADYDMDHPEVVNELRNWGVWYTNTLGLDGFRIDAVKHIKYSFTRDWINHVRSATGKNMFAVAEFWKNDLGAIENYLQKTNWNHSVFDVPLHYNLYNASKSGGNYDMRNIFNGTVVQRHPSHAVTFVDNHDSQPEEALESFVEEWFKPLAYALTLTREQGYPSVFYGDYYGIPTHGVPAMRSKIDPILEARQKYAYGPQHDYLDHPDVIGWTREGDSSHPKSGLATLITDGPGGSKRMYAGLKNAGETWYDITGNRSDTVKIGSDGWGEFHVNDGSVSIYVQK

SEQ ID NO: 39817 - protein, 480 aa, Synthetic construct
NGTMMQYFEWYLPNDGNHWNRLNSDASNLKSKGITAVWIPPAWKGASQNDVGYGAYDLYDLGEFNQKGTVRTKYGTRSQLQAAVTSLKNNGIQVYGDVVMNHKGGADATEMVRAVEVNPNNRNQEVTGEYTIEAWTRFDFPGRGNTHSSFKWRWYHFDGVDWDQSRRLNNRIYKFRGHGKAWDWEVDTEFGNYDYLMYADYDMDHPEVVNELRNWGVWYTNTLGLDGFRIDAVKHIKYSFTRDWINHVRSATGKNMFAVAEFWLNDLGRIENYLQKTNWNHSVFDVPLHYNLYNASKSGGNYDMRNIFNGTVVQRHPSHAVTFVDNHDSQPEEALESFVEEWFKPLAYALTLTREQGYPSVFYGDYYGIPTHGVPAMRSKIDPILEARQKYAYGPQHDYLDHPDVIGWTREGDSSHPKSGLATLITDGPGGSKRMYAGLKNAGETWYDITGNRSDTVKIGSDGWGEFHVNDGSVSIYVQK

SEQ ID NO: 39818 - protein, 480 aa, Bacillus sp.
NGTMMQYFEWYLPNDGNHWNRLNSDASNLKSKGITAVWIPPAWKGASQNDVGYGAYDLYDLGEFNQKGTVRTKYGTRSQLQAAVTSLKNNGIQVYGDVVMNHKGGADATEMVRAVEVNPNNRNQEVTGEYTIEAWTRFDFPGRGNTHSSFKWRWYHFDGVDWDQSRRLNNRIYKFRGHGKAWDWEVDTEFGNYDYLMYADYDMDHPEVVNELRNWGVWYTNTLGLDGFRIDAVKHIKYSFTRDWINHVRIATGKNMFAVAEFWKNDLGAIENYLQKTNWNHSVFDVPLHYNLYNASKSGGNYDMRNIFNGTVVQRHPSHAVTFVDNHDSQPEEALESFVEEWFKPLAYALTLTREQGYPSVFYGDYYGIPTHGVPAMRSKIDPILEARQKYAYGPQHDYLDHPDVIGWTREGDSSHPKSGLATLITDGPGGSKRMYAGLKNAGETWYDITGNRSDTVKIGSDGWGEFHVNDGSVSIYVQK

SEQ ID NO: 39819 - protein, 480 aa, Bacillus sp.
NGTMMQYFEWYLPNDGNHWNRLNSDASNLKSKGITAVWIPPAWKGASQNDVGYGAYDLYDLGEFNQKGTVRTKYGTRSQLQAAVTSLKNNGIQVYGDVVMNHKGGADATEMVRAVEVNPNNRNQEVTGEYTIEAWTTFDFPGRGNTHSSFKWRWYHFDGVDWDQSRRLNNRIYKFRGHGKAWDWEVDTEFGNYDYLMYADYDMDHPEVVNELRNWGVWYTNTLGLDGFRIDAVKHIKYSFTRDWINHVRSATGKNMFAVAEFWKNDLGAIENYLQKTNWNHSVFDVPLHYNLYNASKSGGNYDMRNIFNGTVVQRHPSHAVTFVDNHDSQPEEALESFVEEWFKPLAYALTLTREQGYPSVFYGDYYGIPTHGVPAMRSKIDPILEARQKYAYGPQHDYLDHPDVIGWTREGDSSHPKSGLATLITDGPGGSKRMYAGLKNAGETWYDITGNRSDTVKIGSDGWGEFHVNDGSVSIYVQK

SEQ ID NO: 39820 - protein, 480 aa, Synthetic construct
NGTMMQYFEWYLPNDGNHWNRLNSDASNLKSKGITAVWIPPAWKGASQNDVGYGAYDLYDLGEFNQKGTVRTKYGTRSQLQAAVTSLKNNGIQVYGDVVMNHKGGADATEMVRAVEVNPNNRNQEVTGEYTIEAWTRFDFPGRGNTHSSFKWRWYHFDGVDWDQSRRLNNRIYKFRGHGKAWDWEVDTEFGNYDYLMYADYDSDHPEVVNELRNWGVWYTNTLGLDGFRIDAVKHIKYSFTRDWINHVRSATGKNMFAVAEFWKNDLGAIENYLQKTNWNHSVFDVPLHYNLYNASKSGGNYDMRNIFNGTVVQRHPSHAVTFVDNHDSQPEEALESFVEEWFKPLAYALTLTREQGYPSVFYGDYYGIPTHGVPAMRSKIDPILEARQKYAYGPQHDYLDHPDVIGWTREGDSSHPKSGLATLITDGPGGSKRMYAGLKNAGETWYDITGNRSDTVKIGSDGWGEFHVNDGSVSIYVQK

SEQ ID NO: 39821 - protein, 480 aa, Bacillus sp.
NGTMMQYFEWYLPNDGNHWNRLNSDASNLKSKGITAVWIPPAWKGASQNDVGYGAYDLYDLGEFNQKGTVRTKYGTRSQLQAAVTSLKNNGIQVYGDVVMNHKGGADATEMVRAVEVNPNNRNQEVTGEYTIEAWTRFDFPGRGNTHSSFKWRWYHFDGVDWDQSRQLDNRIYKFRGHGKAWDWEVDTEFGNYDYLMYADYDMDHPEVVNELRNWGVWYTNTLGLDGFRIDAVKHIKYSFTRDWINHVRSATGKNMFAVAEFWKNDLGAIENYLQKTNWNHSVFDVPLHYNLYNASKSGGNYDMRNIFNGTVVQRHPSHAVTFVDNHDSQPEEALESFVEEWFKPLAYALTLTREQGYPSVFYGDYYGIPTHGVPAMRSKIDPILEARQKYAYGPQHDYLDHPDVIGWTREGDSSHPKSGLATLITDGPGGSKRMYAGLKNAGETWYDITGNRSDTVKIGSDGWGEFHVNDGSVSIYVQK

SEQ ID NO: 39822 - protein, 480 aa, Synthetic construct
NGTMMQYFEWYLPNDGNHWNRLNSDASNLKSKGITAVWIPPAWKGASQNDVGYGAYDLYDLGEFNQKGTVRTKYGTRSQLQAAVTSLKNNGIQVYGDVVMNHKGGADATEMVRAVEVNPNNRNQEVTGEYTIEAWTRFDFPGRGNTHSSFKWRWYHFDGVDWDQSRRLNNRIYKFRGHGKAWDWEVDTEFGNYDYLMYADYDMDHPEVVNELRNWGVWYTNTLGLDGFRIDAVKHIKYSFTRDWINHVRSATGKNMFAVAEFWKNDLGAIENYLQKTNWNHSVFDVPLHYNLYNASKSGGNYDMRNIFNGTVVQRHPSHAVTFVDNHDSQPEEALESFVEEWFKPLAYALTLTREQGYPSVFYGDYYGIPTHGVPAMRSKIDPILTARQKYAYGPQHDYLDHPDVIGWTREGDSSHPKSGLATLITDGPGGSKRMYAGLKNAGETWYDITGNRSDTVKIGSDGWGEFHVNDGSVSIYVQK

SEQ ID NO: 39823 - protein, 480 aa, Bacillus sp.
NGTMMQYFEWYLPNDGNHWNRLNSDASNLKSKGITAVWIPPAWKGASQNDVGYGAYDLYDLGEFNQKGTVRTKYGTRSQLQAAVTSLKNNGIQVYGDVVMNHKGGADATEMVRAVEVNPNNRNQEVTGEYTIEAWTRFDFPGRGNTHSSFKWRWYHFDGVDWDQSRDTDNRIYKFRGHGKAWDWEVDTEFGNYDYLMYADYDMDHPEVVNELRNWGVWYTNTLGLDGFRIDAVKHIKYSFTRDWINHVRSATGKNMFAVAEFWKNDLGAIENYLQKTNWNHSVFDVPLHYNLYNASKSGGNYDMRNIFNGTVVQRHPSHAVTFVDNHDSQPEEALESFVEEWFKPLAYALTLTREQGYPSVFYGDYYGIPTHGVPAMRSKIDPILEARQKYAYGPQHDYLDHPDVIGWTREGDSSHPKSGLATLITDGPGGSKRMYAGLKNAGETWYDITGNRSDTVKIGSDGWGEFHVNDGSVSIYVQK

SEQ ID NO: 39824 - protein, 480 aa, Bacillus sp.
NGTMMQYFEWYLPNDGNHWNRLNSDASNLKSKGITAVWIPPAWKGASQNDVGYGAYDLYDLGEFNQKGTVRTKYGTRSQLQAAVTSLKNNGIQVYGDVVMNHKGGADATEMVRAVEVNPNNRNQEVTGEYTIEAWTRFDFPGRGNTHSSFKWRWYHFDGMDWDQSRRLNNRIYKFRGHGKAWDWEVDTEFGNYDYLMYADYDMDHPEVVNELRNWGVWYTNTLGLDGFRIDAVKHIKYSFTRDWINHVRSATGKNMFAVAEFWKNDLGAIENYLQKTNWNHSVFDVPLHYNLYNASKSGGNYDMRNIFNGTVVQRHPSHAVTFVDNHDSQPEEALESFVEEWFKPLAYALTLTREQGYPSVFYGDYYGIPTHGVPAMRSKIDPILEARQKYAYGPQHDYLDHPDVIGWTREGDSSHPKSGLATLITDGPGGSKRMYAGLKNAGETWYDITGNRSDTVKIGSDGWGEFHVNDGSVSIYVQK

SEQ ID NO: 39825 - protein, 480 aa, Bacillus sp.
NGTMMQYFEWYLPNDGNHWNRLNSDASNLKSKGITAVWIPPAWKGASQNDVGYGAYDLYDLGEFNQKGTVRTKYGTRSQLQAAVTSLKNNGIQVYGDVVMNHKGGADATEMVRAVEVNPNNRNQEVTGEYTIEAWTRFDFPGRGNTHSSFKWRWYHFDGVDWDQSRRLNNRIYKFRGHGKAWDWEVDTEFGNYDYLMYADYDMDHPEVVNELRNWGVWYTNTLGLDGFRIDAVKHIKYSFTRDWINHVRSATGKNMFAVAEFWKNDLGAIENYLQKTNWNHSVFDVPLHYNLYNASNSGGNYDMRNIFNGTVVQRHPSHAVTFVDNHDSQPEEALESFVEEWFKPLAYALTLTREQGYPSVFYGDYYGIPTHGVPAMRSKIDPILEARQKYAYGPQHDYLDHPDVIGWTREGDSSHPKSGLATLITDGPGGSKRMYAGLKNAGETWYDITGNRSDTVKIGSDGWGEFHVNDGSVSIYVQK

SEQ ID NO: 39826 - protein, 480 aa, Synthetic construct
NGTMMQYFEWYLPNDGNHWNRLNSDASNLKSKGITAVWIPPAWKGASQNDVGYGAYDLYDLGEFNQKGTVRTKYGTRSQLQAAVTSLKNNGIQVYGDVVMNHKGGADATEMVRAVEVNPNNRNQEVTGEYTIEAWTRFDFPGRGNTHSSFKWRWYHFDGVDWDQSRRLNNRIYKFRGHGKAWDWEVDTENGNYDYLMYADIDMDHPEVVNELRNWGVWYTNTLGLDGFRIDAVKHIKYSFTRDWINHVRSATGKNMFAVAEFWKNDLGAIENYLQKTNWNHSLFDVPLHYNLYNASKSGGNYDMRNIFNGTVVQRHPSHAVTFVDNHDSQPEEALESFVEEWFKPLAYALTLTREQGYPSVFYGDYYGIPTHGVPAMRSKIDPILEARQKYAYGPQHDYLDHPDVIGWTREGDSSHPKSGLATLITDGPGGSKRMYAGLKNAGETWYDITGNRSDTVKIGSDGWGEFHVNDGSVSIYVQK

SEQ ID NO: 39827 - protein, 480 aa, Synthetic construct
NGTMMQYFEWYLPNDGNHWNRLNSDASNLKSKGITAVWIPPAWKGASQNDVGYGAYDLYDLGEFNQKGTVRTKYGTRSQLQAAVTSLKNNGIQVYGDVVMNHKGGADATEMVRAVEVNPNNRNQEVTGEYTIEAWTRFDFPGRGNTHSSFKWRWYHFDGVDWDQSRRLNNRIYKFRGHGKAWDWEVDTENGNYDYLMYADIDMDHPEVVNELRNWGVWYTNTLGLDGFRIDAVKHIKYSFTRDWINHVRSATGKNMFAVAEFWKNDLGAINNYLQKTNWNHSVFDVPLHYNLYNASKSGGNYDMRNIFNGTVVQRHPSHAVTFVDNHDSQPEEALESFVEEWFKPLAYALTLTREQGYPSVFYGDYYGIPTHGVPAMRSKIDPILEARQKYAYGPQHDYLDHPDVIGWTREGDSSHPKSGLATLITDGPGGSKRMYAGLKNAGETWYDITGNRSDTVKIGSDGWGEFHVNDGSVSIYVQK

SEQ ID NO: 39828 - protein, 480 aa, Synthetic construct
NGTMMQYFEWYLPNDGNHWNRLNSDASNLKSKGITAVWIPPAWKGASQNDVGYGAYDLYDLGEFNQKGTVRTKYGTRSQLQAAVTSLKNNGIQVYGDVVMNHKGGADATEMVRAVEVNPNNRNQEVTGEYTIEAWTRFDFPGRGNTHSSFKWRWYHFDGVDWDQSREFNNRIYKFRGHGKAWDWEVDTEFGNYDYLMYADYDMDHPEVVNELRNWGVWYTNTLGLDGFRIDAVKHIKYSFTRDWINHVRSATGKNMFAVAEFWKNDLGAIENYLQKTNWNHSVFDVPLHYNLYNASKSGGNYDMRNIFNGTVVQRHPSHAVTFVDNHDSQPEEALESFVEEWFKPLAYALTLTREQGYPSVFYGDYYGIPTHGVPAMRSKIDPILEARQKYAYGPQHDYLDHPDVIGWTREGDSSHPKSGLATLITDGPGGSKRMYAGLKNAGETWYDITGNRSDTVKIGSDGWGEFHVNDGSVSIYVQK

SEQ ID NO: 39829 - protein, 480 aa, Bacillus sp.
NGTMMQYFEWYLPNDGNHWNRLNSDASNLKSKGITAVWIPPAWKGASQNDVGYGAYDLYDLGEFNQKGTVRTKYGTRSQLQAAVTSLKNNGIQVYGDVVMNHKGGADATEMVRAVEVNPNNRNQEVTGEYTIEAWTRFDFPGRGNTHSSFKWRWYHFDGVDWDQSRKFQNRIYKFRGHGKAWDWEVDTEFGNYDYLMYVDYDMDHPEVVNELRNWGVWYTNTLGLDGFRIDAVKHIKYSFTRDWINHVRSATGKNMFAVAEFWKNDLGAIENYLQKTNWNHSVFDVPLHYNLYNASKSGGNYDMRNIFNGTVVQRHPSHAVTFVDNHDSQPEEALESFVEEWFKPLAYALTLTREQGYPSVFYGDYYGIPTHGVPAMRSKIDPILEARQKYAYGPQHDYLDHPDVIGWTREGDSSHPKSGLATLITDGPGGSKRMYAGLKNAGETWYDITGNRSDTVKIGSDGWGEFHVNDGSVSIYVQK

SEQ ID NO: 39830 - protein, 480 aa, Bacillus sp.
NGTMMQYFEWYLPNDGNHWNRLNSDASNLKSKGITAVWIPPAWKGASQNDVGYGAYDLYDLGEFNQKGTVRTKYGTRSQLQAAVTSLKNNGIQVYGDVVMNHKGGADATEMVRAVEVNPNNRNQEVTGEYTIEAWTRFDFPGRGNTHSSFKWRWYHFDGVDWDQSRRLNNRIYKFRGHGKAWDWEVDTEFGNYDYLMYADYDMDHPEVVNELRNWGVWYTNTLGLDGFRIDAVKHIKYSFTRDWINHVRSATGKNMFAVAEFWKNDLGAIENYLQKTNWNHSVFDVPLHYNLYNASKSGGNYDMRNIFNGTVVQRHPSHAVTFVDNHDSQPEEALESFVETWFKPLAYALTLTREQGYPSVFYGDYYGIPTHGVPAMRSKIDPILEARQKYAYGPQHDYLDHPDVIGWTREGDSSHPKSGLATLITDGPGGSKRMYAGLKNAGETWYDITGNRSDTVKIGSDGWGEFHVNDASVSIYVQK

SEQ ID NO: 39831 - protein, 480 aa, Bacillus sp.
NGTMMQYFEWYLPNDGNHWNRLNSDASNLKSKGITAVWIPPAWKGASQNDVGYGAYDLYDLGEFNQKGTVRTKYGTRSQLQAAVTSLKNNGIQVYGDVVMNHKGGADATEMVRAVEVNPNNRNQEVTGEYTIEAWTRFDFPGRGNTHSSFKWRWYHFDGVDWDQSRRLNNRIYKFRGHGKAWDWEVDTEFGNYDYLMYADYDMDHPEVVNELRNWGVWYTNTLGLDGFRIDAVKHIKYSFTRDWINHVRSATGKNMFAVAEFWKNDLGRIENYLQKTNWNHSVFDVPLHYNLYNASKSGGNYDMRNIFNGTVVQRHPSHAVTFVDNHDSQPEEALESFVEEWFKPLAYALTLTREQGYPSVFYGDYYGIPTHGVPAMRSKIDPILEARQKYAYGPQHDYLDHPDVIGWTREGDSSHPKSGLATLITDGPGGSKRMYAGLKNAGETWYDITGNRSDTVKIGSDGWGEFHVNDGSVSIYVQK

SEQ ID NO: 39832 - protein, 479 aa, Bacillus sp.
NGTMMQYFEWYLPNDGNHWNRLNSDASNLKSKGITAVWIPPAWKGTSQNDVGYGAYDLYDLGEFNQKGTVRTKYGTRSQLQAAVTSLKNNGIQVYGDVVMNHKGGADATEMVRAVEVNPNNRNQEVTGEYTIEAWTRFDFPGRGNTHSSFKWRWYHFDGVDWDQSRNNNRIYKFRGHGKAWDWEVDTEFGNYDYLMYADYDMDHPEVVNELRNWGVWYTNTLGLDGFRIDAVKHIKYSFTRDWINHVRSATGKNMFAVAEFWKNDLGAIENYLQKTNWNHSVFDVPLHYNLYNASKSGGNYDMRNIFNGTVVQRHPSHAVTFVDNHDSQPEEALESFVEEWFKPLAYALTLTREQGYPSVFYGDYYGIPTHGVPAMRSKIDPILEARQKYAYGPQHDYLDHPDVIGWTREGDSSHPKSGLATLITDGPGGSKRMYAGLKNAGETWYDITGNRSDTVKIGSDGWGEFHVNDGSVSIYVQK

SEQ ID NO: 39833 - protein, 480 aa, Synthetic construct
NGTMMQYFEWYLPNDGNHWNRLNSDASNLKSKGITAVWIPPAWKGASQNDVGYGAYDLYDLGEFNQKGTVRTKYGTRSQLQAAVTSLKNNGIQVYGDVVMNHKGGADATEMVRAVEVNPNNRNQEVTGEYTIEAWTRFDFPGRGNTHSSFKWRWYHFDGVDWDQSRQLNNRIYKFRGHGKAWDWEVDTEFGNYDYLMYADYDMDHPEVVNELRNWGVWYTNTLGLDGFRIDAVKHIKYSFTRDWINHVRSATGKNMFAVAEFWKNDLGAIENYLQKTNWNHSVFDVPLHYNLYNASKSGGNYDMRNIFNGTVVQRHPSHAVTFVDNHDSQPEEALESFVEEWFKPLAYALTLTREQGYPSVFYGDYYGIPTHGVPAMRSKIDPILEARQKYAYGPQHDYLDHPDVIGWTREGDSSHPKSGLATLITDGPGGSKRMYAGLKNAGETWYDITGNRSDTVKIGSDGWGEFHVNDGSVSIYVQK

SEQ ID NO: 39834 - protein, 480 aa, Synthetic construct
NGTMMQYFEWYLPNDGNHWNRLNSDASNLKSKGITAVWIPPAWKGASQNDVGYGAYDLYDLGEFNQKGTVRTKYGTRSQLQAAVTSLKNNGIQVYGDVVMNHKGGADATEMVRAVEVNPNNRNQEVTGEYTIEAWTRFDFPGRGNTHSSFKWRWYHFDGVDWDQSRRLNNRIYKFRGHGKAWDWEVDTEFGNYDYLMYADYDMDHPEVVNEMRNWGVWYTNTLGLDGFRIDAVKHIKYSFTRDWINHVRSATGKNMFAVAEFWKNDLGAIENYLQKTNWNHSVFDVPLHYNLYNASKSGGNYDMRNIFNGTVVQRHPSHAVTFVDNHDSQPEEALESFVEEWFKPLAYALTLTREQGYPSVFYGDYYGIPTHGVPAMRSKIDPILEARQKYAYGPQHDYLDHPDVIGWTREGDSSHPKSGLATLITDGPGGSKRMYAGLKNAGETWYDITGNRSDTVKIGSDGWGEFHVNDGSVSIYVQK

SEQ ID NO: 39835 - protein, 480 aa, Bacillus sp.
NGTMMQYFEWYLPNDGNHWNRLNSDASNLKSKGITAVWIPPAWKGASQNDVGYGAYDLYDLGEFNQKGTVRTKYGTRSQLQAAVTSLKNNGIQVYGDVVMNHKGGADATEMVRAVEVNPNNRNQEVTGEYTIEAWTRFDFPGRGNTHSSFKWRWYHFDGVDWDQSRETSNRIYKFRGHGKAWDWEVDTEFGNYDYLMYTDYDMDHPEVVNELRNWGVWYTNTLGLDGFRIDAVKHIKYSFTRDWINHVRSATGKNMFAVAEFWKNDLGAIENYLQKTNWNHSVFDVPLHYNLYNASKSGGNYDMRNIFNGTVVQRHPSHAVTFVDNHDSQPEEALESFVEEWFKPLAYALTLTREQGYPSVFYGDYYGIPTHGVPAMRSKIDPILEARQKYAYGPQHDYLDHPDVIGWTREGDSSHPKSGLATLITDGPGGSKRMYAGLKNAGETWYDITGNRSDTVKIGSDGWGEFHVNDGSVSIYVQK

SEQ ID NO: 39836 - protein, 480 aa, Synthetic construct
NGTMMQYFEWYLPNDGNHWNRLNSDASNLKSKGITAVWIPPAWKGASQNDVGYGAYDLYDLGEFNQKGTVRTKYGTRSQLQAAVTSLKNNGIQVYGDVVMNHKGGADATEMVRAVEVNPNNRNQEVTGEYTIEAWTRFDFPGRGNTHSSFKWRWYHFDGVDWDQSRRLNNRIYKFRGHGKAWDWEVDTEFGNYDYLMYADYDMDHPEVVNELRNWGVWYTNTLGLDGFRIDAVKHIKYSFTRDWINHVRSATGKNMFAVAEFWKNDLGAIENYLQKTNWNHSVFDVPLHYNLYNASKSGGNYDMRNIFNGTVVQRHPSHAVTFVDNHDSQPEEALESFVETWFKPLAYALTLTREQGYPSVFYGDYYGIPTHGVPAMRSKIDPILEARQKYAYGPQHDYLDHPDVIGWTREGDSSHPKSGLATLITDGPGGSKRMYAGLKNAGETWYDITGNRSDTVKIGSDGWGEFHVNQGSVSIYVQK

SEQ ID NO: 39837 - protein, 480 aa, Bacillus sp.
NGTMMQYFEWYLPNDGNHWNRLNSDASNLKSKGITAVWIPPAWKGASQNDVGYGAYDLYDLGEFNQKGTVRTKYGTRSQLQAAVTSLKNNGIQVYGDVVMNHKGGADATEMVRAVEVNPNNRNQEVTGEYTIEAWTRFDFPGRGNTHSSFKWRWYHFDGVDWDQSRRLNNRIYKFRGHGKAWDWEVDTEFGNYDYLMYADYDMDHPEVVNELRNWGVWYTNTLGLDGFRIDAVKHIKYSFTRDWINHVRSATGKNMFAVAEFWHNDLGSIENYLQKTNWNHSVFDVPLHYNLYNASKSGGNYDMRNIFNGTVVQRHPSHAVTFVDNHDSQPEEALESFVEEWFKPLAYALTLTREQGYPSVFYGDYYGIPTHGVPAMRSKIDPILEARQKYAYGPQHDYLDHPDVIGWTREGDSSHPKSGLATLITDGPGGSKRMYAGLKNAGETWYDITGNRSDTVKIGSDGWGEFHVNDGSVSIYVQK

SEQ ID NO: 39838 - protein, 480 aa, Bacillus sp.
NGTMMQYFEWYLPNDGNHWNRLNSDASNLKSKGITAVWIPPAWKGASQNDVGYGAYDLYDLGEFNQKGTVRTKYGTRSQLQAAVTSLKNNGIQVYGDVVMNHKGGADATEMVRAVEVNPNNRNQEVTGEYTIEAWTRFDFPGRGNTHSSFKWRWYHFDGVDWDQSRKLNNRIYKFRGHGKAWDWEVDTEFGNYDYLMYADYDYDHPETTNEMRNWGVWYTNTLGLDGFRIDAVKHIKYSFTRDWINHVRSATGKNMFAVAEFWKNDLGAIENYLQKTNWNHSVFDVPLHYNLYNASKSGGNYDMRNIFNGTVVQRHPSHAVTFVDNHDSQPEEALESFVEEWFKPLAYALTLTREQGYPSVFYGDYYGIPTHGVPAMRSKIDPILEARQKYAYGPQHDYLDHPDVIGWTREGDSSHPKSGLATLITDGPGGSKRMYAGLKNAGETWYDITGNRSDTVKIGSDGWGEFHVNDGSVSIYVQK

SEQ ID NO: 39839 - protein, 480 aa, Bacillus sp.
NGTMMQYFEWYLPNDGNHWNRLNSDASNLKSKGITAVWIPPAWKAASQNDVGYGAYDLYDLGEFNQKGTVRTKYGTRSQLQAAVTSLKNNGIQVYGDVVMNHKGGADATEMVRAVEVNPNNRNQEVTGEYTIEAWTRFDFPGRGNTHSSFKWRWYHFDGVDWDQSRKLNNRIYKFRGHGKAWDWEVDTEFGNYDYLMYADYDMDHPEVVNELRNWGVWYTNTLGLDGFRIDAVKHIKYSFTRDWINHVRSATGKNMFAVAEFWKNDLGAIENYLQKTNWNHSVFDVPLHYNLYNASKSGGNYDMRNIFNGTVVQRHPSHAVTFVDNHDSQPEEALESFVEEWFKPLAYALTLTREQGYPSVFYGDYYGIPTHGVPAMRSKIDPILEARQKYAYGPQHDYLDHPDVIGWTREGDSSHPKSGLATLITDGPGGSKRMYAGLKNAGETWYDITGNRSDTVKIGSDGWGEFHVNDGSVSIYVQK

SEQ ID NO: 39840 - protein, 480 aa, Synthetic construct
NGTMMQYFEWYLPNDGNHWNRLNSDASNLKSKGITAVWIPPAWKGASQNDVGYGAYDLYDLGEFNQKGTVRTKYGTRSQLQAAVTSLKNNGIQVYGDVVMNHKGGADATEMVRAVEVNPNNRNQEVTGEYTIEAWTRFDFPGRGNTHSSFKWRWYHFDGVDWDQSRRLNNRIYKFRGHGKAWDWEVDTENGNYDYLMYADIDMDHPEVVNELRNWGVWYTNTLGLDGFRIDAVKHIKYSFTRDWINHVRSATGKNMFAVAEFWKNDLGAIENYLQKTNWNHSVFDVPLHYNLYNASKSGGNYDMRNIFNGTVVQRHPSHAVTFVDNHDSQPEEALESFVEEWFKPLAYALTLTREQGYPSVFYGDYYGIPTHGVPAMRSKIDPILEARQKYAYGPQHDYLDHPDVIGWTREGDSSHPKSGLATLITDGPGGSKRMYAGLKNAGEVWYDITGNRSDTVKIGSDGWGEFHVNDGSVSIYVQK

SEQ ID NO: 39841 - protein, 480 aa, Synthetic construct
NGTMMQYFEWYLPNDGNHWNRLNSDASNLKSKGITAVWIPPAWKGASQNDVGYGAYDLYDLGEFNQKGTVRTKYGTRSQLQAAVTSLKNNGIQVYGDVVMNHKGGADATEMVRAVEVNPNNRNQEVTGEYTIEAWTRFDFPGRGNTHSSFKWRWYHFDGVDWDQSRNTQNRIYKFRGHGKAWDWEVDTEFGNYDYLMYADYDMDHPEVVNELRNWGVWYTNTLGLDGFRIDAVKHIKYSFTRDWINHVRSATGKNMFAVAEFWKNDLGAIENYLQKTNWNHSVFDVPLHYNLYNASKRGGNYDMRNIFNGTVVQRHPSHAVTFVDNHDSQPEEALESFVEEWFKPLAYALTLTREQGYPSVFYGDYYGIPTHGVPAMRSKIDPILEARQKYAYGPQHDYLDHPDVIGWTREGDSSHPKSGLATLITDGPGGSKRMYAGLKNAGETWYDITGNRSDTVKIGSDGWGEFHVNDGSVSIYVQK

SEQ ID NO: 39842 - protein, 480 aa, Bacillus sp.
NGTMMQYFEWYLPNDGNHWNRLNSDASNLKSKGITAVWIPPAWKGASQNDVGYGAYDLYDLGEFNQKGTVRTKYGTRSQLQAAVTSLKNNGIQVYGDVVMNHKGGADATEMVRAVEVNPNNRNQEVTGEYTIEAWTRFDFPGRGNTHSSFKWRWYHFDGVDWDQSRRLNNRIYKFRGHGKAWDWEVDTEFGNYDYLMYADYDMDHPEVVNELRNWGVWYTNTLGLDGFRIDAVKHIKYSFTRDWINHVRSATGKNMFAVAEFWHNDLGEIENYLQKTNWNHSVFDVPLHYNLYNASKSGGNYDMRNIFNGTVVQRHPSHAVTFVDNHDSQPEEALESFVEEWFKPLAYALTLTREQGYPSVFYGDYYGIPTHGVPAMRSKIDPILEARQKYAYGPQHDYLDHPDVIGWTREGDSSHPKSGLATLITDGPGGSKRMYAGLKNAGETWYDITGNRSDTVKIGSDGWGEFHVNDGSVSIYVQK

SEQ ID NO: 39843 - protein, 480 aa, Synthetic construct
NGTMMQYFEWYLPNDGNHWNRLNSDASNLKSKGITAVWIPPAWKGTSQNDVGYGAYDLYDLGEFNQKGTVRTKYGTRSQLQAAVTSLKNNGIQVYGDVVMNHKGGADATEMVRAVEVNPNNRNQEVTGEYTIEAWTRFDFPGRGNTHSSFKWRWYHFDGVDWDQSRDLQNRIYKFRGHGKAWDWEVDTEFGNYDYLMYADYDMDHPEVVNELRNWGVWYTNTLGLDGFRIDAVKHIKYSFTRDWINHVRSATGKNMFAVAEFWKNDLGAIENYLQKTNWNHSVFDVPLHYNLYNASKSGGNYDMRNIFNGTVVQRHPSHAVTFVDNHDSQPEEALESFVEEWFKPLAYALTLTREQGYPSVFYGDYYGIPTHGVPAMRSKIDPILEARQKYAYGPQHDYLDHPDVIGWTREGDSSHPKSGLATLITDGPGGSKRMYAGLKNAGETWYDITGNRSDTVKIGSDGWGEFHVNDGSVSIYVQK

SEQ ID NO: 39844 - protein, 480 aa, Synthetic construct
NGTMMQYFEWYLPNDGNHWNRLNSDASNLKSKGITAVWIPPAWKGASQNDVGYGAYDLYDLGEFNQKGTVRTKYGTRSQLQAAVTSLKNNGIQVYGDVVMNHKGGADATEMVRAVEVNPNNRNQEVTGEYTIEAWTRFDFPGRGNTHSSFKWRWYHFDGVDWDQSRRFNNRIYKFRGHGKAWDWEVDTEFGNYDYLMYADYDMDHPEVVNELRNWGVWYTNTLGLDGFRIDAVKHIKYSFTRDWINHVRSATGKNMFAVAEFWKNDLGAIENYLQKTNWNHSVFDVPLHYNLYNASKSGGNYDMRNIFNGTVVQRHPSHAVTFVDNHDSQPEEALESFVEEWFKPLAYALTLTREQGYPSVFYGDYYGIPTHGVPAMRSKIDPILEARQKYAYGPQHDYLDHPDVIGWTREGDSSHPKSGLATLITDGPGGSKRMYAGLKNAGETWYDITGNRSDTVKIGSDGWGEFHVNDGSVSIYVQK

SEQ ID NO: 39845 - protein, 480 aa, Bacillus sp.
NGTMMQYFEWYLPNDGNHWNRLNSDASNLKSKGITAVWIPPAWKATSQNDVGYGAYDLYDLGEFNQKGTVRTKYGTRSQLQAAVTSLKNNGIQVYGDVVMNHKGGADATEMVRAVEVNPNNRNQEVTGEYTIEAWTRFDFPGRGNTHSSFKWRWYHFDGVDWDQSRNIQNRIYKFRGHGKAWDWEVDTEFGNYDYLMYADYDMDHPEVVNELRNWGVWYTNTLGLDGFRIDAVKHIKYSFTRDWINHVRSATGKNMFAVAEFWKNDLGAIENYLQKTNWNHSVFDVPLHYNLYNASKSGGNYDMRNIFNGTVVQRHPSHAVTFVDNHDSQPEEALESFVEEWFKPLAYALTLTREQGYPSVFYGDYYGIPTHGVPAMRSKIDPILEARQKYAYGPQHDYLDHPDVIGWTREGDSSHPKSGLATLITDGPGGSKRMYAGLKNAGETWYDITGNRSDTVKIGSDGWGEFHVNDGSVSIYVQK

SEQ ID NO: 39846 - protein, 480 aa, Synthetic construct
NGTMMQYFEWYLPNDGNHWNRLNSDASNLKSKGITAVWIPPAWKGASQNDVGYGAYDLYDLGEFNQKGTVRTKYGTRSQLQAAVTSLKNNGIQVYGDVVMNHKGGADATEMVRAVEVNPNNRNQEVTGEYTIEAWTRFDFPGRGNTHSSFKWRWYHFDGVDWDQSRRLNNRIYKFRGHGKAWDWEVDTEFGNYDYLMYADYDMDHPEVVNELRNWGVWYTNTLGLDGFRIDAVKHIKYSFTRDWINHVRSATGKNMFAVAEFWKNDLGAIENYLSKTNWNHSVFDVPLHYNLYNASKSGGNYDMRNIFNGTVVQRHPSHAVTFVDNHDSQPEEALESFVEEWFKPLAYALTLTREQGYPSVFYGDYYGIPTHGVPAMRSKIDPILEARQKYAYGPQHDYLDHPDVIGWTREGDSSHPKSGLATLITDGPGGSKRMYAGLKNAGETWYDITGNRSDTVKIGSDGWGEFHVNDGSVSIYVQK

SEQ ID NO: 39847 - protein, 480 aa, Bacillus sp.
NGTMMQYFEWYLPNDGNHWNRLNSDASNLKSKGITAVWIPPAWKGASQNDVGYGAYDLYDLGEFNQKGTVRTKYGTRSQLQAAVTSLKNNGIQVYGDVVMNHKGGADATEMVRAVEVNPNNRNQEVTGEYTIEAWTRFDFPGRGNTHSSFKWRWYHFDGQDWDQSRRLNNRIYKFRGHGKAWDWEVDTEFGNYDYLMYADYDMDHPEVVNELRNWGVWYTNTLGLDGFRIDAVKHIKYSFTRDWINHVRSATGKNMFAVAEFWKNDLGAIENYLQKTNWNHSVFDVPLHYNLYNASKSGGNYDMRNIFNGTVVQRHPSHAVTFVDNHDSQPEEALESFVEEWFKPLAYALTLTREQGYPSVFYGDYYGIPTHGVPAMRSKIDPILEARQKYAYGPQHDYLDHPDVIGWTREGDSSHPKSGLATLITDGPGGSKRMYAGLKNAGETWYDITGNRSDTVKIGSDGWGEFHVNDGSVSIYVQK

SEQ ID NO: 39848 - protein, 480 aa, Synthetic construct
NGTMMQYFEWYLPNDGNHWNRLNSDASNLKSKGITAVWIPPAWKGASQNDVGYGAYDLYDLGEFNQKGTVRTKYGTRSQLQAAVTSLKNNGIQVYGDVVMNHKGGADATEMVRAVEVNPNNRNQEVTGEYTIEAWTRFDFPGRGNTHSSFKWRWYHFDGVDWDQSRDLTNRIYKFRGHGKAWDWEVDTEFGNYDYLMYADYDMDHPEVVNELRNWGVWYTNTLGLDGFRIDAVKHIKYSFTRDWINHVRSATGKNMFAVAEFWKNDLGAIENYLQKTNWNHSVFDVPLHYNLYNASKSGGNYDMRNIFNGTVVQRHPSHAVTFVDNHDSQPEEALESFVEEWFKPLAYALTLTREQGYPSVFYGDYYGIPTHGVPAMRSKIDPILEARQKYAYGPQHDYLDHPDVIGWTREGDSSHPKSGLATLITDGPGGSKRMYAGLKNAGETWYDITGNRSDTVKIGSDGWGEFHVNDGSVSIYVQK

SEQ ID NO: 39849 - protein, 480 aa, Synthetic construct
NGTMMQYFEWYLPNDGNHWNRLNSDASNLKSKGITAVWIPPAWKGASQNDVGYGAYDLYDLGEFNQKGTVRTKYGTRSQLQAAVTSLKNNGIQVYGDVVMNHKGGADATEMVRAVEVNPNNRNQEVTGEYTIEAYTRFDFPGRGNTHSSFKWRWYHFDGVDWDQSRRLNNRIYKFRGHGKAWDWEVDTENGNYDYLMYADIDMDHPEVVNELRNWGVWYTNTLGLDGFRIDAVKHIKYSFTRDWINHVRSATGKNMFAVAEFWKNDLGAIENYLQKTNWNHSVFDVPLHYNLYNASKSGGNYDMRNIFNGTVVQRHPSHAVTFVDNHDSQPEEALESFVEEWFKPLAYALTLTREQGYPSVFYGDYYGIPTHGVPAMRSKIDPILEARQKYAYGPQHDYLDHPDVIGWTREGDSSHPKSGLATLITDGPGGSKRMYAGLKNAGETWYDITGNRSDTVKIGSDGWGEFHVNDGSVSIYVQK

SEQ ID NO: 39850 - protein, 480 aa, Bacillus sp.
NGTMMQYFEWYLPNDGNHWNRLNSDASNLKSKGITAVWIPPAWKGASQNDVGYGAYDLYDLGEFNQKGTVRTKYGTRSQLQAAVTSLKNNGIQVYGDVVMNHKGGADATEMVRAVEVNPNNRNQEVTGEYTIEAWTRFQFPGRGNTHSSFKWRWYHFDGVDWDQSRRLNNRIYKFRGHGKAWDWEVDTEFGNYDYLMYADYDMDHPEVVNELRNWGVWYTNTLGLDGFRIDAVKHIKYSFTRDWINHVRSATGKNMFAVAEFWKNDLGAIENYLQKTNWNHSVFDVPLHYNLYNASKSGGNYDMRNIFNGTVVQRHPSHAVTFVDNHDSQPEEALESFVEEWFKPLAYALTLTREQGYPSVFYGDYYGIPTHGVPAMRSKIDPILEARQKYAYGPQHDYLDHPDVIGWTREGDSSHPKSGLATLITDGPGGSKRMYAGLKNAGETWYDITGNRSDTVKIGSDGWGEFHVNDGSVSIYVQK

SEQ ID NO: 39851 - protein, 480 aa, Bacillus sp.
NGTMMQYFEWYLPNDGNHWNRLNSDASNLKSKGITAVWIPPAWKGASQNDVGYGAYDLYDLGEFNQKGTVRTKYGTRSQLQAAVTSLKNNGIQVYGDVVMNHKGGADATEMVRAVEVNPNNRNQEVTGEYTIEAWTRFDFPGRGNTHSSFKWRWYHFDGVDWDQSRRLNNRIYKFRGHGKAWDWEVDTEFGNYDYLMYADYDMDHPEVVNELRNWGVWYTNTLGLDGFRIDAVKHIKSSFTRDWINHVRSATGKNMFAVAEFWKNDLGAIENYLQKTNWNHSVFDVPLHYNLYNASKSGGNYDMRNIFNGTVVQRHPSHAVTFVDNHDSQPEEALESFVEEWFKPLAYALTLTREQGYPSVFYGDYYGIPTHGVPAMRSKIDPILEARQKYAYGPQHDYLDHPDVIGWTREGDSSHPKSGLATLITDGPGGSKRMYAGLKNAGETWYDITGNRSDTVKIGSDGWGEFHVNDGSVSIYVQK

SEQ ID NO: 39852 - protein, 480 aa, Bacillus sp.
NGTMMQYFEWYLPNDGNHWNRLNSDASNLKSKGITAVWIPPAWKGASQNDVGYGAYDLYDLGEFNQKGTVRTKYGTRSQLQAAVTSLKNNGIQVYGDVVMNHKGGADATEMVRAVEVNPNNRNQEVTGEYTIEAWTRFDFPGRGNTHSSFKWRWYHFDGVDWDQSRRLNNRIYKFRGHGKAWDWEVDTEFGNYDYLMYADYDMDHPEVVNELRNWGVWYTNTLGLDGFRIDAVKHIKYSFTRDWINHVRSATGKNMFAVAEFWKNDLGAIENYLQKTNWNHSVFDVPLHYNLYNASKSGGNYDMRNIFNGTVVQRHPSNAVTFVDNHDSQPEEALESFVEEWFKPLAYALTLTREQGYPSVFYGDYYGIPTHGVPAMRSKIDPILEARQKYAYGPQHDYLDHPDVIGWTREGDSSHPKSGLATLITDGPGGSKRMYAGLKNAGETWYDITGNRSDTVKIGSDGWGEFHVNDGSVSIYVQK

SEQ ID NO: 39853 - protein, 480 aa, Synthetic construct
NGTMMQYFEWYLPNDGNHWNRLNSDASNLKSKGITAVWIPPAWKGASQNDVGYGAYDLYDLGEFNQKGTVRTKYGTRSQLQAAVTSLKNNGIQVYGDVVMNHKGGADATEMVRAVEVNPNNRNQEVTGEYTIEAWTRFDFPGRGNTHSSFKWRWYHFDGVDWDQSRRLNNRIYKFRGHGKAWDWEVDTENGNYDYLMYADIDMDHPEVVNELRNWGVWYTNTLGLDGFRIDAVKHIKYSFTRDWINHVRSATGKNMFAVAEFWKNDLGAIENYLQKTNWNHSVFDAPLHYNLYNASKSGGNYDMRNIFNGTVVQRHPSHAVTFVDNHDSQPEEALESFVEEWFKPLAYALTLTREQGYPSVFYGDYYGIPTHGVPAMRSKIDPILEARQKYAYGPQHDYLDHPDVIGWTREGDSSHPKSGLATLITDGPGGSKRMYAGLKNAGETWYDITGNRSDTVKIGSDGWGEFHVNDGSVSIYVQK

SEQ ID NO: 39854 - protein, 480 aa, Bacillus sp.
NGTMMQYFEWYLPNDGNHWNRLNSDASNLKSKGITAVWIPPAWKGASQNDVGYGAYDLYDLGEFNQKGTVRTKYGTRSQLQAAVTSLKNNGIQVYGDVVMNHKGGADATEMVRAVEVNPNNRNQEVTGEYTIEAWTRFDFPGRGNTHSSFKWRWYHFDGVDWDQSRRLNNRIYKFRGHGKAWDWEVDTEFGNYDYLMYADYDMDHPEVVNELRSWGVWYTNTLGLDGFRIDAVKHIKYSFTRDWINHVRSATGKNMFAVAEFWKNDLGAIENYLQKTNWNHSVFDVPLHYNLYNASKSGGNYDMRNIFNGTVVQRHPSHAVTFVDNHDSQPEEALESFVEEWFKPLAYALTLTREQGYPSVFYGDYYGIPTHGVPAMRSKIDPILEARQKYAYGPQHDYLDHPDVIGWTREGDSSHPKSGLATLITDGPGGSKRMYAGLKNAGETWYDITGNRSDTVKIGSDGWGEFHVNDGSVSIYVQK

SEQ ID NO: 39855 - protein, 480 aa, Bacillus sp.
NGTMMQYFEWYLPNDGNHWNRLNSDASNLKSKGITAVWIPPAWKGASQNDVGYGAYDLYDLGEFNQKGTVRTKYGTRSQLQAAVTSLKNNGIQVYGDVVMNHKGGADATEMVRAVEVNPNNRNQEVTGEYTIEAWTRFDFPGRGNTHSSFKWRWYHFDGVDWDQSRRLNNRIYKFRGHGKAWDWEVDNEFGNYDYLMYADYDMDHPEVVNELRNWGVWYTNTLGLDGFRIDAVKHIKYSFTRDWINHVRSATGKNMFAVAEFWKNDLGAIENYLQKTNWNHSVFDVPLHYNLYNASKSGGNYDMRNIFNGTVVQRHPSHAVTFVDNHDSQPEEALESFVEEWFKPLAYALTLTREQGYPSVFYGDYYGIPTHGVPAMRSKIDPILEARQKYAYGPQHDYLDHPDVIGWTREGDSSHPKSGLATLITDGPGGSKRMYAGLKNAGETWYDITGNRSDTVKIGSDGWGEFHVNDGSVSIYVQK

SEQ ID NO: 39856 - protein, 480 aa, Synthetic construct
NGTMMQYFEWYLPNDGNHWNRLNSDASNLKSKGITAVWIPPAWKGASQNDVGYGAYDLYDLGEFNQKGTVRTKYGTRSQLQAAVTSLKNNGIQVYGDVVMNHKGGADATEMVRAVEVNPNNRNQEVTGEYTIEAWTRFDFPGRGNTHSSFKWRWYHFDGVDWDQSRRLNNRIYKFRGHGKAWDWEVDTEFGNYDYLMYADYDMDHPEVVNELRNWGVWYTNTLGLDGFRIDAVKHIKYSFTRDWINHVRSATGKNMFAVAEFWKNDLGAIENYLQKTNWNHSVFDVPLHYNLYNASKSGGNYDMRNIFNGTVVQRHPSHAVTFVDNHDSQPEEALESFVEEWFKPLAYALTLTREQGYPSVFYGDYYGIPTHGVPAMRSKIDPILEARQKYAYGPQHDYLDHPDVIGWTREGDSSRPKSGLATLITDGPGGSKRMYAGLKNAGETWYDITGNRSDTVKIGSDGWGEFHVNDGSVSIYVQK

SEQ ID NO: 39857 - protein, 480 aa, Synthetic construct
NGTMMQYFEWYLPNDGNHWNRLNSDASNLKSKGITAVWIPPAWKGASQNDVGYGAYDLYDLGEFNQKGTVRTKYGTRSQLQAAVTSLKNNGIQVYGDVVMNHKGGADATEMVRAVEVNPNNRNQEVTGEYTIEAWTRFDFPGRGNTHSSFKWRWYHFDGVDWDQSRRLNNRIYKFRGHGKAWDWEVDTEFGNYDYLMYADYDMDHPEVVNELRNWGVWYTNTLGLDGFRIDAVKHIKYSFTRDWINHVRSATGKNMFAVAEFWKNDLGWIENYLQKTNWNHSVFDVPLHYNLYNASKSGGNYDMRNIFNGTVVQRHPSHAVTFVDNHDSQPEEALESFVEEWFKPLAYALTLTREQGYPSVFYGDYYGIPTHGVPAMRSKIDPILEARQKYAYGPQHDYLDHPDVIGWTREGDSSHPKSGLATLITDGPGGSKRMYAGLKNAGETWYDITGNRSDTVKIGSDGWGEFHVNDGSVSIYVQK

SEQ ID NO: 39858 - protein, 480 aa, Bacillus sp.
NGTMMQYFEWYLPNDGNHWNRLNSDASNLKSKGITAVWIPPAWKGASQNDVGYGAYDLYDLGEFNQKGTVRTKYGTRSQLQAAVTSLKNNGIQVYGDVVMNHKGGADATEMVRAVEVNPNNRNQEVTGEYTIEAWTRFDFPGRGNTHSSFKWRWYHFDGVDWDQSRRLNNRIYKFRGHGKAWDWEVDTEFGNYDYLMYADYDMDHPEVVNELRNWGVWYTNTLGLDGFRIDAVKHIKYSFTRDWINHVRSATGKNMFAVAEFWLNDLGSIENYLQKTNWNHSVFDVPLHYNLYNASKSGGNYDMRNIFNGTVVQRHPSHAVTFVDNHDSQPEEALESFVEEWFKPLAYALTLTREQGYPSVFYGDYYGIPTHGVPAMRSKIDPILEARQKYAYGPQHDYLDHPDVIGWTREGDSSHPKSGLATLITDGPGGSKRMYAGLKNAGETWYDITGNRSDTVKIGSDGWGEFHVNDGSVSIYVQK

SEQ ID NO: 39859 - protein, 480 aa, Bacillus sp.
NGTMMQYFEWYLPNDGNHWNRLNSDASNLKSKGITAVWIPPAWKGVSQNDVGYGAYDLYDLGEFNQKGTVRTKYGTRSQLQAAVTSLKNNGIQVYGDVVMNHKGGADATEMVRAVEVNPNNRNQEVTGEYTIEAWTRFDFPGRGNTHSSFKWRWYHFDGVDWDQSRRFNNRIYKFRGHGKAWDWEVDTEFGNYDYLMYADYDMDHPEVVNELRNWGVWYTNTLGLDGFRIDAVKHIKYSFTRDWINHVRSATGKNMFAVAEFWKNDLGAIENYLQKTNWNHSVFDVPLHYNLYNASKSGGNYDMRNIFNGTVVQRHPSHAVTFVDNHDSQPEEALESFVEEWFKPLAYALTLTREQGYPSVFYGDYYGIPTHGVPAMRSKIDPILEARQKYAYGPQHDYLDHPDVIGWTREGDSSHPKSGLATLITDGPGGSKRMYAGLKNAGETWYDITGNRSDTVKIGSDGWGEFHVNDGSVSIYVQK

SEQ ID NO: 39860 - protein, 480 aa, Synthetic construct
NGTMMQYFEWYLPNDGNHWNRLNSDASNLKSKGITAVWIPPAWKGASQNDVGYGAYDLYDLGEFNQKGTVRTKYGTRSQLQAAVTSLKNNGIQVYGDVVMNHKGGADATEMVRAVEVNPNNRNQEVTGEYTIEAWTRFDFPGRGNTHSSFKWRWYHFDGVDWDQSRRLNNRIYKFRGHGKAWDWEVDTENGNYDYLMYADIDMDHPEVVNELRNWGVWYTNTLGLDGFRIDAVKHIKYSFTRDWINHVRSATGKNMFAVAEFWKNDLGAIENYLQKTNWNHSVFDVPLHYNLYNASKSGGNYDMRNIFNGTVVQRHPSHAVTFVDNHDSQPEEALESFVEEWFKPLAYALTLTREQGYPSVFYGDYYGIPTHGVPAMRSKIDPILEARQKYAYGPQHDYLDHPDVIGWTREGDSSHPKSGLATLITDGPGGSKRMYAGLKNAGETWYDITGNRSDTVKINSDGWGEFHVNDGSVSIYVQK

SEQ ID NO: 39861 - protein, 480 aa, Synthetic construct
NGTMMQYFEWYLPNDGNHWNRLNSDASNLKSKGITAVWIPPAWKGASQNDVGYGAYDLYDLGEFNQKGTVRTKYGTRSQLQAAVTSLKNNGIQVYGDVVMNHKGGADATEMVRAVEVNPNNRNQEVTGEYTIEAWTRFDFPGRGNTHSSFKWRWYHFDGVDWDQSRRLNNRIYKFRGHGKAWDWEVDTENGNYDYLMYADIDMDHPEVVNELRNWGVWYTNTLGLDGFRIDAVKHIKYSFTRDWINHVRSATGKNMFAVAEFWKNDLGAIENYLQKTNWNHSVFDVPLHYNLYNASKSGGNYDMRNIFNGTVVQRHPSHAVTFVDNHDSQPEEALESFVEEWFKPLAYALTLTREQGYPSVFYGDYYGIPTHGVPAMRSKIDPILEARQKYAYGPQHDYLDHPDVIGWTREGDSSHPKSGLATLITDGPGGSKRMYAGLKNAGETWYDITGNRSDTVKIGSDGWAEFHVNDGSVSIYVQK

SEQ ID NO: 39862 - protein, 480 aa, Synthetic construct
NGTMMQYFEWYLPNDGNHWNRLNSDASNLKSKGITAVWIPPAWKGASQNDVGYGAYDLYDLGEFNQKGTVRTKYGTRSQLQAAVTSLKNNGIQVYGDVVMNHKGGADATEMVRAVEVNPNNRNQEVTGEYTIEAWTRFDFPGRGNTHSSFKWRWYHFDGVDWDQSRRLNNRIYKFRGHGKAWDWEVDTENGNYDYLMYADIDMDHPEVVNELRNWGVWYTNTLGLDGFRLDAVKHIKYSFTRDWINHVRSATGKNMFAVAEFWKNDLGAIENYLQKTNWNHSVFDVPLHYNLYNASKSGGNYDMRNIFNGTVVQRHPSHAVTFVDNHDSQPEEALESFVEEWFKPLAYALTLTREQGYPSVFYGDYYGIPTHGVPAMRSKIDPILEARQKYAYGPQHDYLDHPDVIGWTREGDSSHPKSGLATLITDGPGGSKRMYAGLKNAGETWYDITGNRSDTVKIGSDGWGEFHVNDGSVSIYVQK

SEQ ID NO: 39863 - protein, 480 aa, Synthetic construct
NGTMMQYFEWYLPNDGNHWNRLNSDASNLKSKGITAVWIPPAWKGASQNDVGYGAYDLYDLGEFNQKGTVRTKYGTRSQLQAAVTSLKNNGIQVYGDVVMNHKGGADATEMVRAVEVNPNNRNQEVTGEYTIEAWTRFDFPGRGNTHSSFKWRWYHFDGVDWDQSRRLNNRIYKFRGHGKAWDWEVDTENGNYDYLMYADYDYDHPETTNEVRNWGVWYTNTLGLDGFRIDAVKHIKYSFTRDWINHVRSATGKNMFAVAEFWKNDLGAIENYLQKTNWNHSVFDVPLHYNLYNASKSGGNYDMRNIFNGTVVQRHPSHAVTFVDNHDSQPEEALESFVEEWFKPLAYALTLTREQGYPSVFYGDYYGIPTHGVPAMRSKIDPILEARQKYAYGPQHDYLDHPDVIGWTREGDSSHPKSGLATLITDGPGGSKRMYAGLKNAGETWYDITGNRSDTVKIGSDGWGEFHVNDGSVSIYVQK

SEQ ID NO: 39864 - protein, 480 aa, Synthetic construct
NGTMMQYFEWYLPNDGNHWNRLNSDASNLKSKGITAVWIPPAWKGASQNDVGYGAYDLYDLGEFNQKGTVRTKYGTRSQLQAAVTSLKNNGIQVYGDVVMNHKGGADATEMVRAVEVNPNNRNQEVTGEYTIEAWTRFDFPGRGNTHSSFKWRWYHFDGVDWDQSRRLNNRIYKFRGHGKAWDWEVDTEFGNYDYLMYADYDMDHPEVVNELRNWGVWYTNTLGLDGFRIDAVKHIKYSFTRDWINHVRSATGKNMFAVAEFWKNDLGAIENYLQKTNWNHSVFDVPLHYNLYNASKSGGNYDMRWIFNGTVVQRHPSHAVTFVDNHDSQPEEALESFVEEWFKPLAYALTLTREQGYPSVFYGDYYGIPTHGVPAMRSKIDPILEARQKYAYGPQHDYLDHPDVIGWTREGDSSHPKSGLATLITDGPGGSKRMYAGLKNAGETWYDITGNRSDTVKIGSDGWGEFHVNDGSVSIYVQK

SEQ ID NO: 39865 - protein, 480 aa, Bacillus sp.
NGTMMQYFEWYLPNDGNHWNRLNSDASNLKSKGITAVWIPPAWKGASQNDVGYGAYDLYDLGEFNQKGTVRTKYGTRSQLQAAVTSLKNNGIQVYGDVVMNHKGGADATEMVRAVEVNPNNRNQEVTGEYTIEAWTRFDFPGRGNTHSSFKWAWYHFDGVDWDQSRRLNNRIYKFRGHGKAWDWEVDTEFGNYDYLMYADYDMDHPEVVNELRNWGVWYTNTLGLDGFRIDAVKHIKYSFTRDWINHVRSATGKNMFAVAEFWKNDLGAIENYLQKTNWNHSVFDVPLHYNLYNASKSGGNYDMRNIFNGTVVQRHPSHAVTFVDNHDSQPEEALESFVEEWFKPLAYALTLTREQGYPSVFYGDYYGIPTHGVPAMRSKIDPILEARQKYAYGPQHDYLDHPDVIGWTREGDSSHPKSGLATLITDGPGGSKRMYAGLKNAGETWYDITGNRSDTVKIGSDGWGEFHVNDGSVSIYVQK

SEQ ID NO: 39866 - protein, 480 aa, Bacillus sp.
NGTMMQYFEWYLPNDGNHWNRLNSDASNLKSKGITAVWIPPAWKGASQNDVGYGAYDLYDLGEFNQKGTVRTKYGTRSQLQAAVTSLKNNGIQVYGDVVMNHKGGADATEMVRAVEVNPNNRNQEVTGEYTIEAWTRFDFPGRGNTHSSFKWRWYHFDGVDWDQSRQFDNRIYKFRGHGKAWDWEVDTEFGNYDYLMYADYDMDHPEVVNELRNWGVWYTNTLGLDGFRIDAVKHIKYSFTRDWINHVRSATGKNMFAVAEFWKNDLGAIENYLQKTNWNHSVFDVPLHYNLYNASKSGGNYDMRNIFNGTVVQRHPSHAVTFVDNHDSQPEEALESFVEEWFKPLAYALTLTREQGYPSVFYGDYYGIPTHGVPAMRSKIDPILEARQKYAYGPQHDYLDHPDVIGWTREGDSSHPKSGLATLITDGPGGSKRMYAGLKNAGETWYDITGNRSDTVKIGSDGWGEFHVNDGSVSIYVQK

SEQ ID NO: 39867 - protein, 480 aa, Bacillus sp.
NGTMMQYFEWYLPNDGNHWNRLNSDASNLKSKGITAVWIPPAWKGASQNDVGYGAYDLYDLGEFNQKGTVRTKYGTRSQLQAAVTSLKNNGIQVYGDVVMNHKGGADATEMVRAVEVNPNNRNQEVTGEYTIEAWTRFDFPGRGNTHSSFKWRWYHFDGVDWDQSRRTNNRIYKFRGHGKAWDWEVDTEFGNYDYLMYADYDMDHPEVVNELRNWGVWYTNTLGLDGFRIDAVKHIKYSFTRDWINHVRSATGKNMFAVAEFWKNDLGAIENYLQKTNWNHSVFDVPLHYNLYNASKSGGNYDMRNIFNGTVVQRHPSHAVTFVDNHDSQPEEALESFVEEWFKPLAYALTLTREQGYPSVFYGDYYGIPTHGVPAMRSKIDPILEARQKYAYGPQHDYLDHPDVIGWTREGDSSHPKSGLATLITDGPGGSKRMYAGLKNAGETWYDITGNRSDTVKIGSDGWGEFHVNDGSVSIYVQK

SEQ ID NO: 39868 - protein, 480 aa, Synthetic construct
NGTMMQYFEWYLPNDGNHWNRLNSDASNLKSKGITAVWIPPAWKGASQNDVGYGAYDLYDLGEFNQKGTVRTKYGTRSQLQAAVTSLKNNGIQVYGDVVMNHKGGADATEMVRAVEVNPNNRNQEVTGEYTIEAWTRFDFPGRGNTHSSFKWRWYHFDGVDWDQSRRLNNRIYKFRGHGKAWDWEVDTENGNYDYLMYADIDMDHPEVVNELRNWGVWYTNTLGLDGFRIDAVKHIKYSFTRDWINHVRSATGKNMFAVAEFWKNDLGAIENYLQKTNWNHSVFDVPLHYNLYNASKSGGNYDMRNIFNGTVVQRHPSHAVTFVDNHDSQPEEALESFVEEWFKPLAYALTLTREQGYPSVFYGDYYGIPTHGVPAMRSKIDPILEARQKYAYGPQHDYLDHPDVIGWTREGDSSHPKSGLATLITDGPGGSKRMYAGLKNAGETWYDITGNRSDTVKIGSDGWGEFHVNDESVSIYVQK

SEQ ID NO: 39869 - protein, 480 aa, Synthetic construct
NGTMMQYFEWYLPNDGNHWNRLNSDASNLKSKGITAVWIPPAWKGASQNDVGYGAYDLYDLGEFNQKGTVRTKYGTRSQLQAAVTSLKNNGIQVYGDVVMNHKGGADATEMVRAVEVNPNNRNQEVTGEYTIEAWTRFDFPGRGNTHSSFKWRWYHFDGVDWDQSRNLNNRIYKFRGHGKAWDWEVDTEFGNYDYLMYADYDMDHPEVVNELRNWGVWYTNTLGLDGFRIDAVKHIKYSFTRDWINHVRSATGKNMFAVAEFWKNDLGAIENYLQKTNWNHSVFDVPLHYNLYNASKSGGNYDMRNIFNGTVVQRHPSHAVTFVDNHDSQPEEALESFVEEWFKPLAYALTLTREQGYPSVFYGDYYGIPTHGVPAMRSKIDPILEARQKYAYGPQHDYLDHPDVIGWTREGDSSHPKSGLATLITDGPGGSKRMYAGLKNAGETWYDITGNRSDTVKIGSDGWGEFHVNDGSVSIYVQK

SEQ ID NO: 39870 - protein, 480 aa, Bacillus sp.
NGTMMQYFEWYLPNDGNHWNRLNSDASNLKSKGITAVWIPPAWKGASQNDVGYGAYDLYDLGEFNQKGTVRTKYGTRSQLQAAVTSLKNNGIQVYGDVVMNHKGGADATEMVRAVEVNPNNRNQEVTGEYTIEAWTRFDFPGRGNTHSSFKWRWYHFDGVDWDQSRRLTNRIYKFRGHGKAWDWEVDTEFGNYDYLMYADYDMDHPEVVNELRNWGVWYTNTLGLDGFRIDAVKHIKYSFTRDWINHVRSATGKNMFAVAEFWKNDLGAIENYLQKTNWNHSVFDVPLHYNLYNASKSGGNYDMRNIFNGTVVQRHPSHAVTFVDNHDSQPEEALESFVEEWFKPLAYALTLTREQGYPSVFYGDYYGIPTHGVPAMRSKIDPILEARQKYAYGPQHDYLDHPDVIGWTREGDSSHPKSGLATLITDGPGGSKRMYAGLKNAGETWYDITGNRSDTVKIGSDGWGEFHVNDGSVSIYVQK

SEQ ID NO: 39871 - protein, 480 aa, Synthetic construct
NGTMMQYFEWYLPNDGNHWNRLNSDASNLKSKGITAVWIPPAWKGASQNDVGYGAYDLYDLGEFNQKGTVRTKYGTRSQLQAAVTSLKNNGIQVYGDVVMNHKGGADATEMVRAVEVNPNNRNQEVTGEYTIEAWTRFDFPGRGNTHSSFKWRWYHFDGVDWDQSRQTQNRIYKFRGHGKAWDWEVDTEFGNYDYLMYADYDMDHPEVVNELRNWGVWYTNTLGLDGFRIDAVKHIKYSFTRDWINHVRSATGKNMFAVAEFWKNDLGAIENYLQKTNWNHSVFDVPLHYNLYNASKSGGNYDMRNIFNGTVVQRHPSHAVTFVDNHDSQPEEALESFVEEWFKPLAYALTLTREQGYPSVFYGDYYGIPTHGVPAMRSKIDPILEARQKYAYGPQHDYLDHPDVIGWTREGDSSHPKSGLATLITDGPGGSKRMYAGLKNAGETWYDITGNRSDTVKIGSDGWGEFHVNDGSVSIYVQK

SEQ ID NO: 39872 - protein, 480 aa, Bacillus sp.
NGTMMQYFEWYLPNDGNHWNRLNSDASNLKSKGITAVWIPPAWKGASQNDVGYGAYDLYDLGEFNQKGTVRTKYGTRSQLQAAVTSLKNNGIQVYGDVVMNHKGGADATEMVRAVEVNPNNRNQEVTGEYTIEAWTRFDFPGRGNTHSSFKWRWYHFDGVDWDQSRRLQNRIYKFRGHGKAWDWEVDTEFGNYDYLMYADYDMDHPEVVNELRNWGVWYTNTLGLDGFRIDAVKHIKYSFTRDWINHVRSATGKNMFAVAEFWKNDLGAIENYLQKTNWNHSVFDVPLHYNLYNASKSGGNYDMRNIFNGTVVQRHPSHAVTFVDNHDSQPEEALESFVEEWFKPLAYALTLTREQGYPSVFYGDYYGIPTHGVPAMRSKIDPILEARQKYAYGPQHDYLDHPDVIGWTREGDSSHPKSGLATLITDGPGGSKRMYAGLKNAGETWYDITGNRSDTVKIGSDGWGEFHVNDGSVSIYVQK

SEQ ID NO: 39873 - protein, 479 aa, Bacillus sp.
NGTMMQYFEWYLPNDGNHWNRLNSDASNLKSKGITAVWIPPAWKGVSQNDVGYGAYDLYDLGEFNQKGTVRTKYGTRSQLQAAVTSLKNNGIQVYGDVVMNHKGGADATEMVRAVEVNPNNRNQEVTGEYTIEAWTRFDFPGRGNTHSSFKWRWYHFDGVDWDQSRELNRIYKFRGHGKAWDWEVDTEFGNYDYLMYADYDMDHPEVVNELRNWGVWYTNTLGLDGFRIDAVKHIKYSFTRDWINHVRSATGKNMFAVAEFWKNDLGAIENYLQKTNWNHSVFDVPLHYNLYNASKSGGNYDMRNIFNGTVVQRHPSHAVTFVDNHDSQPEEALESFVEEWFKPLAYALTLTREQGYPSVFYGDYYGIPTHGVPAMRSKIDPILEARQKYAYGPQHDYLDHPDVIGWTREGDSSHPKSGLATLITDGPGGSKRMYAGLKNAGETWYDITGNRSDTVKIGSDGWGEFHVNDGSVSIYVQK

SEQ ID NO: 39874 - protein, 480 aa, Bacillus sp.
NGTMMQYFEWYLPNDGNHWNRLNSDASNLKSKGITAVWIPPAWKGASQNDVGYGAYDLYDLGEFNQKGTVRTKYGTRSQLQAAVTSLKNNGIQVYGDVVMNHKGGADATEMVRAVEVNPNNRNQEVTGEYTIEAWTRFDFPGRGNTHSSFKWRWYHFDGVDWDQSRRLNNRIYKFRGHGKAWDWEVDTEFGNYDYLMYADYDMDHPEVVNELRNWGVWYTNTLGLDGFRIDAVKHIKYSFTRDWINHVRSATGKNMFAVAEFWHNDLGAIENYLQKTNWNHSVFDVPLHYNLYNASKSGGNYDMRNIFNGTVVQRHPSHAVTFVDNHDSQPEEALESFVEEWFKPLAYALTLTREQGYPSVFYGDYYGIPTHGVPAMRSKIDPILEARQKYAYGPQHDYLDHPDVIGWTREGDSSHPKSGLATLITDGPGGSKRMYAGLKNAGETWYDITGNRSDTVKIGSDGWGEFHVNDGSVSIYVQK

SEQ ID NO: 39875 - protein, 480 aa, Bacillus sp.
NGTMMQYFEWYLPNDGNHWNRLNSDASNLKSKGITAVWIPPAWKAASQNDVGYGAYDLYDLGEFNQKGTVRTKYGTRSQLQAAVTSLKNNGIQVYGDVVMNHKGGADATEMVRAVEVNPNNRNQEVTGEYTIEAWTRFDFPGRGNTHSSFKWRWYHFDGVDWDQSRRFSNRIYKFRGHGKAWDWEVDTEFGNYDYLMYADYDMDHPEVVNELRNWGVWYTNTLGLDGFRIDAVKHIKYSFTRDWINHVRSATGKNMFAVAEFWKNDLGAIENYLQKTNWNHSVFDVPLHYNLYNASKSGGNYDMRNIFNGTVVQRHPSHAVTFVDNHDSQPEEALESFVEEWFKPLAYALTLTREQGYPSVFYGDYYGIPTHGVPAMRSKIDPILEARQKYAYGPQHDYLDHPDVIGWTREGDSSHPKSGLATLITDGPGGSKRMYAGLKNAGETWYDITGNRSDTVKIGSDGWGEFHVNDGSVSIYVQK

SEQ ID NO: 39876 - protein, 480 aa, Bacillus sp.
NGTMMQYFEWYLPNDGNHWNRLNSDASNLKSKGITAVWIPPAWKGASQNDVGYGAYDLYDLGEFNQKGTVRTKYGTRSQLQAAVTSLKNNGIQVYGDVVMNHKGGADATEMVRAVEVNPNNRNQEVTGEYTIEAWTRFDFPGRGNTHSSFKWRWYHFDGVDWDQSRRLNNRIYKFRGHGKAWDWEVDTEFGNYDYLMYADYDMDHPEVVNELRNWGVWYTNTLGLDGFRIDAVKHIKYSFTRDWINHVRSATGKNMFAVAEFWKNDLGAIENYLQKTVWNHSVFDVPLHYNLYNASKSGGNYDMRNIFNGTVVQRHPSHAVTFVDNHDSQPEEALESFVEEWFKPLAYALTLTREQGYPSVFYGDYYGIPTHGVPAMRSKIDPILEARQKYAYGPQHDYLDHPDVIGWTREGDSSHPKSGLATLITDGPGGSKRMYAGLKNAGETWYDITGNRSDTVKIGSDGWGEFHVNDGSVSIYVQK

SEQ ID NO: 39877 - protein, 480 aa, Bacillus sp.
NGTMMQYFEWYLPNDGNHWNRLNSDASNLKSKGITAVWIPPAWKGPSQNDVGYGAYDLYDLGEFNQKGTVRTKYGTRSQLQAAVTSLKNNGIQVYGDVVMNHKGGADATEMVRAVEVNPNNRNQEVTGEYTIEAWTRFDFPGRGNTHSSFKWRWYHFDGVDWDQSRRLNNRIYKFRGHGKAWDWEVDTEFGNYDYLMYADYDMDHPEVVNELRNWGVWYTNTLGLDGFRIDAVKHIKYSFTRDWINHVRSATGKNMFAVAEFWKNDLGAIENYLQKTNWNHSVFDVPLHYNLYNASKSGGNYDMRNIFNGTVVQRHPSHAVTFVDNHDSQPEEALESFVEEWFKPLAYALTLTREQGYPSVFYGDYYGIPTHGVPAMRSKIDPILEARQKYAYGPQHDYLDHPDVIGWTREGDSSHPKSGLATLITDGPGGSKRMYAGLKNAGETWYDITGNRSDTVKIGSDGWGEFHVNDGSVSIYVQK

SEQ ID NO: 39878 - protein, 480 aa, Synthetic construct
NGTMMQYFEWYLPNDGNHWNRLNSDASNLKSKGITAVWIPPAWKGTSQNDVGYGAYDLYDLGEFNQKGTVRTKYGTRSQLQAAVTSLKNNGIQVYGDVVMNHKGGADATEMVRAVEVNPNNRNQEVTGEYTIEAWTRFDFPGRGNTHSSFKWRWYHFDGVDWDQSRRFNNRIYKFRGHGKAWDWEVDTEFGNYDYLMYADYDMDHPEVVNELRNWGVWYTNTLGLDGFRIDAVKHIKYSFTRDWINHVRSATGKNMFAVAEFWKNDLGAIENYLQKTNWNHSVFDVPLHYNLYNASKSGGNYDMRNIFNGTVVQRHPSHAVTFVDNHDSQPEEALESFVEEWFKPLAYALTLTREQGYPSVFYGDYYGIPTHGVPAMRSKIDPILEARQKYAYGPQHDYLDHPDVIGWTREGDSSHPKSGLATLITDGPGGSKRMYAGLKNAGETWYDITGNRSDTVKIGSDGWGEFHVNDGSVSIYVQK

SEQ ID NO: 39879 - protein, 480 aa, Synthetic construct
NGTMMQYFEWYLPNDGNHWNRLNSDASNLKSKGITAVWIPPAWKGASQNDVGYGAYDLYDLGEFNQKGTVRTKYGTRSQLQAAVTSLKNNGIQVYGDVVMNHKGGADATEMVRAVEVNPNNRNQEVTGEYTIEAWTRFDFPGRGNTHSSFKWRWYHFDGVDWDQSRRLNNRIYKFRGHGKAWDWEVDTEFGNYDYLMYADYDMDHPEVVNELRNWGVWYTNTLGLDGFRIDAVKHIKYSFTRDWINHVRSATGKNMFAVAEFWKNDLGAIENYLQKTNWNHSVFDVPLHYNLYNASKSGGNYDMRNIFNGTVVQRHPSHAVTFVDNHDSQPEEALESFVEEWFKPLAYALTLTREAGYPSVFYGDYYGIPTHGVPAMRSKIDPILEARQKYAYGPQHDYLDHPDVIGWTREGDSSHPKSGLATLITDGPGGSKRMYAGLKNAGETWYDITGNRSDTVKIGSDGWGEFHVNDGSVSIYVQK

SEQ ID NO: 39880 - protein, 480 aa, Bacillus sp.
NGTMMQYFEWYLPNDGNHWNRLNSDASNLKSKGITAVWIPPAWKGASQNDVGYGAYDLYDLGEFNQKGTVRTKYGTRSQLQAAVTSLKNNGIQVYGDVVMNHKGGADATEMVRAVEVNPNNRNQEVTGEYTIEAWTRFDFPGRGNTHSSFKWRWYHFDGVDWDQSRRLHNRIYKFRGHGKAWDWEVDTEFGNYDYLMYADYDMDHPEVVNELRNWGVWYTNTLGLDGFRIDAVKHIKYSFTRDWINHVRSATGKNMFAVAEFWKNDLGAIENYLQKTNWNHSVFDVPLHYNLYNASKSGGNYDMRNIFNGTVVQRHPSHAVTFVDNHDSQPEEALESFVEEWFKPLAYALTLTREQGYPSVFYGDYYGIPTHGVPAMRSKIDPILEARQKYAYGPQHDYLDHPDVIGWTREGDSSHPKSGLATLITDGPGGSKRMYAGLKNAGETWYDITGNRSDTVKIGSDGWGEFHVNDGSVSIYVQK

SEQ ID NO: 39881 - protein, 480 aa, Synthetic construct
NGTMMQYFEWYLPNDGNHWNRLNSDASNLKSKGITAVWIPPAWKGASQNDVGYGAYDLYDLGEFNQKGTVRTKYGTRSQLQAAVTSLKNNGIQVYGDVVMNHKGGADATEMVRAVEVNPNNRNQEVTGEYTIEAWTSFDFPGRGNTHSSFKWRWYHFDGVDWDQSRRLNNRIYKFRGHGKAWDWEVDTEFGNYDYLMYADYDMDHPEVVNELRNWGVWYTNTLGLDGFRIDAVKHIKYSFTRDWINHVRSATGKNMFAVAEFWKNDLGAIENYLQKTNWNHSVFDVPLHYNLYNASKSGGNYDMRNIFNGTVVQRHPSHAVTFVDNHDSQPEEALESFVEEWFKPLAYALTLTREQGYPSVFYGDYYGIPTHGVPAMRSKIDPILEARQKYAYGPQHDYLDHPDVIGWTREGDSSHPKSGLATLITDGPGGSKRMYAGLKNAGETWYDITGNRSDTVKIGSDGWGEFHVNDGSVSIYVQK

SEQ ID NO: 39882 - protein, 480 aa, Synthetic construct
NGTMMQYFEWYLPNDGNHWNRLNSDASNLKSKGITAVWIPPAWKGASQNDVGYGAYDLYDLGEFNQKGTVRTKYGTRSQLQAAVTSLKNNGIQVYGDVVMNHKGGADATEMVRAVEVNPNNRNQEVTGEYTIEAWTRFDFPGRGNTHSSFKWRWYHFDGVDWDQSRRLNNRIYKFRGHGKAWDWEVDTEFGNYDYLMYADYDMDHPEVVNELRNWGVWYTNTLGLDGFRIDAVKHIKYSFTRDWINHVRSATGKNMFAVAEFWKNDLGAIENYLQKTNWNHSVFDVPLHYNLYNASKSGGNYDMRNIFNGTVVQRHPSRAVTFVDNHDSQPEEALESFVEEWFKPLAYALTLTREQGYPSVFYGDYYGIPTHGVPAMRSKIDPILEARQKYAYGPQHDYLDHPDVIGWTREGDSSHPKSGLATLITDGPGGSKRMYAGLKNAGETWYDITGNRSDTVKIGSDGWGEFHVNDGSVSIYVQK

SEQ ID NO: 39883 - protein, 480 aa, Synthetic construct
NGTMMQYFEWYLPNDGNHWNRLNSDASNLKSKGITAVWIPPAWKGASQNDVGYGAYDLYDLGEFNQKGTVRTKYGTRSQLQAAVTSLKNNGIQVYGDVVMNHKGGADATEMVRAVEVNPNNRNQEVTGEYTIEAWTRFDFPGRGNTHSSFKWRWYHFDGVDWDQSRRLNNRIYKFRGHGKAWDWEVDTENGNYDYLMYADIDMDHPEVVNELRNWGVWYTNTLGLDGFRIDAVKHIKYSFTRDWINHVRSATGKNMFAVAEFWKNDLGAIENYLQKTNWNHSVFDVPLHYNLYNASKSGGNYDMRNIFNGTVVQRHPSHAVTFVDNHDSQPEEALESFVEEWFKPLAYALTLTREQGYPSVFYGDYYGIPTHGVPAMRSKIDPILEARQKYAYGPQHDYLDHPDVIGWTREGDSSHPKSGLATLITDGPGGSKRMYAGLKNAGETWYDITGNRSDTVKIGSDGWGEFHVNDGSVSIYVQQ

SEQ ID NO: 39884 - protein, 480 aa, Synthetic construct
NGTMMQYFEWYLPNDGNHWNRLNSDASNLKSKGITAVWIPPAWKGASQNDVGYGAYDLYDLGEFNQKGTVRTKYGTRSQLQAAVTSLKNNGIQVYGDVVMNHKGGADATEMVRAVEVNPNNRNQEVTGEYTIEAWTRFDFPGRGNTHSSFKWRWYHFDGVDWDQSRRLNNRIYKFRGHGKAWDWEVDTEFGNYDYLMYADYDMDHPEVVNELRNWGVWYTNTLGLDGFRIDAVKHIKYSFTRDWINHVRSATGKNMFAVAEFWKNDLGAIENYLQKTNWNHSVFDVPLHYNLYNASKSGGNYDMRNIFNGTVVQRHPWHAVTFVDNHDSQPEEALESFVEEWFKPLAYALTLTREQGYPSVFYGDYYGIPTHGVPAMRSKIDPILEARQKYAYGPQHDYLDHPDVIGWTREGDSSHPKSGLATLITDGPGGSKRMYAGLKNAGETWYDITGNRSDTVKIGSDGWGEFHVNDGSVSIYVQK

SEQ ID NO: 39885 - protein, 481 aa, Bacillus sp.
NGTMMQYFEWYLPNDGNHWNRLNSDASNLKSKGITAVWIPPAWKGASQNDVGYGAYDLYDLGEFNQKGTVRTKYGTRSQLQAAVTSLKNNGIQVYGDVVMNHKGGADATEMVRAVEVNPNNRNQEVTGEYTIEAWTRFDFPGRGNTHSSFKWRWYHFDGVDWDQSRRLNNRIYKFRGHGKAWDWEVDTEFGNYDYLMYADYDMDHPEVVNELRNWGVWYTNTLGLDGFRIDAVKHIKYSFTRDWINHVRSATGKNMFAVAEFWKNDLGAIENYLQKTNWNHSVFDVPLHYNLYNASKSGGNYDMRNIFNGTVVQRHPSHAVTFVDNHDSQGPEEALESFVEEWFKPLAYALTLTREQGYPSVFYGDYYGIPTHGVPAMRSKIDPILEARQKYAYGPQHDYLDHPDVIGWTREGDSSHPKSGLATLITDGPGGSKRMYAGLKNAGETWYDITGNRSDTVKIGSDGWGEFHVNDGSVSIYVQK

SEQ ID NO: 39886 - protein, 480 aa, Synthetic construct
NGTMMQYFEWYLPNDGNHWNRLNSDASNLKSKGITAVWIPPAWKGASQNDVGYGAYDLYDLGEFNQKGTVRTKYGTRSQLQAAVTSLKNNGIQVYGDVVMNHKGGADATEMVRAVEVNPNNRNQEVTGEYTIEAWTRFDFPGRGNTHSSFKWRWYHFDGVDWDQSRRLNNRIYKFRGHGKAWDWEVDTENGNYDYLMYADIDMDHPEVVNELRNWGVWYTNTLGLDGFRIDAVKHIKYSFTRDWINHVRSATGKNMFAVAEFWKNDLGAIENYLQKTNWNHSVFDVPLHYNLYNASKSGGNYDMRNIFNGTVVQRHPSHAVTFVDNHDSQPEEALESFVEEWFKPLAYALTLTREQGYPSVFYGDYYGIPTHGVPAMRSKIDPILEARQKYAYGPQHDYLDHPDVIGWTREGDSSHPKSGLATLITDGPGGSKRMYAGLKNAGETWYDITGNRSDTVKIGSDGWGEFHVNDGSVSIYVQR

SEQ ID NO: 39887 - protein, 480 aa, Bacillus sp.
NGTMMQYFEWYLPNDGNHWNRLNSDASNLKSKGITAVWIPPAWKGASQNDVGYGAYDLYDLGEFNQKGTVRTKYGTRSQLQAAVTSLKNNGIQVYGDVVMNHKGGADATEMVRAVEVNPNNRNQEVTGEYTIEAWTRFDFPGRGNTHSSFKWRWYHFDGVDWDQSRRLNNRIYKFRGHGKAWDWEVDTEFGNYDYLMYADYDMDHPEVVNELRNWGVWYTNTLGLDGFRIDAVKHIKYSFTRDWINHVRSATGKNMFAVAEFWKNDLGAIENYLQKTDWNHSVFDVPLHYNLYNASKSGGNYDMRNIFNGTVVQRHPSHAVTFVDNHDSQPEEALESFVEEWFKPLAYALTLTREQGYPSVFYGDYYGIPTHGVPAMRSKIDPILEARQKYAYGPQHDYLDHPDVIGWTREGDSSHPKSGLATLITDGPGGSKRMYAGLKNAGETWYDITGNRSDTVKIGSDGWGEFHVNDGSVSIYVQK

SEQ ID NO: 39888 - protein, 480 aa, Bacillus sp.
NGTMMQYFEWYLPNDGNHWNRLNSDASNLKSKGITAVWIPPAWKGASQNDVGYGAYDLYDLGEFNQKGTVRTKYGTRSQLQAAVTSLKNNGIQVYGDVVMNHKGGADATEMVRAVEVNPNNRNQEVTGEYTIEAWTRFDFPGRGNTHSSFKWRWYHFDGVDWDQSRRLNNRIYKFRGHGKAWDWEVDTEFGNYDYLMYADYDMDHPEVVNELREWGVWYTNTLGLDGFRIDAVKHIKYSFTRDWINHVRSATGKNMFAVAEFWKNDLGAIENYLQKTNWNHSVFDVPLHYNLYNASKSGGNYDMRNIFNGTVVQRHPSHAVTFVDNHDSQPEEALESFVEEWFKPLAYALTLTREQGYPSVFYGDYYGIPTHGVPAMRSKIDPILEARQKYAYGPQHDYLDHPDVIGWTREGDSSHPKSGLATLITDGPGGSKRMYAGLKNAGETWYDITGNRSDTVKIGSDGWGEFHVNDGSVSIYVQK

SEQ ID NO: 39889 - protein, 480 aa, Bacillus sp.
NGTMMQYFEWYLPNDGNHWNRLNSDASNLKSKGITAVWIPPAWKGASQNDVGYGAYDLYDLGEFNQKGTVRTKYGTRSQLQAAVTSLKNNGIQVYGDVVMNHKGGADATEMVRAVEVNPNNRNQEVTGEYTIEAWTRFDFPGRGNTHSSFKWRWYHFDGVDWDQSRRLNNRIYKFRGHGKAWDWEVDTEFGNYDYLMYADYDMDHPEVVNELRNWGVWYTNTLGLDGFRIDAVKHIKYSFTRDWINHVRSATGKNMFAVAEFWKNDLGAIENYLQKTNWNHSVFDVPLHYNLYNASKSGGNYDMRNIFNGTVVQRHPSHAVTFVDNHDSQPEEALESFVEPWFKPLAYALTLTREQGYPSVFYGDYYGIPTHGVPAMRSKIDPILEARQKYAYGPQHDYLDHPDVIGWTREGDSSHPKSGLATLITDGPGGSKRMYAGLKNAGETWYDITGNRSDTVKIGSDGWGEFHVNDGSVSIYVQK

SEQ ID NO: 39890 - protein, 480 aa, Bacillus sp.
NGTMMQYFEWYLPNDGNHWNRLNSDASNLKSKGITAVWIPPAWKGASQNDVGYGAYDLYDLGEFNQKGTVRTKYGTRSQLQAAVTSLKNNGIQVYGDVVMNHKGGADATEMVRAVEVNPNNRNQEVTGEYTIEAWTRFDFPGRGNTHSSFKWRWYHFDGVDWDQSRQLENRIYKFRGHGKAWDWEVDTEFGNYDYLMYADYDMDHPEVVNELRNWGVWYTNTLGLDGFRIDAVKHIKYSFTRDWINHVRSATGKNMFAVAEFWKNDLGAIENYLQKTNWNHSVFDVPLHYNLYNASKSGGNYDMRNIFNGTVVQRHPSHAVTFVDNHDSQPEEALESFVEEWFKPLAYALTLTREQGYPSVFYGDYYGIPTHGVPAMRSKIDPILEARQKYAYGPQHDYLDHPDVIGWTREGDSSHPKSGLATLITDGPGGSKRMYAGLKNAGETWYDITGNRSDTVKIGSDGWGEFHVNDGSVSIYVQK

SEQ ID NO: 39891 - protein, 480 aa, Bacillus sp.
NGTMMQYFEWYLPNDGNHWNRLSSDASNLKSKGITAVWIPPAWKGASQNDVGYGAYDLYDLGEFNQKGTVRTKYGTRSQLQAAVTSLKNNGIQVYGDVVMNHKGGADATEMVRAVEVNPNNRNQEVTGEYTIEAWTRFDFPGRGNTHSSFKWRWYHFDGVDWDQSRRLNNRIYKFRGHGKAWDWEVDTEFGNYDYLMYADYDMDHPEVVNELRNWGVWYTNTLGLDGFRIDAVKHIKYSFTRDWINHVRSATGKNMFAVAEFWKNDLGAIENYLQKTNWNHSVFDVPLHYNLYNASKSGGNYDMRNIFNGTVVQRHPSHAVTFVDNHDSQPEEALESFVEEWFKPLAYALTLTREQGYPSVFYGDYYGIPTHGVPAMRSKIDPILEARQKYAYGPQHDYLDHPDVIGWTREGDSSHPKSGLATLITDGPGGSKRMYAGLKNAGETWYDITGNRSDTVKIGSDGWGEFHVNDGSVSIYVQK

SEQ ID NO: 39892 - protein, 480 aa, Synthetic construct
NGTMMQYFEWYLPNDGNHWNRLNSDASNLKSKGITAVWIPPAWKGASQNDVGYGAYDLYDLGEFNQKGTVRTKYGTRSQLQAAVTSLKNNGIQVYGDVVMNHKGGADATEMVRAVEVNPNNRNQEVTGEYTIEAWTRFDFPGRGNTHSSFKWRWYHFDGVDWDGSRRLNNRIYKFRGHGKAWDWEVDTEFGNYDYLMYADYDMDHPEVVNELRNWGVWYTNTLGLDGFRIDAVKHIKYSFTRDWINHVRSATGKNMFAVAEFWKNDLGAIENYLQKTNWNHSVFDVPLHYNLYNASKSGGNYDMRNIFNGTVVQRHPSHAVTFVDNHDSQPEEALESFVEEWFKPLAYALTLTREQGYPSVFYGDYYGIPTHGVPAMRSKIDPILEARQKYAYGPQHDYLDHPDVIGWTREGDSSHPKSGLATLITDGPGGSKRMYAGLKNAGETWYDITGNRSDTVKIGSDGWGEFHVNDGSVSIYVQK

SEQ ID NO: 39893 - protein, 480 aa, Synthetic construct
NGTMMQYFEWYLPNDGNHWNRLNSDASNLKSKGITAVWIPPAWKGASQNDVGYGAYDLYDLGEFNQKGTVRTKYGTRSQLQAAVTSLKNNGIQVYGDVVMNHKGGADATEMVRAVEVNPNNRNQEVTGEYTIEAWTRFDFPGRGNTHSSFKWRWYHFDGVDWDQSRRLNNRIYKFRGHGKAWDWEVDTENGNYDYLMYADIDMDHPEVVNELRNWGVWYTNTLGLDGFRIDAVKHIKYSFTRDWINHVRSATGKNMFAVAEFWKNDLGAIENYLQKVNWNHSVFDVPLHYNLYNASKSGGNYDMRNIFNGTVVQRHPSHAVTFVDNHDSQPEEALESFVEEWFKPLAYALTLTREQGYPSVFYGDYYGIPTHGVPAMRSKIDPILEARQKYAYGPQHDYLDHPDVIGWTREGDSSHPKSGLATLITDGPGGSKRMYAGLKNAGETWYDITGNRSDTVKIGSDGWGEFHVNDGSVSIYVQK

SEQ ID NO: 39894 - protein, 480 aa, Synthetic construct
NGTMMQYFEWYLPNDGNHWNRLNSDASNLKSKGITAVWIPPAWKGASQNDVGYGAYDLYDLGEFNQKGTVRTKYGTRSQLQAAVTSLKNNGIQVYGDVVMNHKGGADATEMVRAVEVNPNNRNQEVTGEYTIEAWTRFDFPGRGNTHSSFKWRWYHFDGVDWDQSRRLNNRIYKFRGHGKAWDWEVDTEFGNYDYLMYADYDMDHPEVVNELRNWGVWYTNTLGLDGFRIDAVKHIKYSFTRDWINHVRSATGKNMFAVAEFWHNDLGCIENYLQKTNWNHSVFDVPLHYNLYNASKSGGNYDMRNIFNGTVVQRHPSHAVTFVDNHDSQPEEALESFVEEWFKPLAYALTLTREQGYPSVFYGDYYGIPTHGVPAMRSKIDPILEARQKYAYGPQHDYLDHPDVIGWTREGDSSHPKSGLATLITDGPGGSKRMYAGLKNAGETWYDITGNRSDTVKIGSDGWGEFHVNDGSVSIYVQK

SEQ ID NO: 39895 - protein, 480 aa, Synthetic construct
NGTMMQYFEWYLPNDGNHWNRLNSDASNLKSKGITAVWIPPAWKGASQNDVGYGAYDLYDLGEFNQKGTVRTKYGTRSQLQAAVTSLKNNGIQVYGDVVMNHKGGADATEMVRAVEVNPNNRNQEVTGEYTIEAWTRFDFPGRGNTHSSFKWRWYHFDGVDWDQSRDLNNRIYKFRGHGKAWDWEVDTEFGNYDYLMYADYDMDHPEVVNELRNWGVWYTNTLGLDGFRIDAVKHIKYSFTRDWINHVRSATGKNMFAVAEFWKNDLGAIENYLQKTNWNHSVFDVPLHYNLYNASKSGGNYDMRNIFNGTVVQRHPSHAVTFVDNHDSQPEEALESFVEEWFKPLAYALTLTREQGYPSVFYGDYYGIPTHGVPAMRSKIDPILEARQKYAYGPQHDYLDHPDVIGWTREGDSSHPKSGLATLITDGPGGSKRMYAGLKNAGETWYDITGNRSDTVKIGSDGWGEFHVNDGSVSIYVQK

SEQ ID NO: 39896 - protein, 480 aa, Synthetic construct
NGTMMQYFEWYLPNDGNHWNRLNSDASNLKSKGITAVWIPPAWKGASQNDVGYGAYDLYDLGEFNQKGTVRTKYGTRSQLQAAVTSLKNNGIQVYGDVVMNHKGGADATEMVRAVEVNPNNRNQEVTGEYTIEAWTRFDFPGRGNTHSSFKWRWYHFDGVDWDQSRRLNNRIYKFRGHGKAWDWEVDTENGNYDYLMYADIDMDHPEVVNELRNWGVWYTNTLGLDGFRIDAVKHIKYSFTRDWINHVRSATGKNMFAVAEFWKNDLGAIENYLQKTNWNHSVFDVPLHYNLYNASKSGGNYDMRNIFNGTVVQRHPSHAVTFVDNHDSQPEEALESFVEEWFKPLAYALTLTREQGYPSVFYGDYYGIPTHGVPAMRSKIDPILEARQKYAYGPQHDYLDHQDVIGWTREGDSSHPKSGLATLITDGPGGSKRMYAGLKNAGETWYDITGNRSDTVKIGSDGWGEFHVNDGSVSIYVQK

SEQ ID NO: 39897 - protein, 480 aa, Bacillus sp.
NGTMMQYFEWYLPNDGNHWNRLNSDASNLKSKGITAVWIPPAWKGISQNDVGYGAYDLYDLGEFNQKGTVRTKYGTRSQLQAAVTSLKNNGIQVYGDVVMNHKGGADATEMVRAVEVNPNNRNQEVTGEYTIEAWTRFDFPGRGNTHSSFKWRWYHFDGVDWDQSRELTNRIYKFRGHGKAWDWEVDTEFGNYDYLMYADYDMDHPEVVNELRNWGVWYTNTLGLDGFRIDAVKHIKYSFTRDWINHVRSATGKNMFAVAEFWKNDLGAIENYLQKTNWNHSVFDVPLHYNLYNASKSGGNYDMRNIFNGTVVQRHPSHAVTFVDNHDSQPEEALESFVEEWFKPLAYALTLTREQGYPSVFYGDYYGIPTHGVPAMRSKIDPILEARQKYAYGPQHDYLDHPDVIGWTREGDSSHPKSGLATLITDGPGGSKRMYAGLKNAGETWYDITGNRSDTVKIGSDGWGEFHVNDGSVSIYVQK

SEQ ID NO: 39898 - protein, 480 aa, Bacillus sp.
NGTMMQYFEWYLPNDGNHWNRLNSDASNLKSKGITAVWIPPAWKGASQNDVGYGAYDLYDLGEFNQKGTVRTKYGTRSQLQAAVTSLKNNGIQVYGDVVMNHKGGADATEMVRAVEVNPNNRNQEVTGEYTIEAWTRFDFPGRGNTHSSFKWRWYHFDGVDWDQSRRLNNRIYKFRGHGKAWDWEVDTEFGNYDYLMYADYDMDHPEVVNELRNWGVWYTNTLGLDGFRIDAVKHIKYSFTRDWINHVRSATGKNMFAVAEFWKNDLGAIENYLQKTNWNHSVFDVPLHYNLYNASKGGGNYDMRNIFNGTVVQRHPSHAVTFVDNHDSQPEEALESFVEEWFKPLAYALTLTREQGYPSVFYGDYYGIPTHGVPAMRSKIDPILEARQKYAYGPQHDYLDHPDVIGWTREGDSSHPKSGLATLITDGPGGSKRMYAGLKNAGETWYDITGNRSDTVKIGSDGWGEFHVNDGSVSIYVQK

SEQ ID NO: 39899 - protein, 480 aa, Bacillus sp.
NGTMMQYFEWYLPNDGNHWNRLNSDASNLKSKGITAVWIPPAWKATSQNDVGYGAYDLYDLGEFNQKGTVRTKYGTRSQLQAAVTSLKNNGIQVYGDVVMNHKGGADATEMVRAVEVNPNNRNQEVTGEYTIEAWTRFDFPGRGNTHSSFKWRWYHFDGVDWDQSRRFSNRIYKFRGHGKAWDWEVDTEFGNYDYLMYADYDMDHPEVVNELRNWGVWYTNTLGLDGFRIDAVKHIKYSFTRDWINHVRSATGKNMFAVAEFWKNDLGAIENYLQKTNWNHSVFDVPLHYNLYNASKSGGNYDMRNIFNGTVVQRHPSHAVTFVDNHDSQPEEALESFVEEWFKPLAYALTLTREQGYPSVFYGDYYGIPTHGVPAMRSKIDPILEARQKYAYGPQHDYLDHPDVIGWTREGDSSHPKSGLATLITDGPGGSKRMYAGLKNAGETWYDITGNRSDTVKIGSDGWGEFHVNDGSVSIYVQK

SEQ ID NO: 39900 - protein, 480 aa, Synthetic construct
NGTMMQYFEWYLPNDGNHWNRLNSDASNLKSKGITAVWIPPAWKGASQNDVGYGAYDLYDLGEFNQKGTVRTKYGTRSQLQAAVTSLKNNGIQVYGDVVMNHKGGADATEMVRAVEVNPNNRNQEVTGEYTIEAWTRFDFPGRGNTHSSFKWRWYHFDGVDWDQSRRLNNRIYKFRGHGKAWDWEVDTENGNYDYLMYADIDMDHPEVVNELRNWGVWYTNTLGLDGFRIDAVKHIKYSFTRDWINHVRSATGKNMFAVAEFWKNDLGAIENYLQKTNWNHSVFDVPLHYNLYNASKSGGNYDMRNIFNGTVVQRHPSHAVTFVDNHDSQPEEALESFVEEWFKPLAYALTLTREQGYPSVFYGDYYGIPTHGVPAMRSKIDPILEARQKYAYGPQHDYLDHPDVIGWTREGDSSHPKSGLATLITDGPGGSKRMYAGLKNAGETWYDITGNRTDTVKIGSDGWGEFHVNDGSVSIYVQK

SEQ ID NO: 39901 - protein, 480 aa, Bacillus sp.
NGTMMQYFEWYLPNDGNHWNRLNSDASNLKSKGITAVWIPPAWKGASQNDVGYGAYDLYDLGEFNQKGTVRTKYGTRSQLQAAVTSLKNNGIQVYGDVVMNHKGGADATEMVRAVEVNPNNRNQEVTGEYTIEAWTRFDFPGRGNTHSSFKWRWYHFDGVDWDQSRRLNNRIYKFRGHGKAWDWEVDTEFGNYDYLMYADYDMDHPEVVNELRNWGVWYTNTLGLDGFRIDAVKHIKYSFTRDWINHVRSATGKNMFAVAEFWKNDLGAIENYLQKTNWNHSVFDVPLHYNLYTASKSGGNYDMRNIFNGTVVQRHPSHAVTFVDNHDSQPEEALESFVEEWFKPLAYALTLTREQGYPSVFYGDYYGIPTHGVPAMRSKIDPILEARQKYAYGPQHDYLDHPDVIGWTREGDSSHPKSGLATLITDGPGGSKRMYAGLKNAGETWYDITGNRSDTVKIGSDGWGEFHVNDGSVSIYVQK

SEQ ID NO: 39902 - protein, 480 aa, Synthetic construct
NGTMMQYFEWYLPNDGNHWNRLNSDASNLKSKGITAVWIPPAWKGASQNDVGYGAYDLYDLGEFNQKGTVRTKYGTRSQLQAAVTSLKNNGIQVYGDVVMNHKGGADATEMVRAVEVNPNNRNQEVTGEYTIEAWTRFDFPGRGNTHSSFKWRWYHFDGVDWDQSRRLNNRIYKFRGHGKAWDWEVDTEFGNYDYLMYADYDMDHPEVVNELRNWGVWYTNTLGLDGFRIDAVKHIKYSFTRDWINHVRSATGKNMFAVAEFWRNDLGGIENYLQKTNWNHSVFDVPLHYNLYNASKSGGNYDMRNIFNGTVVQRHPSHAVTFVDNHDSQPEEALESFVEEWFKPLAYALTLTREQGYPSVFYGDYYGIPTHGVPAMRSKIDPILEARQKYAYGPQHDYLDHPDVIGWTREGDSSHPKSGLATLITDGPGGSKRMYAGLKNAGETWYDITGNRSDTVKIGSDGWGEFHVNDGSVSIYVQK

SEQ ID NO: 39903 - protein, 480 aa, Bacillus sp.
NGTMMQYFEWYLPNDGNHWNRLNSDASNLKSKGITAVWIPPAWKGASQNDVGYGAYDLYDLGEFNQKGTVRTKYGTRSQLQAAVTSLKNNGIQVYGDVVMNHKGGADATEMVRAVEVNPNNRNQEVTGEYTIEAWTRFDFPGRGNTHSSFKWRWYHFDGVDWDQSRELTNRIYKFRGHGKAWDWEVDTEFGNYDYLMYADYDMDHPEVVNELRNWGVWYTNTLGLDGFRIDAVKHIKYSFTRDWINHVRSATGKNMFAVAEFWKNDLGAIENYLQKTNWNHSVFDVPLHYNLYNASKSGGNYDMRNIFNGTVVQRHPSHAVTFVDNHDSQPEEALESFVEEWFKPLAYALTLTREQGYPSVFYGDYYGIPTHGVPAMRSKIDPILEARQKYAYGPQHDYLDHPDVIGWTREGDSSHPKSGLATLITDGPGGSKRMYAGLKNAGETWYDITGNRSDTVKIGSDGWGEFHVNDGSVSIYVQK

SEQ ID NO: 39904 - protein, 480 aa, Bacillus sp.
NGTMMQYFEWYLPNDGNHWNRLNSDASNLKSKGITAVWIPPAWKGASQNDVGYGAYDLYDLGEFNQKGTVRTKYGTRSQLQAAVTSLKNNGIQVYGDVVMNHKGGADATEMVRAVEVNPNNRNQEVTGEYTIEAWTRFDFPGRGNTHSSFKWRWYHFDGVDWDQSRRLNNRIYKFRGHGKAWDWEVDTEFGNYDYLMYADYDMDHPEVVNELRNWGVWYTNTLGLDGFRIDAVKHIKYSFTRDWINHVRSATGKNMFAVAEFWKNDLGAIENYLQKTNWNHSVFDVPLHYNLYNASKRGGNYDMRNIFNGTVVQRHPSHAVTFVDNHDSQPEEALESFVEEWFKPLAYALTLTREQGYPSVFYGDYYGIPTHGVPAMRSKIDPILEARQKYAYGPQHDYLDHPDVIGWTREGDSSHPKSGLATLITDGPGGSKRMYAGLKNAGETWYDITGNRSDTVKIGSDGWGEFHVNDGSVSIYVQK

SEQ ID NO: 39905 - protein, 480 aa, Bacillus sp.
NGTMMQYFEWYLPNDGNHWNRLNSDASNLKSKGITAVWIPPAWKGASQNDVGYGAYDLYDLGEFNQKGTVRTKYGTRSQLQAAVTSLKNNGIQVYGDVVMNHKGGADATEMVRAVEVNPNNRNQEVTGEYNIEAWTRFDFPGRGNTHSSFKWRWYHFDGVDWDQSRRLNNRIYKFRGHGKAWDWEVDTEFGNYDYLMYADYDMDHPEVVNELRNWGVWYTNTLGLDGFRIDAVKHIKYSFTRDWINHVRSATGKNMFAVAEFWKNDLGAIENYLQKTNWNHSVFDVPLHYNLYNASKSGGNYDMRNIFNGTVVQRHPSHAVTFVDNHDSQPEEALESFVEEWFKPLAYALTLTREQGYPSVFYGDYYGIPTHGVPAMRSKIDPILEARQKYAYGPQHDYLDHPDVIGWTREGDSSHPKSGLATLITDGPGGSKRMYAGLKNAGETWYDITGNRSDTVKIGSDGWGEFHVNDGSVSIYVQK

SEQ ID NO: 39906 - protein, 480 aa, Bacillus sp.
NGTMMQYFEWYLPNDGNHWNRLNSDASNLKSKGITAVWIPPAWKAASQNDVGYGAYDLYDLGEFNQKGTVRTKYGTRSQLQAAVTSLKNNGIQVYGDVVMNHKGGADATEMVRAVEVNPNNRNQEVTGEYTIEAWTRFDFPGRGNTHSSFKWRWYHFDGVDWDQSRRLSNRIYKFRGHGKAWDWEVDTEFGNYDYLMYADYDMDHPEVVNELRNWGVWYTNTLGLDGFRIDAVKHIKYSFTRDWINHVRSATGKNMFAVAEFWKNDLGAIENYLQKTNWNHSVFDVPLHYNLYNASKSGGNYDMRNIFNGTVVQRHPSHAVTFVDNHDSQPEEALESFVEEWFKPLAYALTLTREQGYPSVFYGDYYGIPTHGVPAMRSKIDPILEARQKYAYGPQHDYLDHPDVIGWTREGDSSHPKSGLATLITDGPGGSKRMYAGLKNAGETWYDITGNRSDTVKIGSDGWGEFHVNDGSVSIYVQK

SEQ ID NO: 39907 - protein, 480 aa, Synthetic construct
NGTMMQYFEWYLPNDGNHWNRLNSDASNLKSKGITAVWIPPAWKAASQNDVGYGAYDLYDLGEFNQKGTVRTKYGTRSQLQAAVTSLKNNGIQVYGDVVMNHKGGADATEMVRAVEVNPNNRNQEVTGEYTIEAWTRFDFPGRGNTHSSFKWRWYHFDGVDWDQSRKLDNRIYKFRGHGKAWDWEVDTEFGNYDYLMYADYDMDHPEVVNELRNWGVWYTNTLGLDGFRIDAVKHIKYSFTRDWINHVRSATGKNMFAVAEFWKNDLGAIENYLQKTNWNHSVFDVPLHYNLYNASKSGGNYDMRNIFNGTVVQRHPSHAVTFVDNHDSQPEEALESFVEEWFKPLAYALTLTREQGYPSVFYGDYYGIPTHGVPAMRSKIDPILEARQKYAYGPQHDYLDHPDVIGWTREGDSSHPKSGLATLITDGPGGSKRMYAGLKNAGETWYDITGNRSDTVKIGSDGWGEFHVNDGSVSIYVQK

SEQ ID NO: 39908 - protein, 480 aa, Synthetic construct
NGTMMQYFEWYLPNDGNHWNRLNSDASNLKSKGITAVWIPPAWKGASQNDVGYGAYDLYDLGEFNQKGTVRTKYGTRSQLQAAVTSLKNNGIQVYGDVVMNHKGGADATEMVRAVEVNPNNRNQEVTGEYTIEAWTRFDFPGRGNTHSSFKWRWYHFDGVDWDQSRRLNNRIYKFRGHGKAWDWEVDTEFGNYDYLMYADYDMDHPEVVNELRNWGVWYTNTLGLDGFRIDAVKHIKYSFTRDWINHVRSATGKNMFAVAEFWKNDLGAIENYLQKTNWNHSVFDVPLHYNLYNASKSGGNYDMRNIFNGTVVQRHPSHAVTFVDNHDSQPEEALESFVEEWFKPLAYALTLTREQGYPSVFYGDYYGIPTHGVPAMRSKIDPILIARQKYAYGPQHDYLDHPDVIGWTREGDSSHPKSGLATLITDGPGGSKRMYAGLKNAGETWYDITGNRSDTVKIGSDGWGEFHVNDGSVSIYVQK

SEQ ID NO: 39909 - protein, 480 aa, Bacillus sp.
NGTMMQYFEWYLPNDGNHWNRLNSDASNLKSKGITAVWIPPAWKGASQNDVGYGAYDLYDLGEFNQKGTVRTKYGTRSQLQAAVTSLKNNGIQVYGDVVMNHKGGADATEMVRAVEVNPNNRNQEVTGEYTIEAWTRFDFPGRGNTHSSFKWRWYHFDGVDWDQSRRLNNRIYKFRGHGKAWDWEVDTEFGNYDYLMYADYDMDHPEVVDELRNWGVWYTNTLGLDGFRIDAVKHIKYSFTRDWINHVRSATGKNMFAVAEFWKNDLGAIENYLQKTNWNHSVFDVPLHYNLYNASKSGGNYDMRNIFNGTVVQRHPSHAVTFVDNHDSQPEEALESFVEEWFKPLAYALTLTREQGYPSVFYGDYYGIPTHGVPAMRSKIDPILEARQKYAYGPQHDYLDHPDVIGWTREGDSSHPKSGLATLITDGPGGSKRMYAGLKNAGETWYDITGNRSDTVKIGSDGWGEFHVNDGSVSIYVQK

SEQ ID NO: 39910 - protein, 480 aa, Synthetic construct
NGTMMQYFEWYLPNDGNHWNRLNSDASNLKSKGITAVWIPPAWKGASQNDVGYGAYDLYDLGEFNQKGTVRTKYGTRSQLQAAVTSLKNNGIQVYGDVVMNHKGGADATEMVRAVEVNPNNRNQEVTGEYTIEAWTRFDFPGRGNTHSSFKWRWYHFDGVDWDQSRRLGNRIYKFRGHGKAWDWEVDTEFGNYDYLMYADYDMDHPEVVNELRNWGVWYTNTLGLDGFRIDAVKHIKYSFTRDWINHVRSATGKNMFAVAEFWKNDLGAIENYLQKTNWNHSVFDVPLHYNLYNASKSGGNYDMRNIFNGTVVQRHPSHAVTFVDNHDSQPEEALESFVEEWFKPLAYALTLTREQGYPSVFYGDYYGIPTHGVPAMRSKIDPILEARQKYAYGPQHDYLDHPDVIGWTREGDSSHPKSGLATLITDGPGGSKRMYAGLKNAGETWYDITGNRSDTVKIGSDGWGEFHVNDGSVSIYVQK

SEQ ID NO: 39911 - protein, 480 aa, Synthetic construct
NGTMMQYFEWYLPNDGNHWNRLNSDASNLKSKGITAVWIPPAWKGASQNDVGYGAYDLYDLGEFNQKGTVRTKYGTRSQLQAAVTSLKNNGIQVYGDVVMNHKGGADATEMVRAVEVNPNNRNQEVTGEYTIEAWTRFDFPGRGNTHSSFKWGWYHFDGVDWDQSRRLENRIYKFRGHGKAWDWEVDTEFGNYDYLMYADYDMDHPEVVNELRNWGVWYTNTLGLDGFRIDAVKHIKYSFTRDWINHVRSATGKNMFAVAEFWKNDLGAIENYLQKTNWNHSVFDVPLHYNLYNASKSGGNYDMRNIFNGTVVQRHPSHAVTFVDNHDSQPEEALESFVEEWFKPLAYALTLTREQGYPSVFYGDYYGIPTHGVPAMRSKIDPILEARQKYAYGPQHDYLDHPDVIGWTREGDSSHPKSGLATLITDGPGGSKRMYAGLKNAGETWYDITGNRSDTVKIGSDGWGEFHVNDGSVSIYVQK

SEQ ID NO: 39912 - protein, 480 aa, Bacillus sp.
NGTMMQYFEWYLPNDGNHWNRLNSDASNLKSKGITAVWIPPAWKGASQNDVGYGAYDLYDLGEFNQKGTVRTKYGTRSQLQAAVTSLKNNGIQVYGDVVMNHKGGADATEMVRAVEVNPNNRNQEVTGEYTIEAWTRFDFPGRGNTHSSFKWRWYHFDGVDWDQSRRLNNRIYKFRGHGKAWDWEVDTEFGNYDYLMYADYDMDHPEVVNEFRNWGVWYTNTLGLDGFRIDAVKHIKYSFTRDWINHVRSATGKNMFAVAEFWKNDLGAIENYLQKTNWNHSVFDVPLHYNLYNASKSGGNYDMRNIFNGTVVQRHPSHAVTFVDNHDSQPEEALESFVEEWFKPLAYALTLTREQGYPSVFYGDYYGIPTHGVPAMRSKIDPILEARQKYAYGPQHDYLDHPDVIGWTREGDSSHPKSGLATLITDGPGGSKRMYAGLKNAGETWYDITGNRSDTVKIGSDGWGEFHVNDGSVSIYVQK

SEQ ID NO: 39913 - protein, 480 aa, Bacillus sp.
NGTMMQYFEWYLPNDGNHWNRLNSDASNLKSKGITAVWIPPAWKGASQNDVGYGAYDLYDLGEFNQKGTVRTKYGTRSQLQAAVTSLKNNGIQVYGDVVMNHKGGADATEMVRAVEVNPNNRNQEVTGEYTIEAWTRFDFPGRGNTHSSFKWRWYHFDGVDWDQSRRLNNRIYKFRGHGKAWDWEVDTEFGNYDYLMYADYDMDHPEVVNELRNWGVWYTNTLGLDGFRIDAVKHIKYSFTRDWINHVRSATGKNMFAVAEFWKNDLGAIENYLQKTNWNHSVFDVPLHYNLYNASKSAGNYDMRNIFNGTVVQRHPSHAVTFVDNHDSQPEEALESFVETWFKPLAYALTLTREQGYPSVFYGDYYGIPTHGVPAMRSKIDPILEARQKYAYGPQHDYLDHPDVIGWTREGDSSHPKSGLATLITDGPGGSKRMYAGLKNAGETWYDITGNRSDTVKIGSDGWGEFHVNDGSVSIYVQK

SEQ ID NO: 39914 - protein, 480 aa, Bacillus sp.
NGTMMQYFEWYLPNDGNHWNRLNSDASNLKSKGITAVWIPPAWKGASQNDVGYGAYDLYDLGEFNQKGTVRTKYGTRSQLQAAVTSLKNNGIQVYGDVVMNHKGGADATEMVRAVEVNPNNRNQEVTGEYTIEAWTRFDFPGRGNTHSSFKWRWYHFDGVDWDQSRRLNNRIYKFRGHGKAWDWEVDTEFGNYDYLMYADYDMDHPEVVNELRNWGVWYTNTLGLDGFRIDAVKHIKYSFTRDWINHVRSATGKNMFAVAEFWKNDLGAIENYLKKTNWNHSVFDVPLHYNLYNASKSGGNYDMRNIFNGTVVQRHPSHAVTFVDNHDSQPEEALESFVEEWFKPLAYALTLTREQGYPSVFYGDYYGIPTHGVPAMRSKIDPILEARQKYAYGPQHDYLDHPDVIGWTREGDSSHPKSGLATLITDGPGGSKRMYAGLKNAGETWYDITGNRSDTVKIGSDGWGEFHVNDGSVSIYVQK

SEQ ID NO: 39915 - protein, 480 aa, Synthetic construct
NGTMMQYFEWYLPNDGNHWNRLNSDASNLKSKGITAVWIPPAWKGASQNDVGYGAYDLYDLGEFNQKGTVRTKYGTRSQLQAAVTSLKNNGIQVYGDVVMNHKGGADATEMVRAVEVNPNNRNQEVTGEYTIEAWTRFDFPGRGNTHSSFKWRWYHFDGVDWDQSRRLNNRIYKFRGHGKAWDWEVDTENGNYDYLMYADIDMDHPEVVNELRNWGVWYTNTLGLDGFRIDAVKHIKYSFTKDWINHVRSATGKNMFAVAEFWKNDLGAIENYLQKTNWNHSVFDVPLHYNLYNASKSGGNYDMRNIFNGTVVQRHPSHAVTFVDNHDSQPEEALESFVEEWFKPLAYALTLTREQGYPSVFYGDYYGIPTHGVPAMRSKIDPILEARQKYAYGPQHDYLDHPDVIGWTREGDSSHPKSGLATLITDGPGGSKRMYAGLKNAGETWYDITGNRSDTVKIGSDGWGEFHVNDGSVSIYVQK

SEQ ID NO: 39916 - protein, 480 aa, Bacillus sp.
NGTMMQYFEWYLPNDGNHWNRLNSDASNLKSKGITAVWIPPAWKGASQNDVGYGAYDLYDLGEFNQKGTVRTKYGTRSQLQAAVTSLKNNGIQVYGDVVMNHKGGADATEMVRAVEVNPNNRNQEVTGEYTIEAWTRFDFPGRGNTHSSFKWRWYHFDGVDWDQSRRLNNRIYKFRGHGKAWDWEVDTEFGNYDYLMYADYDMDHPEVVNELRNWGVWYTNTLGLDGFRIDAVKHIKYSFTRDWINHVRSATGKNMFAVAEFWKNDLGAIENYLQKTNWNHSVFDVPLHYNLYNASKSGGNYDMRNIFNGTVVQRHPSHAVTFVDNHDSQPEEALESFVETWFKPLAYALTLTREQGYPSVFYGDYYGIPTHGVPAMRSKIDPILEARQKYAYGPQHDYLDHPDVIGWTREGDSSHPKSGLATLITDGPGGSKRMYAGLKNAGETWYDITGNRSDTVKIGSDGWGEFHVNDKSVSIYVQK

SEQ ID NO: 39917 - protein, 480 aa, Synthetic construct
NGTMMQYFEWYLPNDGNHWNRLNSDASNLKSKGITAVWIPPAWKGASQNDVGYGAYDLYDLGEFNQKGTVRTKYGTRSQLQAAVTSLKNNGIQVYGDVVMNHKGGADATEMVRAVEVNPNNRNQEVTGEYTIEAWTRFDFPGRGNTHSSFKWRWYHFDGVDWDQSRRLNNRIYKFRGHGKAWDWEVDTENGNYDYLMYADIDMDHPEVVNELRNWGVWYTNTLGLDGFRIDAVKHIKYSFTRDWINHVRSATGKNMFAVAEFWKNDLGAIENYLQKTNWNHSVFDVPLHYNLYNASKSGGNYDMRNIFNGTVVQRHPSHAVTFVDNHDSQPEEALESFVEEWFKPLAYALTLTRSQGYPSVFYGDYYGIPTHGVPAMRSKIDPILEARQKYAYGPQHDYLDHPDVIGWTREGDSSHPKSGLATLITDGPGGSKRMYAGLKNAGETWYDITGNRSDTVKIGSDGWGEFHVNDGSVSIYVQK

SEQ ID NO: 39918 - protein, 480 aa, Bacillus sp.
NGTMMQYFEWYLPNDGNHWNRLNSDASNLKSKGITAVWIPPAWKGASQNDVGYGAYDLYDLGEFNQKGTVRTKYGTRSQLQAAVTSLKNNGIQVYGDVVMNHKGGADATEMVRAVEVNPNNRNQEVTGEYTIEAWTRFDFPGRGNTHSSFKWRWYHFDGVDWDQSRRLNNRIYKFRGHGKAWDWEVETEFGNYDYLMYADYDMDHPEVVNELRNWGVWYTNTLGLDGFRIDAVKHIKYSFTRDWINHVRSATGKNMFAVAEFWKNDLGAIENYLQKTNWNHSVFDVPLHYNLYNASKSGGNYDMRNIFNGTVVQRHPSHAVTFVDNHDSQPEEALESFVEEWFKPLAYALTLTREQGYPSVFYGDYYGIPTHGVPAMRSKIDPILEARQKYAYGPQHDYLDHPDVIGWTREGDSSHPKSGLATLITDGPGGSKRMYAGLKNAGETWYDITGNRSDTVKIGSDGWGEFHVNDGSVSIYVQK

SEQ ID NO: 39919 - protein, 480 aa, Bacillus sp.
NGTMMQYFEWYLPNDGNHWNRLNSDASNLKSKGITAVWIPPAWKGASQNDVGYGAYDLYDLGEFNQKGTVRTKYGTRSQLQAAVTSLKNNGIQVYGDVVMNHKGGADATEMVRAVEVNPNNRNQEVTGEYTIEAWTRFDFPGRGNTHSSFKWRWYHFDGVDWDQSRRLNNRIYKFRGHGKAWDWEVDTEFGNYDYLMYADYDMDHPEVVNELRNWGVWYTNTLGLDGFRIDAVKHIKYSFTRDWINHVRSATGKNMFAVAEFWKNDLGAIENYLQKTNWNHSVFDVPLHYNLYNASASGGNYDMRNIFNGTVVQRHPSHAVTFVDNHDSQPEEALESFVEEWFKPLAYALTLTREQGYPSVFYGDYYGIPTHGVPAMRSKIDPILEARQKYAYGPQHDYLDHPDVIGWTREGDSSHPKSGLATLITDGPGGSKRMYAGLKNAGETWYDITGNRSDTVKIGSDGWGEFHVNDGSVSIYVQK

SEQ ID NO: 39920 - protein, 480 aa, Bacillus sp.
NGTMMQYFEWYLPNDGNHWNRLNSDASNLKSKGITAVWIPPALKGASQNDVGYGAYDLYDLGEFNQKGTVRTKYGTRSQLQAAVTSLKNNGIQVYGDVVMNHKGGADATEMVRAVEVNPNNRNQEVTGEYTIEAWTRFDFPGRGNTHSSFKWRWYHFDGVDWDQSRRLNNRIYKFRGHGKAWDWEVDTEFGNYDYLMYADYDMDHPEVVNELRNWGVWYTNTLGLDGFRIDAVKHIKYSFTRDWINHVRSATGKNMFAVAEFWKNDLGAIENYLQKTNWNHSVFDVPLHYNLYNASKSGGNYDMRNIFNGTVVQRHPSHAVTFVDNHDSQPEEALESFVEEWFKPLAYALTLTREQGYPSVFYGDYYGIPTHGVPAMRSKIDPILEARQKYAYGPQHDYLDHPDVIGWTREGDSSHPKSGLATLITDGPGGSKRMYAGLKNAGETWYDITGNRSDTVKIGSDGWGEFHVNDGSVSIYVQK

SEQ ID NO: 39921 - protein, 480 aa, Synthetic construct
NGTMMQYFEWYLPNDGNHWNRLNSDASNLKSKGITAVWIPPAWKGASQNDVGYGAYDLYDLGEFNQKGTVRTKYGTRSQLQAAVTSLKNNGIQVYGDVVMNHKGGADATEMVRAVEVNPNNRNQEVTGEYTIEAWTRFDFPGRGNTHSSFKWRWYHFDGVDWDQSRRLNNRIYKFRGHGKAWDWEVDTENGNYDYLMYADIDMDHPEVVNELRNWGVWYTNTLGLDGFRIDAVKHIKYSFTRDWINHVRSATGKNMFAVAEFWKNDLGAIENYLQKTNWNHSVFDVPLHYNLYNASKSGGNYDMRNIFNGTVVQRHPSHAVTFVDNHDSQPEEALESFVEEWFKPLAYALTLTREQGYPSVFYGDYYGIPTHGVPAMRSKIDPILEARQKYAYGPQHDYLDHPDVIGWTREGDSSHPKSGLATLITDGPGGSKRMYAGTKNAGETWYDITGNRSDTVKIGSDGWGEFHVNDGSVSIYVQK

SEQ ID NO: 39922 - protein, 480 aa, Bacillus sp.
NGTMMQYFEWYLPNDGNHWNRLNSDASNLKSKGITAVWIPPAWKAASQNDVGYGAYDLYDLGEFNQKGTVRTKYGTRSQLQAAVTSLKNNGIQVYGDVVMNHKGGADATEMVRAVEVNPNNRNQEVTGEYTIEAWTRFDFPGRGNTHSSFKWRWYHFDGVDWDQSRDTSNRIYKFRGHGKAWDWEVDTEFGNYDYLMYADYDMDHPEVVNELRNWGVWYTNTLGLDGFRIDAVKHIKYSFTRDWINHVRSATGKNMFAVAEFWKNDLGAIENYLQKTNWNHSVFDVPLHYNLYNASKSGGNYDMRNIFNGTVVQRHPSHAVTFVDNHDSQPEEALESFVEEWFKPLAYALTLTREQGYPSVFYGDYYGIPTHGVPAMRSKIDPILEARQKYAYGPQHDYLDHPDVIGWTREGDSSHPKSGLATLITDGPGGSKRMYAGLKNAGETWYDITGNRSDTVKIGSDGWGEFHVNDGSVSIYVQK

SEQ ID NO: 39923 - protein, 480 aa, Synthetic construct
NGTMMQYFEWYLPNDGNHWNRLNSDASNLKSKGITAVWIPPAWKGASQNDVGYGAYDLYDLGEFNQKGTVRTKYGTRSQLQAAVTSLKNNGIQVYGDVVMNHKGGADATEMVRAVEVNPNNRNQEVTGEYTIEAWTRFDFPGRGNTHSSFKWRWYHFDGVDWDQSRRLNNRIYKFRGHGKAWDWEVDTENGNYDYLMYADIDMDHPEVVNELRNWGVWYTNTLGLDGFRIDAVKHIKYSFTRDWINHVRSATGKNMFAVAEFWKNDLGAIENYLQKTNWNHSVFDVPLHYNLYNASKSGGNYDMRNIFNGTVVQSHPSHAVTFVDNHDSQPEEALESFVEEWFKPLAYALTLTREQGYPSVFYGDYYGIPTHGVPAMRSKIDPILEARQKYAYGPQHDYLDHPDVIGWTREGDSSHPKSGLATLITDGPGGSKRMYAGLKNAGETWYDITGNRSDTVKIGSDGWGEFHVNDGSVSIYVQK

SEQ ID NO: 39924 - protein, 480 aa, Synthetic construct
NGTMMQYFEWYLPNDGNHWNRLNSDASNLKSKGITAVWIPPAWKGASQNDVGYGAYDLYDLGEFNQKGTVRTKYGTRGQLQAAVTSLKNNGIQVYGDVVMNHKGGADATEMVRAVEVNPNNRNQEVTGEYTIEAWTRFDFPGRGNTHSSFKWRWYHFDGVDWDQSRRLNNRIYKFRGHGKAWDWEVDTENGNYDYLMYADIDMDHPEVVNELRNWGVWYTNTLGLDGFRIDAVKHIKYSFTRDWINHVRSATGKNMFAVAEFWKNDLGAIENYLQKTNWNHSVFDVPLHYNLYNASKSGGNYDMRNIFNGTVVQRHPSHAVTFVDNHDSQPEEALESFVEEWFKPLAYALTLTREQGYPSVFYGDYYGIPTHGVPAMRSKIDPILEARQKYAYGPQHDYLDHPDVIGWTREGDSSHPKSGLATLITDGPGGSKRMYAGLKNAGETWYDITGNRSDTVKIGSDGWGEFHVNDGSVSIYVQK

SEQ ID NO: 39925 - protein, 480 aa, Synthetic construct
NGTMMQYFEWYLPNDGNHWNRLNSDASNLKSKGITAVWIPPAWKGASQNDVGYGAYDLYDLGEFNQKGTVRTKYGTRSQLQAAVTSLKNNGIQVYGDVVMNHKGGADATEMVRAVEVNPNNRNQEVTGEYTIEAWTRFDFPGRGNTHSSFKWRWYHFDGVDWDQSRRLNNRIYKFRGHGKAWDWEVDTENGNYDYLMYADIDMDHPEVVNELRNWGVWYTNTLGLDGFRIDAVKHIKYSFTRDWINHVRSATGKNMFAVAEFWKNDLGAIENYLQKTNWNHSVFDVPLHYNLYNASKSGGNYDMRNIFNGTVVQRHPSHAVTFVDNHDSQPEEALESFVEEWFKPLAYALTLTREQGYPSVFYGDYYGIPTHGVPAMRSKIDPILEARQKYAYGPQHDYLDHPDVIGWTREGDSSHPKSGLATLITDGPGGSKRMYAGLKNAGETWKDITGNRSDTVKIGSDGWGEFHVNDGSVSIYVQK

SEQ ID NO: 39926 - protein, 480 aa, Synthetic construct
NGTMMQYFEWYLPNDGNHWNRLNSDASNLKSKGITAVWIPPAWKGASQNDVGYGAYDLYDLGEFNQKGTVRTKYGTRSQLQAAVTSLKNNGIQVYGDVVMNHKGGADATEMVRAVEVNPNNRNQEVTGEYTIEAWTRFDFPGRGNTHSSFKWRWYHFDGVDWDQSRRLNNRIYKFRGHGKAWDWEVDTENGNYDYLMYADIDMDHPEVVNELRNWGVWYTNTLGLDGFRIDAVKHIKYSFTRDWINHVRSATGKNMFAVAEFWKNDLGAIENYLQKTNWNHSVFDVPLHYNLYNASKSGGNYDMRNIFNGTVVQRHPSHAVTFVDNHDSQPEEALESFVEEWFKPLAYALTLTREQGYPSVFYGDYYGIPTHGVPAMRSKIDPILEARQKYAYGPQHDYLDHPDVIGWTREGDSSHPKSGLATLITDGPGGSKRMYVGLKNAGETWYDITGNRSDTVKIGSDGWGEFHVNDGSVSIYVQK

SEQ ID NO: 39927 - protein, 480 aa, Bacillus sp.
NGTMMQYFEWYLPNDGNHWNRLNSDASNLKSKGITAVWIPPAWKGASQNDVGYGAYDLYDLGEFNQKGTVRTKYGTRSQLQAAVTSLKNNGIQVYGDVVMNHKGGADATEMVRAVEVNPNNRNQEVTGEYTIEAWTRFDFPGRGNTHSSFKWRWYHFDGVDWDQSRRLNNRIYKFRGHGKAWDWEVDTEFGNYDYLMYADYDMDHPEVVNELRNWGVWYTNTLGLDGFRIDAVKHIKYSFTRDWINHVRSATGKNMFAVAEFWKNDLGAIENYLQKTNWNHSVFDVPLHYNLYNASKSGGNYDMRNIFNGTVVQRHPQHAVTFVDNHDSQPEEALESFVEEWFKPLAYALTLTREQGYPSVFYGDYYGIPTHGVPAMRSKIDPILEARQKYAYGPQHDYLDHPDVIGWTREGDSSHPKSGLATLITDGPGGSKRMYAGLKNAGETWYDITGNRSDTVKIGSDGWGEFHVNDGSVSIYVQK

SEQ ID NO: 39928 - protein, 480 aa, Synthetic construct
NGTMMQYFEWYLPNDGNHWNRLNSDASNLKSKGITAVWIPPAWKGASQNDVGYGAYDLYDLGEFNQKGTVRTKYGTRSQLQAAVTSLKNNGIQVYGDVVMNHKGGADATEMVRAVEVNPNNRNQEVTGEYTIEAWTRFDFPGRGNTHSSFKWRWYHFDGVDWDQSRRLNNRIYKFRGHGKAWDWEVDTENGNYDYLMYADIDMDHPEVVNELRNWGVWYTNTLGLDGFRIDAVKHIKYSFTRDWINHVRSATGKNMFAVAEFWKNDLGAIENYLQKTNWNHSVFDVPLHYNLYNASKSGGNYDMRNIFNGTVVQRHPSHAVTFVDNHDSQPEEALESFVEEWFKPLAYALTLTREQGYPSVFYGDYYGIPTHGVPAMRSKIDPILEARQKYAYGRQHDYLDHPDVIGWTREGDSSHPKSGLATLITDGPGGSKRMYAGLKNAGETWYDITGNRSDTVKIGSDGWGEFHVNDGSVSIYVQK

SEQ ID NO: 39929 - protein, 480 aa, Synthetic construct
NGTMMQYFEWYLPNDGNHWNRLNSDASNLKSKGITAVWIPPAWKGASQNDVGYGAYDLYDLGEFNQKGTVRTKYGTRSQLQAAVTSLKNNGIQVYGDVVMNHKGGADATEMVRAVEVNPNNRNQEVTGEYTIEAWTRFDFPGRGNTHSSFKWRWYHFDGVDWDQSRRLNNRIYKFRGHGKAWDWEVDTENGNYDYLMYADIDMDHPEVVNELRNWGVWYTNTLGLDGFRIDAVKHIKYSFTRDWINHVRSATGKNMFAVAEFWKNDLGAIENYLQKTNWNHSVFDVPLHYNLYNASKSGGNYDMRNIFNGTVVQRHPSHAVTFVDNHDSQPEEALESFVEEWFKPLAYALTLTREQGYPSVFYGDYYGIPTHGVPAMRSKIDPILEARQKYAYGPQHDYLDHPDVIGWTREGDSSHPKSGLATLITDGPGGSKRMYAGLKNAGETWYDITGNRSDTVTIGSDGWGEFHVNDGSVSIYVQK

SEQ ID NO: 39930 - protein, 480 aa, Synthetic construct
NGTMMQYFEWYLPNDGNHWNRLNSDASNLKSKGITAVWIPPAWKGASQNDVGYGAYDLYDLGEFNQKGTVRTKYGTRSQLKAAVTSLKNNGIQVYGDVVMNHKGGADATEMVRAVEVNPNNRNQEVTGEYTIEAWTRFDFPGRGNTHSSFKWRWYHFDGVDWDQSRRLNNRIYKFRGHGKAWDWEVDTENGNYDYLMYADIDMDHPEVVNELRNWGVWYTNTLGLDGFRIDAVKHIKYSFTRDWINHVRSATGKNMFAVAEFWKNDLGAIENYLQKTNWNHSVFDVPLHYNLYNASKSGGNYDMRNIFNGTVVQRHPSHAVTFVDNHDSQPEEALESFVEEWFKPLAYALTLTREQGYPSVFYGDYYGIPTHGVPAMRSKIDPILEARQKYAYGPQHDYLDHPDVIGWTREGDSSHPKSGLATLITDGPGGSKRMYAGLKNAGETWYDITGNRSDTVKIGSDGWGEFHVNDGSVSIYVQK

SEQ ID NO: 39931 - protein, 480 aa, Bacillus sp.
NGTMMQYFEWYLPNDGNHWNRLNSDASNLKSKGITAVWIPPAWKGASQNDVGYGAYDLYDLGEFNQKGTVRTKYGTRSQLQAAVTSLKNNGIQVYGDVVMNHKGGADATEMVRAVEVNPNNRNQEVTGEYTIEAWTRFDFPGRGNTHSSFKWRWYHFDGVDWDQSRRLNNRIYKFRGHGKAWDWEVDTEFGNYDYLMYADYDMDHPEVVNELRNWGVWYTNTLGLDGFRIDAVKHIKYSFTRDWINHVRSATGKNMFAVAEFWLNDLGWIENYLQKTNWNHSVFDVPLHYNLYNASKSGGNYDMRNIFNGTVVQRHPSHAVTFVDNHDSQPEEALESFVEEWFKPLAYALTLTREQGYPSVFYGDYYGIPTHGVPAMRSKIDPILEARQKYAYGPQHDYLDHPDVIGWTREGDSSHPKSGLATLITDGPGGSKRMYAGLKNAGETWYDITGNRSDTVKIGSDGWGEFHVNDGSVSIYVQK

SEQ ID NO: 39932 - protein, 480 aa, Synthetic construct
NGTMMQYFEWYLPNDGNHWNRLNSDASNLKSKGITAVWIPPAWKGASQNDVGYGAYDLYDLGEFNQKGTVRTKYGTRSQLQAAVTSLKNNGIQVYGDVVMNHKGGADATEMVRAVEVNPNNRNQEVTGEYTIEAWTRFDFPGRGNTHSSFKWRWYHFDGVDWDQSRRLNNRIYKFRGHGKAWDWEVDTEFGNYDYLMYADYDMDHPEVVNELRNWGVWYTNTLGLDGFRIDAVKHIKYSFTRDWINHVRSATGKNMFAVAEFWKNDLGAIENYLQKTNWNHSVFDVPLHYNLYNASKSGGNYDMRFIFNGTVVQRHPSHAVTFVDNHDSQPEEALESFVEEWFKPLAYALTLTREQGYPSVFYGDYYGIPTHGVPAMRSKIDPILEARQKYAYGPQHDYLDHPDVIGWTREGDSSHPKSGLATLITDGPGGSKRMYAGLKNAGETWYDITGNRSDTVKIGSDGWGEFHVNDGSVSIYVQK

SEQ ID NO: 39933 - protein, 480 aa, Synthetic construct
NGTMMQYFEWYLPNDGNHWNRLNSDASNLKSKGITAVWIPPAWKGASQNDVGYGAYDLYDLGEFNQKGTVRTKYGTRSQLQAAVTSLKNNGIQVYGDVVMNHKGGADATEMVRAVEVNPNNRNQEVTGEYTIEAWTRFDFPGRGNTHSSFKWRWYHFDGVDWDQSRRLNNRIYKFRGHGKAWDWEVDTENGNYDYLMYADIDMDHPEVVNELRNWGVWYTNTLGLDGFRIDAVKHIKYSFTRDWINHVRSATGKNMFAVAEFWKNDLGAIENYLQKTNWNHSAFDVPLHYNLYNASKSGGNYDMRNIFNGTVVQRHPSHAVTFVDNHDSQPEEALESFVEEWFKPLAYALTLTREQGYPSVFYGDYYGIPTHGVPAMRSKIDPILEARQKYAYGPQHDYLDHPDVIGWTREGDSSHPKSGLATLITDGPGGSKRMYAGLKNAGETWYDITGNRSDTVKIGSDGWGEFHVNDGSVSIYVQK

SEQ ID NO: 39934 - protein, 480 aa, Bacillus sp.
NGTMMQYFEWYLPNDGNHWNRLNSDASNLKSKGITAVWIPPAWKGISQNDVGYGAYDLYDLGEFNQKGTVRTKYGTRSQLQAAVTSLKNNGIQVYGDVVMNHKGGADATEMVRAVEVNPNNRNQEVTGEYTIEAWTRFDFPGRGNTHSSFKWRWYHFDGVDWDQSRRLNNRIYKFRGHGKAWDWEVDTEFGNYDYLMYADYDMDHPEVVNELRNWGVWYTNTLGLDGFRIDAVKHIKYSFTRDWINHVRSATGKNMFAVAEFWKNDLGAIENYLQKTNWNHSVFDVPLHYNLYNASKSGGNYDMRNIFNGTVVQRHPSHAVTFVDNHDSQPEEALESFVEEWFKPLAYALTLTREQGYPSVFYGDYYGIPTHGVPAMRSKIDPILEARQKYAYGPQHDYLDHPDVIGWTREGDSSHPKSGLATLITDGPGGSKRMYAGLKNAGETWYDITGNRSDTVKIGSDGWGEFHVNDGSVSIYVQK

SEQ ID NO: 39935 - protein, 480 aa, Synthetic construct
NGTMMQYFEWYLPNDGNHWNRLNSDASNLKSKGITAVWIPPAWKGASQNDVGYGAYDLYDLGEFNQKGTVRTKYGTRSQLQAAVTSLKNNGIQVYGDVVMNHKGGADATEMVRAVEVNPNNRNQEVTGEYTIEAWTRFDFPGRGNTHSSFKWRWYHFDGVDWDQSRRLNNRIYKFRGHGKGWDWEVDTENGNYDYLMYADIDMDHPEVVNELRNWGVWYTNTLGLDGFRIDAVKHIKYSFTRDWINHVRSATGKNMFAVAEFWKNDLGAIENYLQKTNWNHSVFDVPLHYNLYNASKSGGNYDMRNIFNGTVVQRHPSHAVTFVDNHDSQPEEALESFVEEWFKPLAYALTLTREQGYPSVFYGDYYGIPTHGVPAMRSKIDPILEARQKYAYGPQHDYLDHPDVIGWTREGDSSHPKSGLATLITDGPGGSKRMYAGLKNAGETWYDITGNRSDTVKIGSDGWGEFHVNDGSVSIYVQK

SEQ ID NO: 39936 - protein, 480 aa, Bacillus sp.
NGTMMQYFEWYLPNDGNHWNRLNSDASNLKSKGITAVWIPPAWKGASQNDVGYGAYDLYDLGEFNQKGTVRTKYGTRSQLQAAVTSLKNNGIQVYGDVVMNHKGGADATEMVRAVEVNPNNRNQEVTGEYTIEAWTRFDFPGRGNTHSSFKWRWYHFDGVDWDQSRRLNNRIYKFRGHGKAWDWEVDTEFGNYDYLMYADYDMDHPEVVNELRNWGVWYTNTLGLDGFRIDAVKHIKYSFTRDWINHVRSATGKNMFAVAEFWKNDLGEIENYLQKTNWNHSVFDVPLHYNLYNASKSGGNYDMRNIFNGTVVQRHPSHAVTFVDNHDSQPEEALESFVEEWFKPLAYALTLTREQGYPSVFYGDYYGIPTHGVPAMRSKIDPILEARQKYAYGPQHDYLDHPDVIGWTREGDSSHPKSGLATLITDGPGGSKRMYAGLKNAGETWYDITGNRSDTVKIGSDGWGEFHVNDGSVSIYVQK

SEQ ID NO: 39937 - protein, 480 aa, Synthetic construct
NGTMMQYFEWYLPNDGNHWNRLNSDASNLKSKGITAVWIPPAWKGASQNDVGYGAYDLYDLGEFNQKGTVRTKYGTRSQLQAAVTSLKNNGIQVYGDVVMNHKGGADATEMVRAVEVNPNNRNQEVTGEYTIEAWTRFDFPGRGNTHSSFKWRWYHFDGVDWDQSRRLNNRIYKFRGHGKAWDWEVDTENGNYDYLMYADIDMDHPEVVNELRNWGVWYTNTLGLDGFRIDAVKHIKYSFTRDWINHVRSATGKNMFAVAEFWKNDLGAIENYLQKTNWNHSVFDVPLHYNLYNASKSGGNYDMRNIFNGTVVQRHPSHAVTFVDNHDSQPEEALESFVEEWFKPLAYALTLTREQGYPSVFYGDYYGIPTHGVPAMRSKIDPILEARQKYAYGPQRDYLDHPDVIGWTREGDSSHPKSGLATLITDGPGGSKRMYAGLKNAGETWYDITGNRSDTVKIGSDGWGEFHVNDGSVSIYVQK

SEQ ID NO: 39938 - protein, 480 aa, Synthetic construct
NGTMMQYFEWYLPNDGNHWNRLNSDASNLKSKGINAVWIPPAWKGASQNDVGYGAYDLYDLGEFNQKGTVRTKYGTRSQLQAAVTSLKNNGIQVYGDVVMNHKGGADATEMVRAVEVNPNNRNQEVTGEYTIEAWTRFDFPGRGNTHSSFKWRWYHFDGVDWDQSRRLNNRIYKFRGHGKAWDWEVDTENGNYDYLMYADIDMDHPEVVNELRNWGVWYTNTLGLDGFRIDAVKHIKYSFTRDWINHVRSATGKNMFAVAEFWKNDLGAIENYLQKTNWNHSVFDVPLHYNLYNASKSGGNYDMRNIFNGTVVQRHPSHAVTFVDNHDSQPEEALESFVEEWFKPLAYALTLTREQGYPSVFYGDYYGIPTHGVPAMRSKIDPILEARQKYAYGPQHDYLDHPDVIGWTREGDSSHPKSGLATLITDGPGGSKRMYAGLKNAGETWYDITGNRSDTVKIGSDGWGEFHVNDGSVSIYVQK

SEQ ID NO: 39939 - protein, 480 aa, Synthetic construct
NGTMMQYFEWYLPNDGNHWNRLNSDASNLKSKGITAVWIPPAWKGASQNDVGYGAYDLYDLGEFNQKGTVRTKYGTRSQLQAAVTSLKNNGIQVYGDVVMNHKGGADATEMVRAVEVNPNNRNQEVTGEYTIEAWTRFDFPGRGNTHSSFKWRWYHFDGVDWDQSRRLNNRIYKFRGHGKAWDWEVDTENGNYDYLMYADIDMDHPEVVNELRNWGVWYTNTLGLDGFRIDAVKHIKYSFTRDWINHVRSATGKNMFAVAEFWKNDLGAIENYLQKTNWNHSVFDVPLHYNLYNASKSGGNYDMRNIFNNTVVQRHPSHAVTFVDNHDSQPEEALESFVEEWFKPLAYALTLTREQGYPSVFYGDYYGIPTHGVPAMRSKIDPILEARQKYAYGPQHDYLDHPDVIGWTREGDSSHPKSGLATLITDGPGGSKRMYAGLKNAGETWYDITGNRSDTVKIGSDGWGEFHVNDGSVSIYVQK

SEQ ID NO: 39940 - protein, 480 aa, Synthetic construct
NGTMMQYFEWYLPNDGNHWNRLNSDASNLKSKGITAVWIPPAWKGASQNDVGYGAYDLYDLGEFNQKGTVRTKYGTRSQLQAAVTSLKNNGIQVYGDVVMNHKGGADATEMVRAVEVNPNNRNQEVTGEYTIEAWTRFDFPGRGNTHSSFKWRWYHFDGVDWDQSRRLNNRIYKFRGHGKAWDWEVDTENGNYDYLMYADIDMDHPEVVNELRNWGVWYTNTLGLDGFRIDAVKHIKYSFTRDWINHVRSATGKNMFAVAEFWKNDLGAIENYLQKTNWNHSVFDVPLHYNLYNASKSGGNYDMRNIFNGTVVQRHPSHAVTFVDNHDSQPEEALESFVEEWFKPLAYALTLTREQGYPSVFYGDYYGIPTHGVPAMRSKIDPILEARQKYAYGPQHDYLDHPDVIGWTREGDSSHPKSGLATLITDGPGGSKRMYAGLKNAGETWYDITGNRSDTVKIGSDGWGEFRVNDGSVSIYVQK

SEQ ID NO: 39941 - protein, 480 aa, Synthetic construct
NGTMMQYFEWYLPNDGNHWNRLNSDSSNLKSKGITAVWIPPAWKGASQNDVGYGAYDLYDLGEFNQKGTVRTKYGTRSQLQAAVTSLKNNGIQVYGDVVMNHKGGADATEMVRAVEVNPNNRNQEVTGEYTIEAWTRFDFPGRGNTHSSFKWRWYHFDGVDWDQSRRLNNRIYKFRGHGKAWDWEVDTENGNYDYLMYADIDMDHPEVVNELRNWGVWYTNTLGLDGFRIDAVKHIKYSFTRDWINHVRSATGKNMFAVAEFWKNDLGAIENYLQKTNWNHSVFDVPLHYNLYNASKSGGNYDMRNIFNGTVVQRHPSHAVTFVDNHDSQPEEALESFVEEWFKPLAYALTLTREQGYPSVFYGDYYGIPTHGVPAMRSKIDPILEARQKYAYGPQHDYLDHPDVIGWTREGDSSHPKSGLATLITDGPGGSKRMYAGLKNAGETWYDITGNRSDTVKIGSDGWGEFHVNDGSVSIYVQK

SEQ ID NO: 39942 - protein, 480 aa, Synthetic construct
NGTMMQYFEWYLPNDGNHWNRLNSDASNLKSKGITAVWIPPAWKGASQNDVGYGAYDVYDLGEFNQKGTVRTKYGTRSQLQAAVTSLKNNGIQVYGDVVFNHKGGADATEMVRAVEVNPNNRNQEVTGEYTIEAWTRFDFPGRGNTHSSFKWRWYHFDGVDWDQSRRLNNRIYKFRGHGKAWDWEVDTENGNYDYLMYADYDFDHPEVVNEIRNWGVWYTNTLGLDGFRIDAVKHIKYSFTRDWINHVRSATGKNMFAVAEFWKNDLGAIENYLQKTNWNHSVFDVPLHYNLYNASKSGGNYDMRNIFNGTVVQRHPSHAVTFVDNHDSQPEEALESFVEEWFKPLAYALTLTREQGYPSVFYGDYYGIPTHGVPAMRSKIDPILEARQKYAYGPQHDYLDHPDVIGWTREGDSSHPKSGLATLITDGPGGSKRMYAGLKNAGETWYDITGNRSDTVKIGSDGWGEFHVNDGSVSIYVQK

SEQ ID NO: 39943 - protein, 481 aa, Bacillus sp.
NGTMMQYFEWYLPNDGNHWNRLNSDASNLKSKGITAVWIPPAWKGASQNDVGYGAYDLYDLGEFNQKGTVRTKYGTRSQLQAAVTSLKNNGIQVYGDVVMNHKGGADATEMVRAVEVNPNNRNQEVTGEYTIEAWTRFDFPGRGNTHSSFKWRWYHFDGVDWDQSRRLNNRIYKFRGHGKAWDWEVDTEFGNYDYLMYADYDMDHPEVVNELRNWGVWYTNTLGLDGFRIDAVKHIKYSFTRDWINHVRSATGKNMFAVAEFWKNDLGAIENYLQKTNWNHSVFDVPLHYNLYNASKSGGNYDMRNIFNGTVVQRHPSHAVTFVDNHDSQHGEEALESFVEEWFKPLAYALTLTREQGYPSVFYGDYYGIPTHGVPAMRSKIDPILEARQKYAYGPQHDYLDHPDVIGWTREGDSSHPKSGLATLITDGPGGSKRMYAGLKNAGETWYDITGNRSDTVKIGSDGWGEFHVNDGSVSIYVQK

SEQ ID NO: 39944 - protein, 480 aa, Synthetic construct
NGTMMQYFEWYLPNDGNHWNRLNSDASNLKSKGITAVWIPPAWKGASQNDVGYGAYDLYDLGEFNQKGTVRTKYGTRSQLQAAVTSLKNNGIQVYGDVVMNHKGGADATEMVRAVEVNPNNRNQEVTGEYTIEAWTRFDFPGRGNTHSSFKWRWYHFDGVDWDQSRRLNNRIYKFRGHGKAWDWEVDTEFGNYDYLMYADYDMDHPEVVNELRNWGVWYTNTLGLDGFRIDAVKHIKYSFTRDWINHVRSATGKNMFAVAEFWKNDLGAIENYLQKTQWNHSVFDVPLHYNLYNASKSGGNYDMRNIFNGTVVQRHPSHAVTFVDNHDSQPEEALESFVEEWFKPLAYALTLTREQGYPSVFYGDYYGIPTHGVPAMRSKIDPILEARQKYAYGPQHDYLDHPDVIGWTREGDSSHPKSGLATLITDGPGGSKRMYAGLKNAGETWYDITGNRSDTVKIGSDGWGEFHVNDGSVSIYVQK

SEQ ID NO: 39945 - protein, 480 aa, Synthetic construct
NGTMMQYFEWYLPNDGNHWNRLNSDASNLKSKGITAVWIPPAWKGASQNDVGYGAYDLYDLGEFNQKGTIRTKYGTRSQLQAAVTSLKNNGIQVYGDVVMNHKGGADATEMVRAVEVNPNNRNQEVTGEYTIEAWTRFDFPGRGNTHSSFKWRWYHFDGVDWDQSRRLNNRIYKFRGHGKAWDWEVDTENGNYDYLMYADIDMDHPEVVNELRNWGVWYTNTLGLDGFRIDAVKHIKYSFTRDWINHVRSATGKNMFAVAEFWKNDLGAIENYLQKTNWNHSVFDVPLHYNLYNASKSGGNYDMRNIFNGTVVQRHPSHAVTFVDNHDSQPEEALESFVEEWFKPLAYALTLTREQGYPSVFYGDYYGIPTHGVPAMRSKIDPILEARQKYAYGPQHDYLDHPDVIGWTREGDSSHPKSGLATLITDGPGGSKRMYAGLKNAGETWYDITGNRSDTVKIGSDGWGEFHVNDGSVSIYVQK

SEQ ID NO: 39946 - protein, 480 aa, Synthetic construct
NGTMMQYFEWYLPNDGNHWNRLNSDASNLKSKGITAVWIPPAWKGASQNDVGYGAYDLYDLGEFNQKGTVRTKYGTRSQLQAAVTSLKNNGIQVYGDVVMNHKGGADATEMVRAVEVNPNNRNQEVTGEYTIEAWTRFDFPGRGSTHSSFKWRWYHFDGVDWDQSRRLNNRIYKFRGHGKAWDWEVDTENGNYDYLMYADIDMDHPEVVNELRNWGVWYTNTLGLDGFRIDAVKHIKYSFTRDWINHVRSATGKNMFAVAEFWKNDLGAIENYLQKTNWNHSVFDVPLHYNLYNASKSGGNYDMRNIFNGTVVQRHPSHAVTFVDNHDSQPEEALESFVEEWFKPLAYALTLTREQGYPSVFYGDYYGIPTHGVPAMRSKIDPILEARQKYAYGPQHDYLDHPDVIGWTREGDSSHPKSGLATLITDGPGGSKRMYAGLKNAGETWYDITGNRSDTVKIGSDGWGEFHVNDGSVSIYVQK

SEQ ID NO: 39947 - protein, 480 aa, Bacillus sp.
NGTMMQYFEWYLPNDGNHWNRLNSDASNLKSKGITAVWIPPAWKGASQNDVGYGAYDLYDLGEFNQKGTVRTKYGTRSQLQAAVTSLKNNGIQVYGDVVMNHKGGADATEMVRAVEVNPNNRNQEVTGEYTIEAWTRFDFPGRGNTHSSFKWRWYHFDGVDWDQSRRLNNRIYKFRGHGKAWDWEVDTEFGNYDYLMYADYDMDHPEVVNELRNWGVWYTNTLGLDGFRIDAVKHIKYSFTRDWINHVRSATGKNMFAVAEFWKNDLGAIENYLQKTNWNHSVFDVPLHYNLYNASKSGGNYDMRNIFNGTVVQRHPNHAVTFVDNHDSQPEEALESFVEEWFKPLAYALTLTREQGYPSVFYGDYYGIPTHGVPAMRSKIDPILEARQKYAYGPQHDYLDHPDVIGWTREGDSSHPKSGLATLITDGPGGSKRMYAGLKNAGETWYDITGNRSDTVKIGSDGWGEFHVNDGSVSIYVQK

SEQ ID NO: 39948 - protein, 480 aa, Bacillus sp.
NGTMMQYFEWYLPNDGNHWNRLNSDASNLKSKGITAVWIPPAWKGASQNDVGYGAYDLYDLGEFNQKGTVRTKYGTRSQLQAAVTSLKNNGIQVYGDVVMNHKGGADATEMVRAVEVNPNNRNQEVTGEYTIEAWTRFDFPGRGNTHSSFKWRWYHFDGVDWDQSRRLNNRIYKFRGHGKAWDWEVDTEFGNYDYLMYADYDMDHPEVVNELRNWGVWYTNTLGLDGFRIDAVKHIKYSFTRDWINHVRSATGKNMFAVAEFWKNDLGAIENYLQKTNWNHSVFDVPLHYNLYNASKSGGNYDMRNIFNGTVVQRHPSHAVTFVDNHDSQPEEALESFVDEWFKPLAYALTLTREQGYPSVFYGDYYGIPTHGVPAMRSKIDPILEARQKYAYGPQHDYLDHPDVIGWTREGDSSHPKSGLATLITDGPGGSKRMYAGLKNAGETWYDITGNRSDTVKIGSDGWGEFHVNDGSVSIYVQK

SEQ ID NO: 39949 - protein, 480 aa, Synthetic construct
NGTMMQYFEWYLPNDGNHWNRLNSDASNLKSKGITAVWIPPAWKGASQNDVGYGAYDLYDLGEFNQKGTVRTKYGTRSQLQAAVTSLKNNGIQVYGDVVMNHKGGADATEMVRAVEVNPNNRNQEVTGEYTIEAWTRFDFPGRGNTHSSFKWRWYHFDGVDWDQSRRLNNRIYKFRGHGKAWDWEVDTENGNYDYLMYADYDMDHPEGVNELRNWGVWYTNTLGLDGFRIDAVKHIKYSFTRDWINHVRSATGKNMFAVAEFWKNDLGAIENYLQKTNWNHSVFDVPLHYNLYNASKSGGNYDMRNIFNGTVVQRHPSHAVTFVDNHDSQPEEALESFVEEWFKPLAYALTLTREQGYPSVFYGDYYGIPTHGVPAMRSKIDPILEARQKYAYGPQHDYLDHPDVIGWTREGDSSHPKSGLATLITDGPGGSKRMYAGLKNAGETWYDITGNRSDTVKIGSDGWGEFHVNDGSVSIYVQK

SEQ ID NO: 39950 - protein, 480 aa, Synthetic construct
NGTMMQYFEWYLPNDGNHWNRLNSDASNLKSKGITAVWIPPAWKGASQNDVGYGAYDLYDLGEFNQKGTVRTKYGTRSQLQAAVTSLKNNGIQVYGDVVMNHKGGADATEMVRAVEVNPNNRNQEVTGEYTIEAWTRFDFPGRGNTHSSFKWRWYHFDGVDWDQSRRLNNRIYKFRGHGKAWDWEVDTENGNYDYLMYADIDMDHPEVVNELRNWGVWYTNTLGLDGFRIDAVKHIKYSFTRDWINHVRSATGKNMFAVAEFWKNDLGAIENYLQKTNWNHSVFDVPLHYNLYNASKSGGNYDMRNIFNGTVVQRHPSHAVTFVDNHDSQPEEALESFVEEWFKPLAYALTLTREQGYPSVFYGDYYGIPTHGVPAMRSKIDPILEARQKYAYGPQHDYLDHPDVIGWTREGDSSHPKSGLATLITDGPGGSKRMYAGLKNAGETWYDITGNRSETVKIGSDGWGEFHVNDGSVSIYVQK

SEQ ID NO: 39951 - protein, 480 aa, Synthetic construct
NGTMMQYFEWYLPNDGNHWNRLNSNASNLKSKGITAVWIPPAWKGASQNDVGYGAYDLYDLGEFNQKGTVRTKYGTRSQLQAAVTSLKNNGIQVYGDVVMNHKGGADATEMVRAVEVNPNNRNQEVTGEYTIEAWTRFDFPGRGNTHSSFKWRWYHFDGVDWDQSRRLNNRIYKFRGHGKAWDWEVDTENGNYDYLMYADIDMDHPEVVNELRNWGVWYTNTLGLDGFRIDAVKHIKYSFTRDWINHVRSATGKNMFAVAEFWKNDLGAIENYLQKTNWNHSVFDVPLHYNLYNASKSGGNYDMRNIFNGTVVQRHPSHAVTFVDNHDSQPEEALESFVEEWFKPLAYALTLTREQGYPSVFYGDYYGIPTHGVPAMRSKIDPILEARQKYAYGPQHDYLDHPDVIGWTREGDSSHPKSGLATLITDGPGGSKRMYAGLKNAGETWYDITGNRSDTVKIGSDGWGEFHVNDGSVSIYVQK

SEQ ID NO: 39952 - protein, 480 aa, Synthetic construct
NGTMMQYFEWYLPNDGNHWNRLNSDASNLKSKGITAVWIPPAWKGASQNDVGYGAYDLYDLGEFNQKGTVRTKYGTRSQLQAAVTSLKNNGIQVYGDVVMNHKGGADATEMVRAVEVNPNNRNQEVTGEYTIEAWTRFDFPGRGNTHSSFKWRWYHFDGVDWDQSRRLNNRIYKFRGHGKAWDWEVDTENGNYDYLMYADIDMDHPEVVNELRNWGVWYTNTLGLDGFRIDAVKHIKYSFTRDWINHVRSATGKNMFAVAEFWKNDLGAIENYLQKTNWNHSVFDVPLHYNLYNASKSGGNYDMRNIFNGTVVQKHPSHAVTFVDNHDSQPEEALESFVEEWFKPLAYALTLTREQGYPSVFYGDYYGIPTHGVPAMRSKIDPILEARQKYAYGPQHDYLDHPDVIGWTREGDSSHPKSGLATLITDGPGGSKRMYAGLKNAGETWYDITGNRSDTVKIGSDGWGEFHVNDGSVSIYVQK

SEQ ID NO: 39953 - protein, 480 aa, Synthetic construct
NGTMMQYFEWYLPNDGNHWNRLNSDASNLKSKGITAVWIPPAWKGASQNDVGYGAYDLYDLGEFNQKGTVRTKYGTRSQLQAAVTSLKNNGIQVYGDVVMNHKGGADATEMVRAVEVNPNNRNQEVTGEYTIEAWTRFDFPGRGNTHSSFKWRWYHFDGVDWDQSRRLNNRIYKFRGHGKAWDWEVDTENGNYDYLMYADIDMDHPEVVNELRNWGVWYTNTLGLDGFRIDAVKHIKYSFTRDWINHVRSATGKNMFAVAEFWKNDLGAIENYLQKTNWNHSVFDVPLHYNLYNASKSGGNYDMRNIFNGTVVQRHPSHAVTFVDNHDSQPEEALESFVEEWFKPLAYALTLTREQGYPSVFYGDYYGIPTHGVPAMRSKIDPILEARQKYAYGPQHDYLDHPDVIGWTREGDSSHPKSGLATLITDGPGGSKRMYAGAKNAGETWYDITGNRSDTVKIGSDGWGEFHVNDGSVSIYVQK

SEQ ID NO: 39954 - protein, 480 aa, Synthetic construct
NGTMMQYFEWYLPNDGNHWNRLNSDASNLKSKGITAVWIPPAWKGASQNDVGYGAYDLYDLGEFNQKGTVRTKYGTRSQLEAAVTSLKNNGIQVYGDVVMNHKGGADATEMVRAVEVNPNNRNQEVTGEYTIEAWTRFDFPGRGNTHSSFKWRWYHFDGVDWDQSRRLNNRIYKFRGHGKAWDWEVDTENGNYDYLMYADIDMDHPEVVNELRNWGVWYTNTLGLDGFRIDAVKHIKYSFTRDWINHVRSATGKNMFAVAEFWKNDLGAIENYLQKTNWNHSVFDVPLHYNLYNASKSGGNYDMRNIFNGTVVQRHPSHAVTFVDNHDSQPEEALESFVEEWFKPLAYALTLTREQGYPSVFYGDYYGIPTHGVPAMRSKIDPILEARQKYAYGPQHDYLDHPDVIGWTREGDSSHPKSGLATLITDGPGGSKRMYAGLKNAGETWYDITGNRSDTVKIGSDGWGEFHVNDGSVSIYVQK

SEQ ID NO: 39955 - protein, 480 aa, Synthetic construct
NGTMMQYFEWYLPNDGNHWNRLNSDASNLKSKGITAVWIPPAWKGASQNDVGYGAYDLYDLGEFNQKGTVRTKYGTRSQLQAAVTSLKNNGIQVYGDVVMNHKGGADATEMVRAVEVNPNNRNQEVTGEYTIEAWTRFDFPGRGNTHSSFKWRWYHFDGVDWDQSRRLNNRIYKFRGHGKAWDWEVDTENGNYDYLMYADIDMDHPEVVNELRNWGVWYTNTLGLDGFRIDAVKHIKYSFTRDWINHVRSATGKNMFAVAEFWKNDLGAIENYLQKTNWNHSVFDVPLHYNLYNASKSGGNYDMRNIFNGTVVQRHPSHAVTFVDNHDSQPEEALESFVEEWFKPLAYALTLTREQGYPSVFYGDYYGIPTHGVPAMRSKIDPILEARQKYAYGPQHDYLDHPDVIGWTREGDSSHPKSGLATLITDGPGGSKRMYAGLKNAGETWHDITGNRSDTVKIGSDGWGEFHVNDGSVSIYVQK

SEQ ID NO: 39956 - protein, 480 aa, Synthetic construct
NGTMMQYFEWYLPNDGNHWNRLNSDASNLKSKGITAVWIPPAWKGASQNDVGYGAYDLYDLGEFNQKGTVRTKYGTRSQLQAAVTSLKNNGIQVYGDVVMNHKGGADATEMVRAVEVNPNNRNQEVTGEYTIEAWTRFDFPGRGNTHSSFKWRWYHFDGVDWDQSRKFNNRIYKFRGHGKAWDWEVDTEFGNYDYLMYTDYDMDHPEVVNELRNWGVWYTNTLGLDGFRIDAVKHIKYSFTRDWINHVRSATGKNMFAVAEFWKNDLGAIENYLQKTNWNHSVFDVPLHYNLYNASKSGGNYDMRNIFNGTVVQRHPSHAVTFVDNHDSQPEEALESFVEEWFKPLAYALTLTREQGYPSVFYGDYYGIPTHGVPAMRSKIDPILEARQKYAYGPQHDYLDHPDVIGWTREGDSSHPKSGLATLITDGPGGSKRMYAGLKNAGETWYDITGNRSDTVKIGSDGWGEFHVNDGSVSIYVQK

SEQ ID NO: 39957 - protein, 480 aa, Synthetic construct
NGTMMQYFEWYLPNDGNHWNRLNSDASNLKSKGITAVWIPPAWKGASQNDVGYGAYDLYDLGEFNQKGTVRTKYGTRSQLQAAVTSLKNNGIQVYGDVVMNHKGGADATEMVRAVEVNPNNRNQEVTGEYTIEAWTRFDFPGRGNTHSSFKWRWYHFDGVDWDQSRRLNNRIYKFRGHGKAWDWEVDTEFGNYDYLMYADYDMDHPEVVNELRNWGVWYTNTLGLDGFRIDAVKHIKYSFTRDWINHVRSATGKNMFAVAEFWHNDLGWIENYLQKTNWNHSVFDVPLHYNLYNASKSGGNYDMRNIFNGTVVQRHPSHAVTFVDNHDSQPEEALESFVEEWFKPLAYALTLTREQGYPSVFYGDYYGIPTHGVPAMRSKIDPILEARQKYAYGPQHDYLDHPDVIGWTREGDSSHPKSGLATLITDGPGGSKRMYAGLKNAGETWYDITGNRSDTVKIGSDGWGEFHVNDGSVSIYVQK

SEQ ID NO: 39958 - protein, 480 aa, Synthetic construct
NGTMMQYFEWYLPNDGNHWNRLNSDASNLKSKGITAVWIPPAWKGASQNDVGYGAYDLYDLGEFNQKGTVRTKYGTRSQLQAAVTSLKNNGIQVYGDVVMNHKGGADATEMVRAVEVNPNNRNQEVTGEYTIEAWTRFDFPGRGNTHSSFKWRWYHFDGVDWDQSRRLNNRIYKFRGHGKAWDWEVDTENGNYDYLMYADIDMDHPEVVNELRNWGVWYTNTLGLDGFRIDAVKHIKYSFTRDWINHVRSATGKNMFAVAEFWKNDLGAIENYLQKTNWNHSVFDVPLHYNLYNASKSGGNYDMRNIFNGTLVQRHPSHAVTFVDNHDSQPEEALESFVEEWFKPLAYALTLTREQGYPSVFYGDYYGIPTHGVPAMRSKIDPILEARQKYAYGPQHDYLDHPDVIGWTREGDSSHPKSGLATLITDGPGGSKRMYAGLKNAGETWYDITGNRSDTVKIGSDGWGEFHVNDGSVSIYVQK

SEQ ID NO: 39959 - protein, 480 aa, Synthetic construct
NGTMMQYFEWYLPNDGNHWNRLNSDASNLKSKGITAVWIPPAWKGASQNDVGYGAYDLYDLGEFNQKGTVRTKYGTRSQLQAAVTSLKNNGIQVYGDVVMNHKGGADATEMVRAVEVNPNNRNQEVTGEYTIEAWTRFDFPGRGNTHSSFKWRWYHFDGVDWDQSRRLNNRIYKFRGHGKAWDWEVDTENGNYDYLMYADIDMDHPEVVNELRNWGVWYTNTLGLDGFRIDAVKHIKYSFTRDWINHVRSQTGKNMFAVAEFWKNDLGAIENYLQKTNWNHSVFDVPLHYNLYNASKSGGNYDMRNIFNGTVVQRHPSHAVTFVDNHDSQPEEALESFVEEWFKPLAYALTLTREQGYPSVFYGDYYGIPTHGVPAMRSKIDPILEARQKYAYGPQHDYLDHPDVIGWTREGDSSHPKSGLATLITDGPGGSKRMYAGLKNAGETWYDITGNRSDTVKIGSDGWGEFHVNDGSVSIYVQK

SEQ ID NO: 39960 - protein, 480 aa, Synthetic construct
NGTMMQYFEWYLPNDGNHWNRLNSDASNLKSKGITAVWIPPAWKGASQNDVGYGAYDLYDLGEFNQKGTVRTKYGTRSQLQAAVTSLKNNGIQVYGDVVMNHKGGADATEMVRAVEVNPNNRNQEVTGTYTIEAWTRFDFPGRGNTHSSFKWRWYHFDGVDWDQSRRLNNRIYKFRGHGKAWDWEVDTENGNYDYLMYADIDMDHPEVVNELRNWGVWYTNTLGLDGFRIDAVKHIKYSFTRDWINHVRSATGKNMFAVAEFWKNDLGAIENYLQKTNWNHSVFDVPLHYNLYNASKSGGNYDMRNIFNGTVVQRHPSHAVTFVDNHDSQPEEALESFVEEWFKPLAYALTLTREQGYPSVFYGDYYGIPTHGVPAMRSKIDPILEARQKYAYGPQHDYLDHPDVIGWTREGDSSHPKSGLATLITDGPGGSKRMYAGLKNAGETWYDITGNRSDTVKIGSDGWGEFHVNDGSVSIYVQK

SEQ ID NO: 39961 - protein, 480 aa, Synthetic construct
NGTMMQYFEWYLPNDGNHWNRLNSDASNLKSKGITAVWIPPAWKGASQNDVGYGAYDLYDLGEFNQKGTVRTKYGTRSQLQAAVTSLKNNGIQVYGDVVMNHKGGADATEMVRAVEVNPNNRNQEVTGEYTIEAWTRFDFPGRGNTHSSFKWRWYHFDGVDFDQSRRLNNRIYKFRGHGKAWDWEVDTENGNYDYLMYADIDMDHPEVVNELRNWGVWYTNTLGLDGFRIDAVKHIKYSFTRDWINHVRSATGKNMFAVAEFWKNDLGAIENYLQKTNWNHSVFDVPLHYNLYNASKSGGNYDMRNIFNGTVVQRHPSHAVTFVDNHDSQPEEALESFVEEWFKPLAYALTLTREQGYPSVFYGDYYGIPTHGVPAMRSKIDPILEARQKYAYGPQHDYLDHPDVIGWTREGDSSHPKSGLATLITDGPGGSKRMYAGLKNAGETWYDITGNRSDTVKIGSDGWGEFHVNDGSVSIYVQK

SEQ ID NO: 39962 - protein, 480 aa, Synthetic construct
NGTMMQYFEWYLPNDGNHWNRLNSDASNLKSKGITAVWIPPAWKGASQNDVGYGAYDLYDLGEFNQKGTVRTKYGTRSQLQAAVTSLKNNGIQVYGDVVMNHKGGADATEMVRAVEVNPNNRNQEVTGEYTIEAWTRFDFPGRGNTHSSFKWRWYHFDGVDWDQSRRLNNRIYKFRGHGKAWDWEVDTENGNYDYLMYADIDMDHPEVINELRNWGVWYTNTLGLDGFRIDAVKHIKYSFTRDWINHVRSATGKNMFAVAEFWKNDLGAIENYLQKTNWNHSVFDVPLHYNLYNASKSGGNYDMRNIFNGTVVQRHPSHAVTFVDNHDSQPEEALESFVEEWFKPLAYALTLTREQGYPSVFYGDYYGIPTHGVPAMRSKIDPILEARQKYAYGPQHDYLDHPDVIGWTREGDSSHPKSGLATLITDGPGGSKRMYAGLKNAGETWYDITGNRSDTVKIGSDGWGEFHVNDGSVSIYVQK

SEQ ID NO: 39963 - protein, 480 aa, Synthetic construct
NGTMMQYFEWYLPNDGNQWNRLNSDASNLKSKGITAVWIPPAWKGASQNDVGYGAYDLYDLGEFNQKGTVRTKYGTRSQLQAAVTSLKNNGIQVYGDVVMNHKGGADATEMVRAVEVNPNNRNQEVTGEYTIEAWTRFDFPGRGNTHSSFKWRWYHFDGVDWDQSRRLNNRIYKFRGHGKAWDWEVDTENGNYDYLMYADIDMDHPEVVNELRNWGVWYTNTLGLDGFRIDAVKHIKYSFTRDWINHVRSATGKNMFAVAEFWKNDLGAIENYLQKTNWNHSVFDVPLHYNLYNASKSGGNYDMRNIFNGTVVQRHPSHAVTFVDNHDSQPEEALESFVEEWFKPLAYALTLTREQGYPSVFYGDYYGIPTHGVPAMRSKIDPILEARQKYAYGPQHDYLDHPDVIGWTREGDSSHPKSGLATLITDGPGGSKRMYAGLKNAGETWYDITGNRSDTVKIGSDGWGEFHVNDGSVSIYVQK

SEQ ID NO: 39964 - protein, 480 aa, Synthetic construct
NGTMMQYFEWYLPNDGNHWNRLNSDASNLKSKGITAVWIPPAWKGASQNDVGYGAYDLYDLGEFNQKGTVRTKYGTRSQLQAAVTSLKNNGIQVYGDVVMNHKGGADATEMVRAVEVNPNNRNQEVTGEYTIEAWTRFDFPGRGNTHSSFKWRWYHFDGVDWDQSRRLNNRIYKFRGHGKAWDWEVDTENGNYDYLMYADIDMDHPEVVNELRNWGVWYTNTLGLDGFRIDAVKHIKYSFTRDWINHVRSATGKNMFAVAEFWKNDLGAIENYLQKTNWNHSVFDVPLHYNLYNASKSGGNYDMRNIFNGTVVQRHPSHAVTFVDNHDSQPEEALESFVEEWFKPLAYALTLTREQGYPSVFYGDYYGIPTHGVPAMRSKIDPILEARQKYAYGPQHDYLDHPDVIGWTREGDSSHPKSGLATLITDGPGGSKRMYAGLKNAGETFYDITGNRSDTVKIGSDGWGEFHVNDGSVSIYVQK

SEQ ID NO: 39965 - protein, 480 aa, Synthetic construct
NGTMMQYFEWYLPNDGNHWNRLNSDASNLKSKGITAVWIPPAWKGASQNDVGYGAYDLYDLGEFNQKGTVRTKYGTRSQLQAAVTSLKNNGIQVYGDVVMNHKGGADATEMVRAVEVNPNNRYQEVTGEYTIEAWTRFDFPGRGNTHSSFKWRWYHFDGVDWDQSRRLNNRIYKFRGHGKAWDWEVDTENGNYDYLMYADIDMDHPEVVNELRNWGVWYTNTLGLDGFRIDAVKHIKYSFTRDWINHVRSATGKNMFAVAEFWKNDLGAIENYLQKTNWNHSVFDVPLHYNLYNASKSGGNYDMRNIFNGTVVQRHPSHAVTFVDNHDSQPEEALESFVEEWFKPLAYALTLTREQGYPSVFYGDYYGIPTHGVPAMRSKIDPILEARQKYAYGPQHDYLDHPDVIGWTREGDSSHPKSGLATLITDGPGGSKRMYAGLKNAGETWYDITGNRSDTVKIGSDGWGEFHVNDGSVSIYVQK

SEQ ID NO: 39966 - protein, 480 aa, Synthetic construct
NGTMMQYFEWYLPNDGNHWNRLNSDASNLKSKGITAVWIPPAWKGASQNDVGYGAYDLYDLGEFNQKGTVRTKYGTRSQLQAAVTSLKNNGIQVYGDVVMNHKGGADATEMVRAVEVNPNNRNQEVTGEYTIEAWTRFDFPGRGNTHSSFKWRWYHFDGVDWDQSRRLNNRIYKFRGHGKAWDWEVDTENGNYDYLMYADIDMDHPEVVNELRNWGVWYTNTLGLDGFRIDAVKHIKYSFTRDWINHVRSATGKNMFAVAEFWKNDLGAIENYLQKTNWNHSVFDVPLHYNLYNASKSGGNYDMRNIFNGTVVQRHPSHAVTFVDNHDSQPEEALESFVEEWFKPLAYALTLTREQGYPSVFYGDYYGIPTHGVPAMRSKIDPILEARQKYAYGPQHDYLDHPDVIGWTREGDSSHPKSGLATLITDGPGGSKRMYAGLKNAGETWYDITGNRSDTVKIGSDGWGEFHVNDGSVSVYVQK

SEQ ID NO: 39967 - protein, 480 aa, Synthetic construct
NGTMMQYFEWYLPNDGNHWNRLNSDASNLKSKGITAVWIPPAWKGASQNDVGYGAYDLYDLGEFNQKGTVRTKYGTRSQLQAAVTSLKNNGIQVYGDVVMNHKGGADATEMVRAVEVNPNNRNQEVTGEYTIEAWTRFDFPGRGNTHSSFKWRWYHFDGVDWDQSRRLNNRIYKFRGHGKAWDWEVDTENGNYDYLMYADIDMDHPEVVNELRNWGVWYTNTLGLDGFRIDAVKHIKYSFTRDWINHVRSATGKNMFAVAEFWKNDLGAIENYLQKTNWNHSVFDVPLHYNLYNASKSGGNYDMRNIFNGTVVQRHPSHAVTFVDNHDSQPEEALESFVEERFKPLAYALTLTREQGYPSVFYGDYYGIPTHGVPAMRSKIDPILEARQKYAYGPQHDYLDHPDVIGWTREGDSSHPKSGLATLITDGPGGSKRMYAGLKNAGETWYDITGNRSDTVKIGSDGWGEFHVNDGSVSIYVQK

SEQ ID NO: 39968 - protein, 480 aa, Synthetic construct
NGTMMQYFEWYLPNDGNHWNRLNSDASNLKSKGITAVWIPPAWKGASQNDVGYGAYDLYDLGEFNQKGTVRTKYGTRSQLQAAVTALKNNGIQVYGDVVMNHKGGADATEMVRAVEVNPNNRNQEVTGEYTIEAWTRFDFPGRGNTHSSFKWRWYHFDGVDWDQSRRLNNRIYKFRGHGKAWDWEVDTENGNYDYLMYADIDMDHPEVVNELRNWGVWYTNTLGLDGFRIDAVKHIKYSFTRDWINHVRSATGKNMFAVAEFWKNDLGAIENYLQKTNWNHSVFDVPLHYNLYNASKSGGNYDMRNIFNGTVVQRHPSHAVTFVDNHDSQPEEALESFVEEWFKPLAYALTLTREQGYPSVFYGDYYGIPTHGVPAMRSKIDPILEARQKYAYGPQHDYLDHPDVIGWTREGDSSHPKSGLATLITDGPGGSKRMYAGLKNAGETWYDITGNRSDTVKIGSDGWGEFHVNDGSVSIYVQK

SEQ ID NO: 39969 - protein, 480 aa, Synthetic construct
NGTMMQYFEWYLPNDGNHWNRLNSDASNLKSKGISAVWIPPAWKGASQNDVGYGAYDLYDLGEFNQKGTVRTKYGTRSQLQAAVTSLKNNGIQVYGDVVMNHKGGADATEMVRAVEVNPNNRNQEVTGEYTIEAWTRFDFPGRGNTHSSFKWRWYHFDGVDWDQSRRLNNRIYKFRGHGKAWDWEVDTENGNYDYLMYADIDMDHPEVVNELRNWGVWYTNTLGLDGFRIDAVKHIKYSFTRDWINHVRSATGKNMFAVAEFWKNDLGAIENYLQKTNWNHSVFDVPLHYNLYNASKSGGNYDMRNIFNGTVVQRHPSHAVTFVDNHDSQPEEALESFVEEWFKPLAYALTLTREQGYPSVFYGDYYGIPTHGVPAMRSKIDPILEARQKYAYGPQHDYLDHPDVIGWTREGDSSHPKSGLATLITDGPGGSKRMYAGLKNAGETWYDITGNRSDTVKIGSDGWGEFHVNDGSVSIYVQK

SEQ ID NO: 39970 - protein, 480 aa, Synthetic construct
NGTMMQYFEWNLPNDGNHWNRLNSDASNLKSKGITAVWIPPAWKGASQNDVGYGAYDLYDLGEFNQKGTVRTKYGTRSQLQAAVTSLKNNGIQVYGDVVMNHKGGADATEMVRAVEVNPNNRNQEVTGEYTIEAWTRFDFPGRGNTHSSFKWRWYHFDGVDWDQSRRLNNRIYKFRGHGKAWDWEVDTENGNYDYLMYADIDMDHPEVVNELRNWGVWYTNTLGLDGFRIDAVKHIKYSFTRDWINHVRSATGKNMFAVAEFWKNDLGAIENYLQKTNWNHSVFDVPLHYNLYNASKSGGNYDMRNIFNGTVVQRHPSHAVTFVDNHDSQPEEALESFVEEWFKPLAYALTLTREQGYPSVFYGDYYGIPTHGVPAMRSKIDPILEARQKYAYGPQHDYLDHPDVIGWTREGDSSHPKSGLATLITDGPGGSKRMYAGLKNAGETWYDITGNRSDTVKIGSDGWGEFHVNDGSVSIYVQK

SEQ ID NO: 39971 - protein, 480 aa, Synthetic construct
NGTMMQYFEWYLPNDGNHWNRLNSDASNLKSKGITAVWIPPAWKGASQNDVGYGAYDLYDLGEFNQKGTVRTKYGTRSQLQAAVTSLKNNGIQVYGDVVMNHKGGADYTEMVRAVEVNPNNRNQEVTGEYTIEAWTRFDFPGRGNTHSSFKWRWYHFDGVDWDQSRRLNNRIYKFRGHGKAWDWEVDTENGNYDYLMYADIDMDHPEVVNELRNWGVWYTNTLGLDGFRIDAVKHIKYSFTRDWINHVRSATGKNMFAVAEFWKNDLGAIENYLQKTNWNHSVFDVPLHYNLYNASKSGGNYDMRNIFNGTVVQRHPSHAVTFVDNHDSQPEEALESFVEEWFKPLAYALTLTREQGYPSVFYGDYYGIPTHGVPAMRSKIDPILEARQKYAYGPQHDYLDHPDVIGWTREGDSSHPKSGLATLITDGPGGSKRMYAGLKNAGETWYDITGNRSDTVKIGSDGWGEFHVNDGSVSIYVQK

SEQ ID NO: 39972 - protein, 480 aa, Synthetic construct
NGTMMQYFEWYLPNDGNHWNRLNSDASNLKSKGITAVWIPPAWKGASQNDVGYGAYDLYDLGEFNQKGTVRTKYGTRSQLQAAVTSLKNNGIQVYGDVVMNHKGGADATEMVRAVEVNPNNRNQEVTGEYTIEAWTRFDFPGRGNTHSSFKWRWYHFDGVDWDQSRRLNNRIYKFRGHGKAWDWEVDTENGNYDYLMYADIDMDHPEVVNELRNWGVWYTNTLGLDGFRIDAVKHIKYSFTRDWINHVRSATGKNMFAVAEFWKNDLGAIENYLQKTNWNHSVFDVPLHYNLYNASKSGGNYDMRNIFNGTVVQRHPSHAVTFVDNHDSQPEEALESFVEEWFKPLAYALTLTREQGYPSVFYGDYYGIPTHGVPAMRSKIDPILEARQKYAYGPQHDYLDHPDVIGWTREGDSSHPKSGLATLITDGPGGSKRMYAGLKNAGETWYDITGNRSDPVKIGSDGWGEFHVNDGSVSIYVQK

SEQ ID NO: 39973 - protein, 480 aa, Synthetic construct
NGTMMQYFEWYLPNDGNHWNRLNSDASNLKSKGITAVWIPPAWKGASQNDVGYGAYDLYDLGEFNQKGTVRTKYGTRSQLQAAVTSLKNNGIQVYGDVVMNHKGGADATEMVRAVEVNPNNRNQEVTGEYTIEAWTRFDFPGRGNTHSSFKWRWYHFDGVDWDQSRRLNNRIYKFRGHGKAWDWEVDTEFGNYDYLMYADYDMDHPEVVNEVRNWGVWYTNTLGLDGFRIDAVKHIKYSFTRDWINHVRSATGKNMFAVAEFWKNDLGAIENYLQKTNWNHSVFDVPLHYNLYNASKSGGNYDMRNIFNGTVVQRHPSHAVTFVDNHDSQPEEALESFVEEWFKPLAYALTLTREQGYPSVFYGDYYGIPTHGVPAMRSKIDPILEARQKYAYGPQHDYLDHPDVIGWTREGDSSHPKSGLATLITDGPGGSKRMYAGLKNAGETWYDITGNRSDTVKIGSDGWGEFHVNDGSVSIYVQK

SEQ ID NO: 39974 - protein, 480 aa, Synthetic construct
NGTMMQYFEWYLPNDGNHWNRLNSDASNLKSKGITAVWIPPAWKGASQNDVGYGAYDLYDLGEFNQKGTVRTKYGTRSQLQAAVTSLKNNGIQVYGDVVMNHKGGADATEMVRAVEVNPNNRNQEVTGEHTIEAWTRFDFPGRGNTHSSFKWRWYHFDGVDWDQSRRLNNRIYKFRGHGKAWDWEVDTENGNYDYLMYADIDMDHPEVVNELRNWGVWYTNTLGLDGFRIDAVKHIKYSFTRDWINHVRSATGKNMFAVAEFWKNDLGAIENYLQKTNWNHSVFDVPLHYNLYNASKSGGNYDMRNIFNGTVVQRHPSHAVTFVDNHDSQPEEALESFVEEWFKPLAYALTLTREQGYPSVFYGDYYGIPTHGVPAMRSKIDPILEARQKYAYGPQHDYLDHPDVIGWTREGDSSHPKSGLATLITDGPGGSKRMYAGLKNAGETWYDITGNRSDTVKIGSDGWGEFHVNDGSVSIYVQK

SEQ ID NO: 39975 - protein, 480 aa, Synthetic construct
NGTMMQYFEWYLPNDGNHWNRLNSDASNLKSKGITAVWIPPAWKGASQNDVGYGAYDLYDLGEFNQKGTVRTKYGTRSQLQAAVTSLKNNGIQVYGDVVMNHKGGADATEMVRAVEVNPNNRNQEVTGEYTIEAWTRFDFPGRGNTHSSFKWRWYHFDGVDWDQSRRLNNRIYKFRGHGKAWDWEVDTENGNYDYLMYADIDMDHPEVVNELRNWGVWYTNTLGLDGFRIDAVKHIKYSFTRDWINHVRSATGKNMFAVAEFWKNDLGAIENYLQKTNWNHSVFDVPLHYNLYNASKSGGNYDMRNIFNGTVVQRHPSHAVTFVDNHDSQPEEALESFVEEWFKPLAYALTLTREQGYPSVFYGDYYGIPTHGVPAMRSKIDPILEARQKYAYGPQHDYLDHPDVIGWTREGDSSHPKSGLATLITDGPGGSKRMYAGLKNAGETWYDITGNRSDTVKIGSDGWGEFHVNDGSVSIYVKK

SEQ ID NO: 39976 - protein, 480 aa, Bacillus sp.
NGTMMQYFEWYLPNDGNHWNRLNSDASNLKSKGITAVWIPPAWKGASQNDVGYGAYDLYDLGEFNQKGTVRTKYGTRSQLQAAVTSLKNNGIQVYGDVVMNHKGGADATEMVDAVEVNPNNRNQEVTGEYTIEAWTRFDFPGRGNTHSSFKWRWYHFDGVDWDQSRRLNNRIYKFRGHGKAWDWEVDTEFGNYDYLMYADYDMDHPEVVNELRNWGVWYTNTLGLDGFRIDAVKHIKYSFTRDWINHVRSATGKNMFAVAEFWKNDLGAIENYLQKTNWNHSVFDVPLHYNLYNASKSGGNYDMRNIFNGTVVQRHPSHAVTFVDNHDSQPEEALESFVEEWFKPLAYALTLTREQGYPSVFYGDYYGIPTHGVPAMRSKIDPILEARQKYAYGPQHDYLDHPDVIGWTREGDSSHPKSGLATLITDGPGGSKRMYAGLKNAGETWYDITGNRSDTVKIGSDGWGEFHVNDGSVSIYVQK

SEQ ID NO: 39977 - protein, 480 aa, Synthetic construct
NGTMMQYFEWYLPNDGNHWNRLNSDASNLKSKGITAIWIPPAWKGASQNDVGYGAYDLYDLGEFNQKGTVRTKYGTRSQLQAAVTSLKNNGIQVYGDVVMNHKGGADATEMVRAVEVNPNNRNQEVTGEYTIEAWTRFDFPGRGNTHSSFKWRWYHFDGVDWDQSRRLNNRIYKFRGHGKAWDWEVDTENGNYDYLMYADIDMDHPEVVNELRNWGVWYTNTLGLDGFRIDAVKHIKYSFTRDWINHVRSATGKNMFAVAEFWKNDLGAIENYLQKTNWNHSVFDVPLHYNLYNASKSGGNYDMRNIFNGTVVQRHPSHAVTFVDNHDSQPEEALESFVEEWFKPLAYALTLTREQGYPSVFYGDYYGIPTHGVPAMRSKIDPILEARQKYAYGPQHDYLDHPDVIGWTREGDSSHPKSGLATLITDGPGGSKRMYAGLKNAGETWYDITGNRSDTVKIGSDGWGEFHVNDGSVSIYVQK

SEQ ID NO: 39978 - protein, 480 aa, Synthetic construct
NGTMMQYFEWYLPNDGNHWNRLNSDASNLKSKGITAVWIPPAWKGASQNDVGYGAYDVYDLGEFNQKGTVRTKYGTRSQLQAAVTSLKNNGIQVYGDVVMNHKGGADATEMVRAVEVNPNNRNQEVTGEYTIEAWTRFDFPGRGNTHSSFKWRWYHFDGVDWDQSRRLNNRIYKFRGHGKAWDWEVDTENGNYDYLMYADFDMDHPEVVNELRNWGVWYTNTLGLDGFRIDAVKHIKYSFTRDWINHVRSATGKNMFAVAEFWKNDLGAIENYLQKTNWNHSVFDVPLHYNLYNASKSGGNYDMRNIFNGTVVQRHPSHAVTFVDNHDSQPEEALESFVEEWFKPLAYALTLTREQGYPSVFYGDYYGIPTHGVPAMRSKIDPILEARQKYAYGPQHDYLDHPDVIGWTREGDSSHPKSGLATLITDGPGGSKRMYAGLKNAGETWYDITGNRSDTVKIGSDGWGEFHVNDGSVSIYVQK

SEQ ID NO: 39979 - protein, 480 aa, Synthetic construct
NGTMMQYFEWYLPNDGNHWNRLNSDASNLKSKGITAVWIPPAWKGASQNDVGYGAYDLYDLGEFNQKGTVRTKYGTRSQLQAAVTSLKNNGIQVYGDVVMNHKGGADATEMVRAVEVNPNNRNQEVTGEYTIEAWTRFDFPGRGNTHSSFKWRWYHFDGVDWDQSRRLNNRIYKFRGHGKAWDWEVDTENGNYDYLMYADIDMDHPEVVNELRNWGVWYTNTLGLDGFRIDAVKHIKYSFTRDWINHVRSATGKNMFAVAEFWKNDLGAIENYLQKTNWNHSVFDVPLHYNLYNASKSGGNYDMRNIFNGTVVQRHPSHAVTFVDNHDSQPEEALESFVEEWFKPLAYALTLTREQGYPSVFYGDYYGIPTHGVPAMRSKIDPILEARQKYAYGPQHDYLDHPDVIGWTREGDSSHPKSGLATLITDGPGGSKRMYAGLKNAGETWYDITGNRSDTVKIGSDGWGEFHCNDGSVSIYVQK

SEQ ID NO: 39980 - protein, 480 aa, Synthetic construct
NGTMMQYFEWYLPNDGNHWNRLNSDASNLKSKGITAVWIPPAWKGASQNDVGYGAYDLYDLGEFNQKGTVRTKYGTRSQLQAAVTSLKNNGIQVYGDVVMNHKGGADATEMVRAVEVNPNNRNQEVTGEYTIEAWTRFDFPGRGNTHSSFKWRWYHFDGVDWDQSRRLNNRIYKFRGHGKAWDWEVDTENGNYDYLMYADIDMDHPEVVNELRNWGVWYTNTLGLDGFRIDAVKHIKYSFTRDWINHVRSATGKNMFAVAEFWKNDLGAIENYLQKTNWNHSVFDVPLHYNLYNASKSGGNYDMRNIFNGTVVQRHPSHAVTFVDNHDSQPEEALESFVEEWFKPLAYALTLTREQGYPSVFYGDYYGIPTHGVPAMRSKIDPILEARQKYAYGPQHDYLDHPDVIGWTREGDSSHPKSGLATLITDGPGGSKRMYAGLKNAGETWYDITGNRSDTVKIGSAGWGEFHVNDGSVSIYVQK

SEQ ID NO: 39981 - protein, 480 aa, Synthetic construct
NGTMMQYFEWYLPNDGNHWNRLNSDASNLKSKGITAVWIPPAWKGASQNDVGYGAYDLYDLGEFNQKGTVRTKYGTRSQLQAAVTSLKNNGIQVYGDVVMNHKGGADATEMVRAVEVNPNNRNQEVTGEYTIEAWTRFDFPGRGNTHSSFKWRWYHFDGVDWDQSRRLNNRIYKFRGHGKAWDWEVDTENGNYDYLMYADIDMDHPEVVNELRNWGVWYTNTLGLDGFRIDAVKHIKYSFTRDWINHVRSATGKNMFAVAEFWKNDLGAIENYLQKTNWNHSVFDVPLHYNLYNASKSGGNYDMRNIFNGTVVQRHPSHAVTFVDNHDSQPEEALESFVEEWFKPLAYALTLTREQGYPSVFYGDYYGIPTHGVPAMRSKIDPILEARQKYAYGPQHDYLDHPDVIGWTREGDSSHPKSGLATLITDGPGGSKRMYAGLKNAGETWYDITGNRSDTIKIGSDGWGEFHVNDGSVSIYVQK

SEQ ID NO: 39982 - protein, 480 aa, Synthetic construct
NGTMMQYFEWYLPNDGNHWNRLNSDASNLKSKGITAVWIPPAWKGASQNDVGYGAYDLYDLGEFNQKGTVRTKYGTRSQLQAAVTSLKNNGIQVYGDVVMNHKGGADATEMVRAVEVNPNNRNQEVTGEYTIEAWTRFDFPGRGNTHSSFKWRWYHFDGVDWDQSRRLNNRIYKFRGHGKAWDWPVDTENGNYDYLMYADIDMDHPEVVNELRNWGVWYTNTLGLDGFRIDAVKHIKYSFTRDWINHVRSATGKNMFAVAEFWKNDLGAIENYLQKTNWNHSVFDVPLHYNLYNASKSGGNYDMRNIFNGTVVQRHPSHAVTFVDNHDSQPEEALESFVEEWFKPLAYALTLTREQGYPSVFYGDYYGIPTHGVPAMRSKIDPILEARQKYAYGPQHDYLDHPDVIGWTREGDSSHPKSGLATLITDGPGGSKRMYAGLKNAGETWYDITGNRSDTVKIGSDGWGEFHVNDGSVSIYVQK

SEQ ID NO: 39983 - protein, 480 aa, Synthetic construct
NGTMMQYFEWYLPNDGNHWNRLNSDASNLKSKGITAVWIPPAWKGVSQNDVGYGAYDLYDLGEFNQKGTVRTKYGTRSQLQAAVTSLKNNGIQVYGDVVMNHKGGADATEMVRAVEVNPNNRNQEVTGEYTIEAWTRFDFPGRGNTHSSFKWRWYHFDGVDWDQSRRFDNRIYKFRGHGKAWDWEVDTEFGNYDYLMYADYDMDHPEVVNELRNWGVWYTNTLGLDGFRIDAVKHIKYSFTRDWINHVRSATGKNMFAVAEFWKNDLGAIENYLQKTNWNHSVFDVPLHYNLYNASKSGGNYDMRNIFNGTVVQRHPSHAVTFVDNHDSQPEEALESFVEEWFKPLAYALTLTREQGYPSVFYGDYYGIPTHGVPAMRSKIDPILEARQKYAYGPQHDYLDHPDVIGWTREGDSSHPKSGLATLITDGPGGSKRMYAGLKNAGETWYDITGNRSDTVKIGSDGWGEFHVNDGSVSIYVQK

SEQ ID NO: 39984 - protein, 480 aa, Synthetic construct
NGTMMQYFEWYLPNDGNHWNRLNSDASNLKSKGITAVWIPPAWKGASQNDVGYGAYDLYDLGEFNQKGTVRTKYGTRSQLQAAVTSLKNNGIQVYGDVVMNHKGGADATEMVRAVEVNPNNRNQEVTGEYTIEAWTRFDFPGRGNTHSSFKWRWYHFDGVDWDQSRRLNNRIYKFRGHGKAWDWEVDTENGNYDYLMYADIDMDHPEVVNELRNWGVWYTNTLGLDGFRIDAVKHIKYSFTRDWINHVRSATGKNMFAVAEFWKNDLGAIENYLQKTNWNHSVFDVPLHYNLYNASKSGGNYDMRNIFNGTVVQRHPSHAVTLVDNHDSQPEEALESFVEEWFKPLAYALTLTREQGYPSVFYGDYYGIPTHGVPAMRSKIDPILEARQKYAYGPQHDYLDHPDVIGWTREGDSSHPKSGLATLITDGPGGSKRMYAGLKNAGETWYDITGNRSDTVKIGSDGWGEFHVNDGSVSIYVQK

SEQ ID NO: 39985 - protein, 480 aa, Bacillus sp.
NGTMMQYFEWYLPNDGNHWNRLNSDASNLKSKGITAVWIPPAWKGVSQNDVGYGAYDLYDLGEFNQKGTVRTKYGTRSQLQAAVTSLKNNGIQVYGDVVMNHKGGADATEMVRAVEVNPNNRNQEVTGEYTIEAWTRFDFPGRGNTHSSFKWRWYHFDGVDWDQSRELSNRIYKFRGHGKAWDWEVDTEFGNYDYLMYADYDYDHPESTNEMRNWGVWYTNTLGLDGFRIDAVKHIKYSFTRDWINHVRSATGKNMFAVAEFWKNDLGAIENYLQKTNWNHSVFDVPLHYNLYNASKSGGNYDMRNIFNGTVVQRHPSHAVTFVDNHDSQPEEALESFVEEWFKPLAYALTLTREQGYPSVFYGDYYGIPTHGVPAMRSKIDPILEARQKYAYGPQHDYLDHPDVIGWTREGDSSHPKSGLATLITDGPGGSKRMYAGLKNAGETWYDITGNRSDTVKIGSDGWGEFHVNDGSVSIYVQK

SEQ ID NO: 39986 - protein, 480 aa, Bacillus sp.
NGTMMQYFEWYLPNDGNHWNRLNSDASNLKSKGITAVWIPPAWKAASQNDVGYGAYDLYDLGEFNQKGTVRTKYGTRSQLQAAVTSLKNNGIQVYGDVVMNHKGGADATEMVRAVEVNPNNRNQEVTGEYTIEAWTRFDFPGRGNTHSSFKWRWYHFDGVDWDQSRDLQNRIYKFRGHGKAWDWEVDTEFGNYDYLMYADYDMDHPEVVNELRNWGVWYTNTLGLDGFRIDAVKHIKYSFTRDWINHVRSATGKNMFAVAEFWKNDLGAIENYLQKTNWNHSVFDVPLHYNLYNASKSGGNYDMRNIFNGTVVQRHPSHAVTFVDNHDSQPEEALESFVETWFKPLAYALTLTREQGYPSVFYGDYYGIPTHGVPAMRSKIDPILEARQKYAYGPQHDYLDHPDVIGWTREGDSSHPKSGLATLITDGPGGSKRMYAGLKNAGETWYDITGNRSDTVKIGSDGWGEFHVNDGSVSIYVQK

SEQ ID NO: 39987 - protein, 480 aa, Synthetic construct
NGTMMQYFEWYLPNDGNHWNRLNSDASNLKSKGITAVWIPPAWKGASQNDVGYGAYDLYDLGEFNQKGTVRTKYGTRSQLQAAVTSLKNNGIQVYGDVVMNHKGGADATEMVRAVEVNPNNRNQEVTGEYTIEAWTRFDFPGRGNTHSSFKWRWYHFDGVDWDQSRRLNNRIYKFRGHGKAWDWEVDTENGNYDYLMYADIDMDHPEVVNELRNWGVWYTNTLGLDGFRIDAVKHIKYSFTRDWINHVRSATGKNMFAVAEFWKNDLGAIENYLQKTNWNHSVFDVPLHYNLYNASKSGGNYDMRNIFNGTVVQRHPSHAVTFVDNHDSQPEEALESFVEEWFKPLAYALTLTREQGYPSVFYGDYYGIPTHGVPAMRSKIDPILEARQKYAYGPQHDYLDHPDVIGWTREGDSSHPKSGLATLITDGPGGAKRMYAGLKNAGETWYDITGNRSDTVKIGSDGWGEFHVNDGSVSIYVQK

SEQ ID NO: 39988 - protein, 480 aa, Synthetic construct
NGTMMQYFEWYLPNDGNHWNRLNSDASNLKSKGITAVWIPPAWKGASQNDVGYGAYDLYDLGEFNQKGTVRTKYGTRSQLQAAVTSLKNNGIQVYGDVVMNHKGGADATEMVRAVEVNPNNRNQEVTGEYTIEAWTRFDFPGRGNTHSSFKWRWYHFDGVDWDQSRRLNNRIYKFRGHGKAWDWEVDTENGNYDYLMYADIDMDHPEVVNELRNWGVWYTNTLGLDGFRIDAVKHIKYSFTRDWINHVRSATGKNMFAVAEFWKNDLGAIENYLQKTNWNHSVFDVPLHYNLYNASKSGGNYDMRNIFNGTVVQRNPSHAVTFVDNHDSQPEEALESFVEEWFKPLAYALTLTREQGYPSVFYGDYYGIPTHGVPAMRSKIDPILEARQKYAYGPQHDYLDHPDVIGWTREGDSSHPKSGLATLITDGPGGSKRMYAGLKNAGETWYDITGNRSDTVKIGSDGWGEFHVNDGSVSIYVQK

SEQ ID NO: 39989 - protein, 480 aa, Bacillus sp.
NGTMMQYFEWYLPNDGNHWNRLNSDASNLKSKGITAVWIPPAWKGASQNDVGYGAYDLYDLGEFNQKGTVRTKYGTRSQLQAAVTSLKNNGIQVYGDVVMNHKGGADATEMVRAVEVNPNNRNQEVTVEYTIEAWTRFDFPGRGNTHSSFKWRWYHFDGVDWDQSRRLNNRIYKFRGHGKAWDWEVDTEFGNYDYLMYADYDMDHPEVVNELRNWGVWYTNTLGLDGFRIDAVKHIKYSFTRDWINHVRSATGKNMFAVAEFWKNDLGAIENYLQKTNWNHSVFDVPLHYNLYNASKSGGNYDMRNIFNGTVVQRHPSHAVTFVDNHDSQPEEALESFVEEWFKPLAYALTLTREQGYPSVFYGDYYGIPTHGVPAMRSKIDPILEARQKYAYGPQHDYLDHPDVIGWTREGDSSHPKSGLATLITDGPGGSKRMYAGLKNAGETWYDITGNRSDTVKIGSDGWGEFHVNDGSVSIYVQK

SEQ ID NO: 39990 - protein, 480 aa, Synthetic construct
NGTMMQYFEWYLPNDGNHWNRLNSDASNLKSKGITAVWIPPAWKGASQNDVGYGAYDLYDLGEFNQKGTVRTKYGTRSQLQAAVTSLKNNGIQVYGDVVMNHKGGADATEMVRAVEVNPNNRNQEVTGEYTIEAWTRFDFPGRGNTHSSFKWRWYHFDGVDWDQSRRLNNRIYKFRGHGKAWDWEVDTENGNYDYLMYADIDMDHPEVVNELRNWGVWYTNTLGLDGFRIDAVKHIKYSFTRDWINHVRSATGKNMFAVAEFWKNDLGAIENYLQKTNWNHSVFDVPLHYNLYNASKSGGNYDMRNIFNGTVVQRHPSHAVTFVDNHDSQPEEALESFVEEWFKPLAYALTLTREQGYPSVFYGDYYGIPTHGVPAMRSKIDPILEARQKYAYGPQHDYLDHPDVIGWTREGDSAHPKSGLATLITDGPGGSKRMYAGLKNAGETWYDITGNRSDTVKIGSDGWGEFHVNDGSVSIYVQK

SEQ ID NO: 39991 - protein, 480 aa, Synthetic construct
NGTMMQYFEWYLPNDGNHWNRLNSDASNLKSKGITAVWIPPAWKGASQNDVGYGAYDLYDLGEFNQKGTVRTKYGTRSQLQAAVTSLKNNGIQVYGDVVMNHKGGADATEMVRAVEVNPNNRNQEVTGEYTIEAWTRFDFPGRGNTHSSFKWRWYHFDGVDWDQSRRLNNRIYKFRGHGKAWDWEVDTEFGNYDYLMYADYDMDHPEVVNELRNWGVWYTNTLGLDGFRIDAVKHIKYSFTRDWINHVRSATGKNMFAVAEFWKNDLGAIENYLQKTNWNHSVFDVPLHYNLYNASKSGGNYDMRHIFNGTVVQRHPSHAVTFVDNHDSQPEEALESFVEEWFKPLAYALTLTREQGYPSVFYGDYYGIPTHGVPAMRSKIDPILEARQKYAYGPQHDYLDHPDVIGWTREGDSSHPKSGLATLITDGPGGSKRMYAGLKNAGETWYDITGNRSDTVKIGSDGWGEFHVNDGSVSIYVQK

SEQ ID NO: 39992 - protein, 480 aa, Synthetic construct
NGTMMQYFEWYLPNDGNHWNRLNSDASNLKSKGITAVWIPPAWKGASQNDVGYGAYDLYDLGEFNQKGTVRTKYGTRSQLQAAVTSLKNNGIQVYGDVVMNHKGGADATEMVRAVEVNPNNRNQEVTGEYTIEAWTRFDFPGRGNTHSSFKWRWYHFDGVDWDQSRRLNNRIYKFRGHGKAWDWEVDTENGNYDYLMYADIDMDHPEVVNELRNWGVWYTNTLGLDGFRIDAVKHIKYSFTRDWINHVRSATGKNMFAVAEFWKNDLGAIENYLQKTNWNHSVFDVPLHYNLYNASKSGGNYDMRNIFNGTVVQRHPSHAVTFVDNHDSQPEEALESFVEEWFKPLAYALTLTREQGYPSVFYGDYYGIPTHGVPAMRSKIDPILEARQKYAYGPQHDYLDHPDVIGWTREGDSSHPKSGLATLITDGPGGSKTMYAGLKNAGETWYDITGNRSDTVKIGSDGWGEFHVNDGSVSIYVQK

SEQ ID NO: 39993 - protein, 480 aa, Bacillus sp.
NGTMMQYFEWYLPNDGNHWNRLNSDASNLKSKGITAVWIPPAWKGASQNDVGYGAYDLYDLGEFNQKGTVRTKYGTRSQLQAAVTSLKNNGIQVYGDVVMNHKGGADATEMVRAVEVNPNNRNQEVTGEYTIEAWTRFDFPGRGNTHSSFKWRWYHFDGVDWDQSRRLNNRIYKFRGHGKAWDWEVDTEFGNYDYLMYADYDMDHPEVVNELRNWGVWYTNTLGLDGFRIDAVKHIKYSFTRDWINHVRSATGKNMFAVAEFWKNDLGAIENYLQKTNWNHSVFDVPLHNNLYTASKSGGNYDMRNIFNGTVVQRHPSHAVTFVDNHDSQPEEALESFVEEWFKPLAYALTLTREQGYPSVFYGDYYGIPTHGVPAMRSKIDPILEARQKYAYGPQHDYLDHPDVIGWTREGDSSHPKSGLATLITDGPGGSKRMYAGLKNAGETWYDITGNRSDTVKIGSDGWGEFHVNDGSVSIYVQK

SEQ ID NO: 39994 - protein, 480 aa, Synthetic construct
NGTMMQYFEWYLPNDGNHWNRLNSDASNLKSKGITAVWIPPAWKGASQNDVGYGAYDLYDLGEFNQKGTVRTKYGTRSQLQAAVTSLKNNGIQVYGDVVMNHKGGADATEMVRAVEVNPNNRNQEVTGEYTIEAWTRFDFPGRGNTHSSFKWRWYHFDGVDWDQSRRLNNRIYKFRGHGKAWDWEVDTENGNYDYLMYADIDMDHPEVVNELRNWGVWYTNTLGLDGFRIDAVKHIKYSFTRDWINHVRSATGKNMFAVAEFWKNDLGAIENYLQKTNWNHSVFDVPLHYNLYNASKSGGNYDMRNIFNGTVVQRHPSHAVTFVDNHDSQPEEALESFVEEWFKPLAYALTLTREQGYPSVFYGDYYGIPTHGVPAMRSKIDPILEARQKYAYGPQHDYLDHPDVIGWTREGDSSHPKSGLATLITDGPGGSKRMYAGLKNAGETWYDLTGNRSDTVKIGSDGWGEFHVNDGSVSIYVQK

SEQ ID NO: 39995 - protein, 480 aa, Synthetic construct
NGTMMQYFEWYLPNDGNHWNRLNSDASNLKSKGITAVWIPPAWKGASQNDVGYGAYDLYDLGEFNQKGTVRTKYGTRSQLQAAVTTLKNNGIQVYGDVVMNHKGGADATEMVRAVEVNPNNRNQEVTGEYTIEAWTRFDFPGRGNTHSSFKWRWYHFDGVDWDQSRRLNNRIYKFRGHGKAWDWEVDTENGNYDYLMYADIDMDHPEVVNELRNWGVWYTNTLGLDGFRIDAVKHIKYSFTRDWINHVRSATGKNMFAVAEFWKNDLGAIENYLQKTNWNHSVFDVPLHYNLYNASKSGGNYDMRNIFNGTVVQRHPSHAVTFVDNHDSQPEEALESFVEEWFKPLAYALTLTREQGYPSVFYGDYYGIPTHGVPAMRSKIDPILEARQKYAYGPQHDYLDHPDVIGWTREGDSSHPKSGLATLITDGPGGSKRMYAGLKNAGETWYDITGNRSDTVKIGSDGWGEFHVNDGSVSIYVQK

SEQ ID NO: 39996 - protein, 480 aa, Synthetic construct
NGTMMQYFEWYLPNDGNHWNRLNSDASNLKSKGITAVWIPPAWKGASQNDVGYGAYDLYDLGEFNQKGTVRTKYGTRSQLQAAVTSLKNNGIQVYGDVVMNHKGGADATEMVRAVEVNPNNRNQEVTGEYTIEAWTRFDFPGRGNTHSSFKWRWYHFDGVDWDQSRRLLNRIYKFRGHGKAWDWEVDTEFGNYDYLMYADYDMDHPEVVNELRNWGVWYTNTLGLDGFRIDAVKHIKYSFTRDWINHVRSATGKNMFAVAEFWKNDLGAIENYLQKTNWNHSVFDVPLHYNLYNASKSGGNYDMRNIFNGTVVQRHPSHAVTFVDNHDSQPEEALESFVEEWFKPLAYALTLTREQGYPSVFYGDYYGIPTHGVPAMRSKIDPILEARQKYAYGPQHDYLDHPDVIGWTREGDSSHPKSGLATLITDGPGGSKRMYAGLKNAGETWYDITGNRSDTVKIGSDGWGEFHVNDGSVSIYVQK

SEQ ID NO: 39997 - protein, 480 aa, Bacillus sp.
NGTMMQYFEWYLPNDGNHWNRLNSDASNLKSKGITAVWIPPAWKALSQNDVGYGAYDLYDLGEFNQKGTVRTKYGTRSQLQAAVTSLKNNGIQVYGDVVMNHKGGADATEMVRAVEVNPNNRNQEVTGEYTIEAWTRFDFPGRGNTHSSFKWRWYHFDGVDWDQSRRLSNRIYKFRGHGKAWDWEVDTEFGNYDYLMYADYDMDHPEVVNELRNWGVWYTNTLGLDGFRIDAVKHIKYSFTRDWINHVRSATGKNMFAVAEFWKNDLGAIENYLQKTNWNHSVFDVPLHYNLYNASKSGGNYDMRNIFNGTVVQRHPSHAVTFVDNHDSQPEEALESFVEEWFKPLAYALTLTREQGYPSVFYGDYYGIPTHGVPAMRSKIDPILEARQKYAYGPQHDYLDHPDVIGWTREGDSSHPKSGLATLITDGPGGSKRMYAGLKNVGETWYDITGNRSDTVKIGSDGWGEFHVNDGSVSIYVQK

SEQ ID NO: 39998 - protein, 480 aa, Bacillus sp.
NGTMMQYFEWYLPNDGNHWNRLNSDASNLKSKGITAVWIPPAWKGASQNDVGYGAYDLYDLGEFNQKGTVRTKYGTRSQLQAAVTSLKNNGIQVYGDVVMNHKGGADATEMVRAVEVNPNNRNQEVTGEYTIEAWTRFDFPGRGNTHSSFKWRWYHFDGVDWDQSRRLNNRIYKFRGHGKAWDWEVDTEFGNYDYLMYADYDMDHPEVVNELRNWGVWYTNTLGLDGFRIDAVKHIKYSFTRDWINHVRSATGKNMFAVAEFWKNDLGAIENYLQKTNWNHSVFDVPLHYNLYNASKSGGNYDMRNIFNGTVVQRHPSHAVTFVDNHDSQPEEALESWVEEWFKPLAYALTLTREQGYPSVFYGDYYGIPTHGVPAMRSKIDPILEARQKYAYGPQHDYLDHPDVIGWTREGDSSHPKSGLATLITDGPGGSKRMYAGLKNAGETWYDITGNRSDTVKIGSDGWGEFHVNDGSVSIYVQK

SEQ ID NO: 39999 - protein, 480 aa, Bacillus sp.
NGTMMQYFEWYLPNDGNHWNRLNSDASNLKSKGITAVWIPPAWKAVSQNDVGYGAYDLYDLGEFNQKGTVRTKYGTRSQLQAAVTSLKNNGIQVYGDVVMNHKGGADATEMVRAVEVNPNNRNQEVTGEYTIEAWTRFDFPGRGNTHSSFKWRWYHFDGVDWDQSRNLSNRIYKFRGHGKAWDWEVDTEFGNYDYLMYADYDMDHPEVVNELRNWGVWYTNTLGLDGFRIDAVKHIKYSFTRDWINHVRSATGKNMFAVAEFWKNDLGAIENYLQKTNWNHSVFDVPLHYNLYNASKSGGNYDMRNIFNGTVVQRHPSHAVTFVDNHDSQPEEALESFVEEWFKPLAYALTLTREQGYPSVFYGDYYGIPTHGVPAMRSKIDPILEARQKYAYGPQHDYLDHPDVIGWTREGDSSHPKSGLATLITDGPGGSKRMYAGLKNAGETWYDITGNRSDTVKIGSDGWGEFHVNDGSVSIYVQK

SEQ ID NO: 40000 - protein, 480 aa, Synthetic construct
NGTMMQYFEWYLPNDGNHWNRLNSDASNLKSKGITAVWIPPAWKGASQNDVGYGAYDLYDLGEFNQKGTVRTKYGTRSQLQAAVTSLKNNGIQVYGDVVMNHKGGADATEMVRAVEVNPNNRNQEVTGEYTIEAWTRFDFPGRGNTHSSFKWRWYHFDGVDWDQSRRLNNRIYKFRGHGKAWDWEVDTEFGNYDYLMYADYDMDHPEVVNELRNWGVWYTNTLGLDGFRIDAVKHIKYSFTRDWINHVRSATGKNMFAVAEFWKNDLGLIENYLQKTNWNHSVFDVPLHYNLYNASKSGGNYDMRNIFNGTVVQRHPSHAVTFVDNHDSQPEEALESFVEEWFKPLAYALTLTREQGYPSVFYGDYYGIPTHGVPAMRSKIDPILEARQKYAYGPQHDYLDHPDVIGWTREGDSSHPKSGLATLITDGPGGSKRMYAGLKNAGETWYDITGNRSDTVKIGSDGWGEFHVNDGSVSIYVQK

SEQ ID NO: 40001 - protein, 480 aa, Synthetic construct
NGTMMQYFEWYLPNDGNHWNRLNSDASNLKSKGITAVWIPPAWKGASQNDVGYGAYDLYDLGEFNQKGTVRTKYGTRSQLQAAVTSLKNNGIQVYGDVVMNHKGGADATEMVRAVEVNPNNRNQEVTGEYTIEAWTRFDFPGRGNTHSSFKWRWYHFDGVDWDQSRRLNNRIYKFRGHGKAWDWEVDTENGNYDYLMYADYDMDHPESVNELRNWGVWYTNTLGLDGFRIDAVKHIKYSFTRDWINHVRSATGKNMFAVAEFWKNDLGAIENYLQKTNWNHSVFDVPLHYNLYNASKSGGNYDMRNIFNGTVVQRHPSHAVTFVDNHDSQPEEALESFVEEWFKPLAYALTLTREQGYPSVFYGDYYGIPTHGVPAMRSKIDPILEARQKYAYGPQHDYLDHPDVIGWTREGDSSHPKSGLATLITDGPGGSKRMYAGLKNAGETWYDITGNRSDTVKIGSDGWGEFHVNDGSVSIYVQK

SEQ ID NO: 40002 - protein, 480 aa, Bacillus sp.
NGTMMQYFEWYLPNDGNHWNRLNSDASNLKSKGITAVWIPPALKGTSQNDVGYGAYDLYDLGEFNQKGTVRTKYGTRSQLQAAVTSLKNNGIQVYGDVVMNHKGGADATEMVRAVEVNPNNRNQEVTGEYTIEAWTRFDFPGRGNTHSSFKWRWYHFDGVDWDQSRQLSNRIYKFRGHGKAWDWEVDTEFGNYDYLMYTDYDMDHPEVVNELRNWGVWYTNTLGLDGFRIDAVKHIKYSFTRDWINHVRSATGKNMFAVAEFWKNDLGAIENYLQKTNWNHSVFDVPLHYNLYNASKSGGNYDMRNIFNGTVVQRHPSHAVTFVDNHDSQPEEALESFVEEWFKPLAYALTLTREQGYPSVFYGDYYGIPTHGVPAMRSKIDPILEARQKYAYGPQHDYLDHPDVIGWTREGDSSHPKSGLATLITDGPGGSKRMYAGLKNAGETWYDITGNRSDTVKIGSDGWGEFHVNDGSVSIYVQK

SEQ ID NO: 40003 - protein, 480 aa, Bacillus sp.
NGTMMQYFEWYLPNDGNHWNRLNSDASNLKSKGITAVWIPPAWKGASQNDVGYGAYDLYDLGEFNQKGTVRTKYGTRSQLQAAVTSLKNNGIQVYGDVVMNHKGGADATEMVRAVEVNPNNRNQEVTGEYTIEAWTRFDFPGRGNTHSSFKWRWYHFDGVDWDQSRRLNNRIYKFRGHGKAWDWEVDTEFGNYDYLMYADYDMDHPEVVNELRNWGVWYTNTLGLDGFRIDAVKHIKYSFTRDWINHVRSATGKNMFAVAEFWKNDLGAIENYLQKTNWNHSVFDVPLHYNLYNASKSGGNYDMRNIFNGTVVKRHPSHAVTFVDNHDSQPEEALESFVEEWFKPLAYALTLTREQGYPSVFYGDYYGIPTHGVPAMRSKIDPILEARQKYAYGPQHDYLDHPDVIGWTREGDSSHPKSGLATLITDGPGGSKRMYAGLKNAGETWYDITGNRSDTVKIGSDGWGEFHVNDGSVSIYVQK

SEQ ID NO: 40004 - protein, 480 aa, Bacillus sp.
NGTMMQYFEWYLPNDGNHWNRLNSDASNLKSKGITAVWIPPAWKGASQNDVGYGAYDLYDLGEFNQKGTVRTKYGTRSQLQAAVTSLKNNGIQVYGDVVMNHKGGADATEMVRAVEVNPNNRNQEVTGEYTIEAWTRFDFPGRGNTHSSFKWRWYHFDGVDWDQSREFDNRIYKFRGHGKAWDWEVDTEFGNYDYLMYADYDMDHPEVVNELRNWGVWYTNTLGLDGFRIDAVKHIKYSFTRDWINHVRSATGKNMFAVAEFWKNDLGAIENYLQKTNWNHSVFDVPLHYNLYNASKSGGNYDMRNIFNGTVVQRHPSHAVTFVDNHDSQPEEALESFVETWFKPLAYALTLTREQGYPSVFYGDYYGIPTHGVPAMRSKIDPILEARQKYAYGPQHDYLDHPDVIGWTREGDSSHPKSGLATLITDGPGGSKRMYAGLKNAGETWYDITGNRSDTVKIGSDGWGEFHVNDASVSIYVQK

SEQ ID NO: 40005 - protein, 480 aa, Synthetic construct
NGTMMQYFEWYLPNDGNHWNRLNSDASNLKSKGITAVWIPPAWKGASQNDVGYGAYDLYDLGEFNQKGTVRTKYGTRSQLQAAVTSLKNNGIQVYGDVVMNHKGGADATEMVRAVEVNPNNRNQEVTGEYTIEAWTRFDFPGRGNTHSSFKWRWYHFDGVDWDQSRRLNNRIYKFRGHGKAWDWEVDTENGNYDYLMYADIDMDHPEVVNELRNWGVWYTNTLGLDGFRIDAVKHIKYSFTRDWINHARSATGKNMFAVAEFWKNDLGAIENYLQKTNWNHSVFDVPLHYNLYNASKSGGNYDMRNIFNGTVVQRHPSHAVTFVDNHDSQPEEALESFVEEWFKPLAYALTLTREQGYPSVFYGDYYGIPTHGVPAMRSKIDPILEARQKYAYGPQHDYLDHPDVIGWTREGDSSHPKSGLATLITDGPGGSKRMYAGLKNAGETWYDITGNRSDTVKIGSDGWGEFHVNDGSVSIYVQK

SEQ ID NO: 40006 - protein, 480 aa, Synthetic construct
NGTMMQYFEWYLPNDGNHWNRLNSDASNLKSKGITAVWIPPAWKGASQNDVGYGAYDLYDLGEFNQKGTVRTKYGTRSQLQAAVTSLKNNGIQVYGDVVMNHKGGADATEMVRAVEVNPNNRNQEVTGEYTIEAWTRFDFPGRGNTHSSFKWRWYHFDGVDWDQSRRLNNRIYKFRGHGKAWDWEVDTENGNYDYLMYADIDMDHPEVVNELRNWGVWYTNTLGLDGFRIDAVKHIKYSFTRDWINHVRSATGKNMFAVAEFWKNDLGAIENYLQFTNWNHSVFDVPLHYNLYNASKSGGNYDMRNIFNGTVVQRHPSHAVTFVDNHDSQPEEALESFVEEWFKPLAYALTLTREQGYPSVFYGDYYGIPTHGVPAMRSKIDPILEARQKYAYGPQHDYLDHPDVIGWTREGDSSHPKSGLATLITDGPGGSKRMYAGLKNAGETWYDITGNRSDTVKIGSDGWGEFHVNDGSVSIYVQK

SEQ ID NO: 40007 - protein, 480 aa, Synthetic construct
NGTMMQYFEWYLPNDGNHWNRLNSDASNLKSKGITAVWIPPAWKGASQNDVGYGAYDVYDLGEFNQKGTVRTKYGTRSQLQAAVTSLKNNGIQVYGDVVFNHKGGADATEMVRAVEVNPNNRNQEVTGEYTIEAWTRFDFPGRGNTHSSFKWRWYHFDGVDWDQSRRLNNRIYKFRGHGKAWDWEVDTENGNYDYLMYADYDMDHPEVVNELRNWGVWYTNTLGLDGFRIDAVKHIKYSFTRDWINHVRSATGKNMFAVAEFWKNDLGAIENYLQKTNWNHSVFDVPLHYNLYNASKSGGNYDMRNIFNGTVVQRHPSHAVTFVDNHDSQPEEALESFVEEWFKPLAYALTLTREQGYPSVFYGDYYGIPTHGVPAMRSKIDPILEARQKYAYGPQHDYLDHPDVIGWTREGDSSHPKSGLATLITDGPGGSKRMYAGLKNAGETWYDITGNRSDTVKIGSDGWGEFHVNDGSVSIYVQK

SEQ ID NO: 40008 - protein, 480 aa, Synthetic construct
NGTMMQYFEWYLPNDGNHWNRLNSDASNLKSKGITAVWIPPAWKGASQNDVGYGAYDLYDLGEFNQKGTVRTKYGTRSQLQAAVTSLKNNGIQVYGDVVMNHKGGADATEMVRAVEVNPNNRNQEVTGEYTIEAWTRFDFPGRGNTHSSFKWRWYHFDGVDWDQSRRLNNRIYKFRGHGKAWDWEVDTEFGNYDYLMYADYDGDHPEVVNELRNWGVWYTNTLGLDGFRIDAVKHIKYSFTRDWINHVRSATGKNMFAVAEFWKNDLGAIENYLQKTNWNHSVFDVPLHYNLYNASKSGGNYDMRNIFNGTVVQRHPSHAVTFVDNHDSQPEEALESFVEEWFKPLAYALTLTREQGYPSVFYGDYYGIPTHGVPAMRSKIDPILEARQKYAYGPQHDYLDHPDVIGWTREGDSSHPKSGLATLITDGPGGSKRMYAGLKNAGETWYDITGNRSDTVKIGSDGWGEFHVNDGSVSIYVQK

SEQ ID NO: 40009 - protein, 480 aa, Synthetic construct
NGTMMQYFEWYLPNDGNHWNRLNSDASNLKSKGITAVWIPPAWKGASQNDVGYGAYDLYDLGEFNQKGTVRTKYGTRSQLQAAVTSLKNNGIQVYGDVVMNHKGGADATEMVRAVEVNPNNRNQEVTGEYTIEAWTRFDFPGRGNTHSSFKWRWYHFDGVDWDKSRRLNNRIYKFRGHGKAWDWEVDTEFGNYDYLMYADYDMDHPEVVNELRNWGVWYTNTLGLDGFRIDAVKHIKYSFTRDWINHVRSATGKNMFAVAEFWKNDLGAIENYLQKTNWNHSVFDVPLHYNLYNASKSGGNYDMRNIFNGTVVQRHPSHAVTFVDNHDSQPEEALESFVEEWFKPLAYALTLTREQGYPSVFYGDYYGIPTHGVPAMRSKIDPILEARQKYAYGPQHDYLDHPDVIGWTREGDSSHPKSGLATLITDGPGGSKRMYAGLKNAGETWYDITGNRSDTVKIGSDGWGEFHVNDGSVSIYVQK

SEQ ID NO: 40010 - protein, 480 aa, Bacillus sp.
NGTMMQYFEWYLPNDGNHWNRLNSDASNLKSKGITAVWIPPAWKGASQNDVGYGAYDLYDLGEFNQKGTVRTKYGTRSQLQAAVTSLKNNGIQVYGDVVMNHKGGADATEMVRAVEVNPNNRNQEVTGEYTIEAWTRFDFPGRGNTHSSFKWRWYHFDGVDWDQSRRLNNRIYKFRGHGKAWDWEVATEFGNYDYLMYADYDMDHPEVVNELRNWGVWYTNTLGLDGFRIDAVKHIKYSFTRDWINHVRSATGKNMFAVAEFWKNDLGAIENYLQKTNWNHSVFDVPLHYNLYNASKSGGNYDMRNIFNGTVVQRHPSHAVTFVDNHDSQPEEALESFVEEWFKPLAYALTLTREQGYPSVFYGDYYGIPTHGVPAMRSKIDPILEARQKYAYGPQHDYLDHPDVIGWTREGDSSHPKSGLATLITDGPGGSKRMYAGLKNAGETWYDITGNRSDTVKIGSDGWGEFHVNDGSVSIYVQK

SEQ ID NO: 40011 - protein, 480 aa, Synthetic construct
NGTMMQYFEWYLPNDGNHWNRLNSDASNLKSKGITAVWIPPAWKGASQNDVGYGAYDIYDLGEFNQKGTVRTKYGTRSQLQAAVTSLKNNGIQVYGDVVMNHKGGADATEMVRAVEVNPNNRNQEVTGEYTIEAWTRFDFPGRGNTHSSFKWRWYHFDGVDWDQSRRLNNRIYKFRGHGKAWDWEVDTENGNYDYLMYADYDMDHPEVVNELRNWGVWYTNTLGLDGFRIDAVKHIKYSFTRDWINHVRSATGKNMFAVAEFWKNDLGAIENYLQKTNWNHSVFDVPLHYNLYNASKSGGNYDMRNIFNGTVVQRHPSHAVTFVDNHDSQPEEALESFVEEWFKPLAYALTLTREQGYPSVFYGDYYGIPTHGVPAMRSKIDPILEARQKYAYGPQHDYLDHPDVIGWTREGDSSHPKSGLATLITDGPGGSKRMYAGLKNAGETWYDITGNRSDTVKIGSDGWGEFHVNDGSVSIYVQK

SEQ ID NO: 40012 - protein, 480 aa, Bacillus sp.
NGTMMQYFEWYLPNDGNHWNRLNSDASNLKSKGITAVWIPPAWKGASQNDVGYGAYDLYDLGEFNQKGTVRTKYGTRSQLQAAVTSLKNNGIQVYGDVVMNHKGGADATEMVKAVEVNPNNRNQEVTGEYTIEAWTRFDFPGRGNTHSSFKWRWYHFDGVDWDQSRRLNNRIYKFRGHGKAWDWEVDTEFGNYDYLMYADYDMDHPEVVNELRNWGVWYTNTLGLDGFRIDAVKHIKYSFTRDWINHVRSATGKNMFAVAEFWKNDLGAIENYLQKTNWNHSVFDVPLHYNLYNASKSGGNYDMRNIFNGTVVQRHPSHAVTFVDNHDSQPEEALESFVEEWFKPLAYALTLTREQGYPSVFYGDYYGIPTHGVPAMRSKIDPILEARQKYAYGPQHDYLDHPDVIGWTREGDSSHPKSGLATLITDGPGGSKRMYAGLKNAGETWYDITGNRSDTVKIGSDGWGEFHVNDGSVSIYVQK

SEQ ID NO: 40013 - protein, 480 aa, Bacillus sp.
NGTMMQYFEWYLPNDGNHWNRLNSDASNLKSKGITAVWIPPAWKGASQNDVGYGAYDLYDLGEFNQKGTVRTKYGTRSQLQAAVTSLKNNGIQVYGDVVMNHKGGADATEMVRAVEVNPNNRNQEVTGEYTIEAWTRFDFPGRGNTHSSFKWRWYHFDGVDWDQSRRLENRIYKFRGHGKAWDWEVDTEFGNYDYLMYADYDMDHPEVVNELRNWGVWYTNTLGLDGFRIDAVKHIKYSFTRDWINHVRSATGKNMFAVAEFWKNDLGAIENYLQKTNWNHSVFDVPLHYNLYNASKSGGNYDMRNIFNGTVVQRHPSHAVTFVDNHDSQPEEALESFVEEWFKPLAYALTLTREQGYPSVFYGDYYGIPTHGVPAMRSKIDPILEARQKYAYGPQHDYLDHPDVIGWTREGDSSHPKSGLATLITDGPGGSKRMYAGLKNAGETWYDITGNRSDTVKIGSDGWGEFHVNDGSVSIYVQK

SEQ ID NO: 40014 - protein, 480 aa, Bacillus sp.
NGTMMQYFEWYLPNDGNHWNRLNSDASNLKSKGITAVWIPPAWKAASQNDVGYGAYDLYDLGEFNQKGTVRTKYGTRSQLQAAVTSLKNNGIQVYGDVVMNHKGGADATEMVRAVEVNPNNRNQEVTGEYTIEAWTRFDFPGRGNTHSSFKWRWYHFDGVDWDQSRRTSNRIYKFRGHGKAWDWEVDTEFGNYDYLMYADYDMDHPEVVNELRNWGVWYTNTLGLDGFRIDAVKHIKYSFTRDWINHVRSATGKNMFAVAEFWKNDLGAIENYLQKTNWNHSVFDVPLHYNLYNASKSGGNYDMRNIFNGTVVQRHPSHAVTFVDNHDSQPEEALESFVEEWFKPLAYALTLTREQGYPSVFYGDYYGIPTHGVPAMRSKIDPILEARQKYAYGPQHDYLDHPDVIGWTREGDSSHPKSGLATLITDGPGGSKRMYAGLKNAGETWYDITGNRSDTVKIGSDGWGEFHVNDGSVSIYVQK

SEQ ID NO: 40015 - protein, 480 aa, Synthetic construct
NGTMMQYFEWYLPNDGNHWNRLNSDASNLKSKGITAVWIPPAWKGASQNDVGYGAYDLYDLGEFNQKGTVRTKYGTRSQLQAAVTSLKNNGIQVYGDVVMNHKGGADATEMVRAVEVNPNNRNQEVTGEYTIEAWTRFDFPGRGNTHSSFKWKWYHFDGVDWDQSRRLNNRIYKFRGHGKAWDWEVDTEFGNYDYLMYADYDMDHPEVVNELRNWGVWYTNTLGLDGFRIDAVKHIKYSFTRDWINHVRSATGKNMFAVAEFWKNDLGAIENYLQKTNWNHSVFDVPLHYNLYNASKSGGNYDMRNIFNGTVVQRHPSHAVTFVDNHDSQPEEALESFVEEWFKPLAYALTLTREQGYPSVFYGDYYGIPTHGVPAMRSKIDPILEARQKYAYGPQHDYLDHPDVIGWTREGDSSHPKSGLATLITDGPGGSKRMYAGLKNAGETWYDITGNRSDTVKIGSDGWGEFHVNDGSVSIYVQK

SEQ ID NO: 40016 - protein, 480 aa, Synthetic construct
NGTMMQYFEWYLPNDGNHWNRLNSDASNLKSKGITAVWIPPAWKGASQNDVGYGAYDLYDLGEFNQKGTVRTKYGTRSQLQAAVTSLKNNGIQVYGDVVMNHKGGADATEMVRAVEVNPNNRNQEVTGEYTIEAWTRFDFPGRGNTHSSFKWRWYHFDGVDWDQSRRLNNRIYKFRGHGKAWDWEVDTENGNYDYLMYADIDMDHPEVVNELRNWGVWYTNTLGLDGFRIDAVKHIKYSFTRDWINHVRSKTGKNMFAVAEFWKNDLGAIENYLQKTNWNHSVFDVPLHYNLYNASKSGGNYDMRNIFNGTVVQRHPSHAVTFVDNHDSQPEEALESFVEEWFKPLAYALTLTREQGYPSVFYGDYYGIPTHGVPAMRSKIDPILEARQKYAYGPQHDYLDHPDVIGWTREGDSSHPKSGLATLITDGPGGSKRMYAGLKNAGETWYDITGNRSDTVKIGSDGWGEFHVNDGSVSIYVQK

SEQ ID NO: 40017 - protein, 480 aa, Synthetic construct
NGTMMQYFEWYLPNDGNHWNRLNSDASNLKSKGITAVWIPPAWKGASQNDVGYGAYDLYDLGEFNQKGTVRTKYGTRSQLQAAVTSLKNNGIQVYGDVVMNHKGGADATEMVRAVEVNPNNRNQEVTGEYTIEAWTRFDFPGRGNTHSSFKWRWYHFDGVDWDQSRRLNNRIYKFRGHGKAWDWEVDTENGNYDYLMYADIDMDHPEVVNELRNWGVWYTNTLGLDGFRIDAVKHIKYSFTRDWINHVRSATGKNMFAVAEFWKNDLGAIENYLQKTNWNHSVFDVPLHYNLYNASKSSGNYDMRNIFNGTVVQRHPSHAVTFVDNHDSQPEEALESFVEEWFKPLAYALTLTREQGYPSVFYGDYYGIPTHGVPAMRSKIDPILEARQKYAYGPQHDYLDHPDVIGWTREGDSSHPKSGLATLITDGPGGSKRMYAGLKNAGETWYDITGNRSDTVKIGSDGWGEFHVNDGSVSIYVQK

SEQ ID NO: 40018 - protein, 480 aa, Synthetic construct
NGTMMQYFEWYLPNDGNHWNRLNSDASNLKSKGITAVWIPPAWKGASQNDVGYGAYDLYDLGEFNQKGTVRTKYGTRSQLQAAVTSLKNNGIQVYGDVVMNHKGGADATEMVRAVEVNPNNRNQEVTGEYTIEAWTRFDFPGRGNTHSSFKWRWYHFDGVDWDQSRRLNNRIYKFRGHGKAWDWEVDTEFGNYDYLMYADYDYDHPETVNEVRNWGVWYTNTLGLDGFRIDAVKHIKYSFTRDWINHVRSATGKNMFAVAEFWKNDLGAIENYLQKTNWNHSVFDVPLHYNLYNASKSGGNYDMRNIFNGTVVQRHPSHAVTFVDNHDSQPEEALESFVEEWFKPLAYALTLTREQGYPSVFYGDYYGIPTHGVPAMRSKIDPILEARQKYAYGPQHDYLDHPDVIGWTREGDSSHPKSGLATLITDGPGGSKRMYAGLKNAGETWYDITGNRSDTVKIGSDGWGEFHVNDGSVSIYVQK

SEQ ID NO: 40019 - protein, 480 aa, Synthetic construct
NGTMMQYFEWYLPNDGNHWNRLNSDASNLKSKGITAVWIPPAWKGASQNDVGYGAYDLYDLGEFNQKGTVRTKYGTRSQLQAAVTSLKNNGIQVYGDVVMNHKGGADATEMVRAVEVNPNNRNQEVTGEYTIEAWTRFDFPGRGNTHSSFKWRWYHFDGVDWDQSRRLNNRIYKFRGHGKAWDWEVDTENGNYDYLMYADIDMDHPEVVNELRNWGVWYTNTLGLDGFRIDAVKHIKYSFTRDWINHVRSATGKNMFAVAEFWKNDLGAIENYLQKTNWNHSVFDVPLHYNLYNASKSGGNYDMRNIFNGTVVQRHPSHAVTFVDNHDSQPEEALESFVEEWFKPLAYALTLTREQGYPSVFYGDYYGIPTHGVPAMRSKIDPILEARQKYAYGPQHDYLDHPDVIGWTREGDSSHPKSGLATLITDGPGGSKRMYAGLKNAGQTWYDITGNRSDTVKIGSDGWGEFHVNDGSVSIYVQK

SEQ ID NO: 40020 - protein, 480 aa, Synthetic construct
NGTMMQYFEWYLPNDGNHWNRLNSDASNLKSKGITAVWIPPAWKGASQNDVGYGAYDLYDLGEFNQKGTVRTKYGTRSQLQAAVTSLKNNGIQVYGDVVMNHKGGADATEMVRAVEVNPNNRNQEVTGEYTIEAWTRFDFPGRGNTHSSFKWRWYHFDGVDWDQSRRLNNRIYKFRGHGKAWDWEVDTENGNYDYLMYADIDMDHPEVVNELRNWGVWYTNTVGLDGFRIDAVKHIKYSFTRDWINHVRSATGKNMFAVAEFWKNDLGAIENYLQKTNWNHSVFDVPLHYNLYNASKSGGNYDMRNIFNGTVVQRHPSHAVTFVDNHDSQPEEALESFVEEWFKPLAYALTLTREQGYPSVFYGDYYGIPTHGVPAMRSKIDPILEARQKYAYGPQHDYLDHPDVIGWTREGDSSHPKSGLATLITDGPGGSKRMYAGLKNAGETWYDITGNRSDTVKIGSDGWGEFHVNDGSVSIYVQK

SEQ ID NO: 40021 - protein, 480 aa, Bacillus sp.
NGTMMQYFEWYLPNDGNHWNRLNSDASNLKSKGITAVWIPPAWKGASQNDVGYGAYDLYDLGEFNQKGTVRTKYGTRSQLQAAVTSLKNNGIQVYGDVVMNHKGGADATEMVRAVEVNPNNRNQEVTGEYTIEAWTRFDFPGRGNTHSSFKWRWYHFDGVDWDQSRRLNNRIYKFRGHGKAWDWEVDTEFGNYDYLMYADYDMDHPEVVNELRNWGVWYTNTLGLDGFRIDAVKHIKYSFTRDWINHVRSATGKNMFAVAEFWKNDLGHIENYLQKTNWNHSVFDVPLHYNLYNASKSGGNYDMRNIFNGTVVQRHPSHAVTFVDNHDSQPEEALESFVEEWFKPLAYALTLTREQGYPSVFYGDYYGIPTHGVPAMRSKIDPILEARQKYAYGPQHDYLDHPDVIGWTREGDSSHPKSGLATLITDGPGGSKRMYAGLKNAGETWYDITGNRSDTVKIGSDGWGEFHVNDGSVSIYVQK

SEQ ID NO: 40022 - protein, 480 aa, Synthetic construct
NGTMMQYFEWYLPNDGNHWNRLNSDASNLKSKGITAVWIPPAWKGASQNDVGYGAYDLYDLGEFNQKGTVRTKYGTRSQLQAAVTSLKNNGIQVYGDVVMNHKGGADATEMVRAVEVNPNNRNQEVTGEYTIEAWTRFDFPGRGNQHSSFKWRWYHFDGVDWDQSRRLNNRIYKFRGHGKAWDWEVDTENGNYDYLMYADIDMDHPEVVNELRNWGVWYTNTLGLDGFRIDAVKHIKYSFTRDWINHVRSATGKNMFAVAEFWKNDLGAIENYLQKTNWNHSVFDVPLHYNLYNASKSGGNYDMRNIFNGTVVQRHPSHAVTFVDNHDSQPEEALESFVEEWFKPLAYALTLTREQGYPSVFYGDYYGIPTHGVPAMRSKIDPILEARQKYAYGPQHDYLDHPDVIGWTREGDSSHPKSGLATLITDGPGGSKRMYAGLKNAGETWYDITGNRSDTVKIGSDGWGEFHVNDGSVSIYVQK

SEQ ID NO: 40023 - protein, 480 aa, Synthetic construct
NGTMMQYFEWYLPNDGNHWNRLNSDASNLKSKGITAVWIPPAWKGASQNDVGYGAYDLYDLGEFNQKGTVRTKYGTRSQLQAAVTSLKNNGIQVYGDVVMNHKGGADATEMVRAVEVNPNNRNQEVTGEYTIEAWTRFDFPGRGNTHSSFKWRWYHFDGVDWDQSRRLNNRIYKFRGHGKAWDWEVDTENGNYDYLMYADIDMDHPEVVNELRNWGVWYTNTLGLDGFRIDAVKHIKYSFTRDWINHVRSATGKNMFAVAEFWKNDLGAIENYLQKTNWNHSVFDVPLHYNLYNASKSGGNYDMRNIFNGTVVQRHPSHAVTFVDNHDSQPEEALESFVEEWFKPLAYALTLTREQGYPSVFYGDYYGIPTHGVPAMRSKIDPILEARQKYAYGTQHDYLDHPDVIGWTREGDSSHPKSGLATLITDGPGGSKRMYAGLKNAGETWYDITGNRSDTVKIGSDGWGEFHVNDGSVSIYVQK

SEQ ID NO: 40024 - protein, 480 aa, Synthetic construct
NGTMMQYFEWYLPNDGNHWNRLNSDASNLKSKGITAVWIPPAWKGASQNDVGYGAYDLYDLGEFNQKGTVRTKYGTRSQLQAAVTSLKNNGINVYGDVVMNHKGGADATEMVRAVEVNPNNRNQEVTGEYTIEAWTRFDFPGRGNTHSSFKWRWYHFDGVDWDQSRRLNNRIYKFRGHGKAWDWEVDTENGNYDYLMYADIDMDHPEVVNELRNWGVWYTNTLGLDGFRIDAVKHIKYSFTRDWINHVRSATGKNMFAVAEFWKNDLGAIENYLQKTNWNHSVFDVPLHYNLYNASKSGGNYDMRNIFNGTVVQRHPSHAVTFVDNHDSQPEEALESFVEEWFKPLAYALTLTREQGYPSVFYGDYYGIPTHGVPAMRSKIDPILEARQKYAYGPQHDYLDHPDVIGWTREGDSSHPKSGLATLITDGPGGSKRMYAGLKNAGETWYDITGNRSDTVKIGSDGWGEFHVNDGSVSIYVQK

SEQ ID NO: 40025 - protein, 480 aa, Synthetic construct
NGTMMQYFEWYLPNDGNHWNRLNSDASNLKSKGITAVWIPPAWKGASQNDVGYGAYDLYDLGEFNQKGTVRTKYGTRSQLQAAVTSLKNNGIQVYGDVVMNHKGGADATEMVRAVEVNPNNRNQEVTGEYTIEAWTRFDFPGRGNTHSSFKWRWYHFDGVDWDQSRDVDNRIYKFRGHGKAWDWEVDTEFGNYDYLMYADYDMDHPEVVNELRNWGVWYTNTLGLDGFRIDAVKHIKYSFTRDWINHVRSATGKNMFAVAEFWKNDLGAIENYLQKTNWNHSVFDVPLHYNLYNASKSGGNYDMRNIFNGTVVQRHPSHAVTFVDNHDSQPEEALESFVEEWFKPLAYALTLTREQGYPSVFYGDYYGIPTHGVPAMRSKIDPILEARQKYAYGPQHDYLDHPDVIGWTREGDSSHPKSGLATLITDGPGGSKRMYAGLKNAGETWYDITGNRSDTVKIGSDGWGEFHVNDGSVSIYVQK

SEQ ID NO: 40026 - protein, 480 aa, Bacillus sp.
NGTMMQYFEWYLPNDGNHWNRLNSDASNLKSKGITAVWIPPAWKGASQNDVGYGAYDLYDLGEFNQKGTVRTKYGTRSQLQAAVTSLKNNGIQVYGDVVMNHKGGADATEMVRAVEVNPNNRNQEVTGEYTIEAWTRFDFPGRGNTHSSFKWRWYHFDGVDWDQSRRLNNRIYKFRGHGKAWDWEVGTEFGNYDYLMYADYDMDHPEVVNELRNWGVWYTNTLGLDGFRIDAVKHIKYSFTRDWINHVRSATGKNMFAVAEFWKNDLGAIENYLQKTNWNHSVFDVPLHYNLYNASKSGGNYDMRNIFNGTVVQRHPSHAVTFVDNHDSQPEEALESFVEEWFKPLAYALTLTREQGYPSVFYGDYYGIPTHGVPAMRSKIDPILEARQKYAYGPQHDYLDHPDVIGWTREGDSSHPKSGLATLITDGPGGSKRMYAGLKNAGETWYDITGNRSDTVKIGSDGWGEFHVNDGSVSIYVQK

SEQ ID NO: 40027 - protein, 480 aa, Synthetic construct
NGTMMQYFEWYLPNDGNHWNRLNSDASNLKSKGITAVWIPPAWKGASQNDVGYGAYDLYDLGEFNQKGTVRTKYGTRSQLQAAVTSLKNNGIQVYGDVVMNHKGGADATEMVRAVEVNPNNRNQEVTGEYTIEAWTRFDFPGRGNTHSSFKWRWYHFDGVDWDQSRRLNNRIYKFRGHGKAWDWEVDAEFGNYDYLMYADIDMDHPEVVNELRNWGVWYTNTLGLDGFRIDAVKHIKYSFTRDWINHVRSATGKNMFAVAEFWKNDLGAIENYLQKTNWNHSVFDVPLHYNLYNASKSGGNYDMRNIFNGTVVQRHPSHAVTFVDNHDSQPEEALESFVEEWFKPLAYALTLTREQGYPSVFYGDYYGIPTHGVPAMRSKIDPILEARQKYAYGPQHDYLDHPDVIGWTREGDSSHPKSGLATLITDGPGGSKRMYAGLKNAGETWYDITGNRSDTVKIGSDGWGEFHVNDGSVSIYVQK

SEQ ID NO: 40028 - protein, 480 aa, Synthetic construct
NGTMMQYFEWYLPNDGNHWNRLNSDASNLKSKGITAVWIPPAWKGASQNDVGYGAYDLYDLGEFNQKGTVRTKYGTRSQLQAAVTSLKNNGIQVYGDVVMNHKGGADATEMVRAVEVNPNNRNQEVTGEYTIEAWTRFDFPGRGNTHSSFKWRWYHFDGVDWDQSRRLNNRIYKFRGHGKAWDWEVDTENGNYDYLMYADIDMDHPEVVNELRNWGVWYTNTLGLDGFRIDAVKHIKYSFTRDWINHVRSATGKNMFAVAEFWKNDLGAIENYLQKTNWNHSVFDVPLHYNLYNASKSGGNYDMRNIFNGTVVQRHPSHSVTFVDNHDSQPEEALESFVEEWFKPLAYALTLTREQGYPSVFYGDYYGIPTHGVPAMRSKIDPILEARQKYAYGPQHDYLDHPDVIGWTREGDSSHPKSGLATLITDGPGGSKRMYAGLKNAGETWYDITGNRSDTVKIGSDGWGEFHVNDGSVSIYVQK

SEQ ID NO: 40029 - protein, 480 aa, Synthetic construct
NGTMMQYFEWYLPNDGNHWNRLNSDASNLKSKGITAVWIPPAWKGASQNDVGYGAYDLYDLGEFNQKGTVRTKYGTRSQLQAAVTSLKNNGIQVYGDVVMNHKGGADATEMVRAVEVNPNNRNQEVTGEYTIEAWTRFDFPGRGNTHSSFKWRWYHFDGVDWDQSRRLNNRIYKFRGHGKAWDWEVDTENGNYDYLMYADIDMDHPEVVNELRNWGVWYTNTLGLDGFRIDAVKHIKYSFTRDWINHVRSATGKNMFAVAEFWKNDLGAIENYLQKTNWNHSVFDVPLHYNLYNASKSGGNYDMRNIFNGTVVQRHPSHAVTFVDNHDSQPEEALESFVEEWFKPLAYALTLTREQGYPSVFYGDYYGIPTHGVPAMRSKIDPILEARQKYAYGPQHDYLDHPDVIGWTREGDSSHPKSGLATLITDGPGGSKRMYAGLKNAGEIWYDITGNRSDTVKIGSDGWGEFHVNDGSVSIYVQK

SEQ ID NO: 40030 - protein, 480 aa, Bacillus sp.
NGTMMQYFEWYLPNDGNHWNRLNSDASNLKSKGITAVWIPPAWKAASQNDVGYGAYDLYDLGEFNQKGTVRTKYGTRSQLQAAVTSLKNNGIQVYGDVVMNHKGGADATEMVRAVEVNPNNRNQEVTGEYTIEAWTRFDFPGRGNTHSSFKWRWYHFDGVDWDQSRKTTNRIYKFRGHGKAWDWEVDTEFGNYDYLMYADYDMDHPEVVNELRNWGVWYTNTLGLDGFRIDAVKHIKYSFTRDWINHVRSATGKNMFAVAEFWKNDLGAIENYLQKTNWNHSVFDVPLHYNLYNASKSGGNYDMRNIFNGTVVQRHPSHAVTFVDNHDSQPEEALESFVEEWFKPLAYALTLTREQGYPSVFYGDYYGIPTHGVPAMRSKIDPILEARQKYAYGPQHDYLDHPDVIGWTREGDSSHPKSGLATLITDGPGGSKRMYAGLKNAGETWYDITGNRSDTVKIGSDGWGEFHVNDGSVSIYVQK

SEQ ID NO: 40031 - protein, 480 aa, Bacillus sp.
NGTMMQYFEWYLPNDGNHWNRLNSDASNLKSKGITAVWIPPAWKGASQNDVGYGAYDLYDLGEFNQKGTVRTKYGTRSQLQAAVTSLKNNGIQVYGDVVMNHKGGADATEMVRAVEVNPNNRNQEVTGEYTIEAWTRFDFPGRGNTHSSFKWRWYHFDGVDWDQSRQLQNRIYKFRGHGKAWDWEVDTEFGNYDYLMYADYDMDHPEVVNELRNWGVWYTNTLGLDGFRIDAVKHIKYSFTRDWINHVRSATGKNMFAVAEFWKNDLGAIENYLQKTNWNHSVFDVPLHYNLYNASKSGGNYDMRNIFNGTVVQRHPSHAVTFVDNHDSQPEEALESFVEEWFKPLAYALTLTREQGYPSVFYGDYYGIPTHGVPAMRSKIDPILEARQKYAYGPQHDYLDHPDVIGWTREGDSSHPKSGLATLITDGPGGSKRMYAGLKNAGETWYDITGNRSDTVKIGSDGWGEFHVNDGSVSIYVQK

SEQ ID NO: 40032 - protein, 480 aa, Bacillus sp.
NGTMMQYFEWYLPNDGNHWNRLNSDASNLKSKGITAVWIPPAWKGASQNDVGYGAYDLYDLGEFNQKGTVRTKYGTRSQLQAAVTSLKNNGIQVYGDVVMNHKGGADATEMVRAVEVNPNNRNQEVTGEYTIEAWTRFDFPGRGNTHSSFKWRWYHFDGVDWDQSRRLNNRIYKFRGHGKAWDWEVDTEFGNYDYLMYADYDMDHPEVVNELRNWGVWYTNTLGLDGFRIDAVKHIKDSFTRDWINHVRSATGKNMFAVAEFWKNDLGAIENYLQKTNWNHSVFDVPLHYNLYNASKSGGNYDMRNIFNGTVVQRHPSHAVTFVDNHDSQPEEALESFVEEWFKPLAYALTLTREQGYPSVFYGDYYGIPTHGVPAMRSKIDPILEARQKYAYGPQHDYLDHPDVIGWTREGDSSHPKSGLATLITDGPGGSKRMYAGLKNAGETWYDITGNRSDTVKIGSDGWGEFHVNDGSVSIYVQK

SEQ ID NO: 40033 - protein, 480 aa, Synthetic construct
NGTMMQYFEWYLPNDGNHWNRLNSDASNLKSKGITAVWIPPAWKGASQNDVGYGAYDLYDLGEFNQKGTVRTKYGTRSQLQAAVTSLKNNGIQVYGDVVMNHKGGADATEMVRAVEVNPNNRNQEVTGEYTIEAWTRFDFPGRGNTHSSFKWRWYHFDGVDWDQSRRLNNRIYKFRGHGKAWDWEVDTEFGNYDYLMYADYDMDHPEVVNELRNWGVWYTNTLGLDGFRIDAVKHIKYSFTRDWINHVRSATGKNMFAVAEFWKNDLGSIENYLQKTNWNHSVFDVPLHYNLYNASKSGGNYDMRNIFNGTVVQRHPSHAVTFVDNHDSQPEEALESFVEEWFKPLAYALTLTREQGYPSVFYGDYYGIPTHGVPAMRSKIDPILEARQKYAYGPQHDYLDHPDVIGWTREGDSSHPKSGLATLITDGPGGSKRMYAGLKNAGETWYDITGNRSDTVKIGSDGWGEFHVNDGSVSIYVQK

SEQ ID NO: 40034 - protein, 480 aa, Synthetic construct
NGTMMQYFEWYLPNDGNHWNRLNSDASNLKSKGITAVWIPPAWKGASQNDVGYGAYDLYDLGEFNQKGTVRTKYGTRSQLQAAVTSLKNNGIQVYGDVVMNHKGGADATEMVRAVEVNPNNRNQEVTGEYTIEAWTRFDFPGRGNTHSSFKWRWYHFDGVDWDQSRRLNNRIYKFRGHGKAWDWEVDTENGNYDYLMYADIDMDHPEVVNELRNWGVWYTNTLGLDGYRIDAVKHIKYSFTRDWINHVRSATGKNMFAVAEFWKNDLGAIENYLQKTNWNHSVFDVPLHYNLYNASKSGGNYDMRNIFNGTVVQRHPSHAVTFVDNHDSQPEEALESFVEEWFKPLAYALTLTREQGYPSVFYGDYYGIPTHGVPAMRSKIDPILEARQKYAYGPQHDYLDHPDVIGWTREGDSSHPKSGLATLITDGPGGSKRMYAGLKNAGETWYDITGNRSDTVKIGSDGWGEFHVNDGSVSIYVQK

SEQ ID NO: 40035 - protein, 480 aa, Synthetic construct
NGTMMQYFEWYLPNDGNHWNRLNSDASNLKSKGITAVWIPPAWKGASQNDVGYGAYDLYDLGEFNQKGTVRTKYGTRSQLQAAVTSLKNNGIQVYGDVVMNHKGGADATEMVRAVEVNPNNRNQEVTGEYTIEAWTRFDFPGRGNTHSSFKWRWYHFDGVDWDQSRRLNNRIYKFRGHGKAWDWEVDNEFGNYDYLMYADIDMDHPEVVNELRNWGVWYTNTLGLDGFRIDAVKHIKYSFTRDWINHVRSATGKNMFAVAEFWKNDLGAIENYLQKTNWNHSVFDVPLHYNLYNASKSGGNYDMRNIFNGTVVQRHPSHAVTFVDNHDSQPEEALESFVEEWFKPLAYALTLTREQGYPSVFYGDYYGIPTHGVPAMRSKIDPILEARQKYAYGPQHDYLDHPDVIGWTREGDSSHPKSGLATLITDGPGGSKRMYAGLKNAGETWYDITGNRSDTVKIGSDGWGEFHVNDGSVSIYVQK

SEQ ID NO: 40036 - protein, 480 aa, Bacillus sp.
NGTMMQYFEWYLPNDGNHWNRLNSDASNLKSKGITAVWIPPAWKATSQNDVGYGAYDLYDLGEFNQKGTVRTKYGTRSQLQAAVTSLKNNGIQVYGDVVMNHKGGADATEMVRAVEVNPNNRNQEVTGEYTIEAWTRFDFPGRGNTHSSFKWRWYHFDGVDWDQSREINNRIYKFRGHGKAWDWEVDTEFGNYDYLMYADYDMDHPEVVNELRNWGVWYTNTLGLDGFRIDAVKHIKYSFTRDWINHVRSATGKNMFAVAEFWKNDLGAIENYLQKTNWNHSVFDVPLHYNLYNASKSGGNYDMRNIFNGTVVQRHPSHAVTFVDNHDSQPEEALESFVEEWFKPLAYALTLTREQGYPSVFYGDYYGIPTHGVPAMRSKIDPILEARQKYAYGPQHDYLDHPDVIGWTREGDSSHPKSGLATLITDGPGGSKRMYAGLKNAGETWYDITGNRSDTVKIGSDGWGEFHVNDGSVSIYVQK

SEQ ID NO: 40037 - protein, 480 aa, Synthetic construct
NGTMMQYFEWYLPNDGNHWNRLNSDASNLKSKGITAVWIPPAWKGASQNDVGYGAYDVYDLGEFNQKGTVRTKYGTRSQLQAAVTSLKNNGIQVYGDVVMNHKGGADATEMVRAVEVNPNNRNQEVTGEYTIEAWTRFDFPGRGNTHSSFKWRWYHFDGVDWDQSRRLNNRIYKFRGHGKAWDWEVDTENGNYDYLMYADLDMDHPEVVNEVRNWGVWYTNTLGLDGFRIDAVKHIKYSFTRDWINHVRSATGKNMFAVAEFWKNDLGAIENYLQKTNWNHSVFDVPLHYNLYNASKSGGNYDMRNIFNGTVVQRHPSHAVTFVDNHDSQPEEALESFVEEWFKPLAYALTLTREQGYPSVFYGDYYGIPTHGVPAMRSKIDPILEARQKYAYGPQHDYLDHPDVIGWTREGDSSHPKSGLATLITDGPGGSKRMYAGLKNAGETWYDITGNRSDTVKIGSDGWGEFHVNDGSVSIYVQK

SEQ ID NO: 40038 - protein, 480 aa, Bacillus sp.
NGTMMQYFEWYLPNDGNHWNRLNSDASNLKSKGITAVWIPPAWKGASQNDVGYGAYDLYDLGEFNQKGTVRTKYGTRSQLQAAVTSLKNNGIQVYGDVVMNHKGGADATEMVRAVEVNPNNRNQEVTGEYTIEAWTRFDFPGRGNTHSSFKWRWYHFDGVDFDQSRQLNNRIYKFRGHGKAWDWEVDTEFGNYDYLMYADYDMDHPEVVNELRNWGVWYTNTLGLDGFRIDAVKHIKYSFTRDWINHVRSATGKNMFAVAEFWKNDLGAIENYLQKTNWNHSVFDVPLHYNLYNASKSGGNYDMRNIFNGTVVQRHPSHAVTFVDNHDSQPEEALESFVETWFKPLAYALTLTREQGYPSVFYGDYYGIPTHGVPAMRSKIDPILEARQKYAYGPQHDYLDHPDVIGWTREGDSSHPKSGLATLITDGPGGSKRMYAGLKNAGETWYDITGNRSDTVKIGSDGWGEFHVNDGSVSIYVQK

SEQ ID NO: 40039 - protein, 480 aa, Bacillus sp.
NGTMMQYFEWYLPNDGNHWNRLNSDASNLKSKGITAVWIPPAWKGTSQNDVGYGAYDLYDLGEFNQKGTVRTKYGTRSQLQAAVTSLKNNGIQVYGDVVMNHKGGADATEMVRAVEVNPNNRNQEVTGEYTIEAWTRFDFPGRGNTHSSFKWRWYHFDGVDWDQSRQTNNRIYKFRGHGKAWDWEVDTEFGNYDYLMYADYDMDHPEVVNELRNWGVWYTNTLGLDGFRIDAVKHIKYSFTRDWINHVRSATGKNMFAVAEFWKNDLGAIENYLQKTNWNHSVFDVPLHYNLYNASKSGGNYDMRNIFNGTVVQRHPSHAVTFVDNHDSQPEEALESFVEEWFKPLAYALTLTREQGYPSVFYGDYYGIPTHGVPAMRSKIDPILEARQKYAYGPQHDYLDHPDVIGWTREGDSSHPKSGLATLITDGPGGSKRMYAGLKNAGETWYDITGNRSDTVKIGSDGWGEFHVNDGSVSIYVQK

SEQ ID NO: 40040 - protein, 480 aa, Synthetic construct
NGTMMQYFEWYLPNDGNHWNRLNSDASNLKSKGITAVWIPPAWKGASQNDVGYGAYDLYDLGEFNQKGTVRTKYGTRSQLQAAVTSLKNNGIQVYGDVVMNHKGGADATEMVRAVEVNPNNRNQEVTGEYTIEAWTRFDFPGRGNTHSSFKWRWYHFDGVDWDQSRRLNNRIYKFRGHGKAWDWEVDTEFGNYDYLMYADYDMDHPEVVNELRNWGVWYTNTLGLDGFRIDAVKHIKYSFTRDWINHVRSATGKNMFAVAEFWKNDLGAIENYLQKTNWNHSVFDVPLHYNLYNASKSGGNYDMRNIFNGTVVQRHPKHAVTFVDNHDSQPEEALESFVEEWFKPLAYALTLTREQGYPSVFYGDYYGIPTHGVPAMRSKIDPILEARQKYAYGPQHDYLDHPDVIGWTREGDSSHPKSGLATLITDGPGGSKRMYAGLKNAGETWYDITGNRSDTVKIGSDGWGEFHVNDGSVSIYVQK

SEQ ID NO: 40041 - protein, 480 aa, Synthetic construct
NGTMMQYFEWYLPNDGNHWNRLNSDASNLKSKGITAVWIPPAWKGVSQNDVGYGAYDLYDLGEFNQKGTVRTKYGTRSQLQAAVTSLKNNGIQVYGDVVMNHKGGADATEMVRAVEVNPNNRNQEVTGEYTIEAWTRFDFPGRGNTHSSFKWRWYHFDGVDWDQSRDFNNRIYKFRGHGKAWDWEVDTEFGNYDYLMYADYDMDHPEVVNELRNWGVWYTNTLGLDGFRIDAVKHIKYSFTRDWINHVRSATGKNMFAVAEFWKNDLGAIENYLQKTNWNHSVFDVPLHYNLYNASKSGGNYDMRNIFNGTVVQRHPSHAVTFVDNHDSQPEEALESFVEEWFKPLAYALTLTREQGYPSVFYGDYYGIPTHGVPAMRSKIDPILEARQKYAYGPQHDYLDHPDVIGWTREGDSSHPKSGLATLITDGPGGSKRMYAGLKNAGETWYDITGNRSDTVKIGSDGWGEFHVNDGSVSIYVQK

SEQ ID NO: 40042 - protein, 480 aa, Synthetic construct
NGTMMQYFEWYLPNDGNHWNRLNSDASNLKSKGITAVWIPPAWKGASQNDVGYGAYDVYDLGEFNQKGTVRTKYGTRSQLQAAVTSLKNNGIQVYGDVVMNHKGGADATEMVRAVEVNPNNRNQEVTGEYTIEAWTRFDFPGRGNTHSSFKWRWYHFDGVDWDQSRRLNNRIYKFRGHGKAWDWEVDTENGNYDYLMYADYDMDHPEVVNELRNWGVWYTNTLGLDGFRIDAVKHVKYSFLRDWINHVRSATGKNMFAVAEFWKNDLGAIENYLQKTNWNHSVFDVPLHYNLYNASKSGGNYDMRNIFNGTVVQRHPSHAVTFVDNHDSQPEEALESFVEEWFKPLAYALTLTREQGYPSVFYGDYYGIPTHGVPAMRSKIDPILEARQKYAYGPQHDYLDHPDVIGWTREGDSSHPKSGLATLITDGPGGSKRMYAGLKNAGETWYDITGNRSDTVKIGSDGWGEFHVNDGSVSIYVQK

SEQ ID NO: 40043 - protein, 480 aa, Synthetic construct
NGTMMQYFEWYLPNDGNHWNRLNSDASNLKSKGITAVWIPPAWKGASQNDVGYGAYDLYDLGEFNQKGTVRTKYGTRSQLQAAVTSLKNNGIQVYGDVVMNHKGGADATEMVRAVEVNPNNRNQEVTGEYTIEAWTRFDFPGRGNTHSSFKWRWYHFDGVDWDQSRRLNNRIYKFRGHGKAWDWEVDTEFGNYDYLMYADYDMDHPEVVNELRNWGVWYTNTLGLDGFRIDAVKHIKYSFTRDWINHVRSATGKNMFAVAEFWKNDLGAIENYLQKTNWNHSVFDVPLHYNLYNASKSGGNYDMRNIFNGTVVQRHPSLAVTFVDNHDSQPEEALESFVEEWFKPLAYALTLTREQGYPSVFYGDYYGIPTHGVPAMRSKIDPILEARQKYAYGPQHDYLDHPDVIGWTREGDSSHPKSGLATLITDGPGGSKRMYAGLKNAGETWYDITGNRSDTVKIGSDGWGEFHVNDGSVSIYVQK

SEQ ID NO: 40044 - protein, 480 aa, Synthetic construct
NGTMMQYFEWYLPNDGNHWNRLNSDASNLKSKGITAVWIPPAWKGASQNDVGYGAYDLYDLGEFNQKGTVRTKYGTRSQLQAAVTSLKNNGIQVYGDVVMNHKGGADATEMVRAVEVNPNNRNQEVTGEYTIEAWTRFDFPGRGNTHSSFKWRWYHFDGVDWDQSRQTNNRIYKFRGHGKAWDWEVDTEFGNYDYLMYADYDMDHPEVVNELRNWGVWYTNTLGLDGFRIDAVKHIKYSFTRDWINHVRSATGKNMFAVAEFWKNDLGAIENYLQKTNWNHSVFDVPLHYNLYNASKSGGNYDMRNIFNGTVVQRHPSHAVTFVDNHDSQPEEALESFVEEWFKPLAYALTLTREQGYPSVFYGDYYGIPTHGVPAMRSKIDPILEARQKYAYGPQHDYLDHPDVIGWTREGDSSHPKSGLATLITDGPGGSKRMYAGLKNAGETWYDITGNRSDTVKIGSDGWGEFHVNDGSVSIYVQK

SEQ ID NO: 40045 - protein, 480 aa, Synthetic construct
NGTMMQYFEWYLPNDGNHWNRLNSDASNLKSKGITAVWIPPAWKGASQNDVGYGAYDLYDLGEFNQKGTVRTKYGTRSQLQAAVTSLKNNGIQVYGDVVMNHKGGADATEMVRAVEVNPNNRNQEVTGEYTIEAWTRFDFPGRGNTHSSFKWRWYHFDGVDWDQSRRLNNRIYKFRGHGKAWDWEVDTENGNYDYLMYADIDMDHPEVVNELRNWGVWYTNTLGLDGFRIDAVKHIKYSFTRDWINHVRSATGKNMFAVAEFWKNDLGAIENYLQKTNWNHSVFDVPLHYNLYNASKSGGNYDMRNIFNGTVVQRHPSHAVTFVDNHDSQPEEALESFVEEWFKPLAYALTLTREQGYPSVFYGDYYGIPTHGVPAMRSKIDPILEARQKYAYGPQHDYLDHPDVIGWTREGDSSHPKSGLATLITDGPGGSKRMYAGLKNAGETWYDITGNRSDTVKIGSEGWGEFHVNDGSVSIYVQK

SEQ ID NO: 40046 - protein, 480 aa, Synthetic construct
NGTMMQYFEWYLPNDGNHWNRLNSDASNLKSKGITAVWIPPAWKGASQNDVGYGAYDVYDLGEFNQKGTVRTKYGTRSQLQAAVTSLKNNGIQVYGDVVMNHKGGADATEMVRAVEVNPNNRNQEVTGEYTIEAWTRFDFPGRGNTHSSFKWRWYHFDGVDWDQSRRLNNRIYKFRGHGKAWDWEVDTENGNYDYLMYADYDMDHPEVVNEIRNWGVWYTNTLGLDGFRIDAVKHIKYSFTRDWINHVRSATGKNMFAVAEFWKNDLGAIENYLQKTNWNHSVFDVPLHYNLYNASKSGGNYDMRNIFNGTVVQRHPSHAVTFVDNHDSQPEEALESFVEEWFKPLAYALTLTREQGYPSVFYGDYYGIPTHGVPAMRSKIDPILEARQKYAYGPQHDYLDHPDVIGWTREGDSSHPKSGLATLITDGPGGSKRMYAGLKNAGETWYDITGNRSDTVKIGSDGWGEFHVNDGSVSIYVQK

SEQ ID NO: 40047 - protein, 480 aa, Bacillus sp.
NGTMMQYFEWYLPNDGNHWNRLNSDASNLKSKGITAVWIPPAWKGASQNDVGYGAYDLYDLGEFNQKGTVRTKYGTRSQLQAAVTSLKNNGIQVYGDVVMNHKGGADATEMVRAVEVNPNNRNQEVTGEYTIEAWTRFDFPGRGNTHSSFKWRWYHFDGVDWDQSRRLNNRIYKFRGHGKAWDWEVDTEFGNYDYLMYADYDMDHPEVVNELRRWGVWYTNTLGLDGFRIDAVKHIKYSFTRDWINHVRSATGKNMFAVAEFWKNDLGAIENYLQKTNWNHSVFDVPLHYNLYNASKSGGNYDMRNIFNGTVVQRHPSHAVTFVDNHDSQPEEALESFVEEWFKPLAYALTLTREQGYPSVFYGDYYGIPTHGVPAMRSKIDPILEARQKYAYGPQHDYLDHPDVIGWTREGDSSHPKSGLATLITDGPGGSKRMYAGLKNAGETWYDITGNRSDTVKIGSDGWGEFHVNDGSVSIYVQK

SEQ ID NO: 40048 - protein, 480 aa, Bacillus sp.
NGTMMQYFEWYLPNDGNHWNRLNSDASNLKSKGITAVWIPPAWKGQSQNDVGYGAYDLYDLGEFNQKGTVRTKYGTRSQLQAAVTSLKNNGIQVYGDVVMNHKGGADATEMVRAVEVNPNNRNQEVTGEYTIEAWTRFDFPGRGNTHSSFKWRWYHFDGVDWDQSRRLNNRIYKFRGHGKAWDWEVDTEFGNYDYLMYADYDMDHPEVVNELRNWGVWYTNTLGLDGFRIDAVKHIKYSFTRDWINHVRSATGKNMFAVAEFWKNDLGAIENYLQKTNWNHSVFDVPLHYNLYNASKSGGNYDMRNIFNGTVVQRHPSHAVTFVDNHDSQPEEALESFVEEWFKPLAYALTLTREQGYPSVFYGDYYGIPTHGVPAMRSKIDPILEARQKYAYGPQHDYLDHPDVIGWTREGDSSHPKSGLATLITDGPGGSKRMYAGLKNAGETWYDITGNRSDTVKIGSDGWGEFHVNDGSVSIYVQK

SEQ ID NO: 40049 - protein, 480 aa, Bacillus sp.
NGTMMQYFEWYLPNDGNHWNRLNSDASNLKSKGITAVWIPPAWKGASQNDVGYGAYDLYDLGEFNQKGTVRTKYGTRSQLQAAVTSLKNNGIQVYGDVVMNHKGGADATEMVRAVEVNPNNRNQEVTGEYTIEAWTRFDFPGRGNTHSSFKWRWYHFDGVDWDQSRRLNNRIYKFRGHGKAWDWEVDTEFGNYDYLMYADYDMDHPEVVNELRNWGVWYTNTLGLDGFRIDAVKHIKYSFTRDWINHVRSATGKNMFAVAEFWSNDLGAIENYLQKTNWNHSVFDVPLHYNLYNASKSGGNYDMRNIFNGTVVQRHPSHAVTFVDNHDSQPEEALESFVEEWFKPLAYALTLTREQGYPSVFYGDYYGIPTHGVPAMRSKIDPILEARQKYAYGPQHDYLDHPDVIGWTREGDSSHPKSGLATLITDGPGGSKRMYAGLKNAGETWYDITGNRSDTVKIGSDGWGEFHVNDGSVSIYVQK

SEQ ID NO: 40050 - protein, 480 aa, Bacillus sp.
NGTMMQYFEWYLPNDGNHWNRLNSDASNLKSKGITAVWIPPAWKAASQNDVGYGAYDLYDLGEFNQKGTVRTKYGTRSQLQAAVTSLKNNGIQVYGDVVMNHKGGADATEMVRAVEVNPNNRNQEVTGEYTIEAWTRFDFPGRGNTHSSFKWRWYHFDGVDWDQSRQINNRIYKFRGHGKAWDWEVDTEFGNYDYLMYADYDMDHPEVVNELRNWGVWYTNTLGLDGFRIDAVKHIKYSFTRDWINHVRSATGKNMFAVAEFWKNDLGAIENYLQKTNWNHSVFDVPLHYNLYNASKSGGNYDMRNIFNGTVVQRHPSHAVTFVDNHDSQPEEALESFVEEWFKPLAYALTLTREQGYPSVFYGDYYGIPTHGVPAMRSKIDPILEARQKYAYGPQHDYLDHPDVIGWTREGDSSHPKSGLATLITDGPGGSKRMYAGLKNAGETWYDITGNRSDTVKIGSDGWGEFHVNDGSVSIYVQK

SEQ ID NO: 40051 - protein, 480 aa, Synthetic construct
NGTMMQYFEWYLPNDGNHWNRLNSDASNLKSKGITAVWIPPAWKGASQNDVGYGAYDLYDLGEFNQKGTVRTKYGTRNQLQAAVTSLKNNGIQVYGDVVMNHKGGADATEMVRAVEVNPNNRNQEVTGEYTIEAWTRFDFPGRGNTHSSFKWRWYHFDGVDWDQSRRLNNRIYKFRGHGKAWDWEVDTENGNYDYLMYADIDMDHPEVVNELRNWGVWYTNTLGLDGFRIDAVKHIKYSFTRDWINHVRSATGKNMFAVAEFWKNDLGAIENYLQKTNWNHSVFDVPLHYNLYNASKSGGNYDMRNIFNGTVVQRHPSHAVTFVDNHDSQPEEALESFVEEWFKPLAYALTLTREQGYPSVFYGDYYGIPTHGVPAMRSKIDPILEARQKYAYGPQHDYLDHPDVIGWTREGDSSHPKSGLATLITDGPGGSKRMYAGLKNAGETWYDITGNRSDTVKIGSDGWGEFHVNDGSVSIYVQK

SEQ ID NO: 40052 - protein, 481 aa, Bacillus sp.
NGTMMQYFEWYLPNDGNHWNRLNSDASNLKSKGITAVWIPPAWKGASQNDVGYGAYDLYDLGEFNQKGTVRTKYGTRSQLQAAVTSLKNNGIQVYGDVVMNHKGGADATEMVRAVEVNPNNRNQEVTGEYTIEAWTRFDFPGRGNTHSSFKWRWYHFDGVDWDQSRRLNNRIYKFRGHGKAWDWEVDTEFGNYDYLMYADYDMDHPEVVNELRNWGVWYTNTLGLDGFRIDAVKHIKYSFTRDWINHVRSATGKNMFAVAEFWKNDLGAIENYLQKTNWNHSVFDVPLHYNLYNASKSGGNYDMRNIFNGTVVQRHPSHAVTFVDNHDSQHPEEALESFVEEWFKPLAYALTLTREQGYPSVFYGDYYGIPTHGVPAMRSKIDPILEARQKYAYGPQHDYLDHPDVIGWTREGDSSHPKSGLATLITDGPGGSKRMYAGLKNAGETWYDITGNRSDTVKIGSDGWGEFHVNDGSVSIYVQK

SEQ ID NO: 40053 - protein, 480 aa, Bacillus sp.
NGTMMQYFEWYLPNDGNHWNRLNSDASNLKSKGITAVWIPPAWKGASQNDVGYGAYDLYDLGEFNQKGTVRTKYGTRSQLQAAVTSLKNNGIQVYGDVVMNHKGGADATEMVRAVEVNPNNRNQEVTGEYTIEAWTRFDFPGRGNTHSSFKWRWYHFDGVDWDQSRRLNNRIYKFRGHGKAWDWEVDTEFGNYDYLMYADYDMDHPEVVNELRNWGVWYTNTLGLDGFRIDAVKHIKYSFTRDWINHVRSATGKNMFAVAEFWKNDLGAIENYLHKTNWNHSVFDVPLHYNLYNASKSGGNYDMRNIFNGTVVQRHPSHAVTFVDNHDSQPEEALESFVEEWFKPLAYALTLTREQGYPSVFYGDYYGIPTHGVPAMRSKIDPILEARQKYAYGPQHDYLDHPDVIGWTREGDSSHPKSGLATLITDGPGGSKRMYAGLKNAGETWYDITGNRSDTVKIGSDGWGEFHVNDGSVSIYVQK

SEQ ID NO: 40054 - protein, 480 aa, Bacillus sp.
NGTMMQYFEWYLPNDGNHWNRLNSDASNLKSKGITAVWIPPAWKAASQNDVGYGAYDLYDLGEFNQKGTVRTKYGTRSQLQAAVTSLKNNGIQVYGDVVMNHKGGADATEMVRAVEVNPNNRNQEVTGEYTIEAWTRFDFPGRGNTHSSFKWRWYHFDGVDWDQSRKLQNRIYKFRGHGKAWDWEVDTEFGNYDYLMYADYDMDHPEVVNELRNWGVWYTNTLGLDGFRIDAVKHIKYSFTRDWINHVRSATGKNMFAVAEFWKNDLGAIENYLQKTNWNHSVFDVPLHYNLYNASKSGGNYDMRNIFNGTVVQRHPSHAVTFVDNHDSQPEEALESFVEEWFKPLAYALTLTREQGYPSVFYGDYYGIPTHGVPAMRSKIDPILEARQKYAYGPQHDYLDHPDVIGWTREGDSSHPKSGLATLITDGPGGSKRMYAGLKNAGETWYDITGNRSDTVKIGSDGWGEFHVNDGSVSIYVQK

SEQ ID NO: 40055 - protein, 480 aa, Bacillus sp.
NGTMMQYFEWYLPNDGNHWNRLNSDASNLKSKGITAVWIPPAWKGASQNDVGYGAYDLYDLGEFNQKGTVRTKYGTRSQLQAAVTSLKNNGIQVYGDVVMNHKGGADATEMVRAVEVNPNNRNQEVTGEYTIEAWTRFDFPGRGNTHSSFKWRWYHFDGVDWDQSRRLNNRIYKFRGHGKAWDWEVDTEFGNYDYLMYADYDMDHPEVVNELRNWGVWYTNTLGLDGFRIDAVKHIKYSFTRDWINHVRSATGKNMFAVAEFWKNDLGAIENYLQKTNWNHSVFDVPLHYNLYNASKSGGNYDMRNIFNGTVVQRHPSAAVTFVDNHDSQPEEALESFVEEWFKPLAYALTLTREQGYPSVFYGDYYGIPTHGVPAMRSKIDPILEARQKYAYGPQHDYLDHPDVIGWTREGDSSHPKSGLATLITDGPGGSKRMYAGLKNAGETWYDITGNRSDTVKIGSDGWGEFHVNDGSVSIYVQK

SEQ ID NO: 40056 - protein, 480 aa, Bacillus sp.
NGTMMQYFEWYLPNDGNHWNRLNSDASNLKSKGITAVWIPPAWKGASQNDVGYGAYDLYDLGEFNQKGTVRTKYGTRSQLQAAVTSLKNNGIQVYGDVVMNHKGGADATEMVRAVEVNPNNRNQEVTGEYTIEAWTRFDFPGRGNTHSSFKWRWYHFDGVDWDQSRELNNRIYKFRGHGKAWDWEVDTEFGNYDYLMYADYDMDHPEVVNELRNWGVWYTNTLGLDGFRIDAVKHIKYSFTRDWINHVRSATGKNMFAVAEFWKNDLGAIENYLQKTNWNHSVFDVPLHYNLYNASKSGGNYDMRNIFNGTVVQRHPSHAVTFVDNHDSQPEEALESFVEEWFKPLAYALTLTREQGYPSVFYGDYYGIPTHGVPAMRSKIDPILEARQKYAYGPQHDYLDHPDVIGWTREGDSSHPKSGLATLITDGPGGSKRMYAGLKNAGETWYDITGNRSDTVKIGSDGWGEFHVNDGSVSIYVQK

SEQ ID NO: 40057 - protein, 480 aa, Synthetic construct
NGTMMQYFEWYLPNDGNHWNRLNSDASNLKSKGITAVWIPPAWKGASQNDVGYGAYDLYDLGEFNQKGTVRTKYGTRSQLQAAVTSLKNNGIQVYGDVVMNHKGGADATEMVRAVEVNPNNRNQEVTGEYTIEAWTRFDFPGRGNTHSSFKWRWYHFDGVDWDQSRLLNNRIYKFRGHGKAWDWEVDTEFGNYDYLMYADYDMDHPEVVNELRNWGVWYTNTLGLDGFRIDAVKHIKYSFTRDWINHVRSATGKNMFAVAEFWKNDLGAIENYLQKTNWNHSVFDVPLHYNLYNASKSGGNYDMRNIFNGTVVQRHPSHAVTFVDNHDSQPEEALESFVEEWFKPLAYALTLTREQGYPSVFYGDYYGIPTHGVPAMRSKIDPILEARQKYAYGPQHDYLDHPDVIGWTREGDSSHPKSGLATLITDGPGGSKRMYAGLKNAGETWYDITGNRSDTVKIGSDGWGEFHVNDGSVSIYVQK

SEQ ID NO: 40058 - protein, 480 aa, Bacillus sp.
NGTMMQYFEWYLPNDGNHWNRLNSDASNLKSKGITAVWIPPAWKGASQNDVGYGAYDLYDLGEFNQKGTVRTKYGTRSQLQAAVTSLKNNGIQVYGDVVMNHKGGADATEMVRAVEVNPNNRNQEVTGEYTIEAWTRFDFPGRGNTHSSFKWRWYHFDGVDWDQSRRLNNRIYKFRGHGKAWDWEVDTEFGNYDYLMYADYDMDHPEVVNELRNWGVWYTNTLGLDGFRIDAVKHIKYSFTRDWINHVRSATGKNMFAVAEFWNNDLGCIENYLQKTNWNHSVFDVPLHYNLYNASKSGGNYDMRNIFNGTVVQRHPSHAVTFVDNHDSQPEEALESFVEEWFKPLAYALTLTREQGYPSVFYGDYYGIPTHGVPAMRSKIDPILEARQKYAYGPQHDYLDHPDVIGWTREGDSSHPKSGLATLITDGPGGSKRMYAGLKNAGETWYDITGNRSDTVKIGSDGWGEFHVNDGSVSIYVQK

SEQ ID NO: 40059 - protein, 480 aa, Synthetic construct
NGTMMQYFEWYLPNDGNHWNRLNSDASNLKSKGITAVWIPPAWKGASQNDVGYGAYDLYDLGEFNQKGTVRTKYGTRSQLQAAVTSLKNNGIQVYGDVVMNHKGGADATEMVRAVEVNPNNRNQEVTGEYTIEAWTRFDFPGRGNTHSSFKWRWYHFDGVDWDQSRRLNNRIYKFRGHGKAWDWEVDTENGNYDYLMYADIDMDHPEVVNELRNWGVWYTNTLGLDGFRIDAVKHIKYSFTRDWINHVRSATGKNMFAVAEFWKNDLGAIENYLQKTNWNHSVFDVPLHYNLYNASKSGGNYDMRNIFNGTVVQRHPSHAVTFVDNHDSQPEEALESFVEEWFKPLAYALTLTREQGYPSVFYGDYYGIPTHGVPAMRSKIDPILEARQKYAYGPQHDYLDHPDVIGWTREGDSSHPKSGLATLITDGPGGSKRMYAGLKNAGETWYDITGNRSDTVVIGSDGWGEFHVNDGSVSIYVQK

SEQ ID NO: 40060 - protein, 480 aa, Synthetic construct
NGTMMQYFEWYLPNDGNHWNRLNSDASNLKSKGITAVWIPPAWKGISQNDVGYGAYDLYDLGEFNQKGTVRTKYGTRSQLQAAVTSLKNNGIQVYGDVVMNHKGGADATEMVRAVEVNPNNRNQEVTGEYTIEAWTRFDFPGRGNTHSSFKWRWYHFDGVDWDQSRNLQNRIYKFRGHGKAWDWEVDTEFGNYDYLMYADYDMDHPEVVNELRNWGVWYTNTLGLDGFRIDAVKHIKYSFTRDWINHVRSATGKNMFAVAEFWKNDLGAIENYLQKTNWNHSVFDVPLHYNLYNASKSGGNYDMRNIFNGTVVQRHPSHAVTFVDNHDSQPEEALESFVEEWFKPLAYALTLTREQGYPSVFYGDYYGIPTHGVPAMRSKIDPILEARQKYAYGPQHDYLDHPDVIGWTREGDSSHPKSGLATLITDGPGGSKRMYAGLKNAGETWYDITGNRSDTVKIGSDGWGEFHVNDGSVSIYVQK

SEQ ID NO: 40061 - protein, 480 aa, Bacillus sp.
NGTMMQYFEWYLPNDGNHWNRLDSDASNLKSKGITAVWIPPAWKGASQNDVGYGAYDLYDLGEFNQKGTVRTKYGTRSQLQAAVTSLKNNGIQVYGDVVMNHKGGADATEMVRAVEVNPNNRNQEVTGEYTIEAWTRFDFPGRGNTHSSFKWRWYHFDGVDWDQSRRLNNRIYKFRGHGKAWDWEVDTEFGNYDYLMYADYDMDHPEVVNELRNWGVWYTNTLGLDGFRIDAVKHIKYSFTRDWINHVRSATGKNMFAVAEFWKNDLGAIENYLQKTNWNHSVFDVPLHYNLYNASKSGGNYDMRNIFNGTVVQRHPSHAVTFVDNHDSQPEEALESFVEEWFKPLAYALTLTREQGYPSVFYGDYYGIPTHGVPAMRSKIDPILEARQKYAYGPQHDYLDHPDVIGWTREGDSSHPKSGLATLITDGPGGSKRMYAGLKNAGETWYDITGNRSDTVKIGSDGWGEFHVNDGSVSIYVQK

SEQ ID NO: 40062 - protein, 480 aa, Bacillus sp.
NGTMMQYFEWYLPNDGNHWNRLNSDASNLKSKGITAVWIPPAWKGASQNDVGYGAYDLYDLGEFNQKGTVRTKYGTRSQLQAAVTSLKNNGIQVYGDVVMNHKGGADATEMVRAVEVNPNNRNQEVTGEYTIEAWTRFDFPGRGNTHSSFKWRWYHFDGVDWDQSRRLNNRIYKFRGHGKAWDWEVDTEFGNYDYLMYADYDMDHPEVVNELRNWGVWYTNTLGLDGFRIDAVKHIKLSFTRDWINHVRSATGKNMFAVAEFWKNDLGAIENYLQKTNWNHSVFDVPLHYNLYNASKSGGNYDMRNIFNGTVVQRHPSHAVTFVDNHDSQPEEALESFVEEWFKPLAYALTLTREQGYPSVFYGDYYGIPTHGVPAMRSKIDPILEARQKYAYGPQHDYLDHPDVIGWTREGDSSHPKSGLATLITDGPGGSKRMYAGLKNAGETWYDITGNRSDTVKIGSDGWGEFHVNDGSVSIYVQK

SEQ ID NO: 40063 - protein, 480 aa, Synthetic construct
NGTMMQYFEWYLPNDGNHWNRLNSDASNLKSKGITAVWIPPAWKGASQNDVGYGAYDLYDLGEFNQKGTVRTKYGTRSQLQAAVTSLKNNGIQVYGDVVMNHKGGADATEMVRAVEVNPNNRNQEVTGEYTIEAWTRFDFPGRGNTHSSFKWRWYHFDGVDWDQSRRLNNRIYKFRGHGKAWDWEVDTENGNYDYLMYADIDMDHPEVVNELRNWGVWYTNTLGLDGFRIDAVKHIKYSFTRDWINHVRSATGKNMFAVAEFWKNDLGAIENYLQKTNWNHSVFDVPLHYNLYNASKSGGNYDMRNIFNGTVVQRHPSHAVTFVDNHDSQPEEALESFVEEWFKPLAYALTLTREQGYPSVFYGDYYGIPTHGVPAMRSKIDPILEARQKYAYGPQHDYLDHPDVIGWTREGDSSHPKSGLATLITDGPGGSKRMYAGLSNAGETWYDITGNRSDTVKIGSDGWGEFHVNDGSVSIYVQK

SEQ ID NO: 40064 - protein, 480 aa, Synthetic construct
NGTMMQYFEWYLPNDGNHWNRLNSDASNLKSKGITAVWIPPAWKGASQNDVGYGAYDLYDLGEFNQKGTVRTKYGTRSQLQAAVTSLKNNGIQVYGDVVMNHKGGADATEMVRAVEVNPNNRNQEVTGEYTIEAWTRFDFPGRGNTHSSFKWRWYHFDGVDWDQSRRLNNRIYKFRGHGKAWDWEVDTENGNYDYLMYADIDMDHPEVVNELRNWGVWYTNTLGLDGFRIDAVKHIKYSFTRDWINHVRSATGKNMFAVAEFWKNDLGAIENYLQKTNWNHSVFDVPLHYQLYNASKSGGNYDMRNIFNGTVVQRHPSHAVTFVDNHDSQPEEALESFVEEWFKPLAYALTLTREQGYPSVFYGDYYGIPTHGVPAMRSKIDPILEARQKYAYGPQHDYLDHPDVIGWTREGDSSHPKSGLATLITDGPGGSKRMYAGLKNAGETWYDITGNRSDTVKIGSDGWGEFHVNDGSVSIYVQK

SEQ ID NO: 40065 - protein, 480 aa, Synthetic construct
NGTMMQYFEWYLPNDGNHWNRLNSDASNLKSKGITAVWIPPAWKGASQNDVGYGAYDLYDLGEFNQKGTVRTKYGTRSQLQAAVTSLKNNGIQVYGDVVMNHKGGADATEMVRAVEVNPNNRNQEVTGEYTIEAWTRFDFPGRGNTHSSFKWRWYHFDGVDWDQSRRLNNRIYKFRGHGKAWDWEVDTEFGNYDYLMYADIDMDHPEVVNELRNWGVWYTNTLGLDGFRIDAVKHIKYSFTRDWINHVRSATGKNMFAVAEFWKNDLGAIENYLQKTNWNHSVFDVPLHYNLYNASKSGGNYDMRNIFNGTVVQRHPSHAVTFVDNHDSQPEEALESFVEEWFKPLAYALTLTREQGYPSVFYGDYYGIPTHGVPAMRSKIDPILEARQKYAYGPQHDYLDHPDVIGWTREGDSSHPKSGLATLITDGPGGSKRMYAGLKNAGETWYDITGNRSDTVKIGSDGWGEFHVNDGSVSIYVQK

SEQ ID NO: 40066 - protein, 480 aa, Bacillus sp.
NGTMMQYFEWYLPNDGNHWNRLNSDASNLKSKGITAVWIPPAWKGASQNDVGYGAYDLYDLGEFNQKGTVRTKYGTRSQLQAAVTSLKNNGIQVYGDVVMNHKGGADATEMVRAVEVNPNNRNQEVTGEYTIEAWTRFDFPGRGNTHSSFKWRWYHFDGVDWDQSRRLNNRIYKFRGHGKAWDWEVDTEFGNYDYLMYADYDMDHPEVVNELRNWGVWYTNTLGLDGFRIDAVKHIKYSFTRDWINHVRSATGKNMFAVAEFWKNDLGAIENYLQKTNWNHSVFDVPLHYNLYNASKSGGNYDMRNIFNGTVVQRHPSHAVTFVDNHDSQPEEALESFVAEWFKPLAYALTLTREQGYPSVFYGDYYGIPTHGVPAMRSKIDPILEARQKYAYGPQHDYLDHPDVIGWTREGDSSHPKSGLATLITDGPGGSKRMYAGLKNAGETWYDITGNRSDTVKIGSDGWGEFHVNDGSVSIYVQK

SEQ ID NO: 40067 - protein, 480 aa, Bacillus sp.
NGTMMQYFEWYLPNDGNHWNRLNSDASNLKSKGITAVWIPPAWKGASQNDVGYGAYDLYDLGEFNQKGTVRTKYGTRSQLQAAVTSLKNNGIQVYGDVVMNHKGGADATEMVRAVEVNPNNRNQEVTGEYTIEAWTRFDFPGRGNTHSSFKWRWYHFDGVDWDQSRRLNNRIYKFRGHGKAWDWEVDTEFGNYDYLMYADYDMDHPEVVNELRNWGVWYTNTLGLDGFRIDAVKHIKYSFTRDWINHVRSATGKNMFAVAEFWKNDLGAIENYLQKTNWNHSVFDVPLHYNLYNASKSGGNYDMRNIFNGTVVQRHPMHAVTFVDNHDSQPEEALESFVEEWFKPLAYALTLTREQGYPSVFYGDYYGIPTHGVPAMRSKIDPILEARQKYAYGPQHDYLDHPDVIGWTREGDSSHPKSGLATLITDGPGGSKRMYAGLKNAGETWYDITGNRSDTVKIGSDGWGEFHVNDGSVSIYVQK

SEQ ID NO: 40068 - protein, 480 aa, Synthetic construct
NGTMMQYFEWYLPNDGNHWNRLNSDASNLKSKGITAVWIPPAWKGASQNDVGYGAYDLYDLGEFNQKGTVRTKYGTRSQLQAAVTSLKNNGIQVYGDVVMNHKGGADATEMVRAVEVNPNNRNQEVTGEYTIEAWTRFDFPGRGNTHSSFKWRWYHFDGVDWDQSRRTDNRIYKFRGHGKAWDWEVDTEFGNYDYLMYADYDMDHPEVVNELRNWGVWYTNTLGLDGFRIDAVKHIKYSFTRDWINHVRSATGKNMFAVAEFWKNDLGAIENYLQKTNWNHSVFDVPLHYNLYNASKSGGNYDMRNIFNGTVVQRHPSHAVTFVDNHDSQPEEALESFVEEWFKPLAYALTLTREQGYPSVFYGDYYGIPTHGVPAMRSKIDPILEARQKYAYGPQHDYLDHPDVIGWTREGDSSHPKSGLATLITDGPGGSKRMYAGLKNAGETWYDITGNRSDTVKIGSDGWGEFHVNDGSVSIYVQK

SEQ ID NO: 40069 - protein, 480 aa, Synthetic construct
NGTMMQYFEWYLPNDGNHWNRLNSDASNLKSKGITAVWIPPAWKGASQNDVGYGAYDLYDLGEFNQKGTVRTKYGTRSQLQAAVTSLKNNGIQVYGDVVMNHKGGADATEMVRAVEVNPNNRNQEVTGEYTIEAWTRFDFPGRGNTHSSFKWRWYHFDGVDWDQSRRLNNRIYKFRGHGKAWDWEVDTENGNYDYLMYADIDMDHPEVVNELRNWGVWYTNTLGLDGFRIDAVKHIKYSFTRDWINHVRSATGKNMFAVAEFWKNDLGAIENYLQKTNWNHSVFDVPLHYNLYNASKSGGNYDMRNIFNGTVVQRHPSHAVTFVDNHDSQPEEALESFVEEWFKPLAYALTLTREQGYPSVFYGDYYGIPTHGVPAMRSKIDPILEARQKYAYGPQHDYLDHPDVIGWTREGDSSHPGSGLATLITDGPGGSKRMYAGLKNAGETWYDITGNRSDTVKIGSDGWGEFHVNDGSVSIYVQK

SEQ ID NO: 40070 - protein, 480 aa, Cytophaga sp.
NGTMMQYFEWYVPNDGQQWNRLRTDAPYLSSVGINAVWTPPAYKGTSQADVGYGPYDLYDLGEFNQKGTVRTKYGTKGELKSAVNTLHSNGIQVYGDVVMNHKAGADYTENVTAVEVNPSNRYQETSGEYNIQAWTGFNFPGRGTTYSNWKWQWFHFDGTDWDQSRSLSRIFKFDGKAWDWPVSSENGNYDYLMYADYDYDHPDVVNEMKKWGVWYANEVGLDGYRLDAVKHIKFSFLKDWVDNARAATGKEMFTVGEYWQNDLGALNNYLAKVNYNQSLFDAPLHYNFYAASTGGGYYDMRNILNNTLVASNPTKAVTLVENHDTQPGQSLESTVQPWFKPLAYAFILTRSGGYPSVFYGDMYGTKGTTTREIPALKSKIEPLLKARKDYAYGTQRDYIDNPDVIGWTREGDSTKAKSGLATVITDGPGGSKRMYVGTSNAGEIWYDLTGNRTDKITIGSDGYATFPVNKESVSVWVQQ

SEQ ID NO: 40071 - protein, 480 aa, Cytophaga sp.
NGTMMQYFEWYVPNDGQQWNRLRTDAPYLSSVGITAVWTPPAYKGTSQADVGYGPYDLYDLGEFNQKGTVRTKYGTKGELKSAVNTLHSNGIQVYGDVVMNHKAGADYTENVTAVEVNPSNRYQETSGHYNIQAWTGFNFPGRGTTYSNFKWQWFHFDGTDWDQSRSLSRIFKFDGKAWDWPVSSENGNYDYLMYADYDYDHPDVVNEMKKWGVWYANEVGLDGYRLDAVKHIKFYFLKDWVDNARAATGKEMFTVGEYWQNDLGALNNYLAFVNYNQSLFDAPLHYNFYAASTGGGYYDMRNILNNTLVASNPTKAVTLVENHDTQPGQSLESTVQPWFKPLAYAFILTRSGGYPSVFYGDMYGTKGTTTREIPALKSKIEPLLKARKDYAYGTQRDYIDNPDVIGWTREGDSTKAKSGLATVITDGPGGSKRMYVGTSNAGEIWYDLTGNRTDKITIGSDGYATFPVNGGSVSVWVQQ

SEQ ID NO: 40072 - protein, 480 aa, Cytophaga sp.
NGTMMQYFEWYVPNDGQQWNRLRTDAPYLSSVGITAVWTPPAYKGTSQADVGYGPYDLYDLGEFNQKGTVRTKYGTKGELKSAVNTLHSNGIQVYGDVVMNHKAGADYTENVTAVEVNPSNRYQETSGHYNIQAWTGFNFPGRGTTYSNFKWQWFHFDGTDWDQSRSLSRIFKFDGKAWDWPVSSENGNYDYLMYADYDYDHPDVVNEMKKWGVWYANEVGLDGYRLDAVKHIKFYFLKDWVDNARAATGKEMFTVGEYWQNDLGALNNYLAYVNYNQSLFDAPLHYNFYAASTGGGYYDMRNILNNTLVASNPTKAVTLVENHDTQPGQSLESTVQPWFKPLAYAFILTRSGGYPSVFYGDMYGTKGTTTREIPALKSKIEPLLKARKDYAYGTQRDYIDNPDVIGWTREGDSTKAKSGLATVITDGPGGSKRMYVGTSNAGEIWYDLTGNRTDKITIGSDGYATFPVNGGSVSVWVQQ

SEQ ID NO: 40073 - protein, 480 aa, Cytophaga sp.
NGTMMQYFEWYVPNDGQQWNRLRTDAPYLSSVGITAVWTPPAYKGTSQADVGYGPYDLYDLGEFNQKGTVRTKYGTKGELKSAVNTLHSNGIQVYGDVVMNHKAGADYTENVTAVEVNPSNRYQETSGEYNIQAWTGFNFPGRGTTYSNWKWQWFHFDGTDWDQSRSLSRIFKFHGKAWDWPVSSENGNYDYLMYADYDYDHPDVVNEMKKWGVWYANEVGLDGYRLDAVKHIKFQFLKDWVDNARAATGKEMFTVGEYWQNDLGALNNYLAKVNYNQSLFDAPLHYNFYAASTGGGYYDMRNILNNTLVASNPTKAVTLVENHDTQPGQSLESTVQPWFKPLAYAFILTRSGGYPSVFYGDMYGTKGTTTREIPALKSKIEPLLKARKDYAYGTQRDYIDNPDVIGWTREGDSTKAKSGLATVITDGPGGSKRMYVGTSNAGEIWYDLTGNRTDKITIGSDGYATFPVNKESVSVWVQQ

SEQ ID NO: 40074 - protein, 479 aa, Bacillus licheniformis
LNGTLMQYFEWYTPNDGQHWNRLRNDSAYLKEHGITAVWIPPAYKGASQNDVGYGAYDLYDLGEFNQKGTVRTKYGTKGQLQSAINSLKSNGINVYGDVVINHKGGADATELVRAVEVNPNNRNQEVSGEYTIEAYTYFDFPGRGNTHSNFKWRWYHFDGVDWDQSRRLNNRIYKFRGKGWDWEVDTEFGNYDYLTYADIDYDHPDVAAEIRNWGTWYANTLQLDGFRLDAVKHIKYSFLRDWVNHVRSATGKNMFTVAEFWKNDLGALENYLNKTNFNHSVFDVPLHYQFYAASKQGGGYDMQNLLNGTVVSKHPLHSVTFVDNHDTQPEEALESTVEEWFKPLAYAFILTRESGYPQVFYGDMYGIPTHGVPALKHKIEPILEARQKYAYGRQNDYFDHHDIVGWTREGNSSHANSGLAALITDGPGGAKWMYVGRQKAGQTWSDITGNRSGPVVINSEGWGNFSVNGGSVSIYVQR

SEQ ID NO: 40075 - protein, 479 aa, Bacillus sp.
NGTMMQYFEWYLPNDGNHWNRLNSDASNLKSKGITAVWIPPAWKGASQNDVGYGAYDLYDLGEFNQKGTVRTKYGTRSQLQAAVTSLKNNGIQVYGDVVMNHKGGADATEMVRAVEVNPNNRNQEVTGEYTIEAWTRFDFPGRGNTHSSFKWRWYHFDGVDWDQSRRLNNRIYKFRGHKAWDWEVDTEFGNYDYLMYADYDMDHPEVVNELRNWGVWYTNTLGLDGFRIDAVKHIKYSFTRDWINHVRSATGKNMFAVAEFWKNDLGAIENYLQKTNWNHSVFDVPLHYNLYNASKSGGNYDMRNIFNGTVVQRHPSHAVTFVDNHDSQPEEALESFVEEWFKPLAYALTLTREQGYPSVFYGDYYGIPTHGVPAMRSKIDPILEARQKYAYGPQHDYLDHPDVIGWTREGDSSHPKSGLATLITDGPGGSKRMYAGLKNAGETWYDITGNRSDTVKIGSDGWGEFHVNDGSVSIYVQK

SEQ ID NO: 40076 - protein, 493 aa, Aspergillus niger
TIFLFLAIFVATALAATPAEWRSQSIYFLLTDRFARTDNSTTASCDLSARQYCGGSWQGIINQLDYIQGMGFTAIWITPVTAQIPQDTGYGQAYHGYWQQDAYALNSHYGTADDLKALASALHSRGMYLMVDVVANHMGHNGTGSSVDYSVYRPFNSQKYFHNLCWISDYNNQTNVEDCWLGDNTVALPDLDTTSTEVKNMWYDWVESLVSNYSVDGLRVDTVKNVQKNFWPGYNNASGVYCIGEVFDGDASYTCPYQEDLDGVLNYPMYYPLLRAFESTNGSISDLYNMINTVKSTCRDSTLLGTFVENHDNPRFAKSYTSDMSLAKNAATFTILADGIPIIYAGQEQHYSGGNDPYNREATWLSGYKTTSELYTHIAASNKIRTHAIKQDTGYLTYKNYPIYQDTSTLAMRKGYNGTQTITVLSNLGASGSSYTLSLPGTGYTAGQKITEIYTCTNLTVNSNGSVPVPMKSGLPRILYPADKLVNGSSFCS

SEQ ID NO: 40077 - protein, 479 aa, Cytophaga sp.
NGTMMQYFEWYVPNDGQQWNRLRTDAPYLSSVGINAVWTPPAYKGTSQADVGYGPYDLYDLGEFNQKGTVRTKYGTKGELKSAVNTLHSNGIQVYGDVVMNHKAGADYTENVTAVEVNPSNRYQESGEYNIQAWTGFNFPGRGTTYSNWKWQWFHFDGTDWDQSRSLSRIFKFDGKAWDWPVSSENGNYDYLMYADYDYDHPDVVNEMKKWGVWYANEVGLDGYRLDAVKHIKFSFLKDWVDNARAATGKEMFTVGEYWQNDLGALNNYLAKVNYNQSLFDAPLHYNFYAASTGGGYYDMRNILNNTLVASNPTKAVTLVENHDTQPGQSLESTVQPWFKPLAYAFILTRSGGYPSVFYGDMYGTKGTTTREIPALKSKIEPLLKARKDYAYGTQRDYIDNPDVIGWTREGDSTKAKSGLATVITDGPGGSKRMYVGTSNAGEIWYDLTGNRTDKITIGSDGYATFPVNKESVSVWVQQ

SEQ ID NO: 40078 - protein, 480 aa, Bacillus sp.
NGTIMQYFEWNVPNDGQHWNRLHNNAQNLKNAGITAIWIPPAWKGTSQNDVGYGAYDLYDLGEFNQKGTVRTKYGTKAELERAIRSLKANGIQVYGDVVMNHKGGADFTERVQAVEVNPQNRNQEVSGTYEIEAWTGFNFPGRGNQHSSFKWRWYHFDGTDWDQSRQLSNRIYKFRGDGKAWDWEVDTENGNYDYLMYADVDMNHPEVINELNRWGVWYANTLNLDGFRLDAVKHIQFSFMRNWLGHVRGQTGKNLFAVAEYWKNDLGALENYLSKTNWTMSAFDVPLHYNLYQASNSGGNYDMRNLLNGTLVQRHPSHAVTFVDNHDTQPGEALESFVQGWFKPLAYATILTREQGYPQVFYGDYYGIPSDGVPSYRQQIDPLLKARQKYAYGPQHDYLDHPDVIGWTREGDSSHPKSGLATLITDGPGGSKRMYAGLKNAGETWYDITGNRSDTVKIGSDGWGEFHVNDGSVSIYVQK

SEQ ID NO: 40079 - protein, 480 aa, Bacillus sp.
NGTIMQYFEWNVPNDGQHWNRLHNNAQNLKNAGITAIWIPPAWKGTSQNDVGYGAYDLYDLGEFNQKGTVRTKYGTKAELERAIRSLKANGIQVYGDVVMNHKGGADFTERVQAVEVNPQNRNQEVSGTYEIEAWTGFNFPGRGNQHSSFKWRWSHFDGTDWDQSRQLSNRIYKFRGDGKAWDWEVDTENGNYDYLMYADVDMNHPDVINELNRWGVWYANTLNLDGFRLDAVKHIQFSFMRNWLGHVRGQTGKNLFAVAEYWKNDLGALENYLSKTNWTMSAFDVPLHYNLYQASNSGGNYDMRNLLNGTLVQRHPSHAVTFVDNHDTQPGEALESFVQGWFKPLAYATILTREQGYPQVFYGDYYGIPSDGVPSYRQQIDPLLKARQKYAYGPQHDYLDHPDVIGWTREGDSSHPKSGLATLITDGPGGSKRMYAGLKNAGETWYDITGNRSDTVKIGSDGWGEFHVNDGSVSIYVQK

SEQ ID NO: 40080 - protein, 477 aa, Bacillus sp.
NGTMMQYFEWYLPNDGNHWNRLNSDASNLKSKGITAVWIPPAWKAISQNDVGYGAYDLYDLGEFNQKGTVRTKYGTRSQLQAAVTSLKNNGIQVYGDVVMNHKGGADATEMVRAVEVNPNNRNQEVTGEYTIEAWTRFDFPGRGNTHSSFKWRWYHFDGVDWDQSRDLNRIYKFRGKAWDWEVDTEFGNYDYLMYADYDMDHPEVVNELRNWGVWYTNTLGLDGFRIDAVKHIKYSFTRDWINHVRSATGKNMFAVAEFWKNDLGAIENYLQKTNWNHSVFDVPLHYNLYNASKSGGNYDMRNIFNGTVVQRHPSHAVTFVDNHDSQPEEALESFVEEWFKPLAYALTLTREQGYPSVFYGDYYGIPTHGVPAMRSKIDPILEARQKYAYGPQHDYLDHPDVIGWTREGDSSHPKSGLATLITDGPGGSKRMYAGLKNAGETWYDITGNRSDTVKIGSDGWGEFHVNDGSVSIYVQK

SEQ ID NO: 40081 - protein, 477 aa, Bacillus sp.
NGTMMQYFEWYLPNDGNHWNRLNSDASNLKSKGITAVWIPPAWKAVSQNDVGYGAYDLYDLGEFNQKGTVRTKYGTRSQLQAAVTSLKNNGIQVYGDVVMNHKGGADATEMVRAVEVNPNNRNQEVTGEYTIEAWTRFDFPGRGNTHSSFKWRWYHFDGVDWDQSRRFNRIYKFRGKAWDWEVDTEFGNYDYLMYADYDMDHPEVVNELRNWGVWYTNTLGLDGFRIDAVKHIKYSFTRDWINHVRSATGKNMFAVAEFWKNDLGAIENYLQKTNWNHSVFDVPLHYNLYNASKSGGNYDMRNIFNGTVVQRHPSHAVTFVDNHDSQPEEALESFVEEWFKPLAYALTLTREQGYPSVFYGDYYGIPTHGVPAMRSKIDPILEARQKYAYGPQHDYLDHPDVIGWTREGDSSHPKSGLATLITDGPGGSKRMYAGLKNAGETWYDITGNRSDTVKIGSDGWGEFHVNDGSVSIYVQK

SEQ ID NO: 40082 - protein, 478 aa, Bacillus sp.
NGTMMQYFEWYLPNDGNHWNRLNSDASNLKSKGITAVWIPPAWKGASQNDVGYGAYDLYDLGEFNQKGTVRTKYGTRSQLQAAVTSLKNNGIQVYGDVVMNHKGGADATEMVRAVEVNPNNRNQEVTGEYTIEAWTRFDFPGRGNTHSSFKWRWYHFDGVDWDQSRQFNNRIYKFRGKAWDWEVDTEFGNYDYLMYTDYDMDHPEVVNELRNWGVWYTNTLGLDGFRIDAVKHIKYSFTRDWINHVRSATGKNMFAVAEFWKNDLGAIENYLQKTNWNHSVFDVPLHYNLYNASKSGGNYDMRNIFNGTVVQRHPSHAVTFVDNHDSQPEEALESFVEEWFKPLAYALTLTREQGYPSVFYGDYYGIPTHGVPAMRSKIDPILEARQKYAYGPQHDYLDHPDVIGWTREGDSSHPKSGLATLITDGPGGSKRMYAGLKNAGETWYDITGNRSDTVKIGSDGWGEFHVNDGSVSIYVQK

SEQ ID NO: 40083 - protein, 478 aa, Bacillus sp.
NGTMMQYFEWYLPNDGNHWNRLNSDASNLKSKGITAVWIPPAWKGASQNDVGYGAYDLYDLGEFNQKGTVRTKYGTRSQLQAAVTSLKNNGIQVYGDVVMNHKGGADATEMVRAVEVNPNNRGQEVTGEYTIEAWTRFDFPGRGNTHSSFKWRWYHFDGVDWDQSRRLNNRIYKFRGKAWDWEVDTEFGNYDYLMYADYDMDHPEVVNELRNWGVWYTNTLGLDGFRIDAVKHIKYSFTRDWINHVRSATGKNMFAVAEFWKNDLGAIENYLQKTNWNHSVFDVPLHYNLYNASKSGGNYDMRNIFNGTVVQRHPSHAVTFVDNHDSQPEEALESFVEEWFKPLAYALTLTREQGYPSVFYGDYYGIPTHGVPAMRSKIDPILEARQKYAYGPQHDYLDHPDVIGWTREGDSSHPKSGLATLITDGPGGSKRMYAGLKNAGETWYDITGNRSDTVKIGSDGWGEFHVNDGSVSIYVQK

SEQ ID NO: 40084 - protein, 478 aa, Bacillus sp.
NGTMMQYFEWYLPNDGNHWNRLNSDASNLKSKGITAVWIPPAWKGASQNDVGYGAYDLYDLGEFNQKGTVRTKYGTRSQLQAAVTSLKNNGIQVYGDVVMNHKGGADATEMVRAVEVNPNNRNQEVTGEYTIEAWTRFDFPGRGNTHSSFKWRWYHFDGVDWDQSRRLNNRIYKFRGKVWDWEVDTEFGNYDYLMYADYDMDHPEVVNELRNWGVWYTNTLGLDGFRIDAVKHIKYSFTRDWINHVRSATGKNMFAVAEFWKNDLGAIENYLQKTNWNHSVFDVPLHYNLYNASKSGGNYDMRNIFNGTVVQRHPSHAVTFVDNHDSQPEEALESFVEEWFKPLAYALTLTREQGYPSVFYGDYYGIPTHGVPAMRSKIDPILEARQKYAYGPQHDYLDHPDVIGWTREGDSSHPKSGLATLITDGPGGSKRMYAGLKNAGETWYDITGNRSDTVKIGSDGWGEFHVNDGSVSIYVQK

SEQ ID NO: 40085 - protein, 478 aa, Bacillus sp.
NGTMMQYFEWYLPNDGNHWNRLNSDASNLKSKGITAVWIPPAWKGASQNDVGYGAYDLYDLGEFNQKGTVRTKYGTRSQLQAAVTSLKNNGIQVYGDVVMNHKGGADATEMVRAVEVNPNNRNQEVTGEYTIEAWTRFDFPGRGNTHSSFKWRWYHFDGVDWDQSREFNNRIYKFRGKAWDWEVDTEFGNYDYLMYVDYDMDHPEVVNELRNWGVWYTNTLGLDGFRIDAVKHIKYSFTRDWINHVRSATGKNMFAVAEFWKNDLGAIENYLQKTNWNHSVFDVPLHYNLYNASKSGGNYDMRNIFNGTVVQRHPSHAVTFVDNHDSQPEEALESFVEEWFKPLAYALTLTREQGYPSVFYGDYYGIPTHGVPAMRSKIDPILEARQKYAYGPQHDYLDHPDVIGWTREGDSSHPKSGLATLITDGPGGSKRMYAGLKNAGETWYDITGNRSDTVKIGSDGWGEFHVNDGSVSIYVQK

SEQ ID NO: 40086 - protein, 478 aa, Bacillus sp.
NGTMMQYFEWYLPNDGNHWNRLNSDASNLKSKGITAVWIPPAWKGASQNDVGYGAYDLYDLGEFNQKGTVRTKYGTRSQLQAAVTSLKNNGIQVYGDVVMNHKGGADATEMVRAVEVNPNNRNQEVTGEYTIEAWTRFDFPGRGNTHSSFKWRWYHFDGVDWDQSRRLNNRIYKFRGKAWDWEVDTENGFYDYLMYADIDYDYPEVVTTLRMWGVWYTNTLGLDGFRIDAVKHIKYSFTRDWINHVRSATGKNMFAVAEFWKNDLGAIENYLQKTNWNHSVFDVPLHYNLYNASKSGGNYDMRNIFNGTVVQRHPSHAVTFVDNHDSQPEEALESFVEEWFKPLAYALTLTREQGYPSVFYGDYYGIPTHGVPAMRSKIDPILEARQKYAYGPQHDYLDHPDVIGWTREGDSSHPKSGLATLITDGPGGSKRMYAGLKNAGETWYDITGNRSDTVKIGSDGWGEFHVNDGSVSIYVQK

SEQ ID NO: 40087 - protein, 478 aa, Bacillus sp.
NGTMMQYFEWYLPNDGNHWNRLNSDASNLKSKGITAVWIPPAWKGASQNDVGYGAYDLYDLGEFNQKGTVRTKYGTRSQLQAAVTSLKNNGIQVYGDVVMNHKGGADATEMVRAVEVNPNNRNQEVTGEYTIEAWTRFDFPGRGNTHSSFKWRWYHFDGVDWDQSRRLNNRIYKFRGKAWDWEVDTEFGNYDYLMYADYDMDHPEVVNELRNWGVWYTNTLGLDGFRIDAVKHIKYSFTRDWINHVRSATGKNMFAVAEFWKNDLGAIENYLQKTNWNHSVFDVPLHYNLYNASKSGGNYDMRNIFNGTVVQAHPMHAVTFVDNHDSQPEEALESFVEEWFKPLAYALTLTREQGYPSVFYGDYYGIPTHGVPAMRSKIDPILEARQKYAYGPQHDYLDHPDVIGWTREGDSSHPKSGLATLITDGPGGSKRMYAGLKNAGETWYDITGNRSDTVKIGSDGWGEFHVNDGSVSIYVQK

SEQ ID NO: 40088 - protein, 478 aa, Bacillus sp.
NGTMMQYFEWYLPNDGNHWNRLNSDASNLKSKGITAVWIPPAWKGASQNDVGYGAYDLYDLGEFNQKGTVRTKYGTRSQLQAAVTSLKNNGIQVYGDVVMNHKGGADATEMVRAVEVNPNNRNQEVTGEYTIEAWTRFDFPGRGNTHSSFKWRWYHFDGVDWDQSRQFDNRIYKFRGKAWDWEVDTEFGNYDYLMYTDYDMDHPEVVNELRNWGVWYTNTLGLDGFRIDAVKHIKYSFTRDWINHVRSATGKNMFAVAEFWKNDLGAIENYLQKTNWNHSVFDVPLHYNLYNASKSGGNYDMRNIFNGTVVQRHPSHAVTFVDNHDSQPEEALESFVEEWFKPLAYALTLTREQGYPSVFYGDYYGIPTHGVPAMRSKIDPILEARQKYAYGPQHDYLDHPDVIGWTREGDSSHPKSGLATLITDGPGGSKRMYAGLKNAGETWYDITGNRSDTVKIGSDGWGEFHVNDGSVSIYVQK

SEQ ID NO: 40089 - protein, 478 aa, Bacillus sp.
NGTMMQYFEWYLPNDGNHWNRLNSDASNLKSKGITAVWIPPAWKGASQNDVGYGAYDLYDLGEFNQKGTVRTKYGTRSQLQAAVTSLKNNGIQVYGDVVMNHKGGADATEMVRAVEVNPNNRNQEVTGEYTIEAWTRFDFPGRGNTHSSFKWRWYHFDGVDWDQSRRLNNRIYKFRGKAWDWEVDTEFGNYDYLMYADYDMDHPEVVNELRNWGVWYTNTLGLDGFRIDAVKHIKYSFTRDWINHVRSATGKNMFAVAEFWKNDLGAIENYLQKTNWNHSVFDVPLHYNLYNASNSGGNYDMRNIFNGTVVQRHPSHAVTFVDNHDSQPEEALESFVDTWFKPLAYALTLTREQGYPSVFYGDYYGIPTHGVPAMRSKIDPILEARQKYAYGPQHDYLDHPDVIGWTREGDSSHPKSGLATLITDGPGGSKRMYAGLKNAGETWYDITGNRSDTVKIGSDGWGEFHVNQQSVSIYVQK

SEQ ID NO: 40090 - protein, 478 aa, Bacillus sp.
NGTMMQYFEWYLPNDGNHWNRLNSDASNLKSKGITAVWIPPAWKGASQNDVGYGAYDLYDLGEFNQKGTVRTKYGTRSQLQAAVTSLKNNGIQVYGDVVMNHKGGADATEMVRAVEVNPNNRNQEVTGEYTIEAWTRFDFPGRGNTHSSFKWRWYHFDGVDWDQSRRLNNRIYMFRGKAWDWEVDTEFGNYDYLMYADYDMDHPEVVNELRNWGVWYTNTLGLDGFRIDAVKHIKYSFTRDWINHVRSATGKNMFAVAEFWKNDLGAIENYLQKTNWNHSVFDVPLHYNLYNASKSGGNYDMRNIFNGTVVQRHPSHAVTFVDNHDSQPEEALESFVEEWFKPLAYALTLTREQGYPSVFYGDYYGIPTHGVPAMRSKIDPILEARQKYAYGPQHDYLDHPDVIGWTREGDSSHPKSGLATLITDGPGGSKRMYAGLKNAGETWYDITGNRSDTVKIGSDGWGEFHVNDGSVSIYVQK

SEQ ID NO: 40091 - protein, 478 aa, Bacillus sp.
NGTMMQYFEWYLPNDGNHWNRLNSDASNLKSKGITAVWIPPAWKGASQNDVGYGAYDLYDLGEFNQKGTVRTKYGTRSQLQAAVTSLKNNGIQVYGDVVMNHKGGADATEMVRAVEVNPNNRNQEVTGEYTIEAWTRFDFPGRGNTHSSFKWRWYHFDGVDWDQSRRLNNRIYKFRGKAWDWEVDTEFGNYDYLMYADYDMDHPESVNELRNWGVWYTNTLGLDGFRIDAVKHIKYSFTRDWINHVRSATGKNMFAVAEFWKNDLGAIENYLQKTNWNHSVFDVPLHYNLYNASKSGGNYDMRNIFNGTVVQRHPSHAVTFVDNHDSQPEEALESFVEEWFKPLAYALTLTREQGYPSVFYGDYYGIPTHGVPAMRSKIDPILEARQKYAYGPQHDYLDHPDVIGWTREGDSSHPKSGLATLITDGPGGSKRMYAGLKNAGETWYDITGNRSDTVKIGSDGWGEFHVNDGSVSIYVQK

SEQ ID NO: 40092 - protein, 478 aa, Synthetic construct
NGTMMQYFEWYLPNDGNHWNRLNSDASNLKSKGITAVWIPPAWKGASQNDVGYGAYDLYDLGEFNQKGTVRTKYGTRSQLQAAVTSLKNNGIQVYGDVVMNHKGGADATEMVRAVEVNPNNRNQEVTGEYTIEAWTRFDFPGRGNTHSSFKWRWYHFDGVDWDQSRRLNNRIYKFRGKAWDWEVDTENGNYDYLMYADIDMDHPESRNELRNWGVWYTNTLGLDGFRIDAVKHIKYSFTRDWINHVRSATGKNMFAVAEFWKNDLGAIENYLQKTNWNHSVFDVPLHYNLYNASKSGGNYDMRNIFNGTVVQRHPSHAVTFVDNHDSQPEEALESFVEEWFKPLAYALTLTREQGYPSVFYGDYYGIPTHGVPAMRSKIDPILEARQKYAYGPQHDYLDHPDVIGWTREGDSSHPKSGLATLITDGPGGSKRMYAGLKNAGETWYDITGNRSDTVKIGSDGWGEFHVNDGSVSIYVQK

SEQ ID NO: 40093 - protein, 478 aa, Bacillus sp.
NGTMMQYFEWYLPNDGNHWNRLNSDASNLKSKGITAVWIPPAWKGASQNDVGYGAYDLYDLGEFNQKGTVRTKYGTRSQLQAAVTSLKNNGIQVYGDVVMNHKGGADATEMVRAVEVNPNNRNQEVTGEYTIEAWTRFDFPGRGNTHSSFKWRWYHFDGVDWDQSRRLNNRIYKFRGKAWDWEVDTENGFYDYLMYADIDMDHPEVVGTLRNWGVWYTNTLGLDGFRIDAVKHIKYSFTRDWINHVRSATGKNMFAVAEFWKNDLGAIENYLQKTNWNHSVFDVPLHYNLYNASKSGGNYDMRNIFNGTVVQRHPSHAVTFVDNHDSQPEEALESFVEEWFKPLAYALTLTREQGYPSVFYGDYYGIPTHGVPAMRSKIDPILEARQKYAYGPQHDYLDHPDVIGWTREGDSSHPKSGLATLITDGPGGSKRMYAGLKNAGETWYDITGNRSDTVKIGSDGWGEFHVNDGSVSIYVQK

SEQ ID NO: 40094 - protein, 478 aa, Bacillus sp.
NGTMMQYFEWYLPNDGNHWNRLNSDASNLKSKGITAVWIPPAWKGASQNDVGYGAYDLYDLGEFNQKGTVRTKYGTRSQLQAAVTSLKNNGIQVYGDVVMNHKGGADATEMVRAVEVNPNNRNQEVTGEYTIEAWTRFDFPGRGNTHSSFKWRWYHFDGVDWDQSRRLNNRIYKFRGKLWDWEVDTEFGNYDYLMYADYDMDHPEVVNELRNWGVWYTNTLGLDGFRIDAVKHIKYSFTRDWINHVRSATGKNMFAVAEFWKNDLGAIENYLQKTNWNHSVFDVPLHYNLYNASKSGGNYDMRNIFNGTVVQRHPSHAVTFVDNHDSQPEEALESFVEEWFKPLAYALTLTREQGYPSVFYGDYYGIPTHGVPAMRSKIDPILEARQKYAYGPQHDYLDHPDVIGWTREGDSSHPKSGLATLITDGPGGSKRMYAGLKNAGETWYDITGNRSDTVKIGSDGWGEFHVNDGSVSIYVQK

SEQ ID NO: 40095 - protein, 478 aa, Bacillus sp.
NGTMMQYFEWYLPNDGNHWNRLNSDASNLKSKGITAVWIPPAWKGASQNDVGYGAYDLYDLGEFNQKGTVRTKYGTRSQLQAAVTSLKNNGIQVYGDVVMNHKGGADATEMVRAVEVNPNNRNQEVTGEYTIEAWTRFDFPGRGNTHSSYKWRWYHFDGVDWDQSRRLNNRIYKFRGKAWDWEVDTEFGNYDYLMYADYDMDHPEVVNELRNWGVWYTNTLGLDGFRIDAVKHIKYSFTRDWINHVRSATGKNMFAVAEFWKNDLGAIENYLQKTNWNHSVFDVPLHYNLYNASKSGGNYDMRNIFNGTVVQRHPSHAVTFVDNHDSQPEEALESFVEEWFKPLAYALTLTREQGYPSVFYGDYYGIPTHGVPAMRSKIDPILEARQKYAYGPQHDYLDHPDVIGWTREGDSSHPKSGLATLITDGPGGSKRMYAGLKNAGETWYDITGNRSDTVKIGSDGWGEFHVNDGSVSIYVQK

SEQ ID NO: 40096 - protein, 478 aa, Bacillus sp.
NGTMMQYFEWYLPNDGNHWNRLNSDASNLKSKGITAVWIPPAWKGASQNDVGYGAYDLYDLGEFNQKGTVRTKYGTRSQLQAAVTSLKNNGIQVYGDVVMNHKGGADATEMVRAVEVNPNNRNQEVTGEYTIEAWTRFDFPGRGNTHSSFKWRWYHFDGVDWDQSRRLNNRIYKFRGKAWDWEVDTEFGNYDYLMYADYDMDHPEVVNELRNWGVWYTNTLGLDGFRIDAVKHIKYSFTRDWINHVRSATGKNMFAVAEFWKNDLGAIENYLQKTNWNHSVFDVPLHYNLYNASNSGGNYDMRNIFNGTVVQRHPSHAVTFVDNHDSQPEEALESFVETWFKPLAYALTLTREQGYPSVFYGDYYGIPTHGVPAMRSKIDPILEARQKYAYGPQHDYLDHPDVIGWTREGDSSHPKSGLATLITDGPGGSKRMYAGLKNAGETWYDITGNRSDTVKIGSDGWGEFHVNQTSVSIYVQK

SEQ ID NO: 40097 - protein, 478 aa, Bacillus sp.
NGTMMQYFEWYLPNDGNHWNRLNSDASNLKSKGITAVWIPPAWKGASQNDVGYGAYDLYDLGEFNQKGTVRTKYGTRSQLQAAVTSLKNNGIQVYGDVVMNHKGGADATEMVRAVEVNPNNRNQEVTGEYTIEAWTRFDFPGRGNTHSSFKWRWYHFDGVDWDQSRDTDNRIYKFRGKAWDWEVDTEFGNYDYLMYTDYDMDHPEVVNELRNWGVWYTNTLGLDGFRIDAVKHIKYSFTRDWINHVRSATGKNMFAVAEFWKNDLGAIENYLQKTNWNHSVFDVPLHYNLYNASKSGGNYDMRNIFNGTVVQRHPSHAVTFVDNHDSQPEEALESFVEEWFKPLAYALTLTREQGYPSVFYGDYYGIPTHGVPAMRSKIDPILEARQKYAYGPQHDYLDHPDVIGWTREGDSSHPKSGLATLITDGPGGSKRMYAGLKNAGETWYDITGNRSDTVKIGSDGWGEFHVNDGSVSIYVQK

SEQ ID NO: 40098 - protein, 478 aa, Bacillus sp.
NGTMMQYFEWYLPNDGNHWNRLNSDASNLKSKGITAVWIPPAWKGASQNDVGYGAYDLYDLGEFNQKGTVRTKYGTRSQLQAAVTSLKNNGIQVYGDVVMNHKGGADATEMVRAVEVNPNNRNQEVTGEYTIEAWTRFDFPGRGNTHSSFKWRWGHFDGVDWDQSRRLNNRIYKFRGKAWDWEVDTEFGNYDYLMYADYDMDHPEVVNELRNWGVWYTNTLGLDGFRIDAVKHIKYSFTRDWINHVRSATGKNMFAVAEFWKNDLGAIENYLQKTNWNHSVFDVPLHYNLYNASKSGGNYDMRNIFNGTVVQRHPSHAVTFVDNHDSQPEEALESFVEEWFKPLAYALTLTREQGYPSVFYGDYYGIPTHGVPAMRSKIDPILEARQKYAYGPQHDYLDHPDVIGWTREGDSSHPKSGLATLITDGPGGSKRMYAGLKNAGETWYDITGNRSDTVKIGSDGWGEFHVNDGSVSIYVQK

SEQ ID NO: 40099 - protein, 478 aa, Bacillus sp.
NGTMMQYFEWYLPNDGNHWNRLNSDASNLKSKGITAVWIPPAWKGASQNDVGYGAYDLYDLGEFNQKGTVRTKYGTRSQLQAAVTSLKNNGIQVYGDVVMNHKGGADATEMVRAVEVNPNNRNQEVTGEYTIEAWTRFDFPGRGNTHSSFKWRWYHFDGVDWDQSRRLNNRIYAFRGKAWDWEVDTEFGNYDYLMYADYDMDHPEVVNELRNWGVWYTNTLGLDGFRIDAVKHIKYSFTRDWINHVRSATGKNMFAVAEFWKNDLGAIENYLQKTNWNHSVFDVPLHYNLYNASKSGGNYDMRNIFNGTVVQRHPSHAVTFVDNHDSQPEEALESFVEEWFKPLAYALTLTREQGYPSVFYGDYYGIPTHGVPAMRSKIDPILEARQKYAYGPQHDYLDHPDVIGWTREGDSSHPKSGLATLITDGPGGSKRMYAGLKNAGETWYDITGNRSDTVKIGSDGWGEFHVNDGSVSIYVQK

SEQ ID NO: 40100 - protein, 478 aa, Bacillus sp.
NGTMMQYFEWYLPNDGNHWNRLNSDASNLKSKGITAVWIPPAWKGASQNDVGYGAYDLYDLGEFNQKGTVRTKYGTRSQLQAAVTSLKNNGIQVYGDVVMNHKGGADATEMVRAVEVNPNNRHQEVTGEYTIEAWTRFDFPGRGNTHSSFKWRWYHFDGVDWDQSRRLNNRIYKFRGKAWDWEVDTEFGNYDYLMYADYDMDHPEVVNELRNWGVWYTNTLGLDGFRIDAVKHIKYSFTRDWINHVRSATGKNMFAVAEFWKNDLGAIENYLQKTNWNHSVFDVPLHYNLYNASKSGGNYDMRNIFNGTVVQRHPSHAVTFVDNHDSQPEEALESFVEEWFKPLAYALTLTREQGYPSVFYGDYYGIPTHGVPAMRSKIDPILEARQKYAYGPQHDYLDHPDVIGWTREGDSSHPKSGLATLITDGPGGSKRMYAGLKNAGETWYDITGNRSDTVKIGSDGWGEFHVNDGSVSIYVQK

SEQ ID NO: 40101 - protein, 478 aa, Bacillus sp.
NGTMMQYFEWYLPNDGNHWNRLNSDASNLKSKGITAVWIPPAWKGASQNDVGYGAYDLYDLGEFNQKGTVRTKYGTRSQLQAAVTSLKNNGIQVYGDVVMNHKGGADATEMVRAVEVNPNNRNQEVTGEYTIEAWTRFDFPGRGNTHSSFKWRWYHFDGVDWDQSRRLNNRIYKFRGKAWDWEVDTEFGNYDYLMYADYDMDHPEVVNELRNWGVWYTNTLGLDGFRIDAVKHIKYSFTRDWINHVRSATGKNMFAVAEFWKNDLGAIENYLQKTNWNHSVFDVPLHYNLYNASQSGGNYDMRNIFNGTVVQRHPSHAVTFVDNHDSQPEEALESFVEPWFKPLAYALTLTREQGYPSVFYGDYYGIPTHGVPAMRSKIDPILEARQKYAYGPQHDYLDHPDVIGWTREGDSSHPKSGLATLITDGPGGSKRMYAGLKNAGETWYDITGNRSDTVKIGSDGWGEFHVNDASVSIYVQK

SEQ ID NO: 40102 - protein, 478 aa, Bacillus sp.
NGTMMQYFEWYLPNDGNHWNRLNSDASNLKSKGITAVWIPPAWKGASQNDVGYGAYDLYDLGEFNQKGTVRTKYGTRSQLQAAVTSLKNNGIQVYGDVVMNHKGGADATEMVRAVEVNPNNRNQEVTGEYTIEAWTRFDFPGRGNTHSSFKWRWYHFDGVDWDQSRDLENRIYKFRGKAWDWEVDTEFGNYDYLMYADYDYDHPESTNEMRNWGVWYTNTLGLDGFRIDAVKHIKYSFTRDWINHVRSATGKNMFAVAEFWKNDLGAIENYLQKTNWNHSVFDVPLHYNLYNASKSGGNYDMRNIFNGTVVQRHPSHAVTFVDNHDSQPEEALESFVEEWFKPLAYALTLTREQGYPSVFYGDYYGIPTHGVPAMRSKIDPILEARQKYAYGPQHDYLDHPDVIGWTREGDSSHPKSGLATLITDGPGGSKRMYAGLKNAGETWYDITGNRSDTVKIGSDGWGEFHVNDGSVSIYVQK

SEQ ID NO: 40103 - protein, 478 aa, Bacillus sp.
NGTMMQYFEWYLPNDGNHWNRLNSDASNLKSKGITAVWIPPAWKGASQNDVRYGAYDLYDLGEFNQKGTVRTKYGTRSQLQAAVTSLKNNGIQVYGDVVMNHKGGADATEMVRAVEVNPNNRNQEVTGEYTIEAWTRFDFPGRGNTHSSFKWRWYHFDGVDWDQSREFDNRIYKFRGKAWDWEVDTEFGNYDYLMYADYDMDHPEVVNELRNWGVWYTNTLGLDGFRIDAVKHIKYSFTRDWINHVRSATGKNMFAVAEFWKNDLGAIENYLQKTNWNHSVFDVPLHYNLYNASQSGGNYDMRNIFNGTVVQRHPSHAVTFVDNHDSQPEEALESFVEPWFKPLAYALTLTREQGYPSVFYGDYYGIPTHGVPAMRSKIDPILEARQKYAYGPQHDYLDHPDVIGWTREGDSSHPKSGLATLITDGPGGSKRMYAGLKNAGETWYDITGNRSDTVKIGSDGWGEFHVNDGSVSIYVQK

SEQ ID NO: 40104 - protein, 478 aa, Bacillus sp.
NGTMMQYFEWYLPNDGNHWNRLNSDASNLKSKGITAVWIPPAWKGASQNDVGYGAYDLYDLGEFNQKGTVRTKYGTRSQLQAAVTSLKNNGIQVYGDVVMNHKGGADATEMVRAVEVNPNNRNQEVTGEYTIEAWTRFDFPGRGNTHSSFKWRWYHFDGVDWDQSRRLNNRIYKFRGKAWDWEVDTEFGAYDYLMYADYDMDHPEVVNELRNWGVWYTNTLGLDGFRIDAVKHIKYSFTRDWINHVRSATGKNMFAVAEFWKNDLGAIENYLQKTNWNHSVFDVPLHYNLYNASKSGGNYDMRNIFNGTVVQRHPSHAVTFVDNHDSQPEEALESFVEEWFKPLAYALTLTREQGYPSVFYGDYYGIPTHGVPAMRSKIDPILEARQKYAYGPQHDYLDHPDVIGWTREGDSSHPKSGLATLITDGPGGSKRMYAGLKNAGETWYDITGNRSDTVKIGSDGWGEFHVNDGSVSIYVQK

SEQ ID NO: 40105 - protein, 478 aa, Bacillus sp.
NGTMMQYFEWYLPNDGNHWNRLNSDASNLKSKGITAVWIPPAWKGASQNDVGYGAYDLYDLGEFNQKGTVRTKYGTRSQLQAAVTSLKNNGIQVYGDVVMNHKGGADATEMVRAVEVNPNNRNQEVTGEYTIEAWTRFDFPGRGNTHSSFKWRWYHFDGVDWDQSHRLNNRIYKFRGKAWDWEVDTEFGNYDYLMYADYDMDHPEVVNELRNWGVWYTNTLGLDGFRIDAVKHIKYSFTRDWINHVRSATGKNMFAVAEFWKNDLGAIENYLQKTNWNHSVFDVPLHYNLYNASKSGGNYDMRNIFNGTVVQRHPSHAVTFVDNHDSQPEEALESFVEEWFKPLAYALTLTREQGYPSVFYGDYYGIPTHGVPAMRSKIDPILEARQKYAYGPQHDYLDHPDVIGWTREGDSSHPKSGLATLITDGPGGSKRMYAGLKNAGETWYDITGNRSDTVKIGSDGWGEFHVNDGSVSIYVQK

SEQ ID NO: 40106 - protein, 478 aa, Bacillus sp.
NGTMMQYFEWYLPNDGNHWNRLNSDASNLKSKGITAVWIPPAWKGASQNDVGYGAYDLYDLGEFNQKGTVRTKYGTRSQLQAAVTSLKNNGIQVYGDVVMNHKGGADATEMVRAVEVNPNNRNQEVTGEYTIEAWTRFDFPGRGNTHSSFKWRWYHFDGVDWDQSRRLNNRIYKFRGKAWDWEVDTEFGNYDYLMYADYDMDHPEVINELRNWGVWYTNTLGLDGFRIDAVKHIKYSFTRDWINHVRSATGKNMFAVAEFWKNDLGAIENYLQKTNWNHSVFDVPLHYNLYNASKSGGNYDMRNIFNGTVVQRHPSHAVTFVDNHDSQPEEALESFVEEWFKPLAYALTLTREQGYPSVFYGDYYGIPTHGVPAMRSKIDPILEARQKYAYGPQHDYLDHPDVIGWTREGDSSHPKSGLATLITDGPGGSKRMYAGLKNAGETWYDITGNRSDTVKIGSDGWGEFHVNDGSVSIYVQK

SEQ ID NO: 40107 - protein, 478 aa, Bacillus sp.
NGTMMQYFEWYLPNDGNHWNRLNSDASNLKSKGITAVWIPPAWKAVSQNDVGYGAYDLYDLGEFNQKGTVRTKYGTRSQLQAAVTSLKNNGIQVYGDVVMNHKGGADATEMVPAVEVNPNNRNQEVTGEYTIEAWTRFDFPGRGNTHSSFKWRWYHFDGVDWDQSRRLSNRIYKFRSKAWDWEVDTEFGNYDYLMYADYDMDHPEVVNELRNWGVWYTNTLGLDGFRIDAVKHIKYSFTRDWINHVRSATGKNMFAVAEFWKNDLGAIENYLQKTNWNHSVFDVPLHYNLYNASKSGGNYDMRNIFNGTVVQRHPSHAVTFVDNHDSQPEEALESFVEEWFKPLAYALTLTREQGYPSVFYGDYYGIPTHGVPAMRSKIDPILEARQKYAYGPQHDYLDHPDVIGWTREGDSSHPKSGLATLITDGPGGSKRMYAGLKNAGETWYDITGNRSDTVKIGSDGWGEFHVNDGSVSIYVQK

SEQ ID NO: 40108 - protein, 478 aa, Bacillus sp.
NGTMMQYFEWYLPNDGNHWNRLNSDASNLKSKGITAVWIPPAWKGASQNDVGYGAYDLYDLGEFNQKGTVRTKYGTRSQLQAAVTSLKNNGIQVYGDVVMNHKGGADATEMVRAVEVNPNNRNQEVTGEYTIEAWTRFDFPGRGNTHSSFKWRWYHFDGVDWDQSRRLNNRIYKFRGKAWDWEVDTEFGNYDYLMYADYDMDHPEVVNELRNWGVWYTNTLGLDGFRIDAVKHIKYSFTRDWINHVRSATGKNMFAVAEFWKNDLGAIENYLQKTNWNHSVFDVPLHYNLYNASKSGGNYDMRNIFNGTVVQRHPSHAVTFVDNHDSQPEEALESFVETWFKPLAYALTLTREQGYPSVFYGDYYGIPTHGVPAMRSKIDPILEARQKYAYGPQHDYLDHPDVIGWTREGDSSHPKSGLATLITDGPGGSKRMYAGLKNAGETWYDITGNRSDTVKIGSDGWGEFHVNKSSVSIYVQK

SEQ ID NO: 40109 - protein, 478 aa, Bacillus sp.
NGTMMQYFEWYLPNDGNHWNRLNSDASNLKSKGITAVWIPPAWKAASQNDVGYGAYDLYDLGEFNQKGTVRTKYGTRSQLQAAVTSLKNNGIQVYGDVVMNHKGGADATEMVRAVEVNPNNRNQEVTGEYTIEAWTRFDFPGRGNTHSSFKWRWYHFDGVDWDQSRDLTNRIYKFRGKAWDWEVDTEFGNYDYLMYADYDMDHPEVVNELRNWGVWYTNTLGLDGFRIDAVKHIKYSFTRDWINHVRSATGKNMFAVAEFWKNDLGAIENYLQKTNWNHSVFDVPLHYNLYNASKSGGNYDMRNIFNGTVVQRHPSHAVTFVDNHDSQPEEALESFVEEWFKPLAYALTLTREQGYPSVFYGDYYGIPTHGVPAMRSKIDPILEARQKYAYGPQHDYLDHPDVIGWTREGDSSHPKSGLATLITDGPGGSKRMYAGLKNAGETWYDITGNRSDTVKIGSDGWGEFHVNDGSVSIYVQK

SEQ ID NO: 40110 - protein, 478 aa, Bacillus sp.
NGTMMQYFEWYLPNDGNHWNRLNSDASNLKSKGITAVWIPPAWKGASQNDVGYGAYDLYDLGEFNQKGTVRTKYGTRSQLQAAVTSLKNNGIQVYGDVVMNHKGGADATEMVSAVEVNPNNRNQEVTGEYTIEAWTRFDFPGRGNTHSSFKWRWYHFDGVDWDQSRRLNNRIYKFRAKAWDWEVDTEFGNYDYLMYADYDMDHPEVVNELRNWGVWYTNTLGLDGFRIDAVKHIKYSFTRDWINHVRSATGKNMFAVAEFWKNDLGAIENYLQKTNWNHSVFDVPLHYNLYNASKSGGNYDMRNIFNGTVVQRHPSHAVTFVDNHDSQPEEALESFVEEWFKPLAYALTLTREQGYPSVFYGDYYGIPTHGVPAMRSKIDPILEARQKYAYGPQHDYLDHPDVIGWTREGDSSHPKSGLATLITDGPGGSKRMYAGLKNAGETWYDITGNRSDTVKIGSDGWGEFHVNDGSVSIYVQK

SEQ ID NO: 40111 - protein, 478 aa, Bacillus sp.
NGTMMQYFEWYLPNDGNHWNRLNSDASNLKSKGITAVWIPPAWKAASQNDVGYGAYDLYDLGEFNQKGTVRTKYGTRSQLQAAVTSLKNNGIQVYGDVVMNHKGGADATEMVDAVEVNPNNRNQEVTGEYTIEAWTRFDFPGRGNTHSSFKWRWYHFDGVDWDQSRDLQNRIYKFRGKAWDWEVDTEFGNYDYLMYADYDMDHPEVVNELRNWGVWYTNTLGLDGFRIDAVKHIKYSFTRDWINHVRSATGKNMFAVAEFWKNDLGAIENYLQKTNWNHSVFDVPLHYNLYNASKSGGNYDMRNIFNGTVVQRHPSHAVTFVDNHDSQPEEALESFVEEWFKPLAYALTLTREQGYPSVFYGDYYGIPTHGVPAMRSKIDPILEARQKYAYGPQHDYLDHPDVIGWTREGDSSHPKSGLATLITDGPGGSKRMYAGLKNAGETWYDITGNRSDTVKIGSDGWGEFHVNDGSVSIYVQK

SEQ ID NO: 40112 - protein, 478 aa, Bacillus sp.
NGTMMQYFEWYLPNDGNHWNRLNSDASNLKSKGITAVWIPPAWKGASQNDVGYGAYDLYDLGEFNQKGTVRTKYGTRSQLQAAVTSLKNNGIQVYGDVVMNHKGGADATEMVRAVEVNPNNRNQEVTGEYTIEAWTRFDFPGRGNTHSSFKWRWYHFDGVDWDQSRNLNNRIYKFRGKAWDWEVDTEFGNYDYLMYVDYDMDHPEVVNELRNWGVWYTNTLGLDGFRIDAVKHIKYSFTRDWINHVRSATGKNMFAVAEFWKNDLGAIENYLQKTNWNHSVFDVPLHYNLYNASKSGGNYDMRNIFNGTVVQRHPSHAVTFVDNHDSQPEEALESFVEEWFKPLAYALTLTREQGYPSVFYGDYYGIPTHGVPAMRSKIDPILEARQKYAYGPQHDYLDHPDVIGWTREGDSSHPKSGLATLITDGPGGSKRMYAGLKNAGETWYDITGNRSDTVKIGSDGWGEFHVNDGSVSIYVQK

SEQ ID NO: 40113 - protein, 478 aa, Bacillus sp.
NGTMMQYFEWYLPNDGNHWNRLNSDASNLKSKGITAVWIPPAWKGASQNDVGYGAYDLYDLGEFNQKGTVRTKYGTRSQLQAAVTSLKNNGIQVYGDVVMNHKGGADATEMVRAVEVNPNNRNQEVTGEYTIEAWTRFDFPGRGNTHSSFKWRWYHFDGVDWDQSRRLNNRIYKFRGKAWDWEVDTEFGNYDYLMYADYDMDHPEVVNELRNWGVWYTNTLGLDGFRIDAVKHIKYSFTRDWINHVRSATGKNMFAVAEFWKNDLGAIENYLQKTNWNHSVFDVPLHYNLYNASKSGGNYDMRNIFNGTVVQRHPSHAVTFVDNHDSQPEEALESFVEEWFKPLAYALTLTREQGYPSVFYGDYYGIPTHGVPAMRSKIDPILEARQKYAYGPQHDYLDHPDVIGWTREGDSSHPKSGLATAITDGPGGSKRMYAGLKNAGETWYDITGNRSDTVKIGSDGWGEFHVNDGSVSIYVQK

SEQ ID NO: 40114 - protein, 478 aa, Synthetic construct
NGTMMQYFEWYLPNDGNHWNRLNSDASNLKSKGITAVWIPPAWKGASQNDVGYGAYDLYDLGEFNQKGTVRTKYGTRSQLQAAVTSLKNNGIQVYGDVVMNHKGGADATEMVRAVEVNPNNRNQEVTGEYTIEAWTRFDFPGRGNTHSSFKWRWYHFDGVDWDQSRRLNNRIYKFRPKEWDWEVDTENGNYDYLMYADIDMDHPEVVNELRNWGVWYTNTLGLDGFRIDAVKHIKYSFTRDWINHVRSATGKNMFAVAEFWKNDLGAIENYLQKTNWNHSVFDVPLHYNLYNASKSGGNYDMRNIFNGTVVQRHPSHAVTFVDNHDSQPEEALESFVEEWFKPLAYALTLTREQGYPSVFYGDYYGIPTHGVPAMRSKIDPILEARQKYAYGPQHDYLDHPDVIGWTREGDSSHPKSGLATLITDGPGGSKRMYAGLKNAGETWYDITGNRSDTVKIGSDGWGEFHVNDGSVSIYVQK

SEQ ID NO: 40115 - protein, 478 aa, Synthetic construct
NGTMMQYFEWYLPNDGNHWNRLNSDASNLKSKGITAVWIPPAWKGASQNDVGYGAYDLYDLGEFNQKGTVRTKYGTRSQLQAAVTSLKNNGIQVYGDVVMNHKGGADATEMVRAVEVNPNNRNQEVTGEYTIEAWTRFDFPGRGNTHSSFKWRWYHFDGVDWDQSSRLNNRIYKFRGKAWDWEVDTEFGNYDYLMYADYDMDHPEVVNELRNWGVWYTNTLGLDGFRIDAVKHIKYSFTRDWINHVRSATGKNMFAVAEFWKNDLGAIENYLQKTNWNHSVFDVPLHYNLYNASKSGGNYDMRNIFNGTVVQRHPSHAVTFVDNHDSQPEEALESFVEEWFKPLAYALTLTREQGYPSVFYGDYYGIPTHGVPAMRSKIDPILEARQKYAYGPQHDYLDHPDVIGWTREGDSSHPKSGLATLITDGPGGSKRMYAGLKNAGETWYDITGNRSDTVKIGSDGWGEFHVNDGSVSIYVQK

SEQ ID NO: 40116 - protein, 478 aa, Bacillus sp.
NGTMMQYFEWYLPNDGNHWNRLNSDASNLKSKGITAVWIPPAWKGASQNDVGYGAYDLYDLGEFNQKGTVRTKYGTRSQLQAAVTSLKNNGIQVYGDVVMNHKGGADATEMVRAVEVNPNNRNQEVTGEYTIEAWTRFDFPGRGNTHSSFKWRWYHFDGVDWDQSRRLNNRIYKFRGKAWDWEVDTENGFYDYLMYADIDMDHPEVVSTLRNWGVWYTNTLGLDGFRIDAVKHIKYSFTRDWINHVRSATGKNMFAVAEFWKNDLGAIENYLQKTNWNHSVFDVPLHYNLYNASKSGGNYDMRNIFNGTVVQRHPSHAVTFVDNHDSQPEEALESFVEEWFKPLAYALTLTREQGYPSVFYGDYYGIPTHGVPAMRSKIDPILEARQKYAYGPQHDYLDHPDVIGWTREGDSSHPKSGLATLITDGPGGSKRMYAGLKNAGETWYDITGNRSDTVKIGSDGWGEFHVNDGSVSIYVQK

SEQ ID NO: 40117 - protein, 478 aa, Bacillus sp.
NGTMMQYFEWYLPNDGNHWNRLNSDASNLKSKGITAVWIPPAWKGASQNDVGYGAYDLYDLGEFNQKGTVRTKYGTRSQLQAAVTSLKNNGIQVYGDVVMNHKGGADATEMVRAVEVNPNNRNQEVTGEYTIEAWTRFDFPGRGNTHSSFKWRWYHFDGVDWDQSRRLNNRIYKFRGKAWDWEVDTEFGNYDYLMYADYDMDHPEVVNELRNWGVWYTNTLGLDGFRIDAVKHIKYSFTRDWINHVRSATGKNMFAVAEFWKNDLGAIENYLQKTNWNHSVFDVPLHYNLYNASKSGGNYDMRNIFNGTVVQRHPSHAVTFVDNHDSQPEEALESFVEEWFKPLAYALTLTREQGYPSVFYGDYYGIPTHGVPAMRSKIDPILEARQKYAYGPQHDYLDHPDVIGWTREGDSSHPKSGLATLITDGPGGSKRMYAGLKNAGETWYDITGNRSDTVKIGSDGWGEFHVNGGSVSIYVQK

SEQ ID NO: 40118 - protein, 478 aa, Bacillus sp.
NGTMMQYFEWYLPNDGNHWNRLNSDASNLKSKGITAVWIPPAWKAASQNDVGYGAYDLYDLGEFNQKGTVRTKYGTRSQLQAAVTSLKNNGIQVYGDVVMNHKGGADATEMVRAVEVNPNNRNQEVTGEYTIEAWTRFDFPGRGNTHSSFKWRWYHFDGVDWDQSRQTDNRIYKFRGKAWDWEVDTEFGNYDYLMYADYDMDHPEVVNELRNWGVWYTNTLGLDGFRIDAVKHIKYSFTRDWINHVRSATGKNMFAVAEFWKNDLGAIENYLQKTNWNHSVFDVPLHYNLYNASKSGGNYDMRNIFNGTVVQRHPSHAVTFVDNHDSQPEEALESFVEEWFKPLAYALTLTREQGYPSVFYGDYYGIPTHGVPAMRSKIDPILEARQKYAYGPQHDYLDHPDVIGWTREGDSSHPKSGLATLITDGPGGSKRMYAGLKNAGETWYDITGNRSDTVKIGSDGWGEFHVNDGSVSIYVQK

SEQ ID NO: 40119 - protein, 478 aa, Bacillus sp.
NGTMMQYFEWYLPNDGNHWNRLNSDASNLKSKGITAVWIPPAWKGASQNDVGYGAYDLYDLGEFNQKGTVRTKYGTRSQLQAAVTSLKNNGIQVYGDVVMNHKGGADTTEMVRAVEVNPNNRNQEVTGEYTIEAWTRFDFPGRGNTHSSFKWRWYHFDGVDWDQSRDLQNRIYKFRGKAWDWEVDTEFGNYDYLMYADYDMDHPEVVNELRNWGVWYTNTLGLDGFRIDAVKHIKYSFTRDWINHVRSATGKNMFAVAEFWKNDLGAIENYLQKTNWNHSVFDVPLHYNLYNASKSGGNYDMRNIFNGTVVQRHPSHAVTFVDNHDSQPEEALESFVETWFKPLAYALTLTREQGYPSVFYGDYYGIPTHGVPAMRSKIDPILEARQKYAYGPQHDYLDHPDVIGWTREGDSSHPKSGLATLITDGPGGSKRMYAGLKNAGETWYDITGNRSDTVKIGSDGWGEFHVNKGSVSIYVQK

SEQ ID NO: 40120 - protein, 478 aa, Bacillus sp.
NGTMMQYFEWYLPNDGNHWNRLNSDASNLKSKGITAVWIPPAWKGASQNDVGYGAYDLYDLGEFNQKGTVRTKYGTRSQLQAAVTSLKNNGIQVYGDVVMNHKGGADATEMVRAVEVNPNNRNQEVTGEYTIEAWTRFDFPGRGNTHSSFKWRWYHFDGVDWDQSERLNNRIYKFRGKAWDWEVDTEFGNYDYLMYADYDMDHPEVVNELRNWGVWYTNTLGLDGFRIDAVKHIKYSFTRDWINHVRSATGKNMFAVAEFWKNDLGAIENYLQKTNWNHSVFDVPLHYNLYNASKSGGNYDMRNIFNGTVVQRHPSHAVTFVDNHDSQPEEALESFVEEWFKPLAYALTLTREQGYPSVFYGDYYGIPTHGVPAMRSKIDPILEARQKYAYGPQHDYLDHPDVIGWTREGDSSHPKSGLATLITDGPGGSKRMYAGLKNAGETWYDITGNRSDTVKIGSDGWGEFHVNDGSVSIYVQK

SEQ ID NO: 40121 - protein, 478 aa, Bacillus sp.
NGTMMQYFEWYLPNDGNHWNRLNSDASNLKSKGITAVWIPPAWKGASQNDVGYGAYDLYDLGEFNQKGTVRTKYGTRSQLQAAVTSLKNNGIQVYGDVVMNHKGGADATEMVRAVEVNPNNRNQEVTGEYTIEAWTRFDFPGRGNTHSSFKWRWYHFDGVDWDQSRRLNNRIYKFRGKAWDWEVDTEFGNYDYLMYADYDMDHPEVVNELRNWGVWYTNTLGLDGFRIDAVKHIKYSFTRDWINHVRSATGKNMFAVAEFWKNDLGAIENYLQKTNWNHSVFDVPLHYNLYNASKSGGNYDMRNIFNGTVVQRHPSHAVTFVDNHDSQPEEALESFVEEWFKPQAYALTLTREQGYPSVFYGDYYGIPTHGVPAMRSKIDPILEARQKYAYGPQHDYLDHPDVIGWTREGDSSHPKSGLATLITDGPGGSKRMYAGLKNAGETWYDITGNRSDTVKIGSDGWGEFHVNDGSVSIYVQK

SEQ ID NO: 40122 - protein, 478 aa, Bacillus sp.
NGTMMQYFEWYLPNDGNHWNRLNSDASNLKSKGITAVWIPPAWKAASQNDVGYGAYDLYDLGEFNQKGTVRTKYGTRSQLQAAVTSLKNNGIQVYGDVVMNHKGGADATEMVRAVEVNPNNRNQEVTGEYTIEAWTRFDFPGRGNTHSSFKWRWYHFDGVDWDQSRRFQNRIYKFRGKAWDWEVDTEFGNYDYLMYADYDMDHPEVVNELRNWGVWYTNTLGLDGFRIDAVKHIKYSFTRDWINHVRSATGKNMFAVAEFWKNDLGAIENYLQKTNWNHSVFDVPLHYNLYNASKSGGNYDMRNIFNGTVVQRHPSHAVTFVDNHDSQPEEALESFVEEWFKPLAYALTLTREQGYPSVFYGDYYGIPTHGVPAMRSKIDPILEARQKYAYGPQHDYLDHPDVIGWTREGDSSHPKSGLATLITDGPGGSKRMYAGLKNAGETWYDITGNRSDTVKIGSDGWGEFHVNDGSVSIYVQK

SEQ ID NO: 40123 - protein, 478 aa, Bacillus sp.
NGTMMQYFEWYLPNDGNHWNRLNSDASNLKSKGITAVWIPPAWKATSQNDVGYGAYDLYDLGEFNQKGTVRTKYGTRSQLQSAVTSLKNNGIQVYGDVVMNHKGGADATEMVRAVEVNPNNRNQEVTGEYTIEAWTRFDFPGRGNTHSSFKWRWYHFDGVDWDQSRNTDNRIYKFRGKAWDWEVDTEFGNYDYLMYADYDMDHPEVVNELRNWGVWYTNTLGLDGFRIDAVKHIKYSFTRDWINHVRSATGKNMFAVAEFWKNDLGAIENYLQKTNWNHSVFDVPLHYNLYNASKSGGNYDMRNIFNGTVVQRHPSHAVTFVDNHDSQPEEALESFVEEWFKPLAYALTLTREQGYPSVFYGDYYGIPTHGVPAMRSKIDPILEARQKYAYGPQHDYLDHPDVIGWTREGDSSHPKSGLATLITDGPGGSKRMYAGLKNAGETWYDITGNRSDTVKIGSDGWGEFHVNDGSVSIYVQK

SEQ ID NO: 40124 - protein, 478 aa, Bacillus sp.
NGTMMQYFEWYLPNDGNHWNRLNSDASNLKSKGITAVWIPPAWKGASQNDVGYGAYDLYDLGEFNQKGTVRTKYGTRSQLQAAVTSLKNNGIQVYGDVVMNHKGGADATEMVRAVEVNPNNRNQEVTGEYTIEAWTRFDFPGRGNTHSSFKWRWYHFDGVDWDQSRRLNNRIYKFRGKAWDWEVDTEFGNYDYLMYADYDMDHPEVVNELRNWGVWYTNTLGLDGFRIDAVKHIKYSFTRDWINHVRSATGKNMFAVAEFWKNDLGAIENYLQKTNWNHSVFDVPLHYNLYNASQSGGNYDMRNIFNGTVVQRHPSHAVTFVDNHDSQPEEALESFVDTWFKPLAYALTLTREQGYPSVFYGDYYGIPTHGVPAMRSKIDPILEARQKYAYGPQHDYLDHPDVIGWTREGDSSHPKSGLATLITDGPGGSKRMYAGLKNAGETWYDITGNRSDTVKIGSDGWGEFHVNKKSVSIYVQK

SEQ ID NO: 40125 - protein, 478 aa, Bacillus sp.
NGTMMQYFEWYLPNDGNHWNRLNSDASNLKSKGITAVWIPPAWKAVSQNDVGYGAYDLYDLGEFNQKGTVRTKYGTRSQLQAAVTSLKNNGIQVYGDVVMNHKGGADATEMVRAVEVNPNNRNQEVTGEYTIEAWTRFDFPGRGNTHSSFKWRWYHFDGVDWDQSRDLENRIYKFRGKAWDWEVDTEFGNYDYLMYADYDMDHPEVVNELRNWGVWYTNTLGLDGFRIDAVKHIKYSFTRDWINHVRSATGKNMFAVAEFWKNDLGAIENYLQKTNWNHSVFDVPLHYNLYNASKSGGNYDMRNIFNGTVVQRHPSHAVTFVDNHDSQPEEALESFVETWFKPLAYALTLTREQGYPSVFYGDYYGIPTHGVPAMRSKIDPILEARQKYAYGPQHDYLDHPDVIGWTREGDSSHPKSGLATLITDGPGGSKRMYAGLKNAGETWYDITGNRSDTVKIGSDGWGEFHVNDASVSIYVQK

SEQ ID NO: 40126 - protein, 478 aa, Bacillus sp.
NGTMMQYFEWYLPNDGNHWNRLNSDASNLKSKGITAVWIPPAWKAVSQNDVGYGAYDLYDLGEFNQKGTVRTKYGTRSQLQAAVTSLKNNGIQVYGDVVMNHKGGADATEMVRAVEVNPNNRNQEVTGEYTIEAWTRFDFPGRGNTHSSFKWRWYHFDGVDWDQSRRLQNRIYKFRGKAWDWEVDTEFGNYDYLMYADYDMDHPEVVNELRNWGVWYTNTLGLDGFRIDAVKHIKYSFTRDWINHVRSATGKNMFAVAEFWKNDLGAIENYLQKTNWNHSVFDVPLHYNLYNASKSGGNYDMRNIFNGTVVQRHPSHAVTFVDNHDSQPEEALESFVEEWFKPLAYALTLTREQGYPSVFYGDYYGIPTHGVPAMRSKIDPILEARQKYAYGPQHDYLDHPDVIGWTREGDSSHPKSGLATLITDGPGGSKRMYAGLKNAGETWYDITGNRSDTVKIGSDGWGEFHVNDGSVSIYVQK

SEQ ID NO: 40127 - protein, 478 aa, Bacillus sp.
NGTMMQYFEWYLPNDGNHWNRLNSDASNLKSKGITAVWIPPAWKAQSQNDVGYGAYDLYDLGEFNQKGTVRTKYGTRSQLQAAVTSLKNNGIQVYGDVVMNHKGGADATEMVRAVEVNPNNRNQEVTGEYTIEAWTRFDFPGRGNTHSSFKWRWYHFDGVDWDQSRQLNNRIYKFRGKAWDWEVDTEFGNYDYLMYADYDMDHPEVVNELRNWGVWYTNTLGLDGFRIDAVKHIKYSFTRDWINHVRSATGKNMFAVAEFWKNDLGAIENYLQKTNWNHSVFDVPLHYNLYNASKSGGNYDMRNIFNGTVVQRHPSHAVTFVDNHDSQPEEALESFVEEWFKPLAYALTLTREQGYPSVFYGDYYGIPTHGVPAMRSKIDPILEARQKYAYGPQHDYLDHPDVIGWTREGDSSHPKSGLATLITDGPGGSKRMYAGLKNAGETWYDITGNRSDTVKIGSDGWGEFHVNDGSVSIYVQK

SEQ ID NO: 40128 - protein, 478 aa, Bacillus sp.
NGTMMQYFEWYLPNDGNHWNRLNSDASNLKSKGITAVWIPPAWKGASQNDVGYGAYDLYDLGEFNQKGTVRTKYGTRSQLQAAVTSLKNNGIQVYGDVVMNHKGGADATEMVRAVEVNPNNRNQEVTGEYTIEAWTRFDFPGRGNTHSSFKWRWYHFDGVDWDQSRRLNNRIYKFRGKAWDWEVDTEFGNYDYLMYADYDMDHVEVVNELRNWGVWYTNTLGLDGFRIDAVKHIKYSFTRDWINHVRSATGKNMFAVAEFWKNDLGAIENYLQKTNWNHSVFDVPLHYNLYNASKSGGNYDMRNIFNGTVVQRHPSHAVTFVDNHDSQPEEALESFVEEWFKPLAYALTLTREQGYPSVFYGDYYGIPTHGVPAMRSKIDPILEARQKYAYGPQHDYLDHPDVIGWTREGDSSHPKSGLATLITDGPGGSKRMYAGLKNAGETWYDITGNRSDTVKIGSDGWGEFHVNDGSVSIYVQK

SEQ ID NO: 40129 - protein, 478 aa, Bacillus sp.
NGTMMQYFEWYLPNDGNHWNRLNSDASNLKSKGITAVWIPPAWKAASQNDVGYGAYDLYDLGEFNQKGTVRTKYGTRSQLQAAVTSLKNNGIQVYGDVVMNHKGGADATEMVRAVEVNPNNRNQEVTGEYTIEAWTRFDFPGRGNTHSSFKWRWYHFDGVDWDQSRRVHNRIYKFRGKAWDWEVDTEFGNYDYLMYADYDMDHPEVVNELRNWGVWYTNTLGLDGFRIDAVKHIKYSFTRDWINHVRSATGKNMFAVAEFWKNDLGAIENYLQKTNWNHSVFDVPLHYNLYNASKSGGNYDMRNIFNGTVVQRHPSHAVTFVDNHDSQPEEALESFVEEWFKPLAYALTLTREQGYPSVFYGDYYGIPTHGVPAMRSKIDPILEARQKYAYGPQHDYLDHPDVIGWTREGDSSHPKSGLATLITDGPGGSKRMYAGLKNAGETWYDITGNRSDTVKIGSDGWGEFHVNDGSVSIYVQK

SEQ ID NO: 40130 - protein, 478 aa, Bacillus sp.
NGTMMQYFEWYLPNDGNHWNRLNSDASNLKSKGITAVWIPPAWKAVSQNDVGYGAYDLYDLGEFNQKGTVRTKYGTRSQLQAAVTSLKNNGIQVYGDVVMNHKGGADATEMVPAVEVNPNNRNQEVTGEYTIEAWTRFDFPGRGNTHSSFKWRWYHFDGVDWDQSRELSNRIYKFRSKAWDWEVDTEFGNYDYLMYADYDMDHPEVVNELRNWGVWYTNTLGLDGFRIDAVKHIKYSFTRDWINHVRSATGKNMFAVAEFWKNDLGAIENYLQKTNWNHSVFDVPLHYNLYNASKSGGNYDMRNIFNGTVVQRHPSHAVTFVDNHDSQPEEALESFVEEWFKPLAYALTLTREQGYPSVFYGDYYGIPTHGVPAMRSKIDPILEARQKYAYGPQHDYLDHPDVIGWTREGDSSHPKSGLATLITDGPGGSKRMYAGLKNAGETWYDITGNRSDTVKIGSDGWGEFHVNDGSVSIYVQK

SEQ ID NO: 40131 - protein, 478 aa, Bacillus sp.
NGTMMQYFEWYLPNDGNHWNRLNSDASNLKSKGITAVWIPPAWKGASQNDVGYGAYDLYDLGEFNQKGTVRTKYGTRSQLQAAVTSLKNNGIQVYGDVVMNHKGGADATEMVRAVEVNPNNRNQEVTGEYTIEAWTRFDFPGRGNTHSSFKWRWYHFDGVDWDQSRRLNNRIYKFRGKAWDWEVDTEFGNYDYLMYADYDMDHPEVVNELRNWGVWYTNTLGLDGFRIDAVKHIKYSFTRDWINHVRSATGKNMFAVAEFWKNDLGAIENYLQKTNWNHSVFDVPLHYNLYNASKSAGNYDMRNIFNGTVVQRHPSHAVTFVDNHDSQPEEALESFVDEWFKPLAYALTLTREQGYPSVFYGDYYGIPTHGVPAMRSKIDPILEARQKYAYGPQHDYLDHPDVIGWTREGDSSHPKSGLATLITDGPGGSKRMYAGLKNAGETWYDITGNRSDTVKIGSDGWGEFHVNDGSVSIYVQK

SEQ ID NO: 40132 - protein, 478 aa, Bacillus sp.
NGTMMQYFEWYLPNDGNHWNRLNSDASNLKSKGITAVWIPPAWKGASQNDVGYGAYDLYDLGEFNQKGTVRTKYGTRSQLQAAVTSLKNNGIQVYGDVVMNHKGGADATEMVRAVEVNPNNRNQEVTGEYTIEAWTRFDFPGRGNTHSSFKWRWYHFDGVDWDQSRRLNNRIYKFRSKAWDWEVDTEFGNYDYLMYADYDMDHPEVVNELRNWGVWYTNTLGLDGFRIDAVKHIKYSFTRDWINHVRSATGKNMFAVAEFWKNDLGAIENYLQKTNWNHSVFDVPLHYNLYNASKSGGNYDMRNIFNGTVVQRHPSHAVTFVDNHDSQPEEALESFVEEWFKPLAYALTLTREQGYPSVFYGDYYGIPTHGVPAMRSKIDPILEARQKYAYGPQHDYLDHPDVIGWTREGDSSHPKSGLATLITDGPGGSKRMYAGLKNAGETWYDITGNRSDTVKIGSDGWGEFHVNDGSVSIYVQK

SEQ ID NO: 40133 - protein, 478 aa, Bacillus sp.
NGTMMQYFEWYLPNDGNHWNRLNSDASNLKSKGITAVWIPPAWKGASQNDVGYGAYDLYDLGEFNQKGTVRTKYGTRSQLQAAVTSLKNNGIQVYGDVVMNHKGGADATEMVRAVEVNPNNRNQEVTGEYTIEAWTRFDFPGRGNTHSSFKWRWYHFDGVDWDQSRRLNNRIYKFRGKAWDWEVDTEFGNYDYLMYADYDMDHPEVVNELRNWGVWYTNTLGLDGFRIDAVKHIKYSFTRDWINHVRSATGKNMFAVAEFWKNDLGAIENYLQKTNWNHSVFDVPLHYNLYNASKSGGNYDMRNIFNGTVVQRHPSHAVTFVDNHDSQPEEALESFVEEWFKPLAYALTLTREQGYPSVFYGDYYGIPTHGVPAMRSKIDPILEARQKYARGPQHDYLDHPDVIGWTREGDSSHPKSGLATLITDGPGGSKRMYAGLKNAGETWYDITGNRSDTVKIGSDGWGEFHVNDGSVSIYVQK

SEQ ID NO: 40134 - protein, 478 aa, Bacillus sp.
NGTMMQYFEWYLPNDGNHWNRLNSDASNLKSKGITAVWIPPAWKGASQNDVGYGAYDLYDLGEFNQKGTVRTKYGTRSQLQAAVTSLKNNGIQVYGDVVMNHKGGADATEMVRAVEVNPNNRNQEVTGEYTIEAWTRFDFPGRGNTHSSFKWRWYHFDGVDWDQSRRFSNRIYKFRGKAWDWEVDTEFGNYDYLMYTDYDMDHPEVVNELRNWGVWYTNTLGLDGFRIDAVKHIKYSFTRDWINHVRSATGKNMFAVAEFWKNDLGAIENYLQKTNWNHSVFDVPLHYNLYNASKSGGNYDMRNIFNGTVVQRHPSHAVTFVDNHDSQPEEALESFVEEWFKPLAYALTLTREQGYPSVFYGDYYGIPTHGVPAMRSKIDPILEARQKYAYGPQHDYLDHQDVIGWTREGDSSHPKSGLATLITDGPGGSKRMYAGLKNAGETWYDITGNRSDTVKIGSDGWGEFHVNDGSVSIYVQK

SEQ ID NO: 40135 - protein, 478 aa, Bacillus sp.
NGTMMQYFEWYLPNDGNHWNRLNSDASNLKSKGITAVWIPPAWKGASQNDVGYGAYDLYDLGEFNQKGTVRTKYGTRSQLQAAVTSLKNNGIQVYGDVVMNHKGGADATEMVRAVEVNPNNRNQEVTGEYTIEAWTRFDFPGRGNTHSSFKWRWYHFDGVDWDQSRRLNNRIYKFRGKAWDWEVDTEFGNYDYLMYADYDMDHPEVVNELRNWGVWYTNTLGLDGFRIDAVKHIKYSFTRDWINHVRSATGKNMFAVAEFWKNDLGAIENYLQKTNWNHSVFDVPLHYNLYNASKSGGNYDMRNIFNGTVVQRHPSHAVTFVDNHDSQPEEALESFVEEWFKPLAYALTLTREQGYPSVFYGDYYGIPTHGVPAMRSKIDPILEARQKYAYGPQHDYLDHPDVIGWTREGDSSHPKSGLATLETDGPGGSKRMYAGLKNAGETWYDITGNRSDTVKIGSDGWGEFHVNDGSVSIYVQK

SEQ ID NO: 40136 - protein, 478 aa, Bacillus sp.
NGTMMQYFEWYLPNDGNHWNRLNSDASNLKSKGITAVWIPPAWKGASQNDVGYGAYDLYDLGEFNQKGTVRTKYGTRSQLQAAVTSLKNNGIQVYGDVVMNHKGGADATEMVRAVEVNPNNRNQEVTGEYTIEAWTRFDFPGRGNTHSSFKWRWYHFDGVDWDQSRRLDNRIYKFRGKAWDWEVDTEFGNYDYLMYADYDMDHPEVVNELRNWGVWYTNTLGLDGFRIDAVKHIKYSFTRDWINHVRSATGKNMFAVAEFWKNDLGAIENYLQKTNWNHSVFDVPLHYNLYNASKSGGNYDMRNIFNGTVVQRHPSHAVTFVDNHDSQPEEALESFVDPWFKPLAYALTLTREQGYPSVFYGDYYGIPTHGVPAMRSKIDPILEARQKYAYGPQHDYLDHPDVIGWTREGDSSHPKSGLATLITDGPGGSKRMYAGLKNAGETWYDITGNRSDTVKIGSDGWGEFHVNKGSVSIYVQK

SEQ ID NO: 40137 - protein, 478 aa, Bacillus sp.
NGTMMQYFEWYLPNDGNHWNRLNSDASNLKSKGITAVWIPPAWKGASQNDVGYGAYDLYDLGEFNQKGTVRTKYGTRSQLQAAVTSLKNNGIQVYGDVVMNHKGGADATEMVRAVEVNPNNRNQEVTGEYTIEAWTRFDFPGRGNTHSSFKWRWYHFDGVDWDQSREFDNRIYKFRGKAWDWEVDTEFGNYDYLMYADYDMDHPEVVNELRNWGVWYTNTLGLDGFRIDAVKHIKYSFTRDWINHVRSATGKNMFAVAEFWKNDLGAIENYLQKTNWNHSVFDVPLHYNLYNASKSGGNYDMRNIFNGTVVQRHPSHAVTFVDNHDSQPEEALESFVETWFKPLAYALTLTREQGYPSVFYGDYYGIPTHGVPAMRSKIDPILEARQKYAYGPQHDYLDHPDVIGWTREGDSSHPKSGLATLITDGPGGSKRMYAGLKNAGETWYDITGNRSDTVKIGSDGWGEFHVNKASVSIYVQK

SEQ ID NO: 40138 - protein, 478 aa, Bacillus sp.
NGTMMQYFEWYLPNDGNHWNRLNSDASNLKSKGITAVWIPPAWKGASQNDVGYGAYDLYDLGEFNQKGTVRTKYGTRSQLQAAVTSLKNNGIQVYGDVVMNHKGGADATEMVRAVEVNPNNRNQEVTGEYTIEAWTRFDFPGRGNTHSSFKWRWYHFDGVDWDQSRNVNNRIYKFRGKAWDWEVDTEFGNYDYLMYADYDMDHPEVVNELRNWGVWYTNTLGLDGFRIDAVKHIKYSFTRDWINHVRIATGKNMFAVAEFWKNDLGAIENYLQKTNWNHSVFDVPLHYNLYNASKSGGNYDMRNIFNGTVVQRHPSHAVTFVDNHDSQPEEALESFVDEWFKPLAYALTLTREQGYPSVFYGDYYGIPTHGVPAMRSKIDPILEARQKYAYGPQHDYLDHPDVIGWTREGDSSHPKSGLATLITDGPGGSKRMYAGLKNAGETWYDITGNRSDTVKIGSDGWGEFHVNDQSVSIYVQK

SEQ ID NO: 40139 - protein, 478 aa, Bacillus sp.
NGTMMQYFEWYLPNDGNHWNRLNSDASNLKSKGITAVWIPPAWKGASQNDVGYGAYDLYDLGEFNQKGTVRTKYGTRSQLQAAVTSLKNNGIQVYGDVVMNHKGGADATEMVRAVEVNPNNRNQEVTGEYTIEAWTRFDFPGRGNTHSSFKWRWYHFDGVDWDQSRRVNNRIYKFRGKAWDWEVDTEFGNYDYLMYTDYDMDHPEVVNELRNWGVWYTNTLGLDGFRIDAVKHIKYSFTRDWINHVRSATGKNMFAVAEFWKNDLGAIENYLQKTNWNHSVFDVPLHYNLYNASKSGGNYDMRNIFNGTVVQRHPSHAVTFVDNHDSQPEEALESFVEEWFKPLAYALTLTREQGYPSVFYGDYYGIPTHGVPAMRSKIDPILEARQKYAYGPQHDYLDHPDVIGWTREGDSSHPKSGLATLITDGPGGSKRMYAGLKNAGETWYDITGNRSDTVKIGSDGWGEFHVNDGSVSIYVQK

SEQ ID NO: 40140 - protein, 478 aa, Bacillus sp.
NGTMMQYFEWYLPNDGNHWNRLNSDASNLKSKGITAVWIPPAWKGASQNDVGYGAYDLYDLGEFNQKGTVRTKYGTRSQLQAAVTSLKNNGIQVYGDVVMNHKGGADATEMVRAVEVNPNNRNQEVTGEYTIEAWTRFDFPGRGNTHSSFKWRWYHFDGVDWDQSRRLNNRIYKFRGKAWDWEVDTEFGNYDYLMYADYDMDHPEVVNELRNWGVWYTNTLGLDGFRIDAVKHIKYSFTRDWINHVRSATGKNMFAVAEFLKNDLGAIENYLQKTNWNHSVFDVPLHYNLYNASKSGGNYDMRNIFNGTVVQRHPSHAVTFVDNHDSQPEEALESFVEEWFKPLAYALTLTREQGYPSVFYGDYYGIPTHGVPAMRSKIDPILEARQKYAYGPQHDYLDHPDVIGWTREGDSSHPKSGLATLITDGPGGSKRMYAGLKNAGETWYDITGNRSDTVKIGSDGWGEFHVNDGSVSIYVQK

SEQ ID NO: 40141 - protein, 478 aa, Bacillus sp.
NGTMMQYFEWYLPNDGNHWNRLNSDASNLKSKGITAVWIPPAWKGASQNDVGYGAYDLYDLGEFNQKGTVRTKYGTRSQLQAAVTSLKNNGIQVYGDVVMNHKGGADATEMVRAVEVNPNNRNQEVTGEYTIEAWTRFDFPGRGNTHSSFKWRWYHFDGVDWDQSRRLNNRIYKFRGKAWDWEVDTEFGNYDYLMYADYDMDHPEVVNELRNWGVWYTNTLGLDGFRIDAVKHIKYSFTRDWINHVRSATGKNMFAVAEFWKNDLGAIENYLQKTNWNHSVFDVPLHYNLYNASKSGGNYDMRNIFNGTVVQRHPSHAVTFVDNHDSQPEEALESFVEEWFMPLAYALTLTREQGYPSVFYGDYYGIPTHGVPAMRSKIDPILEARQKYAYGPQHDYLDHPDVIGWTREGDSSHPKSGLATLITDGPGGSKRMYAGLKNAGETWYDITGNRSDTVKIGSDGWGEFHVNDGSVSIYVQK

SEQ ID NO: 40142 - protein, 478 aa, Bacillus sp.
NGTMMQYFEWYLPNDGNHWNRLNSDASNLKSKGITAVWIPPAWKATSQNDVGYGAYDLYDLGEFNQKGTVRTKYGTRSQLQAAVTSLKNNGIQVYGDVVMNHKGGADATEMVRAVEVNPNNRNQEVTGEYTIEAWTRFDFPGRGNTHSSFKWRWYHFDGVDWDQSRELNNRIYKFRGKAWDWEVDTEFGNYDYLMYADYDMDHPEVVNELRNWGVWYTNTLGLDGFRIDAVKHIKYSFTRDWINHVRSATGKNMFAVAEFWKNDLGAIENYLQKTNWNHSVFDVPLHYNLYNASKSGGNYDMRNIFNGTVVQRHPSHAVTFVDNHDSQPEEALESFVEEWFKPLAYALTLTREQGYPSVFYGDYYGIPTHGVPAMRSKIDPILEARQKYAYGPQHDYLDHPDVIGWTREGDSSHPKSGLATLITDGPGGSKRMYAGLKNAGETWYDITGNRSDTVKIGSDGWGEFHVNDGSVSIYVQK

SEQ ID NO: 40143 - protein, 478 aa, Bacillus sp.
NGTMMQYFEWYLPNDGNHWNRLNSDASNLKSKGITAVWIPPAWKATSQNDVGYGAYDLYDLGEFNQKGTVRTKYGTRSQLQAAVTSLKNNGIQVYGDVVMNHKGGADATEMVDAVEVNPNNRNQEVTGEYTIEAWTRFDFPGRGNTHSSFKWRWYHFDGVDWDQSRNVNNRIYKFRGKAWDWEVDTEFGNYDYLMYADYDMDHPEVVNELRNWGVWYTNTLGLDGFRIDAVKHIKYSFTRDWINHVRSATGKNMFAVAEFWKNDLGAIENYLQKTNWNHSVFDVPLHYNLYNASKSGGNYDMRNIFNGTVVQRHPSHAVTFVDNHDSQPEEALESFVEEWFKPLAYALTLTREQGYPSVFYGDYYGIPTHGVPAMRSKIDPILEARQKYAYGPQHDYLDHPDVIGWTREGDSSHPKSGLATLITDGPGGSKRMYAGLKNAGETWYDITGNRSDTVKIGSDGWGEFHVNDGSVSIYVQK

SEQ ID NO: 40144 - protein, 478 aa, Bacillus sp.
NGTMMQYFEWYLPNDGNHWNRLNSDASNLKSKGITAVWIPPAWKAASQNDVGYGAYDLYDLGEFNQKGTVRTKYGTRSQLQAAVTSLKNNGIQVYGDVVMNHKGGADATEMVRAVEVNPNNRNQEVTGEYTIEAWTRFDFPGRGNTHSSFKWRWYHFDGVDWDQSRSLHNRIYKFRGKAWDWEVDTEFGNYDYLMYADYDMDHPEVVNELRNWGVWYTNTLGLDGFRIDAVKHIKYSFTRDWINHVRSATGKNMFAVAEFWKNDLGAIENYLQKTNWNHSVFDVPLHYNLYNASKSGGNYDMRNIFNGTVVQRHPSHAVTFVDNHDSQPEEALESFVEEWFKPLAYALTLTREQGYPSVFYGDYYGIPTHGVPAMRSKIDPILEARQKYAYGPQHDYLDHPDVIGWTREGDSSHPKSGLATLITDGPGGSKRMYAGLKNAGETWYDITGNRSDTVKIGSDGWGEFHVNDGSVSIYVQK

SEQ ID NO: 40145 - protein, 478 aa, Bacillus sp.
NGTMMQYFEWYLPNDGNHWNRLNSDASNLKSKGITAVWIPPAWKATSQNDVGYGAYDLYDLGEFNQKGTVRTKYGTRSQLQAAVTSLKNNGIQVYGDVVMNHKGGADATEMVRAVEVNPNNRNQEVTGEYTIEAWTRFDFPGRGNTHSSFKWRWYHFDGVDWDQSRQFTNRIYKFRGKAWDWEVDTEFGNYDYLMYADYDMDHPEVVNELRNWGVWYTNTLGLDGFRIDAVKHIKYSFTRDWINHVRSATGKNMFAVAEFWKNDLGAIENYLQKTNWNHSVFDVPLHYNLYNASKSGGNYDMRNIFNGTVVQRHPSHAVTFVDNHDSQPEEALESFVEEWFKPLAYALTLTREQGYPSVFYGDYYGIPTHGVPAMRSKIDPILEARQKYAYGPQHDYLDHPDVIGWTREGDSSHPKSGLATLITDGPGGSKRMYAGLKNAGETWYDITGNRSDTVKIGSDGWGEFHVNDGSVSIYVQK

SEQ ID NO: 40146 - protein, 478 aa, Bacillus sp.
NGTMMQYFEWYLPNDGNHWNRLNSDASNLKSKGITAVWIPPAWKAASQNDVGYGAYDLYDLGEFNQKGTVRTKYGTRSQLQAAVTSLKNNGIQVYGDVVMNHKGGADATEMVRAVEVNPNNRNQEVTGEYTIEAWTRFDFPGRGNTHSSFKWRWYHFDGVDWDQSREFNNRIYKFRGKAWDWEVDTEFGNYDYLMYADYDMDHPEVVNELRNWGVWYTNTLGLDGFRIDAVKHIKYSFTRDWINHVRSATGKNMFAVAEFWKNDLGAIENYLQKTNWNHSVFDVPLHYNLYNASKSGGNYDMRNIFNGTVVQRHPSHAVTFVDNHDSQPEEALESFVEEWFKPLAYALTLTREQGYPSVFYGDYYGIPTHGVPAMRSKIDPILEARQKYAYGPQHDYLDHPDVIGWTREGDSSHPKSGLATLITDGPGGSKRMYAGLKNAGETWYDITGNRSDTVKIGSDGWGEFHVNDGSVSIYVQK

SEQ ID NO: 40147 - protein, 478 aa, Bacillus sp.
NGTMMQYFEWYLPNDGNHWNRLNSDASNLKSKGITAVWIPPAWKAASQNDVGYGAYDLYDLGEFNQKGTVRTKYGTRSQLQAAVTSLKNNGIQVYGDVVMNHKGGADATEMVRAVEVNPNNRNQEVTGEYTIEAWTRFDFPGRGNTHSSFKWRWYHFDGVDWDQSRDLQNRIYKFRGKAWDWEVDTEFGNYDYLMYADYDMDHPEVVNELRNWGVWYTNTLGLDGFRIDAVKHIKYSFTRDWINHVRSATGKNMFAVAEFWKNDLGAIENYLQKTNWNHSVFDVPLHYNLYNASKSGGNYDMRNIFNGTVVQRHPSHAVTFVDNHDSQPEEALESFVETWFKPLAYALTLTREQGYPSVFYGDYYGIPTHGVPAMRSKIDPILEARQKYAYGPQHDYLDHPDVIGWTREGDSSHPKSGLATLITDGPGGSKRMYAGLKNAGETWYDITGNRSDTVKIGSDGWGEFHVNDASVSIYVQK

SEQ ID NO: 40148 - protein, 478 aa, Bacillus sp.
NGTMMQYFEWYLPNDGNHWNRLNSDASNLKSKGITAVWIPPAWKGASQNDVGYGAYDLYDLGEFNQKGTVRTKYGTRSQLQAAVTSLKNNGIQVYGDVVMNHKGGADATEMVRAVEVNPNNRNQEVTGEYTIEAWTRFDFPGRGNTHSSFKWRWYHFDGVDWDQSRRLNNRIYLFRGKAWDWEVDTEFGNYDYLMYADYDMDHPEVVNELRNWGVWYTNTLGLDGFRIDAVKHIKYSFTRDWINHVRSATGKNMFAVAEFWKNDLGAIENYLQKTNWNHSVFDVPLHYNLYNASKSGGNYDMRNIFNGTVVQRHPSHAVTFVDNHDSQPEEALESFVEEWFKPLAYALTLTREQGYPSVFYGDYYGIPTHGVPAMRSKIDPILEARQKYAYGPQHDYLDHPDVIGWTREGDSSHPKSGLATLITDGPGGSKRMYAGLKNAGETWYDITGNRSDTVKIGSDGWGEFHVNDGSVSIYVQK

SEQ ID NO: 40149 - protein, 478 aa, Bacillus sp.
NGTMMQYFEWYLPNDGNHWNRLNSDASNLKSKGITAVWIPPAWKAVSQNDVGYGAYDLYDLGEFNQKGTVRTKYGTRSQLQAAVTSLKNNGIQVYGDVVMNHKGGADATEMVRAVEVNPNNRNQEVTGEYTIEAWTRFDFPGRGNTHSSFKWRWYHFDGVDWDQSRRFDNRIYKFRGKAWDWEVDTEFGNYDYLMYADYDMDHPEVVNELRNWGVWYTNTLGLDGFRIDAVKHIKYSFTRDWINHVRSATGKNMFAVAEFWKNDLGAIENYLQKTNWNHSVFDVPLHYNLYNASKSGGNYDMRNIFNGTVVQRHPSHAVTFVDNHDSQPEEALESFVEEWFKPLAYALTLTREQGYPSVFYGDYYGIPTHGVPAMRSKIDPILEARQKYAYGPQHDYLDHPDVIGWTREGDSSHPKSGLATLITDGPGGSKRMYAGLKNAGETWYDITGNRSDTVKIGSDGWGEFHVNDGSVSIYVQK

SEQ ID NO: 40150 - protein, 478 aa, Bacillus sp.
NGTMMQYFEWYLPNDGNHWNRLNSDASNLKSKGITAVWIPPAWKGASQNDVGYGAYDLYDLGEFNQKGTVRTKYGTRSQLQAAVTSLKNNGIQVYGDVVMNHKGGADATEMVRAVEVNPNNRNQEVTGEYTIEAWTRFDFPGRGNTHSSFKWRWYHFDGVDWDQSRRLNNRIYKFRGKAWDWEVDTEAGFYDYLMYADIDMDHPEVVNELRNWGVWYTNTLGLDGFRIDAVKHIKYSFTRDWINHVRSATGKNMFAVAEFWKNDLGAIENYLQKTNWNHSVFDVPLHYNLYNASKSGGNYDMRNIFNGTVVQRHPSHAVTFVDNHDSQPEEALESFVEEWFKPLAYALTLTREQGYPSVFYGDYYGIPTHGVPAMRSKIDPILEARQKYAYGPQHDYLDHPDVIGWTREGDSSHPKSGLATLITDGPGGSKRMYAGLKNAGETWYDITGNRSDTVKIGSDGWGEFHVNDGSVSIYVQK

SEQ ID NO: 40151 - protein, 478 aa, Bacillus sp.
NGTMMQYFEWYLPNDGNHWNRLNSDASNLKSKGITAVWIPPAWKAASQNDVGYGAYDLYDLGEFNQKGTVRTKYGTRSQLQAAVTSLKNNGIQVYGDVVMNHKGGADATEMVRAVEVNPNNRNQEVTGEYTIEAWTRFDFPGRGNTHSSFKWRWYHFDGVDWDQSREVTNRIYKFRGKAWDWEVDTEFGNYDYLMYADYDMDHPEVVNELRNWGVWYTNTLGLDGFRIDAVKHIKYSFTRDWINHVRSATGKNMFAVAEFWKNDLGAIENYLQKTNWNHSVFDVPLHYNLYNASKSGGNYDMRNIFNGTVVQRHPSHAVTFVDNHDSQPEEALESFVEEWFKPLAYALTLTREQGYPSVFYGDYYGIPTHGVPAMRSKIDPILEARQKYAYGPQHDYLDHPDVIGWTREGDSSHPKSGLATLITDGPGGSKRMYAGLKNAGETWYDITGNRSDTVKIGSDGWGEFHVNDGSVSIYVQK

SEQ ID NO: 40152 - protein, 478 aa, Bacillus sp.
NGTMMQYFEWYLPNDGNHWNRLNSDASNLKSKGITAVWIPPAWKGASQNDVGYGAYDLYDLGEFNQKGTVRTKYGTRSQLQAAVTSLKNNGIQVYGDVVMNHKGGADATEMVRAVEVNPNNRNQEVTGEYTIEAWTRFDFPGRGNTHSSFKWRWYHFDGVDWDQSRRLNNRIYKFRGKAWDWEVDTEFGNYDYLMYADYDMDHPEVVNELRNWGVWYTNTLGLDGFRIDAVKHIKYSFTRDWINHVRSATGKNMFAVAEFWKNDLGAIENYLQKTNWNHSVFDVPLHYNLYNASKSGGNYDMRNIFNGTVVQRHPSHAVTFVDNHDSQPEEALESFVETWFKPLAYALTLTREQGYPSVFYGDYYGIPTHGVPAMRSKIDPILEARQKYAYGPQHDYLDHPDVIGWTREGDSSHPKSGLATLITDGPGGSKRMYAGLKNAGETWYDITGNRSDTVKIGSDGWGEFHVNGTSVSIYVQK

SEQ ID NO: 40153 - protein, 478 aa, Bacillus sp.
NGTMMQYFEWYLPNDGNHWNRLNSDASNLKSKGITAVWIPPAWKGASQNDVGYGAYDLYDLGEFNQKGTVRTKYGTRSQLQAAVTSLKNNGIQVYGDVVMNHKGGADATEMVRAVEVNPNNRNQEVTGEYTIEAWTRFDFPGRGNTHSSFKWRWYHFDGVDWDQSRRLNNRIYKFRGKAWDWEVDTEFGNYDYLMYADYDMDHPEVVNELRNWGVWYTNTLGLDGFRIDAVKHIKYSFTRDWINHVRSATGKNMFAVAEFWKNDLGAIENYLQKTNWNHSVFDVPLHYNLYNASKSGGNYDMRNIFNGTVVQRLPSHAVTFVDNHDSQPEEALESFVEEWFKPLAYALTLTREQGYPSVFYGDYYGIPTHGVPAMRSKIDPILEARQKYAYGPQHDYLDHPDVIGWTREGDSSHPKSGLATLITDGPGGSKRMYAGLKNAGETWYDITGNRSDTVKIGSDGWGEFHVNDGSVSIYVQK

SEQ ID NO: 40154 - protein, 478 aa, Bacillus sp.
NGTMMQYFEWYLPNDGNHWNRLNSDASNLKSKGITAVWIPPAWKGASQNDVGYGAYDLYDLGEFNQKGTVRTKYGTRSQLQAAVTSLKNNGIQVYGDVVMNHKGGADATEMVRAVEVNPNNRNQEVTGEYTIEAWTRFDFPGRGNTHSSFKWRWYHFDGVDWDQSRRLNNRIYKFRGKAWDWEVDTEFGNYDYLMYADYDMDHPEVVNELRNWGVWYTNTLGLDGFRIDAVKHIKYSFTRDWINHVRSATGKNMFAVAEFWKNDLGAIENYLQKTNWNHSVFDVPLHYNLYNASQSGGNYDMRNIFNGTVVQRHPSHAVTFVDNHDSQPEEALESFVDEWFKPLAYALTLTREQGYPSVFYGDYYGIPTHGVPAMRSKIDPILEARQKYAYGPQHDYLDHPDVIGWTREGDSSHPKSGLATLITDGPGGSKRMYAGLKNAGETWYDITGNRSDTVKIGSDGWGEFHVNGGSVSIYVQK

SEQ ID NO: 40155 - protein, 478 aa, Bacillus sp.
NGTMMQYFEWYLPNDGNHWNRLNSDASNLKSKGITAVWIPPAWKGASQNDVGYGAYDLYDLGEFNQKGTVRTKYGTRSQLQAAVTSLKNNGIQVYGDVVMNHKGGADATEMVRAVEVNPNNRNQEVTGEYTIEAWTRFDFPGRGNTHSSFKWRWYHFDGVDWDQSRRLNNRIYKFRGKAWDWEVDTEFGNYDYLMYADYDMDHPEVVNELRNWGVWYTNTLGLDGFRIDAVKHIKYSFTRDWINHVRSATGKNMFAVAEFWKNDLGAIENYLQKTNWNHSVFDVPLHYNLYNASKSGGNYDMRNIFNGTVVQRHPSHAVTFVDNHDSQPEEALESFVEEWFKPHAYALTLTREQGYPSVFYGDYYGIPTHGVPAMRSKIDPILEARQKYAYGPQHDYLDHPDVIGWTREGDSSHPKSGLATLITDGPGGSKRMYAGLKNAGETWYDITGNRSDTVKIGSDGWGEFHVNDGSVSIYVQK

SEQ ID NO: 40156 - protein, 478 aa, unidentified
NGTMMQYFEWYLPNDGNHWNRLRSDASNLKDKGISAVWIPPAWKGASQNDVGYGAYDLYDLGEFNQKGTIRTKYGTRNQLQAAVNALKSNGIQVYGDVVMNHKGGADATEMVKAVEVNPNNRNQEVSGEYTIEAWTKFDFPGRGNTHSNFKWRWYHFDGVDWDQSRKLNNRIYKFRGKGWDWEVDTEFGNYDYLMYADIDMDHPEVVNELRNWGVWYTNTLGLDGFRIDAVKHIKYSFIRDWINHVRSATGKNMFAVAEFWKNDLGAIENYLNKTNWNHSVFDVPLHYNLYNASKSGGNYDMRQIFNGTVVQKHPMHAVTFVDNHDSQPEEALESFVEEWFKPLAYALTLTREQGYPSVFYGDYYGIPTHGVPAMKSKIDPILEARQKYAYGRQHDYLDHPDVIGWTREGDSSHPKSGLATLITDGPGGSKRMYAGLKNAGETWYDITGNRSDTVKIGSDGWGEFHVNDGSVSIYVQK

SEQ ID NO: 40157 - protein, 478 aa, Synthetic construct
NGTMMQYFEWYLPNDGNHWNRLNSDASNLKSKGITAVWIPPAWKGASQNDVGYGAYDLYDLGEFNQKGTVRTKYGTRSQLQAAVTSLKNNGIQVYGDVVMNHKGGADATEMVRAVEVNPNNRNQEVTGEYTIEAWTRFDFPGRGNTHSSFKWRWYHFDGVDWDQSRRLNNRIYKFRSKEWDWEVDTENGNYDYLMYADIDMDHPEVVNELRNWGVWYTNTLGLDGFRIDAVKHIKYSFTRDWINHVRSATGKNMFAVAEFWKNDLGAIENYLQKTNWNHSVFDVPLHYNLYNASKSGGNYDMRNIFNGTVVQRHPSHAVTFVDNHDSQPEEALESFVEEWFKPLAYALTLTREQGYPSVFYGDYYGIPTHGVPAMRSKIDPILEARQKYAYGPQHDYLDHPDVIGWTREGDSSHPKSGLATLITDGPGGSKRMYAGLKNAGETWYDITGNRSDTVKIGSDGWGEFHVNDGSVSIYVQK

SEQ ID NO: 40158 - protein, 478 aa, Bacillus sp.
NGTMMQYFEWYLPNDGNHWNRLNSDASNLKSKGITAVWIPPAWKAASQNDVGYGAYDLYDLGEFNQKGTVRTKYGTRSQLQAAVTSLKNNGIQVYGDVVMNHKGGADATEMVRAVEVNPNNRNQEVTGEYTIEAWTRFDFPGRGNTHSSFKWRWYHFDGVDWDQSRRTNNRIYKFRGKAWDWEVDTEFGNYDYLMYADYDMDHPEVVNELRNWGVWYTNTLGLDGFRIDAVKHIKYSFTRDWINHVRSATGKNMFAVAEFWKNDLGAIENYLQKTNWNHSVFDVPLHYNLYNASKSGGNYDMRNIFNGTVVQRHPSHAVTFVDNHDSQPEEALESFVEEWFKPLAYALTLTREQGYPSVFYGDYYGIPTHGVPAMRSKIDPILEARQKYAYGPQHDYLDHPDVIGWTREGDSSHPKSGLATLITDGPGGSKRMYAGLKNAGETWYDITGNRSDTVKIGSDGWGEFHVNDGSVSIYVQK

SEQ ID NO: 40159 - protein, 478 aa, Bacillus sp.
NGTMMQYFEWYLPNDGNHWNRLNSDASNLKSKGITAVWIPPAWKGASQNDVGYGAYDLYDLGEFNQKGTVRTKYGTRSQLQAAVTSLKNNGIQVYGDVVMNHKGGADATEMVRAVEVNPNNRNQEVTGEYTIEAWTRFDFPGRGNTHSSFKWRWYHFDGVDWDQSRRLNNRIYKFRGKAWDWEVDTEFGNYDYLMYADYDMDHPEVVNELRNWGVWYTNTLGLDGFRIDAVKHIKYSFTRDWINHVRSATGKNMFAVAEFWKNDLGAIENYLQKTNWNHSVFDVPLHYNLYNASQSAGNYDMRNIFNGTVVQRHPSHAVTFVDNHDSQPEEALESFVETWFKPLAYALTLTREQGYPSVFYGDYYGIPTHGVPAMRSKIDPILEARQKYAYGPQHDYLDHPDVIGWTREGDSSHPKSGLATLITDGPGGSKRMYAGLKNAGETWYDITGNRSDTVKIGSDGWGEFHVNDKSVSIYVQK

SEQ ID NO: 40160 - protein, 478 aa, Bacillus sp.
NGTMMQYFEWYLPNDGNHWNRLNSDASNLKSKGITAVWIPPAWKGASQNDVGYGAYDLYDLGEFNQKGTVRTKYGTRSQLQAAVTSLKNNGIQVYGDVVMNHKGGADATEMVRAVEVNPNNRNQEVTGEYTIEAWTRFDFPGRGNTHSSFKWRWYHFDGVDWDQSRRLDNRIYKFRGKAWDWEVDTEFGNYDYLMYVDYDMDHPEVVNELRNWGVWYTNTLGLDGFRIDAVKHIKYSFTRDWINHVRSATGKNMFAVAEFWKNDLGAIENYLQKTNWNHSVFDVPLHYNLYNASKSGGNYDMRNIFNGTVVQRHPSHAVTFVDNHDSQPEEALESFVEEWFKPLAYALTLTREQGYPSVFYGDYYGIPTHGVPAMRSKIDPILEARQKYAYGPQHDYLDHPDVIGWTREGDSSHPKSGLATLITDGPGGSKRMYAGLKNAGETWYDITGNRSDTVKIGSDGWGEFHVNDGSVSIYVQK

SEQ ID NO: 40161 - protein, 478 aa, Bacillus sp.
NGTMMQYFEWYLPNDGNHWNRLNSDASNLKSKGITAVWIPPAWKATSQNDVGYGAYDLYDLGEFNQKGTVRTKYGTRSQLQAAVTSLKNNGIQVYGDVVMNHKGGADATEMVRAVEVNPNNRNQEVTGEYTIEAWTRFDFPGRGNTHSSFKWRWYHFDGVDWDQSRELTNRIYKFRGKAWDWEVDTEFGNYDYLMYADYDMDHPEVVNELRNWGVWYTNTLGLDGFRIDAVKHIKYSFTRDWINHVRSATGKNMFAVAEFWKNDLGAIENYLQKTNWNHSVFDVPLHYNLYNASKSGGNYDMRNIFNGTVVQRHPSHAVTFVDNHDSQPEEALESFVEEWFKPLAYALTLTREQGYPSVFYGDYYGIPTHGVPAMRSKIDPILEARQKYAYGPQHDYLDHPDVIGWTREGDSSHPKSGLATLITDGPGGSKRMYAGLKNAGETWYDITGNRSDTVKIGSDGWGEFHVNDGSVSIYVQK

SEQ ID NO: 40162 - protein, 478 aa, Bacillus sp.
NGTMMQYFEWYLPNDGNHWNRLNSDASNLKSKGITAVWIPPAWKGASQNDVGYGAYDLYDLGEFNQKGTVRTKYGTRSQLQAAVTSLKNNGIQVYGDVVMNHKGGADATEMVRAVEVNPNNRNQEVTGEYTIEAWTRFDFPGRGNTHSSFKWRWYHFDGVDWDQSRRLNNRIYKFRGKAWDWEVDTEFGNYDYLMYADYDMDHPEVVNELRNWGVWYTNTLGLDGFRIDAVKHIKYSFTRDWINHVRSATGKNMFAVAEFWKNDLGAIENYLQKTNWNHSVFDVPLHYNLYNASKSGGNYDMRNIFNGTVVQSHPMQAVTFVDNHDSQPEEALESFVEEWFKPLAYALTLTREQGYPSVFYGDYYGIPTHGVPAMRSKIDPILEARQKYAYGPQHDYLDHPDVIGWTREGDSSHPKSGLATLITDGPGGSKRMYAGLKNAGETWYDITGNRSDTVKIGSDGWGEFHVNDGSVSIYVQK

SEQ ID NO: 40163 - protein, 478 aa, Bacillus sp.
NGTMMQYFEWYLPNDGNHWNRLNSDASNLKSKGITAVWIPPAWKGASQNDVGYGAYDLYDLGEFNQKGTVRTKYGTRSQLQAAVTSLKNNGIQVYGDVVMNHKGGADATEMVRAVEVNPNNRNQEVTGEYTIEAWTRFDFPGRGNTHSSFKWRWYHFDGVDWDQSERLNNRIYKFRGKAWDWEVDTEFGNYDYLMYADYDMDHPEVVNELRNWGVWYTNTLGLDGFRIDAVKHIKYSFTRDWINHVRSATGKNMFAVAEFWKNDLGAIENYLQKTNWNHSVFDVPLHYNLYNASKSGGNYDMRNIFNGTVVQRHPSHAVTFVDNHDSQPEEALESFVEEWFKPLAYALTLTREQGYPSVFYGDYYGIPTHGVPAMRSKIDPILLARQKYAYGPQHDYLDHPDVIGWTREGDSSHPKSGLATLITDGPGGSKRMYAGLKNAGETWYDITGNRSDTVKIGSDGWGEFHVNDGSVSIYVQK

SEQ ID NO: 40164 - protein, 478 aa, Bacillus sp.
NGTMMQYFEWYLPNDGNHWNRLNSDASNLKSKGITAVWIPPAWKGASQNDVGYGAYDLYDLGEFNQKGTVRTKYGTRSQLQAAVTSLKNNGIQVYGDVVMNHKGGADATEMVRAVEVNPNNRNQEVTGEYTIEAWTRFDFPGRGNTHSSFKWRWYHFDGVDWDQSRRLNNRIYKFRGKAWDWEVDTEFGNYDYLMYADYDMDHPEVVNELRNWGVWYTNTLGLDGFRIDAVKHIKYSFTRDWINHVRSATGKNMFAVAEFWKNDLGAIENYLQKTNWNHSVFDVPLHYNLYNASKSGGNYDMRNIFNGTVVQRHPSHAVTFVDNHDSQPEEALESFVEEWFKPLAYALTLTREQGYPSVFYGDYYGIPTHGVPAMRSKIDPILEARQKYAYGPQHDYLDHHDVIGWTREGDSSHPKSGLATLITDGPGGSKRMYAGLKNAGETWYDITGNRSDTVKIGSDGWGEFHVNDGSVSIYVQK

SEQ ID NO: 40165 - protein, 478 aa, Bacillus sp.
NGTMMQYFEWYLPNDGNHWNRLNSDASNLKSKGITAVWIPPAWKAASQNDVGYGAYDLYDLGEFNQKGTVRTKYGTRSQLQAAVTSLKNNGIQVYGDVVMNHKGGADATEMVDAVEVNPNNRNQEVTGEYTIEAWTRFDFPGRGNTHSSFKWRWYHFDGVDWDQSRQITNRIYKFRGKAWDWEVDTEFGNYDYLMYTDYDMDHPEVVNELRNWGVWYTNTLGLDGFRIDAVKHIKYSFTRDWINHVRSATGKNMFAVAEFWKNDLGAIENYLQKTNWNHSVFDVPLHYNLYNASKSGGNYDMRNIFNGTVVQRHPSHAVTFVDNHDSQPEEALESFVEEWFKPLAYALTLTREQGYPSVFYGDYYGIPTHGVPAMRSKIDPILEARQKYAYGPQHDYLDHPDVIGWTREGDSSHPKSGLATLITDGPGGSKRMYAGLKNAGETWYDITGNRSDTVKIGSDGWGEFHVNDGSVSIYVQK

SEQ ID NO: 40166 - protein, 478 aa, Synthetic construct
NGTMMQYFEWYLPNDGNHWNRLNSDASNLKSKGITAVWIPPAWKGASQNDVGYGAYDLYDLGEFNQKGTVRTKYGTRSQLQAAVTSLKNNGIQVYGDVVMNHKGGADATEMVRAVEVNPNNRNQEVTGEYTIEAWTRFDFPGRGNTHSSFKWRWYHFDGVDWDQSRRLNNRIYKFRVKKWDWEVDTENGNYDYLMYADIDMDHPEVVNELRNWGVWYTNTLGLDGFRIDAVKHIKYSFTRDWINHVRSATGKNMFAVAEFWKNDLGAIENYLQKTNWNHSVFDVPLHYNLYNASKSGGNYDMRNIFNGTVVQRHPSHAVTFVDNHDSQPEEALESFVEEWFKPLAYALTLTREQGYPSVFYGDYYGIPTHGVPAMRSKIDPILEARQKYAYGPQHDYLDHPDVIGWTREGDSSHPKSGLATLITDGPGGSKRMYAGLKNAGETWYDITGNRSDTVKIGSDGWGEFHVNDGSVSIYVQK

SEQ ID NO: 40167 - protein, 478 aa, Bacillus sp.
NGTMMQYFEWYLPNDGNHWNRLNSDASNLKSKGITAVWIPPAWKGASQNDVGYGAYDLYDLGEFNQKGTVRTKYGTRSQLQAAVTSLKNNGIQVYGDVVMNHKGGADATEMVRAVEVNPNNRNQEVTGEYTIEAWTRFDFPGRGNTHSSFKWRWYHFDGVDWDQSRRLNNRIYKFRGKAWDWEVDTEFGNYDYLMYADYDMDHPEVVNELRNWGVWYTNTLGLDGFRIDAVKHIKYSFTRDWINHVRSATGKNMFAVAEFWKNDLGAIENYLQKTNWNHSVFDVPLHYNLYNASKSGGNYDMRNIFNGTVVQRHPSHAVTFVDNHDSQPEEALESFVDEWFKPLAYALTLTREQGYPSVFYGDYYGIPTHGVPAMRSKIDPILEARQKYAYGPQHDYLDHPDVIGWTREGDSSHPKSGLATLITDGPGGSKRMYAGLKNAGETWYDITGNRSDTVKIGSDGWGEFHVNGGSVSIYVQK

SEQ ID NO: 40168 - protein, 478 aa, Bacillus sp.
NGTMMQYFEWYLPNDGNHWNRLNSDASNLKSKGITAVWIPPAWKGASQNDVGYGAYDLYDLGEFNQKGTVRTKYGTRSQLQAAVTSLKNNGIQVYGDVVMNHKGGADATEMVRAVEVNPNNRNQEVTGEYTIEAWTRFDFPGRGNTHSSFKWRWYHFDGVDWDQSRRLNNRIYKFRGKAWDWEVDTEFGNYDYLMYADYDMDHPEVVNELRNWGVWYTNTLGLDGFRIDAVKHIKYSFTRDWINHVRSATGKNMFAVAEFWKNDLGAIENYLQKTNWNHSVFDVPLHYNLYNASKSGGNYDMRNIFNGTVVQRHPSHAVTFVDNHDSQPEEALESFVEEWFKPLAYALTLTREQGYPSVFYGDYYGIPTHGVPAMRSKIDPILEARQKYAYGPQHDYLDHPDVIGWTREGDSSHPPSGLATLITDGPGGSKRMYAGLKNAGETWYDITGNRSDTVKIGSDGWGEFHVNDGSVSIYVQK

SEQ ID NO: 40169 - protein, 478 aa, Bacillus sp.
NGTMMQYFEWYLPNDGNHWNRLNSDASNLKSKGITAVWIPPAWKGASQNDVGYGAYDLYDLGEFNQKGTVRTKYGTRSQLQAAVTSLKNNGIQVYGDVVMNHKGGADATEMVRAVEVNPNNRNQEVTGEYTIEAWTRFDFPGRGNTHSSFKWRWYHFDGVDWDQSRELDNRIYKFRGKAWDWEVDTEFGNYDYLMYTDYDMDHPEVVNELRNWGVWYTNTLGLDGFRIDAVKHIKYSFTRDWINHVRSATGKNMFAVAEFWKNDLGAIENYLQKTNWNHSVFDVPLHYNLYNASKSQGNYDMRNIFNGTVVQRHPSHAVTFVDNHDSQPEEALESFVDTWFKPLAYALTLTREQGYPSVFYGDYYGIPTHGVPAMRSKIDPILLARQKYAYGPQHDYLDHPDVIGWTREGDSSHPKSGLATLITDGPGGSKRMYAGLKNAGETWYDITGNRSDTVKIGSDGWGEFHVNDGSVSIYVQK

SEQ ID NO: 40170 - protein, 478 aa, Bacillus sp.
NGTMMQYFEWYLPNDGNHWNRLNSDASNLKSKGITAVWIPPAWKAASQNDVGYGAYDLYDLGEFNQKGTVRTKYGTRSQLQAAVTSLKNNGIQVYGDVVMNHKGGADATEMVRAVEVNPNNRNQEVTGEYTIEAWTRFDFPGRGNTHSSFKWRWYHFDGVDWDQSRNLTNRIYKFRGKAWDWEVDTEFGNYDYLMYADYDMDHPEVVNELRNWGVWYTNTLGLDGFRIDAVKHIKYSFTRDWINHVRSATGKNMFAVAEFWKNDLGAIENYLQKTNWNHSVFDVPLHYNLYNASKSGGNYDMRNIFNGTVVQRHPSHAVTFVDNHDSQPEEALESFVEEWFKPLAYALTLTREQGYPSVFYGDYYGIPTHGVPAMRSKIDPILEARQKYAYGPQHDYLDHPDVIGWTREGDSSHPKSGLATLITDGPGGSKRMYAGLKNAGETWYDITGNRSDTVKIGSDGWGEFHVNDGSVSIYVQK

SEQ ID NO: 40171 - protein, 478 aa, Bacillus sp.
NGTMMQYFEWYLPNDGNHWNRLNSDASNLKSKGITAVWIPPAWKGASQNDVGYGAYDLYDLGEFNQKGTVRTKYGTRSQLQAAVTSLKNNGIQVYGDVVMNHKGGADATEMVRAVEVNPNNRNQEVTGEYTIEAWTRFDFPGRGNTHSSFKWRWYHFDGVDWDQSRRLNNRIYKFRGKAWDWEVDTEFGNYDYLMYADYDMDHPEVVNELRNWGVWYTNTLGLDGFRIDAVKHIKYSFTRDWINHVRSATGKNMFAVAEFWKNDLGAIENYLQKTNWNHSVFDVPLHYNLYNASKSGGNYDMRNIFNGTVVQKHPSHAVTFVDNHDSQPEEALESFVEEWFKPLAYALTLTREQGYPSVFYGDYYGIPTHGVPAMRSKIDPILEARQKYAYGPQHDYLDHPDVIGWTREGDSSHPKSGLATLITDGPGGSKRMYAGLKNAGETWYDITGNRSDTVKIGSDGWGEFHVNDGSVSIYVQK

SEQ ID NO: 40172 - protein, 478 aa, Bacillus sp.
NGTMMQYFEWYLPNDGNHWNRLNSDASNLKSKGITAVWIPPAWKGTSQNDVGYGAYDLYDLGEFNQKGTVRTKYGTRSQLQAAVTSLKNNGIQVYGDVVMNHKGGADATEMVRAVEVNPNNRNQEVTGEYTIEAWTRFDFPGRGNTHSSFKWRWYHFDGVDWDQSRRFQNRIYKFRGKAWDWEVDTEFGNYDYLMYVDYDMDHPEVVNELRNWGVWYTNTLGLDGFRIDAVKHIKYSFTRDWINHVRSATGKNMFAVAEFWKNDLGAIENYLQKTNWNHSVFDVPLHYNLYNASKSGGNYDMRNIFNGTVVQRHPSHAVTFVDNHDSQPEEALESFVEEWFKPLAYALTLTREQGYPSVFYGDYYGIPTHGVPAMRSKIDPILEARQKYAYGPQHDYLDHPDVIGWTREGDSSHPKSGLATLITDGPGGSKRMYAGLKNAGETWYDITGNRSDTVKIGSDGWGEFHVNDGSVSIYVQK

SEQ ID NO: 40173 - protein, 478 aa, Bacillus sp.
NGTMMQYFEWYLPNDGNHWNRLNSDASNLKSKGITAVWIPPAWKGASQNDVGYGAYDLYDLGEFNQKGTVRTKYGTRSQLQAAVTSLKNNGIQVYGDVVMNHKGGADNTEMVRAVEVNPNNRNQEVTGEYTIEAWTRFDFPGRGNTHSSFKWRWYHFDGVDWDQSRRLNNRIYKFRGKAWDWEVDTEFGNYDYLMYADYDMDHPEVVNELRNWGVWYTNTLGLDGFRIDAVKHIKYSFTRDWINHVRSATGKNMFAVAEFWKNDLGAIENYLQKTNWNHSVFDVPLHYNLYNASKSGGNYDMRNIFNGTVVQRHPSHAVTFVDNHDSQPEEALESFVEEWFKPLAYALTLTREQGYPSVFYGDYYGIPTHGVPAMRSKIDPILEARQKYAYGPQHDYLDHPDVIGWTREGDSSHPKSGLATLITDGPGGSKRMYAGLKNAGETWYDITGNRSDTVKIGSDGWGEFHVNDGSVSIYVQK

SEQ ID NO: 40174 - protein, 478 aa, Bacillus sp.
NGTMMQYFEWYLPNDGNHWNRLNSDASNLKSKGITAVWIPPAWKATSQNDVGYGAYDLYDLGEFNQKGTVRTKYGTRSQLQAAVTSLKNNGIQVYGDVVMNHKGGADATEMVRAVEVNPNNRNQEVTGEYTIEAWTRFDFPGRGNTHSSFKWRWYHFDGVDWDQSRQLTNRIYKFRGKAWDWEVDTEFGNYDYLMYADYDMDHPEVVNELRNWGVWYTNTLGLDGFRIDAVKHIKYSFTRDWINHVRSATGKNMFAVAEFWKNDLGAIENYLQKTNWNHSVFDVPLHYNLYNASKSGGNYDMRNIFNGTVVQRHPSHAVTFVDNHDSQPEEALESFVEEWFKPLAYALTLTREQGYPSVFYGDYYGIPTHGVPAMRSKIDPILEARQKYAYGPQHDYLDHPDVIGWTREGDSSHPKSGLATLITDGPGGSKRMYAGLKNAGETWYDITGNRSDTVKIGSDGWGEFHVNDGSVSIYVQK

SEQ ID NO: 40175 - protein, 478 aa, Bacillus sp.
NGTMMQYFEWYLPNDGNHWNRLNSDASNLKSKGITAVWIPPAWKGASQNDVGYGAYDLYDLGEFNQKGTVRTKYGTRSQLQAAVTSLKNNGIQVYGDVVMNHKGGADATEMVRAVEVNPNNRNQEVTGEYTIEAWTRFDFPGRGNTHSSFKWRWYHFDGVDWDQSREFDNRIYKFRGKAWDWEVDTEFGNYDYLMYADYDYDHPESTNEMRNWGVWYTNTLGLDGFRIDAVKHIKYSFTRDWINHVRSATGKNMFAVAEFWKNDLGAIENYLQKTNWNHSVFDVPLHYNLYNASKSGGNYDMRNIFNGTVVQRHPSHAVTFVDNHDSQPEEALESFVEEWFKPLAYALTLTREQGYPSVFYGDYYGIPTHGVPAMRSKIDPILEARQKYAYGPQHDYLDHPDVIGWTREGDSSHPKSGLATLITDGPGGSKRMYAGLKNAGETWYDITGNRSDTVKIGSDGWGEFHVNDGSVSIYVQK

SEQ ID NO: 40176 - protein, 478 aa, Bacillus sp.
NGTMMQYFEWYLPNDGNHWNRLNSDASNLKSKGITAVWIPPAWKGASQNDVGYGAYDLYDLGEFNQKGTVRTKYGTRSQLQAAVTSLKNNGIQVYGDVVMNHKGGADATEMVRAVEVNPNNRNQEVTGEYTIEAWTRFDFPGRGNTHSSFKWRWYHFDGVDFDQSRRLNNRIYKFRGKAWDWEVDTEFGNYDYLMYADYDMDHPEVVNELRNWGVWYTNTLGLDGFRIDAVKHIKYSFTRDWINHVRSATGKNMFAVAEFWKNDLGAIENYLQKTNWNHSVFDVPLHYNLYNASKSGGNYDMRNIFNGTVVQRHPSHAVTFVDNHDSQPEEALESFVEEWFKPLAYALTLTREQGYPSVFYGDYYGIPTHGVPAMRSKIDPILEARQKYAYGPQHDYLDHPDVIGWTREGDSSHPKSGLATLITDGPGGSKRMYAGLKNAGETWYDITGNRSDTVKIGSDGWGEFHVNDGSVSIYVQK

SEQ ID NO: 40177 - protein, 478 aa, Bacillus sp.
NGTMMQYFEWYLPNDGNHWNRLNSDASNLKSKGITAVWIPPAWKGASQNDVGYGAYDLYDLGEFNQKGTVRTKYGTRSQLQAAVTSLKNNGIQVYGDVVMNHKGGADATEMVRAVEVNPNNRNQEVTGEYTIEAWTRFDFPGRGNTHSSFKWRWYHFDGVDWDQSRRLNNRIYLFRGKAWRWEVPTENGNYDYLMYADIDMDHPEVVNELRNWGVWYTNTLGLDGFRIDAVKHIKYSFTRDWINHVRSATGKNMFAVAEFWKNDLGAIENYLQKTNWNHSVFDVPLHYNLYNASKSGGNYDMRNIFNGTVVQRHPSHAVTFVDNHDSQPEEALESFVEEWFKPLAYALTLTREQGYPSVFYGDYYGIPTHGVPAMRSKIDPILEARQKYAYGPQHDYLDHPDVIGWTREGDSSHPKSGLATLITDGPGGSKRMYAGLKNAGETWYDITGNRSDTVKIGSDGWGEFHVNDGSVSIYVQK

SEQ ID NO: 40178 - protein, 478 aa, Bacillus sp.
NGTMMQYFEWYLPNDGNHWNRLNSDASNLKSKGITAVWIPPAWKGASQNDVGYGAYDLYDLGEFNQKGTVRTKYGTRSQLQAAVTSLKNNGIQVYGDVVMNHKGGADATEMVRAVEVNPNNRNQEVTGEYTIEAWTRFDFPGRGNTHSSFKWRWYHFDGVDWDQSRQLTNRIYKFRGKAWDWEVDTEFGNYDYLMYTDYDMDHPEVVNELRNWGVWYTNTLGLDGFRIDAVKHIKYSFTRDWINHVRSATGKNMFAVAEFWKNDLGAIENYLQKTNWNHSVFDVPLHYNLYNASKSGGNYDMRNIFNGTVVQRHPSHAVTFVDNHDSQPEEALESFVEEWFKPLAYALTLTREQGYPSVFYGDYYGIPTHGVPAMRSKIDPILEARQKYAYGPQHDYLDHPDVIGWTREGDSSHPKSGLATLITDGPGGSKRMYAGLKNAGETWYDITGNRSDTVKIGSDGWGEFHVNDGSVSIYVQK

SEQ ID NO: 40179 - protein, 478 aa, Bacillus sp.
NGTMMQYFEWYLPNDGNHWNRLNSDASNLKSKGITAVWIPPAWKAASQNDVGYGAYDLYDLGEFNQKGTVRTKYGTRSQLQAAVTSLKNNGIQVYGDVVMNHKGGADATEMVRAVEVNPNNRNQEVTGEYTIEAWTRFDFPGRGNTHSSFKWRWYHFDGVDWDQSRELTNRIYKFRGKAWDWEVDTEFGNYDYLMYADYDMDHPEVVNELRNWGVWYTNTLGLDGFRIDAVKHIKYSFTRDWINHVRSATGKNMFAVAEFWKNDLGAIENYLQKTNWNHSVFDVPLHYNLYNASKSGGNYDMRNIFNGTVVQRHPSHAVTFVDNHDSQPEEALESFVEEWFKPLAYALTLTREQGYPSVFYGDYYGIPTHGVPAMRSKIDPILEARQKYAYGPQHDYLDHPDVIGWTREGDSSHPKSGLATLITDGPGGSKRMYAGLKNAGETWYDITGNRSDTVKIGSDGWGEFHVNDGSVSIYVQK

SEQ ID NO: 40180 - protein, 478 aa, Bacillus sp.
NGTMMQYFEWYLPNDGNHWNRLNSDASNLKSKGITAVWIPPAWKAASQNDVGYGAYDLYDLGEFNQKGTVRTKYGTRSQLQAAVTSLKNNGIQVYGDVVMNHKGGADATEMVRAVEVNPNNRNQEVTGEYTIEAWTRFDFPGRGNTHSSFKWRWYHFDGVDWDQSRQFNNRIYKFRGKAWDWEVDTEFGNYDYLMYADYDMDHPEVVNELRNWGVWYTNTLGLDGFRIDAVKHIKYSFTRDWINHVRSATGKNMFAVAEFWKNDLGAIENYLQKTNWNHSVFDVPLHYNLYNASKSGGNYDMRNIFNGTVVQRHPSHAVTFVDNHDSQPEEALESFVEEWFKPLAYALTLTREQGYPSVFYGDYYGIPTHGVPAMRSKIDPILEARQKYAYGPQHDYLDHPDVIGWTREGDSSHPKSGLATLITDGPGGSKRMYAGLKNAGETWYDITGNRSDTVKIGSDGWGEFHVNDGSVSIYVQK

SEQ ID NO: 40181 - protein, 478 aa, Bacillus sp.
NGTMMQYFEWYLPNDGNHWNRLNSDASNLKSKGITAVWIPPAWKGASQNDVGYGAYDLYDLGEFNQKGTVRTKYGTRSQLQAAVTSLKNNGIQVYGDVVMNHKGGADATEMVRAVEVNPNNRNQEVTGEYTIEAWTRFDFPGRGNTHSSFKWRWYHFDGVDWDQSRRLNNRIYKFRGKAWDWEVDTEFGNYDYLMYADYDMDHPEVVNELRNWGVWYTNTLGLDGFRIDAVKHIKYSFTRDWINHVRSATGKNMFAVAEFWKNDLGAIENYLQKTNWNHSVFDVPLHYNLYNASNSGGNYDMRNIFNGTVVQRHPSHAVTFVDNHDSQPEEALESFVDEWFKPLAYALTLTREQGYPSVFYGDYYGIPTHGVPAMRSKIDPILEARQKYAYGPQHDYLDHPDVIGWTREGDSSHPKSGLATLITDGPGGSKRMYAGLKNAGETWYDITGNRSDTVKIGSDGWGEFHVNGGSVSIYVQK

SEQ ID NO: 40182 - protein, 478 aa, Bacillus sp.
NGTMMQYFEWYLPNDGNHWNRLNSDASNLKSKGITAVWIPPAWKGASQNDVGYGAYDLYDLGEFNQKGTVRTKYGTRSQLQAAVTSLKNNGIQVYGDVVMNHKGGADATEMVRAVEVNPNNRNQEVTGEYTIEAWTRFDFPGRGNTHSSFKWRWYHFDGVDWDQSRRLNNRIYKFRGKAWDWEVDTEFGNYDYLMYADYDMDHPEVVNELRNWGVWYTNTLGLDGFRIDAVKHIKYSFTRDWINHVRSATGKNMFAVAEFWKNDLGAINNYLQKTNWNHSVFDVPLHYNLYNASKSGGNYDMRNIFNGTVVQRHPSHAVTFVDNHDSQPEEALESFVEEWFKPLAYALTLTREQGYPSVFYGDYYGIPTHGVPAMRSKIDPILEARQKYAYGPQHDYLDHPDVIGWTREGDSSHPKSGLATLITDGPGGSKRMYAGLKNAGETWYDITGNRSDTVKIGSDGWGEFHVNDGSVSIYVQK

SEQ ID NO: 40183 - protein, 478 aa, Bacillus sp.
NGTMMQYFEWYLPNDGNHWNRLNSDASNLKSKGITAVWIPPAWKGASQNDVGYGAYDLYDLGEFNQKGTVRTKYGTRSQLQAAVTSLKNNGIQVYGDVVMNHKGGADATEMVRAVEVNPNNRNQEVTGEYTIEAWTRFDFPGRGNTHSSFKWRWYHFDGVDWDQSRRLNNRIYKFRQKAWDWEVDTEFGNYDYLMYADYDMDHPEVVNELRNWGVWYTNTLGLDGFRIDAVKHIKYSFTRDWINHVRSATGKNMFAVAEFWKNDLGAIENYLQKTNWNHSVFDVPLHYNLYNASKSGGNYDMRNIFNGTVVQRHPSHAVTFVDNHDSQPEEALESFVEEWFKPLAYALTLTREQGYPSVFYGDYYGIPTHGVPAMRSKIDPILEARQKYAYGPQHDYLDHPDVIGWTREGDSSHPKSGLATLITDGPGGSKRMYAGLKNAGETWYDITGNRSDTVKIGSDGWGEFHVNDGSVSIYVQK

SEQ ID NO: 40184 - protein, 478 aa, Bacillus sp.
NGTMMQYFEWYLPNDGNHWNRLNSDASNLKSKGITAVWIPPAWKGASQNDVGYGAYDLYDLGEFNQKGTVRTKYGTRSQLQAAVTSLKNNGIQVYGDVVMNHKGGADATEMVRAVEVNPNNRNQEVTGEYTIEAWTRFDFPGRGNTHSSFKWRWYHFDGVDWDQSRRLNNRIYKFRGKAWDWEVDTEFGNYDYLMYADYDMDHPEVVNELRNWGVWYTNTLGLDGFRIDAVKHIKYSFTRDWINHVRSATGKNMFAVAEFWKNDLGAIENYLQKTNWNHSVFDVPLHYNLYNASKSGGNYDMRNIFNGTVVQRHPSHAVTFVDNHDSQPEEALESFVEEWFKPLAYALTLTREQGYPSVFYGDYYGIPTHGVPAMRSKIDPILEARQKYAYGPQHDYLDHPDVIGWTREGDSSHPTSGLATLITDGPGGSKRMYAGLKNAGETWYDITGNRSDTVKIGSDGWGEFHVNDGSVSIYVQK

SEQ ID NO: 40185 - protein, 478 aa, Bacillus sp.
NGTMMQYFEWYLPNDGNHWNRLNSDASNLKSKGITAVWIPPAWKAASQNDVGYGAYDLYDLGEFNQKGTVRTKYGTRSQLQAAVTSLKNNGIQVYGDVVMNHKGGADATEMVRAVEVNPNNRNQEVTGEYTIEAWTRFDFPGRGNTHSSFKWRWYHFDGVDWDQSRQLNNRIYKFRGKAWDWEVDTEFGNYDYLMYADYDMDHPEVVNELRNWGVWYTNTLGLDGFRIDAVKHIKYSFTRDWINHVRSATGKNMFAVAEFWKNDLGAIENYLQKTNWNHSVFDVPLHYNLYNASKSGGNYDMRNIFNGTVVQRHPSHAVTFVDNHDSQPEEALESFVEEWFKPLAYALTLTREQGYPSVFYGDYYGIPTHGVPAMRSKIDPILEARQKYAYGPQHDYLDHPDVIGWTREGDSSHPKSGLATLITDGPGGSKRMYAGLKNAGETWYDITGNRSDTVKIGSDGWGEFHVNDGSVSIYVQK

SEQ ID NO: 40186 - protein, 478 aa, Bacillus sp.
NGTMMQYFEWYLPNDGNHWNRLNSDASNLKSKGITAVWIPPAWKATSQNDVGYGAYDLYDLGEFNQKGTVRTKYGTRSQLQAAVTSLKNNGIQVYGDVVMNHKGGADATEMVRAVEVNPNNRNQEVTGEYTIEAWTRFDFPGRGNTHSSFKWRWYHFDGVDWDQSRNVNNRIYKFRGKAWDWEVDTEFGNYDYLMYADYDMDHPEVVNELRNWGVWYTNTLGLDGFRIDAVKHIKYSFTRDWINHVRSATGKNMFAVAEFWKNDLGAIENYLQKTNWNHSVFDVPLHYNLYNASKSGGNYDMRNIFNGTVVQRHPSHAVTFVDNHDSQPEEALESFVETWFKPLAYALTLTREQGYPSVFYGDYYGIPTHGVPAMRSKIDPILEARQKYAYGPQHDYLDHPDVIGWTREGDSSHPKSGLATLITDGPGGSKRMYAGLKNAGETWYDITGNRSDTVKIGSDGWGEFHVNDASVSIYVQK

SEQ ID NO: 40187 - protein, 478 aa, Bacillus sp.
NGTMMQYFEWYLPNDGNHWNRLNSDASNLKSKGITAVWIPPAWKGASQNDVGYGAYDLYDLGEFNQKGTVRTKYGTRSQLQAAVTSLKNNGIQVYGDVVMNHKGGADATEMVRAVEVNPNNRNQEVTGEYTIEAWTRFDFPGRGNTHSSFKWRWYHFDGVDWDQSRRLNNRIYKFRGKAWDWEVDTEFGNYDYLMYVDYDMDHPEVVNELRNWGVWYTNTLGLDGFRIDAVKHIKYSFTRDWINHVRSATGKNMFAVAEFWKNDLGAIENYLQKTNWNHSVFDVPLHYNLYNASKSGGNYDMRNIFNGTVVQRHPSHAVTFVDNHDSQPEEALESFVEEWFKPLAYALTLTREQGYPSVFYGDYYGIPTHGVPAMRSKIDPILEARQKYAYGPQHDYLDHPDVIGWTREGDSSHPKSGLATLITDGPGGSKRMYAGLKNAGETWYDITGNRSDTVKIGSDGWGEFHVNDGSVSIYVQK

SEQ ID NO: 40188 - protein, 478 aa, Bacillus sp.
NGTMMQYFEWYLPNDGNHWNRLNSDASNLKSKGITAVWIPPAWKGASQNDVGYGAYDLYDLGEFNQKGTVRTKYGTRSQLQAAVTSLKNNGIQVYGDVVMNHKGGADATEMVRAVEVNPNNRNQEVTGEYTIEAWTRFDFPGRGNTHSSFKWRWYHFDGVDWDQSRRLNNRIYKFRAKAWDWEVDTEFGNYDYLMYADYDMDHPEVVNELRNWGVWYTNTLGLDGFRIDAVKHIKYSFTRDWINHVRSATGKNMFAVAEFWKNDLGAIENYLQKTNWNHSVFDVPLHYNLYNASKSGGNYDMRNIFNGTVVQRHPSHAVTFVDNHDSQPEEALESFVEEWFKPLAYALTLTREQGYPSVFYGDYYGIPTHGVPAMRSKIDPILEARQKYAYGPQHDYLDHPDVIGWTREGDSSHPKSGLATLITDGPGGSKRMYAGLKNAGETWYDITGNRSDTVKIGSDGWGEFHVNDGSVSIYVQK

SEQ ID NO: 40189 - protein, 478 aa, Bacillus sp.
NGTMMQYFEWYLPNDGNHWNRLNSDASNLKSKGITAVWIPPAWKAASQNDVGYGAYDLYDLGEFNQKGTVRTKYGTRSQLQAAVTSLKNNGIQVYGDVVMNHKGGADATEMVRAVEVNPNNRNQEVTGEYTIEAWTRFDFPGRGNTHSSFKWRWYHFDGVDWDQSRDTNNRIYKFRGKAWDWEVDTEFGNYDYLMYADYDMDHPEVVNELRNWGVWYTNTLGLDGFRIDAVKHIKYSFTRDWINHVRSATGKNMFAVAEFWKNDLGAIENYLQKTNWNHSVFDVPLHYNLYNASKSGGNYDMRNIFNGTVVQRHPSHAVTFVDNHDSQPEEALESFVEEWFKPLAYALTLTREQGYPSVFYGDYYGIPTHGVPAMRSKIDPILEARQKYAYGPQHDYLDHPDVIGWTREGDSSHPKSGLATLITDGPGGSKRMYAGLKNAGETWYDITGNRSDTVKIGSDGWGEFHVNDGSVSIYVQK

SEQ ID NO: 40190 - protein, 478 aa, Bacillus sp.
NGTMMQYFEWYLPNDGNHWNRLNSDASNLKSKGITAVWIPPAWKGASQNDVGYGAYDLYDLGEFNQKGTVRTKYGTRSQLQAAVTSLKNNGIQVYGDVVMNHKGGADATEMVRAVEVNPNNRNQEVTGEYTIEAWTRFDFPGRGNTHSSFKWRWYHFDGVDWDQSRRLNNRIYKFRGKAWDWEVDTEFGNYDYLMYADYDMDHPEVVNELRNWGVWYTNTLGLDGFRIDAVKHIKYSFTRDWINHVRSATGKNMFAVAEFWKNDLGAIENYLQKTNWNHSVFDVPLHYNLYNASKSGGNYDMRNIFNGTVVQRHPSHAVTFVDNHDSQPEEALESFVEEWFKPLAYALTLTREQGYPSVFYGDYYGIPTHGVPAMRSKIDPILEARQKYAYGPQHDYLDHPDVIGWTREGDSSHPKSGLATLATDGPGGSKRMYAGLKNAGETWYDITGNRSDTVKIGSDGWGEFHVNDGSVSIYVQK

SEQ ID NO: 40191 - protein, 478 aa, Bacillus sp.
NLTMMQYFEWYLPNDGNHWNRLNSDASNLKSKGITAVWIPPAWKGASQNDVGYGAYDLYDLGEFNQKGTVRTKYGTRSQLQAAVTSLKNNGIQVYGDVVMNHKGGADATEMVRAVEVNPNNRNQEVTGEYTIEAWTRFDFPGRGNTHSSFKWRWYHFDGVDWDQSRRLNNRIYKFRGKAWDWEVDTEFGNYDYLMYADYDMDHPEVVNELRNWGVWYTNTLGLDGFRIDAVKHIKYSFTRDWINHVRSATGKNMFAVAEFWKNDLGAIENYLQKTNWNHSVFDVPLHYNLYNASKSGGNYDMRNIFNGTVVQRHPSHAVTFVDNHDSQPEEALESFVEEWFKPLAYALTLTREQGYPSVFYGDYYGIPTHGVPAMRSKIDPILEARQKYAYGPQHDYLDHPDVIGWTREGDSSHPKSGLATLITDGPGGSKRMYAGLKNAGETWYDITGNRSDTVKIGSDGWGEFHVNDGSVSIYVQK

SEQ ID NO: 40192 - protein, 478 aa, Bacillus sp.
NGTMMQYFEWYLPNDGNHWNRLNSDASNLKSKGITAVWIPPAWKAASQNDVGYGAYDLYDLGEFNQKGTVRTKYGTRSQLQAAVTSLKNNGIQVYGDVVMNHKGGADATEMVRAVEVNPNNRNQEVTGEYTIEAWTRFDFPGRGNTHSSFKWRWYHFDGVDWDQSRQTNNRIYKFRGKAWDWEVDTEFGNYDYLMYADYDMDHPEVVNELRNWGVWYTNTLGLDGFRIDAVKHIKYSFTRDWINHVRSATGKNMFAVAEFWKNDLGAIENYLQKTNWNHSVFDVPLHYNLYNASKSGGNYDMRNIFNGTVVQRHPSHAVTFVDNHDSQPEEALESFVEEWFKPLAYALTLTREQGYPSVFYGDYYGIPTHGVPAMRSKIDPILEARQKYAYGPQHDYLDHPDVIGWTREGDSSHPKSGLATLITDGPGGSKRMYAGLKNAGETWYDITGNRSDTVKIGSDGWGEFHVNDGSVSIYVQK

SEQ ID NO: 40193 - protein, 478 aa, Bacillus sp.
NGTMMQYFEWYLPNDGNHWNRLNSDASNLKSKGITAVWIPPAWKGASQNDVGYGAYDLYDLGEFNQKGTVRTKYGTRSQLQAAVTSLKNNGIQVYGDVVMNHKGGADATEMVRAVEVNPNNRNQEVTGEYTIEAWTRFDFPGRGNTHSSFKWRWYHFDGVDWDQSRRLNNRIYKFRGKAWDWEVDTEFGNYDYLMYADYDMDHPEVVNELRNWGVWYTNTLGLDGFRIDAVKHIKYSFTRDWINHVRSATGKNMFAVAEFWKNDLGAIENYLQKTNWNHSVFDVPLHYNLYNASKSGGNYDMRNIFNGTVVQRHPSHAVTFVDNHDSQPEEALESFVEPWFKPLAYALTLTREQGYPSVFYGDYYGIPTHGVPAMRSKIDPILEARQKYAYGPQHDYLDHPDVIGWTREGDSSHPKSGLATLITDGPGGSKRMYAGLKNAGETWYDITGNRSDTVKIGSDGWGEFHVNDTSVSIYVQK

SEQ ID NO: 40194 - protein, 478 aa, Bacillus sp.
NGTMMQYFEWYLPNDGNHWNRLNSDASNLKSKGITAVWIPPAWKGASQNDVGYGAYDLYDLGEFNQKGTVRTKYGTRSQLQAAVTSLKNNGIQVYGDVVMNHKGGADATEMVRAVEVNPNNRNQEVTGEYTIEAWTRFDFPGRGNTHSSFKWRWYHFDGVDWDQSRRLNNRIYKFRGKAWDWEVDTEFGNYDYLMYADYDMDHPEVVNELRNWGVWYTNTLGLDGFRIDAVKHIKYSFTRDWINHVRSATGKNMFAVAEFWKADLGAIENYLQKTNWNHSVFDVPLHYNLYNASKSGGNYDMRNIFNGTVVQRHPSHAVTFVDNHDSQPEEALESFVEEWFKPLAYALTLTREQGYPSVFYGDYYGIPTHGVPAMRSKIDPILEARQKYAYGPQHDYLDHPDVIGWTREGDSSHPKSGLATLITDGPGGSKRMYAGLKNAGETWYDITGNRSDTVKIGSDGWGEFHVNDGSVSIYVQK

SEQ ID NO: 40195 - protein, 478 aa, Bacillus sp.
NGTMMQYFEWYLPNDGNHWNRLNSDASNLKSKGITAVWIPPAWKGASQNDVGYGAYDLYDLGEFNQKGTVRTKYGTRSQLQAAVTSLKNNGIQVYGDVVMNHKGGADATEMVRAVEVNPNNRNQEVTGEYTIEAWTRFDFPGRGNTHSSFKWRWYHFDGVDWDQSRRLNNRIYKFRGKAWDWEVDTEFGNYDYLMYADYDMDHPEVVNELRNWGVWYTNTLGLDGFRIDAVKHIKYSFTRDWINHVRSATGKNMFAVAEFWKNDLGAIENYLQKTNWNHSVFDVPLHYNLYNASKSGGNYDMRNIFNGTVVQTHPSHAVTFVDNHDSQPEEALESFVEEWFKPLAYALTLTREQGYPSVFYGDYYGIPTHGVPAMRSKIDPILEARQKYAYGPQHDYLDHPDVIGWTREGDSSHPKSGLATLITDGPGGSKRMYAGLKNAGETWYDITGNRSDTVKIGSDGWGEFHVNDGSVSIYVQK

SEQ ID NO: 40196 - protein, 478 aa, Bacillus sp.
NGTMMQYFEWYLPNDGNHWNRLNSDASNLKSKGITAVWIPPAWKGASQNDVGYGAYDLYDLGEFNQKGTVRTKYGTRSQLQAAVTSLKNNGIQVYGDVVMNHKGGADATEMVRAVEVNPNNRNQEVTGEYTIEAWTRFDFPGRGNTHSSFKWRWYHFDGVDWDQSRDLQNRIYKFRGKAWDWEVDTEFGNYDYLMYVDYDMDHPEVVNELRNWGVWYTNTLGLDGFRIDAVKHIKYSFTRDWINHVRSATGKNMFAVAEFWKNDLGAIENYLQKTNWNHSVFDVPLHYNLYNASKSGGNYDMRNIFNGTVVQRHPSHAVTFVDNHDSQPEEALESFVETWFKPLAYALTLTREQGYPSVFYGDYYGIPTHGVPAMRSKIDPILEARQKYAYGPQHDYLDHPDVIGWTREGDSSHPKSGLATLITDGPGGSKRMYAGLKNAGETWYDITGNRSDTVKIGSDGWGEFHVNDASVSIYVQK

SEQ ID NO: 40197 - protein, 478 aa, Bacillus sp.
NGTMMQYFEWYLPNDGNHWNRLNSDASNLKSKGITAVWIPPAWKGASQNDVGYGAYDLYDLGEFNQKGTVRTKYGTRSQLQAAVTSLKNNGIQVYGDVVMNHKGGADATEMVRAVEVNPNNRNQEVTGEYTIEAWTRFDFPGRGNTHSSFKWRWYHFDGVDWDQSRRLNNRIYKFRGKAWDWEVDTEFGNYDYLMYADYDMDHPEVVNELRNWGVWYTNTLGLDGFRIDAVKHIKYSFTRDWINHVRSATGKNMFAVAEFWKNDLGAIENYLQKTNWNHSVFDVPLHYNLYNASKSGGNYDMRNIFNGTVVQMHPSHAVTFVDNHDSQPEEALESFVEEWFKPLAYALTLTREQGYPSVFYGDYYGIPTHGVPAMRSKIDPILEARQKYAYGPQHDYLDHPDVIGWTREGDSSHPKSGLATLITDGPGGSKRMYAGLKNAGETWYDITGNRSDTVKIGSDGWGEFHVNDGSVSIYVQK

SEQ ID NO: 40198 - protein, 478 aa, Bacillus sp.
NGTMMQYFEWYLPNDGNHWNRLNSDASNLKSKGITAVWIPPAWKAASQNDVGYGAYDLYDLGEFNQKGTVRTKYGTRSQLQAAVTSLKNNGIQVYGDVVMNHKGGADATEMVRAVEVNPNNRNQEVTGEYTIEAWTRFDFPGRGNTHSSFKWRWYHFDGVDWDQSRDVNNRIYKFRGKAWDWEVDTEFGNYDYLMYADYDMDHPEVVNELRNWGVWYTNTLGLDGFRIDAVKHIKYSFTRDWINHVRSATGKNMFAVAEFWKNDLGAIENYLQKTNWNHSVFDVPLHYNLYNASKSGGNYDMRNIFNGTVVQRHPSHAVTFVDNHDSQPEEALESFVEEWFKPLAYALTLTREQGYPSVFYGDYYGIPTHGVPAMRSKIDPILEARQKYAYGPQHDYLDHPDVIGWTREGDSSHPKSGLATLITDGPGGSKRMYAGLKNAGETWYDITGNRSDTVKIGSDGWGEFHVNDGSVSIYVQK

SEQ ID NO: 40199 - protein, 478 aa, Bacillus sp.
NGTMMQYFEWYLPNDGNHWNRLNSDASNLKSKGITAVWIPPAWKATSQNDVGYGAYDLYDLGEFNQKGTVRTKYGTRSQLQAAVTSLKNNGIQVYGDVVMNHKGGADATEMVRAVEVNPNNRNQEVTGEYTIEAWTRFDFPGRGNTHSSFKWRWYHFDGVDWDQSRRFNNRIYKFRGKAWDWEVDTEFGNYDYLMYADYDMDHPEVVNELRNWGVWYTNTLGLDGFRIDAVKHIKYSFTRDWINHVRSATGKNMFAVAEFWKNDLGAIENYLQKTNWNHSVFDVPLHYNLYNASKSGGNYDMRNIFNGTVVQRHPSHAVTFVDNHDSQPEEALESFVEEWFKPLAYALTLTREQGYPSVFYGDYYGIPTHGVPAMRSKIDPILEARQKYAYGPQHDYLDHPDVIGWTREGDSSHPKSGLATLITDGPGGSKRMYAGLKNAGETWYDITGNRSDTVKIGSDGWGEFHVNDGSVSIYVQK

SEQ ID NO: 40200 - protein, 478 aa, Bacillus sp.
NGTMMQYFEWYLPNDGNHWNRLNSDASNLKSKGITAVWIPPAWKAVSQNDVGYGAYDLYDLGEFNQKGTVRTKYGTRSQLQAAVTSLKNNGIQVYGDVVMNHKGGADATEMVRAVEVNPNNRNQEVTGEYTIEAWTRFDFPGRGNTHSSFKWRWYHFDGVDWDQSRRLSNRIYKFRGKAWDWEVDTEFGNYDYLMYADYDMDHPEVVNELRNWGVWYTNTLGLDGFRIDAVKHIKYSFTRDWINHVRSATGKNMFAVAEFWKNDLGAIENYLQKTNWNHSVFDVPLHYNLYNASKSGGNYDMRNIFNGTVVQAHPNHAVTFVDNHDSQPEEALESFVEEWFKPLAYALTLTREQGYPSVFYGDYYGIPTHGVPAMRSKIDPILEARQKYAYGPQHDYLDHPDVIGWTREGDSSHPKSGLATLITDGPGGSKRMYAGLKNAGETWYDITGNRSDTVKIGSDGWGEFHVNDGSVSIYVQK

SEQ ID NO: 40201 - protein, 478 aa, Bacillus sp.
NGTMMQYFEWYLPNDGNHWNRLNSDASNLKSKGITAVWIPPAWKAASQNDVGYGAYDLYDLGEFNQKGTVRTKYGTRSQLQAAVTSLKNNGIQVYGDVVMNHKGGADATEMVRAVEVNPNNRNQEVTGEYTIEAWTRFDFPGRGNTHSSFKWRWYHFDGVDWDQSRNLNNRIYKFRGKAWDWEVDTEFGNYDYLMYADYDMDHPEVVNELRNWGVWYTNTLGLDGFRIDAVKHIKYSFTRDWINHVRSATGKNMFAVAEFWKNDLGAIENYLQKTNWNHSVFDVPLHYNLYNASKSGGNYDMRNIFNGTVVQRHPSHAVTFVDNHDSQPEEALESFVEEWFKPLAYALTLTREQGYPSVFYGDYYGIPTHGVPAMRSKIDPILEARQKYAYGPQHDYLDHPDVIGWTREGDSSHPKSGLATLITDGPGGSKRMYAGLKNAGETWYDITGNRSDTVKIGSDGWGEFHVNDGSVSIYVQK

SEQ ID NO: 40202 - protein, 478 aa, Bacillus sp.
NGTMMQYFEWYLPNDGNHWNRLSSDASNLKSKGITAVWIPPAWKGASQNDVGYGAYDLYDLGEFNQKGTVRTKYGTRSQLQAAVTSLKNNGIQVYGDVVMNHKGGADATEMVRAVEVNPNNRNQEVTGEYTIEAWTRFDFPGRGNTHSSFKWRWYHFDGVDWDQSRRLNNRIYKFRGKAWDWEVDTEFGNYDYLMYADYDMDHPEVVNELRNWGVWYTNTLGLDGFRIDAVKHIKYSFTRDWINHVRSATGKNMFAVAEFWKNDLGAIENYLQKTNWNHSVFDVPLHYNLYNASKSGGNYDMRNIFNGTVVQMHPNHAVTFVDNHDSQPEEALESFVEEWFKPLAYALTLTREQGYPSVFYGDYYGIPTHGVPAMRSKIDPILEARQKYAYGPQHDYLDHPDVIGWTREGDSSHPKSGLATLITDGPGGSKRMYAGLKNAGETWYDITGNRSDTVKIGSDGWGEFHVNDGSVSIYVQK

SEQ ID NO: 40203 - protein, 478 aa, Bacillus sp.
NGTMMQYFEWYLPNDGNHWNRLNSDASNLKSKGITAVWIPPAWKGASQNDVGYGAYDLYDLGEFNQKGTVRTKYGTRSQLQAAVTSLKNNGIQVYGDVVMNHKGGADATEMVRAVEVNPNNRNQEVTGEYNIEAWTRFDFPGRGNTHSSFKWRWYHFDGVDWDQSRQLDNRIYKFRGKAWDWEVDTEFGNYDYLMYTDYDMDHPEVVNELRNWGVWYTNTLGLDGFRIDAVKHIKYSFTRDWINHVRSATGKNMFAVAEFWKNDLGAIENYLQKTNWNHSVFDVPLHYNLYNASKSGGNYDMRNIFNGTVVQRHPSHAVTFVDNHDSQPEEALESFVEEWFKPLAYALTLTREQGYPSVFYGDYYGIPTHGVPAMRSKIDPILEARQKYAYGPQHDYLDHPDVIGWTREGDSSHPKSGLATLITDGPGGSKRMYAGLKNAGETWYDITGNRSDTVKIGSDGWGEFHVNDGSVSIYVQK

SEQ ID NO: 40204 - protein, 478 aa, Bacillus sp.
NGTMMQYFEWYLPNDGNHWNRLNSDASNLKSKGITAVWIPPAWKGASQNDVGYGAYDLYDLGEFNQKGTVRTKYGTRSQLQAAVTSLKNNGIQVYGDVVMNHKGGADATEMVRAVEVNPNNRNQEVTGEYTIEAYTRFDFPGRGNTHSSFKWRWYHFDGVDWDQSRDLTNRIYKFRGKAWDWEVDTEFGNYDYLMYADYDMDHPEVVNELRNWGVWYTNTLGLDGFRIDAVKHIKYSFTRDWINHVRSATGKNMFAVAEFWKNDLGAIENYLQKTNWNHSVFDVPLHYNLYNASKSGGNYDMRNIFNGTVVQRHPSHAVTFVDNHDSQPEEALESFVEEWFKPLAYALTLTREQGYPSVFYGDYYGIPTHGVPAMRSKIDPILEARQKYAYGPQHDYLDHPDVIGWTREGDSSHPKSGLATLITDGPGGSKRMYAGLKNAGETWYDITGNRSDTVKIGSDGWGEFHVNDGSVSIYVQK

SEQ ID NO: 40205 - protein, 478 aa, Bacillus sp.
NGTMMQYFEWYLPNDGNHWNRLNSDASNLKSKGITAVWIPPAWKGASQNDVGYGAYDLYDLGEFNQKGTVRTKYGTRSQLQAAVTSLKNNGIQVYGDVVMNHKGGADATEMVDAVEVNPNNRNQEVTGEYTIEAWTRFDFPGRGNTHSSFKWRWYHFDGVDWDQSRRLNNRIYKFRNKAWDWEVDTEFGNYDYLMYADYDMDHPEVVNELRNWGVWYTNTLGLDGFRIDAVKHIKYSFTRDWINHVRSATGKNMFAVAEFWKNDLGAIENYLQKTNWNHSVFDVPLHYNLYNASKSGGNYDMRNIFNGTVVQRHPSHAVTFVDNHDSQPEEALESFVEEWFKPLAYALTLTREQGYPSVFYGDYYGIPTHGVPAMRSKIDPILEARQKYAYGPQHDYLDHPDVIGWTREGDSSHPKSGLATLITDGPGGSKRMYAGLKNAGETWYDITGNRSDTVKIGSDGWGEFHVNDGSVSIYVQK

SEQ ID NO: 40206 - protein, 478 aa, Bacillus sp.
NGTMMQYFEWYLPNDGNHWNRLNSDASNLKSKGITAVWIPPAWKGASQNDVGYGAYDLYDLGEFNQKGTVRTKYGTRSQLQAAVTSLKNNGIQVYGDVVMNHKGGADATEMVRAVEVNPNNRNQEVTGEYTIEAWTRFDFPGRGNTHSSFKWRWYHFDGVDWDQSRRLNNRIYKFRGKAWDWEVDTEFGNYDYLMYADYDMDHPEVVNELRNWGVWYTNTLGLDGFRIDAVKHIKYSFTRDWINHVRSATGKNMFAVAEFWKNDLGAIENYLQKTNWNHSVFDVPLHYNLYNASQSAGNYDMRNIFNGTVVQRHPSHAVTFVDNHDSQPEEALESFVEPWFKPLAYALTLTREQGYPSVFYGDYYGIPTHGVPAMRSKIDPILEARQKYAYGPQHDYLDHPDVIGWTREGDSSHPKSGLATLITDGPGGSKRMYAGLKNAGETWYDITGNRSDTVKIGSDGWGEFHVNDGSVSIYVQK

SEQ ID NO: 40207 - protein, 478 aa, Bacillus sp.
NGTMMQYFEWYLPNDGNHWNRLNSDASNLKSKGITAVWIPPAWKGASQNDVGYGAYDLYDLGEFNQKGTVRTKYGTRSQLQAAVTSLKNNGIQVYGDVVMNHKGGADATEMVRAVEVNPNNRNQEVTGEYTIEAWTRFDFPGRQNTHSSFKWRWYHFDGVDWDQSRRLNNRIYKFRGKAWDWEVDTEFGNYDYLMYADYDMDHPEVVNELRNWGVWYTNTLGLDGFRIDAVKHIKYSFTRDWINHVRSATGKNMFAVAEFWKNDLGAIENYLQKTNWNHSVFDVPLHYNLYNASKSGGNYDMRNIFNGTVVQRHPSHAVTFVDNHDSQPEEALESFVEEWFKPLAYALTLTREQGYPSVFYGDYYGIPTHGVPAMRSKIDPILEARQKYAYGPQHDYLDHPDVIGWTREGDSSHPKSGLATLITDGPGGSKRMYAGLKNAGETWYDITGNRSDTVKIGSDGWGEFHVNDGSVSIYVQK

SEQ ID NO: 40208 - protein, 478 aa, Bacillus sp.
NGTMMQYFEWYLPNDGNHWNRLNSDASNLKSKGITAVWIPPAWKGASQNDVGYGAYDLYDLGEFNQKGTVRTKYGTRSQLQAAVTSLKNNGIQVYGDVVMNHKGGADATEMVRAVEVNPNNRNQEVTGEYTIEAWTRFDFPGRGNTHSSFKWRWYHFDGVDWDQSRRLNNRIYKFRGKAWDWEVDTEFGNYDYLMYADYDMDHPEVVNELRNWGVWYTNTLGLDGFRIDAVKHIKYSFTRDWINHVRSATGKNMFAVAEFWKNDLGAIENYLQKTNWNHSVFDVPLHYNLYNASKSGGNYDMRNIFNGTVVQRHPSHAVTFVDNHDSQPEEALESFVEEWFKPLAYALTLTREQGLPSVFYGDYYGIPTHGVPAMRSKIDPILEARQKYAYGPQHDYLDHPDVIGWTREGDSSHPKSGLATLITDGPGGSKRMYAGLKNAGETWYDITGNRSDTVKIGSDGWGEFHVNDGSVSIYVQK

SEQ ID NO: 40209 - protein, 478 aa, Bacillus sp.
NGTMMQYFEWYLPNDGNHWNRLNSDASNLKSKGITAVWIPPAWKGASQNDVGYGAYDLYDLGEFNQKGTVRTKYGTRSQLQAAVTSLKNNGIQVYGDVVMNHKGGADATEMVRAVEVNPNNRNQEVTGEYTIEAWTRFDFPGRGNTHSSFKWRWYHFDGVDWDQSRNVNNRIYKFRGKAWDWEVDTEFGNYDYLMYADYDMDHPEVVNELRNWGVWYTNTLGLDGFRIDAVKHIKYSFTRDWINHVRSATGKNMFAVAEFWKNDLGAIENYLQKTNWNHSVFDVPLHYNLYNASKSGGNYDMRNIFNGTVVQRHPSHAVTFVDNHDSQPEEALESFVETWFKPLAYALTLTREQGYPSVFYGDYYGIPTHGVPAMRSKIDPILEARQKYAYGPQHDYLDHPDVIGWTREGDSSHPKSGLATLITDGPGGSKRMYAGLKNAGETWYDITGNRSDTVKIGSDGWGEFHVNKASVSIYVQK

SEQ ID NO: 40210 - protein, 478 aa, Bacillus sp.
NGTMMQYFEWYLPNDGNHWNRLNSDASNLKSKGITAVWIPPAWKAISQNDVGYGAYDLYDLGEFNQKGTVRTKYGTRSQLQAAVTSLKNNGIQVYGDVVMNHKGGADATEMVRAVEVNPNNRNQEVTGEYTIEAWTRFDFPGRGNTHSSFKWRWYHFDGVDWDQSRDVNNRIYKFRGKAWDWEVDTEFGNYDYLMYADYDMDHPEVVNELRNWGVWYTNTLGLDGFRIDAVKHIKYSFTRDWINHVRSATGKNMFAVAEFWKNDLGAIENYLQKTNWNHSVFDVPLHYNLYNASKSGGNYDMRNIFNGTVVQRHPSHAVTFVDNHDSQPEEALESFVEEWFKPLAYALTLTREQGYPSVFYGDYYGIPTHGVPAMRSKIDPILEARQKYAYGPQHDYLDHPDVIGWTREGDSSHPKSGLATLITDGPGGSKRMYAGLKNAGETWYDITGNRSDTVKIGSDGWGEFHVNDGSVSIYVQK

SEQ ID NO: 40211 - protein, 478 aa, Bacillus sp.
NGTMMQYFEWYLPNDGNHWNRLNSDASNLKSKGITAVWIPPAWKGASQNDVGYGAYDLYDLGEFNQKGTVRTKYGTRSQLQAAVTSLKNNGIQVYGDVVMNHKGGADATEMVRAVEVNPNNRYQEVTGEYTIEAWTRFDFPGRGNTHSSFKWRWYHFDGVDWDQSRRLNNRIYKFRGKAWDWEVDTEFGNYDYLMYADYDMDHPEVVNELRNWGVWYTNTLGLDGFRIDAVKHIKYSFTRDWINHVRSATGKNMFAVAEFWKNDLGAIENYLQKTNWNHSVFDVPLHYNLYNASKSGGNYDMRNIFNGTVVQRHPSHAVTFVDNHDSQPEEALESFVEEWFKPLAYALTLTREQGYPSVFYGDYYGIPTHGVPAMRSKIDPILEARQKYAYGPQHDYLDHPDVIGWTREGDSSHPKSGLATLITDGPGGSKRMYAGLKNAGETWYDITGNRSDTVKIGSDGWGEFHVNDGSVSIYVQK

SEQ ID NO: 40212 - protein, 478 aa, Bacillus sp.
NGTMMQYFEWYLPNDGNHWNRLNSDASNLKSKGITAVWIPPAWKATSQNDVGYGAYDLYDLGEFNQKGTVRTKYGTRSQLQAAVTSLKNNGIQVYGDVVMNHKGGADATEMVRAVEVNPNNRNQEVTGEYTIEAWTRFDFPGRGNTHSSFKWRWYHFDGVDWDQSRDLNNRIYKFRGKAWDWEVDTEFGNYDYLMYADYDMDHPEVVNELRNWGVWYTNTLGLDGFRIDAVKHIKYSFTRDWINHVRSATGKNMFAVAEFWKNDLGAIENYLQKTNWNHSVFDVPLHYNLYNASKSGGNYDMRNIFNGTVVQRHPSHAVTFVDNHDSQPEEALESFVEEWFKPLAYALTLTREQGYPSVFYGDYYGIPTHGVPAMRSKIDPILEARQKYAYGPQHDYLDHPDVIGWTREGDSSHPKSGLATLITDGPGGSKRMYAGLKNAGETWYDITGNRSDTVKIGSDGWGEFHVNDGSVSIYVQK

SEQ ID NO: 40213 - protein, 478 aa, Bacillus sp.
NGTMMQYFEWYLPNDGNHWNRLNSDASNLKSKGITAVWIPPAWKGASQNDVGYGAYDLYDLGEFNQKGTVRTKYGTRSQLQAAVTSLKNNGIQVYGDVVMNHKGGADATEMVRAVEVNPNNRNQEVTGEYTIEAWTRFDFPGRGNTHSSFKWRWYHFDGVDWDQSRRLNNRIYKFRGKAWDWEVDTEFGNYDYLMYADYDMDHPEVVNELRNWGVWYTNTLGLDGFRIDAVKHIKYSFTRDWINHVRSATGKNMFAVAEFWKNDLGAIENYLQKTNWNHSVFDVPLHYNLYNASKSGGNYDMRNIFNGTVVQRHPSHAVTFVDNHDSQPEEALESFVEEWFKPLAYALTLTREQGYPSVFYGDYYGIPTHGVPAMRSKIDPILEARQKYAYGPQHDYLDHPDVIGWTREGDSSHPKSGLATLITDGPGGSKRMYAGLKNAGETWYDITGNRSDTVKIGSDGWGEFHVNDGAVSIYVQK

SEQ ID NO: 40214 - protein, 478 aa, Bacillus sp.
NGTMMQYFEWYLPNDGNHWNRLNSDASNLKSKGITAVWIPPAWKAASQNDVGYGAYDLYDLGEFNQKGTVRTKYGTRSQLQAAVTSLKNNGIQVYGDVVMNHKGGADATEMVRAVEVNPNNRNQEVTGEYTIEAWTRFDFPGRGNTHSSFKWRWYHFDGVDWDQSRRFNNRIYKFRGKAWDWEVDTEFGNYDYLMYADYDMDHPEVVNELRNWGVWYTNTLGLDGFRIDAVKHIKYSFTRDWINHVRSATGKNMFAVAEFWKNDLGAIENYLQKTNWNHSVFDVPLHYNLYNASKSGGNYDMRNIFNGTVVQRHPSHAVTFVDNHDSQPEEALESFVEEWFKPLAYALTLTREQGYPSVFYGDYYGIPTHGVPAMRSKIDPILEARQKYAYGPQHDYLDHPDVIGWTREGDSSHPKSGLATLITDGPGGSKRMYAGLKNAGETWYDITGNRSDTVKIGSDGWGEFHVNDGSVSIYVQK

SEQ ID NO: 40215 - protein, 478 aa, Bacillus sp.
NGTMMQYFEWYLPNDGNHWNRLNSDASNLKSKGITAVWIPPAWKGASQNDVGYGAYDLYDLGEFNQKGTVRTKYGTRSQLQAAVTSLKNNGIQVYGDVVMNHKGGADATEMVRAVEVNPNNRNQEVTGEYTIEAWTRFDFPGRGNTHSSFKWRWYHFDGVDWDQSRRLNNRIYKFRGKAWDWEVDTENGFYDYLMYADIDYDLPEVVTTLRVWGVWYTNTLGLDGFRIDAVKHIKYSFTRDWINHVRSATGKNMFAVAEFWKNDLGAIENYLQKTNWNHSVFDVPLHYNLYNASKSGGNYDMRNIFNGTVVQRHPSHAVTFVDNHDSQPEEALESFVEEWFKPLAYALTLTREQGYPSVFYGDYYGIPTHGVPAMRSKIDPILEARQKYAYGPQHDYLDHPDVIGWTREGDSSHPKSGLATLITDGPGGSKRMYAGLKNAGETWYDITGNRSDTVKIGSDGWGEFHVNDGSVSIYVQK

SEQ ID NO: 40216 - protein, 478 aa, Bacillus sp.
NGTMMQYFEWYLPNDGNHWNRLNSDASNLKSKGITAVWIPPAWKGASQNDVGYGAYDLYDLGEFNQKGTVRTKYGTRSQLQAAVTSLKNNGIQVYGDVVMNHKGGADATEMVRAVEVNPNNRNQEVTGEYTIEAWTRFDFPGRGNTHSSFKWRWYHFDGVDWDQSRRLNNRIYKFRGKAWDWEVDTEFGNYDYLMYADYDMDHPEVVNELRNWGVWYTNTLGLDGFRIDAVKHIKYSFTRDWINHVRIATGKNMFAVAEFWKNDLGAIENYLQKTNWNHSVFDVPLHYNLYNASKSGGNYDMRNIFNGTVVQRHPSHAVTFVDNHDSQPEEALESFVDEWFKPLAYALTLTREQGYPSVFYGDYYGIPTHGVPAMRSKIDPILEARQKYAYGPQHDYLDHPDVIGWTREGDSSHPKSGLATLITDGPGGSKRMYAGLKNAGETWYDITGNRSDTVKIGSDGWGEFHVNDQSVSIYVQK

SEQ ID NO: 40217 - protein, 478 aa, Bacillus sp.
NGTMMQYFEWYLPNDGNHWNRLNSDASNLKSKGITAVWIPPAWKGASQNDVGYGAYDLYDLGEFNQKGTVRTKYGTRSQLQAAVTSLKNNGIQVYGDVVMNHKGGADATEMVRAVEVNPNNRNQEVTGEYTIEAWTRFDFPGRGNTHSSFKWRWYHFDGVDWDQSRRLNNRIYKFRNKAWDWEVDTEFGNYDYLMYADYDMDHPEVVNELRNWGVWYTNTLGLDGFRIDAVKHIKYSFTRDWINHVRSATGKNMFAVAEFWKNDLGAIENYLQKTNWNHSVFDVPLHYNLYNASKSGGNYDMRNIFNGTVVQRHPSHAVTFVDNHDSQPEEALESFVEEWFKPLAYALTLTREQGYPSVFYGDYYGIPTHGVPAMRSKIDPILEARQKYAYGPQHDYLDHPDVIGWTREGDSSHPKSGLATLITDGPGGSKRMYAGLKNAGETWYDITGNRSDTVKIGSDGWGEFHVNDGSVSIYVQK

SEQ ID NO: 40218 - protein, 478 aa, Bacillus sp.
NGTMMQYFEWYLPNDGNHWNRLNSDASNLKSKGITAVWIPPAWKGASQNDVGYGAYDLYDLGEFNQKGTVRTKYGTRSQLQAAVTSLKNNGIQVYGDVVMNHKGGADATEMVRAVEVNPNNRNQEVTGEYTIEAWTRFDFPGRGNTHSSFKWRWYHFDGVDWDQSRRLNNRIYKFRGKAWDWEVDTEFGNYDYLMYADYDMDHPEVVNELRNWGVWYTNTLGLDGFRIDAVKHIKYSFTRDWINHVRSATGKNMFAVAEFWKNDLGAIENYLQKTNWNHSVFDVPLHYNLYNASKSGGNYDMRNIFNGTVVQRHPSHAVTFVDNHDSQPEEALESFVEEWFKPLAYALTLTREQGYPSVFYGDYYGIPTHGVPAMRSKIDPILLARQKYAYGPQHDYLDHPDVIGWTREGDSSHPPSGLATLITDGPGGSKRMYAGLKNAGETWYDITGNRSDTVKIGSDGWGEFHVNDGSVSIYVQK

SEQ ID NO: 40219 - protein, 478 aa, Bacillus sp.
NGTMMQYFEWYLPNDGNHWNRLNSDASNLKSKGITAVWIPPAWKGASQNDVGYGAYDLYDLGEFNQKGTVRTKYGTRSQLQAAVTSLKNNGIQVYGDVVMNHKGGADATEMVRAVEVNPNNRNQEVTGEYTIEAWTRFDFPGRGNTHSSFKWRWYHFDGVDWDQSRRLNNRIYKFRGKAWDWEVDTEFGNYDYLMYADYDMDHGEVVNELRNWGVWYTNTLGLDGFRIDAVKHIKYSFTRDWINHVRSATGKNMFAVAEFWKNDLGAIENYLQKTNWNHSVFDVPLHYNLYNASKSGGNYDMRNIFNGTVVQRHPSHAVTFVDNHDSQPEEALESFVEEWFKPLAYALTLTREQGYPSVFYGDYYGIPTHGVPAMRSKIDPILEARQKYAYGPQHDYLDHPDVIGWTREGDSSHPKSGLATLITDGPGGSKRMYAGLKNAGETWYDITGNRSDTVKIGSDGWGEFHVNDGSVSIYVQK

SEQ ID NO: 40220 - protein, 478 aa, Bacillus sp.
NGTMMQYFEWYLPNDGNHWNRLNSDASNLKSKGITAVWIPPAWKGASQNDVGYGAYDLYDLGEFNQKGTVRTKYGTRSQLQAAVTSLKNNGIQVYGDVVMNHKGGADATEMVRAVEVNPNNRNQEVTGEYTIEAWTRFDFPGRGNTHSSFKWRWYHFDGVDWDQSREFNNRIYKFRGKAWDWEVDTEFGNYDYLMYADYDMDHPEVVNELRNWGVWYTNTLGLDGFRIDAVKHIKYSFTRDWINHVRSATGKNMFAVAEFWKNDLGAIENYLQKTNWNHSVFDVPLHYNLYNASKSGGNYDMRNIFNGTVVQAHPNHAVTFVDNHDSQPEEALESFVEEWFKPLAYALTLTREQGYPSVFYGDYYGIPTHGVPAMRSKIDPILEARQKYAYGPQHDYLDHPDVIGWTREGDSSHPKSGLATLITDGPGGSKRMYAGLKNAGETWYDITGNRSDTVKIGSDGWGEFHVNDGSVSIYVQK

SEQ ID NO: 40221 - protein, 478 aa, Bacillus sp.
NGTMMQYFEWYLPNDGNHWNRLNSDASNLKSKGITAVWIPPAWKGASQNDVGYGAYDLYDLGEFNQKGTVRTKYGTRSQLQAAVTSLKNNGIQVYGDVVMNHKGGADATEMVPAVEVNPNNRNQEVTGEYTIEAWTRFDFPGRGNTHSSFKWRWYHFDGVDWDQSRRLNNRIYKFRSKAWDWEVDTEFGNYDYLMYADYDMDHPEVVNELRNWGVWYTNTLGLDGFRIDAVKHIKYSFTRDWINHVRSATGKNMFAVAEFWKNDLGAIENYLQKTNWNHSVFDVPLHYNLYNASKSGGNYDMRNIFNGTVVQRHPSHAVTFVDNHDSQPEEALESFVEEWFKPLAYALTLTREQGYPSVFYGDYYGIPTHGVPAMRSKIDPILEARQKYAYGPQHDYLDHPDVIGWTREGDSSHPKSGLATLITDGPGGSKRMYAGLKNAGETWYDITGNRSDTVKIGSDGWGEFHVNDGSVSIYVQK

SEQ ID NO: 40222 - protein, 478 aa, Bacillus sp.
NGTMMQYFEWYLPNDGNHWNRLNSDASNLKSKGITAVWIPPAWKGASQNDVGYGAYDLYDLGEFNQKGTVRTKYGTRSQLQAAVTSLKNNGIQVYGDVVMNHKGGADSTEMVRAVEVNPNNRNQEVTGEYTIEAWTRFDFPGRGNTHSSFKWRWYHFDGVDWDQSRRLNNRIYKFRGKAWDWEVDTEFGNYDYLMYADYDMDHPEVVNELRNWGVWYTNTLGLDGFRIDAVKHIKYSFTRDWINHVRSATGKNMFAVAEFWKNDLGAIENYLQKTNWNHSVFDVPLHYNLYNASKSGGNYDMRNIFNGTVVQRHPSHAVTFVDNHDSQPEEALESFVEEWFKPLAYALTLTREQGYPSVFYGDYYGIPTHGVPAMRSKIDPILEARQKYAYGPQHDYLDHPDVIGWTREGDSSHPKSGLATLITDGPGGSKRMYAGLKNAGETWYDITGNRSDTVKIGSDGWGEFHVNDGSVSIYVQK

SEQ ID NO: 40223 - protein, 478 aa, Bacillus sp.
NGTMMQYFEWYLPNDGNHWNRLNSDASNLKSKGITAVWIPPAWKGASQNDVGYGAYDLYDLGEFNQKGTVRTKYGTRSQLQAAVTSLKNNGIQVYGDVVMNHKGGADATEMVRAVEVNPNNRNQEVTGEYTIEAWTRFDFPGRGNTHSSFKWRWYHFDGVDWDQSRRLNNRIYKFRGKAWDWEVDTENGFYDYLMYADIDYDFPEVVTTLRMWGVWYTNTLGLDGFRIDAVKHIKYSFTRDWINHVRSATGKNMFAVAEFWKNDLGAIENYLQKTNWNHSVFDVPLHYNLYNASKSGGNYDMRNIFNGTVVQRHPSHAVTFVDNHDSQPEEALESFVEEWFKPLAYALTLTREQGYPSVFYGDYYGIPTHGVPAMRSKIDPILEARQKYAYGPQHDYLDHPDVIGWTREGDSSHPKSGLATLITDGPGGSKRMYAGLKNAGETWYDITGNRSDTVKIGSDGWGEFHVNDGSVSIYVQK

SEQ ID NO: 40224 - protein, 478 aa, Bacillus sp.
NGTMMQYFEWYLPNDGNHWNRLNSDASNLKSKGITAVWIPPAWKGASQNDVGYGAYDLYDLGEFNQKGTVRTKYGTRSQLQAAVTSLKNNGIQVYGDVVMNHKGGADATEMVRAVEVNPNNRNQEVTGEYTIEAWTRFDFPGRGNTHSSFKWRWYHFDGVDWDQSRRLNNRIYKFRGKAWDWEVDTEFGNYDYLMYADYDMDMPEVVNELRNWGVWYTNTLGLDGFRIDAVKHIKYSFTRDWINHVRSATGKNMFAVAEFWKNDLGAIENYLQKTNWNHSVFDVPLHYNLYNASKSGGNYDMRNIFNGTVVQRHPSHAVTFVDNHDSQPEEALESFVEEWFKPLAYALTLTREQGYPSVFYGDYYGIPTHGVPAMRSKIDPILEARQKYAYGPQHDYLDHPDVIGWTREGDSSHPKSGLATLITDGPGGSKRMYAGLKNAGETWYDITGNRSDTVKIGSDGWGEFHVNDGSVSIYVQK

SEQ ID NO: 40225 - protein, 478 aa, Bacillus sp.
NGTMMQYFEWYLPNDGNHWNRLNSDASNLKSKGITAVWIPPAWKAVSQNDVGYGAYDLYDLGEFNQKGTVRTKYGTRSQLQAAVTSLKNNGIQVYGDVVMNHKGGADATEMVRAVEVNPNNRNQEVTGEYTIEAWTRFDFPGRGNTHSSFKWRWYHFDGVDWDQSRDLENRIYKFRGKAWDWEVDTEFGNYDYLMYADYDMDHPEVVNELRNWGVWYTNTLGLDGFRIDAVKHIKYSFTRDWINHVRSATGKNMFAVAEFWKNDLGAIENYLQKTNWNHSVFDVPLHYNLYNASKSGGNYDMRNIFNGTVVQRHPSHAVTFVDNHDSQPEEALESFVEEWFKPLAYALTLTREQGYPSVFYGDYYGIPTHGVPAMRSKIDPILEARQKYAYGPQHDYLDHPDVIGWTREGDSSHPKSGLATLITDGPGGSKRMYAGLKNAGETWYDITGNRSDTVKIGSDGWGEFHVNDGSVSIYVQK

SEQ ID NO: 40226 - protein, 478 aa, Bacillus sp.
NGTMMQYFEWYLPNDGNHWNRLNSDASNLKSKGITAVWIPPAWKGASQNDVGYGAYDLYDLGEFNQKGTVRTKYGTRSQLQAAVTSLKNNGIQVYGDVVMNHKGGADATEMVRAVEVNPNNRNQEVTGEYTIEAWTRFDFPGRGNTHSSFKWRWYHFDGVDWDQSRRLNNRIYKFRGKAWDWEVDTEFGNYDYLMYADYDMDHPEVVNELRNWGVWYTNTLGLDGFRIDAVKHIKYSFTRDWINHVRSATGKNMFAVAEFWKNDLGAIENYLQKTNWNHSVFDVPLHYNLYNASKSGGNYDMRNIFNGTVVQRHPSHAVTFVDNHDSQPEEALESFVEEWFKPLAYALTLTREQGYPSVFYGDYYGIPTHGVPAMRSKIDPILEARQKYAYGPQHDYLDHPDVIGWTREGDSSHPKSGLATLLTDGPGGSKRMYAGLKNAGETWYDITGNRSDTVKIGSDGWGEFHVNDGSVSIYVQK

SEQ ID NO: 40227 - protein, 478 aa, Bacillus sp.
NGTMMQYFEWYLPNDGNHWNRLNSDASNLKSKGITAVWIPPAWKGASQNDVGYGAYDLYDLGEFNQKGTVRTKYGTRSQLQAAVTSLKNNGIQVYGDVVMNHKGGADATEMVRAVEVNPNNRNQEVTGEYTIEAWTRFDFPGRGNTHSSFKWRWYHFDGVDWDQSRRLNNRIYKFRGKAWDWEVDTEFGNYDYLMYADYDMDHPEVVNELRNWGVWYTNTLGLDGFRIDAVKHIKYSFTRDWINHVRSATGKNMFAVAEFWKNDLGAIENYLQKTNWNHSVFDVPLHYNLYNASQSGGNYDMRNIFNGTVVQRHPSHAVTFVDNHDSQPEEALESFVETWFKPLAYALTLTREQGYPSVFYGDYYGIPTHGVPAMRSKIDPILEARQKYAYGPQHDYLDHPDVIGWTREGDSSHPKSGLATLITDGPGGSKRMYAGLKNAGETWYDITGNRSDTVKIGSDGWGEFHVNKQSVSIYVQK

SEQ ID NO: 40228 - protein, 478 aa, Bacillus sp.
NGTMMQYFEWYLPNDGNHWNRLNSDASNLKSKGITAVWIPPAWKAASQNDVGYGAYDLYDLGEFNQKGTVRTKYGTRSQLQAAVTSLKNNGIQVYGDVVMNHKGGADATEMVRAVEVNPNNRNQEVTGEYTIEAWTRFDFPGRGNTHSSFKWRWYHFDGVDWDQSRNLENRIYKFRGKAWDWEVDTEFGNYDYLMYADYDMDHPEVVNELRNWGVWYTNTLGLDGFRIDAVKHIKYSFTRDWINHVRSATGKNMFAVAEFWKNDLGAIENYLQKTNWNHSVFDVPLHYNLYNASKSGGNYDMRNIFNGTVVQRHPSHAVTFVDNHDSQPEEALESFVEEWFKPLAYALTLTREQGYPSVFYGDYYGIPTHGVPAMRSKIDPILEARQKYAYGPQHDYLDHPDVIGWTREGDSSHPKSGLATLITDGPGGSKRMYAGLKNAGETWYDITGNRSDTVKIGSDGWGEFHVNDGSVSIYVQK

SEQ ID NO: 40229 - protein, 478 aa, Bacillus sp.
NGTMMQYFEWYLPNDGNHWNRLNSDASNLKSKGITAVWIPPAWKAFSQNDVGYGAYDLYDLGEFNQKGTVRTKYGTRSQLQAAVTSLKNNGIQVYGDVVMNHKGGADATEMVRAVEVNPNNRNQEVTGEYTIEAWTRFDFPGRGNTHSSFKWRWYHFDGVDWDQSRDLNNRIYKFRGKAWDWEVDTEFGNYDYLMYADYDMDHPEVVNELRNWGVWYTNTLGLDGFRIDAVKHIKYSFTRDWINHVRSATGKNMFAVAEFWKNDLGAIENYLQKTNWNHSVFDVPLHYNLYNASKSGGNYDMRNIFNGTVVQRHPSHAVTFVDNHDSQPEEALESFVEEWFKPLAYALTLTREQGYPSVFYGDYYGIPTHGVPAMRSKIDPILEARQKYAYGPQHDYLDHPDVIGWTREGDSSHPKSGLATLITDGPGGSKRMYAGLKNAGETWYDITGNRSDTVKIGSDGWGEFHVNDGSVSIYVQK

SEQ ID NO: 40230 - protein, 478 aa, Bacillus sp.
NGTMMQYFEWYLPNDGNHWNRLNSDASNLKSKGITAVWIPPAWKGASQNDVGYGAYDLYDLGEFNQKGTVRTKYGTRSQLQAAVTSLKNNGIQVYGDVVMNHKGGADATEMVRAVEVNPNNRNQEVTGEYTIEAWTRFDFPGRGNTHSSFKWRWYHFDGVDWDQSRQVNNRIYKFRGKAWDWEVDTEFGNYDYLMYVDYDMDHPEVVNELRNWGVWYTNTLGLDGFRIDAVKHIKYSFTRDWINHVRSATGKNMFAVAEFWKNDLGAIENYLQKTNWNHSVFDVPLHYNLYNASKSGGNYDMRNIFNGTVVQRHPSHAVTFVDNHDSQPEEALESFVEEWFKPLAYALTLTREQGYPSVFYGDYYGIPTHGVPAMRSKIDPILEARQKYAYGPQHDYLDHPDVIGWTREGDSSHPKSGLATLITDGPGGSKRMYAGLKNAGETWYDITGNRSDTVKIGSDGWGEFHVNDGSVSIYVQK

SEQ ID NO: 40231 - protein, 478 aa, Bacillus sp.
NGTMMQYFEWYLPNDGNHWNRLNSDASNLKSKGITAVWIPPAWKGASQNDVGYGAYDLYDLGEFNQKGTVRTKYGTRSQLQAAVTSLKNNGIQVYGDVVMNHKGGADATEMVRAVEVNPNNRNQEVTGEYTIEAWTRFDFPGRGNTHSSFKWRWYHFDGVDWDQSRRLNNRIYKFRGKAWDWEVDTENGFYDYLMYADIDYDLPEVVTTLRMWGVWYTNTLGLDGFRIDAVKHIKYSFTRDWINHVRSATGKNMFAVAEFWKNDLGAIENYLQKTNWNHSVFDVPLHYNLYNASKSGGNYDMRNIFNGTVVQRHPSHAVTFVDNHDSQPEEALESFVEEWFKPLAYALTLTREQGYPSVFYGDYYGIPTHGVPAMRSKIDPILEARQKYAYGPQHDYLDHPDVIGWTREGDSSHPKSGLATLITDGPGGSKRMYAGLKNAGETWYDITGNRSDTVKIGSDGWGEFHVNDGSVSIYVQK

SEQ ID NO: 40232 - protein, 478 aa, Bacillus sp.
NGTMMQYFEWYLPNDGNHWNRLNSDASNLKSKGITAVWIPPAWKGASQNDVGYGAYDLYDLGEFNQKGTVRTKYGTRSQLQAAVTSLKNNGIQVYGDVVMNHKGGADATEMVPAVEVNPNNRNQEVTGEYTIEAWTRFDFPGRGNTHSSFKWRWYHFDGVDWDQSRRLNNRIYKFRAKAWDWEVDTEFGNYDYLMYADYDMDHPEVVNELRNWGVWYTNTLGLDGFRIDAVKHIKYSFTRDWINHVRSATGKNMFAVAEFWKNDLGAIENYLQKTNWNHSVFDVPLHYNLYNASKSGGNYDMRNIFNGTVVQRHPSHAVTFVDNHDSQPEEALESFVEEWFKPLAYALTLTREQGYPSVFYGDYYGIPTHGVPAMRSKIDPILEARQKYAYGPQHDYLDHPDVIGWTREGDSSHPKSGLATLITDGPGGSKRMYAGLKNAGETWYDITGNRSDTVKIGSDGWGEFHVNDGSVSIYVQK

SEQ ID NO: 40233 - protein, 478 aa, Bacillus sp.
NGTMMQYFEWYLPNDGNHWNRLNSDASNLKSKGITAVWIPPAWKGASQNDVGYGAYDLYDLGEFNQKGTVRTKYGTRSQLQAAVTSLKNNGIQVYGDVVMNHKGGADATEMVRAVEVNPNNRNQEVTGEYTIEAWTRFDFPGRKNTHSSFKWRWYHFDGVDWDQSRRLNNRIYKFRGKAWDWEVDTEFGNYDYLMYADYDMDHPEVVNELRNWGVWYTNTLGLDGFRIDAVKHIKYSFTRDWINHVRSATGKNMFAVAEFWKNDLGAIENYLQKTNWNHSVFDVPLHYNLYNASKSGGNYDMRNIFNGTVVQRHPSHAVTFVDNHDSQPEEALESFVEEWFKPLAYALTLTREQGYPSVFYGDYYGIPTHGVPAMRSKIDPILEARQKYAYGPQHDYLDHPDVIGWTREGDSSHPKSGLATLITDGPGGSKRMYAGLKNAGETWYDITGNRSDTVKIGSDGWGEFHVNDGSVSIYVQK

SEQ ID NO: 40234 - protein, 478 aa, Bacillus sp.
NGTMMQYFEWYLPNDGNHWNRLNSDASNLKSKGITAVWIPPAWKGASQNDVGYGAYDLYDLGEFNQKGTVRTKYGTRSQLQAAVTSLKNNGIQVYGDVVMNHKGGADATEMVRAVEVNPNNRNQEVTGEYTIEAWTRFDFPGRGNTHSSFKWRWYHFDGVDWDQSREFDNRIYKFRGKAWDWEVDTEFGNYDYLMYADYDMDHPEVVNELRNWGVWYTNTLGLDGFRIDAVKHIKYSFTRDWINHVRSATGKNMFAVAEFWKNDLGAIENYLQKTNWNHSVFDVPLHYNLYNASKSGGNYDMRNIFNGTVVQAHPNHAVTFVDNHDSQPEEALESFVEEWFKPLAYALTLTREQGYPSVFYGDYYGIPTHGVPAMRSKIDPILEARQKYAYGPQHDYLDHPDVIGWTREGDSSHPKSGLATLITDGPGGSKRMYAGLKNAGETWYDITGNRSDTVKIGSDGWGEFHVNDGSVSIYVQK

SEQ ID NO: 40235 - protein, 478 aa, Bacillus sp.
NGTMMQYFEWYLPNDGNHWNRLNSDASNLKSKGITAVWIPPAWKGASQNDVGYGAYDLYDLGEFNQKGTVRTKYGTRSQLQAAVTSLKNNGIQVYGDVVMNHKGGADATEMVRAVEVNPNNRNQEVTGEYTIEAWTRFDFPGRGNTHSSFKWRWYHFDGVDWDQSRRLNNRIYKFRGKAWDWEVDTEFGNYDYLMYADYDMDHPEVVNELRNWGVWYTNTLGLDGFRIDAVKHIKYSFTRDWINHVRSATGKNMFAVAEFWKNDLGAIENYLQKTNWNHSVFDVPLHYNLYNASKSGGNYDMRNIFNGTVVQAHPSHAVTFVDNHDSQPEEALESFVEEWFKPLAYALTLTREQGYPSVFYGDYYGIPTHGVPAMRSKIDPILEARQKYAYGPQHDYLDHPDVIGWTREGDSSHPKSGLATLITDGPGGSKRMYAGLKNAGETWYDITGNRSDTVKIGSDGWGEFHVNDGSVSIYVQK

SEQ ID NO: 40236 - protein, 478 aa, Bacillus sp.
NGTMMQYFEWYLPNDGNHWNRLNSDASNLKSKGITAVWIPPAWKAASQNDVGYGAYDLYDLGEFNQKGTVRTKYGTRSQLQAAVTSLKNNGIQVYGDVVMNHKGGADATEMVRAVEVNPNNRNQEVTGEYTIEAWTRFDFPGRGNTHSSFKWRWYHFDGVDWDQSRDLNNRIYKFRGKAWDWEVDTEFGNYDYLMYADYDMDHPEVVNELRNWGVWYTNTLGLDGFRIDAVKHIKYSFTRDWINHVRSATGKNMFAVAEFWKNDLGAIENYLQKTNWNHSVFDVPLHYNLYNASKSGGNYDMRNIFNGTVVQRHPSHAVTFVDNHDSQPEEALESFVEEWFKPLAYALTLTREQGYPSVFYGDYYGIPTHGVPAMRSKIDPILEARQKYAYGPQHDYLDHPDVIGWTREGDSSHPKSGLATLITDGPGGSKRMYAGLKNAGETWYDITGNRSDTVKIGSDGWGEFHVNDGSVSIYVQK

SEQ ID NO: 40237 - protein, 478 aa, Bacillus sp.
NGTMMQYFEWYLPNDGNHWNRLNSDASNLKSKGITAVWIPPAWKGASQNDVGYGAYDLYDLGEFNQKGTVRTKYGTRSQLQAAVTSLKNNGIQVYGDVVMNHKGGADATEMVRAVEVNPNNRNQEVTGEYTIEAWTRFDFPGRGNTHSSFKWRWYHFDGVDWDQSRKLNNRIYKFRGKAWDWEVDTEFGNYDYLMYVDYDMDHPEVVNELRNWGVWYTNTLGLDGFRIDAVKHIKYSFTRDWINHVRSATGKNMFAVAEFWKNDLGAIENYLQKTNWNHSVFDVPLHYNLYNASKSGGNYDMRNIFNGTVVQRHPSHAVTFVDNHDSQPEEALESFVDEWFKPLAYALTLTREQGYPSVFYGDYYGIPTHGVPAMRSKIDPILEARQKYAYGPQHDYLDHPDVIGWTREGDSSHPKSGLATLITDGPGGSKRMYAGLKNAGETWYDITGNRSDTVKIGSDGWGEFHVNKGSVSIYVQK

SEQ ID NO: 40238 - protein, 478 aa, Bacillus sp.
NGTMMQYFEWYLPNDGNHWNRLNSDASNLKSKGITAVWIPPAWKGASQNDVGYGAYDLYDLGEFNQKGTVRTKYGTRSQLQAAVTSLKNNGIQVYGDVVMNHKGGADATEMVRAVEVNPNNRNQEVTGEYTIEAWTRFDFPGRGNTHSSFKWRWYHFDGVDWDQSRRLNNRIYKFRGKAWDWEVDTEFGNYDYLMYADYDMDHPEVVNELRNWGVWYTNTLGLDGFRIDAVKHIKYSFTRDWINHVRSATGKNMFAVAEFWKNDLGAIENYLQKTNWNHSVFDVPLHYNLYNASKSGGNYDMRNIFNGTVVQRHPSHAVTFVDNHDSQPEEALESFVETWFKPLAYALTLTREQGYPSVFYGDYYGIPTHGVPAMRSKIDPILEARQKYAYGPQHDYLDHPDVIGWTREGDSSHPKSGLATLITDGPGGSKRMYAGLKNAGETWYDITGNRSDTVKIGSDGWGEFHVNQASVSIYVQK

SEQ ID NO: 40239 - protein, 478 aa, Bacillus sp.
NGTMMQYFEWYLPNDGNHWNRLNSDASNLKSKGITAVWIPPAWKGASQNDVGYGAYDLYDLGEFNQKGTVRTKYGTRSQLQAAVTSLKNNGIQVYGDVVMNHKGGADATEMVRAVEVNPNNRNQEVTGEYTIEAWTRFDFPGRGNTHSSFKWRWYHFDGVDWDQSRRLNNRIYKFRGKAWDWEVDTEDGFYDYLMYADIDMDHPEVVNELRNWGVWYTNTLGLDGFRIDAVKHIKYSFTRDWINHVRSATGKNMFAVAEFWKNDLGAIENYLQKTNWNHSVFDVPLHYNLYNASKSGGNYDMRNIFNGTVVQRHPSHAVTFVDNHDSQPEEALESFVEEWFKPLAYALTLTREQGYPSVFYGDYYGIPTHGVPAMRSKIDPILEARQKYAYGPQHDYLDHPDVIGWTREGDSSHPKSGLATLITDGPGGSKRMYAGLKNAGETWYDITGNRSDTVKIGSDGWGEFHVNDGSVSIYVQK

SEQ ID NO: 40240 - protein, 478 aa, Bacillus sp.
NGTMMQYFEWYLPNDGNHWNRLNSDASNLKSKGITAVWIPPAWKGASQNDVGYGAYDLYDLGEFNQKGTVRTKYGTRSQLQAAVTSLKNNGIQVYGDVVMNHKGGADATEMVRAVEVNPNNRNQEVTGEYTIEAWTRFDFPGRGNTHSSFKWRWYHFDGVDWDQSRRLNNRIYKFRGKAWDWEVDTEFGNYDYLMYADYDMDHPEVVNELRNWGVWYTNTLGLDGFRIDAVKHIKYSFTRDWINHVRSATGKNMFAVAEFWKNDLGAIENYLQKTNWNHSVFDVPLHYNLYNASKSGGNYDMRNIFNGTVVQRHPSHAVTFVDNHDSQPEEALESFVEEWFKPWAYALTLTREQGYPSVFYGDYYGIPTHGVPAMRSKIDPILEARQKYAYGPQHDYLDHPDVIGWTREGDSSHPKSGLATLITDGPGGSKRMYAGLKNAGETWYDITGNRSDTVKIGSDGWGEFHVNDGSVSIYVQK

SEQ ID NO: 40241 - protein, 478 aa, Bacillus sp.
NGTMMQYFEWYLPNDGNHWNRLNSDASNLKSKGITAVWIPPAWKGASQNDVGYGAYDLYDLGEFNQKGTVRTKYGTRSQLQAAVTSLKNNGIQVYGDVVMNHKGGADATEMVRAVEVNPNNRNQEVTGEYTIEAWTRFDFPGRGNTHSSFKWRWYHFDGVDWDQSRRLNNRIYKFRGKAWDWEVDTEFGNYDYLMYADYDMDHPEVVNELRNWGVWYTNTLGLDGFRIDAVKHIKYSFTRDWINHVRSATGKNMFAVAEFWKYDLGAIENYLQKTNWNHSVFDVPLHNNLYNASKSGGNYDMRNIFNGTVVQRHPSHAVTFVDNHDSQPEEALESFVEEWFKPLAYALTLTREQGYPSVFYGDYYGIPTHGVPAMRSKIDPILEARQKYAYGPQHDYLDHPDVIGWTREGDSSHPKSGLATLITDGPGGSKRMYAGLKNAGETWYDITGNRSDTVKIGSDGWGEFHVNDGSVSIYVQK

SEQ ID NO: 40242 - protein, 478 aa, Bacillus sp.
NGTMMQYFEWYLPNDGNHWNRLNSDASNLKSKGITAVWIPPAWKGASQNDVGYGAYDLYDLGEFNQKGTVRTKYGTRSQLQAAVTSLKNNGIQVYGDVVMNHKGGADATEMVRAVEVNPNNRNQEVTGEYTIEAWTRFDFPGRGNTHSSFKWRWYHFDGVDWDQSRRFENRIYKFRGKAWDWEVDTEFGNYDYLMYADYDMDHPEVVNELRNWGVWYTNTLGLDGFRIDAVKHIKYSFTRDWINHVRSATGKNMFAVAEFWKNDLGAIENYLQKTNWNHSVFDVPLHYNLYNASKSGGNYDMRNIFNGTVVQRHPSHAVTFVDNHDSQPEEALESFVEEWFKPLAYALTLTREQGYPSVFYGDYYGIPTHGVPAMRSKIDPILEARQKYAYGPQHDYLDHPDVIGWTREGDSSHPKSGLATLITDGPGGSKRMYAGLKNAGETWYDITGNRSDTVKIGSDGWGEFHVNDSSVSIYVQK

SEQ ID NO: 40243 - protein, 478 aa, Bacillus sp.
NGTMMQYFEWYLPNDGNHWNRLNSDASNLKSKGITAVWIPPAWKAASQNDVGYGAYDLYDLGEFNQKGTVRTKYGTRSQLQAAVTSLKNNGIQVYGDVVMNHKGGADATEMVRAVEVNPNNRNQEVTGEYTIEAWTRFDFPGRGNTHSSFKWRWYHFDGVDWDQSRQLSNRIYKFRGKAWDWEVDTEFGNYDYLMYTDYDMDHPEVVNELRNWGVWYTNTLGLDGFRIDAVKHIKYSFTRDWINHVRSATGKNMFAVAEFWKNDLGAIENYLQKTNWNHSVFDVPLHYNLYNASKSGGNYDMRNIFNGTVVQRHPSHAVTFVDNHDSQPEEALESFVEEWFKPLAYALTLTREQGYPSVFYGDYYGIPTHGVPAMRSKIDPILEARQKYAYGPQHDYLDHPDVIGWTREGDSSHPKSGLATLITDGPGGSKRMYAGLKNAGETWYDITGNRSDTVKIGSDGWGEFHVNDGSVSIYVQK

SEQ ID NO: 40244 - protein, 478 aa, Bacillus sp.
NGTMMQYFEWYLPNDGNHWNRLNSDASNLKSKGITAVWIPPAWKGASQNDVGYGAYDLYDLGEFNQKGTVRTKYGTRSQLQAAVTSLKNNGIQVYGDVVMNHKGGADATEMVRAVEVNPNNRNQEVTGEYTIEAWTRFDFPGRGNTHSSFKWRWYHFDGVDWDQSRRLNNRIYKFRGKAWDWEVDTEFGNYDYLMYADYDMDHPEVVNELRNWGVWYTNTLGLDGFRIDAVKHIKYSFTRDWINHVRSATGKNMFAVAEFWKNDLGAIENYLQKTNWNHSVFDVPLHYNLYNASKSGGNYDMRNIFNGTVVQRHPSHAVTFVDNHDSQPEEALESFVEEWFKPLAYALTLTREQGYPSVFYGDYYGIPTHGVPAMRSKIDPILEARQKYAYGPQHDYLDHPDRIGWTREGDSSHPKSGLATLITDGPGGSKRMYAGLKNAGETWYDITGNRSDTVKIGSDGWGEFHVNDGSVSIYVQK

SEQ ID NO: 40245 - protein, 478 aa, Bacillus sp.
NGTMMQYFEWYLPNDGNHWNRLNSDASNLKSKGITAVWIPPAWKGASQNDVGYGAYDLYDLGEFNQKGTVRTKYGTRSQLQAAVTSLKNNGIQVYGDVVMNHKGGADATEMVRAVEVNPNNRNQEVTGEYTIEAWTRFDFPGRGNTHSSFKWRWYHFDGVDWDQSRQLNNRIYKFRGKAWDWEVDTEFGNYDYLMYVDYDMDHPEVVNELRNWGVWYTNTLGLDGFRIDAVKHIKYSFTRDWINHVRSATGKNMFAVAEFWKNDLGAIENYLQKTNWNHSVFDVPLHYNLYNASKSGGNYDMRNIFNGTVVQRHPSHAVTFVDNHDSQPEEALESFVEEWFKPLAYALTLTREQGYPSVFYGDYYGIPTHGVPAMRSKIDPILEARQKYAYGPQHDYLDHPDVIGWTREGDSSHPKSGLATLITDGPGGSKRMYAGLKNAGETWYDITGNRSDTVKIGSDGWGEFHVNDGSVSIYVQK

SEQ ID NO: 40246 - protein, 478 aa, Bacillus sp.
NGTMMQYFEWYLPNDGNHWNRLNSDASNLKSKGITAVWIPPAWKGASQNDVGYGAYDLYDLGEFNQKGTVRTKYGTRSQLQAAVTSLKNNGIQVYGDVVMNHKGGADATEMVRAVEVNPNNRNQEVTGEYTIEAWTRFDFPGRGNTHSSFKWRWYHFDGVDWDQSRRLNNRIYKFRGKAWDWEVDTEFGNYDYLMYADYDMDHPEVVNELRNWGVWYTNTLGLDGFRIDAVKHIKYSFTRDWINHVRSATGKNMFAVAEFWKNDLGAIENYLQKTNWNHSVFDVPLHYNLYNASKSGGNYDMRNIFNGTVVQSHPSQAVTFVDNHDSQPEEALESFVEEWFKPLAYALTLTREQGYPSVFYGDYYGIPTHGVPAMRSKIDPILEARQKYAYGPQHDYLDHPDVIGWTREGDSSHPKSGLATLITDGPGGSKRMYAGLKNAGETWYDITGNRSDTVKIGSDGWGEFHVNDGSVSIYVQK

SEQ ID NO: 40247 - protein, 478 aa, Bacillus sp.
NGTMMQYFEWYLPNDGNHWNRLNSDASNLKSKGITAVWIPPAWKGASQNDVGYGAYDLYDLGEFNQKGTVRTKYGTRSQLQAAVTSLKNNGIQVYGDVVMNHKGGADATEMVRAVEVNPNNRNQEVTGEYTIEAWTRFDFPGRGNTHSSFKWRWYHFDGVDWDQSRRLNNRIYKFRGKAWDWEVDTEFGNYDYLMYADYDMDHPEVVNELRNWGVWYTNTLGLDGFRIDAVKHIKYSFTRDWINHVRSATGKNMFAVAEFWKNDLGAIENYLQKTNWNHSVFDVPLHYNLYNASKSGGNYDMRNIFNGTVVQSHPMHAVTFVDNHDSQPEEALESFVEEWFKPLAYALTLTREQGYPSVFYGDYYGIPTHGVPAMRSKIDPILEARQKYAYGPQHDYLDHPDVIGWTREGDSSHPKSGLATLITDGPGGSKRMYAGLKNAGETWYDITGNRSDTVKIGSDGWGEFHVNDGSVSIYVQK

SEQ ID NO: 40248 - protein, 478 aa, Bacillus sp.
NGTMMQYFEWYLPNDGNHWNRLNSDASNLKSKGITAVWIPPAWKGASQNDVGYGAYDLYDLGEFNQKGTVRTKYGTRSQLQAAVTSLKNNGIQVYGDVVMNHKGGADATEMVRAVEVNPNNRNQEVTGEYTIEAWTRFDFPGRGNTHSSFKWRWYHFDGVDWDQSRRLNNRIYKFRGKAWDWEVDTEFGNYDYLMYADYDMDHPEVVNELRNWGVWYTNTLGLDGFRIDAVKHIKYSFTRDWINHVRSATGKNMFAVAEFWKNDLGAIENYLQKTNWNHSVFDVPLHYNLYNASKSGGNYDMRNIFNGTVVQRHPSHAVTFVDNHDSQPEEALESFVDTWFKPLAYALTLTREQGYPSVFYGDYYGIPTHGVPAMRSKIDPILEARQKYAYGPQHDYLDHPDVIGWTREGDSSHPKSGLATLITDGPGGSKRMYAGLKNAGETWYDITGNRSDTVKIGSDGWGEFHVNKQSVSIYVQK

SEQ ID NO: 40249 - protein, 478 aa, Bacillus sp.
NGTMMQYFEWYLPNDGNHWNRLNSDASNLKSKGITAVWIPPAWKAASQNDVGYGAYDLYDLGEFNQKGTVRTKYGTRSQLQAAVTSLKNNGIQVYGDVVMNHKGGADATEMVRAVEVNPNNRNQEVTGEYTIEAWTRFDFPGRGNTHSSFKWRWYHFDGVDWDQSRRTSNRIYKFRGKAWDWEVDTEFGNYDYLMYVDYDMDHPEVVNELRNWGVWYTNTLGLDGFRIDAVKHIKYSFTRDWINHVRSATGKNMFAVAEFWKNDLGAIENYLQKTNWNHSVFDVPLHYNLYNASKSGGNYDMRNIFNGTVVQRHPSHAVTFVDNHDSQPEEALESFVEEWFKPLAYALTLTREQGYPSVFYGDYYGIPTHGVPAMRSKIDPILEARQKYAYGPQHDYLDHPDVIGWTREGDSSHPKSGLATLITDGPGGSKRMYAGLKNAGETWYDITGNRSDTVKIGSDGWGEFHVNDGSVSIYVQK

SEQ ID NO: 40250 - protein, 478 aa, Synthetic construct
NGTMMQYFEWYLPNDGNHWNRLNSDASNLKSKGITAVWIPPAWKGASQNDVGYGAYDLYDLGEFNQKGTVRTKYGTRSQLQAAVTSLKNNGIQVYGDVVMNHKGGADATEMVRAVEVNPNNRNQEVTGEYTIEAWTRFDFPGRGNTHSSFKWRWYHFDGVDWDQSRRLNNRIYKFRGKAWDWEVDTEFGNYDYLMYADIDMDHPEPVNELRNWGVWYTNTLGLDGFRIDAVKHIKYSFTRDWINHVRSATGKNMFAVAEFWKNDLGAIENYLQKTNWNHSVFDVPLHYNLYNASKSGGNYDMRNIFNGTVVQRHPSHAVTFVDNHDSQPEEALESFVEEWFKPLAYALTLTREQGYPSVFYGDYYGIPTHGVPAMRSKIDPILEARQKYAYGPQHDYLDHPDVIGWTREGDSSHPKSGLATLITDGPGGSKRMYAGLKNAGETWYDITGNRSDTVKIGSDGWGEFHVNDGSVSIYVQK

SEQ ID NO: 40251 - protein, 478 aa, Bacillus sp.
NGTMMQYFEWYLPNDGNHWNRLNSDASNLKSKGITAVWIPPAWKAASQNDVGYGAYDLYDLGEFNQKGTVRTKYGTRSQLQAAVTSLKNNGIQVYGDVVMNHKGGADATEMVRAVEVNPNNRNQEVTGEYTIEAWTRFDFPGRGNTHSSFKWRWYHFDGVDWDQSRQLDNRIYKFRGKAWDWEVDTEFGNYDYLMYADYDMDHPEVVNELRNWGVWYTNTLGLDGFRIDAVKHIKYSFTRDWINHVRSATGKNMFAVAEFWKNDLGAIENYLQKTNWNHSVFDVPLHYNLYNASKSGGNYDMRNIFNGTVVQRHPSHAVTFVDNHDSQPEEALESFVEEWFKPLAYALTLTREQGYPSVFYGDYYGIPTHGVPAMRSKIDPILEARQKYAYGPQHDYLDHPDVIGWTREGDSSHPKSGLATLITDGPGGSKRMYAGLKNAGETWYDITGNRSDTVKIGSDGWGEFHVNDGSVSIYVQK

SEQ ID NO: 40252 - protein, 478 aa, Bacillus sp.
NGTMMQYFEWYLPNDGNHWNRLNSDASNLKSKGITAVWIPPAWKGASQNDVGYGAYDLYDLGEFNQKGTVRTKYGTRSQLQAAVTSLKNNGIQVYGDVVMNHKGGADATEMVRAVEVNPNNRNQEVTGEYTIEAWTRFDFPGRGNTHSSFKWRWYHFDGVDWDQSRRLNNRIYKFRGKAWDWEVDTEFGNYDYLMYADYDMDHPEVVNELRNWGVWYTNTLGLDGFRIDAVKHIKYSFTRDWINHVRSATGKNMFAVAEFWKNDLGAIENYLQKTNWNHSVFDVPLHYNLYNASNSGGNYDMRNIFNGTVVQRHPSHAVTFVDNHDSQPEEALESFVEEWFKPLAYALTLTREQGYPSVFYGDYYGIPTHGVPAMRSKIDPILEARQKYAYGPQHDYLDHPDVIGWTREGDSSHPKSGLATLITDGPGGSKRMYAGLKNAGETWYDITGNRSDTVKIGSDGWGEFHVNGGSVSIYVQK

SEQ ID NO: 40253 - protein, 478 aa, Bacillus sp.
NGTMMQYFEWYLPNDGNHWNRLNSDASNLKSKGITAVWIPPAWKGASQNDVGYGAYDLYDLGEFNQKGTVRTKYGTRSQLQAAVTSLKNNGIQVYGDVVMNHKGGADATEMVRAVEVNPNNRNQEVTGEYTIEAWTRFDFPGRGNTHSSFKWRWYHFDGVDWDQSRRTNNRIYKFRGKAWDWEVDTEFGNYDYLMYTDYDMDHPEVVNELRNWGVWYTNTLGLDGFRIDAVKHIKYSFTRDWINHVRSATGKNMFAVAEFWKNDLGAIENYLQKTNWNHSVFDVPLHYNLYNASKSGGNYDMRNIFNGTVVQRHPSHAVTFVDNHDSQPEEALESFVEEWFKPLAYALTLTREQGYPSVFYGDYYGIPTHGVPAMRSKIDPILEARQKYAYGPQHDYLDHPDVIGWTREGDSSHPKSGLATLITDGPGGSKRMYAGLKNAGETWYDITGNRSDTVKIGSDGWGEFHVNDGSVSIYVQK

SEQ ID NO: 40254 - protein, 478 aa, Bacillus sp.
NGTMMQYFEWYLPNDGNHWNRLNSDASNLKSKGITAVWIPPAWKGASQNDVGYGAYDLYDLGEFNQKGTVRTKYGTRSQLQAAVTSLKNNGIQVYGDVVMNHKGGADATEMVRAVEVNPNNRNQEVTGEYTIEAWTRFDFPGRGNTHSSFKWRWYHFDGVDWDQSRKLNNRIYKFRGKAWDWEVDTEFGNYDYLMYVDYDMDHPEVVNELRNWGVWYTNTLGLDGFRIDAVKHIKYSFTRDWINHVRSATGKNMFAVAEFWKNDLGAIENYLQKTNWNHSVFDVPLHYNLYNASKSGGNYDMRNIFNGTVVQRHPSHAVTFVDNHDSQPEEALESFVDPWFKPLAYALTLTREQGYPSVFYGDYYGIPTHGVPAMRSKIDPILEARQKYAYGPQHDYLDHPDVIGWTREGDSSHPKSGLATLITDGPGGSKRMYAGLKNAGETWYDITGNRSDTVKIGSDGWGEFHVNGGSVSIYVQK

SEQ ID NO: 40255 - protein, 478 aa, Bacillus sp.
NGTMMQYFEWYLPNDGNHWNRLNSDASNLKSKGITAVWIPPAWKGASQNDVGYGAYDLYDLGEFNQKGTVRTKYGTRSQLQAAVTSLKNNGIQVYGDVVMNHKGGADATEMVRAVEVNPNNRNQEVTGDYTIEAWTRFDFPGRGNTHSSFKWRWYHFDGVDWDQSRRLNNRIYKFRGKAWDWEVDTEFGNYDYLMYADYDMDHPEVVNELRNWGVWYTNTLGLDGFRIDAVKHIKYSFTRDWINHVRSATGKNMFAVAEFWKNDLGAIENYLQKTNWNHSVFDVPLHYNLYNASKSGGNYDMRNIFNGTVVQRHPSHAVTFVDNHDSQPEEALESFVEEWFKPLAYALTLTREQGYPSVFYGDYYGIPTHGVPAMRSKIDPILEARQKYAYGPQHDYLDHPDVIGWTREGDSSHPKSGLATLITDGPGGSKRMYAGLKNAGETWYDITGNRSDTVKIGSDGWGEFHVNDGSVSIYVQK

SEQ ID NO: 40256 - protein, 478 aa, Bacillus sp.
NGTMMQYFEWYLPNDGNHWDRLNSDASNLKSKGITAVWIPPAWKGASQNDVGYGAYDLYDLGEFNQKGTVRTKYGTRSQLQAAVTSLKNNGIQVYGDVVMNHKGGADATEMVRAVEVNPNNRNQEVTGEYTIEAWTRFDFPGRGNTHSSFKWRWYHFDGVDWDQSRNLNNRIYKFRGKAWDWEVDTEFGNYDYLMYTDYDMDHPEVVNELRNWGVWYTNTLGLDGFRIDAVKHIKYSFTRDWINHVRSATGKNMFAVAEFWKNDLGAIENYLQKTNWNHSVFDVPLHYNLYNASKSGGNYDMRNIFNGTVVQRHPSHAVTFVDNHDSQPEEALESFVEEWFKPLAYALTLTREQGYPSVFYGDYYGIPTHGVPAMRSKIDPILEARQKYAYGPQHDYLDHPDVIGWTREGDSSHPKSGLATLITDGPGGSKRMYAGLKNAGETWYDITGNRSDTVKIGSDGWGEFHVNDGSVSIYVQK

SEQ ID NO: 40257 - protein, 478 aa, Bacillus sp.
NGTMMQYFEWYLPNDGNHWNRLNSDASNLKSKGITAVWIPPAWKGASQNDVGYGAYDLYDLGEFNQKGTVRTKYGTRSQLQAAVTSLKNNGIQVYGDVVMNHKGGADATEMVRAVEVNPNNRNQEVTGEYTIEAWTRFDFPGRGNTHSSFKWRWYHFDGVDWDQSRELNNRIYKFRGKAWDWEVDTEFGNYDYLMYVDYDMDHPEVVNELRNWGVWYTNTLGLDGFRIDAVKHIKYSFTRDWINHVRSATGKNMFAVAEFWKNDLGAIENYLQKTNWNHSVFDVPLHYNLYNASKSGGNYDMRNIFNGTVVQRHPSHAVTFVDNHDSQPEEALESFVEEWFKPLAYALTLTREQGYPSVFYGDYYGIPTHGVPAMRSKIDPILEARQKYAYGPQHDYLDHPDVIGWTREGDSSHPKSGLATLITDGPGGSKRMYAGLKNAGETWYDITGNRSDTVKIGSDGWGEFHVNDGSVSIYVQK

SEQ ID NO: 40258 - protein, 478 aa, Bacillus sp.
NGTMMQYFEWYLPNDGNHWNRLNSDASNLKSKGITAVWIPPAWKGASQNDVGYGAYDLYDLGEFNQRGTVRTKYGTRSQLQAAVTSLKNNGIQVYGDVVMNHKGGADATEMVRAVEVNPNNRNQEVTGEYTIEAWTRFDFPGRGNTHSSFKWRWYHFDGVDWDQSRRLNNRIYKFRGKAWDWEVDTEFGNYDYLMYADYDMDHPEVVNELRNWGVWYTNTLGLDGFRIDAVKHIKYSFTRDWINHVRSATGKNMFAVAEFWKNDLGAIENYLQKTNWNHSVFDVPLHYNLYNASKSGGNYDMRNIFNGTVVQRHPSHAVTFVDNHDSQPEEALESFVEEWFKPLAYALTLTREQGYPSVFYGDYYGIPTHGVPAMRSKIDPILEARQKYAYGPQHDYLDHPDVIGWTREGDSSHPKSGLATLITDGPGGSKRMYAGLKNAGETWYDITGNRSDTVKIGSDGWGEFHVNDGSVSIYVQK

SEQ ID NO: 40259 - protein, 478 aa, Bacillus sp.
NGTMMQYFEWYLPNDGNHWNRLNSDASNLKSKGITAVWIPPAWKAASQNDVGYGAYDLYDLGEFNQKGTVRTKYGTRSQLQAAVTSLKNNGIQVYGDVVMNHKGGADATEMVRAVEVNPNNRNQEVTGEYTIEAWTRFDFPGRGNTHSSFKWRWYHFDGVDWDQSRSLSNRIYKFRGKAWDWEVDTEFGNYDYLMYADYDMDHPEVVNELRNWGVWYTNTLGLDGFRIDAVKHIKYSFTRDWINHVRSATGKNMFAVAEFWKNDLGAIENYLQKTNWNHSVFDVPLHYNLYNASKSGGNYDMRNIFNGTVVQRHPSHAVTFVDNHDSQPEEALESFVETWFKPLAYALTLTREQGYPSVFYGDYYGIPTHGVPAMRSKIDPILEARQKYAYGPQHDYLDHPDVIGWTREGDSSHPKSGLATLITDGPGGSKRMYAGLKNAGETWYDITGNRSDTVKIGSDGWGEFHVNKASVSIYVQK

SEQ ID NO: 40260 - protein, 478 aa, Bacillus sp.
NGTMMQYFEWYLPNDGNHWNRLNSDASNLKSKGITAVWIPPAWKGASQNDVGYGAYDLYDLGEFNQKGTVRTKYGTRSQLQAAVTSLKNNGIQVYGDVVMNHKGGADATEMVRAVEVNPNNRNQEVTGEYTIEAWTRFDFPGRGNTHSSFKWRWYHFDGVDWDQSRRLNNRIYKFRGKAWDWEVDTEFGNYDYLMYADYDMDHPEVVNELRNWGVWYTNTLGLDGFRIDAVKHIKYSFTRDWINHVRSATGKNMFAVAEFWKNDLGAIENYLQKTNWNHSVFDVPLHYNLYNASKSRGNYDMRNIFNGTVVQRHPSHAVTFVDNHDSQPEEALESFVEEWFKPLAYALTLTREQGYPSVFYGDYYGIPTHGVPAMRSKIDPILEARQKYAYGPQHDYLDHPDVIGWTREGDSSHPKSGLATLITDGPGGSKRMYAGLKNAGETWYDITGNRSDTVKIGSDGWGEFHVNDGSVSIYVQK

SEQ ID NO: 40261 - protein, 478 aa, Bacillus sp.
NGTMMQYFEWYLPNDGNHWNRLNSDASNLKSKGITAVWIPPAWKAASQNDVGYGAYDLYDLGEFNQKGTVRTKYGTRSQLQAAVTSLKNNGIQVYGDVVMNHKGGADATEMVRAVEVNPNNRNQEVTGEYTIEAWTRFDFPGRGNTHSSFKWRWYHFDGVDWDQSREFTNRIYKFRGKAWDWEVDTEFGNYDYLMYADYDMDHPEVVNELRNWGVWYTNTLGLDGFRIDAVKHIKYSFTRDWINHVRSATGKNMFAVAEFWKNDLGAIENYLQKTNWNHSVFDVPLHYNLYNASKSGGNYDMRNIFNGTVVQRHPSHAVTFVDNHDSQPEEALESFVEEWFKPLAYALTLTREQGYPSVFYGDYYGIPTHGVPAMRSKIDPILEARQKYAYGPQHDYLDHPDVIGWTREGDSSHPKSGLATLITDGPGGSKRMYAGLKNAGETWYDITGNRSDTVKIGSDGWGEFHVNDGSVSIYVQK

SEQ ID NO: 40262 - protein, 478 aa, Bacillus sp.
NGTMMQYFEWYLPNDGNHWNRLNSDASNLKSKGITAVWIPPAWKGASQNDVGYGAYDLYDLGEFNQKGTVRTKYGTRSQLQAAVTSLKNNGIQVYGDVVMNHKGGADATEMVRAVEVNPNNRNQEVTGEYTIEAWTRFDFPGRGNTHSSFKWRWYHFDGVDWDQSRRLNNRIYKFRGKAWDWEVDTEFGNYDYLMYADYDMDHPEVVNELRNWGVWYTNTLGLDGFRIDAVKHIKYSFTRDWINHVRSATGKNMFAVAEFWKNDLGAIENYLQKTNWNHSVFDVPLHYNLYNASKSSGNYDMRNIFNGTVVQRHPSHAVTFVDNHDSQPEEALESFVDTWFKPLAYALTLTREQGYPSVFYGDYYGIPTHGVPAMRSKIDPILEARQKYAYGPQHDYLDHPDVIGWTREGDSSHPKSGLATLITDGPGGSKRMYAGLKNAGETWYDITGNRSDTVKIGSDGWGEFHVNKGSVSIYVQK

SEQ ID NO: 40263 - protein, 478 aa, Bacillus sp.
NGTMMQYFEWYLPNDGNHWNRLNSDASNLKSKGITAVWIPPAWKGASQNDVGYGAYDLYDLGEFNQKGTVRTKYGTRSQLQAAVTSLKNNGIQVYGDVVMNHKGGADATEMVRAVEVNPNNRNQEVTGEYTIEAWTRFDFPGRGNTHSSFKWRWYHFDGVDWDQSRRLNNRIYTFRGKAWDWEVDTEFGNYDYLMYADYDMDHPEVVNELRNWGVWYTNTLGLDGFRIDAVKHIKYSFTRDWINHVRSATGKNMFAVAEFWKNDLGAIENYLQKTNWNHSVFDVPLHYNLYNASKSGGNYDMRNIFNGTVVQRHPSHAVTFVDNHDSQPEEALESFVEEWFKPLAYALTLTREQGYPSVFYGDYYGIPTHGVPAMRSKIDPILEARQKYAYGPQHDYLDHPDVIGWTREGDSSHPKSGLATLITDGPGGSKRMYAGLKNAGETWYDITGNRSDTVKIGSDGWGEFHVNDGSVSIYVQK

SEQ ID NO: 40264 - protein, 478 aa, Bacillus sp.
NGTMMQYFEWYLPNDGNHWNRLNSDASNLKSKGITAVWIPPAWKGASQNDVGYGAYDLYDLGEFNQKGTVRTKYGTRSQLQAAVTSLKNNGIQVYGDVVMNHKGGADATEMVRAVEVNPNNRNQEVTGEYTIEAWTRFDFPGRGNTHSSFKWRWYHFDGVDWDQSRRLNNRIYKFRGKTWDWEVDTEFGNYDYLMYADYDMDHPEVVNELRNWGVWYTNTLGLDGFRIDAVKHIKYSFTRDWINHVRSATGKNMFAVAEFWKNDLGAIENYLQKTNWNHSVFDVPLHYNLYNASKSGGNYDMRNIFNGTVVQRHPSHAVTFVDNHDSQPEEALESFVEEWFKPLAYALTLTREQGYPSVFYGDYYGIPTHGVPAMRSKIDPILEARQKYAYGPQHDYLDHPDVIGWTREGDSSHPKSGLATLITDGPGGSKRMYAGLKNAGETWYDITGNRSDTVKIGSDGWGEFHVNDGSVSIYVQK

SEQ ID NO: 40265 - protein, 478 aa, Bacillus sp.
NGTMMQYFEWYLPNDGNHWNRLNSDASNLKSKGITAVWIPPAWKGASQNDVGYGAYDLYDLGEFNQKGTVRTKYGTRSQLQAAVTSLKNNGIQVYGDVVMNHKGGADATEMVRAVEVNPNNRNQEVTGEYTIEAWTRFDFPGRGNTHSSFKWRWYHFDGVDWDQSRRLNNRIYKFRGKAWDWEVDTEFGNYDYLMYADYDMDHPEVVNELRNWGVWYTNTLGLDGFRIDAVKHIKYSFTRDWINHVRSATGKNMFAVAEFWKNDLGAIENYLQKGNWNHSVFDVPLHYNLYNASKSGGNYDMRNIFNGTVVQRHPSHAVTFVDNHDSQPEEALESFVEEWFKPLAYALTLTREQGYPSVFYGDYYGIPTHGVPAMRSKIDPILEARQKYAYGPQHDYLDHPDVIGWTREGDSSHPKSGLATLITDGPGGSKRMYAGLKNAGETWYDITGNRSDTVKIGSDGWGEFHVNDGSVSIYVQK

SEQ ID NO: 40266 - protein, 478 aa, Bacillus sp.
NGTMMQYFEWYLPNDGNHWNRLNSDASNLKSKGITAVWIPPAWKAVSQNDVGYGAYDLYDLGEFNQKGTVRTKYGTRSQLQAAVTSLKNNGIQVYGDVVMNHKGGADATEMVRAVEVNPNNRNQEVTGEYTIEAWTRFDFPGRGNTHSSFKWRWYHFDGVDWDQSRDFNNRIYKFRGKAWDWEVDTEFGNYDYLMYADYDMDHPEVVNELRNWGVWYTNTLGLDGFRIDAVKHIKYSFTRDWINHVRSATGKNMFAVAEFWKNDLGAIENYLQKTNWNHSVFDVPLHYNLYNASKSGGNYDMRNIFNGTVVQRHPSHAVTFVDNHDSQPEEALESFVEEWFKPLAYALTLTREQGYPSVFYGDYYGIPTHGVPAMRSKIDPILEARQKYAYGPQHDYLDHPDVIGWTREGDSSHPKSGLATLITDGPGGSKRMYAGLKNAGETWYDITGNRSDTVKIGSDGWGEFHVNDGSVSIYVQK

SEQ ID NO: 40267 - protein, 478 aa, Bacillus sp.
NGTMMQYFEWYLPNDGNHWNRLNSDASNLKSKGITAVWIPPAWKGASQNDVGYGAYDLYDLGEFNQKGTVRTKYGTRSQLQAAVTSLKNNGIQVYGDVVMNHKGGADATEMVRAVEVNPNNRNQEVTGEYTIEAWTRFDFPGRGNTHSSFKWRWHHFDGVDWDQSRRLNNRIYKFRGKAWDWEVDTEFGNYDYLMYADYDMDHPEVVNELRNWGVWYTNTLGLDGFRIDAVKHIKYSFTRDWINHVRSATGKNMFAVAEFWKNDLGAIENYLQKTNWNHSVFDVPLHYNLYNASKSGGNYDMRNIFNGTVVQRHPSHAVTFVDNHDSQPEEALESFVEEWFKPLAYALTLTREQGYPSVFYGDYYGIPTHGVPAMRSKIDPILEARQKYAYGPQHDYLDHPDVIGWTREGDSSHPKSGLATLITDGPGGSKRMYAGLKNAGETWYDITGNRSDTVKIGSDGWGEFHVNDGSVSIYVQK

SEQ ID NO: 40268 - protein, 478 aa, Bacillus sp.
NGTMMQYFEWYLPNDGNHWNRLNSDASNLKSKGITAVWIPPAWKGASQNDVGYGAYDLYDLGEFNQKGTVRTKYGTRSQLQAAVTSLKNNGIQVYGDVVMNHKGGADATEMVRAVEVNPNNRNQEVTGEYTIEAWTRFDFPGRGNTHSSFKWRWYHFDGVDWDQSRRLNNRIYKFRGKAWDWEVDTEFGNYDYLMYADYDMDHPEVVNELRNWGVWYTNTLGLDGFRIDAVKHIKYSFTRDWINHVRSATGKNMFAVAEFWKNDLGAIENYLQKTNWNHSVFDVPLHYNLYNASKSAGNYDMRNIFNGTVVQRHPSHAVTFVDNHDSQPEEALESFVEPWFKPLAYALTLTREQGYPSVFYGDYYGIPTHGVPAMRSKIDPILEARQKYAYGPQHDYLDHPDVIGWTREGDSSHPKSGLATLITDGPGGSKRMYAGLKNAGETWYDITGNRSDTVKIGSDGWGEFHVNDGSVSIYVQK

SEQ ID NO: 40269 - protein, 478 aa, Bacillus sp.
NGTMMQYFEWYLPNDGNHWNRLNSDASNLKSKGITAVWIPPAWKGASQNDVGYGAYDLYDLGEFNQKGTVRTKYGTRSQLQAAVTSLKNNGIQVYGDVVMNHKGGADHTEMVRAVEVNPNNRNQEVTGEYTIEAWTRFDFPGRGNTHSSFKWRWYHFDGVDWDQSRRLNNRIYKFRGKAWDWEVDTEFGNYDYLMYADYDMDHPEVVNELRNWGVWYTNTLGLDGFRIDAVKHIKYSFTRDWINHVRSATGKNMFAVAEFWKNDLGAIENYLQKTNWNHSVFDVPLHYNLYNASKSGGNYDMRNIFNGTVVQRHPSHAVTFVDNHDSQPEEALESFVEEWFKPLAYALTLTREQGYPSVFYGDYYGIPTHGVPAMRSKIDPILEARQKYAYGPQHDYLDHPDVIGWTREGDSSHPKSGLATLITDGPGGSKRMYAGLKNAGETWYDITGNRSDTVKIGSDGWGEFHVNDGSVSIYVQK

SEQ ID NO: 40270 - protein, 478 aa, Bacillus sp.
NGTMMQYFEWYLPNDGNHWNRLNSDASNLKSKGIMAVWIPPAWKGASQNDVGYGAYDLYDLGEFNQKGTVRTKYGTRSQLQAAVTSLKNNGIQVYGDVVMNHKGGADATEMVRAVEVNPNNRNQEVTGEYTIEAWTRFDFPGRGNTHSSFKWRWYHFDGVDWDQSRRLNNRIYKFRGKAWDWEVDTEFGNYDYLMYADYDMDHPEVVNELRNWGVWYTNTLGLDGFRIDAVKHIKYSFTRDWINHVRSATGKNMFAVAEFWKNDLGAIENYLQKTNWNHSVFDVPLHYNLYNASKSGGNYDMRNIFNGTVVQRHPSHAVTFVDNHDSQPEEALESFVEEWFKPLAYALTLTREQGYPSVFYGDYYGIPTHGVPAMRSKIDPILEARQKYAYGPQHDYLDHPDVIGWTREGDSSHPKSGLATLITDGPGGSKRMYAGLKNAGETWYDITGNRSDTVKIGSDGWGEFHVNDGSVSIYVQK

SEQ ID NO: 40271 - protein, 478 aa, Bacillus sp.
NGTMMQYFEWYLPNDGNHWNRLNSDASNLKSKGITAVWIPPAWKAASQNDVGYGAYDLYDLGEFNQKGTVRTKYGTRSQLQAAVTSLKNNGIQVYGDVVMNHKGGADATEMVRAVEVNPNNRNQEVTGEYTIEAWTRFDFPGRGNTHSSFKWRWYHFDGVDWDQSRQVNNRIYKFRGKAWDWEVDTEFGNYDYLMYADYDMDHPEVVNELRNWGVWYTNTLGLDGFRIDAVKHIKYSFTRDWINHVRSATGKNMFAVAEFWKNDLGAIENYLQKTNWNHSVFDVPLHYNLYNASKSGGNYDMRNIFNGTVVQRHPSHAVTFVDNHDSQPEEALESFVEEWFKPLAYALTLTREQGYPSVFYGDYYGIPTHGVPAMRSKIDPILEARQKYAYGPQHDYLDHPDVIGWTREGDSSHPKSGLATLITDGPGGSKRMYAGLKNAGETWYDITGNRSDTVKIGSDGWGEFHVNDGSVSIYVQK

SEQ ID NO: 40272 - protein, 478 aa, Bacillus sp.
NGTMMQYFEWYLPNDGNHWNRLNSDASNLKSKGITAVWIPPAWKATSQNDVGYGAYDLYDLGEFNQKGTVRTKYGTRSQLQAAVTSLKNNGIQVYGDVVMNHKGGADATEMVRAVEVNPNNRNQEVTGEYTIEAWTRFDFPGRGNTHSSFKWRWYHFDGVDWDQSRRLENRIYKFRGKAWDWEVDTEFGNYDYLMYADYDMDHPEVVNELRNWGVWYTNTLGLDGFRIDAVKHIKYSFTRDWINHVRSATGKNMFAVAEFWKNDLGAIENYLQKTNWNHSVFDVPLHYNLYNASKSGGNYDMRNIFNGTVVQRHPSHAVTFVDNHDSQPEEALESFVEEWFKPLAYALTLTREQGYPSVFYGDYYGIPTHGVPAMRSKIDPILEARQKYAYGPQHDYLDHPDVIGWTREGDSSHPKSGLATLITDGPGGSKRMYAGLKNAGETWYDITGNRSDTVKIGSDGWGEFHVNDGSVSIYVQK

SEQ ID NO: 40273 - protein, 478 aa, Bacillus sp.
NGTMMQYFEWYLPNDGNHWNRLNSDASNLKSKGITAVWIPPAWKASSQNDVGYGAYDLYDLGEFNQKGTVRTKYGTRSQLQAAVTSLKNNGIQVYGDVVMNHKGGADATEMVRAVEVNPNNRNQEVTGEYTIEAWTRFDFPGRGNTHSSFKWRWYHFDGVDWDQSRDLQNRIYKFRGKAWDWEVDTEFGNYDYLMYADYDMDHPEVVNELRNWGVWYTNTLGLDGFRIDAVKHIKYSFTRDWINHVRSATGKNMFAVAEFWKNDLGAIENYLQKTNWNHSVFDVPLHYNLYNASKSGGNYDMRNIFNGTVVQRHPSHAVTFVDNHDSQPEEALESFVEEWFKPLAYALTLTREQGYPSVFYGDYYGIPTHGVPAMRSKIDPILEARQKYAYGPQHDYLDHPDVIGWTREGDSSHPKSGLATLITDGPGGSKRMYAGLKNAGETWYDITGNRSDTVKIGSDGWGEFHVNDGSVSIYVQK

SEQ ID NO: 40274 - protein, 478 aa, Bacillus sp.
NGTMMQYFEWYLPNDGNHWNRLNSDASNLKSKGITAVWIPPAWKGTSQNDVGYGAYDLYDLGEFNQKGTVRTKYGTRSQLQAAVTSLKNNGIQVYGDVVMNHKGGADATEMVRAVEVNPNNRNQEVTGEYTIEAWTRFDFPGRGNTHSSFKWRWYHFDGVDWDQSRNLNNRIYKFRGKAWDWEVDTEFGNYDYLMYVDYDMDHPEVVNELRNWGVWYTNTLGLDGFRIDAVKHIKYSFTRDWINHVRSATGKNMFAVAEFWKNDLGAIENYLQKTNWNHSVFDVPLHYNLYNASKSGGNYDMRNIFNGTVVQRHPSHAVTFVDNHDSQPEEALESFVEEWFKPLAYALTLTREQGYPSVFYGDYYGIPTHGVPAMRSKIDPILEARQKYAYGPQHDYLDHPDVIGWTREGDSSHPKSGLATLITDGPGGSKRMYAGLKNAGETWYDITGNRSDTVKIGSDGWGEFHVNDGSVSIYVQK

SEQ ID NO: 40275 - protein, 478 aa, Bacillus sp.
NGTMMQYFEWYLPNDGNHWNRLNSDASNLKSKGITAVWIPPAWKGASQNDVGYGAYDLYDLGEFNQKGTVRTKYGTRSQLQAAVTSLKNNGIQVYGDVVMNHKGGADATEMVRAVEVNPNNRNQEVTGEYTIEAWTRFDFPGRGNTHSSFKWRWYHFDGVDWDQSRRLNNRIYKFRGKAWDWEVDTEFGNYDYLMYADYDMDHPEVVNELRNWGVWYTNTLGLDGFRIDAVKHIKYSFTRDWINHVRSATGKNMFAVAEFWKNDLGAIENYLQKTNWNHSVFDVPLHYNLYNASKSGGNYDMRNIFNGTVVQMHPNHAVTFVDNHDSQPEEALESFVEEWFKPLAYALTLTREQGYPSVFYGDYYGIPTHGVPAMRSKIDPILEARQKYAYGPQHDYLDHPDVIGWTREGDSSHPKSGLATLITDGPGGSKRMYAGLKNAGETWYDITGNRSDTVKIGSDGWGEFHVNDGSVSIYVQK

SEQ ID NO: 40276 - protein, 478 aa, Bacillus sp.
NGTMMQYFEWYLPNDGNHWNRLNSDASNLKSKGITAVWIPPAWKGASQNDVGYGAYDLYDLGEFNQKGTVRTKYGTRSQLQAAVTSLKNNGIQVYGDVVMNHKGGADATEMVRAVEVNPNNRNQEVTGEYTIEAWTRFDFPGRGNTHSSFKWRWYHFDGVDWDQSRRLNNRIYKFRGKAWDWEVDTEFGNYDYLMYADYDMDHPEVVNELRNWGVWYTNTLGLDGFRIDAVKHIKYSFTRDWINHVRSATGKNMFAVAEFWKNDLGAIENYLQKTNWNHSVFDVPLHYNLYNASKSGGNYDMRNIFNGTVVQAHPNHAVTFVDNHDSQPEEALESFVEEWFKPLAYALTLTREQGYPSVFYGDYYGIPTHGVPAMRSKIDPILEARQKYAYGPQHDYLDHPDVIGWTREGDSSHPKSGLATLITDGPGGSKRMYAGLKNAGETWYDITGNRSDTVKIGSDGWGEFHVNDGSVSIYVQK

SEQ ID NO: 40277 - protein, 478 aa, Bacillus sp.
NGTMMQYFEWYLPNDGNHWNRLNSDASNLKSKGITAVWIPPAWKGASQNDVGYGAYDLYDLGEFNQKGTVRTKYGTRSQLQAAVTSLKNNGIQVYGDVVMNHKGGADATEMVRAVEVNPNNRNQEVTGEYTIEAWTRFDFPGRGNTHSSFKWRWYHFDGVDWDQSRKLNNRIYKFRGKAWDWEVDTEFGNYDYLMYVDYDMDHPEVVNELRNWGVWYTNTLGLDGFRIDAVKHIKYSFTRDWINHVRSATGKNMFAVAEFWKNDLGAIENYLQKTNWNHSVFDVPLHYNLYNASKSGGNYDMRNIFNGTVVQRHPSHAVTFVDNHDSQPEEALESFVETWFKPLAYALTLTREQGYPSVFYGDYYGIPTHGVPAMRSKIDPILEARQKYAYGPQHDYLDHPDVIGWTREGDSSHPKSGLATLITDGPGGSKRMYAGLKNAGETWYDITGNRSDTVKIGSDGWGEFHVNKASVSIYVQK

SEQ ID NO: 40278 - protein, 478 aa, Bacillus sp.
NGTMMQYFEWYLPNDGNHWNRLNSDASNLKSKGITAVWIPPAWKGASQNDVGYGAYDLYDLGEFNQKGTVRTKYGTRSQLQAAVTSLKNNGIQVYGDVVMNHKGGADATEMVRAVEVNPNNRNQEVTGEYTIEAWTRFDFPGRGNTHSSFKWRWYHFDGVDWDQSRRLNNRIYKFRGKAWDWEVDTEFGNYDYLMYADYDMDHPEVVNELRNWGVWYTNTLGLDGFRIDAVKHIKYSFTRDWINHVRSATGKNMFAVAEFWKNDLGAIENYLQKTNWNHSVFDVPLHYNLYNASKSGGNYDMRNIFNGTVVQRHPSHAVTFVDNHDSQPEEALESFVDTWFKPLAYALTLTREQGYPSVFYGDYYGIPTHGVPAMRSKIDPILEARQKYAYGPQHDYLDHPDVIGWTREGDSSHPKSGLATLITDGPGGSKRMYAGLKNAGETWYDITGNRSDTVKIGSDGWGEFHVNKKSVSIYVQK

SEQ ID NO: 40279 - protein, 478 aa, Bacillus sp.
NGTMMQYFEWYLPNDGNHWNRLNSDASNLKSKGITAVWIPPAWKGASQNDVGYGAYDLYDLGEFNQKGTVRTKYGTRSQLQAAVTSLKNNGIQVYGDVVMNHKGGADATEMVRAVEVNPNNRNQEVTGEYTIEAWTRFDFPGRGNTHSSFKWRWYHFDGVDWDQSRRLNNRIYPFRGKAWDWEVDTEFGNYDYLMYADYDMDHPEVVNELRNWGVWYTNTLGLDGFRIDAVKHIKYSFTRDWINHVRSATGKNMFAVAEFWKNDLGAIENYLQKTNWNHSVFDVPLHYNLYNASKSGGNYDMRNIFNGTVVQRHPSHAVTFVDNHDSQPEEALESFVEEWFKPLAYALTLTREQGYPSVFYGDYYGIPTHGVPAMRSKIDPILEARQKYAYGPQHDYLDHPDVIGWTREGDSSHPKSGLATLITDGPGGSKRMYAGLKNAGETWYDITGNRSDTVKIGSDGWGEFHVNDGSVSIYVQK

SEQ ID NO: 40280 - protein, 478 aa, Bacillus sp.
NGTMMQYFEWYLPNDGNHWNRLNSDASNLKSKGITAVWIPPAWKGASQNDVGYGAYDLYDLGEFNQKGTVRTKYGTRSQLQAAVTSLKNNGIQVYGDVVMNHKGGADATEMVRAVEVNPNNRNQEVTGEYTIEAWTRFDFPGRGNTHSSFKWRWYHFDGVDWDQSRRLNNRIYKFRGKAWDWEVDTEFGNYDYLMYADYDMDHPEVVNELRNWGVWYTNTLGLDGFRIDAVKHIKYSFTRDWINHVRSATGKNMFAVAEFWKYDLGAIENYLQKTNWNHSVFDVPLHNNLYTASKSGGNYDMRNIFNGTVVQRHPSHAVTFVDNHDSQPEEALESFVEEWFKPLAYALTLTREQGYPSVFYGDYYGIPTHGVPAMRSKIDPILEARQKYAYGPQHDYLDHPDVIGWTREGDSSHPKSGLATLITDGPGGSKRMYAGLKNAGETWYDITGNRSDTVKIGSDGWGEFHVNDGSVSIYVQK

SEQ ID NO: 40281 - protein, 478 aa, Bacillus sp.
NGTMMQYFEWYLPNDGNHWNRLNSDASNLKSKGITAVWIPPAWKGASQNDVGYGAYDLYDLGEFNQKGTVRTKYGTRSQLQAAVTSLKNNGIQVYGDVVMNHKGGADATEMVRAVEVNPNNRNQEVTGEYTIEAWTRFDFPGRGNTHSSFKWRWYHFDGVDWDQSRDLQNRIYKFRGKAWDWEVDTEFGNYDYLMYADYDMDHPEVVNELRNWGVWYTNTLGLDGFRIDAVKHIKYSFTRDWINHVRSATGKNMFAVAEFWKNDLGAIENYLQKTNWNHSVFDVPLHYNLYNASKSGGNYDMRNIFNGTVVQRHPSHAVTFVDNHDSQPEEALESFVETWFKPLAYALTLTREQGYPSVFYGDYYGIPTHGVPAMRSKIDPILEARQKYAYGPQHDYLDHPDVIGWTREGDSSHPKSGLATLITDGPGGSKRMYAGLKNAGETWYDITGNRSDTVKIGSDGWGEFHVNKASVSIYVQK

SEQ ID NO: 40282 - protein, 478 aa, Bacillus sp.
NGTMMQYFEWYLPNDGNHWNRLNSDASNLKSKGITAVWIPPAWKAVSQNDVGYGAYDLYDLGEFNQKGTVRTKYGTRSQLQAAVTSLKNNGIQVYGDVVMNHKGGADATEMVRAVEVNPNNRNQEVTGEYTIEAWTRFDFPGRGNTHSSFKWRWYHFDGVDWDQSRQLQNRIYKFRGKAWDWEVDTEFGNYDYLMYADYDMDHPEVVNELRNWGVWYTNTLGLDGFRIDAVKHIKYSFTRDWINHVRSATGKNMFAVAEFWKNDLGAIENYLQKTNWNHSVFDVPLHYNLYNASKSGGNYDMRNIFNGTVVQRHPSHAVTFVDNHDSQPEEALESFVEEWFKPLAYALTLTREQGYPSVFYGDYYGIPTHGVPAMRSKIDPILEARQKYAYGPQHDYLDHPDVIGWTREGDSSHPKSGLATLITDGPGGSKRMYAGLKNAGETWYDITGNRSDTVKIGSDGWGEFHVNDGSVSIYVQK

SEQ ID NO: 40283 - protein, 478 aa, Bacillus sp.
NGTMMQYFEWYLPNDGNHWNRLNSDASNLKSKGITAVWIPPAWKGASQNDVGYGAYDLYDLGEFNQKGTVRTKYGTRSQLQAAVTSLKNNGIQVYGDVVMNHKGGADATEMVRAVEVNPNNRNQEVTGEYTIEAWTRFDFPGRGNTHSSFKWRWYHFDGVDWDQSRRLNNRIYKFRGKAWDWEVDTEFGNYDYLMYADYDMDHPEVVNELRNWGVWYTNTLGLDGFRIDAVKHIKYSFTRDWINHVRSATGKNMFAVAEFWKNDLGAIENYLQKTNWNHSVFDVPLHYNLYNASKSGGNYDMRNIFNGTVVQRHPSHAVTFVDNHDSQPEEALESFVEEWFKPLAAALTLTREQGYPSVFYGDYYGIPTHGVPAMRSKIDPILEARQKYAYGPQHDYLDHPDVIGWTREGDSSHPKSGLATLITDGPGGSKRMYAGLKNAGETWYDITGNRSDTVKIGSDGWGEFHVNDGSVSIYVQK

SEQ ID NO: 40284 - protein, 478 aa, Bacillus sp.
NGTMMQYFEWYLPNDGNHWNRLNSDASNLKSKGITAVWIPPAWKGASQNDVGYGAYDLYDLGEFNQKGTVRTKYGTRSQLQAAVTSLKNNGIQVYGDVVMNHKGGADATEMVRAVEVNPNNRNQEVTGEYTIEAWTRFDFPGRGNTHSSFKWRWYHFDGVDWDQSRRLNNRIYKFRGKAWDWEVDTEFGNYDYLMYADIDYDHPESTNEMRNWGVWYTNTLGLDGFRIDAVKHIKYSFTRDWINHVRSATGKNMFAVAEFWKNDLGAIENYLQKTNWNHSVFDVPLHYNLYNASKSGGNYDMRNIFNGTVVQRHPSHAVTFVDNHDSQPEEALESFVEEWFKPLAYALTLTREQGYPSVFYGDYYGIPTHGVPAMRSKIDPILEARQKYAYGPQHDYLDHPDVIGWTREGDSSHPKSGLATLITDGPGGSKRMYAGLKNAGETWYDITGNRSDTVKIGSDGWGEFHVNDGSVSIYVQK

SEQ ID NO: 40285 - protein, 478 aa, Bacillus sp.
NGTMMQYFEWYLPNDGNHWNRLNSDASNLKSKGITAVWIPPAWKGASQNDVGYGAYDLYDLGEFNQKGTVRTKYGTRSQLQAAVTSLKNNGIQVYGDVVMNHKGGADATEMVRAVEVNPNNRNQEVTGEYTIEAWTRFDFPGRGNTHSSFKWRWYHFDGVDWDQSRRLNNRIYKFRGKAWDWEVDTENGFYDYLMYADIDYDYPEVVTTLRNWGVWYTNTLGLDGFRIDAVKHIKYSFTRDWINHVRSATGKNMFAVAEFWKNDLGAIENYLQKTNWNHSVFDVPLHYNLYNASKSGGNYDMRNIFNGTVVQRHPSHAVTFVDNHDSQPEEALESFVEEWFKPLAYALTLTREQGYPSVFYGDYYGIPTHGVPAMRSKIDPILEARQKYAYGPQHDYLDHPDVIGWTREGDSSHPKSGLATLITDGPGGSKRMYAGLKNAGETWYDITGNRSDTVKIGSDGWGEFHVNDGSVSIYVQK

SEQ ID NO: 40286 - protein, 478 aa, Bacillus sp.
NGTMMQYFEWYLPNDGNHWNRLNSDASNLKSKGITAVWIPPAWKGASQNDVGYGAYDLYDLGEFNQKGTVRTKYGTRSQLQAAVTSLKNNGIQVYGDVVMNHKGGADATEMVRAVEVNPNNRNQEVTGEYTIEAWTRFDFPGRGNTHSSFKWRWYHFDGVDWDQSRRLNNRIYKFRGKAWDWEVDTEFGNYDYLMYADYDMDHPEVVNELRNWGVWYTNTLGLDGFRIDAVKHIKYSFTRDWINHVRSATGKNMFAVAEFWKNDLGAIENYLQKTNWNHSVFDVPLHYNLYNASKSGGNYDMRNIFNGTVVQRHPSHAVTFVDNHDSQPEEALESFVDTWFKPLAYALTLTREQGYPSVFYGDYYGIPTHGVPAMRSKIDPILEARQKYAYGPQHDYLDHPDVIGWTREGDSSHPKSGLATLITDGPGGSKRMYAGLKNAGETWYDITGNRSDTVKIGSDGWGEFHVNQQSVSIYVQK

SEQ ID NO: 40287 - protein, 478 aa, Bacillus sp.
NGTMMQYFEWYLPNDGNHWNRLNSDASNLKSKGITAVWIPPAWKGASQNDVGYGAYDLYDLGEFNQKGTVRTKYGTRSQLQAAVTSLKNNGIQVYGDVVMNHKGGADATEMVRAVEVNPNNRMQEVTGEYTIEAWTRFDFPGRGNTHSSFKWRWYHFDGVDWDQSRRLNNRIYKFRGKAWDWEVDTEFGNYDYLMYADYDMDHPEVVNELRNWGVWYTNTLGLDGFRIDAVKHIKYSFTRDWINHVRSATGKNMFAVAEFWKNDLGAIENYLQKTNWNHSVFDVPLHYNLYNASKSGGNYDMRNIFNGTVVQRHPSHAVTFVDNHDSQPEEALESFVEEWFKPLAYALTLTREQGYPSVFYGDYYGIPTHGVPAMRSKIDPILEARQKYAYGPQHDYLDHPDVIGWTREGDSSHPKSGLATLITDGPGGSKRMYAGLKNAGETWYDITGNRSDTVKIGSDGWGEFHVNDGSVSIYVQK

SEQ ID NO: 40288 - protein, 478 aa, Bacillus sp.
NGTMMQYFEWYLPNDGNHWNRLNSDASNLKSKGITAVWIPPAWKGASQNDVGYGAYDLYDLGEFNQKGTVRTKYGTRSQLQAAVTSLKNNGIQVYGDVVMNHKGGADATEMVRAVEVNPNNRNQEVTGEYTIEAWTRFDFPGRGNTHSSFKWRWYHFDGVDWDQSRRTTNRIYKFRGKAWDWEVDTEFGNYDYLMYTDYDMDHPEVVNELRNWGVWYTNTLGLDGFRIDAVKHIKYSFTRDWINHVRSATGKNMFAVAEFWKNDLGAIENYLQKTNWNHSVFDVPLHYNLYNASKSGGNYDMRNIFNGTVVQRHPSHAVTFVDNHDSQPEEALESFVEEWFKPLAYALTLTREQGYPSVFYGDYYGIPTHGVPAMRSKIDPILEARQKYAYGPQHDYLDHPDVIGWTREGDSSHPKSGLATLITDGPGGSKRMYAGLKNAGETWYDITGNRSDTVKIGSDGWGEFHVNDGSVSIYVQK

SEQ ID NO: 40289 - protein, 478 aa, Bacillus sp.
NGTMMQYFEWYLPNDGNHWNRLNSDASNLKSKGITAVWIPPAWKGASQNDVGYGAYDLYDLGEFNQKGTVRTKYGTRSQLQAAVTSLKNNGIQVYGDVVMNHKGGADATEMVRAVEVNPNNRNQEVTGEYTIEAWTRFDFPGRGNTHSSFKWRWYHFDGVDWDQSRRLNNRIYKFRGKAWDWEVDTEFGNYDYLMYADYDMDHPEVVNELRNWGVWYTNTLGLDGFRIDAVKHIKYSFTRDWINHVRSATGKNMFAVAEFWKNDLGAIENYLQKTNWNHSVFDVPLHYNLYNASKSGGNYDMRNIFNGTVVQRHPSHAVTFVDNHDSQPEEALESFVETWFKPLAYALTLTREQGYPSVFYGDYYGIPTHGVPAMRSKIDPILEARQKYAYGPQHDYLDHPDVIGWTREGDSSHPKSGLATLITDGPGGSKRMYAGLKNAGETWYDITGNRSDTVKIGSDGWGEFHVNGSSVSIYVQK

SEQ ID NO: 40290 - protein, 478 aa, Bacillus sp.
NGTMMQYFEWYLPNDGNHWNRLNSDASNLKSKGITAVWIPPAWKGASQNDVGYGAYDLYDLGEFNQKGTVRTKYGTRSQLQAAVTSLKNNGIQVYGDVVMNHKGGADATEMVRAVEVNPNNRTQEVTGEYTIEAWTRFDFPGRGNTHSSFKWRWYHFDGVDWDQSRRLNNRIYKFRGKAWDWEVDTEFGNYDYLMYADYDMDHPEVVNELRNWGVWYTNTLGLDGFRIDAVKHIKYSFTRDWINHVRSATGKNMFAVAEFWKNDLGAIENYLQKTNWNHSVFDVPLHYNLYNASKSGGNYDMRNIFNGTVVQRHPSHAVTFVDNHDSQPEEALESFVEEWFKPLAYALTLTREQGYPSVFYGDYYGIPTHGVPAMRSKIDPILEARQKYAYGPQHDYLDHPDVIGWTREGDSSHPKSGLATLITDGPGGSKRMYAGLKNAGETWYDITGNRSDTVKIGSDGWGEFHVNDGSVSIYVQK

SEQ ID NO: 40291 - protein, 478 aa, Bacillus sp.
NGTMMQYFEWYLPNDGNHWNRLNSDASNLKSKGITAVWIPPAWKGASQNDVGYGAYDLYDLGEFNQKGTVRTKYGTRSQLQAAVTSLKNNGIQVYGDVVMNHKGGADATEMVRAVEVNPNNRNQEVTGEYTIEAWTRFDFPGRGNTHSSFKWRWYHFDGVDWDQSRRLNNRIYLFRGKAWHWEVPTENGNYDYLMYADIDMDHPEVVNELRNWGVWYTNTLGLDGFRIDAVKHIKYSFTRDWINHVRSATGKNMFAVAEFWKNDLGAIENYLQKTNWNHSVFDVPLHYNLYNASKSGGNYDMRNIFNGTVVQRHPSHAVTFVDNHDSQPEEALESFVEEWFKPLAYALTLTREQGYPSVFYGDYYGIPTHGVPAMRSKIDPILEARQKYAYGPQHDYLDHPDVIGWTREGDSSHPKSGLATLITDGPGGSKRMYAGLKNAGETWYDITGNRSDTVKIGSDGWGEFHVNDGSVSIYVQK

SEQ ID NO: 40292 - protein, 478 aa, Bacillus sp.
NGTMMQYFEWYLPNDGNHWNRLNSDASNLKSKGITAVWIPPAWKGASQNDVGYGAYDLYDLGEFNQKGTVRTKYGTRSQLQAAVTSLKNNGIQVYGDVVMNHKGGADATEMVRAVEVNPNNRNQEVTGEYTIEAWTRFDFPGRGNTHSSFKWRWYHFDGVDWDQSRRLNNRIYKFRGKAWDWEVDTEFGNYDYLMYADYDMDHPEVVNELRNWGVWYTNTLGLDGFRIDAVKHIKYSFTRDWINHVRSATGKNMFAVAEFWKNDLGAIENYLQKTNWNHSVFDVPLHYNLYNASKSGGNYDMRNIFNGTVVQRHPSHAVTFVDNHDSQPEEALESFVEEWFKPLAYALTLTREQGYPSVFYGDYYGIPTHGVPAMRSKIDPILEARQKYAYGPQHDYLDHPDVIGWTREGDSSHPLSGLATLITDGPGGSKRMYAGLKNAGETWYDITGNRSDTVKIGSDGWGEFHVNDGSVSIYVQK

SEQ ID NO: 40293 - protein, 478 aa, Bacillus sp.
NGTMMQYFEWYLPNDGNHWNRLNSDASNLKSKGITAVWIPPAWKGASQNDVGYGAYDLYDLGEFNQKGTVRTKYGTRSQLQAAVTSLKNNGIQVYGDVVMNHKGGADATEMVRAVEVNPNNRNQEVTGEYTIEAWTRFDFPGRGNTHSSFKWRWYHFDGVDWDQSERLNNRIYKFRGKAWDWEVETEFGNYDYLMYADYDMDHPEVVNELRNWGVWYTNTLGLDGFRIDAVKHIKYSFTRDWINHVRSATGKNMFAVAEFWKNDLGAIENYLQKTNWNHSVFDVPLHYNLYNASKSGGNYDMRNIFNGTVVQRHPSHAVTFVDNHDSQPEEALESFVEEWFKPLAYALTLTREQGYPSVFYGDYYGIPTHGVPAMRSKIDPILEARQKYAYGPQHDYLDHPDVIGWTREGDSSHPKSGLATLITDGPGGSKRMYAGLKNAGETWYDITGNRSDTVKIGSDGWGEFHVNDGSVSIYVQK

SEQ ID NO: 40294 - protein, 478 aa, Bacillus sp.
NGTMMQYFEWYLPNDGNHWNRLNSDASNLKSKGITAVWIPPAWKGASQNDVGYGAYDLYDLGEFNQKGTVRTKYGTRSQLQAAVTSLKNNGIQVYGDVVMNHKGGADATEMVRAVEVNPNNRNQEVTGEYTIEAWTRFDFPGRANTHSSFKWRWYHFDGVDWDQSRRLNNRIYKFRGKAWDWEVDTEFGNYDYLMYADYDMDHPEVVNELRNWGVWYTNTLGLDGFRIDAVKHIKYSFTRDWINHVRSATGKNMFAVAEFWKNDLGAIENYLQKTNWNHSVFDVPLHYNLYNASKSGGNYDMRNIFNGTVVQRHPSHAVTFVDNHDSQPEEALESFVEEWFKPLAYALTLTREQGYPSVFYGDYYGIPTHGVPAMRSKIDPILEARQKYAYGPQHDYLDHPDVIGWTREGDSSHPKSGLATLITDGPGGSKRMYAGLKNAGETWYDITGNRSDTVKIGSDGWGEFHVNDGSVSIYVQK

SEQ ID NO: 40295 - protein, 478 aa, Bacillus sp.
NGTMMQYFEWYLPNDGNHWNRLNSDASNLKSKGITAVWIPPAWKGASQNDVGYGAYDLYDLGEFNQSGTVRTKYGTRSQLQAAVTSLKNNGIQVYGDVVMNHKGGADATEMVRAVEVNPNNRNQEVTGEYTIEAWTRFDFPGRGNTHSSFKWRWYHFDGVDWDQSRRLNNRIYKFRGKAWDWEVDTEFGNYDYLMYADYDMDHPEVVNELRNWGVWYTNTLGLDGFRIDAVKHIKYSFTRDWINHVRSATGKNMFAVAEFWKNDLGAIENYLQKTNWNHSVFDVPLHYNLYNASKSGGNYDMRNIFNGTVVQRHPSHAVTFVDNHDSQPEEALESFVEEWFKPLAYALTLTREQGYPSVFYGDYYGIPTHGVPAMRSKIDPILEARQKYAYGPQHDYLDHPDVIGWTREGDSSHPKSGLATLITDGPGGSKRMYAGLKNAGETWYDITGNRSDTVKIGSDGWGEFHVNDGSVSIYVQK

SEQ ID NO: 40296 - protein, 478 aa, Bacillus sp.
NGTMMQYFEWYLPNDGNHWNRLNSDASNLKSKGITAVWIPPAWKAASQNDVGYGAYDLYDLGEFNQKGTVRTKYGTRSQLQAAVTSLKNNGIQVYGDVVMNHKGGADATEMVRAVEVNPNNRNQEVTGEYTIEAWTRFDFPGRGNTHSSFKWRWYHFDGVDWDQSRQLQNRIYKFRGKAWDWEVDTEFGNYDYLMYADYDMDHPEVVNELRNWGVWYTNTLGLDGFRIDAVKHIKYSFTRDWINHVRSATGKNMFAVAEFWKNDLGAIENYLQKTNWNHSVFDVPLHYNLYNASKSGGNYDMRNIFNGTVVQRHPSHAVTFVDNHDSQPEEALESFVEEWFKPLAYALTLTREQGYPSVFYGDYYGIPTHGVPAMRSKIDPILEARQKYAYGPQHDYLDHPDVIGWTREGDSSHPKSGLATLITDGPGGSKRMYAGLKNAGETWYDITGNRSDTVKIGSDGWGEFHVNDGSVSIYVQK

SEQ ID NO: 40297 - protein, 478 aa, Bacillus sp.
NGTMMQYFEWYLPNDGNHWNRLNSDASNLKSKGITAVWIPPAWKGASQNDVGYGAYDLYDLGEFNQKVTVRTKYGTRSQLQAAVTSLKNNGIQVYGDVVMNHKGGADATEMVRAVEVNPNNRNQEVTGEYTIEAWTRFDFPGRGNTHSSFKWRWYHFDGVDWDQSRQLENRIYKFRGKAWDWEVDTEFGNYDYLMYADYDMDHPEVVNELRNWGVWYTNTLGLDGFRIDAVKHIKYSFTRDWINHVRSATGKNMFAVAEFWKNDLGAIENYLQKTNWNHSVFDVPLHYNLYNASKSGGNYDMRNIFNGTVVQRHPSHAVTFVDNHDSQPEEALESFVEEWFKPLAYALTLTREQGYPSVFYGDYYGIPTHGVPAMRSKIDPILEARQKYAYGPQHDYLDHPDVIGWTREGDSSHPKSGLATLITDGPGGSKRMYAGLKNAGETWYDITGNRSDTVKIGSDGWGEFHVNDGSVSIYVQK

SEQ ID NO: 40298 - protein, 478 aa, Bacillus sp.
NGTMMQYFEWYLPNDGNHWNRLNSDASNLKSKGITAVWIPPAWKGASQNDVGYGAYDLYDLGEFNQKGTVRTKYGTRSQLQAAVTSLKNNGIQVYGDVVMNHKGGADATEMVRAVEVNPNNRNQEVTGEYTIEAWTRFDFPGRGNTHSSFKWRWYHFDGVDWDQSRRLNNRIYKFRGKAWDWEVDTEFGNYDYLMYADYDMDHPEVVNELRNWGVWYTNTLGLDGFRIDAVKHIKYSFTRDWINHVRSATGKNMFAVAEFWKNDLGAIENYLQKTNWNHSVFDVPLHYNLYNASKSGGNYDMRNIFNGTVVQRHPSHAVTFVDNHDSQPEEALESFVEEWFKPLAYALTLTREQGYPSVFYGDYYGIPTHGVPAMRSKIDPILEARQKYAYGPQHDYLDHPDVIGWTREGDSSHPKSGLATLITDGPGGSKRMYAGLKNAGETWYDITGNRSDTVKIGSDGWGNFHVNDGSVSIYVQK

SEQ ID NO: 40299 - protein, 478 aa, Bacillus sp.
NGTMMQYFEWYLPNDGNHWNRLNSDASNLKSKGITAVWIPPAWKGASQNDVGYGAYDLYDLGEFNQKGTVRTKYGTRSQLQAAVTSLKNNGIQVYGDVVMNHKGGADATEMVRAVEVNPNNRNQEVTGEYTIEAWTRFDFPGRGNTHSSFKWRWYHFDGVDWDQSRRLNNRIYKFRGKAWDWEVDTENGFYDYLMYADIDYDYPEVVTTLRIWGVWYTNTLGLDGFRIDAVKHIKYSFTRDWINHVRSATGKNMFAVAEFWKNDLGAIENYLQKTNWNHSVFDVPLHYNLYNASKSGGNYDMRNIFNGTVVQRHPSHAVTFVDNHDSQPEEALESFVEEWFKPLAYALTLTREQGYPSVFYGDYYGIPTHGVPAMRSKIDPILEARQKYAYGPQHDYLDHPDVIGWTREGDSSHPKSGLATLITDGPGGSKRMYAGLKNAGETWYDITGNRSDTVKIGSDGWGEFHVNDGSVSIYVQK

SEQ ID NO: 40300 - protein, 478 aa, Bacillus sp.
NGTMMQYFEWYLPNDGNHWNRLNSDASNLKSKGITAVWIPPAWKGASQNDVGYGAYDLYDLGEFNQKGTVRTKYGTRSQLQAAVTSLKNNGIQVYGDVVMNHKGGADATEMVRAVEVNPNNRNQEVTGEYTIEAWTRFDFPGRGNTHSSFKWRWYHFDGVDWDQSRRLNNRIYKFRGKAWDWEVDTEFGNYDYLMYADYDMDSPEVVNELRNWGVWYTNTLGLDGFRIDAVKHIKYSFTRDWINHVRSATGKNMFAVAEFWKNDLGAIENYLQKTNWNHSVFDVPLHYNLYNASKSGGNYDMRNIFNGTVVQRHPSHAVTFVDNHDSQPEEALESFVEEWFKPLAYALTLTREQGYPSVFYGDYYGIPTHGVPAMRSKIDPILEARQKYAYGPQHDYLDHPDVIGWTREGDSSHPKSGLATLITDGPGGSKRMYAGLKNAGETWYDITGNRSDTVKIGSDGWGEFHVNDGSVSIYVQK

SEQ ID NO: 40301 - protein, 478 aa, Bacillus sp.
NGTMMQYFEWYLPNDGNHWNRLNSDASNLKSKGITAVWIPPAWKGASQNDVGYGAYDLYDLGEFNQKGTVRTKYGTRSQLQAAVTSLKNNGIQVYGDVVMNHKGGADATEMVRAVEVNPNNRNQEVTGEYTIEAWTRFDFPGRGNTHSSFKWRWYHFDGVDWDQSRRFDNRIYKFRGKAWDWEVDTEFGNYDYLMYADYDMDHPEVVNELRNWGVWYTNTLGLDGFRIDAVKHIKYSFTRDWINHVRSATGKNMFAVAEFWKNDLGAIENYLQKTNWNHSVFDVPLHYNLYNASKSGGNYDMRNIFNGTVVQRHPSHAVTFVDNHDSQPEEALESFVEEWFKPLAYVLTLTREQGYPSVFYGDYYGIPTHGVPAMRSKIDPILEARQKYAYGPQHDYLDHPDVIGWTREGDSSHPKSGLATLITDGPGGSKRMYAGLKNAGETWYDITGNRSDTVKIGSDGWGEFHVNDGSVSIYVQK

SEQ ID NO: 40302 - protein, 478 aa, Bacillus sp.
NGTMMQYFEWYLPNDGNHWNRLNSDASNLKSKGITAVWIPPAWKGASQNDVGYGAYDLYDLGEFNQKGTVRTKYGTRSQLQAAVTSLKNNGIQVYGDVVMNHKGGADATEMVRAVEVNPNNRNQEVTGEYTIEAWTRFDFPGRGNTHSSFKWRWYHFDGVDWDQSRRLNNRIYKFRGKAWDWEVDTEFGNYDYLMYADYDMDHPEVVNELRNWGVWYTNTLGLDGFRIDAVKHIKYSFTRDWINHVRSATGKNMFAVAEFWKNDLGAIENYLQKTNWNHSVFDVPLHYNLYNASKSGGNYDMRNIFNGTVVQRAPSHAVTFVDNHDSQPEEALESFVEEWFKPLAYALTLTREQGYPSVFYGDYYGIPTHGVPAMRSKIDPILEARQKYAYGPQHDYLDHPDVIGWTREGDSSHPKSGLATLITDGPGGSKRMYAGLKNAGETWYDITGNRSDTVKIGSDGWGEFHVNDGSVSIYVQK

SEQ ID NO: 40303 - protein, 478 aa, Bacillus sp.
NGTMMQYFEWYLPNDGNHWNRLNSDASNLKSKGITAVWIPPAWKAVSQNDVGYGAYDLYDLGEFNQKGTVRTKYGTRSQLQAAVTSLKNNGIQVYGDVVMNHKGGADATEMVRAVEVNPNNRNQEVTGEYTIEAWTRFDFPGRGNTHSSFKWRWYHFDGVDWDQSRQLNNRIYKFRGKAWDWEVDTEFGNYDYLMYADYDMDHPEVVNELRNWGVWYTNTLGLDGFRIDAVKHIKYSFTRDWINHVRSATGKNMFAVAEFWKNDLGAIENYLQKTNWNHSVFDVPLHYNLYNASKSGGNYDMRNIFNGTVVQRHPSHAVTFVDNHDSQPEEALESFVEEWFKPLAYALTLTREQGYPSVFYGDYYGIPTHGVPAMRSKIDPILEARQKYAYGPQHDYLDHPDVIGWTREGDSSHPKSGLATLITDGPGGSKRMYAGLKNAGETWYDITGNRSDTVKIGSDGWGEFHVNDGSVSIYVQK

SEQ ID NO: 40304 - protein, 478 aa, Bacillus sp.
NGTMMQYFEWYLPNDGNHWNRLNSDASNLKSKGITAVWIPPAWKGASQNDVGYGAYDLYDLGEFNQKGTVRTKYGTRSQLQAAVTSLKNNGIQVYGDVVMNHKGGADATEMVRAVEVNPNNRNQEVTGEYTIEAWTRFDFPGRGNTHSSFKWRWYHFDGVDWDQSREFTNRIYKFRGKAWDWEVDTEFGNYDYLMYVDYDMDHPEVVNELRNWGVWYTNTLGLDGFRIDAVKHIKYSFTRDWINHVRSATGKNMFAVAEFWKNDLGAIENYLQKTNWNHSVFDVPLHYNLYNASKSGGNYDMRNIFNGTVVQRHPSHAVTFVDNHDSQPEEALESFVDTWFKPLAYALTLTREQGYPSVFYGDYYGIPTHGVPAMRSKIDPILEARQKYAYGPQHDYLDHPDVIGWTREGDSSHPKSGLATLITDGPGGSKRMYAGLKNAGETWYDITGNRSDTVKIGSDGWGEFHVNDASVSIYVQK

SEQ ID NO: 40305 - protein, 478 aa, Bacillus sp.
NGTMMQYFEWYLPNDGNHWNRLNSDASNLKSKGITAVWIPPAWKGASQNDVGYGAYDLYDLGEFNQKGTVRTKYGTRSQLQAAVTSLKNNGIQVYGDVVMNHKGGADATEMVRAVEVNPNNRNQEVTGEYTIEAWTRFDFPGRGNTHSSFKWRWRHFDGVDWDQSRRLNNRIYKFRGKAWDWEVDTEFGNYDYLMYADYDMDHPEVVNELRNWGVWYTNTLGLDGFRIDAVKHIKYSFTRDWINHVRSATGKNMFAVAEFWKNDLGAIENYLQKTNWNHSVFDVPLHYNLYNASKSGGNYDMRNIFNGTVVQRHPSHAVTFVDNHDSQPEEALESFVEEWFKPLAYALTLTREQGYPSVFYGDYYGIPTHGVPAMRSKIDPILEARQKYAYGPQHDYLDHPDVIGWTREGDSSHPKSGLATLITDGPGGSKRMYAGLKNAGETWYDITGNRSDTVKIGSDGWGEFHVNDGSVSIYVQK

SEQ ID NO: 40306 - protein, 478 aa, Bacillus sp.
NGTMMQYFEWYLPNDGNHWNRLNSDASNLKSKGITAVWIPPAWKGASQNDVGYGAYDLYDLGEFNQKGTVRTKYGTRSQLQAAVTSLKNNGIQVYGDVVMNHKGGADATEMVRAVEVNPNNRNQEVTGEYTIEAWTRFDFPGRGNTHSSFKWRWYHFDGVDWDQSRRLNNRIYKFRGKAWDWEVDTEFGNYDYLMYADYDMDHPEVVNELRNWGVWYTNTLGLDGFRIDAVKHIKYSFTRDWINHVRSATGKNMFAVAEFWKNDLGAIENYLQKTNWNHSVFDVPLHYNLYNASKSGGNYDMRNIFNGTVVQAHPMQAVTFVDNHDSQPEEALESFVEEWFKPLAYALTLTREQGYPSVFYGDYYGIPTHGVPAMRSKIDPILEARQKYAYGPQHDYLDHPDVIGWTREGDSSHPKSGLATLITDGPGGSKRMYAGLKNAGETWYDITGNRSDTVKIGSDGWGEFHVNDGSVSIYVQK

SEQ ID NO: 40307 - protein, 478 aa, Bacillus sp.
NGTMMQYFEWYLPNDGNHWNRLNSDASNLKSKGITAVWIPPAWKGASQNDVGYGAYDLYDLGEFNQKGTVRTKYGTRSQLQAAVTSLKNNGIQVYGDVVMNHKGGADATEMVRAVEVNPNNRNQEVTGEYTIEAWTRFDFPGRGNTHSSFKWRWYHFDGVDWDQSRRLNNRIYKFRGKAWDWEVDTEFGNYDYLMYTDYDMDHPEVVNELRNWGVWYTNTLGLDGFRIDAVKHIKYSFTRDWINHVRSATGKNMFAVAEFWKNDLGAIENYLQKTNWNHSVFDVPLHYNLYNASKSGGNYDMRNIFNGTVVQRHPSHAVTFVDNHDSQPEEALESFVEEWFKPLAYALTLTREQGYPSVFYGDYYGIPTHGVPAMRSKIDPILEARQKYAYGPQHDYLDHPDVIGWTREGDSSHPKSGLATLITDGPGGSKRMYAGLKNAGETWYDITGNRSDTVKIGSDGWGEFHVNDGSVSIYVQK

SEQ ID NO: 40308 - protein, 478 aa, Bacillus sp.
NGTMMQYFEWYLPNDGNHWNRLNSDASNLKSKGITAVWIPPAWKGASQNDVGYGAYDLYDLGEFNQKGTVRTKYGTRSQLQAAVTSLKNNGIQVYGDVVMNHKGGADATEMVRAVEVNPNNRNQEVTGEYTIEAWTRFDFPGRGNTHSSFKWRWYHFDGVDWDQSRRLNNRIYKFRGKAWDWEVDTEFGNYDYLMYADYDMDHPEVVNELRNWGVWYTNTLGLDGFRIDAVKHIKYSFTRDWINHVRSATGKNMFAVAEFWKNDLGAIENYLQKTNWNHSVFDVPLHYNLYNASKSGGNYDMRNIFNGTVVQRHPSHAVTFVDNHDSQPEEALESFVEEWFKPLAYALTLTREQGYPSVFYGDYYGIPTHGVPAMRSKIDPILEARQKYAYGPQHDYLDHPDVIGWTREGDSSHPKSGLATLMTDGPGGSKRMYAGLKNAGETWYDITGNRSDTVKIGSDGWGEFHVNDGSVSIYVQK

SEQ ID NO: 40309 - protein, 478 aa, Bacillus sp.
NGTMMQYFEWYLPNDGNHWNRLNSDASNLKSKGITAVWIPPAWKGASQNDVGYGAYDLYDLGEFNQKGTVRTKYGTRSQLQAAVTSLKNNGIQVYGDVVMNHKGGADATEMVRAVEVNPNNRNQEVTGEYTIEAWTRFDFPGRGNTHSSFKWRWYHFDGVDWDQSRRLNNRIYKFRGKAWDWEVDTEFGNYDYLMYADYDMDHPEVVNELRNWGVWYTNTLGLDGFRIDAVKHIKYSFTRDWINHVRSATGKNMFAVAEFWKNDLGAIENYLQKTNWNHSVFDVPLHYNLYNASKSGGNYDMRNIFNGTVVQRHPSHAVTFVDNHDSQPEEALESFVEEWFKPLAYALTLTREQGYPSVFYGDYYGIPTHGVPAMRSKIDPILEARQKYAYGPQHDYLDHPDVIGWTREGDSSHPKSGLATLITDGPGGSKRMYAGRKNAGETWYDITGNRSDTVKIGSDGWGEFHVNDGSVSIYVQK

SEQ ID NO: 40310 - protein, 478 aa, Bacillus sp.
NGTMMQYFEWYLPNDGNHWNRLNSDASNLKSKGITAVWIPPAWKGASQNDVGYGAYDLYDLGEFNQKGTVRTKYGTRSQLQAAVTSLKNNGIQVYGDVVMNHKGGADATEMVRAVEVNPNNRNQEVTGEYTIEAWTRFDFPGRGNTHSSFKWRWYHFDGVDWDQSRRFQNRIYKFRGKAWDWEVDTEFGNYDYLMYVDYDMDHPEVVNELRNWGVWYTNTLGLDGFRIDAVKHIKYSFTRDWINHVRSATGKNMFAVAEFWKNDLGAIENYLQKTNWNHSVFDVPLHYNLYNASKSGGNYDMRNIFNGTVVQRHPSHAVTFVDNHDSQPEEALESFVEEWFKPLAYALTLTREQGYPSVFYGDYYGIPTHGVPAMRSKIDPILEARQKYAYGPQHDYLDHPDVIGWTREGDSSHPKSGLATLITDGPGGSKRMYAGLKNAGETWYDITGNRSDTVKIGSDGWGEFHVNDGSVSIYVQK

SEQ ID NO: 40311 - protein, 478 aa, Synthetic construct
NGTMMQYFEWYLPNDGNHWNRLNSDASNLKSKGITAVWIPPAWKGASQNDVGYGAYDLYDLGEFNQKGTVRTKYGTRSQLQAAVTSLKNNGIQVYGDVVMNHKGGADATEMVRAVEVNPNNRNQEVTGEYTIEAWTRFDFPGRGNTHSSFKWRWYHFDGVDWDQSRRLNNRIYKFRGKAWDWEVDTENGNYDYLMYADIDMDHPEGTNELRNWGVWYTNTLGLDGFRIDAVKHIKYSFTRDWINHVRSATGKNMFAVAEFWKNDLGAIENYLQKTNWNHSVFDVPLHYNLYNASKSGGNYDMRNIFNGTVVQRHPSHAVTFVDNHDSQPEEALESFVEEWFKPLAYALTLTREQGYPSVFYGDYYGIPTHGVPAMRSKIDPILEARQKYAYGPQHDYLDHPDVIGWTREGDSSHPKSGLATLITDGPGGSKRMYAGLKNAGETWYDITGNRSDTVKIGSDGWGEFHVNDGSVSIYVQK

SEQ ID NO: 40312 - protein, 478 aa, Bacillus sp.
NGTMMQYFEWYLPNDGNHWNRLNSDASNLKSKGITAVWIPPAWKGASQNDVGYGAYDLYDLGEFNQKGTVRTKYGTRSQLQAAVTSLKNNGIQVYGDVVMNHKGGADATEMVRAVEVNPNNRNQEVTGEYTIEAWTRFDFPGRGNTHSSFKWRWYHFDGVDWDQSRRLNNRIYKFRGKAWDWEVDTEFGNYDYLMYADYDMDHPEVVNELRNWGVWYTNTLGLDGFRIDAVKHIKYSFTRDWINHVRSATGKNMFAVAEFWKNDLGAIENYLQKTNWNHSVFDVPLHYNLYNASKSQGNYDMRNIFNGTVVQRHPSHAVTFVDNHDSQPEEALESFVDTWFKPLAYALTLTREQGYPSVFYGDYYGIPTHGVPAMRSKIDPILEARQKYAYGPQHDYLDHPDVIGWTREGDSSHPKSGLATLITDGPGGSKRMYAGLKNAGETWYDITGNRSDTVKIGSDGWGEFHVNDQSVSIYVQK

SEQ ID NO: 40313 - protein, 478 aa, Bacillus sp.
NGTMMQYFEWYLPNDGNHWNRLNSDASNLKSKGITAVWIPPAWKGASQNDVGYGAYDLYDLGEFNQKGTVRTKYGTRSQLQAAVTSLKNNGIQVYGDVVMNHKGGADATEMVRAVEVNPNNRNQEVTGEYTIEAWTRFDFPGRGNTHSSFKWRWYHFDGVDWDQSRRLNNRIYKFRGKAWDWEVDTEFGNYDYLMYADYDMDHPEVVNELRNWGVWYTNTLGLDGFRIDAVKHIKYSFTRDWINHVRSATGKNMFAVAEFWKNDLGAIENYLQKTNWNHSVFDVPLHYNLYNASKSGGNYDMRNIFNGTVVQMHPMQAVTFVDNHDSQPEEALESFVEEWFKPLAYALTLTREQGYPSVFYGDYYGIPTHGVPAMRSKIDPILEARQKYAYGPQHDYLDHPDVIGWTREGDSSHPKSGLATLITDGPGGSKRMYAGLKNAGETWYDITGNRSDTVKIGSDGWGEFHVNDGSVSIYVQK

SEQ ID NO: 40314 - protein, 478 aa, Bacillus sp.
NGTMMQYFEWYLPNDGNHWNRLNSDASNLKSKGITAVWIPPAWKGASQNDVGYGAYDLYDLGEFNQKGTVRTKYGTRSQLQAAVTSLKNNGIQVYGDVVMNHKGGADATEMVRAVEVNPNNRNQEVTGEYTIEAWTRFDFPGRGNTHSSFKWRWYHFDGVDWDQSRRTQNRIYKFRGKAWDWEVDTEFGNYDYLMYVDYDMDHPEVVNELRNWGVWYTNTLGLDGFRIDAVKHIKYSFTRDWINHVRSATGKNMFAVAEFWKNDLGAIENYLQKTNWNHSVFDVPLHYNLYNASKSGGNYDMRNIFNGTVVQRHPSHAVTFVDNHDSQPEEALESFVEEWFKPLAYALTLTREQGYPSVFYGDYYGIPTHGVPAMRSKIDPILEARQKYAYGPQHDYLDHPDVIGWTREGDSSHPKSGLATLITDGPGGSKRMYAGLKNAGETWYDITGNRSDTVKIGSDGWGEFHVNDGSVSIYVQK

SEQ ID NO: 40315 - protein, 478 aa, Bacillus sp.
NGTMMQYFEWYLPNDGNHWNRLNSDASNLKSKGITAVWIPPAWKGASQNDVGYGAYDLYDLGEFNQKGTVRTKYGTRSQLQAAVTSLKNNGIQVYGDVVMNHKGGADATEMVRAVEVNPNNRNQEVTGEYTIEAWTRFDFPGRGNTHSSFKWRWYHFDGVDWDQSRRLNNRIYKFRGKAWDWEVDTEFGNYDYLMYADYDMDHPEVVNELRNWGVWYTNTLGLDGFRIDAVKHIKYSFTRDWINHVRSATGKNMFAVAEFWKNDLGAIENYLQKTNWNHSVFDVPLHYNLYNASKSGGNYDMRNIFNGTVVQRHPSHAVTFVDNHDSQPEEALESFVDTWFKPLAYALTLTREQGYPSVFYGDYYGIPTHGVPAMRSKIDPILEARQKYAYGPQHDYLDHPDVIGWTREGDSSHPKSGLATLITDGPGGSKRMYAGPKNAGETWYDITGNRSDTVKIGSDGWGEFHVNDKSVSIYVQK

SEQ ID NO: 40316 - protein, 478 aa, Bacillus sp.
NGTMMQYFEWYLPNDGNHWNRLNSDASNLKSKGITAVWIPPAWKGASQNDVGYGAYDLYDLGEFNQKGTVRTKYGTRSQLQAAVTSLKNNGIQVYGDVVMNHKGGADATEMVRAVEVNPNNRNQEVTGEYTIEAWTRFDFPGRRNTHSSFKWRWYHFDGVDWDQSRRLNNRIYKFRGKAWDWEVDTEFGNYDYLMYADYDMDHPEVVNELRNWGVWYTNTLGLDGFRIDAVKHIKYSFTRDWINHVRSATGKNMFAVAEFWKNDLGAIENYLQKTNWNHSVFDVPLHYNLYNASKSGGNYDMRNIFNGTVVQRHPSHAVTFVDNHDSQPEEALESFVEEWFKPLAYALTLTREQGYPSVFYGDYYGIPTHGVPAMRSKIDPILEARQKYAYGPQHDYLDHPDVIGWTREGDSSHPKSGLATLITDGPGGSKRMYAGLKNAGETWYDITGNRSDTVKIGSDGWGEFHVNDGSVSIYVQK

SEQ ID NO: 40317 - protein, 478 aa, Bacillus sp.
NGTMMQYFEWYLPNDGNHWNRLNSDASNLKSKGITAVWIPPAWKGASQNDVGYGAYDLYDLGEFNQKGTVRTKYGTRSQLQAAVTSLKNNGIQVYGDVVMNHKGGADATEMVRAVEVNPNNRNQEVTGEYTIEAWTRFDFPGRGNTHSSFKWRWYHFDGVDWDQSRRLNNRIYKFRGKAWDWEVDTENGFYDYLMYADIDYDYPEVVTTLRVWGVWYTNTLGLDGFRIDAVKHIKYSFTRDWINHVRSATGKNMFAVAEFWKNDLGAIENYLQKTNWNHSVFDVPLHYNLYNASKSGGNYDMRNIFNGTVVQRHPSHAVTFVDNHDSQPEEALESFVEEWFKPLAYALTLTREQGYPSVFYGDYYGIPTHGVPAMRSKIDPILEARQKYAYGPQHDYLDHPDVIGWTREGDSSHPKSGLATLITDGPGGSKRMYAGLKNAGETWYDITGNRSDTVKIGSDGWGEFHVNDGSVSIYVQK

SEQ ID NO: 40318 - protein, 478 aa, Bacillus sp.
NGTMMQYFEWYLPNDGNHWNRLNSDASNLKSKGITAVWIPPAWKGASQNDVGYGAYDLYDLGEFNQKGTVRTKYGTRSQLQAAVTSLKNNGIQVYGDVVMNHKGGADATEMVRAVEVNPNNRNQEVTGEYTIEAWTRFDFPGRGNTHSSFKWRWYHFDGVDWDQSRKLNNRIYKFRGKAWDWEVDTEFGNYDYLMYVDYDMDHPEVVNELRNWGVWYTNTLGLDGFRIDAVKHIKYSFTRDWINHVRIATGKNMFAVAEFWKNDLGAIENYLQKTNWNHSVFDVPLHYNLYNASKSGGNYDMRNIFNGTVVQRHPSHAVTFVDNHDSQPEEALESFVDEWFKPLAYALTLTREQGYPSVFYGDYYGIPTHGVPAMRSKIDPILEARQKYAYGPQHDYLDHPDVIGWTREGDSSHPKSGLATLITDGPGGSKRMYAGLKNAGETWYDITGNRSDTVKIGSDGWGEFHVNDQSVSIYVQK

SEQ ID NO: 40319 - protein, 478 aa, Bacillus sp.
NGTMMQYFEWYLPNDGNHWNRLNSDASNLKSKGITAVWIPPAWKGASQNDVGYGAYDLYDLGEFNQKGTVRTKYGTRSQLQAAVTSLKNNGIQVYGDVVMNHKGGADATEMVRAVEVNPNNRNQEVTGEYTIEAWTRFDFPGRGNTHSSFKWRWYHFDGVDWDQSRRLNNRIYRFRGKAWDWEVDTEFGNYDYLMYADYDMDHPEVVNELRNWGVWYTNTLGLDGFRIDAVKHIKYSFTRDWINHVRSATGKNMFAVAEFWKNDLGAIENYLQKTNWNHSVFDVPLHYNLYNASKSGGNYDMRNIFNGTVVQRHPSHAVTFVDNHDSQPEEALESFVEEWFKPLAYALTLTREQGYPSVFYGDYYGIPTHGVPAMRSKIDPILEARQKYAYGPQHDYLDHPDVIGWTREGDSSHPKSGLATLITDGPGGSKRMYAGLKNAGETWYDITGNRSDTVKIGSDGWGEFHVNDGSVSIYVQK

SEQ ID NO: 40320 - protein, 478 aa, Bacillus sp.
NGTMMQYFEWYLPNDGNHWNRLNSDASNLKSKGITAVWIPPAWKGASQNDVGYGAYDLYDLGEFNQKGTVRTKYGTRSQLQAAVTSLKNNGIQVYGDVVMNHKGGADATEMVRAVEVNPNNRNQEVTGEYTIEAWTRFDFPGRGNTHSSFKWRWYHFDGVDWDQSRRLNNRIYKFRGKAWDWEVDTEFGNYDYLMYADYDMDHPEVVNELRNWGVWYTNTLGLDGFRIDAVKHIKYSFTRDWINHVRSATGKNMFAVAEFWKNDLGAIENYLQKTNWNHSVFDVPLHYNLYNASKSGGNYDMRNIFNGTVVQRHPSHAVTFVDNHDSQPEEALESFVEEWFKPLAYALTLTREQGYPSVFYGDYYGIPTHGVPAMRSKIDPILEARQKYAYGPQHDYLDHPDVIGWTREGDSSHPKSGLATLITDGPGGSKRMYAGLKNAGETWYDITGNRSDTVRIGSDGWGEFHVNDGSVSIYVQK

SEQ ID NO: 40321 - protein, 478 aa, Bacillus sp.
NGTMMQYFEWYLPNDGNHWNRLNSDASNLKSKGITAVWIPPAWKGASQNDVGYGAYDLYDLGEFNQKGTVRTKYGTRSQLQAAVTSLKNNGIQVYGDVVMNHKGGADATEMVRAVEVNPNNRNQEVTGEYTIEAWTRFDFPGRGNTHSSFKWRWYHFDGVDWDQSRRLNNRIYKFRGKAWDWEVDTEFGNYDYLMYADYDMDHEEVVNELRNWGVWYTNTLGLDGFRIDAVKHIKYSFTRDWINHVRSATGKNMFAVAEFWKNDLGAIENYLQKTNWNHSVFDVPLHYNLYNASKSGGNYDMRNIFNGTVVQRHPSHAVTFVDNHDSQPEEALESFVEEWFKPLAYALTLTREQGYPSVFYGDYYGIPTHGVPAMRSKIDPILEARQKYAYGPQHDYLDHPDVIGWTREGDSSHPKSGLATLITDGPGGSKRMYAGLKNAGETWYDITGNRSDTVKIGSDGWGEFHVNDGSVSIYVQK

SEQ ID NO: 40322 - protein, 478 aa, Bacillus sp.
NGTMMQYFEWYLPNDGNHWNRLNSDASNLKSKGITAVWIPPAWKGASQNDVGYGAYDLYDLGEFNQKGTVRTKYGTRSQLQAAVTSLKNNGIQVYGDVVMNHKGGADYTEMVRAVEVNPNNRNQEVTGEYTIEAWTRFDFPGRGNTHSSFKWRWYHFDGVDWDQSRRLNNRIYKFRGKAWDWEVDTEFGNYDYLMYADYDMDHPEVVNELRNWGVWYTNTLGLDGFRIDAVKHIKYSFTRDWINHVRSATGKNMFAVAEFWKNDLGAIENYLQKTNWNHSVFDVPLHYNLYNASKSGGNYDMRNIFNGTVVQRHPSHAVTFVDNHDSQPEEALESFVEEWFKPLAYALTLTREQGYPSVFYGDYYGIPTHGVPAMRSKIDPILEARQKYAYGPQHDYLDHPDVIGWTREGDSSHPKSGLATLITDGPGGSKRMYAGLKNAGETWYDITGNRSDTVKIGSDGWGEFHVNDGSVSIYVQK

SEQ ID NO: 40323 - protein, 478 aa, Bacillus sp.
NGTMMQYFEWYLPNDGNHWNRLNSDASNLKSKGITAVWIPPAWKATSQNDVGYGAYDLYDLGEFNQKGTVRTKYGTRSQLQAAVTSLKNNGIQVYGDVVMNHKGGADATEMVRAVEVNPNNRNQEVTGEYTIEAWTRFDFPGRGNTHSSFKWRWYHFDGVDWDQSRRTNNRIYKFRGKAWDWEVDTEFGNYDYLMYADYDMDHPEVVNELRNWGVWYTNTLGLDGFRIDAVKHIKYSFTRDWINHVRSATGKNMFAVAEFWKNDLGAIENYLQKTNWNHSVFDVPLHYNLYNASKSGGNYDMRNIFNGTVVQRHPSHAVTFVDNHDSQPEEALESFVEEWFKPLAYALTLTREQGYPSVFYGDYYGIPTHGVPAMRSKIDPILEARQKYAYGPQHDYLDHPDVIGWTREGDSSHPKSGLATLITDGPGGSKRMYAGLKNAGETWYDITGNRSDTVKIGSDGWGEFHVNDGSVSIYVQK

SEQ ID NO: 40324 - protein, 478 aa, Bacillus sp.
NGTMMQYFEWYLPNDGNHWNRLNSDASNLKSKGITAVWIPPAWKGASQNDVGYGAYDLYDLGEFNQKGTVRTKYGTRSQLQAAVTSLKNNGIQVYGDVVMNHKGGADATEMVRAVEVNPNNRNQEVTGEYTIEAWTRFDFPGRGNTHSSFKWRWYHFDGVDWDQSRRLNNRIYKFRGKAWDWEVDTENGFYDYLMYADIDYDFPEVVTTLRVWGVWYTNTLGLDGFRIDAVKHIKYSFTRDWINHVRSATGKNMFAVAEFWKNDLGAIENYLQKTNWNHSVFDVPLHYNLYNASKSGGNYDMRNIFNGTVVQRHPSHAVTFVDNHDSQPEEALESFVEEWFKPLAYALTLTREQGYPSVFYGDYYGIPTHGVPAMRSKIDPILEARQKYAYGPQHDYLDHPDVIGWTREGDSSHPKSGLATLITDGPGGSKRMYAGLKNAGETWYDITGNRSDTVKIGSDGWGEFHVNDGSVSIYVQK

SEQ ID NO: 40325 - protein, 478 aa, Bacillus sp.
NGTMMQYFEWYLPNDGNHWNRLNSDASNLKSKGITAVWIPPAWKAASQNDVGYGAYDLYDLGEFNQKGTVRTKYGTRSQLQAAVTSLKNNGIQVYGDVVMNHKGGADATEMVRAVEVNPNNRNQEVTGEYTIEAWTRFDFPGRGNTHSSFKWRWYHFDGVDWDQSRQLTNRIYKFRGKAWDWEVDTEFGNYDYLMYADYDMDHPEVVNELRNWGVWYTNTLGLDGFRIDAVKHIKYSFTRDWINHVRSATGKNMFAVAEFWKNDLGAIENYLQKTNWNHSVFDVPLHYNLYNASKSGGNYDMRNIFNGTVVQRHPSHAVTFVDNHDSQPEEALESFVEEWFKPLAYALTLTREQGYPSVFYGDYYGIPTHGVPAMRSKIDPILEARQKYAYGPQHDYLDHPDVIGWTREGDSSHPKSGLATLITDGPGGSKRMYAGLKNAGETWYDITGNRSDTVKIGSDGWGEFHVNDGSVSIYVQK

SEQ ID NO: 40326 - protein, 478 aa, Bacillus sp.
NGTMMQYFEWYLPNDGNHWNRLNSDASNLKSKGITAVWIPPAWKAASQNDVGYGAYDLYDLGEFNQKGTVRTKYGTRSQLQAAVTSLKNNGIQVYGDVVMNHKGGADATEMVRAVEVNPNNRNQEVTGEYTIEAWTRFDFPGRGNTHSSFKWRWYHFDGVDWDQSRDLDNRIYKFRGKAWDWEVDTEFGNYDYLMYADYDMDHPEVVNELRNWGVWYTNTLGLDGFRIDAVKHIKYSFTRDWINHVRSATGKNMFAVAEFWKNDLGAIENYLQKTNWNHSVFDVPLHYNLYNASKSGGNYDMRNIFNGTVVQRHPSHAVTFVDNHDSQPEEALESFVEEWFKPLAYALTLTREQGYPSVFYGDYYGIPTHGVPAMRSKIDPILEARQKYAYGPQHDYLDHPDVIGWTREGDSSHPKSGLATLITDGPGGSKRMYAGLKNAGETWYDITGNRSDTVKIGSDGWGEFHVNDGSVSIYVQK

SEQ ID NO: 40327 - protein, 478 aa, Bacillus sp.
NGTMMQYFEWYLPNDGNHWNRLNSDASNLKSKGITAVWIPPAWKGASQNDVGYGAYDLYDLGEFNQKGTVRTKYGTRSQLQAAVTSLKNNGIQVYGDVVMNHKGGADATEMVRAVEVNPNNRNQEVTGEYTIEAWTRFDFPGRGNTHSSFKWRWYHFDGVDWDQSRRLNNRIYKFRGKAWDWEVDTENGFYDYLMYADIDYDYPEVVSTLRNWGVWYTNTLGLDGFRIDAVKHIKYSFTRDWINHVRSATGKNMFAVAEFWKNDLGAIENYLQKTNWNHSVFDVPLHYNLYNASKSGGNYDMRNIFNGTVVQRHPSHAVTFVDNHDSQPEEALESFVEEWFKPLAYALTLTREQGYPSVFYGDYYGIPTHGVPAMRSKIDPILEARQKYAYGPQHDYLDHPDVIGWTREGDSSHPKSGLATLITDGPGGSKRMYAGLKNAGETWYDITGNRSDTVKIGSDGWGEFHVNDGSVSIYVQK

SEQ ID NO: 40328 - protein, 478 aa, Bacillus sp.
NGTMMQYFEWYLPNDGNHWNRLNSDASNLKSKGITAVWIPPAWKGASQNDVGYGAYDLYDLGEFNQKGTVRTKYGTRSQLQAAVTSLKNNGIQVYGDVVMNHKGGADATEMVRAVEVNPNNRNQEVTGEYTIEAWTRFDFPGRGNTHSSFKWRWYHFDGVDWDQSRRLNNRIYKFRGKAWDWEVDTEFGNYDYLMYADYDMDHPEVVNELRNWGVWYTNTLGLDGFRIDAVKHIKYSFTRDWINHVRSATGKNMFAVAEFWKNDLGAIENYLQKTNWNHSVFDVPLHYNLYNASKSGGNYDMRNIFNGTVVQRHPSHAVTFVDNHDSQPEEALESFVDTWFKPLAYALTLTREQGYPSVFYGDYYGIPTHGVPAMRSKIDPILEARQKYAYGPQHDYLDHPDVIGWTREGDSSHPKSGLATLITDGPGGSKRMYAGLKNAGETWYDITGNRSDTVKIGSDGWGEFHVNQASVSIYVQK

SEQ ID NO: 40329 - protein, 478 aa, Bacillus sp.
NGTMMQYFEWYLPNDGNHWNRLNSDASNLKSKGITAVWIPPAWKGASQNDVGYGAYDLYDLGEFNQKGTVRTKYGTRSQLQAAVTSLKNNGIQVYGDVVMNHKGGADATEMVRAVEVNPNNRNQEVTGEYTIEAWTRFDFPGRGNTHSSFKWRWYHFDGVDWDQSRNLTNRIYKFRGKAWDWEVDTEFGNYDYLMYVDYDMDHPEVVNELRNWGVWYTNTLGLDGFRIDAVKHIKYSFTRDWINHVRSATGKNMFAVAEFWKNDLGAIENYLQKTNWNHSVFDVPLHYNLYNASKSGGNYDMRNIFNGTVVQRHPSHAVTFVDNHDSQPEEALESFVEEWFKPLAYALTLTREQGYPSVFYGDYYGIPTHGVPAMRSKIDPILEARQKYAYGPQHDYLDHPDVIGWTREGDSSHPKSGLATLITDGPGGSKRMYAGLKNAGETWYDITGNRSDTVKIGSDGWGEFHVNDGSVSIYVQK

SEQ ID NO: 40330 - protein, 478 aa, Synthetic construct
NGTMMQYFEWYLPNDGNHWNRLNSDASNLKSKGITAVWIPPAWKGASQNDVGYGAYDLYDLGEFNQKGTVRTKYGTRSQLQAAVTSLKNNGIQVYGDVVMNHKGGADATEMVRAVEVNPNNRNQEVTGEYTIEAWTRFDFPGRGNTHSSFKWRWYHFDGVDWDQSRRLNNRIYKFRGKAWDWEVDTENGNYDYLMYADIDMDHPEPTNELRNWGVWYTNTLGLDGFRIDAVKHIKYSFTRDWINHVRSATGKNMFAVAEFWKNDLGAIENYLQKTNWNHSVFDVPLHYNLYNASKSGGNYDMRNIFNGTVVQRHPSHAVTFVDNHDSQPEEALESFVEEWFKPLAYALTLTREQGYPSVFYGDYYGIPTHGVPAMRSKIDPILEARQKYAYGPQHDYLDHPDVIGWTREGDSSHPKSGLATLITDGPGGSKRMYAGLKNAGETWYDITGNRSDTVKIGSDGWGEFHVNDGSVSIYVQK

SEQ ID NO: 40331 - protein, 478 aa, Synthetic construct
NGTMMQYFEWYLPNDGNHWNRLNSDASNLKSKGITAVWIPPAWKGASQNDVGYGAYDLYDLGEFNQKGTVRTKYGTRSQLQAAVTSLKNNGIQVYGDVVMNHKGGADATEMVRAVEVNPNNRNQEVTGEYTIEAWTRFDFPGRGNTHSSFKWRWYHFDGVDWDQSRRLNNRIYKFRGKAWDWEVDTENGNYDYLMYADIDMDHPESTNELRNWGVWYTNTLGLDGFRIDAVKHIKYSFTRDWINHVRSATGKNMFAVAEFWKNDLGAIENYLQKTNWNHSVFDVPLHYNLYNASKSGGNYDMRNIFNGTVVQRHPSHAVTFVDNHDSQPEEALESFVEEWFKPLAYALTLTREQGYPSVFYGDYYGIPTHGVPAMRSKIDPILEARQKYAYGPQHDYLDHPDVIGWTREGDSSHPKSGLATLITDGPGGSKRMYAGLKNAGETWYDITGNRSDTVKIGSDGWGEFHVNDGSVSIYVQK

SEQ ID NO: 40332 - protein, 478 aa, Bacillus sp.
NGTMMQYFEWYLPNDGNHWNRLNSDASNLKSKGITAVWIPPAWKGASQNDVGYGAYDLYDLGEFNQKGTVRTKYGTRSQLQAAVTSLKNNGIQVYGDVVMNHKGGADATEMVRAVEVNPNNRNQEVTGEYTIEAWTRFDFPGRGNTHSSFKWRWYHFDGVDWDQSRRLNNRIYKFRSKAWEWEVDTENGNYDYLMYADIDMDHPEVVNELRNWGVWYTNTLGLDGFRIDAVKHIKYSFTRDWINHVRSATGKNMFAVAEFWKNDLGAIENYLQKTNWNHSVFDVPLHYNLYNASKSGGNYDMRNIFNGTVVQRHPSHAVTFVDNHDSQPEEALESFVEEWFKPLAYALTLTREQGYPSVFYGDYYGIPTHGVPAMRSKIDPILEARQKYAYGPQHDYLDHPDVIGWTREGDSSHPKSGLATLITDGPGGSKRMYAGLKNAGETWYDITGNRSDTVKIGSDGWGEFHVNDGSVSIYVQK

SEQ ID NO: 40333 - protein, 478 aa, Bacillus sp.
NGTMMQYFEWYLPNDGNHWNRLNSDASNLKSKGITAVWIPPAWKATSQNDVGYGAYDLYDLGEFNQKGTVRTKYGTRSQLQAAVTSLKNNGIQVYGDVVMNHKGGADATEMVRAVEVNPNNRNQEVTGEYTIEAWTRFDFPGRGNTHSSFKWRWYHFDGVDWDQSRQLQNRIYKFRGKAWDWEVDTEFGNYDYLMYADYDMDHPEVVNELRNWGVWYTNTLGLDGFRIDAVKHIKYSFTRDWINHVRSATGKNMFAVAEFWKNDLGAIENYLQKTNWNHSVFDVPLHYNLYNASKSGGNYDMRNIFNGTVVQRHPSHAVTFVDNHDSQPEEALESFVEEWFKPLAYALTLTREQGYPSVFYGDYYGIPTHGVPAMRSKIDPILEARQKYAYGPQHDYLDHPDVIGWTREGDSSHPKSGLATLITDGPGGSKRMYAGLKNAGETWYDITGNRSDTVKIGSDGWGEFHVNDGSVSIYVQK

SEQ ID NO: 40334 - protein, 478 aa, Bacillus sp.
NGTMMQYFEWYLPNDGNHWNRLNSDASNLKSKGITAVWIPPAWKGASQNDVGYGAYDLYDLGEFNQKGTVRTKYGTRSQLQAAVTSLKNNGIQVYGDVVMNHKGGADATEMVRAVEVNPNNRNQEVTGEYTIEAWTRFDFPGRGNTHSSFKWRWYHFDGVDWDQSRRLNNRIYKFRGKAWDWEVDTEFGNYDYLMYADYDMDHPEVVNELRNWGVWYTNTLGLDGFRIDAVKHIKYSFTRDWINHVRSATGKNMFAVAEFWKNDLGAIENYLQKTNWNHSVFDVPLHYNLYNASQSGGNYDMRNIFNGTVVQRHPSHAVTFVDNHDSQPEEALESFVETWFKPLAYALTLTREQGYPSVFYGDYYGIPTHGVPAMRSKIDPILEARQKYAYGPQHDYLDHPDVIGWTREGDSSHPKSGLATLITDGPGGSKRMYAGLKNAGETWYDITGNRSDTVKIGSDGWGEFHVNKSSVSIYVQK

SEQ ID NO: 40335 - protein, 478 aa, Bacillus sp.
NGTMMQYFEWYLPNDGNHWNRLNSDASNLKSKGITAVWIPPAWKGASQNDVGYGAYDLYDLGEFNQKGTVRTKYGTRSQLQAAVTSLKNNGIQVYGDVVMNHKGGADATEMVRAVEVNPNNRNQEVTGEYTIEAWTRFDFPGRGNTHSSFKWRWYHFDGVDWDQSRNVNNRIYKFRGKAWDWEVDTEFGNYDYLMYADYDMDHPEVVNELRNWGVWYTNTLGLDGFRIDAVKHIKYSFTRDWINHVRSATGKNMFAVAEFWKNDLGAIENYLQKTNWNHSVFDVPLHYNLYNASKSGGNYDMRNIFNGTVVQAHPNHAVTFVDNHDSQPEEALESFVEEWFKPLAYALTLTREQGYPSVFYGDYYGIPTHGVPAMRSKIDPILEARQKYAYGPQHDYLDHPDVIGWTREGDSSHPKSGLATLITDGPGGSKRMYAGLKNAGETWYDITGNRSDTVKIGSDGWGEFHVNDGSVSIYVQK

SEQ ID NO: 40336 - protein, 478 aa, Bacillus sp.
NGTMMQYFEWYLPNDGNHWNRLNSDASNLKSKGITAVWIPPAWKGASQNDVGYGAYDLYDLGEFNQKGTVRTKYGTRSQLQAAVTSLKNNGIQVYGDVVMNHKGGADATEMVRAVEVNPNNRNQEVTGEYTIEAWTRFDFPGRGNTHSSFKWRWYHFDGVDWDQSRRLNNRIYKFRGKAWDWEVDTEFGNYDYLMYADYDMDHPEVVNELRNWGVWYTNTLGLDGFRIDAVKHIKYSFTRDWINHVRSATGKNMFAVAEFWKNDLGAIENYLQKTNWNHSVFDVPLHYNLYNASKSGGNYDMRNIFNGTVVQRHPSHAVTFVDNHDSQPEEALESFVEEWFKPSAYALTLTREQGYPSVFYGDYYGIPTHGVPAMRSKIDPILEARQKYAYGPQHDYLDHPDVIGWTREGDSSHPKSGLATLITDGPGGSKRMYAGLKNAGETWYDITGNRSDTVKIGSDGWGEFHVNDGSVSIYVQK

SEQ ID NO: 40337 - protein, 478 aa, Bacillus sp.
NGTMMQYFEWYLPNDGNHWNRLNSDASNLKSKGITAVWIPPAWKGASQNDVGYGAYDLYDLGEFNQKGTVRTKYGTRSQLQAAVTSLKNNGIQVYGDVVMNHKGGADATEMVRAVEVNPNNRNQEVTGEYTIEAYTRFDFPGRGNTHSSFKWRWYHFDGVDWDQSRRLNNRIYKFRGKAWDWEVDTEFGNYDYLMYADYDMDHPEVVNELRNWGVWYTNTLGLDGFRIDAVKHIKYSFTRDWINHVRSATGKNMFAVAEFWKNDLGAIENYLQKTNWNHSVFDVPLHYNLYNASKSGGNYDMRNIFNGTVVQRHPSHAVTFVDNHDSQPEEALESFVEEWFKPLAYALTLTREQGYPSVFYGDYYGIPTHGVPAMRSKIDPILEARQKYAYGPQHDYLDHPDVIGWTREGDSSHPKSGLATLITDGPGGSKRMYAGLKNAGETWYDITGNRSDTVKIGSDGWGEFHVNDGSVSIYVQK

SEQ ID NO: 40338 - protein, 478 aa, Bacillus sp.
NGTMMQYFEWYLPNDGNHWNRLNSDASNLKSKGITAVWIPPAWKGASQNDVGYGAYDLYDLGEFNQKGTVRTKYGTRSQLQAAVTSLKNNGIQVYGDVVMNHKGGADATEMVRAVEVNPNNRNQEVTGEYTIEAWTRFDFPGRGNTHSSFKWRWYHFDGVDFDQSRQLDNRIYKFRGKAWDWEVDTEFGNYDYLMYADYDMDHPEVVNELRNWGVWYTNTLGLDGFRIDAVKHIKYSFTRDWINHVRSATGKNMFAVAEFWKNDLGAIENYLQKTNWNHSVFDVPLHYNLYNASKSGGNYDMRNIFNGTVVQRHPSHAVTFVDNHDSQPEEALESFVEEWFKPLAYALTLTREQGYPSVFYGDYYGIPTHGVPAMRSKIDPILEARQKYAYGPQHDYLDHPDVIGWTREGDSSHPKSGLATLITDGPGGSKRMYAGLKNAGETWYDITGNRSDTVKIGSDGWGEFHVNDGSVSIYVQK

SEQ ID NO: 40339 - protein, 478 aa, Bacillus sp.
NGTMMQYFEWYLPNDGNHWNRLNSDASNLKSKGITAVWIPPAWKGASQNDVGYGAYDLYDLGEFNQKGTVRTKYGTRSQLQAAVTSLKNNGIQVYGDVVMNHKGGADATEMVRAVEVNPNNRNQEVTGEYTIEAWTRFDFPGRGNTHSSFKWRWYHFDGVDWDQSRRLNNRIYKFRGKAWDWEVDTEFGNYDYLMYADYDMDHPEVVNELRNWGVWYTNTLGLDGFRIDAVKHIKYSFTRDWINHVRSATGKNMFAVAEFWKNDLGAIENYLQKTNWNHSVFDVPLHYNLYNASQSGGNYDMRNIFNGTVVQRHPSHAVTFVDNHDSQPEEALESFVDTWFKPLAYALTLTREQGYPSVFYGDYYGIPTHGVPAMRSKIDPILEARQKYAYGPQHDYLDHPDVIGWTREGDSSHPKSGLATLITDGPGGSKRMYAGLKNAGETWYDITGNRSDTVKIGSDGWGEFHVNKQSVSIYVQK

SEQ ID NO: 40340 - protein, 478 aa, Synthetic construct
NGTMMQYFEWYLPNDGNHWNRLNSDASNLKSKGITAVWIPPAWKGASQNDVGYGAYDLYDLGEFNQKGTVRTKYGTRSQLQAAVTSLKNNGIQVYGDVVMNHKGGADATEMVRAVEVNPNNRNQEVTGEYTIEAWTRFDFPGRGNTHSSFKWRWYHFDGVDWDQSRRLNNRIYKFRGKEWDWEVDTEFGNYDYLMYADYDMDHPEVVNELRNWGVWYTNTLGLDGFRIDAVKHIKYSFTRDWINHVRSATGKNMFAVAEFWKNDLGAIENYLQKTNWNHSVFDVPLHYNLYNASKSGGNYDMRNIFNGTVVQRHPSHAVTFVDNHDSQPEEALESFVEEWFKPLAYALTLTREQGYPSVFYGDYYGIPTHGVPAMRSKIDPILEARQKYAYGPQHDYLDHPDVIGWTREGDSSHPKSGLATLITDGPGGSKRMYAGLKNAGETWYDITGNRSDTVKIGSDGWGEFHVNDGSVSIYVQK

SEQ ID NO: 40341 - protein, 478 aa, Bacillus sp.
NGTMMQYFEWYLPNDGNHWNRLNSDASNLKSKGITAVWIPPAWKATSQNDVGYGAYDLYDLGEFNQKGTVRTKYGTRSQLQAAVTSLKNNGIQVYGDVVMNHKGGADATEMVRAVEVNPNNRNQEVTGEYTIEAWTRFDFPGRGNTHSSFKWRWYHFDGVDWDQSRQFQNRIYKFRGKAWDWEVDTEFGNYDYLMYADYDMDHPEVVNELRNWGVWYTNTLGLDGFRIDAVKHIKYSFTRDWINHVRSATGKNMFAVAEFWKNDLGAIENYLQKTNWNHSVFDVPLHYNLYNASKSGGNYDMRNIFNGTVVQRHPSHAVTFVDNHDSQPEEALESFVEEWFKPLAYALTLTREQGYPSVFYGDYYGIPTHGVPAMRSKIDPILEARQKYAYGPQHDYLDHPDVIGWTREGDSSHPKSGLATLITDGPGGSKRMYAGLKNAGETWYDITGNRSDTVKIGSDGWGEFHVNDGSVSIYVQK

SEQ ID NO: 40342 - protein, 478 aa, Bacillus sp.
NGTMMQYFEWYLPNDGNHWNRLNSDASNLKSKGITAVWIPPAWKGASQNDVGYGAYDLYDLGEFNQKGTVRTKYGTRSQLQAAVTSLKNNGIQVYGDVVMNHKGGADATEMVRAVEVNPNNRNQEVTGEYTIEAWTRFDFPGRLNTHSSFKWRWYHFDGVDWDQSRRLNNRIYKFRGKAWDWEVDTEFGNYDYLMYADYDMDHPEVVNELRNWGVWYTNTLGLDGFRIDAVKHIKYSFTRDWINHVRSATGKNMFAVAEFWKNDLGAIENYLQKTNWNHSVFDVPLHYNLYNASKSGGNYDMRNIFNGTVVQRHPSHAVTFVDNHDSQPEEALESFVEEWFKPLAYALTLTREQGYPSVFYGDYYGIPTHGVPAMRSKIDPILEARQKYAYGPQHDYLDHPDVIGWTREGDSSHPKSGLATLITDGPGGSKRMYAGLKNAGETWYDITGNRSDTVKIGSDGWGEFHVNDGSVSIYVQK

SEQ ID NO: 40343 - protein, 478 aa, Bacillus sp.
NGTMMQYFEWYLPNDGNHWNRLNSDASNLKSKGITAVWIPPAWKGASQNDVGYGAYDLYDLGEFNQKGTVRTKYGTRSQLQAAVTSLKNNGIQVYGDVVMNHKGGADATEMVRAVEVNPNNRNQEVTGEYTIEAWTRFDFPGRGNTHSSFKWRWYHFDGVDWDQSRRLNNRIYKFRGKAWDWEVDTEFGNYDYLMYADYDMDHPEVVNELRNWGVWYTNTLGLDGFRIDAVKHIKYSFTRDWINHVRSATGKNMFAVAEFWKNDLGAIENYLQKTNWNHSVFDVPLHYNLYNASKSGGNYDMRNIFNGTVVQRHPSHAVTFVDNHDSQPEEALESFVDPWFKPLAYALTLTREQGYPSVFYGDYYGIPTHGVPAMRSKIDPILEARQKYAYGPQHDYLDHPDVIGWTREGDSSHPKSGLATLITDGPGGSKRMYAGLKNAGETWYDITGNRSDTVKIGSDGWGEFHVNGGSVSIYVQK

SEQ ID NO: 40344 - protein, 478 aa, Bacillus sp.
NGTMMQYFEWYLPNDGNHWNRLNSDASNLKSKGITAVWIPPAWKGASQNDVGYGAYDLYDLGEFNQKGTVRTKYGTRSQLQAAVTSLKNNGIQVYGDVVMNHKGGADLTEMVRAVEVNPNNRNQEVTGEYTIEAWTRFDFPGRGNTHSSFKWRWYHFDGVDWDQSRQLDNRIYKFRGKAWDWEVDTEFGNYDYLMYADYDMDHPEVVNELRNWGVWYTNTLGLDGFRIDAVKHIKYSFTRDWINHVRSATGKNMFAVAEFWKNDLGAIENYLQKTNWNHSVFDVPLHYNLYNASKSGGNYDMRNIFNGTVVQRHPSHAVTFVDNHDSQPEEALESFVEEWFKPLAYALTLTREQGYPSVFYGDYYGIPTHGVPAMRSKIDPILEARQKYAYGPQHDYLDHPDVIGWTREGDSSHPKSGLATLITDGPGGSKRMYAGLKNAGETWYDITGNRSDTVKIGSDGWGEFHVNDGSVSIYVQK

SEQ ID NO: 40345 - protein, 478 aa, Bacillus sp.
NGTMMQYFEWYLPNDGNHWNRLNSDASNLKSKGITAVWIPPAWKGASQNDVGYGAYDLYDLGEFNQKGTVRTKYGTRSQLQAAVTSLKNNGIQVYGDVVMNHKGGADATEMVRAVEVNPNNRNQEVTGEYTIEAWTRFDFPGRGNTHSSFKWRWYHFDGVDWDQSREFNNRIYKFRGKAWDWEVDTEFGNYDYLMYADYDMDHPEVVNELRNWGVWYTNTLGLDGFRIDAVKHIKYSFTRDWINHVRSATGKNMFAVAEFWKNDLGAIENYLQKTNWNHSVFDVPLHYNLYNASKSGGNYDMRNIFNGTVVQRHPSHAVTFVDNHDSQPEEALESFVDPWFKPLAYALTLTREQGYPSVFYGDYYGIPTHGVPAMRSKIDPILEARQKYAYGPQHDYLDHPDVIGWTREGDSSHPKSGLATLITDGPGGSKRMYAGLKNAGETWYDITGNRSDTVKIGSDGWGEFHVNGGSVSIYVQK

SEQ ID NO: 40346 - protein, 478 aa, Bacillus sp.
NGTMMQYFEWYLPNDGNHWNRLNSDASNLKSKGITAVWIPPAWKGASQNDVGYGAYDLYDLGEFNQKGTVRTKYGTRSQLQAAVTSLKNNGIQVYGDVVMNHKGGADATEMVRAVEVNPNNRNQEVTGEYTIEAWTRFDFPGRGNTHSSFKWRWYHFDGVDWDQSRRLNNRIYKFRGKAWDWEVDTEFGNYDYLMYADYDMDHPEVVNELRNWGVWYTNTLGLDGFRIDAVKHIKYSFTRDWINHVRSATGKNMFAVAEFWKNDLGAIENYLQKTNWNHSVFDVPLHYNLYNASKSGGNYDMRNIFNGTVVQRHPSHAVTFVDNHDSQPEEALESFVEEWFAPLAYALTLTREQGYPSVFYGDYYGIPTHGVPAMRSKIDPILEARQKYAYGPQHDYLDHPDVIGWTREGDSSHPKSGLATLITDGPGGSKRMYAGLKNAGETWYDITGNRSDTVKIGSDGWGEFHVNDGSVSIYVQK

SEQ ID NO: 40347 - protein, 478 aa, Bacillus sp.
NGTMMQYFEWYLPNDGNHWNRLNSDASNLKSKGITAVWIPPAWKGISQNDVGYGAYDLYDLGEFNQKGTVRTKYGTRSQLQAAVTSLKNNGIQVYGDVVMNHKGGADATEMVRAVEVNPNNRNQEVTGEYTIEAWTRFDFPGRGNTHSSFKWRWYHFDGVDWDQSRQFNNRIYKFRGKAWDWEVDTEFGNYDYLMYTDYDMDHPEVVNELRNWGVWYTNTLGLDGFRIDAVKHIKYSFTRDWINHVRSATGKNMFAVAEFWKNDLGAIENYLQKTNWNHSVFDVPLHYNLYNASKSGGNYDMRNIFNGTVVQRHPSHAVTFVDNHDSQPEEALESFVEEWFKPLAYALTLTREQGYPSVFYGDYYGIPTHGVPAMRSKIDPILEARQKYAYGPQHDYLDHPDVIGWTREGDSSHPKSGLATLITDGPGGSKRMYAGLKNAGETWYDITGNRSDTVKIGSDGWGEFHVNDGSVSIYVQK

SEQ ID NO: 40348 - protein, 478 aa, Bacillus sp.
NGTMMQYFEWYLPNDGNHWNRLNSDASNLKSKGITAVWIPPAWKGASQNDVGYGAYDLYDLGEFNQKGTVRTKYGTRSQLQAAVTSLKNNGIQVYGDVVMNHKGGADATEMVRAVEVNPNNRVQEVTGEYTIEAWTRFDFPGRGNTHSSFKWRWYHFDGVDWDQSRRLNNRIYKFRGKAWDWEVDTEFGNYDYLMYADYDMDHPEVVNELRNWGVWYTNTLGLDGFRIDAVKHIKYSFTRDWINHVRSATGKNMFAVAEFWKNDLGAIENYLQKTNWNHSVFDVPLHYNLYNASKSGGNYDMRNIFNGTVVQRHPSHAVTFVDNHDSQPEEALESFVEEWFKPLAYALTLTREQGYPSVFYGDYYGIPTHGVPAMRSKIDPILEARQKYAYGPQHDYLDHPDVIGWTREGDSSHPKSGLATLITDGPGGSKRMYAGLKNAGETWYDITGNRSDTVKIGSDGWGEFHVNDGSVSIYVQK

SEQ ID NO: 40349 - protein, 478 aa, Bacillus sp.
NGTMMQYFEWYLPNDGNHWNRLNSDASNLKSKGITAVWIPPAWKGASQNDVGYGAYDLYDLGEFNQKGTVRTKYGTRSQLQAAVTSLKNNGIQVYGDVVMNHKGGADATEMVRAVEVNPNNRNQEVTGEYTIEAWTRFDFPGRGNTHSSFKWRWYHFDGVDWDQSRRLNNRIYKFRGKAWDWEVDTEFGNYDYLMYADYDMDHPEVVNELRNWGVWYTNTLGLDGFRIDAVKHIKYSFTRDWINHVRSATGKNMFAVAEFWKNDLGAIENYLQKTNWNHSVFDVPLHYNLYNASKSGGNYDMRNIFNGTVVQRHPSHAVTFVDNHDSQPEEALESFVETWFKPLAYALTLTREQGYPSVFYGDYYGIPTHGVPAMRSKIDPILEARQKYAYGPQHDYLDHPDVIGWTREGDSSHPKSGLATLITDGPGGSKRMYAGLKNAGETWYDITGNRSDTVKIGSDGWGEFHVNGQSVSIYVQK

SEQ ID NO: 40350 - protein, 478 aa, Bacillus sp.
NGTMMQYFEWYLPNDGNHWNRLNSDASNLKSKGITAVWIPPAWKGASQNDVGYGAYDLYDLGEFNQKGTVRTKYGTRSQLQAAVTSLKNNGIQVYGDVVMNHKGGADATEMVRAVEVNPNNRNQEVTGEYTIEAWTRFDFPGRGNTHSSFKWRWYHFDGVDWDQSRRLNNRIYKFRGKAWDWEVDTEFGNYDYLMYADYDMDHPEVVNELRNWGVWYTNTLGLDGFRIDAVKHFKYSFTRDWINHVRSATGKNMFAVAEFWKNDLGAIENYLQKTNWNHSVFDVPLHYNLYNASKSGGNYDMRNIFNGTVVQRHPSHAVTFVDNHDSQPEEALESFVEEWFKPLAYALTLTREQGYPSVFYGDYYGIPTHGVPAMRSKIDPILEARQKYAYGPQHDYLDHPDVIGWTREGDSSHPKSGLATLITDGPGGSKRMYAGLKNAGETWYDITGNRSDTVKIGSDGWGEFHVNDGSVSIYVQK

SEQ ID NO: 40351 - protein, 478 aa, Bacillus sp.
NGTMMQYFEWYLPNDGNHWNRLNSDASNLKSKGITAVWIPPAWKGASQNDVGYGAYDLYDLGEFNQKGTVRTKYGTRSQLQAAVTSLKNNGIQVYGDVVMNHKGGADQTEMVRAVEVNPNNRNQEVTGEYTIEAWTRFDFPGRGNTHSSFKWRWYHFDGVDWDQSRRLNNRIYKFRGKAWDWEVDTEFGNYDYLMYADYDMDHPEVVNELRNWGVWYTNTLGLDGFRIDAVKHIKYSFTRDWINHVRSATGKNMFAVAEFWKNDLGAIENYLQKTNWNHSVFDVPLHYNLYNASKSGGNYDMRNIFNGTVVQRHPSHAVTFVDNHDSQPEEALESFVEEWFKPLAYALTLTREQGYPSVFYGDYYGIPTHGVPAMRSKIDPILEARQKYAYGPQHDYLDHPDVIGWTREGDSSHPKSGLATLITDGPGGSKRMYAGLKNAGETWYDITGNRSDTVKIGSDGWGEFHVNDGSVSIYVQK

SEQ ID NO: 40352 - protein, 478 aa, Bacillus sp.
NGTMMQYFEWYLPNDGNHWNRLNSDASNLKSKGITAVWIPPAWKATSQNDVGYGAYDLYDLGEFNQKGTVRTKYGTRSQLQAAVTSLKNNGIQVYGDVVMNHKGGADATEMVRAVEVNPNNRNQEVTGEYTIEAWTRFDFPGRGNTHSSFKWRWYHFDGVDWDQSRQLSNRIYKFRGKAWDWEVDTEFGNYDYLMYVDYDMDHPEVVNELRNWGVWYTNTLGLDGFRIDAVKHIKYSFTRDWINHVRSATGKNMFAVAEFWKNDLGAIENYLQKTNWNHSVFDVPLHYNLYNASKSGGNYDMRNIFNGTVVQRHPSHAVTFVDNHDSQPEEALESFVEEWFKPLAYALTLTREQGYPSVFYGDYYGIPTHGVPAMRSKIDPILEARQKYAYGPQHDYLDHPDVIGWTREGDSSHPKSGLATLITDGPGGSKRMYAGLKNAGETWYDITGNRSDTVKIGSDGWGEFHVNDGSVSIYVQK

SEQ ID NO: 40353 - protein, 478 aa, Bacillus sp.
NGTMMQYFEWYLPNDGNHWNRLNSDASNLKSKGITAVWIPPAWKATSQNDVGYGAYDLYDLGEFNQKGTVRTKYGTRSQLQAAVTSLKNNGIQVYGDVVMNHKGGADATEMVRAVEVNPNNRNQEVTGEYTIEAWTRFDFPGRGNTHSSFKWRWYHFDGVDWDQSRRFDNRIYKFRGKAWDWEVDTEFGNYDYLMYADYDMDHPEVVNELRNWGVWYTNTLGLDGFRIDAVKHIKYSFTRDWINHVRSATGKNMFAVAEFWKNDLGAIENYLQKTNWNHSVFDVPLHYNLYNASKSGGNYDMRNIFNGTVVQRHPSHAVTFVDNHDSQPEEALESFVEEWFKPLAYALTLTREQGYPSVFYGDYYGIPTHGVPAMRSKIDPILEARQKYAYGPQHDYLDHPDVIGWTREGDSSHPKSGLATLITDGPGGSKRMYAGLKNAGETWYDITGNRSDTVKIGSDGWGEFHVNDGSVSIYVQK

SEQ ID NO: 40354 - protein, 478 aa, Bacillus sp.
NGTMMQYFEWYLPNDGNHWNRLNSDASNLKSKGITAVWIPPAWKGASQNDVGYGAYDLYDLGEFNQKGTVRTKYGTRSQLQAAVTSLKNNGIQVYGDVVMNHKGGADATEMVRAVEVNPNNRNQEVTGEYTIEAWTRFDFPGRGNTHSSFKWRWYHFDGVDWDQSRRLNNRIYKFRGKAWDWEVDTEFGNYDYLMYADYDMDHPEVVNELRNWGVWYTNTLGLDGFRIDAVKHIKYSFTRDWINHVRSATGKNMFAVAEFWKNDLGAIENYLQKTNWNHSVFDVPLHYNLYNASKSGGNYDMRNIFNGTVVQRHPSHAVTFVDNHDSQPEEALESFVEEWFKPLAYALTLTREQGYPSVFYGDYYGIPTHGVPAMRSKIDPILEARQKYAYGPQHDYLDHPDVIGWTREGDSSHPHSGLATLITDGPGGSKRMYAGLKNAGETWYDITGNRSDTVKIGSDGWGEFHVNDGSVSIYVQK

SEQ ID NO: 40355 - protein, 478 aa, Bacillus sp.
NGTMMQYFEWYLPNDGNHWNRLNSDASNLKSKGITAVWIPPAWKGASQNDVGYGAYDLYDLGEFNQKGTVRTKYGTRSQLQAAVTSLKNNGIQVYGDVVMNHKGGADATEMVRAVEVNPNNRNQEVTGEYTIEAWTRFDFPGRGNTHSSFKWRWYHFDGVDWDQSRRLNNRIYKFRGKAWDWEVDTEFGNYDYLMYADYDMDHPEVVNELRNWGVWYTNTLGLDGFRIDAVKHIKYSFTRDWINHVRSATGKNMFAVAEFWKNDLGAIENYLQKTNWNHSVFDVPLHYNLYNASKSAGNYDMRNIFNGTVVQRHPSHAVTFVDNHDSQPEEALESFVEEWFKPLAYALTLTREQGYPSVFYGDYYGIPTHGVPAMRSKIDPILEARQKYAYGPQHDYLDHPDVIGWTREGDSSHPKSGLATLITDGPGGSKRMYAGLKNAGETWYDITGNRSDTVKIGSDGWGEFHVNDGSVSIYVQK

SEQ ID NO: 40356 - protein, 478 aa, Bacillus sp.
NGTMMQYFEWYLPNDGNHWNRLNSDASNLKSKGITAVWIPPAWKGASQNDVGYGAYDLYDLGEFNQKGTVRTKYGTRSQLQAAVTSLKNNGIQVYGDVVMNHKGGADATEMVRAVEVNPNNRNQEVTGEYTIEAWTRFDFPGRGNTHSSFKWRWYHFDGVDWDQSRRLNNRIYKFRGKAWDWEVDTEFGNYDYLMYADYDMDHPEVVNELRNWGVWYTNTLGLDGFRIDAVKHIKYSFTRDWINHVRSATGKNMFAVAEFWKNDLGAIENYLQKTNWNHSVFDVPLHYNLYNASKSGGNYDMRNIFNGTVVQRHPSHAVTFVDNHDSQPEEALESFVDTWFKPLAYALTLTREQGYPSVFYGDYYGIPTHGVPAMRSKIDPILEARQKYAYGPQHDYLDHPDVIGWTREGDSSHPKSGLATLITDGPGGSKRMYAGLKNAGETWYDITGNRSDTVKIGSDGWGEFHVNGSSVSIYVQK

SEQ ID NO: 40357 - protein, 478 aa, Bacillus sp.
NGTMMQYFEWYLPNDGNHWNRLNSDASNLKSKGITAVWIPPAWKAVSQNDVGYGAYDLYDLGEFNQKGTVRTKYGTRSQLQAAVTSLKNNGIQVYGDVVMNHKGGADATEMVDAVEVNPNNRNQEVTGEYTIEAWTRFDFPGRGNTHSSFKWRWYHFDGVDWDQSRDFNNRIYKFRGKAWDWEVDTEFGNYDYLMYADYDMDHPEVVNELRNWGVWYTNTLGLDGFRIDAVKHIKYSFTRDWINHVRSATGKNMFAVAEFWKNDLGAIENYLQKTNWNHSVFDVPLHYNLYNASKSGGNYDMRNIFNGTVVQRHPSHAVTFVDNHDSQPEEALESFVEEWFKPLAYALTLTREQGYPSVFYGDYYGIPTHGVPAMRSKIDPILEARQKYAYGPQHDYLDHPDVIGWTREGDSSHPKSGLATLITDGPGGSKRMYAGLKNAGETWYDITGNRSDTVKIGSDGWGEFHVNDGSVSIYVQK

SEQ ID NO: 40358 - protein, 478 aa, Synthetic construct
NGTMMQYFEWYLPNDGNHWNRLNSDASNLKSKGITAVWIPPAWKGASQNDVGYGAYDLYDLGEFNQKGTVRTKYGTRSQLQAAVTSLKNNGIQVYGDVVMNHKGGADATEMVRAVEVNPNNRNQEVTGEYTIEAWTRFDFPGRGNTHSSFKWRWYHFDGVDWDQSRRLNNRIYKFRGKAWDWEVDTENGNYDYLMYADIDMDHPEPLNELRNWGVWYTNTLGLDGFRIDAVKHIKYSFTRDWINHVRSATGKNMFAVAEFWKNDLGAIENYLQKTNWNHSVFDVPLHYNLYNASKSGGNYDMRNIFNGTVVQRHPSHAVTFVDNHDSQPEEALESFVEEWFKPLAYALTLTREQGYPSVFYGDYYGIPTHGVPAMRSKIDPILEARQKYAYGPQHDYLDHPDVIGWTREGDSSHPKSGLATLITDGPGGSKRMYAGLKNAGETWYDITGNRSDTVKIGSDGWGEFHVNDGSVSIYVQK

SEQ ID NO: 40359 - protein, 478 aa, Bacillus sp.
NGTMMQYFEWYLPNDGNHWNRLNSDASNLKSKGITAVWIPPAWKAASQNDVGYGAYDLYDLGEFNQKGTVRTKYGTRSQLQAAVTSLKNNGIQVYGDVVMNHKGGADATEMVRAVEVNPNNRNQEVTGEYTIEAWTRFDFPGRGNTHSSFKWRWYHFDGVDWDQSRQTNNRIYKFRGKAWDWEVDTEFGNYDYLMYADYDMDHPEVVNELRNWGVWYTNTLGLDGFRIDAVKHIKYSFTRDWINHVRSATGKNMFAVAEFWKNDLGAIENYLQKTNWNHSVFDVPLHYNLYNASKSGGNYDMRNIFNGTVVQRHPSHAVTFVDNHDSQPEEALESFVETWFKPLAYALTLTREQGYPSVFYGDYYGIPTHGVPAMRSKIDPILEARQKYAYGPQHDYLDHPDVIGWTREGDSSHPKSGLATLITDGPGGSKRMYAGLKNAGETWYDITGNRSDTVKIGSDGWGEFHVNDASVSIYVQK

SEQ ID NO: 40360 - protein, 478 aa, Bacillus sp.
NGTMMQYFEWYLPNDGNHWNRLNSDASNLKSKGITAVWIPPAWKGASQNDVGYGAYDLYDLGEFNQKGTVRTKYGTRSQLQAAVTSLKNNGIQVYGDVVMNHKGGADATEMVRAVEVNPNNRQQEVTGEYTIEAWTRFDFPGRGNTHSSFKWRWYHFDGVDWDQSRRLNNRIYKFRGKAWDWEVDTEFGNYDYLMYADYDMDHPEVVNELRNWGVWYTNTLGLDGFRIDAVKHIKYSFTRDWINHVRSATGKNMFAVAEFWKNDLGAIENYLQKTNWNHSVFDVPLHYNLYNASKSGGNYDMRNIFNGTVVQRHPSHAVTFVDNHDSQPEEALESFVEEWFKPLAYALTLTREQGYPSVFYGDYYGIPTHGVPAMRSKIDPILEARQKYAYGPQHDYLDHPDVIGWTREGDSSHPKSGLATLITDGPGGSKRMYAGLKNAGETWYDITGNRSDTVKIGSDGWGEFHVNDGSVSIYVQK

SEQ ID NO: 40361 - protein, 478 aa, Bacillus sp.
NGTMMQYFEWYLPNDGNHWNRLNSDASNLKSKGITAVWIPPAWKGASQNDVGYGAYDLYDLGEFNQKGTVRTKYGTRSQLQAAVTSLKNNGIQVYGDVVMNHKGGADATEMVRAVEVNPNNRNQEVTGEYTIEAWTRFDFPGRGNTHSSFKWRWYHFDGVDWDQSGRLNNRIYKFRGKAWDWEVDTEFGNYDYLMYADYDMDHPEVVNELRNWGVWYTNTLGLDGFRIDAVKHIKYSFTRDWINHVRSATGKNMFAVAEFWKNDLGAIENYLQKTNWNHSVFDVPLHYNLYNASKSGGNYDMRNIFNGTVVQRHPSHAVTFVDNHDSQPEEALESFVEEWFKPLAYALTLTREQGYPSVFYGDYYGIPTHGVPAMRSKIDPILEARQKYAYGPQHDYLDHPDVIGWTREGDSSHPKSGLATLITDGPGGSKRMYAGLKNAGETWYDITGNRSDTVKIGSDGWGEFHVNDGSVSIYVQK

SEQ ID NO: 40362 - protein, 478 aa, Bacillus sp.
NGTMMQYFEWYLPNDGNHWNRLNSDASNLKSKGITAVWIPPAWKGASQNDVGYGAYDLYDLGEFNQKGTVRTKYGTRSQLQAAVTSLKNNGIQVYGDVVMNHKGGADATEMVRAVEVNPNNRNQEVTGEYTIEAWTRFDFPGRGNTHSSFKWRWYHFDGVDWDQSREFDNRIYKFRGKAWDWEVDTEFGNYDYLMYADYDMDHPEVVNELRNWGVWYTNTLGLDGFRIDAVKHIKYSFTRDWINHVRIATGKNMFAVAEFWKNDLGAIENYLQKTNWNHSVFDVPLHYNLYNASKSGGNYDMRNIFNGTVVQRHPSHAVTFVDNHDSQPEEALESFVDEWFKPLAYALTLTREQGYPSVFYGDYYGIPTHGVPAMRSKIDPILEARQKYAYGPQHDYLDHPDVIGWTREGDSSHPKSGLATLITDGPGGSKRMYAGLKNAGETWYDITGNRSDTVKIGSDGWGEFHVNDQSVSIYVQK

SEQ ID NO: 40363 - protein, 478 aa, Bacillus sp.
NGTMMQYFEWYLPNDGNHWNRLNSDASNLKSKGITAVWIPPAWKAVSQNDVGYGAYDLYDLGEFNQKGTVRTKYGTRSQLQAAVTSLKNNGIQVYGDVVMNHKGGADATEMVRAVEVNPNNRNQEVTGEYTIEAWTRFDFPGRGNTHSSFKWRWYHFDGVDWDQSRRLSNRIYKFRGKAWDWEVDTEFGNYDYLMYADYDYDHPESTNEMRNWGVWYTNTLGLDGFRIDAVKHIKYSFTRDWINHVRSATGKNMFAVAEFWKNDLGAIENYLQKTNWNHSVFDVPLHYNLYNASKSGGNYDMRNIFNGTVVQRHPSHAVTFVDNHDSQPEEALESFVEEWFKPLAYALTLTREQGYPSVFYGDYYGIPTHGVPAMRSKIDPILEARQKYAYGPQHDYLDHPDVIGWTREGDSSHPKSGLATLITDGPGGSKRMYAGLKNAGETWYDITGNRSDTVKIGSDGWGEFHVNDGSVSIYVQK

SEQ ID NO: 40364 - protein, 478 aa, Bacillus sp.
NGTMMQYFEWYLPNDGNHWNRLNSDASNLKSKGITAVWIPPAWKGASQNDVGYGAYDLYDLGEFNQKGTVRTKYGTRSQLQAAVTSLKNNGIQVYGDVVMNHKGGADATEMVRAVEVNPNNRNQEVTGEYTIEAWTRFDFPGRGNTHSSFKWRWYHFDGVDWDQSRRLNNRIYKFRGKFWDWEVDTEFGNYDYLMYADYDMDHPEVVNELRNWGVWYTNTLGLDGFRIDAVKHIKYSFTRDWINHVRSATGKNMFAVAEFWKNDLGAIENYLQKTNWNHSVFDVPLHYNLYNASKSGGNYDMRNIFNGTVVQRHPSHAVTFVDNHDSQPEEALESFVEEWFKPLAYALTLTREQGYPSVFYGDYYGIPTHGVPAMRSKIDPILEARQKYAYGPQHDYLDHPDVIGWTREGDSSHPKSGLATLITDGPGGSKRMYAGLKNAGETWYDITGNRSDTVKIGSDGWGEFHVNDGSVSIYVQK

SEQ ID NO: 40365 - protein, 478 aa, Bacillus sp.
NGTMMQYFEWYLPNDGNHWNRLNSDASNLKSKGITAVWIPPAWKGASQNDVGYGAYDLYDLGEFNQKGTVRTKYGTRSQLQAAVTSLKNNGIQVYGDVVMNHKGGADATEMVRAVEVNPNNRNQEVTGEYTIEAWTRFDFPGRGNTHSSFKWRWYHFDGVDWDQSRRFNNRIYKFRGKAWDWEVDTEFGNYDYLMYTDYDMDHPEVVNELRNWGVWYTNTLGLDGFRIDAVKHIKYSFTRDWINHVRSATGKNMFAVAEFWKNDLGAIENYLQKTNWNHSVFDVPLHYNLYNASKSGGNYDMRNIFNGTVVQRHPSHAVTFVDNHDSQPEEALESFVEEWFKPLAYALTLTREQGYPSVFYGDYYGIPTHGVPAMRSKIDPILEARQKYAYGPQHDYLDHPDVIGWTREGDSSHPKSGLATLITDGPGGSKRMYAGLKNAGETWYDITGNRSDTVKIGSDGWGEFHVNDGSVSIYVQK

SEQ ID NO: 40366 - protein, 478 aa, Bacillus sp.
NGTMMQYFEWYLPNDGNHWNRLNSDASNLKSKGITAVWIPPAWKGASQNDVGYGAYDLYDLGEFNQKGTVRTKYGTRSQLQAAVTSLKNNGIQVYGDVVMNHKGGADATEMVRAVEVNPNNRNQEVTGEYTIEAWTRFDFPGRGNTHSSFKWRWYHFDGVDWDQSRRLNNRIYKFRGKAWDWEVDTEFGNYDYLMYADYDMDHPEVVNELRNWGVWYTNTLGLDGFRIDAVKHIKYSFTRDWINHVRSATGKNMFAVAEFWKNDLGAIENYLQKTNWNHSVFDVPLHYNLYNASKSGGNYDMRNIFNGTVVQAHPMLAVTFVDNHDSQPEEALESFVEEWFKPLAYALTLTREQGYPSVFYGDYYGIPTHGVPAMRSKIDPILEARQKYAYGPQHDYLDHPDVIGWTREGDSSHPKSGLATLITDGPGGSKRMYAGLKNAGETWYDITGNRSDTVKIGSDGWGEFHVNDGSVSIYVQK

SEQ ID NO: 40367 - protein, 478 aa, Bacillus sp.
NGTMMQYFEWYLPNDGNHWNRLNSDASNLKSKGITAVWIPPAWKGASQNDVGYGAYDLYDLGEFNQKGTVRTKYGTRSQLQAAVTSLKNNGIQVYGDVVMNHKGGADATEMVRAVEVNPNNRNQEVTGEYTIEAWTRFDFPGRGNTHSSFKWRWYHFDGVDWDQSRRLNNRIYLFRGKAWSWEVPTENGNYDYLMYADIDMDHPEVVNELRNWGVWYTNTLGLDGFRIDAVKHIKYSFTRDWINHVRSATGKNMFAVAEFWKNDLGAIENYLQKTNWNHSVFDVPLHYNLYNASKSGGNYDMRNIFNGTVVQRHPSHAVTFVDNHDSQPEEALESFVEEWFKPLAYALTLTREQGYPSVFYGDYYGIPTHGVPAMRSKIDPILEARQKYAYGPQHDYLDHPDVIGWTREGDSSHPKSGLATLITDGPGGSKRMYAGLKNAGETWYDITGNRSDTVKIGSDGWGEFHVNDGSVSIYVQK

SEQ ID NO: 40368 - protein, 478 aa, Bacillus sp.
NGTMMQYFEWYLPNDGNHWNRLNSDASNLKSKGITAVWIPPAWKGASQNDVGYGAYDLYDLGEFNQKGTVRTKYGTRSQLQAAVTSLKNNGIQVYGDVVMNHKGGADATEMVRAVEVNPNNRNQEVTGEYTIEAWTRFDFPGRGNTHSSFKWRWYHFDGVDWDQSRRLTNRIYKFRGKAWDWEVDTEFGNYDYLMYTDYDMDHPEVVNELRNWGVWYTNTLGLDGFRIDAVKHIKYSFTRDWINHVRSATGKNMFAVAEFWKNDLGAIENYLQKTNWNHSVFDVPLHYNLYNASKSGGNYDMRNIFNGTVVQRHPSHAVTFVDNHDSQPEEALESFVEEWFKPLAYALTLTREQGYPSVFYGDYYGIPTHGVPAMRSKIDPILEARQKYAYGPQHDYLDHPDVIGWTREGDSSHPKSGLATLITDGPGGSKRMYAGLKNAGETWYDITGNRSDTVKIGSDGWGEFHVNDGSVSIYVQK

SEQ ID NO: 40369 - protein, 478 aa, Bacillus sp.
NGTMMQYFEWYLPNDGNHWNRLNSDASNLKSKGITAVWIPPAWKGASQNDVGYGAYDLYDLGEFNQKGTVRTKYGTRSQLQAAVTSLKNNGIQVYGDVVMNHKGGADATEMVRAVEVNPNNRNQEVTGEYTIEAWTRFDFPGRGNTHSSFKWRWYHFDGVDWDQSRRLNNRIYKFRGKAWDWEVDTESGFYDYLMYADIDMDHPEVVNELRNWGVWYTNTLGLDGFRIDAVKHIKYSFTRDWINHVRSATGKNMFAVAEFWKNDLGAIENYLQKTNWNHSVFDVPLHYNLYNASKSGGNYDMRNIFNGTVVQRHPSHAVTFVDNHDSQPEEALESFVEEWFKPLAYALTLTREQGYPSVFYGDYYGIPTHGVPAMRSKIDPILEARQKYAYGPQHDYLDHPDVIGWTREGDSSHPKSGLATLITDGPGGSKRMYAGLKNAGETWYDITGNRSDTVKIGSDGWGEFHVNDGSVSIYVQK

SEQ ID NO: 40370 - protein, 478 aa, Bacillus sp.
NGTMMQYFEWYLPNDGNHWNRLNSDASNLKSKGITAVWIPPAWKGASQNDVGYGAYDLYDLGEFNQKGTVRTKYGTRSQLQAAVTSLKNNGIQVYGDVVMNHKGGADATEMVRAVEVNPNNRNQEVTGEYTIEAWTRFDFPGRGNTHSSFKWRWYHFDGVDWDQSRRLNNRIYKFRGKAWDWEVDTEFGNYDLLMYADYDMDHPEVVNELRNWGVWYTNTLGLDGFRIDAVKHIKYSFTRDWINHVRSATGKNMFAVAEFWKNDLGAIENYLQKTNWNHSVFDVPLHYNLYNASKSGGNYDMRNIFNGTVVQRHPSHAVTFVDNHDSQPEEALESFVEEWFKPLAYALTLTREQGYPSVFYGDYYGIPTHGVPAMRSKIDPILEARQKYAYGPQHDYLDHPDVIGWTREGDSSHPKSGLATLITDGPGGSKRMYAGLKNAGETWYDITGNRSDTVKIGSDGWGEFHVNDGSVSIYVQK

SEQ ID NO: 40371 - protein, 478 aa, Bacillus sp.
NGTMMQYFEWYLPNDGNHWNRLNSDASNLKSKGITAVWIPPAWKGASQNDVGYGAYDLYDLGEFNQKGTVRTKYGTRSQLQAAVTSLKNNGIQVYGDVVMNHKGGADATEMVRAVEVNPNNRNQEVTGEYTIEAWTRFDFPGRGNTHSSFKWRWYHFDGVDWDQSRRLNNRIYKFRGKAWDWEVDTEFGNYDYLMYADYDMDHPEVVNELRNWGVWYTNTLGLDGFRIDAVKHIKYSFTRDWINHVRSATGKNMFAVAEFWKNDLGAIENYLQKTNWNHSVFDVPLHYNLYNASKSGGNYDMRNIFNGTVVQRHPSHAVTFVDNHDSQPEEALESFVETWFKPLAYALTLTREQGYPSVFYGDYYGIPTHGVPAMRSKIDPILEARQKYAYGPQHDYLDHPDVIGWTREGDSSHPKSGLATLITDGPGGSKRMYAGLKNAGETWYDITGNRSDTVKIGSDGWGEFHVNQSSVSIYVQK

SEQ ID NO: 40372 - protein, 478 aa, Bacillus sp.
NGTMMQYFEWYLPNDGNHWNRLNSDASNLKSKGITAVWIPPAWKGASQNDVGYGAYDLYDLGEFNQKGTVRTKYGTRSQLQAAVTSLKNNGIQVYGDVVMNHKGGADATEMVRAVEVNPNNRNQEVTGEYTIEAWTRFDFPGRGNTHSSFKWRWYHFDGVDWDQSRNVNNRIYKFRGKAWDWEVDTEFGNYDYLMYADYDMDHPEVVNELRNWGVWYTNTLGLDGFRIDAVKHIKYSFTRDWINHVRSATGKNMFAVAEFWKNDLGAIENYLQKTNWNHSVFDVPLHYNLYNASKSGGNYDMRNIFNGTVVQRHPSHAVTFVDNHDSQPEEALESFVDPWFKPLAYALTLTREQGYPSVFYGDYYGIPTHGVPAMRSKIDPILEARQKYAYGPQHDYLDHPDVIGWTREGDSSHPKSGLATLITDGPGGSKRMYAGLKNAGETWYDITGNRSDTVKIGSDGWGEFHVNGGSVSIYVQK

SEQ ID NO: 40373 - protein, 478 aa, Bacillus sp.
NGTMMQYFEWYLPNDGNHWNRLNSDASNLKSKGITAVWIPPAWKAASQNDVGYGAYDLYDLGEFNQKGTVRTKYGTRSQLQAAVTSLKNNGIQVYGDVVMNHKGGADATEMVRAVEVNPNNRNQEVTGEYTIEAWTRFDFPGRGNTHSSFKWRWYHFDGVDWDQSRNLTNRIYKFRGKAWDWEVDTEFGNYDYLMYADYDMDHPEVVNELRNWGVWYTNTLGLDGFRIDAVKHIKYSFTRDWINHVRSATGKNMFAVAEFWKNDLGAIENYLQKTNWNHSVFDVPLHYNLYNASKSGGNYDMRNIFNGTVVQRHPSHAVTFVDNHDSQPEEALESFVETWFKPLAYALTLTREQGYPSVFYGDYYGIPTHGVPAMRSKIDPILEARQKYAYGPQHDYLDHPDVIGWTREGDSSHPKSGLATLITDGPGGSKRMYAGLKNAGETWYDITGNRSDTVKIGSDGWGEFHVNKGSVSIYVQK

SEQ ID NO: 40374 - protein, 478 aa, Bacillus sp.
NGTMMQYFEWYLPNDGNHWNRLNSDASNLKSKGITAVWIPPAWKGASQNDVGYGAYDLYDLGEFNQKGTVRTKYGTRSQLQAAVTSLKNNGIQVYGDVVMNHKGGADATEMVRAVEVNPNNRNQEVTGEYTIEAWTRFDFPGRGNTHSSFKWRWYHFDGVDWDQSRRLNNRIYKFRGKAWDWEVDTEFGNYDYLMYADYDMDHPEVVNELRNWGVWYTNTLGLDGFRIDAVKHIKYSFTRDWINHVRSATGKNMFAVAEFWKNDLGAIENYLQKTNWNHSVFDVPLHYNLYNASNSGGNYDMRNIFNGTVVQRHPSHAVTFVDNHDSQPEEALESFVETWFKPLAYALTLTREQGYPSVFYGDYYGIPTHGVPAMRSKIDPILEARQKYAYGPQHDYLDHPDVIGWTREGDSSHPKSGLATLITDGPGGSKRMYAGLKNAGETWYDITGNRSDTVKIGSDGWGEFHVNKASVSIYVQK

SEQ ID NO: 40375 - protein, 478 aa, Bacillus sp.
NGTMMQYFEWYLPNDGNHWNRLNSDASNLKSKGITAVWIPPAWKGASQNDVGYGAYDLYDLGEFNQKGTVRTKYGTRSQLQAAVTSLKNNGIQVYGDVVMNHKGGADATEMVRAVEVNPNNRNQEVTGEYTIEAWTRFDFPGRGNTHSSFKWRWYHFDGVDWDQSRRFDNRIYKFRGKAWDWEVDTEFGNYDYLMYSDYDMDHPEVVNELRNWGVWYTNTLGLDGFRIDAVKHIKYSFTRDWINHVRSATGKNMFAVAEFWKNDLGAIENYLQKTNWNHSVFDVPLHYNLYNASKSGGNYDMRNIFNGTVVQRHPSHAVTFVDNHDSQPEEALESFVEEWFKPLAYALTLTREQGYPSVFYGDYYGIPTHGVPAMRSKIDPILEARQKYAYGPQHDYLDHPDVIGWTREGDSSHPKSGLATLITDGPGGSKRMYAGLKNAGETWYDITGNRSDTVKIGSDGWGEFHVNDGSVSIYVQK

SEQ ID NO: 40376 - protein, 478 aa, Bacillus sp.
NGTMMQYFEWYLPNDGNHWNRLNSDASNLKSKGITAVWIPPAWKGASQNDVGYGAYDLYDLGEFNQKGTVRTKYGTRSQLQAAVTSLKNNGIQVYGDVVMNHKGGADATEMVRAVEVNPNNRNQEVTGEYTIEAWTRFDFPGRGNTHSSFKWRWYHFDGVDWDQSRRLNNRIYKFRGKAWDWEVDTEFGNYDYLMYADYDMDHPEVVNELRNWGVWYTNTLGLDGFRIDAVKHIKYSFTRDWINHVRSATGKNMFAVAEFWKNDLGAIENYLQKTNWNHSVFDAPLHYNLYNASKSGGNYDMRNIFNGTVVQRHPSHAVTFVDNHDSQPEEALESFVEEWFKPLAYALTLTREQGYPSVFYGDYYGIPTHGVPAMRSKIDPILEARQKYAYGPQHDYLDHPDVIGWTREGDSSHPKSGLATLITDGPGGSKRMYAGLKNAGETWYDITGNRSDTVKIGSDGWGEFHVNDGSVSIYVQK

SEQ ID NO: 40377 - protein, 478 aa, Bacillus sp.
NGTMMQYFEWYLPNDGNHWNRLNSDASNLKSKGITAVWIPPAWKAASQNDVGYGAYDLYDLGEFNQKGTVRTKYGTRSQLQAAVTSLKNNGIQVYGDVVMNHKGGADATEMVRAVEVNPNNRNQEVTGEYTIEAWTRFDFPGRGNTHSSFKWRWYHFDGVDWDQSRNVNNRIYKFRGKAWDWEVDTEFGNYDYLMYADYDMDHPEVVNELRNWGVWYTNTLGLDGFRIDAVKHIKYSFTRDWINHVRSATGKNMFAVAEFWKNDLGAIENYLQKTNWNHSVFDVPLHYNLYNASKSGGNYDMRNIFNGTVVQRHPSHAVTFVDNHDSQPEEALESFVEEWFKPLAYALTLTREQGYPSVFYGDYYGIPTHGVPAMRSKIDPILEARQKYAYGPQHDYLDHPDVIGWTREGDSSHPKSGLATLITDGPGGSKRMYAGLKNAGETWYDITGNRSDTVKIGSDGWGEFHVNDGSVSIYVQK

SEQ ID NO: 40378 - protein, 478 aa, Bacillus sp.
NGTMMQYFEWYLPNDGNHWNRLNSDASNLKSKGITAVWIPPAWKGASQNDVGYGAYDLYDLGEFNQKGTVRTKYGTRSQLQAAVTSLKNNGIVVYGDVVMNHKGGADATEMVRAVEVNPNNRNQEVTGEYTIEAWTRFDFPGRGNTHSSFKWRWYHFDGVDWDQSRRLNNRIYKFRGKAWDWEVDTEFGNYDYLMYADYDMDHPEVVNELRNWGVWYTNTLGLDGFRIDAVKHIKYSFTRDWINHVRSATGKNMFAVAEFWKNDLGAIENYLQKTNWNHSVFDVPLHYNLYNASKSGGNYDMRNIFNGTVVQRHPSHAVTFVDNHDSQPEEALESFVEEWFKPLAYALTLTREQGYPSVFYGDYYGIPTHGVPAMRSKIDPILEARQKYAYGPQHDYLDHPDVIGWTREGDSSHPKSGLATLITDGPGGSKRMYAGLKNAGETWYDITGNRSDTVKIGSDGWGEFHVNDGSVSIYVQK

SEQ ID NO: 40379 - protein, 478 aa, Bacillus sp.
NGTMMQYFEWYLPNDGNHWNRLNSDASNLKSKGITAVWIPPAWKAASQNDVGYGAYDLYDLGEFNQKGTVRTKYGTRSQLQAAVTSLKNNGIQVYGDVVMNHKGGADATEMVRAVEVNPNNRNQEVTGEYTIEAWTRFDFPGRGNTHSSFKWRWYHFDGVDWDQSREFQNRIYKFRGKAWDWEVDTEFGNYDYLMYADYDMDHPEVVNELRNWGVWYTNTLGLDGFRIDAVKHIKYSFTRDWINHVRSATGKNMFAVAEFWKNDLGAIENYLQKTNWNHSVFDVPLHYNLYNASKSGGNYDMRNIFNGTVVQRHPSHAVTFVDNHDSQPEEALESFVEEWFKPLAYALTLTREQGYPSVFYGDYYGIPTHGVPAMRSKIDPILEARQKYAYGPQHDYLDHPDVIGWTREGDSSHPKSGLATLITDGPGGSKRMYAGLKNAGETWYDITGNRSDTVKIGSDGWGEFHVNDGSVSIYVQK

SEQ ID NO: 40380 - protein, 478 aa, Bacillus sp.
NGTMMQYFEWYLPNDGNHWNRLNSDASNLKSKGITAVWIPPAWKAASQNDVGYGAYDLYDLGEFNQKGTVRTKYGTRSQLQAAVTSLKNNGIQVYGDVVMNHKGGADATEMVRAVEVNPNNRNQEVTGEYTIEAWTRFDFPGRGNTHSSFKWRWYHFDGVDWDQSRNTDNRIYKFRGKAWDWEVDTEFGNYDYLMYADYDMDHPEVVNELRNWGVWYTNTLGLDGFRIDAVKHIKYSFTRDWINHVRSATGKNMFAVAEFWKNDLGAIENYLQKTNWNHSVFDVPLHYNLYNASKSGGNYDMRNIFNGTVVQRHPSHAVTFVDNHDSQPEEALESFVEEWFKPLAYALTLTREQGYPSVFYGDYYGIPTHGVPAMRSKIDPILEARQKYAYGPQHDYLDHPDVIGWTREGDSSHPKSGLATLITDGPGGSKRMYAGLKNAGETWYDITGNRSDTVKIGSDGWGEFHVNDGSVSIYVQK

SEQ ID NO: 40381 - protein, 478 aa, Bacillus sp.
NGTMMQYFEWYLPNDGNHWNRLNSDASNLKSKGITAVWIPPAWKAASQNDVGYGAYDLYDLGEFNQKGTVRTKYGTRSQLQAAVTSLKNNGIQVYGDVVMNHKGGADATEMVRAVEVNPNNRNQEVTGEYTIEAWTRFDFPGRGNTHSSFKWRWYHFDGVDWDQSRRTQNRIYKFRGKAWDWEVDTEFGNYDYLMYADYDMDHPEVVNELRNWGVWYTNTLGLDGFRIDAVKHIKYSFTRDWINHVRSATGKNMFAVAEFWKNDLGAIENYLQKTNWNHSVFDVPLHYNLYNASKSGGNYDMRNIFNGTVVQRHPSHAVTFVDNHDSQPEEALESFVEEWFKPLAYALTLTREQGYPSVFYGDYYGIPTHGVPAMRSKIDPILEARQKYAYGPQHDYLDHPDVIGWTREGDSSHPKSGLATLITDGPGGSKRMYAGLKNAGETWYDITGNRSDTVKIGSDGWGEFHVNDGSVSIYVQK

SEQ ID NO: 40382 - protein, 478 aa, Bacillus sp.
NGTMMQYFEWYLPNDGNHWNRLNSDASNLKSKGITAVWIPPAWKGASQNDVGYGAYDLYDLGEFNQKGTVRTKYGTRSQLQAAVTSLKNNGIQVYGDVVMNHKGGADATEMVRAVEVNPNNRNQEVTGEYTIEAWTRFDFPGRGNTHSSFKWRWYHFDGVDWDQSRRLNNRIYKFRGKAWDWEVDTEFGNYDYLMYADYDMDHPEVVNELRNWGVWYTNTLGLDGFRIDAVKHIKYSFTRDWINHVRSATGKNMFAVAEFWKNDLGAIENYLQKTNWNHSVFDVPLHYNLYNASKSGGNYDMRNIFNGTVVQRHPSHAVTFVDNHDSQPEEALESFVEEWFKPLAYVLTLTREQGYPSVFYGDYYGIPTHGVPAMRSKIDPILEARQKYAYGPQHDYLDHPDVIGWTREGDSSHPKSGLATLITDGPGGSKRMYAGLKNAGETWYDITGNRSDTVKIGSDGWGEFHVNDGSVSIYVQK

SEQ ID NO: 40383 - protein, 478 aa, Bacillus sp.
NGTMMQYFEWYLPNDGNHWNRLNSDASNLKSKGITAVWIPPAWKAASQNDVGYGAYDLYDLGEFNQKGTVRTKYGTRSQLQAAVTSLKNNGIQVYGDVVMNHKGGADATEMVRAVEVNPNNRNQEVTGEYTIEAWTRFDFPGRGNTHSSFKWRWYHFDGVDWDQSRRLENRIYKFRGKAWDWEVDTEFGNYDYLMYADYDMDHPEVVNELRNWGVWYTNTLGLDGFRIDAVKHIKYSFTRDWINHVRSATGKNMFAVAEFWKNDLGAIENYLQKTNWNHSVFDVPLHYNLYNASKSGGNYDMRNIFNGTVVQRHPSHAVTFVDNHDSQPEEALESFVEEWFKPLAYALTLTREQGYPSVFYGDYYGIPTHGVPAMRSKIDPILEARQKYAYGPQHDYLDHPDVIGWTREGDSSHPKSGLATLITDGPGGSKRMYAGLKNAGETWYDITGNRSDTVKIGSDGWGEFHVNDGSVSIYVQK

SEQ ID NO: 40384 - protein, 478 aa, Bacillus sp.
NGTMMQYFEWYLPNDGNHWNRLNSDASNLKSKGITAVWIPPAWKAASQNDVGYGAYDLYDLGEFNQKGTVRTKYGTRSQLQAAVTSLKNNGIQVYGDVVMNHKGGADATEMVRAVEVNPNNRNQEVTGEYTIEAWTRFDFPGRGNTHSSFKWRWYHFDGVDWDQSRDLQNRIYKFRGKAWDWEVDTEFGNYDYLMYADYDMDHPEVVNELRNWGVWYTNTLGLDGFRIDAVKHIKYSFTRDWINHVRSATGKNMFAVAEFWKNDLGAIENYLQKTNWNHSVFDVPLHYNLYNASKSGGNYDMRNIFNGTVVQRHPSHAVTFVDNHDSQPEEALESFVEEWFKPLAYALTLTREQGYPSVFYGDYYGIPTHGVPAMRSKIDPILEARQKYAYGPQHDYLDHPDVIGWTREGDSSHPKSGLATLITDGPGGSKRMYAGLKNAGETWYDITGNRSDTVKIGSDGWGEFHVNDGSVSIYVQK

SEQ ID NO: 40385 - protein, 478 aa, Bacillus sp.
NGTMMQYFEWYLPNDGNHWNRLNSDASNLKSKGITAVWIPPAWKGASQNDVGYGAYDLYDLGEFNQKGTVRTKYGTRSQLQAAVTSLKNNGIQVYGDVVMNHKGGADATEMVRAVEVNPNNRNQEVTGEYTIEAWTRFDFPGRGNTHSSFKWRWYHFDGVDWDQSRRTNNRIYKFRGKAWDWEVDTEFGNYDYLMYTDYDMDHPEVVNELRNWGVWYTNTLGLDGFRIDAVKHIKYSFTRDWINHVRSATGKNMFAVAEFWKNDLGAIENYLQKTNWNHSVFDVPLHYNLYNASKSGGNYDMRNIFNGTVVQRHPSHAVTFVDNHDSQPEEALESFVETWFKPLAYALTLTREQGYPSVFYGDYYGIPTHGVPAMRSKIDPILEARQKYAYGPQHDYLDHPDVIGWTREGDSSHPKSGLATLITDGPGGSKRMYAGLKNAGETWYDITGNRSDTVKIGSDGWGEFHVNDASVSIYVQK

SEQ ID NO: 40386 - protein, 478 aa, Bacillus sp.
NGTMMQYFEWYLPNDGNHWNRLNSDASNLKSKGITAVWIPPAWKGASQNDVGYGAYDLYDLGEFNQKGTVRTKYGTRSQLQAAVTSLKNNGIQVYGDVVMNHKGGADATEMVRAVEVNPNNRNQEVTGEYTIEAWTRFDFPGRGNTHSSFKWRWYHFDGVDWDQSRRLNNRIYKFRGKAWDWEVDTEFGNYDYLMYADYDMDHPEVVNELRNWGVWYTNTLGLDGFRIDAVKHIKYSFTRDWINHVRSATGKNMFAVAEFWKNDLGAIENYLQKTNWNHSVFDVPLHYNLYNASKSGGNLDMRNIFNGTVVQRHPSHAVTFVDNHDSQPEEALESFVEEWFKPLAYALTLTREQGYPSVFYGDYYGIPTHGVPAMRSKIDPILEARQKYAYGPQHDYLDHPDVIGWTREGDSSHPKSGLATLITDGPGGSKRMYAGLKNAGETWYDITGNRSDTVKIGSDGWGEFHVNDGSVSIYVQK

SEQ ID NO: 40387 - protein, 478 aa, Bacillus sp.
NGTMMQYFEWYLPNDGNHWNRLNSDASNLKSKGITAVWIPPAWKGASQNDVGYGAYDLYDLGEFNQKGTVRTKYGTRSQLQAAVTSLKNNGIQVYGDVVMNHKGGADATEMVRAVEVNPNNRNQEVTGEYTIEAWTRFDFPGRGNTHSSFKWRWYHFDGVDWDQSRQVNNRIYKFRGKAWDWEVDTEFGNYDYLMYTDYDMDHPEVVNELRNWGVWYTNTLGLDGFRIDAVKHIKYSFTRDWINHVRSATGKNMFAVAEFWKNDLGAIENYLQKTNWNHSVFDVPLHYNLYNASKSGGNYDMRNIFNGTVVQRHPSHAVTFVDNHDSQPEEALESFVEEWFKPLAYALTLTREQGYPSVFYGDYYGIPTHGVPAMRSKIDPILEARQKYAYGPQHDYLDHPDVIGWTREGDSSHPKSGLATLITDGPGGSKRMYAGLKNAGETWYDITGNRSDTVKIGSDGWGEFHVNDGSVSIYVQK

SEQ ID NO: 40388 - protein, 478 aa, Bacillus sp.
NGTMMQYFEWYLPNDGNHWNRLNSDASNLKSKGITAVWIPPAWKGASQNDVGYGAYDLYDLGEFNQKGTVRTKYGTRSQLQAAVTSLKNNGIQVYGDVVMNHKGGADATEMVRAVEVNPNNRNQEVTGEYTIEAWTRFDFPGRGNTHSSFKWRWYHFDGVDWDQSRRLNNRIYKFRVKAWKWEVDTENGNYDYLMYADIDMDHPEVVNELRNWGVWYTNTLGLDGFRIDAVKHIKYSFTRDWINHVRSATGKNMFAVAEFWKNDLGAIENYLQKTNWNHSVFDVPLHYNLYNASKSGGNYDMRNIFNGTVVQRHPSHAVTFVDNHDSQPEEALESFVEEWFKPLAYALTLTREQGYPSVFYGDYYGIPTHGVPAMRSKIDPILEARQKYAYGPQHDYLDHPDVIGWTREGDSSHPKSGLATLITDGPGGSKRMYAGLKNAGETWYDITGNRSDTVKIGSDGWGEFHVNDGSVSIYVQK

SEQ ID NO: 40389 - protein, 478 aa, Bacillus sp.
NGTMMQYFEWYLPNDGNHWNRLNSDASNLKSKGITAVWIPPAWKGASQNDVGYGAYDLYDLGEFNQKGTVRTKYGTRSQLQAAVTSLKNNGIQVYGDVVMNHKGGADATEMVRAVEVNPNNRNQEVTGEYTIEAWTRFDFPGRGNTHSSFKWRWYHFDGVDWDQSRRLNNRIYKFRGKAWDWEVDTEFGNYDYLMMADYDMDHPEVVNELRNWGVWYTNTLGLDGFRIDAVKHIKYSFTRDWINHVRSATGKNMFAVAEFWKNDLGAIENYLQKTNWNHSVFDVPLHYNLYNASKSGGNYDMRNIFNGTVVQRHPSHAVTFVDNHDSQPEEALESFVEEWFKPLAYALTLTREQGYPSVFYGDYYGIPTHGVPAMRSKIDPILEARQKYAYGPQHDYLDHPDVIGWTREGDSSHPKSGLATLITDGPGGSKRMYAGLKNAGETWYDITGNRSDTVKIGSDGWGEFHVNDGSVSIYVQK

SEQ ID NO: 40390 - protein, 478 aa, Bacillus sp.
NGTMMQYFEWYLPNDGNHWNRLNSDASNLKSKGITAVWIPPAWKGASQNDVGYGAYDLYDLGEFNQKGTVRTKYGTRSQLQAAVTSLKNNGIQVYGDVVMNHKGGADATEMVRAVEVNPNNRNQEVTGEYTIEAWTRFDFPGRGNTHSSFKWRWYHFDGVDWDQSREFDNRIYKFRGKAWDWEVDTEFGNYDYLMYADYDMDHPEVVNELRNWGVWYTNTLGLDGFRIDAVKHIKYSFTRDWINHVRSATGKNMFAVAEFWKNDLGAIENYLQKTNWNHSVFDVPLHYNLYNASKSGGNYDMRNIFNGTVVQVHPSHAVTFVDNHDSQPEEALESFVEEWFKPLAYALTLTREQGYPSVFYGDYYGIPTHGVPAMRSKIDPILEARQKYAYGPQHDYLDHPDVIGWTREGDSSHPKSGLATLITDGPGGSKRMYAGLKNAGETWYDITGNRSDTVKIGSDGWGEFHVNDGSVSIYVQK

SEQ ID NO: 40391 - protein, 478 aa, Bacillus sp.
NGTMMQYFEWYLPNDGNHWNRLNSDASNLKSKGITAVWIPPAWKGASQNDVGYGAYDLYDLGEFNQKGTVRTKYGTRSQLQAAVTSLKNNGIQVYGDVVMNHKGGADATEMVRAVEVNPNNRNQEVTGEYTIEAWTRFDFPGRGNTHSSFKWRWYHFDGVDWDQSRRLNNRIYKFRGKAWDWEVDTEFGNYDYLMYADYDMDHPEVVNELRNWGVWYTNTLGLDGFRIDAVKHIKYSFTRDWINHVRSATGKNMFAVAEFWKNDLGAIENYLQKTNWNHSVFDVPLHYQLYNASKSGGNYDMRNIFNGTVVQRHPSHAVTFVDNHDSQPEEALESFVEEWFKPLAYALTLTREQGYPSVFYGDYYGIPTHGVPAMRSKIDPILEARQKYAYGPQHDYLDHPDVIGWTREGDSSHPKSGLATLITDGPGGSKRMYAGLKNAGETWYDITGNRSDTVKIGSDGWGEFHVNDGSVSIYVQK

SEQ ID NO: 40392 - protein, 478 aa, Bacillus sp.
NGTMMQYFEWYLPNDGNHWNRLNSDASNLKSKGITAVWIPPAWKGASQNDVGYGAYDLYDLGEFNQKGTVRTKYGTRSQLQAAVTSLKNNGIQVYGDVVMNHKGGADATEMVRAVEVNPNNRNQEVTGEYTIEAWTRFDFPGRGNTHSSFKWRWYHFDGVDFDQSRQLNNRIYKFRGKAWDWEVDTEFGNYDYLMYADYDMDHPEVVNELRNWGVWYTNTLGLDGFRIDAVKHIKYSFTRDWINHVRSATGKNMFAVAEFWKNDLGAIENYLQKTNWNHSVFDVPLHYNLYNASKSGGNYDMRNIFNGTVVQRHPSHAVTFVDNHDSQPEEALESFVETWFKPLAYALTLTREQGLPSVFYGDYYGIPTHGVPAMRSKIDPILEARQKYAYGPQHDYLDHPDVIGWTREGDSSHPKSGLATLITDGPGGSKRMYAGLKNAGETWYDITGNRSDTVKIGSDGWGEFHVNDGSVSIYVQK

SEQ ID NO: 40393 - protein, 478 aa, Bacillus sp.
NGTMMQYFEWYLPNDGNHWNRLNSDASNLKSKGITAVWIPPAWKATSQNDVGYGAYDLYDLGEFNQKGTVRTKYGTRSQLQAAVTSLKNNGIQVYGDVVMNHKGGADATEMVRAVEVNPNNRNQEVTGEYTIEAWTRFDFPGRGNTHSSFKWRWYHFDGVDWDQSRNVNNRIYKFRGKAWDWEVDTEFGNYDYLMYADYDMDHPEVVNELRNWGVWYTNTLGLDGFRIDAVKHIKYSFTRDWINHVRSATGKNMFAVAEFWKNDLGAIENYLQKTNWNHSVFDVPLHYNLYNASKSGGNYDMRNIFNGTVVQRHPSHAVTFVDNHDSQPEEALESFVEEWFKPLAYALTLTREQGYPSVFYGDYYGIPTHGVPAMRSKIDPILEARQKYAYGPQHDYLDHPDVIGWTREGDSSHPKSGLATLITDGPGGSKRMYAGLKNAGETWYDITGNRSDTVKIGSDGWGEFHVNDGSVSIYVQK

SEQ ID NO: 40394 - protein, 478 aa, Bacillus sp.
NGTMMQYFEWYLPNDGNHWNRLNSDASNLKSKGITAVWIPPAWKGASQNDVGYGAYDLYDLGEFNQKGTVRTKYGTRSQLQAAVTSLKNNGIQVYGDVVMNHKGGADATEMVRAVEVNPNNRNQEVTGEYTIEAWTRFDFPGRGNTHSSFKWRWYHFDGVDWDQSRRLNNRIYKFRGKAWDWEVDTEFGNYDYLMYADYDMDHPEVVNELRNWGVWYTNTLGLDGFRIDAVKHIKYSFTRDWINHVRSATGKNMFAVAEFWKNDLGAIENYLQKTNWNHSVFDVPLHYNLYNASKSVGNYDMRNIFNGTVVQRHPSHAVTFVDNHDSQPEEALESFVEEWFKPLAYALTLTREQGYPSVFYGDYYGIPTHGVPAMRSKIDPILEARQKYAYGPQHDYLDHPDVIGWTREGDSSHPKSGLATLITDGPGGSKRMYAGLKNAGETWYDITGNRSDTVKIGSDGWGEFHVNDGSVSIYVQK

SEQ ID NO: 40395 - protein, 478 aa, Bacillus sp.
NGTMMQYFEWYLPNDGNHWNRLNSDASNLKSKGITAVWIPPAWKGASQNDVGYGAYDLYDLGEFNQKGTVRTKYGTRSQLQAAVTSLKNNGIQVYGDVVMNHKGGADATEMVRAVEVNPNNRNQEVTGEYTIEAWTRFDFPGRGNTHSSFKWRWYHFDGVDWDQSRDFDNRIYKFRGKAWDWEVDTEFGNYDYLMYADYDMDHPEVVNELRNWGVWYTNTLGLDGFRIDAVKHIKYSFTRDWINHVRSATGKNMFAVAEFWKNDLGAIENYLQKTNWNHSVFDVPLHYNLYNASKSGGNYDMRNIFNGTVVQRHPSHAVTFVDNHDSQPEEALESFVDPWFKPLAYALTLTREQGYPSVFYGDYYGIPTHGVPAMRSKIDPILEARQKYAYGPQHDYLDHPDVIGWTREGDSSHPKSGLATLITDGPGGSKRMYAGLKNAGETWYDITGNRSDTVKIGSDGLGEFHVNDGSVSIYVQK

SEQ ID NO: 40396 - protein, 478 aa, Bacillus sp.
NGTMMQYFEWYLPNDGNHWNRLNSDASNLKSKGITAVWIPPAWKGASQNDVGYGAYDLYDLGEFNQKGTVRTKYGTRSQLQAAVTSLKNNGIQVYGDVVMNHKGGADATEMVRAVEVNPNNRNQEVTGEYTIEAWTRFDFPGRGNTHSSFKWRWYHFDGVDWDQSRRLNNRIYKFRGKAWDWEVDTEFGNYDYLMYADYDMDHPEVVNELRNWGVWYTNTLGLDGFRIDAVKHIKYSFTRDWINHVRSATGKNMFAVAEFWKNDLGAIENYLQKTNWNHSVFDVPLHYNLYNASKSGSNYDMRNIFNGTVVQRHPSHAVTFVDNHDSQPEEALESFVEPWFKPLAYALTLTREQGYPSVFYGDYYGIPTHGVPAMRSKIDPILEARQKYAYGPQHDYLDHPDVIGWTREGDSSHPKSGLATLITDGPGGSKRMYAGLKNAGETWYDITGNRSDTVKIGSDGWGEFHVNDGSVSIYVQK

SEQ ID NO: 40397 - protein, 478 aa, Bacillus sp.
NGTMMQYFEWYLPNDGNHWNRLNSDASNLKSKGITAVWIPPAWKGASQNDVGYGAYDLYDLGEFNQKGTVRTKYGTRSQLQAAVTSLKNNGIQVYGDVVMNHKGGADATEMVRAVEVNPNNRNQEVTGEYTIEAWTRFDFPGRGNTHSSFKWRWYHFDGVDWDQSRRLNNRIYKFRGKAWDWEVDTEFGNYDYLMYADYDMDHPEVVNELRNWGVWYTNTLGLDGFRIDAVKHIKYSFTRDWINHVRSATGKNMFAVAEFWKNDLGAIENYLQKTNWNHSVFDVPLHYNLYNASKSGGNYDMRNIFNGTVVQRHPSHAVTFVDNHDSQPEEALESFVETWFKPLAYALTLTREQGYPSVFYGDYYGIPTHGVPAMRSKIDPILEARQKYAYGPQHDYLDHPDVIGWTREGDSSHPKSGLATLITDGPGGSKRMYAGLKNAGETWYDITGNRSDTVKIGSDGWGEFHVNQKSVSIYVQK

SEQ ID NO: 40398 - protein, 478 aa, Bacillus sp.
NGTMMQYFEWYLPNDGNHWNRLNSDASNLKSKGITAVWIPPAWKGASQNDVGYGAYDLYDLGEFNQKGTVRTKYGTRSQLQAAVTSLKNNGIQVYGDVVMNHKGGADATEMVRAVEVNPNNRNQEVTGEYTIEAWTRFDFPGRGNTHSSFKWRWYHFDGVDWDQSRRLNNRIYKFRGKAWDWEVDTEFGNYDYLMYADYDMDHPEVVNELRNWGVWYTNTLGLDGFRIDAVKHIKYSFTRDWINHVRSATGKNMFAVAEFWKGDLGAIENYLQKTNWNHSVFDVPLHYNLYNASKSGGNYDMRNIFNGTVVQRHPSHAVTFVDNHDSQPEEALESFVEEWFKPLAYALTLTREQGYPSVFYGDYYGIPTHGVPAMRSKIDPILEARQKYAYGPQHDYLDHPDVIGWTREGDSSHPKSGLATLITDGPGGSKRMYAGLKNAGETWYDITGNRSDTVKIGSDGWGEFHVNDGSVSIYVQK

SEQ ID NO: 40399 - protein, 478 aa, Bacillus sp.
NGTMMQYFEWYLPNDGNHWNQLNSDASNLKSKGITAVWIPPAWKGASQNDVGYGAYDLYDLGEFNQKGTVRTKYGTRSQLQAAVTSLKNNGIQVYGDVVMNHKGGADATEMVRAVEVNPNNRNQEVTGEYTIEAWTRFDFPGRGNTHSSFKWRWYHFDGVDWDQSRRTNNRIYKFRGKAWDWEVDTEFGNYDYLMYADYDMDHPEVVNELRNWGVWYTNTLGLDGFRIDAVKHIKYSFTRDWINHVRSATGKNMFAVAEFWKNDLGAIENYLQKTNWNHSVFDVPLHYNLYNASKSGGNYDMRNIFNGTVVQRHPSHAVTFVDNHDSQPEEALESFVEEWFKPLAYALTLTREQGYPSVFYGDYYGIPTHGVPAMRSKIDPILEARQKYAYGPQHDYLDHPDVIGWTREGDSSHPKSGLATLITDGPGGSKRMYAGLKNAGETWYDITGNRSDTVKIGSDGWGEFHVNDGSVSIYVQK

SEQ ID NO: 40400 - protein, 478 aa, Bacillus sp.
NGTMMQYFEWYLPNDGNHWNRLNSDASNLKSKGITAVWIPPAWKGASQNDVGYGAYDLYDLGEFNQKGTVRTKYGTRSQLQAAVTSLKNNGIQVYGDVVMNHKGGADATEMVRAVEVNPNNRNQEVTGEYTIEAWTRFDFPGRGNTHSSFKWRWYHFDGVDWDQSRRLNNRIYLFRGKAWKWEVPTENGNYDYLMYADIDMDHPEVVNELRNWGVWYTNTLGLDGFRIDAVKHIKYSFTRDWINHVRSATGKNMFAVAEFWKNDLGAIENYLQKTNWNHSVFDVPLHYNLYNASKSGGNYDMRNIFNGTVVQRHPSHAVTFVDNHDSQPEEALESFVEEWFKPLAYALTLTREQGYPSVFYGDYYGIPTHGVPAMRSKIDPILEARQKYAYGPQHDYLDHPDVIGWTREGDSSHPKSGLATLITDGPGGSKRMYAGLKNAGETWYDITGNRSDTVKIGSDGWGEFHVNDGSVSIYVQK

SEQ ID NO: 40401 - protein, 478 aa, Synthetic construct
NGTMMQYFEWYLPNDGNHWNRLNSDASNLKSKGITAVWIPPAWKGASQNDVGYGAYDLYDLGEFNQKGTVRTKYGTRSQLQAAVTSLKNNGIQVYGDVVMNHKGGADATEMVRAVEVNPNNRNQEVTGEYTIEAWTRFDFPGRGNTHSSFKWRWYHFDGVDWDQSRRLNNRIYKFRGKAWDWEVDTENGNYDYLMYADYDMDLPESVNELRNWGVWYTNTLGLDGFRIDAVKHIKYSFTRDWINHVRSATGKNMFAVAEFWKNDLGAIENYLQKTNWNHSVFDVPLHYNLYNASKSGGNYDMRNIFNGTVVQRHPSHAVTFVDNHDSQPEEALESFVEEWFKPLAYALTLTREQGYPSVFYGDYYGIPTHGVPAMRSKIDPILEARQKYAYGPQHDYLDHPDVIGWTREGDSSHPKSGLATLITDGPGGSKRMYAGLKNAGETWYDITGNRSDTVKIGSDGWGEFHVNDGSVSIYVQK

SEQ ID NO: 40402 - protein, 478 aa, Bacillus sp.
NGTMMQYFEWYLPNDGNHWNRLNSDASNLKSKGITAVWIPPAWKGASQNDVGYGAYDLYDLGEFNQKGTVRTKYGTRSQLQAAVTSLKNNGIQVYGDVVMNHKGGADATEMVRAVEVNPNNRNQEVTGEYTIEAWTRFDFPGRGNTHSSFKWRWYHFDGVDWDQSRRLNNRIYKFRGKAWDWEVDTEFGNYDYLMYADYDMDHDEVVNELRNWGVWYTNTLGLDGFRIDAVKHIKYSFTRDWINHVRSATGKNMFAVAEFWKNDLGAIENYLQKTNWNHSVFDVPLHYNLYNASKSGGNYDMRNIFNGTVVQRHPSHAVTFVDNHDSQPEEALESFVEEWFKPLAYALTLTREQGYPSVFYGDYYGIPTHGVPAMRSKIDPILEARQKYAYGPQHDYLDHPDVIGWTREGDSSHPKSGLATLITDGPGGSKRMYAGLKNAGETWYDITGNRSDTVKIGSDGWGEFHVNDGSVSIYVQK

SEQ ID NO: 40403 - protein, 478 aa, Synthetic construct
NGTMMQYFEWYLPNDGNHWNRLNSDASNLKSKGITAVWIPPAWKGASQNDVGYGAYDLYDLGEFNQKGTVRTKYGTRSQLQAAVTSLKNNGIQVYGDVVMNHKGGADATEMVRAVEVNPNNRNQEVTGEYTIEAWTRFDFPGRGNTHSSFKWRWYHFDGVDWDQSRQFQNRIYKFRGKAWDWEVDTEFGNYDYLMYADIDMDHPESVNELRNWGVWYTNTLGLDGFRIDAVKHIKYSFTRDWINHVRSATGKNMFAVAEFWKNDLGAIENYLQKTNWNHSVFDVPLHYNLYNASKSGGNYDMRNIFNGTVVQRHPSHAVTFVDNHDSQPEEALESFVEEWFKPLAYALTLTREQGYPSVFYGDYYGIPTHGVPAMRSKIDPILEARQKYAYGPQHDYLDHPDVIGWTREGDSSHPKSGLATLITDGPGGSKRMYAGLKNAGETWYDITGNRSDTVKIGSDGWGEFHVNDGSVSIYVQK

SEQ ID NO: 40404 - protein, 478 aa, Bacillus sp.
NGTMMQYFEWYLPNDGNHWNRLNSDASNLKSKGITAVWIPPAWKAASQNDVGYGAYDLYDLGEFNQKGTVRTKYGTRSQLQAAVTSLKNNGIQVYGDVVMNHKGGADATEMVDAVEVNPNNRNQEVTGEYTIEAWTRFDFPGRGNTHSSFKWRWYHFDGVDWDQSRQLNNRIYKFRGKAWDWEVDTEFGNYDYLMYADYDMDHPEVVNELRNWGVWYTNTLGLDGFRIDAVKHIKYSFTRDWINHVRSATGKNMFAVAEFWKNDLGAIENYLQKTNWNHSVFDVPLHYNLYNASKSGGNYDMRNIFNGTVVQRHPSHAVTFVDNHDSQPEEALESFVEEWFKPLAYALTLTREQGYPSVFYGDYYGIPTHGVPAMRSKIDPILEARQKYAYGPQHDYLDHPDVIGWTREGDSSHPKSGLATLITDGPGGSKRMYAGLKNAGETWYDITGNRSDTVKIGSDGWGEFHVNDGSVSIYVQK

SEQ ID NO: 40405 - protein, 478 aa, Bacillus sp.
NGTMMQYFEWYLPNDGNHWNRLNSDASNLKSKGITAVWIPPAWKGASQNDVGYGAYDLYDLGEFNQKGTVRTKYGTRSQLQAAVTSLKNNGIQVYGDVVMNHKGGADATEMVRAVEVNPNNRNQEVTGEYTIEAWTRFDFPGRGNTHSSFKWRWYHFDGVDWDQSREFDNRIYKFRGKAWDWEVDTEFGNYDYLMYADYDMDHPEVVNELRNWGVWYTNTLGLDGFRIDAVKHIKYSFTRDWINHVRSATGKNMFAVAEFWKNDLGAIENYLQKTNWNHSVFDVPLHYNLYNASKSGGNYDMRNIFNGTVVQRHPSHAVTFVDNHDSQPEEALESFVETWFKPLAYVLTLTREQGYPSVFYGDYYGIPTHGVPAMRSKIDPILEARQKYAYGPQHDYLDHPDVIGWTREGDSSHPKSGLATLITDGPGGSKRMYAGLKNAGETWYDITGNRSDTVKIGSDGWGEFHVNDASVSIYVQK

SEQ ID NO: 40406 - protein, 478 aa, Bacillus sp.
NGTMMQYFEWYLPNDGNHWNRLNSDASNLKSKGITAVWIPPAWKALSQNDVGYGAYDLYDLGEFNQKGTVRTKYGTRSQLQAAVTSLKNNGIQVYGDVVMNHKGGADATEMVRAVEVNPNNRNQEVTGEYTIEAWTRFDFPGRGNTHSSFKWRWYHFDGVDWDQSRRTTNRIYKFRGKAWDWEVDTEFGNYDYLMYTDYDMDHPEVVNELRNWGVWYTNTLGLDGFRIDAVKHIKYSFTRDWINHVRSATGKNMFAVAEFWKNDLGAIENYLQKTNWNHSVFDVPLHYNLYNASKSGGNYDMRNIFNGTVVQRHPSHAVTFVDNHDSQPEEALESFVEEWFKPLAYALTLTREQGYPSVFYGDYYGIPTHGVPAMRSKIDPILEARQKYAYGPQHDYLDHPDVIGWTREGDSSHPKSGLATLITDGPGGSKRMYAGLKNAGETWYDITGNRSDTVKIGSDGWGEFHVNDGSVSIYVQK

SEQ ID NO: 40407 - protein, 478 aa, Bacillus sp.
NGTMMQYFEWYLPNDGNHWNRLNSDASNLKSKGITAVWIPPAWKGASQNDVGYGAYDLYDLGEFNQKGTVRTKYGTRSQLQAAVTSLKNNGIQVYGDVVMNHKGGADATEMVRAVEVNPNNRNQEVTGEYTIEAWTRFDFPGRGNTHSSFKWRWYHFDGVDWDQSRRLNNRIYKFRGKAWDWEVDTEFGNYDYLMYADYDMDHPEVVNELRNWGVWYTNTLGLDGFRIDAVKHIKYSFTRDWINHVRSATGKNMFAVAEFWKNDLGAIENYLQKTNWNHSVFDVPLHYNLYNASKSGGNYDMRNIFNGTVVQRHPSHAVTFVDNHDSQPEEALESFVEEWFKPCAYALTLTREQGYPSVFYGDYYGIPTHGVPAMRSKIDPILEARQKYAYGPQHDYLDHPDVIGWTREGDSSHPKSGLATLITDGPGGSKRMYAGLKNAGETWYDITGNRSDTVKIGSDGWGEFHVNDGSVSIYVQK

SEQ ID NO: 40408 - protein, 478 aa, Bacillus sp.
NGTMMQYFEWYLPNDGNHWNRLNSDASNLKSKGITAVWIPPAWKGASQNDVGYGAYDLYDLGEFNQKGTVRTKYGTRSQLQAAVTSLKNNGIQVYGDVVMNHKGGADATEMVRAVEVNPNNRNQEVTGEYTIEAWTRFDFPGRGNTHSSFKWRWYHFDGVDWDQSRRLNNRIYKFRGKAWDWEVDTEFGNYDYLMYADYDMDHPEVVNELRNWGVWYTNTLGLDGFRIDAVKHIKYSFTRDWINHVRSATGKNMFAVAEFWKNDLGAIENYLQKTNWNHSVFDVPLHYNLYNASKSGGNYDMRNIFNGTVVQRHPSHAVTFVDNHDSQPEEALESFVEPWFKPLAYALTLTREQGYPSVFYGDYYGIPTHGVPAMRSKIDPILEARQKYAYGPQHDYLDHPDVIGWTREGDSSHPKSGLATLITDGPGGSKRMYAGLKNAGETWYDITGNRSDTVKIGSDGWGEFHVNDSSVSIYVQK

SEQ ID NO: 40409 - protein, 478 aa, Bacillus sp.
NGTMMQYFEWYLPNDGNHWNRLNSDASNLKSKGITAVWIPPAWKGASQNDVGYGAYDLYDLGEFNQKGTVRTKYGTRSQLQAAVTSLKNNGIQVYGDVVMNHKGGADATEMVRAVEVNPNNRNQEVTGEYTIEAWTRFDFPGRGNTHSSFKWRWYHFDGVDWDQSRRVNNRIYKFRGKAWDWEVDTEFGNYDYLMYVDYDMDHPEVVNELRNWGVWYTNTLGLDGFRIDAVKHIKYSFTRDWINHVRSATGKNMFAVAEFWKNDLGAIENYLQKTNWNHSVFDVPLHYNLYNASKSGGNYDMRNIFNGTVVQRHPSHAVTFVDNHDSQPEEALESFVEEWFKPLAYALTLTREQGYPSVFYGDYYGIPTHGVPAMRSKIDPILEARQKYAYGPQHDYLDHPDVIGWTREGDSSHPKSGLATLITDGPGGSKRMYAGLKNAGETWYDITGNRSDTVKIGSDGWGEFHVNDGSVSIYVQK

SEQ ID NO: 40410 - protein, 478 aa, Bacillus sp.
NGTMMQYFEWYLPNDGNHWNRLNSDASNLKSKGITAVWIPPAWKGVSQNDVGYGAYDLYDLGEFNQKGTVRTKYGTRSQLQAAVTSLKNNGIQVYGDVVMNHKGGADATEMVRAVEVNPNNRNQEVTGEYTIEAWTRFDFPGRGNTHSSFKWRWYHFDGVDWDQSRRLSNRIYKFRGKAWDWEVDTEFGNYDYLMYADYDMDHPEVVNELRNWGVWYTNTLGLDGFRIDAVKHIKYSFTRDWINHVRSATGKNMFAVAEFWKNDLGAIENYLQKTNWNHSVFDVPLHYNLYNASKSGGNYDMRNIFNGTVVQVHPSHAVTFVDNHDSQPEEALESFVEEWFKPLAYALTLTREQGYPSVFYGDYYGIPTHGVPAMRSKIDPILEARQKYAYGPQHDYLDHPDVIGWTREGDSSHPKSGLATLITDGPGGSKRMYAGLKNAGETWYDITGNRSDTVKIGSDGWGEFHVNYGSVSIYVQK

SEQ ID NO: 40411 - protein, 478 aa, Bacillus sp.
NGTMMQYFEWYLPNDGNHWNRLNSDASNLKSKGITAVWIPPAWKGASQNDVGYGAYDLYDLGEFNQKGTVRTKYGTRSQLQAAVTSLKNNGIQVYGDVVMNHKGGADATEMVDAVEVNPNNRNQEVTGEYTIEAWTRFDFPGRGNTHSSFKWRWYHFDGVDFDQSRQLDNRIYKFRGKAWDWEVDTEFGNYDYLMYADYDMDHPEVVNELRNWGVWYTNTLGLDGFRIDAVKHIKYSFTRDWINHVRSATGKNMFAVAEFWKNDLGAIENYLQKTNWNHSVFDVPLHYNLYNASKSGGNYDMRNIFNGTVVQRHPSHAVTFVDNHDSQPEEALESFVEEWFKPLAYALTLTREQGYPSVFYGDYYGIPTHGVPAMRSKIDPILEARQKYAYGPQHDYLDHPDVIGWTREGDSSHPKSGLATLITDGPGGSKRMYAGLKNAGETWYDITGNRSDTVKIGSDGWGEFHVNDGSVSIYVQK

SEQ ID NO: 40412 - protein, 478 aa, Bacillus sp.
NGTMMQYFEWYLPNDGNHWNRLNSDASNLKSKGITAVWIPPAWKGASQNDVGYGAYDLYDLGEFNQKGTVRTKYGTRSQLQAAVTSLKNNGIQVYGDVVMNHKGGADATEMVRAVEVNPNNRNQEVTGEYTIEAWTRFDFPGRGNTHSSFKWRWYHFDGVDWDQSRRLNNRIYKFRGKAWDWEVDTEFGNYDYLMYADYDMDHPEVVNELRNWGVWYTNTLGLDGFRIDAVKHIKYSFTRDWINHVRSATGKNMFAVAEFWKNDLGAIENYLQKTNWNHSVFDVPLHYNLYNASKSGGNYDMRNIFNGTVVQRHPSHAVTFVDNHDSQPEEALESFVETWFKPLAYALTLTREQGYPSVFYGDYYGIPTHGVPAMRSKIDPILEARQKYAYGPQHDYLDHPDVIGWTREGDSSHPKSGLATLITDGPGGSKRMYAGLKNAGETWYDITGNRSDTVKIGSDGWGEFHVNKASVSIYVQK

SEQ ID NO: 40413 - protein, 478 aa, Bacillus sp.
NGTMMQYFEWYLPNDGNHWNRLNSDASNLKSKGITAVWIPPAWKAASQNDVGYGAYDLYDLGEFNQKGTVRTKYGTRSQLQAAVTSLKNNGIQVYGDVVMNHKGGADATEMVRAVEVNPNNRNQEVTGEYTIEAWTRFDFPGRGNTHSSFKWRWYHFDGVDWDQSREFDNRIYKFRGKAWDWEVDTEFGNYDYLMYADYDMDHPEVVNELRNWGVWYTNTLGLDGFRIDAVKHIKYSFTRDWINHVRSATGKNMFAVAEFWKNDLGAIENYLQKTNWNHSVFDVPLHYNLYNASKSGGNYDMRNIFNGTVVQRHPSHAVTFVDNHDSQPEEALESFVEEWFKPLAYALTLTREQGYPSVFYGDYYGIPTHGVPAMRSKIDPILEARQKYAYGPQHDYLDHPDVIGWTREGDSSHPKSGLATLITDGPGGSKRMYAGLKNAGETWYDITGNRSDTVKIGSDGWGEFHVNDGSVSIYVQK

SEQ ID NO: 40414 - protein, 478 aa, Bacillus sp.
NGTMMQYFEWYLPNDGNHWNRLNSDASNLKSKGITAVWIPPAWKAASQNDVGYGAYDLYDLGEFNQKGTVRTKYGTRSQLQAAVTSLKNNGIQVYGDVVMNHKGGADATEMVRAVEVNPNNRNQEVTGEYTIEAWTRFDFPGRGNTHSSFKWRWYHFDGVDWDQSRRFTNRIYKFRGKAWDWEVDTEFGNYDYLMYADYDMDHPEVVNELRNWGVWYTNTLGLDGFRIDAVKHIKYSFTRDWINHVRSATGKNMFAVAEFWKNDLGAIENYLQKTNWNHSVFDVPLHYNLYNASKSGGNYDMRNIFNGTVVQRHPSHAVTFVDNHDSQPEEALESFVEEWFKPLAYALTLTREQGYPSVFYGDYYGIPTHGVPAMRSKIDPILEARQKYAYGPQHDYLDHPDVIGWTREGDSSHPKSGLATLITDGPGGSKRMYAGLKNAGETWYDITGNRSDTVKIGSDGWGEFHVNDGSVSIYVQK

SEQ ID NO: 40415 - protein, 478 aa, Synthetic construct
NGTMMQYFEWYLPNDGNHWNRLNSDASNLKSKGITAVWIPPAWKGASQNDVGYGAYDLYDLGEFNQKGTVRTKYGTRSQLQAAVTSLKNNGIQVYGDVVMNHKGGADATEMVRAVEVNPNNRNQEVTGEYTIEAWTRFDFPGRGNTHSSFKWRWYHFDGVDWDQSRRLNNRIYLFRGKAWDWPVDTENGNYDYLMYADIDMDHPEVVNELRNWGVWYTNTLGLDGFRIDAVKHIKYSFTRDWINHVRSATGKNMFAVAEFWKNDLGAIENYLQKTNWNHSVFDVPLHYNLYNASKSGGNYDMRNIFNGTVVQRHPSHAVTFVDNHDSQPEEALESFVEEWFKPLAYALTLTREQGYPSVFYGDYYGIPTHGVPAMRSKIDPILEARQKYAYGPQHDYLDHPDVIGWTREGDSSHPKSGLATLITDGPGGSKRMYAGLKNAGETWYDITGNRSDTVKIGSDGWGEFHVNDGSVSIYVQK

SEQ ID NO: 40416 - protein, 478 aa, Bacillus sp.
NGTMMQYFEWYLPNDGNHWNRLNSDASNLKSKGITAVWIPPAWKATSQNDVGYGAYDLYDLGEFNQKGTVRTKYGTRSQLQAAVTSLKNNGIQVYGDVVMNHKGGADATEMVRAVEVNPNNRNQEVTGEYTIEAWTRFDFPGRGNTHSSFKWRWYHFDGVDWDQSRQVNNRIYKFRGKAWDWEVDTEFGNYDYLMYADYDMDHPEVVNELRNWGVWYTNTLGLDGFRIDAVKHIKYSFTRDWINHVRSATGKNMFAVAEFWKNDLGAIENYLQKTNWNHSVFDVPLHYNLYNASKSGGNYDMRNIFNGTVVQRHPSHAVTFVDNHDSQPEEALESFVEEWFKPLAYALTLTREQGYPSVFYGDYYGIPTHGVPAMRSKIDPILEARQKYAYGPQHDYLDHPDVIGWTREGDSSHPKSGLATLITDGPGGSKRMYAGLKNAGETWYDITGNRSDTVKIGSDGWGEFHVNDGSVSIYVQK

SEQ ID NO: 40417 - protein, 478 aa, Bacillus sp.
NGTMMQYFEWYLPNDGNHWNRLNSDASNLKSKGITAVWIPPAWKAISQNDVGYGAYDLYDLGEFNQKGTVRTKYGTRSQLQAAVTSLKNNGIQVYGDVVMNHKGGADATEMVRAVEVNPNNRNQEVTGEYTIEAWTRFDFPGRGNTHSSFKWRWYHFDGVDWDQSRRFNNRIYKFRGKAWDWEVDTEFGNYDYLMYADYDMDHPEVVNELRNWGVWYTNTLGLDGFRIDAVKHIKYSFTRDWINHVRSATGKNMFAVAEFWKNDLGAIENYLQKTNWNHSVFDVPLHYNLYNASKSGGNYDMRNIFNGTVVQRHPSHAVTFVDNHDSQPEEALESFVEEWFKPLAYALTLTREQGYPSVFYGDYYGIPTHGVPAMRSKIDPILEARQKYAYGPQHDYLDHPDVIGWTREGDSSHPKSGLATLITDGPGGSKRMYAGLKNAGETWYDITGNRSDTVKIGSDGWGEFHVNDGSVSIYVQK

SEQ ID NO: 40418 - protein, 478 aa, Synthetic construct
NGTMMQYFEWYLPNDGNHWNRLNSDASNLKSKGITAVWIPPAWKGASQNDVGYGAYDVYDLGEFNQKGTVRTKYGTRSQLQAAVTSLKNNGIQVYGDVVFNHKGGADATEMVRAVEVNPNNRNQEVTGEYTIEAWTRFDFPGRGNTHSSFKWRWYHFDGVDWDQSRRLNNRIYKFRGKAWDWEVDTENGNYDYLMYADYDMDFPEVVNEIRNWGVWYTNTLGLDGFRIDAVKHIKYSFTRDWINHVRSATGKNMFAVAEFWKNDLGAIENYLQKTNWNHSVFDVPLHYNLYNASKSGGNYDMRNIFNGTVVQRHPSHAVTFVDNHDSQPEEALESFVEEWFKPLAYALTLTREQGYPSVFYGDYYGIPTHGVPAMRSKIDPILEARQKYAYGPQHDYLDHPDVIGWTREGDSSHPKSGLATLITDGPGGSKRMYAGLKNAGETWYDITGNRSDTVKIGSDGWGEFHVNDGSVSIYVQK

SEQ ID NO: 40419 - protein, 478 aa, Bacillus sp.
NGTMMQYFEWYLPNDGNHWNRLNSDASNLKSKGITAVWIPPAWKGASQNDVGYGAYDLYDLGEFNQKGTVRTKYGTRSQLQAAVTSLKNNGIQVYGDVVMNHKGGADATEMVRAVEVNPNNRNQEVTGEYTIEAWTRFDFPGRGNTHSSFKWRWYHFDGVDWDQSRRLNNRIYKFRGKAWDWEVDTEFGNYDYLMYADYDMDHPEVVNELRNWGVWYTNTLGLDGFRIDAVKHIKYSFTRDWINHVRSATGKNMFAVAEFWKNDLGAIENYLQKTNWNHSVFDVPLHYNLYNASKSGANYDMRNIFNGTVVQRHPSHAVTFVDNHDSQPEEALESFVDEWFKPLAYALTLTREQGYPSVFYGDYYGIPTHGVPAMRSKIDPILEARQKYAYGPQHDYLDHPDVIGWTREGDSSHPKSGLATLITDGPGGSKRMYAGLKNAGETWYDITGNRSDTVKIGSDGWGEFHVNDGSVSIYVQK

SEQ ID NO: 40420 - protein, 478 aa, Synthetic construct
NGTMMQYFEWYLPNDGNHWNRLNSDASNLKSKGITAVWIPPAWKGASQNDVGYGAYDLYDLGEFNQKGTVRTKYGTRSQLQAAVTSLKNNGIQVYGDVVMNHKGGADATEMVRAVEVNPNNRNQEVTGEYTIEAWTRFDFPGRGNTHSSFKWRWYHFDGVDWDQSRRLNNRIYKFRGKAWDWEVDTENGNYDYLMYADIDMDHPENINELRNWGVWYTNTLGLDGFRIDAVKHIKYSFTRDWINHVRSATGKNMFAVAEFWKNDLGAIENYLQKTNWNHSVFDVPLHYNLYNASKSGGNYDMRNIFNGTVVQRHPSHAVTFVDNHDSQPEEALESFVEEWFKPLAYALTLTREQGYPSVFYGDYYGIPTHGVPAMRSKIDPILEARQKYAYGPQHDYLDHPDVIGWTREGDSSHPKSGLATLITDGPGGSKRMYAGLKNAGETWYDITGNRSDTVKIGSDGWGEFHVNDGSVSIYVQK

SEQ ID NO: 40421 - protein, 478 aa, Bacillus sp.
NGTMMQYFEWYLPNDGNHWNRLNSDASNLKSKGITAVWIPPAWKGASQNDVGYGAYDLYDLGEFNQKGTVRTKYGTRSQLQAAVTSLKNNGIQVYGDVVMNHKGGADATEMVRAVEVNPNNRNQEVTGEYTIEAWTRFDFPGRGNTHSSFKWRWYHFDGVDWDQSRRLNNRIYKFRGKAWDWEVDTEFGNYDYLMYADYDMDHPEVVNELRNWGVWYTNTLGLDGFRIDAVKHIKYSFTRDWINHVRSATGKNMFAVAEFWKNDLGAIENYLQKTNWNHSVFDVPLHYNLYNASKSGGNYDMRNIFNGTVVQRHPSHAVTFVDNHDSQPEEALESFVEEWFKPLAYALTLTREQGYPSVFYGDYYGIPTHGVPAMRSKIDPILEARQKYAYGPQHDYLDHPDVIGWTREGDSSHPKSGLATLITDGPGGSKRMYAGLKNAGETWYDITGNRSDTVKIGSDGWGEFHVNDGSVSIYRQK

SEQ ID NO: 40422 - protein, 478 aa, Synthetic construct
NGTMMQYFEWYLPNDGNHWNRLNSDASNLKSKGITAVWIPPAWKGASQNDVGYGAYDLYDLGEFNQKGTVRTKYGTRSQLQAAVTSLKNNGIQVYGDVVMNHKGGADATEMVRAVEVNPNNRNQEVTGEYTIEAWTRFDFPGRGNTHSSFKWRWYHFDGVDWDQSRRLNNRIYKFRGKAWDWEVDTENGNYDYLMYADIDMDYPESVNEMRNWGVWYTNTLGLDGFRIDAVKHIKYSFTRDWINHVRSATGKNMFAVAEFWKNDLGAIENYLQKTNWNHSVFDVPLHYNLYNASKSGGNYDMRNIFNGTVVQRHPSHAVTFVDNHDSQPEEALESFVEEWFKPLAYALTLTREQGYPSVFYGDYYGIPTHGVPAMRSKIDPILEARQKYAYGPQHDYLDHPDVIGWTREGDSSHPKSGLATLITDGPGGSKRMYAGLKNAGETWYDITGNRSDTVKIGSDGWGEFHVNDGSVSIYVQK

SEQ ID NO: 40423 - protein, 478 aa, Synthetic construct
NGTMMQYFEWYLPNDGNHWNRLNSDASNLKSKGITAVWIPPAWKGASQNDVGYGAYDLYDLGEFNQKGTVRTKYGTRSQLQAAVTSLKNNGIQVYGDVVMNHKGGADATEMVRAVEVNPNNRNQEVTGEYTIEAWTRFDFPGRGNTHSSFKWRWYHFDGVDWDQSRRLNNRIYKFRGKAWDWEVDTENGNYDYLMYADIDMDHPEIPNELRNWGVWYTNTLGLDGFRIDAVKHIKYSFTRDWINHVRSATGKNMFAVAEFWKNDLGAIENYLQKTNWNHSVFDVPLHYNLYNASKSGGNYDMRNIFNGTVVQRHPSHAVTFVDNHDSQPEEALESFVEEWFKPLAYALTLTREQGYPSVFYGDYYGIPTHGVPAMRSKIDPILEARQKYAYGPQHDYLDHPDVIGWTREGDSSHPKSGLATLITDGPGGSKRMYAGLKNAGETWYDITGNRSDTVKIGSDGWGEFHVNDGSVSIYVQK

SEQ ID NO: 40424 - protein, 478 aa, Synthetic construct
NGTMMQYFEWYLPNDGNHWNRLNSDASNLKSKGITAVWIPPAWKGASQNDVGYGAYDLYDLGEFNQKGTVRTKYGTRSQLQAAVTSLKNNGIQVYGDVVMNHKGGADATEMVRAVEVNPNNRNQEVTGEYTIEAWTRFDFPGRGNTHSSFKWRWYHFDGVDWDQSRRLNNRIYKFRGKAWDWEVDTENGNYDYLMYADIDMDHPEAQNELRNWGVWYTNTLGLDGFRIDAVKHIKYSFTRDWINHVRSATGKNMFAVAEFWKNDLGAIENYLQKTNWNHSVFDVPLHYNLYNASKSGGNYDMRNIFNGTVVQRHPSHAVTFVDNHDSQPEEALESFVEEWFKPLAYALTLTREQGYPSVFYGDYYGIPTHGVPAMRSKIDPILEARQKYAYGPQHDYLDHPDVIGWTREGDSSHPKSGLATLITDGPGGSKRMYAGLKNAGETWYDITGNRSDTVKIGSDGWGEFHVNDGSVSIYVQK

SEQ ID NO: 40425 - protein, 478 aa, Bacillus sp.
NGTMMQYFEWYLPNDGNHWNRLNSDASNLKSKGITAVWIPPAWKGASQNDVGYGAYDLYDLGEFNQKGTVRTKYGTRSQLQAAVTSLKNNGIQVYGDVVMNHKGGADATEMVRAVEVNPNNRNQEVTGEYTIEAWTRFDFPGRGNTHSSFKWRWYHFDGVDWDQSRRLNNRIYKFRGKAWDWEVDTEFGNYDYLMYADYDMDHPEVVNELRNWGVWYTNTLGLDGFRIDAVKHIKYSFTRDWINHVRSATGKNMFAVAEFWKNDLGAIENYLQKTNWNHSVFDVPLHYNLYNASKSGGNYDMRNIFNGTVVQRHPSHAVTFVDNHDSQPEEALESFVDPWFKPLAYALTLTREQGYPSVFYGDYYGIPTHGVPAMRSKIDPILEARQKYAYGPQHDYLDHPDVIGWTREGDSSHPKSGLATLITDGPGGSKRMYAGLKNAGETWYDITGNRSDTVKIGSDGWGEFHVNQGSVSIYVQK

SEQ ID NO: 40426 - protein, 478 aa, Bacillus sp.
NGTMMQYFEWYLPNDGNHWNRLNSDASNLKSKGITAVWIPPAWKAASQNDVGYGAYDLYDLGEFNQKGTVRTKYGTRSQLQAAVTSLKNNGIQVYGDVVMNHKGGADATEMVRAVEVNPNNRNQEVTGEYTIEAWTRFDFPGRGNTHSSFKWRWYHFDGVDWDQSRRVNNRIYKFRGKAWDWEVDTEFGNYDYLMYADYDMDHPEVVNELRNWGVWYTNTLGLDGFRIDAVKHIKYSFTRDWINHVRSATGKNMFAVAEFWKNDLGAIENYLQKTNWNHSVFDVPLHYNLYNASKSGGNYDMRNIFNGTVVQRHPSHAVTFVDNHDSQPEEALESFVEEWFKPLAYALTLTREQGYPSVFYGDYYGIPTHGVPAMRSKIDPILEARQKYAYGPQHDYLDHPDVIGWTREGDSSHPKSGLATLITDGPGGSKRMYAGLKNAGETWYDITGNRSDTVKIGSDGWGEFHVNDGSVSIYVQK

SEQ ID NO: 40427 - protein, 478 aa, Bacillus sp.
NGTMMQYFEWYLPNDGNHWNRLNSDASNLKSKGITAVWIPPAWKAASQNDVGYGAYDLYDLGEFNQKGTVRTKYGTRSQLQAAVTSLKNNGIQVYGDVVMNHKGGADATEMVRAVEVNPNNRNQEVTGEYTIEAWTRFDFPGRGNTHSSFKWRWYHFDGVDWDQSRELNNRIYKFRGKAWDWEVDTEFGNYDYLMYADYDMDHPEVVNELRNWGVWYTNTLGLDGFRIDAVKHIKYSFTRDWINHVRSATGKNMFAVAEFWKNDLGAIENYLQKTNWNHSVFDVPLHYNLYNASKSGGNYDMRNIFNGTVVQRHPSHAVTFVDNHDSQPEEALESFVEEWFKPLAYALTLTREQGYPSVFYGDYYGIPTHGVPAMRSKIDPILEARQKYAYGPQHDYLDHPDVIGWTREGDSSHPKSGLATLITDGPGGSKRMYAGLKNAGETWYDITGNRSDTVKIGSDGWGEFHVNDGSVSIYVQK

SEQ ID NO: 40428 - protein, 478 aa, Bacillus sp.
NGTMMQYFEWYLPNDGNHWNRLNSDASNLKSKGITAVWIPPAWKGASQNDVGYGAYDLYDLGEFNQKGTVRTKYGTRSQLQAAVTSLKNNGIQVYGDVVMNHKGGADATEMVRAVEVNPNNRNQEVTGEYTIEAWTRFDFPGRGNTHSSFKWRWYHFDGVDWDQSRRLNNRIYKFRGKAWDWEVDTEFGNYDYLMYADYDMDHPEVVNELRNWGVWYTNTLGLDGFRIDAVKHIKYSFTRDWINHVRSATGKNMFAVAEFWKNDLGAIENYLQHTNWNHSVFDVPLHYNLYNASKSGGNYDMRNIFNGTVVQRHPSHAVTFVDNHDSQPEEALESFVEEWFKPLAYALTLTREQGYPSVFYGDYYGIPTHGVPAMRSKIDPILEARQKYAYGPQHDYLDHPDVIGWTREGDSSHPKSGLATLITDGPGGSKRMYAGLKNAGETWYDITGNRSDTVKIGSDGWGEFHVNDGSVSIYVQK

SEQ ID NO: 40429 - protein, 478 aa, Synthetic construct
NGTMMQYFEWYLPNDGNHWNRLNSDASNLKSKGITAVWIPPAWKGASQNDVGYGAYDLYDLGEFNQKGTVRTKYGTRSQLQAAVTSLKNNGIQVYGDVVMNHKGGADATEMVRAVEVNPNNRNQEVTGEYTIEAWTRFDFPGRGNTHSSFKWRWYHFDGVDWDQSRRLNNRIYKFRGKAWDWEVDTEFGNYDYLMYADYDMDHPEVVNELRNWGVWYTNTLGLDGFRIDAVKHIKYSFTRDWINHVRSATGKNMFAVAEFWKNDLGAIENYLQKTNWNHSVFDVPLHYNLYNASKSGGNSDMRNIFNGTVVQRHPSHAVTFVDNHDSQPEEALESFVEEWFKPLAYALTLTREQGYPSVFYGDYYGIPTHGVPAMRSKIDPILEARQKYAYGPQHDYLDHPDVIGWTREGDSSHPKSGLATLITDGPGGSKRMYAGLKNAGETWYDITGNRSDTVKIGSDGWGEFHVNDGSVSIYVQK

SEQ ID NO: 40430 - protein, 478 aa, Synthetic construct
NGTMMQYFEWYLPNDGNHWNRLNSDASNLKSKGITAVWIPPAWKGASQNDVGYGAYDLYDLGEFNQKGTVRTKYGTRSQLQAAVTSLKNNGIQVYGDVVMNHKGGADATEMVRAVEVNPNNRNQEVTGEYTIEAWTRFDFPGRGNTHSSFKWRWYHFDGVDWDQSRRLNNRIYKFRGKAWDWEVDTENGNYDYLMYADIDMDYPEAVNEQRNWGVWYTNTLGLDGFRIDAVKHIKYSFTRDWINHVRSATGKNMFAVAEFWKNDLGAIENYLQKTNWNHSVFDVPLHYNLYNASKSGGNYDMRNIFNGTVVQRHPSHAVTFVDNHDSQPEEALESFVEEWFKPLAYALTLTREQGYPSVFYGDYYGIPTHGVPAMRSKIDPILEARQKYAYGPQHDYLDHPDVIGWTREGDSSHPKSGLATLITDGPGGSKRMYAGLKNAGETWYDITGNRSDTVKIGSDGWGEFHVNDGSVSIYVQK

SEQ ID NO: 40431 - protein, 478 aa, Bacillus sp.
NGTMMQYFEWYLPNDGNHWNRLNSDASNLKSKGITAVWIPPAWKAVSQNDVGYGAYDLYDLGEFNQKGTVRTKYGTRSQLQAAVTSLKNNGIQVYGDVVMNHKGGADATEMVRAVEVNPNNRNQEVTGEYTIEAWTRFDFPGRGNTHSSFKWRWYHFDGVDWDQSRRFDNRIYKFRGKAWDWEVDTEFGNYDYLMYADYDMDHPEVVNELRNWGVWYTNTLGLDGFRIDAVKHIKYSFTRDWINHVRIATGKNMFAVAEFWKNDLGAIENYLQKTNWNHSVFDVPLHYNLYNASKSGGNYDMRNIFNGTVVQRHPSHAVTFVDNHDSQPEEALESFVDEWFKPLAYALTLTREQGYPSVFYGDYYGIPTHGVPAMRSKIDPILEARQKYAYGPQHDYLDHPDVIGWTREGDSSHPKSGLATLITDGPGGSKRMYAGLKNAGETWYDITGNRSDTVKIGSDGWGEFHVNDGSVSIYVQK

SEQ ID NO: 40432 - protein, 478 aa, Bacillus sp.
NGTMMQYFEWYLPNDGNHWNRLNSDASNLKSKGITAVWIPPAWKGASQNDVGYGAYDLYDLGEFNQKGTVRTKYGTRSQLQAAVTSLKNNGIQVYGDVVMNHKGGADATEMVRAVEVNPNNRNQEVTGEYTIEAWTRFDFPGRGNTHSSFKWRWYHFDGVDWDQSRRLNNRIYKFRGKAWDWEVDTEFGNYDYLMYADYDMDHPEVVNELRNWGVWYTNTLGLDGFRIDAVKHIKYSFTRDWINHVRSATGKNMFAVAEFWKNDLGAIENYLQKTNWNHSVFDVPLHYNLYNASKSGGNYDMRNIFNGTVVQAHPSQAVTFVDNHDSQPEEALESFVEEWFKPLAYALTLTREQGYPSVFYGDYYGIPTHGVPAMRSKIDPILEARQKYAYGPQHDYLDHPDVIGWTREGDSSHPKSGLATLITDGPGGSKRMYAGLKNAGETWYDITGNRSDTVKIGSDGWGEFHVNDGSVSIYVQK

SEQ ID NO: 40433 - protein, 478 aa, Synthetic construct
NGTMMQYFEWYLPNDGNHWNRLNSDASNLKSKGITAVWIPPAWKGASQNDVGYGAYDLYDLGEFNQKGTVRTKYGTRSQLQAAVTSLKNNGIQVYGDVVMNHKGGADATEMVRAVEVNPNNRNQEVTGEYTIEAWTRFDFPGRGNTHSSFKWRWYHFDGVDWDQSRRLNNRIYKFRGKAWDWEVDTENGNYDYLMYADYDMDYPEAVNEMRNWGVWYTNTLGLDGFRIDAVKHIKYSFTRDWINHVRSATGKNMFAVAEFWKNDLGAIENYLQKTNWNHSVFDVPLHYNLYNASKSGGNYDMRNIFNGTVVQRHPSHAVTFVDNHDSQPEEALESFVEEWFKPLAYALTLTREQGYPSVFYGDYYGIPTHGVPAMRSKIDPILEARQKYAYGPQHDYLDHPDVIGWTREGDSSHPKSGLATLITDGPGGSKRMYAGLKNAGETWYDITGNRSDTVKIGSDGWGEFHVNDGSVSIYVQK

SEQ ID NO: 40434 - protein, 478 aa, Bacillus sp.
NGTMMQYFEWYLPNDGNHWNRLNSDASNLKSKGITAVWIPPAWKGASQNDVGYGAYDLYDLGEFNQKGTVRTKYGTRSQLQAAVTSLKNNGIQVYGDVVMNHKGGADATEMVRAVEVNPNNRNQEVTGEYTIEAWTRFDFPGRGNTHSSFKWRWYHFDGVDWDQSRRLNNRIYKFRGKAWDWEVDTEFGNYDYLMYADYDMDHPEVVNELRNWGVWYTNTLGLDGFRIDAVKHIKYSFTRDWINHVRSATGKNMFAVAEFWKNDLGAIENYLQKTNWNHSVFDVPLHYNLYNASKSQGNYDMRNIFNGTVVQRHPSHAVTFVDNHDSQPEEALESFVDTWFKPLAYALTLTREQGYPSVFYGDYYGIPTHGVPAMRSKIDPILEARQKYAYGPQHDYLDHPDVIGWTREGDSSHPKSGLATLITDGPGGSKRMYAGLKNAGETWYDITGNRSDTVKIGSDGWGEFHVNGGSVSIYVQK

SEQ ID NO: 40435 - protein, 478 aa, Bacillus sp.
NGTMMQYFEWYLPNDGNHWNRLNSDASNLKSKGITAVWIPPAWKGASQNDVGYGAYDLYDLGEFNQKGTVRTKYGTRSQLQAAVTSLKNNGIQVYGDVVMNHKGGADATEMVRAVEVNPNNRNQEVTGEYTIEAWTRFDFPGRGNTHSSFKWRWYHFDGVDWDQSRRLNNRIYKFRGKMWDWEVDTEFGNYDYLMYADYDMDHPEVVNELRNWGVWYTNTLGLDGFRIDAVKHIKYSFTRDWINHVRSATGKNMFAVAEFWKNDLGAIENYLQKTNWNHSVFDVPLHYNLYNASKSGGNYDMRNIFNGTVVQRHPSHAVTFVDNHDSQPEEALESFVEEWFKPLAYALTLTREQGYPSVFYGDYYGIPTHGVPAMRSKIDPILEARQKYAYGPQHDYLDHPDVIGWTREGDSSHPKSGLATLITDGPGGSKRMYAGLKNAGETWYDITGNRSDTVKIGSDGWGEFHVNDGSVSIYVQK

SEQ ID NO: 40436 - protein, 478 aa, Bacillus sp.
NGTMMQYFEWYLPNDGNHWNRLNSDASNLKSKGITAVWIPPAWKGASQNDVGYGAYDLYDLGEFNQKGTVRTKYGTRSQLQAAVTSLKNNGIQVYGDVVMNHKGGADATEMVPAVEVNPNNRNQEVTGEYTIEAYTRFDFPGRGNTHSSFKWRWYHFDGVDWDQSRRLNNRIYKFRGKAWDWEVDTEFGNYDYLMYADYDMDHPEVVNELRNWGVWYTNTLGLDGFRIDAVKHIKYSFTRDWINHVRSATGKNMFAVAEFWKNDLGAIENYLQKTNWNHSVFDVPLHYNLYNASKSGGNYDMRNIFNGTVVQRHPSHAVTFVDNHDSQPEEALESFVEEWFKPLAYALTLTREQGYPSVFYGDYYGIPTHGVPAMRSKIDPILEARQKYAYGPQHDYLDHPDVIGWTREGDSSHPKSGLATLITDGPGGSKRMYAGLKNAGETWYDITGNRSDTVKIGSDGWGEFHVNDGSVSIYVQK

SEQ ID NO: 40437 - protein, 478 aa, Bacillus sp.
NGTMMQYFEWYLPNDGNHWNRLNSDASNLKSKGITAVWIPPAWKGTSQNDVGYGAYDLYDLGEFNQKGTVRTKYGTRSQLQAAVTSLKNNGIQVYGDVVMNHKGGADATEMVRAVEVNPNNRNQEVTGEYTIEAWTRFDFPGRGNTHSSFKWRWYHFDGVDWDQSRRTQNRIYKFRGKAWDWEVDTEFGNYDYLMYTDYDMDHPEVVNELRNWGVWYTNTLGLDGFRIDAVKHIKYSFTRDWINHVRSATGKNMFAVAEFWKNDLGAIENYLQKTNWNHSVFDVPLHYNLYNASKSGGNYDMRNIFNGTVVQRHPSHAVTFVDNHDSQPEEALESFVEEWFKPLAYALTLTREQGYPSVFYGDYYGIPTHGVPAMRSKIDPILEARQKYAYGPQHDYLDHPDVIGWTREGDSSHPKSGLATLITDGPGGSKRMYAGLKNAGETWYDITGNRSDTVKIGSDGWGEFHVNDGSVSIYVQK

SEQ ID NO: 40438 - protein, 478 aa, Bacillus sp.
NGTMMQYFEWYLPNDGNHWNRLNSDASNLKSKGITAVWIPPAWKGASQNDVGYGAYDLYDLGEFNQKGTVRTKYGTRSQLQAAVTSLKNNGIQVYGDVVMNHKGGADATEMVRAVEVNPNNRNQEVTGEYTIEAWTRFDFPGRGNTHSSFKWRWYHFDGVDWDQSRRLNNRIYKFRGKAWDWEVDTEFGNYDYLMYADYDMDHPETVNELRNWGVWYTNTLGLDGFRIDAVKHIKYSFTRDWINHVRSATGKNMFAVAEFWKNDLGAIENYLQKTNWNHSVFDVPLHYNLYNASKSGGNYDMRNIFNGTVVQRHPSHAVTFVDNHDSQPEEALESFVEEWFKPLAYALTLTREQGYPSVFYGDYYGIPTHGVPAMRSKIDPILEARQKYAYGPQHDYLDHPDVIGWTREGDSSHPKSGLATLITDGPGGSKRMYAGLKNAGETWYDITGNRSDTVKIGSDGWGEFHVNDGSVSIYVQK

SEQ ID NO: 40439 - protein, 478 aa, Bacillus sp.
NGTMMQYFEWYLPNDGNHWNRLNSDASNLKSKGITAVWIPPAWKGASQNDVGYGAYDLYDLGEFNQKGTVRTKYGTRSQLQAAVTSLKNNGIQVYGDVVMNHKGGADATEMVRAVEVNPNNRNQEVTGEYTIEAWTRFDFPGRGNTHSSFKWRWYHFDGVDWDQSRRLNNRIYKFRGKAWDWEVDTEFGNYDYLMYADYDMDHPEVVNELRNWGVWYTNTLGLDGFRIDAVKHIKYSFTRDWINHVRSATGKNMFAVAEFWKNDLGAIENYLQKTNWNHSVFDVPLHYNLYNASKSGGNYDMRNIFNGTVVQRHPSHAVTFVDNHDSQPEEALESFVEPWFKPLAYALTLTREQGYPSVFYGDYYGIPTHGVPAMRSKIDPILEARQKYAYGPQHDYLDHPDVIGWTREGDSSHPKSGLATLITDGPGGSKRMYAGLKNAGETWYDITGNRSDTVKIGSDGWGEFHVNDKSVSIYVQK

SEQ ID NO: 40440 - protein, 478 aa, Bacillus sp.
NGTMMQYFEWYLPNDGNHWNRLNSDASNLKSKGITAVWIPPAWKAASQNDVGYGAYDLYDLGEFNQKGTVRTKYGTRSQLQAAVTSLKNNGIQVYGDVVMNHKGGADATEMVRAVEVNPNNRNQEVTGEYTIEAWTRFDFPGRGNTHSSFKWRWYHFDGVDWDQSRDTDNRIYKFRGKAWDWEVDTEFGNYDYLMYADYDMDHPEVVNELRNWGVWYTNTLGLDGFRIDAVKHIKYSFTRDWINHVRSATGKNMFAVAEFWKNDLGAIENYLQKTNWNHSVFDVPLHYNLYNASKSGGNYDMRNIFNGTVVQRHPSHAVTFVDNHDSQPEEALESFVEEWFKPLAYALTLTREQGYPSVFYGDYYGIPTHGVPAMRSKIDPILEARQKYAYGPQHDYLDHPDVIGWTREGDSSHPKSGLATLITDGPGGSKRMYAGLKNAGETWYDITGNRSDTVKIGSDGWGEFHVNDGSVSIYVQK

SEQ ID NO: 40441 - protein, 478 aa, Bacillus sp.
NGTMMQYFEWYLPNDGNHWNRLNSDASNLKSKGITAVWIPPAWKGASQNDVGYGAYDLYDLGEFNQKGTVRTKYGTRSQLQAAVTSLKNNGIQVYGDVVMNHKGGADATEMVRAVEVNPNNRNQEVTGEYTIEAWTRFDFPGRGNTHSSFKWRWYHFDGVDWDQSRRLNNRIYKFRGKAWDWEVDTEFGNYDYLMYADYDMDHPEVVNELRNWGVWYTNTLGLDGFRIDAVKHIKYSFTRDWINHVRSATGKNMFAVAEFWKNDLGAIENYLQKTNWNHSVFDVPLHYNLYNASKSGGNYDMRNIFNGTVVQSHPSHAVTFVDNHDSQPEEALESFVEEWFKPLAYALTLTREQGYPSVFYGDYYGIPTHGVPAMRSKIDPILEARQKYAYGPQHDYLDHPDVIGWTREGDSSHPKSGLATLITDGPGGSKRMYAGLKNAGETWYDITGNRSDTVKIGSDGWGEFHVNDGSVSIYVQK

SEQ ID NO: 40442 - protein, 478 aa, Bacillus sp.
NGTMMQYFEWYLPNDGNHWNRLNSDASNLKSKGITAVWIPPAWKSASQNDVGYGAYDLYDLGEFNQKGTVRTKYGTRSQLQAAVTSLKNNGIQVYGDVVMNHKGGADATEMVRAVEVNPNNRNQEVTGEYTIEAWTRFDFPGRGNTHSSFKWRWYHFDGVDWDQSRNLQNRIYKFRGKAWDWEVDTEFGNYDYLMYADYDMDHPEVVNELRNWGVWYTNTLGLDGFRIDAVKHIKYSFTRDWINHVRSATGKNMFAVAEFWKNDLGAIENYLQKTNWNHSVFDVPLHYNLYNASKSGGNYDMRNIFNGTVVQRHPSHAVTFVDNHDSQPEEALESFVEEWFKPLAYALTLTREQGYPSVFYGDYYGIPTHGVPAMRSKIDPILEARQKYAYGPQHDYLDHPDVIGWTREGDSSHPKSGLATLITDGPGGSKRMYAGLKNAGETWYDITGNRSDTVKIGSDGWGEFHVNDGSVSIYVQK

SEQ ID NO: 40443 - protein, 478 aa, Bacillus sp.
NGTMMQYFEWYLPNDGNHWNRLNSDASNLKSKGITAVWIPPAWKGASQNDVGYGAYDLYDLGEFNQKGTVRTKYGTRSQLQAAVTSLKNNGIQVYGDVVMNHKGGADATEMVPAVEVNPNNRNQEVTGEYTIEAWTRFDFPGRGNTHSSFKWRWYHFDGVDWDQSRRLNNRIYKFRNKAWDWEVDTEFGNYDYLMYADYDMDHPEVVNELRNWGVWYTNTLGLDGFRIDAVKHIKYSFTRDWINHVRSATGKNMFAVAEFWKNDLGAIENYLQKTNWNHSVFDVPLHYNLYNASKSGGNYDMRNIFNGTVVQRHPSHAVTFVDNHDSQPEEALESFVEEWFKPLAYALTLTREQGYPSVFYGDYYGIPTHGVPAMRSKIDPILEARQKYAYGPQHDYLDHPDVIGWTREGDSSHPKSGLATLITDGPGGSKRMYAGLKNAGETWYDITGNRSDTVKIGSDGWGEFHVNDGSVSIYVQK

SEQ ID NO: 40444 - protein, 478 aa, Bacillus sp.
NGTMMQYFEWYLPNDGNHWNRLNSDASNLKSKGITAVWIPPAWKAASQNDVGYGAYDLYDLGEFNQKGTVRTKYGTRSQLQAAVTSLKNNGIQVYGDVVMNHKGGADATEMVRAVEVNPNNRNQEVTGEYTIEAWTRFDFPGRGNTHSSFKWRWYHFDGVDWDQSRQITNRIYKFRGKAWDWEVDTEFGNYDYLMYTDYDMDHPEVVNELRNWGVWYTNTLGLDGFRIDAVKHIKYSFTRDWINHVRSATGKNMFAVAEFWKNDLGAIENYLQKTNWNHSVFDVPLHYNLYNASKSGGNYDMRNIFNGTVVQRHPSHAVTFVDNHDSQPEEALESFVEEWFKPLAYALTLTREQGYPSVFYGDYYGIPTHGVPAMRSKIDPILEARQKYAYGPQHDYLDHPDVIGWTREGDSSHPKSGLATLITDGPGGSKRMYAGLKNAGETWYDITGNRSDTVKIGSDGWGEFHVNDGSVSIYVQK

SEQ ID NO: 40445 - protein, 478 aa, Bacillus sp.
NGTMMQYFEWYLPNDGNHWNRLNSDASNLKSKGITAVWIPPAWKGASQNDVGYGAYDLYDLGEFNQKGTVRTKYGTRSQLQAAVTSLKNNGIQVYGDVVMNHKGGADATEMVRAVEVNPNNRNQEVTGEYTIEAWTRFDFPGRGNTHSSFKWRWYHFDGVDWDQSRELDNRIYKFRGKAWDWEVDTEFGNYDYLMYTDYDMDHPEVVNELRNWGVWYTNTLGLDGFRIDAVKHIKYSFTRDWINHVRSATGKNMFAVAEFWKNDLGAIENYLQKTNWNHSVFDVPLHYNLYNASKSGGNYDMRNIFNGTVVQRHPSHAVTFVDNHDSQPEEALESFVEEWFKPLAYALTLTREQGYPSVFYGDYYGIPTHGVPAMRSKIDPILEARQKYAYGPQHDYLDHPDVIGWTREGDSSHPKSGLATLITDGPGGSKRMYAGLKNAGETWYDITGNRSDTVKIGSDGWGEFHVNDGSVSIYVQK

SEQ ID NO: 40446 - protein, 478 aa, Bacillus sp.
NGTMMQYFEWYLPNDGNHWNRLNSDASNLKSKGITAVWIPPAWKGASQNDVGYGAYDLYDLGEFNQKGTVRTKYGTRSQLQAAVTSLKNNGIQVYGDVVMNHKGGADATEMVRAVEVNPNNRNQEVTGEYTIEAWTRFDFPGRGNTHSSFKWRWYHFDGVDWDQSRRLQNRIYKFRGKAWDWEVDTEFGNYDYLMYVDYDMDHPEVVNELRNWGVWYTNTLGLDGFRIDAVKHIKYSFTRDWINHVRSATGKNMFAVAEFWKNDLGAIENYLQKTNWNHSVFDVPLHYNLYNASKSGGNYDMRNIFNGTVVQRHPSHAVTFVDNHDSQPEEALESFVEEWFKPLAYALTLTREQGYPSVFYGDYYGIPTHGVPAMRSKIDPILEARQKYAYGPQHDYLDHPDVIGWTREGDSSHPKSGLATLITDGPGGSKRMYAGLKNAGETWYDITGNRSDTVKIGSDGWGEFHVNDGSVSIYVQK

SEQ ID NO: 40447 - protein, 478 aa, Bacillus sp.
NGTMMQYFEWYLPNDGNHWNRLNSDASNLKSKGITAVWIPPAWKGASQNDVGYGAYDLYDLGEFNQKGTVRTKYGTRSQLQAAVTSLKNNGIQVYGDVVMNHKGGADATEMVRAVEVNPNNRNQEVTGEYTIEAWTRFDFPGRGNTHSSFKWRWLHFDGVDWDQSRRLNNRIYKFRGKAWDWEVDTEFGNYDYLMYADYDMDHPEVVNELRNWGVWYTNTLGLDGFRIDAVKHIKYSFTRDWINHVRSATGKNMFAVAEFWKNDLGAIENYLQKTNWNHSVFDVPLHYNLYNASKSGGNYDMRNIFNGTVVQRHPSHAVTFVDNHDSQPEEALESFVEEWFKPLAYALTLTREQGYPSVFYGDYYGIPTHGVPAMRSKIDPILEARQKYAYGPQHDYLDHPDVIGWTREGDSSHPKSGLATLITDGPGGSKRMYAGLKNAGETWYDITGNRSDTVKIGSDGWGEFHVNDGSVSIYVQK

SEQ ID NO: 40448 - protein, 478 aa, Bacillus sp.
NGTMMQYFEWYLPNDGNHWNRLNSDASNLKSKGITAVWIPPAWKGVSQNDVGYGAYDLYDLGEFNQKGTVRTKYGTRSQLQAAVTSLKNNGIQVYGDVVMNHKGGADATEMVRAVEVNPNNRNQEVTGEYTIEAWTRFDFPGRGNTHSSFKWRWYHFDGVDWDQSRRLTNRIYKFRGKAWDWEVDTEFGNYDYLMYVDYDMDHPEVVNELRNWGVWYTNTLGLDGFRIDAVKHIKYSFTRDWINHVRSATGKNMFAVAEFWKNDLGAIENYLQKTNWNHSVFDVPLHYNLYNASKSGGNYDMRNIFNGTVVQRHPSHAVTFVDNHDSQPEEALESFVEEWFKPLAYALTLTREQGYPSVFYGDYYGIPTHGVPAMRSKIDPILEARQKYAYGPQHDYLDHPDVIGWTREGDSSHPKSGLATLITDGPGGSKRMYAGLKNAGETWYDITGNRSDTVKIGSDGWGEFHVNDGSVSIYVQK

SEQ ID NO: 40449 - protein, 478 aa, Bacillus sp.
NGTMMQYFEWYLPNDGNHWNRLNSDASNLKSKGITAVWIPPAWKGASQNDVGYGAYDLYDLGEFNQKGTVRTKYGTRSQLQAAVTSLKNNGIQVYGDVVMNHKGGADATEMVRAVEVNPNNRNQEVTGEYTIEAWTRFDFPGRGNTHSSFKWRWYHFDGVDWDQSRRLNNRIYKFRGKAWDWEVDTEFGNYDYLMYADYDMDHPEVVNELRNWGVWYTNTLGLDGFRIDAVKHIKYSFTRDWINHVRSATGKNMFAVAEFWKNDLGAIENYLQKTNWNHSVFDVPLHYNLYNASKSGGNYDMRNIFNGTVVQSHPNHAVTFVDNHDSQPEEALESFVEEWFKPLAYALTLTREQGYPSVFYGDYYGIPTHGVPAMRSKIDPILEARQKYAYGPQHDYLDHPDVIGWTREGDSSHPKSGLATLITDGPGGSKRMYAGLKNAGETWYDITGNRSDTVKIGSDGWGEFHVNDGSVSIYVQK

SEQ ID NO: 40450 - protein, 478 aa, Bacillus sp.
NGTMMQYFEWYLPNDGNHWNRLNSDASNLKSKGITAVWIPPAWKGASQNDVGYGAYDLYDLGEFNQKGTVRTKYGTRSQLQAAVTSLKNNGIQVYGDVVMNHKGGADATEMVRAVEVNPNNRNQEVTGEYTIEAWTRFDFPGRGNTHSSFKWRWYHFDGVDWDQSRRLNNRIYKFRGKAWDWEVDTEFGNYDYLMYADYDMDHPEVVNELRNWGVWYTNTLGLDGFRIDAVKHIKYSFTRDWINHVRSATGKNMFAVAEFWKNDLGAIENYLQKTNWNHSVFDVPLHYNLYNASKSGGNYDMRNIFNGTVVQRHPSHAVTFVDNHDSQPEEALESFVEPWFKPLAYALTLTREQGYPSVFYGDYYGIPTHGVPAMRSKIDPILEARQKYAYGPQHDYLDHPDVIGWTREGDSSHPKSGLATLITDGPGGSKRMYAGLKNAGETWYDITGNRSDTVKIGSDGWGEFHVNDQSVSIYVQK

SEQ ID NO: 40451 - protein, 478 aa, Bacillus sp.
NGTMMQYFEWYLPNDGNHWNRLNSDASNLKSKGITAVWIPPAWKGASQNDVGYGAYDLYDLGEFNQKGTVRTKYGTRSQLQAAVTSLKNNGIQVYGDVVMNHKGGADATEMVRAVEVNPNNRNQEVTGEYTIEAWTRFDFPGRGNTHSSFKWRWYHFDGVDWDQSRRLNNRIYKFRGKAWDWEVDTEFGNYDYLMYADYDMDHWEVVNELRNWGVWYTNTLGLDGFRIDAVKHIKYSFTRDWINHVRSATGKNMFAVAEFWKNDLGAIENYLQKTNWNHSVFDVPLHYNLYNASKSGGNYDMRNIFNGTVVQRHPSHAVTFVDNHDSQPEEALESFVEEWFKPLAYALTLTREQGYPSVFYGDYYGIPTHGVPAMRSKIDPILEARQKYAYGPQHDYLDHPDVIGWTREGDSSHPKSGLATLITDGPGGSKRMYAGLKNAGETWYDITGNRSDTVKIGSDGWGEFHVNDGSVSIYVQK

SEQ ID NO: 40452 - protein, 478 aa, Bacillus sp.
NGTMMQYFEWYLPNDGNHWNRLNSDASNLKSKGIKAVWIPPAWKGASQNDVGYGAYDLYDLGEFNQKGTVRTKYGTRSQLQAAVTSLKNNGIQVYGDVVMNHKGGADATEMVRAVEVNPNNRNQEVTGEYTIEAWTRFDFPGRGNTHSSFKWRWYHFDGVDWDQSRRLNNRIYKFRGKAWDWEVDTEFGNYDYLMYADYDMDHPEVVNELRNWGVWYTNTLGLDGFRIDAVKHIKYSFTRDWINHVRSATGKNMFAVAEFWKNDLGAIENYLQKTNWNHSVFDVPLHYNLYNASKSGGNYDMRNIFNGTVVQRHPSHAVTFVDNHDSQPEEALESFVEEWFKPLAYALTLTREQGYPSVFYGDYYGIPTHGVPAMRSKIDPILEARQKYAYGPQHDYLDHPDVIGWTREGDSSHPKSGLATLITDGPGGSKRMYAGLKNAGETWYDITGNRSDTVKIGSDGWGEFHVNDGSVSIYVQK

SEQ ID NO: 40453 - protein, 478 aa, Bacillus sp.
NGTMMQYFEWYLPNDGNHWNRLNSDASNLKSKGITAVWIPPAWKATSQNDVGYGAYDLYDLGEFNQKGTVRTKYGTRSQLQAAVTSLKNNGIQVYGDVVMNHKGGADATEMVRAVEVNPNNRNQEVTGEYTIEAWTRFDFPGRGNTHSSFKWRWYHFDGVDWDQSRQLNNRIYKFRGKAWDWEVDTEFGNYDYLMYADYDMDHPEVVNELRNWGVWYTNTLGLDGFRIDAVKHIKYSFTRDWINHVRSATGKNMFAVAEFWKNDLGAIENYLQKTNWNHSVFDVPLHYNLYNASKSGGNYDMRNIFNGTVVQRHPSHAVTFVDNHDSQPEEALESFVEEWFKPLAYALTLTREQGYPSVFYGDYYGIPTHGVPAMRSKIDPILEARQKYAYGPQHDYLDHPDVIGWTREGDSSHPKSGLATLITDGPGGSKRMYAGLKNAGETWYDITGNRSDTVKIGSDGWGEFHVNDGSVSIYVQK

SEQ ID NO: 40454 - protein, 478 aa, Bacillus sp.
NGTMMQYFEWYLPNDGNHWNRLNSDASNLKSKGITAVWIPPAWKGASQNDVGYGAYDLYDLGEFNQKGTVRTKYGTRSQLQAAVTSLKNNGIQVYGDVVMNHKGGADATEMVRAVEVNPNNRNQEVTGEYTIEAWTRFDFPGRGNTHSSFKWRWYHFDGVDWDQSRRLNNRIYKFRGKAWDWEVDTENGFYDYLMYADIDYDYPEVVTTLRQWGVWYTNTLGLDGFRIDAVKHIKYSFTRDWINHVRSATGKNMFAVAEFWKNDLGAIENYLQKTNWNHSVFDVPLHYNLYNASKSGGNYDMRNIFNGTVVQRHPSHAVTFVDNHDSQPEEALESFVEEWFKPLAYALTLTREQGYPSVFYGDYYGIPTHGVPAMRSKIDPILEARQKYAYGPQHDYLDHPDVIGWTREGDSSHPKSGLATLITDGPGGSKRMYAGLKNAGETWYDITGNRSDTVKIGSDGWGEFHVNDGSVSIYVQK

SEQ ID NO: 40455 - protein, 478 aa, Bacillus sp.
NGTMMQYFEWYLPNDGNHWNRLNSDASNLKSKGITAVWIPPAWKGASQNDVGYGAYDLYDLGEFNQKGTVRTKYGTRSQLQAAVTSLKNNGIQVYGDVVMNHKGGADATEMVRAVEVNPNNRNQEVTGEYTIEAWTRFDFPGRGNTHSSFKWRWYHFDGVDWDQSRRLNNRIYKFRGKAWDWEVDTENGFYDYLMYADIDMDHPEVVIPLRNWGVWYTNTLGLDGFRIDAVKHIKYSFTRDWINHVRSATGKNMFAVAEFWKNDLGAIENYLQKTNWNHSVFDVPLHYNLYNASKSGGNYDMRNIFNGTVVQRHPSHAVTFVDNHDSQPEEALESFVEEWFKPLAYALTLTREQGYPSVFYGDYYGIPTHGVPAMRSKIDPILEARQKYAYGPQHDYLDHPDVIGWTREGDSSHPKSGLATLITDGPGGSKRMYAGLKNAGETWYDITGNRSDTVKIGSDGWGEFHVNDGSVSIYVQK

SEQ ID NO: 40456 - protein, 478 aa, Bacillus sp.
NGTMMQYFEWYLPNDGNHWNRLNSDASNLKSKGITAVWIPPAWKGASQNDVGYGAYDLYDLGEFNQKGTVRTKYGTRSQLQAAVTSLKNNGIQVYGDVVMNHKGGADATEMVRAVEVNPNNRLQEVTGEYTIEAWTRFDFPGRGNTHSSFKWRWYHFDGVDWDQSRRLNNRIYKFRGKAWDWEVDTEFGNYDYLMYADYDMDHPEVVNELRNWGVWYTNTLGLDGFRIDAVKHIKYSFTRDWINHVRSATGKNMFAVAEFWKNDLGAIENYLQKTNWNHSVFDVPLHYNLYNASKSGGNYDMRNIFNGTVVQRHPSHAVTFVDNHDSQPEEALESFVEEWFKPLAYALTLTREQGYPSVFYGDYYGIPTHGVPAMRSKIDPILEARQKYAYGPQHDYLDHPDVIGWTREGDSSHPKSGLATLITDGPGGSKRMYAGLKNAGETWYDITGNRSDTVKIGSDGWGEFHVNDGSVSIYVQK

SEQ ID NO: 40457 - protein, 478 aa, Bacillus sp.
NGTMMQYFEWYLPNDGNHWNRLNSDASNLKSKGITAVWIPPAWKGASQNDVGYGAYDLYDLGEFNQKGTVRTKYGTRSQLQAAVTSLKNNGIQVYGDVVMNHKGGADATEMVRAVEVNPNNRNQEVTGEYTIEAWTRFDFPGRGNTHSSFKWRWYHFDGVDWDQSRRLNNRIYKFRGKAWDWEVDTEFGNYDYLMYADYDMDHPEVVNELRNWGVWYTNTLGLDGFRIDAVKHIKYSFTRDWINHVRSATGKNMFAVAEFWKNDLGAIENYLQKTNWNHSVFDVPLHYNLYNASKSGGNYDMRNIFNGTVVQRHPSHAVTFVDNHDSQPEEALESFVDTWFKPLAYALTLTREQGYPSVFYGDYYGIPTHGVPAMRSKIDPILEARQKYAYGPQHDYLDHPDVIGWTREGDSSHPKSGLATLITDGPGGSKRMYAGLKNAGETWYDITGNRSDTVKIGSDGWGEFHVNGASVSIYVQK

SEQ ID NO: 40458 - protein, 478 aa, Bacillus sp.
NGTMMQYFEWYLPNDGNHWNRLNSDASNLKSKGITAVWIPPAWKGASQNDVGYGAYDLYDLGEFNQKGTVRTKYGTRSQLQAAVTSLKNNGIQVYGDVVMNHKGGADATEMVRAVEVNPNNRNQEVTGEYTIEAWTRFDFPGRGNTHSSFKWRWYHFDGVDWDQSRRLNNRIYKFRGKAWDWEVDTEFGNYDYLMYADYDMDHPEVVNELRNWGVWYTNTLGLDGFRIDAVKHIKYSFTRDWINHVRSATGKNMFAVAEFWKNDLGAIENYLQKTNWNHSVFDVPLHYNLYNASKSGGNYDMRNIFNGTVVQRHPSHAVTFVDNHDSQPEEALESFVDPWFKPLAYALTLTREQGYPSVFYGDYYGIPTHGVPAMRSKIDPILEARQKYAYGPQHDYLDHPDVIGWTREGDSSHPKSGLATLITDGPGGSKRMYAGLKNAGETWYDITGNRSDTVKIGSDGWGEFHVNDQSVSIYVQK

SEQ ID NO: 40459 - protein, 478 aa, Bacillus sp.
NGTMMQYFEWYLPNDGNHWNRLNSDASNLKSKGITAVWIPPAWKGASQNDVGYGAYDLYDLGEFNQKGTVRTKYGTRSQLQAAVTSLKNNGIQVYGDVVMNHKGGADATEMVRAVEVNPNNRNQEVTGEYTIEAWTRFDFPGRGNTHSSFKWRWYHFDGVDWDQSRRLNNRIYKFRGKAWDWEVDTEFGNYDYLMYADYDMDHPEVVNELRNWGVWYTNTLGLDGFRIDAVKHIKYSFTRDWINHVRSATGKNMFAVAEFWKNDLGAIENYLQKTNWNHSVFDVPLHYNLYNASKSGGNYDMRNIFNGTVVQRHPSHAVTFVDNHDSQPEEALESFVEEWFKPLAYALTLTREQGYPSVFYGDYYGIPTHGVPAMRSKIDPILEARQKYAYGPQHDYLDHPDVIGWTREGDSSHPWSGLATLITDGPGGSKRMYAGLKNAGETWYDITGNRSDTVKIGSDGWGEFHVNDGSVSIYVQK

SEQ ID NO: 40460 - protein, 478 aa, Bacillus sp.
NGTMMQYFEWYLPNDGNHWNRLNSDASNLKSKGITAVWIPPAWKAASQNDVGYGAYDLYDLGEFNQKGTVRTKYGTRSQLQAAVTSLKNNGIQVYGDVVMNHKGGADATEMVRAVEVNPNNRNQEVTGEYTIEAWTRFDFPGRGNTHSSFKWRWYHFDGVDWDQSRQTQNRIYKFRGKAWDWEVDTEFGNYDYLMYADYDMDHPEVVNELRNWGVWYTNTLGLDGFRIDAVKHIKYSFTRDWINHVRSATGKNMFAVAEFWKNDLGAIENYLQKTNWNHSVFDVPLHYNLYNASKSGGNYDMRNIFNGTVVQRHPSHAVTFVDNHDSQPEEALESFVEEWFKPLAYALTLTREQGYPSVFYGDYYGIPTHGVPAMRSKIDPILEARQKYAYGPQHDYLDHPDVIGWTREGDSSHPKSGLATLITDGPGGSKRMYAGLKNAGETWYDITGNRSDTVKIGSDGWGEFHVNDGSVSIYVQK

SEQ ID NO: 40461 - protein, 478 aa, Bacillus sp.
NGTMMQYFEWYLPNDGNHWNRLNSDASNLKSKGITAVWIPPAWKGASQNDVGYGAYDLYDLGEFNQKGTVRTKYGTRSQLQAAVTSLKNNGIQVYGDVVMNHKGGADATEMVRAVEVNPNNRNQEVTGEYTIEAWTRFDFPGRGNTHSSFKWRWYHFDGVDWDQSRRLNNRIYKFRGKAWDWEVDTEFGNYDYLMYADYDMDHPEVVNELRNWGVWYTNTLGLDGFRIDAVKHIKYSFTRDWINHVRSATGKNMFAVAEFWKNDLGAIENYLQKTNWNHSVFDVPLHYNLYNASQSGGNYDMRNIFNGTVVQRHPSHAVTFVDNHDSQPEEALESFVEPWFKPLAYALTLTREQGYPSVFYGDYYGIPTHGVPAMRSKIDPILEARQKYAYGPQHDYLDHPDVIGWTREGDSSHPKSGLATLITDGPGGSKRMYAGLKNAGETWYDITGNRSDTVKIGSDGWGEFHVNDQSVSIYVQK

SEQ ID NO: 40462 - protein, 478 aa, Bacillus sp.
NGTMMQYFEWYLPNDGNHWNRLNSDASNLKSKGITAVWIPPAWKGASQNDVGYGAYDLYDLGEFNQKGTVRTKYGTRSQLQAAVTSLKNNGIQVYGDVVMNHKGGADATEMVRAVEVNPNNRNQEVTGEYTIEAWTRFDFPGRGNTHSSFKWRWYHFDGVDWDQSRKLNNRIYKFRGKAWDWEVDTEFGNYDYLMYVDYDMDHPEVVNELRNWGVWYTNTLGLDGFRIDAVKHIKYSFTRDWINHVRSATGKNMFAVAEFWKNDLGAIENYLQKTNWNHSVFDVPLHYNLYNASKSGGNYDMRNIFNGTVVQAHPNHAVTFVDNHDSQPEEALESFVEEWFKPLAYALTLTREQGYPSVFYGDYYGIPTHGVPAMRSKIDPILEARQKYAYGPQHDYLDHPDVIGWTREGDSSHPKSGLATLITDGPGGSKRMYAGLKNAGETWYDITGNRSDTVKIGSDGWGEFHVNDGSVSIYVQK

SEQ ID NO: 40463 - protein, 478 aa, Bacillus sp.
NGTMMQYFEWYLPNDGNHWNRLNSDASNLKSKGITAVWIPPAWKGASQNDVGYGAYDLYDLGEFNQKGTVRTKYGTRSQLQAAVTSLKNNGIQVYGDVVMNHKGGADATEMVRAVEVNPNNRNQEVTGEYTIEAWTRFDFPGRGNTHSSFKWRWYHFDGVDWDQSRDLTNRIYKFRGKAWDWEVDTEFGNYDYLMYADYDMDHPEVVNELRNWGVWYTNTLGLDGFRIDAVKHIKYSFTRDWINHVRSATGKNMFAVAEFWKNDLGAIENYLQKTNWNHSVFDVPLHYNLYNASKSGGNYDMRNIFNGTVVQRHPSHAVTFVDNHDSQPEEALESFVETWFKPLAYALTLTREQGYPSVFYGDYYGIPTHGVPAMRSKIDPILEARQKYAYGPQHDYLDHPDVIGWTREGDSSHPKSGLATLITDGPGGSKRMYAGLKNAGETWYDITGNRSDTVKIGSDGWGEFHVNKASVSIYVQK

SEQ ID NO: 40464 - protein, 478 aa, Bacillus sp.
NGTMMQYFEWYLPNDGNHWNRLNSDASNLKSKGITAVWIPPAWKAASQNDVGYGAYDLYDLGEFNQKGTVRTKYGTRSQLQAAVTSLKNNGIQVYGDVVMNHKGGADATEMVRAVEVNPNNRNQEVTGEYTIEAWTRFDFPGRGNTHSSFKWRWYHFDGVDWDQSRRLNNRIYKFRGKAWDWEVDTEFGNYDYLMYADYDMDHPEVVNELRNWGVWYTNTLGLDGFRIDAVKHIKYSFTRDWINHVRSATGKNMFAVAEFWKNDLGAIENYLQKTNWNHSVFDVPLHYNLYNASKSGGNYDMRNIFNGTVVQRHPSHAVTFVDNHDSQPEEALESFVEEWFKPLAYALTLTREQGYPSVFYGDYYGIPTHGVPAMRSKIDPILEARQKYAYGPQHDYLDHPDVIGWTREGDSSHPKSGLATLITDGPGGSKRMYAGLKNAGETWYDITGNRSDTVKIGSDGWGEFHVNDGSVSIYVQK

SEQ ID NO: 40465 - protein, 478 aa, Bacillus sp.
NGTMMQYFEWYLPNDGNHWNRLNSDASNLKSKGITAVWIPPAWKGASQNDVGYGAYDLYDLGEFNQKGTVRTKYGTRSQLQAAVTSLKNNGIQVYGDVVMNHKGGADATEMVRAVEVNPNNRNQEVTGEYTIEAWTRFDFPGRGNTHSSFKWRWYHFDGVDWDQSRRLNNRIYKFRGKAWDWEVDTEFGNYDYLMYADYDMDHPEVVNELRNWGVWYTNTLGLDGFRIDAVKHIKYSFTRDWINHVRSATGKNMFAVAEFWKPDLGAIENYLQKTNWNHSVFDVPLHYNLYNASKSGGNYDMRNIFNGTVVQRHPSHAVTFVDNHDSQPEEALESFVEEWFKPLAYALTLTREQGYPSVFYGDYYGIPTHGVPAMRSKIDPILEARQKYAYGPQHDYLDHPDVIGWTREGDSSHPKSGLATLITDGPGGSKRMYAGLKNAGETWYDITGNRSDTVKIGSDGWGEFHVNDGSVSIYVQK

SEQ ID NO: 40466 - protein, 478 aa, Bacillus sp.
NGTMMQYFEWYLPNDGNHWNRLNSDASNLKSKGITAVWIPPAWKAASQNDVGYGAYDLYDLGEFNQKGTVRTKYGTRSQLQAAVTSLKNNGIQVYGDVVMNHKGGADATEMVRAVEVNPNNRNQEVTGEYTIEAWTRFDFPGRGNTHSSFKWRWYHFDGVDWDQSRQFQNRIYKFRGKAWDWEVDTEFGNYDYLMYADYDMDHPEVVNELRNWGVWYTNTLGLDGFRIDAVKHIKYSFTRDWINHVRSATGKNMFAVAEFWKNDLGAIENYLQKTNWNHSVFDVPLHYNLYNASKSGGNYDMRNIFNGTVVQRHPSHAVTFVDNHDSQPEEALESFVEEWFKPLAYALTLTREQGYPSVFYGDYYGIPTHGVPAMRSKIDPILEARQKYAYGPQHDYLDHPDVIGWTREGDSSHPKSGLATLITDGPGGSKRMYAGLKNAGETWYDITGNRSDTVKIGSDGWGEFHVNDGSVSIYVQK

SEQ ID NO: 40467 - protein, 478 aa, Bacillus sp.
NGTMMQYFEWYLPNDGNHWNRLNSDASNLKSKGITAVWIPPAWKGASQNDVGYGAYDLYDLGEFNQKGTVRTKYGTRSQLQAAVTSLKNNGIQVYGDVVMNHKGGADATEMVPAVEVNPNNRNQEVTGDYTIEAWTRFDFPGRGNTHSSFKWRWYHFDGVDWDQSRRLNNRIYKFRGKAWDWEVDTEFGNYDYLMYADYDMDHPEVVNELRNWGVWYTNTLGLDGFRIDAVKHIKYSFTRDWINHVRSATGKNMFAVAEFWKNDLGAIENYLQKTNWNHSVFDVPLHYNLYNASKSGGNYDMRNIFNGTVVQRHPSHAVTFVDNHDSQPEEALESFVEEWFKPLAYALTLTREQGYPSVFYGDYYGIPTHGVPAMRSKIDPILEARQKYAYGPQHDYLDHPDVIGWTREGDSSHPKSGLATLITDGPGGSKRMYAGLKNAGETWYDITGNRSDTVKIGSDGWGEFHVNDGSVSIYVQK

SEQ ID NO: 40468 - protein, 478 aa, Synthetic construct
NGTMMQYFEWYLPNDGNHWNRLNSDASNLKSKGITAVWIPPAWKGASQNDVGYGAYDLYDLGEFNQKGTVRTKYGTRSQLQAAVTSLKNNGIQVYGDVVMNHKGGADATEMVRAVEVNPNNRNQEVTGEYTIEAWTRFDFPGRGNTHSSFKWRWYHFDGVDWDQSRRLNNRIYKFRGKAWDWEVDTENGNYDYLMYADIDMDHPENQNELRNWGVWYTNTLGLDGFRIDAVKHIKYSFTRDWINHVRSATGKNMFAVAEFWKNDLGAIENYLQKTNWNHSVFDVPLHYNLYNASKSGGNYDMRNIFNGTVVQRHPSHAVTFVDNHDSQPEEALESFVEEWFKPLAYALTLTREQGYPSVFYGDYYGIPTHGVPAMRSKIDPILEARQKYAYGPQHDYLDHPDVIGWTREGDSSHPKSGLATLITDGPGGSKRMYAGLKNAGETWYDITGNRSDTVKIGSDGWGEFHVNDGSVSIYVQK

SEQ ID NO: 40469 - protein, 478 aa, Bacillus sp.
NGTMMQYFEWYLPNDGNHWNRLNSDASNLKSKGITAVWIPPAWKGASQNDVGYGAYDLYDLGEFNQKGTVRTKYGTRSQLQAAVTSLKNNGIQVYGDVVMNHKGGADATEMVSAVEVNPNNRNQEVTGEYTIEAWTRFDFPGRGNTHSSFKWRWYHFDGVDWDQSRRLNNRIYKFRAKAWDWEVDKEFGNYDYLMYADYDMDHPEVVNELRNWGVWYTNTLGLDGFRIDAVKHIKYSFTRDWINHVRSATGKNMFAVAEFWKNDLGAIENYLQKTNWNHSVFDVPLHYNLYNASKSGGNYDMRNIFNGTVVQRHPSHAVTFVDNHDSQPEEALESFVEEWFKPLAYALTLTREQGYPSVFYGDYYGIPTHGVPAMRSKIDPILEARQKYAYGPQHDYLDHPDVIGWTREGDSSHPKSGLATLITDGPGGSKRMYAGLKNAGETWYDITGNRSDTVKIGSDGWGEFHVNDGSVSIYVQK

SEQ ID NO: 40470 - protein, 478 aa, Bacillus sp.
NGTMMQYFEWYLPNDGNHWNRLNSDASNLKSKGITAVWIPPAWKSASQNDVGYGAYDLYDLGEFNQKGTVRTKYGTRSQLQAAVTSLKNNGIQVYGDVVMNHKGGADATEMVRAVEVNPNNRNQEVTGEYTIEAWTRFDFPGRGNTHSSFKWRWYHFDGVDWDQSRNLQNRIYKFRGKAWDWEVDTEFGNYDYLMYADYDMDHPEVVNELRNWGVWYTNTLGLDGFRIDAVKHIKYSFTRDWINHVRSATGKNMFAVAEFWKNDLGAIENYLQKTNWNHSVFDVPLHYNLYNASKSGGNYDMRNIFNGTVVQRHPSHAVTFVDNHDSQPEEALESFVDEWFKPLAYALTLTREQGYPSVFYGDYYGIPTHGVPAMRSKIDPILEARQKYAYGPQHDYLDHPDVIGWTREGDSSHPKSGLATLITDGPGGSKRMYAGLKNAGETWYDITGNRSDTVKIGSDGWGEFHVNDGSVSIYVQK

SEQ ID NO: 40471 - protein, 478 aa, Bacillus sp.
NGTMMQYFEWYLPNDGNHWNRLNSDASNLKSKGITAVWIPPAWKGASQNDVGYGAYDLYDLGEFNQKGTVRTKYGTRSQLQAAVTSLKNNGIQVYGDVVMNHKGGADATEMVRAVEVNPNNRNQEVTGEYTIEAWTRFDFPGRGNTHSSFKWRWYHFDGVDWDQSRRLNNRIYKFRGKAWDWEVDTEFGNYDYLMYADYDMDHPEVVNELRNWGVWYTNTLGLDGFRIDAVKHIKYSFTRDWINHVRSATGKNMFAVAEFWKNDLGAIENYLQKTNWNHSVFDVPLHYNLYNASKSGGNYDMRNIFNGTVVQRHPSHAVTFVDNHDSQPEEALESFVEPWFKPLAYALTLTREQGYPSVFYGDYYGIPTHGVPAMRSKIDPILEARQKYAYGPQHDYLDHPDVIGWTREGDSSHPKSGLATLITDGPGGSKRMYAGLKNAGETWYDITGNRSDTVKIGSDGWGEFHVNQGSVSIYVQK

SEQ ID NO: 40472 - protein, 478 aa, Bacillus sp.
NGTMMQYFEWYLPNDGNHWNRLNSDASNLKSKGITAVWIPPAWKAASQNDVGYGAYDLYDLGEFNQKGTVRTKYGTRSQLQAAVTSLKNNGIQVYGDVVMNHKGGADATEMVRAVEVNPNNRNQEVTGEYTIEAWTRFDFPGRGNTHSSFKWRWYHFDGVDWDQSRRLQNRIYKFRGKAWDWEVDTEFGNYDYLMYADYDMDHPEVVNELRNWGVWYTNTLGLDGFRIDAVKHIKYSFTRDWINHVRSATGKNMFAVAEFWKNDLGAIENYLQKTNWNHSVFDVPLHYNLYNASKSGGNYDMRNIFNGTVVQRHPSHAVTFVDNHDSQPEEALESFVEEWFKPLAYALTLTREQGYPSVFYGDYYGIPTHGVPAMRSKIDPILEARQKYAYGPQHDYLDHPDVIGWTREGDSSHPKSGLATLITDGPGGSKRMYAGLKNAGETWYDITGNRSDTVKIGSDGWGEFHVNDGSVSIYVQK

SEQ ID NO: 40473 - protein, 478 aa, Bacillus sp.
NGTMMQYFEWYLPNDGNHWNRLNSDASNLKSKGITAVWIPPAWKATSQNDVGYGAYDLYDLGEFNQKGTVRTKYGTRSQLQAAVTSLKNNGIQVYGDVVMNHKGGADATEMVRAVEVNPNNRNQEVTGEYTIEAWTRFDFPGRGNTHSSFKWRWYHFDGVDWDQSREVTNRIYKFRGKAWDWEVDTEFGNYDYLMYADYDMDHPEVVNELRNWGVWYTNTLGLDGFRIDAVKHIKYSFTRDWINHVRSATGKNMFAVAEFWKNDLGAIENYLQKTNWNHSVFDVPLHYNLYNASKSGGNYDMRNIFNGTVVQRHPSHAVTFVDNHDSQPEEALESFVEEWFKPLAYALTLTREQGYPSVFYGDYYGIPTHGVPAMRSKIDPILEARQKYAYGPQHDYLDHPDVIGWTREGDSSHPKSGLATLITDGPGGSKRMYAGLKNAGETWYDITGNRSDTVKIGSDGWGEFHVNDGSVSIYVQK

SEQ ID NO: 40474 - protein, 478 aa, Bacillus sp.
NGTMMQYFEWYLPNDGNHWNRLNSDASNLKSKGITAVWIPPAWKGASQNDVGYGAYDLYDLGEFNQKGTVRTKYGTRSQLQAAVTSLKNNGIQVYGDVVMNHKGGADATEMVRAVEVNPNNRNQEVTGEYTIEAWTRFDFPGRGNTHSSFKWRWYHFDGVDWDQSRRLNNRIYKFRGKAWDWEVDTEFGNYDYLMYADYDMDHPEVVNELRNWGVWYTNTLGLDGFRIDAVKHIKYSFTRDWINHVRSATGKNMFAVAEFFKNDLGAIENYLQKTNWNHSVFDVPLHYNLYNASKSGGNYDMRNIFNGTVVQRHPSHAVTFVDNHDSQPEEALESFVEEWFKPLAYALTLTREQGYPSVFYGDYYGIPTHGVPAMRSKIDPILEARQKYAYGPQHDYLDHPDVIGWTREGDSSHPKSGLATLITDGPGGSKRMYAGLKNAGETWYDITGNRSDTVKIGSDGWGEFHVNDGSVSIYVQK

SEQ ID NO: 40475 - protein, 478 aa, Bacillus sp.
NGTMMQYFEWYLPNDGNHWNRLNSDASNLKSKGITAVWIPPAWKGASQNDVGYGAYDLYDLGEFNQKGTVRTKYGTRSQLQAAVTSLKNNGIQVYGDVVMNHKGGADATEMVRAVEVNPNNRNQEVTGEYTIEAWTRFDFPGRGNTHSSFKWRWYHFDGVDWDQSRRLNNRIYKFRGKAWDWEVDTEFGNYDYLMYADYDMDHPEVVNELRNWGVWYTNTLGLDGFRIDAVKHIKYSFTRDWINHVRSATGKNMFAVAEFWKNDLGAIENYLQKTNWNHSVFDVPLHYNLYNASKSGGNYDMRNIFNGTVVQRHPSHAVTFVDNHDSQPEEALESFVDPWFKPLAYALTLTREQGYPSVFYGDYYGIPTHGVPAMRSKIDPILEARQKYAYGPQHDYLDHPDVIGWTREGDSSHPKSGLATLITDGPGGSKRMYAGLKNAGETWYDITGNRSDTVKIGSDGWGEFHVNDSSVSIYVQK

SEQ ID NO: 40476 - protein, 478 aa, Bacillus sp.
NGTMMQYFEWYLPNDGNHWNRLNSDASNLKSKGITAVWIPPAWKGASQNDVGYGAYDLYDLGEFNQKGTVRTKYGTRSQLQAAVTSLKNNGIQVYGDVVMNHKGGADATEMVRAVEVNPNNRNQEVTGEYTIEAWTRFDFPGRGNTHSSFKWRWYHFDGVDWDQSRRLNNRIYKFRGKAWEWEVDTENGFYDYLMYTDIDYDHPSVVNELRNWGVWYTNTLGLDGFRIDAVKHIKYSFTRDWINHVRSATGKNMFAVAEFWKNDLGAIENYLQKTNWNHSVFDVPLHYNLYNASKSGGNYDMRNIFNGTVVQRHPSHAVTFVDNHDSQPEEALESFVEEWFKPLAYALTLTREQGYPSVFYGDYYGIPTHGVPAMRSKIDPILEARQKYAYGPQHDYLDHPDVIGWTREGDSSHPKSGLATLITDGPGGSKRMYAGLKNAGETWYDITGNRSDTVKIGSDGWGEFHVNDGSVSIYVQK

SEQ ID NO: 40477 - protein, 478 aa, Bacillus sp.
NGTMMQYFEWYLPNDGNHWNRLNSDASNLKSKGITAVWIPPAWKGTSQNDVGYGAYDLYDLGEFNQKGTVRTKYGTRSQLQAAVTSLKNNGIQVYGDVVMNHKGGADATEMVRAVEVNPNNRNQEVTGEYTIEAWTRFDFPGRGNTHSSFKWRWYHFDGVDWDQSRRLDNRIYKFRGKAWDWEVDTEFGNYDYLMYVDYDMDHPEVVNELRNWGVWYTNTLGLDGFRIDAVKHIKYSFTRDWINHVRSATGKNMFAVAEFWKNDLGAIENYLQKTNWNHSVFDVPLHYNLYNASKSGGNYDMRNIFNGTVVQRHPSHAVTFVDNHDSQPEEALESFVEEWFKPLAYALTLTREQGYPSVFYGDYYGIPTHGVPAMRSKIDPILEARQKYAYGPQHDYLDHPDVIGWTREGDSSHPKSGLATLITDGPGGSKRMYAGLKNAGETWYDITGNRSDTVKIGSDGWGEFHVNDGSVSIYVQK

SEQ ID NO: 40478 - protein, 478 aa, Bacillus sp.
NGTMMQYFEWYLPNDGNHWNRLNSDASNLKSKGITAVWIPPAWKGASQNDVGYGAYDLYDLGEFNQKGTVRTKYGTRSQLQAAVTSLKNNGIQVYGDVVMNHKGGADATEMVRAVEVNPNNRNQEVTGEYTIEAWTRFDFPGRGNTHSSFKWRWYHFDGVDWDQSRRLNNRIYKFRGKAWDWEVDTENGFYDYLMYADIDYDYPEVVSTLRMWGVWYTNTLGLDGFRIDAVKHIKYSFTRDWINHVRSATGKNMFAVAEFWKNDLGAIENYLQKTNWNHSVFDVPLHYNLYNASKSGGNYDMRNIFNGTVVQRHPSHAVTFVDNHDSQPEEALESFVEEWFKPLAYALTLTREQGYPSVFYGDYYGIPTHGVPAMRSKIDPILEARQKYAYGPQHDYLDHPDVIGWTREGDSSHPKSGLATLITDGPGGSKRMYAGLKNAGETWYDITGNRSDTVKIGSDGWGEFHVNDGSVSIYVQK

SEQ ID NO: 40479 - protein, 478 aa, Bacillus sp.
NGTMMQYFEWYLPNDGNHWNRLNSDASNLKSKGITAVWIPPAWKALSQNDVGYGAYDLYDLGEFNQKGTVRTKYGTRSQLQAAVTSLKNNGIQVYGDVVMNHKGGADATEMVRAVEVNPNNRNQEVTGEYTIEAWTRFDFPGRGNTHSSFKWRWYHFDGVDWDQSRNVNNRIYKFRGKAWDWEVDTEFGNYDYLMYTDYDMDHPEVVNELRNWGVWYTNTLGLDGFRIDAVKHIKYSFTRDWINHVRSATGKNMFAVAEFWKNDLGAIENYLQKTNWNHSVFDVPLHYNLYNASKSGGNYDMRNIFNGTVVQRHPSHAVTFVDNHDSQPEEALESFVEEWFKPLAYALTLTREQGYPSVFYGDYYGIPTHGVPAMRSKIDPILEARQKYAYGPQHDYLDHPDVIGWTREGDSSHPKSGLATLITDGPGGSKRMYAGLKNAGETWYDITGNRSDTVKIGSDGWGEFHVNDGSVSIYVQK

SEQ ID NO: 40480 - protein, 478 aa, Bacillus sp.
NGTMMQYFEWYLPNDGNHWNRLNSDASNLKSKGITAVWIPPAWKGASQNDVGYGAYDLYDLGEFNQRGTVRTKYGTRSQLQAAVTSLKNNGIQVYGDVVMNHKGGADATEMVRAVEVNPNNRNQEVTGEYTIEAWTRFDFPGRGNTHSSFKWRWYHFDGVDFDQSRRLNNRIYKFRGKAWDWEVDTEFGNYDYLMYADYDMDHPEVVNELRNWGVWYTNTLGLDGFRIDAVKHIKYSFTRDWINHVRSATGKNMFAVAEFWKNDLGAIENYLQKTNWNHSVFDVPLHYNLYNASKSGGNYDMRNIFNGTVVQRHPSHAVTFVDNHDSQPEEALESFVETWFKPLAYALTLTREQGYPSVFYGDYYGIPTHGVPAMRSKIDPILEARQKYAYGPQHDYLDHPDVIGWTREGDSSHPKSGLATLITDGPGGSKRMYAGLKNAGETWYDITGNRSDTVKIGSDGWGEFHVNDGSVSIYVQK

SEQ ID NO: 40481 - protein, 478 aa, Bacillus sp.
NGTMMQYFEWYLPNDGNHWNRLNSDASNLKSKGITAVWIPPAWKGASQNDVGYGAYDLYDLGEFNQKGTVRTKYGTRSQLQAAVTSLKNNGIQVYGDVVMNHKGGADATEMVRAVEVNPNNRNQEVTGEYTIEAWTRFDFPGRGNTHSSFKWRWYHFDGVDWDQSRRTTNRIYKFRGKAWDWEVDTEFGNYDYLMYVDYDMDHPEVVNELRNWGVWYTNTLGLDGFRIDAVKHIKYSFTRDWINHVRSATGKNMFAVAEFWKNDLGAIENYLQKTNWNHSVFDVPLHYNLYNASKSGGNYDMRNIFNGTVVQRHPSHAVTFVDNHDSQPEEALESFVEEWFKPLAYALTLTREQGYPSVFYGDYYGIPTHGVPAMRSKIDPILEARQKYAYGPQHDYLDHPDVIGWTREGDSSHPKSGLATLITDGPGGSKRMYAGLKNAGETWYDITGNRSDTVKIGSDGWGEFHVNDGSVSIYVQK

SEQ ID NO: 40482 - protein, 478 aa, Synthetic construct
NGTMMQYFEWYLPNDGNHWNRLNSDASNLKSKGITAVWIPPAWKGASQNDVGYGAYDLYDLGEFNQKGTVRTKYGTRSQLQAAVTSLKNNGIQVYGDVVMNHKGGADATEMVRAVEVNPNNRNQEVTGEYTIEAWTRFDFPGRGNTHSSFKWRWYHFDGVDWDQSRRLNNRIYKFRGKAWDWEVDTEFGNYDYLMYADIDMDHPESVNELRNWGVWYTNTLGLDGFRIDAVKHIKYSFTRDWINHVRSATGKNMFAVAEFWKNDLGAIENYLQKTNWNHSVFDVPLHYNLYNASKSGGNYDMRNIFNGTVVQRHPSHAVTFVDNHDSQPEEALESFVEEWFKPLAYALTLTREQGYPSVFYGDYYGIPTHGVPAMRSKIDPILEARQKYAYGPQHDYLDHPDVIGWTREGDSSHPKSGLATLITDGPGGSKRMYAGLKNAGETWYDITGNRSDTVKIGSDGWGEFHVNDGSVSIYVQK

SEQ ID NO: 40483 - protein, 478 aa, Bacillus sp.
NGTMMQYFEWYLPNDGNHWNRLNSDASNLKSKGITAVWIPPAWKGASQNDVGYGAYDLYDLGEFNQKGTVRTKYGTRSQLQAAVTSLKNNGIQVYGDVVMNHKGGADLTEMVRAVEVNPNNRNQEVTGEYTIEAWTRFDFPGRGNTHSSFKWRWYHFDGVDWDQSRRLNNRIYKFRGKAWDWEVDTEFGNYDYLMYADYDMDHPEVVNELRNWGVWYTNTLGLDGFRIDAVKHIKYSFTRDWINHVRSATGKNMFAVAEFWKNDLGAIENYLQKTNWNHSVFDVPLHYNLYNASKSGGNYDMRNIFNGTVVQRHPSHAVTFVDNHDSQPEEALESFVEEWFKPLAYALTLTREQGYPSVFYGDYYGIPTHGVPAMRSKIDPILEARQKYAYGPQHDYLDHPDVIGWTREGDSSHPKSGLATLITDGPGGSKRMYAGLKNAGETWYDITGNRSDTVKIGSDGWGEFHVNDGSVSIYVQK

SEQ ID NO: 40484 - protein, 478 aa, Bacillus sp.
NGTMMQYFEWYLPNDGNHWNRLNSDASNLKSKGITAVWIPPAWKGVSQNDVGYGAYDLYDLGEFNQKGTVRTKYGTRSQLQAAVTSLKNNGIQVYGDVVMNHKGGADATEMVRAVEVNPNNRNQEVTGEYTIEAWTRFDFPGRGNTHSSFKWRWYHFDGVDWDQSRRVNNRIYKFRGKAWDWEVDTEFGNYDYLMYVDYDMDHPEVVNELRNWGVWYTNTLGLDGFRIDAVKHIKYSFTRDWINHVRSATGKNMFAVAEFWKNDLGAIENYLQKTNWNHSVFDVPLHYNLYNASKSGGNYDMRNIFNGTVVQRHPSHAVTFVDNHDSQPEEALESFVEEWFKPLAYALTLTREQGYPSVFYGDYYGIPTHGVPAMRSKIDPILEARQKYAYGPQHDYLDHPDVIGWTREGDSSHPKSGLATLITDGPGGSKRMYAGLKNAGETWYDITGNRSDTVKIGSDGWGEFHVNDGSVSIYVQK

SEQ ID NO: 40485 - protein, 478 aa, Bacillus sp.
NGTMMQYFEWYLPNDGNHWNRLNSDASNLKSKGITVVWIPPAWKGASQNDVGYGAYDVYDLGEFNQKGTVRTKYGTRSQLQAAVTSLKNNGIQVYGDVVMNHKGGADATEMVRAVEVNPNNRNQEVTGEYTIEAWTRFDFPGRGNTHSSFKWRWYHFDGVDWDQSRRLNNRIYKFRGKAWDWEVDTENGNYDYLMYADIDYDHPEVVNELRNWGVWYTNTLGLDGFRIDAVKHIKYSFTRLWINHVRSATGKNMFAVAEFWKNDLGAIENYLQKTNWNHSVFDVPLHYNLYNASKSGGNYDMRNIFNGTVVQRHPSHAVTFVDNHDSQPEEALESFVEEWFKPLAYALTLTREQGYPSVFYGDYYGIPTHGVPAMRSKIDPILEARQKYAYGPQHDYLDHPDVIGWTREGDSSHPKSGLATLITDGPGGSKRMYAGLKNAGETWYDITGNRSDTVKIGSDGWGEFHVNDGSVSIYVQK

SEQ ID NO: 40486 - protein, 478 aa, Bacillus sp.
NGTMMQYFEWYLPNDGNHWNRLNSDASNLKSKGITAVWIPPAWKGASQNDVGYGAYDLYDLGEFNQKGTVRTKYGTRSQLQAAVTSLKNNGIQVYGDVVMNHKGGADATEMVRAVEVNPNNRNQEVTGEYTIEAWTRFDFPGRGNTHSSFKWRWYHFDGVDWDQSRRLNNRIYSFRGKAWDWEVDTEFGNYDYLMYADYDMDHPEVVNELRNWGVWYTNTLGLDGFRIDAVKHIKYSFTRDWINHVRSATGKNMFAVAEFWKNDLGAIENYLQKTNWNHSVFDVPLHYNLYNASKSGGNYDMRNIFNGTVVQRHPSHAVTFVDNHDSQPEEALESFVEEWFKPLAYALTLTREQGYPSVFYGDYYGIPTHGVPAMRSKIDPILEARQKYAYGPQHDYLDHPDVIGWTREGDSSHPKSGLATLITDGPGGSKRMYAGLKNAGETWYDITGNRSDTVKIGSDGWGEFHVNDGSVSIYVQK

SEQ ID NO: 40487 - protein, 478 aa, Bacillus sp.
NGTMMQYFEWYLPNDGNHWNRLNSDASNLKSKGITAVWIPPAWKGASQNDVGYGAYDLYDLGEFNQKGTVRTKYGTRSQLQAAVTSLKNNGIQVYGDVVMNHKGGADATEMVRAVEVNPNNRNQEVTGEYTIEAWTRFDFPGRGNTHSSFKWRWYHFDGVDWDQSREFDNRIYKFRGKAWDWEVDTEFGNYDYLMYADYDMDHPEVVNELRNWGVWYTNTLGLDGFRIDAVKHIKYSFMRDWINHVRIATGKNMFAVAEFWKNDLGAIENYLQKTNWNHSVFDVPLHYNLYNASKSGGNYDMRNIFNGTVVQRHPSHAVTFVDNHDSQPEEALESFVDEWFKPLAYALTLTREQGYPSVFYGDYYGIPTHGVPAMRSKIDPILEARQKYAYGPQHDYLDHPDVIGWTREGDSSHPKSGLATLITDGPGGSKRMYAGLKNAGETWYDITGNRSDTVKIGSDGWGEFHVNDQSVSIYVQK

SEQ ID NO: 40488 - protein, 478 aa, Bacillus sp.
NGTMMQYFEWYLPNDGNHWNRLNSDASNLKSKGITAVWIPPAWKGASQNDVGYGAYDLYDLGEFNQKGTVRTKYGTRSQLQAAVTSLKNNGIQVYGDVVMNHKGGADATEMVRAVEVNPNNRNQEVTGEYTIEAWTRFDFPGRGNTHSSFKWRWYHFDGVDWDQSRRLNNRIYKFRGKAWDWEVDTEFGNYDYLMYADYDMDHPEVVNELRNWGVWYTNTLGLDGFRIDAVKHIKYSFTRDWINHVRSATGKNMFAVAEFWKNDLGAIENYLQKTNWNHSVFDVPLHYNLYNASKSGGNYDMRNIFNGTVVQRHPSHAVTFVDNHDSQPEEALESFVEEWFKPLAYALTLTREQGYPSVFYGDYYGIPTHGVPAMRSKIDPILEARQKYAYGPQHDYLDHPDVIGWTREGDSSHPRSGLATLITDGPGGSKRMYAGLKNAGETWYDITGNRSDTVKIGSDGWGEFHVNDGSVSIYVQK

SEQ ID NO: 40489 - protein, 478 aa, Bacillus sp.
NGTMMQYFEWYLPNDGNHWNRLNSDASNLKSKGITAVWIPPAWKGASQNDVGYGAYDLYDLGEFNQKGTVRTKYGTRSQLQAAVTSLKNNGIQVYGDVVMNHKGGADATEMVRAVEVNPNNRNQEVTGEYTIEAWTRFDFPGRGNTHSSFKWRWYHFDGVDWDQSRRLNNRIYKFRGKAWDWEVDTEFGNYDYLMYADYDMDHPEVVNELRNWGVWYTNTLGLDGFRIDAVKHQKYSFTRDWINHVRSATGKNMFAVAEFWKNDLGAIENYLQKTNWNHSVFDVPLHYNLYNASKSGGNYDMRNIFNGTVVQRHPSHAVTFVDNHDSQPEEALESFVEEWFKPLAYALTLTREQGYPSVFYGDYYGIPTHGVPAMRSKIDPILEARQKYAYGPQHDYLDHPDVIGWTREGDSSHPKSGLATLITDGPGGSKRMYAGLKNAGETWYDITGNRSDTVKIGSDGWGEFHVNDGSVSIYVQK

SEQ ID NO: 40490 - protein, 478 aa, Bacillus sp.
NGTMMQYFEWYLPNDGNHWNRLNSDASNLKSKGITEVWIPPAWKGISQNDVGYGAYDLYDLGEFNQKGTVRTKYGTRSQLQAAVTSLKNNGIQVYGDVVMNHKGGADATEMVRAVEVNPNNRNQEVTGEYTIEAWTRFDFPGRGNTHSSFKWRWYHFDGVDWDQSRDTNNRIYKFRGKAWDWEVDTEFGNYDYLMYADYDMDHPEVVNELRNWGVWYTNTLGLDGFRIDAVKHIKYSFTRDWINHVRSATGKNMFAVAEFWKNDLGAIENYLQKTNWNHSVFDVPLHYNLYNASKSGGNYDMRNIFNGTVVQRHPSHAVTFVDNHDSQPEEALESFVEEWFKPLAYALTLTREQGYPSVFYGDYYGIPTHGVPAMRSKIDPILEARQKYAYGPQHDYLDHPDVIGWTREGDSSHPKSGLATLITDGPGGSKRMYAGLKNAGETWYDITGNRSDTVKIGSDGWGEFHVNDGSVSIYVQK

SEQ ID NO: 40491 - protein, 478 aa, Bacillus sp.
NGTMMQYFEWYLPNDGNHWNRLNSDASNLKSKGITAVWIPPAWKGASQNDVGYGAYDLYDLGEFNQKGTVRTKYGTRSQLQAAVTSLKNNGIQVYGDVVMNHKGGADATEMVRAVEVNPNNRNQEVTGEYTIEAWTRFDFPGRGNTHSSFKWRWYHFDGVDWDQSRRLNNRIYKFRGKAWDWEVDTEFGNYDYLMYADYDMDHTEVVNELRNWGVWYTNTLGLDGFRIDAVKHIKYSFTRDWINHVRSATGKNMFAVAEFWKNDLGAIENYLQKTNWNHSVFDVPLHYNLYNASKSGGNYDMRNIFNGTVVQRHPSHAVTFVDNHDSQPEEALESFVEEWFKPLAYALTLTREQGYPSVFYGDYYGIPTHGVPAMRSKIDPILEARQKYAYGPQHDYLDHPDVIGWTREGDSSHPKSGLATLITDGPGGSKRMYAGLKNAGETWYDITGNRSDTVKIGSDGWGEFHVNDGSVSIYVQK

SEQ ID NO: 40492 - protein, 478 aa, Bacillus sp.
NGTMMQYFEWYLPNDGNHWNRLNSDASNLKSKGITAVWIPPAWKGASQNDVGYGAYDLYDLGEFNQKGTVRTKYGTRSQLQAAVTSLKNNGIQVYGDVVMNHKGGADATEMVRAVEVNPNNRNQEVTGEYTIEAWTRFDFPGRGNTHSSFKWRWYHFDGVDWDQSRRLNNRIYKFRGKAWDWEVDTEFGNYDYLMYADYDMDHPEVVNELRNWGVWYTNTLGLDGFRIDAVKHIKYSFTRDWINHVRSATGKNMFAVAEFWKNDLGAIENYLQKTNWNHSVFDVPLHYNLYNASKSGGNYDMRNIFNGTVVQRHPSHAVTFVDNHDSQPEEALESFVETWFKPLAYALTLTREQGYPSVFYGDYYGIPTHGVPAMRSKIDPILEARQKYAYGPQHDYLDHPDVIGWTREGDSSHPKSGLATLITDGPGGSKRMYAGLKNAGETWYDITGNRSDTVKIGSDGWGEFHVNKQSVSIYVQK

SEQ ID NO: 40493 - protein, 478 aa, Bacillus sp.
NGTMMQYFEWYLPNDGNHWNRLNSDASNLKSKGITAVWIPPAWKAVSQNDVGYGAYDLYDLGEFNQKGTVRTKYGTRSQLQAAVTSLKNNGIQVYGDVVMNHKGGADATEMVRAVEVNPNNRNQEVTGEYTIEAWTRFDFPGRGNTHSSFKWRWYHFDGVDWDQSRDLTNRIYKFRGKAWDWEVDTEFGNYDYLMYADYDMDHPEVVNELRNWGVWYTNTLGLDGFRIDAVKHIKYSFTRDWINHVRSATGKNMFAVAEFWKNDLGAIENYLQKTNWNHSVFDVPLHYNLYNASKSGGNYDMRNIFNGTVVQRHPSHAVTFVDNHDSQPEEALESFVEEWFKPLAYALTLTREQGYPSVFYGDYYGIPTHGVPAMRSKIDPILEARQKYAYGPQHDYLDHPDVIGWTREGDSSHPKSGLATLITDGPGGSKRMYAGLKNAGETWYDITGNRSDTVKIGSDGWGEFHVNDGSVSIYVQK

SEQ ID NO: 40494 - protein, 478 aa, Bacillus sp.
NGTMMQYFEWYLPNDGNHWNRLNSDASNLKSKGITAVWIPPAWKAASQNDVGYGAYDLYDLGEFNQKGTVRTKYGTRSQLQAAVTSLKNNGIQVYGDVVMNHKGGADATEMVRAVEVNPNNRNQEVTGEYTIEAWTRFDFPGRGNTHSSFKWRWYHFDGVDWDQSRDLDNRIYKFRGKAWDWEVDTEFGNYDYLMYADYDMDHPEVVNELRNWGVWYTNTLGLDGFRIDAVKHIKYSFTRDWINHVRSATGKNMFAVAEFWKNDLGAIENYLQKTNWNHSVFDVPLHYNLYNASKSGGNYDMRNIFNGTVVQRHPSHAVTFVDNHDSQPEEALESFVETWFKPLAYALTLTREQGYPSVFYGDYYGIPTHGVPAMRSKIDPILEARQKYAYGPQHDYLDHPDVIGWTREGDSSHPKSGLATLITDGPGGSKRMYAGLKNAGETWYDITGNRSDTVKIGSDGWGEFHVNKGSVSIYVQK

SEQ ID NO: 40495 - protein, 478 aa, Bacillus sp.
NGTMMQYFEWYLPNDGNHWNRLNSDASNLKSKGITAVWIPPAWKGASQNDVGYGAYDLYDLGEFNQKGTVRTKYGTRSQLQAAVTSLKNNGIQVYGDVVMNHKGGADATEMVRAVEVNPNNRNQEVTGEYTIEAWTRFDFPGRGNTHSSFKWRWYHFDGVDWDQSRRLNNRIYKFRGKAWDWEVDTEFGNYDYLMYADYDMDHPEVVNELRNWGVWYTNTLGLDGFRIDAVKHIKYSFTRDWINHVRSATGKNMFAVAEFWKNDLGAIENYLQKTNWNHSVFDVPLHYNLYNASKSGSNYDMRNIFNGTVVQRHPSHAVTFVDNHDSQPEEALESFVEEWFKPLAYALTLTREQGYPSVFYGDYYGIPTHGVPAMRSKIDPILEARQKYAYGPQHDYLDHPDVIGWTREGDSSHPKSGLATLITDGPGGSKRMYAGLKNAGETWYDITGNRSDTVKIGSDGWGEFHVNDGSVSIYVQK

SEQ ID NO: 40496 - protein, 478 aa, Bacillus sp.
NGTMMQYFEWYLPNDGNHWNRLNSDASNLKSKGITAVWIPPAWKGASQNDVGYGAYDLYDLGEFNQKGTVRTKYGTRSQLQAAVTSLKNNGIQVYGDVVMNHKGGADATEMVRAVEVNPNNRNQEVTGEYTIEAWTRFDFPGRGNTHSSFKWRWYHFDGVDWDQSRRLNNRIYKFRGKAWDWEVDTEFGNYDYLMYADYDMDHPEVVNELRNWGVWYTNTLGLDGFRIDAVKHIKYSFTRDWINHVRSATGKNMFAVAEFWKNDLGAIENYLQKTNWNHSVFDVPLHYNLYNASKSGGNYDMRNIFNGTVVQRHPSHAVTFVDNHDSQPEEALESFVEEWFKPAAYALTLTREQGYPSVFYGDYYGIPTHGVPAMRSKIDPILEARQKYAYGPQHDYLDHPDVIGWTREGDSSHPKSGLATLITDGPGGSKRMYAGLKNAGETWYDITGNRSDTVKIGSDGWGEFHVNDGSVSIYVQK

SEQ ID NO: 40497 - protein, 478 aa, Synthetic construct
NGTMMQYFEWYLPNDGNHWNRLNSDASNLKSKGITAVWIPPAWKGASQNDVGYGAYDLYDLGEFNQKGTVRTKYGTRSQLQAAVTSLKNNGIQVYGDVVMNHKGGADATEMVRAVEVNPNNRNQEVTGEYTIEAWTRFDFPGRGNTHSSFKWRWYHFDGVDWDQSRRLSNRIYKFRGKAWDWEVDTENGNYDYLMYADIDMDHPEVVNELRNWGVWYTNTLGLDGFRIDAVKHIKYSFTRDWINHVRSATGKNMFAVAEFWKNDLGAIENYLQKTNWNHSVFDVPLHYNLYNASKSGGNYDMRKLLNGTVVSKHPSKAVTFVDNHDTQPEEALESFVQPWFKPLAYAFILTRESGYPSVFYGDMYGIPTHGIPAMKHKIEPILKARKQYAYGAQHDYLDHHDIVGWTREGDSSHPNSGLATLITDGPGGAKRMYVGRQNAGETWHDITGNRSEPVVINSEGWGEFHVNKGSVSIYVQR

SEQ ID NO: 40498 - protein, 478 aa, Bacillus sp.
NGTMMQYFEWYLPNDGNHWNRLNSDASNLKSKGITAVWIPPAWKGASQNDVGYGAYDLYDLGEFNQKGTVRTKYGTRSQLQAAVTSLKNNGIQVYGDVVMNHKGGADATEMVRAVEVNPNNRNQEVTGEYTIEAWTRFDFPGRGNTHSSFKWRWYHFDGVDWDQSRRLNNRIYKFRGKAWDWEVDTEFGNYDYLMYADYDMDHPEVVNELRNWGVWYTNTLGLDGFRIDAVKHIKYSFTRDWINHVRSATGKNMFAVAEFWKNDLGAIENYLQKTNWNHSVFDVPLHYNLYNASQSGGNYDMRNIFNGTVVQRHPSHAVTFVDNHDSQPEEALESFVEPWFKPLAYALTLTREQGYPSVFYGDYYGIPTHGVPAMRSKIDPILEARQKYAYGPQHDYLDHPDVIGWTREGDSSHPKSGLATLITDGPGGSKRMYAGLKNAGETWYDITGNRSDTVKIGSDGWGEFHVNKGSVSIYVQK

SEQ ID NO: 40499 - protein, 478 aa, Bacillus sp.
NGTMMQYFEWYLPNDGNHWNRLNSDASNLKSKGITAVWIPPAWKGASQNDVGYGAYDLYDLGEFNQKGTVRTKYGTRSQLQAAVTSLKNNGIQVYGDVVMNHKGGADATEMVRAVEVNPNNRNQEVTGEYTIEAWTRFDFPGRGNTHSSFKWRWYHFDGVDWDQSRRLNNRIYKFRGKAWDWEVDTEFGNYDYLMYADYDMDHPEVVNELRNWGVWYTNTLGLDGFRIDAVKHIKYSFTRDWINHVRSATGKNMFAVAEFWGGDLGAIENYLQKTNWNHSVFDVPLHYNLYNASKSGGNYDMRNIFNGTVVQRHPSHAVTFVDNHDSQPEEALESFVEEWFKPLAYALTLTREQGYPSVFYGDYYGIPTHGVPAMRSKIDPILEARQKYAYGPQHDYLDHPDVIGWTREGDSSHPKSGLATLITDGPGGSKRMYAGLKNAGETWYDITGNRSDTVKIGSDGWGEFHVNDGSVSIYVQK

SEQ ID NO: 40500 - protein, 478 aa, Bacillus sp.
NGTMMQYFEWYLPNDGNHWNRLNSDASNLKSKGITAVWIPPAWKAASQNDVGYGAYDLYDLGEFNQKGTVRTKYGTRSQLQAAVTSLKNNGIQVYGDVVMNHKGGADATEMVRAVEVNPNNRNQEVTGEYTIEAWTRFDFPGRGNTHSSFKWRWYHFDGVDWDQSRRFENRIYKFRGKAWDWEVDTEFGNYDYLMYADYDMDHPEVVNELRNWGVWYTNTLGLDGFRIDAVKHIKYSFTRDWINHVRSATGKNMFAVAEFWKNDLGAIENYLQKTNWNHSVFDVPLHYNLYNASKSGGNYDMRNIFNGTVVQRHPSHAVTFVDNHDSQPEEALESFVEEWFKPLAYALTLTREQGYPSVFYGDYYGIPTHGVPAMRSKIDPILEARQKYAYGPQHDYLDHPDVIGWTREGDSSHPKSGLATLITDGPGGSKRMYAGLKNAGETWYDITGNRSDTVKIGSDGWGEFHVNDGSVSIYVQK

SEQ ID NO: 40501 - protein, 478 aa, Bacillus sp.
NGTMMQYFEWYLPNDGNHWNRLNSDASNLKSKGITAVWIPPAWKGASQNDVGYGAYDLYDLGEFNQKGTVRTKYGTRSQLQAAVTSLKNNGIQVYGDVVMNHKGGADATEMVRAVEVNPNNRNQEVTGEYTIEAWTRFDFPGRGNTHSSFKWRWYHFDGVDWDQSRRLNNRIYKFRGKAWDWEVDTEFGNYDYLMYADYDMDHPEVVNELRNWGVWYTNTLGLDGFRIDAVKHIKYSFTRDWINHVRSATGKNMFAVAEFWKNDLGAIENYLQKTNWNHSVFDVPLHYNLYNASKSGGNYDMRNIFNGTVVQAHPSLAVTFVDNHDSQPEEALESFVEEWFKPLAYALTLTREQGYPSVFYGDYYGIPTHGVPAMRSKIDPILEARQKYAYGPQHDYLDHPDVIGWTREGDSSHPKSGLATLITDGPGGSKRMYAGLKNAGETWYDITGNRSDTVKIGSDGWGEFHVNDGSVSIYVQK

SEQ ID NO: 40502 - protein, 478 aa, Bacillus sp.
NGTMMQYFEWYLPNDGNHWNRLNSDASNLKSKGITAVWIPPAWKGASQNDVGYGAYDLYDLGEFNQKGTVRTKYGTRSQLQAAVTSLKNNGIQVYGDVVMNHKGGADATEMVRAVEVNPNNRNQEVTGEYTIEAWTRFDFPGRGNTHSSFKWRWYHFDGVDWDQSRRLNNRIYKFRGKAWDWEVDTEFGNYDYLMYADYDMDHPEVVNELRNWGVWYTNTLGLDGFRIDAVKHIKYSFTRDWINHVRSATGKNMFAVAEFWKNDLGAISNYLQKTNWNHSVFDVPLHYNLYNASKSGGNYDMRNIFNGTVVQRHPSHAVTFVDNHDSQPEEALESFVEEWFKPLAYALTLTREQGYPSVFYGDYYGIPTHGVPAMRSKIDPILEARQKYAYGPQHDYLDHPDVIGWTREGDSSHPKSGLATLITDGPGGSKRMYAGLKNAGETWYDITGNRSDTVKIGSDGWGEFHVNDGSVSIYVQK

SEQ ID NO: 40503 - protein, 478 aa, Bacillus sp.
NGTMMQYFEWYLPNDGNHWNRLNSDASNLKSKGITAVWIPPAWKATSQNDVGYGAYDLYDLGEFNQKGTVRTKYGTRSQLQAAVTSLKNNGIQVYGDVVMNHKGGADATEMVRAVEVNPNNRNQEVTGEYTIEAWTRFDFPGRGNTHSSFKWRWYHFDGVDWDQSRRFTNRIYKFRGKAWDWEVDTEFGNYDYLMYADYDMDHPEVVNELRNWGVWYTNTLGLDGFRIDAVKHIKYSFTRDWINHVRSATGKNMFAVAEFWKNDLGAIENYLQKTNWNHSVFDVPLHYNLYNASKSGGNYDMRNIFNGTVVQRHPSHAVTFVDNHDSQPEEALESFVEEWFKPLAYALTLTREQGYPSVFYGDYYGIPTHGVPAMRSKIDPILEARQKYAYGPQHDYLDHPDVIGWTREGDSSHPKSGLATLITDGPGGSKRMYAGLKNAGETWYDITGNRSDTVKIGSDGWGEFHVNDGSVSIYVQK

SEQ ID NO: 40504 - protein, 478 aa, Bacillus sp.
NGTMMQYFEWYLPNDGNHWNRLNSDASNLKSKGITAVWIPPSWKAASQNDVGYGAYDLYDLGEFNQKGTVRTKYGTRSQLQAAVTSLKNNGIQVYGDVVMNHKGGADATEMVRAVEVNPNNRNQEVTGEYTIEAWTRFDFPGRGNTHSSFKWRWYHFDGVDWDQSRKFDNRIYKFRGKAWDWEVDTEFGNYDYLMYADYDMDHPEVVNELRNWGVWYTNTLGLDGFRIDAVKHIKYSFTRDWINHVRSATGKNMFAVAEFWKNDLGAIENYLQKTNWNHSVFDVPLHYNLYNASKSGGNYDMRNIFNGTVVQRHPSHAVTFVDNHDSQPEEALESFVEEWFKPLAYALTLTREQGYPSVFYGDYYGIPTHGVPAMRSKIDPILEARQKYAYGPQHDYLDHPDVIGWTREGDSSHPKSGLATLITDGPGGSKRMYAGLKNAGETWYDITGNRSDTVKIGSDGWGEFHVNDGSVSIYVQK

SEQ ID NO: 40505 - protein, 478 aa, Bacillus sp.
NGTMMQYFEWYLPNDGNHWNRLNSDASNLKSKGITAVWIPPAWKGASQNDVGYGAYDLYDLGEFNQKGTVRTKYGTRSQLQAAVTSLKNNGIQVYGDVVMNHKGGADATEMVRAVEVNPNNRNQEVTGEYTIEAWTRFDFPGRGNTHSSFKWRWYHFDGVDWDQSRRLNNRIYKFRGKAWDWEVDTEFGNYDYLMYADYDMDHPEVVNELRNWGVWYTNTLGLDGFRIDAVKHIKYSFTRDWINHVRSATGKNMFAVAEFWKNDLGAIENYLQKTNWNHSVFDVPLHYNLYNASKSGGNYDMRNIFNGTVVQRHPSHAVTFVDNHDSQPEEALESFVEEWFKPLAYALTLTREQGYPSVFYGDYYGIPTHGVPAMRSKIDPILEARQKYAYGPQHDYLDHPDVIGWTREGLSSHPKSGLATLITDGPGGSKRMYAGLKNAGETWYDITGNRSDTVKIGSDGWGEFHVNDGSVSIYVQK

SEQ ID NO: 40506 - protein, 478 aa, Bacillus sp.
NGTMMQYFEWYLPNDGNHWNRLNSDASNLKSKGITAVWIPPAWKGASQNDVGYGAYDLYDLGEFNQKGTVRTKYGTRSQLQAAVTSLKNNGIQVYGDVVMNHKGGADATEMVRAVEVNPNNRNQEVTGEYTIEAWTRFDFPGRGNTHSSFKWRWYHFDGVDWDQSRRLNNRIYKFRGKAWDWEVDTEFGNYDYLMYADYDMDHPEVVNELRNWGVWYTNTLGLDGFRIDAVKHIKYSFTRDWINHVRSATGKNMFAVAEFWKNDLGAIENYLQKTNWNHSVFDVPLHYNLYNASKSAGNYDMRNIFNGTVVQRHPSHAVTFVDNHDSQPEEALESFVETWFKPLAYALTLTREQGYPSVFYGDYYGIPTHGVPAMRSKIDPILEARQKYAYGPQHDYLDHPDVIGWTREGDSSHPKSGLATLITDGPGGSKRMYAGLKNAGETWYDITGNRSDTVKIGSDGWGEFHVNGGSVSIYVQK

SEQ ID NO: 40507 - protein, 478 aa, Bacillus sp.
NGTMMQYFEWYLPNDGNHWNRLNSDASNLKSKGITAVWIPPAWKGASQNDVGYGAYDLYDLGEFNQKGTVRTKYGTRSQLQAAVTSLKNNGIQVYGDVVMNHKGGADATEMVRAVEVNPNNRNQEVTGEYTIEAWTRFDFPGRGNTHSSFKWRWYHFDGVDWDQSREFDNRIYKFRGKAWDWEVDTEFGNYDYLMYADYDMDHPEVVNELRNWGVWYTNTLGLDGFRIDAVKHIKYSFTRDWINHVRSATGKNMFAVAEFWKNDLGAIENYLQKTNWNHSVFDVPLHYNLYNASKSGGNYDMRNIFNGTVVQRHPSHAVTFVDNHDSQPEEALESFVDPWFKPLAYALTLTREQGYPSVFYGDYYGIPTHGVPAMRSKIDPILEARQKYAYGPQHDYLDHPDVIGWTREGDSSHPKSGLATLITDGPGGSKRMYAGLKNAGETWYDITGNRSDTVKIGSDGWGEFHVNGGSVSIYVQK

SEQ ID NO: 40508 - protein, 478 aa, Bacillus sp.
NGTMMQYFEWYLPNDGNHWNRLNSDASNLKSKGITAVWIPPAWKGASQNDVGYGAYDLYDLGEFNQKGTVRTKYGTRSQLQAAVTSLKNNGIQVYGDVVMNHKGGADATEMVRAVEVNPNNRNQEVTGEYTIEAWTRFDFPGRGNTHSSFKWRWYHFDGVDWDQSRRLNNRIYKFRGKAWDWEVDTEFGNYDYLMYADYDMDHPEVVNELRNWGVWYTNTLGLDGFRIDAVKHIKYSFTRDWINHVRSATGKNMFAVAEFWKNDLGAIENYLQKTNWNHSVFDVPLHYNLYNASKSGGNYDMRNIFNGTVVQRHPSHAVTFVDNHDSQPEEALESFVEEWFKPLAYALTLTREQGYPSVFYGDYYGIPTHGVPAMRSKIDPILEARQKYAYGPQHDYLDHPDVIGWTREGDSSHPNSGLATLITDGPGGSKRMYAGLKNAGETWYDITGNRSDTVKIGSDGWGEFHVNDGSVSIYVQK

SEQ ID NO: 40509 - protein, 478 aa, Bacillus sp.
NGTMMQYFEWYLPNDGNHWNRLNSDASNLKSKGITAVWIPPAWKGASQNDVGYGAYDLYDLGEFNQKGTVRTKYGTRSQLQAAVTSLKNNGIQVYGDVVMNHKGGADATEMVRAVEVNPNNRNQEVTGEYTIEAWTRFDFPGRGNTHSSFKWRWYHFDGVDWDQSRRLNNRIYKFRGKAWDWEVDTEFGNYDYLMYADYDMDHPEVSNELRNWGVWYTNTLGLDGFRIDAVKHIKYSFTRDWINHVRSATGKNMFAVAEFWKNDLGAIENYLQKTNWNHSVFDVPLHYNLYNASKSGGNYDMRNIFNGTVVQRHPSHAVTFVDNHDSQPEEALESFVEEWFKPLAYALTLTREQGYPSVFYGDYYGIPTHGVPAMRSKIDPILEARQKYAYGPQHDYLDHPDVIGWTREGDSSHPKSGLATLITDGPGGSKRMYAGLKNAGETWYDITGNRSDTVKIGSDGWGEFHVNDGSVSIYVQK

SEQ ID NO: 40510 - protein, 478 aa, Bacillus sp.
NGTMMQYFEWYLPNDGNHWNRLNSDASNLKSKGITAVWIPPAWKGASQNDVGYGAYDLYDLGEFNQKGTVRTKYGTRSQLQAAVTSLKNNGIQVYGDVVMNHKGGADATEMVRAVEVNPNNRNQEVTGEYTIEAWTRFDFPGRGNTHSSFKWRWYHFDGVDLDQSRRLNNRIYKFRGKAWDWEVDTEFGNYDYLMYADYDMDHPEVVNELRNWGVWYTNTLGLDGFRIDAVKHIKYSFTRDWINHVRSATGKNMFAVAEFWKNDLGAIENYLQKTNWNHSVFDVPLHYNLYNASKSGGNYDMRNIFNGTVVQRHPSHAVTFVDNHDSQPEEALESFVEEWFKPLAYALTLTREQGYPSVFYGDYYGIPTHGVPAMRSKIDPILEARQKYAYGPQHDYLDHPDVIGWTREGDSSHPKSGLATLITDGPGGSKRMYAGLKNAGETWYDITGNRSDTVKIGSDGWGEFHVNDGSVSIYVQK

SEQ ID NO: 40511 - protein, 478 aa, Bacillus sp.
NGTMMQYFEWYLPNDGNHWNRLNSDASNLKSKGITAVWIPPAWKGASQNDVGYGAYDLYDLGEFNQKGTVRTKYGTRSQLQAAVTSLKNNGIQVYGDVVMNHKGGADATEMVRAVEVNPNNRNQEVTGEYTIEAWTRFDFPGRGNTHSSFKWRWYHFDGVDWDQSRRLNNRIYKFRGKAWDWEVDTEFGNYDYLMYADYDMDHPEVVNELRNWGVWYTNTLGLDGFRIDAVKHIKYSFTRDWINHVRSATGKNMFAVAEFWKNDLGAIENYLQKTNWNHSVFDVPLHYNLYNASKSGGNYDMRNIFNGTVVQRVPSHAVTFVDNHDSQPEEALESFVEEWFKPLAYALTLTREQGYPSVFYGDYYGIPTHGVPAMRSKIDPILEARQKYAYGPQHDYLDHPDVIGWTREGDSSHPKSGLATLITDGPGGSKRMYAGLKNAGETWYDITGNRSDTVKIGSDGWGEFHVNDGSVSIYVQK

SEQ ID NO: 40512 - protein, 478 aa, Bacillus sp.
NGTMMQYFEWYLPNDGNHWNRLNSDASNLKSKGITAVWIPPAWKGVSQNDVGYGAYDLYDLGEFNQKGTVRTKYGTRSQLQAAVTSLKNNGIQVYGDVVMNHKGGADATEMVRAVEVNPNNRNQEVTGEYTIEAWTRFDFPGRGNTHSSFKWRWYHFDGVDWDQSRRLQNRIYKFRGKAWDWEVDTEFGNYDYLMYVDYDMDHPEVVNELRNWGVWYTNTLGLDGFRIDAVKHIKYSFTRDWINHVRSATGKNMFAVAEFWKNDLGAIENYLQKTNWNHSVFDVPLHYNLYNASKSGGNYDMRNIFNGTVVQRHPSHAVTFVDNHDSQPEEALESFVEEWFKPLAYALTLTREQGYPSVFYGDYYGIPTHGVPAMRSKIDPILEARQKYAYGPQHDYLDHPDVIGWTREGDSSHPKSGLATLITDGPGGSKRMYAGLKNAGETWYDITGNRSDTVKIGSDGWGEFHVNDGSVSIYVQK

SEQ ID NO: 40513 - protein, 478 aa, Bacillus sp.
NGTMMQYFEWYLPNDGNHWNRLNSDASNLKSKGITAVWIPPAWKGVSQNDVGYGAYDLYDLGEFNQKGTVRTKYGTRSQLQAAVTSLKNNGIQVYGDVVMNHKGGADATEMVRAVEVNPNNRNQEVTGEYTIEAWTRFDFPGRGNTHSSFKWRWYHFDGVDWDQSRQLNNRIYKFRGKAWDWEVDTEFGNYDYLMYVDYDMDHPEVVNELRNWGVWYTNTLGLDGFRIDAVKHIKYSFTRDWINHVRSATGKNMFAVAEFWKNDLGAIENYLQKTNWNHSVFDVPLHYNLYNASKSGGNYDMRNIFNGTVVQRHPSHAVTFVDNHDSQPEEALESFVEEWFKPLAYALTLTREQGYPSVFYGDYYGIPTHGVPAMRSKIDPILEARQKYAYGPQHDYLDHPDVIGWTREGDSSHPKSGLATLITDGPGGSKRMYAGLKNAGETWYDITGNRSDTVKIGSDGWGEFHVNDGSVSIYVQK

SEQ ID NO: 40514 - protein, 478 aa, Bacillus sp.
NGTMMQYFEWYLPNDGNHWNRLNSDASNLKSKGITAVWIPPAWKATSQNDVGYGAYDLYDLGEFNQKGTVRTKYGTRSQLQAAVTSLKNNGIQVYGDVVMNHKGGADATEMVRAVEVNPNNRNQEVTGEYTIEAWTRFDFPGRGNTHSSFKWRWYHFDGVDWDQSRQLENRIYKFRGKAWDWEVDTEFGNYDYLMYADYDMDHPEVVNELRNWGVWYTNTLGLDGFRIDAVKHIKYSFTRDWINHVRSATGKNMFAVAEFWKNDLGAIENYLQKTNWNHSVFDVPLHYNLYNASKSGGNYDMRNIFNGTVVQRHPSHAVTFVDNHDSQPEEALESFVEEWFKPLAYALTLTREQGYPSVFYGDYYGIPTHGVPAMRSKIDPILEARQKYAYGPQHDYLDHPDVIGWTREGDSSHPKSGLATLITDGPGGSKRMYAGLKNAGETWYDITGNRSDTVKIGSDGWGEFHVNDGSVSIYVQK

SEQ ID NO: 40515 - protein, 478 aa, Bacillus sp.
NGTMMQYFEWYLPNDGNHWNRLNSDASNLKSKGITAVWIPPAWKGASQNDVGYGAYDLYDLGEFNQKGTVRTKYGTRSQLQAAVTSLKNNGIQVYGDVVMNHKGGADATEMVRAVEVNPNNRNQEVTGEYTIEAWTRFDFPGRGNTHSSFKWRWQHFDGVDWDQSRRLNNRIYKFRGKAWDWEVDTEFGNYDYLMYADYDMDHPEVVNELRNWGVWYTNTLGLDGFRIDAVKHIKYSFTRDWINHVRSATGKNMFAVAEFWKNDLGAIENYLQKTNWNHSVFDVPLHYNLYNASKSGGNYDMRNIFNGTVVQRHPSHAVTFVDNHDSQPEEALESFVEEWFKPLAYALTLTREQGYPSVFYGDYYGIPTHGVPAMRSKIDPILEARQKYAYGPQHDYLDHPDVIGWTREGDSSHPKSGLATLITDGPGGSKRMYAGLKNAGETWYDITGNRSDTVKIGSDGWGEFHVNDGSVSIYVQK

SEQ ID NO: 40516 - protein, 478 aa, Bacillus sp.
NGTMMQYFEWYLPNDGNHWNRLNSDASNLKSKGITAVWIPPAWKGASQNDVGYGAYDLYDLGEFNQKGTVRTKYGTRSQLQAAVTSLKNNGIQVYGDVVMNHKGGADATEMVRAVEVNPNNRNQEVTGEYTIEAWTRFDFPGRGNTHSSFKWRWYHFDGVDWDQSRRLNNRIYKFRGKAWDWEVDTEFGNYDYLMYADYDMDHPEVVNELRNWGVWYTNTLGLDGFRIDAVKHIKYSFTRDWINHVRSATGKNMFAVAEFWKNDLGAIENYLQKTNWNHSVFDVPLHYNLYNASKSGGNYDMRNIFNGTVVQRHPSHAVTFVDNHDSQPEEALESFVDEWFKPLAYALTLTREQGYPSVFYGDYYGIPTHGVPAMRSKIDPILEARQKYAYGPQHDYLDHPDVIGWTREGDSSHPKSGLATLITDGPGGSKRMYAGLKNAGETWYDITGNRSDTVKIGSDGWGEFHVNQGSVSIYVQK

SEQ ID NO: 40517 - protein, 478 aa, Bacillus sp.
NGTMMQYFEWYLPNDGNHWNRLNSDASNLKSKGITAVWIPPAWKGASQNDVGYGAYDLYDLGEFNQKGTVRTKYGTRSQLQAAVTSLKNNGIQVYGDVVMNHKGGADATEMVRAVEVNPNNRNQEVTGEYTIEAWTRFDFPGRGNTHSSFKWRWYHFDGVDWDQSRRLNNRIYKFRGKAWDWEVDTEFGNYDYLMYADYDMDHPEVVNELRNWGVWYTNTLGLDGFRIDAVKHIKYSFTRDWINHVRSATGKNMFAVAEFWKNDLGAIENYLQKTNWNHSVFDVPLHYNLYNASKSGGNYDMRNIFNGTVVQRHPSHAVTFVDNHDSQPEEALESFVDTWFKPLAYALTLTREQGYPSVFYGDYYGIPTHGVPAMRSKIDPILEARQKYAYGPQHDYLDHPDVIGWTREGDSSHPKSGLATLITDGPGGSKRMYAGLKNAGETWYDITGNRSDTVKIGSDGWGEFHVNGKSVSIYVQK

SEQ ID NO: 40518 - protein, 478 aa, Bacillus sp.
NGTMMQYFEWYLPNDGNHWNRLNSDASNLKSKGITAVWIPPAWKGASQNDVGYGAYDLYDLGEFNQKGTVRTKYGTRSQLQAAVTSLKNNGIQVYGDVVMNHKGGADATEMVRAVEVNPNNRNQEVTGEYTIEAWTRFDFPGRGNTHSSFKWRWYHFDGVDWDQSRRLNNRIYKFRGKAWDWEVDTEFGNYDYLMYADYDMDHAEVVNELRNWGVWYTNTLGLDGFRIDAVKHIKYSFTRDWINHVRSATGKNMFAVAEFWKNDLGAIENYLQKTNWNHSVFDVPLHYNLYNASKSGGNYDMRNIFNGTVVQRHPSHAVTFVDNHDSQPEEALESFVEEWFKPLAYALTLTREQGYPSVFYGDYYGIPTHGVPAMRSKIDPILEARQKYAYGPQHDYLDHPDVIGWTREGDSSHPKSGLATLITDGPGGSKRMYAGLKNAGETWYDITGNRSDTVKIGSDGWGEFHVNDGSVSIYVQK

SEQ ID NO: 40519 - protein, 478 aa, Bacillus sp.
NGTMMQYFEWYLPNDGNHWNRLNSDASNLKSKGITAVWIPPAWKGASQNDVGYGAYDLYDLGEFNQKGTVRTKYGTRSQLQAAVTSLKNNGIQVYGDVVMNHKGGADATEMVRAVEVNPNNRNQEVTGEYTIEAWTRFDFPGRGNTHSSFKWRWYHFDGVDWDQSRRLNNRIYKFRPKAWEWEVDTENGNYDYLMYADIDMDHPEVVNELRNWGVWYTNTLGLDGFRIDAVKHIKYSFTRDWINHVRSATGKNMFAVAEFWKNDLGAIENYLQKTNWNHSVFDVPLHYNLYNASKSGGNYDMRNIFNGTVVQRHPSHAVTFVDNHDSQPEEALESFVEEWFKPLAYALTLTREQGYPSVFYGDYYGIPTHGVPAMRSKIDPILEARQKYAYGPQHDYLDHPDVIGWTREGDSSHPKSGLATLITDGPGGSKRMYAGLKNAGETWYDITGNRSDTVKIGSDGWGEFHVNDGSVSIYVQK

SEQ ID NO: 40520 - protein, 478 aa, Bacillus sp.
NGTMMQYFEWYLPNDGNHWNRLNSDASNLKSKGITAVWIPPAWKAVSQNDVGYGAYDLYDLGEFNQKGTVRTKYGTRSQLQAAVTSLKNNGIQVYGDVVMNHKGGADATEMVRAVEVNPNNRNQEVTGEYTIEAWTRFDFPGRGNTHSSFKWRWYHFDGVDWDQSRELSNRIYKFRGKAWDWEVDTEFGNYDYLMYADYDYDHPESTNEMRNWGVWYTNTLGLDGFRIDAVKHIKYSFTRDWINHVRSATGKNMFAVAEFWKNDLGAIENYLQKTNWNHSVFDVPLHYNLYNASKSGGNYDMRNIFNGTVVQRHPSHAVTFVDNHDSQPEEALESFVEEWFKPLAYALTLTREQGYPSVFYGDYYGIPTHGVPAMRSKIDPILEARQKYAYGPQHDYLDHPDVIGWTREGDSSHPKSGLATLITDGPGGSKRMYAGLKNAGETWYDITGNRSDTVKIGSDGWGEFHVNDGSVSIYVQK

SEQ ID NO: 40521 - protein, 478 aa, Bacillus sp.
NGTMMQYFEWYLPNDGNHWNRLNSDASNLKSKGITAVWIPPAWKGASQNDVGYGAYDLYDLGEFNQKGTVRTKYGTRSQLQAAVTSLKNNGIQVYGDVVMNHKGGADATEMVRAVEVNPNNRNQEVTGEYTIEAWTRFDFPGRGNTHSSFKWRWYHFDGVDWDQSRRLNNRIYKFRGKAWDWEVDTEFGNYDYLMYADYDMDHPEVVNELRNWGVWYTNTLGLDGFRIDAVKHIKYSFTRDWINHVRSATGKNMFAVAEFWKNDLGAIENYLQKTNWNHSVFDVPLHYNLYNASKSGGNYDMRNIFNGTVVQRHPSHAVTFVDNHDSQPEEALESFVDPWFKPLAYALTLTREQGYPSVFYGDYYGIPTHGVPAMRSKIDPILEARQKYAYGPQHDYLDHPDVIGWTREGDSSHPKSGLATLITDGPGGSKRMYAGLKNAGETWYDITGNRSDTVKIGSDGWGEFHVNDKSVSIYVQK

SEQ ID NO: 40522 - protein, 478 aa, Bacillus sp.
NGTMMQYFEWYLPNDGNHWNRLNSDASNLKSKGITAVWIPPAWKGASQNDVGYGAYDLYDLGEFNQKGTVRTKYGTRSQLQAAVTSLKNNGIQVYGDVVMNHKGGADATEMVRAVEVNPNNRNQEVTGEYTIEAWTRFDFPGRGNTHSSFKWRWYHFDGVDWDQSRRLNNRIYKFRGKAWDWEVDTEFGNYDYLMYADYDMDHPEVVNELRNWGVWYTNTLGLDGFRIDAVKHIKYSFTRDWINHVRSATGKNMFAVAEFWKNDLGAIENYLQKTNWNHSVFDVPLHYNLYNASKSGGNYDMRNIFNGTVVQSHPMLAVTFVDNHDSQPEEALESFVEEWFKPLAYALTLTREQGYPSVFYGDYYGIPTHGVPAMRSKIDPILEARQKYAYGPQHDYLDHPDVIGWTREGDSSHPKSGLATLITDGPGGSKRMYAGLKNAGETWYDITGNRSDTVKIGSDGWGEFHVNDGSVSIYVQK

SEQ ID NO: 40523 - protein, 478 aa, Bacillus sp.
NGTMMQYFEWYLPNDGNHWNRLNSDASNLKSKGITAVWIPPAWKGASQNDVGYGAYDLYDLGEFNQKGTVRTKYGTRSQLQAAVTSLKNNGIQVYGDVVMNHKGGADATEMVSAVEVNPNNRNQEVTGDYTIEAWTRFDFPGRGNTHSSFKWRWYHFDGVDWDQSRRLNNRIYKFRGKAWDWEVDTEFGNYDYLMYADYDMDHPEVVNELRNWGVWYTNTLGLDGFRIDAVKHIKYSFTRDWINHVRSATGKNMFAVAEFWKNDLGAIENYLQKTNWNHSVFDVPLHYNLYNASKSGGNYDMRNIFNGTVVQRHPSHAVTFVDNHDSQPEEALESFVEEWFKPLAYALTLTREQGYPSVFYGDYYGIPTHGVPAMRSKIDPILEARQKYAYGPQHDYLDHPDVIGWTREGDSSHPKSGLATLITDGPGGSKRMYAGLKNAGETWYDITGNRSDTVKIGSDGWGEFHVNDGSVSIYVQK

SEQ ID NO: 40524 - protein, 478 aa, Bacillus sp.
NGTMMQYFEWYLPNDGNHWNRLNSDASNLKSKGITAVWIPPAWKGASQNDVGYGAYDLYDLGEFNQKGTVRTKYGTRSQLQAAVTSLKNNGIQVYGDVVMNHKGGADATEMVRAVEVNPNNRNQEVTGEYTIEAWTRFDFPGRGNTHSSFKWRWYHFDGVDWDQSRRLNNRIYKFRGKAWDWEVDTENGFYDYLMYADIDYDYPEVVNTLRVWGVWYTNTLGLDGFRIDAVKHIKYSFTRDWINHVRSATGKNMFAVAEFWKNDLGAIENYLQKTNWNHSVFDVPLHYNLYNASKSGGNYDMRNIFNGTVVQRHPSHAVTFVDNHDSQPEEALESFVEEWFKPLAYALTLTREQGYPSVFYGDYYGIPTHGVPAMRSKIDPILEARQKYAYGPQHDYLDHPDVIGWTREGDSSHPKSGLATLITDGPGGSKRMYAGLKNAGETWYDITGNRSDTVKIGSDGWGEFHVNDGSVSIYVQK

SEQ ID NO: 40525 - protein, 478 aa, Synthetic construct
NGTMMQYFEWYLPNDGNHWNRLNSDASNLKSKGITAVWIPPAWKGASQNDVGYGAYDLYDLGEFNQKGTVRTKYGTRSQLQAAVTSLKNNGIQVYGDVVMNHKGGADATEMVRAVEVNPNNRNQEVTGEYTIEAWTRFDFPGRGNTHSSFKWRWYHFDGVDWDQSRRLNNRIYKFRGKAWDWEVDTEFGNYDYLMYADYDMDYPEVVNELRNWGVWYTNTLGLDGFRIDAVKHIKYSFTRDWINHVRSATGKNMFAVAEFWKNDLGAIENYLQKTNWNHSVFDVPLHYNLYNASKSGGNYDMRNIFNGTVVQRHPSHAVTFVDNHDSQPEEALESFVEEWFKPLAYALTLTREQGYPSVFYGDYYGIPTHGVPAMRSKIDPILEARQKYAYGPQHDYLDHPDVIGWTREGDSSHPKSGLATLITDGPGGSKRMYAGLKNAGETWYDITGNRSDTVKIGSDGWGEFHVNDGSVSIYVQK

SEQ ID NO: 40526 - protein, 482 aa, Bacillus sp.
HHNGTNGTMMQYFEWDLPNDGTLWNRLHNNAQNLKNAGITALWLPPAYKGTSQSDVGYGVYDLYDLGEFNQKGTIRTKYGTKTQLERAIRSLKANGIQVYADVVFNHKAGADGTEFVDAVEVDPSNRNQEVSGTYQIEAWTKFDFPGRGNTYSSFKWRWYHFDGTDWDESRKLNRIYKFRGKAWDWEVDTENGNYDYLMFADLDMDHPEVVTELKNWGTWYVNTTNIDGFRLDAVKHIKFSFMRDWLTYVRNQTGKNLFAVGEFWKNDLGALENYITKTNGSMSLFDAPLHNNFYTASKSSGNFDMRNLLNGTLVQRHPSHAVTLVDNHDTQPGQSLQSWVEPWFKPLAYAFILTRQEGYPCVFYGDYYGIPKYNIPGLKSKIDPLLIARRDYAYGTQRDYIDHQDIIGWTREGIDTKPNSGLAALITDGPGGSKWMYVGKKHAGKVFYDLTGNRSDTVTINADGWGEFKVKGGSVSIWVAK

SEQ ID NO: 40527 - protein, 482 aa, Cytophaga sp.
NGTMMQYFEWYVPNDGQQWNRLRTDAPYLSSVGITAVWTPPAYKGTSQADVGYGPYDLYDLGEFNQKGTVRTKYGTKGELKSAVNTLHSNGIQVYGDVVMNHKAGADYTENVTAVEVNPSNRYQETSGHYNIQAWTGFNFPGRGTTYSNWKWQWFHFDGTDWDESRSLSRIFKFDGTGKAWDWEVSSENGNYDYLMYYDIDYDHPDVVNEMKKWGVWYANEVGLDGYRLDAVKHIQFSFLKDWVDNARAATGKEMFTVGEYWQNDLGALNNFLAKVNYNQSLFDAPLHYNFYAASTGGGYYDMRNILNNTLVASNPTKAVTLVENHDTQPGQSLESTVQPWFKPLAYAFILTRSGGYPSVFYGDMYGTKGTTTREIPALKSKIEPLLKARKDYAYGTQRDYIDNPDVIGWTREGDSTKAKSGLATVITDGPGGSKRMYVGTSNAGEIWYDLTGNRTDKITIGSDGYATFPVNGGSVSVWVQQ

SEQ ID NO: 40528 - protein, 483 aa, Synthetic construct
NGTMMQYFEWYVPNDGQQWNRLRTDAPYLSSVGITAVWTPPAYKGTSQADVGYGPYDLYDLGEFNQKGTVRTKYGTKGELKSAVNTLHSNGIQVYGDVVMNHKGGADATEMVRAVEVNPNNRNQEVTGEYTIEAWTRFDFPGRGNTHSSFKWRWYHFDGVDWDQSRRLNNRIYKFRGHGKAWDWEVDTENGNYDYLMYADIDYDHPDVVNEMKKWGVWYANEVGLDGYRLDAVKHIKFSFLKDWVDNARAATGKEMFTVGEYWQNDLGALNNYLAKVNYNQSLFDAPLHYNFYAASTGGGYYDMRNILNNTLVASNPTKAVTLVENHDTQPGQSLESTVQPWFKPLAYAFILTRSGGYPSVFYGDMYGTKGTTTREIPALKSKIEPLLKARKDYAYGTQRDYIDNPDVIGWTREGDSTKAKSGLATVITDGPGGSKRMYVGTSNAGEIWYDLTGNRTDKITIGSDGYATFPVNGGSVSVWVQQ

SEQ ID NO: 40529 - protein, 482 aa, Cytophaga sp.
NGTMMQYFEWYVPNDGQQWNRLRTDAPYLSSVGINAVWTPPAYKGTSQADVGYGPYDLYDLGEFNQKGTVRTKYGTKGELKSAVHTLHSNGIQVYGDVVMNHKAGADYTENVTAVEVNPSNRYQEISGEYMIQAWTGFNFPGRGTTYSNWKWQWFHFDGTDWDQSRSRSRIFKFRGDGKAWDWPVSSENGNYDYLMYADYDYDHPDVVNEMKKWGVWYANEVGLDGYRLDAVKHIKFSFLKDWVDNARAATGKEMFTVGEYWQNDLGALNNYLAKVNYNQSLFDAPLHYNFYAASTGGGYYDMRNILNNTLVASNPTKAVTLVENHDTQPGQSLESTVQPWFKPLAYAFILTRSGGYPSVFYGDMYGTKGTTTREIPALKSKIEPLLKARKDYAYGTQRDYIDNPDVIGWTREGDSTKAKSGLATVITDGPGGSKRMYVGTSNAGEIWYDLTGNRTDKITIGSDGYATFPVNKESVSVWVQQ

SEQ ID NO: 40530 - protein, 488 aa, Synthetic construct
NGTMMQYFEWYVPNDGQQWNRLRTDAPYLSSVGINAVWTPPAYKGTSQADVGYGPYDLYDLGEFNQKGTVRTKYGTKGELKSAVNTLHSNGIQVYGDVVMNHKAGADGTEFVDAVEVDPSNRNQETSGTYQIQAWTKFDFPGRGNTYSSFKWRWYHFDGTDWDESRKLNRIYKFRSTGKAWDWEVDTENGNYDYLMFADLDMDHPYDYDHPDVVNEMKKWGVWYANEVGLDGYRLDAVKHIKFSFLKDWVDNARAATGKEMFTVGEYWQNDLGALNNYLAKVNYNQSLFDAPLHYNFYAASTGGGYYDMRNILNNTLVASNPTKAVTLVENHDTQPGQSLESTVQPWFKPLAYAFILTRSGGYPSVFYGDMYGTKGTTTREIPALKSKIEPLLKARKDYAYGTQRDYIDNPDVIGWTREGDSTKAKSGLATVITDGPGGSKRMYVGTSNAGEIWYDLTGNRTDKITIGSDGYATFPVNKESVSVWVQQ

SEQ ID NO: 40531 - protein, 483 aa, Synthetic construct
NGTMMQYFEWYVPNDGQQWNRLRTDAPYLSSVGITAVWTPPAYKGTSQADVGYGPYDLYDLGEFNQKGTVRTKYGTKGELKSAVNTLHSNGIQVYGDVVMNHKGGADFTERVQAVEVNPQNRNQEVSGTYQIEAWTGFNFPGRGNQHSSFKWRWYHFDGTDWDQSRQLANRIYKFRGDGKAWDWEVDTENGNYDYLMYADVDYDHPDVVNEMKKWGVWYANEVGLDGYRLDAVKHIKFSFLKDWVDNARAATGKEMFTVGEYWQNDLGALNNYLAKVNYNQSLFDAPLHYNFYAASTGGGYYDMRNILNNTLVASNPTKAVTLVENHDTQPGQSLESTVQPWFKPLAYAFILTRSGGYPSVFYGDMYGTKGTTTREIPALKSKIEPLLKARKDYAYGTQRDYIDNPDVIGWTREGDSTKAKSGLATVITDGPGGSKRMYVGTSNAGEIWYDLTGNRTDKITIGSDGYATFPVNGGSVSVWVQQ

SEQ ID NO: 40532 - protein, 480 aa, Geobacillus stearothermophilus
NGTMMQYFEWHLPXDGXXWXKLXXDAXNLXXXGITAIWIPPAWKGTSXXDVGYGXYDLYDLGEFNQKGTVRTKYGTKAQXXXAIXAXXXXGMQVYADVVXXHKGGADATEXVXAVEVNPXXRNQEISGXYXIXAWTKFDFPGRGNTYSXFKWRWYHFDGVDWDXSRQXXXRIYKFRGXGKAWDWEVDSENGNYDYLMYADLDMDHPEVVXELKXWGXWYXNTXNIDGFRIDAVKHIKFSFXXDWLSHVRXXTGKXLFXVAEFWXXDIXXLXNYIXKTNXXXSLFDXPLHXXXYXASXSGGXFDMXXLLXXTLMXXXPXXAVTFVDNHDSXPGXALXSFVXXWFKPLAYAXILTRXXGYPXVFYGDYYGIPXHXIPALKAKIDPILXARXXFAYGTQHDYXDHXXIIGWTREGXTXXPXSGLAXIISDGPGGXKWMYVGXNXAGXVFHDITGNKXXTVTINADGWAXFXVNGGSVSIWVXR

SEQ ID NO: 40533 - protein, 480 aa, Geobacillus stearothermophilus
NGTMMQYFEWHLPDDGTLWTKLANDANNLSSLGITAIWIPPAWKGTSRSDVGYGVYDLYDLGEFNQKGTVRTKYGTKAQYLQAIQAAHAAGMQVYADVVFDHKGGADATEWVDAVEVNPSDRNQEISGTYQIQAWTKFDFPGRGNTYSSFKWRWYHFDGVDWDESRQKLSRIYKFRGIGKAWDWEVDSENGNYDYLMYADLDMDHPEVVTELKNWGKWYVNTTNIDGFRIDAVKHIKFSFFPDWLSHVRSQTGKPLFTVAEFWSYDINKLHNYITKTNGTMSLFDAPLHNKFYTASKSGGAFDMRTLLTNTLMKDQPTLAVTFVDNHDSEPGQALQSFVDPWFKPLAYAFILTRQEGYPCVFYGDYYGIPQHNIPALKAKIDPILIARRDFAYGTQHDYLDHSDIIGWTREGVTEKPGSGLAAIISDGPGGSKWMYVGKNHAGKVFHDITGNKSDTVTINADGWAEFKVNGGSVSIWVPR

SEQ ID NO: 40534 - protein, 480 aa, Synthetic construct
NGTMMQYFEWYLPNDGNHWNRLNSDASNLKSKGITAVWIPPAWKGASQNDVGYGAYDLYDLGEFNQKGTVRTKYGTRSQLQAAVTSLKNNGIQVYGDVVMNHKGGADATEMVRAVEVNPNNRNQEVTGEYTIEAWTRFDFPGRGNTHSSFKWRWYHFDGVDWDQSRRLNNRIYKFRGHGKAWDWEVDTENGNYDYLMYADIDMDHPEVVNELRNWGVWYTNTLGLDGFRIDAVKHIKYSFTRDWINHVRSATGKNMFAVAEFWKNDLGAIENYLQKTNWNHSVFDVPLHYNLYNASKSGGNYDMRNIFNGTVVQRHPSHAVTFVDNHDSQPEEALESFVEEWFKPLAYALTLTREQGYPSVFYGDYYGIPQHGVPAMRSKIDPILEARQKYAYGPQHDYLDHPDVIGWTREGDSSHPKSGLATLITDGPGGSKRMYAGLKNAGETWYDITGNRSDTVKIGSDGWGEFHVNDGSVSIYVQK

SEQ ID NO: 40535 - protein, 480 aa, Synthetic construct
NGTMMQYFEWYLPNDGNHWNRLNSDASNLKSKGITAVWIPPAWKGASQNDVGYGAYDLYDLGEFNQKGTVRTKYGTRSQLQAAVTSLKNNGIQVYGDVVMNHKGGADATEMVRAVEVNPNNRNQEVTGEYTIEAWTRFDFPGRGNTHSSFKWRWYHFDGVDWDQSRRLNNRIYKFRGHGKAWDWEVDTENGNYDYLMYADIDMDHPEVVNELRNWGVWYTNTLGLDGFRIDAVKHIKYSFTRDWINHVRSATGKNMFAVAEFWKNDLGAIENYLQKTNWNHSVFDVPLHYNLYNASKSGGNYDMRNIFNGTVVQRHPSHAVTFVDNHDSQPEEALESFVEEWFKPLAYALTLTREQGYPSVFYGDYYGIPTDGVPAMRSKIDPILEARQKYAYGPQHDYLDHPDVIGWTREGDSSHPKSGLATLITDGPGGSKRMYAGLKNAGETWYDITGNRSDTVKIGSDGWGEFHVNDGSVSIYVQK

SEQ ID NO: 40536 - protein, 480 aa, Bacillus sp.
NGTMMQYFEWYLPNDGNHWNRLNSDASNLKSKGITAVWIPPAWKGASQNDVGYGAYDLYDLGEFNQKGTVRTKYGTRSQLQAAVTSLKNNGIQVYGDVVMNHKGGADATEMVRAVEVNPNNRNQEVTGEYTIEAWTRFDFPGRGNTHSSFKWRWYHFDGVDWDQSRRLNNRIYKFRGHGKAWDWEVDTEFGNYDYLMYADYDMDHPEVVNELRNWGVWYTNTLGLDGFRIDAVKHIKYSFTRDWINHVRSATGKNMFAVAEFWKNDLGAIENYLQKTNWNHSVFDVPLHYNLYNASKSGGNYDMRNIFNGTVVQRHPSHAVTFVDNHDSQPEEALESFVEEWFKPLAYALTLTREQGYPSVFYGDYYGIPKHGVPAMRSKIDPILEARQKYAYGPQHDYLDHPDVIGWTREGDSSHPKSGLATLITDGPGGSKRMYAGLKNAGETWYDITGNRSDTVKIGSDGWGEFHVNDGSVSIYVQK

SEQ ID NO: 40537 - protein, 477 aa, Bacillus sp.
NGTMMQYFEWYLPNDGNHWNRLDSDASNLKSKGITAVWIPPAWKGASQNDVGYGAYDLYDLGEFNQKGTVRTKYGTRSQLQAAVTSLKNNGIQVYGDVVMNHKSADATEMVRPPEVNPNNRNQEVTGEYTIEAWTRFDFPGRGNTHSSFKWRWYHFDGVDWDQSRDDVSRIYKFRGKAWDWEVDTEFGNYDYLMYADYDMDHPEVVNELRNWGVWYTNTLGLDGFRIDAVKHIKYSFTRDWINHVRSATGKNMFAVAEFWKNDLGAIENYLQKTNWNHSVFDVPLHYNLYNASKSGGNYDMRNIFNGTVVQRHPSHAVTFVDNHDSQPEEALESFVEEWFKPLAYALTLTREQGYPSVFYGDYYGIPTHGVPAMRSKIDPILEARQKYAYGPQHDYLDHPDVIGWTREGDSSHPKSGLATLITDGPGGSKRMYAGLKNAGETWYDITGNRSDTVKIGSDGWGEFHVNDGSVSIYVQK

SEQ ID NO: 40538 - protein, 477 aa, Bacillus sp.
NGTMMQYFEWYLPNDGNHWNRLNSDASNLKSKGITAVWIPPAWKAASQNDVGYGAYDLYDLGEFNQKGTVRTKYGTRSQLQAAVTSLKNNGIQVYGDVVMNHKGADATEMVRAVEVNPNNRNQEVTGEYTIEAWTRFDFPGRGNTHSSFKWRWYHFDGVDFDQSRQLNNRIYKFRGKAWDWEVDTEFGNYDYLMYADYDMDHPEVVNELRNWGVWYTNTLGLDGFRIDAVKHIKYSFTRDWINHVRSATGKNMFAVAEFWKNDLGAIENYLQKTNWNHSVFDVPLHYNLYNASKSGGNYDMRNIFNGTVVQRHPSHAVTFVDNHDSQPEEALESFVEEWFKPLAYALTLTREQGYPSVFYGDYYGIPTHGVPAMRSKIDPILEARQKYAYGPQHDYLDHPDVIGWTREGDSSHPKSGLATLITDGPGGSKRMYAGLKNAGETWYDITGNRSDTVKIGSDGWGEFHVNDGSVSIYVQK

SEQ ID NO: 40539 - protein, 477 aa, Bacillus sp.
NETMMQYFEWDLPNDGTLWNRLHNNAQNLKNAGITALWLPPAYKGTSQSDVGYGVYDLYDLGEFNQKGTIRTKYGTKTQLERAIRSLKANGIQVYADVVFNHKAGADGTEFVDAVEVDPSNRNQEVSGTYQIEAWTKFDFPGRGNTYSSFKWRWYHFDGTDWDESRKLNRIYKFRGKAWDWEVDTENGNYDYLMFADLDMDHPEVVTELKNWGTWYVNTTNIDGFRLDAVKHIKFSFMRDWLTYVRNQTGKNLFAVGEFWKNDLGALENYITKTNGSMSLFDAPLHNNFYTASKSSGYFDMRNLLNGTLVQRHPSHAVTLVDNHDTQPGQSLQSWVEEWFKPLAYAFILTRQEGYPCVFYGDYYGIPKYNIPGMKSKIDPLLIARRDYAYGTQRDYIDHQDIIGWTREGIDTKPNSGLAALITDGPGGSKWMYVGKKHAGKVFYDLTGNRSDTVTINADGWGEFKVNGGSVSIWVAK

SEQ ID NO: 40540 - protein, 477 aa, Bacillus sp.
NETMMQYFEWDLPNDGTLWNRLHNNAQNLKNAGITALWLPPAYKGTSQSDVGYGVYDLYDLGEFNQKGTIRTKYGTKTQLERAIRSLKANGIQVYADVVFNHKAGADGTEFVDAVEVDPSNRNQEVSGTYQIEAWTKFDFPGRGNTYSSFKWRWYHFDGTDWDESRKLNRIYKFRGKAWDWEVDTENGNYDYLMFADLDMDHPEVVTELKNWGTWYVNTTNIDGFRLDAVKHIKFSFMRDWLTYVRNQTGKNLFAVGEFWKNDLGALENYITKTNGSMSLFDAPLHNNFYTASKSSGYFDMRNLLNGTLVQRHPSHAVTLVDNHDTQPGQSLQSWVEPWFKPLAYAFILTRQEGYPCVFYGDYYGIPKYNIPGLKSKIDPLLEARRDYAYGTQRDYIDHQDIIGWTREGIDTKPNSGLAALITDGPGGSKWMYVGKKHAGKVFYDITGNRSDTVTINADGWGEFKVNGGSVSIWVAK

SEQ ID NO: 40541 - protein, 480 aa, Bacillus sp.
NGTMMQYFEWYLPNDGNHWNRLNSDASNLKSKGITAVWIPPAWKGASQNDVGYGAYDLYDLGEFNQKGTVRTKYGTRSQLQAAVTSLKNNGIQVYGDVVMNHKGGADATEMVRAVEVNPNNRNQEVTGEYTIEAWTRFDFPGRGNTHSSFKWRWYHFDGVDWDQSRRLNNRIYKFRGHGKAWDWEVDTEFGNYDYLMYADYDMDHPEVVNELRNWGVWYTNTLGLDGFRIDAVKHIKYSFTRDWINHVRSATGKNMFAVAEFWKNDLGAIENYLQKTNWNHSVFDVPLHYNLYNASKSGGNYDMRNIFNGTVVQAHPSHAVTFVDNHDSQPEEALESFVEEWFKPLAYALTLTREQGYPSVFYGDYYGIPTHGVPAMRSKIDPILEARQKYAYGPQHDYLDHPDVIGWTREGDSSHPKSGLATLITDGPGGSKRMYAGLKNAGETWYDITGNRSDTVKIGSDGWGEFHVNDGSVSIYVQK

SEQ ID NO: 40542 - protein, 480 aa, Bacillus sp.
NGTMMQYFEWYLPNDGNHWNRLNSDASNLKSKGITAVWIPPAWKGASQNDVGYGAYDLYDLGEFNQKGTVRTKYGTRSQLQAAVTSLKNNGIQVYGDVVMNHKGGADATEMVRAVEVNPNNRNQEVTGEYTIEAWTRFDFPGRGNTHSSFKWRWYHFDGVDWDQSRRLNNRIYKFRGHGKAWDWEVDTEFGNYDYLMYADYDMDHPEVVNELRNWGVWYTNTLGLDGFRIDAVKHIKYSFTRDWINHVRSATGKNMFAVAEFWKNDLGAIENYLQKTNWNHSVFDVPLHYNLYNASKSGGNYDMRNIFNGTVVQRHPSHAVTFVDNHDSQPEEALESFVEEWFKPLAYALTLTREQGYPSVFYGDYYGIPTHGVPAMRSKIDPILEARQKYAYGPQHDYLDHPDVIGWTREGDSSHPNSGLATLITDGPGGSKRMYAGLKNAGETWYDITGNRSDTVKIGSDGWGEFHVNDGSVSIYVQK

SEQ ID NO: 40543 - protein, 480 aa, Bacillus sp.
NGTMMQYFEWYLPNDGNHWNRLNSDASNLKSKGITAVWIPPAWKAASQNDVGYGAYDLYDLGEFNQKGTVRTKYGTRSQLQAAVTSLKNNGIQVYGDVVMNHKGGADATEMVRAVEVNPNNRNQEVTGEYTIEAWTRFDFPGRGNTHSSFKWRWYHFDGVDWDQSRRLENRIYKFRGHGKAWDWEVDTEFGNYDYLMYADYDMDHPEVVNELRNWGVWYTNTLGLDGFRIDAVKHIKYSFTRDWINHVRSATGKNMFAVAEFWKNDLGAIENYLQKTNWNHSVFDVPLHYNLYNASKSGGNYDMRNIFNGTVVQRHPSHAVTFVDNHDSQPEEALESFVEEWFKPLAYALTLTREQGYPSVFYGDYYGIPTHGVPAMRSKIDPILEARQKYAYGPQHDYLDHPDVIGWTREGDSSHPKSGLATLITDGPGGSKRMYAGLKNAGETWYDITGNRSDTVKIGSDGWGEFHVNDGSVSIYVQK

SEQ ID NO: 40544 - protein, 480 aa, Bacillus sp.
NGTMMQYFEWYLPNDGNHWNRLNSDASNLKSKGITAVWIPPAWKGASQNDVGYGAYDLYDLGEFNQKGTVRTKYGTRSQLQAAVTSLKNNGIQVYGDVVMNHKGGADATEMVRAVEVNPNNRNQEVTGEYTIEAWTRFDFPGRGNTHSSFKWRWYHFDGVDWDQSRRFQNRIYKFRGHGKAWDWEVDTEFGNYDYLMYVDYDMDHPEVVNELRNWGVWYTNTLGLDGFRIDAVKHIKYSFTRDWINHVRSATGKNMFAVAEFWKNDLGAIENYLQKTNWNHSVFDVPLHYNLYNASKSGGNYDMRNIFNGTVVQRHPSHAVTFVDNHDSQPEEALESFVEEWFKPLAYALTLTREQGYPSVFYGDYYGIPTHGVPAMRSKIDPILEARQKYAYGPQHDYLDHPDVIGWTREGDSSHPKSGLATLITDGPGGSKRMYAGLKNAGETWYDITGNRSDTVKIGSDGWGEFHVNDGSVSIYVQK

SEQ ID NO: 40545 - protein, 480 aa, Bacillus sp.
NGTMMQYFEWYLPNDGNHWNRLNSDASNLKSKGITAVWIPPAWKGASQNDVGYGAYDLYDLGEFNQKGTVRTKYGTRSQLQAAVTSLKNNGIQVYGDVVMNHKGGADATEMVRAVEVNPNNRNQEVTGEYTIEAWTRFDFPGRGNTHSSFKWRWYHFDGVDWDQSRRLNNRIYKFRGHGKAWDWEVDTEFGNYDYLMYADYDMDYPEVVNELRNWGVWYTNTLGLDGFRIDAVKHIKYSFTRDWINHVRSATGKNMFAVAEFWKNDLGAIENYLQKTNWNHSVFDVPLHYNLYNASKSGGNYDMRNIFNGTVVQRHPSHAVTFVDNHDSQPEEALESFVEEWFKPLAYALTLTREQGYPSVFYGDYYGIPTHGVPAMRSKIDPILEARQKYAYGPQHDYLDHPDVIGWTREGDSSHPKSGLATLITDGPGGSKRMYAGLKNAGETWYDITGNRSDTVKIGSDGWGEFHVNDGSVSIYVQK

SEQ ID NO: 40546 - protein, 480 aa, Bacillus sp.
NGTMMQYFEWYLPNDGNHWNRLNSDASNLKSKGITAVWIPPAWKAVSQNDVGYGAYDLYDLGEFNQKGTVRTKYGTRSQLQAAVTSLKNNGIQVYGDVVMNHKGGADATEMVRAVEVNPNNRNQEVTGEYTIEAWTRFDFPGRGNTHSSFKWRWYHFDGVDWDQSRQLQNRIYKFRGHGKAWDWEVDTEFGNYDYLMYADYDMDHPEVVNELRNWGVWYTNTLGLDGFRIDAVKHIKYSFTRDWINHVRSATGKNMFAVAEFWKNDLGAIENYLQKTNWNHSVFDVPLHYNLYNASKSGGNYDMRNIFNGTVVQRHPSHAVTFVDNHDSQPEEALESFVEEWFKPLAYALTLTREQGYPSVFYGDYYGIPTHGVPAMRSKIDPILEARQKYAYGPQHDYLDHPDVIGWTREGDSSHPKSGLATLITDGPGGSKRMYAGLKNAGETWYDITGNRSDTVKIGSDGWGEFHVNDGSVSIYVQK

SEQ ID NO: 40547 - protein, 480 aa, Bacillus sp.
NDTMMQYFEWYLPNDGNHWNRLNSDASNLKSKGITAVWIPPAWKGASQNDVGYGAYDLYDLGEFNQKGTVRTKYGTRSQLQAAVTSLKNNGIQVYGDVVMNHKGGADATEMVRAVEVNPNNRNQEVTGEYTIEAWTRFDFPGRGNTHSSFKWRWYHFDGVDWDQSRRLNNRIYKFRGHGKAWDWEVDTEFGNYDYLMYADYDMDHPEVVNELRNWGVWYTNTLGLDGFRIDAVKHIKYSFTRDWINHVRSATGKNMFAVAEFWKNDLGAIENYLQKTNWNHSVFDVPLHYNLYNASKSGGNYDMRNIFNGTVVQRHPSHAVTFVDNHDSQPEEALESFVEEWFKPLAYALTLTREQGYPSVFYGDYYGIPTHGVPAMRSKIDPILEARQKYAYGPQHDYLDHPDVIGWTREGDSSHPKSGLATLITDGPGGSKRMYAGLKNAGETWYDITGNRSDTVKIGSDGWGEFHVNDGSVSIYVQK

SEQ ID NO: 40548 - protein, 480 aa, Bacillus sp.
NGTMMQYFEWYLPNDGNHWNRLNSDASNLKSKGITAVWIPPAWKGASQNDVGYGAYDLYDLGEFNQKGTVRTKYGTRSQLQAAVTSLKNNGIQVYGDVVMNHKGGADATEMVRAVEVNPNNRNQEVTGEYTIEAWTRFDFPGRGNTHSSFKWRWYHFDGVDWDQSRRLNNRIYKFRGHGKAWDWEVDTEFGNYDYLMYADYDMDHPEVVNELRNWGVWYTNTLGLDGFRIDAVKHIKYSFTRDWINHVRSATGKNMFAVAEFWKNDLGAIENYLQKTNWNHSVFDVPLHYNLYNASKSGGNYDMRNIFNGTVVQRHPSHAVTFVDNHDSQPEEALESFVEEWFKPLAYALTLTREQGYPSVFYGDYYGIPTHGVPAMRSKIDPILEARQKYAYGPQHDYLDHPDVIGWTREGDSSHPKSGLATLITDGPGGSKRMYAGLKNAGETWYDITGNRSDTVKIGSDGWGEFSVNDGSVSIYVQK

SEQ ID NO: 40549 - protein, 480 aa, Bacillus sp.
NGTMMQYFEWYLPNDGNHWNRLNSDASNLKSKGITAVWIPPAWKAASQNDVGYGAYDLYDLGEFNQKGTVRTKYGTRSQLQAAVTSLKNNGIQVYGDVVMNHKGGADATEMVRAVEVNPNNRNQEVTGEYTIEAWTRFDFPGRGNTHSSFKWRWYHFDGVDWDQSRDLDNRIYKFRGHGKAWDWEVDTEFGNYDYLMYADYDMDHPEVVNELRNWGVWYTNTLGLDGFRIDAVKHIKYSFTRDWINHVRSATGKNMFAVAEFWKNDLGAIENYLQKTNWNHSVFDVPLHYNLYNASKSGGNYDMRNIFNGTVVQRHPSHAVTFVDNHDSQPEEALESFVETWFKPLAYALTLTREQGYPSVFYGDYYGIPTHGVPAMRSKIDPILEARQKYAYGPQHDYLDHPDVIGWTREGDSSHPKSGLATLITDGPGGSKRMYAGLKNAGETWYDITGNRSDTVKIGSDGWGEFHVNKGSVSIYVQK

SEQ ID NO: 40550 - protein, 480 aa, Bacillus sp.
NGTMMQYFEWYLPNDGNHWNRLNSDASNLKSKGITAVWIPPAWKGASQNDVGYGAYDLYDLGEFNQHGTVRTKYGTRSQLQAAVTSLKNNGIQVYGDVVMNHKGGADATEMVRAVEVNPNNRNQEVTGEYTIEAWTRFDFPGRGNTHSSFKWRWYHFDGVDWDQSRRLNNRIYKFRGHGKAWDWEVDTEFGNYDYLMYADYDMDHPEVVNELRNWGVWYTNTLGLDGFRIDAVKHIKYSFTRDWINHVRSATGKNMFAVAEFWKNDLGAIENYLQKTNWNHSVFDVPLHYNLYNASKSGGNYDMRNIFNGTVVQRHPSHAVTFVDNHDSQPEEALESFVEEWFKPLAYALTLTREQGYPSVFYGDYYGIPTHGVPAMRSKIDPILEARQKYAYGPQHDYLDHPDVIGWTREGDSSHPKSGLATLITDGPGGSKRMYAGLKNAGETWYDITGNRSDTVKIGSDGWGEFHVNDGSVSIYVQK

SEQ ID NO: 40551 - protein, 480 aa, Bacillus sp.
NGTMMQYFEWYLPNDGNHWNRLNSDASNLKSKGITAVWIPPAWKGASQNDVGYGAYDLYDLGEFNQKGTVRTKYGTRSQLQAAVTSLKNNGIQVYGDVVMNHKGGADATEMVRAVEVNPNNRNQEVTGEYTIEAWTRFDFPGRGNTHSSFKWRWYHFDGVDWDQSRRLNNRIYKFRGHGKAWDWEVDTEFGNYDYLMYADYDMDHPEVVNELRNWGVWYTNTLGLDGFRIDAVKHIKYSFTRDWINHVRSATGKNMFAVAEFWKNDLGAIENYLQKTNWNHSVFDVPLHYNLYNASKSGGNYDMRNIFNGTVVQRHPSHAVTFVDNHDSQPEEALESFVEEWFKPLAYALTLTREQGYPSVFYGDYYGIPTHGVPAMRSKIDPILEARQKYAYGPQHDYLDHPDVIGWTREGDSSHPKSGLATLITDGPGGSKRMYAGLKNAGETWYDITGNRSDTVKIGSDGLGEFHVNDGSVSIYVQK

SEQ ID NO: 40552 - protein, 480 aa, Bacillus sp.
NGTMMQYFEWYLPNDGNHWNRLNSDASNLKSKGITEVWIPPAWKGISQNDVGYGAYDLYDLGEFNQKGTVRTKYGTRSQLQAAVTSLKNNGIQVYGDVVMNHKGGADATEMVRAVEVNPNNRNQEVTGEYTIEAWTRFDFPGRGNTHSSFKWRWYHFDGVDWDQSRDTNNRIYKFRGHGKAWDWEVDTEFGNYDYLMYADYDMDHPEVVNELRNWGVWYTNTLGLDGFRIDAVKHIKYSFTRDWINHVRSATGKNMFAVAEFWKNDLGAIENYLQKTNWNHSVFDVPLHYNLYNASKSGGNYDMRNIFNGTVVQRHPSHAVTFVDNHDSQPEEALESFVEEWFKPLAYALTLTREQGYPSVFYGDYYGIPTHGVPAMRSKIDPILEARQKYAYGPQHDYLDHPDVIGWTREGDSSHPKSGLATLITDGPGGSKRMYAGLKNAGETWYDITGNRSDTVKIGSDGWGEFHVNDGSVSIYVQK

SEQ ID NO: 40553 - protein, 480 aa, Bacillus sp.
NGTMMQYFEWYLPNDGNHWNRLNSDASNLKSKGITAVWIPPAWKGASQNDVGYGAYDLYDLGEFNQKGTVRTKYGTRSQLQAAVTSLKNNGIQVYGDVVMNHKGGADATEMVRAVEVNPNNRNQEVTGEYTIEAWTRFDFPGRGNTHSSFKWRWYHFDGVDWDQSRRLNNRIYKFRGHGKAWDWEVDTEFGNYDYLMYADYDMDHPEVVNELRNWGVWYTNTLGLDGFRIDAVKHIKYSFTRDWINHVRSATGKNMFAVAEFWKYDLGAIENYLQKTNWNHSVFDVPLHYNLYNASKSGGNYDMRNIFNGTVVQRHPSHAVTFVDNHDSQPEEALESFVEEWFKPLAYALTLTREQGYPSVFYGDYYGIPTHGVPAMRSKIDPILEARQKYAYGPQHDYLDHPDVIGWTREGDSSHPKSGLATLITDGPGGSKRMYAGLKNAGETWYDITGNRSDTVKIGSDGWGEFHVNDGSVSIYVQK

SEQ ID NO: 40554 - protein, 480 aa, Bacillus sp.
NGTMMQYFEWYLPNDGNHWNRLNSDASNLKSKGITAVWIPPAWKAASQNDVGYGAYDLYDLGEFNQKGTVRTKYGTRSQLQAAVTSLKNNGIQVYGDVVMNHKGGADATEMVDAVEVNPNNRNQEVTGEYTIEAWTRFDFPGRGNTHSSFKWRWYHFDGVDWDQSRDLQNRIYKFRGHGKAWDWEVDTEFGNYDYLMYADYDMDHPEVVNELRNWGVWYTNTLGLDGFRIDAVKHIKYSFTRDWINHVRSATGKNMFAVAEFWKNDLGAIENYLQKTNWNHSVFDVPLHYNLYNASKSGGNYDMRNIFNGTVVQRHPSHAVTFVDNHDSQPEEALESFVEEWFKPLAYALTLTREQGYPSVFYGDYYGIPTHGVPAMRSKIDPILEARQKYAYGPQHDYLDHPDVIGWTREGDSSHPKSGLATLITDGPGGSKRMYAGLKNAGETWYDITGNRSDTVKIGSDGWGEFHVNDGSVSIYVQK

SEQ ID NO: 40555 - protein, 480 aa, Bacillus sp.
NGTMMQYFEWYLPNDGNHWNRLNSDASNLKSKGITAVWIPPAWKGASQNDVGYGAYDLYDLGEFNQKGTVRTKYGTRSQLQAAVTSLKNNGIQVYGDVVMNHKGGADATEMVRAVEVNPNNRNQEVTGEYTIEAWTRFDFPGRGNTHSSFKWRWYHFDGVDYDQSRRLNNRIYKFRGHGKAWDWEVDTEFGNYDYLMYADYDMDHPEVVNELRNWGVWYTNTLGLDGFRIDAVKHIKYSFTRDWINHVRSATGKNMFAVAEFWKNDLGAIENYLQKTNWNHSVFDVPLHYNLYNASKSGGNYDMRNIFNGTVVQRHPSHAVTFVDNHDSQPEEALESFVEEWFKPLAYALTLTREQGYPSVFYGDYYGIPTHGVPAMRSKIDPILEARQKYAYGPQHDYLDHPDVIGWTREGDSSHPKSGLATLITDGPGGSKRMYAGLKNAGETWYDITGNRSDTVKIGSDGWGEFHVNDGSVSIYVQK

SEQ ID NO: 40556 - protein, 480 aa, Bacillus sp.
NGTMMQYFEWYLPNDGNHWNRLNSDASNLKSKGITAVWIPPAWKGASQNDVGYGAYDLYDLGEFNQKGTVRTKYGTRSQLQAAVTSLKNNGIQVYGDVVMNHKGGADATEMVRAVEVNPNNRNQEVTGEYTIEAWTRFDFPGRGNTHSSFKWRWYHFDGVDWDQSREFDNRIYKFRGHGKAWDWEVDTEFGNYDYLMYADYDYDHPESTNEMRNWGVWYTNTLGLDGFRIDAVKHIKYSFTRDWINHVRSATGKNMFAVAEFWKNDLGAIENYLQKTNWNHSVFDVPLHYNLYNASKSGGNYDMRNIFNGTVVQRHPSHAVTFVDNHDSQPEEALESFVEEWFKPLAYALTLTREQGYPSVFYGDYYGIPTHGVPAMRSKIDPILEARQKYAYGPQHDYLDHPDVIGWTREGDSSHPKSGLATLITDGPGGSKRMYAGLKNAGETWYDITGNRSDTVKIGSDGWGEFHVNDGSVSIYVQK

SEQ ID NO: 40557 - protein, 480 aa, Bacillus sp.
NGTMMQYFEWYLPNDGNHWNRLNSDASNLKSKGITAVWIPPAWKASSQNDVGYGAYDLYDLGEFNQKGTVRTKYGTRSQLQAAVTSLKNNGIQVYGDVVMNHKGGADATEMVRAVEVNPNNRNQEVTGEYTIEAWTRFDFPGRGNTHSSFKWRWYHFDGVDWDQSRDLQNRIYKFRGHGKAWDWEVDTEFGNYDYLMYADYDMDHPEVVNELRNWGVWYTNTLGLDGFRIDAVKHIKYSFTRDWINHVRSATGKNMFAVAEFWKNDLGAIENYLQKTNWNHSVFDVPLHYNLYNASKSGGNYDMRNIFNGTVVQRHPSHAVTFVDNHDSQPEEALESFVEEWFKPLAYALTLTREQGYPSVFYGDYYGIPTHGVPAMRSKIDPILEARQKYAYGPQHDYLDHPDVIGWTREGDSSHPKSGLATLITDGPGGSKRMYAGLKNAGETWYDITGNRSDTVKIGSDGWGEFHVNDGSVSIYVQK

SEQ ID NO: 40558 - protein, 480 aa, Bacillus sp.
NGTMMQYFEWYLPNDGNHWNRLNSDASNLKSKGITAVWIPPAWKGASQNDVGYGAYDLYDLGEFNQKGTVRTKYGTRSQLQAAVTSLKNNGIQVYGDVVMNHKGGADATEMVRAVEVNPNNRNQEVTGEYTIEAWTRFDFPGRGNTHSSFKWRWYHFDGVDWDQSRDTDNRIYKFRGHGKAWDWEVDTEFGNYDYLMYTDYDMDHPEVVNELRNWGVWYTNTLGLDGFRIDAVKHIKYSFTRDWINHVRSATGKNMFAVAEFWKNDLGAIENYLQKTNWNHSVFDVPLHYNLYNASKSGGNYDMRNIFNGTVVQRHPSHAVTFVDNHDSQPEEALESFVEEWFKPLAYALTLTREQGYPSVFYGDYYGIPTHGVPAMRSKIDPILEARQKYAYGPQHDYLDHPDVIGWTREGDSSHPKSGLATLITDGPGGSKRMYAGLKNAGETWYDITGNRSDTVKIGSDGWGEFHVNDGSVSIYVQK

SEQ ID NO: 40559 - protein, 480 aa, Bacillus sp.
NGTMMQYFEWYLPNDGNHWNRLNSDASNLKSKGITAVWIPPAWKGASQNDVGYGAYDLYDLGEFNQKGTVRTKYGTRSQLQAAVTSLKNNGIQVYGDVVMNHKGGADATEMVRAVEVNPNNRNQEVTGEYTIEAWTRFDFPGRGNTHSSFKWRWYHFDGVDWDQSRRLNNRIYPFRGHGKAWDWEVDTEFGNYDYLMYADYDMDHPEVVNELRNWGVWYTNTLGLDGFRIDAVKHIKYSFTRDWINHVRSATGKNMFAVAEFWKNDLGAIENYLQKTNWNHSVFDVPLHYNLYNASKSGGNYDMRNIFNGTVVQRHPSHAVTFVDNHDSQPEEALESFVEEWFKPLAYALTLTREQGYPSVFYGDYYGIPTHGVPAMRSKIDPILEARQKYAYGPQHDYLDHPDVIGWTREGDSSHPKSGLATLITDGPGGSKRMYAGLKNAGETWYDITGNRSDTVKIGSDGWGEFHVNDGSVSIYVQK

SEQ ID NO: 40560 - protein, 480 aa, Bacillus sp.
NGTMMQYFEWYLPNDGNHWNRLNSDASNLKSKGITAVWIPPAWKGASQNDVGYGAYDLYDLGEFNQKGTVRTKYGTRSQLQAAVTSLKNNGIQVYGDVVMNHKGGADATEMVRAVEVNPNNRNQEVTGEYTIEAWTRFDFPGRGNTHSSFKWRWYHFDGVDWDQSRRLNNRIYKFRGHGKAWDWEVDTEFGNYDYLMYADYDMDHPEVVNELRNWGVWYTNTLGLDGFRIDAVKHIKYSFTRDWINHVRSATGKNMFAVAEFWKNDLGAIENYLQKTNWNHSVFDVPLHYNLYNASKSGGNYDMRNIFNGTVVQRHPSHAVTFVDNHDSQPEEALESFVEEWFKPLAYALTLTREQGYPSVFYGDYYGIPTHGVPAMRSKIDPILLARQKYAYGPQHDYLDHPDVIGWTREGDSSHPPSGLATLITDGPGGSKRMYAGLKNAGETWYDITGNRSDTVKIGSDGWGEFHVNDGSVSIYVQK

SEQ ID NO: 40561 - protein, 480 aa, Bacillus sp.
NGTMMQYFEWYLPNDGNHWNRLNSDASNLKSKGITAVWIPPAWKAVSQNDVGYGAYDLYDLGEFNQKGTVRTKYGTRSQLQAAVTSLKNNGIQVYGDVVMNHKGGADATEMVRAVEVNPNNRNQEVTGEYTIEAWTRFDFPGRGNTHSSFKWRWYHFDGVDWDQSRRLSNRIYKFRGHGKAWDWEVDTEFGNYDYLMYADYDMDHPEVVNELRNWGVWYTNTLGLDGFRIDAVKHIKYSFTRDWINHVRSATGKNMFAVAEFWKNDLGAIENYLQKTNWNHSVFDVPLHYNLYNASKSGGNYDMRNIFNGTVVQAHPNHAVTFVDNHDSQPEEALESFVEEWFKPLAYALTLTREQGYPSVFYGDYYGIPTHGVPAMRSKIDPILEARQKYAYGPQHDYLDHPDVIGWTREGDSSHPKSGLATLITDGPGGSKRMYAGLKNAGETWYDITGNRSDTVKIGSDGWGEFHVNDGSVSIYVQK

SEQ ID NO: 40562 - protein, 480 aa, Bacillus sp.
NGTMMQYFEWYLPNDGNHWNRLNSDASNLKSKGIMAVWIPPAWKGASQNDVGYGAYDLYDLGEFNQKGTVRTKYGTRSQLQAAVTSLKNNGIQVYGDVVMNHKGGADATEMVRAVEVNPNNRNQEVTGEYTIEAWTRFDFPGRGNTHSSFKWRWYHFDGVDWDQSRRLNNRIYKFRGHGKAWDWEVDTEFGNYDYLMYADYDMDHPEVVNELRNWGVWYTNTLGLDGFRIDAVKHIKYSFTRDWINHVRSATGKNMFAVAEFWKNDLGAIENYLQKTNWNHSVFDVPLHYNLYNASKSGGNYDMRNIFNGTVVQRHPSHAVTFVDNHDSQPEEALESFVEEWFKPLAYALTLTREQGYPSVFYGDYYGIPTHGVPAMRSKIDPILEARQKYAYGPQHDYLDHPDVIGWTREGDSSHPKSGLATLITDGPGGSKRMYAGLKNAGETWYDITGNRSDTVKIGSDGWGEFHVNDGSVSIYVQK

SEQ ID NO: 40563 - protein, 480 aa, Bacillus sp.
NGTMMQYFEWYLPNDGNHWNRLNSDASNLKSKGITAVWIPPAWKGASQNDVGYGAYDLYDLGEFNQKGTVRTKYGTRSQLQAAVTSLKNNGIQVYGDVVMNHKGGADLTEMVRAVEVNPNNRNQEVTGEYTIEAWTRFDFPGRGNTHSSFKWRWYHFDGVDWDQSRRLNNRIYKFRGHGKAWDWEVDTEFGNYDYLMYADYDMDHPEVVNELRNWGVWYTNTLGLDGFRIDAVKHIKYSFTRDWINHVRSATGKNMFAVAEFWKNDLGAIENYLQKTNWNHSVFDVPLHYNLYNASKSGGNYDMRNIFNGTVVQRHPSHAVTFVDNHDSQPEEALESFVEEWFKPLAYALTLTREQGYPSVFYGDYYGIPTHGVPAMRSKIDPILEARQKYAYGPQHDYLDHPDVIGWTREGDSSHPKSGLATLITDGPGGSKRMYAGLKNAGETWYDITGNRSDTVKIGSDGWGEFHVNDGSVSIYVQK

SEQ ID NO: 40564 - protein, 480 aa, Bacillus sp.
NGTMMQYFEWYLPNDGNHWNRLNSDASNLKSKGITAVWIPPAWKGASQNDVGYGAYDLYDLGEFNQKGTVRTKYGTRSQLQAAVTSLKNNGIQVYGDVVMNHKGGADATEMVRAVEVNPNNRNQEVTGEYTIEAWTRFDFPGRGNTHSSFKWRWQHFDGVDWDQSRRLNNRIYKFRGHGKAWDWEVDTEFGNYDYLMYADYDMDHPEVVNELRNWGVWYTNTLGLDGFRIDAVKHIKYSFTRDWINHVRSATGKNMFAVAEFWKNDLGAIENYLQKTNWNHSVFDVPLHYNLYNASKSGGNYDMRNIFNGTVVQRHPSHAVTFVDNHDSQPEEALESFVEEWFKPLAYALTLTREQGYPSVFYGDYYGIPTHGVPAMRSKIDPILEARQKYAYGPQHDYLDHPDVIGWTREGDSSHPKSGLATLITDGPGGSKRMYAGLKNAGETWYDITGNRSDTVKIGSDGWGEFHVNDGSVSIYVQK

SEQ ID NO: 40565 - protein, 480 aa, Synthetic construct
NGTMMQYFEWYLPNDGNHWNRLNSDASNLKSKGITAVWIPPAWKGASQNDVGYGAYDLYDLGEFNQKGTVRTKYGTRSQLQAAVTSLKNNGIQVYGDVVMNHKGGADATEMVRAVEVNPNNRNQEVTGEYTIEAWTRFDFPGRGNTHSSFKWRWYHFDGVDWDQSRRLNNRIYKFRGHGKAWDWEVDTEFGNYDYLMYADYDYDHPETTNEIRNWGVWYTNTLGLDGFRIDAVKHIKYSFTRDWINHVRSATGKNMFAVAEFWKNDLGAIENYLQKTNWNHSVFDVPLHYNLYNASKSGGNYDMRNIFNGTVVQRHPSHAVTFVDNHDSQPEEALESFVEEWFKPLAYALTLTREQGYPSVFYGDYYGIPTHGVPAMRSKIDPILEARQKYAYGPQHDYLDHPDVIGWTREGDSSHPKSGLATLITDGPGGSKRMYAGLKNAGETWYDITGNRSDTVKIGSDGWGEFHVNDGSVSIYVQK

SEQ ID NO: 40566 - protein, 480 aa, Bacillus sp.
NGTMMQYFEWYLPNDGNHWNRLNSDASNLKSKGITAVWIPPAWKGASQNDVGYGAYDLYDLGEFNQKGTVRTKYGTRSQLQAAVTSLKNNGIQVYGDVVMNHKGGADATEMVRAVEVNPNNRNQEVTGEYTIEAWTRFDFPGRGNTHSSFKWRWYHFDGVDWDQSRRLNNRIYKFRGHGKAWDWEVDTEFGNYDYLMYADYDMDHPEVVNELRNWGVWYTNTLGLDGFRIDAVKHIKYSFTRDWINHVRSATGKNMFAVAEFWKNDLGAIENYLQKTNWNHSVFDVPLHYNLYNASKSGGNYDMRNIFNGTVVQRHPSHAVTFVDNHDSQPEEALESFVDEWFKPLAYALTLTREQGYPSVFYGDYYGIPTHGVPAMRSKIDPILEARQKYAYGPQHDYLDHPDVIGWTREGDSSHPKSGLATLITDGPGGSKRMYAGLKNAGETWYDITGNRSDTVKIGSDGWGEFHVNQGSVSIYVQK

SEQ ID NO: 40567 - protein, 480 aa, Bacillus sp.
NGTMMQYFEWYLPNDGNHWNRLNSDASNLKSKGITAVWIPPAWKGASQNDVGYGAYDLYDLGEFNQKGTVRTKYGTRSQLQAAVTSLKNNGIQVYGDVVMNHKGGADATEMVRAVEVNPNNRNQEVTGEYTIEAWTRFDFPGRGNTHSSFKWRWYHFDGVDWDQSRRLNNRIYKFRGHGKAWDWEVDTEFGNYDYLMYADYDMDHPEVVNELRNWGVWYTNTLGLDGFRIDAVKHIKYSFTRDWINHVRSATGKNMFAVAEFWKNDLGAIENYLQKTNWNHSVFDVPLHYNLYNASKSGGNYDMRNIFNGTVVQSHPMQAVTFVDNHDSQPEEALESFVEEWFKPLAYALTLTREQGYPSVFYGDYYGIPTHGVPAMRSKIDPILEARQKYAYGPQHDYLDHPDVIGWTREGDSSHPKSGLATLITDGPGGSKRMYAGLKNAGETWYDITGNRSDTVKIGSDGWGEFHVNDGSVSIYVQK

SEQ ID NO: 40568 - protein, 480 aa, Bacillus sp.
NGTMMQYFEWYLPNDGNHWNRLNSDASNLKSKGITAVWIPPAWKGASQNDVGYGAYDLYDLGEFNQKGTVRTKYGTRSQLQAAVTSLKNNGIQVYGDVVMNHKGGADATEMVRAVEVNPNNRNQEVTGEYTIEAWTRFDFPGRGNTHSSFKWRWYHFDGVDWDQSRRLNNRIYKFRGHGKAWDWEVDTEFGNYDYLMYADYDMDHPEVVNELRNWGVWYTNTLGLDGFRIDAVKHIKYSFTRDWINHVRSATGKNMFAVAEFWKNDLGAIENYLQKTNWNHSVFDVPLHYNLYNASKSGGNYDMRNIFNGTVVQRHPSHAVTFVDNHDSQPEEALESFVDPWFKPLAYALTLTREQGYPSVFYGDYYGIPTHGVPAMRSKIDPILEARQKYAYGPQHDYLDHPDVIGWTREGDSSHPKSGLATLITDGPGGSKRMYAGLKNAGETWYDITGNRSDTVKIGSDGWGEFHVNDQSVSIYVQK

SEQ ID NO: 40569 - protein, 480 aa, Bacillus sp.
NGTMMQYFEWYLPNDGNHWNRLNSDASNLKSKGITAVWIPPAWKGASQNDVGYGAYDLYDLGEFNQKGTVRTKYGTRSQLQAAVTSLKNNGIQVYGDVVMNHKGGADATEMVRAVEVNPNNRNQEVTGEYTIEAWTRFDFPGRGNTHSSFKWRWYHFDGVDWDQSRRLNNRIYKFRGHGKAWDWEVDTEFGNYDYLMYADYDMDHPEVVNELRNWGVWYTNTLGLDGFRIDAVKHIKYSFTRDWINHVRSATGKNMFAVAEFWKNDLGAIENYLQKTNWNHSVFDVPLHYNLYNASKSGGNYDMRNIFNGTVVQRHPSHAVTFVDNHDSQPEEALESFVEEWFKPLAYALTLTREQGYPSVFYGDYYGIPTHGVPAMRSKIDPILEARQKYAYGPQHDYLDHPDVIGWTREGDSSHPKSGLATLITDGPGGSKRMYAGLKNAGKTWYDITGNRSDTVKIGSDGWGEFHVNDGSVSIYVQK

SEQ ID NO: 40570 - protein, 480 aa, Bacillus sp.
NGTMMQYFEWYLPNDGNHWNRLNSDASNLKSKGITAVWIPPAWKGASQNDVGYGAYDLYDLGEFNQKGTVRTKYGTRSQLQAAVTSLKNNGIQVYGDVVMNHKGGADATEMVRAVEVNPNNRNQEVTGEYTIEAWTRFDFPGRGNTHSSFKWRWYHFDGVDWDQSRRLNNRIYKFRGHGKAWDWEVDTEFGNYDYLMYADYDMDHPEVVNELRNWGVWYTNTLGLDGFRIDAVKHIKYSFTRDWINHVRSATGKNMFAVAEFWKNDLGAIENYLQKTNWNHSVFDVPLHYNLYNASKSGGNYDMRNIFNGTVVQRHPSHAVTFVDNHDSQPEEALESFVEEWFKPLAYALTLTREQGYPSVFYGDYYGIPTHGVPAMRSKIDPILEARQKYAYGPQHDYLDHPDVIGWTREGDSSHPKSGLATLITDGPGGSKRMYAGLKNAGETWYDITGNRSDTVKIGSDGWGNFHVNDGSVSIYVQK

SEQ ID NO: 40571 - protein, 480 aa, Bacillus sp.
NGTMMQYFEWYLPNDGNHWNRLNSDASNLKSKGITAVWIPPAWKGASQNDVGYGAYDLYDLGEFNQKGTVRTKYGTRSQLQAAVTSLKNNGIQVYGDVVMNHKGGADATEMVRAVEVNPNNRNQEVTGEYTIEAWTRFDFPGRGNTHSSFKWRWYHFDGVDWDQSRQLNNRIYKFRGHGKAWDWEVDTEFGNYDYLMYVDYDMDHPEVVNELRNWGVWYTNTLGLDGFRIDAVKHIKYSFTRDWINHVRSATGKNMFAVAEFWKNDLGAIENYLQKTNWNHSVFDVPLHYNLYNASKSGGNYDMRNIFNGTVVQRHPSHAVTFVDNHDSQPEEALESFVEEWFKPLAYALTLTREQGYPSVFYGDYYGIPTHGVPAMRSKIDPILEARQKYAYGPQHDYLDHPDVIGWTREGDSSHPKSGLATLITDGPGGSKRMYAGLKNAGETWYDITGNRSDTVKIGSDGWGEFHVNDGSVSIYVQK

SEQ ID NO: 40572 - protein, 480 aa, Bacillus sp.
NGTMMQYFEWYLPNDGNHWNRLNSDASNLKSKGITAVWIPPAWKATSQNDVGYGAYDLYDLGEFNQKGTVRTKYGTRSQLQAAVTSLKNNGIQVYGDVVMNHKGGADATEMVRAVEVNPNNRNQEVTGEYTIEAWTRFDFPGRGNTHSSFKWRWYHFDGVDWDQSRQLQNRIYKFRGHGKAWDWEVDTEFGNYDYLMYADYDMDHPEVVNELRNWGVWYTNTLGLDGFRIDAVKHIKYSFTRDWINHVRSATGKNMFAVAEFWKNDLGAIENYLQKTNWNHSVFDVPLHYNLYNASKSGGNYDMRNIFNGTVVQRHPSHAVTFVDNHDSQPEEALESFVEEWFKPLAYALTLTREQGYPSVFYGDYYGIPTHGVPAMRSKIDPILEARQKYAYGPQHDYLDHPDVIGWTREGDSSHPKSGLATLITDGPGGSKRMYAGLKNAGETWYDITGNRSDTVKIGSDGWGEFHVNDGSVSIYVQK

SEQ ID NO: 40573 - protein, 480 aa, Bacillus sp.
NGTMMQYFEWYLPNDGNHWNRLNSDASNLKSKGITAVWIPPAWKGASQNDVGYGAYDLYDLGEFNQKGTVRTKYGTRSQLQAAVTSLKNNGIQVYGDVVMNHKGGADATEMVRAVEVNPNNRNQEVTGEYTIEAWTRFDFPGRGNTHSSFKWRWYHFDGVDWDQSRRLNNRIYKFRGHGKAWDWEVDTEFGNYDYLMYADYDMDHPEVVNELRNWGVWYTNTLGLDGFRIDAVKHIKYSFTRDWINHVRSATGKNMFAVAEFWKNDLGAIENYLQKTNWNHSVFDVPLHYNLYNASKSGGNYDMRNIFNGTVVQRHPSHAVTFVDNHDSQPEEALESFVEEWFKPLAYALTLTREQGYPSVFYGDYYGIPTHGVPAMRSKIDPILEARQKYAYGPQHDYLDHPDVIGWTREGDSSHPKSGLATLITDGPGGSKRMYAGLKNAGETWYDITGNRSDTVKIGSDGWGEFHVNDASVSIYVQK

SEQ ID NO: 40574 - protein, 480 aa, Bacillus sp.
NETMMQYFEWYLPNDGNHWNRLNSDASNLKSKGITAVWIPPAWKGASQNDVGYGAYDLYDLGEFNQKGTVRTKYGTRSQLQAAVTSLKNNGIQVYGDVVMNHKGGADATEMVRAVEVNPNNRNQEVTGEYTIEAWTRFDFPGRGNTHSSFKWRWYHFDGVDWDQSRRLNNRIYKFRGHGKAWDWEVDTEFGNYDYLMYADYDMDHPEVVNELRNWGVWYTNTLGLDGFRIDAVKHIKYSFTRDWINHVRSATGKNMFAVAEFWKNDLGAIENYLQKTNWNHSVFDVPLHYNLYNASKSGGNYDMRNIFNGTVVQRHPSHAVTFVDNHDSQPEEALESFVEEWFKPLAYALTLTREQGYPSVFYGDYYGIPTHGVPAMRSKIDPILEARQKYAYGPQHDYLDHPDVIGWTREGDSSHPKSGLATLITDGPGGSKRMYAGLKNAGETWYDITGNRSDTVKIGSDGWGEFHVNDGSVSIYVQK

SEQ ID NO: 40575 - protein, 480 aa, Bacillus sp.
NGTMMQYFEWYLPNDGNHWNRLNSDASNLKSKGITAVWIPPAWKAASQNDVGYGAYDLYDLGEFNQKGTVRTKYGTRSQLQAAVTSLKNNGIQVYGDVVMNHKGGADATEMVRAVEVNPNNRNQEVTGEYTIEAWTRFDFPGRGNTHSSFKWRWYHFDGVDWDQSRRFTNRIYKFRGHGKAWDWEVDTEFGNYDYLMYADYDMDHPEVVNELRNWGVWYTNTLGLDGFRIDAVKHIKYSFTRDWINHVRSATGKNMFAVAEFWKNDLGAIENYLQKTNWNHSVFDVPLHYNLYNASKSGGNYDMRNIFNGTVVQRHPSHAVTFVDNHDSQPEEALESFVEEWFKPLAYALTLTREQGYPSVFYGDYYGIPTHGVPAMRSKIDPILEARQKYAYGPQHDYLDHPDVIGWTREGDSSHPKSGLATLITDGPGGSKRMYAGLKNAGETWYDITGNRSDTVKIGSDGWGEFHVNDGSVSIYVQK

SEQ ID NO: 40576 - protein, 480 aa, Bacillus sp.
NGTMMQYFEWYLPNDGNHWNRLNSDASNLKSKGITAVWIPPAWKGASQNDVGYGAYDLYDLGEFNQKGTVRTKYGTRSQLQAAVTSLKNNGIQVYGDVVMNHKGGADATEMVRAVEVNPNNRNQEVTGEYTIEAWTRFDFPGRGNTHSSFKWRWYHFDGVDWDQSRRLNNRIYKFRGHGKAWDWEVDTEFGNYDYLMYADYDMDHPEVVNELRNWGVWYTNTLGLDGFRIDAVKHIKYSFTRDWINHVRSATGKNMFAVAEFWKNDLGAIENYLQKTNWNHSVFDVPLHYNLYNASKSQGNYDMRNIFNGTVVQRHPSHAVTFVDNHDSQPEEALESFVDTWFKPLAYALTLTREQGYPSVFYGDYYGIPTHGVPAMRSKIDPILEARQKYAYGPQHDYLDHPDVIGWTREGDSSHPKSGLATLITDGPGGSKRMYAGLKNAGETWYDITGNRSDTVKIGSDGWGEFHVNGGSVSIYVQK

SEQ ID NO: 40577 - protein, 480 aa, Bacillus sp.
NGTMMQYFEWYLPNDGNHWNRLNSDASNLKSKGITAVWIPPAWKGASQNDVGYGAYDLYDLGEFNQKGTVRTKYGTRSQLQAAVTSLKNNGIQVYGDVVMNHKGGADATEMVRAVEVNPNNRNQEVTGEYTIEAWTRFDFPGRGNTHSSFKWRWYHFDGVDWDQSRRLNNRIYKFRGHGKAWDWEVDTEFGNYDYLMYADYDMDHPEVVNELRNWGVWYTNTLGLDGFRIDAVKHIKYSFTRDWINHVRSATGKNMFAVAEFWKNDLGAIENYLQKTNWNHSVFDVPLHYNLYNASKSGGNYDMRNIFNGTVVQRHPSHAVTFVDNHDSQPEEALESFVEEWFKPLAYALTLTREQGYPSVFYGDYYGIPTHGVPAMRSKIDPILEARQKYAYGPQHDYLDHPDVIGWTREGDSSHPKSGLATLITDGPGGSKRMYAGLKNAGETWYDITGNRSDTVKIGSDGWGEFHTNDGSVSIYVQK

SEQ ID NO: 40578 - protein, 480 aa, Bacillus sp.
NGTMMQYFEWYLPNDGNHWNRLNSDASNLKSKGITAVWIPPAWKAASQNDVGYGAYDLYDLGEFNQKGTVRTKYGTRSQLQAAVTSLKNNGIQVYGDVVMNHKGGADATEMVRAVEVNPNNRNQEVTGEYTIEAWTRFDFPGRGNTHSSFKWRWYHFDGVDWDQSRQTNNRIYKFRGHGKAWDWEVDTEFGNYDYLMYADYDMDHPEVVNELRNWGVWYTNTLGLDGFRIDAVKHIKYSFTRDWINHVRSATGKNMFAVAEFWKNDLGAIENYLQKTNWNHSVFDVPLHYNLYNASKSGGNYDMRNIFNGTVVQRHPSHAVTFVDNHDSQPEEALESFVEEWFKPLAYALTLTREQGYPSVFYGDYYGIPTHGVPAMRSKIDPILEARQKYAYGPQHDYLDHPDVIGWTREGDSSHPKSGLATLITDGPGGSKRMYAGLKNAGETWYDITGNRSDTVKIGSDGWGEFHVNDGSVSIYVQK

SEQ ID NO: 40579 - protein, 480 aa, Bacillus sp.
NGTMMQYFEWYLPNDGNHWNRLNSDASNLKSKGITAVWIPPAWKGASQNDVGYGAYDLYDLGEFNQKGTVRTKYGTRSQLQAAVTSLKNNGIQVYGDVVMNHKGGADATEMVRAVEVNPNNRNQEVTGEYTIEAWTRFDFPGRGNTHSSFKWRWYHFDGVDWDQSRRLNNRIYKFRGHGKAWDWEVDTEFGNYDYLMYADYDMDHPEVVNELRNWGVWYTNTLGLDGFRIDAVKHIKYSFTRDWINHVRSATGKNMFAVAEFWKNDLGAIENYLQKTNWNHSVFDVPLHYNLYNASKSGGNYDMRNIFNGTVVQRHPSHAVTFVDNHDSQPEEALESFVDTWFKPLAYALTLTREQGYPSVFYGDYYGIPTHGVPAMRSKIDPILEARQKYAYGPQHDYLDHPDVIGWTREGDSSHPKSGLATLITDGPGGSKRMYAGLKNAGETWYDITGNRSDTVKIGSDGWGEFHVNQASVSIYVQK

SEQ ID NO: 40580 - protein, 480 aa, Bacillus sp.
NGTMMQYFEWYLPNDGNHWNRLNSDASNLKSKGITAVWIPPAWKAASQNDVGYGAYDLYDLGEFNQKGTVRTKYGTRSQLQAAVTSLKNNGIQVYGDVVMNHKGGADATEMVRAVEVNPNNRNQEVTGEYTIEAWTRFDFPGRGNTHSSFKWRWYHFDGVDWDQSRSLSNRIYKFRGHGKAWDWEVDTEFGNYDYLMYADYDMDHPEVVNELRNWGVWYTNTLGLDGFRIDAVKHIKYSFTRDWINHVRSATGKNMFAVAEFWKNDLGAIENYLQKTNWNHSVFDVPLHYNLYNASKSGGNYDMRNIFNGTVVQRHPSHAVTFVDNHDSQPEEALESFVETWFKPLAYALTLTREQGYPSVFYGDYYGIPTHGVPAMRSKIDPILEARQKYAYGPQHDYLDHPDVIGWTREGDSSHPKSGLATLITDGPGGSKRMYAGLKNAGETWYDITGNRSDTVKIGSDGWGEFHVNKASVSIYVQK

SEQ ID NO: 40581 - protein, 480 aa, Bacillus sp.
NGTMMQYFEWYLPNDGNHWNRLNSDASNLKSKGITAVWIPPAWKAASQNDVGYGAYDLYDLGEFNQKGTVRTKYGTRSQLQAAVTSLKNNGIQVYGDVVMNHKGGADATEMVRAVEVNPNNRNQEVTGEYTIEAWTRFDFPGRGNTHSSFKWRWYHFDGVDWDQSRDTNNRIYKFRGHGKAWDWEVDTEFGNYDYLMYADYDMDHPEVVNELRNWGVWYTNTLGLDGFRIDAVKHIKYSFTRDWINHVRSATGKNMFAVAEFWKNDLGAIENYLQKTNWNHSVFDVPLHYNLYNASKSGGNYDMRNIFNGTVVQRHPSHAVTFVDNHDSQPEEALESFVEEWFKPLAYALTLTREQGYPSVFYGDYYGIPTHGVPAMRSKIDPILEARQKYAYGPQHDYLDHPDVIGWTREGDSSHPKSGLATLITDGPGGSKRMYAGLKNAGETWYDITGNRSDTVKIGSDGWGEFHVNDGSVSIYVQK

SEQ ID NO: 40582 - protein, 480 aa, Bacillus sp.
NGTMMQYFEWYLPNDGNHWNRLNSDASNLKSKGITAVWIPPAWKGASQNDVGYGAYDLYDLGEFNQKGTVRTKYGTRSQLQAAVTSLKNNGIQVYGDVVMNHKGGADATEMVRAVEVNPNNRNQEVTGEYTIEAWTRFDFPGRGNTHSSFKWRWYHFDGVDWDQSRRLNNRIYKFRGHGKAWDWEVDTEFGNYDYLMYADYDMDHPEVVNELRNWGVWYTNTLGLDGFRIDAVKHIKYSFTRDWINHVRSATGKNMFAVAEFWKNDLGAIENYLQKTNWNHSVFDVPLHYNLYNASKSGGNYDMRNIFNGTVVQRHPSHAVTFVDNHDSQPEEALESFVEEWFKPKAYALTLTREQGYPSVFYGDYYGIPTHGVPAMRSKIDPILEARQKYAYGPQHDYLDHPDVIGWTREGDSSHPKSGLATLITDGPGGSKRMYAGLKNAGETWYDITGNRSDTVKIGSDGWGEFHVNDGSVSIYVQK

SEQ ID NO: 40583 - protein, 480 aa, Bacillus sp.
NGTMMQYFEWYLPNDGNHWNRLNSDASNLKSKGITAVWIPPAWKGASQNDVGYGAYDLYDLGEFNQKGTVRTKYGTRSQLQAAVTSLKNNGIQVYGDVVMNHKGGADATEMVRAVEVNPNNRTQEVTGEYTIEAWTRFDFPGRGNTHSSFKWRWYHFDGVDWDQSRRLNNRIYKFRGHGKAWDWEVDTEFGNYDYLMYADYDMDHPEVVNELRNWGVWYTNTLGLDGFRIDAVKHIKYSFTRDWINHVRSATGKNMFAVAEFWKNDLGAIENYLQKTNWNHSVFDVPLHYNLYNASKSGGNYDMRNIFNGTVVQRHPSHAVTFVDNHDSQPEEALESFVEEWFKPLAYALTLTREQGYPSVFYGDYYGIPTHGVPAMRSKIDPILEARQKYAYGPQHDYLDHPDVIGWTREGDSSHPKSGLATLITDGPGGSKRMYAGLKNAGETWYDITGNRSDTVKIGSDGWGEFHVNDGSVSIYVQK

SEQ ID NO: 40584 - protein, 480 aa, Bacillus sp.
NGTMMQYFEWYLPNDGNHWNRLNSDASNLKSKGITAVWIPPAWKGASQNDVGYGAYDLYDLGEFNQKGTVRTKYGTRSQLQAAVTSLKNNGIQVYGDVVMNHKGGADATEMVRAVEVNPNNRNQEVTGEYTIEAWTRFDFPGRGNTHSSFKWRWYHFDGVDWDQSRRLNNRIYKFRGHGKAWDWEVDTEFGNYDYLMYADYDMDHPEVVNELRNWGVWYTNTLGLDGFRIDAVKHIKYSFTRDWINHVRSATGKNMFAVAEFWKNDLGAIENYLQKTNWNHSVFDVPLHYNLYNASKSAGNYDMRNIFNGTVVQRHPSHAVTFVDNHDSQPEEALESFVEPWFKPLAYALTLTREQGYPSVFYGDYYGIPTHGVPAMRSKIDPILEARQKYAYGPQHDYLDHPDVIGWTREGDSSHPKSGLATLITDGPGGSKRMYAGLKNAGETWYDITGNRSDTVKIGSDGWGEFHVNDGSVSIYVQK

SEQ ID NO: 40585 - protein, 480 aa, Bacillus sp.
NGTMMQYFEWYLPNDGNHWNRLNSDASNLKSKGITAVWIPPAWKAASQNDVGYGAYDLYDLGEFNQKGTVRTKYGTRSQLQAAVTSLKNNGIQVYGDVVMNHKGGADATEMVRAVEVNPNNRNQEVTGEYTIEAWTRFDFPGRGNTHSSFKWRWYHFDGVDWDQSRDVNNRIYKFRGHGKAWDWEVDTEFGNYDYLMYADYDMDHPEVVNELRNWGVWYTNTLGLDGFRIDAVKHIKYSFTRDWINHVRSATGKNMFAVAEFWKNDLGAIENYLQKTNWNHSVFDVPLHYNLYNASKSGGNYDMRNIFNGTVVQRHPSHAVTFVDNHDSQPEEALESFVEEWFKPLAYALTLTREQGYPSVFYGDYYGIPTHGVPAMRSKIDPILEARQKYAYGPQHDYLDHPDVIGWTREGDSSHPKSGLATLITDGPGGSKRMYAGLKNAGETWYDITGNRSDTVKIGSDGWGEFHVNDGSVSIYVQK

SEQ ID NO: 40586 - protein, 480 aa, Bacillus sp.
NGTMMQYFEWYLPNDGNHWNRLNSDASNLKSKGITAVWIPPAWKGASQNDVGYGAYDLYDLGEFNQKGTVRTKYGTRSQLQAAVTSLKNNGIQVYGDVVMNHKGGADATEMVRAVEVNPNNRNQEVTGEYTIEAWTRFDFPGRGNTHSSFKWRWYHFDGVDWDQSRRLNNRIYKFRGHGKAWDWEVDTEFGNYDYLMYADYDMDHPEVVNELRNWGVWYTNTLGLDGFRIDAVKHIKYSFTRDWINHVRSATGKNMFAVAEFWKNDLGAIENYLQKTNWNHSVFDVPLHYNLYNASKSGGNYDMRNIFNGTVVQSHPSHAVTFVDNHDSQPEEALESFVEEWFKPLAYALTLTREQGYPSVFYGDYYGIPTHGVPAMRSKIDPILEARQKYAYGPQHDYLDHPDVIGWTREGDSSHPKSGLATLITDGPGGSKRMYAGLKNAGETWYDITGNRSDTVKIGSDGWGEFHVNDGSVSIYVQK

SEQ ID NO: 40587 - protein, 480 aa, Bacillus sp.
NGTMMQYFEWYLPNDGNHWNRLSSDASNLKSKGITAVWIPPAWKGASQNDVGYGAYDLYDLGEFNQKGTVRTKYGTRSQLQAAVTSLKNNGIQVYGDVVMNHKGGADATEMVRAVEVNPNNRNQEVTGEYTIEAWTRFDFPGRGNTHSSFKWRWYHFDGVDWDQSRRLNNRIYKFRGHGKAWDWEVDTEFGNYDYLMYADYDMDHPEVVNELRNWGVWYTNTLGLDGFRIDAVKHIKYSFTRDWINHVRSATGKNMFAVAEFWKNDLGAIENYLQKTNWNHSVFDVPLHYNLYNASKSGGNYDMRNIFNGTVVQMHPNHAVTFVDNHDSQPEEALESFVEEWFKPLAYALTLTREQGYPSVFYGDYYGIPTHGVPAMRSKIDPILEARQKYAYGPQHDYLDHPDVIGWTREGDSSHPKSGLATLITDGPGGSKRMYAGLKNAGETWYDITGNRSDTVKIGSDGWGEFHVNDGSVSIYVQK

SEQ ID NO: 40588 - protein, 480 aa, Bacillus sp.
NGTMMQYFEWYLPNDGNHWNRLNSDASNLKSKGITAVWIPPAWKGASQNDVGYGAYDLYDLGEFNQKGTVRTKYGTRSQLQAAVTSLKNNGIQVYGDVVMNHKGGADATEMVRAVEVNPNNRNQEVTGEYTIEAWTRFDFPGRGNTHSSFKWRWYHFDGVDWDQSRDLQNRIYKFRGHGKAWDWEVDTEFGNYDYLMYADYDMDHPEVVNELRNWGVWYTNTLGLDGFRIDAVKHIKYSFTRDWINHVRSATGKNMFAVAEFWKNDLGAIENYLQKTNWNHSVFDVPLHYNLYNASKSGGNYDMRNIFNGTVVQRHPSHAVTFVDNHDSQPEEALESFVETWFKPLAYALTLTREQGYPSVFYGDYYGIPTHGVPAMRSKIDPILEARQKYAYGPQHDYLDHPDVIGWTREGDSSHPKSGLATLITDGPGGSKRMYAGLKNAGETWYDITGNRSDTVKIGSDGWGEFHVNKASVSIYVQK

SEQ ID NO: 40589 - protein, 480 aa, Bacillus sp.
NGTMMQYFEWYLPNDGNHWNRLNSDASNLKSKGITAVWIPPAWKGASQNDVGYGAYDLYDLGEFNQKGTVRTKYGTRSQLQAAVTSLKNNGIQVYGDVVMNHKGGADATEMVRAVEVNPNNRNQEVTGEYTIEAWTRFDFPGRGNTHSSFKWRWYHFDGVDWDQSREFDNRIYKFRGHGKAWDWEVDTEFGNYDYLMYADYDMDHPEVVNELRNWGVWYTNTLGLDGFRIDAVKHIKYSFTRDWINHVRSATGKNMFAVAEFWKNDLGAIENYLQKTNWNHSVFDVPLHYNLYNASKSGGNYDMRNIFNGTVVQVHPSHAVTFVDNHDSQPEEALESFVEEWFKPLAYALTLTREQGYPSVFYGDYYGIPTHGVPAMRSKIDPILEARQKYAYGPQHDYLDHPDVIGWTREGDSSHPKSGLATLITDGPGGSKRMYAGLKNAGETWYDITGNRSDTVKIGSDGWGEFHVNDGSVSIYVQK

SEQ ID NO: 40590 - protein, 480 aa, Bacillus sp.
NGTMMQYFEWYLPNDGNHWNRLNSDASNLKSKGITAVWIPPAWKGASQNDVGYGAYDLYDLGEFNQKGTVRTKYGTRSQLQAAVTSLKNNGIQVYGDVVMNHKGGADATEMVRAVEVNPNNRNQEVTGEYTIEAWTRFDFPGRGNTHSSFKWRWYHFDGVDWDQSRRLNNRIYKFRGHGKAWDWEVDTEFGNYDYLMYADYDMDHPEVVNELRNWGVWYTNTLGLDGFRIDAVKHIKYSFTRDWINHVRSATGKNMFAVAEFWKNDLGAIENYLQKTNWNHSVFDVPLHYNLYNASKSGGNYDMRNIFNGTVVQRQPSHAVTFVDNHDSQPEEALESFVEEWFKPLAYALTLTREQGYPSVFYGDYYGIPTHGVPAMRSKIDPILEARQKYAYGPQHDYLDHPDVIGWTREGDSSHPKSGLATLITDGPGGSKRMYAGLKNAGETWYDITGNRSDTVKIGSDGWGEFHVNDGSVSIYVQK

SEQ ID NO: 40591 - protein, 480 aa, Bacillus sp.
NGTMMQYFEWYLPNDGNHWNRLNSDASNLKSKGITAVWIPPAWKAASQNDVGYGAYDLYDLGEFNQKGTVRTKYGTRSQLQAAVTSLKNNGIQVYGDVVMNHKGGADATEMVRAVEVNPNNRNQEVTGEYTIEAWTRFDFPGRGNTHSSFKWRWYHFDGVDWDQSREFQNRIYKFRGHGKAWDWEVDTEFGNYDYLMYADYDMDHPEVVNELRNWGVWYTNTLGLDGFRIDAVKHIKYSFTRDWINHVRSATGKNMFAVAEFWKNDLGAIENYLQKTNWNHSVFDVPLHYNLYNASKSGGNYDMRNIFNGTVVQRHPSHAVTFVDNHDSQPEEALESFVEEWFKPLAYALTLTREQGYPSVFYGDYYGIPTHGVPAMRSKIDPILEARQKYAYGPQHDYLDHPDVIGWTREGDSSHPKSGLATLITDGPGGSKRMYAGLKNAGETWYDITGNRSDTVKIGSDGWGEFHVNDGSVSIYVQK

SEQ ID NO: 40592 - protein, 480 aa, Bacillus sp.
NGTMMQYFEWYLPNDGNHWNRLNSDASNLKSKGITAVWIPPAWKGASQNDVGYGAYDLYDLGEFNQKGTVRTKYGTRSQLQAAVTSLKNNGIQVYGDVVMNHKGGADATEMVRAVEVNPNNRNQEVTGEYTIEAWTRFDFPGRGNTHSSFKWRWYHFDGVDWDQSREFDNRIYKFRGHGKAWDWEVDTEFGNYDYLMYADYDMDHPEVVNELRNWGVWYTNTLGLDGFRIDAVKHIKYSFTRDWINHVRSATGKNMFAVAEFWKNDLGAIENYLQKTNWNHSVFDVPLHYNLYNASKSGGNYDMRNIFNGTVVQRHPSHAVTFVDNHDSQPEEALESFVDPWFKPLAYALTLTREQGYPSVFYGDYYGIPTHGVPAMRSKIDPILEARQKYAYGPQHDYLDHPDVIGWTREGDSSHPKSGLATLITDGPGGSKRMYAGLKNAGETWYDITGNRSDTVKIGSDGWGEFHVNGGSVSIYVQK

SEQ ID NO: 40593 - protein, 480 aa, Bacillus sp.
NGTMMQYFEWYLPNDGNHWNRLNSDASNLKSKGITAVWIPPAWKGASQNDVGYGAYDLYDLGEFNQKGTVRTKYGTRSQLQAAVTSLKNNGIQVYGDVVMNHKGGADATEMVRAVEVNPNNRNQEVTGEYTIEAWTRFDFPGRGNTHSSFKWRWYHFDGVDWDQSRRLNNRIYKFGGHGKAWDWEVDTEFGNYDYLMYADYDMDHPEVVNELRNWGVWYTNTLGLDGFRIDAVKHIKYSFTRDWINHVRSATGKNMFAVAEFWKNDLGAIENYLQKTNWNHSVFDVPLHYNLYNASKSGGNYDMRNIFNGTVVQRHPSHAVTFVDNHDSQPEEALESFVEEWFKPLAYALTLTREQGYPSVFYGDYYGIPTHGVPAMRSKIDPILEARQKYAYGPQHDYLDHPDVIGWTREGDSSHPKSGLATLITDGPGGSKRMYAGLKNAGETWYDITGNRSDTVKIGSDGWGEFHVNDGSVSIYVQK

SEQ ID NO: 40594 - protein, 480 aa, Bacillus sp.
NGTMMQYFEWYLPNDGNHWNRLNSDASNLKSKGITAVWIPPAWKGASQNDVGYGAYDLYDLGEFNQKGTVRTKYGTRSQLQAAVTSLKNNGIQVYGDVVMNHKGGADATEMVRAVEVNPNNRNQEVTGEYTIEAYTRFDFPGRGNTHSSFKWRWYHFDGVDWDQSRRLNNRIYKFRGHGKAWDWEVDTEFGNYDYLMYADYDMDHPEVVNELRNWGVWYTNTLGLDGFRIDAVKHIKYSFTRDWINHVRSATGKNMFAVAEFWKNDLGAIENYLQKTNWNHSVFDVPLHYNLYNASKSGGNYDMRNIFNGTVVQRHPSHAVTFVDNHDSQPEEALESFVEEWFKPLAYALTLTREQGYPSVFYGDYYGIPTHGVPAMRSKIDPILEARQKYAYGPQHDYLDHPDVIGWTREGDSSHPKSGLATLITDGPGGSKRMYAGLKNAGETWYDITGNRSDTVKIGSDGWGEFHVNDGSVSIYVQK

SEQ ID NO: 40595 - protein, 480 aa, Bacillus sp.
NGTMMQYFEWYLPNDGNHWNRLNSDASNLKSKGITAVWIPPAWKGASQNDVGYGAYDLYDLGEFNQKGTVRTKYGTRSQLQAAVTSLKNNGIQVYGDVVMNHKGGADATEMVRAVEVNPNNRNQEVTGEYTIEAWTRFDFPGRGNTHSSFKWRWYHFDGVDWDQSRRLNNRIYKFRGHGKAWDWEVDTEFGNYDYLMYGDYDMDHPEVVNELRNWGVWYTNTLGLDGFRIDAVKHIKYSFTRDWINHVRSATGKNMFAVAEFWKNDLGAIENYLQKTNWNHSVFDVPLHYNLYNASKSGGNYDMRNIFNGTVVQRHPSHAVTFVDNHDSQPEEALESFVEEWFKPLAYALTLTREQGYPSVFYGDYYGIPTHGVPAMRSKIDPILEARQKYAYGPQHDYLDHPDVIGWTREGDSSHPKSGLATLITDGPGGSKRMYAGLKNAGETWYDITGNRSDTVKIGSDGWGEFHVNDGSVSIYVQK

SEQ ID NO: 40596 - protein, 480 aa, Bacillus sp.
NGTMMQYFEWYLPNDGNHWNRLNSDASNLKSKGITAVWIPPAWKGASQNDVGYGAYDLYDLGEFNQKGTVRTKYGTRSQLQAAVTSLKNNGIQVYGDVVMNHKGGADATEMVRAVEVNPNNRNQEVTGEYTIEAWTRFDFPGRGNTHSSFKWRWYHFDGVDWDQSRRLNNRIYKFRGHGKAWDWEVDTEFGNYDYLMYADYDMDHPEVVNELRNWGVWYTNTLGLDGFRIDAVKHIKYSFTRDWINHVRSATGKNMFAVAEFWKNDLGAISNYLQKTNWNHSVFDVPLHYNLYNASKSGGNYDMRNIFNGTVVQRHPSHAVTFVDNHDSQPEEALESFVEEWFKPLAYALTLTREQGYPSVFYGDYYGIPTHGVPAMRSKIDPILEARQKYAYGPQHDYLDHPDVIGWTREGDSSHPKSGLATLITDGPGGSKRMYAGLKNAGETWYDITGNRSDTVKIGSDGWGEFHVNDGSVSIYVQK

SEQ ID NO: 40597 - protein, 480 aa, Bacillus sp.
NGTMMQYFEWYLPNDGNHWNRLNSDASNLKSKGITAVWIPPAWKGASQNDVGYGAYDLYDLGEFNQKGTVRTKYGTRSQLQAAVTSLKNNGIQVYGDVVMNHKGGADATEMVRAVEVNPNNRNQEVTGEYTIEAWTRFDFPGRGNTHSSFKWRWYHFDGVDWDQSRRLNNRIYKFRGHGKAWDWEVDTEFGNYDYLMYADYDMDHPEVVNELRNWGVWYTNTLGLDGFRIDAVKHIKYSFTRDWINHVRSATGKNMFAVAEFWKNDLGAIENYLQKTNWNHSVFDVPLHYNLYNASKSGGNYDMRNIFNGTVVQRHPSHAVTFVDNHDSQPEEALESFVEEWFKPLAYALTLTREQGYPSVFYGDYYGIPTHGVPAMRSKIDPILEARQKYAYGPQHDYLDHPDVIGWTREGDSSHPKQGLATLITDGPGGSKRMYAGLKNAGETWYDITGNRSDTVKIGSDGWGEFHVNDGSVSIYVQK

SEQ ID NO: 40598 - protein, 480 aa, Bacillus sp.
NGTMMQYFEWYLPNDGNHWNRLNSDASNLKSKGITAVWIPPAWKGASQNDVGYGAYDLYDLGEFNQKGTVRTKYGTRSQLQAAVTSLKNNGIQVYGDVVMNHKGGADSTEMVRAVEVNPNNRNQEVTGEYTIEAWTRFDFPGRGNTHSSFKWRWYHFDGVDWDQSRRLNNRIYKFRGHGKAWDWEVDTEFGNYDYLMYADYDMDHPEVVNELRNWGVWYTNTLGLDGFRIDAVKHIKYSFTRDWINHVRSATGKNMFAVAEFWKNDLGAIENYLQKTNWNHSVFDVPLHYNLYNASKSGGNYDMRNIFNGTVVQRHPSHAVTFVDNHDSQPEEALESFVEEWFKPLAYALTLTREQGYPSVFYGDYYGIPTHGVPAMRSKIDPILEARQKYAYGPQHDYLDHPDVIGWTREGDSSHPKSGLATLITDGPGGSKRMYAGLKNAGETWYDITGNRSDTVKIGSDGWGEFHVNDGSVSIYVQK

SEQ ID NO: 40599 - protein, 480 aa, Bacillus sp.
NGTMMQYFEWYLPNDGNHWNRLNSDASNLKSKGITAVWIPPAWKGASQNDVGYGAYDLYDLGEFNQKGTVRTKYGTRSQLQAAVTSLKNNGIQVYGDVVMNHKGGADATEMVRAVEVNPNNRNQEVTGEYTIEAWTRFDFPGRKNTHSSFKWRWYHFDGVDWDQSRRLNNRIYKFRGHGKAWDWEVDTEFGNYDYLMYADYDMDHPEVVNELRNWGVWYTNTLGLDGFRIDAVKHIKYSFTRDWINHVRSATGKNMFAVAEFWKNDLGAIENYLQKTNWNHSVFDVPLHYNLYNASKSGGNYDMRNIFNGTVVQRHPSHAVTFVDNHDSQPEEALESFVEEWFKPLAYALTLTREQGYPSVFYGDYYGIPTHGVPAMRSKIDPILEARQKYAYGPQHDYLDHPDVIGWTREGDSSHPKSGLATLITDGPGGSKRMYAGLKNAGETWYDITGNRSDTVKIGSDGWGEFHVNDGSVSIYVQK

SEQ ID NO: 40600 - protein, 480 aa, Bacillus sp.
NGTMMQYFEWYLPNDGNHWNRLNSDASNLKSKGITAVWIPPAWKGASQNDVGYGAYDLYDLGEFNQKGTVRTKYGTRSQLQAAVTSLKNNGIQVYGDVVMNHKGGADATEMVRAVEVNPNNRNQEVTGEYTIEAWTRFDFPGRGNTHSSFKWRWYHFDGVDWDQSRRLNNRIYKFRGHGKAWDWEVDTEFGNYDYLMYADYDMDHPEVVNELRNWGVWYTNTLGLDGFRIDAVKHIKYSFTRDWINHVRSATGKNMFAVAEFWKNDLGAIENYLQKTNWNHSVFDVPLHYNLYNASKSGGNYDMRNIFNGTVVQRHPSHAVTFVDNHDSQPEEALESFVETWFKPLAYALTLTREQGYPSVFYGDYYGIPTHGVPAMRSKIDPILEARQKYAYGPQHDYLDHPDVIGWTREGDSSHPKSGLATLITDGPGGSKRMYAGLKNAGETWYDITGNRSDTVKIGSDGWGEFHVNQKSVSIYVQK

SEQ ID NO: 40601 - protein, 480 aa, Bacillus sp.
NGTMMQYFEWYLPNDGNHWNRLNSDASNLKSKGIKAVWIPPAWKGASQNDVGYGAYDLYDLGEFNQKGTVRTKYGTRSQLQAAVTSLKNNGIQVYGDVVMNHKGGADATEMVRAVEVNPNNRNQEVTGEYTIEAWTRFDFPGRGNTHSSFKWRWYHFDGVDWDQSRRLNNRIYKFRGHGKAWDWEVDTEFGNYDYLMYADYDMDHPEVVNELRNWGVWYTNTLGLDGFRIDAVKHIKYSFTRDWINHVRSATGKNMFAVAEFWKNDLGAIENYLQKTNWNHSVFDVPLHYNLYNASKSGGNYDMRNIFNGTVVQRHPSHAVTFVDNHDSQPEEALESFVEEWFKPLAYALTLTREQGYPSVFYGDYYGIPTHGVPAMRSKIDPILEARQKYAYGPQHDYLDHPDVIGWTREGDSSHPKSGLATLITDGPGGSKRMYAGLKNAGETWYDITGNRSDTVKIGSDGWGEFHVNDGSVSIYVQK

SEQ ID NO: 40602 - protein, 480 aa, Bacillus sp.
NGTMMQYFEWYLPNDGNHWNRLNSDASNLKSKGITAVWIPPAWKGASQNDVGYGAYDLYDLGEFNQKGTVRTKYGTRSQLQAAVTSLKNNGIQVYGDVVMNHKGGADATEMVRAVEVNPNNRNQEVTGEYTIEAWTRFDFPGRGNTHSSFKWRWYHFDGVDWDQSRQLTNRIYKFRGHGKAWDWEVDTEFGNYDYLMYTDYDMDHPEVVNELRNWGVWYTNTLGLDGFRIDAVKHIKYSFTRDWINHVRSATGKNMFAVAEFWKNDLGAIENYLQKTNWNHSVFDVPLHYNLYNASKSGGNYDMRNIFNGTVVQRHPSHAVTFVDNHDSQPEEALESFVEEWFKPLAYALTLTREQGYPSVFYGDYYGIPTHGVPAMRSKIDPILEARQKYAYGPQHDYLDHPDVIGWTREGDSSHPKSGLATLITDGPGGSKRMYAGLKNAGETWYDITGNRSDTVKIGSDGWGEFHVNDGSVSIYVQK

SEQ ID NO: 40603 - protein, 480 aa, Bacillus sp.
NGTMMQYFEWYLPNDGNHWNRLNSDASNLKSKGITAVWIPPAWKAASQNDVGYGAYDLYDLGEFNQKGTVRTKYGTRSQLQAAVTSLKNNGIQVYGDVVMNHKGGADATEMVRAVEVNPNNRNQEVTGEYTIEAWTRFDFPGRGNTHSSFKWRWYHFDGVDWDQSRQLSNRIYKFRGHGKAWDWEVDTEFGNYDYLMYTDYDMDHPEVVNELRNWGVWYTNTLGLDGFRIDAVKHIKYSFTRDWINHVRSATGKNMFAVAEFWKNDLGAIENYLQKTNWNHSVFDVPLHYNLYNASKSGGNYDMRNIFNGTVVQRHPSHAVTFVDNHDSQPEEALESFVEEWFKPLAYALTLTREQGYPSVFYGDYYGIPTHGVPAMRSKIDPILEARQKYAYGPQHDYLDHPDVIGWTREGDSSHPKSGLATLITDGPGGSKRMYAGLKNAGETWYDITGNRSDTVKIGSDGWGEFHVNDGSVSIYVQK

SEQ ID NO: 40604 - protein, 480 aa, Bacillus sp.
NGTMMQYFEWYLPNDGNHWNRLNSDASNLKSKGITAVWIPPAWKGASQNDVGYGAYDLYDLGEFNQKGTVRTKYGTRSQLQAAVTSLKNNGIQVYGDVVMNHKGGADATEMVPAVEVNPNNRNQEVTGEYTIEAWTRFDFPGRGNTHSSFKWRWYHFDGVDWDQSRRLNNRIYKFRAHGKAWDWEVDTEFGNYDYLMYADYDMDHPEVVNELRNWGVWYTNTLGLDGFRIDAVKHIKYSFTRDWINHVRSATGKNMFAVAEFWKNDLGAIENYLQKTNWNHSVFDVPLHYNLYNASKSGGNYDMRNIFNGTVVQRHPSHAVTFVDNHDSQPEEALESFVEEWFKPLAYALTLTREQGYPSVFYGDYYGIPTHGVPAMRSKIDPILEARQKYAYGPQHDYLDHPDVIGWTREGDSSHPKSGLATLITDGPGGSKRMYAGLKNAGETWYDITGNRSDTVKIGSDGWGEFHVNDGSVSIYVQK

SEQ ID NO: 40605 - protein, 480 aa, Bacillus sp.
NATMMQYFEWYLPNDGNHWNRLNSDASNLKSKGITAVWIPPAWKGASQNDVGYGAYDLYDLGEFNQKGTVRTKYGTRSQLQAAVTSLKNNGIQVYGDVVMNHKGGADATEMVRAVEVNPNNRNQEVTGEYTIEAWTRFDFPGRGNTHSSFKWRWYHFDGVDWDQSRRLNNRIYKFRGHGKAWDWEVDTEFGNYDYLMYADYDMDHPEVVNELRNWGVWYTNTLGLDGFRIDAVKHIKYSFTRDWINHVRSATGKNMFAVAEFWKNDLGAIENYLQKTNWNHSVFDVPLHYNLYNASKSGGNYDMRNIFNGTVVQRHPSHAVTFVDNHDSQPEEALESFVEEWFKPLAYALTLTREQGYPSVFYGDYYGIPTHGVPAMRSKIDPILEARQKYAYGPQHDYLDHPDVIGWTREGDSSHPKSGLATLITDGPGGSKRMYAGLKNAGETWYDITGNRSDTVKIGSDGWGEFHVNDGSVSIYVQK

SEQ ID NO: 40606 - protein, 480 aa, Bacillus sp.
NGTMMQYFEWYLPNDGNHWNRLNSDASNLKSKGITAVWIPPAWKGASQNDVGYGAYDLYDLGEFNQKGTVRTKYGTRSQLQAAVTSLKNNGIQVYGDVVMNHKGGADATEMVRAVEVNPNNRNQEVTGEYTIEAWTRFDFPGRGNTHSSFKWRWYHFDGVDWDQSRRLNNRIYKFRGHGKAWDWEVDTEFGNYDYLMYADYDMDHPEVVNELRNWGVWYTNTLGLDGFRIDAVKHIKYSFTRDWINHVRSATGKNMFAVAEFWKNDLGAIENYLQKTNWNHSVFDVPLHYNLYNASKSGGNYDMRNIFNGTVVQRHPSHAVTFVDNHDSQPEEALESFVEEWFKPLAYALTLTREQGYPSVFYGDYYGIPTHGVPAMRSKIDPILEARQKYAYGPQHDYLDHPDVIGWTREGDSSHPKSGLATFITDGPGGSKRMYAGLKNAGETWYDITGNRSDTVKIGSDGWGEFHVNDGSVSIYVQK

SEQ ID NO: 40607 - protein, 480 aa, Bacillus sp.
NLTMMQYFEWYLPNDGNHWNRLNSDASNLKSKGITAVWIPPAWKGASQNDVGYGAYDLYDLGEFNQKGTVRTKYGTRSQLQAAVTSLKNNGIQVYGDVVMNHKGGADATEMVRAVEVNPNNRNQEVTGEYTIEAWTRFDFPGRGNTHSSFKWRWYHFDGVDWDQSRRLNNRIYKFRGHGKAWDWEVDTEFGNYDYLMYADYDMDHPEVVNELRNWGVWYTNTLGLDGFRIDAVKHIKYSFTRDWINHVRSATGKNMFAVAEFWKNDLGAIENYLQKTNWNHSVFDVPLHYNLYNASKSGGNYDMRNIFNGTVVQRHPSHAVTFVDNHDSQPEEALESFVEEWFKPLAYALTLTREQGYPSVFYGDYYGIPTHGVPAMRSKIDPILEARQKYAYGPQHDYLDHPDVIGWTREGDSSHPKSGLATLITDGPGGSKRMYAGLKNAGETWYDITGNRSDTVKIGSDGWGEFHVNDGSVSIYVQK

SEQ ID NO: 40608 - protein, 480 aa, Bacillus sp.
NGTMMQYFEWYLPNDGNHWNRLNSDASNLKSKGITAVWIPPAWKGASQNDVGYGAYDLYDLGEFNQKGTVRTKYGTRSQLQAAVTSLKNNGIQVYGDVVMNHKGGADATEMVRAVEVNPNNRNQEVTGEYTIEAWTRFDFPGRGNTHSSFKWRWYHFDGVDWDQSRELDNRIYKFRGHGKAWDWEVDTEFGNYDYLMYTDYDMDHPEVVNELRNWGVWYTNTLGLDGFRIDAVKHIKYSFTRDWINHVRSATGKNMFAVAEFWKNDLGAIENYLQKTNWNHSVFDVPLHYNLYNASKSGGNYDMRNIFNGTVVQRHPSHAVTFVDNHDSQPEEALESFVEEWFKPLAYALTLTREQGYPSVFYGDYYGIPTHGVPAMRSKIDPILEARQKYAYGPQHDYLDHPDVIGWTREGDSSHPKSGLATLITDGPGGSKRMYAGLKNAGETWYDITGNRSDTVKIGSDGWGEFHVNDGSVSIYVQK

SEQ ID NO: 40609 - protein, 480 aa, Synthetic construct
NGTMMQYFEWYLPNDGNHWNRLNSDASNLKSKGITAVWIPPAWKGASQNDVGYGAYDLYDLGEFNQKGTVRTKYGTRSQLQAAVTSLKNNGIQVYGDVVMNHKGGADATEMVRAVEVNPNNRNQEVTGDYTIEAWTRFDFPGRGNTHSSFKWRWYHFDGVDWDQSRRLNNRIYKFRGHGKAWDWEVDTEFGNYDYLMYADYDMDHPEVVNELRNWGVWYTNTLGLDGFRIDAVKHIKYSFTRDWINHVRSATGKNMFAVAEFWKNDLGAIENYLQKTNWNHSVFDVPLHYNLYNASKSGGNYDMRNIFNGTVVQRHPSHAVTFVDNHDSQPEEALESFVEEWFKPLAYALTLTREQGYPSVFYGDYYGIPTHGVPAMRSKIDPILEARQKYAYGPQHDYLDHPDVIGWTREGDSSHPKSGLATLITDGPGGSKRMYAGLKNAGETWYDITGNRSDTVKIGSDGWGEFHVNDGSVSIYVQK

SEQ ID NO: 40610 - protein, 480 aa, Bacillus sp.
NGTMMQYFEWYLPNDGNHWNRLNSDASNLKSKGITAVWIPPAWKGASQNDVGYGAYDLYDLGEFNQKGTVRTKYGTRSQLQAAVTSLKNNGIQVYGDVVMNHKGGADATEMVRAVEVNPNNRNQEVTGEYTIEAWTRFDFPGRGNTHSSFKWRWGHFDGVDWDQSRRLNNRIYKFRGHGKAWDWEVDTEFGNYDYLMYADYDMDHPEVVNELRNWGVWYTNTLGLDGFRIDAVKHIKYSFTRDWINHVRSATGKNMFAVAEFWKNDLGAIENYLQKTNWNHSVFDVPLHYNLYNASKSGGNYDMRNIFNGTVVQRHPSHAVTFVDNHDSQPEEALESFVEEWFKPLAYALTLTREQGYPSVFYGDYYGIPTHGVPAMRSKIDPILEARQKYAYGPQHDYLDHPDVIGWTREGDSSHPKSGLATLITDGPGGSKRMYAGLKNAGETWYDITGNRSDTVKIGSDGWGEFHVNDGSVSIYVQK

SEQ ID NO: 40611 - protein, 480 aa, Bacillus sp.
NGTMMQYFEWYLPNDGNHWNRLNSDASNLKSKGITAVWIPPAWKGASQNDVGYGAYDLYDLGEFNQKGTVRTKYGTRSQLQAAVTSLKNNGIQVYGDVVMNHKGGADATEMVRAVEVNPNNRNQEVTGEYTIEAWTRFDFPGRGNTHSSFKWRWYHFDGVDWDQSRRLNNRIYKFRGHGKAWDWEVDTEFGNYDYLMYADYDMDHPEVVNELRNWGVWYTNTLGLDGFRIDAVKHIKYSFTRDWINHVRSATGKNMFAVAEFWKNDLGAIENYLQKTNWNHSVFDVPLHYNLYNASKSGGNYDMRNIFNGTVVQRHPSHAVTFVDNHDSQPEEALESFVEEWFKPLAYALTLTREQGYPSVFYGDYYGIPTHGVPAMRSKIDPILEARQKYAYGPQHDYLDHPDVIGWTREGDSSHPKSGLATLITDGPGGSKRMYAGLKNAGETWYDITGNRSDTVKIGSDGWGEFHVNDGSVSIYRQK

SEQ ID NO: 40612 - protein, 480 aa, Bacillus sp.
NGTMMQYFEWYLPNDGNHWNRLNSDASNLKSKGITAVWIPPAWKGASQNDVGYGAYDLYDLGEFNQKGTVRTKYGTRSQLQAAVTSLKNNGIQVYGDVVMNHKGGADATEMVRAVEVNPNNRNQEVTGEYTIEAWTRFDFPGRGNTHSSFKWRWYHFDGVDWDQSRRLNNRIYKFRGHGKAWDWEVDTEFGNYDYLMYADYDMDHPEVVNELRNWGVWYTNTLGLDGFRIDAVKHIKYSFTRDWINHVRSATGKNMFAVAEFWKNDLGAIENYLQKTNWNHSVFDVPLHYNLYNASKSGGNYDMRNIFNGTVVQRHPSHAVTFVDNHDSQPEEALESFVEEWFKPLAYALTLTREQGYPSVFYGDYYGIPTHGVPAMRSKIDPILEARQKYAYGPQHDYLDHPDVIGWTREGDSSHPKSGLATLITDGPGGSKRMYAGLKNAGETWYDITGNRSDTVKIGSDGWGEFHVNKGSVSIYVQK

SEQ ID NO: 40613 - protein, 480 aa, Bacillus sp.
NGTMMQYFEWYLPNDGNHWNRLNSDASNLKSKGITAVWIPPAWKAVSQNDVGYGAYDLYDLGEFNQKGTVRTKYGTRSQLQAAVTSLKNNGIQVYGDVVMNHKGGADATEMVPAVEVNPNNRNQEVTGEYTIEAWTRFDFPGRGNTHSSFKWRWYHFDGVDWDQSRELSNRIYKFRGHSKAWDWEVDTEFGNYDYLMYADYDMDHPEVVNELRNWGVWYTNTLGLDGFRIDAVKHIKYSFTRDWINHVRSATGKNMFAVAEFWKNDLGAIENYLQKTNWNHSVFDVPLHYNLYNASKSGGNYDMRNIFNGTVVQRHPSHAVTFVDNHDSQPEEALESFVEEWFKPLAYALTLTREQGYPSVFYGDYYGIPTHGVPAMRSKIDPILEARQKYAYGPQHDYLDHPDVIGWTREGDSSHPKSGLATLITDGPGGSKRMYAGLKNAGETWYDITGNRSDTVKIGSDGWGEFHVNDGSVSIYVQK

SEQ ID NO: 40614 - protein, 480 aa, Bacillus sp.
NGTMMQYFEWYLPNDGNHWNRLNSDASNLKSKGITAVWIPPAWKAASQNDVGYGAYDLYDLGEFNQKGTVRTKYGTRSQLQAAVTSLKNNGIQVYGDVVMNHKGGADATEMVRAVEVNPNNRNQEVTGEYTIEAWTRFDFPGRGNTHSSFKWRWYHFDGVDWDQSREFTNRIYKFRGHGKAWDWEVDTEFGNYDYLMYADYDMDHPEVVNELRNWGVWYTNTLGLDGFRIDAVKHIKYSFTRDWINHVRSATGKNMFAVAEFWKNDLGAIENYLQKTNWNHSVFDVPLHYNLYNASKSGGNYDMRNIFNGTVVQRHPSHAVTFVDNHDSQPEEALESFVEEWFKPLAYALTLTREQGYPSVFYGDYYGIPTHGVPAMRSKIDPILEARQKYAYGPQHDYLDHPDVIGWTREGDSSHPKSGLATLITDGPGGSKRMYAGLKNAGETWYDITGNRSDTVKIGSDGWGEFHVNDGSVSIYVQK

SEQ ID NO: 40615 - protein, 480 aa, Bacillus sp.
NGTMMQYFEWYLPNDGNHWNRLNSDASNLKSKGITAVWIPPAWKGASQNDVGYGAYDLYDLGEFNQKGTVRTKYGTRSQLQAAVTSLKNNGIQVYGDVVMNHKGGADATEMVRAVEVNPNNRNQEVTGEYTIEAWTRFDFPGRGNTHSSFKWRWYHFDGVDWDQSRRLNNRIYKFRGHGKAWDWEVDTEFGNYDYLMYADYDMDHVEVVNELRNWGVWYTNTLGLDGFRIDAVKHIKYSFTRDWINHVRSATGKNMFAVAEFWKNDLGAIENYLQKTNWNHSVFDVPLHYNLYNASKSGGNYDMRNIFNGTVVQRHPSHAVTFVDNHDSQPEEALESFVEEWFKPLAYALTLTREQGYPSVFYGDYYGIPTHGVPAMRSKIDPILEARQKYAYGPQHDYLDHPDVIGWTREGDSSHPKSGLATLITDGPGGSKRMYAGLKNAGETWYDITGNRSDTVKIGSDGWGEFHVNDGSVSIYVQK

SEQ ID NO: 40616 - protein, 480 aa, Bacillus sp.
NGTMMQYFEWYLPNDGNHWNRLNSDASNLKSKGITAVWIPPAWKGASQNDVGYGAYDLYDLGEFNQKGTVRTKYGTRSQLQAAVTSLKNNGIQVYGDVVMNHKGGADATEMVRAVEVNPNNRNQEVTGEYTIEAWTRFDFPGRGNTHSSFKWRWYHFDGVDWDQSHRLNNRIYKFRGHGKAWDWEVDTEFGNYDYLMYADYDMDHPEVVNELRNWGVWYTNTLGLDGFRIDAVKHIKYSFTRDWINHVRSATGKNMFAVAEFWKNDLGAIENYLQKTNWNHSVFDVPLHYNLYNASKSGGNYDMRNIFNGTVVQRHPSHAVTFVDNHDSQPEEALESFVEEWFKPLAYALTLTREQGYPSVFYGDYYGIPTHGVPAMRSKIDPILEARQKYAYGPQHDYLDHPDVIGWTREGDSSHPKSGLATLITDGPGGSKRMYAGLKNAGETWYDITGNRSDTVKIGSDGWGEFHVNDGSVSIYVQK

SEQ ID NO: 40617 - protein, 480 aa, Bacillus sp.
NGTMMQYFEWYLPNDGNHWNRLNSDASNLKSKGITAVWIPPAWKGASQNDVGYGAYDLYDLGEFNQKGTVRTKYGTRSQLQAAVTSLKNNGIQVYGDVVMNHKGGADATEMVRAVEVNPNNRNQEVTGEYTIEAWTRFDFPGRGNTHSSFKWRWYHFDGVDWDQSREFDNRIYKFRGHGKAWDWEVDTEFGNYDYLMYADYDMDHPEVVNELRNWGVWYTNTLGLDGFRIDAVKHIKYSFMRDWINHVRIATGKNMFAVAEFWKNDLGAIENYLQKTNWNHSVFDVPLHYNLYNASKSGGNYDMRNIFNGTVVQRHPSHAVTFVDNHDSQPEEALESFVDEWFKPLAYALTLTREQGYPSVFYGDYYGIPTHGVPAMRSKIDPILEARQKYAYGPQHDYLDHPDVIGWTREGDSSHPKSGLATLITDGPGGSKRMYAGLKNAGETWYDITGNRSDTVKIGSDGWGEFHVNDQSVSIYVQK

SEQ ID NO: 40618 - protein, 480 aa, Bacillus sp.
NGTMMQYFEWYLPNDGNHWNRLNSDASNLKSKGITAVWIPPAWKGASQNDVGYGAYDLYDLGEFNQKGTVRTKYGTRSQLQAAVTSLKNNGIQVYGDVVMNHKGGADATEMVRAVEVNPNNRNQEVTGEYTIEAWTRFDFPGRGNTHSSFKWRWYHFDGVDWDQSRRLNNRIYKFRGHGKAWDWEVDTEFGNYDYLMYADYDMDHPEVVNELRNWGVWYTNTLGLDGFRIDAVKHIKYSFTRDWINHVRSATGKNMFAVAEFWKNDLGAIENYLQKTNWNHSVFDVPLHYNLYNASKSGGNYDMRNIFNGTVVQRHPSHAVTFVDNHDSQPEEALESFVEEWFKPLAYALTLTREQGYPSVFYGDYYGIPTHGVPAMRSKIDPILEARQKYAYGPQHDYLDHPDVIGWTREGDSSHPKSGLATLITDGPGGSKRMYVGLKNAGETWYDITGNRSDTVKIGSDGWGEFHVNDGSVSIYVQK

SEQ ID NO: 40619 - protein, 480 aa, Bacillus sp.
NGTMMQYFEWYLPNDGNHWNRLNSDASNLKSKGITAVWIPPAWKGASQNDVGYGAYDLYDLGEFNQKGTVRTKYGTRSQLQAAVTSLKNNGIQVYGDVVMNHKGGADTTEMVRAVEVNPNNRNQEVTGEYTIEAWTRFDFPGRGNTHSSFKWRWYHFDGVDWDQSRDLQNRIYKFRGHGKAWDWEVDTEFGNYDYLMYADYDMDHPEVVNELRNWGVWYTNTLGLDGFRIDAVKHIKYSFTRDWINHVRSATGKNMFAVAEFWKNDLGAIENYLQKTNWNHSVFDVPLHYNLYNASKSGGNYDMRNIFNGTVVQRHPSHAVTFVDNHDSQPEEALESFVETWFKPLAYALTLTREQGYPSVFYGDYYGIPTHGVPAMRSKIDPILEARQKYAYGPQHDYLDHPDVIGWTREGDSSHPKSGLATLITDGPGGSKRMYAGLKNAGETWYDITGNRSDTVKIGSDGWGEFHVNKGSVSIYVQK

SEQ ID NO: 40620 - protein, 480 aa, Bacillus sp.
NGTMMQYFEWYLPNDGNHWNRLNSDASNLKSKGITAVWIPPAWKGASQNDVGYGAYDLYDLGEFNQKGTVRTKYGTRSQLQAAVTSLKNNGIQVYGDVVMNHKGGADATEMVRAVEVNPNNRNQEVTGEYTIEAWTRFDFPGRGNTHSSFKWRWRHFDGVDWDQSRRLNNRIYKFRGHGKAWDWEVDTEFGNYDYLMYADYDMDHPEVVNELRNWGVWYTNTLGLDGFRIDAVKHIKYSFTRDWINHVRSATGKNMFAVAEFWKNDLGAIENYLQKTNWNHSVFDVPLHYNLYNASKSGGNYDMRNIFNGTVVQRHPSHAVTFVDNHDSQPEEALESFVEEWFKPLAYALTLTREQGYPSVFYGDYYGIPTHGVPAMRSKIDPILEARQKYAYGPQHDYLDHPDVIGWTREGDSSHPKSGLATLITDGPGGSKRMYAGLKNAGETWYDITGNRSDTVKIGSDGWGEFHVNDGSVSIYVQK

SEQ ID NO: 40621 - protein, 480 aa, Bacillus sp.
NGTMMQYFEWYLPNDGNHWNRLNSDASNLKSKGITAVWIPPAWKAASQNDVGYGAYDLYDLGEFNQKGTVRTKYGTRSQLQAAVTSLKNNGIQVYGDVVMNHKGGADATEMVRAVEVNPNNRNQEVTGEYTIEAWTRFDFPGRGNTHSSFKWRWYHFDGVDWDQSREFNNRIYKFRGHGKAWDWEVDTEFGNYDYLMYADYDMDHPEVVNELRNWGVWYTNTLGLDGFRIDAVKHIKYSFTRDWINHVRSATGKNMFAVAEFWKNDLGAIENYLQKTNWNHSVFDVPLHYNLYNASKSGGNYDMRNIFNGTVVQRHPSHAVTFVDNHDSQPEEALESFVEEWFKPLAYALTLTREQGYPSVFYGDYYGIPTHGVPAMRSKIDPILEARQKYAYGPQHDYLDHPDVIGWTREGDSSHPKSGLATLITDGPGGSKRMYAGLKNAGETWYDITGNRSDTVKIGSDGWGEFHVNDGSVSIYVQK

SEQ ID NO: 40622 - protein, 480 aa, Bacillus sp.
NGTMMQYFEWYLPNDGNHWNRLNSDASNLKSKGITAVWIPPAWKGASQNDVGYGAYDLYDLGEFNQKGTVRTKYGTRSQLQAAVTSLKNNGIQVYGDVVMNHKGGADATEMVRAVEVNPNNRNQEVTGEYTIEAWTRFDFPGRGNTHSSFKWRWYHFDGVDWDQSRRLNNRIYKFRGHGKAWDWEVDTEFGNYDYLMYADYDMDHPEVVNELRNWGVWYTNTLGLDGFRIDAVKHIKYSFTRDWINHVRSATGKNMFAVAEFWKNDLGAIENYLQKTNWNHSVFDVPLHYNLYNASKSGGNYDMRNIFNGTVVQRVPSHAVTFVDNHDSQPEEALESFVEEWFKPLAYALTLTREQGYPSVFYGDYYGIPTHGVPAMRSKIDPILEARQKYAYGPQHDYLDHPDVIGWTREGDSSHPKSGLATLITDGPGGSKRMYAGLKNAGETWYDITGNRSDTVKIGSDGWGEFHVNDGSVSIYVQK

SEQ ID NO: 40623 - protein, 480 aa, Bacillus sp.
NGTMMQYFEWYLPNDGNHWNRLNSDASNLKSKGITAVWIPPAWKGASQNDVGYGAYDLYDLGEFNQKGTVRTKYGTRSQLQAAVTSLKNNGIQVYGDVVMNHKGGADATEMVRAVEVNPNNRNQEVTGEYTIEAWTRFDFPGRGNTHSSFKWRWYHFDGVDWDQSREFDNRIYKFRGHGKAWDWEVDTEFGNYDYLMYADYDMDHPEVVNELRNWGVWYTNTLGLDGFRIDAVKHIKYSFTRDWINHVRSATGKNMFAVAEFWKNDLGAIENYLQKTNWNHSVFDVPLHYNLYNASKSGGNYDMRNIFNGTVVQRHPSHAVTFVDNHDSQPEEALESFVETWFKPLAYALTLTREQGYPSVFYGDYYGIPTHGVPAMRSKIDPILEARQKYAYGPQHDYLDHPDVIGWTREGDSSHPKSGLATLITDGPGGSKRMYAGLKNAGETWYDITGNRSDTVKIGSDGWGEFHVNKASVSIYVQK

SEQ ID NO: 40624 - protein, 480 aa, Bacillus sp.
NGTMMQYFEWYLPNDGNHWNRLNSDASNLKSKGITAVWIPPAWKGASQNDVGYGAYDLYDLGEFNQKGTVRTKYGTRSQLQAAVTSLKNNGIQVYGDVVMNHKGGADATEMVRAVEVNPNNRNQEVTGEYTIEAWTRFDFPGRGNTHSSFKWRWYHFDGVDWDQSRRLNNRIYKFRGHGKAWDWEVDTEFGNYDYLMYADYDMDHPEVVNELRNWGVWYTNTLGLDGFRIDAVKHIKYSFTRDWINHVRSATGKNMFAVAEFWKNDLGAIENYLQKTNWNHSVFDAPLHYNLYNASKSGGNYDMRNIFNGTVVQRHPSHAVTFVDNHDSQPEEALESFVEEWFKPLAYALTLTREQGYPSVFYGDYYGIPTHGVPAMRSKIDPILEARQKYAYGPQHDYLDHPDVIGWTREGDSSHPKSGLATLITDGPGGSKRMYAGLKNAGETWYDITGNRSDTVKIGSDGWGEFHVNDGSVSIYVQK

SEQ ID NO: 40625 - protein, 480 aa, Bacillus sp.
NGTMMQYFEWYLPNDGNHWNRLNSDASNLKSKGITAVWIPPAWKGASQNDVGYGAYDLYDLEEFNQKGTVRTKYGTRSQLQAAVTSLKNNGIQVYGDVVMNHKGGADATEMVRAVEVNPNNRNQEVTGEYTIEAWTRFDFPGRGNTHSSFKWRWYHFDGVDWDQSRRLNNRIYKFRGHGKAWDWEVDTEFGNYDYLMYADYDMDHPEVVNELRNWGVWYTNTLGLDGFRIDAVKHIKYSFTRDWINHVRSATGKNMFAVAEFWKNDLGAIENYLQKTNWNHSVFDVPLHYNLYNASKSGGNYDMRNIFNGTVVQRHPSHAVTFVDNHDSQPEEALESFVEEWFKPLAYALTLTREQGYPSVFYGDYYGIPTHGVPAMRSKIDPILEARQKYAYGPQHDYLDHPDVIGWTREGDSSHPKSGLATLITDGPGGSKRMYAGLKNAGETWYDITGNRSDTVKIGSDGWGEFHVNDGSVSIYVQK

SEQ ID NO: 40626 - protein, 480 aa, Bacillus sp.
NGTMMQYFEWYLPNDGNHWNRLNSDASNLKSKGITAVWIPPAWKAASQNDVGYGAYDLYDLGEFNQKGTVRTKYGTRSQLQAAVTSLKNNGIQVYGDVVMNHKGGADATEMVRAVEVNPNNRNQEVTGEYTIEAWTRFDFPGRGNTHSSFKWRWYHFDGVDWDQSRELTNRIYKFRGHGKAWDWEVDTEFGNYDYLMYADYDMDHPEVVNELRNWGVWYTNTLGLDGFRIDAVKHIKYSFTRDWINHVRSATGKNMFAVAEFWKNDLGAIENYLQKTNWNHSVFDVPLHYNLYNASKSGGNYDMRNIFNGTVVQRHPSHAVTFVDNHDSQPEEALESFVEEWFKPLAYALTLTREQGYPSVFYGDYYGIPTHGVPAMRSKIDPILEARQKYAYGPQHDYLDHPDVIGWTREGDSSHPKSGLATLITDGPGGSKRMYAGLKNAGETWYDITGNRSDTVKIGSDGWGEFHVNDGSVSIYVQK

SEQ ID NO: 40627 - protein, 480 aa, Bacillus sp.
NGTMMQYFEWYLPNDGNHWNRLNSDASNLKSKGITAVWIPPAWKGASQNDVGYGAYDLYDLGEFNQKGTVRTKYGTRSQLQAAVTSLKNNGIQVYGDVVMNHKGGADATEMVRAVEVNPNNRNQEVTGEYTIEAWTRFDFPGRGNTHSSFKWRWYHFDGVDWDQSRRLNNRIYKFRGHGKAWDWEVDTEFGNYDYLMYADYDMDHPEVVNELRNWGVWYTNTLGLDGFRIDAVKHIKYSFTRDWINHVRSATGKNMFAVAEFWKNDLGAIENYLQKTNWNHSVFDVPLHYNLYNASKSGGNYDMRNIFNGTVVQRHPSHAVTFVDNHDSQPEEALESFVEEWFKPLAYALTLTREQGYPSVFYGDYYGIPTHGVPAMRSKIDPILEARQKYAYGPQHDYLDHPDVIGWTREGDSSHPKSGLATLITDGPGGSKRMYAGLKKAGETWYDITGNRSDTVKIGSDGWGEFHVNDGSVSIYVQK

SEQ ID NO: 40628 - protein, 480 aa, Bacillus sp.
NGTMMQYFEWYLPNDGNHWNRLNSDASNLKSKGITAVWIPPAWKGASQNDVGYGAYDLYDLGEFNQKGTVRTKYGTRSQLQAAVTSLKNNGIQVYGDVVMNHKGGADATEMVRAVEVNPNNRNQEVTGEYTIEAWTRFDFPGRGNTHSSFKWRWYHFDGVDWDQSRRFDNRIYKFRGHGKAWDWEVDTEFGNYDYLMYSDYDMDHPEVVNELRNWGVWYTNTLGLDGFRIDAVKHIKYSFTRDWINHVRSATGKNMFAVAEFWKNDLGAIENYLQKTNWNHSVFDVPLHYNLYNASKSGGNYDMRNIFNGTVVQRHPSHAVTFVDNHDSQPEEALESFVEEWFKPLAYALTLTREQGYPSVFYGDYYGIPTHGVPAMRSKIDPILEARQKYAYGPQHDYLDHPDVIGWTREGDSSHPKSGLATLITDGPGGSKRMYAGLKNAGETWYDITGNRSDTVKIGSDGWGEFHVNDGSVSIYVQK

SEQ ID NO: 40629 - protein, 480 aa, Bacillus sp.
NGTMMQYFEWYLPNDGNHWNRLNSDASNLKSKGITAVWIPPAWKGASQNDVGYGAYDLYDLGEFNQKGTVRTKYGTRSQLQAAVTSLKNNGIQVYGDVVMNHKGGADATEMVRAVEVNPNNRNQEVTGEYTIEAWTRFDFPGRGNTHSSFKWRWYHFDGVDWDQSRRLNNRIYKFRGHGKAWDWEVDTEFGNYDYLMYADYDMDHPEVVNELRNWGVWYTNTLGLDGFRIDAVKHIKYSFTRDWINHVRSATGKNMFAVAEFWKNDLGAIENYLQKTNWNHSVFDVPLGYNLYNASKSGGNYDMRNIFNGTVVQRHPSHAVTFVDNHDSQPEEALESFVEEWFKPLAYALTLTREQGYPSVFYGDYYGIPTHGVPAMRSKIDPILEARQKYAYGPQHDYLDHPDVIGWTREGDSSHPKSGLATLITDGPGGSKRMYAGLKNAGETWYDITGNRSDTVKIGSDGWGEFHVNDGSVSIYVQK

SEQ ID NO: 40630 - protein, 480 aa, Bacillus sp.
NGTMMQYFEWYLPNDGNHWNRLNSDASNLKSKGITAVWIPPAWKGASQNDVGYGAYDLYDLGEFNQKGTVRTKYGTRSQLQAAVTSLKNNGIQVYGDVVMNHKGGADATEMVRAVEVNPNNRNQEVTGEYTIEAWTRFDFPGRGNTHSSFKWRWYHFDGVDWDQSRRLNNRIYKFRGHGKAWDWEVDTEFGNYDYLMYADYDMDHPEVVNELRNWGVWYTNTLGLDGFRIDAVKHIKYSFTRDWINHVRSATGKNMFAVAEFWKNDLGAIENYLQKTNWNHSVFDVPLHYNLYNASNSGGNYDMRNIFNGTVVQRHPSHAVTFVDNHDSQPEEALESFVDTWFKPLAYALTLTREQGYPSVFYGDYYGIPTHGVPAMRSKIDPILEARQKYAYGPQHDYLDHPDVIGWTREGDSSHPKSGLATLITDGPGGSKRMYAGLKNAGETWYDITGNRSDTVKIGSDGWGEFHVNQQSVSIYVQK

SEQ ID NO: 40631 - protein, 480 aa, Bacillus sp.
NGTMMQYFEWYLPNDGNHWNRLNSDASNLKSKGITAVWIPPAWKGASQNDVGYGAYDLYDLGEFNQKGTVRTKYGTRSQLQAAVTSLKNNGIQVYGDVVMNHKGGADATEMVRAVEVNPNNRNQEVTGEYTIEAWTRFDFPGRGNTHSSFKWRWYHFDGVDWDQSRRLNNRIYKFRGHGKAWDWEVDTEFGNYDYLMYADYDMDHPEVVNELRNWGVWYTNTLGLDGFRIDAVKHIKYSFTRDWINHVRSATGKNMFAVAEFLKNDLGAIENYLQKTNWNHSVFDVPLHYNLYNASKSGGNYDMRNIFNGTVVQRHPSHAVTFVDNHDSQPEEALESFVEEWFKPLAYALTLTREQGYPSVFYGDYYGIPTHGVPAMRSKIDPILEARQKYAYGPQHDYLDHPDVIGWTREGDSSHPKSGLATLITDGPGGSKRMYAGLKNAGETWYDITGNRSDTVKIGSDGWGEFHVNDGSVSIYVQK

SEQ ID NO: 40632 - protein, 480 aa, Bacillus sp.
NGTMMQYFEWYLPNDGNHWNRLNSDASNLKSKGITAVWIPPAWKGASQNDVGYGAYDLYDLGEFNQKGTVRTKYGTRSQLQAAVTSLKNNGIQVYGDVVMNHKGGADATEMVRAVEVNPNNRNQEVTGEYTIEAWTRFDFPGRGNTHSSFKWRWYHFDGVDWDQSRRLNNRIYKFRGHGKAWDWEVDTEFGNYDYLMYADYDMDHPEVVNELRNWGVWYTNTLGLDGFRIDAVKHIKYSFTRDWINHVRSATGKNMFAVAEFWKNDLGAIENYLQKTNWNHSVFDVPLHYNLYNASKSGGNYDMRNIFNGTVVQTHPSHAVTFVDNHDSQPEEALESFVEEWFKPLAYALTLTREQGYPSVFYGDYYGIPTHGVPAMRSKIDPILEARQKYAYGPQHDYLDHPDVIGWTREGDSSHPKSGLATLITDGPGGSKRMYAGLKNAGETWYDITGNRSDTVKIGSDGWGEFHVNDGSVSIYVQK

SEQ ID NO: 40633 - protein, 480 aa, Bacillus sp.
NGTMMQYFEWYLPNDGNHWNRLNSDASNLKSKGITAVWIPPAWKGASQNDVGYGAYDLYDLGEFNQKGTVRTKYGTRSQLQAAVTSLKNNGIQVYGDVVMNHKGGADATEMVRAVEVNPNNRNQEVTGEYTIEAWTRFDFPGRGNTHSSFKWRWYHFDGVDWDQSRNLTNRIYKFRGHGKAWDWEVDTEFGNYDYLMYVDYDMDHPEVVNELRNWGVWYTNTLGLDGFRIDAVKHIKYSFTRDWINHVRSATGKNMFAVAEFWKNDLGAIENYLQKTNWNHSVFDVPLHYNLYNASKSGGNYDMRNIFNGTVVQRHPSHAVTFVDNHDSQPEEALESFVEEWFKPLAYALTLTREQGYPSVFYGDYYGIPTHGVPAMRSKIDPILEARQKYAYGPQHDYLDHPDVIGWTREGDSSHPKSGLATLITDGPGGSKRMYAGLKNAGETWYDITGNRSDTVKIGSDGWGEFHVNDGSVSIYVQK

SEQ ID NO: 40634 - protein, 480 aa, Bacillus sp.
NGTMMQYFEWYLPNDGNHWNRLNSDASNLKSKGITAVWIPPAWKGASQNDVGYGAYDLYDLGEFNQKGTVRTKYGTRSQLQAAVTSLKNNGIQVYGDVVMNHKGGADATEMVRAVEVNPNNRNQEVTGEYTIEAWTRFDFPGRGNTHSSFKWRWYHFDGVDWDQSRRLNNRIYKFRGHGKAWDWEVDTEFGNYDYLMYADYDMDHPEVVNELRNWGVWYTNTLGLDGFRIDAVKHIKYSFTRDWINHVRSATGKNMFAVAEFWKNDLGAIENYLQKTNWNHSVFDVPLHYNLYNASKSGGNYDMRNIFNGTVVQRWPSHAVTFVDNHDSQPEEALESFVEEWFKPLAYALTLTREQGYPSVFYGDYYGIPTHGVPAMRSKIDPILEARQKYAYGPQHDYLDHPDVIGWTREGDSSHPKSGLATLITDGPGGSKRMYAGLKNAGETWYDITGNRSDTVKIGSDGWGEFHVNDGSVSIYVQK

SEQ ID NO: 40635 - protein, 480 aa, Bacillus sp.
NGTMMQYFEWYLPNDGNHWNRLNSDASNLKSKGITAVWIPPAWKAASQNDVGYGAYDLYDLGEFNQKGTVRTKYGTRSQLQAAVTSLKNNGIQVYGDVVMNHKGGADATEMVRAVEVNPNNRNQEVTGEYTIEAWTRFDFPGRGNTHSSFKWRWYHFDGVDWDQSRQFNNRIYKFRGHGKAWDWEVDTEFGNYDYLMYADYDMDHPEVVNELRNWGVWYTNTLGLDGFRIDAVKHIKYSFTRDWINHVRSATGKNMFAVAEFWKNDLGAIENYLQKTNWNHSVFDVPLHYNLYNASKSGGNYDMRNIFNGTVVQRHPSHAVTFVDNHDSQPEEALESFVEEWFKPLAYALTLTREQGYPSVFYGDYYGIPTHGVPAMRSKIDPILEARQKYAYGPQHDYLDHPDVIGWTREGDSSHPKSGLATLITDGPGGSKRMYAGLKNAGETWYDITGNRSDTVKIGSDGWGEFHVNDGSVSIYVQK

SEQ ID NO: 40636 - protein, 480 aa, Bacillus sp.
NGTMMQYFEWYLPNDGNHWNRLNSDASNLKSKGITAVWIPPAWKGASQNDVGYGAYDLYDLGEFNQKGTVRTKYGTRSQLQAAVTSLKNNGIQVYGDVVMNHKGGADATEMVRAVEVNPNNRNQEVTGEYTIEAWTRFDFPGRGNTHSSFKWRWYHFDGVDWDQSRRLNNRIYKFRGHGKAWDWEVDTEFGNYDYLMYADYDMDHPEVVNELRNWGVWYTNTLGLDGFRIDAVKHIKYSFTRDWINHVRSATGKNMFAVAEFWKNDLGAIENYLQKTNWNHSVFDVPLHYNLYNASKSGGNYDMRNIFNGTVVQRHPSHAVTFVDNHDSQPEEALESFVEEWFKPLAYALTLTREQGYPSVFYGDYYGIPTHGVPAMRSKIDPILEARQKYAYGPQHDYLDHPDVIGWTREGDSSHPKSGLATLITDGPGGSKRMYAGLKNTGETWYDITGNRSDTVKIGSDGWGEFHVNDGSVSIYVQK

SEQ ID NO: 40637 - protein, 480 aa, Bacillus sp.
NGTMMQYFEWYLPNDGNHWNRLNSDASNLKSKGITAVWIPPAWKGASQNDVGYGAYDLYDLGEFNQKGTVRTKYGTRSQLQAAVTSLKNNGIQVYGDVVMNHKGGADATEMVRAVEVNPNNRLQEVTGEYTIEAWTRFDFPGRGNTHSSFKWRWYHFDGVDWDQSRRLNNRIYKFRGHGKAWDWEVDTEFGNYDYLMYADYDMDHPEVVNELRNWGVWYTNTLGLDGFRIDAVKHIKYSFTRDWINHVRSATGKNMFAVAEFWKNDLGAIENYLQKTNWNHSVFDVPLHYNLYNASKSGGNYDMRNIFNGTVVQRHPSHAVTFVDNHDSQPEEALESFVEEWFKPLAYALTLTREQGYPSVFYGDYYGIPTHGVPAMRSKIDPILEARQKYAYGPQHDYLDHPDVIGWTREGDSSHPKSGLATLITDGPGGSKRMYAGLKNAGETWYDITGNRSDTVKIGSDGWGEFHVNDGSVSIYVQK

SEQ ID NO: 40638 - protein, 480 aa, Bacillus sp.
NGTMMQYFEWYLPNDGNHWNRLNSDASNLKSKGITAVWIPPAWKGASQNDVGYGAYDLYDLGEFNQKGTVRTKYGTRSQLQAAVTSLKNNGIQVYGDVVMNHKGGADATEMVRAVEVNPNNRNQEVTGEYTIEAWTRFDFPGRGNTHSSFKWRWYHFDGVDWDQSRRLNNRIYKFRGHGKAWDWEVDTEFGNYDYLMYADYDMDHPEVVNELRNWGVWYTNTLGLDGFRIDAVKHIKYSFTRDWINHVRSATGKNMFAVAEFWKNDLGAIENYLQKTNWNHSVFDVPLHYNLYNASKSGGNYDMRNIFNGTVVQRHPSHAVTFVDNHDSQPEEALESFVEEWFAPLAYALTLTREQGYPSVFYGDYYGIPTHGVPAMRSKIDPILEARQKYAYGPQHDYLDHPDVIGWTREGDSSHPKSGLATLITDGPGGSKRMYAGLKNAGETWYDITGNRSDTVKIGSDGWGEFHVNDGSVSIYVQK

SEQ ID NO: 40639 - protein, 480 aa, Bacillus sp.
NGTMMQYFEWYLPNDGNHWNRLNSDASNLKSKGITAVWIPPAWKGASQNDVGYGAYDLYDLGEFNQKGTVRTKYGTRSQLQAAVTSLKNNGIQVYGDVVMNHKGGADATEMVSAVEVNPNNRNQEVTGDYTIEAWTRFDFPGRGNTHSSFKWRWYHFDGVDWDQSRRLNNRIYKFRGHGKAWDWEVDTEFGNYDYLMYADYDMDHPEVVNELRNWGVWYTNTLGLDGFRIDAVKHIKYSFTRDWINHVRSATGKNMFAVAEFWKNDLGAIENYLQKTNWNHSVFDVPLHYNLYNASKSGGNYDMRNIFNGTVVQRHPSHAVTFVDNHDSQPEEALESFVEEWFKPLAYALTLTREQGYPSVFYGDYYGIPTHGVPAMRSKIDPILEARQKYAYGPQHDYLDHPDVIGWTREGDSSHPKSGLATLITDGPGGSKRMYAGLKNAGETWYDITGNRSDTVKIGSDGWGEFHVNDGSVSIYVQK

SEQ ID NO: 40640 - protein, 480 aa, Bacillus sp.
NGTMMQYFEWYLPNDGNHWNRLNSDASNLKSKGITAVWIPPAWKGASQNDVGYGAYDLYDLGEFNQKGTVRTKYGTRSQLQAAVTSLKNNGIQVYGDVVMNHKGGADATEMVRAVEVNPNNRNQEVTGEYTIEAWTRFDFPGRGNTHSSFKWRWYHFDGVDWDQSRRLNNRIYKFRGHGKAWDWEVDTEFGNYDYLMYADYDMDHPEVVNELRNWGVWYTNTLGLDGFRIDAVKHIKYSFTRDWINHVRSATGKNMFAVAEFWKNDLGAIENYLQKTNWNHSVFDVPLHYNLYNASKSGGNYDMRNIFNGTVVQRHPSHAVTFVDNHDSQPEEALESFVDTWFKPLAYALTLTREQGYPSVFYGDYYGIPTHGVPAMRSKIDPILEARQKYAYGPQHDYLDHPDVIGWTREGDSSHPKSGLATLITDGPGGSKRMYAGLKNAGETWYDITGNRSDTVKIGSDGWGEFHVNGASVSIYVQK

SEQ ID NO: 40641 - protein, 480 aa, Bacillus sp.
NGTMMQYFEWYLPNDGNHWNRLNSDASNLKSKGITAVWIPPAWKAASQNDVGYGAYDLYDLGEFNQKGTVRTKYGTRSQLQAAVTSLKNNGIQVYGDVVMNHKGGADATEMVRAVEVNPNNRNQEVTGEYTIEAWTRFDFPGRGNTHSSFKWRWYHFDGVDWDQSRQFQNRIYKFRGHGKAWDWEVDTEFGNYDYLMYADYDMDHPEVVNELRNWGVWYTNTLGLDGFRIDAVKHIKYSFTRDWINHVRSATGKNMFAVAEFWKNDLGAIENYLQKTNWNHSVFDVPLHYNLYNASKSGGNYDMRNIFNGTVVQRHPSHAVTFVDNHDSQPEEALESFVEEWFKPLAYALTLTREQGYPSVFYGDYYGIPTHGVPAMRSKIDPILEARQKYAYGPQHDYLDHPDVIGWTREGDSSHPKSGLATLITDGPGGSKRMYAGLKNAGETWYDITGNRSDTVKIGSDGWGEFHVNDGSVSIYVQK

SEQ ID NO: 40642 - protein, 480 aa, Bacillus sp.
NGTMMQYFEWYLPNDGNHWNRLNSDASNLKSKGITAVWIPPAWKAISQNDVGYGAYDLYDLGEFNQKGTVRTKYGTRSQLQAAVTSLKNNGIQVYGDVVMNHKGGADATEMVRAVEVNPNNRNQEVTGEYTIEAWTRFDFPGRGNTHSSFKWRWYHFDGVDWDQSRDVNNRIYKFRGHGKAWDWEVDTEFGNYDYLMYADYDMDHPEVVNELRNWGVWYTNTLGLDGFRIDAVKHIKYSFTRDWINHVRSATGKNMFAVAEFWKNDLGAIENYLQKTNWNHSVFDVPLHYNLYNASKSGGNYDMRNIFNGTVVQRHPSHAVTFVDNHDSQPEEALESFVEEWFKPLAYALTLTREQGYPSVFYGDYYGIPTHGVPAMRSKIDPILEARQKYAYGPQHDYLDHPDVIGWTREGDSSHPKSGLATLITDGPGGSKRMYAGLKNAGETWYDITGNRSDTVKIGSDGWGEFHVNDGSVSIYVQK

SEQ ID NO: 40643 - protein, 480 aa, Bacillus sp.
NGTMMQYFEWYLPNDGNHWNRLNSDASNLKSKGITAVWIPPAWKGASQNDVGYGAYDLYDLGEFNQKGTVRTKYGTRSQLQAAVTSLKNNGIQVYGDVVMNHKGGADATEMVRAVEVNPNNRNQEVTGEYTIEAWTRFDFPGRGNTHSSFKWRWYHFDGVDWDQSERLNNRIYKFRGHGKAWDWEVDTEFGNYDYLMYADYDMDHPEVVNELRNWGVWYTNTLGLDGFRIDAVKHIKYSFTRDWINHVRSATGKNMFAVAEFWKNDLGAIENYLQKTNWNHSVFDVPLHYNLYNASKSGGNYDMRNIFNGTVVQRHPSHAVTFVDNHDSQPEEALESFVEEWFKPLAYALTLTREQGYPSVFYGDYYGIPTHGVPAMRSKIDPILEARQKYAYGPQHDYLDHPDVIGWTREGDSSHPKSGLATLITDGPGGSKRMYAGLKNAGETWYDITGNRSDTVKIGSDGWGEFHVNDGSVSIYVQK

SEQ ID NO: 40644 - protein, 480 aa, Bacillus sp.
NGTMMQYFEWYLPNDGNHWNRLNSDASNLKSKGITAVWIPPAWKATSQNDVGYGAYDLYDLGEFNQKGTVRTKYGTRSQLQAAVTSLKNNGIQVYGDVVMNHKGGADATEMVRAVEVNPNNRNQEVTGEYTIEAWTRFDFPGRGNTHSSFKWRWYHFDGVDWDQSRQFTNRIYKFRGHGKAWDWEVDTEFGNYDYLMYADYDMDHPEVVNELRNWGVWYTNTLGLDGFRIDAVKHIKYSFTRDWINHVRSATGKNMFAVAEFWKNDLGAIENYLQKTNWNHSVFDVPLHYNLYNASKSGGNYDMRNIFNGTVVQRHPSHAVTFVDNHDSQPEEALESFVEEWFKPLAYALTLTREQGYPSVFYGDYYGIPTHGVPAMRSKIDPILEARQKYAYGPQHDYLDHPDVIGWTREGDSSHPKSGLATLITDGPGGSKRMYAGLKNAGETWYDITGNRSDTVKIGSDGWGEFHVNDGSVSIYVQK

SEQ ID NO: 40645 - protein, 480 aa, Bacillus sp.
NGTMMQYFEWYLPNDGNHWNRLNSDASNLKSKGITAVWIPPAWKGASQNDVGYGAYDLYDLGEFNQKGTVRTKYGTRSQLQAAVTSLKNNGIQVYGDVVMNHKGGADATEMVRAVEVNPNNRNQEVTGEYTIEAWTRFDFPGRGNTHSSFKWRWYHFDGVDWDQSRRLNNRIYKFRGHGKAWDWEVDTEFGNYDYLMYADYDMDHHEVVNELRNWGVWYTNTLGLDGFRIDAVKHIKYSFTRDWINHVRSATGKNMFAVAEFWKNDLGAIENYLQKTNWNHSVFDVPLHYNLYNASKSGGNYDMRNIFNGTVVQRHPSHAVTFVDNHDSQPEEALESFVEEWFKPLAYALTLTREQGYPSVFYGDYYGIPTHGVPAMRSKIDPILEARQKYAYGPQHDYLDHPDVIGWTREGDSSHPKSGLATLITDGPGGSKRMYAGLKNAGETWYDITGNRSDTVKIGSDGWGEFHVNDGSVSIYVQK

SEQ ID NO: 40646 - protein, 480 aa, Bacillus sp.
NGTMMQYFEWYLPNDGNHWNRLNSDASNLKSKGITAVWIPPAWKGASQNDVGYGAYDLYDLGEFNQKGTVRTKYGTRSQLQAAVTSLKNNGIQVYGDVVMNHKGGADATEMVRAVEVNPNNRNQEVTGEYTIEAWTRFDFPGRGNTHSSFKWRWYHFDGVDWDQSRRLNNRIYKFRGHGKAWDWEVDTEFGNYDYLMYADYDMDHPEVVNELRNWGVWYTNTLGLDGFRIDAVKHIKYSFTRDWINHVRSATGKNMFAVAEFWKNDLGAIENYLQKTNWNHSVFDVPLHYNLYNASKSGGNYDMRNIFNGTVVQSHPNHAVTFVDNHDSQPEEALESFVEEWFKPLAYALTLTREQGYPSVFYGDYYGIPTHGVPAMRSKIDPILEARQKYAYGPQHDYLDHPDVIGWTREGDSSHPKSGLATLITDGPGGSKRMYAGLKNAGETWYDITGNRSDTVKIGSDGWGEFHVNDGSVSIYVQK

SEQ ID NO: 40647 - protein, 480 aa, Bacillus sp.
NGTMMQYFEWYLPNDGNHWNRLNSDASNLKSKGITAVWIPPGWKGASQNDVGYGAYDLYDLGEFNQKGTVRTKYGTRSQLQAAVTSLKNNGIQVYGDVVMNHKGGADATEMVRAVEVNPNNRNQEVTGEYTIEAWTRFDFPGRGNTHSSFKWRWYHFDGVDWDQSRRLNNRIYKFRGHGKAWDWEVDTEFGNYDYLMYADYDMDHPEVVNELRNWGVWYTNTLGLDGFRIDAVKHIKYSFTRDWINHVRSATGKNMFAVAEFWKNDLGAIENYLQKTNWNHSVFDVPLHYNLYNASKSGGNYDMRNIFNGTVVQRHPSHAVTFVDNHDSQPEEALESFVEEWFKPLAYALTLTREQGYPSVFYGDYYGIPTHGVPAMRSKIDPILEARQKYAYGPQHDYLDHPDVIGWTREGDSSHPKSGLATLITDGPGGSKRMYAGLKNAGETWYDITGNRSDTVKIGSDGWGEFHVNDGSVSIYVQK

SEQ ID NO: 40648 - protein, 480 aa, Bacillus sp.
NGTMMQYFEWYLPNDGNHWNRLNSDASNLKSKGITAVWIPPAWKAASQNDVGYGAYDLYDLGEFNQKGTVRTKYGTRSQLQAAVTSLKNNGIQVYGDVVMNHKGGADATEMVRAVEVNPNNRNQEVTGEYTIEAWTRFDFPGRGNTHSSFKWRWYHFDGVDWDQSRRTSNRIYKFRGHGKAWDWEVDTEFGNYDYLMYVDYDMDHPEVVNELRNWGVWYTNTLGLDGFRIDAVKHIKYSFTRDWINHVRSATGKNMFAVAEFWKNDLGAIENYLQKTNWNHSVFDVPLHYNLYNASKSGGNYDMRNIFNGTVVQRHPSHAVTFVDNHDSQPEEALESFVEEWFKPLAYALTLTREQGYPSVFYGDYYGIPTHGVPAMRSKIDPILEARQKYAYGPQHDYLDHPDVIGWTREGDSSHPKSGLATLITDGPGGSKRMYAGLKNAGETWYDITGNRSDTVKIGSDGWGEFHVNDGSVSIYVQK

SEQ ID NO: 40649 - protein, 480 aa, Bacillus sp.
NGTMMQYFEWYLPNDGNHWNRLNSDASNLKSKGITAVWIPPAWKGASQNDVGYGAYDLYDLGEFNQKGTVRTKYGTRSQLQAAVTSLKNNGIQVYGDVVMNHKGGADATEMVRAVEVNPNNRNQEVTGEYTIEAWTRFDFPGRGNTHSSFKWRWYHFDGVDWDQSRRLNNRIYKFRGHGKAWDWEVDTEFGNYDYLMYADYDMDHPEVVNELRNWGVWYTNTLGLDGFRIDAVKHIKYSFTRDWINHVRSATGKNMFAVAEFWKNDLGAIENYLQKTNWNHSVFDVPLHYNLYNASKSGGNYDMRNIFNGTVVQRHPSHAVTFVDNHDSQPEEALESFVEEWFKPQAYALTLTREQGYPSVFYGDYYGIPTHGVPAMRSKIDPILEARQKYAYGPQHDYLDHPDVIGWTREGDSSHPKSGLATLITDGPGGSKRMYAGLKNAGETWYDITGNRSDTVKIGSDGWGEFHVNDGSVSIYVQK

SEQ ID NO: 40650 - protein, 480 aa, Bacillus sp.
NGTMMQYFEWYLPNDGNHWNRLNSDASNLKSKGITAVWIPPAWKGASQNDVGYGAYDLYDLGEFNQKGTVRTKYGTRSQLQAAVTSLKNNGIQVYGDVVMNHKGGADATEMVRAVEVNPNNRNQEVTGEYTIEAWTRFDFPGRGNTHSSFKWRWYHFDGVDWDQSRRLNNRIYKFRGHGKAWDWEVDTEFGNYDYLMYADYDMDHPEVVNELRNWGVWYTNTLGLDGFRIDAVKHIKYSFTRDWINHVRSATGKNMFAVAEFWKNDLGAIENYLQKTNWNHSVFDVPLHYNLYNASKSQGNYDMRNIFNGTVVQRHPSHAVTFVDNHDSQPEEALESFVEEWFKPLAYALTLTREQGYPSVFYGDYYGIPTHGVPAMRSKIDPILEARQKYAYGPQHDYLDHPDVIGWTREGDSSHPKSGLATLITDGPGGSKRMYAGLKNAGETWYDITGNRSDTVKIGSDGWGEFHVNDGSVSIYVQK

SEQ ID NO: 40651 - protein, 480 aa, Bacillus sp.
NGTMMQYFEWYLPNDGNHWNRLNSDASNLKSKGITAVWIPPAWKAASQNDVGYGAYDLYDLGEFNQKGTVRTKYGTRSQLQAAVTSLKNNGIQVYGDVVMNHKGGADATEMVRAVEVNPNNRNQEVTGEYTIEAWTRFDFPGRGNTHSSFKWRWYHFDGVDWDQSRQITNRIYKFRGHGKAWDWEVDTEFGNYDYLMYTDYDMDHPEVVNELRNWGVWYTNTLGLDGFRIDAVKHIKYSFTRDWINHVRSATGKNMFAVAEFWKNDLGAIENYLQKTNWNHSVFDVPLHYNLYNASKSGGNYDMRNIFNGTVVQRHPSHAVTFVDNHDSQPEEALESFVEEWFKPLAYALTLTREQGYPSVFYGDYYGIPTHGVPAMRSKIDPILEARQKYAYGPQHDYLDHPDVIGWTREGDSSHPKSGLATLITDGPGGSKRMYAGLKNAGETWYDITGNRSDTVKIGSDGWGEFHVNDGSVSIYVQK

SEQ ID NO: 40652 - protein, 480 aa, Bacillus sp.
NGTMMQYFEWYLPNDGNHWNRLNSDASNLKSKGITAVWIPPAWKGASQNDVGYGAYDLYDLGEFNQKGTVRTKYGTRSQLQAAVTSLKNNGIQVYGDVVMNHKGGADATEMVRAVEVNPNNRNQEVTGEYTIEAWTRFDFPGRGNTHSSFKWRWYHFDGVDWDQSRRLNNRIYKFRGHGKAWDWEVDTEFGNYDYLMYADYDMDHPEVVNELRNWGVWYTNTLGLDGFRIDAVKHIKYSFTRDWINHVRSATGKNMFAVAEFWKNDLGAIENYLQKTNWNHSVFDVPLHYNLYNASKSGGNYDMRNIFNGTVVQRKPSHAVTFVDNHDSQPEEALESFVEEWFKPLAYALTLTREQGYPSVFYGDYYGIPTHGVPAMRSKIDPILEARQKYAYGPQHDYLDHPDVIGWTREGDSSHPKSGLATLITDGPGGSKRMYAGLKNAGETWYDITGNRSDTVKIGSDGWGEFHVNDGSVSIYVQK

SEQ ID NO: 40653 - protein, 480 aa, Bacillus sp.
NGTMMQYFEWYLPNDGNHWNRLNSDASNLKSKGITAVWIPPAWKAVSQNDVGYGAYDLYDLGEFNQKGTVRTKYGTRSQLQAAVTSLKNNGIQVYGDVVMNHKGGADATEMVRAVEVNPNNRNQEVTGEYTIEAWTRFDFPGRGNTHSSFKWRWYHFDGVDWDQSRQLNNRIYKFRGHGKAWDWEVDTEFGNYDYLMYADYDMDHPEVVNELRNWGVWYTNTLGLDGFRIDAVKHIKYSFTRDWINHVRSATGKNMFAVAEFWKNDLGAIENYLQKTNWNHSVFDVPLHYNLYNASKSGGNYDMRNIFNGTVVQRHPSHAVTFVDNHDSQPEEALESFVEEWFKPLAYALTLTREQGYPSVFYGDYYGIPTHGVPAMRSKIDPILEARQKYAYGPQHDYLDHPDVIGWTREGDSSHPKSGLATLITDGPGGSKRMYAGLKNAGETWYDITGNRSDTVKIGSDGWGEFHVNDGSVSIYVQK

SEQ ID NO: 40654 - protein, 480 aa, Bacillus sp.
NGTMMQYFEWYLPNDGNHWNRLNSDASNLKSKGITAVWIPPAWKGASQNDVGYGAYDLYDLGEFNQKGTVRTKYGTRSQLQAAVTSLKNNGIQVYGDVVMNHKGGADATEMVRAVEVNPNNRNQEVTGEYTIEAWTRFDFPGRGNTHSSFKWRWYHFDGVDWDQSRRLTNRIYKFRGHGKAWDWEVDTEFGNYDYLMYTDYDMDHPEVVNELRNWGVWYTNTLGLDGFRIDAVKHIKYSFTRDWINHVRSATGKNMFAVAEFWKNDLGAIENYLQKTNWNHSVFDVPLHYNLYNASKSGGNYDMRNIFNGTVVQRHPSHAVTFVDNHDSQPEEALESFVEEWFKPLAYALTLTREQGYPSVFYGDYYGIPTHGVPAMRSKIDPILEARQKYAYGPQHDYLDHPDVIGWTREGDSSHPKSGLATLITDGPGGSKRMYAGLKNAGETWYDITGNRSDTVKIGSDGWGEFHVNDGSVSIYVQK

SEQ ID NO: 40655 - protein, 480 aa, Bacillus sp.
NGTMMQYFEWYLPNDGNHWNRLNSDASNLKSKGITAVWIPPAWKAASQNDVGYGAYDLYDLGEFNQKGTVRTKYGTRSQLQAAVTSLKNNGIQVYGDVVMNHKGGADATEMVRAVEVNPNNRNQEVTGEYTIEAWTRFDFPGRGNTHSSFKWRWYHFDGVDWDQSRRFNNRIYKFRGHGKAWDWEVDTEFGNYDYLMYADYDMDHPEVVNELRNWGVWYTNTLGLDGFRIDAVKHIKYSFTRDWINHVRSATGKNMFAVAEFWKNDLGAIENYLQKTNWNHSVFDVPLHYNLYNASKSGGNYDMRNIFNGTVVQRHPSHAVTFVDNHDSQPEEALESFVEEWFKPLAYALTLTREQGYPSVFYGDYYGIPTHGVPAMRSKIDPILEARQKYAYGPQHDYLDHPDVIGWTREGDSSHPKSGLATLITDGPGGSKRMYAGLKNAGETWYDITGNRSDTVKIGSDGWGEFHVNDGSVSIYVQK

SEQ ID NO: 40656 - protein, 480 aa, Bacillus sp.
NGTMMQYFEWYLPNDGNHWNRLNSDASNLKSKGITAVWIPPAWKGASQNDVGYGAYDLYDLGEFNQKGTVRTKYGTRSQLQAAVTSLKNNGIQVYGDVVMNHKGGADATEMVRAVEVNPNNRNQEVTGEYTIEAWTRFDFPGRFNTHSSFKWRWYHFDGVDWDQSRRLNNRIYKFRGHGKAWDWEVDTEFGNYDYLMYADYDMDHPEVVNELRNWGVWYTNTLGLDGFRIDAVKHIKYSFTRDWINHVRSATGKNMFAVAEFWKNDLGAIENYLQKTNWNHSVFDVPLHYNLYNASKSGGNYDMRNIFNGTVVQRHPSHAVTFVDNHDSQPEEALESFVEEWFKPLAYALTLTREQGYPSVFYGDYYGIPTHGVPAMRSKIDPILEARQKYAYGPQHDYLDHPDVIGWTREGDSSHPKSGLATLITDGPGGSKRMYAGLKNAGETWYDITGNRSDTVKIGSDGWGEFHVNDGSVSIYVQK

SEQ ID NO: 40657 - protein, 480 aa, Synthetic construct
NGTMMQYFEWYLPNDGNHWNRLNSDASNLKSKGITAVWIPPAWKGASQNDVGYGAYDLYDLGEFNQKGTVRTKYGTRSQLQAAVTSLKNNGIQVYGDVVMNHKGGADATEMVRAVEVNPNNRNQEVTGEYTIEAWTRFDFPGRGNTHSSFKWRWYHFDGVDWDQSRRLNNRIYKFRGHGKAWDWEVDTEFGNYDYLMYADYDYDHPESTNELRNWGVWYTNTLGLDGFRIDAVKHIKYSFTRDWINHVRSATGKNMFAVAEFWKNDLGAIENYLQKTNWNHSVFDVPLHYNLYNASKSGGNYDMRNIFNGTVVQRHPSHAVTFVDNHDSQPEEALESFVEEWFKPLAYALTLTREQGYPSVFYGDYYGIPTHGVPAMRSKIDPILEARQKYAYGPQHDYLDHPDVIGWTREGDSSHPKSGLATLITDGPGGSKRMYAGLKNAGETWYDITGNRSDTVKIGSDGWGEFHVNDGSVSIYVQK

SEQ ID NO: 40658 - protein, 480 aa, Bacillus sp.
NGTMMQYFEWYLPNDGNHWNRLNSDASNLKSKGITAVWIPPAWKGASQNDVGYGAYDLYDLGEFNQKGTVRTKYGTRSQLQAAVTSLKNNGIQVYGDVVMNHKGGADATEMVRAVEVNPNNRGQEVTGEYTIEAWTRFDFPGRGNTHSSFKWRWYHFDGVDWDQSRRLNNRIYKFRGHGKAWDWEVDTEFGNYDYLMYADYDMDHPEVVNELRNWGVWYTNTLGLDGFRIDAVKHIKYSFTRDWINHVRSATGKNMFAVAEFWKNDLGAIENYLQKTNWNHSVFDVPLHYNLYNASKSGGNYDMRNIFNGTVVQRHPSHAVTFVDNHDSQPEEALESFVEEWFKPLAYALTLTREQGYPSVFYGDYYGIPTHGVPAMRSKIDPILEARQKYAYGPQHDYLDHPDVIGWTREGDSSHPKSGLATLITDGPGGSKRMYAGLKNAGETWYDITGNRSDTVKIGSDGWGEFHVNDGSVSIYVQK

SEQ ID NO: 40659 - protein, 480 aa, Bacillus sp.
NQTMMQYFEWYLPNDGNHWNRLNSDASNLKSKGITAVWIPPAWKGASQNDVGYGAYDLYDLGEFNQKGTVRTKYGTRSQLQAAVTSLKNNGIQVYGDVVMNHKGGADATEMVRAVEVNPNNRNQEVTGEYTIEAWTRFDFPGRGNTHSSFKWRWYHFDGVDWDQSRRLNNRIYKFRGHGKAWDWEVDTEFGNYDYLMYADYDMDHPEVVNELRNWGVWYTNTLGLDGFRIDAVKHIKYSFTRDWINHVRSATGKNMFAVAEFWKNDLGAIENYLQKTNWNHSVFDVPLHYNLYNASKSGGNYDMRNIFNGTVVQRHPSHAVTFVDNHDSQPEEALESFVEEWFKPLAYALTLTREQGYPSVFYGDYYGIPTHGVPAMRSKIDPILEARQKYAYGPQHDYLDHPDVIGWTREGDSSHPKSGLATLITDGPGGSKRMYAGLKNAGETWYDITGNRSDTVKIGSDGWGEFHVNDGSVSIYVQK

SEQ ID NO: 40660 - protein, 480 aa, Bacillus sp.
NGTMMQYFEWYLPNDGNHWNRLNSDASNLKSKGITAVWIPPAWKGASQNDVGYGAYDLYDLGEFNQKGTVRTKYGTRSQLQAAVTSLKNNGIQVYGDVVMNHKGGADATEMVRAVEVNPNNRNQEVTGEYTIEAWTRFDFPGRGNTHSSFKWRWYHFDGVDWDQSRRLNNRIYKFRGHGKAWDWEVDTEFGNYDYLMYADYDMDHPEVVNELRNWGVWYTNTLGLDGFRIDAVKHIKYSFTRDWINHVRSATGKNMFAVAEFWKNDLGAIENYLQKTNWNHSVFDVPLHYNLYNASKSGGNYDMRNIFNGTVVQRHPSHAVTFVDNHDSQPEEALESFVEPWFKPLAYALTLTREQGYPSVFYGDYYGIPTHGVPAMRSKIDPILEARQKYAYGPQHDYLDHPDVIGWTREGDSSHPKSGLATLITDGPGGSKRMYAGLKNAGETWYDITGNRSDTVKIGSDGWGEFHVNDKSVSIYVQK

SEQ ID NO: 40661 - protein, 480 aa, Bacillus sp.
NGTMMQYFEWYLPNDGNHWNRLNSDASNLKSKGITAVWIPPAWKGASQNDVGYGAYDLYDLGEFNQKGTVRTKYGTRSQLQAAVTSLKNNGIQVYGDVVMNHKGGADATEMVRAVEVNPNNRNQEVTGEYTIEAWTRFDFPGRGNTHSSFKWRWYHFDGVDWDQSRRLNNRIYKFRGHGKAWDWEVDTEFGNYDYLMYADYDMDHPEVVNELRNWGVWYTNTLGLDGFRIDAVKHIKYSFTRDWINHVRSATGKNMFAVAEFWKNDLGAIENYLQKTNWNHSVFDVPLHYQLYNASKSGGNYDMRNIFNGTVVQRHPSHAVTFVDNHDSQPEEALESFVEEWFKPLAYALTLTREQGYPSVFYGDYYGIPTHGVPAMRSKIDPILEARQKYAYGPQHDYLDHPDVIGWTREGDSSHPKSGLATLITDGPGGSKRMYAGLKNAGETWYDITGNRSDTVKIGSDGWGEFHVNDGSVSIYVQK

SEQ ID NO: 40662 - protein, 480 aa, Bacillus sp.
NGTMMQYFEWYLPNDGNHWNRLNSDASNLKSKGITAVWIPPAWKGASQNDVGYGAYDLYDLGEFNQKGTVRTKYGTRSQLQAAVTSLKNNGIQVYGDVVMNHKGGADATEMVRAVEVNPNNRNQEVTGEYTIEAWTRFDFPGRGNTHSSFKWRWYHFDGVDWDQSRELNNRIYKFRGHGKAWDWEVDTEFGNYDYLMYVDYDMDHPEVVNELRNWGVWYTNTLGLDGFRIDAVKHIKYSFTRDWINHVRSATGKNMFAVAEFWKNDLGAIENYLQKTNWNHSVFDVPLHYNLYNASKSGGNYDMRNIFNGTVVQRHPSHAVTFVDNHDSQPEEALESFVEEWFKPLAYALTLTREQGYPSVFYGDYYGIPTHGVPAMRSKIDPILEARQKYAYGPQHDYLDHPDVIGWTREGDSSHPKSGLATLITDGPGGSKRMYAGLKNAGETWYDITGNRSDTVKIGSDGWGEFHVNDGSVSIYVQK

SEQ ID NO: 40663 - protein, 480 aa, Bacillus sp.
NGTMMQYFEWYLPNDGNHWNRLNSDASNLKSKGITAVWIPPAWKGASQNDVGYGAYDLYDLGEFNQKGTVRTKYGTRSQLQAAVTSLKNNGIQVYGDVVMNHKGGADATEMVRAVEVNPNNRNQEVTGEYTIEAWTRFDFPGRGNTHSSFKWRWYHFDGVDWDQSRRLNNRIYKFRGHGKAWDWEVDTEFGNYDYLMYADYDMDDPEVVNELRNWGVWYTNTLGLDGFRIDAVKHIKYSFTRDWINHVRSATGKNMFAVAEFWKNDLGAIENYLQKTNWNHSVFDVPLHYNLYNASKSGGNYDMRNIFNGTVVQRHPSHAVTFVDNHDSQPEEALESFVEEWFKPLAYALTLTREQGYPSVFYGDYYGIPTHGVPAMRSKIDPILEARQKYAYGPQHDYLDHPDVIGWTREGDSSHPKSGLATLITDGPGGSKRMYAGLKNAGETWYDITGNRSDTVKIGSDGWGEFHVNDGSVSIYVQK

SEQ ID NO: 40664 - protein, 480 aa, Bacillus sp.
NGTMMQYFEWYLPNDGNHWNRLNSDASNLKSKGITAVWIPPAWKGASQNDVGYGAYDLYDLGEFNQKGTVRTKYGTRSQLQAAVTSLKNNGIQVYGDVVMNHKGGADATEMVRAVEVNPNNRNQEVTGEYTIEAWTRFDFPGRGNTHSSFKWRWYHFDGVDWDQSRRLNNRIYKFRGHGKAWDWEVDTEFGNYDYLMYADYDMDHPEVVNELRNWGVWYTNTLGLDGFRIDAVKHIKYSFTRDWINHVRSATGKNMFAVAEFWKNDLGAIENYLQKTNWNHSVFDVPLHYNLYNASKSGGNYDMRNIFNGTVVQRHPSHAVTFVDNHDSQPEEALESFVETWFKPLAYALTLTREQGYPSVFYGDYYGIPTHGVPAMRSKIDPILEARQKYAYGPQHDYLDHPDVIGWTREGDSSHPKSGLATLITDGPGGSKRMYAGLKNAGETWYDITGNRSDTVKIGSDGWGEFHVNKASVSIYVQK

SEQ ID NO: 40665 - protein, 480 aa, Bacillus sp.
NGTMMQYFEWYLPNDGNHWNRLNSDASNLKSKGITAVWIPPAWKAASQNDVGYGAYDLYDLGEFNQKGTVRTKYGTRSQLQAAVTSLKNNGIQVYGDVVMNHKGGADATEMVDAVEVNPNNRNQEVTGEYTIEAWTRFDFPGRGNTHSSFKWRWYHFDGVDWDQSRQITNRIYKFRGHGKAWDWEVDTEFGNYDYLMYTDYDMDHPEVVNELRNWGVWYTNTLGLDGFRIDAVKHIKYSFTRDWINHVRSATGKNMFAVAEFWKNDLGAIENYLQKTNWNHSVFDVPLHYNLYNASKSGGNYDMRNIFNGTVVQRHPSHAVTFVDNHDSQPEEALESFVEEWFKPLAYALTLTREQGYPSVFYGDYYGIPTHGVPAMRSKIDPILEARQKYAYGPQHDYLDHPDVIGWTREGDSSHPKSGLATLITDGPGGSKRMYAGLKNAGETWYDITGNRSDTVKIGSDGWGEFHVNDGSVSIYVQK

SEQ ID NO: 40666 - protein, 480 aa, Bacillus sp.
NGTMMQYFEWYLPNDGNHWNRLNSDASNLKSKGITAVWIPPAWKGASQNDVGYGAYDLYDLGEFNQKGTVRTKYGTRSQLQAAVTSLKNNGIQVYGDVVMNHKGGADATEMVRAVEVNPNNRNQEVTGEYTIEAWTRFDFPGRGNTHSSFKWRWYHFDGVDWDQSRRLNNRIYKFRGHGKAWDWEVDTEFGNYDYLMYADYDMDHPEVVNELRNWGVWYTNTLGLDGFRIDAVKHIKYSFTRDWINHVRSATGKNMFAVAEFWKNDLGAIENYLQKTNWNHSVFDVPLHYNLYNASNSGGNYDMRNIFNGTVVQRHPSHAVTFVDNHDSQPEEALESFVETWFKPLAYALTLTREQGYPSVFYGDYYGIPTHGVPAMRSKIDPILEARQKYAYGPQHDYLDHPDVIGWTREGDSSHPKSGLATLITDGPGGSKRMYAGLKNAGETWYDITGNRSDTVKIGSDGWGEFHVNQTSVSIYVQK

SEQ ID NO: 40667 - protein, 480 aa, Bacillus sp.
NGTMMQYFEWYLPNDGNHWNRLNSDASNLKSKGITAVWIPPAWKGASQNDVGYGAYDLYDLGEFNQKGTVRTKYGTRSQLQAAVTSLKNNGIQVYGDVVMNHKGGADATEMVRAVEVNPNNRNQEVTGEYTIEAWTRFDFPGRGNTHSSFKWRWYHFDGVDWDQSRRLNNRIYKFRGHNKAWDWEVDTEFGNYDYLMYADYDMDHPEVVNELRNWGVWYTNTLGLDGFRIDAVKHIKYSFTRDWINHVRSATGKNMFAVAEFWKNDLGAIENYLQKTNWNHSVFDVPLHYNLYNASKSGGNYDMRNIFNGTVVQRHPSHAVTFVDNHDSQPEEALESFVEEWFKPLAYALTLTREQGYPSVFYGDYYGIPTHGVPAMRSKIDPILEARQKYAYGPQHDYLDHPDVIGWTREGDSSHPKSGLATLITDGPGGSKRMYAGLKNAGETWYDITGNRSDTVKIGSDGWGEFHVNDGSVSIYVQK

SEQ ID NO: 40668 - protein, 480 aa, Bacillus sp.
NGTMMQYFEWYLPNDGNHWNRLNSDASNLKSKGITAVWIPPAWKGASQNDVGYGAYDLYDLGEFNQKGTVRTKYGTRSQLQAAVTSLKNNGIQVYGDVVMNHKGGADATEMVRAVEVNPNNRNQEVTGEYTIEAWTRFDFPGRGNTHSSFKWRWYHFDGVDWDQSRRFSNRIYKFRGHGKAWDWEVDTEFGNYDYLMYTDYDMDHPEVVNELRNWGVWYTNTLGLDGFRIDAVKHIKYSFTRDWINHVRSATGKNMFAVAEFWKNDLGAIENYLQKTNWNHSVFDVPLHYNLYNASKSGGNYDMRNIFNGTVVQRHPSHAVTFVDNHDSQPEEALESFVEEWFKPLAYALTLTREQGYPSVFYGDYYGIPTHGVPAMRSKIDPILEARQKYAYGPQHDYLDHQDVIGWTREGDSSHPKSGLATLITDGPGGSKRMYAGLKNAGETWYDITGNRSDTVKIGSDGWGEFHVNDGSVSIYVQK

SEQ ID NO: 40669 - protein, 480 aa, Bacillus sp.
NGTMMQYFEWYLPNDGNHWNRLNSDASNLKSKGITAVWIPPAWKGASQNDVGYGAYDLYDLGEFNQKGTVRTKYGTRSQLQAAVTSLKNNGIQVYGDVVMNHKGGADATEMVRAVEVNPNNRNQEVTGEYTIEAWTRFDFPGRGNTHSSFKWRWYHFDGVDWDQSREFNNRIYKFRGHGKAWDWEVDTEFGNYDYLMYADYDMDHPEVVNELRNWGVWYTNTLGLDGFRIDAVKHIKYSFTRDWINHVRSATGKNMFAVAEFWKNDLGAIENYLQKTNWNHSVFDVPLHYNLYNASKSGGNYDMRNIFNGTVVQAHPNHAVTFVDNHDSQPEEALESFVEEWFKPLAYALTLTREQGYPSVFYGDYYGIPTHGVPAMRSKIDPILEARQKYAYGPQHDYLDHPDVIGWTREGDSSHPKSGLATLITDGPGGSKRMYAGLKNAGETWYDITGNRSDTVKIGSDGWGEFHVNDGSVSIYVQK

SEQ ID NO: 40670 - protein, 480 aa, Bacillus sp.
NGTMMQYFEWYLPNDGNHWNRLNSDASNLKSKGITAVWIPPAWKAVSQNDVGYGAYDLYDLGEFNQKGTVRTKYGTRSQLQAAVTSLKNNGIQVYGDVVMNHKGGADATEMVRAVEVNPNNRNQEVTGEYTIEAWTRFDFPGRGNTHSSFKWRWYHFDGVDWDQSRRFDNRIYKFRGHGKAWDWEVDTEFGNYDYLMYADYDMDHPEVVNELRNWGVWYTNTLGLDGFRIDAVKHIKYSFTRDWINHVRSATGKNMFAVAEFWKNDLGAIENYLQKTNWNHSVFDVPLHYNLYNASKSGGNYDMRNIFNGTVVQRHPSHAVTFVDNHDSQPEEALESFVEEWFKPLAYALTLTREQGYPSVFYGDYYGIPTHGVPAMRSKIDPILEARQKYAYGPQHDYLDHPDVIGWTREGDSSHPKSGLATLITDGPGGSKRMYAGLKNAGETWYDITGNRSDTVKIGSDGWGEFHVNDGSVSIYVQK

SEQ ID NO: 40671 - protein, 480 aa, Synthetic construct
NGTMMQYFEWYLPNDGNHWNRLNSDASNLKSKGITAVWIPPAWKGASQNDVGYGAYDLYDLGEFNQKGTVRTKYGTRSQLQAAVTSLKNNGIQVYGDVVMNHKGGADATEMVRAVEVNPNNRNQEVTGEYTIEAWTRFDFPGRGNTHSSFKWRWYHFDGVDWDQSRRLNNRIYKFRGHGKAWDWEVDTEFGNYDYLMYADYDYDHPESTNEMRNWGVWYTNTLGLDGFRIDAVKHIKYSFTRDWINHVRSATGKNMFAVAEFWKNDLGAIENYLQKTNWNHSVFDVPLHYNLYNASKSGGNYDMRNIFNGTVVQRHPSHAVTFVDNHDSQPEEALESFVEEWFKPLAYALTLTREQGYPSVFYGDYYGIPTHGVPAMRSKIDPILEARQKYAYGPQHDYLDHPDVIGWTREGDSSHPKSGLATLITDGPGGSKRMYAGLKNAGETWYDITGNRSDTVKIGSDGWGEFHVNDGSVSIYVQK

SEQ ID NO: 40672 - protein, 480 aa, Bacillus sp.
NGTMMQYFEWYLPNDGNHWNRLNSDASNLKSKGITAVWIPPAWKGASQNDVGYGAYDLYDLGEFNQKGTVRTKYGTRSQLQAAVTSLKNNGIQVYGDVVMNHKGGADATEMVRAVEVNPNNRNQEVTGEYTIEAWTRFDFPGRGNTHSSFKWRWYHFDGVDWDQSRRLNNRIYKFRGHGKAWDWEVDTEFGNYDYLMYADYDMDHPEVVNELRNWGVWYTNTLGLDGFRIDAVKHIKYSFTRDWINHVRSATGKNMFAVAEFWKNDLGAIENYLQKTNWNHSVFDVPLHYNLYNASKSGGNYDMRNIFNGTVVQSHPMHAVTFVDNHDSQPEEALESFVEEWFKPLAYALTLTREQGYPSVFYGDYYGIPTHGVPAMRSKIDPILEARQKYAYGPQHDYLDHPDVIGWTREGDSSHPKSGLATLITDGPGGSKRMYAGLKNAGETWYDITGNRSDTVKIGSDGWGEFHVNDGSVSIYVQK

SEQ ID NO: 40673 - protein, 480 aa, Bacillus sp.
NGTMMQYFEWYLPNDGNHWNRLNSDASNLKSKGITAVWIPPAWKGASQNDVGYGAYDLYDLGEFNQKGTVRTKYGTRSQLQAAVTSLKNNGIQVYGDVVMNHKGGADATEMVRAVEVNPNNRNQEVTGEYTIEAWTRFDFPGRGNTHSSFKWRWYHFDGVDWDQSRQVNNRIYKFRGHGKAWDWEVDTEFGNYDYLMYVDYDMDHPEVVNELRNWGVWYTNTLGLDGFRIDAVKHIKYSFTRDWINHVRSATGKNMFAVAEFWKNDLGAIENYLQKTNWNHSVFDVPLHYNLYNASKSGGNYDMRNIFNGTVVQRHPSHAVTFVDNHDSQPEEALESFVEEWFKPLAYALTLTREQGYPSVFYGDYYGIPTHGVPAMRSKIDPILEARQKYAYGPQHDYLDHPDVIGWTREGDSSHPKSGLATLITDGPGGSKRMYAGLKNAGETWYDITGNRSDTVKIGSDGWGEFHVNDGSVSIYVQK

SEQ ID NO: 40674 - protein, 480 aa, Bacillus sp.
NGTMMQYFEWYLPNDGNHWNRLNSDASNLKSKGITAVWIPPAWKAVSQNDVGYGAYDLYDLGEFNQKGTVRTKYGTRSQLQAAVTSLKNNGIQVYGDVVMNHKGGADATEMVRAVEVNPNNRNQEVTGEYTIEAWTRFDFPGRGNTHSSFKWRWYHFDGVDWDQSRDLENRIYKFRGHGKAWDWEVDTEFGNYDYLMYADYDMDHPEVVNELRNWGVWYTNTLGLDGFRIDAVKHIKYSFTRDWINHVRSATGKNMFAVAEFWKNDLGAIENYLQKTNWNHSVFDVPLHYNLYNASKSGGNYDMRNIFNGTVVQRHPSHAVTFVDNHDSQPEEALESFVEEWFKPLAYALTLTREQGYPSVFYGDYYGIPTHGVPAMRSKIDPILEARQKYAYGPQHDYLDHPDVIGWTREGDSSHPKSGLATLITDGPGGSKRMYAGLKNAGETWYDITGNRSDTVKIGSDGWGEFHVNDGSVSIYVQK

SEQ ID NO: 40675 - protein, 480 aa, Bacillus sp.
NGTMMQYFEWYLPNDGNHWNRLNSDASNLKSKGITAVWIPPAWKAVSQNDVGYGAYDLYDLGEFNQKGTVRTKYGTRSQLQAAVTSLKNNGIQVYGDVVMNHKGGADATEMVRAVEVNPNNRNQEVTGEYTIEAWTRFDFPGRGNTHSSFKWRWYHFDGVDWDQSRELSNRIYKFRGHGKAWDWEVDTEFGNYDYLMYADYDYDHPESTNEMRNWGVWYTNTLGLDGFRIDAVKHIKYSFTRDWINHVRSATGKNMFAVAEFWKNDLGAIENYLQKTNWNHSVFDVPLHYNLYNASKSGGNYDMRNIFNGTVVQRHPSHAVTFVDNHDSQPEEALESFVEEWFKPLAYALTLTREQGYPSVFYGDYYGIPTHGVPAMRSKIDPILEARQKYAYGPQHDYLDHPDVIGWTREGDSSHPKSGLATLITDGPGGSKRMYAGLKNAGETWYDITGNRSDTVKIGSDGWGEFHVNDGSVSIYVQK

SEQ ID NO: 40676 - protein, 480 aa, Bacillus sp.
NGTMMQYFEWYLPNDGNHWNRLNSDASNLKSKGITAVWIPPAWKGASQNDVGYGAYDLYDLGEFNQKGTVRTKYGTRSQLQAAVTSLKNNGILVYGDVVMNHKGGADATEMVRAVEVNPNNRNQEVTGEYTIEAWTRFDFPGRGNTHSSFKWRWYHFDGVDWDQSRRLNNRIYKFRGHGKAWDWEVDTEFGNYDYLMYADYDMDHPEVVNELRNWGVWYTNTLGLDGFRIDAVKHIKYSFTRDWINHVRSATGKNMFAVAEFWKNDLGAIENYLQKTNWNHSVFDVPLHYNLYNASKSGGNYDMRNIFNGTVVQRHPSHAVTFVDNHDSQPEEALESFVEEWFKPLAYALTLTREQGYPSVFYGDYYGIPTHGVPAMRSKIDPILEARQKYAYGPQHDYLDHPDVIGWTREGDSSHPKSGLATLITDGPGGSKRMYAGLKNAGETWYDITGNRSDTVKIGSDGWGEFHVNDGSVSIYVQK

SEQ ID NO: 40677 - protein, 480 aa, Bacillus sp.
NGTMMQYFEWYLPNDGNHWNRLNSDASNLKSKGITAVWIPPAWKGASQNDVGYGAYDLYDLGEFNQKGTVRTKYGTRSQLHAAVTSLKNNGIQVYGDVVMNHKGGADATEMVRAVEVNPNNRNQEVTGEYTIEAWTRFDFPGRGNTHSSFKWRWYHFDGVDWDQSRRLNNRIYKFRGHGKAWDWEVDTEFGNYDYLMYADYDMDHPEVVNELRNWGVWYTNTLGLDGFRIDAVKHIKYSFTRDWINHVRSATGKNMFAVAEFWKNDLGAIENYLQKTNWNHSVFDVPLHYNLYNASKSGGNYDMRNIFNGTVVQRHPSHAVTFVDNHDSQPEEALESFVEEWFKPLAYALTLTREQGYPSVFYGDYYGIPTHGVPAMRSKIDPILEARQKYAYGPQHDYLDHPDVIGWTREGDSSHPKSGLATLITDGPGGSKRMYAGLKNAGETWYDITGNRSDTVKIGSDGWGEFHVNDGSVSIYVQK

SEQ ID NO: 40678 - protein, 480 aa, Bacillus sp.
NGTMMQYFEWYLPNDGNHWNRLNSDASNLKSKGITAVWIPPAWKGASQNDVGYGAYDLYDLGEFNQKGTVRTKYGTRSQLQAAVTSLKNNGIQVYGDVVMNHKGGADATEMVRAVEVNPNNRNQEVTGEYTIEAWTRFDFPGRGNTHSSFKWRWYHFDGVDWDQSRRLNNRIYKFRGHGKAWDWEVDTEFGNYDYLMYADYDMDHPEVVNELRNWGVWYTNTLGLDGFRIDAVKHIKYSFTRDWINHVRSATGKNMFAVAEFWKNDLGAIENYLQKTNWNHSVFDVPLHYNLYNASKSGGNYDMRNIFNGTVVQRHPSHAVTFVDNHDSQPEEALESFVETWFKPLAYALTLTREQGYPSVFYGDYYGIPTHGVPAMRSKIDPILEARQKYAYGPQHDYLDHPDVIGWTREGDSSHPKSGLATLITDGPGGSKRMYAGLKNAGETWYDITGNRSDTVKIGSDGWGEFHVNQSSVSIYVQK

SEQ ID NO: 40679 - protein, 480 aa, Bacillus sp.
NGTMMQYFEWYLPNDGNHWNRLNSDASNLKSKGITAVWIPPAWKATSQNDVGYGAYDLYDLGEFNQKGTVRTKYGTRSQLQAAVTSLKNNGIQVYGDVVMNHKGGADATEMVRAVEVNPNNRNQEVTGEYTIEAWTRFDFPGRGNTHSSFKWRWYHFDGVDWDQSRELNNRIYKFRGHGKAWDWEVDTEFGNYDYLMYADYDMDHPEVVNELRNWGVWYTNTLGLDGFRIDAVKHIKYSFTRDWINHVRSATGKNMFAVAEFWKNDLGAIENYLQKTNWNHSVFDVPLHYNLYNASKSGGNYDMRNIFNGTVVQRHPSHAVTFVDNHDSQPEEALESFVEEWFKPLAYALTLTREQGYPSVFYGDYYGIPTHGVPAMRSKIDPILEARQKYAYGPQHDYLDHPDVIGWTREGDSSHPKSGLATLITDGPGGSKRMYAGLKNAGETWYDITGNRSDTVKIGSDGWGEFHVNDGSVSIYVQK

SEQ ID NO: 40680 - protein, 480 aa, Bacillus sp.
NGTMMQYFEWYLPNDGNHWNRLNSDASNLKSKGITAVWIPPAWKGASQNDVGYGAYDLYDLGEFNQKGTVRTKYGTRSQLQAAVTSLKNNGIQVYGDVVMNHKGGADATEMVRAVEVNPNNRNQEVTGEYTIEAWTRFDFPGRGNTHSSFKWRWYHFDGVDWDQSRRLNNRIYKFRGHGKAWDWEVDTEFGNYDYLMYADYDMDHTEVVNELRNWGVWYTNTLGLDGFRIDAVKHIKYSFTRDWINHVRSATGKNMFAVAEFWKNDLGAIENYLQKTNWNHSVFDVPLHYNLYNASKSGGNYDMRNIFNGTVVQRHPSHAVTFVDNHDSQPEEALESFVEEWFKPLAYALTLTREQGYPSVFYGDYYGIPTHGVPAMRSKIDPILEARQKYAYGPQHDYLDHPDVIGWTREGDSSHPKSGLATLITDGPGGSKRMYAGLKNAGETWYDITGNRSDTVKIGSDGWGEFHVNDGSVSIYVQK

SEQ ID NO: 40681 - protein, 480 aa, Bacillus sp.
NGTMMQYFEWYLPNDGNHWNRLNSDASNLKSKGITAVWIPPAWKATSQNDVGYGAYDLYDLGEFNQKGTVRTKYGTRSQLQAAVTSLKNNGIQVYGDVVMNHKGGADATEMVRAVEVNPNNRNQEVTGEYTIEAWTRFDFPGRGNTHSSFKWRWYHFDGVDWDQSRDLNNRIYKFRGHGKAWDWEVDTEFGNYDYLMYADYDMDHPEVVNELRNWGVWYTNTLGLDGFRIDAVKHIKYSFTRDWINHVRSATGKNMFAVAEFWKNDLGAIENYLQKTNWNHSVFDVPLHYNLYNASKSGGNYDMRNIFNGTVVQRHPSHAVTFVDNHDSQPEEALESFVEEWFKPLAYALTLTREQGYPSVFYGDYYGIPTHGVPAMRSKIDPILEARQKYAYGPQHDYLDHPDVIGWTREGDSSHPKSGLATLITDGPGGSKRMYAGLKNAGETWYDITGNRSDTVKIGSDGWGEFHVNDGSVSIYVQK

SEQ ID NO: 40682 - protein, 480 aa, Bacillus sp.
NGTMMQYFEWYLPNDGNHWNRLNSDASNLKSKGITAVWIPPAWKGASQNDVGYGAYDLYDLGEFNQKGTVRTKYGTRSQLQAAVTSLKNNGIQVYGDVVMNHKGGADATEMVRAVEVNPNNRNQEVTGEYTIEAWTRFDFPGRGNTHSSFKWRWYHFDGVDWDQSRRLNNRIYKFRGHGKAWDWEVDTEFGNYDYLMYADYDMDHPEVVNELRNWGVWYTNTLGLDGFRIDAVKHIKYSFTRDWINHVRSATGKNMFAVAEFWKNDLGAIENYLQKTNWNHSVFDVPLHYNLYNASKSGGNYDMRNIFNGTVVQRHPSHAVTFVDNHDSQPEEALESFVEEWFKPLAYALTLTREQGYPSVFYGDYYGIPTHGVPAMRSKIDPILEARQKYAYGPQHDYLDHPDVIGWTREGHSSHPKSGLATLITDGPGGSKRMYAGLKNAGETWYDITGNRSDTVKIGSDGWGEFHVNDGSVSIYVQK

SEQ ID NO: 40683 - protein, 480 aa, Bacillus sp.
NGTMMQYFEWYLPNDGNHWNRLNSDASNLKSKGITAVWIPPAWKGASQNDVGYGAYDLYDLGEFNQKGTVRTKYGTRSQLQAAVTSLKNNGIQVYGDVVMNHKGGADTTEMVRAVEVNPNNRNQEVTGEYTIEAWTRFDFPGRGNTHSSFKWRWYHFDGVDWDQSRRLNNRIYKFRGHGKAWDWEVDTEFGNYDYLMYADYDMDHPEVVNELRNWGVWYTNTLGLDGFRIDAVKHIKYSFTRDWINHVRSATGKNMFAVAEFWKNDLGAIENYLQKTNWNHSVFDVPLHYNLYNASKSGGNYDMRNIFNGTVVQRHPSHAVTFVDNHDSQPEEALESFVEEWFKPLAYALTLTREQGYPSVFYGDYYGIPTHGVPAMRSKIDPILEARQKYAYGPQHDYLDHPDVIGWTREGDSSHPKSGLATLITDGPGGSKRMYAGLKNAGETWYDITGNRSDTVKIGSDGWGEFHVNDGSVSIYVQK

SEQ ID NO: 40684 - protein, 480 aa, Bacillus sp.
NGTMMQYFEWYLPNDGNHWNRLNSDASNLKSKGITAVWIPPAWKATSQNDVGYGAYDLYDLGEFNQKGTVRTKYGTRSQLQAAVTSLKNNGIQVYGDVVMNHKGGADATEMVRAVEVNPNNRNQEVTGEYTIEAWTRFDFPGRGNTHSSFKWRWYHFDGVDWDQSRELTNRIYKFRGHGKAWDWEVDTEFGNYDYLMYADYDMDHPEVVNELRNWGVWYTNTLGLDGFRIDAVKHIKYSFTRDWINHVRSATGKNMFAVAEFWKNDLGAIENYLQKTNWNHSVFDVPLHYNLYNASKSGGNYDMRNIFNGTVVQRHPSHAVTFVDNHDSQPEEALESFVEEWFKPLAYALTLTREQGYPSVFYGDYYGIPTHGVPAMRSKIDPILEARQKYAYGPQHDYLDHPDVIGWTREGDSSHPKSGLATLITDGPGGSKRMYAGLKNAGETWYDITGNRSDTVKIGSDGWGEFHVNDGSVSIYVQK

SEQ ID NO: 40685 - protein, 480 aa, Bacillus sp.
NGTMMQYFEWYLPNDGNHWNRLNSDASNLKSKGITAVWIPPAWKGASQNDVGYGAYDLYDLGEFNQKGTVRTKYGTRSQLQAAVTSLKNNGIQVYGDVVMNHKGGADATEMVRAVEVNPNNRNQEVTGEYTIEAWTRFDFPGRGNTHSSFKWRWYHFDGVDWDQSRRLNNRIYKFRGHGKAWDWEVDTEFGNYDYLMYADYDMDHGEVVNELRNWGVWYTNTLGLDGFRIDAVKHIKYSFTRDWINHVRSATGKNMFAVAEFWKNDLGAIENYLQKTNWNHSVFDVPLHYNLYNASKSGGNYDMRNIFNGTVVQRHPSHAVTFVDNHDSQPEEALESFVEEWFKPLAYALTLTREQGYPSVFYGDYYGIPTHGVPAMRSKIDPILEARQKYAYGPQHDYLDHPDVIGWTREGDSSHPKSGLATLITDGPGGSKRMYAGLKNAGETWYDITGNRSDTVKIGSDGWGEFHVNDGSVSIYVQK

SEQ ID NO: 40686 - protein, 480 aa, Bacillus sp.
NGTMMQYFEWYLPNDGNHWNRLNSDASNLKSKGITAVWIPPAWKGASQNDVGYGAYDLYDLGEFNQKGTVRTKYGTRSQLQAAVTSLKNNGIQVYGDVVMNHKGGADATEMVRAVEVNPNNRNQEVTGEYTIEAWTRFDFPGRGNTHSSFKWRWYHFDGVDWDQSRRLNNRIYKFRGHSKAWDWEVDTEFGNYDYLMYADYDMDHPEVVNELRNWGVWYTNTLGLDGFRIDAVKHIKYSFTRDWINHVRSATGKNMFAVAEFWKNDLGAIENYLQKTNWNHSVFDVPLHYNLYNASKSGGNYDMRNIFNGTVVQRHPSHAVTFVDNHDSQPEEALESFVEEWFKPLAYALTLTREQGYPSVFYGDYYGIPTHGVPAMRSKIDPILEARQKYAYGPQHDYLDHPDVIGWTREGDSSHPKSGLATLITDGPGGSKRMYAGLKNAGETWYDITGNRSDTVKIGSDGWGEFHVNDGSVSIYVQK

SEQ ID NO: 40687 - protein, 478 aa, Bacillus sp.
NGTIMQYFEWNVPNDGQHWNRLHNNAQNLKNAGITAIWIPPAWKGTSQNDVGYGAYDLYDLGEFNQKGTVRTKYGTKAELERAIRSLKANGIQVYGDVVMNHKGGADFTERVQAVEVNPQNRNQEVSGTYEIEAWTGFNFPGRGNQHSSFKWRWYHFDGTDWDQSRQLSNRIYKFDGKAWDWEVDTENGNYDYLMYADVDMNHPEVINELNRWGVWYANTLNLDGFRLDAVKHIQFSFMRNWLGHVRGQTGKNLFAVAEYWKNDLGALENYLSKTNWTMSAFDVPLHYNLYQASNSGGNYDMRNLLNGTLVQRHPSHAVTFVDNHDTQPGEALESFVQGWFKPLAYATILTREQGYPQVFYGDYYGIPSDGVPSYRQQIDPLLKARQKYAYGPQHDYLDHPDVIGWTREGDSSHPKSGLATLITDGPGGSKRMYAGLKNAGETWYDITGNRSDTVKIGSDGWGEFHVNDGSVSIYVQK

SEQ ID NO: 40688 - protein, 480 aa, Synthetic construct
NGTMMQYFEWYLPNDGNHWNRLNSDASNLKSKGITAVWIPPAWKGASQNDVGYGAYDLYDLGEFNQKGTVRTKYGTRSQLQAAVTSLKNNGIQVYGDVVMNHKGGADATEMVRAVEVNPNNRNQEVTGEYTIEAWTRFDFPGRGNTHSSFKWRWYHFDGVDWDQSRRLNNRIYKFRGHGKAWDWEVDTENGNYDYLMYADIDMDHPEGTNELRNWGVWYTNTLGLDGFRIDAVKHIKYSFTRDWINHVRSATGKNMFAVAEFWKNDLGAIENYLQKTNWNHSVFDVPLHYNLYNASKSGGNYDMRNIFNGTVVQRHPSHAVTFVDNHDSQPEEALESFVEEWFKPLAYALTLTREQGYPSVFYGDYYGIPTHGVPAMRSKIDPILEARQKYAYGPQHDYLDHPDVIGWTREGDSSHPKSGLATLITDGPGGSKRMYAGLKNAGETWYDITGNRSDTVKIGSDGWGEFHVNDGSVSIYVQK

SEQ ID NO: 40689 - protein, 480 aa, Bacillus sp.
NGTMMQYFEWYLPNDGNHWNRLNSDASNLKSKGITAVWIPPAWKGASQNDVGYGAYDLYDLGEFNQKGTVRTKYGTRSQLQAAVTSLKNNGIQVYGDVVMNHKGGADATEMVRAVEVNPNNRNQEVTGEYTIEAWTRFDFPGRGNTHSSFKWRWYHFDGVDWDQSRRLNNRIYKFRAHGKAWDWEVDTEFGNYDYLMYADYDMDHPEVVNELRNWGVWYTNTLGLDGFRIDAVKHIKYSFTRDWINHVRSATGKNMFAVAEFWKNDLGAIENYLQKTNWNHSVFDVPLHYNLYNASKSGGNYDMRNIFNGTVVQRHPSHAVTFVDNHDSQPEEALESFVEEWFKPLAYALTLTREQGYPSVFYGDYYGIPTHGVPAMRSKIDPILEARQKYAYGPQHDYLDHPDVIGWTREGDSSHPKSGLATLITDGPGGSKRMYAGLKNAGETWYDITGNRSDTVKIGSDGWGEFHVNDGSVSIYVQK

SEQ ID NO: 40690 - protein, 480 aa, Bacillus sp.
NGTMMQYFEWYLPNDGNHWNRLNSDASNLKSKGITAVWIPPAWKGASQNDVGYGAYDLYDLGEFNQKGTVRTKYGTRSQLQAAVTSLKNNGIQVYGDVVMNHKGGADATEMVRAVEVNPNNRNQEVTGEYTIEAWTRFDFPGRGNTHSSFKWRWYHFDGVDWDQSRRLNNRIYKFRGHGKAWDWEVDTEFGNYDYLMYADYDMDHPEVVNELRNWGVWYTNTLGLDGFRIDAVKHIKYSFTRDWINHVRSATGKNMFAVAEFWKNDLGAIENYLQKTNWNHSVFDVPLHYNLYNASKSGGNYDMRNIFNGTVVQRHPSHAVTFVDNHDSQPEEALESFVEEWFKPLAYALTLTREQGYPSVFYGDYYGIPTHGVPAMRSKIDPILEARQKYAYGPQHDYLDHPDVIGWTKEGDSSHPKSGLATLITDGPGGSKRMYAGLKNAGETWYDITGNRSDTVKIGSDGWGEFHVNDGSVSIYVQK

SEQ ID NO: 40691 - protein, 480 aa, Bacillus sp.
NGTMMQYFEWYLPNDGNHWNRLNSDASNLKSKGITAVWIPPAWKGASQNDVGYGAYDLYDLGEFNQKGTVRTKYGTRSQLQAAVTSLKNNGIQVYGDVVMNHKGGADATEMVRAVEVNPNNRNQEVTGEYTIEAWTRFDFPGRGNTHSSFKWRWYHFDGVDWDQSRRLNNRIYKFRGHGKAWDWEVDTEFGNYDYLMYADYDMDHPEVVNELRNWGVWYTNTLGLDGFRIDAVKHIKYSFTRDWINHVRSATGKNMFAVAEFWKNDLGAIENYLQKTNWNHSVFDVPLHYNLYNASKSGGNYDMRNIFNGTVVQRHPSHAVTFVDNHDSQPEEALESFVEEWFKPLAYALTLTREQGYPSVFYGDYYGIPTHGVPAMRSKIDPILEARQKYAYGPQHDYLDHPDVIGWTREGDSSHPKSGLATLITDGPGGSKRMYAGLKNAGETWYDITGNRSDTVKIGSDGWGEFHVNDGSVSIFVQK

SEQ ID NO: 40692 - protein, 480 aa, Bacillus sp.
NGTMMQYFEWYLPNDGNHWNRLNSDASNLKSKGITAVWIPPAWKAFSQNDVGYGAYDLYDLGEFNQKGTVRTKYGTRSQLQAAVTSLKNNGIQVYGDVVMNHKGGADATEMVRAVEVNPNNRNQEVTGEYTIEAWTRFDFPGRGNTHSSFKWRWYHFDGVDWDQSRDLNNRIYKFRGHGKAWDWEVDTEFGNYDYLMYADYDMDHPEVVNELRNWGVWYTNTLGLDGFRIDAVKHIKYSFTRDWINHVRSATGKNMFAVAEFWKNDLGAIENYLQKTNWNHSVFDVPLHYNLYNASKSGGNYDMRNIFNGTVVQRHPSHAVTFVDNHDSQPEEALESFVEEWFKPLAYALTLTREQGYPSVFYGDYYGIPTHGVPAMRSKIDPILEARQKYAYGPQHDYLDHPDVIGWTREGDSSHPKSGLATLITDGPGGSKRMYAGLKNAGETWYDITGNRSDTVKIGSDGWGEFHVNDGSVSIYVQK

SEQ ID NO: 40693 - protein, 480 aa, Bacillus sp.
NGTMMQYFEWYLPNDGNHWNRLNSDASNLKSKGITAVWIPPAWKGASQNDVRYGAYDLYDLGEFNQKGTVRTKYGTRSQLQAAVTSLKNNGIQVYGDVVMNHKGGADATEMVRAVEVNPNNRNQEVTGEYTIEAWTRFDFPGRGNTHSSFKWRWYHFDGVDWDQSREFDNRIYKFRGHGKAWDWEVDTEFGNYDYLMYADYDMDHPEVVNELRNWGVWYTNTLGLDGFRIDAVKHIKYSFTRDWINHVRSATGKNMFAVAEFWKNDLGAIENYLQKTNWNHSVFDVPLHYNLYNASQSGGNYDMRNIFNGTVVQRHPSHAVTFVDNHDSQPEEALESFVEPWFKPLAYALTLTREQGYPSVFYGDYYGIPTHGVPAMRSKIDPILEARQKYAYGPQHDYLDHPDVIGWTREGDSSHPKSGLATLITDGPGGSKRMYAGLKNAGETWYDITGNRSDTVKIGSDGWGEFHVNDGSVSIYVQK

SEQ ID NO: 40694 - protein, 480 aa, Bacillus sp.
NGTMMQYFEWYLPNDGNHWNRLNSDASNLKSKGITAVWIPPAWKGASQNDVGYGAYDLYDLGEFNQKGTVRTKYGTRSQLQAAVTSLKNNGIQVYGDVVMNHKGGADATEMVRAVEVNPNNRNQEVTGEYTIEAWTRFDFPGRGNTHSSFKWRWYHFDGVDWDQSRRLNNRIYKFRGHGKAWDWEVDTEFGNYDYLMYADYDMDHPEVVNELRNWGVWYTNTLGLDGFRIDAVKHIKYSFTRDWINHVRSATGKNMFAVAEFWKNDLGAIENYLQKTNWNHSVFDVPLHYNLYNASKSGGNYDMRNIFNGTVVQSHPSQAVTFVDNHDSQPEEALESFVEEWFKPLAYALTLTREQGYPSVFYGDYYGIPTHGVPAMRSKIDPILEARQKYAYGPQHDYLDHPDVIGWTREGDSSHPKSGLATLITDGPGGSKRMYAGLKNAGETWYDITGNRSDTVKIGSDGWGEFHVNDGSVSIYVQK

SEQ ID NO: 40695 - protein, 480 aa, Bacillus sp.
NGTMMQYFEWYLPNDGNHWNRLNSDASNLKSKGITAVWIPPAWKGASQNDVGYGAYDLYDLGEFNQKGTVRTKYGTRSQLQAAVTSLKNNGIQVYGDVVMNHKGGADATEMVRAVEVNPNNRNQEVTGEYTIEAWTRFDFPGRGNTHSSFKWRWYHFDGVDWDQSRQVNNRIYKFRGHGKAWDWEVDTEFGNYDYLMYTDYDMDHPEVVNELRNWGVWYTNTLGLDGFRIDAVKHIKYSFTRDWINHVRSATGKNMFAVAEFWKNDLGAIENYLQKTNWNHSVFDVPLHYNLYNASKSGGNYDMRNIFNGTVVQRHPSHAVTFVDNHDSQPEEALESFVEEWFKPLAYALTLTREQGYPSVFYGDYYGIPTHGVPAMRSKIDPILEARQKYAYGPQHDYLDHPDVIGWTREGDSSHPKSGLATLITDGPGGSKRMYAGLKNAGETWYDITGNRSDTVKIGSDGWGEFHVNDGSVSIYVQK

SEQ ID NO: 40696 - protein, 480 aa, Bacillus sp.
NGTMMQYFEWYLPNDGNHWNRLNSDASNLKSKGIIAVWIPPAWKGASQNDVGYGAYDLYDLGEFNQKGTVRTKYGTRSQLQAAVTSLKNNGIQVYGDVVMNHKGGADATEMVRAVEVNPNNRNQEVTGEYTIEAWTRFDFPGRGNTHSSFKWRWYHFDGVDWDQSRRLNNRIYKFRGHGKAWDWEVDTEFGNYDYLMYADYDMDHPEVVNELRNWGVWYTNTLGLDGFRIDAVKHIKYSFTRDWINHVRSATGKNMFAVAEFWKNDLGAIENYLQKTNWNHSVFDVPLHYNLYNASKSGGNYDMRNIFNGTVVQRHPSHAVTFVDNHDSQPEEALESFVEEWFKPLAYALTLTREQGYPSVFYGDYYGIPTHGVPAMRSKIDPILEARQKYAYGPQHDYLDHPDVIGWTREGDSSHPKSGLATLITDGPGGSKRMYAGLKNAGETWYDITGNRSDTVKIGSDGWGEFHVNDGSVSIYVQK

SEQ ID NO: 40697 - protein, 480 aa, Bacillus sp.
NGTMMQYFEWYLPNDGNHWNRLNSDASNLKSKGITAVWIPPAWKGASQNDVGYGAYDLYDLGEFNQKGTVRTKYGTRSQLQAAVTSLKNNGIQVYGDVVMNHKGGADATEMVRAVEVNPNNRNQEVTGEYTIEAWTRFDFPGRGNTHSSFKWRWYHFDGVDWDQSRRLNNRIYKFRGHGKAWDWEVDTEFGNYDYLMYADYDMDHPEVVNELRNWGVWYTNTLGLDGFRIDAVKHIKYSFTRDWINHVRSATGKNMFAVAEFWKNDLGAIENYLQKTNWNHSVFDVPLHYNLYNASKSGGNYDMRNIFNGTVVQRHPSHAVTFVDNHDSQPEEALESFVEEWFKPLAYALTLTREQGYPSVFYGDYYGIPTHGVPAMRSKIDPILEARQKYAYGPQHDYLDHPDVIGWTREGDSSHPKSGLATLITDGPGGSKRMYAGLKNAGETWYDITGTRSDTVKIGSDGWGEFHVNDGSVSIYVQK

SEQ ID NO: 40698 - protein, 480 aa, Bacillus sp.
NGTMMQYFEWYLPNDGNHWNRLNSDASNLKSKGITAVWIPPAWKGASQNDVGYGAYDLYDLGEFNQKGTVRTKYGTRSQLQAAVTSLKNNGIQVYGDVVMNHKGGADATEMVRAVEVNPNNRNQEVTGEYTIEAWTRFDFPGRGNTHSSFKWRWYHFDGVDWDQSERLNNRIYKFRGHGKAWDWEVETEFGNYDYLMYADYDMDHPEVVNELRNWGVWYTNTLGLDGFRIDAVKHIKYSFTRDWINHVRSATGKNMFAVAEFWKNDLGAIENYLQKTNWNHSVFDVPLHYNLYNASKSGGNYDMRNIFNGTVVQRHPSHAVTFVDNHDSQPEEALESFVEEWFKPLAYALTLTREQGYPSVFYGDYYGIPTHGVPAMRSKIDPILEARQKYAYGPQHDYLDHPDVIGWTREGDSSHPKSGLATLITDGPGGSKRMYAGLKNAGETWYDITGNRSDTVKIGSDGWGEFHVNDGSVSIYVQK

SEQ ID NO: 40699 - protein, 480 aa, Bacillus sp.
NGTMMQYFEWDLPNDGNHWDRLNSDASNLKSKGITAVWIPPAWKGASQNDVGYGAYDLYDLGEFNQKGTVRTKYGTRSQLQAAVTSLKNNGIQVYGDVVMNHKGGADATEMVRAVEVNPNNRNQEVTGEYTIEAWTRFDFPGRGNTHSSFKWRWYHFDGVDWDQSRRLNNRIYKFRGHGKAWDWEVDTEFGNYDYLMYADYDMDHPEVVNELRNWGVWYTNTLGLDGFRIDAVKHIKYSFTRDWINHVRSATGKNMFAVAEFWKNDLGAIENYLQKTNWNHSVFDVPLHYNLYNASKSGGNYDMRNIFNGTVVQRHPSHAVTFVDNHDSQPEEALESFVEEWFKPLAYALTLTREQGYPSVFYGDYYGIPTHGVPAMRSKIDPILEARQKYAYGPQHDYLDHPDVIGWTREGDSSHPKSGLATLITDGPGGSKRMYAGLKNAGETWYDITGNRSDTVKIGSDGWGEFHVNDGSVSIYVQK

SEQ ID NO: 40700 - protein, 480 aa, Bacillus sp.
NGTMMQYFEWYLPNDGNHWNRLNSDASNLKSKGITAVWIPPAWKGASQNDVGYGAYDLYDLGEFNQKGTVRTKYGTRSQLQAAVTSLKNNGIQVYGDVVMNHKGGADATEMVRAVEVNPNNRNQEVTGEYTIEAWTRFDFPGRGNTHSSFKWRWYHFDGVDWDQSRRLNNRIYKFRGHGKAWDWEVDTEFGNYDYLMYADYDMDHPEVVNELRNWGVWYTNTLGLDGFRIDAVKHIKYSFTRDWINHVRSATGKNMFAVAEFWKNDLGAIENYLQKTNWNHSVFDVPLHYNLYNASKSGGNYDMRNIFNGTVVQAHPMHAVTFVDNHDSQPEEALESFVEEWFKPLAYALTLTREQGYPSVFYGDYYGIPTHGVPAMRSKIDPILEARQKYAYGPQHDYLDHPDVIGWTREGDSSHPKSGLATLITDGPGGSKRMYAGLKNAGETWYDITGNRSDTVKIGSDGWGEFHVNDGSVSIYVQK

SEQ ID NO: 40701 - protein, 480 aa, Bacillus sp.
NGTMMQYFEWYLPNDGNHWNRLNSDASNLKSKGITAVWIPPAWKGASQNDVGYGAYDLYDLGEFNQKGTVRTKYGTRSQLQAAVTSLKNNGIQVYGDVVMNHKGGADATEMVRAVEVNPNNRNQEVTGEYTIEAYTRFDFPGRGNTHSSFKWRWYHFDGVDWDQSRDLTNRIYKFRGHGKAWDWEVDTEFGNYDYLMYADYDMDHPEVVNELRNWGVWYTNTLGLDGFRIDAVKHIKYSFTRDWINHVRSATGKNMFAVAEFWKNDLGAIENYLQKTNWNHSVFDVPLHYNLYNASKSGGNYDMRNIFNGTVVQRHPSHAVTFVDNHDSQPEEALESFVEEWFKPLAYALTLTREQGYPSVFYGDYYGIPTHGVPAMRSKIDPILEARQKYAYGPQHDYLDHPDVIGWTREGDSSHPKSGLATLITDGPGGSKRMYAGLKNAGETWYDITGNRSDTVKIGSDGWGEFHVNDGSVSIYVQK

SEQ ID NO: 40702 - protein, 480 aa, Bacillus sp.
NGTMMQYFEWYLPNDGNHWNRLNSDASNLKSKGITAVWIPPAWKGASQNDVGYGAYDLYDLGEFNQKGTVRTKYGTRSQLQAAVTSLKNNGIQVYGDVVMNHKGGADATEMVRAVEVNPNNRNQEVTGEYTIEAWTRFDFPGRGNTHSSFKWRWYHFDGVDWDQSRRLNNRIYKFRGHGKAWDWEVDTEFGNYDYLMYADYDMDHPEVVNELRNWGVWYTNTLGLDGFRIDAVKHIKYSFTRDWINHVRSATGKNMFAVAEFWKNDLGAIENYLQKTNWNHSVFDVPLHYNLYNASKSGGNYDMRNIFNGTVVQRHPSHAVTFVDNHDSQPEEALESFVEEWFKPLAYALTLTREQGYPSVFYGDYYGIPTHGVPAMRSKIDPILEARQKYAYGPQHDYLDHPDVIGWTREGDSSHPPSGLATLITDGPGGSKRMYAGLKNAGETWYDITGNRSDTVKIGSDGWGEFHVNDGSVSIYVQK

SEQ ID NO: 40703 - protein, 479 aa, Synthetic construct
NGTMMQYFEWYLPNDGNHWNRLNSDASNLKSKGITAVWIPPAWKAISQNDVGYGAYDLYDLGEFNQKGTVRTKYGTRSQLQAAVTSLKNNGIQVYGDVVMNHKGGADATEMVRAVEVNPNNRNQEVTGEYTIEAWTRFDFPGRGNTHSSFKWRWYHFDGVDWDQSRDLNRIYKFRGHGKAWDWEVDTEFGNYDYLMYADYDMDHPEVVNELRNWGVWYTNTLGLDGFRIDAVKHIKYSFTRDWINHVRSATGKNMFAVAEFWKNDLGAIENYLQKTNWNHSVFDVPLHYNLYNASKSGGNYDMRNIFNGTVVQRHPSHAVTFVDNHDSQPEEALESFVEEWFKPLAYALTLTREQGYPSVFYGDYYGIPTHGVPAMRSKIDPILEARQKYAYGPQHDYLDHPDVIGWTREGDSSHPKSGLATLITDGPGGSKRMYAGLKNAGETWYDITGNRSDTVKIGSDGWGEFHVNDGSVSIYVQK

SEQ ID NO: 40704 - protein, 480 aa, Bacillus sp.
NGTMMQYFEWYLPNDGNHWNRLNSDASNLKSKGITAVWIPPAWKGASQNDVGYGAYDLYDLGEFNQKGTVRTKYGTRSQLQAAVTSLKNNGIQVYGDVVMNHKGGADLTEMVRAVEVNPNNRNQEVTGEYTIEAWTRFDFPGRGNTHSSFKWRWYHFDGVDWDQSRQLDNRIYKFRGHGKAWDWEVDTEFGNYDYLMYADYDMDHPEVVNELRNWGVWYTNTLGLDGFRIDAVKHIKYSFTRDWINHVRSATGKNMFAVAEFWKNDLGAIENYLQKTNWNHSVFDVPLHYNLYNASKSGGNYDMRNIFNGTVVQRHPSHAVTFVDNHDSQPEEALESFVEEWFKPLAYALTLTREQGYPSVFYGDYYGIPTHGVPAMRSKIDPILEARQKYAYGPQHDYLDHPDVIGWTREGDSSHPKSGLATLITDGPGGSKRMYAGLKNAGETWYDITGNRSDTVKIGSDGWGEFHVNDGSVSIYVQK

SEQ ID NO: 40705 - protein, 480 aa, Bacillus sp.
NGTMMQYFEWYLPNDGNHWNRLNSDASNLKSKGITAVWIPPAWKGASQNDVGYGAYDLYDLGEFNQKGTVRTKYGTRSQLQAAVTSLKNNGIQVYGDVVMNHKGGADATEMVRAVEVNPNNRNQEVTGEYTIEAWTRFDFPGRGNTHSSFKWRWYHFDGVDWDQSREFNNRIYKFRGHGKAWDWEVDTEFGNYDYLMYVDYDMDHPEVVNELRNWGVWYTNTLGLDGFRIDAVKHIKYSFTRDWINHVRSATGKNMFAVAEFWKNDLGAIENYLQKTNWNHSVFDVPLHYNLYNASKSGGNYDMRNIFNGTVVQRHPSHAVTFVDNHDSQPEEALESFVEEWFKPLAYALTLTREQGYPSVFYGDYYGIPTHGVPAMRSKIDPILEARQKYAYGPQHDYLDHPDVIGWTREGDSSHPKSGLATLITDGPGGSKRMYAGLKNAGETWYDITGNRSDTVKIGSDGWGEFHVNDGSVSIYVQK

SEQ ID NO: 40706 - protein, 480 aa, Bacillus sp.
NGTMMQYFEWYLPNDGNHWNRLNSDASNLKSKGITAVWIPPAWKGASQNDVGYGAYDLYDLGEFNQKGTVRTKYGTRSQLQAAVTSLKNNGIQVYGDVVMNHKGGADATEMVRAVEVNPNNRNQEVTGEYTIEAWTRFDFPGRGNTHSSFKWRWYHFDGVDWDQSRRLNNRIYKFRGHGKAWDWEVDTEFGNYDYLMYADYDMDHPEVVNELRNWGVWYTNTLGLDGFRIDAVKHIKYSFTRDWINHVRSATGKNMFAVAEFWKNDLGAIENYLQKTNWNHSVFDVPLHYNLYNASKSGGNYDMRNIFNGTVVQRHPSHAVTFVDNHDSQPEEALESFVEEWFKPLAYALTLTREQGYPSVFYGDYYGIPTHGVPAMRSKIDPILEARQKYAYGPQHDYLDHPDVIGWTREGDSSHPLSGLATLITDGPGGSKRMYAGLKNAGETWYDITGNRSDTVKIGSDGWGEFHVNDGSVSIYVQK

SEQ ID NO: 40707 - protein, 480 aa, Bacillus sp.
NGTMMQYFEWYLPNDGNHWNRLNSDASNLKSKGITAVWIPPAWKAQSQNDVGYGAYDLYDLGEFNQKGTVRTKYGTRSQLQAAVTSLKNNGIQVYGDVVMNHKGGADATEMVRAVEVNPNNRNQEVTGEYTIEAWTRFDFPGRGNTHSSFKWRWYHFDGVDWDQSRQLNNRIYKFRGHGKAWDWEVDTEFGNYDYLMYADYDMDHPEVVNELRNWGVWYTNTLGLDGFRIDAVKHIKYSFTRDWINHVRSATGKNMFAVAEFWKNDLGAIENYLQKTNWNHSVFDVPLHYNLYNASKSGGNYDMRNIFNGTVVQRHPSHAVTFVDNHDSQPEEALESFVEEWFKPLAYALTLTREQGYPSVFYGDYYGIPTHGVPAMRSKIDPILEARQKYAYGPQHDYLDHPDVIGWTREGDSSHPKSGLATLITDGPGGSKRMYAGLKNAGETWYDITGNRSDTVKIGSDGWGEFHVNDGSVSIYVQK

SEQ ID NO: 40708 - protein, 480 aa, Bacillus sp.
NGTMMQYFEWYLPNDGNHWNRLNSDASNLKSKGITAVWIPPAWKAASQNDVGYGAYDLYDLGEFNQKGTVRTKYGTRSQLQAAVTSLKNNGIQVYGDVVMNHKGGADATEMVRAVEVNPNNRNQEVTGEYTIEAWTRFDFPGRGNTHSSFKWRWYHFDGVDWDQSRRLNNRIYKFRGHGKAWDWEVDTEFGNYDYLMYADYDMDHPEVVNELRNWGVWYTNTLGLDGFRIDAVKHIKYSFTRDWINHVRSATGKNMFAVAEFWKNDLGAIENYLQKTNWNHSVFDVPLHYNLYNASKSGGNYDMRNIFNGTVVQRHPSHAVTFVDNHDSQPEEALESFVEEWFKPLAYALTLTREQGYPSVFYGDYYGIPTHGVPAMRSKIDPILEARQKYAYGPQHDYLDHPDVIGWTREGDSSHPKSGLATLITDGPGGSKRMYAGLKNAGETWYDITGNRSDTVKIGSDGWGEFHVNDGSVSIYVQK

SEQ ID NO: 40709 - protein, 480 aa, Bacillus sp.
NGTMMQYFEWYLPNDGNHWNRLNSDASNLKSKGITAVWIPPAWKGASQNDVGYGAYDLYDLGEFNQKGTVRTKYGTRSQLQAAVTSLKNNGIQVYGDVVMNHKGGADATEMVRAVEVNPNNRNQEVTGEYTIEAWTRFDFPGRGNTHSSFKWRWYHFDGVDWDQSRRLNNRIYKFRGHGKAWDWEVDTEFGNYDYLMYADYDMDHPEVVNELRNWGVWYTNTLGLDGFRIDAVKHIKYSFTRDWINHVRSATGKNMFAVAEFWKNDLGAIENYLQKTNWNHSVFDVPLHYNLYNASKSGGNYDMRNIFNGTVVQRHPSHAVTFVDNHDSQPEEALESFVEEWFKPLAYALTLTREQGYPSVFYGDYYGIPTHGVPAMRSKIDPILEARQKYAYGPQHDYLDHPDVIGWTREGDSSHPKSGLATAITDGPGGSKRMYAGLKNAGETWYDITGNRSDTVKIGSDGWGEFHVNDGSVSIYVQK

SEQ ID NO: 40710 - protein, 480 aa, Bacillus sp.
NGTMMQYFEWYLPNDGNHWNRLNSDASNLKSKGITAVWIPPAWKGASQNDVGYGAYDLYDLGEFNQKGTVRTKYGTRSQLQAAVTSLKNNGIQVYGDVVMNHKGGADATEMVRAVEVNPNNRNQEVTGEYTIEAWTRFDFPGRGNTHSSFKWRWYHFDGVDWDQSRRLNNRIYKFRGHGKAWDWEVDTEFGNYDYLMYADYDMDHPEVVNELRNWGVWYTNTLGLDGFRIDAVKHIKYSFTRDWINHVRSATGKNMFAVAEFWKNDLGAIENYLQKTNWNHSVFDVPLHYNLYNASKSGGNYDMRNIFNGTVVQRHPSHAVTFVDNHDSQPEEALESFVEEWFKPLAYALTLTREQGYPSVFYGDYYGIPTHGVPAMRSKIDPILEARQKYAYGPQHDYLDHPDVIGWTREGDSSHPKSGLATLITDGPGGSKRMYAGLKNAGETWYDITGNRSDTVRIGSDGWGEFHVNDGSVSIYVQK

SEQ ID NO: 40711 - protein, 480 aa, Bacillus sp.
NGTMMQYFEWYLPNDGNHWNRLNSDASNLKSKGITAVWIPPAWKGASQNDVGYGAYDLYDLGEFNQKGTVRTKYGTRSQLQAAVTSLKNNGIQVYGDVVMNHKGGADATEMVRAVEVNPNNRNQEVTGEYTIEAWTRFDFPGRGNTHSSFKWRWYHFDGVDWDQSRRLNNRIYKFRGHGKAWDWEVDTEFGNYDYLMYADYDMDHPEVVNELRNWGVWYTNTLGLDGFRIDAVKHIKYSFTRDWINHVRSATGKNMFAVAEFWKNDLGAIENYLQKTNWNHSVFDVPLHYNLYNASKSGGNYDMRNIFNGTVVQRLPSHAVTFVDNHDSQPEEALESFVEEWFKPLAYALTLTREQGYPSVFYGDYYGIPTHGVPAMRSKIDPILEARQKYAYGPQHDYLDHPDVIGWTREGDSSHPKSGLATLITDGPGGSKRMYAGLKNAGETWYDITGNRSDTVKIGSDGWGEFHVNDGSVSIYVQK

SEQ ID NO: 40712 - protein, 480 aa, Bacillus sp.
NGTMMQYFEWYLPNDGNHWNRLNSDASNLKSKGITAVWIPPAWKGASQNDVGYGAYDLYDLGEFNQKGTVRTKYGTRSQLQAAVTSLKNNGIQVYGDVVMNHKGGADATEMVRAVEVNPNNRNQEVTGEYTIEAWTRFDFPGRLNTHSSFKWRWYHFDGVDWDQSRRLNNRIYKFRGHGKAWDWEVDTEFGNYDYLMYADYDMDHPEVVNELRNWGVWYTNTLGLDGFRIDAVKHIKYSFTRDWINHVRSATGKNMFAVAEFWKNDLGAIENYLQKTNWNHSVFDVPLHYNLYNASKSGGNYDMRNIFNGTVVQRHPSHAVTFVDNHDSQPEEALESFVEEWFKPLAYALTLTREQGYPSVFYGDYYGIPTHGVPAMRSKIDPILEARQKYAYGPQHDYLDHPDVIGWTREGDSSHPKSGLATLITDGPGGSKRMYAGLKNAGETWYDITGNRSDTVKIGSDGWGEFHVNDGSVSIYVQK

SEQ ID NO: 40713 - protein, 480 aa, Bacillus sp.
NGTMMQYFEWYLPNDGNHWNRLNSDASNLKSKGITAVWIPPAWKGASQNDVGYGAYDLYDLGEFNQKGTVRTKYGTRSQLQAAVTSLKNNGIQVYGDVVMNHKGGADATEMVRAVEVNPNNRNQEVTGEYTIEAWTRFDFSGRGNTHSSFKWRWYHFDGVDWDQSRRLNNRIYKFRGHGKAWDWEVDTEFGNYDYLMYADYDMDHPEVVNELRNWGVWYTNTLGLDGFRIDAVKHIKYSFTRDWINHVRSATGKNMFAVAEFWKNDLGAIENYLQKTNWNHSVFDVPLHYNLYNASKSGGNYDMRNIFNGTVVQRHPSHAVTFVDNHDSQPEEALESFVEEWFKPLAYALTLTREQGYPSVFYGDYYGIPTHGVPAMRSKIDPILEARQKYAYGPQHDYLDHPDVIGWTREGDSSHPKSGLATLITDGPGGSKRMYAGLKNAGETWYDITGNRSDTVKIGSDGWGEFHVNDGSVSIYVQK

SEQ ID NO: 40714 - protein, 480 aa, Bacillus sp.
NGTMMQYFEWYLPNDGNHWNRLNSDASNLKSKGITAVWIPPAWKGASQNDVGYGAYDLYDLGEFNQKGTVRTKYGTRSQLQAAVTSLKNNGIQVYGDVVMNHKGGADATEMVRAVEVNPNNRNQEVTGEYTIEAWTRFDFPGRGNTHSSFKWRWYHFDGVDWDQSRRLNNRIYKFRGHGKAWDWEVDTEFGNYDYLMYADYDMDHPEVVNELRNWGVWYTNTLGLDGFRIDAVKHIKYSFTRDWINHVRSATGKNMFAVAEFWKNDLGAIENYLQKTNWNHSVFDVPLHYNLYNASKSGGNYDMRNIFNGTVVQRHPSHAVTFVDNHDSQPEEALESFVETWFKPLAYALTLTREQGYPSVFYGDYYGIPTHGVPAMRSKIDPILEARQKYAYGPQHDYLDHPDVIGWTREGDSSHPKSGLATLITDGPGGSKRMYAGLKNAGETWYDITGNRSDTVKIGSDGWGEFHVNGTSVSIYVQK

SEQ ID NO: 40715 - protein, 480 aa, Bacillus sp.
NGTMMQYFEWYLPNDGNHWNRLNSDASNLKSKGITAVWIPPAWKGASQNDVGYGAYDLYDLGEFNQKGTVRTKYGTRSQLQAAVTSLKNNGIQVYGDVVMNHKGGADATEMVRAVEVNPNNRNQEVTGEYTIEAWTRFDFPGRGNTHSSFKWRWYHFDGVDWDQSRRLNNRIYKFRGHGKAWDWEVDTEFGNYDYLMYADYDMDHPEVVNELRNWGVWYTNTLGLDGFRIDAVKHIKYSFTRDWINHVRSATGKNMFAVAEFWKNDLGAIENYLQKTNWNHSVFDVPLHYNLYNASKSGGNYDMRNIFNGTVVQRHPSHAVTFVDNHDSQPEEALESFVEEWFKPLAYALTLTREQGYPSVFYGDYYGIPTHGVPAMRSKIDPILEARQKYAYGPQHDYLDHPDVIGWTREGDSSHPKSGLATLITDGPGGSKRMYAGLKNAGETWYDITGNRSDTVKTGSDGWGEFHVNDGSVSIYVQK

SEQ ID NO: 40716 - protein, 480 aa, Bacillus sp.
NGTMMQYFEWYLPNDGNHWNRLNSDASNLKSKGITAVWIPPAWKGASQNDVGYGAYDLYDLGEFNQKGTVRTKYGTRSQLQAAVTSLKNNGIQVYGDVVMNHKGGADATEMVRAVEVNPNNRNQEVTGEYTIEAWTRFDFPGRGNTHSSFKWRWYHFDGVDWDQSRRLNNRIYKFRGHGKAWDWEVDTEFGNYDYLMYADYDMDHPEVVNELRNWGVWYTNTLGLDGFRIDAVKHIKYSFTRDWINHVRSATGKNMFAVAEFWKNDLGAIENYLQKTNWNHSVFDVPLHYNLYNASKSGGNYDMRNIFNGTVVQRHPSHAVTFVDNHDSQPEEALESFVEEWFMPLAYALTLTREQGYPSVFYGDYYGIPTHGVPAMRSKIDPILEARQKYAYGPQHDYLDHPDVIGWTREGDSSHPKSGLATLITDGPGGSKRMYAGLKNAGETWYDITGNRSDTVKIGSDGWGEFHVNDGSVSIYVQK

SEQ ID NO: 40717 - protein, 480 aa, Bacillus sp.
NGTMMQYFEWYLPNDGNHWNRLNSDASNLKSKGITAVWIPPAWKAASQNDVGYGAYDLYDLGEFNQKGTVRTKYGTRSQLQAAVTSLKNNGIQVYGDVVMNHKGGADATEMVRAVEVNPNNRNQEVTGEYTIEAWTRFDFPGRGNTHSSFKWRWYHFDGVDWDQSRQVNNRIYKFRGHGKAWDWEVDTEFGNYDYLMYADYDMDHPEVVNELRNWGVWYTNTLGLDGFRIDAVKHIKYSFTRDWINHVRSATGKNMFAVAEFWKNDLGAIENYLQKTNWNHSVFDVPLHYNLYNASKSGGNYDMRNIFNGTVVQRHPSHAVTFVDNHDSQPEEALESFVEEWFKPLAYALTLTREQGYPSVFYGDYYGIPTHGVPAMRSKIDPILEARQKYAYGPQHDYLDHPDVIGWTREGDSSHPKSGLATLITDGPGGSKRMYAGLKNAGETWYDITGNRSDTVKIGSDGWGEFHVNDGSVSIYVQK

SEQ ID NO: 40718 - protein, 480 aa, Bacillus sp.
NGTMMQYFEWYLPNDGNHWNRLNSDASNLKSKGITAVWIPPAWKGASQNDVGYGAYDLYDLGEFNQKGTVRTKYGTRSQLQAAVTSLKNNGIQVYGDVVMNHKGGADATEMVRAVEVNPNNRNQEVTGEYTIEAWTRFDFPGRGNTHSSFKWRWYHFDGVDWDQSRDLENRIYKFRGHGKAWDWEVDTEFGNYDYLMYADYDYDHPESTNEMRNWGVWYTNTLGLDGFRIDAVKHIKYSFTRDWINHVRSATGKNMFAVAEFWKNDLGAIENYLQKTNWNHSVFDVPLHYNLYNASKSGGNYDMRNIFNGTVVQRHPSHAVTFVDNHDSQPEEALESFVEEWFKPLAYALTLTREQGYPSVFYGDYYGIPTHGVPAMRSKIDPILEARQKYAYGPQHDYLDHPDVIGWTREGDSSHPKSGLATLITDGPGGSKRMYAGLKNAGETWYDITGNRSDTVKIGSDGWGEFHVNDGSVSIYVQK

SEQ ID NO: 40719 - protein, 480 aa, Bacillus sp.
NSTMMQYFEWYLPNDGNHWNRLNSDASNLKSKGITAVWIPPAWKGASQNDVGYGAYDLYDLGEFNQKGTVRTKYGTRSQLQAAVTSLKNNGIQVYGDVVMNHKGGADATEMVRAVEVNPNNRNQEVTGEYTIEAWTRFDFPGRGNTHSSFKWRWYHFDGVDWDQSRRLNNRIYKFRGHGKAWDWEVDTEFGNYDYLMYADYDMDHPEVVNELRNWGVWYTNTLGLDGFRIDAVKHIKYSFTRDWINHVRSATGKNMFAVAEFWKNDLGAIENYLQKTNWNHSVFDVPLHYNLYNASKSGGNYDMRNIFNGTVVQRHPSHAVTFVDNHDSQPEEALESFVEEWFKPLAYALTLTREQGYPSVFYGDYYGIPTHGVPAMRSKIDPILEARQKYAYGPQHDYLDHPDVIGWTREGDSSHPKSGLATLITDGPGGSKRMYAGLKNAGETWYDITGNRSDTVKIGSDGWGEFHVNDGSVSIYVQK

SEQ ID NO: 40720 - protein, 480 aa, Bacillus sp.
NGTMMQYFEWYLPNDGNHWNRLNSDASNLKSKGITAVWIPPAWKGASQNDVGYGAYDLYDLGEFNQKGTVRTKYGTRSQLQAAVTSLKNNGIQVYGDVVMNHKGGADATEMVRAVEVNPNNRNQEVTGEYTIEAWTRFDFPGRGNTHSSFKWRWYHFDGVDWDQSRRLNNRIYKFRGHGKAWDWEVDTEFGNYDYLMYADYDMDHPEVVNELRNWGVWYTNTLGLDGFRIDAVKHIKYSFTRDWINHVRSATGKNMFAVAEFWKNDLGAIENYLQKTNWNHSVFDVPLHYNLYNASKSGGNYDMRNIFNGTVVQRHPSHAVTFVDNHDSQPEEALESFVEEWFKPLAYALTLTREQGYPSVFYGDYYGIPTHGVPAMRSKIDPILEARQKYAYGPQHDYLDHPDVIGWTREGDSSHPKSGLATLITDGPGGSKRMYAGLKNAGETWYDITGNRSDTVKIGSDGWGEFHVNYGSVSIYVQK

SEQ ID NO: 40721 - protein, 480 aa, Bacillus sp.
NGTMMQYFEWYLPNDGNHWNRLNSDASNLKSKGITAVWIPPAWKGASQNDVGYGAYDLYDLGEFNQKGTVRTKYGTRSQLQAAVTSLKNNGIQVYGDVVMNHKGGADATEMVRAVEVNPNNRNQEVTGEYTIEAWTRFDFPGRGNTHSSFKWRWYHFDGVDWDQSRRLNNRIYKFRGHGKVWDWEVDTEFGNYDYLMYADYDMDHPEVVNELRNWGVWYTNTLGLDGFRIDAVKHIKYSFTRDWINHVRSATGKNMFAVAEFWKNDLGAIENYLQKTNWNHSVFDVPLHYNLYNASKSGGNYDMRNIFNGTVVQRHPSHAVTFVDNHDSQPEEALESFVEEWFKPLAYALTLTREQGYPSVFYGDYYGIPTHGVPAMRSKIDPILEARQKYAYGPQHDYLDHPDVIGWTREGDSSHPKSGLATLITDGPGGSKRMYAGLKNAGETWYDITGNRSDTVKIGSDGWGEFHVNDGSVSIYVQK

SEQ ID NO: 40722 - protein, 480 aa, Bacillus sp.
NGTMMQYFEWYLPNDGNHWNRLNSDASNLKSKGITAVWIPPAWKGASQNDVGYGAYDLYDLGEFNQKGTVRTKYGTRSQLQAAVTSLKNNGIQVYGDVVMNHKGGADATEMVRAVEVNPNNRNQEVTGEYTIEAWTRFDFPGRGNTHSSFKWRWYHFDGVDWDQSRRLNNRIYKFRGHGKAWDWEVDTEFGNYDYLMYADYDMDHPEVVNELRNWGVWYTNTLGLDGFRIDAVKHIKYSFTRDWINHVRSATGKNMFAVAEFWKNDLGAIENYLQKTNWNHSVFDVPLHYNLYNASKSGGNYDMRNIFNGTVVQRHPSHAVTFVDNHDSQGEEALESFVEEWFKPLAYALTLTREQGYPSVFYGDYYGIPTHGVPAMRSKIDPILEARQKYAYGPQHDYLDHPDVIGWTREGDSSHPKSGLATLITDGPGGSKRMYAGLKNAGETWYDITGNRSDTVKIGSDGWGEFHVNDGSVSIYVQK

SEQ ID NO: 40723 - protein, 480 aa, Bacillus sp.
NGTMMQYFEWYLPNDGNHWNRLNSDASNLKSKGITAVWIPPAWKGASQNDVGYGAYDLYDLGEFNQKGTVRTKYGTRSQLQAAVTSLKNNGIQVYGDVVMNHKGGADATEMVRAVEVNPNNRNQEVTGEYTIEAWTRFDFPGRGNTHSSFKWRWYHFDGVDWDQSRRLNNRIYKFRGHGKAWDWEVDTEFGNYDYLMYADYDMDHPEVVNELRNWGVWYTNTLGLDGFRIDAVKHIKYSFTRDWINHVRSATGKNMFAVAEFWKNDLGAIENYLQKTNWNHSVFDVPLHYNLYNASKSGGNYDMRNIFNGTVVQRHPSHAVTFVDNHDSQPEEALESFVDPWFKPLAYALTLTREQGYPSVFYGDYYGIPTHGVPAMRSKIDPILEARQKYAYGPQHDYLDHPDVIGWTREGDSSHPKSGLATLITDGPGGSKRMYAGLKNAGETWYDITGNRSDTVKIGSDGWGEFHVNDKSVSIYVQK

SEQ ID NO: 40724 - protein, 480 aa, Bacillus sp.
NGTMMQYFEWYLPNDGNHWNRLNSDASNLKSKGITAVWIPPAWKGASQNDVGYGAYDLYDLGEFNQSGTVRTKYGTRSQLQAAVTSLKNNGIQVYGDVVMNHKGGADATEMVRAVEVNPNNRNQEVTGEYTIEAWTRFDFPGRGNTHSSFKWRWYHFDGVDWDQSRRLNNRIYKFRGHGKAWDWEVDTEFGNYDYLMYADYDMDHPEVVNELRNWGVWYTNTLGLDGFRIDAVKHIKYSFTRDWINHVRSATGKNMFAVAEFWKNDLGAIENYLQKTNWNHSVFDVPLHYNLYNASKSGGNYDMRNIFNGTVVQRHPSHAVTFVDNHDSQPEEALESFVEEWFKPLAYALTLTREQGYPSVFYGDYYGIPTHGVPAMRSKIDPILEARQKYAYGPQHDYLDHPDVIGWTREGDSSHPKSGLATLITDGPGGSKRMYAGLKNAGETWYDITGNRSDTVKIGSDGWGEFHVNDGSVSIYVQK

SEQ ID NO: 40725 - protein, 480 aa, Bacillus sp.
NGTMMQYFEWYLPNDGNHWNRLNSDASNLKSKGITAVWIPPAWKGASQNDVGYGAYDLYDLGEFNQKGTVRTKYGTRSQLQAAVTSLKNNGIQVYGDVVMNHKGGADATEMVRAVEVNPNNRNQEVTGEYTIEAWTRFDFPGRGNTHSSFKWRWYHFDGVDWDQSRRLNNRIYKFRGHGKAWDWEVDTEFGNYDYLMYADYDMDHPESVNELRNWGVWYTNTLGLDGFRIDAVKHIKYSFTRDWINHVRSATGKNMFAVAEFWKNDLGAIENYLQKTNWNHSVFDVPLHYNLYNASKSGGNYDMRNIFNGTVVQRHPSHAVTFVDNHDSQPEEALESFVEEWFKPLAYALTLTREQGYPSVFYGDYYGIPTHGVPAMRSKIDPILEARQKYAYGPQHDYLDHPDVIGWTREGDSSHPKSGLATLITDGPGGSKRMYAGLKNAGETWYDITGNRSDTVKIGSDGWGEFHVNDGSVSIYVQK

SEQ ID NO: 40726 - protein, 480 aa, Bacillus sp.
NGTMMQYFEWYLPNDGNHWNRLNSDASNLKSKGITAVWIPPAWKGASQNDVGYGAYDLYDLGEFNQKGTVRTKYGTRSQLQAAVTSLKNNGIQVYGDVVMNHKGGADATEMVRAVEVNPNNRNQEVTGEYTIEAWTRFDFPGRGNTHSSFKWRWYHFDGVDWDQSRRLNNRIYKFRGHGKAWDWEVDTEFGNYDYLMYADYDMDHPEVVNELRNWGVWYTNTLGLDGFRIDAVKHIKYSFTRDWINHVRSATGKNMFAVAEFWKNDLVAIENYLQKTNWNHSVFDVPLHYNLYNASKSGGNYDMRNIFNGTVVQRHPSHAVTFVDNHDSQPEEALESFVEEWFKPLAYALTLTREQGYPSVFYGDYYGIPTHGVPAMRSKIDPILEARQKYAYGPQHDYLDHPDVIGWTREGDSSHPKSGLATLITDGPGGSKRMYAGLKNAGETWYDITGNRSDTVKIGSDGWGEFHVNDGSVSIYVQK

SEQ ID NO: 40727 - protein, 480 aa, Bacillus sp.
NGTMMQYFEWYLPNDGNHWNRLNSDASNLKSKGITAVWIPPAWKGASQNDVGYGAYDLYDLGEFNQKGTVRTKYGTRSQLQAAVTSLKNNGIQVYGDVVMNHKGGADATEMVRAVEVNPNNRNQEVTGEYTIEAWTRFDFPGRGNTHSSFKWRWYHFDGVDWDQSRNVNNRIYKFRGHGKAWDWEVDTEFGNYDYLMYADYDMDHPEVVNELRNWGVWYTNTLGLDGFRIDAVKHIKYSFTRDWINHVRSATGKNMFAVAEFWKNDLGAIENYLQKTNWNHSVFDVPLHYNLYNASKSGGNYDMRNIFNGTVVQAHPNHAVTFVDNHDSQPEEALESFVEEWFKPLAYALTLTREQGYPSVFYGDYYGIPTHGVPAMRSKIDPILEARQKYAYGPQHDYLDHPDVIGWTREGDSSHPKSGLATLITDGPGGSKRMYAGLKNAGETWYDITGNRSDTVKIGSDGWGEFHVNDGSVSIYVQK

SEQ ID NO: 40728 - protein, 480 aa, Bacillus sp.
NGTMMQYFEWYLPNDGNHWNRLNSDASNLKSKGITAVWIPPAWKGASQNDVGYGAYDLYDLGEFNQKGTVRTKYGTRSQLQAAVTSLKNNGIQVYGDVVMNHKGGADATEMVRAVEVNPNNRNQEVTGEYTIEAWTRFDFPGRGNTHSSFKWRWYHFDGVDWDQSRRLNNRIYKFRGHGKAWDWEVDTEFGNYDYLMYADYDMDHPEVVNELRNWGVWYTNTLGLDGFRIDAVKHIKYSFTRDWINHVRSATGKNMFAVAEFWKNDLGAIENYLQKTNWNHSVFDVPLHYNLYNASKSGGNYDMRNIFNGTVVQRHPSHAVTFVDNHDSQPEEALESFVEEWFKPLAYALTLTREQGLPSVFYGDYYGIPTHGVPAMRSKIDPILEARQKYAYGPQHDYLDHPDVIGWTREGDSSHPKSGLATLITDGPGGSKRMYAGLKNAGETWYDITGNRSDTVKIGSDGWGEFHVNDGSVSIYVQK

SEQ ID NO: 40729 - protein, 480 aa, Bacillus sp.
NGTMMQYFEWYLPNDGNHWNQLNSDASNLKSKGITAVWIPPAWKGASQNDVGYGAYDLYDLGEFNQKGTVRTKYGTRSQLQAAVTSLKNNGIQVYGDVVMNHKGGADATEMVRAVEVNPNNRNQEVTGEYTIEAWTRFDFPGRGNTHSSFKWRWYHFDGVDWDQSRRTNNRIYKFRGHGKAWDWEVDTEFGNYDYLMYADYDMDHPEVVNELRNWGVWYTNTLGLDGFRIDAVKHIKYSFTRDWINHVRSATGKNMFAVAEFWKNDLGAIENYLQKTNWNHSVFDVPLHYNLYNASKSGGNYDMRNIFNGTVVQRHPSHAVTFVDNHDSQPEEALESFVEEWFKPLAYALTLTREQGYPSVFYGDYYGIPTHGVPAMRSKIDPILEARQKYAYGPQHDYLDHPDVIGWTREGDSSHPKSGLATLITDGPGGSKRMYAGLKNAGETWYDITGNRSDTVKIGSDGWGEFHVNDGSVSIYVQK

SEQ ID NO: 40730 - protein, 480 aa, Bacillus sp.
NGTMMQYFEWYLPNDGNHWNRLNSDASNLKSKGITAVWIPPAWKGASQNDVGYGAYDLYDLGEFNQKGTVRTKYGTRSQLQAAVTSLKNNGIQVYGDVVMNHKGGADATEMVRAVEVNPNNRNQEVTGEYTIEAWTRFDFPGRGNTHSSFKWRWYHFDGVDWDQSRRLNNRIYKFRGHGKAWDWEVDTEFGNYDYLMYADYDMDHPEVVNELRNWGVWYTNTLGLDGFRIDAVKHIKYSFTRDWINHVRSATGKNMFAVAEFWKNDLGAIENYLQKTNWNHSVFDVPLHYNLYNASKSGGNYDMRNIFNGTVVQMHPSHAVTFVDNHDSQPEEALESFVEEWFKPLAYALTLTREQGYPSVFYGDYYGIPTHGVPAMRSKIDPILEARQKYAYGPQHDYLDHPDVIGWTREGDSSHPKSGLATLITDGPGGSKRMYAGLKNAGETWYDITGNRSDTVKIGSDGWGEFHVNDGSVSIYVQK

SEQ ID NO: 40731 - protein, 480 aa, Bacillus sp.
NGTMMQYFEWYLPNDGNHWNRLNSDASNLKSKGITAVWIPPAWKGASQNDVGYGAYDLYDLGEFNQKGTVRTKYGTRSQLQAAVTSLKNNGIQVYGDVVMNHKGGADATEMVRAVEVNPNNRNQEVTGEYTIEAWTRFDFPGRGNTHSSFKWRWYHFDGVDWDQSRRLNNRIYKFRGHGKAWDWEVDTEFGNYDYLMYADYDMDHPEVVNELRNWGVWYTNTLGLDGFRIDAVKHIKYSFTRDWINHVRSATGKNMFAVAEFWKNDLGAIENYLQKTNWNHSVFDVPLHYNLYNASQSGGNYDMRNIFNGTVVQRHPSHAVTFVDNHDSQPEEALESFVEPWFKPLAYALTLTREQGYPSVFYGDYYGIPTHGVPAMRSKIDPILEARQKYAYGPQHDYLDHPDVIGWTREGDSSHPKSGLATLITDGPGGSKRMYAGLKNAGETWYDITGNRSDTVKIGSDGWGEFHVNKGSVSIYVQK

SEQ ID NO: 40732 - protein, 480 aa, Synthetic construct
NGTMMQYFEWYLPNDGNHWNRLNSDASNLKSKGITAVWIPPAWKGASQNDVGYGAYDLYDLGEFNQKGTVRTKYGTRSQLQAAVTSLKNNGIQVYGDVVMNHKGGADATEMVRAVEVNPNNRNQEVTGEYTIEAWTRFDFPGRGNTHSSFKWRWYHFDGVDWDQSRRLNNRIYKFRGHGKAWDWEVDTEFGNYDYLMYADYDYDHPETTNELRNWGVWYTNTLGLDGFRIDAVKHIKYSFTRDWINHVRSATGKNMFAVAEFWKNDLGAIENYLQKTNWNHSVFDVPLHYNLYNASKSGGNYDMRNIFNGTVVQRHPSHAVTFVDNHDSQPEEALESFVEEWFKPLAYALTLTREQGYPSVFYGDYYGIPTHGVPAMRSKIDPILEARQKYAYGPQHDYLDHPDVIGWTREGDSSHPKSGLATLITDGPGGSKRMYAGLKNAGETWYDITGNRSDTVKIGSDGWGEFHVNDGSVSIYVQK

SEQ ID NO: 40733 - protein, 480 aa, Bacillus sp.
NGTMMQYFEWYLPNDGNHWNRLNSDASNLKSKGITAVWIPPAWKGASQNDVGYGAYDLYDLGEFNQKGTVRTKYGTRSQLQAAVTSLKNNGIQVYGDVVMNHKGGADATEMVRAVEVNPNNRNQEVTGEYTIEAWTRFDFPGRGNTHSSFKWRWYHFDGVDWDQSRRLNNRIYKFRGHGKAWDWEVDTEFGNYDYLMYADYDMDHPEVVNELRNWGVWYTNTLGLDGFRIDAVKHIKYSFTRDWINHVRSATGKNMFAVAEFWKNDLGAIENYLQKTNWNHSVFDVPLHYNLYNASKSGGNYDMRNIFNGTVVQRHPSHAVTFVDNHDSQPEEALESFVEEWFKPLAYALTLTREQGYPSVFYGDYYGIPTHGVPAMRSKIDPILEARQKYAYGPQHDYLDHPDVMGWTREGDSSHPKSGLATLITDGPGGSKRMYAGLKNAGETWYDITGNRSDTVKIGSDGWGEFHVNDGSVSIYVQK

SEQ ID NO: 40734 - protein, 480 aa, Bacillus sp.
NGTMMQYFEWYLPNDGNHWNRLNSDASNLKSKGITAVWIPPAWKGASQNDVGYGAYDLYDLGEFNQKGTVRTKYGTRSQLQAAVTSLKNNGIQVYGDVVMNHKGGADATEMVRAVEVNPNNRNQEVTGEYTIEAWTRFDFPGRGNTHSSFKWRWYHFDGVDFDQSRRLNNRIYKFRGHGKAWDWEVDTEFGNYDYLMYADYDMDHPEVVNELRNWGVWYTNTLGLDGFRIDAVKHIKYSFTRDWINHVRSATGKNMFAVAEFWKNDLGAIENYLQKTNWNHSVFDVPLHYNLYNASKSGGNYDMRNIFNGTVVQRHPSHAVTFVDNHDSQPEEALESFVEEWFKPLAYALTLTREQGYPSVFYGDYYGIPTHGVPAMRSKIDPILEARQKYAYGPQHDYLDHPDVIGWTREGDSSHPKSGLATLITDGPGGSKRMYAGLKNAGETWYDITGNRSDTVKIGSDGWGEFHVNDGSVSIYVQK

SEQ ID NO: 40735 - protein, 480 aa, Bacillus sp.
NGTMMQYFEWYLPNDGNHWNRLNSDASNLKSKGITAVWIPPAWKGASQNDVGYGAYDLYDLGEFNQKGTVRTKYGTRSQLQAAVTSLKNNGIQVYGDVVMNHKGGADATEMVRAVEVNPNNRNQEVTGEYTIEAWTRFDFPGRGNTHSSFKWRWYHFDGVDWDQSRRLNNRIYKFRGHGKAWDWEVDTEFGNYDYLMYADYDMDHPEVVNELRNWGVWYTNTLGLDGFRIDAVKHIKYSFTRDWINHVRSATGKNMFAVAEFWKNDLGAIENYLQKTNWNHSVFDVPLHYNLYNASKSGGNYDMRNIFNGTVVQRHPSHAVTFVDNHDSQPEEALESFVEEWFKPLAYALTLTREQGYPSVFYGDYYGIPTHGVPAMRSKIDPILEARQKYAYGPQHDYLDHPDVIGWKREGDSSHPKSGLATLITDGPGGSKRMYAGLKNAGETWYDITGNRSDTVKIGSDGWGEFHVNDGSVSIYVQK

SEQ ID NO: 40736 - protein, 480 aa, Bacillus sp.
NGTMMQYFEWYLPNDGNHWNRLNSDASNLKSKGITAVWIPPAWKGISQNDVGYGAYDLYDLGEFNQKGTVRTKYGTRSQLQAAVTSLKNNGIQVYGDVVMNHKGGADATEMVRAVEVNPNNRNQEVTGEYTIEAWTRFDFPGRGNTHSSFKWRWYHFDGVDWDQSRRLNNRIYKFRGHGKAWDWEVDTEFGNYDYLMYTDYDMDHPEVVNELRNWGVWYTNTLGLDGFRIDAVKHIKYSFTRDWINHVRSATGKNMFAVAEFWKNDLGAIENYLQKTNWNHSVFDVPLHYNLYNASKSGGNYDMRNIFNGTVVQRHPSHAVTFVDNHDSQPEEALESFVEEWFKPLAYALTLTREQGYPSVFYGDYYGIPTHGVPAMRSKIDPILEARQKYAYGPQHDYLDHPDVIGWTREGDSSHPKSGLATLITDGPGGSKRMYAGLKNAGETWYDITGNRSDTVKIGSDGWGEFHVNDGSVSIYVQK

SEQ ID NO: 40737 - protein, 480 aa, Bacillus sp.
NGTMMQYFEWYLPNDGNHWNRLNSDASNLKSKGITAVWIPPAWKGASQNDVGYGAYDLYDLGEFNQKGTVRTKYGTRSQLQAAVTSLKNNGIQVYGDVVMNHKGGADATEMVRAVEVNPNNRNQEVTGEYTIEAWTRFDFPGRGNTHSSFKWRWYHFDGVDWDQSRRLNNRIYKFRGHGKAWDWEVDTEFGNYDYLMYTDYDMDHPEVVNELRNWGVWYTNTLGLDGFRIDAVKHIKYSFTRDWINHVRSATGKNMFAVAEFWKNDLGAIENYLQKTNWNHSVFDVPLHYNLYNASKSGGNYDMRNIFNGTVVQRHPSHAVTFVDNHDSQPEEALESFVEEWFKPLAYALTLTREQGYPSVFYGDYYGIPTHGVPAMRSKIDPILEARQKYAYGPQHDYLDHPDVIGWTREGDSSHPKSGLATLITDGPGGSKRMYAGLKNAGETWYDITGNRSDTVKIGSDGWGEFHVNDGSVSIYVQK

SEQ ID NO: 40738 - protein, 480 aa, Bacillus sp.
NGTMMQYFEWYLPNDGNHWNRLNSDASNLKSKGITAVWIPPAWKAASQNDVGYGAYDLYDLGEFNQKGTVRTKYGTRSQLQAAVTSLKNNGIQVYGDVVMNHKGGADATEMVRAVEVNPNNRNQEVTGEYTIEAWTRFDFPGRGNTHSSFKWRWYHFDGVDWDQSRQTDNRIYKFRGHGKAWDWEVDTEFGNYDYLMYADYDMDHPEVVNELRNWGVWYTNTLGLDGFRIDAVKHIKYSFTRDWINHVRSATGKNMFAVAEFWKNDLGAIENYLQKTNWNHSVFDVPLHYNLYNASKSGGNYDMRNIFNGTVVQRHPSHAVTFVDNHDSQPEEALESFVEEWFKPLAYALTLTREQGYPSVFYGDYYGIPTHGVPAMRSKIDPILEARQKYAYGPQHDYLDHPDVIGWTREGDSSHPKSGLATLITDGPGGSKRMYAGLKNAGETWYDITGNRSDTVKIGSDGWGEFHVNDGSVSIYVQK

SEQ ID NO: 40739 - protein, 480 aa, Bacillus sp.
NHTMMQYFEWYLPNDGNHWNRLNSDASNLKSKGITAVWIPPAWKGASQNDVGYGAYDLYDLGEFNQKGTVRTKYGTRSQLQAAVTSLKNNGIQVYGDVVMNHKGGADATEMVRAVEVNPNNRNQEVTGEYTIEAWTRFDFPGRGNTHSSFKWRWYHFDGVDWDQSRRLNNRIYKFRGHGKAWDWEVDTEFGNYDYLMYADYDMDHPEVVNELRNWGVWYTNTLGLDGFRIDAVKHIKYSFTRDWINHVRSATGKNMFAVAEFWKNDLGAIENYLQKTNWNHSVFDVPLHYNLYNASKSGGNYDMRNIFNGTVVQRHPSHAVTFVDNHDSQPEEALESFVEEWFKPLAYALTLTREQGYPSVFYGDYYGIPTHGVPAMRSKIDPILEARQKYAYGPQHDYLDHPDVIGWTREGDSSHPKSGLATLITDGPGGSKRMYAGLKNAGETWYDITGNRSDTVKIGSDGWGEFHVNDGSVSIYVQK

SEQ ID NO: 40740 - protein, 480 aa, Bacillus sp.
NGTMMQYFEWYLPNDGNHWNRLNSDASNLKSKGITAVWIPPAWKGASQNDVGYGAYDLYDLGEFNQKGTVRTKYGTRSQLQAAVTSLKNNGIQVYGDVVMNHKGGADATEMVRAVEVNPNNRNQEVTGEYTIEAWTRFDFPGRGNTHSSFKWRWYHFDGVDFDQSRQLDNRIYKFRGHGKAWDWEVDTEFGNYDYLMYADYDMDHPEVVNELRNWGVWYTNTLGLDGFRIDAVKHIKYSFTRDWINHVRSATGKNMFAVAEFWKNDLGAIENYLQKTNWNHSVFDVPLHYNLYNASKSGGNYDMRNIFNGTVVQRHPSHAVTFVDNHDSQPEEALESFVEEWFKPLAYALTLTREQGYPSVFYGDYYGIPTHGVPAMRSKIDPILEARQKYAYGPQHDYLDHPDVIGWTREGDSSHPKSGLATLITDGPGGSKRMYAGLKNAGETWYDITGNRSDTVKIGSDGWGEFHVNDGSVSIYVQK

SEQ ID NO: 40741 - protein, 480 aa, Bacillus sp.
NGTMMQYFEWYLPNDGNHWNRLNSDASNLKSKGITAVWIPPAWKALSQNDVGYGAYDLYDLGEFNQKGTVRTKYGTRSQLQAAVTSLKNNGIQVYGDVVMNHKGGADATEMVRAVEVNPNNRNQEVTGEYTIEAWTRFDFPGRGNTHSSFKWRWYHFDGVDWDQSRNVNNRIYKFRGHGKAWDWEVDTEFGNYDYLMYTDYDMDHPEVVNELRNWGVWYTNTLGLDGFRIDAVKHIKYSFTRDWINHVRSATGKNMFAVAEFWKNDLGAIENYLQKTNWNHSVFDVPLHYNLYNASKSGGNYDMRNIFNGTVVQRHPSHAVTFVDNHDSQPEEALESFVEEWFKPLAYALTLTREQGYPSVFYGDYYGIPTHGVPAMRSKIDPILEARQKYAYGPQHDYLDHPDVIGWTREGDSSHPKSGLATLITDGPGGSKRMYAGLKNAGETWYDITGNRSDTVKIGSDGWGEFHVNDGSVSIYVQK

SEQ ID NO: 40742 - protein, 480 aa, Bacillus sp.
NGTMMQYFEWYLPNDGNHWNRLNSDASNLKSKGITAVWIPPAWKGASQNDVGYGAYDLYDLGEFNQKGTVRTKYGTRSQLQAAVTSLKNNGIQVYGDVVMNHKGGADATEMVRAVEVNPNNRNQEVTGEYTIEAWTRFDFPGRGNTHSSFKWRWYHFDGVDWDQSRRLDNRIYKFRGHGKAWDWEVDTEFGNYDYLMYVDYDMDHPEVVNELRNWGVWYTNTLGLDGFRIDAVKHIKYSFTRDWINHVRSATGKNMFAVAEFWKNDLGAIENYLQKTNWNHSVFDVPLHYNLYNASKSGGNYDMRNIFNGTVVQRHPSHAVTFVDNHDSQPEEALESFVEEWFKPLAYALTLTREQGYPSVFYGDYYGIPTHGVPAMRSKIDPILEARQKYAYGPQHDYLDHPDVIGWTREGDSSHPKSGLATLITDGPGGSKRMYAGLKNAGETWYDITGNRSDTVKIGSDGWGEFHVNDGSVSIYVQK

SEQ ID NO: 40743 - protein, 480 aa, Bacillus sp.
NGTMMQYFEWYLPNDGNHWNRLNSDASNLKSKGITAVWIPPAWKGASQNDVGYGAYDLYDLGEFNQKGTVRTKYGTRSQLQAAVTSLKNNGIQVYGDVVMNHKGGADATEMVRAVEVNPNNRNQEVTGEYTIEAWTRFDFPGRGNTHSSFKWRWYHFDGVDWDQSRRLNNRIYKFRGHGKAWDWEVDTEFGNYDYLMYADYDMDHPEVVNELRNWGVWYTNTLGLDGFRIDAVKHIKYSFTRDWINHVRSATGKNMFAVAEFWKNDLGAIENYLQKTNWNHSVFDVPLHYNLYNASKSGGNYDMRNIFNGTVVQRHPSHAVTFVDNHDSQPEEALESFVEEWFKPLAYALTLTREQGYPSVFYGDYYGIPTHGVPAMRSKIDPILEARQKYAYGPQHDYLDHPDVIGWTREGDSSHPKSGLATLITDGPGGSKRMYAGLKNAGETWYDITGNRSDTVKIGSGGWGEFHVNDGSVSIYVQK

SEQ ID NO: 40744 - protein, 480 aa, Bacillus sp.
NGTMMQYFEWYLPNDGNHWNRLNSDASNLKSKGITAVWIPPAWKGASQNDVGYGAYDLYDLGEFNQKGTVRTKYGTRSQLQAAVTSLKNNGIQVYGDVVMNHKGGADATEMVRAVEVNPNNRNQEVTGEYTIEAWTRFDFPGRGNTHSSFKWRWYHFDGVDWDQSRRFENRIYKFRGHGKAWDWEVDTEFGNYDYLMYADYDMDHPEVVNELRNWGVWYTNTLGLDGFRIDAVKHIKYSFTRDWINHVRSATGKNMFAVAEFWKNDLGAIENYLQKTNWNHSVFDVPLHYNLYNASKSGGNYDMRNIFNGTVVQRHPSHAVTFVDNHDSQPEEALESFVEEWFKPLAYALTLTREQGYPSVFYGDYYGIPTHGVPAMRSKIDPILEARQKYAYGPQHDYLDHPDVIGWTREGDSSHPKSGLATLITDGPGGSKRMYAGLKNAGETWYDITGNRSDTVKIGSDGWGEFHVNDSSVSIYVQK

SEQ ID NO: 40745 - protein, 480 aa, Bacillus sp.
NGTMMQYFEWYLPNDGNHWNRLNSDASNLKSKGITAVWIPPAWKGASQNDVGYGAYDLYDLGEFNQKGTVRTKYGTRSQLQAAVTSLKNNGIQVYGDVVMNHKGGADATEMVDAVEVNPNNRNQEVTGEYTIEAWTRFDFPGRGNTHSSFKWRWYHFDGVDFDQSRQLDNRIYKFRGHGKAWDWEVDTEFGNYDYLMYADYDMDHPEVVNELRNWGVWYTNTLGLDGFRIDAVKHIKYSFTRDWINHVRSATGKNMFAVAEFWKNDLGAIENYLQKTNWNHSVFDVPLHYNLYNASKSGGNYDMRNIFNGTVVQRHPSHAVTFVDNHDSQPEEALESFVEEWFKPLAYALTLTREQGYPSVFYGDYYGIPTHGVPAMRSKIDPILEARQKYAYGPQHDYLDHPDVIGWTREGDSSHPKSGLATLITDGPGGSKRMYAGLKNAGETWYDITGNRSDTVKIGSDGWGEFHVNDGSVSIYVQK

SEQ ID NO: 40746 - protein, 480 aa, Bacillus sp.
NGTMMQYFEWYLPNDGNHWNRLNSDASNLKSKGITAVWIPPAWKGASQNDVGYGAYDLYDLGEFNQKGTVRTKYGTRSQLQAAVTSLKNNGIQVYGDVVMNHKGGADATEMVRAVEVNPNNRNQEVTGEYTIEAWTRFDFPGRGNTHSSFKWRWYHFDGVDWDQSREFNNRIYKFRGHGKAWDWEVDTEFGNYDYLMYADYDMDHPEVVNELRNWGVWYTNTLGLDGFRIDAVKHIKYSFTRDWINHVRSATGKNMFAVAEFWKNDLGAIENYLQKTNWNHSVFDVPLHYNLYNASKSGGNYDMRNIFNGTVVQRHPSHAVTFVDNHDSQPEEALESFVDPWFKPLAYALTLTREQGYPSVFYGDYYGIPTHGVPAMRSKIDPILEARQKYAYGPQHDYLDHPDVIGWTREGDSSHPKSGLATLITDGPGGSKRMYAGLKNAGETWYDITGNRSDTVKIGSDGWGEFHVNGGSVSIYVQK

SEQ ID NO: 40747 - protein, 480 aa, Bacillus sp.
NGTMMQYFEWYLPNDGNHWNRLNSDASNLKSKGITAVWIPPAWKGASQNDVGYGAYDLYDLGEFNQKGTVRTKYGTRSQLQAAVTSLKNNGIQVYGDVVMNHKGGADATEMVRAVEVNPNNRNQEVTGEYTIEAWTRFDFPGRGNTHSSFKWRWYHFDGVDWDQSRRLDNRIYKFRGHGKAWDWEVDTEFGNYDYLMYADYDMDHPEVVNELRNWGVWYTNTLGLDGFRIDAVKHIKYSFTRDWINHVRSATGKNMFAVAEFWKNDLGAIENYLQKTNWNHSVFDVPLHYNLYNASKSGGNYDMRNIFNGTVVQRHPSHAVTFVDNHDSQPEEALESFVDPWFKPLAYALTLTREQGYPSVFYGDYYGIPTHGVPAMRSKIDPILEARQKYAYGPQHDYLDHPDVIGWTREGDSSHPKSGLATLITDGPGGSKRMYAGLKNAGETWYDITGNRSDTVKIGSDGWGEFHVNKGSVSIYVQK

SEQ ID NO: 40748 - protein, 480 aa, Bacillus sp.
NGTMMQYFEWYLPNDGNHWNRLNSDASNLKSKGITAVWIPPAWKGASQNDVGYGAYDLYDLGEFNQKGTVRTKYGTRSQLQAAVTSLKNNGIQVYGDVVMNHKGGADATEMVRAVEVNPNNRNQEVTGEYTIEAWTRFDFPGRGNTHSSFKWRWYHFDGVDWDQSRRLNNRIYKFRGHGKAWDWEVDTEFGNYDYLMYADYDMDHPEVVNELRNWGVWYTNTLGLDGFRIDAVKHIKYSFTRDWINHVRSATGKNMFAVAEFWKNDLGAIENYLQKTNWNHSVFDVPLHYNLYNASKSGGNYDMRNIFNGTVVQRHPSHAVTFVDNHDSQPEEALESFVEEWFKPLAYALTLTREQGYPSVFYGDYYGIPTHGVPAMRSKIDPILEARQKYAYGPQHDYLDHPDVIGWTREGNSSHPKSGLATLITDGPGGSKRMYAGLKNAGETWYDITGNRSDTVKIGSDGWGEFHVNDGSVSIYVQK

SEQ ID NO: 40749 - protein, 480 aa, Bacillus sp.
NGTMMQYFEWYLPNDGNHWNRLNSDASNLKSKGITAVWIPPAWKATSQNDVGYGAYDLYDLGEFNQKGTVRTKYGTRSQLQAAVTSLKNNGIQVYGDVVMNHKGGADATEMVRAVEVNPNNRNQEVTGEYTIEAWTRFDFPGRGNTHSSFKWRWYHFDGVDWDQSRQLENRIYKFRGHGKAWDWEVDTEFGNYDYLMYADYDMDHPEVVNELRNWGVWYTNTLGLDGFRIDAVKHIKYSFTRDWINHVRSATGKNMFAVAEFWKNDLGAIENYLQKTNWNHSVFDVPLHYNLYNASKSGGNYDMRNIFNGTVVQRHPSHAVTFVDNHDSQPEEALESFVEEWFKPLAYALTLTREQGYPSVFYGDYYGIPTHGVPAMRSKIDPILEARQKYAYGPQHDYLDHPDVIGWTREGDSSHPKSGLATLITDGPGGSKRMYAGLKNAGETWYDITGNRSDTVKIGSDGWGEFHVNDGSVSIYVQK

SEQ ID NO: 40750 - protein, 480 aa, Bacillus sp.
NGTMMQYFEWYLPNDGNHWNRLNSDASNLKSKGITAVWIPPAWKAASQNDVGYGAYDLYDLGEFNQKGTVRTKYGTRSQLQAAVTSLKNNGIQVYGDVVMNHKGGADATEMVDAVEVNPNNRNQEVTGEYTIEAWTRFDFPGRGNTHSSFKWRWYHFDGVDWDQSRQLNNRIYKFRGHGKAWDWEVDTEFGNYDYLMYADYDMDHPEVVNELRNWGVWYTNTLGLDGFRIDAVKHIKYSFTRDWINHVRSATGKNMFAVAEFWKNDLGAIENYLQKTNWNHSVFDVPLHYNLYNASKSGGNYDMRNIFNGTVVQRHPSHAVTFVDNHDSQPEEALESFVEEWFKPLAYALTLTREQGYPSVFYGDYYGIPTHGVPAMRSKIDPILEARQKYAYGPQHDYLDHPDVIGWTREGDSSHPKSGLATLITDGPGGSKRMYAGLKNAGETWYDITGNRSDTVKIGSDGWGEFHVNDGSVSIYVQK

SEQ ID NO: 40751 - protein, 480 aa, Bacillus sp.
NGTMMQYFEWYLPNDGNHWNQLNSDASNLKSKGITAVWIPPAWKGASQNDVGYGAYDLYDLGEFNQKGTVRTKYGTRSQLQAAVTSLKNNGIQVYGDVVMNHKGGADATEMVRAVEVNPNNRNQEVTGEYTIEAWTRFDFPGRGNTHSSFKWRWYHFDGVDWDQSRRLNNRIYKFRGHGKAWDWEVDTEFGNYDYLMYADYDMDHPEVVNELRNWGVWYTNTLGLDGFRIDAVKHIKYSFTRDWINHVRSATGKNMFAVAEFWKNDLGAIENYLQKTNWNHSVFDVPLHYNLYNASKSGGNYDMRNIFNGTVVQRHPSHAVTFVDNHDSQPEEALESFVEEWFKPLAYALTLTREQGYPSVFYGDYYGIPTHGVPAMRSKIDPILEARQKYAYGPQHDYLDHPDVIGWTREGDSSHPKSGLATLITDGPGGSKRMYAGLKNAGETWYDITGNRSDTVKIGSDGWGEFHVNDGSVSIYVQK

SEQ ID NO: 40752 - protein, 480 aa, Bacillus sp.
NGTMMQYFEWYLPNDGNHWNRLNSDASNLKSKGITAVWIPPAWKGASQNDVGYGAYDLYDLGEFNQKGTVRTKYGTRSQLQAAVTSLKNNGIQVYGDVVMNHKGGADATEMVRAVEVNPNNRNQEVTGEYTIEAWTRFDFPGRGNTHSSFKWRWYHFDGVDWDQSRRLNNRIYKFRGHGKAWDWEVDTEFGNYDYLMYADYDMDHPEVINELRNWGVWYTNTLGLDGFRIDAVKHIKYSFTRDWINHVRSATGKNMFAVAEFWKNDLGAIENYLQKTNWNHSVFDVPLHYNLYNASKSGGNYDMRNIFNGTVVQRHPSHAVTFVDNHDSQPEEALESFVEEWFKPLAYALTLTREQGYPSVFYGDYYGIPTHGVPAMRSKIDPILEARQKYAYGPQHDYLDHPDVIGWTREGDSSHPKSGLATLITDGPGGSKRMYAGLKNAGETWYDITGNRSDTVKIGSDGWGEFHVNDGSVSIYVQK

SEQ ID NO: 40753 - protein, 480 aa, Bacillus sp.
NGTMMQYFEWYLPNDGNHWNRLNSDASNLKSKGITAVWIPPAWKGASQNDVGYGAYDLYDLGEFNQKGTVRTKYGTRSQLQAAVTSLKNNGIQVYGDVVMNHKGGADATEMVRAVEVNPNNRNQEVTGEYTIEAWTRFDFPGRGNTHSSFKWRWYHFDGVDWDQSREFDNRIYKFRGHGKAWDWEVDTEFGNYDYLMYADYDMDHPEVVNELRNWGVWYTNTLGLDGFRIDAVKHIKYSFTRDWINHVRIATGKNMFAVAEFWKNDLGAIENYLQKTNWNHSVFDVPLHYNLYNASKSGGNYDMRNIFNGTVVQRHPSHAVTFVDNHDSQPEEALESFVDEWFKPLAYALTLTREQGYPSVFYGDYYGIPTHGVPAMRSKIDPILEARQKYAYGPQHDYLDHPDVIGWTREGDSSHPKSGLATLITDGPGGSKRMYAGLKNAGETWYDITGNRSDTVKIGSDGWGEFHVNDQSVSIYVQK

SEQ ID NO: 40754 - protein, 480 aa, Bacillus sp.
NGTMMQYFEWYLPNDGNHWNRLNSDASNLKSKGITAVWIPPAWKATSQNDVGYGAYDLYDLGEFNQKGTVRTKYGTRSQLQSAVTSLKNNGIQVYGDVVMNHKGGADATEMVRAVEVNPNNRNQEVTGEYTIEAWTRFDFPGRGNTHSSFKWRWYHFDGVDWDQSRNTDNRIYKFRGHGKAWDWEVDTEFGNYDYLMYADYDMDHPEVVNELRNWGVWYTNTLGLDGFRIDAVKHIKYSFTRDWINHVRSATGKNMFAVAEFWKNDLGAIENYLQKTNWNHSVFDVPLHYNLYNASKSGGNYDMRNIFNGTVVQRHPSHAVTFVDNHDSQPEEALESFVEEWFKPLAYALTLTREQGYPSVFYGDYYGIPTHGVPAMRSKIDPILEARQKYAYGPQHDYLDHPDVIGWTREGDSSHPKSGLATLITDGPGGSKRMYAGLKNAGETWYDITGNRSDTVKIGSDGWGEFHVNDGSVSIYVQK

SEQ ID NO: 40755 - protein, 480 aa, Bacillus sp.
NGTMMQYFEWYLPNDGNHWNRLNSDASNLKSKGITAVWIPPAWKGASQNDVGYGAYDLYDLGEFNQKGTVRTKYGTRSQLQAAVTSLKNNGIQVYGDVVMNHKGGADATEMVPAVEVNPNNRNQEVTGEYTIEAYTRFDFPGRGNTHSSFKWRWYHFDGVDWDQSRRLNNRIYKFRGHGKAWDWEVDTEFGNYDYLMYADYDMDHPEVVNELRNWGVWYTNTLGLDGFRIDAVKHIKYSFTRDWINHVRSATGKNMFAVAEFWKNDLGAIENYLQKTNWNHSVFDVPLHYNLYNASKSGGNYDMRNIFNGTVVQRHPSHAVTFVDNHDSQPEEALESFVEEWFKPLAYALTLTREQGYPSVFYGDYYGIPTHGVPAMRSKIDPILEARQKYAYGPQHDYLDHPDVIGWTREGDSSHPKSGLATLITDGPGGSKRMYAGLKNAGETWYDITGNRSDTVKIGSDGWGEFHVNDGSVSIYVQK

SEQ ID NO: 40756 - protein, 480 aa, Bacillus sp.
NGTMMQYFEWYLPNDGNHWNRLNSDASNLKSKGITAVWIPPAWKGASQNDVGYGAYDLYDLGEFNQKGTVRTKYGTRSQLQAAVTSLKNNGIQVYGDVVMNHKGGADATEMVRAVEVNPNNRNQEVTGEYTIEAWTRFDFPGRGNTHSSFKWRWYHFDGVDWDQSRRLNNRIYKFRGHGKAWDWEVDTEFGNYDYLMYADYDMDHPEVVNELRNWGVWYTNTLGLDGFRIDAVKHIKYSFTRDWINHVRSATGKNMFAVAEFWKNDLGAIENYLQKTNWNHSVFDVPLHYNLYNASKSGGNYDMRNIFNGTVVQAHPSLAVTFVDNHDSQPEEALESFVEEWFKPLAYALTLTREQGYPSVFYGDYYGIPTHGVPAMRSKIDPILEARQKYAYGPQHDYLDHPDVIGWTREGDSSHPKSGLATLITDGPGGSKRMYAGLKNAGETWYDITGNRSDTVKIGSDGWGEFHVNDGSVSIYVQK

SEQ ID NO: 40757 - protein, 480 aa, Bacillus sp.
NGTMMQYFEWYLPNDGNHWNRLNSDASNLKSKGITAVWIPPAWKGASQNDVGYGAYDLYDLGEFNQKGTVRTKYGTRSQLQAAVTSLKNNGIQVYGDVVMNHKGGADATEMVRAVEVNPNNRNQEVTGEYTIEAWTRFDFPGRGNTHSSFKWRWYHFDGVDWDQSRRLNNRIYKFRGHGKAWDWEVDTEFGNYDYLMYADYDMDHPEVVNELRNWGVWYTNTLGLDGFRIDAVKHIKYSFTRDWINHVRSATGKNMFAVAEFWKNDLGAIENYLQKTNWNHSVFDVPLHYNLYNASNSGGNYDMRNIFNGTVVQRHPSHAVTFVDNHDSQPEEALESFVDEWFKPLAYALTLTREQGYPSVFYGDYYGIPTHGVPAMRSKIDPILEARQKYAYGPQHDYLDHPDVIGWTREGDSSHPKSGLATLITDGPGGSKRMYAGLKNAGETWYDITGNRSDTVKIGSDGWGEFHVNGGSVSIYVQK

SEQ ID NO: 40758 - protein, 480 aa, Bacillus sp.
NGTMMQYFEWYLPNDGNHWNRLNSDASNLKSKGITAVWIPPAWKATSQNDVGYGAYDLYDLGEFNQKGTVRTKYGTRSQLQAAVTSLKNNGIQVYGDVVMNHKGGADATEMVRAVEVNPNNRNQEVTGEYTIEAWTRFDFPGRGNTHSSFKWRWYHFDGVDWDQSRNVNNRIYKFRGHGKAWDWEVDTEFGNYDYLMYADYDMDHPEVVNELRNWGVWYTNTLGLDGFRIDAVKHIKYSFTRDWINHVRSATGKNMFAVAEFWKNDLGAIENYLQKTNWNHSVFDVPLHYNLYNASKSGGNYDMRNIFNGTVVQRHPSHAVTFVDNHDSQPEEALESFVEEWFKPLAYALTLTREQGYPSVFYGDYYGIPTHGVPAMRSKIDPILEARQKYAYGPQHDYLDHPDVIGWTREGDSSHPKSGLATLITDGPGGSKRMYAGLKNAGETWYDITGNRSDTVKIGSDGWGEFHVNDGSVSIYVQK

SEQ ID NO: 40759 - protein, 480 aa, Synthetic construct
NGTMMQYFEWYLPNDGNHWNRLNSDASNLKSKGITAVWIPPAWKGASQNDVGYGAYDLYDLGEFNQKGTVRTKYGTRSQLQAAVTSLKNNGIQVYGDVVMNHKGGADATEMVRAVEVNPNNRNQEVTGEYTIEAWTRFDFPGRGNTHSSFKWRWYHFDGVDWDQSRRLNNRIYKFRGHGKEWDWEVDTEFGNYDYLMYADYDMDHPEVVNELRNWGVWYTNTLGLDGFRIDAVKHIKYSFTRDWINHVRSATGKNMFAVAEFWKNDLGAIENYLQKTNWNHSVFDVPLHYNLYNASKSGGNYDMRNIFNGTVVQRHPSHAVTFVDNHDSQPEEALESFVEEWFKPLAYALTLTREQGYPSVFYGDYYGIPTHGVPAMRSKIDPILEARQKYAYGPQHDYLDHPDVIGWTREGDSSHPKSGLATLITDGPGGSKRMYAGLKNAGETWYDITGNRSDTVKIGSDGWGEFHVNDGSVSIYVQK

SEQ ID NO: 40760 - protein, 480 aa, Synthetic construct
NGTMMQYFEWYLPNDGNHWNRLNSDASNLKSKGITAVWIPPAWKGASQNDVGYGAYDLYDLGEFNQKGTVRTKYGTRSQLQAAVTSLKNNGIQVYGDVVMNHKGGADATEMVRAVEVNPNNRNQEVTGEYTIEAWTRFDFPGRGNTHSSFKWRWYHFDGVDWDQSRRLNNRIYKFRGHGKAWDWEVDTEFGNYDYLMYADYDYDHPETTNEVRNWGVWYTNTLGLDGFRIDAVKHIKYSFTRDWINHVRSATGKNMFAVAEFWKNDLGAIENYLQKTNWNHSVFDVPLHYNLYNASKSGGNYDMRNIFNGTVVQRHPSHAVTFVDNHDSQPEEALESFVEEWFKPLAYALTLTREQGYPSVFYGDYYGIPTHGVPAMRSKIDPILEARQKYAYGPQHDYLDHPDVIGWTREGDSSHPKSGLATLITDGPGGSKRMYAGLKNAGETWYDITGNRSDTVKIGSDGWGEFHVNDGSVSIYVQK

SEQ ID NO: 40761 - protein, 480 aa, Bacillus sp.
NGTMMQYFEWYLPNDGNHWNRLNSDASNLKSKGITAVWIPPAWKAASQNDVGYGAYDLYDLGEFNQKGTVRTKYGTRSQLQAAVTSLKNNGIQVYGDVVMNHKGGADATEMVRAVEVNPNNRNQEVTGEYTIEAWTRFDFPGRGNTHSSFKWRWYHFDGVDWDQSRRFQNRIYKFRGHGKAWDWEVDTEFGNYDYLMYADYDMDHPEVVNELRNWGVWYTNTLGLDGFRIDAVKHIKYSFTRDWINHVRSATGKNMFAVAEFWKNDLGAIENYLQKTNWNHSVFDVPLHYNLYNASKSGGNYDMRNIFNGTVVQRHPSHAVTFVDNHDSQPEEALESFVEEWFKPLAYALTLTREQGYPSVFYGDYYGIPTHGVPAMRSKIDPILEARQKYAYGPQHDYLDHPDVIGWTREGDSSHPKSGLATLITDGPGGSKRMYAGLKNAGETWYDITGNRSDTVKIGSDGWGEFHVNDGSVSIYVQK

SEQ ID NO: 40762 - protein, 480 aa, Bacillus sp.
NGTMMQYFEWYLPNDGNHWNRLNSDASNLKSKGITAVWIPPAWKGASQNDVGYGAYDLYDLGEFNQKGTVRTKYGTRSQLQAAVTSLKNNGIQVYGDVVMNHKGGADATEMVRAVEVNPNNRNQEVTGEYTIEAWTRFDFPGRGNTHSSFKWRWYHFDGVDWDQSRRLNNRIYKFRGHGKAWDWEVDTEFGNYDYLMYADYDMDHPEVVNELRNWGVWYTNTLGLDGFRIDAVKHIKYSFTRDWINHVRSATGKNMFAVAEFWKNDLGAIENYLQKTNWNHSVFDVPLHYNLYNASKSGGNYDMRNIFNGTVVQRHPSHAVTFVDNHDSQPEEALESFVEEWFKPLAYVLTLTREQGYPSVFYGDYYGIPTHGVPAMRSKIDPILEARQKYAYGPQHDYLDHPDVIGWTREGDSSHPKSGLATLITDGPGGSKRMYAGLKNAGETWYDITGNRSDTVKIGSDGWGEFHVNDGSVSIYVQK

SEQ ID NO: 40763 - protein, 480 aa, Bacillus sp.
NGTMMQYFEWYLPNDGNHWNRLNSDASNLKSKGITAVWIPPAWKGASQNDVGYGAYDLYDLGEFNQKGTVRTKYGTRSQLQAAVTSLKNNGIQVYGDVVMNHKGGADATEMVRAVEVNPNNRNQEVTGEYTIEAWTRFDFPGRGNTHSSFKWRWYHFDGVDWDQSRRLNNRIYLFRGHGKAWDWEVDTEFGNYDYLMYADYDMDHPEVVNELRNWGVWYTNTLGLDGFRIDAVKHIKYSFTRDWINHVRSATGKNMFAVAEFWKNDLGAIENYLQKTNWNHSVFDVPLHYNLYNASKSGGNYDMRNIFNGTVVQRHPSHAVTFVDNHDSQPEEALESFVEEWFKPLAYALTLTREQGYPSVFYGDYYGIPTHGVPAMRSKIDPILEARQKYAYGPQHDYLDHPDVIGWTREGDSSHPKSGLATLITDGPGGSKRMYAGLKNAGETWYDITGNRSDTVKIGSDGWGEFHVNDGSVSIYVQK

SEQ ID NO: 40764 - protein, 480 aa, Bacillus sp.
NGTMMQYFEWYLPNDGNHWNRLNSDASNLKSKGITAVWIPPAWKGASQNDVGYGAYDLYDLGEFNQKGTVRTKYGTRSQLQAAVTSLKNNGIQVYGDVVMNHKGGADATEMVRAVEVNPNNRNQEVTGEYTIEAWTRFDFPGRGNTHSSFKWRWYHFDGVDWDQSRRLNNRIYKFRGHGKAWDWEVDTEFGNYDYLMYADYDMDHPEVVNELRNWGVWYTNTLGLDGFRIDAVKHIKYSFTRDWINHVRSATGKNMFAVAEFWKNDLGAINNYLQKTNWNHSVFDVPLHYNLYNASKSGGNYDMRNIFNGTVVQRHPSHAVTFVDNHDSQPEEALESFVEEWFKPLAYALTLTREQGYPSVFYGDYYGIPTHGVPAMRSKIDPILEARQKYAYGPQHDYLDHPDVIGWTREGDSSHPKSGLATLITDGPGGSKRMYAGLKNAGETWYDITGNRSDTVKIGSDGWGEFHVNDGSVSIYVQK

SEQ ID NO: 40765 - protein, 480 aa, Bacillus sp.
NGTMMQYFEWYLPNDGNHWNRLNSDASNLKSKGITAVWIPPAWKGASQNDVGYGAYDLYDLGEFNQKGTVRTKYGTRSQLQAAVTSLKNNGIQVYGDVVMNHKGGADATEMVRAVEVNPNNRNQEVTGEYTIEAWTRFDFPGRGNTHSSFKWRWYHFDGVDWDQSRRLNNRIYKFRGHGKAWDWEVDTSFGNYDYLMYADYDMDHPEVVNELRNWGVWYTNTLGLDGFRIDAVKHIKYSFTRDWINHVRSATGKNMFAVAEFWKNDLGAIENYLQKTNWNHSVFDVPLHYNLYNASKSGGNYDMRNIFNGTVVQRHPSHAVTFVDNHDSQPEEALESFVEEWFKPLAYALTLTREQGYPSVFYGDYYGIPTHGVPAMRSKIDPILEARQKYAYGPQHDYLDHPDVIGWTREGDSSHPKSGLATLITDGPGGSKRMYAGLKNAGETWYDITGNRSDTVKIGSDGWGEFHVNDGSVSIYVQK

SEQ ID NO: 40766 - protein, 480 aa, Bacillus sp.
NGTMMQYFEWYLPNDGNHWNRLNSDASNLKSKGITAVWIPPAWKAASQNDVGYGAYDLYDLGEFNQKGTVRTKYGTRSQLQAAVTSLKNNGIQVYGDVVMNHKGGADATEMVRAVEVNPNNRNQEVTGEYTIEAWTRFDFPGRGNTHSSFKWRWYHFDGVDWDQSRQTNNRIYKFRGHGKAWDWEVDTEFGNYDYLMYADYDMDHPEVVNELRNWGVWYTNTLGLDGFRIDAVKHIKYSFTRDWINHVRSATGKNMFAVAEFWKNDLGAIENYLQKTNWNHSVFDVPLHYNLYNASKSGGNYDMRNIFNGTVVQRHPSHAVTFVDNHDSQPEEALESFVETWFKPLAYALTLTREQGYPSVFYGDYYGIPTHGVPAMRSKIDPILEARQKYAYGPQHDYLDHPDVIGWTREGDSSHPKSGLATLITDGPGGSKRMYAGLKNAGETWYDITGNRSDTVKIGSDGWGEFHVNDASVSIYVQK

SEQ ID NO: 40767 - protein, 480 aa, Bacillus sp.
NGTMMQYFEWYLPNDGNHWNRLNSDASNLKSKGITAVWIPPAWKGASQNDVGYGAYDLYDLGEFNQKGTVRTKYGTRSQLQAAVTSLKNNGIQVYGDVVMNHKGGADATEMVRAVEVNPNNRNQEVTGEYTIEAWTRFDFPGRGNTHSSFKWRWYHFDGVDWDQSRRLNNRIYTFRGHGKAWDWEVDTEFGNYDYLMYADYDMDHPEVVNELRNWGVWYTNTLGLDGFRIDAVKHIKYSFTRDWINHVRSATGKNMFAVAEFWKNDLGAIENYLQKTNWNHSVFDVPLHYNLYNASKSGGNYDMRNIFNGTVVQRHPSHAVTFVDNHDSQPEEALESFVEEWFKPLAYALTLTREQGYPSVFYGDYYGIPTHGVPAMRSKIDPILEARQKYAYGPQHDYLDHPDVIGWTREGDSSHPKSGLATLITDGPGGSKRMYAGLKNAGETWYDITGNRSDTVKIGSDGWGEFHVNDGSVSIYVQK

SEQ ID NO: 40768 - protein, 480 aa, Bacillus sp.
NGTMMQYFEWYLPNDGNHWNRLNSDASNLKSKGITAVWIPPAWKGASQNDVGYGAYDLYDLGEFNQKGTVRTKYGTRSQLQAAVTSLKNNGIQVYGDVVMNHKGGADATEMVSAVEVNPNNRNQEVTGEYTIEAWTRFDFPGRGNTHSSFKWRWYHFDGVDWDQSRRLNNRIYKFRAHGKAWDWEVDKEFGNYDYLMYADYDMDHPEVVNELRNWGVWYTNTLGLDGFRIDAVKHIKYSFTRDWINHVRSATGKNMFAVAEFWKNDLGAIENYLQKTNWNHSVFDVPLHYNLYNASKSGGNYDMRNIFNGTVVQRHPSHAVTFVDNHDSQPEEALESFVEEWFKPLAYALTLTREQGYPSVFYGDYYGIPTHGVPAMRSKIDPILEARQKYAYGPQHDYLDHPDVIGWTREGDSSHPKSGLATLITDGPGGSKRMYAGLKNAGETWYDITGNRSDTVKIGSDGWGEFHVNDGSVSIYVQK

SEQ ID NO: 40769 - protein, 480 aa, Bacillus sp.
NGTMMQYFEWYLPNDGNHWDRLNSDASNLKSKGITAVWIPPAWKGASQNDVGYGAYDLYDLGEFNQKGTVRTKYGTRSQLQAAVTSLKNNGIQVYGDVVMNHKGGADATEMVRAVEVNPNNRNQEVTGEYTIEAWTRFDFPGRGNTHSSFKWRWYHFDGVDWDQSRNLNNRIYKFRGHGKAWDWEVDTEFGNYDYLMYTDYDMDHPEVVNELRNWGVWYTNTLGLDGFRIDAVKHIKYSFTRDWINHVRSATGKNMFAVAEFWKNDLGAIENYLQKTNWNHSVFDVPLHYNLYNASKSGGNYDMRNIFNGTVVQRHPSHAVTFVDNHDSQPEEALESFVEEWFKPLAYALTLTREQGYPSVFYGDYYGIPTHGVPAMRSKIDPILEARQKYAYGPQHDYLDHPDVIGWTREGDSSHPKSGLATLITDGPGGSKRMYAGLKNAGETWYDITGNRSDTVKIGSDGWGEFHVNDGSVSIYVQK

SEQ ID NO: 40770 - protein, 480 aa, Bacillus sp.
NGTMMQYFEWYLPNDGNHWNRLNSDASNLKSKGITAVWIPPAWKGASQNDVGYGAYDLYDLGEFNQKGTVRTKYGTRSQLQAAVTSLKNNGIQVYGDVVMNHKGGADATEMVRAVEVNPNNRNQEVTGEYTIEAWTRFDFPGRGNTHSSFKWRWYHFDGVDWDQSRRLNNRIYKFRGHGKAWDWEVDTEFGNYDYLMYADYDMDHPEVVNELRNWGVWYTNTLGLDGFRIDAVKHIKYSFTRDWINHVRSATGKNMFAVAEFWKNDLGAIENYLQKTNWNHSVFDVPLHYNLYNASKSGGNYDMRNIFNGTVVQRHPSHAVTFVDNHDSQPEEALESFVEEWFKPLAYALTLTREQGYPSVFYGDYYGIPTHGVPAMRSKIDPILEARQKYAYGPQHDYLDHPDVIGWTREGDSSHPKSGLATLITDGPGGSKRMYAGLKNAGETWYDITGNRSDTVKIGSDGWGEFHINDGSVSIYVQK

SEQ ID NO: 40771 - protein, 480 aa, Bacillus sp.
NGTMMQYFEWYLPNDGNHWNRLNSDASNLKSKGITAVWIPPAWKGASQNDVGYGAYDLYDLGEFNQKGTVRTKYGTRSQLQAAVTSLKNNGIQVYGDVVMNHKGGADATEMVRAVEVNPNNRNQEVTGEYTIEAWTRFDFPGRGNTHSSYKWRWYHFDGVDWDQSRRLNNRIYKFRGHGKAWDWEVDTEFGNYDYLMYADYDMDHPEVVNELRNWGVWYTNTLGLDGFRIDAVKHIKYSFTRDWINHVRSATGKNMFAVAEFWKNDLGAIENYLQKTNWNHSVFDVPLHYNLYNASKSGGNYDMRNIFNGTVVQRHPSHAVTFVDNHDSQPEEALESFVEEWFKPLAYALTLTREQGYPSVFYGDYYGIPTHGVPAMRSKIDPILEARQKYAYGPQHDYLDHPDVIGWTREGDSSHPKSGLATLITDGPGGSKRMYAGLKNAGETWYDITGNRSDTVKIGSDGWGEFHVNDGSVSIYVQK

SEQ ID NO: 40772 - protein, 480 aa, Bacillus sp.
NGTMMQYFEWYLPNDGNHWNRLNSDASNLKSKGITAVWIPPAWKATSQNDVGYGAYDLYDLGEFNQKGTVRTKYGTRSQLQAAVTSLKNNGIQVYGDVVMNHKGGADATEMVRAVEVNPNNRNQEVTGEYTIEAWTRFDFPGRGNTHSSFKWRWYHFDGVDWDQSREVTNRIYKFRGHGKAWDWEVDTEFGNYDYLMYADYDMDHPEVVNELRNWGVWYTNTLGLDGFRIDAVKHIKYSFTRDWINHVRSATGKNMFAVAEFWKNDLGAIENYLQKTNWNHSVFDVPLHYNLYNASKSGGNYDMRNIFNGTVVQRHPSHAVTFVDNHDSQPEEALESFVEEWFKPLAYALTLTREQGYPSVFYGDYYGIPTHGVPAMRSKIDPILEARQKYAYGPQHDYLDHPDVIGWTREGDSSHPKSGLATLITDGPGGSKRMYAGLKNAGETWYDITGNRSDTVKIGSDGWGEFHVNDGSVSIYVQK

SEQ ID NO: 40773 - protein, 479 aa, Synthetic construct
NGTMMQYFEWYLPNDGNHWNRLNSDASNLKSKGITAVWIPPAWKAVSQNDVGYGAYDLYDLGEFNQKGTVRTKYGTRSQLQAAVTSLKNNGIQVYGDVVMNHKGGADATEMVRAVEVNPNNRNQEVTGEYTIEAWTRFDFPGRGNTHSSFKWRWYHFDGVDWDQSRRFNRIYKFRGHGKAWDWEVDTEFGNYDYLMYADYDMDHPEVVNELRNWGVWYTNTLGLDGFRIDAVKHIKYSFTRDWINHVRSATGKNMFAVAEFWKNDLGAIENYLQKTNWNHSVFDVPLHYNLYNASKSGGNYDMRNIFNGTVVQRHPSHAVTFVDNHDSQPEEALESFVEEWFKPLAYALTLTREQGYPSVFYGDYYGIPTHGVPAMRSKIDPILEARQKYAYGPQHDYLDHPDVIGWTREGDSSHPKSGLATLITDGPGGSKRMYAGLKNAGETWYDITGNRSDTVKIGSDGWGEFHVNDGSVSIYVQK

SEQ ID NO: 40774 - protein, 480 aa, Bacillus sp.
NGTMMQYFEWYLPNDGNHWNRLNSDASNLKSKGITAVWIPPAWKAASQNDVGYGAYDLYDLGEFNQKGTVRTKYGTRSQLQAAVTSLKNNGIQVYGDVVMNHKGGADATEMVRAVEVNPNNRNQEVTGEYTIEAWTRFDFPGRGNTHSSFKWRWYHFDGVDWDQSRQLTNRIYKFRGHGKAWDWEVDTEFGNYDYLMYADYDMDHPEVVNELRNWGVWYTNTLGLDGFRIDAVKHIKYSFTRDWINHVRSATGKNMFAVAEFWKNDLGAIENYLQKTNWNHSVFDVPLHYNLYNASKSGGNYDMRNIFNGTVVQRHPSHAVTFVDNHDSQPEEALESFVEEWFKPLAYALTLTREQGYPSVFYGDYYGIPTHGVPAMRSKIDPILEARQKYAYGPQHDYLDHPDVIGWTREGDSSHPKSGLATLITDGPGGSKRMYAGLKNAGETWYDITGNRSDTVKIGSDGWGEFHVNDGSVSIYVQK

SEQ ID NO: 40775 - protein, 480 aa, Bacillus sp.
NGTMMQYFEWYLPNDGNHWNRLNSDASNLKSKGITAVWIPPAWKGASQNDVGYGAYDLYDLGEFNQKGTVRTKYGTRSQLQAAVTSLKNNGIQVYGDVVMNHKGGADATEMVRAVEVNPNNRNQEVTGEYTIEAWTRFDFPGRGNTHSSFKWRWYHFDGVDWDQSRRFNNRIYKFRGHGKAWDWEVDTEFGNYDYLMYTDYDMDHPEVVNELRNWGVWYTNTLGLDGFRIDAVKHIKYSFTRDWINHVRSATGKNMFAVAEFWKNDLGAIENYLQKTNWNHSVFDVPLHYNLYNASKSGGNYDMRNIFNGTVVQRHPSHAVTFVDNHDSQPEEALESFVEEWFKPLAYALTLTREQGYPSVFYGDYYGIPTHGVPAMRSKIDPILEARQKYAYGPQHDYLDHPDVIGWTREGDSSHPKSGLATLITDGPGGSKRMYAGLKNAGETWYDITGNRSDTVKIGSDGWGEFHVNDGSVSIYVQK

SEQ ID NO: 40776 - protein, 480 aa, Bacillus sp.
NGTMMQYFEWYLPNDGNHWNRLNSDASNLKSKGITAVWIPPAWKGASQNDVGYGAYDLYDLGEFNQKGTVRTKYGTRSQLQAAVTSLKNNGIQVYGDVVMNHKGGADATEMVRAVEVNPNNRNQEVTGEYTIEAWTRFDFPGRGNTHSSFKWRWYHFDGVDWDQSRRLNNRIYKFRGHGKAWDWEVDTEFGNYDYLMYADYDMDHPEVVNELRNWGVWYTNTLGLDGFRIDAVKHIKYSFTRDWINHVRSATGKNMFAVAEFWKNDLGAIENYLQKTNWNHSVFDVPLHYNLYNASNSGGNYDMRNIFNGTVVQRHPSHAVTFVDNHDSQPEEALESFVDTWFKPLAYALTLTREQGYPSVFYGDYYGIPTHGVPAMRSKIDPILEARQKYAYGPQHDYLDHPDVIGWTREGDSSHPKSGLATLITDGPGGSKRMYAGLKNAGETWYDITGNRSDTVKIGSDGWGEFHVNKASVSIYVQK

SEQ ID NO: 40777 - protein, 480 aa, Bacillus sp.
NGTMMQYFEWYLPNDGNHWNRLNSDASNLKSKGITAVWIPPAWKGASQNDVGYGAYDLYDLGEFNQKGTVRTKYGTRSQLQAAVTSLKNNGIQVYGDVVMNHKGGADATEMVRAVEVNPNNRNQEVTGEYTIEAWTRFDFPGRGNTHSSFKWRWYHFDGVDWDQSRRLNNRIYKFRGHGKAWDWEVDTEFGNYDYLMYADYDMDHPEVVNELRNWGVWYTNTLGLDGFRIDAVKHIKYSFTRDWINHVRSATGKNMFAVAEFWKNDLGAIENYLQKTNWNHSVFDVPLHYNLYNASKSGGNYDMRNIFNGTVVQAHPSQAVTFVDNHDSQPEEALESFVEEWFKPLAYALTLTREQGYPSVFYGDYYGIPTHGVPAMRSKIDPILEARQKYAYGPQHDYLDHPDVIGWTREGDSSHPKSGLATLITDGPGGSKRMYAGLKNAGETWYDITGNRSDTVKIGSDGWGEFHVNDGSVSIYVQK

SEQ ID NO: 40778 - protein, 480 aa, Bacillus sp.
NGTMMQYFEWYLPNDGNHWNRLNSDASNLKSKGITAVWIPPAWKGASQNDVGYGAYDLYDLGEFNQKGTVRTKYGTRSQLQAAVTSLKNNGITVYGDVVMNHKGGADATEMVRAVEVNPNNRNQEVTGEYTIEAWTRFDFPGRGNTHSSFKWRWYHFDGVDWDQSRRLNNRIYKFRGHGKAWDWEVDTEFGNYDYLMYADYDMDHPEVVNELRNWGVWYTNTLGLDGFRIDAVKHIKYSFTRDWINHVRSATGKNMFAVAEFWKNDLGAIENYLQKTNWNHSVFDVPLHYNLYNASKSGGNYDMRNIFNGTVVQRHPSHAVTFVDNHDSQPEEALESFVEEWFKPLAYALTLTREQGYPSVFYGDYYGIPTHGVPAMRSKIDPILEARQKYAYGPQHDYLDHPDVIGWTREGDSSHPKSGLATLITDGPGGSKRMYAGLKNAGETWYDITGNRSDTVKIGSDGWGEFHVNDGSVSIYVQK

SEQ ID NO: 40779 - protein, 480 aa, Bacillus sp.
NGTMMQYFEWYLPNDGNHWNRLNSDASNLKSKGITAVWIPPAWKGASQNDVGYGAYDLYDLGEFNQKGTVRTKYGTRSQLQAAVTSLKNNGIQVYGDVVMNHKGGANATEMVRAVEVNPNNRNQEVTGEYTIEAWTRFDFPGRGNTHSSFKWRWYHFDGVDWDQSRRLNNRIYKFRGHGKAWDWEVDTEFGNYDYLMYADYDMDHPEVVNELRNWGVWYTNTLGLDGFRIDAVKHIKYSFTRDWINHVRSATGKNMFAVAEFWKNDLGAIENYLQKTNWNHSVFDVPLHYNLYNASKSGGNYDMRNIFNGTVVQRHPSHAVTFVDNHDSQPEEALESFVEEWFKPLAYALTLTREQGYPSVFYGDYYGIPTHGVPAMRSKIDPILEARQKYAYGPQHDYLDHPDVIGWTREGDSSHPKSGLATLITDGPGGSKRMYAGLKNAGETWYDITGNRSDTVKIGSDGWGEFHVNDGSVSIYVQK

SEQ ID NO: 40780 - protein, 480 aa, Bacillus sp.
NGTMMQYFEWYLPNDGNHWNRLNSDASNLKSKGITAVWIPPAWKGASQNDVGYGAYDLYDLGEFNQKGTVRTKYGTRSQLQAAVTSLKNNGIQVYGDVVMNHKGGADATEMVRAVEVNPNNRNQEVTGEYTIEAWTRFDFPGRGNTHSSFKWRWYHFDGVDWDQSRRLNNRIYKFRGHGKAWDWEVDTEFGNYDYLMYADYDMDHPEVVNELRNWGVWYTNTLGLDGFRIDAVKHIKYSFTRDWINHVRSATGKNMFAVAEFWKNDLGAIENYLQKTNWNHSVFDVPLHYNLYNASKSGGNYDMRNIFNGTVVQRHPSHAVTFVDNHDSQPEEALESFVEEWFKPLAYALTLTREQGYPSVFYGDYYGIPTHGVPAMRSKIDPILEARQKYAYGPQHDYLDHPDVIGWTREGDSSHPKSGLATLITDGPGGSKRMYAGLKNAGETWYDITGNRSDTVKSGSDGWGEFHVNDGSVSIYVQK

SEQ ID NO: 40781 - protein, 480 aa, Bacillus sp.
NGTMMQYFEWYLPNDGNHWNRLNSDASNLKSKGITAVWIPPAWKATSQNDVGYGAYDLYDLGEFNQKGTVRTKYGTRSQLQAAVTSLKNNGIQVYGDVVMNHKGGADATEMVRAVEVNPNNRNQEVTGEYTIEAWTRFDFPGRGNTHSSFKWRWYHFDGVDWDQSRRFDNRIYKFRGHGKAWDWEVDTEFGNYDYLMYADYDMDHPEVVNELRNWGVWYTNTLGLDGFRIDAVKHIKYSFTRDWINHVRSATGKNMFAVAEFWKNDLGAIENYLQKTNWNHSVFDVPLHYNLYNASKSGGNYDMRNIFNGTVVQRHPSHAVTFVDNHDSQPEEALESFVEEWFKPLAYALTLTREQGYPSVFYGDYYGIPTHGVPAMRSKIDPILEARQKYAYGPQHDYLDHPDVIGWTREGDSSHPKSGLATLITDGPGGSKRMYAGLKNAGETWYDITGNRSDTVKIGSDGWGEFHVNDGSVSIYVQK

SEQ ID NO: 40782 - protein, 480 aa, Synthetic construct
NGTMMQYFEWYLPNDGNHWNRLNSDASNLKSKGITAVWIPPAWKGVSQNDVGYGAYDLYDLGEFNQKGTVRTKYGTRSQLQAAVTSLKNNGIQVYGDVVMNHKGGADATEMVRAVEVNPNNRNQEVTGEYTIEAWTRFDFPGRGNTHSSFKWRWYHFDGVDWDQSRQLNNRIYKFRGHGKAWDWEVDTEFGNYDYLMYVDYDMDHPEVVNELRNWGVWYTNTLGLDGFRIDAVKHIKYSFTRDWINHVRSATGKNMFAVAEFWKNDLGAIENYLQKTNWNHSVFDVPLHYNLYNASKSGGNYDMRNIFNGTVVQRHPSHAVTFVDNHDSQPEEALESFVEEWFKPLAYALTLTREQGYPSVFYGDYYGIPTHGVPAMRSKIDPILEARQKYAYGPQHDYLDHPDVIGWTREGDSSHPKSGLATLITDGPGGSKRMYAGLKNAGETWYDITGNRSDTVKIGSDGWGEFHVNDGSVSIYVQK

SEQ ID NO: 40783 - protein, 480 aa, Bacillus sp.
NGTMMQYFEWYLPNDGNHWNRLNSDASNLKSKGITAVWIPPAWKGASQNDVGYGAYDLYDLGEFNQKGTVRTKYGTRSQLQAAVTSLKNNGIQVYGDVVMNHKGGADYTEMVRAVEVNPNNRNQEVTGEYTIEAWTRFDFPGRGNTHSSFKWRWYHFDGVDWDQSRRLNNRIYKFRGHGKAWDWEVDTEFGNYDYLMYADYDMDHPEVVNELRNWGVWYTNTLGLDGFRIDAVKHIKYSFTRDWINHVRSATGKNMFAVAEFWKNDLGAIENYLQKTNWNHSVFDVPLHYNLYNASKSGGNYDMRNIFNGTVVQRHPSHAVTFVDNHDSQPEEALESFVEEWFKPLAYALTLTREQGYPSVFYGDYYGIPTHGVPAMRSKIDPILEARQKYAYGPQHDYLDHPDVIGWTREGDSSHPKSGLATLITDGPGGSKRMYAGLKNAGETWYDITGNRSDTVKIGSDGWGEFHVNDGSVSIYVQK

SEQ ID NO: 40784 - protein, 480 aa, Bacillus sp.
NGTMMQYFEWYLPNDGNHWNRLNSDASNLKSKGITAVWIPPAWKGASQNDVGYGAYDLYDLGEFNQKGTVRTKYGTRSQLQAAVTSLKNNGIQVYGDVVMNHKGGADATEMVRPVEVNPNNRNQEVTGEYTIEAWTRFDFPGRGNTHSSFKWRWYHFDGVDWDQSRRLNNRIYKFRGHGKAWDWEVDTEFGNYDYLMYADYDMDHPEVVNELRNWGVWYTNTLGLDGFRIDAVKHIKYSFTRDWINHVRSATGKNMFAVAEFWKNDLGAIENYLQKTNWNHSVFDVPLHYNLYNASKSGGNYDMRNIFNGTVVQRHPSHAVTFVDNHDSQPEEALESFVEEWFKPLAYALTLTREQGYPSVFYGDYYGIPTHGVPAMRSKIDPILEARQKYAYGPQHDYLDHPDVIGWTREGDSSHPKSGLATLITDGPGGSKRMYAGLKNAGETWYDITGNRSDTVKIGSDGWGEFHVNDGSVSIYVQK

SEQ ID NO: 40785 - protein, 480 aa, Bacillus sp.
NGTMMQYFEWYLPNDGNHWNRLNSDASNLKSKGITAVWIPPAWKGASQNDVGYGAYDLYDLGEFNQKGTVRTKYGTRSQLQAAVTSLKNNGIQVYGDVVMNHKGGADATEMVRAVEVNPNNRNQEVTGEYTIEAWTRFDFPGRGNTHSSFKWRWYHFDGVDWDQSRRLNNRIYKFRGHGKAWDWEVDTEFGNYDYLMYADYDMDHPEVVNELRNWGVWYTNTLGLDGFRIDAVKHIKYSFTRDWINHVRSATGKNMFAVAEFWKYDLGAIENYLQKTNWNHSVFDVPLHNNLYNASKSGGNYDMRNIFNGTVVQRHPSHAVTFVDNHDSQPEEALESFVEEWFKPLAYALTLTREQGYPSVFYGDYYGIPTHGVPAMRSKIDPILEARQKYAYGPQHDYLDHPDVIGWTREGDSSHPKSGLATLITDGPGGSKRMYAGLKNAGETWYDITGNRSDTVKIGSDGWGEFHVNDGSVSIYVQK

SEQ ID NO: 40786 - protein, 480 aa, Bacillus sp.
NGTMMQYFEWYLPNDGNHWNRLNSDASNLKSKGITAVWIPPAWKGASQNDVGYGAYDLYDLGEFNQKGTVRTKYGTRSQLQAAVTSLKNNGIQVYGDVVMNHKGGADATEMVRAVEVNPNNRNQEVTGEYTIEAWTRFDFPGRGNTHSSFKWRWYHFDGVDWDQSRRLNNRIYKFRGHGKAWDWEVDTEFGNYDYLMYADYDMDHPEVVNELRNWGVWYTNTLGLDGFRIDAVKHIKYSFTRDWINHVRSATGKNMFAVAEFWKNDLGAIENYLQKTNWNHSVFDVPLHYNLYNASKSGGNYDMRNIFNGTVVQRHPSHAVTFVDNHDSQPEEALESFVEEWFKPLAYALTLTREQGYPSVFYGDYYGIPTHGVPAMRSKIDPILEARQKYAYGPQHDYLDHPDVIGWTREGDSSHPKSGLATLITDGPGGSKRMYAGLKNAGETWYDITGNRSDTVKIGSDGWGEFHVNDSSVSIYVQK

SEQ ID NO: 40787 - protein, 480 aa, Bacillus sp.
NGTMMQYFEWYLPNDGNHWNRLNSDASNLKSKGITAVWIPPAWKGVSQNDVGYGAYDLYDLGEFNQKGTVRTKYGTRSQLQAAVTSLKNNGIQVYGDVVMNHKGGADATEMVRAVEVNPNNRNQEVTGEYTIEAWTRFDFPGRGNTHSSFKWRWYHFDGVDWDQSRRLQNRIYKFRGHGKAWDWEVDTEFGNYDYLMYVDYDMDHPEVVNELRNWGVWYTNTLGLDGFRIDAVKHIKYSFTRDWINHVRSATGKNMFAVAEFWKNDLGAIENYLQKTNWNHSVFDVPLHYNLYNASKSGGNYDMRNIFNGTVVQRHPSHAVTFVDNHDSQPEEALESFVEEWFKPLAYALTLTREQGYPSVFYGDYYGIPTHGVPAMRSKIDPILEARQKYAYGPQHDYLDHPDVIGWTREGDSSHPKSGLATLITDGPGGSKRMYAGLKNAGETWYDITGNRSDTVKIGSDGWGEFHVNDGSVSIYVQK

SEQ ID NO: 40788 - protein, 480 aa, Bacillus sp.
NGTMMQYFEWYLPNDGNHWNRLNSDASNLKSKGITAVWIPPAWKGASQNDVGYGAYDLYDLGEFNQKGTVRTKYGTRSQLQAAVTSLKNNGIQVYGDVVMNHKGGADATEMVRAVEVNPNNRNQEVTGEYTIEAWTRFDFPGRGNTHSSFKWRWYHFDGVDWDQSRRLNNRIYKFRNHGKAWDWEVDTEFGNYDYLMYADYDMDHPEVVNELRNWGVWYTNTLGLDGFRIDAVKHIKYSFTRDWINHVRSATGKNMFAVAEFWKNDLGAIENYLQKTNWNHSVFDVPLHYNLYNASKSGGNYDMRNIFNGTVVQRHPSHAVTFVDNHDSQPEEALESFVEEWFKPLAYALTLTREQGYPSVFYGDYYGIPTHGVPAMRSKIDPILEARQKYAYGPQHDYLDHPDVIGWTREGDSSHPKSGLATLITDGPGGSKRMYAGLKNAGETWYDITGNRSDTVKIGSDGWGEFHVNDGSVSIYVQK

SEQ ID NO: 40789 - protein, 480 aa, Bacillus sp.
NGTMMQYFEWYLPNDGNHWNRLNSDASNLKSKGITAVWIPPAWKGASQNDVGYGAYDLYDLGEFNQKGTVRTKYGTRSQLQAAVTSLKNNGIQVYGDVVMNHKGGADATEMVRAVEVNPNNRNQEVTGEYTIEAWTRFDFPGRGNTHSSFKWRWYHFDGVDWDQSRRLNNRIYKFRGHGKAWDWEVDTEFGNYDYLMYADYDMDHPEVVNELRNWGVWYTNTLGLDGFRIDAVKHIKYSFTRDWINHVRSATGKNMFAVAEFWKNDLGAIENYLQKTNWNHSVFDVPLHYNLYNASKSGGNYDMRNIFNGTVVQRHPSHAVTFVDNHDSQPEEALESFVEPWFKPLAYALTLTREQGYPSVFYGDYYGIPTHGVPAMRSKIDPILEARQKYAYGPQHDYLDHPDVIGWTREGDSSHPKSGLATLITDGPGGSKRMYAGLKNAGETWYDITGNRSDTVKIGSDGWGEFHVNDTSVSIYVQK

SEQ ID NO: 40790 - protein, 480 aa, Bacillus sp.
NGTMMQYFEWYLPNDGNHWNRLNSDASNLKSKGITAVWIPPAWKGTSQNDVGYGAYDLYDLGEFNQKGTVRTKYGTRSQLQAAVTSLKNNGIQVYGDVVMNHKGGADATEMVRAVEVNPNNRNQEVTGEYTIEAWTRFDFPGRGNTHSSFKWRWYHFDGVDWDQSRRFQNRIYKFRGHGKAWDWEVDTEFGNYDYLMYVDYDMDHPEVVNELRNWGVWYTNTLGLDGFRIDAVKHIKYSFTRDWINHVRSATGKNMFAVAEFWKNDLGAIENYLQKTNWNHSVFDVPLHYNLYNASKSGGNYDMRNIFNGTVVQRHPSHAVTFVDNHDSQPEEALESFVEEWFKPLAYALTLTREQGYPSVFYGDYYGIPTHGVPAMRSKIDPILEARQKYAYGPQHDYLDHPDVIGWTREGDSSHPKSGLATLITDGPGGSKRMYAGLKNAGETWYDITGNRSDTVKIGSDGWGEFHVNDGSVSIYVQK

SEQ ID NO: 40791 - protein, 480 aa, Bacillus sp.
NGTMMQYFEWYLPNDGNHWNRLNSDASNLKSKGITAVWIPPAWKGASQNDVGYGAYDLYDLGEFNQKGTVRTKYGTRSQLQAAVTSLKNNGIQVYGDVVMNHKGGADATEMVPAVEVNPNNRNQEVTGDYTIEAWTRFDFPGRGNTHSSFKWRWYHFDGVDWDQSRRLNNRIYKFRGHGKAWDWEVDTEFGNYDYLMYADYDMDHPEVVNELRNWGVWYTNTLGLDGFRIDAVKHIKYSFTRDWINHVRSATGKNMFAVAEFWKNDLGAIENYLQKTNWNHSVFDVPLHYNLYNASKSGGNYDMRNIFNGTVVQRHPSHAVTFVDNHDSQPEEALESFVEEWFKPLAYALTLTREQGYPSVFYGDYYGIPTHGVPAMRSKIDPILEARQKYAYGPQHDYLDHPDVIGWTREGDSSHPKSGLATLITDGPGGSKRMYAGLKNAGETWYDITGNRSDTVKIGSDGWGEFHVNDGSVSIYVQK

SEQ ID NO: 40792 - protein, 480 aa, Bacillus sp.
NGTMMQYFEWYLPNDGNHWNRLNSDASNLKSKGITAVWIPPAWKGASQNDVGYGAYDLYDLGEFNQKGTVRTKYGTRSQLQAAVTSLKNNGIQVYGDVVMNHKGGADATEMVRAVEVNPNNRNQEVTGEYTIEAWTRFDFPGRGNTHSSFKWRWYHFDGVDWDQSRRVNNRIYKFRGHGKAWDWEVDTEFGNYDYLMYVDYDMDHPEVVNELRNWGVWYTNTLGLDGFRIDAVKHIKYSFTRDWINHVRSATGKNMFAVAEFWKNDLGAIENYLQKTNWNHSVFDVPLHYNLYNASKSGGNYDMRNIFNGTVVQRHPSHAVTFVDNHDSQPEEALESFVEEWFKPLAYALTLTREQGYPSVFYGDYYGIPTHGVPAMRSKIDPILEARQKYAYGPQHDYLDHPDVIGWTREGDSSHPKSGLATLITDGPGGSKRMYAGLKNAGETWYDITGNRSDTVKIGSDGWGEFHVNDGSVSIYVQK

SEQ ID NO: 40793 - protein, 480 aa, Bacillus sp.
NGTMMQYFEWYLPNDGNHWNRLNSDASNLKSKGITAVWIPPAWKAVSQNDVGYGAYDLYDLGEFNQKGTVRTKYGTRSQLQAAVTSLKNNGIQVYGDVVMNHKGGADATEMVRAVEVNPNNRNQEVTGEYTIEAWTRFDFPGRGNTHSSFKWRWYHFDGVDWDQSRRFDNRIYKFRGHGKAWDWEVDTEFGNYDYLMYADYDMDHPEVVNELRNWGVWYTNTLGLDGFRIDAVKHIKYSFTRDWINHVRIATGKNMFAVAEFWKNDLGAIENYLQKTNWNHSVFDVPLHYNLYNASKSGGNYDMRNIFNGTVVQRHPSHAVTFVDNHDSQPEEALESFVDEWFKPLAYALTLTREQGYPSVFYGDYYGIPTHGVPAMRSKIDPILEARQKYAYGPQHDYLDHPDVIGWTREGDSSHPKSGLATLITDGPGGSKRMYAGLKNAGETWYDITGNRSDTVKIGSDGWGEFHVNDGSVSIYVQK

SEQ ID NO: 40794 - protein, 480 aa, Bacillus sp.
NGTMMQYFEWYLPNDGNHWNRLNSDASNLKSKGITAVWIPPAWKGASQNDVGYGAYDLYDLGEFNQKGTVRTKYGTRSQLQAAVTSLKNNGIQVYGDVVMNHKGGADATEMVRAVEVNPNNRNQEVTGEYTIEAWTRFDFPGRGNTHSSFKWRWYHFDGVDWDQSRRLNNRIYKFRGHGKAWDWEVDTEFGNYDYLMYADIDYDHPESTNEMRNWGVWYTNTLGLDGFRIDAVKHIKYSFTRDWINHVRSATGKNMFAVAEFWKNDLGAIENYLQKTNWNHSVFDVPLHYNLYNASKSGGNYDMRNIFNGTVVQRHPSHAVTFVDNHDSQPEEALESFVEEWFKPLAYALTLTREQGYPSVFYGDYYGIPTHGVPAMRSKIDPILEARQKYAYGPQHDYLDHPDVIGWTREGDSSHPKSGLATLITDGPGGSKRMYAGLKNAGETWYDITGNRSDTVKIGSDGWGEFHVNDGSVSIYVQK

SEQ ID NO: 40795 - protein, 480 aa, Bacillus sp.
NGTMMQYFEWYLPNDGNHWNRLNSDASNLKSKGITAVWIPPAWKATSQNDVGYGAYDLYDLGEFNQKGTVRTKYGTRSQLQAAVTSLKNNGIQVYGDVVMNHKGGADATEMVRAVEVNPNNRNQEVTGEYTIEAWTRFDFPGRGNTHSSFKWRWYHFDGVDWDQSRQLNNRIYKFRGHGKAWDWEVDTEFGNYDYLMYADYDMDHPEVVNELRNWGVWYTNTLGLDGFRIDAVKHIKYSFTRDWINHVRSATGKNMFAVAEFWKNDLGAIENYLQKTNWNHSVFDVPLHYNLYNASKSGGNYDMRNIFNGTVVQRHPSHAVTFVDNHDSQPEEALESFVEEWFKPLAYALTLTREQGYPSVFYGDYYGIPTHGVPAMRSKIDPILEARQKYAYGPQHDYLDHPDVIGWTREGDSSHPKSGLATLITDGPGGSKRMYAGLKNAGETWYDITGNRSDTVKIGSDGWGEFHVNDGSVSIYVQK

SEQ ID NO: 40796 - protein, 480 aa, Bacillus sp.
NGTMMQYFEWYLPNDGNHWNRLNSDASNLKSKGITAVWIPPAWKGASQNDVGYGAYDLYDLGEFNQKGTVRTKYGTRSQLQAAVTSLKNNGIQVYGDVVMNHKGGADATEMVRAVEVNPNNRHQEVTGEYTIEAWTRFDFPGRGNTHSSFKWRWYHFDGVDWDQSRRLNNRIYKFRGHGKAWDWEVDTEFGNYDYLMYADYDMDHPEVVNELRNWGVWYTNTLGLDGFRIDAVKHIKYSFTRDWINHVRSATGKNMFAVAEFWKNDLGAIENYLQKTNWNHSVFDVPLHYNLYNASKSGGNYDMRNIFNGTVVQRHPSHAVTFVDNHDSQPEEALESFVEEWFKPLAYALTLTREQGYPSVFYGDYYGIPTHGVPAMRSKIDPILEARQKYAYGPQHDYLDHPDVIGWTREGDSSHPKSGLATLITDGPGGSKRMYAGLKNAGETWYDITGNRSDTVKIGSDGWGEFHVNDGSVSIYVQK

SEQ ID NO: 40797 - protein, 480 aa, Synthetic construct
NGTMMQYFEWYLPNDGNHWNRLNSDASNLKSKGITAVWIPPAWKGASQNDVGYGAYDLYDLGEFNQKGTVRTKYGTRSQLQAAVTSLKNNGIQVYGDVVMNHKGGADATEMVRAVEVNPNNRNQEVTGEYTIEAWTRFDFPGRGNTHSSFKWRWYHFDGVDWDQSRRLNNRIYKFRGHGKAWDWEVDTEFGNYDYLMYADYDMDHPEVVNELRNWGVWYTNTLGLDGFRIDAVKHIKYSFTRDWINHVRSATGKNMFAVAEFWKNDLGAIENYLQKTNWNHSVFDVPLHYNLYNASKSGGNYDMRNIFNGTVVQRHPSHAVTFVDNHDSQPEEALESFVEEWFKPLAYALTLTREQGYPSVFYGDYYGIPTHGVPAMRSKIDPILEARQKYAYGPQHDYLDHPDVIGWTREGDSSHPKSGLATLMTDGPGGSKRMYAGLKNAGETWYDITGNRSDTVKIGSDGWGEFHVNDGSVSIYVQK

SEQ ID NO: 40798 - protein, 480 aa, Bacillus sp.
NGTMMQYFEWYLPNDGNHWNRLNSDASNLKSKGITAVWIPPAWKSASQNDVGYGAYDLYDLGEFNQKGTVRTKYGTRSQLQAAVTSLKNNGIQVYGDVVMNHKGGADATEMVRAVEVNPNNRNQEVTGEYTIEAWTRFDFPGRGNTHSSFKWRWYHFDGVDWDQSRNLQNRIYKFRGHGKAWDWEVDTEFGNYDYLMYADYDMDHPEVVNELRNWGVWYTNTLGLDGFRIDAVKHIKYSFTRDWINHVRSATGKNMFAVAEFWKNDLGAIENYLQKTNWNHSVFDVPLHYNLYNASKSGGNYDMRNIFNGTVVQRHPSHAVTFVDNHDSQPEEALESFVEEWFKPLAYALTLTREQGYPSVFYGDYYGIPTHGVPAMRSKIDPILEARQKYAYGPQHDYLDHPDVIGWTREGDSSHPKSGLATLITDGPGGSKRMYAGLKNAGETWYDITGNRSDTVKIGSDGWGEFHVNDGSVSIYVQK

SEQ ID NO: 40799 - protein, 480 aa, Synthetic construct
NGTMMQYFEWYLPNDGNHWNRLNSDASNLKSKGITAVWIPPAWKGASQNDVGYGAYDLYDLGEFNQKGTVRTKYGTRSQLQAAVTSLKNNGIQVYGDVVMNHKGGADATEMVRAVEVNPNNRNQEVTGEYTIEAWTRFDFPGRGNTHSSFKWRWYHFDGVDWDQSRRLNNRIYLFRGHGKAWDWPVDTENGNYDYLMYADIDMDHPEVVNELRNWGVWYTNTLGLDGFRIDAVKHIKYSFTRDWINHVRSATGKNMFAVAEFWKNDLGAIENYLQKTNWNHSVFDVPLHYNLYNASKSGGNYDMRNIFNGTVVQRHPSHAVTFVDNHDSQPEEALESFVEEWFKPLAYALTLTREQGYPSVFYGDYYGIPTHGVPAMRSKIDPILEARQKYAYGPQHDYLDHPDVIGWTREGDSSHPKSGLATLITDGPGGSKRMYAGLKNAGETWYDITGNRSDTVKIGSDGWGEFHVNDGSVSIYVQK

SEQ ID NO: 40800 - protein, 480 aa, Bacillus sp.
NGTMMQYFEWYLPNDGNHWNRLNSDASNLKSKGITAVWIPPAWKGASQNDVGYGAYDLYDLGEFNQKGTVRTKYGTRSQLQAAVTSLKNNGIQVYGDVVMNHKGGADATEMVRAVEVNPNNRNQEVTGEYTIEAWTRFDFPGRGNTHSSFKWRWYHFDGVDWDQSRRLNNRIYKFRGHGKAWDWEVDTEFGNYDYLMYADYDMDHPEVVNELRNWGVWYTNTLGLDGFRIDAVKHIKYSFTRDWINHVRSATGKNMFAVAEFWKNDLGAIENYLQKTNWNHSVFDVPLHYNLYNASKSGGNYDMRNIFNGTVVQSHPMLAVTFVDNHDSQPEEALESFVEEWFKPLAYALTLTREQGYPSVFYGDYYGIPTHGVPAMRSKIDPILEARQKYAYGPQHDYLDHPDVIGWTREGDSSHPKSGLATLITDGPGGSKRMYAGLKNAGETWYDITGNRSDTVKIGSDGWGEFHVNDGSVSIYVQK

SEQ ID NO: 40801 - protein, 480 aa, Bacillus sp.
NGTMMQYFEWYLPNDGNHWNRLNSDASNLKSKGITAVWIPPAWKGASQNDVGYGAYDLYDLGEFNQKGTVRTKYGTRSQLQAAVTSLKNNGIQVYGDVVMNHKGGADATEMVRAVEVNPNNRNQEVTGEYTIEAWTRFDFPGRGNTHSSFKWRWYHFDGVDWDQSRRLNNRIYRFRGHGKAWDWEVDTEFGNYDYLMYADYDMDHPEVVNELRNWGVWYTNTLGLDGFRIDAVKHIKYSFTRDWINHVRSATGKNMFAVAEFWKNDLGAIENYLQKTNWNHSVFDVPLHYNLYNASKSGGNYDMRNIFNGTVVQRHPSHAVTFVDNHDSQPEEALESFVEEWFKPLAYALTLTREQGYPSVFYGDYYGIPTHGVPAMRSKIDPILEARQKYAYGPQHDYLDHPDVIGWTREGDSSHPKSGLATLITDGPGGSKRMYAGLKNAGETWYDITGNRSDTVKIGSDGWGEFHVNDGSVSIYVQK

SEQ ID NO: 40802 - protein, 480 aa, Bacillus sp.
NGTMMQYFEWYLPNDGNHWNRLNSDASNLKSKGITAVWIPPAWKGASQNDVGYGAYDLYDLGEFNQKGTVRTKYGTRSQLQAAVTSLKNNGIQVYGDVVMNHKGGADATEMVRAVEVNPNNRNQEVTGEYTIEAWTRFDFPGRGNTHSSFKWRWYHFDGVDWDQSRRLNNRIYKFRGHGKAWDWEVDTEFGNYDYLMYADYDMDHPEVVNELRNWGVWYTNTLGLDGFRIDAVKHIKYSFTRDWINHVRSATGKNMFAVSEFWKNDLGAIENYLQKTNWNHSVFDVPLHYNLYNASKSGGNYDMRNIFNGTVVQRHPSHAVTFVDNHDSQPEEALESFVEEWFKPLAYALTLTREQGYPSVFYGDYYGIPTHGVPAMRSKIDPILEARQKYAYGPQHDYLDHPDVIGWTREGDSSHPKSGLATLITDGPGGSKRMYAGLKNAGETWYDITGNRSDTVKIGSDGWGEFHVNDGSVSIYVQK

SEQ ID NO: 40803 - protein, 480 aa, Bacillus sp.
NGTMMQYFEWYLPNDGNHWNRLNSDASNLKSKGITAVWIPPAWKAASQNDVGYGAYDLYDLGEFNQKGTVRTKYGTRSQLQAAVTSLKNNGIQVYGDVVMNHKGGADATEMVRAVEVNPNNRNQEVTGEYTIEAWTRFDFPGRGNTHSSFKWRWYHFDGVDWDQSRRTNNRIYKFRGHGKAWDWEVDTEFGNYDYLMYADYDMDHPEVVNELRNWGVWYTNTLGLDGFRIDAVKHIKYSFTRDWINHVRSATGKNMFAVAEFWKNDLGAIENYLQKTNWNHSVFDVPLHYNLYNASKSGGNYDMRNIFNGTVVQRHPSHAVTFVDNHDSQPEEALESFVEEWFKPLAYALTLTREQGYPSVFYGDYYGIPTHGVPAMRSKIDPILEARQKYAYGPQHDYLDHPDVIGWTREGDSSHPKSGLATLITDGPGGSKRMYAGLKNAGETWYDITGNRSDTVKIGSDGWGEFHVNDGSVSIYVQK

SEQ ID NO: 40804 - protein, 480 aa, Bacillus sp.
NGTMMQYFEWYLPNDGNHWNRLNSDASNLKSKGITAVWIPPAWKGASQNDVGYGAYDLYDLGEFNQKGTVRTKYGTRSQLQAAVTSLKNNGIQVYGDVVMNHKGGADATEMVRAVEVNPNNRNQEVTGEYTIEAWTRFDFPGRGNTHSSFKWRWYHFDGVDWDQSRRLNNRIYKFRGHGKAWDWEVDTEFGNYDYLMYADYDMDHPEVVNELRNWGVWYTNTLGLDGFRIDAVKHIKYSFTRDWINHVRSATGKNMFAVAEFWKNDLGAIENYLQKTNWNHSVFDVPLHYNLYNASKSGGNYDMRNIFNGTVVQRHPSHAVTFVDNHDSQPEEALESFVEEWFKPAAYALTLTREQGYPSVFYGDYYGIPTHGVPAMRSKIDPILEARQKYAYGPQHDYLDHPDVIGWTREGDSSHPKSGLATLITDGPGGSKRMYAGLKNAGETWYDITGNRSDTVKIGSDGWGEFHVNDGSVSIYVQK

SEQ ID NO: 40805 - protein, 480 aa, Bacillus sp.
NGTMMQYFEWYLPNDGNHWNRLNSDASNLKSKGITAVWIPPAWKGASQNDVGYGAYDLYDLGEFNQKGTVRTKYGTRSQLQAAVTSLKNNGIQVYGDVVMNHKGGADATEMVRAVEVNPNNRNQEVTGEYTIEAWTRFDFPGRGNTHSSFKWRWYHFDGVDWDQSRRLNNRIYKFRGHGKAWDWEVDTEFGNYDYLMYADYDMDHPEVVNELRNWGVWYTTTLGLDGFRIDAVKHIKYSFTRDWINHVRSATGKNMFAVAEFWKNDLGAIENYLQKTNWNHSVFDVPLHYNLYNASKSGGNYDMRNIFNGTVVQRHPSHAVTFVDNHDSQPEEALESFVEEWFKPLAYALTLTREQGYPSVFYGDYYGIPTHGVPAMRSKIDPILEARQKYAYGPQHDYLDHPDVIGWTREGDSSHPKSGLATLITDGPGGSKRMYAGLKNAGETWYDITGNRSDTVKIGSDGWGEFHVNDGSVSIYVQK

SEQ ID NO: 40806 - protein, 480 aa, Bacillus sp.
NGTMMQYFEWYLPNDGNHWNRLNSDASNLKSKGITAVWIPPAWKGTSQNDVGYGAYDLYDLGEFNQKGTVRTKYGTRSQLQAAVTSLKNNGIQVYGDVVMNHKGGADATEMVRAVEVNPNNRNQEVTGEYTIEAWTRFDFPGRGNTHSSFKWRWYHFDGVDWDQSRRLDNRIYKFRGHGKAWDWEVDTEFGNYDYLMYVDYDMDHPEVVNELRNWGVWYTNTLGLDGFRIDAVKHIKYSFTRDWINHVRSATGKNMFAVAEFWKNDLGAIENYLQKTNWNHSVFDVPLHYNLYNASKSGGNYDMRNIFNGTVVQRHPSHAVTFVDNHDSQPEEALESFVEEWFKPLAYALTLTREQGYPSVFYGDYYGIPTHGVPAMRSKIDPILEARQKYAYGPQHDYLDHPDVIGWTREGDSSHPKSGLATLITDGPGGSKRMYAGLKNAGETWYDITGNRSDTVKIGSDGWGEFHVNDGSVSIYVQK

SEQ ID NO: 40807 - protein, 480 aa, Bacillus sp.
NGTMMQYFEWYLPNDGNHWNRLNSDASNLKSKGITAVWIPPAWKGASQNDVGYGAYDLYDLGEFNQKGTVRTKYGTRSQLQAAVTSLKNNGIQVYGDVVMNHKGGADATEMVRAVEVNPNNRNQEVTGEYTIEAWTRFDFPGRGNTHSSFKWRWYHFDGVDWDQSRRLNNRIYKFRGHGKAWDWEVDTEFGNYDYLMYADYDMDHPEVSNELRNWGVWYTNTLGLDGFRIDAVKHIKYSFTRDWINHVRSATGKNMFAVAEFWKNDLGAIENYLQKTNWNHSVFDVPLHYNLYNASKSGGNYDMRNIFNGTVVQRHPSHAVTFVDNHDSQPEEALESFVEEWFKPLAYALTLTREQGYPSVFYGDYYGIPTHGVPAMRSKIDPILEARQKYAYGPQHDYLDHPDVIGWTREGDSSHPKSGLATLITDGPGGSKRMYAGLKNAGETWYDITGNRSDTVKIGSDGWGEFHVNDGSVSIYVQK

SEQ ID NO: 40808 - protein, 480 aa, Bacillus sp.
NGTMMQYFEWYLPNDGNHWNRLNSDASNLKSKGITAVWIPPAWKGASQNDVGYGAYDLYDLGEFNQKGTVRTKYGTRSQLQAAVTSLKNNGIQVYGDVVMNHKGGADATEMVRAVEVNPNNRNQEVTGEYTIEAWTRFDFPGRGNTHSSFKWRWYHFDGVDWDQSRNVNNRIYKFRGHGKAWDWEVDTEFGNYDYLMYADYDMDHPEVVNELRNWGVWYTNTLGLDGFRIDAVKHIKYSFTRDWINHVRIATGKNMFAVAEFWKNDLGAIENYLQKTNWNHSVFDVPLHYNLYNASKSGGNYDMRNIFNGTVVQRHPSHAVTFVDNHDSQPEEALESFVDEWFKPLAYALTLTREQGYPSVFYGDYYGIPTHGVPAMRSKIDPILEARQKYAYGPQHDYLDHPDVIGWTREGDSSHPKSGLATLITDGPGGSKRMYAGLKNAGETWYDITGNRSDTVKIGSDGWGEFHVNDQSVSIYVQK

SEQ ID NO: 40809 - protein, 480 aa, Bacillus sp.
NGTMMQYFEWYLPNDGNHWNRLNSDASNLKSKGITAVWIPPAWKGASQNDVGYGAYDLYDLGEFNQKGTVRTKYGTRSQLQAAVTSLKNNGIQVYGDVVMNHKGGADATEMVRAVEVNPNNRNQEVTGEYTIEAWTRFDFPGRGNTHSSFKWRWYHFDGVDLDQSRRLNNRIYKFRGHGKAWDWEVDTEFGNYDYLMYADYDMDHPEVVNELRNWGVWYTNTLGLDGFRIDAVKHIKYSFTRDWINHVRSATGKNMFAVAEFWKNDLGAIENYLQKTNWNHSVFDVPLHYNLYNASKSGGNYDMRNIFNGTVVQRHPSHAVTFVDNHDSQPEEALESFVEEWFKPLAYALTLTREQGYPSVFYGDYYGIPTHGVPAMRSKIDPILEARQKYAYGPQHDYLDHPDVIGWTREGDSSHPKSGLATLITDGPGGSKRMYAGLKNAGETWYDITGNRSDTVKIGSDGWGEFHVNDGSVSIYVQK

SEQ ID NO: 40810 - protein, 480 aa, Synthetic construct
NGTMMQYFEWYLPNDGNHWNRLNSDASNLKSKGITAVWIPPAWKGASQNDVGYGAYDLYDLGEFNQRGTVRTKYGTRSQLQAAVTSLKNNGIQVYGDVVMNHKGGADATEMVRAVEVNPNNRNQEVTGEYTIEAWTRFDFPGRGNTHSSFKWRWYHFDGVDWDQSRRLNNRIYKFRGHGKAWDWEVDTEFGNYDYLMYADYDMDHPEVVNELRNWGVWYTNTLGLDGFRIDAVKHIKYSFTRDWINHVRSATGKNMFAVAEFWKNDLGAIENYLQKTNWNHSVFDVPLHYNLYNASKSGGNYDMRNIFNGTVVQRHPSHAVTFVDNHDSQPEEALESFVEEWFKPLAYALTLTREQGYPSVFYGDYYGIPTHGVPAMRSKIDPILEARQKYAYGPQHDYLDHPDVIGWTREGDSSHPKSGLATLITDGPGGSKRMYAGLKNAGETWYDITGNRSDTVKIGSDGWGEFHVNDGSVSIYVQK

SEQ ID NO: 40811 - protein, 480 aa, Bacillus sp.
NGTMMQYFEWYLPNDGNHWNRLNSDASNLKSKGITAVWIPPAWKATSQNDVGYGAYDLYDLGEFNQKGTVRTKYGTRSQLQAAVTSLKNNGIQVYGDVVMNHKGGADATEMVRAVEVNPNNRNQEVTGEYTIEAWTRFDFPGRGNTHSSFKWRWYHFDGVDWDQSRRLENRIYKFRGHGKAWDWEVDTEFGNYDYLMYADYDMDHPEVVNELRNWGVWYTNTLGLDGFRIDAVKHIKYSFTRDWINHVRSATGKNMFAVAEFWKNDLGAIENYLQKTNWNHSVFDVPLHYNLYNASKSGGNYDMRNIFNGTVVQRHPSHAVTFVDNHDSQPEEALESFVEEWFKPLAYALTLTREQGYPSVFYGDYYGIPTHGVPAMRSKIDPILEARQKYAYGPQHDYLDHPDVIGWTREGDSSHPKSGLATLITDGPGGSKRMYAGLKNAGETWYDITGNRSDTVKIGSDGWGEFHVNDGSVSIYVQK

SEQ ID NO: 40812 - protein, 480 aa, Synthetic construct
NGTMMQYFEWYLPNDGNHWNRLNSDASNLKSKGITAVWIPPAWKGASQNDVGYGAYDLYDLGEFNQKGTVRTKYGTRSQLQAAVTSLKNNGIQVYGDVVMNHKGGADATEMVRAVEVNPNNRNQEVTGEYTIEAWTRFDFPGRGNTHSSFKWRWYHFDGVDWDQSSRLNNRIYKFRGHGKAWDWEVDTEFGNYDYLMYADYDMDHPEVVNELRNWGVWYTNTLGLDGFRIDAVKHIKYSFTRDWINHVRSATGKNMFAVAEFWKNDLGAIENYLQKTNWNHSVFDVPLHYNLYNASKSGGNYDMRNIFNGTVVQRHPSHAVTFVDNHDSQPEEALESFVEEWFKPLAYALTLTREQGYPSVFYGDYYGIPTHGVPAMRSKIDPILEARQKYAYGPQHDYLDHPDVIGWTREGDSSHPKSGLATLITDGPGGSKRMYAGLKNAGETWYDITGNRSDTVKIGSDGWGEFHVNDGSVSIYVQK

SEQ ID NO: 40813 - protein, 480 aa, Bacillus sp.
NGTMMQYFEWYLPNDGNHWNRLNSDASNLKSKGITAVWIPPAWKGASQNDVGYGAYDLYDLGEFNQKGTVRTKYGTRSQLQAAVTSLKNNGIQVYGDVVMNHKGGADATEMVRAVEVNPNNRNQEVTGEYTIEAWTRFDFPGRGNTHSSFKWRWYHFDGVDWDQSRRLNNRIYKFRGHGKAWDWEVDTEFGNYDYLMYADYDMDHPEVVNELRNWGVWYTNTLGLDGFRIDAVKHIKYSFTRDWINHVRSATGKNMFAVAEFWKNDLGAIENYLQKTNWNHSVFDVPLHYNLYNASKSGGNYDMRNIFNGTVVQRHPSHAVTFVDNHDSQPEEALESFVDPWFKPLAYALTLTREQGYPSVFYGDYYGIPTHGVPAMRSKIDPILEARQKYAYGPQHDYLDHPDVIGWTREGDSSHPKSGLATLITDGPGGSKRMYAGLKNAGETWYDITGNRSDTVKIGSDGWGEFHVNDSSVSIYVQK

SEQ ID NO: 40814 - protein, 480 aa, Bacillus sp.
NGTMMQYFEWYLPNDGNHWNRLNSDASNLKSKGITAVWIPPAWKGASQNDVGYGAYDLYDLGEFNQKGTVRTKYGTRSQLQAAVTSLKNNGIQVYGDVVMNHKGGADATEMVRAVEVNPNNRNQEVTGEYTIEAWTRFDFPGRGNTHSSFKWRWYHFDGVDWDQSRRLNNRIYKFRGHGKAWDWEVDTEFGNYDYLMYADYDMDHPEVVNELRNWGVWYTNTLGLDGFRIDAVKHIKYSFTRDWINHVRSATGKNMFAVAEFWKNDLGAIENYLQKTNWNHSVFDVPLHYNLYNASKSGGNYDMRNIFNGTVVQAHPMLAVTFVDNHDSQPEEALESFVEEWFKPLAYALTLTREQGYPSVFYGDYYGIPTHGVPAMRSKIDPILEARQKYAYGPQHDYLDHPDVIGWTREGDSSHPKSGLATLITDGPGGSKRMYAGLKNAGETWYDITGNRSDTVKIGSDGWGEFHVNDGSVSIYVQK

SEQ ID NO: 40815 - protein, 480 aa, Bacillus sp.
NGTMMQYFEWYLPNDGNHWNRLNSDASNLKSKGITAVWIPPAWKATSQNDVGYGAYDLYDLGEFNQKGTVRTKYGTRSQLQAAVTSLKNNGIQVYGDVVMNHKGGADATEMVRAVEVNPNNRNQEVTGEYTIEAWTRFDFPGRGNTHSSFKWRWYHFDGVDWDQSRQLTNRIYKFRGHGKAWDWEVDTEFGNYDYLMYADYDMDHPEVVNELRNWGVWYTNTLGLDGFRIDAVKHIKYSFTRDWINHVRSATGKNMFAVAEFWKNDLGAIENYLQKTNWNHSVFDVPLHYNLYNASKSGGNYDMRNIFNGTVVQRHPSHAVTFVDNHDSQPEEALESFVEEWFKPLAYALTLTREQGYPSVFYGDYYGIPTHGVPAMRSKIDPILEARQKYAYGPQHDYLDHPDVIGWTREGDSSHPKSGLATLITDGPGGSKRMYAGLKNAGETWYDITGNRSDTVKIGSDGWGEFHVNDGSVSIYVQK

SEQ ID NO: 40816 - protein, 480 aa, Bacillus sp.
NGTMMQYFEWYLPNDGNHWNRLNSDASNLKSKGITAVWIPPAWKGASQNDVGYGAYDLYDLGEFNQKGTVRTKYGTRSQLQAAVTSLKNNGIQVYGDVVMNHKGGADATEMVRAVEVNPNNRNQEVTGEYTIEAWTRFDFPGRGNTHSSFKWRWYHFDGVDWDQSRKLNNRIYKFRGHGKAWDWEVDTEFGNYDYLMYVDYDMDHPEVVNELRNWGVWYTNTLGLDGFRIDAVKHIKYSFTRDWINHVRIATGKNMFAVAEFWKNDLGAIENYLQKTNWNHSVFDVPLHYNLYNASKSGGNYDMRNIFNGTVVQRHPSHAVTFVDNHDSQPEEALESFVDEWFKPLAYALTLTREQGYPSVFYGDYYGIPTHGVPAMRSKIDPILEARQKYAYGPQHDYLDHPDVIGWTREGDSSHPKSGLATLITDGPGGSKRMYAGLKNAGETWYDITGNRSDTVKIGSDGWGEFHVNDQSVSIYVQK

SEQ ID NO: 40817 - protein, 480 aa, Bacillus sp.
NGTMMQYFEWYLPNDGNHWNRLNSDASNLKSKGITAVWIPPAWKGASQNDVGYGAYDLYDLGEFNQKVTVRTKYGTRSQLQAAVTSLKNNGIQVYGDVVMNHKGGADATEMVRAVEVNPNNRNQEVTGEYTIEAWTRFDFPGRGNTHSSFKWRWYHFDGVDWDQSRQLENRIYKFRGHGKAWDWEVDTEFGNYDYLMYADYDMDHPEVVNELRNWGVWYTNTLGLDGFRIDAVKHIKYSFTRDWINHVRSATGKNMFAVAEFWKNDLGAIENYLQKTNWNHSVFDVPLHYNLYNASKSGGNYDMRNIFNGTVVQRHPSHAVTFVDNHDSQPEEALESFVEEWFKPLAYALTLTREQGYPSVFYGDYYGIPTHGVPAMRSKIDPILEARQKYAYGPQHDYLDHPDVIGWTREGDSSHPKSGLATLITDGPGGSKRMYAGLKNAGETWYDITGNRSDTVKIGSDGWGEFHVNDGSVSIYVQK

SEQ ID NO: 40818 - protein, 480 aa, Bacillus sp.
NGTMMQYFEWYLPNDGNHWNRLNSDASNLKSKGITAVWIPPAWKGASQNDVGYGAYDLYDLGEFNQKGTIRTKYGTRSQLQAAVTSLKNNGIQVYGDVVMNHKGGADATEMVRAVEVNPNNRNQEVTGEYTIEAWTRFDFPGRGNTHSSFKWRWYHFDGVDWDQSRRLNNRIYKFRGHGKAWDWEVDTEFGNYDYLMYADYDMDHPEVVNELRNWGVWYTNTLGLDGFRIDAVKHIKYSFTRDWINHVRSATGKNMFAVAEFWKNDLGAIENYLQKTNWNHSVFDVPLHYNLYNASKSGGNYDMRNIFNGTVVQRHPSHAVTFVDNHDSQPEEALESFVEEWFKPLAYALTLTREQGYPSVFYGDYYGIPTHGVPAMRSKIDPILEARQKYAYGPQHDYLDHPDVIGWTREGDSSHPKSGLATLITDGPGGSKRMYAGLKNAGETWYDITGNRSDTVKIGSDGWGEFHVNDGSVSIYVQK

SEQ ID NO: 40819 - protein, 480 aa, Bacillus sp.
NGTMMQYFEWYLPNDGNHWNRLNSDASNLKSKGITAVWIPPAWKGASQNDVGYGAYDLYDLGEFNQKGTVRTKYGTRSQLQAAVTSLKNNGIQVYGDVVMNHKGGADATEMVRAVEVNPNNRNQEVTGEYTIEAWTRFDFPGRGNTHSSFKWRWYHFDGVDWDQSRRLNNRIYKFRGHGKAWDWEVDTEFGNYDYLMYADYDMDHPEVVNELRNWGVWYTNTLGLDGFRIDAVKHIKYSFTRDWINHVRSATGKNMFAVAEFWKNDLGAIENYLQKTNWNHSVFDVPLHYNLYNASKSGGNYDMRNIFNGTVVQRHPSHAVTFVDNHDSQPEEALESFVEEWFKPSAYALTLTREQGYPSVFYGDYYGIPTHGVPAMRSKIDPILEARQKYAYGPQHDYLDHPDVIGWTREGDSSHPKSGLATLITDGPGGSKRMYAGLKNAGETWYDITGNRSDTVKIGSDGWGEFHVNDGSVSIYVQK

SEQ ID NO: 40820 - protein, 480 aa, Bacillus sp.
NGTMMQYFEWYLPNDGNHWNRLNSDASNLKSKGITAVWIPPAWKGASQNDVGYGAYDLYDLGEFNQKGTVRTKYGTRSQLQAAVTSLKNNGIQVYGDVVMNHKGGADATEMVRAVEVNPNNRNQEVTGEYTIEAWTRFDFPGRGNTHSSFKWRWYHFDGVDWDQSRRLNNRIYKFRGHGKAWDWEVDTEFGNYDYLMYADYDMDHPEVVNELRNWGVWYTNTLGLDGFRIDAVKHIKYSFTRDWINHVRSATGKNMFAVAEFWKNDLGAIENYLQKTNWNHSVFDVPLHYNLYNASKSGGNYDMRNIFNGTVVQVHPSHAVTFVDNHDSQPEEALESFVEEWFKPLAYALTLTREQGYPSVFYGDYYGIPTHGVPAMRSKIDPILEARQKYAYGPQHDYLDHPDVIGWTREGDSSHPKSGLATLITDGPGGSKRMYAGLKNAGETWYDITGNRSDTVKIGSDGWGEFHVNDGSVSIYVQK

SEQ ID NO: 40821 - protein, 480 aa, Bacillus sp.
NGTMMQYFEWYLPNDGNHWNRLNSDASNLKSKGITAVWIPPAWKGASQNDVGYGAYDLYDLGEFNQKGTVRTKYGTRSQLQAAVTSLKNNGIQVYGDVVMNHKGGADATEMVRAVEVNPNNRNQEVTGEYTIEAWTRFDFPGRGNTHSSFKWRWYHFDGVDWDQSRRLNNRIYKFRGHGKAWDWEVDTEFGNYDYLMYADYDMDHPEVVNELRNWGVWYTNTLGLDGFRIDAVKHIKYSFTRDWINHVRSATGKNMFAVAEFWKNDLGAIENYLQKTNWNHSVFDVPLHYNLYNASKSGGNYDMRNIFNGTVVQRAPSHAVTFVDNHDSQPEEALESFVEEWFKPLAYALTLTREQGYPSVFYGDYYGIPTHGVPAMRSKIDPILEARQKYAYGPQHDYLDHPDVIGWTREGDSSHPKSGLATLITDGPGGSKRMYAGLKNAGETWYDITGNRSDTVKIGSDGWGEFHVNDGSVSIYVQK

SEQ ID NO: 40822 - protein, 480 aa, Bacillus sp.
NGTMMQYFEWYLPNDGNHWNRLNSDASNLKSKGITAVWIPPAWKGASQNDVGYGAYDLYDLGEFNQKGTVRTKYGTRSQLQAAVTSLKNNGIQVYGDVVMNHKGGADATEMVRAVEVNPNNRNQEVTGEYTIEAWTRFDFPGRGNTHSSFKWRWYHFDGVDWDQSRRLNNRIYKFRGHGKAWDWEVDTEFGNYDYLMYADYDMDHPEVVNELRNWGVWYTNTLGLDGFRIDAVKHIKYSFTRDWINHVRSATGKNMFAVAEFWKNDLGAIENYLQKTNWNHSVFDVPLHYNLYNASQSAGNYDMRNIFNGTVVQRHPSHAVTFVDNHDSQPEEALESFVETWFKPLAYALTLTREQGYPSVFYGDYYGIPTHGVPAMRSKIDPILEARQKYAYGPQHDYLDHPDVIGWTREGDSSHPKSGLATLITDGPGGSKRMYAGLKNAGETWYDITGNRSDTVKIGSDGWGEFHVNDKSVSIYVQK

SEQ ID NO: 40823 - protein, 480 aa, Bacillus sp.
NGTMMQYFEWYLPNDGNHWNRLNSDASNLKSKGITAVWIPPAWKGASQNDVGYGAYDLYDLGEFNQKGTVRTKYGTRSQLQAAVTSLKNNGIQVYGDVVMNHKGGADATEMVRAVEVNPNNRNQEVTGEYTIEAWTRFDFPGRGNTHSSFKWRWYHFDGVDWDQSRRLNNRIYAFRGHGKAWDWEVDTEFGNYDYLMYADYDMDHPEVVNELRNWGVWYTNTLGLDGFRIDAVKHIKYSFTRDWINHVRSATGKNMFAVAEFWKNDLGAIENYLQKTNWNHSVFDVPLHYNLYNASKSGGNYDMRNIFNGTVVQRHPSHAVTFVDNHDSQPEEALESFVEEWFKPLAYALTLTREQGYPSVFYGDYYGIPTHGVPAMRSKIDPILEARQKYAYGPQHDYLDHPDVIGWTREGDSSHPKSGLATLITDGPGGSKRMYAGLKNAGETWYDITGNRSDTVKIGSDGWGEFHVNDGSVSIYVQK

SEQ ID NO: 40824 - protein, 480 aa, Bacillus sp.
NGTMMQYFEWYLPNDGNHWNRLNSDASNLKSKGITAVWIPPAWKGASQNDVGYGAYDLYDLGEFNQKGTVRTKYGTRSQLQAAVTSLKNNGIQVYGDVVMNHKGGADATEMVRAVEVNPNNRNQEVTGEYTIEAWTRFDFPGRGNTHSSFKWRWYHFDGVDWDQSRRLNNRIYKFRGHGKAWDWEVDTEFGNYDYLMYADYDMDHPEVVNELRNWGVWYTNTLGLDGFRIDAVKHIKYSFTRDWINHVRSATGKNMFAVAEFWKNDLGAIENYLQKTNWNHSVFDVPLHYNLYNASKSQGNYDMRNIFNGTVVQRHPSHAVTFVDNHDSQPEEALESFVDTWFKPLAYALTLTREQGYPSVFYGDYYGIPTHGVPAMRSKIDPILEARQKYAYGPQHDYLDHPDVIGWTREGDSSHPKSGLATLITDGPGGSKRMYAGLKNAGETWYDITGNRSDTVKIGSDGWGEFHVNDQSVSIYVQK

SEQ ID NO: 40825 - protein, 480 aa, Bacillus sp.
NGTMMQYFEWYLPNDGNHWNRLNSDASNLKSKGITAVWIPPAWKSASQNDVGYGAYDLYDLGEFNQKGTVRTKYGTRSQLQAAVTSLKNNGIQVYGDVVMNHKGGADATEMVRAVEVNPNNRNQEVTGEYTIEAWTRFDFPGRGNTHSSFKWRWYHFDGVDWDQSRNLQNRIYKFRGHGKAWDWEVDTEFGNYDYLMYADYDMDHPEVVNELRNWGVWYTNTLGLDGFRIDAVKHIKYSFTRDWINHVRSATGKNMFAVAEFWKNDLGAIENYLQKTNWNHSVFDVPLHYNLYNASKSGGNYDMRNIFNGTVVQRHPSHAVTFVDNHDSQPEEALESFVDEWFKPLAYALTLTREQGYPSVFYGDYYGIPTHGVPAMRSKIDPILEARQKYAYGPQHDYLDHPDVIGWTREGDSSHPKSGLATLITDGPGGSKRMYAGLKNAGETWYDITGNRSDTVKIGSDGWGEFHVNDGSVSIYVQK

SEQ ID NO: 40826 - protein, 480 aa, Bacillus sp.
NGTMMQYFEWYLPNDGNHWNRLNSDASNLKSKGITAVWIPPAWKATSQNDVGYGAYDLYDLGEFNQKGTVRTKYGTRSQLQAAVTSLKNNGIQVYGDVVMNHKGGADATEMVRAVEVNPNNRNQEVTGEYTIEAWTRFDFPGRGNTHSSFKWRWYHFDGVDWDQSRQFQNRIYKFRGHGKAWDWEVDTEFGNYDYLMYADYDMDHPEVVNELRNWGVWYTNTLGLDGFRIDAVKHIKYSFTRDWINHVRSATGKNMFAVAEFWKNDLGAIENYLQKTNWNHSVFDVPLHYNLYNASKSGGNYDMRNIFNGTVVQRHPSHAVTFVDNHDSQPEEALESFVEEWFKPLAYALTLTREQGYPSVFYGDYYGIPTHGVPAMRSKIDPILEARQKYAYGPQHDYLDHPDVIGWTREGDSSHPKSGLATLITDGPGGSKRMYAGLKNAGETWYDITGNRSDTVKIGSDGWGEFHVNDGSVSIYVQK

SEQ ID NO: 40827 - protein, 480 aa, Bacillus sp.
NGTMMQYFEWYLPNDGNHWNRLNSDASNLKSKGITAVWIPPAWKGASQNDVGYGAYDLYDLGEFNQKGTVRTKYGTRSQLQAAVTSLKNNGIQVYGDVVMNHKGGADATEMVRAVEVNPNNRNQEVTGEYTIEAWTRFDFPGRGNTHSSFKWRWYHFDGVDWDQSRRLNNRIYKFRGHGKAWDWEVDTEFGNYDYLMYADYDMDHPEVVNELRNWGVWYTNTLGLDGFRIDAVKHIKYSFTRDWINHVRSATGKNMFAVAEFWKNDLGAIENYLQKTNWNHSVFDVPLHYNLYNASKSGGNYDMRNIFNGTVVQRHPSHAVTFVDNHDSQPEEALESFVEEWFKPLAYALTLTREQGYPSVFYGDYYGIPTHGVPAMRSKIDPILEARQKYAYGPQHDYLDHPDVIGWTREGDSSHPKSGLATLITDGPGGSKRMYAGLKNAGGTWYDITGNRSDTVKIGSDGWGEFHVNDGSVSIYVQK

SEQ ID NO: 40828 - protein, 480 aa, Bacillus sp.
NGTMMQYFEWYLPNDGNHWNRLNSDASNLKSKGITAVWIPPAWKGISQNDVGYGAYDLYDLGEFNQKGTVRTKYGTRSQLQAAVTSLKNNGIQVYGDVVMNHKGGADATEMVRAVEVNPNNRNQEVTGEYTIEAWTRFDFPGRGNTHSSFKWRWYHFDGVDWDQSRQFNNRIYKFRGHGKAWDWEVDTEFGNYDYLMYTDYDMDHPEVVNELRNWGVWYTNTLGLDGFRIDAVKHIKYSFTRDWINHVRSATGKNMFAVAEFWKNDLGAIENYLQKTNWNHSVFDVPLHYNLYNASKSGGNYDMRNIFNGTVVQRHPSHAVTFVDNHDSQPEEALESFVEEWFKPLAYALTLTREQGYPSVFYGDYYGIPTHGVPAMRSKIDPILEARQKYAYGPQHDYLDHPDVIGWTREGDSSHPKSGLATLITDGPGGSKRMYAGLKNAGETWYDITGNRSDTVKIGSDGWGEFHVNDGSVSIYVQK

SEQ ID NO: 40829 - protein, 480 aa, Bacillus sp.
NGTMMQYFEWYLPNDGNHWNRLNSDASNLKSKGITAVWIPPSWKAASQNDVGYGAYDLYDLGEFNQKGTVRTKYGTRSQLQAAVTSLKNNGIQVYGDVVMNHKGGADATEMVRAVEVNPNNRNQEVTGEYTIEAWTRFDFPGRGNTHSSFKWRWYHFDGVDWDQSRKFDNRIYKFRGHGKAWDWEVDTEFGNYDYLMYADYDMDHPEVVNELRNWGVWYTNTLGLDGFRIDAVKHIKYSFTRDWINHVRSATGKNMFAVAEFWKNDLGAIENYLQKTNWNHSVFDVPLHYNLYNASKSGGNYDMRNIFNGTVVQRHPSHAVTFVDNHDSQPEEALESFVEEWFKPLAYALTLTREQGYPSVFYGDYYGIPTHGVPAMRSKIDPILEARQKYAYGPQHDYLDHPDVIGWTREGDSSHPKSGLATLITDGPGGSKRMYAGLKNAGETWYDITGNRSDTVKIGSDGWGEFHVNDGSVSIYVQK

SEQ ID NO: 40830 - protein, 480 aa, Bacillus sp.
NGTMMQYFEWYLPNDGNHWNRLNSDASNLKSKGITAVWIPPAWKGASQNDVGYGAYDLYDLGEFNQKGTVRTKYGTRSQLQAAVTSLKNNGIQVYGDVVMNHKGGADATEMVRAVEVNPNNRNQEVTGEYTIEAWTRFDFPGRGNTHSSFKWRWYHFDGVDWDQSRRLNNRIYKFRGHGKAWDWEVDTEFGNYDYLMYADYDMDHPEVVNELRNWGVWYTNTLGLDGFRIDAVKHIKYSFTRDWINHVRSATGKNMFAVAEFWKNDLGAIENYLQKTNWNHSVFDVPLHYNLYNASQSGGNYDMRNIFNGTVVQRHPSHAVTFVDNHDSQPEEALESFVDTWFKPLAYALTLTREQGYPSVFYGDYYGIPTHGVPAMRSKIDPILEARQKYAYGPQHDYLDHPDVIGWTREGDSSHPKSGLATLITDGPGGSKRMYAGLKNAGETWYDITGNRSDTVKIGSDGWGEFHVNGASVSIYVQK

SEQ ID NO: 40831 - protein, 480 aa, Bacillus sp.
NGTMMQYFEWYLPNDGNHWNRLNSDASNLKSKGITAVWIPPAWKGASQNDVGYGAYDLYDLGEFNQKGTVRTKYGTRSQLQAAVTSLKNNGIQVYGDVVMNHKGGADATEMVRAVEVNPNNRNQEVTGEYTIEAWTRFDFPGRGNTHSSFKWRWYHFDGVDWDQSRRLNNRIYKFRGHGKAWDWEVDTEFGNYDYLMYADYDMDHPEVVNELRNWGVWYTNTLGLDGFRIDAVKHIKYSFTRDWINHVRSATGKNMFAVAEFWKNDLGAIENYLQKTNWNHSVFDVPLHYNLYNASKSGGNYDMRNIFNGTVVQRHPSHAVTFVDNHDSQPEEALESFVDTWFKPLAYALTLTREQGYPSVFYGDYYGIPTHGVPAMRSKIDPILEARQKYAYGPQHDYLDHPDVIGWTREGDSSHPKSGLATLITDGPGGSKRMYAGLKNAGETWYDITGNRSDTVKIGSDGWGEFHVNKKSVSIYVQK

SEQ ID NO: 40832 - protein, 480 aa, Bacillus sp.
NGTMMQYFEWYLPNDGNHWNRLNSDASNLKSKGITAVWIPPAWKGASQNDVGYGAYDLYDLGEFNQKGTVRTKYGTRSQLQAAVTSLKNNGIQVYGDVVMNHKGGADATEMVRAVEVNPNNRNQEVTGEYTIEAWTRFDFPGRGNTHSSFKWRWYHFDGVDWDQSRRLNNRIYKFRGHGKAWDWEVDTEFGNYDYLMYADYDMDHPEVVNELRNWGVWYTNTLGLDGFRIDAVKHIKYSFTRDWINHVRSATGKNMFAVAEFWKNDLGAIENYLQKTNWNHSVFDVPLHYNLYNASKSGGNYDMRNIFNGTVVQRHPSHAVTFVDNHDSQPEEALESFVEEWFKPLAYALTLTREQGYPSVFYGDYYGIPTHGVPAMRSKIDPILEARQKYAYGPQHDYLDHQDVIGWTREGDSSHPKSGLATLITDGPGGSKRMYAGLKNAGETWYDITGNRSDTVKIGSDGWGEFHVNDGSVSIYVQK

SEQ ID NO: 40833 - protein, 480 aa, Bacillus sp.
NGTMMQYFEWYLPNDGNHWNRLNSDASNLKSKGITAVWIPPAWKGASQNDVGYGAYDLYDLGEFNQKGTVRTKYGTRSQLQAAVTSLKNNGIQVYGDVVMNHKGGADATEMVRAVEVNPNNRNQEVTGEYTIEAWTRFDFPGRGNTHSSFKWRWYHFDGVDWDQSRRLNNRIYKFRGHGKAWDWEVDTEFGNYDYLMYADYDMDHPEVVNELRNWGVWYTNTLGLDGFRIDAVKHIKYSFTRDWINHVRSATGKNMFAVAEFWKNDLGAIENYLQKTNWNHSVFDVPLHYNLYNASKSGGNYDMRNIFNGTVVQRHPSHAVTFVDNHDSQPEEALESFVEEWFKPLAYALTLTREQGYPSVFYGDYYGIPTHGVPAMRSKIDPILEARQKYAYGPQHDYLDHPDVIGWTREGDSSHPHSGLATLITDGPGGSKRMYAGLKNAGETWYDITGNRSDTVKIGSDGWGEFHVNDGSVSIYVQK

SEQ ID NO: 40834 - protein, 480 aa, Bacillus sp.
NGTMMQYFEWYLPNDGNHWNRLNSDASNLKSKGITAVWIPPAWKGASQNDVGYGAYDLYDLGEFNQKGTVRTKYGTRSQLQAAVTSLKNNGIQVYGDVVMNHKGGADATEMVRAVEVNPNNRNQEVTGEYTIEAWTRFDFPGRGNTHSSFKWRWYHFDGVDWDQSRRTTNRIYKFRGHGKAWDWEVDTEFGNYDYLMYTDYDMDHPEVVNELRNWGVWYTNTLGLDGFRIDAVKHIKYSFTRDWINHVRSATGKNMFAVAEFWKNDLGAIENYLQKTNWNHSVFDVPLHYNLYNASKSGGNYDMRNIFNGTVVQRHPSHAVTFVDNHDSQPEEALESFVEEWFKPLAYALTLTREQGYPSVFYGDYYGIPTHGVPAMRSKIDPILEARQKYAYGPQHDYLDHPDVIGWTREGDSSHPKSGLATLITDGPGGSKRMYAGLKNAGETWYDITGNRSDTVKIGSDGWGEFHVNDGSVSIYVQK

SEQ ID NO: 40835 - protein, 480 aa, Bacillus sp.
NGTMMQYFEWYLPNDGNHWNRLNSDASNLKSKGITAVWIPPAWKGASQNDVGYGAYDLYDLGEFNQKGTVRTKYGTRSQLQAAVTSLKNNGIQVYGDVVMNHKGGADATEMVRAVEVNPNNRNQEVTGEYTIEAWTRFDFPGRGNTHSSFKWRWYHFDGVDFDQSRQLNNRIYKFRGHGKAWDWEVDTEFGNYDYLMYADYDMDHPEVVNELRNWGVWYTNTLGLDGFRIDAVKHIKYSFTRDWINHVRSATGKNMFAVAEFWKNDLGAIENYLQKTNWNHSVFDVPLHYNLYNASKSGGNYDMRNIFNGTVVQRHPSHAVTFVDNHDSQPEEALESFVETWFKPLAYALTLTREQGLPSVFYGDYYGIPTHGVPAMRSKIDPILEARQKYAYGPQHDYLDHPDVIGWTREGDSSHPKSGLATLITDGPGGSKRMYAGLKNAGETWYDITGNRSDTVKIGSDGWGEFHVNDGSVSIYVQK

SEQ ID NO: 40836 - protein, 480 aa, Bacillus sp.
NGTMMQYFEWYLPNDGNHWNRLNSDASNLKSKGITAVWIPPAWKGVSQNDVGYGAYDLYDLGEFNQKGTVRTKYGTRSQLQAAVTSLKNNGIQVYGDVVMNHKGGADATEMVRAVEVNPNNRNQEVTGEYTIEAWTRFDFPGRGNTHSSFKWRWYHFDGVDWDQSRRVNNRIYKFRGHGKAWDWEVDTEFGNYDYLMYVDYDMDHPEVVNELRNWGVWYTNTLGLDGFRIDAVKHIKYSFTRDWINHVRSATGKNMFAVAEFWKNDLGAIENYLQKTNWNHSVFDVPLHYNLYNASKSGGNYDMRNIFNGTVVQRHPSHAVTFVDNHDSQPEEALESFVEEWFKPLAYALTLTREQGYPSVFYGDYYGIPTHGVPAMRSKIDPILEARQKYAYGPQHDYLDHPDVIGWTREGDSSHPKSGLATLITDGPGGSKRMYAGLKNAGETWYDITGNRSDTVKIGSDGWGEFHVNDGSVSIYVQK

SEQ ID NO: 40837 - protein, 480 aa, Bacillus sp.
NGTMMQYFEWYLPNDGNHWNRLNSDASNLKSKGITAVWIPPAWKGASQNDVGYGAYDLYDLGEFNQKGTVRTKYGTRSQLQAAVTSLKNNGIQVYGDVVMNHKGGADATEMVRAVEVNPNNRNQEVTGEYTIEAWTRFDFPGRGNTHSSFKWRWYHFDGVDWDQSRRLNNRIYKFRGHGKWWDWEVDTEFGNYDYLMYADYDMDHPEVVNELRNWGVWYTNTLGLDGFRIDAVKHIKYSFTRDWINHVRSATGKNMFAVAEFWKNDLGAIENYLQKTNWNHSVFDVPLHYNLYNASKSGGNYDMRNIFNGTVVQRHPSHAVTFVDNHDSQPEEALESFVEEWFKPLAYALTLTREQGYPSVFYGDYYGIPTHGVPAMRSKIDPILEARQKYAYGPQHDYLDHPDVIGWTREGDSSHPKSGLATLITDGPGGSKRMYAGLKNAGETWYDITGNRSDTVKIGSDGWGEFHVNDGSVSIYVQK

SEQ ID NO: 40838 - protein, 480 aa, Bacillus sp.
NGTMMQYFEWYLPNDGNHWNRLNSDASNLKSKGITAVWIPPAWKGASQNDVGYGAYDLYDLGEFNQKGTVRTKYGTRSQLQAAVTSLKNNGISVYGDVVMNHKGGADATEMVRAVEVNPNNRNQEVTGEYTIEAWTRFDFPGRGNTHSSFKWRWYHFDGVDWDQSRRLNNRIYKFRGHGKAWDWEVDTEFGNYDYLMYADYDMDHPEVVNELRNWGVWYTNTLGLDGFRIDAVKHIKYSFTRDWINHVRSATGKNMFAVAEFWKNDLGAIENYLQKTNWNHSVFDVPLHYNLYNASKSGGNYDMRNIFNGTVVQRHPSHAVTFVDNHDSQPEEALESFVEEWFKPLAYALTLTREQGYPSVFYGDYYGIPTHGVPAMRSKIDPILEARQKYAYGPQHDYLDHPDVIGWTREGDSSHPKSGLATLITDGPGGSKRMYAGLKNAGETWYDITGNRSDTVKIGSDGWGEFHVNDGSVSIYVQK

SEQ ID NO: 40839 - protein, 480 aa, Bacillus sp.
NGTMMQYFEWYLPNDGNHWNRLNSDASNLKSKGITAVWIPPAWKGASQNDVGYGAYDLYDLGEFNQKGTVRTKYGTRSQLQAAVTSLKNNGIQVYGDVVMNHKGGADATEMVRAVEVNPNNRNQEVTGEYTIEAWTRFDFPGRGNTHSSFKWRWYHFDGVDWDQSRRLQNRIYKFRGHGKAWDWEVDTEFGNYDYLMYVDYDMDHPEVVNELRNWGVWYTNTLGLDGFRIDAVKHIKYSFTRDWINHVRSATGKNMFAVAEFWKNDLGAIENYLQKTNWNHSVFDVPLHYNLYNASKSGGNYDMRNIFNGTVVQRHPSHAVTFVDNHDSQPEEALESFVEEWFKPLAYALTLTREQGYPSVFYGDYYGIPTHGVPAMRSKIDPILEARQKYAYGPQHDYLDHPDVIGWTREGDSSHPKSGLATLITDGPGGSKRMYAGLKNAGETWYDITGNRSDTVKIGSDGWGEFHVNDGSVSIYVQK

SEQ ID NO: 40840 - protein, 480 aa, Bacillus sp.
NGTMMQYFEWYLPNDGNHWNRLNSDASNLKSKGITAVWIPPAWKGASQNDVGYGAYDLYDLGEFNQKGTVRTKYGTRSQLQAAVTSLKNNGIQVYGDVVMNHKGGADATEMVRAVEVNPNNRVQEVTGEYTIEAWTRFDFPGRGNTHSSFKWRWYHFDGVDWDQSRRLNNRIYKFRGHGKAWDWEVDTEFGNYDYLMYADYDMDHPEVVNELRNWGVWYTNTLGLDGFRIDAVKHIKYSFTRDWINHVRSATGKNMFAVAEFWKNDLGAIENYLQKTNWNHSVFDVPLHYNLYNASKSGGNYDMRNIFNGTVVQRHPSHAVTFVDNHDSQPEEALESFVEEWFKPLAYALTLTREQGYPSVFYGDYYGIPTHGVPAMRSKIDPILEARQKYAYGPQHDYLDHPDVIGWTREGDSSHPKSGLATLITDGPGGSKRMYAGLKNAGETWYDITGNRSDTVKIGSDGWGEFHVNDGSVSIYVQK

SEQ ID NO: 40841 - protein, 480 aa, Bacillus sp.
NGTMMQYFEWYLPNDGNHWNRLNSDASNLKSKGITAVWIPPAWKGASQNDVGYGAYDLYDLGEFNQKGTVRTKYGTRSQLQAAVTSLKNNGIQVYGDVVMNHKGGADATEMVRAVEVNPNNRNQEVTGEYTIEAWTRFDFPGRGNTHSSFKWRWYHFDGVDWDQSRRLNNRIYKFRGHGKAWDWEVDTEFGNYDYLMYADYDMDHPEVVNELRNWGVWYTNTLGLDGFRIDAVKHIKYSFTRDWINHVRSATGKNMFAVAEFWKNDLGAIENYLQKTNWNHSVFDVPLHYNLYNASKSGGNYDMRNIFNGTVVQRHPSHAVTFVDNHDSQPEEALESFVDPWFKPLAYALTLTREQGYPSVFYGDYYGIPTHGVPAMRSKIDPILEARQKYAYGPQHDYLDHPDVIGWTREGDSSHPKSGLATLITDGPGGSKRMYAGLKNAGETWYDITGNRSDTVKIGSDGWGEFHVNGGSVSIYVQK

SEQ ID NO: 40842 - protein, 480 aa, Bacillus sp.
NGTMMQYFEWYLPNDGNHWNRLNSDASNLKSKGITAVWIPPAWKGASQNDVGYGAYDLYDLGEFNQKGTVRTKYGTRSQLQAAVTSLKNNGIQVYGDVVMNHKGGADATEMVRAVEVNPNNRNQEVTGEYTIEAWTRFDFPGRGNTHSSFKWRWYHFDGVDWDQSRRLNNRIYKFRGHGKAWDWEVDTEFGNYDYLMYADYDMDHPEVVNELRNWGVWYTNTLGLDGFRIDAVKHIKYSFTRDWINHVRSATGKNMFAVAEFWKNDLGAIENYLQKTNWNHSVFDVPLHYNLYNASKSGGNYDMRNIFNGTVVQRHPSHAVTFVDNHDSQPEEALESFVEEWFKPLAYALTLTREQGYPSVFYGDYYGIPTHGVPAMRSKIDPILEARQKYAYGPQHDYLDHPDVIGWTREGDSSHPKSGLATLITDGPGGSKRMYAGLKNAGETWYDITGNRSDTVKIGSDGWGEFHVNQGSVSIYVQK

SEQ ID NO: 40843 - protein, 480 aa, Bacillus sp.
NGTMMQYFEWYLPNDGNHWNRLNSDASNLKSKGITAVWIPPAWKGASQNDVGYGAYDLYDLGEFNQKGTVRTKYGTRSQLQAAVTSLKNNGIQVYGDVVMNHKGGADATEMVRAVEVNPNNRNQEVTGEYTIEAWTRFDFPGRGNTHSSFKWRWYHFDGVDWDQSRRLNNRIYKFRGHGKAWDWEVDTEFGNYDYLMYADYDMDHPEVVNELRNWGVWYTNTLGLDGFRIDAVKHIKYSFTRDWINHVRSATGKNMFAVAEFWKNDLGAIENYLQKTNWNHSVFDVPLHYNLYNASKSGGNYDMRNIFNGTVVQRHPSHAVTFVDNHDSQPEEALESFVEPWFKPLAYALTLTREQGYPSVFYGDYYGIPTHGVPAMRSKIDPILEARQKYAYGPQHDYLDHPDVIGWTREGDSSHPKSGLATLITDGPGGSKRMYAGLKNAGETWYDITGNRSDTVKIGSDGWGEFHVNDSSVSIYVQK

SEQ ID NO: 40844 - protein, 480 aa, Bacillus sp.
NGTMMQYFEWYLPNDGNHWNRLNSDASNLKSKGITAVWIPPAWKGASQNDVGYGAYDLYDLGEFNQKGTVRTKYGTRSQLQAAVTSLKNNGIQVYGDVVMNHKGGADATEMVRAVEVNPNNRQQEVTGEYTIEAWTRFDFPGRGNTHSSFKWRWYHFDGVDWDQSRRLNNRIYKFRGHGKAWDWEVDTEFGNYDYLMYADYDMDHPEVVNELRNWGVWYTNTLGLDGFRIDAVKHIKYSFTRDWINHVRSATGKNMFAVAEFWKNDLGAIENYLQKTNWNHSVFDVPLHYNLYNASKSGGNYDMRNIFNGTVVQRHPSHAVTFVDNHDSQPEEALESFVEEWFKPLAYALTLTREQGYPSVFYGDYYGIPTHGVPAMRSKIDPILEARQKYAYGPQHDYLDHPDVIGWTREGDSSHPKSGLATLITDGPGGSKRMYAGLKNAGETWYDITGNRSDTVKIGSDGWGEFHVNDGSVSIYVQK

SEQ ID NO: 40845 - protein, 480 aa, Bacillus sp.
NGTMMQYFEWYLPNDGNHWNRLNSDASNLKSKGITAVWIPPAWKGASQNDVGYGAYDLYDLGEFNQKGTVRTKYGTRSQLQAAVTSLKNNGIQVYGDVVMNHKGGADATEMVRAVEVNPNNRNQEVTGEYTIEAWTRFDFPGRGNTHSSFKWRWYHFDGVDWDQSRRLNNRIYKFRGHGKAWDWEVDTEFGNYDYLMYADYDMDMPEVVNELRNWGVWYTNTLGLDGFRIDAVKHIKYSFTRDWINHVRSATGKNMFAVAEFWKNDLGAIENYLQKTNWNHSVFDVPLHYNLYNASKSGGNYDMRNIFNGTVVQRHPSHAVTFVDNHDSQPEEALESFVEEWFKPLAYALTLTREQGYPSVFYGDYYGIPTHGVPAMRSKIDPILEARQKYAYGPQHDYLDHPDVIGWTREGDSSHPKSGLATLITDGPGGSKRMYAGLKNAGETWYDITGNRSDTVKIGSDGWGEFHVNDGSVSIYVQK

SEQ ID NO: 40846 - protein, 480 aa, Bacillus sp.
NGTMMQYFEWYLPNDGNHWNRLNSDASNLKSKGITAVWIPPAWKGASQNDVGYGAYDLYDLGEFNQKGTVRTKYGTRSQLQAAVTSLKNNGIQVYGDVVMNHKGGADATEMVRAVEVNPNNRNQEVTGEYTIEAWTRFDFPGRGNTHSSFKWRWYHFDGVDWDQSRRLNNRIYKFRGHGKAWDWEVDTEFGNYDYLMYADYDMDHWEVVNELRNWGVWYTNTLGLDGFRIDAVKHIKYSFTRDWINHVRSATGKNMFAVAEFWKNDLGAIENYLQKTNWNHSVFDVPLHYNLYNASKSGGNYDMRNIFNGTVVQRHPSHAVTFVDNHDSQPEEALESFVEEWFKPLAYALTLTREQGYPSVFYGDYYGIPTHGVPAMRSKIDPILEARQKYAYGPQHDYLDHPDVIGWTREGDSSHPKSGLATLITDGPGGSKRMYAGLKNAGETWYDITGNRSDTVKIGSDGWGEFHVNDGSVSIYVQK

SEQ ID NO: 40847 - protein, 480 aa, Bacillus sp.
NGTMMQYFEWYLPNDGNHWNRLNSDASNLKSKGITAVWIPPAWKGASQNDVGYGAYDLYDLGEFNQKGTVRTKYGTRSQLQAAVTSLKNNGIQVYGDVVMNHKGGADATEMVRAVEVNPNNRNQEVTGEYTIEAWTRFDFPGRGNTHSSFKWRWYHFDGVDWDQSREFTNRIYKFRGHGKAWDWEVDTEFGNYDYLMYVDYDMDHPEVVNELRNWGVWYTNTLGLDGFRIDAVKHIKYSFTRDWINHVRSATGKNMFAVAEFWKNDLGAIENYLQKTNWNHSVFDVPLHYNLYNASKSGGNYDMRNIFNGTVVQRHPSHAVTFVDNHDSQPEEALESFVDTWFKPLAYALTLTREQGYPSVFYGDYYGIPTHGVPAMRSKIDPILEARQKYAYGPQHDYLDHPDVIGWTREGDSSHPKSGLATLITDGPGGSKRMYAGLKNAGETWYDITGNRSDTVKIGSDGWGEFHVNDASVSIYVQK

SEQ ID NO: 40848 - protein, 480 aa, Bacillus sp.
NGTMMQYFEWYLPNDGNHWNRLNSDASNLKSKGITAVWIPPAWKGASQNDVGYGAYDLYDLGEFNQKGTVRTKYGTRSQLQAAVTSLKNNGIQVYGDVVMNHKGGADATEMVRAVEVNPNNRNQEVTGEYTIEAWTRFDFPGRGNTHSSFKWRWYHFDGVDWDQSRRLNNRIYKFRGHGKAWDWEVDTEFGNYDYLMYADYDMDHPEVVNELRNWGVWYTNTLGLDGFRIDAVKHIKYSFTRDWINHVRSATGKNMFAVAEFWKNDLGAIENYLQKTNWNHSVFDVPLHYNLYNASKSSGNYDMRNIFNGTVVQRHPSHAVTFVDNHDSQPEEALESFVEEWFKPLAYALTLTREQGYPSVFYGDYYGIPTHGVPAMRSKIDPILEARQKYAYGPQHDYLDHPDVIGWTREGDSSHPKSGLATLITDGPGGSKRMYAGLKNAGETWYDITGNRSDTVKIGSDGWGEFHVNDGSVSIYVQK

SEQ ID NO: 40849 - protein, 480 aa, Bacillus sp.
NGTMMQYFEWYLPNDGNHWNRLNSDASNLKSKGITAVWIPPAWKALSQNDVGYGAYDLYDLGEFNQKGTVRTKYGTRSQLQAAVTSLKNNGIQVYGDVVMNHKGGADATEMVRAVEVNPNNRNQEVTGEYTIEAWTRFDFPGRGNTHSSFKWRWYHFDGVDWDQSRRTTNRIYKFRGHGKAWDWEVDTEFGNYDYLMYTDYDMDHPEVVNELRNWGVWYTNTLGLDGFRIDAVKHIKYSFTRDWINHVRSATGKNMFAVAEFWKNDLGAIENYLQKTNWNHSVFDVPLHYNLYNASKSGGNYDMRNIFNGTVVQRHPSHAVTFVDNHDSQPEEALESFVEEWFKPLAYALTLTREQGYPSVFYGDYYGIPTHGVPAMRSKIDPILEARQKYAYGPQHDYLDHPDVIGWTREGDSSHPKSGLATLITDGPGGSKRMYAGLKNAGETWYDITGNRSDTVKIGSDGWGEFHVNDGSVSIYVQK

SEQ ID NO: 40850 - protein, 480 aa, Bacillus sp.
NGTMMQYFEWYLPNDGNHWNRLNSDASNLKSKGITAVWIPPAWKGASQNDVGYGAYDLYDLGEFNQKGTVRTKYGTRSQLQAAVTSLKNNGIQVYGDVVMNHKGGADATEMVRAVEVNPNNRNQEVTGEYTIEAWTRFDFPGRGNTHSSFKWRWYHFDGVDWDQSRQFDNRIYKFRGHGKAWDWEVDTEFGNYDYLMYTDYDMDHPEVVNELRNWGVWYTNTLGLDGFRIDAVKHIKYSFTRDWINHVRSATGKNMFAVAEFWKNDLGAIENYLQKTNWNHSVFDVPLHYNLYNASKSGGNYDMRNIFNGTVVQRHPSHAVTFVDNHDSQPEEALESFVEEWFKPLAYALTLTREQGYPSVFYGDYYGIPTHGVPAMRSKIDPILEARQKYAYGPQHDYLDHPDVIGWTREGDSSHPKSGLATLITDGPGGSKRMYAGLKNAGETWYDITGNRSDTVKIGSDGWGEFHVNDGSVSIYVQK

SEQ ID NO: 40851 - protein, 480 aa, Synthetic construct
NGTMMQYFEWYLPNDGNHWNRLNSDASNLKSKGITAVWIPPAWKGASQNDVGYGAYDLYDLGEFNQKGTVRTKYGTRSQLQAAVTSLKNNGIQVYGDVVMNHKGGADATEMVRAVEVNPNNRNQEVTGEYTIEAWTRFDFPGRGNTHSSFKWRWYHFDGVDWDQSRRVNNRIYKFRGHGKAWDWEVDTEFGNYDYLMYTDYDMDHPEVVNELRNWGVWYTNTLGLDGFRIDAVKHIKYSFTRDWINHVRSATGKNMFAVAEFWKNDLGAIENYLQKTNWNHSVFDVPLHYNLYNASKSGGNYDMRNIFNGTVVQRHPSHAVTFVDNHDSQPEEALESFVEEWFKPLAYALTLTREQGYPSVFYGDYYGIPTHGVPAMRSKIDPILEARQKYAYGPQHDYLDHPDVIGWTREGDSSHPKSGLATLITDGPGGSKRMYAGLKNAGETWYDITGNRSDTVKIGSDGWGEFHVNDGSVSIYVQK

SEQ ID NO: 40852 - protein, 480 aa, Bacillus sp.
NGTMMQYFEWYLPNDGNHWNRLNSDASNLKSKGITAVWIPPAWKAVSQNDVGYGAYDLYDLGEFNQKGTVRTKYGTRSQLQAAVTSLKNNGIQVYGDVVMNHKGGADATEMVPAVEVNPNNRNQEVTGEYTIEAWTRFDFPGRGNTHSSFKWRWYHFDGVDWDQSRRLSNRIYKFRGHSKAWDWEVDTEFGNYDYLMYADYDMDHPEVVNELRNWGVWYTNTLGLDGFRIDAVKHIKYSFTRDWINHVRSATGKNMFAVAEFWKNDLGAIENYLQKTNWNHSVFDVPLHYNLYNASKSGGNYDMRNIFNGTVVQRHPSHAVTFVDNHDSQPEEALESFVEEWFKPLAYALTLTREQGYPSVFYGDYYGIPTHGVPAMRSKIDPILEARQKYAYGPQHDYLDHPDVIGWTREGDSSHPKSGLATLITDGPGGSKRMYAGLKNAGETWYDITGNRSDTVKIGSDGWGEFHVNDGSVSIYVQK

SEQ ID NO: 40853 - protein, 480 aa, Bacillus sp.
NGTMMQYFEWYLPNDGNHWNRLNSDASNLKSKGITAVWIPPAWKGASQNDVGYGAYDLYDLGEFNQKGTVRTKYGTRSQLQAAVTSLKNNGIQVYGDVVMNHKGGADATEMVRAVEVNPNNRNQEVTGEYTIEAWTRFDFPGRGNTHSSFKWRWYHFDGVDWDQSRRLNNRIYKFRGHGKAWDWEVDTEFGNYDYLMYADYDMDHPEVVNELRNWGVWYTNTLGLDGFRIDAVKHIKYSFTRDWINHVRSATGKNMFAVAEFWKNDLGAIENYLQKTNWNHSVFDVPLHYNLYNASKSGSNYDMRNIFNGTVVQRHPSHAVTFVDNHDSQPEEALESFVEEWFKPLAYALTLTREQGYPSVFYGDYYGIPTHGVPAMRSKIDPILEARQKYAYGPQHDYLDHPDVIGWTREGDSSHPKSGLATLITDGPGGSKRMYAGLKNAGETWYDITGNRSDTVKIGSDGWGEFHVNDGSVSIYVQK

SEQ ID NO: 40854 - protein, 480 aa, Bacillus sp.
NGTMMQYFEWYLPNDGNHWNRLNSDASNLKSKGITAVWIPPAWKGASQNDVGYGAYDLYDLGEFNQKGTVRTKYGTRSQLQAAVTSLKNNGIQVYGDVVMNHKGGADATEMVRAVEVNPNNRNQEVTGEYTIEAWTRFDFPGRGNTHSSFKWRWYHFDGVDWDQSRDFDNRIYKFRGHGKAWDWEVDTEFGNYDYLMYADYDMDHPEVVNELRNWGVWYTNTLGLDGFRIDAVKHIKYSFTRDWINHVRSATGKNMFAVAEFWKNDLGAIENYLQKTNWNHSVFDVPLHYNLYNASKSGGNYDMRNIFNGTVVQRHPSHAVTFVDNHDSQPEEALESFVDPWFKPLAYALTLTREQGYPSVFYGDYYGIPTHGVPAMRSKIDPILEARQKYAYGPQHDYLDHPDVIGWTREGDSSHPKSGLATLITDGPGGSKRMYAGLKNAGETWYDITGNRSDTVKIGSDGLGEFHVNDGSVSIYVQK

SEQ ID NO: 40855 - protein, 480 aa, Bacillus sp.
NGTMMQYFEWYLPNDGNHWNRLNSDASNLKSKGITAVWIPPAWKGASQNDVGYGAYDLYDLGEFNQKGTVRTKYGTRSQLQAAVTSLKNNGIQVYGDVVMNHKGGADATEMVRAVEVNPNNRNQEVTGEYTIEAWTRFDFPGRGNTHSSFKWRWYHFDGVDWDQSRRLNNRIYKFRGHGKAWDWEVDTEFGNYDYLMYADYDMDHPEVVNELRNWGVWYTNTLGLDGFRIDAVKHIKYSFTRDWINHVRSATGKNMFAVAEFWKNDLGAIENYLQKTNWNHSVFDVPLHYNLYNASKSAGNYDMRNIFNGTVVQRHPSHAVTFVDNHDSQPEEALESFVETWFKPLAYALTLTREQGYPSVFYGDYYGIPTHGVPAMRSKIDPILEARQKYAYGPQHDYLDHPDVIGWTREGDSSHPKSGLATLITDGPGGSKRMYAGLKNAGETWYDITGNRSDTVKIGSDGWGEFHVNGGSVSIYVQK

SEQ ID NO: 40856 - protein, 480 aa, Bacillus sp.
NGTMMQYFEWYLPNDGNHWNRLNSDASNLKSKGITAVWIPPAWKAVSQNDVGYGAYDLYDLGEFNQKGTVRTKYGTRSQLQAAVTSLKNNGIQVYGDVVMNHKGGADATEMVRAVEVNPNNRNQEVTGEYTIEAWTRFDFPGRGNTHSSFKWRWYHFDGVDWDQSRDFNNRIYKFRGHGKAWDWEVDTEFGNYDYLMYADYDMDHPEVVNELRNWGVWYTNTLGLDGFRIDAVKHIKYSFTRDWINHVRSATGKNMFAVAEFWKNDLGAIENYLQKTNWNHSVFDVPLHYNLYNASKSGGNYDMRNIFNGTVVQRHPSHAVTFVDNHDSQPEEALESFVEEWFKPLAYALTLTREQGYPSVFYGDYYGIPTHGVPAMRSKIDPILEARQKYAYGPQHDYLDHPDVIGWTREGDSSHPKSGLATLITDGPGGSKRMYAGLKNAGETWYDITGNRSDTVKIGSDGWGEFHVNDGSVSIYVQK

SEQ ID NO: 40857 - protein, 480 aa, Bacillus sp.
NGTMMQYFEWYLPNDGNHWNRLNSDASNLKSKGITAVWIPPAWKGASQNDVGYGAYDLYDLGEFNQKGTVRTKYGTRSQLQAAVTSLKNNGIQVYGDVVMNHKGGADATEMVRAVEVNPNNRNQEVTGEYTIEAWTRFDFPGRGNTHSSFKWRWYHFDGVDWDQSRKLNNRIYKFRGHGKAWDWEVDTEFGNYDYLMYVDYDMDHPEVVNELRNWGVWYTNTLGLDGFRIDAVKHIKYSFTRDWINHVRSATGKNMFAVAEFWKNDLGAIENYLQKTNWNHSVFDVPLHYNLYNASKSGGNYDMRNIFNGTVVQRHPSHAVTFVDNHDSQPEEALESFVETWFKPLAYALTLTREQGYPSVFYGDYYGIPTHGVPAMRSKIDPILEARQKYAYGPQHDYLDHPDVIGWTREGDSSHPKSGLATLITDGPGGSKRMYAGLKNAGETWYDITGNRSDTVKIGSDGWGEFHVNKASVSIYVQK

SEQ ID NO: 40858 - protein, 480 aa, Synthetic construct
NGTMMQYFEWYLPNDGNHWNRLNSDASNLKSKGITAVWIPPAWKGASQNDVGYGAYDIYDLGEFNQKGTVRTKYGTRSQLQAAVTSLKNNGIQVYGDVVMNHKGGADATEMVRAVEVNPNNRNQEVTGEYTIEAWTRFDFPGRGNTHSSFKWRWYHFDGVDWDQSRRLNNRIYKFRGHGKAWDWEVDTENGNYDYLMYADYDMDHPEVVNELRNWGVWYTNTLGLDGFRIDAVKHVKYSFTRDWINHVRSATGKNMFAVAEFWKNDLGAIENYLQKTNWNHSVFDVPLHYNLYNASKSGGNYDMRNIFNGTVVQRHPSHAVTFVDNHDSQPEEALESFVEEWFKPLAYALTLTREQGYPSVFYGDYYGIPTHGVPAMRSKIDPILEARQKYAYGPQHDYLDHPDVIGWTREGDSSHPKSGLATLITDGPGGSKRMYAGLKNAGETWYDITGNRSDTVKIGSDGWGEFHVNDGSVSIYVQK

SEQ ID NO: 40859 - protein, 480 aa, Bacillus sp.
NGTMMQYFEWYLPNDGNHWNRLNSDASNLKSKGITAVWIPPAWKGASQNDVGYGAYDLYDLGEFNQKGTVRTKYGTRSQLQAAVTSLKNNGIQVYGDVVMNHKGGADATEMVRAVEVNPNNRNQEVTGEYTIEAWTRFDFPGRGNTHSSFKWRWYHFDGVDWDQSRRLNNRIYKFRGHGKAWDWEVDTEFGNYDYLMYADYDMDHPEVVNELRNWGVWYTNTLGLDGFRIDAVKHIKYSFTRDWINHVRSATGKNMFAVAEFWKNDLGAIENYLQKTNWNHSVFDVPLHYNLYNASKSGGNYDMRNIFNGTVVQRHPSHAVTFVDNHDSQPEEALESFVEPWFKPLAYALTLTREQGYPSVFYGDYYGIPTHGVPAMRSKIDPILEARQKYAYGPQHDYLDHPDVIGWTREGDSSHPKSGLATLITDGPGGSKRMYAGLKNAGETWYDITGNRSDTVKIGSDGWGEFHVNDQSVSIYVQK

SEQ ID NO: 40860 - protein, 480 aa, Bacillus sp.
NGTMMQYFEWYLPNDGNHWNRLNSDASNLKSKGITAVWIPPAWKGASQNDVGYGAYDLYDLGEFNQKGTVRTKYGTRSQLQAAVTSLKNNGIQVYGDVVMNHKGGADATEMVRAVEVNPNNRNQEVTGEYTIEAWTRFDFPGRGNTHSSFKWRWYHFDGVDWDQSRRLNNRIYKFRGHGKAWDWEVDTEFGNYDYLMYADYDMDHPEVVNELRNWGVWYTNTLGLDGFRIDAVKHIKYSFTRDWINHVRSATGKNMFAVAEFWKNDLGAIENYLQKTNWNHSVFDVPLHYNLYNASKSGGNYDMRNIFNGTVVQRHPSHAVTFVDNHDSQPEEALESFVEEWFKPLAYALTLTREQGYPSVFYGDYYGIPTHGVPAMRSKIDPILEARQKYAYGPQHDYLDHPDVIGWTREGDSSHPKSGLATLITDGPGGSKRMYAGLKNAGETWYDITGNRSDTVKIGSDGWGEFHVNDGAVSIYVQK

SEQ ID NO: 40861 - protein, 480 aa, Bacillus sp.
NGTMMQYFEWYLPNDGNHWNRLNSDASNLKSKGITAVWIPPAWKGASQNDVGYGAYDLYDLGEFNQKGTVRTKYGTRSQLQAAVTSLKNNGIQVYGDVVMNHKGGADATEMVRAVEVNPNNRNQEVTGEYTIEAWTRFDFPGRGNTHSSFKWRWYHFDGVDWDQSRRLNNRIYKFRGHGKAWDWEVDTEFGNYDYLMYADYDMDHPEVVNELRNWGVWYTNTLGLDGFRIDAVKHIKYSFTRDWINHVRSATGKNMFAVAEFWKNDLGAIENYLQKTNWNHSVFDVPLHYNLYNASKSGGNYDMRNIFNGTVVQRHPSHAVTFVDNHDSQPEEALESFVEEWFKPLAYALTLTREQGYPSVFYGDYYGIPTHGVPAMRSKIDPILEARQKYAYGPQHDYLDHPDVIGWTREGDSSHPKSGLATLIPDGPGGSKRMYAGLKNAGETWYDITGNRSDTVKIGSDGWGEFHVNDGSVSIYVQK

SEQ ID NO: 40862 - protein, 480 aa, Bacillus sp.
NGTMMQYFEWYLPNDGNHWNRLNSDASNLKSKGITAVWIPPAWKGASQNDVGYGAYDLYDLGEFNQKGTVRTKYGTRSQLQAAVTSLKNNGIQVYGDVVMNHKGGADATEMVRAVEVNPNNRNQEVTGEYTIEAWTRFDFPGRGNTHSSFKWRWYHFDGVDWDQSRRLNNRIYKFRGHGKAWDWEVDTEFGNYDYLMYADYDMDHPEVVNELRNWGVWYTNTLGLDGFRIDAVKHIKYSFTRDWINHVRSATGKNMFAVAEFWKNDLGAIENYLQKTNWNHSVFDVPLHYNLYNASKSGGNYDMRNIFNGTVVQRHPSHAVTFVDNHDSQPEEALESFVEEWFKPLAYALTLTREQGYPSVFYGDYYGIPTHGVPAMRSKIDPILEARQKYAYGPQHDYLDHPDVIGWTREGDSSHPKSGLATLITDGPGGSKRMYAGLKNAGETWYDITGNRSDTVKIGFDGWGEFHVNDGSVSIYVQK

SEQ ID NO: 40863 - protein, 480 aa, Bacillus sp.
NGTMMQYFEWYLPNDGNHWNRLNSDASNLKSKGITAVWIPPAWKGASQNDVGYGAYDLYDLGEFNQKGTVRTKYGTRSQLQAAVTSLKNNGIQVYGDVVMNHKGGADATEMVRAVEVNPNNRNQEVTGEYTIEAWTRFDFPGRGNTHSSFKWRWYHFDGVDWDQSRRLNNRIYKFRGHGKAWDWEVDTEFGNYDYLMYADYDMDHPEVVNELRNWGVWYTNTLGLDGFRIDAVKHIKYSFTRDWINHVRSATGKNMFAVAEFWKNDLGAIENYLQKTNWNHSVFDVPLHYNLYNASKSGGNYDMRNIFNGTVVQRHPSHAVTFVDNHDSQPEEALESFVEEWFKPLAYALTLTREQGYPSVFYGDYYGIPTHGVQAMRSKIDPILEARQKYAYGPQHDYLDHPDVIGWTREGDSSHPKSGLATLITDGPGGSKRMYAGLKNAGETWYDITGNRSDTVKIGSDGWGEFHVNDGSVSIYVQK

SEQ ID NO: 40864 - protein, 480 aa, Bacillus sp.
NGTMMQYFEWYLPNDGNHWNRLNSDASNLKSKGITAVWIPPAWKGASQNDVGYGAYDLYDLGEFNQKGTVRTKYGTRSQLQAAVTSLKNNGIQVYGDVVMNHKGGADATEMVRAVEVNPNNRNQEVTGEYTIEAWTRFDFPGRGNTHSSFKWRWYHFDGVDWDQSRRLNNRIYKFRGHGKAWDWEVDTEFGNYDYLMYADYDMDHPEVVNELRNWGVWYTNTLGLDGFRIDAVKHIKYSFTRDWINHVRSATGKNMFAVAEFWKNDLGAIENYLQKTNWNHSVFDVPLHYNLYNASKSGGNYDMRNIFNGTVVQRHPSHAVTFVDNHDSQPEEALESFVETWFKPLAYALTLTREQGYPSVFYGDYYGIPTHGVPAMRSKIDPILEARQKYAYGPQHDYLDHPDVIGWTREGDSSHPKSGLATLITDGPGGSKRMYAGLKNAGETWYDITGNRSDTVKIGSDGWGEFHVNKSSVSIYVQK

SEQ ID NO: 40865 - protein, 480 aa, Bacillus sp.
NGTMMQYFEWYLPNDGNHWNRLNSDASNLKSKGITAVWIPPAWKGASQNDVGYGAYDLYDLGEFNQKGTVRTKYGTRSQLQAAVTSLKNNGIQVYGDVVMNHKGGADATEMVRAVEVNPNNRNQEVTGEYTIEAWTRFDFPGRGNTHSSFKWRWYHFDGVDWDQSRRLNNRIYKFRGHGKAWDWEVDTEFGNYDYLMYADYDMDHPEVVNELRNWGVWYTNTLGLDGFRIDAVKHIKYSFTRDWINHVRSATGKNMFAVAEFWKNDLGAIENYLQKTNWNHSVFDVPLHYNLYNASKSGGNYDMRNIFNGTVVQRHPSHAVTFVDNHDSQPEEALESFVDTWFKPLAYALTLTREQGYPSVFYGDYYGIPTHGVPAMRSKIDPILEARQKYAYGPQHDYLDHPDVIGWTREGDSSHPKSGLATLITDGPGGSKRMYAGLKNAGETWYDITGNRSDTVKIGSDGWGEFHVNGSSVSIYVQK

SEQ ID NO: 40866 - protein, 480 aa, Bacillus sp.
NGTMMQYFEWYLPNDGNHWNRLNSDASNLKSKGITAVWIPPAWKGASQNDVGYGAYDLYDLGEFNQKGTVRTKYGTRSQLQAAVTSLKNNGIQVYGDVVMNHKGGADATEMVRAVEVNPNNRNQEVTGEYTIEAWTRFDFPGRGNTHSSFKWRWYHFDGVDWDQSRRLNNRIYKFRGHGKAWDWEVDTEFGNYDYLMYADYDMDHPEVVNELRNWGVWYTNTLGLDGFRIDAVKHIKYSFTRDWINHVRSATGKNMFAVAEFWKNDLGAIENYLQKTNWNHSVFDVPLHYNLYNASQSGGNYDMRNIFNGTVVQRHPSHAVTFVDNHDSQPEEALESFVEPWFKPLAYALTLTREQGYPSVFYGDYYGIPTHGVPAMRSKIDPILEARQKYAYGPQHDYLDHPDVIGWTREGDSSHPKSGLATLITDGPGGSKRMYAGLKNAGETWYDITGNRSDTVKIGSDGWGEFHVNDQSVSIYVQK

SEQ ID NO: 40867 - protein, 480 aa, Bacillus sp.
NGTMMQYFEWYLPNDGNHWNRLNSDASNLKSKGITAVWIPPAWKGASQNDVGYGAYDLYDLGEFNQKGTVRTKYGTRSQLQAAVTSLKNNGIQVYGDVVMNHKGGADATEMVRAVEVNPNNRNQEVTGEYTIEAWTRFDFPGRGNTHSSFKWRWYHFDGVDWDQSRRLNNRIYKFRGHGKAWDWEVDTEFGNYDYLMYADYDMDHPEVVNELRNWGVWYTNTLGLDGFRIDAVKHIKYSFTRDWINHVRSATGKNMFAVAEFWKNDLGAIENYLQKTNWNHSVFDVPLHYNLYNASKSRGNYDMRNIFNGTVVQRHPSHAVTFVDNHDSQPEEALESFVEEWFKPLAYALTLTREQGYPSVFYGDYYGIPTHGVPAMRSKIDPILEARQKYAYGPQHDYLDHPDVIGWTREGDSSHPKSGLATLITDGPGGSKRMYAGLKNAGETWYDITGNRSDTVKIGSDGWGEFHVNDGSVSIYVQK

SEQ ID NO: 40868 - protein, 480 aa, Bacillus sp.
NGTMMQYFEWYLPNDGNHWNRLNSDASNLKSKGITAVWIPPAWKGASQNDVGYGAYDLYDLGEFNQKGTVRTKYGTRSQLQAAVTSLKNNGIQVYGDVVMNHKGGADATEMVRAVEVNPNNRNQEVTGEYTIEAWTRFDFPGRGNTHSSFKWRWYHFDGVDWDQSRRLNNRIYKFRGHGKAWDWEVDTEFGAYDYLMYADYDMDHPEVVNELRNWGVWYTNTLGLDGFRIDAVKHIKYSFTRDWINHVRSATGKNMFAVAEFWKNDLGAIENYLQKTNWNHSVFDVPLHYNLYNASKSGGNYDMRNIFNGTVVQRHPSHAVTFVDNHDSQPEEALESFVEEWFKPLAYALTLTREQGYPSVFYGDYYGIPTHGVPAMRSKIDPILEARQKYAYGPQHDYLDHPDVIGWTREGDSSHPKSGLATLITDGPGGSKRMYAGLKNAGETWYDITGNRSDTVKIGSDGWGEFHVNDGSVSIYVQK

SEQ ID NO: 40869 - protein, 480 aa, Bacillus sp.
NGTMMQYFEWYLPNDGNHWNRLNSDASNLKSKGITAVWIPPAWKGASQNDVGYGAYDLYDLGEFNQKGTVRTKYGTRSQLQAAVTSLKNNGIQVYGDVVMNHKGGADATEMVRAVEVNPNNRNQEVTGEYTIEAWTRFDFPGRGNTHSSFKWRWYHFDGVDWDQSRNVNNRIYKFRGHGKAWDWEVDTEFGNYDYLMYADYDMDHPEVVNELRNWGVWYTNTLGLDGFRIDAVKHIKYSFTRDWINHVRSATGKNMFAVAEFWKNDLGAIENYLQKTNWNHSVFDVPLHYNLYNASKSGGNYDMRNIFNGTVVQRHPSHAVTFVDNHDSQPEEALESFVETWFKPLAYALTLTREQGYPSVFYGDYYGIPTHGVPAMRSKIDPILEARQKYAYGPQHDYLDHPDVIGWTREGDSSHPKSGLATLITDGPGGSKRMYAGLKNAGETWYDITGNRSDTVKIGSDGWGEFHVNKASVSIYVQK

SEQ ID NO: 40870 - protein, 480 aa, Bacillus sp.
NGTMMQYFEWYLPNDGNHWNRLNSDASNLKSKGITAVWIPPAWKGASQNDVGYGAYDLYDLGEFNQKGTVRTKYGTRSQLQAAVTSLKNNGIQVYGDVVMNHKGGADATEMVRAVEVNPNNRNQEVTGEYTIEAWTRFDFPGRGNTHSSFKWRWYHFDGVDWDQSRRLNNRIYKFRGHGKAWDWEVDTEFGNYDYLMYADYDMDHPEVVNELRNWGVWYTNTLGLDGFRIDAVKHIKYSFTRDWINHVRSATGKNMFAVAEFWKNDLGAIENYLQKTNWNHSVFDVPLHYNLYNASKSGGNYDMRNIFNGTVVQRHPSHAVTFVDNHDSQPEEALESFVEEWFKPHAYALTLTREQGYPSVFYGDYYGIPTHGVPAMRSKIDPILEARQKYAYGPQHDYLDHPDVIGWTREGDSSHPKSGLATLITDGPGGSKRMYAGLKNAGETWYDITGNRSDTVKIGSDGWGEFHVNDGSVSIYVQK

SEQ ID NO: 40871 - protein, 480 aa, Bacillus sp.
NGTMMQYFEWYLPNDGNHWNRLNSDASNLKSKGITAVWIPPAWKGASQNDVGYGAYDLYDLGEFNQKGTVRTKYGTRSQLQAAVTSLKNNGIQVYGDVVMNHKGGADATEMVRAVEVNPNNRNQEVTGEYTIEAWSRFDFPGRGNTHSSFKWRWYHFDGVDWDQSRRLNNRIYKFRGHGKAWDWEVDTEFGNYDYLMYADYDMDHPEVVNELRNWGVWYTNTLGLDGFRIDAVKHIKYSFTRDWINHVRSATGKNMFAVAEFWKNDLGAIENYLQKTNWNHSVFDVPLHYNLYNASKSGGNYDMRNIFNGTVVQRHPSHAVTFVDNHDSQPEEALESFVEEWFKPLAYALTLTREQGYPSVFYGDYYGIPTHGVPAMRSKIDPILEARQKYAYGPQHDYLDHPDVIGWTREGDSSHPKSGLATLITDGPGGSKRMYAGLKNAGETWYDITGNRSDTVKIGSDGWGEFHVNDGSVSIYVQK

SEQ ID NO: 40872 - protein, 478 aa, Bacillus sp.
NGTIMQYFEWNVPNDGQHWNRLHNNAQNLKNAGITAIWIPPAWKGTSQNDVGYGAYDLYDLGEFNQKGTVRTKYGTKAELERAIRSLKANGIQVYGDVVMNHKGGADFTERVQAVEVNPQNRNQEVSGTYEIEAWTGFNFPGRGNQHSSFKWRWYHFDGTDWDQSRQLSNRIYKFGDKAWDWEVDTENGNYDYLMYADVDMNHPEVINELNRWGVWYANTLNLDGFRLDAVKHIQFSFMRNWLGHVRGQTGKNLFAVAEYWKNDLGALENYLSKTNWTMSAFDVPLHYNLYQASNSGGNYDMRNLLNGTLVQRHPSHAVTFVDNHDTQPGEALESFVQGWFKPLAYATILTREQGYPQVFYGDYYGIPSDGVPSYRQQIDPLLKARQKYAYGPQHDYLDHPDVIGWTREGDSSHPKSGLATLITDGPGGSKRMYAGLKNAGETWYDITGNRSDTVKIGSDGWGEFHVNDGSVSIYVQK

SEQ ID NO: 40873 - protein, 480 aa, Bacillus sp.
NGTMMQYFEWYLPNDGNHWNRLNSDASNLKSKGITAVWIPPAWKAASQNDVGYGAYDLYDLGEFNQKGTVRTKYGTRSQLQAAVTSLKNNGIQVYGDVVMNHKGGADATEMVRAVEVNPNNRNQEVTGEYTIEAWTRFDFPGRGNTHSSFKWRWYHFDGVDWDQSRNTDNRIYKFRGHGKAWDWEVDTEFGNYDYLMYADYDMDHPEVVNELRNWGVWYTNTLGLDGFRIDAVKHIKYSFTRDWINHVRSATGKNMFAVAEFWKNDLGAIENYLQKTNWNHSVFDVPLHYNLYNASKSGGNYDMRNIFNGTVVQRHPSHAVTFVDNHDSQPEEALESFVEEWFKPLAYALTLTREQGYPSVFYGDYYGIPTHGVPAMRSKIDPILEARQKYAYGPQHDYLDHPDVIGWTREGDSSHPKSGLATLITDGPGGSKRMYAGLKNAGETWYDITGNRSDTVKIGSDGWGEFHVNDGSVSIYVQK

SEQ ID NO: 40874 - protein, 480 aa, Bacillus sp.
NGTMMQYFEWYLPNDGNHWNRLNSDASNLKSKGITAVWIPPAWKGASQNDVGYGAYDLYDLGEFNQKGTVRTKYGTRSQLQAAVTSLKNNGIQVYGDVVMNHKGGADATEMVRAVEVNPNNRNQEVTGEYTIEAWTRFDFPGRGNTHSSFKWRWYHFDGVDWDQSRRLNNRIYKFRGHGKAWDWEVDTEFGNYDYLMYADYDMDHPEVVNELRNWGVWYTNTLGLDGFRIDAVKHIKYSFTRDWINHVRSATGKNMFAVAEFWKNDLGAIENYLQKTNWNHSVFDVPLHYNLYNASKSGGNYDMRNIFNGTVVQRHPSHAVTFVDNHDSQPEEALESFVEEWFKPLAYALTLTREQGYPSVFYGDYYGIPTHGVPAMRSKIDPILEARQKYAYGPQHDYLAHPDVIGWTREGDSSHPKSGLATLITDGPGGSKRMYAGLKNAGETWYDITGNRSDTVKIGSDGWGEFHVNDGSVSIYVQK

SEQ ID NO: 40875 - protein, 480 aa, Bacillus sp.
NGTMMQYFEWYLPNDGNHWNRLNSDASNLKSKGITAVWIPPAWKGASQNDVGYGAYDLYDLGEFNQKGTVRTKYGTRSQLQAAVTSLKNNGIQVYGDVVMNHKGGADATEMVRAVEVNPNNRNQEVTGEYTIEAWTRFDFPGRGNTHSSFKWRWYHFDGVDWDQSRRLNNRIYKFRGHGKAWDWEVDTEFGNYDYLMYADYDMDHEEVVNELRNWGVWYTNTLGLDGFRIDAVKHIKYSFTRDWINHVRSATGKNMFAVAEFWKNDLGAIENYLQKTNWNHSVFDVPLHYNLYNASKSGGNYDMRNIFNGTVVQRHPSHAVTFVDNHDSQPEEALESFVEEWFKPLAYALTLTREQGYPSVFYGDYYGIPTHGVPAMRSKIDPILEARQKYAYGPQHDYLDHPDVIGWTREGDSSHPKSGLATLITDGPGGSKRMYAGLKNAGETWYDITGNRSDTVKIGSDGWGEFHVNDGSVSIYVQK

SEQ ID NO: 40876 - protein, 480 aa, Bacillus sp.
NGTMMQYFEWYLPNDGNHWNRLNSDASNLKSKGITAVWIPPAWKGASQNDVGYGAYDLYDLGEFNQKGTVRTKYGTRSQLQAAVTSLKNNGIQVYGDVVMNHKGGADATEMVRAVEVNPNNRNQEVTGEYTIEAWTRFDFPGRGNTHSSFKWRWYHFDGVDWDQSRRLNNRIYKFRGHGKAWDWEVDTEFGNYDYLMYADYDMDHPEVVNELRNWGVWYTNTLGLDGFRIDAVKHIKYSFTRDWINHVRSATGKNMFAVAEFWKNDLGAIENYLQKTNWNHSVFDVPLHYNLYNASKSGNNYDMRNIFNGTVVQRHPSHAVTFVDNHDSQPEEALESFVEEWFKPLAYALTLTREQGYPSVFYGDYYGIPTHGVPAMRSKIDPILEARQKYAYGPQHDYLDHPDVIGWTREGDSSHPKSGLATLITDGPGGSKRMYAGLKNAGETWYDITGNRSDTVKIGSDGWGEFHVNDGSVSIYVQK

SEQ ID NO: 40877 - protein, 480 aa, Bacillus sp.
NGTMMQYFEWYLPNDGNHWNRLNSDASNLKSKGITAVWIPPAWKGASQNDVGYGAYDLYDLGEFNQKGTVRTKYGTRSQLQAAVTSLKNNGIQVYGDVVMNHKGGADATEMVRAVEVNPNNRNQEVTGEYTIEAWTRFDFPGRGNTHSSFKWRWYHFDGVDWDQSRRLNNRIYKFRGHGKAWDWEVDTEFGNYDYLMYADYDMDHPEVVNELRNWGVWYTNTLGLDGFRIDAVKHIKYSFTRDWINHVRSATGKNMFAVAEFWKNDLGAIENYLQKTNWNHSVFDVPLHYNLYNASKSGGNYDMRNIFNETVVQRHPSHAVTFVDNHDSQPEEALESFVEEWFKPLAYALTLTREQGYPSVFYGDYYGIPTHGVPAMRSKIDPILEARQKYAYGPQHDYLDHPDVIGWTREGDSSHPKSGLATLITDGPGGSKRMYAGLKNAGETWYDITGNRSDTVKIGSDGWGEFHVNDGSVSIYVQK

SEQ ID NO: 40878 - protein, 480 aa, Bacillus sp.
NGTMMQYFEWYLPNDGNHWNRLNSDASNLKSKGITAVWIPPAWKAASQNDVGYGAYDLYDLGEFNQKGTVRTKYGTRSQLQAAVTSLKNNGIQVYGDVVMNHKGGADATEMVRAVEVNPNNRNQEVTGEYTIEAWTRFDFPGRGNTHSSFKWRWYHFDGVDWDQSRNLTNRIYKFRGHGKAWDWEVDTEFGNYDYLMYADYDMDHPEVVNELRNWGVWYTNTLGLDGFRIDAVKHIKYSFTRDWINHVRSATGKNMFAVAEFWKNDLGAIENYLQKTNWNHSVFDVPLHYNLYNASKSGGNYDMRNIFNGTVVQRHPSHAVTFVDNHDSQPEEALESFVETWFKPLAYALTLTREQGYPSVFYGDYYGIPTHGVPAMRSKIDPILEARQKYAYGPQHDYLDHPDVIGWTREGDSSHPKSGLATLITDGPGGSKRMYAGLKNAGETWYDITGNRSDTVKIGSDGWGEFHVNKGSVSIYVQK

SEQ ID NO: 40879 - protein, 480 aa, Synthetic construct
NGTMMQYFEWYLPNDGNHWNRLNSDASNLKSKGITAVWIPPAWKGASQNDVGYGAYDLYDLGEFNQKGTVRTKYGTRSQLQAAVTSLKNNGIQVYGDVVMNHKGGADATEMVRAVEVNPNNRNQEVTGEYTIEAWTRFDFPGRGNTHSSFKWRWYHFDGVDWDQSRRLNNRIYKFRGHGKAWDWEVDTEFGNYDYLMYADYDYDHPETTNEQRNWGVWYTNTLGLDGFRIDAVKHIKYSFTRDWINHVRSATGKNMFAVAEFWKNDLGAIENYLQKTNWNHSVFDVPLHYNLYNASKSGGNYDMRNIFNGTVVQRHPSHAVTFVDNHDSQPEEALESFVEEWFKPLAYALTLTREQGYPSVFYGDYYGIPTHGVPAMRSKIDPILEARQKYAYGPQHDYLDHPDVIGWTREGDSSHPKSGLATLITDGPGGSKRMYAGLKNAGETWYDITGNRSDTVKIGSDGWGEFHVNDGSVSIYVQK

SEQ ID NO: 40880 - protein, 480 aa, Bacillus sp.
NGTMMQYFEWYLPNDGNHWNRLNSDASNLKSKGITAVWIPPAWKGASQNDVGYGAYDLYDLGEFNQKGTVRTKYGTRSQLQAAVTSLKNNGIQVYGDVVMNHKGGADATEMVRAVEVNPNNRNQEVTGEYTIEAWTRFDFPGRGNTHSSFKWRWYHFDGVDWDQSRRLNNRIYKFRGHGKAWDWEVDTEFGNYDYLMYADYDMDHPEVVNELRNWGVWYTNTLGLDGFRIDAVKHIKYSFTRDWINHVRSATGKNMFAVAEFWKNDLGAIENYLQKTNWNHSVFDVPLHYNLYNASKSGGNYDMRNIFNGTVVQRHPSHAVTFVDNHDSQPEEALESFVEEWFKPLAYALTLTREQGYPSVFYGDYYGIPTHGVPAMRSKIDPILEARQKYAYGPQHDYLDHPDVIGWTREGDSSHPKSGLVTLITDGPGGSKRMYAGLKNAGETWYDITGNRSDTVKIGSDGWGEFHVNDGSVSIYVQK

SEQ ID NO: 40881 - protein, 480 aa, Bacillus sp.
NGTMMQYFEWYLPNDGNHWNRLNSDASNLKSKGITAVWIPPAWKGASQNDVGYGAYDLYDLGEFNQKGTVRTKYGTRSQLQAAVTSLKNNGIQVYGDVVMNHKGGADATEMVRAVEVNPNNRNQEVTGEYTIEAWTRFDFPGRGNTHSSFKWRWYHFDGVDWDQSRRLNNRIYKFRGHGKTWDWEVDTEFGNYDYLMYADYDMDHPEVVNELRNWGVWYTNTLGLDGFRIDAVKHIKYSFTRDWINHVRSATGKNMFAVAEFWKNDLGAIENYLQKTNWNHSVFDVPLHYNLYNASKSGGNYDMRNIFNGTVVQRHPSHAVTFVDNHDSQPEEALESFVEEWFKPLAYALTLTREQGYPSVFYGDYYGIPTHGVPAMRSKIDPILEARQKYAYGPQHDYLDHPDVIGWTREGDSSHPKSGLATLITDGPGGSKRMYAGLKNAGETWYDITGNRSDTVKIGSDGWGEFHVNDGSVSIYVQK

SEQ ID NO: 40882 - protein, 480 aa, Bacillus sp.
NGTMMQYFEWYLPNDGNHWNRLNSDASNLKSKGITAVWIPPAWKAASQNDVGYGAYDLYDLGEFNQKGTVRTKYGTRSQLQAAVTSLKNNGIQVYGDVVMNHKGGADATEMVRAVEVNPNNRNQEVTGEYTIEAWTRFDFPGRGNTHSSFKWRWYHFDGVDWDQSRDLDNRIYKFRGHGKAWDWEVDTEFGNYDYLMYADYDMDHPEVVNELRNWGVWYTNTLGLDGFRIDAVKHIKYSFTRDWINHVRSATGKNMFAVAEFWKNDLGAIENYLQKTNWNHSVFDVPLHYNLYNASKSGGNYDMRNIFNGTVVQRHPSHAVTFVDNHDSQPEEALESFVEEWFKPLAYALTLTREQGYPSVFYGDYYGIPTHGVPAMRSKIDPILEARQKYAYGPQHDYLDHPDVIGWTREGDSSHPKSGLATLITDGPGGSKRMYAGLKNAGETWYDITGNRSDTVKIGSDGWGEFHVNDGSVSIYVQK

SEQ ID NO: 40883 - protein, 480 aa, Bacillus sp.
NGTMMQYFEWYLPNDGNHWNRLNSDASNLKSKGITAVWIPPAWKAASQNDVGYGAYDLYDLGEFNQKGTVRTKYGTRSQLQAAVTSLKNNGIQVYGDVVMNHKGGADATEMVRAVEVNPNNRNQEVTGEYTIEAWTRFDFPGRGNTHSSFKWRWYHFDGVDWDQSRNLNNRIYKFRGHGKAWDWEVDTEFGNYDYLMYADYDMDHPEVVNELRNWGVWYTNTLGLDGFRIDAVKHIKYSFTRDWINHVRSATGKNMFAVAEFWKNDLGAIENYLQKTNWNHSVFDVPLHYNLYNASKSGGNYDMRNIFNGTVVQRHPSHAVTFVDNHDSQPEEALESFVEEWFKPLAYALTLTREQGYPSVFYGDYYGIPTHGVPAMRSKIDPILEARQKYAYGPQHDYLDHPDVIGWTREGDSSHPKSGLATLITDGPGGSKRMYAGLKNAGETWYDITGNRSDTVKIGSDGWGEFHVNDGSVSIYVQK

SEQ ID NO: 40884 - protein, 480 aa, Bacillus sp.
NGTMMQYFEWYLPNDGNHWNRLNSDASNLKSKGITAVWIPPAWKGASQNDVGYGAYDLYDLGEFNQKGTVRTKYGTRSQLQAAVTSLKNNGIQVYGDVVMNHKGGADATEMVRAVEVNPNNRNQEVTGEYTIEAWTRFDFPGRGNTHSSFKWRWYHFDGVDWDQSRRLNNRIYKFRGHGKAWDWEVDTEFGNYDYLMYADYDMDHPEVVNELRNWGVWYTNTLGLDGFRIDAVKHIKYSFTRDWINHVRSATGKNMFAVAEFWKNDLGAIENYLQKTNWNHSVFDVPLHYNLYNASKSGGNYDMRNIFNGTVVQRHPSHAVTFVDNHDSQPEEALESFVEEWFKPLAYALTLTREQGYPSVFYGDYYGIPTHGVPAMRSKIDPILEARQKYAYGPQHDYLDHPDVIGWTREGDSSHPKSGLATLLTDGPGGSKRMYAGLKNAGETWYDITGNRSDTVKIGSDGWGEFHVNDGSVSIYVQK

SEQ ID NO: 40885 - protein, 480 aa, Bacillus sp.
NGTMMQYFEWYLPNDGNHWNRLNSDASNLKSKGITAVWIPPAWKGASQNDVGYGAYDLYDLGEFNQKGTVRTKYGTRSQLQAAVTSLKNNGIQVYGDVVMNHKGGADATEMVRAVEVNPNNRNQEVTGEYTIEAWTRFDFPGRGNTHSSFKWRWYHFDGVDWDQSRRLNNRIYKFRGHGKAWDWEVDTEFGNYDYLMYADYDMDHPEVVNELRNFGVWYTNTLGLDGFRIDAVKHIKYSFTRDWINHVRSATGKNMFAVAEFWKNDLGAIENYLQKTNWNHSVFDVPLHYNLYNASKSGGNYDMRNIFNGTVVQRHPSHAVTFVDNHDSQPEEALESFVEEWFKPLAYALTLTREQGYPSVFYGDYYGIPTHGVPAMRSKIDPILEARQKYAYGPQHDYLDHPDVIGWTREGDSSHPKSGLATLITDGPGGSKRMYAGLKNAGETWYDITGNRSDTVKIGSDGWGEFHVNDGSVSIYVQK

SEQ ID NO: 40886 - protein, 480 aa, Bacillus sp.
NGTMMQYFEWYLPNDGNHWNRLNSDASNLKSKGITAVWIPPAWKGASQNDVGYGAYDLYDLGEFNQKGTVRTKYGTRSQLQAAVTSLKNNGIKVYGDVVMNHKGGADATEMVRAVEVNPNNRNQEVTGEYTIEAWTRFDFPGRGNTHSSFKWRWYHFDGVDWDQSRRLNNRIYKFRGHGKAWDWEVDTEFGNYDYLMYADYDMDHPEVVNELRNWGVWYTNTLGLDGFRIDAVKHIKYSFTRDWINHVRSATGKNMFAVAEFWKNDLGAIENYLQKTNWNHSVFDVPLHYNLYNASKSGGNYDMRNIFNGTVVQRHPSHAVTFVDNHDSQPEEALESFVEEWFKPLAYALTLTREQGYPSVFYGDYYGIPTHGVPAMRSKIDPILEARQKYAYGPQHDYLDHPDVIGWTREGDSSHPKSGLATLITDGPGGSKRMYAGLKNAGETWYDITGNRSDTVKIGSDGWGEFHVNDGSVSIYVQK

SEQ ID NO: 40887 - protein, 480 aa, Bacillus sp.
NGTMMQYFEWYLPNDGNHWNRLNSDASNLKSKGITAVWIPPAWKGASQNDVGYGAYDLYDLGEFNQKGTVRTKYGTRSQLQAAVTSLKNNGIQVYGDVVMNHKGGADATEMVRAVEVNPNNRNQEVTGEYTIEAWTRFDFPGRGNTHSSFKWRWYHFDGVDWDQSRNLNNRIYKFRGHGKAWDWEVDTEFGNYDYLMYVDYDMDHPEVVNELRNWGVWYTNTLGLDGFRIDAVKHIKYSFTRDWINHVRSATGKNMFAVAEFWKNDLGAIENYLQKTNWNHSVFDVPLHYNLYNASKSGGNYDMRNIFNGTVVQRHPSHAVTFVDNHDSQPEEALESFVEEWFKPLAYALTLTREQGYPSVFYGDYYGIPTHGVPAMRSKIDPILEARQKYAYGPQHDYLDHPDVIGWTREGDSSHPKSGLATLITDGPGGSKRMYAGLKNAGETWYDITGNRSDTVKIGSDGWGEFHVNDGSVSIYVQK

SEQ ID NO: 40888 - protein, 480 aa, Bacillus sp.
NGTMMQYFEWYLPNDGNHWNRLNSDASNLKSKGITAVWIPPAWKGASQNDVGYGAYDLYDLGEFNQKGTVRTKYGTRSQLQAAVTSLKNNGIQVYGDVVMNHKGGADATEMVRAVEVNPNNRNQEVTGEYTIEAWTRFDFPGRGNTHSSFKWRWYHFDGVDWDQSRRLNNRIYKFRGHGKAWDWEVDTEFGNYDYLMYADYDMDHPEVVNELRNWGVWYTNTLGLDGFRIDAVKHIKYSFTRDWINHVRSATGKNMFAVAEFWKNDLGAIENYLQKTNWNHSVFDVPLHYNLYNASKSGGNYDMRNIFNGTVVQRHPSHAVTFVDNHDSQPEEALESFVETWFKPLAYALTLTREQGYPSVFYGDYYGIPTHGVPAMRSKIDPILEARQKYAYGPQHDYLDHPDVIGWTREGDSSHPKSGLATLITDGPGGSKRMYAGLKNAGETWYDITGNRSDTVKIGSDGWGEFHVNGQSVSIYVQK

SEQ ID NO: 40889 - protein, 480 aa, Bacillus sp.
NGTMMQYFEWYLPNDGNHWNRLNSDASNLKSKGITAVWIPPAWKAVSQNDVGYGAYDLYDLGEFNQKGTVRTKYGTRSQLQAAVTSLKNNGIQVYGDVVMNHKGGADATEMVRAVEVNPNNRNQEVTGEYTIEAWTRFDFPGRGNTHSSFKWRWYHFDGVDWDQSRDLENRIYKFRGHGKAWDWEVDTEFGNYDYLMYADYDMDHPEVVNELRNWGVWYTNTLGLDGFRIDAVKHIKYSFTRDWINHVRSATGKNMFAVAEFWKNDLGAIENYLQKTNWNHSVFDVPLHYNLYNASKSGGNYDMRNIFNGTVVQRHPSHAVTFVDNHDSQPEEALESFVETWFKPLAYALTLTREQGYPSVFYGDYYGIPTHGVPAMRSKIDPILEARQKYAYGPQHDYLDHPDVIGWTREGDSSHPKSGLATLITDGPGGSKRMYAGLKNAGETWYDITGNRSDTVKIGSDGWGEFHVNDASVSIYVQK

SEQ ID NO: 40890 - protein, 480 aa, Bacillus sp.
NGTMMQYFEWYLPNDGNHWNRLNSDASNLKSKGITAVWIPPAWKGASQNDVGYGAYDLYDLGEFNQKGTVRTKYGTRSQLQAAVTSLKNNGIQVYGDVVMNHKGGADATEMVRAVEVNPNNRNQEVTGEYTIEAWTRFDFPGRGNTHSSFKWRWYHFDGVDWDQSRRLNNRIYKFRGHGKAWDWEVDTEFGNYDYLMYADYDMDHPEVVNELRNWGVWYTNTLGLDGFRIDAVKHIKYSFTRDWINHVRSATGKNMFAVAEFWKNDLGAIENYLQKTNWNHSVFDVPLHYNLYNASKSGGNYDMRNIFNGTVVQRHPSHAVTFVDNHDSQPEEALESFVEEWFKPLAYALTLTREQGYPSVFYGDYYGIPTHGVPAMRSKIDPILEARQKYAYGPQHDYLDHPDVIGWTRKGDSSHPKSGLATLITDGPGGSKRMYAGLKNAGETWYDITGNRSDTVKIGSDGWGEFHVNDGSVSIYVQK

SEQ ID NO: 40891 - protein, 480 aa, Synthetic construct
NGTMMQYFEWYLPNDGNHWNRLNSDASNLKSKGITAVWIPPAWKGASQNDVGYGAYDLYDLGEFNQKGTVRTKYGTRSQLQAAVTSLKNNGIQVYGDVVMNHKGGADATEMVRAVEVNPNNRNQEVTGEYTIEAWTRFDFPGRGNTHSSFKWRWYHFDGVDWDQSRRLNNRIYKFRGHGKAWDWEVDTENGNYDYLMYADIDMDHPENINELRNWGVWYTNTLGLDGFRIDAVKHIKYSFTRDWINHVRSATGKNMFAVAEFWKNDLGAIENYLQKTNWNHSVFDVPLHYNLYNASKSGGNYDMRNIFNGTVVQRHPSHAVTFVDNHDSQPEEALESFVEEWFKPLAYALTLTREQGYPSVFYGDYYGIPTHGVPAMRSKIDPILEARQKYAYGPQHDYLDHPDVIGWTREGDSSHPKSGLATLITDGPGGSKRMYAGLKNAGETWYDITGNRSDTVKIGSDGWGEFHVNDGSVSIYVQK

SEQ ID NO: 40892 - protein, 480 aa, Bacillus sp.
NGTMMQYFEWYLPNDGNHWNRLNSDASNLKSKGITAVWIPPAWKGASQNDVGYGAYDLYDLGEFNQKGTVRTKYGTRSQLQAAVTSLKNNGIQVYGDVVMNHKGGADATEMVRAVEVNPNNRNQEVTGEYTIEAWTRFDFPGRGNTHSSFKWRWYHFDGVDWDQSRRLNNRIYKFRGHGKAWDWEVDTEFGNYDYLMYADYDMDHQEVVNELRNWGVWYTNTLGLDGFRIDAVKHIKYSFTRDWINHVRSATGKNMFAVAEFWKNDLGAIENYLQKTNWNHSVFDVPLHYNLYNASKSGGNYDMRNIFNGTVVQRHPSHAVTFVDNHDSQPEEALESFVEEWFKPLAYALTLTREQGYPSVFYGDYYGIPTHGVPAMRSKIDPILEARQKYAYGPQHDYLDHPDVIGWTREGDSSHPKSGLATLITDGPGGSKRMYAGLKNAGETWYDITGNRSDTVKIGSDGWGEFHVNDGSVSIYVQK

SEQ ID NO: 40893 - protein, 480 aa, Bacillus sp.
NGTMMQYFEWYLPNDGNHWNRLNSDASNLKSKGITAVWIPPAWKAASQNDVGYGAYDLYDLGEFNQKGTVRTKYGTRSQLQAAVTSLKNNGIQVYGDVVMNHKGGADATEMVRAVEVNPNNRNQEVTGEYTIEAWTRFDFPGRGNTHSSFKWRWYHFDGVDWDQSRDLTNRIYKFRGHGKAWDWEVDTEFGNYDYLMYADYDMDHPEVVNELRNWGVWYTNTLGLDGFRIDAVKHIKYSFTRDWINHVRSATGKNMFAVAEFWKNDLGAIENYLQKTNWNHSVFDVPLHYNLYNASKSGGNYDMRNIFNGTVVQRHPSHAVTFVDNHDSQPEEALESFVEEWFKPLAYALTLTREQGYPSVFYGDYYGIPTHGVPAMRSKIDPILEARQKYAYGPQHDYLDHPDVIGWTREGDSSHPKSGLATLITDGPGGSKRMYAGLKNAGETWYDITGNRSDTVKIGSDGWGEFHVNDGSVSIYVQK

SEQ ID NO: 40894 - protein, 480 aa, Bacillus sp.
NGTMMQYFEWYLPNDGNHWNRLNSDASNLKSKGITAVWIPPAWKAASQNDVGYGAYDLYDLGEFNQKGTVRTKYGTRSQLQAAVTSLKNNGIQVYGDVVMNHKGGADATEMVRAVEVNPNNRNQEVTGEYTIEAWTRFDFPGRGNTHSSFKWRWYHFDGVDWDQSRDLQNRIYKFRGHGKAWDWEVDTEFGNYDYLMYADYDMDHPEVVNELRNWGVWYTNTLGLDGFRIDAVKHIKYSFTRDWINHVRSATGKNMFAVAEFWKNDLGAIENYLQKTNWNHSVFDVPLHYNLYNASKSGGNYDMRNIFNGTVVQRHPSHAVTFVDNHDSQPEEALESFVEEWFKPLAYALTLTREQGYPSVFYGDYYGIPTHGVPAMRSKIDPILEARQKYAYGPQHDYLDHPDVIGWTREGDSSHPKSGLATLITDGPGGSKRMYAGLKNAGETWYDITGNRSDTVKIGSDGWGEFHVNDGSVSIYVQK

SEQ ID NO: 40895 - protein, 480 aa, Bacillus sp.
NGTMMQYFEWYLPNDGNHWNRLNSDASNLKSKGITAVWIPPAWKGASQNDVGYGAYDLYDLGEFNQKGTVRTKYGTRSQLQAAVTSLKNNGIQVYGDVVMNHKGGADATEMVRAVEVNPNNRNQEVTGEYTIEAWTRFDFPGRGNTHSSFKWRWYHFDGVDWDQSRRLNNRIYKFRGHGKAWDWEVDTEFGNYDYLMYADYDMDHPEVVNELRNWGVWYTNTLGLDGFRIDAVKHIKYSFTRDWINHVRSATGKNMFAVAEFWKNDLGAIENYLQKTNWNHSVFDVPLHYNLYNASKSGGNYDMRNIFNGTVVQRHPSHAVTFVDNHDSQPEEALESFVEEWFKPLAYALTLTREQGYPSVFYGDYYGIPTHGVPAMRSKIDPILEARQKYAYGPQHDYLDHHDVIGWTREGDSSHPKSGLATLITDGPGGSKRMYAGLKNAGETWYDITGNRSDTVKIGSDGWGEFHVNDGSVSIYVQK

SEQ ID NO: 40896 - protein, 480 aa, Bacillus sp.
NGTMMQYFEWYLPNDGNHWNRLNSDASNLKSKGITAVWIPPAWKGASQNDVGYGAYDLYDLGEFNQKGTVRTKYGTRSQLQAAVTSLKNNGIQVYGDVVMNHKGGADATEMVRAVEVNPNNRNQEVTGEYTIEAWTRFDFPGRGNTHSSFKWRWYHFDGVDWDQSRRLNNRIYKFRVHGKAWDWEVDTEFGNYDYLMYADYDMDHPEVVNELRNWGVWYTNTLGLDGFRIDAVKHIKYSFTRDWINHVRSATGKNMFAVAEFWKNDLGAIENYLQKTNWNHSVFDVPLHYNLYNASKSGGNYDMRNIFNGTVVQRHPSHAVTFVDNHDSQPEEALESFVEEWFKPLAYALTLTREQGYPSVFYGDYYGIPTHGVPAMRSKIDPILEARQKYAYGPQHDYLDHPDVIGWTREGDSSHPKSGLATLITDGPGGSKRMYAGLKNAGETWYDITGNRSDTVKIGSDGWGEFHVNDGSVSIYVQK

SEQ ID NO: 40897 - protein, 480 aa, Bacillus sp.
NGTMMQYFEWYLPNDGNHWNRLNSDASNLKSKGITAVWIPPAWKGASQNDVGYGAYDLYDLGEFNQKGTVRTKYGTRSQLQAAVTSLKNNGIQVYGDVVMNHKGGADATEMVRAVEVNPNNRNQEVTGEYTIEAWTRFDFPGRGNTHSSFKWRWYHFDGVDWDQSRRLNNRIYKFRGHGKAWDWEVDTEFGNYDYLMYADYDMDHPEVVNELRNWGVWYTNTLGLDGFRIDAVKHIKYSFTRDWINHVRSATGKNMFAVAEFWKYDLGAIENYLQKTNWNHSVFDVPLHNNLYTASKSGGNYDMRNIFNGTVVQRHPSHAVTFVDNHDSQPEEALESFVEEWFKPLAYALTLTREQGYPSVFYGDYYGIPTHGVPAMRSKIDPILEARQKYAYGPQHDYLDHPDVIGWTREGDSSHPKSGLATLITDGPGGSKRMYAGLKNAGETWYDITGNRSDTVKIGSDGWGEFHVNDGSVSIYVQK

SEQ ID NO: 40898 - protein, 480 aa, Bacillus sp.
NGTMMQYFEWYLPNDGNHWNRLNSDASNLKSKGITAVWIPPAWKGASQNDVGYGAYDLYDLGEFNQKGTVRTKYGTRSQLQAAVTSLKNNGIQVYGDVVMNHKGGADATEMVRAVEVNPNNRNQEVTGEYTIEAWTRFDFPGRGNTHSSFKWRWYHFDGVDWDQSRRLNNRIYKFRGHGKAWDWEVDTEFGNYDYLMYADYDMDHPEVVNELRNWGVWYTNTLGLDGFRIDAVKHIKYSFTRDWINHVRSATGKNMFAVAEFWKNDLGAIENYLQKTNWNHSVFDVPLHYNLYNASKSGGNYDMRNIFNGTVVQRHPSHAVTFVDNHDSQPEEALESFVETWFKPLAYALTLTREQGYPSVFYGDYYGIPTHGVPAMRSKIDPILEARQKYAYGPQHDYLDHPDVIGWTREGDSSHPKSGLATLITDGPGGSKRMYAGLKNAGETWYDITGNRSDTVKIGSDGWGEFHVNKQSVSIYVQK

SEQ ID NO: 40899 - protein, 480 aa, Bacillus sp.
NGTMMQYFEWYLPNDGNHWNRLNSDASNLKSKGITAVWIPPAWKGASQNDVGYGAYDLYDLGEFNQKGTVRTKYGTRSQLQAAVTSLKNNGIQVYGDVVMNHKGGADATEMVRAVEVNPNNRNQEVTGEYTIEAWTRFDFPGRGNTHSSFKWRWYHFDGVDWDQSRRTNNRIYKFRGHGKAWDWEVDTEFGNYDYLMYTDYDMDHPEVVNELRNWGVWYTNTLGLDGFRIDAVKHIKYSFTRDWINHVRSATGKNMFAVAEFWKNDLGAIENYLQKTNWNHSVFDVPLHYNLYNASKSGGNYDMRNIFNGTVVQRHPSHAVTFVDNHDSQPEEALESFVETWFKPLAYALTLTREQGYPSVFYGDYYGIPTHGVPAMRSKIDPILEARQKYAYGPQHDYLDHPDVIGWTREGDSSHPKSGLATLITDGPGGSKRMYAGLKNAGETWYDITGNRSDTVKIGSDGWGEFHVNDASVSIYVQK

SEQ ID NO: 40900 - protein, 480 aa, Bacillus sp.
NGTMMQYFEWYLPNDGNHWNRLNSDASNLKSKGITAVWIPPAWKGASQNDVGYGAYDLYDLGEFNQKGTVRTKYGTRSQLQAAVTSLKNNGIQVYGDVVMNHKGGADATEMVRAVEVNPNNRNQEVTGEYTIEAWTRFDFPGRGNTHSSFKWRWYHFDGVDWDQSRRLNNRIYKFRGHGKAWDWEVDTEFGNYDYLMYVDYDMDHPEVVNELRNWGVWYTNTLGLDGFRIDAVKHIKYSFTRDWINHVRSATGKNMFAVAEFWKNDLGAIENYLQKTNWNHSVFDVPLHYNLYNASKSGGNYDMRNIFNGTVVQRHPSHAVTFVDNHDSQPEEALESFVEEWFKPLAYALTLTREQGYPSVFYGDYYGIPTHGVPAMRSKIDPILEARQKYAYGPQHDYLDHPDVIGWTREGDSSHPKSGLATLITDGPGGSKRMYAGLKNAGETWYDITGNRSDTVKIGSDGWGEFHVNDGSVSIYVQK

SEQ ID NO: 40901 - protein, 480 aa, Bacillus sp.
NGTMMQYFEWYLPNDGNHWNRLNSDASNLKSKGITAVWIPPAWKGASQNDVGYGAYDLYDLGEFNQKGTVRTKYGTRSQLQAAVTSLKNNGIQVYGDVVMNHKGGADATEMVRAVEVNPNNRNQEVTGEYTIEAWTRFDFPGRGNTHSSFKWRWYHFDGVDWDQSRRLNNRIYMFRGHGKAWDWEVDTEFGNYDYLMYADYDMDHPEVVNELRNWGVWYTNTLGLDGFRIDAVKHIKYSFTRDWINHVRSATGKNMFAVAEFWKNDLGAIENYLQKTNWNHSVFDVPLHYNLYNASKSGGNYDMRNIFNGTVVQRHPSHAVTFVDNHDSQPEEALESFVEEWFKPLAYALTLTREQGYPSVFYGDYYGIPTHGVPAMRSKIDPILEARQKYAYGPQHDYLDHPDVIGWTREGDSSHPKSGLATLITDGPGGSKRMYAGLKNAGETWYDITGNRSDTVKIGSDGWGEFHVNDGSVSIYVQK

SEQ ID NO: 40902 - protein, 480 aa, Bacillus sp.
NGTMMQYFEWYLPNDGNHWNRLNSDASNLKSKGITAVWIPPAWKGASQNDVGYGAYDLYDLGEFNQKGTVRTKYGTRSQLQAAVTSLKNNGIQVYGDVVMNHKGGADATEMVRAVEVNPNNRNQEVTGEYTIEAWTRFDFPGRGNTHSSFKWRWYHFDGVDWDQSRDLTNRIYKFRGHGKAWDWEVDTEFGNYDYLMYADYDMDHPEVVNELRNWGVWYTNTLGLDGFRIDAVKHIKYSFTRDWINHVRSATGKNMFAVAEFWKNDLGAIENYLQKTNWNHSVFDVPLHYNLYNASKSGGNYDMRNIFNGTVVQRHPSHAVTFVDNHDSQPEEALESFVETWFKPLAYALTLTREQGYPSVFYGDYYGIPTHGVPAMRSKIDPILEARQKYAYGPQHDYLDHPDVIGWTREGDSSHPKSGLATLITDGPGGSKRMYAGLKNAGETWYDITGNRSDTVKIGSDGWGEFHVNKASVSIYVQK

SEQ ID NO: 40903 - protein, 480 aa, Bacillus sp.
NGTMMQYFEWYLPNDGNHWNRLNSDASNLKSKGITAVWIPPAWKAASQNDVGYGAYDLYDLGEFNQKGTVRTKYGTRSQLQAAVTSLKNNGIQVYGDVVMNHKGGADATEMVRAVEVNPNNRNQEVTGEYTIEAWTRFDFPGRGNTHSSFKWRWYHFDGVDWDQSRELNNRIYKFRGHGKAWDWEVDTEFGNYDYLMYADYDMDHPEVVNELRNWGVWYTNTLGLDGFRIDAVKHIKYSFTRDWINHVRSATGKNMFAVAEFWKNDLGAIENYLQKTNWNHSVFDVPLHYNLYNASKSGGNYDMRNIFNGTVVQRHPSHAVTFVDNHDSQPEEALESFVEEWFKPLAYALTLTREQGYPSVFYGDYYGIPTHGVPAMRSKIDPILEARQKYAYGPQHDYLDHPDVIGWTREGDSSHPKSGLATLITDGPGGSKRMYAGLKNAGETWYDITGNRSDTVKIGSDGWGEFHVNDGSVSIYVQK

SEQ ID NO: 40904 - protein, 480 aa, Synthetic construct
NGTMMQYFEWYLPNDGNHWNRLNSDASNLKSKGITAVWIPPAWKGASQNDVGYGAYDLYDLGEFNQKGTVRTKYGTRSQLQAAVTSLKNNGIQVYGDVVMNHKGGADATEMVRAVEVNPNNRNQEVTGEYTIEAWTRFDFPGRGNTHSSFKWRWYHFDGVDWDQSRRLNNRIYKFRGHGKAWDWEVDTENGNYDYLMYADIDMDHPENQNELRNWGVWYTNTLGLDGFRIDAVKHIKYSFTRDWINHVRSATGKNMFAVAEFWKNDLGAIENYLQKTNWNHSVFDVPLHYNLYNASKSGGNYDMRNIFNGTVVQRHPSHAVTFVDNHDSQPEEALESFVEEWFKPLAYALTLTREQGYPSVFYGDYYGIPTHGVPAMRSKIDPILEARQKYAYGPQHDYLDHPDVIGWTREGDSSHPKSGLATLITDGPGGSKRMYAGLKNAGETWYDITGNRSDTVKIGSDGWGEFHVNDGSVSIYVQK

SEQ ID NO: 40905 - protein, 480 aa, Bacillus sp.
NGTMMQYFEWYLPNDGNHWNRLNSDASNLKSKGITAVWIPPAWKGASQNDVGYGAYDLYDLGEFNQKGTVRTKYGTRSQLQAAVTSLKNNGIQVYGDVVMNHKGGADATEMVRAVEVNPNNRNQEVTGEYTIEAWTRFDFPGRGNTHSSFKWRWYHFDGVDWDQSRRLNNRIYKFRGHGKAWDWEVDTEFGNYDYLMYADYDMDHPEVVNELRNWGVWYTNTLGLDGFRIDAVKHIKYSFTRDWINHVRSATGKNMFAVAEFWKNDLGAIENYLQKTNWNHSVFDVPLHYNLYNASKSGGNYDMRNIFNGTVVQRHPSHAVTFVDNHDSQPEEALESFVEEWFKPLAYALTLTREQGYPSVFYGDYYGIPTHGVPAMRSKIDPILEARQKYAYGPQHDYLDHPDVIGWTREGDSSHPKSGLATLITDGPGGSNRMYAGLKNAGETWYDITGNRSDTVKIGSDGWGEFHVNDGSVSIYVQK

SEQ ID NO: 40906 - protein, 480 aa, Bacillus sp.
NGTMMQYFEWYLPNDGNHWNRLNSDASNLKSKGITAVWIPPAWKGASQNDVGYGAYDLYDLGEFNQKGTVRTKYGTRSQLQAAVTSLKNNGIQVYGDVVMNHKGGADATEMVRAVEVNPNNRMQEVTGEYTIEAWTRFDFPGRGNTHSSFKWRWYHFDGVDWDQSRRLNNRIYKFRGHGKAWDWEVDTEFGNYDYLMYADYDMDHPEVVNELRNWGVWYTNTLGLDGFRIDAVKHIKYSFTRDWINHVRSATGKNMFAVAEFWKNDLGAIENYLQKTNWNHSVFDVPLHYNLYNASKSGGNYDMRNIFNGTVVQRHPSHAVTFVDNHDSQPEEALESFVEEWFKPLAYALTLTREQGYPSVFYGDYYGIPTHGVPAMRSKIDPILEARQKYAYGPQHDYLDHPDVIGWTREGDSSHPKSGLATLITDGPGGSKRMYAGLKNAGETWYDITGNRSDTVKIGSDGWGEFHVNDGSVSIYVQK

SEQ ID NO: 40907 - protein, 480 aa, Bacillus sp.
NGTMMQYFEWYLPNDGNHWNRLNSDASNLKSKGITAVWIPPAWKGASQNDVGYGAYDLYDLGEFNQKGTVRTKYGTRSQLQAAVTSLKNNGIQVYGDVVMNHKGGADATEMVRAVEVNPNNRNQEVTGEYTIEAWTRFDFPGRGNTHSSFKWRWYHFDGVDHDQSRRLNNRIYKFRGHGKAWDWEVDTEFGNYDYLMYADYDMDHPEVVNELRNWGVWYTNTLGLDGFRIDAVKHIKYSFTRDWINHVRSATGKNMFAVAEFWKNDLGAIENYLQKTNWNHSVFDVPLHYNLYNASKSGGNYDMRNIFNGTVVQRHPSHAVTFVDNHDSQPEEALESFVEEWFKPLAYALTLTREQGYPSVFYGDYYGIPTHGVPAMRSKIDPILEARQKYAYGPQHDYLDHPDVIGWTREGDSSHPKSGLATLITDGPGGSKRMYAGLKNAGETWYDITGNRSDTVKIGSDGWGEFHVNDGSVSIYVQK

SEQ ID NO: 40908 - protein, 480 aa, Bacillus sp.
NGTMMQYFEWYLPNDGNHWNRLNSDASNLKSKGITAVWIPPAWKGASQNDVGYGAYDLYDLGEFNQKGTVRTKYGTRSQLQAAVTSLKNNGIQVYGDVVMNHKGGADATEMVRAVEVNPNNRNQEVTGEYTIEAWTRFDFPGRGNTHSSFKWRWYHFDGVDWDQSERLNNRIYKFRGHGKAWDWEVDTEFGNYDYLMYADYDMDHPEVVNELRNWGVWYTNTLGLDGFRIDAVKHIKYSFTRDWINHVRSATGKNMFAVAEFWKNDLGAIENYLQKTNWNHSVFDVPLHYNLYNASKSGGNYDMRNIFNGTVVQRHPSHAVTFVDNHDSQPEEALESFVEEWFKPLAYALTLTREQGYPSVFYGDYYGIPTHGVPAMRSKIDPILLARQKYAYGPQHDYLDHPDVIGWTREGDSSHPKSGLATLITDGPGGSKRMYAGLKNAGETWYDITGNRSDTVKIGSDGWGEFHVNDGSVSIYVQK

SEQ ID NO: 40909 - protein, 480 aa, Bacillus sp.
NGTMMQYFEWYLPNDGNHWNRLNSDASNLKSKGITAVWIPPAWKGVSQNDVGYGAYDLYDLGEFNQKGTVRTKYGTRSQLQAAVTSLKNNGIQVYGDVVMNHKGGADATEMVRAVEVNPNNRNQEVTGEYTIEAWTRFDFPGRGNTHSSFKWRWYHFDGVDWDQSRRLTNRIYKFRGHGKAWDWEVDTEFGNYDYLMYVDYDMDHPEVVNELRNWGVWYTNTLGLDGFRIDAVKHIKYSFTRDWINHVRSATGKNMFAVAEFWKNDLGAIENYLQKTNWNHSVFDVPLHYNLYNASKSGGNYDMRNIFNGTVVQRHPSHAVTFVDNHDSQPEEALESFVEEWFKPLAYALTLTREQGYPSVFYGDYYGIPTHGVPAMRSKIDPILEARQKYAYGPQHDYLDHPDVIGWTREGDSSHPKSGLATLITDGPGGSKRMYAGLKNAGETWYDITGNRSDTVKIGSDGWGEFHVNDGSVSIYVQK

SEQ ID NO: 40910 - protein, 480 aa, Bacillus sp.
NGTMMQYFEWYLPNDGNHWNRLNSDASNLKSKGITAVWIPPAWKAASQNDVGYGAYDLYDLGEFNQKGTVRTKYGTRSQLQAAVTSLKNNGIQVYGDVVMNHKGGADATEMVRAVEVNPNNRNQEVTGEYTIEAWTRFDFPGRGNTHSSFKWRWYHFDGVDWDQSRNLENRIYKFRGHGKAWDWEVDTEFGNYDYLMYADYDMDHPEVVNELRNWGVWYTNTLGLDGFRIDAVKHIKYSFTRDWINHVRSATGKNMFAVAEFWKNDLGAIENYLQKTNWNHSVFDVPLHYNLYNASKSGGNYDMRNIFNGTVVQRHPSHAVTFVDNHDSQPEEALESFVEEWFKPLAYALTLTREQGYPSVFYGDYYGIPTHGVPAMRSKIDPILEARQKYAYGPQHDYLDHPDVIGWTREGDSSHPKSGLATLITDGPGGSKRMYAGLKNAGETWYDITGNRSDTVKIGSDGWGEFHVNDGSVSIYVQK

SEQ ID NO: 40911 - protein, 480 aa, Bacillus sp.
NGTMMQYFEWYLPNDGNHWNRLNSDASNLKSKGITAVWIPPAWKGASQNDVGYGAYDLYDLGEFNQKGTVRTKYGTRSQLQAAVTSLKNNGIQVYGDVVMNHKGGADATEMVRAVEVNPNNRNQEVTGEYTIEAWTRFDFPGRGNTHSSFKWRWYHFDGVDWDQSRRLNNRIYKFRGHGKAWDWEVDTEFGNYDYLMYADYDMDHPEVVNELRNWGVWYTNTLGLDGFRIDAVKHIKYSFTRDWINHVRSATGKNMFAVAEFWKNDLGAIENYLQKTNWNHSVFDVPLHYNLYNASKSAGNYDMRNIFNGTVVQRHPSHAVTFVDNHDSQPEEALESFVDEWFKPLAYALTLTREQGYPSVFYGDYYGIPTHGVPAMRSKIDPILEARQKYAYGPQHDYLDHPDVIGWTREGDSSHPKSGLATLITDGPGGSKRMYAGLKNAGETWYDITGNRSDTVKIGSDGWGEFHVNDGSVSIYVQK

SEQ ID NO: 40912 - protein, 480 aa, Bacillus sp.
NGTMMQYFEWYLPNDGNHWNRLNSDASNLKSKGITAVWIPPAWKGASQNDVGYGAYDLYDLGEFNQKGTVRTKYGTRSQLQAAVTSLKNNGIQVYGDVVMNHKGGADHTEMVRAVEVNPNNRNQEVTGEYTIEAWTRFDFPGRGNTHSSFKWRWYHFDGVDWDQSRRLNNRIYKFRGHGKAWDWEVDTEFGNYDYLMYADYDMDHPEVVNELRNWGVWYTNTLGLDGFRIDAVKHIKYSFTRDWINHVRSATGKNMFAVAEFWKNDLGAIENYLQKTNWNHSVFDVPLHYNLYNASKSGGNYDMRNIFNGTVVQRHPSHAVTFVDNHDSQPEEALESFVEEWFKPLAYALTLTREQGYPSVFYGDYYGIPTHGVPAMRSKIDPILEARQKYAYGPQHDYLDHPDVIGWTREGDSSHPKSGLATLITDGPGGSKRMYAGLKNAGETWYDITGNRSDTVKIGSDGWGEFHVNDGSVSIYVQK

SEQ ID NO: 40913 - protein, 480 aa, Bacillus sp.
NGTMMQYFEWYLPNDGNHWNRLNSDASNLKSKGITAVWIPPAWKGASQNDVGYGAYDLYDLGEFNQKGTVRTKYGTRSQLQAAVTSLKNNGIQVYGDVVMNHKGGADATEMVRAVEVNPNNRNQEVTGEYTIEAWTRFDFPGRGNTHSSFKWRWYHFDGVDWDQSRRLNNRIYKFRGHGKAWDWEVDTEFGNYDYLMYADYDMDHPEVVNELRNWGVWYTNTLGLDGFRIDAVKHIKYSFTRDWINHVRSATGKNMFAVAEFWKNDLGAIENYLQKTNWNHSVFDVPLHYNLYNASKSGGNYDMRNIFNGTVVQRHPSHAVTFVDNHDSQPEEALESFVEEWFKPLAYALTLTREQGYPSVFYGDYYGIPTHGVPAMRSKIDPILEARQKYAYGPQHDYLDHPDVIGWTREGDSSHPKSGLATLITDGPGGSKGMYAGLKNAGETWYDITGNRSDTVKIGSDGWGEFHVNDGSVSIYVQK

SEQ ID NO: 40914 - protein, 480 aa, Bacillus sp.
NGTMMQYFEWYLPNDGNHWNRLNSDASNLKSKGITAVWIPPAWKGASQNDVGYGAYDLYDLGEFNQKGTVRTKYGTRSQLQAAVTSLKNNGIQVYGDVVMNHKGGADATEMVPAVEVNPNNRNQEVTGEYTIEAWTRFDFPGRGNTHSSFKWRWYHFDGVDWDQSRRLNNRIYKFRNHGKAWDWEVDTEFGNYDYLMYADYDMDHPEVVNELRNWGVWYTNTLGLDGFRIDAVKHIKYSFTRDWINHVRSATGKNMFAVAEFWKNDLGAIENYLQKTNWNHSVFDVPLHYNLYNASKSGGNYDMRNIFNGTVVQRHPSHAVTFVDNHDSQPEEALESFVEEWFKPLAYALTLTREQGYPSVFYGDYYGIPTHGVPAMRSKIDPILEARQKYAYGPQHDYLDHPDVIGWTREGDSSHPKSGLATLITDGPGGSKRMYAGLKNAGETWYDITGNRSDTVKIGSDGWGEFHVNDGSVSIYVQK

SEQ ID NO: 40915 - protein, 480 aa, Bacillus sp.
NGTMMQYFEWYLPNDGNHWNRLNSDASNLKSKGITAVWIPPAWKGASQNDVGYGAYDLYDLGEFNQKGTVRTKYGTRSQLQAAVTSLKNNGINVYGDVVMNHKGGADATEMVRAVEVNPNNRNQEVTGEYTIEAWTRFDFPGRGNTHSSFKWRWYHFDGVDWDQSRRLNNRIYKFRGHGKAWDWEVDTEFGNYDYLMYADYDMDHPEVVNELRNWGVWYTNTLGLDGFRIDAVKHIKYSFTRDWINHVRSATGKNMFAVAEFWKNDLGAIENYLQKTNWNHSVFDVPLHYNLYNASKSGGNYDMRNIFNGTVVQRHPSHAVTFVDNHDSQPEEALESFVEEWFKPLAYALTLTREQGYPSVFYGDYYGIPTHGVPAMRSKIDPILEARQKYAYGPQHDYLDHPDVIGWTREGDSSHPKSGLATLITDGPGGSKRMYAGLKNAGETWYDITGNRSDTVKIGSDGWGEFHVNDGSVSIYVQK

SEQ ID NO: 40916 - protein, 480 aa, Bacillus sp.
NGTMMQYFEWYLPNDGNHWNRLNSDASNLKSKGITAVWIPPAWKGASQNDVGYGAYDLYDLGEFNQKGTVRTKYGTRSQLQAAVTSLKNNGIQVYGDVVMNHKGGADATEMVRAVEVNPNNRNQEVTGEYTIEAWTRFDFPGRGNTHSSFKWRWYHFDGVDWDQSRRLNNRIYKFRGHGKAWDWEVDTEFGNYDYLMYADYDMDHPEVVNELRNWGVWYTNTLGLDGFRIDAVKHFKYSFTRDWINHVRSATGKNMFAVAEFWKNDLGAIENYLQKTNWNHSVFDVPLHYNLYNASKSGGNYDMRNIFNGTVVQRHPSHAVTFVDNHDSQPEEALESFVEEWFKPLAYALTLTREQGYPSVFYGDYYGIPTHGVPAMRSKIDPILEARQKYAYGPQHDYLDHPDVIGWTREGDSSHPKSGLATLITDGPGGSKRMYAGLKNAGETWYDITGNRSDTVKIGSDGWGEFHVNDGSVSIYVQK

SEQ ID NO: 40917 - protein, 480 aa, Synthetic construct
NGTMMQYFEWYLPNDGNHWNRLNSDASNLKSKGITAVWIPPAWKGASQNDVGYGAYDLYDLGEFNQKGTVRTKYGTRSQLQAAVTSLKNNGIQVYGDVVMNHKGGADATEMVRAVEVNPNNRNQEVTGEYTIEAWTRFDFPGRGNTHSSFKWRWYHFDGVDWDQSRRLNNRIYKFRGHGKAWDWEVDTENGNYDYLMYADIDMDHPESRNELRNWGVWYTNTLGLDGFRIDAVKHIKYSFTRDWINHVRSATGKNMFAVAEFWKNDLGAIENYLQKTNWNHSVFDVPLHYNLYNASKSGGNYDMRNIFNGTVVQRHPSHAVTFVDNHDSQPEEALESFVEEWFKPLAYALTLTREQGYPSVFYGDYYGIPTHGVPAMRSKIDPILEARQKYAYGPQHDYLDHPDVIGWTREGDSSHPKSGLATLITDGPGGSKRMYAGLKNAGETWYDITGNRSDTVKIGSDGWGEFHVNDGSVSIYVQK

SEQ ID NO: 40918 - protein, 480 aa, Bacillus sp.
NGTMMQYFEWYLPNDGNHWNRLNSDASNLKSKGITAVWIPPAWKGASQNDVGYGAYDLYDLGEFNQKGTVRTKYGTRSQLQAAVTSLKNNGIQVYGDVVMNHKGGADATEMVRAVEVNPNNRNQEVTGEYTIEAWTRFDFPGRGNTHSSFKWRWYHFDGVDWDQSRRLNNRIYKFRGHGKAWDWEVDTEFGNYDYLMYADYDMDHPEVVNELRNWGVWYTNTLGLDGFRIDAVKHIKYSFTRDWINHVRSATGKNMFAVAEFWKNDLGAIENYLQKTNWNHSVFDVPLHYNLYNASKSGGNYDMRNIFNGTVVQRHPSHAVTFVDNHDSQPEEALESFVEEWFKPCAYALTLTREQGYPSVFYGDYYGIPTHGVPAMRSKIDPILEARQKYAYGPQHDYLDHPDVIGWTREGDSSHPKSGLATLITDGPGGSKRMYAGLKNAGETWYDITGNRSDTVKIGSDGWGEFHVNDGSVSIYVQK

SEQ ID NO: 40919 - protein, 480 aa, Bacillus sp.
NGTMMQYFEWYLPNDGNHWNRLNSDASNLKSKGITAVWIPPAWKGASQNDVGYGAYDLYDLGEFNQKGTVRTKYGTRSQLQAAVTSLKNNGIQVYGDVVMNHKGGADATEMVRAVEVNPNNRNQEVTGEYTIEAWTRFDFPGRGNTHSSFKWRWYHFDGVDWDQSRRLNNRIYKFRGHGKAWDWEVDTEFGNYDYLMYADYDMDHPEVVNELRNWGVWYTNTLGLDGFRIDAVKHIKYSFTRDWINHVRSATGKNMFAVAEFWKNDLGAIENYLQKTNWNHSVFDVPLHYNLYNASKSGGNYDMRNIFNGTVVQRNPSHAVTFVDNHDSQPEEALESFVEEWFKPLAYALTLTREQGYPSVFYGDYYGIPTHGVPAMRSKIDPILEARQKYAYGPQHDYLDHPDVIGWTREGDSSHPKSGLATLITDGPGGSKRMYAGLKNAGETWYDITGNRSDTVKIGSDGWGEFHVNDGSVSIYVQK

SEQ ID NO: 40920 - protein, 480 aa, Bacillus sp.
NGTMMQYFEWYLPNDGNHWNRLNSDASNLKSKGITAVWIPPAWKGASQNDVGYGAYDLYDLGEFNQKGTVRTKYGTRSQLQAAVTSLKNNGIQVYGDVVMNHKGGADATEMVRAVEVNPNNRNQEVTGEYTIEAWTRFDFPGRGNTHSSFKWRWLHFDGVDWDQSRRLNNRIYKFRGHGKAWDWEVDTEFGNYDYLMYADYDMDHPEVVNELRNWGVWYTNTLGLDGFRIDAVKHIKYSFTRDWINHVRSATGKNMFAVAEFWKNDLGAIENYLQKTNWNHSVFDVPLHYNLYNASKSGGNYDMRNIFNGTVVQRHPSHAVTFVDNHDSQPEEALESFVEEWFKPLAYALTLTREQGYPSVFYGDYYGIPTHGVPAMRSKIDPILEARQKYAYGPQHDYLDHPDVIGWTREGDSSHPKSGLATLITDGPGGSKRMYAGLKNAGETWYDITGNRSDTVKIGSDGWGEFHVNDGSVSIYVQK

SEQ ID NO: 40921 - protein, 480 aa, Bacillus sp.
NGTMMQYFEWYLPNDGNHWNRLNSDASNLKSKGITAVWIPPAWKGASQNDVGYGAYDLYDLGEFNQKGTVRTKYGTRSQLQAAVTSLKNNGIQVYGDVVMNHKGGADATEMVRAVEVNPNNRNQEVTGEYTIEAWTRFDFPGRGNTHSSFKWRWYHFDGVDWDQSRRLNNRIYKFRGHGKAWDWEVDTEFGNYDYLMYADYDMDHPEVVNELRNWGVWYTNTLGLDGFRIDAVKHIKYSFTRDWINHVRSATGKNMFAVAEFWKNDLGAIENYLQKTNWNHSVFDVPLHYNLYNASKSGGNYDMRNIFNGTVVQRHPSHAVTFVDNHDSQPEEALESFVEEWFKPLAYALTLTREQGYPSVFYGDYYGIPTHGVPAMRSKIDPILEARQKYAYGPQHDYLDHPDVIGWTREGDSSHPKSGLATLITDGPGGSKRMYAGLKNAGETWYDITGNRSDTVKIGSDGWGEFHVNDTSVSIYVQK

SEQ ID NO: 40922 - protein, 480 aa, Bacillus sp.
NGTMMQYFEWYLPNDGNHWNRLNSDASNLKSKGITAVWIPPAWKGASQNDVGYGAYDLYDLGEFNQKGTVRTKYGTRSQLQAAVTSLKNNGIQVYGDVVMNHKGGADATEMVRAVEVNPNNRNQEVTGEYTIEAWTRFDFPGRGNTHSSFKWRWYHFDGVDWDQSRRLNNRIYKFRGHGKAWDWEVDTEFGNYDYLMYADYDMDHPEVVNELRNWGVWYTNTLGLDGFRIDAVKHIKYSFTRDWINHVRSATGKNMFAVAEFWKADLGAIENYLQKTNWNHSVFDVPLHYNLYNASKSGGNYDMRNIFNGTVVQRHPSHAVTFVDNHDSQPEEALESFVEEWFKPLAYALTLTREQGYPSVFYGDYYGIPTHGVPAMRSKIDPILEARQKYAYGPQHDYLDHPDVIGWTREGDSSHPKSGLATLITDGPGGSKRMYAGLKNAGETWYDITGNRSDTVKIGSDGWGEFHVNDGSVSIYVQK

SEQ ID NO: 40923 - protein, 480 aa, Bacillus sp.
NGTMMQYFEWYLPNDGNHWNRLNSDASNLKSKGITAVWIPPAWKGASQNDVGYGAYDLYDLGEFNQKGTVRTKYGTRSQLQAAVTSLKNNGIQVYGDVVMNHKGGADATEMVRAVEVNPNNRNQEVTGEYTIEAWTRFDFPGRGNTHSSFKWRWYHFDGVDWDQSRRLNNRIYKFRGHGKAWDWEVDTEFGNYDYLMYADYDMDHPEVVNELRNWGVWYTNTLGLDGFRIDAVKHIKYSFTRDWINHVRSATGKNMFAVAEFWKNDLGAIENYLQKTNWNHSVFDVPLHYNLYNASKSGGNYDMRNIFNGTVVQAHPNHAVTFVDNHDSQPEEALESFVEEWFKPLAYALTLTREQGYPSVFYGDYYGIPTHGVPAMRSKIDPILEARQKYAYGPQHDYLDHPDVIGWTREGDSSHPKSGLATLITDGPGGSKRMYAGLKNAGETWYDITGNRSDTVKIGSDGWGEFHVNDGSVSIYVQK

SEQ ID NO: 40924 - protein, 480 aa, Bacillus sp.
NGTMMQYFEWYLPNDGNHWNRLNSDASNLKSKGITAVWIPPAWKGASQNDVGYGAYDLYDLGEFNQKGTVRTKYGTRSQLQAAVTSLKNNGIQVYGDVVMNHKGGADATEMVRAVEVNPNNRNQEVTGEYTIEAWTRFDFPGRGNTHSSFKWRWYHFDGVDWDQSRRLNNRIYKFRGHGKAWDWEVDTEFGNYDYLMYADYDMDHPEVTNELRNWGVWYTNTLGLDGFRIDAVKHIKYSFTRDWINHVRSATGKNMFAVAEFWKNDLGAIENYLQKTNWNHSVFDVPLHYNLYNASKSGGNYDMRNIFNGTVVQRHPSHAVTFVDNHDSQPEEALESFVEEWFKPLAYALTLTREQGYPSVFYGDYYGIPTHGVPAMRSKIDPILEARQKYAYGPQHDYLDHPDVIGWTREGDSSHPKSGLATLITDGPGGSKRMYAGLKNAGETWYDITGNRSDTVKIGSDGWGEFHVNDGSVSIYVQK

SEQ ID NO: 40925 - protein, 480 aa, Bacillus sp.
NGTMMQYFEWYLPNDGNHWNRLNSDASNLKSKGITAVWIPPAWKATSQNDVGYGAYDLYDLGEFNQKGTVRTKYGTRSQLQAAVTSLKNNGIQVYGDVVMNHKGGADATEMVRAVEVNPNNRNQEVTGEYTIEAWTRFDFPGRGNTHSSFKWRWYHFDGVDWDQSRRFNNRIYKFRGHGKAWDWEVDTEFGNYDYLMYADYDMDHPEVVNELRNWGVWYTNTLGLDGFRIDAVKHIKYSFTRDWINHVRSATGKNMFAVAEFWKNDLGAIENYLQKTNWNHSVFDVPLHYNLYNASKSGGNYDMRNIFNGTVVQRHPSHAVTFVDNHDSQPEEALESFVEEWFKPLAYALTLTREQGYPSVFYGDYYGIPTHGVPAMRSKIDPILEARQKYAYGPQHDYLDHPDVIGWTREGDSSHPKSGLATLITDGPGGSKRMYAGLKNAGETWYDITGNRSDTVKIGSDGWGEFHVNDGSVSIYVQK

SEQ ID NO: 40926 - protein, 480 aa, Bacillus sp.
NGTMMQYFEWYLPNDGNHWNRLNSDASNLKSKGITAVWIPPAWKGASQNDVGYGAYDLYDLGEFNQKGTVRTKYGTRSQLQAAVTSLKNNGIQVYGDVVMNHKGGADATEMVRAVEVNPNNRFQEVTGEYTIEAWTRFDFPGRGNTHSSFKWRWYHFDGVDWDQSRRLNNRIYKFRGHGKAWDWEVDTEFGNYDYLMYADYDMDHPEVVNELRNWGVWYTNTLGLDGFRIDAVKHIKYSFTRDWINHVRSATGKNMFAVAEFWKNDLGAIENYLQKTNWNHSVFDVPLHYNLYNASKSGGNYDMRNIFNGTVVQRHPSHAVTFVDNHDSQPEEALESFVEEWFKPLAYALTLTREQGYPSVFYGDYYGIPTHGVPAMRSKIDPILEARQKYAYGPQHDYLDHPDVIGWTREGDSSHPKSGLATLITDGPGGSKRMYAGLKNAGETWYDITGNRSDTVKIGSDGWGEFHVNDGSVSIYVQK

SEQ ID NO: 40927 - protein, 480 aa, Bacillus sp.
NGTMMQYFEWYLPNDGNHWNRLNSDASNLKSKGITAVWIPPAWKGASQNDVGYGAYDLYDLGEFNQKGTVRTKYGTRSQLQAAVTSLKNNGIQVYGDVVMNHKGGADATEMVRAVEVNPNNRNQEVTGEYTIEAWTRFDFPGRGNTHSSFKWRWYHFDGVDWDQSRRLNNRIYKFRGHGKAWDWEVDTEFGNYDLLMYADYDMDHPEVVNELRNWGVWYTNTLGLDGFRIDAVKHIKYSFTRDWINHVRSATGKNMFAVAEFWKNDLGAIENYLQKTNWNHSVFDVPLHYNLYNASKSGGNYDMRNIFNGTVVQRHPSHAVTFVDNHDSQPEEALESFVEEWFKPLAYALTLTREQGYPSVFYGDYYGIPTHGVPAMRSKIDPILEARQKYAYGPQHDYLDHPDVIGWTREGDSSHPKSGLATLITDGPGGSKRMYAGLKNAGETWYDITGNRSDTVKIGSDGWGEFHVNDGSVSIYVQK

SEQ ID NO: 40928 - protein, 480 aa, Bacillus sp.
NGTMMQYFEWYLPNDGNHWNRLNSDASNLKSKGITAVWIPPAWKGASQNDVGYGAYDLYDLGEFNQKGTVRTKYGTRSQLQAAVTSLKNNGIQVYGDVVMNHKGGADATEMVRAVEVNPNNRNQEVTGEYTIEAWTRFDFPGRGNTHSSFKWRWYHFDGVDWDQSRRLNNRIYKFRGHGKAWDWEVDTEFGNYDYLMYADYDMDHPEVVNELRNWGVWYTNTLGLDGFRIDAVKHIKYSFTRDWINHVRSATGKNMFAVAEFWKNDLGAIENYLQKTNWNHSVFDVPLHYNLYNASKSGGNYDMRNIFNGTVVQRHPSHAVTFVDNHDSQPEEALESFVEEWFKPLAYALTLTREQGYPSVFYGDYYGIPTHGVPAMRSKIDPILEARQKYAYGPQNDYLDHPDVIGWTREGDSSHPKSGLATLITDGPGGSKRMYAGLKNAGETWYDITGNRSDTVKIGSDGWGEFHVNDGSVSIYVQK

SEQ ID NO: 40929 - protein, 480 aa, Bacillus sp.
NGTMMQYFEWYLPNDGNHWNRLNSDASNLKSKGITAVWIPPAWKAVSQNDVGYGAYDLYDLGEFNQKGTVRTKYGTRSQLQAAVTSLKNNGIQVYGDVVMNHKGGADATEMVRAVEVNPNNRNQEVTGEYTIEAWTRFDFPGRGNTHSSFKWRWYHFDGVDWDQSRRLSNRIYKFRGHGKAWDWEVDTEFGNYDYLMYADYDYDHPESTNEMRNWGVWYTNTLGLDGFRIDAVKHIKYSFTRDWINHVRSATGKNMFAVAEFWKNDLGAIENYLQKTNWNHSVFDVPLHYNLYNASKSGGNYDMRNIFNGTVVQRHPSHAVTFVDNHDSQPEEALESFVEEWFKPLAYALTLTREQGYPSVFYGDYYGIPTHGVPAMRSKIDPILEARQKYAYGPQHDYLDHPDVIGWTREGDSSHPKSGLATLITDGPGGSKRMYAGLKNAGETWYDITGNRSDTVKIGSDGWGEFHVNDGSVSIYVQK

SEQ ID NO: 40930 - protein, 480 aa, Synthetic construct
NGTMMQYFEWYLPNDGNHWNRLNSDASNLKSKGITAVWIPPAWKGASQNDVGYGAYDLYDLGEFNQKGTVRTKYGTRSQLQAAVTSLKNNGIQVYGDVVMNHKGGADATEMVRAVEVNPNNRNQEVTGEYTIEAWTRFDFPGRGNTHSSFKWRWYHFDGVDWDQSRRLNNRIYKFRGHGKAWDWEVDTEFGNYDYLMYADYDMDHPEVVNELRNWGVWYTNTLGLDGFRIDAVKHIKYSFTRDWINHVRSATGKNMFAVAEFWKNDLGAIENYLQKTNWNHSVFDVPLHYNLYNASKSGGNYDMRNIFNGTVVQKHPSHAVTFVDNHDSQPEEALESFVEEWFKPLAYALTLTREQGYPSVFYGDYYGIPTHGVPAMRSKIDPILEARQKYAYGPQHDYLDHPDVIGWTREGDSSHPKSGLATLITDGPGGSKRMYAGLKNAGETWYDITGNRSDTVKIGSDGWGEFHVNDGSVSIYVQK

SEQ ID NO: 40931 - protein, 480 aa, Bacillus sp.
NGTMMQYFEWYLPNDGNHWNRLNSDASNLKSKGITAVWIPPAWKGASQNDVGYGAYDLYDLGEFNQKGTVRTKYGTRSQFQAAVTSLKNNGIQVYGDVVMNHKGGADATEMVRAVEVNPNNRNQEVTGEYTIEAWTRFDFPGRGNTHSSFKWRWYHFDGVDWDQSRRLNNRIYKFRGHGKAWDWEVDTEFGNYDYLMYADYDMDHPEVVNELRNWGVWYTNTLGLDGFRIDAVKHIKYSFTRDWINHVRSATGKNMFAVAEFWKNDLGAIENYLQKTNWNHSVFDVPLHYNLYNASKSGGNYDMRNIFNGTVVQRHPSHAVTFVDNHDSQPEEALESFVEEWFKPLAYALTLTREQGYPSVFYGDYYGIPTHGVPAMRSKIDPILEARQKYAYGPQHDYLDHPDVIGWTREGDSSHPKSGLATLITDGPGGSKRMYAGLKNAGETWYDITGNRSDTVKIGSDGWGEFHVNDGSVSIYVQK

SEQ ID NO: 40932 - protein, 480 aa, Bacillus sp.
NGTMMQYFEWYLPNDGNHWNRLNSDASNLKSKGITAVWIPPAWKGASQNDVGYGAYDLYDLGEFNQKGTVRTKYGTRSQLQAAVTSLKNNGIQVYGDVVMNHKGGADATEMVRAVEVNPNNRNQEVTGEYTIEAWTRFDFPGRGNTHSSFKWRWYHFDGVDWDQSRKLNNRIYKFRGHGKAWDWEVDTEFGNYDYLMYVDYDMDHPEVVNELRNWGVWYTNTLGLDGFRIDAVKHIKYSFTRDWINHVRSATGKNMFAVAEFWKNDLGAIENYLQKTNWNHSVFDVPLHYNLYNASKSGGNYDMRNIFNGTVVQRHPSHAVTFVDNHDSQPEEALESFVDPWFKPLAYALTLTREQGYPSVFYGDYYGIPTHGVPAMRSKIDPILEARQKYAYGPQHDYLDHPDVIGWTREGDSSHPKSGLATLITDGPGGSKRMYAGLKNAGETWYDITGNRSDTVKIGSDGWGEFHVNGGSVSIYVQK

SEQ ID NO: 40933 - protein, 480 aa, Bacillus sp.
NGTMMQYFEWYLPNDGNHWNRLNSDASNLKSKGITAVWIPPAWKGASQNDVGYGAYDLYDLGEFNQKGTVRTKYGTRSQLQAAVTSLKNNGIQVYGDVVMNHKGGADNTEMVRAVEVNPNNRNQEVTGEYTIEAWTRFDFPGRGNTHSSFKWRWYHFDGVDWDQSRRLNNRIYKFRGHGKAWDWEVDTEFGNYDYLMYADYDMDHPEVVNELRNWGVWYTNTLGLDGFRIDAVKHIKYSFTRDWINHVRSATGKNMFAVAEFWKNDLGAIENYLQKTNWNHSVFDVPLHYNLYNASKSGGNYDMRNIFNGTVVQRHPSHAVTFVDNHDSQPEEALESFVEEWFKPLAYALTLTREQGYPSVFYGDYYGIPTHGVPAMRSKIDPILEARQKYAYGPQHDYLDHPDVIGWTREGDSSHPKSGLATLITDGPGGSKRMYAGLKNAGETWYDITGNRSDTVKIGSDGWGEFHVNDGSVSIYVQK

SEQ ID NO: 40934 - protein, 480 aa, Bacillus sp.
NGTMMQYFEWYLPNDGNHWNRLNSDASNLKSKGITAVWIPPAWKGASQNDVGYGAYDLYDLGEFNQRGTVRTKYGTRSQLQAAVTSLKNNGIQVYGDVVMNHKGGADATEMVRAVEVNPNNRNQEVTGEYTIEAWTRFDFPGRGNTHSSFKWRWYHFDGVDFDQSRRLNNRIYKFRGHGKAWDWEVDTEFGNYDYLMYADYDMDHPEVVNELRNWGVWYTNTLGLDGFRIDAVKHIKYSFTRDWINHVRSATGKNMFAVAEFWKNDLGAIENYLQKTNWNHSVFDVPLHYNLYNASKSGGNYDMRNIFNGTVVQRHPSHAVTFVDNHDSQPEEALESFVETWFKPLAYALTLTREQGYPSVFYGDYYGIPTHGVPAMRSKIDPILEARQKYAYGPQHDYLDHPDVIGWTREGDSSHPKSGLATLITDGPGGSKRMYAGLKNAGETWYDITGNRSDTVKIGSDGWGEFHVNDGSVSIYVQK

SEQ ID NO: 40935 - protein, 480 aa, Bacillus sp.
NGTMMQYFEWYLPNDGNHWNRLNSDASNLKSKGITAVWIPPAWKGASQNDVGYGAYDLYDLGEFNQKGTVRTKYGTRSQLQAAVTSLKNNGIQVYGDVVMNHKGGADATEMVRAVEVNPNNRNQEVTGEYTIEAWTRFDFPGRGNTHSSFKWRWYHFDGVDWDQSRRLNNRIYKFRGHGKAWDWEVDTEFGNYDYLMYADYDMDHPEVVNELRNWGVWYTNTLGLDGFRIDAVKHIKYSFTRDWINHVRSATGKNMFAVAEFWKNDLGAIENYLQKTNWNHSVFDVPLHYNLYNASKSGGNYDMRNIFNGTVVQRHPSHAVTFVDNHDSQPEEALESFVEPWFKPLAYALTLTREQGYPSVFYGDYYGIPTHGVPAMRSKIDPILEARQKYAYGPQHDYLDHPDVIGWTREGDSSHPKSGLATLITDGPGGSKRMYAGLKNAGETWYDITGNRSDTVKIGSDGWGEFHVNQGSVSIYVQK

SEQ ID NO: 40936 - protein, 480 aa, Bacillus sp.
NGTMMQYFEWYLPNDGNHWNRLNSDASNLKSKGITAVWIPPAWKAASQNDVGYGAYDLYDLGEFNQKGTVRTKYGTRSQLQAAVTSLKNNGIQVYGDVVMNHKGGADATEMVRAVEVNPNNRNQEVTGEYTIEAWTRFDFPGRGNTHSSFKWRWYHFDGVDWDQSRNVNNRIYKFRGHGKAWDWEVDTEFGNYDYLMYADYDMDHPEVVNELRNWGVWYTNTLGLDGFRIDAVKHIKYSFTRDWINHVRSATGKNMFAVAEFWKNDLGAIENYLQKTNWNHSVFDVPLHYNLYNASKSGGNYDMRNIFNGTVVQRHPSHAVTFVDNHDSQPEEALESFVEEWFKPLAYALTLTREQGYPSVFYGDYYGIPTHGVPAMRSKIDPILEARQKYAYGPQHDYLDHPDVIGWTREGDSSHPKSGLATLITDGPGGSKRMYAGLKNAGETWYDITGNRSDTVKIGSDGWGEFHVNDGSVSIYVQK

SEQ ID NO: 40937 - protein, 480 aa, Bacillus sp.
NGTMMQYFEWYLPNDGNHWNRLNSDASNLKSKGITAVWIPPAWKGASQNDVGYGAYDLYDLGEFNQKGTVRTKYGTRSQLQAAVTSLKNNGIQVYGDVVMNHKGGADATEMVRAVEVNPNNRNQEVTGEYTIEAWTRFDFPGRGNTHSSFKWRWYHFDGVDWDQSRRLNNRIYKFRGHGKAWDWEVDTEFGNYDYLMYADYDMDHPEVVNELRNWGVWYTNTLGLDGFRIDAVKHIKYSFTRDWINHVRSATGKNMFAVAEFWKNDLGAIENYLQKTNWNHSVFDVPLHYNLYNASKSGGNYDMRNIFNGTVVQRHPSHAVTFVDNHDSQPEEALESFVEEWFKPLAYALTLTREQGYPSVFYGDYYGIPTHGVPAMRSKIDPILEARQKYAYGPQHDYLDHPDVIGWTREGDSSHPWSGLATLITDGPGGSKRMYAGLKNAGETWYDITGNRSDTVKIGSDGWGEFHVNDGSVSIYVQK

SEQ ID NO: 40938 - protein, 480 aa, Synthetic construct
NGTMMQYFEWYLPNDGNHWNRLNSDASNLKSKGITAVWIPPAWKGASQNDVGYGAYDLYDLGEFNQKGTVRTKYGTRSQLQAAVTSLKNNGIQVYGDVVMNHKGGADATEMVRAVEVNPNNRNQEVTGEYTIEAWTRFDFPGRGNTHSSFKWRWYHFDGVDWDQSRRLNNRIYKFRGHGKAWDWEVDTENGNYDYLMYADIDMDHPEPLNELRNWGVWYTNTLGLDGFRIDAVKHIKYSFTRDWINHVRSATGKNMFAVAEFWKNDLGAIENYLQKTNWNHSVFDVPLHYNLYNASKSGGNYDMRNIFNGTVVQRHPSHAVTFVDNHDSQPEEALESFVEEWFKPLAYALTLTREQGYPSVFYGDYYGIPTHGVPAMRSKIDPILEARQKYAYGPQHDYLDHPDVIGWTREGDSSHPKSGLATLITDGPGGSKRMYAGLKNAGETWYDITGNRSDTVKIGSDGWGEFHVNDGSVSIYVQK

SEQ ID NO: 40939 - protein, 480 aa, Bacillus sp.
NGTMMQYFEWYLPNDGNHWNRLNSDASNLKSKGITAVWIPPAWKGASQNDVGYGAYDLYDLGEFNQKGTVRTKYGTRSQLQAAVTSLKNNGIQVYGDVVMNHKGGADATEMVRAVEVNPNNRNQEVTGEYTIEAWTRFDFPGRGNTHSSFKWRWYHFDGVDWDQSRRLNNRIYKFRGHGKAWDWEVDTEFGNYDYLMYADYDMDHPEVVNELRNWGVWYTNTLGLDGFRIDAVKHIKYSFTRDWINHVRSATGKNMFAVAEFWKNDLGAIENYLQKTNWNHSVFDVPLHYNLYNASKSGGNYDMRNIFNGTVVQRHPSHAVTFVDNHDSQPEEALESFVEEWFKPLAYALTLTREQGYPSVFYGDYYGIPTHGVPAMRSKIDPILEARQKYAYGPQHDYLDHPDVIGWTREGDSSHPKSGLATLITDGPGGSKRMYAGLKNAGETWYDITGNRSDTVKILSDGWGEFHVNDGSVSIYVQK

SEQ ID NO: 40940 - protein, 480 aa, Bacillus sp.
NGTMMQYFEWYLPNDGNHWNRLNSDASNLKSKGITAVWIPPAWKGASQNDVGYGAYDLYDLGEFNQKGTVRTKYGTRSQLQAAVTSLKNNGIAVYGDVVMNHKGGADATEMVRAVEVNPNNRNQEVTGEYTIEAWTRFDFPGRGNTHSSFKWRWYHFDGVDWDQSRRLNNRIYKFRGHGKAWDWEVDTEFGNYDYLMYADYDMDHPEVVNELRNWGVWYTNTLGLDGFRIDAVKHIKYSFTRDWINHVRSATGKNMFAVAEFWKNDLGAIENYLQKTNWNHSVFDVPLHYNLYNASKSGGNYDMRNIFNGTVVQRHPSHAVTFVDNHDSQPEEALESFVEEWFKPLAYALTLTREQGYPSVFYGDYYGIPTHGVPAMRSKIDPILEARQKYAYGPQHDYLDHPDVIGWTREGDSSHPKSGLATLITDGPGGSKRMYAGLKNAGETWYDITGNRSDTVKIGSDGWGEFHVNDGSVSIYVQK

SEQ ID NO: 40941 - protein, 480 aa, Bacillus sp.
NGTMMQYFEWYLPNDGNHWNRLNSDASNLKSKGITAVWIPPAWKGASQNDVGYGAYDLYDLGEFNQKGTVRTKYGTRSQLQAAVTSLKNNGIQVYGDVVMNHKGGADATEMVRAVEVNPNNRNQEVTGEYTIEAWTRFDFPGRGNTHSSFKWRWYHFDGVDWDQSRRLNNRIYKFRGHGKAWDWEVDTEFGNYDYLAYADYDMDHPEVVNELRNWGVWYTNTLGLDGFRIDAVKHIKYSFTRDWINHVRSATGKNMFAVAEFWKNDLGAIENYLQKTNWNHSVFDVPLHYNLYNASKSGGNYDMRNIFNGTVVQRHPSHAVTFVDNHDSQPEEALESFVEEWFKPLAYALTLTREQGYPSVFYGDYYGIPTHGVPAMRSKIDPILEARQKYAYGPQHDYLDHPDVIGWTREGDSSHPKSGLATLITDGPGGSKRMYAGLKNAGETWYDITGNRSDTVKIGSDGWGEFHVNDGSVSIYVQK

SEQ ID NO: 40942 - protein, 480 aa, Bacillus sp.
NGTMMQYFEWYLPNDGNHWNRLNSDASNLKSKGITAVWIPPAWKGASQNDVGYGAYDLYDLGEFNQKGTVRTKYGTRSQLQAAVTSLKNNGIQVYGDVVMNHKGGADATEMVRAVEVNPNNRNQEVTGEYTIEAWTRFDFPGRGNTHSSFKWRWYHFDGVDWDQSRRLNNRIYKFRGHGKAWDWEVDTEFGNYDYLMYADYDMDHPEVVNELRNWGVWYTNTLGLDGFRIDAVKHIKYSFTRDWINHVRSATGKNMFAVAEFWKNDLGAIENYLQKTNWNHSVFDVPLHYNLYNASKSGGNYDMRNIFNGTVVQRHPSHAVTFVDNHDSQPEEALESFVETWFKPLAYALTLTREQGYPSVFYGDYYGIPTHGVPAMRSKIDPILEARQKYAYGPQHDYLDHPDVIGWTREGDSSHPKSGLATLITDGPGGSKRMYAGLKNAGETWYDITGNRSDTVKIGSDGWGEFHVNQASVSIYVQK

SEQ ID NO: 40943 - protein, 480 aa, Bacillus sp.
NGTMMQYFEWYLPNDGNHWNRLNSDASNLKSKGITAVWIPPAWKAASQNDVGYGAYDLYDLGEFNQKGTVRTKYGTRSQLQAAVTSLKNNGIQVYGDVVMNHKGGADATEMVRAVEVNPNNRNQEVTGEYTIEAWTRFDFPGRGNTHSSFKWRWYHFDGVDWDQSRRVHNRIYKFRGHGKAWDWEVDTEFGNYDYLMYADYDMDHPEVVNELRNWGVWYTNTLGLDGFRIDAVKHIKYSFTRDWINHVRSATGKNMFAVAEFWKNDLGAIENYLQKTNWNHSVFDVPLHYNLYNASKSGGNYDMRNIFNGTVVQRHPSHAVTFVDNHDSQPEEALESFVEEWFKPLAYALTLTREQGYPSVFYGDYYGIPTHGVPAMRSKIDPILEARQKYAYGPQHDYLDHPDVIGWTREGDSSHPKSGLATLITDGPGGSKRMYAGLKNAGETWYDITGNRSDTVKIGSDGWGEFHVNDGSVSIYVQK

SEQ ID NO: 40944 - protein, 480 aa, Bacillus sp.
NGTMMQYFEWYLPNDGNHWNRLNSDASNLKSKGITAVWIPPAWKGASQNDVGYGAYDLYDLGEFNQKGTVRTKYGTRSQLQAAVTSLKNNGIQVYGDVVMNHKGGADATEMVRAVEVNPNNRNQEVTGEYTIEAWTRFDFPGRGNTHSSFKWRWYHFDGVDWDQSRRLNNRIYKFRGHGKAWDWEVDTAFGNYDYLMYADYDMDHPEVVNELRNWGVWYTNTLGLDGFRIDAVKHIKYSFTRDWINHVRSATGKNMFAVAEFWKNDLGAIENYLQKTNWNHSVFDVPLHYNLYNASKSGGNYDMRNIFNGTVVQRHPSHAVTFVDNHDSQPEEALESFVEEWFKPLAYALTLTREQGYPSVFYGDYYGIPTHGVPAMRSKIDPILEARQKYAYGPQHDYLDHPDVIGWTREGDSSHPKSGLATLITDGPGGSKRMYAGLKNAGETWYDITGNRSDTVKIGSDGWGEFHVNDGSVSIYVQK

SEQ ID NO: 40945 - protein, 480 aa, Synthetic construct
NGTMMQYFEWYLPNDGNHWNRLNSDASNLKSKGITAVWIPPAWKGASQNDVGYGAYDLYDLGEFNQKGTVRTKYGTRSQLQAAVTSLKNNGIQVYGDVVMNHKGGADATEMVRAVEVNPNNRNQEVTGEYTIEAWTRFDFPGRGNTHSSFKWRWYHFDGVDWDQSRRLNNRIYKFRGHGKAWDWEVDTENGNYDYLMYADIDMDHPEIPNELRNWGVWYTNTLGLDGFRIDAVKHIKYSFTRDWINHVRSATGKNMFAVAEFWKNDLGAIENYLQKTNWNHSVFDVPLHYNLYNASKSGGNYDMRNIFNGTVVQRHPSHAVTFVDNHDSQPEEALESFVEEWFKPLAYALTLTREQGYPSVFYGDYYGIPTHGVPAMRSKIDPILEARQKYAYGPQHDYLDHPDVIGWTREGDSSHPKSGLATLITDGPGGSKRMYAGLKNAGETWYDITGNRSDTVKIGSDGWGEFHVNDGSVSIYVQK

SEQ ID NO: 40946 - protein, 480 aa, Synthetic construct
NGTMMQYFEWYLPNDGNHWNRLNSDASNLKSKGITAVWIPPAWKGASQNDVGYGAYDLYDLGEFNQKGTVRTKYGTRSQLQAAVTSLKNNGIQVYGDVVMNHKGGADATEMVRAVEVNPNNRNQEVTGEYTIEAWTRFDFPGRGNTHSSFKWRWYHFDGVDWDQSRRLNNRIYKFRPHGKEWDWEVDTENGNYDYLMYADIDMDHPEVVNELRNWGVWYTNTLGLDGFRIDAVKHIKYSFTRDWINHVRSATGKNMFAVAEFWKNDLGAIENYLQKTNWNHSVFDVPLHYNLYNASKSGGNYDMRNIFNGTVVQRHPSHAVTFVDNHDSQPEEALESFVEEWFKPLAYALTLTREQGYPSVFYGDYYGIPTHGVPAMRSKIDPILEARQKYAYGPQHDYLDHPDVIGWTREGDSSHPKSGLATLITDGPGGSKRMYAGLKNAGETWYDITGNRSDTVKIGSDGWGEFHVNDGSVSIYVQK

SEQ ID NO: 40947 - protein, 480 aa, Bacillus sp.
NGTMMQYFEWYLPNDGNHWNRLNSDASNLKSKGITAVWIPPAWKGASQNDVGYGAYDLYDLGEFNQKGTVRTKYGTRSQLQAAVTSLKNNGIQVYGDVVMNHKGGADATEMVRAVEVNPNNRNQEVTGEYTIEAWTRFDFPGRGNTHSSFKWRWYHFDGVDWDQSRRLNNRIYKFRGHGKAWDWEVDTEFGNYDYLMYADYDMDHPEVVNELRNWGVWYTNTLGLDGFRIDAVKHIKYSFTRDWINHVRSATGKNMFAVAEFWKNDLGAIENYLQKTNWNHSVFDVPLHYNLYNASKSGGNYDMRNIFNGTVVQRHPSHAVTFVDNHDSQPEEALESFVEEWFKPLAYALTLTREQGYPSVFYGDYYGIPTHGVPAMRSKIDPILEARQKYAYGPQHDYLDHPDVIGWTREGDSSHPKSGLATLITDGPGGSKRMYAGLKNAGETWYDITGNRSDTVKIGSDGWGEFHVNDQSVSIYVQK

SEQ ID NO: 40948 - protein, 480 aa, Bacillus sp.
NGTMMQYFEWYLPNDGNHWNRLNSDASNLKSKGITAVWIPPAWKGASQNDVGYGAYDLYDLGEFNQKGTVRTKYGTRSQLQAAVTSLKNNGIQVYGDVVMNHKGGADATEMVRAVEVNPNNRNQEVTGEYTIEAWTRFDFPGRGNTHSSFKWRWYHFDGVDWDQSRRLNNRIYKFRGHGKAWDWEVDTEFGNYDYLMYADYDMDHPEVVNELRNWGVWYTNTLGLDGFRIDAVKHIKYSFTRDWINHVRSATGKNMFAVAEFWKNDLGAIENYLQKGNWNHSVFDVPLHYNLYNASKSGGNYDMRNIFNGTVVQRHPSHAVTFVDNHDSQPEEALESFVEEWFKPLAYALTLTREQGYPSVFYGDYYGIPTHGVPAMRSKIDPILEARQKYAYGPQHDYLDHPDVIGWTREGDSSHPKSGLATLITDGPGGSKRMYAGLKNAGETWYDITGNRSDTVKIGSDGWGEFHVNDGSVSIYVQK

SEQ ID NO: 40949 - protein, 480 aa, Synthetic construct
NGTMMQYFEWYLPNDGNHWNRLNSDASNLKSKGITAVWIPPAWKGASQNDVGYGAYDLYDLGEFNQKGTVRTKYGTRSQLQAAVTSLKNNGIQVYGDVVMNHKGGADATEMVRAVEVNPNNRNQEVTGEYTIEAWTRFDFPGRGNTHSSFKWRWYHFDGVDWDQSRRLNNRIYKFRGHGKAWDWEVDTEFGNYDYLMYADIDMDHPEPVNELRNWGVWYTNTLGLDGFRIDAVKHIKYSFTRDWINHVRSATGKNMFAVAEFWKNDLGAIENYLQKTNWNHSVFDVPLHYNLYNASKSGGNYDMRNIFNGTVVQRHPSHAVTFVDNHDSQPEEALESFVEEWFKPLAYALTLTREQGYPSVFYGDYYGIPTHGVPAMRSKIDPILEARQKYAYGPQHDYLDHPDVIGWTREGDSSHPKSGLATLITDGPGGSKRMYAGLKNAGETWYDITGNRSDTVKIGSDGWGEFHVNDGSVSIYVQK

SEQ ID NO: 40950 - protein, 480 aa, Bacillus sp.
NGTMMQYFEWYLPNDGNHWNRLNSDASNLKSKGITAVWIPPAWKGASQNDVGYGAYDLYDLGEFNQKGTVRTKYGTRSQLQAAVTSLKNNGIQVYGDVVMNHKGGADATEMVRAVEVNPNNRNQEVTGEYTIEAWTRFDFPGRGNTHSSFKWRWYHFDGVDWDQSRRLNNRIYKFRGHGKAWDWEVDTEFGNYDYLMYADYDMDHPEVVNELRNWGVWYTNTLGLDGFRIDAVKHIKYSFTRDWINHVRSATGKNMFAVAEFWKNDLGAIENYLQKTNWNHSVFDVPLHYNLYNASKSGANYDMRNIFNGTVVQRHPSHAVTFVDNHDSQPEEALESFVDEWFKPLAYALTLTREQGYPSVFYGDYYGIPTHGVPAMRSKIDPILEARQKYAYGPQHDYLDHPDVIGWTREGDSSHPKSGLATLITDGPGGSKRMYAGLKNAGETWYDITGNRSDTVKIGSDGWGEFHVNDGSVSIYVQK

SEQ ID NO: 40951 - protein, 480 aa, Bacillus sp.
NGTMMQYFEWYLPNDGNHWNRLNSDASNLKSKGITAVWIPPAWKGASQNDVGYGAYDLYDLGEFNQKGTVRTKYGTRSQLQAAVTSLKNNGIQVYGDVVMNHKGGADATEMVRAVEVNPNNRNQEVTGEYTIEAWTRFDFPGRGNTHSSFKWRWYHFDGVDWDQSRRLNNRIYKFRGHGKAWDWEVDTEFGNYDYLMYADYDMDHAEVVNELRNWGVWYTNTLGLDGFRIDAVKHIKYSFTRDWINHVRSATGKNMFAVAEFWKNDLGAIENYLQKTNWNHSVFDVPLHYNLYNASKSGGNYDMRNIFNGTVVQRHPSHAVTFVDNHDSQPEEALESFVEEWFKPLAYALTLTREQGYPSVFYGDYYGIPTHGVPAMRSKIDPILEARQKYAYGPQHDYLDHPDVIGWTREGDSSHPKSGLATLITDGPGGSKRMYAGLKNAGETWYDITGNRSDTVKIGSDGWGEFHVNDGSVSIYVQK

SEQ ID NO: 40952 - protein, 480 aa, Bacillus sp.
NGTMMQYFEWYLPNDGNHWNRLNSDASNLKSKGITAVWIPPAWKGASQNDVGYGAYDLYDLGEFNQKGTVRTKYGTRSQLQAAVTSLKNNGIVVYGDVVMNHKGGADATEMVRAVEVNPNNRNQEVTGEYTIEAWTRFDFPGRGNTHSSFKWRWYHFDGVDWDQSRRLNNRIYKFRGHGKAWDWEVDTEFGNYDYLMYADYDMDHPEVVNELRNWGVWYTNTLGLDGFRIDAVKHIKYSFTRDWINHVRSATGKNMFAVAEFWKNDLGAIENYLQKTNWNHSVFDVPLHYNLYNASKSGGNYDMRNIFNGTVVQRHPSHAVTFVDNHDSQPEEALESFVEEWFKPLAYALTLTREQGYPSVFYGDYYGIPTHGVPAMRSKIDPILEARQKYAYGPQHDYLDHPDVIGWTREGDSSHPKSGLATLITDGPGGSKRMYAGLKNAGETWYDITGNRSDTVKIGSDGWGEFHVNDGSVSIYVQK

SEQ ID NO: 40953 - protein, 480 aa, Bacillus sp.
NGTMMQYFEWYLPNDGNHWNRLNSDASNLKSKGITAVWIPPAWKGASQNDVGYGAYDLYDLGEFNQKGTVRTKYGTRSQLQAAVTSLKNNGIQVYGDVVMNHKGGADATEMVDAVEVNPNNRNQEVTGEYTIEAWTRFDFPGRGNTHSSFKWRWYHFDGVDWDQSRRLNNRIYKFRNHGKAWDWEVDTEFGNYDYLMYADYDMDHPEVVNELRNWGVWYTNTLGLDGFRIDAVKHIKYSFTRDWINHVRSATGKNMFAVAEFWKNDLGAIENYLQKTNWNHSVFDVPLHYNLYNASKSGGNYDMRNIFNGTVVQRHPSHAVTFVDNHDSQPEEALESFVEEWFKPLAYALTLTREQGYPSVFYGDYYGIPTHGVPAMRSKIDPILEARQKYAYGPQHDYLDHPDVIGWTREGDSSHPKSGLATLITDGPGGSKRMYAGLKNAGETWYDITGNRSDTVKIGSDGWGEFHVNDGSVSIYVQK

SEQ ID NO: 40954 - protein, 480 aa, Bacillus sp.
NGTMMQYFEWYLPNDGNHWNRLNSDASNLKSKGITAVWIPPAWKGASQNDVGYGAYDLYDLGEFNQKGTVRTKYGTRSQLQAAVTSLKNNGIQVYGDVVMNHKGGADQTEMVRAVEVNPNNRNQEVTGEYTIEAWTRFDFPGRGNTHSSFKWRWYHFDGVDWDQSRRLNNRIYKFRGHGKAWDWEVDTEFGNYDYLMYADYDMDHPEVVNELRNWGVWYTNTLGLDGFRIDAVKHIKYSFTRDWINHVRSATGKNMFAVAEFWKNDLGAIENYLQKTNWNHSVFDVPLHYNLYNASKSGGNYDMRNIFNGTVVQRHPSHAVTFVDNHDSQPEEALESFVEEWFKPLAYALTLTREQGYPSVFYGDYYGIPTHGVPAMRSKIDPILEARQKYAYGPQHDYLDHPDVIGWTREGDSSHPKSGLATLITDGPGGSKRMYAGLKNAGETWYDITGNRSDTVKIGSDGWGEFHVNDGSVSIYVQK

SEQ ID NO: 40955 - protein, 480 aa, Bacillus sp.
NGTMMQYFEWYLPNDGNHWNRLNSDASNLKSKGITAVWIPPAWKGASQNDVGYGAYDLYDLGEFNQKGTVRTKYGTRSQLQAAVTSLKNNGIQVYGDVVMNHKGGADATEMVRAVEVNPNNRNQEVTGEYTIEAWTRFDFPGRGNTHSSFKWRWYHFDGVDWDQSRRLNNRIYKFRGHGKAWDWEVDTEFGNYDYLMYADYDMDHPEVVNELRNWGVWYTNTLGLDGFRIDAVKHIKYSFTRDWINHVRSATGKNMFAVAEFWKNDLGAIENYLQKTNWNHSVFDVPLHYNLYNASKSGGNYDMRNIFNGTVVQRHPSHAVTFVDNHDSQPEEALESFVDTWFKPLAYALTLTREQGYPSVFYGDYYGIPTHGVPAMRSKIDPILEARQKYAYGPQHDYLDHPDVIGWTREGDSSHPKSGLATLITDGPGGSKRMYAGLKNAGETWYDITGNRSDTVKIGSDGWGEFHVNQQSVSIYVQK

SEQ ID NO: 40956 - protein, 480 aa, Bacillus sp.
NGTMMQYFEWYLPNDGNHWNRLNSDASNLKSKGITAVWIPPAWKATSQNDVGYGAYDLYDLGEFNQKGTVRTKYGTRSQLQAAVTSLKNNGIQVYGDVVMNHKGGADATEMVRAVEVNPNNRNQEVTGEYTIEAWTRFDFPGRGNTHSSFKWRWYHFDGVDWDQSRNVNNRIYKFRGHGKAWDWEVDTEFGNYDYLMYADYDMDHPEVVNELRNWGVWYTNTLGLDGFRIDAVKHIKYSFTRDWINHVRSATGKNMFAVAEFWKNDLGAIENYLQKTNWNHSVFDVPLHYNLYNASKSGGNYDMRNIFNGTVVQRHPSHAVTFVDNHDSQPEEALESFVETWFKPLAYALTLTREQGYPSVFYGDYYGIPTHGVPAMRSKIDPILEARQKYAYGPQHDYLDHPDVIGWTREGDSSHPKSGLATLITDGPGGSKRMYAGLKNAGETWYDITGNRSDTVKIGSDGWGEFHVNDASVSIYVQK

SEQ ID NO: 40957 - protein, 480 aa, Bacillus sp.
NGTMMQYFEWYLPNDGNHWNRLNSDASNLKSKGITAVWIPPAWKGASQNDVGYGAYDLYDLGEFNQKGTVRTKYGTRSQLQAAVTSLKNNGIQVYGDVVMNHKGGADATEMVRAVEVNPNNRNQEVTGEYTIEAWTRFDFPGRGNTHSSFKWRWYHFDGVDWDQSRRTNNRIYKFRGHGKAWDWEVDTEFGNYDYLMYTDYDMDHPEVVNELRNWGVWYTNTLGLDGFRIDAVKHIKYSFTRDWINHVRSATGKNMFAVAEFWKNDLGAIENYLQKTNWNHSVFDVPLHYNLYNASKSGGNYDMRNIFNGTVVQRHPSHAVTFVDNHDSQPEEALESFVEEWFKPLAYALTLTREQGYPSVFYGDYYGIPTHGVPAMRSKIDPILEARQKYAYGPQHDYLDHPDVIGWTREGDSSHPKSGLATLITDGPGGSKRMYAGLKNAGETWYDITGNRSDTVKIGSDGWGEFHVNDGSVSIYVQK

SEQ ID NO: 40958 - protein, 480 aa, Bacillus sp.
NGTMMQYFEWYLPNDGNHWNRLNSDASNLKSKGITAVWIPPAWKSASQNDVGYGAYDLYDLGEFNQKGTVRTKYGTRSQLQAAVTSLKNNGIQVYGDVVMNHKGGADATEMVRAVEVNPNNRNQEVTGEYTIEAWTRFDFPGRGNTHSSFKWRWYHFDGVDWDQSRRLNNRIYKFRGHGKAWDWEVDTEFGNYDYLMYADYDMDHPEVVNELRNWGVWYTNTLGLDGFRIDAVKHIKYSFTRDWINHVRSATGKNMFAVAEFWKNDLGAIENYLQKTNWNHSVFDVPLHYNLYNASKSGGNYDMRNIFNGTVVQRHPSHAVTFVDNHDSQPEEALESFVEEWFKPLAYALTLTREQGYPSVFYGDYYGIPTHGVPAMRSKIDPILEARQKYAYGPQHDYLDHPDVIGWTREGDSSHPKSGLATLITDGPGGSKRMYAGLKNAGETWYDITGNRSDTVKIGSDGWGEFHVNDGSVSIYVQK

SEQ ID NO: 40959 - protein, 480 aa, Bacillus sp.
NGTMMQYFEWYLPNDGNHWNRLNSDASNLKSKGITAVWIPPAWKGASQNDVGYGAYDLYDLGEFNQKGTVRTKYGTRSQLQAAVTSLKNNGIQVYGDVVMNHKGGADATEMVRAVEVNPNNRNQEVTGEYTIEAWTRFDFPGRGNTHSSFKWRWYHFDGVDWDQSRRLNNRIYKFRGHGKAWDWEVDTEFGNYDYLMYADYDMDHPEVVNELRNWGVWYTNTLGLDGFRIDAVKHIKYSFTRDWINHVRSATGKNMFAVAEFWKNDLGAIENYLQKTNWNHSVFDVPLHYNLYNASKSGGNYDMRNIFNGTVVQRHPSHAVTFVDNHDSQPEEALESFVEEWFKPLAYALTLTREQGYSSVFYGDYYGIPTHGVPAMRSKIDPILEARQKYAYGPQHDYLDHPDVIGWTREGDSSHPKSGLATLITDGPGGSKRMYAGLKNAGETWYDITGNRSDTVKIGSDGWGEFHVNDGSVSIYVQK

SEQ ID NO: 40960 - protein, 480 aa, Bacillus sp.
NGTMMQYFEWYLPNDGNHWNRLNSDASNLKSKGITAVWIPPAWKGASQNDVGYGAYDLYDLGEFNQKGTVRTKYGTRSQLQAAVTSLKNNGIQVYGDVVMNHKGGADATEMVRAVEVNPNNRNQEVTGEYTIEAWTRFDFPGRGNTHSSFKWRWYHFDGVDWDQSRRLNNRIYKFRGHGKAWDWEVDTEFGNYDYLMYADYDMDHPEVVNELRNWGVWYTNTLGLDGFRIDAVKHIKYSFTRDWINHVRSATGKNMFAVAEFFKNDLGAIENYLQKTNWNHSVFDVPLHYNLYNASKSGGNYDMRNIFNGTVVQRHPSHAVTFVDNHDSQPEEALESFVEEWFKPLAYALTLTREQGYPSVFYGDYYGIPTHGVPAMRSKIDPILEARQKYAYGPQHDYLDHPDVIGWTREGDSSHPKSGLATLITDGPGGSKRMYAGLKNAGETWYDITGNRSDTVKIGSDGWGEFHVNDGSVSIYVQK

SEQ ID NO: 40961 - protein, 480 aa, Bacillus sp.
NGTMMQYFEWYLPNDGNHWNRLNSDASNLKSKGITAVWIPPAWKGASQNDVGYGAYDLYDLGEFNQKGTVRTKYGTRSQLQAAVTSLKNNGIQVYGDVVMNHKGGADATEMVRAVEVNPNNRNQEVTGEYTIEAWTRFDFPGRGNTHSSFKWRWYHFDGVDWDQSRRLNNRIYKFRGHGKAWDWEVDTEFGNYDYLMYADYDMDHPEVVNELRNWGVWYTNTLGLDGFRIDAVKHIKYSFTRDWINHVRSATGKNMFAVAEFWKNDLGAIENYLQKTNWNHSVFDVPLHYNLYNASKSGGNYDMRNIFNGTVVQRHPSHAVTFVDNHDSQPEEALESFVEEWFKPLAYALTLTREQGYPSVFYGDYYGIPTHGVPAMRSKIDPILEARQKYAYGPQHDYLDHPDRIGWTREGDSSHPKSGLATLITDGPGGSKRMYAGLKNAGETWYDITGNRSDTVKIGSDGWGEFHVNDGSVSIYVQK

SEQ ID NO: 40962 - protein, 480 aa, Bacillus sp.
NGTMMQYFEWYLPNDGNHWNRLNSDASNLKSKGITAVWIPPAWKGASQNDVGYGAYDLYDLGEFNQKGTVRTKYGTRSQLQAAVTSLKNNGIQVYGDVVMNHKGGADATEMVRAVEVNPNNRNQEVTGEYTIEAWTRFDFPGRGNTHSSFKWRWYHFDGVDWDQSRRLNNRIYKFRGHGKAWDWEVDTEFGNYDYLMYADYDMDHPEVVNELRNWGVWYTNTLGLDGFRIDAVKHIKYSFTRDWINHVRSATGKNMFAVAEFWKNDLGAIENYLQKTNWNHSVFDVPLHYNLYNASKSAGNYDMRNIFNGTVVQRHPSHAVTFVDNHDSQPEEALESFVEEWFKPLAYALTLTREQGYPSVFYGDYYGIPTHGVPAMRSKIDPILEARQKYAYGPQHDYLDHPDVIGWTREGDSSHPKSGLATLITDGPGGSKRMYAGLKNAGETWYDITGNRSDTVKIGSDGWGEFHVNDGSVSIYVQK

SEQ ID NO: 40963 - protein, 480 aa, Bacillus sp.
NGTMMQYFEWYLPNDGNHWNRLNSDASNLKSKGITAVWIPPAWKGASQNDVGYGAYDLYDLGEFNQKGTVRTKYGTRSQLQAAVTSLKNNGIQVYGDVVMNHKGGADATEMVRAVEVNPNNRNQEVTGEYTIEAWTRFDFPGRGNTHSSFKWRWYHFDGVDWDQSRRTTNRIYKFRGHGKAWDWEVDTEFGNYDYLMYVDYDMDHPEVVNELRNWGVWYTNTLGLDGFRIDAVKHIKYSFTRDWINHVRSATGKNMFAVAEFWKNDLGAIENYLQKTNWNHSVFDVPLHYNLYNASKSGGNYDMRNIFNGTVVQRHPSHAVTFVDNHDSQPEEALESFVEEWFKPLAYALTLTREQGYPSVFYGDYYGIPTHGVPAMRSKIDPILEARQKYAYGPQHDYLDHPDVIGWTREGDSSHPKSGLATLITDGPGGSKRMYAGLKNAGETWYDITGNRSDTVKIGSDGWGEFHVNDGSVSIYVQK

SEQ ID NO: 40964 - protein, 480 aa, Bacillus sp.
NGTMMQYFEWYLPNDGNHWNRLNSDASNLKSKGITAVWIPPAWKGASQNDVGYGAYDLYDLGEFNQKGTVRTKYGTRSQLQAAVTSLKNNGIQVYGDVVMNHKGGADATEMVRAVEVNPNNRNQEVTGEYTIEAWTRFDFPGRGNTHSSFKWRWYHFDGVDWDQSRRLNNRIYKFRGHGKAWDWEVDTEFGNYDYLMYADYDMDHDEVVNELRNWGVWYTNTLGLDGFRIDAVKHIKYSFTRDWINHVRSATGKNMFAVAEFWKNDLGAIENYLQKTNWNHSVFDVPLHYNLYNASKSGGNYDMRNIFNGTVVQRHPSHAVTFVDNHDSQPEEALESFVEEWFKPLAYALTLTREQGYPSVFYGDYYGIPTHGVPAMRSKIDPILEARQKYAYGPQHDYLDHPDVIGWTREGDSSHPKSGLATLITDGPGGSKRMYAGLKNAGETWYDITGNRSDTVKIGSDGWGEFHVNDGSVSIYVQK

SEQ ID NO: 40965 - protein, 480 aa, Bacillus sp.
NGTMMQYFEWYLPNDGNHWNRLNSDASNLKSKGITAVWIPPAWKGASQNDVGYGAYDLYDLGEFNQKGTVRTKYGTRSQLQAAVTSLKNNGIQVYGDVVMNHKGGADATEMVRAVEVNPNNRNQEVTGEYTIEAWTRFDFPGRGNTHSSFKWRWYHFDGVDWDQSRRLNNRIYKFRGHGKAWDWEVDTEFGNYDYLMYADYDMDHPEVVNELRNWGVWYTNTLGLDGFRIDAVKHIKYSFTRDWINHVRSATGKNMFAVAEFWKNDLGAIENYLQKTNWNHSVFDVPLHYNLYNASKSGGNYDMRNIFNGTVVQRHPSHAVTFVDNHDSQPEEALESFVEEWFKPLAYALTLTREQGYPSVFYGDYYGIPTHGVPAMRSKIDPILEARQKYAYGPQHDYLDHPDVIGWTREGDSSHPKSGLATLITDGPGGSKRMYAGLKNVGETWYDITGNRSDTVKIGSDGWGEFHVNDGSVSIYVQK

SEQ ID NO: 40966 - protein, 480 aa, Bacillus sp.
NGTMMQYFEWYLPNDGNHWNRLNSDASNLKSKGITAVWIPPAWKGASQNDVGYGAYDLYDLGEFNQKGTVRTKYGTRSQLQAAVTSLKNNGIQVYGDVVMNHKGGADATEMVRAVEVNPNNRNQEVTGEYNIEAWTRFDFPGRGNTHSSFKWRWYHFDGVDWDQSRQLDNRIYKFRGHGKAWDWEVDTEFGNYDYLMYTDYDMDHPEVVNELRNWGVWYTNTLGLDGFRIDAVKHIKYSFTRDWINHVRSATGKNMFAVAEFWKNDLGAIENYLQKTNWNHSVFDVPLHYNLYNASKSGGNYDMRNIFNGTVVQRHPSHAVTFVDNHDSQPEEALESFVEEWFKPLAYALTLTREQGYPSVFYGDYYGIPTHGVPAMRSKIDPILEARQKYAYGPQHDYLDHPDVIGWTREGDSSHPKSGLATLITDGPGGSKRMYAGLKNAGETWYDITGNRSDTVKIGSDGWGEFHVNDGSVSIYVQK

SEQ ID NO: 40967 - protein, 480 aa, Bacillus sp.
NGTMMQYFEWYLPNDGNHWNRLNSDASNLKSKGITAVWIPPAWKGASQNDVGYGAYDLYDLGEFNQKGTVRTKYGTRSQLQAAVTSLKNNGIQVYGDVVMNHKGGADATEMVRAVEVNPNNRNQEVTGEYTIEAWTRFDFPGRGNTHSSFKWRWYHFDGVDWDQSRRLNNRIYKFRGHGKAWDWEVDTEFGNYDYLMYADYDMDHPETVNELRNWGVWYTNTLGLDGFRIDAVKHIKYSFTRDWINHVRSATGKNMFAVAEFWKNDLGAIENYLQKTNWNHSVFDVPLHYNLYNASKSGGNYDMRNIFNGTVVQRHPSHAVTFVDNHDSQPEEALESFVEEWFKPLAYALTLTREQGYPSVFYGDYYGIPTHGVPAMRSKIDPILEARQKYAYGPQHDYLDHPDVIGWTREGDSSHPKSGLATLITDGPGGSKRMYAGLKNAGETWYDITGNRSDTVKIGSDGWGEFHVNDGSVSIYVQK

SEQ ID NO: 40968 - protein, 480 aa, Bacillus sp.
NGTMMQYFEWYLPNDGNHWNRLNSDASNLKSKGITAVWIPPAWKGASQNDVGYGAYDLYDLGEFNQKGTVRTKYGTRSQLQAAVTSLKNNGIQVYGDVVMNHKGGADATEMVRAVEVNPNNRNQEVTGEYTIEAWTRFDFPGRGNTHSSFKWRWYHFDGVDWDQSRRLNNRIYKFRGHGKAWDWEVDTEFGNYDYLMYADYDMDHPEVVNELRNWGVWYTNTLGLDGFRIDAVKHIKYSFTRDWINHVRSATGKNMFAVAEFWKNDLGAIENYLQKTNWNHSVFDVPLHYNLYNASNSGGNYDMRNIFNGTVVQRHPSHAVTFVDNHDSQPEEALESFVEEWFKPLAYALTLTREQGYPSVFYGDYYGIPTHGVPAMRSKIDPILEARQKYAYGPQHDYLDHPDVIGWTREGDSSHPKSGLATLITDGPGGSKRMYAGLKNAGETWYDITGNRSDTVKIGSDGWGEFHVNGGSVSIYVQK

SEQ ID NO: 40969 - protein, 480 aa, Synthetic construct
NGTMMQYFEWYLPNDGNHWNRLNSDASNLKSKGITAVWIPPAWKGASQNDVGYGAYDLYDLGEFNQKGTVRTKYGTRSQLQAAVTSLKNNGIQVYGDVVMNHKGGADATEMVRAVEVNPNNRNQEVTGEYTIEAWTRFDFPGRGNTHSSFKWRWYHFDGVDWDQSRRLNNRIYKFRGHGKAWDWEVDTEFGNYDYLMYADIDYDHPETTNEVRNWGVWYTNTLGLDGFRIDAVKHIKYSFTRDWINHVRSATGKNMFAVAEFWKNDLGAIENYLQKTNWNHSVFDVPLHYNLYNASKSGGNYDMRNIFNGTVVQRHPSHAVTFVDNHDSQPEEALESFVEEWFKPLAYALTLTREQGYPSVFYGDYYGIPTHGVPAMRSKIDPILEARQKYAYGPQHDYLDHPDVIGWTREGDSSHPKSGLATLITDGPGGSKRMYAGLKNAGETWYDITGNRSDTVKIGSDGWGEFHVNDGSVSIYVQK

SEQ ID NO: 40970 - protein, 480 aa, Synthetic construct
NGTMMQYFEWYLPNDGNHWNRLNSDASNLKSKGITAVWIPPAWKGASQNDVGYGAYDLYDLGEFNQKGTVRTKYGTRSQLQAAVTSLKNNGIQVYGDVVMNHKGGADATEMVRAVEVNPNNRNQEVTGEYTIEAWTRFDFPGRGNTHSSFKWRWYHFDGVDWDQSRRLNNRIYKFRSHGKEWDWEVDTENGNYDYLMYADIDMDHPEVVNELRNWGVWYTNTLGLDGFRIDAVKHIKYSFTRDWINHVRSATGKNMFAVAEFWKNDLGAIENYLQKTNWNHSVFDVPLHYNLYNASKSGGNYDMRNIFNGTVVQRHPSHAVTFVDNHDSQPEEALESFVEEWFKPLAYALTLTREQGYPSVFYGDYYGIPTHGVPAMRSKIDPILEARQKYAYGPQHDYLDHPDVIGWTREGDSSHPKSGLATLITDGPGGSKRMYAGLKNAGETWYDITGNRSDTVKIGSDGWGEFHVNDGSVSIYVQK

SEQ ID NO: 40971 - protein, 480 aa, Bacillus sp.
NGTMMQYFEWYLPNDGNHWNRLNSDASNLKSKGITAVWIPPAWKGASQNDVGYGAYDLYDLGEFNQKGTVRTKYGTRSQLQAAVTSLKNNGIQVYGDVVMNHKGGADATEMVRAVEVNPNNRNQEVTGEYTIEAWTRFDFPGRRNTHSSFKWRWYHFDGVDWDQSRRLNNRIYKFRGHGKAWDWEVDTEFGNYDYLMYADYDMDHPEVVNELRNWGVWYTNTLGLDGFRIDAVKHIKYSFTRDWINHVRSATGKNMFAVAEFWKNDLGAIENYLQKTNWNHSVFDVPLHYNLYNASKSGGNYDMRNIFNGTVVQRHPSHAVTFVDNHDSQPEEALESFVEEWFKPLAYALTLTREQGYPSVFYGDYYGIPTHGVPAMRSKIDPILEARQKYAYGPQHDYLDHPDVIGWTREGDSSHPKSGLATLITDGPGGSKRMYAGLKNAGETWYDITGNRSDTVKIGSDGWGEFHVNDGSVSIYVQK

SEQ ID NO: 40972 - protein, 480 aa, Synthetic construct
NGTMMQYFEWYLPNDGNHWNRLNSDASNLKSKGITAVWIPPAWKGASQNDVGYGAYDLYDLGEFNQKGTVRTKYGTRSQLQAAVTSLKNNGIQVYGDVVMNHKGGADATEMVRAVEVNPNNRNQEVTGEYTIEAWTRFDFPGRGNTHSSFKWRWYHFDGVDWDQSRRLNNRIYKFRGHGKAWDWEVDTEFGNYDYLMYADIDMDHPESVNELRNWGVWYTNTLGLDGFRIDAVKHIKYSFTRDWINHVRSATGKNMFAVAEFWKNDLGAIENYLQKTNWNHSVFDVPLHYNLYNASKSGGNYDMRNIFNGTVVQRHPSHAVTFVDNHDSQPEEALESFVEEWFKPLAYALTLTREQGYPSVFYGDYYGIPTHGVPAMRSKIDPILEARQKYAYGPQHDYLDHPDVIGWTREGDSSHPKSGLATLITDGPGGSKRMYAGLKNAGETWYDITGNRSDTVKIGSDGWGEFHVNDGSVSIYVQK

SEQ ID NO: 40973 - protein, 480 aa, Bacillus sp.
NGTMMQYFEWYLPNDGNHWNRLNSDASNLKSKGITAVWIPPAWKAASQNDVGYGAYDLYDLGEFNQKGTVRTKYGTRSQLQAAVTSLKNNGIQVYGDVVMNHKGGADATEMVRAVEVNPNNRNQEVTGEYTIEAWTRFDFPGRGNTHSSFKWRWYHFDGVDWDQSREVTNRIYKFRGHGKAWDWEVDTEFGNYDYLMYADYDMDHPEVVNELRNWGVWYTNTLGLDGFRIDAVKHIKYSFTRDWINHVRSATGKNMFAVAEFWKNDLGAIENYLQKTNWNHSVFDVPLHYNLYNASKSGGNYDMRNIFNGTVVQRHPSHAVTFVDNHDSQPEEALESFVEEWFKPLAYALTLTREQGYPSVFYGDYYGIPTHGVPAMRSKIDPILEARQKYAYGPQHDYLDHPDVIGWTREGDSSHPKSGLATLITDGPGGSKRMYAGLKNAGETWYDITGNRSDTVKIGSDGWGEFHVNDGSVSIYVQK

SEQ ID NO: 40974 - protein, 480 aa, Bacillus sp.
NGTMMQYFEWYLPNDGNHWNRLNSDASNLKSKGITAVWIPPAWKGASQNDVGYGAYDLYDLGEFNQKVTVRTKYGTRSQLQAAVTSLKNNGIQVYGDVVMNHKGGADATEMVRAVEVNPNNRNQEVTGEYTIEAWTRFDFPGRGNTHSSFKWRWYHFDGVDWDQSRRLNNRIYKFRGHGKAWDWEVDTEFGNYDYLMYADYDMDHPEVVNELRNWGVWYTNTLGLDGFRIDAVKHIKYSFTRDWINHVRSATGKNMFAVAEFWKNDLGAIENYLQKTNWNHSVFDVPLHYNLYNASKSGGNYDMRNIFNGTVVQRHPSHAVTFVDNHDSQPEEALESFVEEWFKPLAYALTLTREQGYPSVFYGDYYGIPTHGVPAMRSKIDPILEARQKYAYGPQHDYLDHPDVIGWTREGDSSHPKSGLATLITDGPGGSKRMYAGLKNAGETWYDITGNRSDTVKIGSDGWGEFHVNDGSVSIYVQK

SEQ ID NO: 40975 - protein, 480 aa, Bacillus sp.
NGTMMQYFEWYLPNDGNHWNRLNSDASNLKSKGITAVWIPPAWKGASQNDVGYGAYDLYDLGEFNQKGTVRTKYGTRSQLQAAVTSLKNNGIQVYGDVVMNHKGGADATEMVRAVEVNPNNRNQEVTGEYTIEAWTRFDFPGRGNTHSSFKWRWYHFDGVDWDQSRRLNNRIYKFRGHGKAWDWEVDTEFGNYDYLMYADYDMDHPEVVNELRNWGVWYTNTLGLDGFRIDAVKHIKYSFTRDWINHVRSATGKNMFAVAEFWKNDLGAIENYLQKTNWNHSVFDVPLHYNLYNASKSGGNYDMRNIFNGTVVQRHPSHAVTFVDNHDSQPEEALESFVEEWFKPLAYALTLTREQGYPSVFYGDYYGIPTHGVPAMRSKIDPILEARQKYAYGPQHDYLDHPDVIGWTREGDSSHPKSGLATLITDGPGGSKRMYAGLKNAGETWYDITGNRSDTVKIGSDGWGKFHVNDGSVSIYVQK

SEQ ID NO: 40976 - protein, 480 aa, Bacillus sp.
NGTMMQYFEWYLPNDGNHWNRLNSDASNLKSKGITAVWIPPAWKGASQNDVGYGAYDLYDLGEFNQKGTVRTKYGTRSQLQAAVTSLKNNGIQVYGDVVMNHKGGAHATEMVRAVEVNPNNRNQEVTGEYTIEAWTRFDFPGRGNTHSSFKWRWYHFDGVDWDQSRRLNNRIYKFRGHGKAWDWEVDTEFGNYDYLMYADYDMDHPEVVNELRNWGVWYTNTLGLDGFRIDAVKHIKYSFTRDWINHVRSATGKNMFAVAEFWKNDLGAIENYLQKTNWNHSVFDVPLHYNLYNASKSGGNYDMRNIFNGTVVQRHPSHAVTFVDNHDSQPEEALESFVEEWFKPLAYALTLTREQGYPSVFYGDYYGIPTHGVPAMRSKIDPILEARQKYAYGPQHDYLDHPDVIGWTREGDSSHPKSGLATLITDGPGGSKRMYAGLKNAGETWYDITGNRSDTVKIGSDGWGEFHVNDGSVSIYVQK

SEQ ID NO: 40977 - protein, 480 aa, Bacillus sp.
NGTMMQYFEWYLPNDGNHWNRLNSDASNLKSKGITAVWIPPAWKAISQNDVGYGAYDLYDLGEFNQKGTVRTKYGTRSQLQAAVTSLKNNGIQVYGDVVMNHKGGADATEMVRAVEVNPNNRNQEVTGEYTIEAWTRFDFPGRGNTHSSFKWRWYHFDGVDWDQSRRFNNRIYKFRGHGKAWDWEVDTEFGNYDYLMYADYDMDHPEVVNELRNWGVWYTNTLGLDGFRIDAVKHIKYSFTRDWINHVRSATGKNMFAVAEFWKNDLGAIENYLQKTNWNHSVFDVPLHYNLYNASKSGGNYDMRNIFNGTVVQRHPSHAVTFVDNHDSQPEEALESFVEEWFKPLAYALTLTREQGYPSVFYGDYYGIPTHGVPAMRSKIDPILEARQKYAYGPQHDYLDHPDVIGWTREGDSSHPKSGLATLITDGPGGSKRMYAGLKNAGETWYDITGNRSDTVKIGSDGWGEFHVNDGSVSIYVQK

SEQ ID NO: 40978 - protein, 480 aa, Bacillus sp.
NGTMMQYFEWYLPNDGNHWNRLNSDASNLKSKGITAVWIPPAWKATSQNDVGYGAYDLYDLGEFNQKGTVRTKYGTRSQLQAAVTSLKNNGIQVYGDVVMNHKGGADATEMVRAVEVNPNNRNQEVTGEYTIEAWTRFDFPGRGNTHSSFKWRWYHFDGVDWDQSRQVNNRIYKFRGHGKAWDWEVDTEFGNYDYLMYADYDMDHPEVVNELRNWGVWYTNTLGLDGFRIDAVKHIKYSFTRDWINHVRSATGKNMFAVAEFWKNDLGAIENYLQKTNWNHSVFDVPLHYNLYNASKSGGNYDMRNIFNGTVVQRHPSHAVTFVDNHDSQPEEALESFVEEWFKPLAYALTLTREQGYPSVFYGDYYGIPTHGVPAMRSKIDPILEARQKYAYGPQHDYLDHPDVIGWTREGDSSHPKSGLATLITDGPGGSKRMYAGLKNAGETWYDITGNRSDTVKIGSDGWGEFHVNDGSVSIYVQK

SEQ ID NO: 40979 - protein, 480 aa, Bacillus sp.
NGTMMQYFEWYLPNDGNHWNRLNSDASNLKSKGITAVWIPPAWKGASQNDVGYGAYDLYDLGEFNQKGTVRTKYGTRSQLQAAVTSLKNNGIQVYGDVVMNHKGGADATEMVRAVEVNPNNRNQEVTGEYTIEAWTRFDFPGRGNTHSSFKWRWYHFDGVDWDQSRRLNNRIYKFRGHGKAWDWEVDTEFGNYDYLMYADYDMDHPEVVNELRNWGVWYTNTLGLDGFRIDAVKHIKYSFTRDWINHVRSATGKNMFAVAEFWKNDLGAIENYLQKTNWNHSVFDVPLHYNLYNASKSGRNYDMRNIFNGTVVQRHPSHAVTFVDNHDSQPEEALESFVEEWFKPLAYALTLTREQGYPSVFYGDYYGIPTHGVPAMRSKIDPILEARQKYAYGPQHDYLDHPDVIGWTREGDSSHPKSGLATLITDGPGGSKRMYAGLKNAGETWYDITGNRSDTVKIGSDGWGEFHVNDGSVSIYVQK

SEQ ID NO: 40980 - protein, 480 aa, Bacillus sp.
NGTMMQYFEWYLPNDGNHWNRLNSDASNLKSKGITAVWIPPAWKAASQNDVGYGAYDLYDLGEFNQKGTVRTKYGTRSQLQAAVTSLKNNGIQVYGDVVMNHKGGADATEMVRAVEVNPNNRNQEVTGEYTIEAWTRFDFPGRGNTHSSFKWRWYHFDGVDWDQSRNLTNRIYKFRGHGKAWDWEVDTEFGNYDYLMYADYDMDHPEVVNELRNWGVWYTNTLGLDGFRIDAVKHIKYSFTRDWINHVRSATGKNMFAVAEFWKNDLGAIENYLQKTNWNHSVFDVPLHYNLYNASKSGGNYDMRNIFNGTVVQRHPSHAVTFVDNHDSQPEEALESFVEEWFKPLAYALTLTREQGYPSVFYGDYYGIPTHGVPAMRSKIDPILEARQKYAYGPQHDYLDHPDVIGWTREGDSSHPKSGLATLITDGPGGSKRMYAGLKNAGETWYDITGNRSDTVKIGSDGWGEFHVNDGSVSIYVQK

SEQ ID NO: 40981 - protein, 480 aa, Bacillus sp.
NGTMMQYFEWYLPNDGNHWNRLNSDASNLKSKGITAVWIPPAWKAASQNDVGYGAYDLYDLGEFNQKGTVRTKYGTRSQLQAAVTSLKNNGIQVYGDVVMNHKGGADATEMVRAVEVNPNNRNQEVTGEYTIEAWTRFDFPGRGNTHSSFKWRWYHFDGVDWDQSRQLNNRIYKFRGHGKAWDWEVDTEFGNYDYLMYADYDMDHPEVVNELRNWGVWYTNTLGLDGFRIDAVKHIKYSFTRDWINHVRSATGKNMFAVAEFWKNDLGAIENYLQKTNWNHSVFDVPLHYNLYNASKSGGNYDMRNIFNGTVVQRHPSHAVTFVDNHDSQPEEALESFVEEWFKPLAYALTLTREQGYPSVFYGDYYGIPTHGVPAMRSKIDPILEARQKYAYGPQHDYLDHPDVIGWTREGDSSHPKSGLATLITDGPGGSKRMYAGLKNAGETWYDITGNRSDTVKIGSDGWGEFHVNDGSVSIYVQK

SEQ ID NO: 40982 - protein, 480 aa, Synthetic construct
NGTMMQYFEWYLPNDGNHWNRLNSDASNLKSKGITAVWIPPAWKGASQNDVGYGAYDLYDLGEFNQKGTVRTKYGTRSQLQAAVTSLKNNGIQVYGDVVMNHKGGADATEMVRAVEVNPNNRNQEVTGEYTIEAWTRFDFPGRGNTHSSFKWRWYHFDGVDWDQSRRLNNRIYKFRGHGKAWDWEVDTENGNYDYLMYADIDMDHPESTNELRNWGVWYTNTLGLDGFRIDAVKHIKYSFTRDWINHVRSATGKNMFAVAEFWKNDLGAIENYLQKTNWNHSVFDVPLHYNLYNASKSGGNYDMRNIFNGTVVQRHPSHAVTFVDNHDSQPEEALESFVEEWFKPLAYALTLTREQGYPSVFYGDYYGIPTHGVPAMRSKIDPILEARQKYAYGPQHDYLDHPDVIGWTREGDSSHPKSGLATLITDGPGGSKRMYAGLKNAGETWYDITGNRSDTVKIGSDGWGEFHVNDGSVSIYVQK

SEQ ID NO: 40983 - protein, 480 aa, Synthetic construct
NGTMMQYFEWYLPNDGNHWNRLNSDASNLKSKGITAVWIPPAWKGASQNDVGYGAYDLYDLGEFNQKGTVRTKYGTRSQLQAAVTSLKNNGIQVYGDVVMNHKGGADATEMVRAVEVNPNNRNQEVTGEYTIEAWTRFDFPGRGNTHSSFKWRWYHFDGVDWDQSRRLNNRIYKFRGHGKAWDWEVDTENGNYDYLMYADIDMDHPEAQNELRNWGVWYTNTLGLDGFRIDAVKHIKYSFTRDWINHVRSATGKNMFAVAEFWKNDLGAIENYLQKTNWNHSVFDVPLHYNLYNASKSGGNYDMRNIFNGTVVQRHPSHAVTFVDNHDSQPEEALESFVEEWFKPLAYALTLTREQGYPSVFYGDYYGIPTHGVPAMRSKIDPILEARQKYAYGPQHDYLDHPDVIGWTREGDSSHPKSGLATLITDGPGGSKRMYAGLKNAGETWYDITGNRSDTVKIGSDGWGEFHVNDGSVSIYVQK

SEQ ID NO: 40984 - protein, 480 aa, Bacillus sp.
NGTMMQYFEWYLPNDGNHWNRLNSDASNLKSKGITAVWIPPAWKAVSQNDVGYGAYDLYDLGEFNQKGTVRTKYGTRSQLQAAVTSLKNNGIQVYGDVVMNHKGGADATEMVRAVEVNPNNRNQEVTGEYTIEAWTRFDFPGRGNTHSSFKWRWYHFDGVDWDQSRRLQNRIYKFRGHGKAWDWEVDTEFGNYDYLMYADYDMDHPEVVNELRNWGVWYTNTLGLDGFRIDAVKHIKYSFTRDWINHVRSATGKNMFAVAEFWKNDLGAIENYLQKTNWNHSVFDVPLHYNLYNASKSGGNYDMRNIFNGTVVQRHPSHAVTFVDNHDSQPEEALESFVEEWFKPLAYALTLTREQGYPSVFYGDYYGIPTHGVPAMRSKIDPILEARQKYAYGPQHDYLDHPDVIGWTREGDSSHPKSGLATLITDGPGGSKRMYAGLKNAGETWYDITGNRSDTVKIGSDGWGEFHVNDGSVSIYVQK

SEQ ID NO: 40985 - protein, 480 aa, Bacillus sp.
NKTMMQYFEWYLPNDGNHWNRLNSDASNLKSKGITAVWIPPAWKGASQNDVGYGAYDLYDLGEFNQKGTVRTKYGTRSQLQAAVTSLKNNGIQVYGDVVMNHKGGADATEMVRAVEVNPNNRNQEVTGEYTIEAWTRFDFPGRGNTHSSFKWRWYHFDGVDWDQSRRLNNRIYKFRGHGKAWDWEVDTEFGNYDYLMYADYDMDHPEVVNELRNWGVWYTNTLGLDGFRIDAVKHIKYSFTRDWINHVRSATGKNMFAVAEFWKNDLGAIENYLQKTNWNHSVFDVPLHYNLYNASKSGGNYDMRNIFNGTVVQRHPSHAVTFVDNHDSQPEEALESFVEEWFKPLAYALTLTREQGYPSVFYGDYYGIPTHGVPAMRSKIDPILEARQKYAYGPQHDYLDHPDVIGWTREGDSSHPKSGLATLITDGPGGSKRMYAGLKNAGETWYDITGNRSDTVKIGSDGWGEFHVNDGSVSIYVQK

SEQ ID NO: 40986 - protein, 480 aa, Bacillus sp.
NGTMMQYFEWYLPNDGNHWNRLNSDASNLKSKGITAVWIPPAWKGASQNDVGYGAYDLYDLGEFNQKGTVRTKYGTRSQLQAAVTSLKNNGIQVYGDVVMNHKGGADATEMVRAVEVNPNNRNQEVTGEYTIEAWTRFDFPGRQNTHSSFKWRWYHFDGVDWDQSRRLNNRIYKFRGHGKAWDWEVDTEFGNYDYLMYADYDMDHPEVVNELRNWGVWYTNTLGLDGFRIDAVKHIKYSFTRDWINHVRSATGKNMFAVAEFWKNDLGAIENYLQKTNWNHSVFDVPLHYNLYNASKSGGNYDMRNIFNGTVVQRHPSHAVTFVDNHDSQPEEALESFVEEWFKPLAYALTLTREQGYPSVFYGDYYGIPTHGVPAMRSKIDPILEARQKYAYGPQHDYLDHPDVIGWTREGDSSHPKSGLATLITDGPGGSKRMYAGLKNAGETWYDITGNRSDTVKIGSDGWGEFHVNDGSVSIYVQK

SEQ ID NO: 40987 - protein, 480 aa, Synthetic construct
NGTMMQYFEWYLPNDGNHWNRLNSDASNLKSKGITAVWIPPAWKGASQNDVGYGAYDLYDLGEFNQKGTVRTKYGTRSQLQAAVTSLKNNGIQVYGDVVMNHKGGADATEMVDAVEVNPNNRNQEVTGDYTIEAWTRFDFPGRGNTHSSFKWRWYHFDGVDWDQSRRLNNRIYKFRGHGKAWDWEVDTEFGNYDYLMYADYDMDHPEVVNELRNWGVWYTNTLGLDGFRIDAVKHIKYSFTRDWINHVRSATGKNMFAVAEFWKNDLGAIENYLQKTNWNHSVFDVPLHYNLYNASKSGGNYDMRNIFNGTVVQRHPSHAVTFVDNHDSQPEEALESFVEEWFKPLAYALTLTREQGYPSVFYGDYYGIPTHGVPAMRSKIDPILEARQKYAYGPQHDYLDHPDVIGWTREGDSSHPKSGLATLITDGPGGSKRMYAGLKNAGETWYDITGNRSDTVKIGSDGWGEFHVNDGSVSIYVQK

SEQ ID NO: 40988 - protein, 480 aa, Bacillus sp.
NGTMMQYFEWYLPNDGNHWNRLNSDASNLKSKGITAVWIPPAWKGASQNDVGYGAYDLYDLGEFNQKGTVRTKYGTRSQLQAAVTSLKNNGIQVYGDVVMNHKGGADATEMVRAVEVNPNNRNQEVTGEYTIEAWTRFDFPGRGNTHSSFKWRWYHFDGVDWDQSRNVNNRIYKFRGHGKAWDWEVDTEFGNYDYLMYADYDMDHPEVVNELRNWGVWYTNTLGLDGFRIDAVKHIKYSFTRDWINHVRSATGKNMFAVAEFWKNDLGAIENYLQKTNWNHSVFDVPLHYNLYNASKSGGNYDMRNIFNGTVVQRHPSHAVTFVDNHDSQPEEALESFVDPWFKPLAYALTLTREQGYPSVFYGDYYGIPTHGVPAMRSKIDPILEARQKYAYGPQHDYLDHPDVIGWTREGDSSHPKSGLATLITDGPGGSKRMYAGLKNAGETWYDITGNRSDTVKIGSDGWGEFHVNGGSVSIYVQK

SEQ ID NO: 40989 - protein, 480 aa, Bacillus sp.
NGTMMQYFEWYLPNDGNHWNRLNSDASNLKSKGITAVWIPPAWKAASQNDVGYGAYDLYDLGEFNQKGTVRTKYGTRSQLQAAVTSLKNNGIQVYGDVVMNHKGGADATEMVRAVEVNPNNRNQEVTGEYTIEAWTRFDFPGRGNTHSSFKWRWYHFDGVDWDQSRQTQNRIYKFRGHGKAWDWEVDTEFGNYDYLMYADYDMDHPEVVNELRNWGVWYTNTLGLDGFRIDAVKHIKYSFTRDWINHVRSATGKNMFAVAEFWKNDLGAIENYLQKTNWNHSVFDVPLHYNLYNASKSGGNYDMRNIFNGTVVQRHPSHAVTFVDNHDSQPEEALESFVEEWFKPLAYALTLTREQGYPSVFYGDYYGIPTHGVPAMRSKIDPILEARQKYAYGPQHDYLDHPDVIGWTREGDSSHPKSGLATLITDGPGGSKRMYAGLKNAGETWYDITGNRSDTVKIGSDGWGEFHVNDGSVSIYVQK

SEQ ID NO: 40990 - protein, 480 aa, Bacillus sp.
NGTMMQYFEWYLPNDGNHWNRLNSDASNLKSKGITAVWIPPAWKGASQNDVGYGAYDLYDLGEFNQKGTVRTKYGTRSQLQAAVTSLKNNGIQVYGDVVMNHKGGADATEMVRAVEVNPNNRNQEVTGEYTIEAWTRFDFPGRGNTHSSFKWRWYHFDGVDWDQSRKLNNRIYKFRGHGKAWDWEVDTEFGNYDYLMYVDYDMDHPEVVNELRNWGVWYTNTLGLDGFRIDAVKHIKYSFTRDWINHVRSATGKNMFAVAEFWKNDLGAIENYLQKTNWNHSVFDVPLHYNLYNASKSGGNYDMRNIFNGTVVQRHPSHAVTFVDNHDSQPEEALESFVDEWFKPLAYALTLTREQGYPSVFYGDYYGIPTHGVPAMRSKIDPILEARQKYAYGPQHDYLDHPDVIGWTREGDSSHPKSGLATLITDGPGGSKRMYAGLKNAGETWYDITGNRSDTVKIGSDGWGEFHVNKGSVSIYVQK

SEQ ID NO: 40991 - protein, 480 aa, Bacillus sp.
NGTMMQYFEWYLPNDGNHWNRLNSDASNLKSKGITAVWIPPAWKGASQNDVGYGAYDLYDLGEFNQKGTVRTKYGTRSQLQAAVTSLKNNGIQVYGDVVMNHKGGADATEMVRAVEVNPNNRNQEVTGEYTIEAWTRFDFPGRGNTHSSFKWRWYHFDGVDWDQSRRLNNRIYKFRGHGKAWDWEVDTEFGNYDYLMYADYDMDHPEVVNELRNWGVWYTNTLGLDGFRIDAVKHIKYSFTRDWINHVRSATGKNMFAVAEFWKNDLGAIENYLQKTNWNHSVFDVPLHYNLYNASKSGANYDMRNIFNGTVVQRHPSHAVTFVDNHDSQPEEALESFVEEWFKPLAYALTLTREQGYPSVFYGDYYGIPTHGVPAMRSKIDPILEARQKYAYGPQHDYLDHPDVIGWTREGDSSHPKSGLATLITDGPGGSKRMYAGLKNAGETWYDITGNRSDTVKIGSDGWGEFHVNDGSVSIYVQK

SEQ ID NO: 40992 - protein, 480 aa, Bacillus sp.
NGTMMQYFEWYLPNDGNHWNRLNSDASNLKSKGITAVWIPPAWKGASQNDVGYGAYDLYDLGEFNQKGTVRTKYGTRSQLQAAVTSLKNNGIQVYGDVVMNHKGGADATEMVRAVEVNPNNRNQEVTGEYTIEAWTRFDFPGRGNTHSSFKWRWYHFDGVDWDQSRRLNNRIYKFRGHGKAWDWEVDTEFGNYDYLMYADYDMDHPEVVNELRNWGVWYTNTLGLDGFRIDAVKHIKYSFTRDWINHVRSATGKNMFAVAEFWKNDLGAIENYLQKTNWNHSVFDVPLHYNLYNASKSVGNYDMRNIFNGTVVQRHPSHAVTFVDNHDSQPEEALESFVEEWFKPLAYALTLTREQGYPSVFYGDYYGIPTHGVPAMRSKIDPILEARQKYAYGPQHDYLDHPDVIGWTREGDSSHPKSGLATLITDGPGGSKRMYAGLKNAGETWYDITGNRSDTVKIGSDGWGEFHVNDGSVSIYVQK

SEQ ID NO: 40993 - protein, 480 aa, Bacillus sp.
NGTMMQYFEWYLPNDGNHWNRLNSDASNLKSKGITAVWIPPAWKGASQNDVGYGAYDLYDLGEFNQKGTVRTKYGTRSQLQAAVTSLKNNGIQVYGDVVMNHKGGADATEMVRAVEVNPNNRNQEVTGEYTIEAWTRFDFPGRGNTHSSFKWRWYHFDGVDWDQSRRFDNRIYKFRGHGKAWDWEVDTEFGNYDYLMYADYDMDHPEVVNELRNWGVWYTNTLGLDGFRIDAVKHIKYSFTRDWINHVRSATGKNMFAVAEFWKNDLGAIENYLQKTNWNHSVFDVPLHYNLYNASKSGGNYDMRNIFNGTVVQRHPSHAVTFVDNHDSQPEEALESFVEEWFKPLAYVLTLTREQGYPSVFYGDYYGIPTHGVPAMRSKIDPILEARQKYAYGPQHDYLDHPDVIGWTREGDSSHPKSGLATLITDGPGGSKRMYAGLKNAGETWYDITGNRSDTVKIGSDGWGEFHVNDGSVSIYVQK

SEQ ID NO: 40994 - protein, 480 aa, Bacillus sp.
NPTMMQYFEWYLPNDGNHWNRLNSDASNLKSKGITAVWIPPAWKGASQNDVGYGAYDLYDLGEFNQKGTVRTKYGTRSQLQAAVTSLKNNGIQVYGDVVMNHKGGADATEMVRAVEVNPNNRNQEVTGEYTIEAWTRFDFPGRGNTHSSFKWRWYHFDGVDWDQSRRLNNRIYKFRGHGKAWDWEVDTEFGNYDYLMYADYDMDHPEVVNELRNWGVWYTNTLGLDGFRIDAVKHIKYSFTRDWINHVRSATGKNMFAVAEFWKNDLGAIENYLQKTNWNHSVFDVPLHYNLYNASKSGGNYDMRNIFNGTVVQRHPSHAVTFVDNHDSQPEEALESFVEEWFKPLAYALTLTREQGYPSVFYGDYYGIPTHGVPAMRSKIDPILEARQKYAYGPQHDYLDHPDVIGWTREGDSSHPKSGLATLITDGPGGSKRMYAGLKNAGETWYDITGNRSDTVKIGSDGWGEFHVNDGSVSIYVQK

SEQ ID NO: 40995 - protein, 480 aa, Bacillus sp.
NGTMMQYFEWYLPNDGNHWNRLNSDASNLKSKGITAVWIPPAWKGASQNDVGYGAYDLYDLGEFNQKGTVRTKYGTRSQLQAAVTSLKNNGIQVYGDVVMNHKGGADATEMVRAVEVNPNNRNQEVTGEYTIEAWTRFDFPGRGNTHSSFKWRWYHFDGVDWDQSRRLNNRIYKFRGHGKAWDWEVDTEFGNYDYLMYADYDMDHPEVVNELRNWGVWYTNTLGLDGFRIDAVKHIKYSFTRDWINHVRSATGKNMFAVAEFWKNDLGAIENYLQKTNWNHSVFDVPLHYNLYNASKSGGNYDMRNIFNGTVVQRHPSHAVTFVDNHDSQPEEALESFVEEWFKPLAYALTLTREQGYPSVFYGDYYGIPTHGVPAMRSKIDPILEARQKYAYGPQHDYLDHPDVIGWTREGDSSHPTSGLATLITDGPGGSKRMYAGLKNAGETWYDITGNRSDTVKIGSDGWGEFHVNDGSVSIYVQK

SEQ ID NO: 40996 - protein, 480 aa, Bacillus sp.
NGTMMQYFEWYLPNDGNHWNRLNSDASNLKSKGITAVWIPPAWKGASQNDVGYGAYDLYDLGEFNQKGTVRTKYGTRSQLQAAVTSLKNNGIQVYGDVVMNHKGGADATEMVRAVEVNPNNRNQEVTGEYTIEAWTRFDFPGRGNTHSSFKWRWYHFDGVDWDQSRRLNNRIYKFRGHGKAWDWEVDTEFGNYDYLMYADYDMDHPEVVNELRNWGVWYTNTLGLDGFRIDAVKHIKYSFTRDWINHVRSATGKNMFAVAEFWKNDLGAIENYLQKTNWNHSVFDVPLHYNLYNASKSGGNYDMRNIFNGTVVQRHPSHAVTFVDNHDSQPEEALESFVEEWFKPLAYALTLTREQGYPSVFYGDYYGIPTHGVPAMRSKIDPILEARQKYAYGPQHDYLDHPDVIGWTREGLSSHPKSGLATLITDGPGGSKRMYAGLKNAGETWYDITGNRSDTVKIGSDGWGEFHVNDGSVSIYVQK

SEQ ID NO: 40997 - protein, 480 aa, Bacillus sp.
NGTMMQYFEWYLPNDGNHWNRLNSDASNLKSKGITAVWIPPAWKGASQNDVGYGAYDLYDLGEFNQKGTVRTKYGTRSQLQAAVTSLKNNGIQVYGDVVMNHKGGADATEMVRAVEVNPNNRNQEVTGEYTIEAWTRFDFPGRGNTHSSFKWRWYHFDGVDWDQSRRLNNRIYKFRGHGKAWDWEVDTEFGNYDYLMYADYDMDHPEVVNELRNWGVWYTNTLGLDGFRIDAVKHIKYSFTRDWINHVRSATGKNMFAVAEFWKGDLGAIENYLQKTNWNHSVFDVPLHYNLYNASKSGGNYDMRNIFNGTVVQRHPSHAVTFVDNHDSQPEEALESFVEEWFKPLAYALTLTREQGYPSVFYGDYYGIPTHGVPAMRSKIDPILEARQKYAYGPQHDYLDHPDVIGWTREGDSSHPKSGLATLITDGPGGSKRMYAGLKNAGETWYDITGNRSDTVKIGSDGWGEFHVNDGSVSIYVQK

SEQ ID NO: 40998 - protein, 480 aa, Synthetic construct
NGTMMQYFEWYLPNDGNHWNRLNSDASNLKSKGITAVWIPPAWKGASQNDVGYGAYDLYDLGEFNQKGTVRTKYGTRSQLQAAVTSLKNNGIQVYGDVVMNHKGGADATEMVRAVEVNPNNRNQEVTGEYTIEAWTRFDFPGRGNTHSSFKWRWYHFDGVDWDQSRRLNNRIYKFRGHGKAWDWEVDTEFGNYDYLMYADYDYDHPETTNEMRNWGVWYTNTLGLDGFRIDAVKHIKYSFTRDWINHVRSATGKNMFAVAEFWKNDLGAIENYLQKTNWNHSVFDVPLHYNLYNASKSGGNYDMRNIFNGTVVQRHPSHAVTFVDNHDSQPEEALESFVEEWFKPLAYALTLTREQGYPSVFYGDYYGIPTHGVPAMRSKIDPILEARQKYAYGPQHDYLDHPDVIGWTREGDSSHPKSGLATLITDGPGGSKRMYAGLKNAGETWYDITGNRSDTVKIGSDGWGEFHVNDGSVSIYVQK

SEQ ID NO: 40999 - protein, 480 aa, Bacillus sp.
NGTMMQYFEWYLPNDGNHWNRLNSDASNLKSKGITAVWIPPAWKGASQNDVGYGAYDLYDLGEFNQKGTVRTKYGTRSQLQAAVTSLKNNGIQVYGDVVMNHKGGADATEMVRAVEVNPNNRNQEVTGEYTIEAWTRFDFPGRGNTHSSFKWRWYHFDGVDWDQSRRLNNRIYKFRGHGKSWDWEVDTEFGNYDYLMYADYDMDHPEVVNELRNWGVWYTNTLGLDGFRIDAVKHIKYSFTRDWINHVRSATGKNMFAVAEFWKNDLGAIENYLQKTNWNHSVFDVPLHYNLYNASKSGGNYDMRNIFNGTVVQRHPSHAVTFVDNHDSQPEEALESFVEEWFKPLAYALTLTREQGYPSVFYGDYYGIPTHGVPAMRSKIDPILEARQKYAYGPQHDYLDHPDVIGWTREGDSSHPKSGLATLITDGPGGSKRMYAGLKNAGETWYDITGNRSDTVKIGSDGWGEFHVNDGSVSIYVQK

SEQ ID NO: 41000 - protein, 480 aa, Bacillus sp.
NGTMMQYFEWYLPNDGNHWNRLNSDASNLKSKGITAVWIPPAWKGASQNDVGYGAYDLYDLGEFNQKGTVRTKYGTRSQLQAAVTSLKNNGIQVYGDVVMNHKGGADATEMVRAVEVNPNNRNQEVTGEYTIEAWTRFDFPGRGNTHSSFKWRWYHFDGVDWDQSRRTQNRIYKFRGHGKAWDWEVDTEFGNYDYLMYVDYDMDHPEVVNELRNWGVWYTNTLGLDGFRIDAVKHIKYSFTRDWINHVRSATGKNMFAVAEFWKNDLGAIENYLQKTNWNHSVFDVPLHYNLYNASKSGGNYDMRNIFNGTVVQRHPSHAVTFVDNHDSQPEEALESFVEEWFKPLAYALTLTREQGYPSVFYGDYYGIPTHGVPAMRSKIDPILEARQKYAYGPQHDYLDHPDVIGWTREGDSSHPKSGLATLITDGPGGSKRMYAGLKNAGETWYDITGNRSDTVKIGSDGWGEFHVNDGSVSIYVQK

SEQ ID NO: 41001 - protein, 480 aa, Bacillus sp.
NGTMMQYFEWYLPNDGNHWNRLNSDASNLKSKGITAVWIPPAWKAASQNDVGYGAYDLYDLGEFNQKGTVRTKYGTRSQLQAAVTSLKNNGIQVYGDVVMNHKGGADATEMVRAVEVNPNNRNQEVTGEYTIEAWTRFDFPGRGNTHSSFKWRWYHFDGVDWDQSRQLDNRIYKFRGHGKAWDWEVDTEFGNYDYLMYADYDMDHPEVVNELRNWGVWYTNTLGLDGFRIDAVKHIKYSFTRDWINHVRSATGKNMFAVAEFWKNDLGAIENYLQKTNWNHSVFDVPLHYNLYNASKSGGNYDMRNIFNGTVVQRHPSHAVTFVDNHDSQPEEALESFVEEWFKPLAYALTLTREQGYPSVFYGDYYGIPTHGVPAMRSKIDPILEARQKYAYGPQHDYLDHPDVIGWTREGDSSHPKSGLATLITDGPGGSKRMYAGLKNAGETWYDITGNRSDTVKIGSDGWGEFHVNDGSVSIYVQK

SEQ ID NO: 41002 - protein, 480 aa, Bacillus sp.
NGTMMQYFEWYLPNDGNHWNRLNSDASNLKSKGITAVWIPPAWKGASQNDVGYGAYDLYDLGEFNQKGTVRTKYGTRSQLQAAVTSLKNNGIQVYGDVVMNHKGGADATEMVRAVEVNPNNRNQEVTGEYTIEAWTRFDFPGRGNTHSSFKWRWYHFDGVDWDQSRRLNNRIYKFRGHGKAWDWEVDTEFGNYDYLMYADYDMDHPEVVNELRNWGVWYTNTLGLDGFRIDAVKHIKYSFTRDWINHVRSATGKNMFAVAEFWGGDLGAIENYLQKTNWNHSVFDVPLHYNLYNASKSGGNYDMRNIFNGTVVQRHPSHAVTFVDNHDSQPEEALESFVEEWFKPLAYALTLTREQGYPSVFYGDYYGIPTHGVPAMRSKIDPILEARQKYAYGPQHDYLDHPDVIGWTREGDSSHPKSGLATLITDGPGGSKRMYAGLKNAGETWYDITGNRSDTVKIGSDGWGEFHVNDGSVSIYVQK

SEQ ID NO: 41003 - protein, 480 aa, Bacillus sp.
NGTMMQYFEWYLPNDGNHWNRLNSDASNLKSKGITAVWIPPAWKGASQNDVGYGAYDLYDLGEFNQKGTVRTKYGTRSQLQAAVTSLKNNGIQVYGDVVMNHKGGADATEMVRAVEVNPNNRNQEVTGEYTIEAWTRFDFPGRGNTHSSFKWRWYHFDGVDWDQSREFDNRIYKFRGHGKAWDWEVDTEFGNYDYLMYADYDMDHPEVVNELRNWGVWYTNTLGLDGFRIDAVKHIKYSFTRDWINHVRSATGKNMFAVAEFWKNDLGAIENYLQKTNWNHSVFDVPLHYNLYNASKSGGNYDMRNIFNGTVVQRHPSHAVTFVDNHDSQPEEALESFVETWFKPLAYVLTLTREQGYPSVFYGDYYGIPTHGVPAMRSKIDPILEARQKYAYGPQHDYLDHPDVIGWTREGDSSHPKSGLATLITDGPGGSKRMYAGLKNAGETWYDITGNRSDTVKIGSDGWGEFHVNDASVSIYVQK

SEQ ID NO: 41004 - protein, 480 aa, Bacillus sp.
NNTMMQYFEWYLPNDGNHWNRLNSDASNLKSKGITAVWIPPAWKGASQNDVGYGAYDLYDLGEFNQKGTVRTKYGTRSQLQAAVTSLKNNGIQVYGDVVMNHKGGADATEMVRAVEVNPNNRNQEVTGEYTIEAWTRFDFPGRGNTHSSFKWRWYHFDGVDWDQSRRLNNRIYKFRGHGKAWDWEVDTEFGNYDYLMYADYDMDHPEVVNELRNWGVWYTNTLGLDGFRIDAVKHIKYSFTRDWINHVRSATGKNMFAVAEFWKNDLGAIENYLQKTNWNHSVFDVPLHYNLYNASKSGGNYDMRNIFNGTVVQRHPSHAVTFVDNHDSQPEEALESFVEEWFKPLAYALTLTREQGYPSVFYGDYYGIPTHGVPAMRSKIDPILEARQKYAYGPQHDYLDHPDVIGWTREGDSSHPKSGLATLITDGPGGSKRMYAGLKNAGETWYDITGNRSDTVKIGSDGWGEFHVNDGSVSIYVQK

SEQ ID NO: 41005 - protein, 480 aa, Bacillus sp.
NGTMMQYFEWYLPNDGNHWNRLNSDASNLKSKGITAVWIPPAWKGASQNDVGYGAYDLYDLGEFNQKGTVRTKYGTRSQLQAAVTSLKNNGIQVYGDVVMNHKGGADATEMVRAVEVNPNNRNQEVTGEYTIEAWTRFDFPGRGNTHSSFKWRWYHFDGVDWDQSRRLNNRIYKFRGHGKAWDWEVDTEFGNYDYLMYADYDMDHPEVVNELRNWGVWYTNTLGLDGFRIDAVKHIKYSFTRDWINHVRSATGKNMFAVAEFWKNDLGAIENYLQKTNWNHSVFDVPLHYNLYNASKSGGNYDMRNIFNGTVVQMHPMQAVTFVDNHDSQPEEALESFVEEWFKPLAYALTLTREQGYPSVFYGDYYGIPTHGVPAMRSKIDPILEARQKYAYGPQHDYLDHPDVIGWTREGDSSHPKSGLATLITDGPGGSKRMYAGLKNAGETWYDITGNRSDTVKIGSDGWGEFHVNDGSVSIYVQK

SEQ ID NO: 41006 - protein, 480 aa, Bacillus sp.
NGTMMQYFEWYLPNDGNHWNRLNSDASNLKSKGITAVWIPPAWKGTSQNDVGYGAYDLYDLGEFNQKGTVRTKYGTRSQLQAAVTSLKNNGIQVYGDVVMNHKGGADATEMVRAVEVNPNNRNQEVTGEYTIEAWTRFDFPGRGNTHSSFKWRWYHFDGVDWDQSRRTQNRIYKFRGHGKAWDWEVDTEFGNYDYLMYTDYDMDHPEVVNELRNWGVWYTNTLGLDGFRIDAVKHIKYSFTRDWINHVRSATGKNMFAVAEFWKNDLGAIENYLQKTNWNHSVFDVPLHYNLYNASKSGGNYDMRNIFNGTVVQRHPSHAVTFVDNHDSQPEEALESFVEEWFKPLAYALTLTREQGYPSVFYGDYYGIPTHGVPAMRSKIDPILEARQKYAYGPQHDYLDHPDVIGWTREGDSSHPKSGLATLITDGPGGSKRMYAGLKNAGETWYDITGNRSDTVKIGSDGWGEFHVNDGSVSIYVQK

SEQ ID NO: 41007 - protein, 480 aa, Bacillus sp.
NGTMMQYFEWYLPNDGNHWNRLNSDASNLKSKGITAVWIPPSWKGASQNDVGYGAYDLYDLGEFNQKGTVRTKYGTRSQLQAAVTSLKNNGIQVYGDVVMNHKGGADATEMVRAVEVNPNNRNQEVTGEYTIEAWTRFDFPGRGNTHSSFKWRWYHFDGVDWDQSRRLNNRIYKFRGHGKAWDWEVDTEFGNYDYLMYADYDMDHPEVVNELRNWGVWYTNTLGLDGFRIDAVKHIKYSFTRDWINHVRSATGKNMFAVAEFWKNDLGAIENYLQKTNWNHSVFDVPLHYNLYNASKSGGNYDMRNIFNGTVVQRHPSHAVTFVDNHDSQPEEALESFVEEWFKPLAYALTLTREQGYPSVFYGDYYGIPTHGVPAMRSKIDPILEARQKYAYGPQHDYLDHPDVIGWTREGDSSHPKSGLATLITDGPGGSKRMYAGLKNAGETWYDITGNRSDTVKIGSDGWGEFHVNDGSVSIYVQK

SEQ ID NO: 41008 - protein, 480 aa, Bacillus sp.
NGTMMQYFEWYLPNDGNHWNRLNSDASNLKSKGITAVWIPPAWKGASQNDVGYGAYDLYDLGEFNQKGTVRTKYGTRSQLQAAVTSLKNNGIQVYGDVVMNHKGGADATEMVRAVEVNPNNRNQEVTGEYTIEAWTRFDFPGRGNTHSSFKWRWYHFDGVDWDQSRRLNNRIYKFRGHGKAWDWEVDTEFGNYDYLMYADYDMDHPEVVNELRNWGVWYTNTLGLDGFRIDAVKHIKYSFTRDWINHVRSATGKNMFAVAEFWKNDLGAIENYLQKTNWNHSVFDVPLHYNLYNASKSGTNYDMRNIFNGTVVQRHPSHAVTFVDNHDSQPEEALESFVEEWFKPLAYALTLTREQGYPSVFYGDYYGIPTHGVPAMRSKIDPILEARQKYAYGPQHDYLDHPDVIGWTREGDSSHPKSGLATLITDGPGGSKRMYAGLKNAGETWYDITGNRSDTVKIGSDGWGEFHVNDGSVSIYVQK

SEQ ID NO: 41009 - protein, 480 aa, Bacillus sp.
NGTMMQYFEWYLPNDGNHWNRLNSDASNLKSKGITAVWIPPAWKGASQNDVGYGAYDLYDLGEFNQKGTVRTKYGTRSQLQAAVTSLKNNGIQVYGDVVMNHKGGADATEMVRAVEVNPNNRNQEVTGEYTIEAWTRFDFPGRGNTHSSFKWRWYHFDGVDWDQSRRLNNRIYKFRGHGKAWDWEVDTEFGNYDYLMYADYDMDHPEVVNELRNWGVWYTNTLGLDGFRIDAVKHIKYSFTRDWINHVRSATGKNMFAVAEFWKNDLGAIENYLQKTNWNHSVFDVPLHYNLYNASKSGGNYDMRNIFNGTVVQRHPSHAVTFVDNHDSQPEEALESFVDPWFKPLAYALTLTREQGYPSVFYGDYYGIPTHGVPAMRSKIDPILEARQKYAYGPQHDYLDHPDVIGWTREGDSSHPKSGLATLITDGPGGSKRMYAGLKNAGETWYDITGNRSDTVKIGSDGWGEFHVNQGSVSIYVQK

SEQ ID NO: 41010 - protein, 480 aa, Bacillus sp.
NGTMMQYFEWYLPNDGNHWNRLNSDASNLKSKGITAVWIPPAWKAVSQNDVGYGAYDLYDLGEFNQKGTVRTKYGTRSQLQAAVTSLKNNGIQVYGDVVMNHKGGADATEMVDAVEVNPNNRNQEVTGEYTIEAWTRFDFPGRGNTHSSFKWRWYHFDGVDWDQSRDFNNRIYKFRGHGKAWDWEVDTEFGNYDYLMYADYDMDHPEVVNELRNWGVWYTNTLGLDGFRIDAVKHIKYSFTRDWINHVRSATGKNMFAVAEFWKNDLGAIENYLQKTNWNHSVFDVPLHYNLYNASKSGGNYDMRNIFNGTVVQRHPSHAVTFVDNHDSQPEEALESFVEEWFKPLAYALTLTREQGYPSVFYGDYYGIPTHGVPAMRSKIDPILEARQKYAYGPQHDYLDHPDVIGWTREGDSSHPKSGLATLITDGPGGSKRMYAGLKNAGETWYDITGNRSDTVKIGSDGWGEFHVNDGSVSIYVQK

SEQ ID NO: 41011 - protein, 480 aa, Bacillus sp.
NGTMMQYFEWYLPNDGNHWNRLNSDASNLKSKGITAVWIPPAWKATSQNDVGYGAYDLYDLGEFNQKGTVRTKYGTRSQLQAAVTSLKNNGIQVYGDVVMNHKGGADATEMVDAVEVNPNNRNQEVTGEYTIEAWTRFDFPGRGNTHSSFKWRWYHFDGVDWDQSRNVNNRIYKFRGHGKAWDWEVDTEFGNYDYLMYADYDMDHPEVVNELRNWGVWYTNTLGLDGFRIDAVKHIKYSFTRDWINHVRSATGKNMFAVAEFWKNDLGAIENYLQKTNWNHSVFDVPLHYNLYNASKSGGNYDMRNIFNGTVVQRHPSHAVTFVDNHDSQPEEALESFVEEWFKPLAYALTLTREQGYPSVFYGDYYGIPTHGVPAMRSKIDPILEARQKYAYGPQHDYLDHPDVIGWTREGDSSHPKSGLATLITDGPGGSKRMYAGLKNAGETWYDITGNRSDTVKIGSDGWGEFHVNDGSVSIYVQK

SEQ ID NO: 41012 - protein, 480 aa, Bacillus sp.
NGTMMQYFEWYLPNDGNHWNRLNSDASNLKSKGITAVWIPPAWKGASQNDVGYGAYDLYDLGEFNQKGTVRTKYGTRSQLQAAVTSLKNNGIQVYGDVVMNHKGGADATEMVRAVEVNPNNRNQEVTGEYTIEAWTRFDFPGRGNTHSSFKWRWYHFDGVDWDQSRQFNNRIYKFRGHGKAWDWEVDTEFGNYDYLMYTDYDMDHPEVVNELRNWGVWYTNTLGLDGFRIDAVKHIKYSFTRDWINHVRSATGKNMFAVAEFWKNDLGAIENYLQKTNWNHSVFDVPLHYNLYNASKSGGNYDMRNIFNGTVVQRHPSHAVTFVDNHDSQPEEALESFVEEWFKPLAYALTLTREQGYPSVFYGDYYGIPTHGVPAMRSKIDPILEARQKYAYGPQHDYLDHPDVIGWTREGDSSHPKSGLATLITDGPGGSKRMYAGLKNAGETWYDITGNRSDTVKIGSDGWGEFHVNDGSVSIYVQK

SEQ ID NO: 41013 - protein, 480 aa, Bacillus sp.
NGTMMQYFEWYLPNDGNHWNRLNSDASNLKSKGITAVWIPPAWKGASQNDVGYGAYDLYDLGEFNQKGTVRTKYGTRSQLQAAVTSLKNNGIQVYGDVVMNHKGGADATEMVRAVEVNPNNRNQEVTGEYTIEAWTRFDFPGRGNTHSSFKWRWYHFDGVDWDQSRRLNNRIYKFRGHGKAWDWEVDTEFGNYDYLMYADYDMDHPEVVNELRNWGVWYTNTLGLDGFRIDAVKHIKYSFTRDWINHVRSATGKNMFAVAEFWKNDLGAIENYLQKTNWNHSVFDVPLHYNLYNASKSGGNYDMRNIFNGTVVQRHPSHAVTFVDNHDSQPEEALESFVEEWFKPLAYALTLTREQGYPSVFYGDYYGIPTHGVPAMRSKIDPILEARQKYAYGPQHDYLDHPDVIGWTREGESSHPKSGLATLITDGPGGSKRMYAGLKNAGETWYDITGNRSDTVKIGSDGWGEFHVNDGSVSIYVQK

SEQ ID NO: 41014 - protein, 480 aa, Bacillus sp.
NGTMMQYFEWYLPNDGNHWNRLNSDASNLKSKGITAVWIPPAWKAASQNDVGYGAYDLYDLGEFNQKGTVRTKYGTRSQLQAAVTSLKNNGIQVYGDVVMNHKGGADATEMVRAVEVNPNNRNQEVTGEYTIEAWTRFDFPGRGNTHSSFKWRWYHFDGVDWDQSREFDNRIYKFRGHGKAWDWEVDTEFGNYDYLMYADYDMDHPEVVNELRNWGVWYTNTLGLDGFRIDAVKHIKYSFTRDWINHVRSATGKNMFAVAEFWKNDLGAIENYLQKTNWNHSVFDVPLHYNLYNASKSGGNYDMRNIFNGTVVQRHPSHAVTFVDNHDSQPEEALESFVEEWFKPLAYALTLTREQGYPSVFYGDYYGIPTHGVPAMRSKIDPILEARQKYAYGPQHDYLDHPDVIGWTREGDSSHPKSGLATLITDGPGGSKRMYAGLKNAGETWYDITGNRSDTVKIGSDGWGEFHVNDGSVSIYVQK

SEQ ID NO: 41015 - protein, 480 aa, Bacillus sp.
NGTMMQYFEWYLPNDGNHWNRLNSDASNLKSKGITAVWIPPAWKGASQNDVGYGAYDLYDLGEFNQKGTVRTKYGTRSQLQAAVTSLKNNGIQVYGDVVMNHKGGADATEMVRAVEVNPNNRNQEVTGEYTIEAWTRFDFPGRGNTHSSFKWRWYHFDGVDWDQSRRLNNRIYKFRGHGKAWDWEVDTEFGNYDYLMYADYDMDHPEVVNELRNWGVWYTNTLGLDGFRIDAVKHIKYSFTRDWINHVRSATGKNMFAVAEFWKNDLGAIENYLQKTNWNHSVFDVPLHYNLYNASKSSGNYDMRNIFNGTVVQRHPSHAVTFVDNHDSQPEEALESFVDTWFKPLAYALTLTREQGYPSVFYGDYYGIPTHGVPAMRSKIDPILEARQKYAYGPQHDYLDHPDVIGWTREGDSSHPKSGLATLITDGPGGSKRMYAGLKNAGETWYDITGNRSDTVKIGSDGWGEFHVNKGSVSIYVQK

SEQ ID NO: 41016 - protein, 480 aa, Bacillus sp.
NGTMMQYFEWYLPNDGNHWNRLNSDASNLKSKGITAVWIPPAWKGASQNDVGYGAYDLYDLGEFNQKGTVRTKYGTRSQLQAAVTSLKNNGIQVYGDVVMNHKGGADATEMVRAVEVNPNNRNQEVTGEYTIEAWTRFDFPGRGNTHSSFKWRWYHFDGVDWDQSRRLNNRIYKFRGHGKAWDWEVDTEFGNYDYLMYADYDMDHPEVVNELRNWGVWYTNTLGLDGFRIDAVKHIKYSFTRDWINHVRSATGKNMFAVAEFWKNDLGAIENYLQKTNWNHSVFDVPLHYNLYNASKSGGNYDMRNIFNGTVVQRHPSHAVTFVDNHDSQPEEALESFVEEWFKPLAYALTLTREQGYPSVFYGDYYGIPTHGVPAMRSKIDPILEARQKYAYGPQHDYLDHPDVIGWTREGDSSHPKSGLATLITDGPGGSKRMYAGLKNAGETWYDITGNRSDTVKIGSDGWGEFHVNDKSVSIYVQK

SEQ ID NO: 41017 - protein, 478 aa, Bacillus sp.
NGTIMQYFEWNVPNDGQHWNRLHNNAQNLKNAGITAIWIPPAWKGTSQNDVGYGAYDLYDLGEFNQKGTVRTKYGTKAELERAIRSLKANGIQVYGDVVMNHKGGADFTERVQAVEVNPQNRNQEVSGTYEIEAWTGFNFPGRGNQHSSFKWRWYHFDGTDWDQSRQLSNRIYKFRDKAWDWEVDTENGNYDYLMYADVDMNHPEVINELNRWGVWYANTLNLDGFRLDAVKHIQFSFMRNWLGHVRGQTGKNLFAVAEYWKNDLGALENYLSKTNWTMSAFDVPLHYNLYQASNSGGNYDMRNLLNGTLVQRHPSHAVTFVDNHDTQPGEALESFVQGWFKPLAYATILTREQGYPQVFYGDYYGIPSDGVPSYRQQIDPLLKARQKYAYGPQHDYLDHPDVIGWTREGDSSHPKSGLATLITDGPGGSKRMYAGLKNAGETWYDITGNRSDTVKIGSDGWGEFHVNDGSVSIYVQK

SEQ ID NO: 41018 - protein, 480 aa, Bacillus sp.
NGTMMQYFEWYLPNDGNHWNRLNSDASNLKSKGITAVWIPPAWKGASQNDVGYGAYDLYDLGEFNQKGTVRTKYGTRSQLQAAVTSLKNNGIQVYGDVVMNHKGGADATEMVRAVEVNPNNRNQEVTGEYTIEAWTRFDFPGRGNTHSSFKWRWYHFDGVDWDQSRRLNNRIYKFRGHGKAWDWEVDTEFGNYDYLMYADYDMDHPEVVNELRNWGVWYTNTLGLDGFRIDAVKHIKYSFTRDWINHVRSATGKNMFAVAEFWKNDLGAIENYLQKTNWNHSVFDVPLHYNLYNASKSGGNYDMRNIFNGTVVQRHPSHAVTFVDNHDSQPEEALESFVDTWFKPLAYALTLTREQGYPSVFYGDYYGIPTHGVPAMRSKIDPILEARQKYAYGPQHDYLDHPDVIGWTREGDSSHPKSGLATLITDGPGGSKRMYAGLKNAGETWYDITGNRSDTVKIGSDGWGEFHVNGKSVSIYVQK

SEQ ID NO: 41019 - protein, 480 aa, Bacillus sp.
NGTMMQYFEWYLPNDGNHWNRLNSDASNLKSKGITAVWIPPAWKGASQNDVGYGAYDLYDLGEFNQKGTVRTKYGTRSQLQAAVTSLKNNGIQVYGDVVMNHKGGADATEMVRAVEVNPNNRNQEVTGEYTIEAWTRFDFPGRGNTHSSFKWRWYHFDGVDWDQSRRLNNRIYKFRGHGKMWDWEVDTEFGNYDYLMYADYDMDHPEVVNELRNWGVWYTNTLGLDGFRIDAVKHIKYSFTRDWINHVRSATGKNMFAVAEFWKNDLGAIENYLQKTNWNHSVFDVPLHYNLYNASKSGGNYDMRNIFNGTVVQRHPSHAVTFVDNHDSQPEEALESFVEEWFKPLAYALTLTREQGYPSVFYGDYYGIPTHGVPAMRSKIDPILEARQKYAYGPQHDYLDHPDVIGWTREGDSSHPKSGLATLITDGPGGSKRMYAGLKNAGETWYDITGNRSDTVKIGSDGWGEFHVNDGSVSIYVQK

SEQ ID NO: 41020 - protein, 480 aa, Bacillus sp.
NGTMMQYFEWYLPNDGNHWNRLNSDASNLKSKGITAVWIPPAWKGASQNDVGYGAYDLYDLGEFNQKGTVRTKYGTRSQLQAAVTSLKNNGIQVYGDVVMNHKGGADATEMVRAVEVNPNNRNQEVTGEYTIEAWTRFDFPGRGNTHSSFKWRWYHFDGVDWDQSRRLNNRIYKFRGHGKAWDWEVDTEFGNYDYLMYADYDMDHPEVVNELRNWGVWYTNTLGLDGFRIDAVKHIKYSFTRDWINHVRSATGKNMFAVAEFWKNDLGAIENYLQKTNWNHSVFDVPLHYNLYNASKSGGNYDMRNIFNGTVVQRHPSHAVTFVDNHDSQPEEALESFVEEWFKPLAYALTLTREQGYPSVFYGDYYGIPTHGVPAMRSKIDPILEARQKYAYGPQHDYLDHPDVIGWTREGDSSHPKSGLATLITDGPGGSKRMYAGLKNAGETWYDITGNRSDTVKIGSDGWGEFHVNGGSVSIYVQK

SEQ ID NO: 41021 - protein, 480 aa, Bacillus sp.
NGTMMQYFEWYLPNDGNHWNRLNSDASNLKSKGITAVWIPPAWKGASQNDVGYGAYDLYDLGEFNQKGTVRTKYGTRSQLQAAVTSLKNNGIQVYGDVVMNHKGGADATEMVRAVEVNPNNRNQEVTGEYTIEAWTRFDFPGRGNTHSSFKWRWYHFDGVDWDQSRRLNNRIYKFRGHGKAWDWEVDTEFGNYDYLMYADYDMDHPEVVNELRNWGVWYTNTLGLDGFRIDAVKHIKYSFTRDWINHVRSATGKNMFAVAEFWKNDLGAIENYLQKTNWNHSVFDVPLHYNLYNASKSGGNYDMRNIFNGTVVQMHPNHAVTFVDNHDSQPEEALESFVEEWFKPLAYALTLTREQGYPSVFYGDYYGIPTHGVPAMRSKIDPILEARQKYAYGPQHDYLDHPDVIGWTREGDSSHPKSGLATLITDGPGGSKRMYAGLKNAGETWYDITGNRSDTVKIGSDGWGEFHVNDGSVSIYVQK

SEQ ID NO: 41022 - protein, 480 aa, Bacillus sp.
NGTMMQYFEWYLPNDGNHWNRLNSDASNLKSKGITAVWIPPAWKGASQNDVGYGAYDLYDLGEFNQKGTVRTKYGTRSQLQAAVTSLKNNGIQVYGDVVMNHKGGADATEMVRAVEVNPNNRNQEVTGEYTIEAWTRFDFPGRGNTHSSFKWRWYHFDGVDWDQSRRLNNRIYKFRGHGKAWDWEVDTEFGNYDYLMYADYDMDHPEVVNELRNWGVWYTNTLGLDGFRIDAVKHIKYSFTRDWINHVRSATGKNMFAVAEFWKNDLGAIENYLQKTNWNHSVFDVPLHYNLYNASQSGGNYDMRNIFNGTVVQRHPSHAVTFVDNHDSQPEEALESFVEPWFKPLAYALTLTREQGYPSVFYGDYYGIPTHGVPAMRSKIDPILEARQKYAYGPQHDYLDHPDVIGWTREGDSSHPKSGLATLITDGPGGSKRMYAGLKNAGETWYDITGNRSDTVKIGSDGWGEFHVNDASVSIYVQK

SEQ ID NO: 41023 - protein, 480 aa, Bacillus sp.
NGTMMQYFEWYLPNDGNHWNRLNSDASNLKSKGITAVWIPPAWKAASQNDVGYGAYDLYDLGEFNQKGTVRTKYGTRSQLQAAVTSLKNNGIQVYGDVVMNHKGGADATEMVRAVEVNPNNRNQEVTGEYTIEAWTRFDFPGRGNTHSSFKWRWYHFDGVDWDQSRDLNNRIYKFRGHGKAWDWEVDTEFGNYDYLMYADYDMDHPEVVNELRNWGVWYTNTLGLDGFRIDAVKHIKYSFTRDWINHVRSATGKNMFAVAEFWKNDLGAIENYLQKTNWNHSVFDVPLHYNLYNASKSGGNYDMRNIFNGTVVQRHPSHAVTFVDNHDSQPEEALESFVEEWFKPLAYALTLTREQGYPSVFYGDYYGIPTHGVPAMRSKIDPILEARQKYAYGPQHDYLDHPDVIGWTREGDSSHPKSGLATLITDGPGGSKRMYAGLKNAGETWYDITGNRSDTVKIGSDGWGEFHVNDGSVSIYVQK

SEQ ID NO: 41024 - protein, 480 aa, Bacillus sp.
NGTMMQYFEWYLPNDGNHWNRLNSDASNLKSKGITAVWIPPAWKGASQNDVGYGAYDLYDLGEFNQKGTFRTKYGTRSQLQAAVTSLKNNGIQVYGDVVMNHKGGADATEMVRAVEVNPNNRNQEVTGEYTIEAWTRFDFPGRGNTHSSFKWRWYHFDGVDWDQSRRLNNRIYKFRGHGKAWDWEVDTEFGNYDYLMYADYDMDHPEVVNELRNWGVWYTNTLGLDGFRIDAVKHIKYSFTRDWINHVRSATGKNMFAVAEFWKNDLGAIENYLQKTNWNHSVFDVPLHYNLYNASKSGGNYDMRNIFNGTVVQRHPSHAVTFVDNHDSQPEEALESFVEEWFKPLAYALTLTREQGYPSVFYGDYYGIPTHGVPAMRSKIDPILEARQKYAYGPQHDYLDHPDVIGWTREGDSSHPKSGLATLITDGPGGSKRMYAGLKNAGETWYDITGNRSDTVKIGSDGWGEFHVNDGSVSIYVQK

SEQ ID NO: 41025 - protein, 480 aa, Bacillus sp.
NGTMMQYFEWYLPNDGNHWNRLNSDASNLKSKGITAVWIPPAWKGASQNDVGYGAYDLYDLGEFNQKGTVRTKYGTRSQLQAAVTSLKNNGIQVYGDVVMNHKGGADATEMVSAVEVNPNNRNQEVTGEYTIEAWTRFDFPGRGNTHSSFKWRWYHFDGVDWDQSRRLNNRIYKFRAHGKAWDWEVDTEFGNYDYLMYADYDMDHPEVVNELRNWGVWYTNTLGLDGFRIDAVKHIKYSFTRDWINHVRSATGKNMFAVAEFWKNDLGAIENYLQKTNWNHSVFDVPLHYNLYNASKSGGNYDMRNIFNGTVVQRHPSHAVTFVDNHDSQPEEALESFVEEWFKPLAYALTLTREQGYPSVFYGDYYGIPTHGVPAMRSKIDPILEARQKYAYGPQHDYLDHPDVIGWTREGDSSHPKSGLATLITDGPGGSKRMYAGLKNAGETWYDITGNRSDTVKIGSDGWGEFHVNDGSVSIYVQK

SEQ ID NO: 41026 - protein, 480 aa, Synthetic construct
NGTMMQYFEWYLPNDGNHWNRLNSDASNLKSKGITAVWIPPAWKGASQNDVGYGAYDLYDLGEFNQKGTVRTKYGTRSQLQAAVTSLKNNGIQVYGDVVMNHKGGADATEMVRAVEVNPNNRNQEVTGEYTIEAWTRFDFPGRGNTHSSFKWRWYHFDGVDWDQSRRLNNRIYKFRGHGKAWDWEVDTENGNYDYLMYADIDMDHPEPTNELRNWGVWYTNTLGLDGFRIDAVKHIKYSFTRDWINHVRSATGKNMFAVAEFWKNDLGAIENYLQKTNWNHSVFDVPLHYNLYNASKSGGNYDMRNIFNGTVVQRHPSHAVTFVDNHDSQPEEALESFVEEWFKPLAYALTLTREQGYPSVFYGDYYGIPTHGVPAMRSKIDPILEARQKYAYGPQHDYLDHPDVIGWTREGDSSHPKSGLATLITDGPGGSKRMYAGLKNAGETWYDITGNRSDTVKIGSDGWGEFHVNDGSVSIYVQK

SEQ ID NO: 41027 - protein, 480 aa, Bacillus sp.
NGTMMQYFEWYLPNDGNHWNRLNSDASNLKSKGITAVWIPPAWKGASQNDVGYGAYDLYDLGEFNQKGTVRTKYGTRSQLQAAVTSLKNNGIQVYGDVVMNHKGGADATEMVRAVEVNPNNRNQEVTGEYTIEAWTRFDFPGRGNTHSSFKWRWYHFDGVDWDQSRRLNNRIYKFRGHGKAWDWEVDTEFGNYDYLMYADYDMDHPEVVNELRNWGVWYTNTLGLDGFRIDAVKHIKYSFTRDWINHVRSATGKNMFAVAEFWKNDLGAIENYLQKTNWNHSVFDVPLHYNLYNASQSGGNYDMRNIFNGTVVQRHPSHAVTFVDNHDSQPEEALESFVDTWFKPLAYALTLTREQGYPSVFYGDYYGIPTHGVPAMRSKIDPILEARQKYAYGPQHDYLDHPDVIGWTREGDSSHPKSGLATLITDGPGGSKRMYAGLKNAGETWYDITGNRSDTVKIGSDGWGEFHVNKKSVSIYVQK

SEQ ID NO: 41028 - protein, 480 aa, Bacillus sp.
NGTMMQYFEWYLPNDGNHWNRLNSDASNLKSKGITAVWIPPAWKATSQNDVGYGAYDLYDLGEFNQKGTVRTKYGTRSQLQAAVTSLKNNGIQVYGDVVMNHKGGADATEMVRAVEVNPNNRNQEVTGEYTIEAWTRFDFPGRGNTHSSFKWRWYHFDGVDWDQSRQLSNRIYKFRGHGKAWDWEVDTEFGNYDYLMYVDYDMDHPEVVNELRNWGVWYTNTLGLDGFRIDAVKHIKYSFTRDWINHVRSATGKNMFAVAEFWKNDLGAIENYLQKTNWNHSVFDVPLHYNLYNASKSGGNYDMRNIFNGTVVQRHPSHAVTFVDNHDSQPEEALESFVEEWFKPLAYALTLTREQGYPSVFYGDYYGIPTHGVPAMRSKIDPILEARQKYAYGPQHDYLDHPDVIGWTREGDSSHPKSGLATLITDGPGGSKRMYAGLKNAGETWYDITGNRSDTVKIGSDGWGEFHVNDGSVSIYVQK

SEQ ID NO: 41029 - protein, 480 aa, Bacillus sp.
NGTMMQYFEWYLPNDGNHWNRLNSDASNLKSKGITAVWIPPAWKGVSQNDVGYGAYDLYDLGEFNQKGTVRTKYGTRSQLQAAVTSLKNNGIQVYGDVVMNHKGGADATEMVRAVEVNPNNRNQEVTGEYTIEAWTRFDFPGRGNTHSSFKWRWYHFDGVDWDQSRRLSNRIYKFRGHGKAWDWEVDTEFGNYDYLMYADYDMDHPEVVNELRNWGVWYTNTLGLDGFRIDAVKHIKYSFTRDWINHVRSATGKNMFAVAEFWKNDLGAIENYLQKTNWNHSVFDVPLHYNLYNASKSGGNYDMRNIFNGTVVQVHPSHAVTFVDNHDSQPEEALESFVEEWFKPLAYALTLTREQGYPSVFYGDYYGIPTHGVPAMRSKIDPILEARQKYAYGPQHDYLDHPDVIGWTREGDSSHPKSGLATLITDGPGGSKRMYAGLKNAGETWYDITGNRSDTVKIGSDGWGEFHVNYGSVSIYVQK

SEQ ID NO: 41030 - protein, 480 aa, Bacillus sp.
NGTMMQYFEWYLPNDGNHWNRLNSDASNLKSKGITAVWIPPAWKGASQNDVGYGAYDLYDLGEFNQKGTVRTKYGTRSQLQAAVTSLKNNGIQVYGDVVMNHKGGADATEMVRAVEVNPNNRNQEVTGEYTIEAWTRFDFPGRGNTHSSFKWRWYHFDGVDWDQSRRLNNRIYSFRGHGKAWDWEVDTEFGNYDYLMYADYDMDHPEVVNELRNWGVWYTNTLGLDGFRIDAVKHIKYSFTRDWINHVRSATGKNMFAVAEFWKNDLGAIENYLQKTNWNHSVFDVPLHYNLYNASKSGGNYDMRNIFNGTVVQRHPSHAVTFVDNHDSQPEEALESFVEEWFKPLAYALTLTREQGYPSVFYGDYYGIPTHGVPAMRSKIDPILEARQKYAYGPQHDYLDHPDVIGWTREGDSSHPKSGLATLITDGPGGSKRMYAGLKNAGETWYDITGNRSDTVKIGSDGWGEFHVNDGSVSIYVQK

SEQ ID NO: 41031 - protein, 480 aa, Bacillus sp.
NGTMMQYFEWYLPNDGNHWNRLNSDASNLKSKGITAVWIPPAWKAVSQNDVGYGAYDLYDLGEFNQKGTVRTKYGTRSQLQAAVTSLKNNGIQVYGDVVMNHKGGADATEMVRAVEVNPNNRNQEVTGEYTIEAWTRFDFPGRGNTHSSFKWRWYHFDGVDWDQSRDLTNRIYKFRGHGKAWDWEVDTEFGNYDYLMYADYDMDHPEVVNELRNWGVWYTNTLGLDGFRIDAVKHIKYSFTRDWINHVRSATGKNMFAVAEFWKNDLGAIENYLQKTNWNHSVFDVPLHYNLYNASKSGGNYDMRNIFNGTVVQRHPSHAVTFVDNHDSQPEEALESFVEEWFKPLAYALTLTREQGYPSVFYGDYYGIPTHGVPAMRSKIDPILEARQKYAYGPQHDYLDHPDVIGWTREGDSSHPKSGLATLITDGPGGSKRMYAGLKNAGETWYDITGNRSDTVKIGSDGWGEFHVNDGSVSIYVQK

SEQ ID NO: 41032 - protein, 480 aa, Synthetic construct
NGTMMQYFEWYLPNDGNHWNRLNSDASNLKSKGITAVWIPPAWKGASQNDVGYGAYDLYDLGEFNQKGTVRTKYGTRSQLQAAVTSLKNNGIQVYGDVVMNHKGGADATEMVRAVEVNPNNRNQEVTGEYTIEAWTRFDFPGRGNTHSSFKWRWYHFDGVDWDQSRRLNNRIYKFRGHGKAWDWEVDTEFGNYDYLMYADYDMDHPEVVNELRNWGVWYTNTLGLDGFRIDAVKHIKYSFTRDWINHVRSATGKNMFAVAEFWKNDLGAIENYLQKTNWNHSVFDVPLHYNLYNASKSGGNYDMRNIFNGTVVQRHPSHAVTFVDNHDSQPEEALESFVEEWFKPLAYALTLTREQGYPSVFYGDYYGIPTHGVPAMRSKIDPILEARQKYAYGPQHDYLDHPDVIGWTREGDSSHPRSGLATLITDGPGGSKRMYAGLKNAGETWYDITGNRSDTVKIGSDGWGEFHVNDGSVSIYVQK

SEQ ID NO: 41033 - protein, 480 aa, Bacillus sp.
NGTMMQYFEWYLPNDGNHWNRLNSDASNLKSKGITAVWIPPAWKGASQNDVGYGAYDLYDLGEFNQKGTVRTKYGTRSQLQAAVTSLKNNGIQVYGDVVMNHKGGADATEMVRAVEVNPNNRNQEVTGEYTIEAWTRFDFPGRANTHSSFKWRWYHFDGVDWDQSRRLNNRIYKFRGHGKAWDWEVDTEFGNYDYLMYADYDMDHPEVVNELRNWGVWYTNTLGLDGFRIDAVKHIKYSFTRDWINHVRSATGKNMFAVAEFWKNDLGAIENYLQKTNWNHSVFDVPLHYNLYNASKSGGNYDMRNIFNGTVVQRHPSHAVTFVDNHDSQPEEALESFVEEWFKPLAYALTLTREQGYPSVFYGDYYGIPTHGVPAMRSKIDPILEARQKYAYGPQHDYLDHPDVIGWTREGDSSHPKSGLATLITDGPGGSKRMYAGLKNAGETWYDITGNRSDTVKIGSDGWGEFHVNDGSVSIYVQK

SEQ ID NO: 41034 - protein, 480 aa, Bacillus sp.
NGTMMQYFEWYLPNDGNHWNRLNSDASNLKSKGITAVWIPPAWKGASQNDVGYGAYDLYDLGEFNQKGTVRTKYGTRSQLQAAVTSLKNNGIQVYGDVVMNHKGGADATEMVRAVEVNPNNRNQEVTGEYTIEAWTRFDFPGRGNTHSSFKWRWYHFDGVDWDQSRELDNRIYKFRGHGKAWDWEVDTEFGNYDYLMYTDYDMDHPEVVNELRNWGVWYTNTLGLDGFRIDAVKHIKYSFTRDWINHVRSATGKNMFAVAEFWKNDLGAIENYLQKTNWNHSVFDVPLHYNLYNASKSQGNYDMRNIFNGTVVQRHPSHAVTFVDNHDSQPEEALESFVDTWFKPLAYALTLTREQGYPSVFYGDYYGIPTHGVPAMRSKIDPILLARQKYAYGPQHDYLDHPDVIGWTREGDSSHPKSGLATLITDGPGGSKRMYAGLKNAGETWYDITGNRSDTVKIGSDGWGEFHVNDGSVSIYVQK

SEQ ID NO: 41035 - protein, 480 aa, Bacillus sp.
NGTMMQYFEWYLPNDGNHWNRLNSDASNLKSKGITAVWIPPAWKGASQNDVGYGAYDLYDLGEFNQKGTVRTKYGTRSQLQAAVTSLKNNGIQVYGDVVMNHKGGADATEMVPAVEVNPNNRNQEVTGEYTIEAWTRFDFPGRGNTHSSFKWRWYHFDGVDWDQSRRLNNRIYKFRSHGKAWDWEVDTEFGNYDYLMYADYDMDHPEVVNELRNWGVWYTNTLGLDGFRIDAVKHIKYSFTRDWINHVRSATGKNMFAVAEFWKNDLGAIENYLQKTNWNHSVFDVPLHYNLYNASKSGGNYDMRNIFNGTVVQRHPSHAVTFVDNHDSQPEEALESFVEEWFKPLAYALTLTREQGYPSVFYGDYYGIPTHGVPAMRSKIDPILEARQKYAYGPQHDYLDHPDVIGWTREGDSSHPKSGLATLITDGPGGSKRMYAGLKNAGETWYDITGNRSDTVKIGSDGWGEFHVNDGSVSIYVQK

SEQ ID NO: 41036 - protein, 480 aa, Bacillus sp.
NGTMMQYFEWYLPNDGNHWNRLNSDASNLKSKGITAVWIPPAWKAASQNDVGYGAYDLYDLGEFNQKGTVRTKYGTRSQLQAAVTSLKNNGIQVYGDVVMNHKGGADATEMVRAVEVNPNNRNQEVTGEYTIEAWTRFDFPGRGNTHSSFKWRWYHFDGVDWDQSRRLQNRIYKFRGHGKAWDWEVDTEFGNYDYLMYADYDMDHPEVVNELRNWGVWYTNTLGLDGFRIDAVKHIKYSFTRDWINHVRSATGKNMFAVAEFWKNDLGAIENYLQKTNWNHSVFDVPLHYNLYNASKSGGNYDMRNIFNGTVVQRHPSHAVTFVDNHDSQPEEALESFVEEWFKPLAYALTLTREQGYPSVFYGDYYGIPTHGVPAMRSKIDPILEARQKYAYGPQHDYLDHPDVIGWTREGDSSHPKSGLATLITDGPGGSKRMYAGLKNAGETWYDITGNRSDTVKIGSDGWGEFHVNDGSVSIYVQK

SEQ ID NO: 41037 - protein, 480 aa, Bacillus sp.
NGTMMQYFEWYLPNDGNHWNRLNSDASNLKSKGITAVWIPPAWKAASQNDVGYGAYDLYDLGEFNQKGTVRTKYGTRSQLQAAVTSLKNNGIQVYGDVVMNHKGGADATEMVRAVEVNPNNRNQEVTGEYTIEAWTRFDFPGRGNTHSSFKWRWYHFDGVDWDQSRDLQNRIYKFRGHGKAWDWEVDTEFGNYDYLMYADYDMDHPEVVNELRNWGVWYTNTLGLDGFRIDAVKHIKYSFTRDWINHVRSATGKNMFAVAEFWKNDLGAIENYLQKTNWNHSVFDVPLHYNLYNASKSGGNYDMRNIFNGTVVQRHPSHAVTFVDNHDSQPEEALESFVETWFKPLAYALTLTREQGYPSVFYGDYYGIPTHGVPAMRSKIDPILEARQKYAYGPQHDYLDHPDVIGWTREGDSSHPKSGLATLITDGPGGSKRMYAGLKNAGETWYDITGNRSDTVKIGSDGWGEFHVNDASVSIYVQK

SEQ ID NO: 41038 - protein, 480 aa, Bacillus sp.
NGTMMQYFEWYLPNDGNHWNRLNSDASNLKSKGITAVWIPPAWKGASQNDVGYGAYDLYDLGEFNQKGTVRTKYGTRSQLQAAVTSLKNNGIQVYGDVVMNHKGGADATEMVRAVEVNPNNRNQEVTGEYTIEAWTRFDFPGRGNTHSSFKWRWYHFDGVDWDQSREFDNRIYKFRGHGKAWDWEVDTEFGNYDYLMYADYDMDHPEVVNELRNWGVWYTNTLGLDGFRIDAVKHIKYSFTRDWINHVRSATGKNMFAVAEFWKNDLGAIENYLQKTNWNHSVFDVPLHYNLYNASKSGGNYDMRNIFNGTVVQAHPNHAVTFVDNHDSQPEEALESFVEEWFKPLAYALTLTREQGYPSVFYGDYYGIPTHGVPAMRSKIDPILEARQKYAYGPQHDYLDHPDVIGWTREGDSSHPKSGLATLITDGPGGSKRMYAGLKNAGETWYDITGNRSDTVKIGSDGWGEFHVNDGSVSIYVQK

SEQ ID NO: 41039 - protein, 480 aa, Bacillus sp.
NGTMMQYFEWYLPNDGNHWNRLNSDASNLKSKGITAVWIPPAWKGASQNDVGYGAYDLYDLGEFNQKGTVRTKYGTRSQLQAAVTSLKNNGIQVYGDVVMNHKGGADATEMVRAVEVNPNNRNQEVTGEYTIEAWTRFDFPGRGNTHSSFKWRWYHFDGVDWDQSRRLNNRIYKFRGHGKAWDWEVDTEFGNYDYLMYADYDMDHPEVVNELRNWGVWYTNTLGLDGFRIDAVKHIKYSFTRDWINHVRIATGKNMFAVAEFWKNDLGAIENYLQKTNWNHSVFDVPLHYNLYNASKSGGNYDMRNIFNGTVVQRHPSHAVTFVDNHDSQPEEALESFVDEWFKPLAYALTLTREQGYPSVFYGDYYGIPTHGVPAMRSKIDPILEARQKYAYGPQHDYLDHPDVIGWTREGDSSHPKSGLATLITDGPGGSKRMYAGLKNAGETWYDITGNRSDTVKIGSDGWGEFHVNDQSVSIYVQK

SEQ ID NO: 41040 - protein, 480 aa, Synthetic construct
NGTMMQYFEWYLPNDGNHWNRLNSDASNLKSKGITAVWIPPAWKGASQNDVGYGAYDLYDLGEFNQKGTVRTKYGTRSQLQAAVTSLKNNGIQVYGDVVMNHKGGADATEMVRAVEVNPNNRNQEVTGEYTIEAWTRFDFPGRGNTHSSFKWRWYHFDGVDWDQSRRLNNRIYKFRVHGKKWDWEVDTENGNYDYLMYADIDMDHPEVVNELRNWGVWYTNTLGLDGFRIDAVKHIKYSFTRDWINHVRSATGKNMFAVAEFWKNDLGAIENYLQKTNWNHSVFDVPLHYNLYNASKSGGNYDMRNIFNGTVVQRHPSHAVTFVDNHDSQPEEALESFVEEWFKPLAYALTLTREQGYPSVFYGDYYGIPTHGVPAMRSKIDPILEARQKYAYGPQHDYLDHPDVIGWTREGDSSHPKSGLATLITDGPGGSKRMYAGLKNAGETWYDITGNRSDTVKIGSDGWGEFHVNDGSVSIYVQK

SEQ ID NO: 41041 - protein, 480 aa, Bacillus sp.
NGTMMQYFEWYLPNDGNHWNRLNSDASNLKSKGITAVWIPPAWKGASQNDVGYGAYDLYDLGEFNQKGTVRTKYGTRSQLQAAVTSLKNNGIQVYGDVVMNHKGGADATEMVRAVEVNPNNRNQEVTGEYTIEAWTRFDFPGRGNTHSSFKWRWYHFDGVDWDQSRRLNNRIYKFRGHGKAWDWEVDTEFGNYDYLMYADYDMDHPEVVNELRNWGVWYTNTLGLDGFRIDAVKHIKYSFTRDWINHVRSATGKNMFAVAEFWKNDLGAIENYLQKTNWNHSVFDVPLHYNLYNASKSGGNYDMRNIFNGTVVQRHPSHAVTFVDNHDSQPEEALESFVEEWFKPLAYALTLTREQGYPSVFYGDYYGIPTHGVPAMRSKIDPILEARQKYAYGPQHDYLDHPDVIGWTREGDSSHPKSGLATLETDGPGGSKRMYAGLKNAGETWYDITGNRSDTVKIGSDGWGEFHVNDGSVSIYVQK

SEQ ID NO: 41042 - protein, 480 aa, Bacillus sp.
NGTMMQYFEWYLPNDGNHWNRLNSDASNLKSKGITAVWIPPAWKGASQNDVGYGAYDLYDLGEFNQKGTVRTKYGTRSQLQAAVTSLKNNGIQVYGDVVMNHKGGADATEMVRAVEVNPNNRNQEVTGEYTIEAWTRFDFPGRGNTHSSFKWRWYHFDGVDWDQSRKLNNRIYKFRGHGKAWDWEVDTEFGNYDYLMYVDYDMDHPEVVNELRNWGVWYTNTLGLDGFRIDAVKHIKYSFTRDWINHVRSATGKNMFAVAEFWKNDLGAIENYLQKTNWNHSVFDVPLHYNLYNASKSGGNYDMRNIFNGTVVQAHPNHAVTFVDNHDSQPEEALESFVEEWFKPLAYALTLTREQGYPSVFYGDYYGIPTHGVPAMRSKIDPILEARQKYAYGPQHDYLDHPDVIGWTREGDSSHPKSGLATLITDGPGGSKRMYAGLKNAGETWYDITGNRSDTVKIGSDGWGEFHVNDGSVSIYVQK

SEQ ID NO: 41043 - protein, 480 aa, Bacillus sp.
NGTMMQYFEWYLPNDGNHWNRLNSDASNLKSKGITAVWIPPAWKAASQNDVGYGAYDLYDLGEFNQKGTVRTKYGTRSQLQAAVTSLKNNGIQVYGDVVMNHKGGADATEMVRAVEVNPNNRNQEVTGEYTIEAWTRFDFPGRGNTHSSFKWRWYHFDGVDWDQSRRVNNRIYKFRGHGKAWDWEVDTEFGNYDYLMYADYDMDHPEVVNELRNWGVWYTNTLGLDGFRIDAVKHIKYSFTRDWINHVRSATGKNMFAVAEFWKNDLGAIENYLQKTNWNHSVFDVPLHYNLYNASKSGGNYDMRNIFNGTVVQRHPSHAVTFVDNHDSQPEEALESFVEEWFKPLAYALTLTREQGYPSVFYGDYYGIPTHGVPAMRSKIDPILEARQKYAYGPQHDYLDHPDVIGWTREGDSSHPKSGLATLITDGPGGSKRMYAGLKNAGETWYDITGNRSDTVKIGSDGWGEFHVNDGSVSIYVQK

SEQ ID NO: 41044 - protein, 480 aa, Bacillus sp.
NGTMMQYFEWYLPNDGNHWNRLNSDASNLKSKGITAVWIPPAWKAASQNDVGYGAYDLYDLGEFNQKGTVRTKYGTRSQLQAAVTSLKNNGIQVYGDVVMNHKGGADATEMVRAVEVNPNNRNQEVTGEYTIEAWTRFDFPGRGNTHSSFKWRWYHFDGVDWDQSRSLHNRIYKFRGHGKAWDWEVDTEFGNYDYLMYADYDMDHPEVVNELRNWGVWYTNTLGLDGFRIDAVKHIKYSFTRDWINHVRSATGKNMFAVAEFWKNDLGAIENYLQKTNWNHSVFDVPLHYNLYNASKSGGNYDMRNIFNGTVVQRHPSHAVTFVDNHDSQPEEALESFVEEWFKPLAYALTLTREQGYPSVFYGDYYGIPTHGVPAMRSKIDPILEARQKYAYGPQHDYLDHPDVIGWTREGDSSHPKSGLATLITDGPGGSKRMYAGLKNAGETWYDITGNRSDTVKIGSDGWGEFHVNDGSVSIYVQK

SEQ ID NO: 41045 - protein, 480 aa, Bacillus sp.
NGTMMQYFEWYLPNDGNHWNRLNSDASNLKSKGITAVWIPPAWKGASQNDVGYGAYDLYDLGEFNQKGTVRTKYGTRSQLQAAVTSLKNNGIQVYGDVVMNHKGGADATEMVRAVEVNPNNRNQEVTGEYTIEAWTRFDFPGRGNTHSSFKWRWHHFDGVDWDQSRRLNNRIYKFRGHGKAWDWEVDTEFGNYDYLMYADYDMDHPEVVNELRNWGVWYTNTLGLDGFRIDAVKHIKYSFTRDWINHVRSATGKNMFAVAEFWKNDLGAIENYLQKTNWNHSVFDVPLHYNLYNASKSGGNYDMRNIFNGTVVQRHPSHAVTFVDNHDSQPEEALESFVEEWFKPLAYALTLTREQGYPSVFYGDYYGIPTHGVPAMRSKIDPILEARQKYAYGPQHDYLDHPDVIGWTREGDSSHPKSGLATLITDGPGGSKRMYAGLKNAGETWYDITGNRSDTVKIGSDGWGEFHVNDGSVSIYVQK

SEQ ID NO: 41046 - protein, 480 aa, Bacillus sp.
NGTMMQYFEWYLPNDGNHWNRLNSDASNLKSKGITAVWIPPAWKGASQNDVGYGAYDLYDLGEFNQKGTVRTKYGTRSQLQAAVTSLKNNGIQVYGDVVMNHKGGADATEMVRAVEVNPNNRNQEVTGEYTIEAWTRFDFPGRGNTHSSFKWRWYHFDGVDWDQSRRLNNRIYKFRGHGKAWDWEVDTEFGNYDYLMYADYDMDHPEVVNELRNWGVWYTNTLGLDGFRIDAVKHIKYSFTRDWINHVRSATGKNMFAVAEFWKPDLGAIENYLQKTNWNHSVFDVPLHYNLYNASKSGGNYDMRNIFNGTVVQRHPSHAVTFVDNHDSQPEEALESFVEEWFKPLAYALTLTREQGYPSVFYGDYYGIPTHGVPAMRSKIDPILEARQKYAYGPQHDYLDHPDVIGWTREGDSSHPKSGLATLITDGPGGSKRMYAGLKNAGETWYDITGNRSDTVKIGSDGWGEFHVNDGSVSIYVQK

SEQ ID NO: 41047 - protein, 480 aa, Bacillus sp.
NGTMMQYFEWYLPNDGNHWNRLNSDASNLKSKGITAVWIPPAWKGASQNDVGYGAYDLYDLGEFNQKGTVRTKYGTRSQLQAAVTSLKNNGIQVYGDVVMNHKGGADATEMVRAVEVNPNNRNQEVTGEYTIEAWTRFDFPGRGNTHSSFKWRWYHFDGVDWDQSRRLNNRIYKFRSHGKAWDWEVDTEFGNYDYLMYADYDMDHPEVVNELRNWGVWYTNTLGLDGFRIDAVKHIKYSFTRDWINHVRSATGKNMFAVAEFWKNDLGAIENYLQKTNWNHSVFDVPLHYNLYNASKSGGNYDMRNIFNGTVVQRHPSHAVTFVDNHDSQPEEALESFVEEWFKPLAYALTLTREQGYPSVFYGDYYGIPTHGVPAMRSKIDPILEARQKYAYGPQHDYLDHPDVIGWTREGDSSHPKSGLATLITDGPGGSKRMYAGLKNAGETWYDITGNRSDTVKIGSDGWGEFHVNDGSVSIYVQK

SEQ ID NO: 41048 - protein, 480 aa, Bacillus sp.
NGTMMQYFEWYLPNDGNHWNRLNSDASNLKSKGITAVWIPPAWKGTSQNDVGYGAYDLYDLGEFNQKGTVRTKYGTRSQLQAAVTSLKNNGIQVYGDVVMNHKGGADATEMVRAVEVNPNNRNQEVTGEYTIEAWTRFDFPGRGNTHSSFKWRWYHFDGVDWDQSRNLNNRIYKFRGHGKAWDWEVDTEFGNYDYLMYVDYDMDHPEVVNELRNWGVWYTNTLGLDGFRIDAVKHIKYSFTRDWINHVRSATGKNMFAVAEFWKNDLGAIENYLQKTNWNHSVFDVPLHYNLYNASKSGGNYDMRNIFNGTVVQRHPSHAVTFVDNHDSQPEEALESFVEEWFKPLAYALTLTREQGYPSVFYGDYYGIPTHGVPAMRSKIDPILEARQKYAYGPQHDYLDHPDVIGWTREGDSSHPKSGLATLITDGPGGSKRMYAGLKNAGETWYDITGNRSDTVKIGSDGWGEFHVNDGSVSIYVQK

SEQ ID NO: 41049 - protein, 480 aa, Bacillus sp.
NGTMMQYFEWYLPNDGNHWNRLNSDASNLKSKGITAVWIPPAWKGASQNDVGYGAYDLYDLGEFNQKGTVRTKYGTRSQLQAAVTSLKNNGIQVYGDVVMNHKGGADATEMVRAVEVNPNNRNQEVTGEYTIEAWTRFDFPGRGNTHSSFKWRWYHFDGVDWDQSRRLNNRIYKFRGHGKHWDWEVDTEFGNYDYLMYADYDMDHPEVVNELRNWGVWYTNTLGLDGFRIDAVKHIKYSFTRDWINHVRSATGKNMFAVAEFWKNDLGAIENYLQKTNWNHSVFDVPLHYNLYNASKSGGNYDMRNIFNGTVVQRHPSHAVTFVDNHDSQPEEALESFVEEWFKPLAYALTLTREQGYPSVFYGDYYGIPTHGVPAMRSKIDPILEARQKYAYGPQHDYLDHPDVIGWTREGDSSHPKSGLATLITDGPGGSKRMYAGLKNAGETWYDITGNRSDTVKIGSDGWGEFHVNDGSVSIYVQK

SEQ ID NO: 41050 - protein, 480 aa, Bacillus sp.
NGTMMQYFEWYLPNDGNHWNRLNSDASNLKSKGITAVWIPPAWKGASQNDVGYGAYDLYDLGEFNQKGTVRTKYGTRSQLQAAVTSLKNNGIQVYGDVVMNHKGGADATEMVRAVEVNPNNRNQEVTGEYTIEAWTRFDFPGRGNTHSSFKWRWYHFDGVDWDQSRRLNNRIYKFRGHGKAWDWEVDTEFGNYDYLMYADYDMDSPEVVNELRNWGVWYTNTLGLDGFRIDAVKHIKYSFTRDWINHVRSATGKNMFAVAEFWKNDLGAIENYLQKTNWNHSVFDVPLHYNLYNASKSGGNYDMRNIFNGTVVQRHPSHAVTFVDNHDSQPEEALESFVEEWFKPLAYALTLTREQGYPSVFYGDYYGIPTHGVPAMRSKIDPILEARQKYAYGPQHDYLDHPDVIGWTREGDSSHPKSGLATLITDGPGGSKRMYAGLKNAGETWYDITGNRSDTVKIGSDGWGEFHVNDGSVSIYVQK

SEQ ID NO: 41051 - protein, 480 aa, Bacillus sp.
NGTMMQYFEWYLPNDGNHWNRLNSDASNLKSKGITAVWIPPAWKAASQNDVGYGAYDLYDLGEFNQKGTVRTKYGTRSQLQAAVTSLKNNGIQVYGDVVMNHKGGADATEMVRAVEVNPNNRNQEVTGEYTIEAWTRFDFPGRGNTHSSFKWRWYHFDGVDWDQSRQLQNRIYKFRGHGKAWDWEVDTEFGNYDYLMYADYDMDHPEVVNELRNWGVWYTNTLGLDGFRIDAVKHIKYSFTRDWINHVRSATGKNMFAVAEFWKNDLGAIENYLQKTNWNHSVFDVPLHYNLYNASKSGGNYDMRNIFNGTVVQRHPSHAVTFVDNHDSQPEEALESFVEEWFKPLAYALTLTREQGYPSVFYGDYYGIPTHGVPAMRSKIDPILEARQKYAYGPQHDYLDHPDVIGWTREGDSSHPKSGLATLITDGPGGSKRMYAGLKNAGETWYDITGNRSDTVKIGSDGWGEFHVNDGSVSIYVQK

SEQ ID NO: 41052 - protein, 480 aa, Bacillus sp.
NGTMMQYFEWYLPNDGNHWNRLNSDASNLKSKGITAVWIPPAWKGASQNDVGYGAYDLYDLGEFNQKGTVRTKYGTRSQLQAAVTSLKNNGIQVYGDVVMNHKGGADATEMVRAVEVNPNNRNQEVTGEYTIEAWTRFDFPGRGNTHSSFKWRWYHFDGVDWDQSRDLQNRIYKFRGHGKAWDWEVDTEFGNYDYLMYVDYDMDHPEVVNELRNWGVWYTNTLGLDGFRIDAVKHIKYSFTRDWINHVRSATGKNMFAVAEFWKNDLGAIENYLQKTNWNHSVFDVPLHYNLYNASKSGGNYDMRNIFNGTVVQRHPSHAVTFVDNHDSQPEEALESFVETWFKPLAYALTLTREQGYPSVFYGDYYGIPTHGVPAMRSKIDPILEARQKYAYGPQHDYLDHPDVIGWTREGDSSHPKSGLATLITDGPGGSKRMYAGLKNAGETWYDITGNRSDTVKIGSDGWGEFHVNDASVSIYVQK

SEQ ID NO: 41053 - protein, 480 aa, Cytophaga sp.
NGTMMQYFEWYVPNDGQQWNRLRTDAPYLSSVGINAVWTPPAYKGTSQADVGYGPYDLYDLGEFNQKGTVRTKYGTKGELKSAVNTLHSNGIQVYGDVVMNHKAGADYTENVTAVEVNPSNRYQEISGEYNIQAWTGFNFPGRGTTYSNWKWQWFHFDGTDWDQSRSLSRIFKFDGKAWDWPVSSENGNYDYLMYADYDYDHPDVVNEMKKWGVWYANEVGLDGYRLDAVKHIKFSFLKDWVDNARAATGKEMFTVGEYWQNDLGALNNYLAKVNYNQSLFDAPLHYNFYAASTGGGYYDMRNILNNTLVASNPTKAVTLVENHDTQPGQSLESTVQPWFKPLAYAFILTRSGGYPSVFYGDMYGTKGTTTREIPALKSKIEPLLKARKDYAYGTQRDYIDNPDVIGWTREGDSTKAKSGLATVITDGPGGSKRMYVGTSNAGEIWYDLTGNRTDKITIGSDGYATFPVNKESVSVWVQQ

SEQ ID NO: 41054 - protein, 480 aa, Cytophaga sp.
NGTMMQYFEWYVPNDGQQWNRLRTDAPYLSSVGINAVWTPPAYKGTSQADVGYGPYDLYDLGEFNQKGTVRTKYGTKGELKSAVHTLHSNGIQVYGDVVMNHKAGADYTENVTAVEVNPSNRYQEISGEYMIQAWTGFNFPGRGTTYSNWKWQWFHFDGTDWDQSRSRSRIFKFDGKAWDWPVSSENGNYDYLMYADYDYDHPDVVNEMKKWGVWYANEVGLDGYRLDAVKHIKFSFLKDWVDNARAATGKEMFTVGEYWQNDLGALNNYLAKVNYNQSLFDAPLHYNFYAASTGGGYYDMRNILNNTLVASNPTKAVTLVENHDTQPGQSLESTVQPWFKPLAYAFILTRSGGYPSVFYGDMYGTKGTTTREIPALKSKIEPLLKARKDYAYGTQRDYIDNPDVIGWTREGDSTKAKSGLATVITDGPGGSKRMYVGTSNAGEIWYDLTGNRTDKITIGSDGYATFPVNKESVSVWVQQ

SEQ ID NO: 41055 - protein, 492 aa, Aspergillus niger
TIFLFLAIFVATALAATPAEWRSQSIYFLLTDRFARTDNSTTASCDLSARQYCGGSWQGIINQLDYIQGMGFTAIWITPVTAQIPQDTGYGQAYHGYWQQDAYALNSHYGTADDLKALASALHSRGMYLMVDVVANHMGHNGTGSSVDYSVYRPFNSQKYFHNLCWISDYNNQTNVEDCWLGDNTVALPDLDTTSTEVKNMWYDWVESLVSNYSVDGLRVDTVKNVQKNFWPGYNNASGVYCIGEVFDGDASYTCPYQEDLDGVLNYPMYYPLLRAFESTNGSISDLYNMINTVKSTCRDSTLLGTFVENHDNPRFANYTSDMSLAKNAATFTILADGIPIIYAGQEQHYSGGNDPYNREATWLSGYKTTSELYTHIAASNKIRTHAIKQDTGYLTYKNYPIYQDTSTLAMRKGYNGTQTITVLSNLGASGSSYTLSLPGTGYTAGQKITEIYTCTNLTVNSNGSVPVPMKSGLPRILYPADKLVNGSSFCS

SEQ ID NO: 41056 - protein, 480 aa, Bacillus sp.
NGTIMQYFEWNVPNDGQHWNRLHNNAQNLKNAGITAIWIPPAWKGTSQNDVGYGAYDLYDLGEFNQKGTVRTKYGTKAELERAIRSLKANGIQVYGDVVMNHKGGADFTERVQAVEVNPQNRNQEVSGTYEIEAWTGFNFPGRGNQHSSFKWRWYHFDGTDWDQSRQLSNRIYKFRGDGKAWDWEVDTENGNYDYLLYADVDMNHPEVINELNRWGVWYANTLNLDGFRLDAVKHIQFSFMRNWLGHVRGQTGKNLFAVAEYWKNDLGALENYLSKTNWTMSAFDVPLHYNLYQASNSGGNYDMRNLLNGTLVQRHPSHAVTFVDNHDTQPGEALESFVQGWFKPLAYATILTREQGYPQVFYGDYYGIPSDGVPSYRQQIDPLLKARQKYAYGPQHDYLDHPDVIGWTREGDSSHPKSGLATLITDGPGGSKRMYAGLKNAGETWYDITGNRSDTVKIGSDGWGEFHVNDGSVSIYVQK

SEQ ID NO: 41057 - protein, 480 aa, Bacillus sp.
NGTIMQYFEWNVPNDGQHWNRLHNNAQNLKNAGITAIWIPPAWKGTSQNDVGYGAYDLYDLGEFNQKGTVRTKYGTKAELERAIRSLKANGIQVYGDVVMNHKGGADFTERVQAVEVNPQNRNQEVSGTYEIEAWTGFNFPGRGNQHSSFKWRWYHFDGTDWDQSRQLSNRIYKFRGDGKAWDWEVDTENGNYDYLMYADVDMNHPEVINELNRWGVWYANTLNLDGFRLDAVKHIQFSFMRNWLGHVRGQTGKPLFAVAEYWKNDLGALENYLSKTNWTMSAFDVPLHYNLYQASNSGRNYDMRNLLNGTLVQRHPSHAVTFVDNHDTQPGEALESFVQGWFKPLAYATILTREQGYPQVFYGDYYGIPSDGVPSYRQQIDPLLKARQKYAYGPQHDYLDHPDVIGWTREGDSSHPKSGLATLITDGPGGSKRMYAGLKNAGETWYDITGNRSDTVKIGSDGWGEFHVNDGSVSIYVQK

SEQ ID NO: 41058 - protein, 480 aa, Bacillus sp.
NGTIMQYFEWNVPNDGQHWNRLHNNAQNLKNAGITAIWIPPAWKGTSQNDVGYGAYDLYDLGEFNQKGTVRTKYGTKAELERAIRSLKANGIQVYGDVVMNHKGGADFTERVQAVEVNPQNRNQEVSGTYEIEAWTGFNFPGRGNQHSSFKWRWYHFDGTDWDQSRQLSNRIYKFRGDGKAWDWEVDTENGNYDYLMYADVDMNHPEVINELNRWGVWYANTLNLDGFRLDAVKHIQFSFMRNWLGHVRGQTGKPLFAVAEYWKNDLGALENYLSKTNWTMSAFDVPLHYNLYQASNSGGNYDMRNLLNGTLVQRHPSHAVTFVDNHDTQPGEALESFVQGWFKPLAYATILTREQGYPQVFYGDYYGIPSDGVPSYRQQIDPLLKARQKYAYGPQHDYLDHPDVIGWTREGDSSHPKSGLATLITDGPGGSKRMYAGLKNAGETWYDITGNRSDTVKIGSDGWGEFHVNDRSVSIYVQK

SEQ ID NO: 41059 - protein, 480 aa, Bacillus sp.
NGTIMQYFEWNVPNDGQHWNRLHNNAQNLKNAGITAIWIPPAWKGTSQNDVGYGAYDLYDLGEFNQKGTVRTKYGTKAELERAIRSLKANGIQVYGDVVMNHKGGADFTERVQAVEVNPQNRNQEVSGTYEIEAWTGFNFPGRGNQHSSFKWRWYHFDGTDWDQSRQLSNRIYKFRGDGKAWDWEVDTENGNYDYLMYADVDMNHPEVINELNRWGVWYANTLNLDGFRLDAVKHIQFQFMRNWLGHVRGQTGKNLFAVAEYWKNDLGALENYLSKTNWTMSAFDVPLHYNLYQASNSGGNYDMRNLLNGTLVQRHPSHAVTFVDNHDTQPGEALESFVQGWFKPLAYATILTREQGYPQVFYGDYYGIPSDGVPSYRQQIDPLLKARQKYAYGPQHDYLDHPDVIGWTREGDSSHPKSGLATLITDGPGGSKRMYAGLKNAGETWYDITGNRSDTVKIGSDGWGEFHVNDGSVSIYVQK

SEQ ID NO: 41060 - protein, 480 aa, Bacillus sp.
NGTIMQYFEWNVPNDGQHWNRLHNNAQNLKNAGITAIWIPPAWKGTSQNDVGYGAYDLYDLGEFNQKGTVRTKYGTKAELERAIRSLKANGIQVYGDVVMNHKGGADFTERVQAVEVNPQNRNQEVSGTYEIEAWTGFNFPGRGNQHSSFKWRWYHFDGTDWDQSRQLSNRIYKFRGDGKAWDWEVDTENGNYDYLMYADVDMNHPEVINELNRWGVWYANTLNLDGFRLDAVKHIQFSFMRNWLGHVRGQTGKPLFAVAEYWKNDLGALENYLSKTNWTMSAFDVPLHYNLYQASNSGGNYDMRNLLNGTLVQRHPSHAVTFVDNHDTQPGEALESFVQGWFKPLAYATILTREQGYPQVFYGDYYGIPSDGVPSYRQQIDPLLKARQKYAYGPQHDYLDHPDVIGWTREGDSSHPKSGLATLITDGPGGSKRMYAGLKNAGETWYDITGNRSDTVKIGSDGRGEFHVNDGSVSIYVQK

SEQ ID NO: 41061 - protein, 480 aa, Bacillus sp.
NGTIMQYFEWNVPNDGQHWNRLHNNAQNLKNAGITAIWIPPAWKGTSQNDVGYGAYDLYDLGEFNQKGTVRTKYGTKAELERAIRSLKANGIQVYGDVVMNHKGGADFTERVQAVEVNPQNRNQEVSGTYEIEAWTGFNFPGRGNQHSSFKWRWYHFDGTDWDQSRQLSNRIYKFRGDGKAWDWEVDTENGNYDYLMYADVDMNHPEVINELNRWGVWYANTLNLDGFRLDAVKHIQFAFMRNWLGHVRGQTGKNLFAVAEYWKNDLGALENYLSKTNWTMSAFDVPLHYNLYQASNSGGNYDMRNLLNGTLVQRHPSHAVTFVDNHDTQPGEALESFVQGWFKPLAYATILTREQGYPQVFYGDYYGIPSDGVPSYRQQIDPLLKARQKYAYGPQHDYLDHPDVIGWTREGDSSHPKSGLATLITDGPGGSKRMYAGLKNAGETWYDITGNRSDTVKIGSDGWGEFHVNDGSVSIYVQK

SEQ ID NO: 41062 - protein, 480 aa, Bacillus sp.
NGTIMQYFEWNVPNDGQHWNRLHNNAQNLKNAGITAIWIPPAWKGTSQNDVGYGAYDLYDLGEFNQKGTVRTKYGTKAELERAIRSLKANGIQVYGDVVMNHKGGADFTERVQAVEVNPQNRNQEVSGTYEIEAYTGFNFPGRGNQHSSFKWRWYHFDGTDWDQSRQLSNRIYKFRGDGKAWDWEVDTENGNYDYLMYADVDMNHPEVINELNRWGVWYANTLNLDGFRLDAVKHIQFSFMRNWLGHVRGQTGKPLFAVAEYWKNDLGALENYLSKTNWTMSAFDVPLHYNLYQASNSGGNYDMRNLLNGTLVQRHPSHAVTFVDNHDTQPGEALESFVQGWFKPLAYATILTREQGYPQVFYGDYYGIPSDGVPSYRQQIDPLLKARQKYAYGPQHDYLDHPDVIGWTREGDSSHPKSGLATLITDGPGGSKRMYAGLKNAGETWYDITGNRSDTVKIGSDGWGEFHVNDGSVSIYVQK

SEQ ID NO: 41063 - protein, 480 aa, Bacillus sp.
NGTIMQYFEWNVPNDGQHWNRLHNNAQNLKNAGITAIWIPPAWKGTSQNDVGYGAYDLYDLGEFNQKGTVRTKYGTKAELERAIRSLKANGIQVYGDVVMNHKGGADFTERVQAVEVNPQNRNQEVSGTYEIEAWTGFNFPGRGNQHSSFKWRWYHFDGTDWDQSRQLSNRIYKFRGDGKAWDWEVDTENGNYDYLMYADVDMNHPEVINELNRWGVWYANTLNLDGFRLDAVKHIQFDFMRNWLGHVRGQTGKNLFAVAEYWKNDLGALENYLSKTNWTMSAFDVPLHYNLYQASNSGGNYDMRNLLNGTLVQRHPSHAVTFVDNHDTQPGEALESFVQGWFKPLAYATILTREQGYPQVFYGDYYGIPSDGVPSYRQQIDPLLKARQKYAYGPQHDYLDHPDVIGWTREGDSSHPKSGLATLITDGPGGSKRMYAGLKNAGETWYDITGNRSDTVKIGSDGWGEFHVNDGSVSIYVQK

SEQ ID NO: 41064 - protein, 480 aa, Bacillus sp.
NGTIMQYFEWNVPNDGQHWNRLHNNAQNLKNAGITAIWIPPAWKGTSQNDVGYGAYDLYDLGEFNQKGTVRTKYGTKAELERAIRSLKANGIQVYGDVVMNHKGGADFTERVQAVEVNPQNRNQEVSGTYEIEAWTGFNFPGRGNQHSSFKWRWYHFDGTDWDQSRQLSNRIYKFRGDGKAWDWEVDTENGNYDYLMYADVDMNHPEVINELNRWGVWYANTLNLDGFRLDAVKHIQFSFMRNWLGHVRGQTGKPLFAVAEYWKNDLGALENYLSKTNWTMSAFDVPLHYNLYQASNSGGNYDMRNLLNGTLVQRHPSHAVTFVDNHDTQPGEALESFVQGWFKPLAYATILTREQGYPQVFYGDYYGIPSDGVPSYRQQIDPLLKARQKYAYGPQHDYLDHPDVIGWTREGDSSHPKSGLATLITDGPGGSKRMYAGLKNAGETWYDITGNRSDTVKIGSDGWGEFHVNKGSVSIYVQK

SEQ ID NO: 41065 - protein, 480 aa, Bacillus sp.
NGTIMQYFEWNVPNDGQHWNRLHNNAQNLKNAGITAIWIPPAWKGTSQNDVGYGAYDLYDLGEFNQKGTVRTKYGTKAELERAIRSLKANGIQVYGDVVMNHKGGADFTERVQAVEVNPQNRNQEVSGTYEIEAWTGFNFPGRGNQHSSFKWRWYHFDGTDWDQSRQLSNRIYKFRGDGKAWDWEVDTENGNYDYLMYADYDMNHPEVINELNRWGVWYANTLNLDGFRLDAVKHIQFSFMRNWLGHVRGQTGKNLFAVAEYWKNDLGALENYLSKTNWTMSAFDVPLHYNLYQASNSGGNYDMRNLLNGTLVQRHPSHAVTFVDNHDTQPGEALESFVQGWFKPLAYATILTREQGYPQVFYGDYYGIPSDGVPSYRQQIDPLLKARQKYAYGPQHDYLDHPDVIGWTREGDSSHPKSGLATLITDGPGGSKRMYAGLKNAGETWYDITGNRSDTVKIGSDGWGEFHVNDGSVSIYVQK

SEQ ID NO: 41066 - protein, 480 aa, Bacillus sp.
NGTIMQYFEWNVPNDGQHWNRLHNNAQNLKNAGITAIWIPPAWKGTSQNDVGYGAYDLYDLGEFNQKGTVRTKYGTKAELERAIRSLKANGIQVYGDVVMNHKGGADFTERVQAVEVNPQNRNQEVSGTYEIEAWTGFNFPGRGNQHSSFKWRWYHFDGTDWDQSRQLSNRIYKFRGDGKAWDWEVDTENGNYDYLMYADVDMNHPEVINELNRWGVWYANTLNLDGFRLDAVKHIQFSFMRNWLGHVRGQTGKNLFAVAEYWKNDLGALENYLSKTNGTMSAFDVPLHYNLYQASNSGGNYDMRNLLNGTLVQRHPSHAVTFVDNHDTQPGEALESFVQGWFKPLAYATILTREQGYPQVFYGDYYGIPSDGVPSYRQQIDPLLKARQKYAYGPQHDYLDHPDVIGWTREGDSSHPKSGLATLITDGPGGSKNMYAGLKNAGETWYDITGNRSDTVKIGSDGWGEFHVNDGSVSIYVQK

SEQ ID NO: 41067 - protein, 479 aa, Synthetic construct
NGTIMQYFEWNVPNDGQHWNRLHNNAQNLKNAGITAIWIPPAWKGTSQNDVGYGAYDLYDLGEFNQKGTVRTKYGTKAELERAIRSLKANGIQVYGDVVMNHKAGADATEDVTAVEVNPANRNQETSEEYQIKAWTDFRFPGRGNTYSDFKWHWYHFDGADWDESRKISRIFKFRGEGKAWDWEVSSENGNYDYLMYADVDMDHPEVINELNRWGVWYANTLNLDGFRLDAVKHIKFSFMRDWLGHVRGQTGKNLFAVAEYWKNDLGALENYLSKTNWTMSAFDVPLHYNLYQASNSSGNYDMRNLLNGTLVQRHPSHAVTFVDNHDTQPGEALESFVQGWFKPLAYATILTREQGYPQVFYGDYYGIPSDGVPSYRQQIDPLLKARQQYAYGRQHDYFDHWDVIGWTREGNASHPNSGLATIMSDGPGGSKWMYVGRQKAGEVWHDMTGNRSGTVTINQDGWGHFFVNGGSVSVWVKR

SEQ ID NO: 41068 - protein, 480 aa, Bacillus sp.
NGTIMQYFEWNVPNDGQHWNRLHNNAQNLKNAGITAIWIPPAWKGTSQNDVGYGAYDLYDLGEFNQKGTVRTKYGTKAELERAIRSLKANGIQVYGDVVMNHKGGADFTERVQAVEVNPQNRNQEVSGTYEIEAWTGFNFPGRGNQHSSFKWRWYHFDGTDWDQSRQLSNRIYKFRGDGKAWDWEVDTENGNYDYLMYADVDMNHPEVINELNRWGVWYANTLNLDGFRLDAVKHIQFEFMRNWLGHVRGQTGKNLFAVAEYWKNDLGALENYLSKTNWTMSAFDVPLHYNLYQASNSGGNYDMRNLLNGTLVQRHPSHAVTFVDNHDTQPGEALESFVQGWFKPLAYATILTREQGYPQVFYGDYYGIPSDGVPSYRQQIDPLLKARQKYAYGPQHDYLDHPDVIGWTREGDSSHPKSGLATLITDGPGGSKRMYAGLKNAGETWYDITGNRSDTVKIGSDGWGEFHVNDGSVSIYVQK

SEQ ID NO: 41069 - protein, 480 aa, Bacillus sp.
NGTIMQYFEWNVPNDGQHWNRLHNNAQNLKNAGITAIWIPPAWKGTSQNDVGYGAYDLYDLGEFNQKGTVRTKYGTKAELERAIRSLKANGIQVYGDVVMNHKGGADFTERVQAVEVNPQNRNQEVSGTYEIEAWTGFNFPGRGNQHSSFKWRWYHFDGTDWDQSRQLSNRIYKFRGDGKAWDWEVDTENGNYDYLMYADVDMNHPEVINELNRWGVWYANTLNLDGFRLDAVKHIQFSFMRNWLGHVRGQTGKNLFAVAEYWKNDLGALENYLSKTNGTMSAFDVPLHYNLYQASNSGGNYDMRNLLNGTLVQRHPSHAVTFVDNHDTQPGEALESFVQGWFKPLAYATILTREQGYPQVFYGDYYGIPSDGVPSYRQQIDPLLKARQKYAYGPQHDYLDHPDVIGWTREGDSSHPKSGLATLITDGPGGSKRMYAGLKNAGETWYDITGNRSDTVKIGSDGTGEFHVNDGSVSIYVQK

SEQ ID NO: 41070 - protein, 480 aa, Bacillus sp.
NGTIMQYFEWNVPNDGQHWNRLHNNAQNLKNAGITAIWIPPAWKGTSQNDVGYGAYDLYDLGEFNQKGTVRTKYGTKAELERAIRSLKANGIQVYGDVVMNHKGGADFTERVQAVEVNPQNRNQEVSGTYEIEAWTGFNFPGRGNQHSSFKWRWYHFDGTDWDQSRQLSNRIYKFRGDGKAWDWEVDTENGNYDYLMYADVDMNHPEVINELNRWGVWYANTLNLDGFRLDAVKHIQFSFMRNWLGHVRGQTGKNLFAVAEYWKNDLGALENYLSKTNGTMSAFDVPLHYNLYQASNSGGNYDMRNLLNGTLVQRHPSHAVTFVDNHDTQPGEALESFVQGWFKPLAYATILTREQGYPQVFYGDYYGIPSDGVPSYRQQIDPLLKARQKYAYGPQHDYLDHPDVIGWTREGDSSHPKSGLATLITDGPGGSKRMYAGLKNAGETWYDITGNRSDTVKIGSDGWGEFHVNKGSVSIYVQK

SEQ ID NO: 41071 - protein, 480 aa, Bacillus sp.
NGTIMQYFEWNVPNDGQHWNRLHNNAQNLKNAGITAIWIPPAWKGTSQNDVGYGAYDLYDLGEFNQKGTVRTKYGTKAELERAIRSLKANGIQVYGDVVMNHKGGADFTERVQAVEVNPQNRNQEVSGTYEIEAWTGFNFPGRGNQHSSFKWRWYHFDGTDWDQSRQLSNRIYKFRGDGKAWDWEVDTENGNYDYLMYADVDMNHPEVINELNRWGVWYANTLNLDGFRLDAVKHIQFSFMRNWLGHVRGQTGKPLFAVAEYWKNDLGALENYLSKTNWTMSAFDVPLHYNLYQASNSGGNYDMRNLLNGTLVQRHPSHAVTFVDNHDTQPGEALESFVQGWFKPLAYATILTREQGYPQVFYGDYYGIPSDGVPSYRQQIDPLLKARQKYAYGPQHDYLDHPDVIGWTREGDSSHPKSGLATLITDGPGGSKKMYAGLKNAGETWYDITGNRSDTVKIGSDGWGEFHVNDGSVSIYVQK

SEQ ID NO: 41072 - protein, 480 aa, Bacillus sp.
NGTIMQYFEWNVPNDGQHWNRLHNNAQNLKNAGITAIWIPPAWKGTSQNDVGYGAYDLYDLGEFNQKGTVRTKYGTKAELERAIRSLKANGIQVYGDVVMNHKGGADFTERVQAVEVNPQNRNQEVSGTYEIEAWTGFNFPGRGNQHSSFKWRWYHFDGTDWDQSRQLSNRIYKFRGDGKAWDWEVDTENGNYDYLMYADVDMNHPEVINELNRWGVWYANTLNLDGFRLDAVKHIQFSFMRNWLGHVRGQTGKNLFAVAEYWKNDLGALENYLSKTNGTMSAFDVPLHYNLYQASNSGRNYDMRNLLNGTLVQRHPSHAVTFVDNHDTQPGEALESFVQGWFKPLAYATILTREQGYPQVFYGDYYGIPSDGVPSYRQQIDPLLKARQKYAYGPQHDYLDHPDVIGWTREGDSSHPKSGLATLITDGPGGSKRMYAGLKNAGETWYDITGNRSDTVKIGSDGWGEFHVNDGSVSIYVQK

SEQ ID NO: 41073 - protein, 480 aa, Bacillus sp.
NGTIMQYFEWNVPNDGQHWNRLHNNAQNLKNAGITAIWIPPAWKGTSQNDVGYGAYDLYDLGEFNQKGTVRTKYGTKAELERAIRSLKANGIQVYGDVVMNHKGGADFTERVQAVEVNPQNRNQEVSGTYEIEAWTGFNFPGRGNQHSSFKWRWYHFDGTDWDQSRQLSNRIYKFRGDGKAWDWEVDTENGNYDYLTYADVDMNHPEVINELNRWGVWYANTLNLDGFRLDAVKHIQFSFMRNWLGHVRGQTGKNLFAVAEYWKNDLGALENYLSKTNWTMSAFDVPLHYNLYQASNSGGNYDMRNLLNGTLVQRHPSHAVTFVDNHDTQPGEALESFVQGWFKPLAYATILTREQGYPQVFYGDYYGIPSDGVPSYRQQIDPLLKARQKYAYGPQHDYLDHPDVIGWTREGDSSHPKSGLATLITDGPGGSKRMYAGLKNAGETWYDITGNRSDTVKIGSDGWGEFHVNDGSVSIYVQK

SEQ ID NO: 41074 - protein, 480 aa, Bacillus sp.
NGTIMQYFEWNVPNDGQHWNRLHNNAQNLKNAGITAIWIPPAWKGTSQNDVGYGAYDLYDLGEFNQKGTVRTKYGTKAELERAIRSLKANGIQVYGDVVMNHKGGADFTERVQAVEVNPQNRNQEVSGTYEIEAWTGFNFPGRGNQHSSFKWRWYHFDGTDWDQSRQLSNRIYKFRGDGKAWDWEVDTEFGNYDYLMYADVDMNHPEVINELNRWGVWYANTLNLDGFRLDAVKHIQFSFMRNWLGHVRGQTGKNLFAVAEYWKNDLGALENYLSKTNWTMSAFDVPLHYNLYQASNSGGNYDMRNLLNGTLVQRHPSHAVTFVDNHDTQPGEALESFVQGWFKPLAYATILTREQGYPQVFYGDYYGIPSDGVPSYRQQIDPLLKARQKYAYGPQHDYLDHPDVIGWTREGDSSHPKSGLATLITDGPGGSKRMYAGLKNAGETWYDITGNRSDTVKIGSDGWGEFHVNDGSVSIYVQK

SEQ ID NO: 41075 - protein, 480 aa, Bacillus sp.
NGTIMQYFEWNVPNDGQHWNRLHNNAQNLKNAGITAIWIPPAWKGTSQNDVGYGAYDLYDLGEFNQKGTVRTKYGTKAELERAIRSLKANGIQVYGDVVMNHKGGADFTERVQAVEVNPQNRNQEVSGTYEIEAWTGFNFPGRGNQHSSFKWRWYHFDGTDWDQSRQLSNRIYKFRGDGKAWDWEVDTENGNYDYLMYADVDMNHPEVINELNRWGVWYANTLNLDGFRLDAVKHIQFSFMRNWLGHVRGQTGKNLFAVAEYWKNDLGALENYLSKTNGTMSAFDVPLHYNLYQASNSGGNYDMRNLLNGTLVQRHPSHAVTFVDNHDTQPGEALESFVQGWFKPLAYATILTREQGYPQVFYGDYYGIPSDGVPSYRQQIDPLLKARQKYAYGPQHDYLDHPDVIGWTREGDSSHPKSGLATLITDGPGGSKRMYAGLKNAGETWYDITGNRSDTVKIGSDGWGEFHVNDRSVSIYVQK

SEQ ID NO: 41076 - protein, 480 aa, Bacillus sp.
NGTIMQYFEWNVPNDGQHWNRLHNNAQNLKNAGITAIWIPPAWKGTSQNDVGYGAYDLYDLGEFNQKGTVRTKYGTKAELERAIRSLKANGIQVYGDVVMNHKGGADFTERVQAVEVNPQNRNQEVSGTYEIEAWTGFNFPGRANQHSSFKWRWYHFDGTDWDQSRQLSNRIYKFRGDGKAWDWEVDTENGNYDYLMYADVDMNHPEVINELNRWGVWYANTLNLDGFRLDAVKHIQFSFMRNWLGHVRGQTGKNLFAVAEYWKNDLGALENYLSKTNWTMSAFDVPLHYNLYQASNSGGNYDMRNLLNGTLVQRHPSHAVTFVDNHDTQPGEALESFVQGWFKPLAYATILTREQGYPQVFYGDYYGIPSDGVPSYRQQIDPLLKARQKYAYGPQHDYLDHPDVIGWTREGDSSHPKSGLATLITDGPGGSKRMYAGLKNAGETWYDITGNRSDTVKIGSDGWGEFHVNDGSVSIYVQK

SEQ ID NO: 41077 - protein, 480 aa, Bacillus sp.
NGTIMQYFEWNVPNDGQHWNRLHNNAQNLKNAGITAIWIPPAWKGTSQNDVGYGAYDLYDLGEFNQKGTVRTKYGTKAELERAIRSLKANGIQVYGDVVMNHKGGADFTERVQAVEVNPQNRNQEVSGTYEIEAWTGFNFPGRGNQHSSFKWRWYHFDGTDWDQSRQLSNRIYKFRGDGKAWDWEVDTENGNYDYLMYADVDMNHPEVINELNRWGVWYANTLNLDGFRLDAVKHIQFSFMRNWLGHVRGQTGKNLFAVAEYWKNDLGALENYLSKTNGTMSAFDVPLHYNLYQASNSKGNYDMRNLLNGTLVQRHPSHAVTFVDNHDTQPGEALESFVQGWFKPLAYATILTREQGYPQVFYGDYYGIPSDGVPSYRQQIDPLLKARQKYAYGPQHDYLDHPDVIGWTREGDSSHPKSGLATLITDGPGGSKRMYAGLKNAGETWYDITGNRSDTVKIGSDGWGEFHVNDGSVSIYVQK

SEQ ID NO: 41078 - protein, 480 aa, Bacillus sp.
NGTIMQYFEWNVPNDGQHWNRLHNNAQNLKNAGITAIWIPPAWKGTSQNDVGYGAYDLYDLGEFNQKGTVRTKYGTKAELERAIRSLKANGIQVYGDVVMNHKGGADFTERVQAVEVNPQNRNQEVSGTYEIEAWTGFNFPGRGNQHSSFKWRWYHFDGTDWDQSRQLSNRIYKFRGDGKAWDWPVDTENGNYDYLMYADVDMNHPEVINELNRWGVWYANTLNLDGFRLDAVKHIQFSFMRNWLGHVRGQTGKNLFAVAEYWKNDLGALENYLSKTNWTMSAFDVPLHYNLYQASNSGGNYDMRNLLNGTLVQRHPSHAVTFVDNHDTQPGEALESFVQGWFKPLAYATILTREQGYPQVFYGDYYGIPSDGVPSYRQQIDPLLKARQKYAYGPQHDYLDHPDVIGWTREGDSSHPKSGLATLITDGPGGSKRMYAGLKNAGETWYDITGNRSDTVKIGSDGWGEFHVNDGSVSIYVQK

SEQ ID NO: 41079 - protein, 480 aa, Synthetic construct
NGTMMQYFEWYLPNDGNHWNRLNSDASNLKSKGITAVWIPPAWKGASQNDVGYGAYDLYDLGEFNQKGTVRTKYGTRSQLQAAVTSLKNNGIQVYGDVVMNHKGGADATEMVRAVEVNPNNRNQEVTGEYTIEAWTRFDFPGRGNTHSSFKWRWYHFDGVDWDQSRRLNNRIYKFRGHGKAWDWEVDTENGNYDYLMYADIDMDHPEVVNELRNWGVWYTNTLGLDGFRIDAVKHIKYSFTRDWINHVRSATGKNMFAVAEFWKNDLGAIENYLQKTNWNHSVFDVPLHYNLYNASKSGGNYDMRNIFNGTVVQRHPSHAVTFVDNHDSQPEEALESFVEEWFKPLAYALTLTREQGYPSVFYGDYYGIPTHEVPAMRSKIDPILEARQKYAYGPQHDYLDHPDVIGWTREGDSSHPKSGLATLITDGPGGSKRMYAGLKNAGETWYDITGNRSDTVKIGSDGWGEFHVNDGSVSIYVQK

SEQ ID NO: 41080 - protein, 480 aa, Bacillus sp.
NGTIMQYFEWNVPNDGQHWNRLHNNAQNLKNAGITAIWIPPAWKGTSQNDVGYGAYDLYDLGEFNQKGTVRTKYGTKAELERAIRSLKANGIQVYGDVVMNHKGGADFTERVQAVEVNPQNRNQEVSGTYEIEAWTGFNFPGRGNQHSSFKWRWYHFDGTDWDQSRQLSNRIYKFRGDGKAWDWEVDTENGNYDYLMYADVDMNHPEVINELNRWGVWYANTLNLDGFRLDAVKHIQFSFMRNWLGHVRGQTGKPLFAVAEYWKNDLGALENYLSKTNWTMSAFDVPLHYNLYQASNSKGNYDMRNLLNGTLVQRHPSHAVTFVDNHDTQPGEALESFVQGWFKPLAYATILTREQGYPQVFYGDYYGIPSDGVPSYRQQIDPLLKARQKYAYGPQHDYLDHPDVIGWTREGDSSHPKSGLATLITDGPGGSKRMYAGLKNAGETWYDITGNRSDTVKIGSDGWGEFHVNDGSVSIYVQK

SEQ ID NO: 41081 - protein, 480 aa, Bacillus sp.
NGTIMQYFEWNVPNDGQHWNRLHNNAQNLKNAGITAIWIPPAWKGTSQNDVGYGAYDLYDLGEFNQKGTVRTKYGTKAELERAIRSLKANGIQVYGDVVMNHKGGADFTERVQAVEVNPQNRNQEVSGTYEIEAWTGFNFPGRGNQHSSFKWRWYHFDGTDWDQSRQLSNRIYKFRGDGKAWDWEVDTENGNYDYLMYADFDMNHPEVINELNRWGVWYANTLNLDGFRLDAVKHIQFSFMRNWLGHVRGQTGKNLFAVAEYWKNDLGALENYLSKTNWTMSAFDVPLHYNLYQASNSGGNYDMRNLLNGTLVQRHPSHAVTFVDNHDTQPGEALESFVQGWFKPLAYATILTREQGYPQVFYGDYYGIPSDGVPSYRQQIDPLLKARQKYAYGPQHDYLDHPDVIGWTREGDSSHPKSGLATLITDGPGGSKRMYAGLKNAGETWYDITGNRSDTVKIGSDGWGEFHVNDGSVSIYVQK

SEQ ID NO: 41082 - protein, 480 aa, Bacillus sp.
NGTIMQYFEWNVPNDGQHWNRLHNNAQNLKNAGITAIWIPPAWKGTSQNDVGYGAYDLYDLGEFNQKGTVRTKYGTKAELERAIRSLKANGIQVYGDVVMNHKGGADFTERVQAVEVNPQNRNQEVSGTYEIEAWTGFNFPGRGNQHSSFKWRWYHFDGTDWDQSRQLSNRIYLFRGDGKAWDWEVDTENGNYDYLMYADVDMNHPEVINELNRWGVWYANTLNLDGFRLDAVKHIQFSFMRNWLGHVRGQTGKNLFAVAEYWKNDLGALENYLSKTNWTMSAFDVPLHYNLYQASNSGGNYDMRNLLNGTLVQRHPSHAVTFVDNHDTQPGEALESFVQGWFKPLAYATILTREQGYPQVFYGDYYGIPSDGVPSYRQQIDPLLKARQKYAYGPQHDYLDHPDVIGWTREGDSSHPKSGLATLITDGPGGSKRMYAGLKNAGETWYDITGNRSDTVKIGSDGWGEFHVNDGSVSIYVQK

SEQ ID NO: 41083 - protein, 480 aa, Bacillus sp.
NGTIMQYFEWNVPNDGQHWNRLHNNAQNLKNAGITAIWIPPAWKGTSQNDVGYGAYDLYDLGEFNQKGTVRTKYGTKAELERAIRSLKANGIQVYGDVVMNHKGGADFTERVQAVEVNPQNRNQEVSGTYEIEAWTGFNFPGRGNQHSSFKWRWYHFDGTDWDQSRQLSNRIYKFRGDGKAWDWEVDTENGNYDYLIYADVDMNHPEVINELNRWGVWYANTLNLDGFRLDAVKHIQFSFMRNWLGHVRGQTGKNLFAVAEYWKNDLGALENYLSKTNWTMSAFDVPLHYNLYQASNSGGNYDMRNLLNGTLVQRHPSHAVTFVDNHDTQPGEALESFVQGWFKPLAYATILTREQGYPQVFYGDYYGIPSDGVPSYRQQIDPLLKARQKYAYGPQHDYLDHPDVIGWTREGDSSHPKSGLATLITDGPGGSKRMYAGLKNAGETWYDITGNRSDTVKIGSDGWGEFHVNDGSVSIYVQK

SEQ ID NO: 41084 - protein, 480 aa, Synthetic construct
NGTMMQYFEWYLPNDGNHWNRLNSDASNLKSKGITAVWIPPAWKGASQNDVGYGAYDLYDLGEFNQKGTVRTKYGTRSQLQAAVTSLKNNGIQVYGDVVMNHKGGADATEMVRAVEVNPNNRNQEVTGEYTIEAWTRFDFPGRGNTHSSFKWRWYHFDGVDWDQSRRLNNRIYKFRGHGKAWDWEVDTENGNYDYLMYADIDMDHPEVVNELRNWGVWYTNTLGLDGFRIDAVKHIKYSFTRDWINHVRSATGKNMFAVAEFWKNDLGAIENYLQKTNWNHSVFDVPLHYNLYNASKSGGNYDMRNIFNGTVVQRHPSHAVTFVDNHDSQPEEALESFVEEWFKPLAYALTLTREQGYPSVFYGDYYGTPTHGVPAMRSKIDPILEARQKYAYGPQHDYLDHPDVIGWTREGDSSHPKSGLATLITDGPGGSKRMYAGLKNAGETWYDITGNRSDTVKIGSDGWGEFHVNDGSVSIYVQK

SEQ ID NO: 41085 - protein, 480 aa, Bacillus sp.
NGTIMQYFEWNVPNDGQHWNRLHNNAQNLKNAGITAIWIPPAWKGTSQNDVGYGAYDLYDLGEFNQKGTVRTKYGTKAELERAIRSLKANGIQVYGDVVMNHKGGADFTERVQAVEVNPQNRNQEVSGTYEIEAWTGFNFPGRGNQHSSFKWRWSHFDGTDWDQSRQLSNRIYKFRGDGKAWDWEVDTENGNYDYLMYADVDMNHPEVINELNRWGVWYANTLNLDGFRLDAVKHIQFSFMRNWLGHVRGQTGKPLFAVAEYWKNDLGALENYLSKTNWTMSAFDVPLHYNLYQASNSGGNYDMRNLLNGTLVQRHPSHAVTFVDNHDTQPGEALESFVQGWFKPLAYATILTREQGYPQVFYGDYYGIPSDGVPSYRQQIDPLLKARQKYAYGPQHDYLDHPDVIGWTREGDSSHPKSGLATLITDGPGGSKRMYAGLKNAGETWYDITGNRSDTVKIGSDGWGEFHVNDGSVSIYVQK

SEQ ID NO: 41086 - protein, 480 aa, Bacillus sp.
NGTIMQYFEWNVPNDGQHWNRLHNNAQNLKNAGITAIWIPPAWKGTSQNDVGYGAYDLYDLGEFNQKGTVRTKYGTKAELERAIRSLKANGIQVYGDVVMNHKGGADFTERVQAVEVNPQNRNQEVSGTYEIEAWTGFNFPGRGNQHSSFKWRWYHFDGTDWDQSRQLSNRIYKFRGDGKAWDWEVDTENGNYDYLMYADVDMNHPEVINELNRWGVWYANTLNLDGFRLDAVKHIQFNFMRNWLGHVRGQTGKNLFAVAEYWKNDLGALENYLSKTNWTMSAFDVPLHYNLYQASNSGGNYDMRNLLNGTLVQRHPSHAVTFVDNHDTQPGEALESFVQGWFKPLAYATILTREQGYPQVFYGDYYGIPSDGVPSYRQQIDPLLKARQKYAYGPQHDYLDHPDVIGWTREGDSSHPKSGLATLITDGPGGSKRMYAGLKNAGETWYDITGNRSDTVKIGSDGWGEFHVNDGSVSIYVQK

SEQ ID NO: 41087 - protein, 480 aa, Synthetic construct
NGTMMQYFEWYLPNDGNHWNRLNSDASNLKSKGITAVWIPPAWKGASQNDVGYGAYDLYDLGEFNQKGTVRTKYGTRSQLQAAVTSLKNNGIQVYGDVVMNHKGGADATEMVRAVEVNPNNRNQEVTGEYTIEAWTRFDFPGRGNTHSSFKWRWYHFDGVDWDQSRRLNNRIYKFRGHGKAWDWEVDTENGNYDYLMYADIDMDHPEVVNELRNWGVWYTNTLGLDGFRIDAVKHIKYSFTRDWINHVRSATGKNMFAVAEFWKNDLGAIENYLQKTNWNHSVFDVPLHYNLYNASKSGGNYDMRNIFNGTVVQRHPSHAVTFVDNHDSQPEEALESFVEEWFKPLAYALTLTREQGYPSVFYGDYYGISTHGVPAMRSKIDPILEARQKYAYGPQHDYLDHPDVIGWTREGDSSHPKSGLATLITDGPGGSKRMYAGLKNAGETWYDITGNRSDTVKIGSDGWGEFHVNDGSVSIYVQK

SEQ ID NO: 41088 - protein, 478 aa, Bacillus sp.
NGTMMQYFEWYLPNDGNHWNRLNSDASNLKSKGITAVWIPPAWKAVSQNDVGYGAYDLYDLGEFNQKGTVRTKYGTRSQLQAAVTSLKNNGIQVYGDVVMNHKGGADATEMVRAVEVNPNNRNQEVTGEYTIEAWTRFDFPGRGNTHSSFKWRWYHFDGVDWDQSRNLTNRIYKFRGKAWDWEVDTEFGNYDYLMYTDYDMDHPEVVNELRNWGVWYTNTLGLDGFRIDAVKHIKYSFTRDWINHVRSATGKNMFAVAEFWKNDLGAIENYLQKTNWNHSVFDVPLHYNLYNASKSGGNYDMRNIFNGTVVQRHPSHAVTFVDNHDSQPEEALESFVEEWFKPLAYALTLTREQGYPSVFYGDYYGIPTHGVPAMRSKIDPILEARQKYAYGPQHDYLDHPDVIGWTREGDSSHPKSGLATLITDGPGGSKRMYAGLKNAGETWYDITGNRSDTVKIGSDGWGEFHVNDGSVSIYVQK

SEQ ID NO: 41089 - protein, 478 aa, Bacillus sp.
NGTMMQYFEWYLPNDGNHWNRLNSDASNLKSKGITAVWIPPAWKAASQNDVGYGAYDLYDLGEFNQKGTVRTKYGTRSQLQAAVTSLKNNGIQVYGDVVMNHKGGANATEMVRAVEVNPNNRNQEVTGEYTIEAWTRFDFPGRGNTHSSFKWRWYHFDGVDWDQSRRLNNRIYKFRGKAWDWEVDTEFGNYDYLMYADYDMDHPEVVNELRNWGVWYTNTLGLDGFRIDAVKHIKYSFTRDWINHVRSATGKNMFAVAEFWKNDLGAIENYLQKTNWNHSVFDVPLHYNLYNASKSGGNYDMRNIFNGTVVQRHPSHAVTFVDNHDSQPEEALESFVEEWFKPLAYALTLTREQGYPSVFYGDYYGIPTHGVPAMRSKIDPILEARQKYAYGPQHDYLDHPDVIGWTREGDSSHPKSGLATLITDGPGGSKRMYAGLKNAGETWYDITGNRSDTVKIGSDGWGEFHVNDGSVSIYVQK

SEQ ID NO: 41090 - protein, 478 aa, Bacillus sp.
NGTMMQYFEWYLPNDGNHWNRLNSDASNLKSKGITAVWIPPAWKATSQNDVGYGAYDLYDLGEFNQKGTVRTKYGTRSQLQAAVTSLKNNGIQVYGDVVMNHKGGADATEMVDAVEVNPNNRNQEVTGEYTIEAWTRFDFPGRGNTHSSFKWRWYHFDGVDFDQSRNVNNRIYKFRGKAWDWEVDTEFGNYDYLMYADYDMDHPEVVNELRNWGVWYTNTLGLDGFRIDAVKHIKYSFTRDWINHVRSATGKNMFAVAEFWKNDLGAIENYLQKTNWNHSVFDVPLHYNLYNASKSGGNYDMRNIFNGTVVQRHPSHAVTFVDNHDSQPEEALESFVEEWFKPLAYALTLTREQGYPSVFYGDYYGIPTHGVPAMRSKIDPILEARQKYAYGPQHDYLDHPDVIGWTREGDSSHPKSGLATLITDGPGGSKRMYAGLKNAGETWYDITGNRSDTVKIGSDGWGEFHVNDGSVSIYVQK

SEQ ID NO: 41091 - protein, 478 aa, Bacillus sp.
NGTMMQYFEWYLPNDGNHWNRLNSDASNLKSKGIKAVWIPPAWKGASQNDVGYGAYDLYDLGEFNQKGTVRTKYGTRSQLQAAVTSLKNNGIQVYGDVVMNHKGGADATEMVRAVEVNPNNRNQEVTGEYTIEAWTRFDFPGRGNTHSSFKWRWYHFDGVDWDQSRRLDNRIYKFRGKAWDWEVDTEFGNYDYLMYTDYDMDHPEVVNELRNWGVWYTNTLGLDGFRIDAVKHIKYSFTRDWINHVRSATGKNMFAVAEFWKNDLGAIENYLQKTNWNHSVFDVPLHYNLYNASKSGGNYDMRNIFNGTVVQRHPSHAVTFVDNHDSQPEEALESFVEEWFKPLAYALTLTREQGYPSVFYGDYYGIPTHGVPAMRSKIDPILEARQKYAYGPQHDYLDHPDVIGWTREGDSSHPKSGLATLITDGPGGSKRMYAGLKNAGETWYDITGNRSDTVKIGSDGWGEFHVNDGSVSIYVQK

SEQ ID NO: 41092 - protein, 478 aa, Bacillus sp.
NGTMMQYFEWYLPNDGNHWNRLNSDASNLKSKGITAVWIPPAWKATSQNDVGYGAYDLYDLGEFNQKGTVRTKYGTRSQLQAAVTSLKNNGIQVYGDVVMNHKGGADATEMVRAVEVNPNNRNQEVTGEYTIEAWTRFDFPGRGNTHSSFKWRWYHFDGVDWDQSRQVNNRIYKFRGKAWDWEVDTEFGNYDYLMYVDYDMDHPEVVNELRNWGVWYTNTLGLDGFRIDAVKHIKYSFTRDWINHVRSATGKNMFAVAEFWKNDLGAIENYLQKTNWNHSVFDVPLHYNLYNASKSGGNYDMRNIFNGTVVQRHPSHAVTFVDNHDSQPEEALESFVEEWFKPLAYALTLTREQGYPSVFYGDYYGIPTHGVPAMRSKIDPILEARQKYAYGPQHDYLDHPDVIGWTREGDSSHPKSGLATLITDGPGGSKRMYAGLKNAGETWYDITGNRSDTVKIGSDGWGEFHVNDGSVSIYVQK

SEQ ID NO: 41093 - protein, 478 aa, Bacillus sp.
NGTMMQYFEWYLPNDGNHWNRLNSDASNLKSKGITAVWIPPAWKGASQNDVGYGAYDLYDLGEFNQKGTVRTKYGTRSQLQAAVTSLKNNGIQVYGDVVMNHKGGADATEMVRAVEVNPNNRNQEVTGEYTIEAWTRFDFPGRGNTHSSFKWRWYHFDGVDWDQSRRLNNRIYKFRGKAWDWEVDTEFGNYDYLMYADYDMDHPETSNELRNWGVWYTNTLGLDGFRIDAVKHIKYSFTRDWINHVRSATGKNMFAVAEFWKNDLGAIENYLQKTNWNHSVFDVPLHYNLYNASKSGGNYDMRNIFNGTVVQRHPSHAVTFVDNHDSQPEEALESFVEEWFKPLAYALTLTREQGYPSVFYGDYYGIPTHGVPAMRSKIDPILEARQKYAYGPQHDYLDHPDVIGWTREGDSSHPKSGLATLITDGPGGSKRMYAGLKNAGETWYDITGNRSDTVKIGSDGWGEFHVNDGSVSIYVQK

SEQ ID NO: 41094 - protein, 478 aa, Bacillus sp.
NGTMMQYFEWYLPNDGNHWNRLNSDASNLKSKGITAVWIPPAWKGASQNDVGYGAYDLYDLGEFNQKGTVRTKYGTRSQLQAAVTSLKNNGIQVYGDVVMNHKGGADATEMVRAVEVNPNNRNQEVTGEYTIEAWTRFDFPGRGNTHSSFKWRWYHFDGVDWDQSRRLNNRIYKFRGKAWDWEVDTENGFYDYLMYADIDMDYPEVVTTLRVWGVWYTNTLGLDGFRIDAVKHIKYSFTRDWINHVRSATGKNMFAVAEFWKNDLGAIENYLQKTNWNHSVFDVPLHYNLYNASKSGGNYDMRNIFNGTVVQRHPSHAVTFVDNHDSQPEEALESFVEEWFKPLAYALTLTREQGYPSVFYGDYYGIPTHGVPAMRSKIDPILEARQKYAYGPQHDYLDHPDVIGWTREGDSSHPKSGLATLITDGPGGSKRMYAGLKNAGETWYDITGNRSDTVKIGSDGWGEFHVNDGSVSIYVQK

SEQ ID NO: 41095 - protein, 478 aa, Bacillus sp.
NGTMMQYFEWYLPNDGNHWNRLNSDASNLKSKGITAVWIPPAWKGASQNDVGYGAYDLYDLGEFNQKGTVRTKYGTRSQLQAAVTSLKNNGIQVYGDVVMNHKGGADATEMVRAVEVNPNNRNQEVTGEYTIEAWTRFDFPGRGNTHSSFKWRWYHFDGVDWDQSERLNNRIYKFRGKAWDWEVDTEFGNYDYLMYADYDMDHPEVVNELRNWGVWYTNTLGLDGFRIDAVKHIKYSFTRDWINHVRSATGKNMFAVAEFWKNDLGAIENYLQKTNWNHSVFDVPLHYNLYNASKSGGNYDMRNIFNGTVVQRHPSLAVTFVDNHDSQPEEALESFVEEWFKPLAYALTLTREAGLPSVFYGDYYGIPTHGVPAMRSKIDPILEARQKYAYGPQHDYLDHPDVIGWTREGDSSHPKSGLATLITDGPGGSKRMYAGLKNAGETWYDITGNRSDTVKIGSDGWGEFHVNDGSVSIYVQK

SEQ ID NO: 41096 - protein, 478 aa, Bacillus sp.
NGTMMQYFEWYLPNDGNHWNRLNSDASNLKSKGITAVWIPPAWKGASQNDVGYGAYDLYDLGEFNQKGTVRTKYGTRSQLQAAVTSLKNNGIQVYGDVVMNHKGGADATEMVRAVEVNPNNRNQEVTGEYTIEAWTRFDFPGRGNTHSSFKWRWYHFDGVDWDQSRRTNNRIYKFRGKAWDWEVDTEFGNYDYLMYTDYDMDHPEVVNELRNWGVWYTNTLGLDGFRIDAVKHIKYSFTRDWINHVRSATGKNMFAVAEFWKNDLGAIENYLQKTNWNHSVFDVPLHYNLYNASKSGGNYDMRNIFNGTVVQRHPSHAVTFVDNHDSQPEEALESFVETWFKPLAYALTLTREQGYPSVFYGDYYGIPTHGVPAMRSKIDPILEARQKYAYGPQHDYLDHPDVIGWTREGDSSHPKSGLATLITDGPGGSKRMYAGLKNAGETWYDITGNRSDTVKIGSDGWGEFHVNKASVSIYVQK

SEQ ID NO: 41097 - protein, 478 aa, Bacillus sp.
NGTMMQYFEWYLPNDGNHWNRLNSDASNLKSKGITAVWIPPAWKGASQNDVGYGAYDLYDLGEFNQKGTVRTKYGTRSQLQAAVTSLKNNGIQVYGDVVMNHKGGADATEMVRAVEVNPNNRNQEVTGEYTIEAWTRFDFPGRGNTHSSFKWRWYHFDGVDWDQSRRLNNRIYKFRGKAWDWEVDTEFGNYDYLMYADYDMDHPEVVNELRNWGVWYTNTLGLDGFRIDAVKHIKYSFTRDWINHVRSATGKNMFAVAEFWKNDLGAIENYLQKTNWNHSVFDVPLHYNLYNASKSGGNYDMRNIFNGTVVQSWPMHAVTFVDNHDSQPEEALESFVEEWFKPLAYALTLTREQGYPSVFYGDYYGIPTHGVPAMRSKIDPILEARQKYAYGPQHDYLDHPDVIGWTREGDSSHPKSGLATLITDGPGGSKRMYAGLKNAGETWYDITGNRSDTVKIGSDGWGEFHVNDGSVSIYVQK

SEQ ID NO: 41098 - protein, 478 aa, Bacillus sp.
NGTMMQYFEWYLPNDGNHWNRLNSDASNLKSKGITAVWIPPAWKGASQNDVGYGAYDLYDLGEFNQKGTVRTKYGTRSQLQAAVTSLKNNGIQVYGDVVMNHKGGADATEMVRAVEVNPHNRNQEVTGEYTIEAWTRFDFPGRGNTHSSFKWRWYHFDGVDWDQSRRLNNRIYKFRGKAWDWEVDTEFGNYDYLMYADYDMDHPEVVNELRNWGVWYTNTLGLDGFRIDAVKHIKYSFTRDWINHVRSATGKNMFAVAEFWKNDLGAIENYLQKTNWNHSVFDVPLHYNLYNASKSGGNYDMRNIFNGTVVQRHPSHAVTFVDNHDSQPEEALESFVDPWFKPLAYALTLTREQGYPSVFYGDYYGIPTHGVPAMRSKIDPILEARQKYAYGPQHDYLDHPDVIGWTREGDSSHPKSGLATLITDGPGGSKRMYAGLKNAGETWYDITGNRSDTVKIGSDGWGEFHVNKASVSIYVQK

SEQ ID NO: 41099 - protein, 478 aa, Bacillus sp.
NGTMMQYFEWYLPNDGNHWNRLNSDASNLKSKGITAVWIPPAWKAASQNDVGYGAYDLYDLGEFNQKGTVRTKYGTRSQLQAAVTSLKNNGIQVYGDVVMNHKGGADATEMVRAVEVNPNNRNQEVTGEYTIEAWTRFDFPGRGNTHSSFKWRWYHFDGVDWDQSRDLTNRIYKFRGKAWDWEVDTEFGNYDYLMYADYDMDHPEVVNELRNWGVWYTNTLGLDGFRIDAVKHIKYSFTRDWINHVRIATGKNMFAVAEFWKNDLGAIENYLQKTNWNHSVFDVPLHYNLYNASKSGGNYDMRNIFNGTVVQRHPSHAVTFVDNHDSQPEEALESFVDEWFKPLAYALTLTREQGYPSVFYGDYYGIPTHGVPAMRSKIDPILEARQKYAYGPQHDYLDHPDVIGWTREGDSSHPKSGLATLITDGPGGSKRMYAGLKNAGETWYDITGNRSDTVKIGSDGWGEFHVNDQSVSIYVQK

SEQ ID NO: 41100 - protein, 478 aa, Bacillus sp.
NGTMMQYFEWYLPNDGNHWNRLNSDASNLKSKGITAVWIPPAWKAASQNDVGYGAYDLYDLGEFNQKGTVRTKYGTRSQLQAAVTSLKNNGIQVYGDVVMNHKGGADATEMVRAVEVNPNNRNQEVTGEYTIEAYTRFDFPGRGNTHSSFKWRWYHFDGVDWDQSRNLTNRIYKFRGKAWDWEVDTEFGNYDYLMYADYDMDHPEVVNELRNWGVWYTNTLGLDGFRIDAVKHIKYSFTRDWINHVRSATGKNMFAVAEFWKNDLGAIENYLQKTNWNHSVFDVPLHYNLYNASKSGGNYDMRNIFNGTVVQRHPSHAVTFVDNHDSQPEEALESFVEEWFKPLAYALTLTREQGYPSVFYGDYYGIPTHGVPAMRSKIDPILEARQKYAYGPQHDYLDHPDVIGWTREGDSSHPKSGLATLITDGPGGSKRMYAGLKNAGETWYDITGNRSDTVKIGSDGWGEFHVNDGSVSIYVQK

SEQ ID NO: 41101 - protein, 478 aa, Bacillus sp.
NGTMMQYFEWYLPNDGNHWNRLNSDASNLKSKGITAVWIPPAWKGASQNDVGYGAYDLYDLGEFNQKGTVRTKYGTRSQLQAAVTSLKNNGIQVYGDVVMNHKGGADATEMVRAVEVNPNNRNQEVTGEYTIEAWTRFDFPGRGNTHSSFKWRWYHFDGVDWDQSRKLNNRIYKFRGKAWDWEVDTEFGNYDYLMYVDYDYDHPETTNEMRNWGVWYTNTLGLDGFRIDAVKHIKYSFTRDWINHVRIATGKNMFAVAEFWKNDLGAIENYLQKTNWNHSVFDVPLHYNLYNASKSGGNYDMRNIFNGTVVQRHPSHAVTFVDNHDSQPEEALESFVDEWFKPLAYALTLTREQGYPSVFYGDYYGIPTHGVPAMRSKIDPILEARQKYAYGPQHDYLDHPDVIGWTREGDSSHPKSGLATLITDGPGGSKRMYAGLKNAGETWYDITGNRSDTVKIGSDGWGEFHVNDQSVSIYVQK

SEQ ID NO: 41102 - protein, 478 aa, Bacillus sp.
NGTMMQYFEWYLPNDGNHWNRLNSDASNLKSKGIKAVWIPPAWKGASQNDVGYGAYDLYDLGEFNQKGTVRTKYGTRSQLQAAVTSLKNNGIQVYGDVVMNHKGGADATEMVRAVEVNPNNRNQEVTGEYTIEAWTRFDFPGRGNTHSSFKWRWYHFDGVDWDQSRRLNNRIYSFRGKAWDWEVDTEFGNYDYLMYADYDMDHPEVVNELRNWGVWYTNTLGLDGFRIDAVKHIKYSFTRDWINHVRSATGKNMFAVAEFWKNDLGAIENYLQKTNWNHSVFDVPLHYNLYNASKSGGNYDMRNIFNGTVVQRHPSHAVTFVDNHDSQPEEALESFVEEWFKPLAYALTLTREQGYPSVFYGDYYGIPTHGVPAMRSKIDPILEARQKYAYGPQHDYLDHPDVIGWTREGDSSHPKSGLATLITDGPGGSKRMYAGLKNAGETWYDITGNRSDTVKIGSDGWGEFHVNDGSVSIYVQK

SEQ ID NO: 41103 - protein, 478 aa, Bacillus sp.
NETMMQYFEWYLPNDGNHWNRLNSDASNLKSKGITAVWIPPAWKGASQNDVGYGAYDLYDLGEFNQKGTVRTKYGTRSQLQAAVTSLKNNGIQVYGDVVMNHKGGADATEMVRAVEVNPNNRNQEVTGEYTIEAWTRFDFPGRGNTHSSFKWRWYHFDGVDWDQSRRLNNRIYKFRGKAWDWEVDTEFGNYDYLMYADYDMDHPEVVNELRNWGVWYTNTLGLDGFRIDAVKHIKYSFTRDWINHVRSATGKNMFAVAEFWKNDLGAIENYLQKTNWNHSVFDVPLHYNLYNASKSGGNYDMRNIFNGTVVQAHPSHAVTFVDNHDSQPEEALESFVEEWFKPLAYALTLTREQGYPSVFYGDYYGIPTHGVPAMRSKIDPILEARQKYAYGPQHDYLDHPDVIGWTREGDSSHPKSGLATLITDGPGGSKRMYAGLKNAGETWYDITGNRSDTVKIGSDGWGEFHVNDGSVSIYVQK

SEQ ID NO: 41104 - protein, 478 aa, Bacillus sp.
NGTMMQYFEWYLPNDGNHWNRLNSDASNLKSKGITAVWIPPAWKGASQNDVGYGAYDLYDLGEFNQKGTVRTKYGTRSQLQAAVTSLKNNGIQVYGDVVMNHKGGADATEMVDAVEVNPNNRNQEVTGEYTIEAWTRFDFPGRGNTHSSFKWRWYHFDGVDWDQSRRLNNRIYLFRAKAWDWEVDTEFGNYDYLMYADYDMDHPEVVNELRNWGVWYTNTLGLDGFRIDAVKHIKYSFTRDWINHVRSATGKNMFAVAEFWKNDLGAIENYLQKTNWNHSVFDVPLHYNLYNASKSGGNYDMRNIFNGTVVQRHPSHAVTFVDNHDSQPEEALESFVEEWFKPLAYALTLTREQGYPSVFYGDYYGIPTHGVPAMRSKIDPILEARQKYAYGPQHDYLDHPDVIGWTREGDSSHPKSGLATLITDGPGGSKRMYAGLKNAGETWYDITGNRSDTVKIGSDGWGEFHVNDGSVSIYVQK

SEQ ID NO: 41105 - protein, 478 aa, Bacillus sp.
NGTMMQYFEWYLPNDGNHWNRLNSDASNLKSKGITAVWIPPAWKGASQNDVGYGAYDLYDLGEFNQKGTVRTKYGTRSQLQAAVTSLKNNGIQVYGDVVMNHKGGADATEMVRAVEVNPNNRNQEVTGEYTIEAWTRFDFPGRGNTHSSFKWRWYHFDGVDWDQSRRLNNRIYKFRGKAWDWEVDTEFGNYDYLMYADYDMDHPEVVNELRNWGVWYTNTLGLDGFRIDAVKHIKYSFTRDWINHVRSATGKNMFAVAEFWKNDLGAIENYLQKTNWNHSVFDVPLHYNLYNASNSGGNYDMRNIFNGTVVQRHPSHAVTFVDNHDSQPEEALESFVDPWFKPLAYALTLTREQGYPSVFYGDYYGIPTHGVPAMRSKIDPILEARQKYAYGPQHDYLDHPDVIGWTREGDSSHPKSGLATLITDGPGGSKRMYAGLKNAGETWYDITGNRSDTVKIGSDGWGEFHVNQSSVSIYVQK

SEQ ID NO: 41106 - protein, 478 aa, Bacillus sp.
NGTMMQYFEWYLPNDGNHWNRLNSDASNLKSKGITAVWIPPAWKAVSQNDVGYGAYDLYDLGEFNQKGTVRTKYGTRSQLQAAVTSLKNNGIQVYGDVVMNHKGGADATEMVRAVEVNPNNRNQEVTGEYTIEAWTRFDFPGRGNTHSSFKWRWYHFDGVDWDQSRRFENRIYKFRGKAWDWEVDTEFGNYDYLMYADYDMDHPEVVNELRNWGVWYTNTLGLDGFRIDAVKHIKYSFTRDWINHVRSATGKNMFAVAEFWKNDLGAIENYLQKTNWNHSVFDVPLHYNLYNASKSGGNYDMRNIFNGTVVQRHPSHAVTFVDNHDSQPEEALESFVEEWFKPLAYALTLTREQGYPSVFYGDYYGIPTHGVPAMRSKIDPILEARQKYAYGPQHDYLDHPDVIGWTREGDSSHPKSGLATLITDGPGGSKRMYAGLKNAGETWYDITGNRSDTVKIGSDGWGKFHVNDGSVSIYVQK

SEQ ID NO: 41107 - protein, 478 aa, Synthetic construct
NGTMMQYFEWYLPNDGNHWNRLNSDASNLKSKGITAVWIPPAWKGASQNDVGYGAYDLYDLGEFNQKGTVRTKYGTRSQLQAAVTSLKNNGIQVYGDVVMNHKGGADATEMVRAVEVNPNNRNQEVTGEYTIEAWTRFDFPGRGNTHSSFKWRWYHFDGVDWDQSRRLNNRIYKFRGKAWDWEVDTEFGNYDYLMYADIDMDHPESTNELRNWGVWYTNTLGLDGFRIDAVKHIKYSFTRDWINHVRSATGKNMFAVAEFWKNDLGAIENYLQKTNWNHSVFDVPLHYNLYNASKSGGNYDMRNIFNGTVVQRHPSHAVTFVDNHDSQPEEALESFVEEWFKPLAYALTLTREQGYPSVFYGDYYGIPTHGVPAMRSKIDPILEARQKYAYGPQHDYLDHPDVIGWTREGDSSHPKSGLATLITDGPGGSKRMYAGLKNAGETWYDITGNRSDTVKIGSDGWGEFHVNDGSVSIYVQK

SEQ ID NO: 41108 - protein, 478 aa, Bacillus sp.
NGTMMQYFEWYLPNDGNHWNRLNSDASNLKSKGITAVWIPPAWKGASQNDVGYGAYDLYDLGEFNQKGTVRTKYGTRSQLQAAVTSLKNNGIQVYGDVVMNHKGGADATEMVRAVEVNPNNRNQEVTGEYTIEAWTRFDFPGRGNTHSSFKWRWYHFDGVDWDQSERLNNRIYKFRGKAWDWEVDTEFGNYDYLMYADYDMDHPEVVNELRNWGVWYTNTLGLDGFRIDAVKHIKYSFTRDWINHVRSATGKNMFAVAEFWKNDLGAIENYLQKTNWNHSVFDVPLHYNLYNASKSGGNYDMRNIFNGTVVQRHPSHAVTFVDNHDSQPEEALESFVEEWFKPLAYALTLTREQGLPSVFYGDYYGIPTHGVPAMRSKIDPILEARQKYAYGPQHDYLDHPDVIGWTREGDSSHPKSGLATLITDGPGGSKRMYAGLKNAGETWYDITGNRSDTVKIGSDGWGEFHVNDGSVSIYVQK

SEQ ID NO: 41109 - protein, 478 aa, Synthetic construct
NGTMMQYFEWYLPNDGNHWNRLNSDASNLKSKGITAVWIPPAWKGASQNDVGYGAYDLYDLGEFNQKGTVRTKYGTRSQLQAAVTSLKNNGIQVYGDVVMNHKGGADATEMVQAVEVNPNNRNQEVTGEYTIEAWTRFDFPGRGNTHSSFKWRWYHFDGVDWDQSRRLSNRIYKFRGKAWDWPVDTENGNYDYLMYADLDMDHPEVVNELRNWGVWYTNTLGLDGFRIDAVKHIKFSFTRDWINHVRSATGKNMFAVAEYWKNDLGAIENYLQFTNWNHSVFDVPLHYNLYNASKSGGNYDMRKLLNGTVVSKHPSKAVTFVDNHDTQPEEALESFVQPWFKPLAYAFILTRESGYPSVFYGDMYGIPTHGVPAMKHKIEPILKARKQYAYGAQHDYLDHHDIVGWTREGDSSHPNSGLATLITDGPGGAKRMYVGRQNAGETWHDITGNRSEPVVINSEGWGEFHVNKGSVSIYVQR

SEQ ID NO: 41110 - protein, 478 aa, Bacillus sp.
NGTMMQYFEWYLPNDGNHWNRLNSDASNLKSKGITAVWIPPAWKGASQNDVGYGAYDLYDLGEFNQKGTVRTKYGTRSQLQAAVTSLKNNGIQVYGDVVMNHKGGADTTEMVRAVEVNPNNRNQEVTGEYTIEAWTRFDFPGRGNTHSSFKWRWYHFDGVDWDQSRRLNNRIYKFRGKAWDWEVDTEFGNYDYLMYADYDMDHPEVVNELRNWGVWYTNTLGLDGFRIDAVKHIKYSFTRDWINHVRSATGKNMFAVAEFWKNDLGAIENYLQKTNWNHSVFDVPLHYNLYNASQSGGNYDMRNIFNGTVVQRHPSHAVTFVDNHDSQPEEALESFVETWFKPLAYALTLTREQGYPSVFYGDYYGIPTHGVPAMRSKIDPILEARQKYAYGPQHDYLDHPDVIGWTREGDSSHPKSGLATLITDGPGGSKRMYAGLKNAGETWYDITGNRSDTVKIGSDGWGEFHVNGKSVSIYVQK

SEQ ID NO: 41111 - protein, 478 aa, Bacillus sp.
NGTMMQYFEWYLPNDGNHWNRLNSDASNLKSKGITAVWIPPAWKGASQNDVGYGAYDLYDLGEFNQKGTVRTKYGTRSQLQAAVTSLKNNGIQVYGDVVMNHKGGADATEMVRAVEVNPNNRNQEVTGEYTIEAWTRFDFPGRGNTHSSFKWRWYHFDGVDWDQSRRLNNRIYKFRGKAWDWEVDTEFGNYDYLMYADYDMDHPEVVNELRNWGVWYTNTLGLDGFRIDAVKHIKYSFTRDWINHVRSATGKNMFAVAEFWKNDLGAIENYLQKTNWNHSVFDVPLHYNLYNASKSGSNYDMRNIFNGTVVQRHPSHAVTFVDNHDSQPEEALESFVETWFKPLAYALTLTREQGYPSVFYGDYYGIPTHGVPAMRSKIDPILEARQKYAYGPQHDYLDHPDVIGWTREGDSSHPKSGLATLITDGPGGSKRMYAGLKNAGETWYDITGNRSDTVKIGSDGWGEFHVNKKSVSIYVQK

SEQ ID NO: 41112 - protein, 478 aa, Bacillus sp.
NGTMMQYFEWYLPNDGNHWNRLNSDASNLKSKGITAVWIPPAWKGASQNDVGYGAYDLYDLGEFNQKGTVRTKYGTRSQLQAAVTSLKNNGIQVYGDVVMNHKGGADLTEMVRAVEVNPNNRNQEVTGEYTIEAWTRFDFPGRGNTHSSFKWRWYHFDGVDFDQSRQLNNRIYKFRGKAWDWEVDTEFGNYDYLMYADYDMDHPEVVGELRNWGVWYTNTLGLDGFRIDAVKHIKYSFTRDWINHVRSATGKNMFAVAEFWKNDLGAIENYLQKTNWNHSVFDVPLHYNLYNASKSGGNYDMRNIFNGTVVQRHPSHAVTFVDNHDSQPEEALESFVEEWFKPLAYALTLTREQGYPSVFYGDYYGIPTHGVPAMRSKIDPILEARQKYAYGPQHDYLDHPDVIGWTREGDSSHPKSGLATLITDGPGGSKRMYAGLKNAGETWYDITGNRSDTVKIGSDGWGEFHVNDGSVSIYVQK

SEQ ID NO: 41113 - protein, 478 aa, Bacillus sp.
NGTMMQYFEWYLPNDGNHWNRLNSDASNLKSKGITAVWIPPAWKGASQNDVGYGAYDLYDLGEFNQKGTVRTKYGTRSQLQAAVTSLKNNGIQVYGDVVMNHKGGADATEMVDAVEVNPNNRNQEVTGEYTIEAWTRFDFPGRGNTHSSFKWRWYHFDGVDFDQSRRLNNRIYKFRGKAWDWEVDTEFGNYDYLMYADYDMDHPEVVNELRNWGVWYTNTLGLDGFRIDAVKHIKYSFTRDWINHVRIATGKNMFAVAEFWKNDLGAIENYLQKTNWNHSVFDVPLHYNLYNASKSGGNYDMRNIFNGTVVQRHPSHAVTFVDNHDSQPEEALESFVDEWFKPLAYALTLTREQGYPSVFYGDYYGIPTHGVPAMRSKIDPILEARQKYAYGPQHDYLDHPDVIGWTREGDSSHPKSGLATLITDGPGGSKRMYAGLKNAGETWYDITGNRSDTVKIGSDGWGEFHVNDQSVSIYVQK

SEQ ID NO: 41114 - protein, 478 aa, Synthetic construct
NGTMMQYFEWYLPNDGNHWNRLNSDASNLKSKGITAVWIPPAWKGASQNDVGYGAYDLYDLGEFNQKGTVRTKYGTRSQLQAAVTSLKNNGIQVYGDVVMNHKGGADATEMVRAVEVNPNNRNQEVTGEYTIEAWTRFDFPGRGNTHSSFKWRWYHFDGVDWDQSRRLNNRIYKFRGKAWDWEVDTEFGNYDYLMYADYDMDYPEVTNEVRNWGVWYTNTLGLDGFRIDAVKHIKYSFTRDWINHVRSATGKNMFAVAEFWKNDLGAIENYLQKTNWNHSVFDVPLHYNLYNASKSGGNYDMRNIFNGTVVQRHPSHAVTFVDNHDSQPEEALESFVEEWFKPLAYALTLTREQGYPSVFYGDYYGIPTHGVPAMRSKIDPILEARQKYAYGPQHDYLDHPDVIGWTREGDSSHPKSGLATLITDGPGGSKRMYAGLKNAGETWYDITGNRSDTVKIGSDGWGEFHVNDGSVSIYVQK

SEQ ID NO: 41115 - protein, 478 aa, Bacillus sp.
NGTMMQYFEWYLPNDGNHWNRLNSDASNLKSKGITAVWIPPAWKGASQNDVGYGAYDLYDLGEFNQKGTVRTKYGTRSQLQAAVTSLKNNGIQVYGDVVMNHKGGADATEMVRAVEVNPNNRNQEVTGEYTIEAWTRFDFPGRGNTHSSFKWRWYHFDGVDWDQSRRLNNRIYKFRSKVWDWEVDTEFGNYDYLMYADYDMDHPEVVNELRNWGVWYTNTLGLDGFRIDAVKHIKYSFTRDWINHVRSATGKNMFAVAEFWKNDLGAIENYLQKTNWNHSVFDVPLHYNLYNASKSGGNYDMRNIFNGTVVQRHPSHAVTFVDNHDSQPEEALESFVEEWFKPLAYALTLTREQGYPSVFYGDYYGIPTHGVPAMRSKIDPILEARQKYAYGPQHDYLDHPDVIGWTREGDSSHPKSGLATLITDGPGGSKRMYAGLKNAGETWYDITGNRSDTVKIGSDGWGEFHVNDGSVSIYVQK

SEQ ID NO: 41116 - protein, 478 aa, Bacillus sp.
NGTMMQYFEWYLPNDGNHWNRLNSDASNLKSKGITAVWIPPAWKGASQNDVGYGAYDLYDLGEFNQKGTVRTKYGTRSQLQAAVTSLKNNGIQVYGDVVMNHKGGADATEMVRAVEVNPNNRNQEVTGEYTIEAWTRFDFPGRGNTHSSFKWRWYHFDGVDWDQSREFDNRIYKFRGKAWDWEVDTEFGNYDYLMYADYDMDHPEVVNELRNWGVWYTNTLGLDGFRIDAVKHIKYSFTRDWINHVRSATGKNMFAVAEFWKNDLGAIENYLQKTNWNHSVFDVPLHYNLYNASKSGGNYDMRNIFNGTVVQRHPSHAVTFVDNHDSQPEEALESFVDEWFKPLAYALTLTREQGYPSVFYGDYYGIPTHGVPAMRSKIDPILEARQKYAYGPQHDYLDHPDVIGWTREGDSSHPKSGLATLITDGPGGSKRMYAGLKNAGETWYDITGNRSDTVKIGSDGWGEFHVNKSSVSIYVQK

SEQ ID NO: 41117 - protein, 478 aa, Bacillus sp.
NGTMMQYFEWYLPNDGNHWNRLNSDASNLKSKGITAVWIPPAWKGASQNDVGYGAYDLYDLGEFNQKGTVRTKYGTRSQLQAAVTSLKNNGIQVYGDVVMNHKGGADATEMVRAVEVNPNNRNQEVTGEYTIEAWTRFDFPGRGNTHSSFKWRWYHFDGVDWDQSREFDNRIYKFRGKAWDWEVDTEFGNYDYLMYADYDMDHPEVVNELRNWGVWYTNTLGLDGFRIDAVKHIKYSFTRDWINHVRSATGKNMFAVAEFWKNDLGAIENYLQKTNWNHSVFDVPLHYNLYNASKSGGNYDMRNIFNGTVVQVHPSHAVTFVDNHDSQPEEALESFVEEWFKPLAYALTLTREQGYPSVFYGDYYGIPTHGVPAMRSKIDPILEARQKYAYGPQHDYLDHPDVIGWTREGDSSHPKSGLATLITDGPGGSKRMYAGLKNAGETWYDITGNRSDTVKIGSDGWGEFHVNYGSVSIYVQK

SEQ ID NO: 41118 - protein, 478 aa, Bacillus sp.
NGTMMQYFEWYLPNDGNHWNRLNSDASNLKSKGITAVWIPPAWKGASQNDVGYGAYDLYDLGEFNQKGTVRTKYGTRSQLQAAVTSLKNNGIQVYGDVVMNHKGGADATEMVRAVEVNPNNRNQEVTGEYTIEAWTRFDFPGRGNTHSSFKWRWYHFDGVDWDQSREFNNRIYKFRGKAWDWEVDTEFGNYDYLMYADYDMDHPEVVNELRNWGVWYTNTLGLDGFRIDAVKHIKYSFTRDWINHVRSATGKNMFAVAEFWKNDLGAIENYLQKTNWNHSVFDVPLHYNLYNASQSGGNYDMRNIFNGTVVQRHPSHAVTFVDNHDSQPEEALESFVEPWFKPLAYALTLTREQGYPSVFYGDYYGIPTHGVPAMRSKIDPILEARQKYAYGPQHDYLDHPDVIGWTREGDSSHPKSGLATLITDGPGGSKRMYAGLKNAGETWYDITGNRSDTVKIGSDGWGEFHVNKSSVSIYVQK

SEQ ID NO: 41119 - protein, 478 aa, Bacillus sp.
NGTMMQYFEWYLPNDGNHWNRLNSDASNLKSKGITAVWIPPAWKATSQNDVGYGAYDLYDLGEFNQKGTVRTKYGTRSQLQAAVTSLKNNGIQVYGDVVMNHKGGADATEMVRAVEVNPNNRNQEVTGEYTIEAWTRFDFPGRGNTHSSFKWRWYHFDGVDWDMSRELSNRIYKFRGKAWDWEVDTEFGNYDYLMYADYDMDHPEVVNELRNWGVWYTNTLGLDGFRIDAVKHIKYSFTRDWINHVRSATGKNMFAVAEFWKNDLGAIENYLQKTNWNHSVFDVPLHYNLYNASKSQGNYDMRNIFNGTVVQRHPSHAVTFVDNHDSQPEEALESFVDTWFKPLAYALTLTREQGYPSVFYGDYYGIPTHGVPAMRSKIDPILEARQKYAYGPQHDYLDHPDVIGWTREGDSSHPKSGLATLITDGPGGSKRMYAGLKNAGETWYDITGNRSDTVKIGSDGWGEFHVNGSSVSIYVQK

SEQ ID NO: 41120 - protein, 478 aa, Bacillus sp.
NGTMMQYFEWYLPNDGNHWNRLNSDASNLKSKGITAVWIPPAWKATSQNDVGYGAYDLYDLGEFNQKGTVRTKYGTRSQLQAAVTSLKNNGIQVYGDVVMNHKGGADATEMVRAVEVNPNNRNQEVTGEYTIEAWTRFDFPGRGNTHSSFKWRWYHFDGVDWDQSRELNNRIYKFRGKAWDWEVDTEFGNYDYLMYVDYDMDHPEVVNELRNWGVWYTNTLGLDGFRIDAVKHIKYSFTRDWINHVRSATGKNMFAVAEFWKNDLGAIENYLQKTNWNHSVFDVPLHYNLYNASKSGGNYDMRNIFNGTVVQRHPSHAVTFVDNHDSQPEEALESFVEEWFKPLAYALTLTREQGYPSVFYGDYYGIPTHGVPAMRSKIDPILEARQKYAYGPQHDYLDHPDVIGWTREGDSSHPKSGLATLITDGPGGSKRMYAGLKNAGETWYDITGNRSDTVKIGSDGWGEFHVNDGSVSIYVQK

SEQ ID NO: 41121 - protein, 478 aa, Bacillus sp.
NGTMMQYFEWYLPNDGNHWNRLNSDASNLKSKGITAVWIPPAWKGASQNDVGYGAYDLYDLGEFNQKGTVRTKYGTRSQLQAAVTSLKNNGIQVYGDVVMNHKGGADATEMVRAVEVNPNNRNQEVTGEYTIEAWTRFDFPGRGNTHSSFKWRWYHFDGVDWDQSRRLNNRIYKFRGKAWDWEVDTEFGNYDYLMYADYDMDHPEVVNELRNWGVWYTNTLGLDGFRIDAVKHIKYSFTRDWINHVRSATGKNMFAVAEFWKNDLGAIENYLQKTNWNHSVFDVPLHYNLYNASKSGGNYDMRNIFNGTVVQRHPSHAVTFVDNHDSQPEEALESFVEEWFKPLAYALTLTREQGYPSVFYGDYYGIPTHGVPAMRSKIDPILEARQKYAYGPQHDYLDHPDVIGWTREGDSSHPKSGLATLITDGPGGSKRMYAGLKNAGETWYDITGNRSDTVKIGSDGWGEFHVNQKSVSIYVQK

SEQ ID NO: 41122 - protein, 478 aa, Bacillus sp.
NGTMMQYFEWYLPNDGNHWNRLNSDASNLKSKGITAVWIPPAWKGASQNDVGYGAYDLYDLGEFNQKGTVRTKYGTRSQLQAAVTSLKNNGIQVYGDVVMNHKGGADATEMVRAVEVNPNNRFQEVTGEYTIEAWTRFDFPGRGNTHSSFKWRWYHFDGVDWDQSRRLNNRIYLFRGKAWDWEVDTEFGNYDYLMYADYDMDHPEVVNELRNWGVWYTNTLGLDGFRIDAVKHIKYSFTRDWINHVRSATGKNMFAVAEFWKNDLGAIENYLQKTNWNHSVFDVPLHYNLYNASKSGGNYDMRNIFNGTVVQRHPSHAVTFVDNHDSQPEEALESFVEEWFKPLAYALTLTREQGYPSVFYGDYYGIPTHGVPAMRSKIDPILEARQKYAYGPQHDYLDHPDVIGWTREGDSSHPKSGLATLITDGPGGSKRMYAGLKNAGETWYDITGNRSDTVKIGSDGWGEFHVNDGSVSIYVQK

SEQ ID NO: 41123 - protein, 478 aa, Bacillus sp.
NGTMMQYFEWYLPNDGNHWNRLNSDASNLKSKGITAVWIPPAWKASSQNDVGYGAYDLYDLGEFNQKGTVRTKYGTRSQLQAAVTSLKNNGIQVYGDVVMNHKGGADLTEMVDAVEVNPNNRNQEVTGEYTIEAWTRFDFPGRGNTHSSFKWRWYHFDGVDWDQSRDLQNRIYKFRGKAWDWEVDTEFGNYDYLMYADYDMDHPEVVNELRNWGVWYTNTLGLDGFRIDAVKHIKYSFTRDWINHVRSATGKNMFAVAEFWKNDLGAIENYLQKTNWNHSVFDVPLHYNLYNASKSGGNYDMRNIFNGTVVQRHPSHAVTFVDNHDSQPEEALESFVEEWFKPLAYALTLTREQGYPSVFYGDYYGIPTHGVPAMRSKIDPILEARQKYAYGPQHDYLDHPDVIGWTREGDSSHPKSGLATLITDGPGGSKRMYAGLKNAGETWYDITGNRSDTVKIGSDGWGEFHVNDGSVSIYVQK

SEQ ID NO: 41124 - protein, 478 aa, Bacillus sp.
NGTMMQYFEWYLPNDGNHWNRLNSDASNLKSKGITAVWIPPAWKGASQNDVGYGAYDLYDLGEFNQKGTVRTKYGTRSQLQAAVTSLKNNGIQVYGDVVMNHKGGADYTEMVRAVEVNPNNRNQEVTGEYTIEAWTRFDFPGRQNTHSSFKWRWYHFDGVDWDQSRRLNNRIYKFRGKAWDWEVDTEFGNYDYLMYADYDMDHPEVVNELRNWGVWYTNTLGLDGFRIDAVKHIKYSFTRDWINHVRSATGKNMFAVAEFWKNDLGAIENYLQKTNWNHSVFDVPLHYNLYNASRSGGNYDMRNIFNGTVVQRHPSLAVTFVDNHDSQPEEALESFVSEWFKPLAYALTLTREQGYPSVFYGDYYGIPTHGVPAMRSKIDPILLARQKYAYGPQHDYLDHPDVIGWTREGDSSHPKSGLATLITDGPGGSKRMYAGLKNAGETWYDITGNRSDTVKIGSDGWGEFHVNDGSVSIYVQK

SEQ ID NO: 41125 - protein, 478 aa, Bacillus sp.
NGTMMQYFEWYLPNDGNHWNRLNSDASNLKSKGITAVWIPPAWKAVSQNDVGYGAYDLYDLGEFNQKGTVRTKYGTRSQLQAAVTSLKNNGIQVYGDVVMNHKGGADATEMVRAVEVNPNNRNQEVTGEYTIEAWTRFDFPGRGNTHSSFKWRWYHFDGVDWDQSRDLENRIYKFRGKAWDWEVDTEFGNYDYLMYADYDMDHPEVVNELRNWGVWYTNTLGLDGFRIDAVKHIKYSFTRDWINHVRSATGKNMFAVAEFWKNDLGAIENYLQKTNWNHSVFDVPLHYNLYNASKSGGNYDMRNIFNGTVVQAHPNHAVTFVDNHDSQPEEALESFVEEWFKPLAYALTLTREQGYPSVFYGDYYGIPTHGVPAMRSKIDPILEARQKYAYGPQHDYLDHPDVIGWTREGDSSHPKSGLATLITDGPGGSKRMYAGLKNAGETWYDITGNRSDTVKIGSDGWGEFHVNDGSVSIYVQK

SEQ ID NO: 41126 - protein, 478 aa, Bacillus sp.
NGTMMQYFEWYLPNDGNHWNRLNSDASNLKSKGITAVWIPPAWKAASQNDVGYGAYDLYDLGEFNQKGTVRTKYGTRSQLQAAVTSLKNNGIQVYGDVVMNHKGGADLTEMVRAVEVNPNNRNQEVTGEYTIEAWTRFDFPGRGNTHSSFKWRWYHFDGVDWDQSRQITNRIYKFRGKAWDWEVDTEFGNYDYLMYTDYDMDHPEVVNELRNWGVWYTNTLGLDGFRIDAVKHIKYSFTRDWINHVRSATGKNMFAVAEFWKNDLGAIENYLQKTNWNHSVFDVPLHYNLYNASKSGGNYDMRNIFNGTVVQRHPSHAVTFVDNHDSQPEEALESFVEEWFKPLAYALTLTREQGYPSVFYGDYYGIPTHGVPAMRSKIDPILEARQKYAYGPQHDYLDHPDVIGWTREGDSSHPKSGLATLITDGPGGSKRMYAGLKNAGETWYDITGNRSDTVKIGSDGWGEFHVNDGSVSIYVQK

SEQ ID NO: 41127 - protein, 478 aa, Bacillus sp.
NGTMMQYFEWYLPNDGNHWNRLNSDASNLKSKGITAVWIPPAWKGASQNDVGYGAYDLYDLGEFNQKGTVRTKYGTRSQLQAAVTSLKNNGIQVYGDVVMNHKGGADATEMVRAVEVNPNNRNQEVTGEYTIEAWTRFDFPGRGNTHSSFKWRWYHFDGVDWDQSRKLNNRIYKFRGKAWDWEVDTEFGNYDYLMYVDYDMDHPEVVNELRNWGVWYTNTLGLDGFRIDAVKHIKYSFTRDWINHVRIATGKNMFAVAEFWKNDLGAIENYLQKTNWNHSVFDVPLHYNLYNASKSGGNYDMRNIFNGTVVQRHPSHAVTFVDNHDSQPEEALESFVDEWFKPLAYALTLTREQGYPSVFYGDYYGIPTHGVPAMRSKIDPILEARQKYAYGPQHDYLDHPDVIGWTREGDSSHPPSGLATLITDGPGGSKRMYAGLKNAGETWYDITGNRSDTVKIGSDGWGEFHVNDQSVSIYVQK

SEQ ID NO: 41128 - protein, 478 aa, Bacillus sp.
NGTMMQYFEWYLPNDGNHWNRLNSDASNLKSKGITAVWIPPAWKGASQNDVGYGAYDLYDLGEFNQKGTVRTKYGTRSQLQAAVTSLKNNGIQVYGDVVMNHKGGADATEMVRAVEVNPNNRNQEVTGEYTIEAWTRFDFPGRGNTHSSFKWRWYHFDGVDWDQSRRLDNRIYKFRGKAWDWEVDTEFGNYDYLMYTDYDMDHPEVVNELRNWGVWYTNTLGLDGFRIDAVKHIKYSFTRDWINHVRSATGKNMFAVAEFWKNDLGAIENYLQKTNWNHSVFDVPLHYNLYNASKSGGNYDMRNIFNGTVVQRHPSHAVTFVDNHDSQPEEALESFVETWFKPLAYALTLTREQGYPSVFYGDYYGIPTHGVPAMRSKIDPILEARQKYAYGPQHDYLDHPDVIGWTREGDSSHPKSGLATLITDGPGGSKRMYAGLKNAGETWYDITGNRSDTVKIGSDGWGEFHVNKASVSIYVQK

SEQ ID NO: 41129 - protein, 478 aa, Bacillus sp.
NGTMMQYFEWYLPNDGNHWNRLNSDASNLKSKGITAVWIPPAWKGVSQNDVGYGAYDLYDLGEFNQKGTVRTKYGTRSQLQAAVTSLKNNGIQVYGDVVMNHKGGADATEMVRAVEVNPNNRNQEVTGEYTIEAWTRFDFPGRGNTHSSFKWRWYHFDGVDWDQSRDLSNRIYKFRGKAWDWEVDTEFGNYDYLMYADYDMDHPEVVNELRNWGVWYTNTLGLDGFRIDAVKHIKYSFTRDWINHVRSATGKNMFAVAEFWKNDLGAIENYLQKTNWNHSVFDVPLHYNLYNASKSGNNYDMRNIFNGTVVQRHPSHAVTFVDNHDSQPEEALESFVEEWFKPLAYALTLTREQGYPSVFYGDYYGIPTHGVPAMRSKIDPILEARQKYAYGPQHDYLDHPDVIGWTREGDSSHPKSGLATLITDGPGGSKRMYAGLKNAGETWYDITGNRSDTVKILSGGWGEFHVNDGSVSIYVQK

SEQ ID NO: 41130 - protein, 478 aa, Bacillus sp.
NGTMMQYFEWYLPNDGNHWNRLNSDASNLKSKGITAVWIPPAWKGASQNDVGYGAYDLYDLGEFNQKGTVRTKYGTRSQLQAAVTSLKNNGIQVYGDVVMNHKGGADATEMVRAVEVNPNNRNQEVTGDYTIEAWTRFDFPGRGNTHSSFKWRWYHFDGVDWDQSRRLNNRIYKFRGKEWDWEVDTEFGNYDYLMYADYDMDHPEVVNELRNWGVWYTNTLGLDGFRIDAVKHIKYSFTRDWINHVRSATGKNMFAVAEFWKNDLGAIENYLQKTNWNHSVFDVPLHYNLYNASKSGGNYDMRNIFNGTVVQRHPSHAVTFVDNHDSQPEEALESFVEEWFKPLAYALTLTREQGYPSVFYGDYYGIPTHGVPAMRSKIDPILEARQKYAYGPQHDYLDHPDVIGWTREGDSSHPKSGLATLITDGPGGSKRMYAGLKNAGETWYDITGNRSDTVKIGSDGWGEFHVNDGSVSIYVQK

SEQ ID NO: 41131 - protein, 478 aa, Bacillus sp.
NGTMMQYFEWYLPNDGNHWNRLNSDASNLKSKGITAVWIPPAWKGASQNDVGYGAYDLYDLGEFNQKGTVRTKYGTRSQLQAAVTSLKNNGIQVYGDVVMNHKGGAHATEMVRAVEVNPNNRNQEVTGEYTIEAWTRFDFPGRGNTHSSFKWRWYHFDGVDWDQSRRLNNRIYKFRGKAWDWEVDTEFGNYDYLMYADYDMDHPEVVNELRNWGVWYTNTLGLDGFRIDAVKHIKYSFTRDWINHVRSATGKNMFAVAEFWKNDLGAIENYLQKTNWNHSVFDVPLHYNLYNASKSGGNYDMRNIFNGTVVQAHPNHAVTFVDNHDSQPEEALESFVEEWFKPLAYALTLTREQGYPSVFYGDYYGIPTHGVPAMRSKIDPILEARQKYAYGPQHDYLDHPDVIGWTREGDSSHPKSGLATLITDGPGGSKRMYAGLKNAGETWYDITGNRSDTVKIGSDGWGEFHVNDGSVSIYVQK

SEQ ID NO: 41132 - protein, 478 aa, Bacillus sp.
NGTMMQYFEWYLPNDGNHWNRLNSDASNLKSKGITAVWIPPAWKGASQNDVGYGAYDLYDLGEFNQKGTVRTKYGTRSQLQAAVTSLKNNGIQVYGDVVMNHKGGADATEMVRAVEVNPNNRNQEVTGEYTIEAWTRFDFPGRGNTHSSFKWRWYHFDGVDWDQSREFDNRIYKFRGKAWDWEVDTEFGNYDYLMYADYDMDHPEVVNELRNWGVWYTNTLGLDGFRIDAVKHIKYSFTRDWINHVRSATGKNMFAVAEFWKNDLGAIENYLQKTNWNHSVFDVPLHYNLYNASQSGGNYDMRNIFNGTVVQRHPSHAVTFVDNHDSQPEEALESFVEPWFKPLAYALTLTREQGYPSVFYGDYYGIPTHGVPAMRSKIDPILEARQKYAYGPQHDYLDHPDVIGWTREGDSSHPKSGLATLITDGPGGSKRMYAGLKNAGETWYDITGNRSDTVKIGSDGWGEFHVNKSSVSIYVQK

SEQ ID NO: 41133 - protein, 478 aa, Bacillus sp.
NGTMMQYFEWYLPNDGNHWNRLNSDASNLKSKGITAVWIPPAWKGASQNDVGYGAYDLYDLGEFNQKGTVRTKYGTRSQLQAAVTSLKNNGIQVYGDVVMNHKGGADATEMVRAVEVNPNNRNQEVTGEYTIEAWTRFDFPGRGNTHSSFKWRWYHFDGVDWDQSRRLNNRIYLFRAKAWDWEVDTEFGNYDYLMYADYDMDHPEVVNELRNWGVWYTNTLGLDGFRIDAVKHIKYSFTRDWINHVRSATGKNMFAVAEFWKNDLGAIENYLQKTNWNHSVFDVPLHYNLYNASKSGGNYDMRNIFNGTVVQRHPSHAVTFVDNHDSQPEEALESFVEEWFKPLAYALTLTREQGYPSVFYGDYYGIPTHGVPAMRSKIDPILEARQKYAYGPQHDYLDHPDVIGWTREGDSSHPKSGLATLITDGPGGSKRMYAGLKNAGETWYDITGNRSDTVKIGSDGWGEFHVNDGSVSIYVQK

SEQ ID NO: 41134 - protein, 478 aa, Bacillus sp.
NGTMMQYFEWYLPNDGNHWNRLNSDASNLKSKGITAVWIPPAWKGASQNDVGYGAYDLYDLGEFNQKGTVRTKYGTRSQLQAAVTSLKNNGIQVYGDVVMNHKGGADATEMVRAVEVNPNNRNQEVTGEYTIEAWTRFDFPGRGNTHSSFKWRWYHFDGVDWDQSRRLNNRIYKFRGKAWDWEVDTEFGNYDYLMYADYDMDHPEVVNELRNWGVWYTNTLGLDGFRIDAVKHIKYSFTRDWINHVRSATGKNMFAVAEFWKNDLGAIENYLQKTNWNHSVFDVPLHYNLYNASKSGGNYDMRNIFNGTVVQRHPSHAVTFVDNHDSQPEEALESFVDEWFKPLAYALTLTREQGYPSVFYGDYYGIPTHGVPAMRSKIDPILEARQKYAYGPQHDYLDHPDVIGWTREGDSSHPKSGLATLITDGPGGSKRMYAGLKNAGETWYDITGNRSDTVKIGSDGWGEFHVNGSSVSIYVQK

SEQ ID NO: 41135 - protein, 478 aa, Bacillus sp.
NGTMMQYFEWYLPNDGNHWNRLNSDASNLKSKGITAVWIPPAWKGASQNDVGYGAYDLYDLGEFNQKGTVRTKYGTRSQLQAAVTSLKNNGIQVYGDVVMNHKGGADATEMVRAVEVNPNNRNQEVTGEYTIEAWTRFDFPGRGNTHSSFKWRWYHFDGVDWDQSRRLNNRIYKFRGKAWDWEVDTEFGNYDYLMYADYDMDHPEVVNELRNWGVWYTNTLGLDGFRIDAVKHIKYSFTRDWINHVRSATGKNMFAVAEFWKNDLGAIENYLQKTNWNHSVFDVPLHYNLYNASKSAGNYDMRNIFNGTVVQRHPSHAVTFVDNHDSQPEEALESFVDTWFKPLAYALTLTREQGYPSVFYGDYYGIPTHGVPAMRSKIDPILEARQKYAYGPQHDYLDHPDVIGWTREGDSSHPKSGLATLITDGPGGSKRMYAGLKNAGETWYDITGNRSDTVKIGSDGWGEFHVNGKSVSIYVQK

SEQ ID NO: 41136 - protein, 478 aa, Bacillus sp.
NGTMMQYFEWYLPNDGNHWNRLNSDASNLKSKGITAVWIPPAWKGASQNDVGYGAYDLYDLGEFNQKGTVRTKYGTRSQLQAAVTSLKNNGIQVYGDVVMNHKGGADATEMVRAVEVNPNNRNQEVTGDYTIEAWTRFDFPGRGNTHSSFKWRWYHFDGVDWDQSRRLNNRIYLFRGKAWDWEVDTEFGNYDYLMYADYDMDHPEVVNELRNWGVWYTNTLGLDGFRIDAVKHIKYSFTRDWINHVRSATGKNMFAVAEFWKNDLGAIENYLQKTNWNHSVFDVPLHYNLYNASKSGGNYDMRNIFNGTVVQRHPSHAVTFVDNHDSQPEEALESFVEEWFKPLAYALTLTREQGYPSVFYGDYYGIPTHGVPAMRSKIDPILEARQKYAYGPQHDYLDHPDVIGWTREGDSSHPKSGLATLITDGPGGSKRMYAGLKNAGETWYDITGNRSDTVKIGSDGWGEFHVNDGSVSIYVQK

SEQ ID NO: 41137 - protein, 478 aa, Bacillus sp.
NGTMMQYFEWYLPNDGNHWNRLNSDASNLKSKGITAVWIPPAWKGASQNDVGYGAYDLYDLGEFNQKGTVRTKYGTRSQLQAAVTSLKNNGIQVYGDVVMNHKGGADATEMVRAVEVNPNNRNQEVTGEYTIEAWTRFDFPGRGNTHSSFKWRWYHFDGVDWDQSRRLNNRIYKFRGKAWDWEVDTEFGNYDYLMYADYDMDHPETTNELRNWGVWYTNTLGLDGFRIDAVKHIKYSFTRDWINHVRSATGKNMFAVAEFWKNDLGAIENYLQKTNWNHSVFDVPLHYNLYNASKSGGNYDMRNIFNGTVVQRHPSHAVTFVDNHDSQPEEALESFVEEWFKPLAYALTLTREQGYPSVFYGDYYGIPTHGVPAMRSKIDPILEARQKYAYGPQHDYLDHPDVIGWTREGDSSHPKSGLATLITDGPGGSKRMYAGLKNAGETWYDITGNRSDTVKIGSDGWGEFHVNDGSVSIYVQK

SEQ ID NO: 41138 - protein, 478 aa, Bacillus sp.
NNTMMQYFEWYLPNDGNHWNRLNSDASNLKSKGITAVWIPPAWKGASQNDVGYGAYDLYDLGEFNQKGTVRTKYGTRSQLQAAVTSLKNNGIQVYGDVVMNHKGGADATEMVRAVEVNPNNRNQEVTGEYTIEAWTRFDFPGRGNTHSSFKWRWYHFDGVDWDQSRRLNNRIYKFRGKAWDWEVDTEFGNYDYLMYADYDMDHPEVVNELRNWGVWYTNTLGLDGFRIDAVKHIKYSFTRDWINHVRSATGKNMFAVAEFWKNDLGAIENYLQKTNWNHSVFDVPLHYNLYNASKSGGNYDMRNIFNGTVVQAHPMHAVTFVDNHDSQPEEALESFVEEWFKPLAYALTLTREQGYPSVFYGDYYGIPTHGVPAMRSKIDPILEARQKYAYGPQHDYLDHPDVIGWTREGDSSHPKSGLATLITDGPGGSKRMYAGLKNAGETWYDITGNRSDTVKIGSDGWGEFHVNDGSVSIYVQK

SEQ ID NO: 41139 - protein, 478 aa, Bacillus sp.
NGTMMQYFEWYLPNDGNHWNRLNSDASNLKSKGITAVWIPPAWKGASQNDVGYGAYDLYDLGEFNQKGTVRTKYGTRSQLQAAVTSLKNNGIQVYGDVVMNHKGGADATEMVRAVEVNPNNRNQEVTGEYTIEAWTRFDFPGRGNTHSSFKWRWYHFDGVDWDQSRRLNNRIYKFRGKAWDWEVDTEFGNYDYLMYADYDMDHPEVVNELRNWGVWYTNTLGLDGFRIDAVKHIKYSFTRDWINHVRSATGKNMFAVAEFWKNDLGAIENYLQKTNWNHSVFDVPLHYNLYNASKSGGNYDMRNIFNGTVVQRHPSHAVTFVDNHDSQPEEALESFVDPWFKPLAYALTLTREQGYPSVFYGDYYGIPTHGVPAMRSKIDPILEARQKYAYGPQHDYLDHPDVIGWTREGDSSHPKSGLATLITDGPGGSKRMYAGLKNAGETWYDITGNRSDTVKIGSDGWGEFHVNGSSVSIYVQK

SEQ ID NO: 41140 - protein, 478 aa, Bacillus sp.
NGTMMQYFEWYLPNDGNHWNRLNSDASNLKSKGITAVWIPPAWKGASQNDVGYGAYDLYDLGEFNQKGTVRTKYGTRSQLQAAVTSLKNNGIQVYGDVVMNHKGGADATEMVRAVEVNPNNRNQEVTGEYTIEAWTRFDFPGRGNTHSSFKWRWYHFDGVDWDQSRRLNNRIYKFRGKAWDWEVDTEFGNYDYLMYADYDMDHPEVVNELRNWGVWYTNTLGLDGFRIDAVKHIKYSFTRDWINHVRSATGKNMFAVAEFWKNDLGAIENYLQKTNWNHSVFDVPLHYNLYNASKSGGNYDMRNIFNGTVVQRHPSHAVTFVDNHDSQPEEALESFVDPWFKPLAYALTLTREQGYPSVFYGDYYGIPTHGVPAMRSKIDPILEARQKYAYGPQHDYLDHPDVIGWTREGDSSHPKSGLATLITDGPGGSKRMYAGLKNAGETWYDITGNRSDTVKIGSDGWGEFHVNQTSVSIYVQK

SEQ ID NO: 41141 - protein, 478 aa, Bacillus sp.
NGTMMQYFEWYLPNDGNHWNRLNSDASNLKSKGITAVWIPPAWKGASQNDVGYGAYDLYDLEEFNQKGTVRTKYGTRSQLQAAVTSLKNNGIQVYGDVVMNHKGGANATEMVRAVEVNPNNRNQEVTGEYTIEAWTRFDFPGRGNTHSSFKWRWYHFDGVDWDQSRDFSNRIYKFRGKAWDWEVDTEFGNYDYLMYADYDMDHPEVVNELRNWGVWYTNTLGLDGFRIDAVKHIKYSFTRDWINHVRSATGKNMFAVAEFWKNDLGAIENYLQKTNWNHSVFDVPLHYNLYNASKSGGNYDMRNIFNGTVVQRHPSHAVTFVDNHDSQPEEALESFVEEWFKPLAYALTLTREQGYPSVFYGDYYGIPTHGVPAMRSKIDPILEARQKYAYGPQHDYLDHPDVIGWTREGDSSHPKSGLATLITDGPGGSKRMYAGLKNAGETWYDITGNRSDTVKIGFDGWGEFHVNDGSVSIYVQK

SEQ ID NO: 41142 - protein, 478 aa, Bacillus sp.
NETMMQYFEWYLPNDGNHWNRLNSDASNLKSKGITAVWIPPAWKGASQNDVGYGAYDLYDLGEFNQKGTVRTKYGTRSQLQAAVTSLKNNGIQVYGDVVMNHKGGADATEMVRAVEVNPNNRNQEVTGEYTIEAWTRFDFPGRGNTHSSFKWRWYHFDGVDWDQSRRLNNRIYKFRGKAWDWEVDTEFGNYDYLMYADYDMDHPEVVNELRNWGVWYTNTLGLDGFRIDAVKHIKYSFTRDWINHVRSATGKNMFAVAEFWKNDLGAIENYLQKTNWNHSVFDVPLHYNLYNASKSGGNYDMRNIFNGTVVQMHPSHAVTFVDNHDSQPEEALESFVEEWFKPLAYALTLTREQGYPSVFYGDYYGIPTHGVPAMRSKIDPILEARQKYAYGPQHDYLDHPDVIGWTREGDSSHPKSGLATLITDGPGGSKRMYAGLKNAGETWYDITGNRSDTVKIGSDGWGEFHVNDGSVSIYVQK

SEQ ID NO: 41143 - protein, 478 aa, Bacillus sp.
NETMMQYFEWYLPNDGNHWNRLNSDASNLKSKGITAVWIPPAWKGASQNDVGYGAYDLYDLGEFNQKGTVRTKYGTRSQLQAAVTSLKNNGIQVYGDVVMNHKGGADATEMVRAVEVNPNNRNQEVTGEYTIEAWTRFDFPGRGNTHSSFKWRWYHFDGVDWDQSRRLNNRIYKFRGKAWDWEVDTEFGNYDYLMYADYDMDHPEVVNELRNWGVWYTNTLGLDGFRIDAVKHIKYSFTRDWINHVRSATGKNMFAVAEFWKNDLGAIENYLQKTNWNHSVFDVPLHYNLYNASKSGGNYDMRNIFNGTVVQAHPNHAVTFVDNHDSQPEEALESFVEEWFKPLAYALTLTREQGYPSVFYGDYYGIPTHGVPAMRSKIDPILEARQKYAYGPQHDYLDHPDVIGWTREGDSSHPKSGLATLITDGPGGSKRMYAGLKNAGETWYDITGNRSDTVKIGSDGWGEFHVNDGSVSIYVQK

SEQ ID NO: 41144 - protein, 478 aa, Bacillus sp.
NGTMMQYFEWYLPNDGNHWNRLNSDASNLKSKGITAVWIPPAWKAASQNDVGYGAYDLYDLGEFNQKGTVRTKYGTRSQLQAAVTSLKNNGIQVYGDVVMNHKGGADATEMVRAVEVNPNNRNQEVTGEYTIEAWTRFDFPGRGNTHSSFKWRWYHFDGVDWDQSRRTNNRIYKFRGKAWDWEVDTEFGNYDYLMYTDYDMDHPEVVNELRNWGVWYTNTLGLDGFRIDAVKHIKYSFTRDWINHVRSATGKNMFAVAEFWKNDLGAIENYLQKTNWNHSVFDVPLHYNLYNASKSGGNYDMRNIFNGTVVQRHPSHAVTFVDNHDSQPEEALESFVEEWFKPLAYALTLTREQGYPSVFYGDYYGIPTHGVPAMRSKIDPILEARQKYAYGPQHDYLDHPDVIGWTREGDSSHPKSGLATLITDGPGGSKRMYAGLKNAGETWYDITGNRSDTVKIGSDGWGEFHVNDGSVSIYVQK

SEQ ID NO: 41145 - protein, 478 aa, Synthetic construct
NGTMMQYFEWYLPNDGNHWNRLNSDASNLKSKGITAVWIPPAWKGASQNDVGYGAYDLYDLGEFNQKGTVRTKYGTRSQLQAAVTSLKNNGIQVYGDVVMNHKGGADATEMVRAVEVNPNNRNQEVTGEYTIEAWTRFDFPGRGNTHSSFKWRWYHFDGVDWDQSRRLNNRIYKFRGKEWDWEVDTEFGNYDYLMYADYDMDSPEVVNELRNWGVWYTNTLGLDGFRIDAVKHIKYSFTRDWINHVRSATGKNMFAVAEFWKNDLGAIENYLQKTNWNHSVFDVPLHYNLYNASKSGGNYDMRNIFNGTVVQRHPSHAVTFVDNHDSQPEEALESFVEEWFKPLAYALTLTREQGYPSVFYGDYYGIPTHGVPAMRSKIDPILEARQKYAYGPQHDYLDHPDVIGWTREGDSSHPKSGLATLITDGPGGSKRMYAGLKNAGETWYDITGNRSDTVKIGSDGWGEFHVNDGSVSIYVQK

SEQ ID NO: 41146 - protein, 478 aa, Bacillus sp.
NLTMMQYFEWYLPNDGNHWNRLNSDASNLKSKGITAVWIPPAWKGASQNDVGYGAYDLYDLGEFNQKGTVRTKYGTRSQLQAAVTSLKNNGIQVYGDVVMNHKGGADATEMVRAVEVNPNNRNQEVTGEYTIEAWTRFDFPGRGNTHSSFKWRWYHFDGVDWDQSRRLNNRIYKFRGKAWDWEVDTEFGNYDYLMYADYDMDHPEVVNELRNWGVWYTNTLGLDGFRIDAVKHIKYSFTRDWINHVRSATGKNMFAVAEFWKNDLGAIENYLQKTNWNHSVFDVPLHYNLYNASKSGGNYDMRNIFNGTVVQSHPNWAVTFVDNHDSQPEEALESFVEEWFKPLAYALTLTREQGYPSVFYGDYYGIPTHGVPAMRSKIDPILEARQKYAYGPQHDYLDHPDVIGWTREGDSSHPKSGLATLITDGPGGSKRMYAGLKNAGETWYDITGNRSDTVKIGSDGWGEFHVNDGSVSIYVQK

SEQ ID NO: 41147 - protein, 478 aa, Bacillus sp.
NQTMMQYFEWYLPNDGNHWNRLNSDASNLKSKGITAVWIPPAWKGASQNDVGYGAYDLYDLGEFNQKGTVRTKYGTRSQLQAAVTSLKNNGIQVYGDVVMNHKGGADATEMVRAVEVNPNNRNQEVTGEYTIEAWTRFDFPGRGNTHSSFKWRWYHFDGVDWDQSRRLNNRIYKFRGKAWDWEVDTEFGNYDYLMYADYDMDHPEVVNELRNWGVWYTNTLGLDGFRIDAVKHIKYSFTRDWINHVRSATGKNMFAVAEFWKNDLGAIENYLQKTNWNHSVFDVPLHYNLYNASKSGGNYDMRNIFNGTVVQSHPMHAVTFVDNHDSQPEEALESFVEEWFKPLAYALTLTREQGYPSVFYGDYYGIPTHGVPAMRSKIDPILEARQKYAYGPQHDYLDHPDVIGWTREGDSSHPKSGLATLITDGPGGSKRMYAGLKNAGETWYDITGNRSDTVKIGSDGWGEFHVNDGSVSIYVQK

SEQ ID NO: 41148 - protein, 478 aa, Bacillus sp.
NGTMMQYFEWYLPNDGNHWNRLNSDASNLKSKGITAVWIPPAWKATSQNDVGYGAYDLYDLGEFNQKGTVRTKYGTRSQLQAAVTSLKNNGIQVYGDVVMNHKGGADATEMVRAVEVNPNNRNQEVTGEYTIEAWTRFDFPGRGNTHSSFKWRWYHFDGVDWDQSRRTQNRIYKFRGKAWDWEVDTEFGNYDYLMYADYDMDHTEVVNELRNWGVWYTNTLGLDGFRIDAVKHIKYSFTRDWINHVRSATGKNMFAVAEFWKNDLGAIENYLQKTNWNHSVFDVPLHYNLYNASKSGGNYDMRNIFNGTVVQRHPSHAVTFVDNHDSQPEEALESFVEEWFKPLAYALTLTREQGYPSVFYGDYYGIPTHGVPAMRSKIDPILEARQKYAYGPQHDYLDHPDVIGWTREGDSSHPKSGLATLITDGPGGSKRMYAGLKNAGETWYDITGNRSDTVKIGSDGWGEFHVNDGSVSIYVQK

SEQ ID NO: 41149 - protein, 478 aa, Bacillus sp.
NGTMMQYFEWYLPNDGNHWNRLNSDASNLKSKGITAVWIPPAWKGASQNDVGYGAYDLYDLGEFNQKGTVRTKYGTRSQLQAAVTSLKNNGIQVYGDVVMNHKGGADATEMVRAVEVNPNNRNQEVTGEYTIEAWTRFDFPGRGNTHSSFKWRWYHFDGVDWDQSERLNNRIYKFRGKAWDWEVDTEFGNYDYLMYADYDMDHPEVVNELRNWGVWYTNTLGLDGFRIDAVKHIKYSFTRDWINHVRSATGKNMFAVAEFWKNDLGAIENYLQKTNWNHSVFDVPLHYNLYNASKSGGNYDMRNIFNGTVVQRHPSHAVTFVDNHDSQPEEALESFVEEWFKPLAYALTLTREAGLPSVFYGDYYGIPTHGVPAMRSKIDPILEARQKYAYGPQHDYLDHPDVIGWTREGDSSHPKSGLATLITDGPGGSKRMYAGLKNAGETWYDITGNRSDTVKIGSDGWGEFHVNDGSVSIYVQK

SEQ ID NO: 41150 - protein, 478 aa, Bacillus sp.
NLTMMQYFEWYLPNDGNHWNRLNSDASNLKSKGITAVWIPPAWKGSSQNDVGYGAYDLYDLGEFNQKGTVRTKYGTRSQLQAAVTSLKNNGIQVYGDVVMNHKGGADATEMVRAVEVNPNNRNQEVTGEYTIEAWTRFDFPGRGNTHSSFKWRWYHFDGVDWDQSRRLNNRIYKFRGKAWDWEVDTEFGNYDYLMYADYDMDHPEVVNELRNWGVWYTNTLGLDGFRIDAVKHIKYSFTRDWINHVRSATGKNMFAVAEFWKNDLGAIENYLQKTNWNHSVFDVPLHYNLYNASKSGGNYDMRNIFNGTVVQSHPMHAVTFVDNHDSQPEEALESFVEEWFKPLAYALTLTREQGYPSVFYGDYYGIPTHGVPAMRSKIDPILEARQKYAYGPQHDYLDHPDVIGWTREGDSSHPKSGLATLITDGPGGSKRMYAGLKNAGETWYDITGNRSDTVKIGSDGWGEFHVNDGSVSIYVQK

SEQ ID NO: 41151 - protein, 478 aa, Bacillus sp.
NGTMMQYFEWYLPNDGNHWNRLNSDASNLKSKGITAVWIPPAWKGASQNDVGYGAYDLYDLGEFNQKGTVRTKYGTRSQLQAAVTSLKNNGIQVYGDVVMNHKGGADATEMVRAVEVNPNNRNQEVTGEYTIEAWTRFDFPGRGNTHSSFKWRWYHFDGVDWDQSRRLNNRIYKFRGKAWDWEVDTEFGNYDYLMYADYDMDHPEVVNELRNWGVWYTNTLGLDGFRIDAVKHIKYSFTRDWINHVRSATGKNMFAVAEFWKNDLGAIENYLQKTNWNHSVFDVPLHYNLYNASKSGGNYDMRNIFNGTVVQRHPSHAVTFVDNHDSQPEEALESFVEPWFKPLAYALTLTREQGYPSVFYGDYYGIPTHGVPAMRSKIDPILEARQKYAYGPQHDYLDHPDVIGWTREGDSSHPKSGLATLITDGPGGSKRMYAGLKNAGETWYDITGNRSDTVKIGSDGWGEFHVNKTSVSIYVQK

SEQ ID NO: 41152 - protein, 478 aa, Bacillus sp.
NGTMMQYFEWYLPNDGNHWNRLNSDASNLKSKGITAVWIPPAWKGASQNDVGYGAYDLYDLGEFNQKGTVRTKYGTRSQLQAAVTSLKNNGIQVYGDVVMNHKGGADATEMVRAVEVNPNNRNQEVTGEYTIEAWTRFDFPGRGNTHSSFKWRWYHFDGVDWDQSRRLNNRIYKFRGKAWDWEVDTEFGNYDYLMYADYDMDHPEVVNELRNWGVWYTNTLGLDGFRIDAVKHIKYSFTRDWINHVRSATGKNMFAVAEFWKNDLGAIENYLQKTNWNHSVFDVPLHYNLYNASQSGGNYDMRNIFNGTVVQRHPSHAVTFVDNHDSQPEEALESFVDEWFKPLAYALTLTREQGYPSVFYGDYYGIPTHGVPAMRSKIDPILEARQKYAYGPQHDYLDHPDVIGWTREGDSSHPKSGLATLITDGPGGSKRMYAGLKNAGETWYDITGNRSDTVKIGSDGWGEFHVNKKSVSIYVQK

SEQ ID NO: 41153 - protein, 478 aa, Bacillus sp.
NGTMMQYFEWYLPNDGNHWNRLNSDASNLKSKGITAVWIPPAWKAISQNDVGYGAYDLYDLGEFNQKGTVRTKYGTRSQLQAAVTSLKNNGIQVYGDVVMNHKGGADATEMVRAVEVNPNNRNQEVTGEYTIEAWTRFDFPGRGNTHSSFKWRWYHFDGVDWDQSRRLNNRIYKFRGKAWDWEVDTEFGNYDYLMYVDYDMDHPEVVNELRNWGVWYTNTLGLDGFRIDAVKHIKYSFTRDWINHVRSATGKNMFAVAEFWKNDLGAIENYLQKTNWNHSVFDVPLHYNLYNASKSGGNYDMRNIFNGTVVQRHPSHAVTFVDNHDSQPEEALESFVEEWFKPLAYALTLTREQGYPSVFYGDYYGIPTHGVPAMRSKIDPILEARQKYAYGPQHDYLDHPDVIGWTREGDSSHPKSGLATLITDGPGGSKRMYAGLKNAGETWYDITGNRSDTVKIGSDGWGEFHVNDGSVSIYVQK

SEQ ID NO: 41154 - protein, 478 aa, Synthetic construct
NGTMMQYFEWYLPNDGNHWNRLNSDASNLKSKGITAVWIPPAWKGASQNDVGYGAYDLYDLGEFNQKGTVRTKYGTRSQLQAAVTSLKNNGIQVYGDVVMNHKGGADATEMVRAVEVNPNNRNQEVTGEYTIEAWTRFDFPGRGNTHSSFKWRWYHFDGVDWDQSRRLNNRIYKFRGKAWDWEVDTEFGNYDYLMYADYDMDHPEPTNELRNWGVWYTNTLGLDGFRIDAVKHIKYSFTRDWINHVRSATGKNMFAVAEFWKNDLGAIENYLQKTNWNHSVFDVPLHYNLYNASKSGGNYDMRNIFNGTVVQRHPSHAVTFVDNHDSQPEEALESFVEEWFKPLAYALTLTREQGYPSVFYGDYYGIPTHGVPAMRSKIDPILEARQKYAYGPQHDYLDHPDVIGWTREGDSSHPKSGLATLITDGPGGSKRMYAGLKNAGETWYDITGNRSDTVKIGSDGWGEFHVNDGSVSIYVQK

SEQ ID NO: 41155 - protein, 478 aa, Bacillus sp.
NGTMMQYFEWYLPNDGNHWNRLNSDASNLKSKGITAVWIPPAWKGASQNDVGYGAYDLYDLGEFNQKGTVRTKYGTRSQLQAAVTSLKNNGIQVYGDVVMNHKGGADYTEMVRAVEVNPNNRNQEVTGEYTIEAWTRFDFPGRGNTHSSFKWRWYHFDGVDWDQSERLNNRIYKFRGKAWDWEVETEFGNYDYLMYADYDMDHPEVVNELRNWGVWYTNTLGLDGFRIDAVKHIKYSFTRDWINHVRSATGKNMFAVAEFWKNDLGAIENYLQKTNWNHSVFDVPLHYNLYNASKSGGNYDMRNIFNGTVVQRHPSHAVTFVDNHDSQPEEALESFVEEWFKPLAYALTLTREQGYPSVFYGDYYGIPTHGVPAMRSKIDPILEARQKYAYGPQHDYLDHPDVIGWTREGDSSHPKSGLATLITDGPGGSKRMYAGLKNAGETWYDITGNRSDTVKIGSDGWGEFHVNDGSVSIYVQK

SEQ ID NO: 41156 - protein, 478 aa, Bacillus sp.
NGTMMQYFEWYLPNDGNHWNRLNSDASNLKSKGITAVWIPPAWKGASQNDVGYGAYDLYDLGEFNQKGTVRTKYGTRSQLQAAVTSLKNNGIQVYGDVVMNHKGGADATEMVRAVEVNPNNRNQEVTGEYTIEAWTRFDFPGRGNTHSSFKWRWYHFDGVDWDQSRRLNNRIYKFRGKAWEWEVDTENGFYDYLMYTDIDYDHSEVVNELRNWGVWYTNTLGLDGFRIDAVKHIKYSFTRDWINHVRSATGKNMFAVAEFWKNDLGAIENYLQKTNWNHSVFDVPLHYNLYNASKSGGNYDMRNIFNGTVVQRHPSHAVTFVDNHDSQPEEALESFVEEWFKPLAYALTLTREQGYPSVFYGDYYGIPTHGVPAMRSKIDPILEARQKYAYGPQHDYLDHPDVIGWTREGDSSHPKSGLATLITDGPGGSKRMYAGLKNAGETWYDITGNRSDTVKIGSDGWGEFHVNDGSVSIYVQK

SEQ ID NO: 41157 - protein, 478 aa, Bacillus sp.
NSTMMQYFEWYLPNDGNHWNRLNSDASNLKSKGITAVWIPPAWKGASQNDVGYGAYDLYDLGEFNQKGTVRTKYGTRSQLQAAVTSLKNNGIQVYGDVVMNHKGGADATEMVRAVEVNPNNRNQEVTGEYTIEAWTRFDFPGRGNTHSSFKWRWYHFDGVDWDQSRRLNNRIYKFRGKAWDWEVDTEFGNYDYLMYADYDMDHPEVVNELRNWGVWYTNTLGLDGFRIDAVKHIKYSFTRDWINHVRSATGKNMFAVAEFWKNDLGAIENYLQKTNWNHSVFDVPLHYNLYNASKSGGNYDMRNIFNGTVVQAHPNQAVTFVDNHDSQPEEALESFVEEWFKPLAYALTLTREQGYPSVFYGDYYGIPTHGVPAMRSKIDPILEARQKYAYGPQHDYLDHPDVIGWTREGDSSHPKSGLATLITDGPGGSKRMYAGLKNAGETWYDITGNRSDTVKIGSDGWGEFHVNDGSVSIYVQK

SEQ ID NO: 41158 - protein, 478 aa, Bacillus sp.
NGTMMQYFEWYLPNDGNHWNRLNSDASNLKSKGITAVWIPPAWKAASQNDVGYGAYDLYDLGEFNQKGTVRTKYGTRSQLQAAVTSLKNNGIQVYGDVVMNHKGGADATEMVRAVEVNPNNRNQEVTGEYTIEAWTRFDFPGRGNTHSSFKWRWYHFDGVDWDQSRRLTNRIYKFRGKAWDWEVDTEFGNYDYLMYADYDMDHPEVVNELRNWGVWYTNTLGLDGFRIDAVKHIKYSFTRDWINHVRSATGKNMFAVAEFWKNDLGAIENYLQKTNWNHSVFDVPLHYNLYNASKSGGNYDMRNIFNGTVVQRHPSHAVTFVDNHDSQPEEALESFVEEWFKPLAYALTLTREQGYPSVFYGDYYGIPTHGVPAMRSKIDPILEARQKYAYGPQHDYLDHPDVIGWTREGDSSHPKSGLATLITDGPGGSKRMYAGLKNAGETWYMITGNRSDTVKIGSDGWGEFHVNDGSVSIYVQK

SEQ ID NO: 41159 - protein, 478 aa, Synthetic construct
NGTMMQYFEWYLPNDGNHWNRLNSDASNLKSKGITAVWIPPAWKGASQNDVGYGAYDLYDLGEFNQKGTVRTKYGTRSQLQAAVTSLKNNGIQVYGDVVMNHKGGADATEMVRAVEVNPNNRNQEVTGEYTIEAWTRFDFPGRGNTHSSFKWRWYHFDGVDWDQSRRLNNRIYKFRGKAWDWEVDTEFGNYDYLMYADYDMDHPESTNELRNWGVWYTNTLGLDGFRIDAVKHIKYSFTRDWINHVRSATGKNMFAVAEFWKNDLGAIENYLQKTNWNHSVFDVPLHYNLYNASKSGGNYDMRNIFNGTVVQRHPSHAVTFVDNHDSQPEEALESFVEEWFKPLAYALTLTREQGYPSVFYGDYYGIPTHGVPAMRSKIDPILEARQKYAYGPQHDYLDHPDVIGWTREGDSSHPKSGLATLITDGPGGSKRMYAGLKNAGETWYDITGNRSDTVKIGSDGWGEFHVNDGSVSIYVQK

SEQ ID NO: 41160 - protein, 478 aa, Bacillus sp.
NGTMMQYFEWYLPNDGNHWNRLNSDASNLKSKGITAVWIPPAWKAVSQNDVGYGAYDLYDLGEFNQKGTVRTKYGTRSQLQAAVTSLKNNGIQVYGDVVMNHKGGADATEMVRAVEVNPNNRNQEVTGEYTIEAWTRFDFPGRGNTHSSFKWRWYHFDGVDWDQSRDLENRIYKFRGKAWDWEVDTEFGNYDYLMYADYDMDHPEVVNELRNWGVWYTNTLGLDGFRIDAVKHIKYSFTRDWINHVRSATGKNMFAVAEFWKNDLGAIENYLQKTNWNHSVFDVPLHYNLYNASKSGGNYDMRNIFNGTVVQRHPSHAVTFVDNHDSQPEEALESFVDPWFKPLAYALTLTREQGYPSVFYGDYYGIPTHGVPAMRSKIDPILEARQKYAYGPQHDYLDHPDVIGWTREGDSSHPKSGLATLITDGPGGSKRMYAGLKNAGETWYDITGNRSDTVKIGSDGWGEFHVNGGSVSIYVQK

SEQ ID NO: 41161 - protein, 478 aa, Bacillus sp.
NGTMMQYFEWYLPNDGNHWNRLNSDASNLKSKGITAVWIPPAWKATSQNDVGYGAYDLYDLGEFNQKGTVRTKYGTRSQLQAAVTSLKNNGIQVYGDVVMNHKGGADATEMVRAVEVNPNNRNQEVTGEYTIEAYTRFDFPGRGNTHSSFKWRWYHFDGVDWDQSRNVNNRIYKFRGKAWDWEVDTEFGNYDYLMYADYDMDHPEVVNELRNWGVWYTNTLGLDGFRIDAVKHIKYSFTRDWINHVRSATGKNMFAVAEFWKNDLGAIENYLQKTNWNHSVFDVPLHYNLYNASKSGGNYDMRNIFNGTVVQRHPSHAVTFVDNHDSQPEEALESFVEEWFKPLAYALTLTREQGYPSVFYGDYYGIPTHGVPAMRSKIDPILEARQKYAYGPQHDYLDHPDVIGWTREGDSSHPKSGLATLITDGPGGSKRMYAGLKNAGETWYDITGNRSDTVKIGSDGWGEFHVNDGSVSIYVQK

SEQ ID NO: 41162 - protein, 478 aa, Bacillus sp.
NGTMMQYFEWYLPNDGNHWNRLNSDASNLKSKGITAVWIPPAWKATSQNDVGYGAYDLYDLGEFNQKGTVRTKYGTRSQLQAAVTSLKNNGIQVYGDVVMNHKGGADATEMVRAVEVNPNNRNQEVTGEYTIEAWTRFDFPGRGNTHSSFKWRWYHFDGVDWDQSRDLNNRIYKFRGKAWDWEVDTEFGNYDYLMYADYDMDHPEVVNELRNWGVWYTNTLGLDGFRIDAVKHIKYSFTRDWINHVRSATGKNMFAVAEFWKNDLGAIENYLQKTNWNHSVFDVPLHYNLYNASKSGGNYDMRNIFNGTVVQRHPSHAVTFVDNHDSQPEEALESFVDPWFKPLAYALTLTREQGYPSVFYGDYYGIPTHGVPAMRSKIDPILEARQKYAYGPQHDYLDHPDVIGWTREGDSSHPKSGLATLITDGPGGSKRMYAGLKNAGETWYDITGNRSDTVKIGSDGWGEFHVNGGSVSIYVQK

SEQ ID NO: 41163 - protein, 478 aa, Bacillus sp.
NGTMMQYFEWYLPNDGNHWNRLNSDASNLKSKGITAVWIPPAWKGASQNDVGYGAYDLYDLGEFNQKGTVRTKYGTRSQLQAAVTSLKNNGIQVYGDVVMNHKGGADATEMVRAVEVNPNNRNQEVTGEYTIEAWTRFDFPGRGNTHSSFKWRWYHFDGVDWDQSRRLNNRIYKFRGKAWDWEVDTEFGNYDYLMYADYDMDHPEVVNELRNWGVWYTNTLGLDGFRIDAVKHIKYSFTRDWINHVRSATGKNMFAVAEFWKNDLGAIENYLQKTNWNHSVFDVPLHYNLYNASKSGGNYDMRNIFNGTVVQRHPSHAVTFVDNHDSQPEEALESFVDEWFKPLAYALTLTREQGYPSVFYGDYYGIPTHGVPAMRSKIDPILEARQKYAYGPQHDYLDHPDVIGWTREGDSSHPKSGLATLITDGPGGSKRMYAGLKNAGETWYDITGNRSDTVKIGSDGWGEFHVNKQSVSIYVQK

SEQ ID NO: 41164 - protein, 478 aa, Bacillus sp.
NGTMMQYFEWYLPNDGNHWNRLNSDASNLKSKGITAVWIPPAWKGASQNDVGYGAYDLYDLGEFNQKGTVRTKYGTRSQLQAAVTSLKNNGIQVYGDVVMNHKGGADATEMVSAVEVNPNNRQQEVTGEYTIEAWTRFDFPGRGNTHSSFKWRWYHFDGVDWDQSRRLNNRIYLFRGKAWDWEVDTEFGNYDYLMYADYDMDHPEVVNELRNWGVWYTNTLGLDGFRIDAVKHIKYSFTRDWINHVRSATGKNMFAVAEFWKNDLGAIENYLQKTNWNHSVFDVPLHYNLYNASKSGGNYDMRNIFNGTVVQRHPSHAVTFVDNHDSQPEEALESFVEEWFKPLAYALTLTREQGYPSVFYGDYYGIPTHGVPAMRSKIDPILEARQKYAYGPQHDYLDHPDVIGWTREGDSSHPKSGLATLITDGPGGSKRMYAGLKNAGETWYDITGNRSDTVKIGSDGWGEFHVNDGSVSIYVQK

SEQ ID NO: 41165 - protein, 478 aa, Bacillus sp.
NGTMMQYFEWYLPNDGNHWNRLNSDASNLKSKGITAVWIPPAWKAVSQNDVGYGAYDLYDLGEFNQKGTVRTKYGTRSQLQAAVTSLKNNGIQVYGDVVMNHKGGADATEMVDAVEVNPNNRNQEVTGEYTIEAWTRFDFPGRGNTHSSFKWRWYHFDGVDWDQSRNLTNRIYKFRGKAWDWEVDTEFGNYDYLMYTDYDMDHPEVVNELRNWGVWYTNTLGLDGFRIDAVKHIKYSFTRDWINHVRSATGKNMFAVAEFWKNDLGAIENYLQKTNWNHSVFDVPLHYNLYNASKSGGNYDMRNIFNGTVVQRHPSHAVTFVDNHDSQPEEALESFVEEWFKPLAYALTLTREQGYPSVFYGDYYGIPTHGVPAMRSKIDPILEARQKYAYGPQHDYLDHPDVIGWTREGDSSHPKSGLATLITDGPGGSKRMYAGLKNAGETWYDITGNRSDTVKIGSDGWGEFHVNDGSVSIYVQK

SEQ ID NO: 41166 - protein, 478 aa, Bacillus sp.
NGTMMQYFEWYLPNDGNHWNRLNSDASNLKSKGITAVWIPPAWKGASQNDVGYGAYDLYDLGEFNQKGTVRTKYGTRSQLQAAVTSLKNNGIQVYGDVVMNHKGGADATEMVPAVEVNPNNRNQEVTGDYTIEAWTRFDFPGRGNTHSSFKWRWYHFDGVDWDQSRRLNNRIYKFRAKAWDWEVDTEFGNYDYLMYADYDMDHPEVVNELRNWGVWYTNTLGLDGFRIDAVKHIKYSFTRDWINHVRSATGKNMFAVAEFWKNDLGAIENYLQKTNWNHSVFDVPLHYNLYNASKSGGNYDMRNIFNGTVVQRHPSHAVTFVDNHDSQPEEALESFVEEWFKPLAYALTLTREQGYPSVFYGDYYGIPTHGVPAMRSKIDPILEARQKYAYGPQHDYLDHPDVIGWTREGDSSHPKSGLATLITDGPGGSKRMYAGLKNAGETWYDITGNRSDTVKIGSDGWGEFHVNDGSVSIYVQK

SEQ ID NO: 41167 - protein, 478 aa, Bacillus sp.
NGTMMQYFEWYLPNDGNHWNRLNSDASNLKSKGITAVWIPPAWKGASQNDVGYGAYDLYDLGEFNQKGTVRTKYGTRSQLQAAVTSLKNNGIQVYGDVVMNHKGGADATEMVRAVEVNPNNRNQEVTGEYTIEAWTRFDFPGRGNTHSSFKWRWYHFDGVDWDQSRRLNNRIYKFRGKAWDWEVDTEFGNYDYLMYADYDMDHPEVVNELRNWGVWYTNTLGLDGFRIDAVKHIKYSFTRDWINHVRSATGKNMFAVAEFWKNDLGAIENYLQKTNWNHSVFDVPLHYNLYNASKSAGNYDMRNIFNGTVVQRHPSHAVTFVDNHDSQPEEALESFVDPWFKPLAYALTLTREQGYPSVFYGDYYGIPTHGVPAMRSKIDPILEARQKYAYGPQHDYLDHPDVIGWTREGDSSHPKSGLATLITDGPGGSKRMYAGLKNAGETWYDITGNRSDTVKIGSDGWGEFHVNKGSVSIYVQK

SEQ ID NO: 41168 - protein, 478 aa, Bacillus sp.
NATMMQYFEWYLPNDGNHWNRLNSDASNLKSKGITAVWIPPAWKGASQNDVGYGAYDLYDLGEFNQKGTVRTKYGTRSQLQAAVTSLKNNGIQVYGDVVMNHKGGADATEMVRAVEVNPNNRNQEVTGEYTIEAWTRFDFPGRGNTHSSFKWRWYHFDGVDWDQSRRLNNRIYKFRGKAWDWEVDTEFGNYDYLMYADYDMDHPEVVNELRNWGVWYTNTLGLDGFRIDAVKHIKYSFTRDWINHVRSATGKNMFAVAEFWKNDLGAIENYLQKTNWNHSVFDVPLHYNLYNASKSGGNYDMRNIFNGTVVQSHPMHAVTFVDNHDSQPEEALESFVEEWFKPLAYALTLTREQGYPSVFYGDYYGIPTHGVPAMRSKIDPILEARQKYAYGPQHDYLDHPDVIGWTREGDSSHPKSGLATLITDGPGGSKRMYAGLKNAGETWYDITGNRSDTVKIGSDGWGEFHVNDGSVSIYVQK

SEQ ID NO: 41169 - protein, 478 aa, Bacillus sp.
NGTMMQYFEWYLPNDGNHWNRLNSDASNLKSKGITAVWIPPAWKGASQNDVGYGAYDLYDLGEFNQKGTVRTKYGTRSQLQAAVTSLKNNGIQVYGDVVMNHKGGADATEMVRAVEVNPNNRNQEVTGEYTIEAWTRFDFPGRGNTHSSFKWRWYHFDGVDWDQSRRLNNRIYKFRGKAWDWEVDTEFGNYDYLMYADYDMDHPEVVNELRNWGVWYTNTLGLDGFRIDAVKHIKYSFTRDWINHVRSATGKNMFAVAEFWKNDLGAIENYLQKTNWNHSVFDVPLHYNLYNASKSGRNYDMRNIFNGTVVQRHPSHAVTFVDNHDSQPEEALESFVEPWFKPLAYALTLTREQGYPSVFYGDYYGIPTHGVPAMRSKIDPILEARQKYAYGPQHDYLDHPDVIGWTREGDSSHPKSGLATLITDGPGGSKRMYAGLKNAGKTWYDITGNRSDTVKIGSDGWGEFHVNDGSVSIYVQK

SEQ ID NO: 41170 - protein, 478 aa, Bacillus sp.
NGTMMQYFEWYLPNDGNHWNRLNSDASNLKSKGITAVWIPPAWKAVSQNDVGYGAYDLYDLGEFNQKGTVRTKYGTRSQLQAAVTSLKNNGIQVYGDVVMNHKGGADATEMVRAVEVNPNNRNQEVTGEYTIEAWTRFDFPGRGNTHSSFKWRWYHFDGVDWDQSRNLTNRIYKFRGKAWDWEVDTEFGNYDYLMYTDYDMDHPEVVNELRNWGVWYTNTLGLDGFRIDAVKHIKYSFTRDWINHVRIATGKNMFAVAEFWKNDLGAIENYLQKTNWNHSVFDVPLHYNLYNASKSGGNYDMRNIFNGTVVQRHPSHAVTFVDNHDSQPEEALESFVDEWFKPLAYALTLTREQGYPSVFYGDYYGIPTHGVPAMRSKIDPILEARQKYAYGPQHDYLDHPDVIGWTREGDSSHPKSGLATLITDGPGGSKRMYAGLKNAGETWYDITGNRSDTVKIGSDGWGEFHVNDGSVSIYVQK

SEQ ID NO: 41171 - protein, 478 aa, Bacillus sp.
NGTMMQYFEWYLPNDGNHWNRLNSDASNLKSKGITAVWIPPAWKGASQNDVGYGAYDLYDLGEFNQKGTVRTKYGTRSQLQAAVTSLKNNGIQVYGDVVMNHKGGADATEMVRAVEVNPNNRNQEVTGEYTIEAWTRFDFPGRGNTHSSFKWRWYHFDGVDWDQSRRLNNRIYKFRGKAWDWEVDTEFGNYDYLMYADYDMDHPEVVNELRNWGVWYTNTLGLDGFRIDAVKHIKYSFTRDWINHVRSATGKNMFAVAEFWKNDLGAIENYLQKTNWNHSVFDVPLHYNLYNASKSAGNYDMRNIFNGTVVQRHPSHAVTFVDNHDSQPEEALESFVDEWFKPLAYALTLTREQGYPSVFYGDYYGIPTHGVPAMRSKIDPILEARQKYAYGPQHDYLDHPDVIGWTREGDSSHPKSGLATLITDGPGGSKRMYAGLKNAGETWYDITGNRSDTVKIGSDGWGEFHVNQGSVSIYVQK

SEQ ID NO: 41172 - protein, 478 aa, Bacillus sp.
NGTMMQYFEWYLPNDGNHWNRLNSDASNLKSKGITAVWIPPAWKGASQNDVGYGAYDLYDLGEFNQKGTVRTKYGTRSQLQAAVTSLKNNGIQVYGDVVMNHKGGADATEMVRAVEVNPNNRNQEVTGEYTIEAWTRFDFPGRGNTHSSFKWRWYHFDGVDWDQSERLNNRIYKFRGKAWDWEVETEFGNYDYLMYADYDMDHPEVVNELRNWGVWYTNTLGLDGFRIDAVKHIKYSFTRDWINHVRIATGKNMFAVAEFWKNDLGAIENYLQKTNWNHSVFDVPLHYNLYNASKSGGNYDMRNIFNGTVVQRHPSHAVTFVDNHDSQPEEALESFVDEWFKPLAYALTLTREQGYPSVFYGDYYGIPTHGVPAMRSKIDPILEARQKYAYGPQHDYLDHPDVIGWTREGDSSHPKSGLATLITDGPGGSKRMYAGLKNAGETWYDITGNRSDTVKIGSDGWGEFHVNDQSVSIYVQK

SEQ ID NO: 41173 - protein, 478 aa, Bacillus sp.
NGTMMQYFEWYLPNDGNHWNRLNSDASNLKSKGIKAVWIPPAWKAVSQNDVGYGAYDLYDLGEFNQKGTVRTKYGTRSQLQAAVTSLKNNGIQVYGDVVMNHKGGADATEMVRAVEVNPNNRNQEVTGEYTIEAWTRFDFPGRGNTHSSFKWRWYHFDGVDFDQSRRLSNRIYKFRGKAWDWEVDTEFGNYDYLMYADYDMDHPEVVNELRNWGVWYTNTLGLDGFRIDAVKHIKYSFTRDWINHVRSATGKNMFAVAEFWKNDLGAIENYLQKTNWNHSVFDVPLHYNLYNASKSGGNYDMRNIFNGTVVQRHPSHAVTFVDNHDSQPEEALESFVEEWFKPLAYALTLTREQGYPSVFYGDYYGIPTHGVPAMRSKIDPILEARQKYAYGPQHDYLDHPDVIGWTREGDSSHPKSGLATLITDGPGGSKRMYAGLKNAGETWYDITGNRSDTVKIGSDGWGEFHVNDGSVSIYVQK

SEQ ID NO: 41174 - protein, 478 aa, Bacillus sp.
NQTMMQYFEWYLPNDGNHWNRLNSDASNLKSKGITAVWIPPAWKGASQNDVGYGAYDLYDLGEFNQKGTVRTKYGTRSQLQAAVTSLKNNGIQVYGDVVMNHKGGADATEMVRAVEVNPNNRNQEVTGEYTIEAWTRFDFPGRGNTHSSFKWRWYHFDGVDWDQSRRLNNRIYKFRGKAWDWEVDTEFGNYDYLMYADYDMDHPEVVNELRNWGVWYTNTLGLDGFRIDAVKHIKYSFTRDWINHVRSATGKNMFAVAEFWKNDLGAIENYLQKTNWNHSVFDVPLHYNLYNASKSGGNYDMRNIFNGTVVQAHPRHAVTFVDNHDSQPEEALESFVEEWFKPLAYALTLTREQGYPSVFYGDYYGIPTHGVPAMRSKIDPILEARQKYAYGPQHDYLDHPDVIGWTREGDSSHPKSGLATLITDGPGGSKRMYAGLKNAGETWYDITGNRSDTVKIGSDGWGEFHVNDGSVSIYVQK

SEQ ID NO: 41175 - protein, 478 aa, Synthetic construct
NGTMMQYFEWYLPNDGNHWNRLNSDASNLKSKGITAVWIPPAWKGASQNDVGYGAYDLYDLGEFNQKGTVRTKYGTRSQLQAAVTSLKNNGIQVYGDVVMNHKGGADATEMVRAVEVNPNNRNQEVTGEYTIEAWTRFDFPGRGNTHSSFKWRWYHFDGVDWDQSRRLNNRIYKFRGKAWDWEVDTENGNYDYLMYADYDMDYPETTNEVRNWGVWYTNTLGLDGFRIDAVKHIKYSFTRDWINHVRSATGKNMFAVAEFWKNDLGAIENYLQKTNWNHSVFDVPLHYNLYNASKSGGNYDMRNIFNGTVVQRHPSHAVTFVDNHDSQPEEALESFVEEWFKPLAYALTLTREQGYPSVFYGDYYGIPTHGVPAMRSKIDPILEARQKYAYGPQHDYLDHPDVIGWTREGDSSHPKSGLATLITDGPGGSKRMYAGLKNAGETWYDITGNRSDTVKIGSDGWGEFHVNDGSVSIYVQK

SEQ ID NO: 41176 - protein, 478 aa, Bacillus sp.
NGTMMQYFEWYLPNDGNHWNRLNSDASNLKSKGITAVWIPPAWKGASQNDVGYGAYDLYDLGEFNQKGTVRTKYGTRSQLQAAVTSLKNNGIQVYGDVVMNHKGGADATEMVRAVEVNPNNRNQEVTGEYTIEAWTRFDFPGRGNTHSSFKWRWYHFDGVDWDQSRRLNNRIYKFRGKAWDWEVDTEFGNYDYLMYADYDMDHPEVVNELRNWGVWYTNTLGLDGFRIDAVKHIKYSFTRDWINHVRSATGKNMFAVAEFWKNDLGAIENYLQKTNWNHSVFDVPLHYNLYNASQSAANYDMRNIFNGTVVQRHPSHAVTFVDNHDSQPEEALESFVEPWFKPLAYALTLTREQGYPSVFYGDYYGIPTHGVPAMRSKIDPILEARQKYAYGPQHDYLDHPDVIGWTREGDSSHPKSGLATLITDGPGGSKRMYAGLKNAGETWYDITGNRSDTVKIGSDGWGEFHVNDGSVSIYVQK

SEQ ID NO: 41177 - protein, 478 aa, Bacillus sp.
NGTMMQYFEWYLPNDGNHWNRLNSDASNLKSKGITAVWIPPAWKGASQNDVGYGAYDLYDLGEFNQKGTVRTKYGTRSQLQAAVTSLKNNGIQVYGDVVMNHKGGADATEMVRAVEVNPNNRNQEVTGEYTIEAYTRFDFPGRGNTHSSFKWRWYHFDGVDFDQSRKLNNRIYKFRGKAWDWEVDTEFGNYDYLMYVDYDMDHPEVVNELRNWGVWYTNTLGLDGFRIDAVKHIKYSFTRDWINHVRSATGKNMFAVAEFWKNDLGAIENYLQKTNWNHSVFDVPLHYNLYNASKSGGNYDMRNIFNGTVVQRHPSHAVTFVDNHDSQPEEALESFVEEWFKPLAYALTLTREQGYPSVFYGDYYGIPTHGVPAMRSKIDPILEARQKYAYGPQHDYLDHPDVIGWTREGDSSHPKSGLATLITDGPGGSKRMYAGLKNAGETWYDITGNRSDTVKIGSDGWGEFHVNDGSVSIYVQK

SEQ ID NO: 41178 - protein, 478 aa, Bacillus sp.
NGTMMQYFEWYLPNDGNHWNRLNSDASNLKSKGITAVWIPPAWKGASQNDVGYGAYDLYDLGEFNQKGTVRTKYGTRSQLQAAVTSLKNNGIQVYGDVVMNHKGGADATEMVRAVEVNPNNRNQEVTGEYTIEAWTRFDFPGRGNTHSSFKWRWYHFDGVDWDQSERLNNRIYKFRGKAWDWEVETEFGNYDYLMYADYDMDHPEVVNELRNWGVWYTNTLGLDGFRIDAVKHIKYSFTRDWINHVRSATGKNMFAVAEFWKNDLGAIENYLQKTNWNHSVFDVPLHYNLYNASKSGGNYDMRNIFNGTVVQRHPSHAVTFVDNHDSQPEEALESFVDPWFKPLAYALTLTREQGYPSVFYGDYYGIPTHGVPAMRSKIDPILEARQKYAYGPQHDYLDHPDVIGWTREGDSSHPKSGLATLITDGPGGSKRMYAGLKNAGETWYDITGNRSDTVKIGSDGWGEFHVNGGSVSIYVQK

SEQ ID NO: 41179 - protein, 478 aa, Bacillus sp.
NGTMMQYFEWYLPNDGNHWNRLNSDASNLKSKGITAVWIPPAWKAASQNDVGYGAYDLYDLGEFNQKGTVRTKYGTRSQLQAAVTSLKNNGIQVYGDVVMNHKGGADATEMVRAVEVNPNNRNQEVTGEYTIEAWTRFDFPGRGNTHSSFKWRWYHFDGVDWDQSRDLDNRIYKFRGKAWDWEVDTEFGNYDYLMYADYDMDHPEVVNELRNWGVWYTNTLGLDGFRIDAVKHIKYSFTRDWINHVRSATGKNMFAVAEFWKNDLGAIENYLQKTNWNHSVFDVPLHYNLYNASKSGGNYDMRNIFNGTVVQRHPSHAVTFVDNHDSQPEEALESFVETWFKPLAYALTLTREQGYPSVFYGDYYGIPTHGVPAMRSKIDPILEARQKYAYGPQHDYLDHPDVIGWTREGDSSHPKSGLATLITDGPGGSKRMYAGLKNAGETWYDITGNRSDTVKIGSDGWGEFHVNKASVSIYVQK

SEQ ID NO: 41180 - protein, 478 aa, Bacillus sp.
NGTMMQYFEWYLPNDGNHWNRLNSDASNLKSKGITAVWIPPAWKAASQNDVGYGAYDLYDLGEFNQKGTVRTKYGTRSQLQAAVTSLKNNGIQVYGDVVMNHKGGADATEMVRAVEVNPNNRNQEVTGEYTIEAWTRFDFPGRGNTHSSFKWRWYHFDGVDWDQSRDLDNRIYKFRGKAWDWEVDTEFGNYDYLMYADYDMDHPEVVNELRNWGVWYTNTLGLDGFRIDAVKHIKYSFTRDWINHVRIATGKNMFAVAEFWKNDLGAIENYLQKTNWNHSVFDVPLHYNLYNASKSGGNYDMRNIFNGTVVQRHPSHAVTFVDNHDSQPEEALESFVDEWFKPLAYALTLTREQGYPSVFYGDYYGIPTHGVPAMRSKIDPILEARQKYAYGPQHDYLDHPDVIGWTREGDSSHPKSGLATLITDGPGGSKRMYAGLKNAGETWYDITGNRSDTVKIGSDGWGEFHVNDQSVSIYVQK

SEQ ID NO: 41181 - protein, 478 aa, Bacillus sp.
NATMMQYFEWYLPNDGNHWNRLNSDASNLKSKGITAVWIPPAWKGASQNDVGYGAYDLYDLGEFNQKGTVRTKYGTRSQLQAAVTSLKNNGIQVYGDVVMNHKGGADATEMVRAVEVNPNNRNQEVTGEYTIEAWTRFDFPGRGNTHSSFKWRWYHFDGVDWDQSRRLNNRIYKFRGKAWDWEVDTEFGNYDYLMYADYDMDHPEVVNELRNWGVWYTNTLGLDGFRIDAVKHIKYSFTRDWINHVRSATGKNMFAVAEFWKNDLGAIENYLQKTNWNHSVFDVPLHYNLYNASKSGGNYDMRNIFNGTVVQAHPMHAVTFVDNHDSQPEEALESFVEEWFKPLAYALTLTREQGYPSVFYGDYYGIPTHGVPAMRSKIDPILEARQKYAYGPQHDYLDHPDVIGWTREGDSSHPKSGLATLITDGPGGSKRMYAGLKNAGETWYDITGNRSDTVKIGSDGWGEFHVNDGSVSIYVQK

SEQ ID NO: 41182 - protein, 478 aa, Bacillus sp.
NGTMMQYFEWYLPNDGNHWNRLNSDASNLKSKGITAVWIPPAWKGASQNDVGYGAYDLYDLGEFNQKGTVRTKYGTRSQLQAAVTSLKNNGIQVYGDVVMNHKGGADATEMVRAVEVNPNNRNQEVTGEYTIEAWTRFDFPGRGNTHSSFKWRWYHFDGVDWDQSRRLNNRIYKFRAKAWDWEVDTEFGNYDYLMYADYDMDHPEVVNELRNWGVWYTNTLGLDGFRIDAVKHIKYSFTRDWINHVRSATGKNMFAVAEFWKNDLGAIENYLQKTNWNHSVFDVPLHYNLYNASKSGGNYDMRNIFNGTVVQRHPSHAVTFVDNHDSQPEEALESFVEEWFKPLAYALTLTREQGYPSVFYGDYYGIPTHGVPAMRSKIDPILEARQKYAYGPQHDYLDHPDVIGWTREGDSSHPKSGLATLITHGPGGSKRMYAGLKNAGETWYDITGNRSDTVKIGSDGWGEFHVNDGSVSIYVQK

SEQ ID NO: 41183 - protein, 478 aa, Bacillus sp.
NGTMMQYFEWYLPNDGNHWNRLNSDASNLKSKGITAVWIPPAWKGASQNDVGYGAYDLYDLGEFNQKGTVRTKYGTRSQLQAAVTSLKNNGIQVYGDVVMNHKGGADATEMVRAVEVNPNNRNQEVTGEYTIEAWTRFDFPGRGNTHSSFKWRWYHFDGVDWDQSRRLNNRIYKFRGKAWDWEVDTEFGNYDYLMYADYDMDHPEVVNELRNWGVWYTNTLGLDGFRIDAVKHIKYSFTRDWINHVRSATGKNMFAVAEFWKNDLGAIENYLQKTNWNHSVFDVPLHYNLYNASKSGGNYDMRNIFNGTVVQRHPSHAVTFVDNHDSQPEEALESFVDPWFKPLAYALTLTREQGYPSVFYGDYYGIPTHGVPAMRSKIDPILEARQKYAYGPQHDYLDHPDVIGWTREGDSSHPKSGLATLITDGPGGSKRMYAGLKNAGETWYDITGNRSDTVKIGSDGWGEFHVNGASVSIYVQK

SEQ ID NO: 41184 - protein, 478 aa, Bacillus sp.
NGTMMQYFEWYLPNDGNHWNRLNSDASNLKSKGITAVWIPPAWKATSQNDVGYGAYDLYDLGEFNQKGTVRTKYGTRSQLQAAVTSLKNNGIQVYGDVVMNHKGGADATEMVRAVEVNPNNRNQEVTGEYTIEAWTRFDFPGRGNTHSSFKWRWYHFDGVDWDQSRNVNNRIYKFRGKAWDWEVDTEFGNYDYLMYADYDMDHPEVVNELRNWGVWYTNTLGLDGFRIDAVKHIKYSFTRDWINHVRSATGKNMFAVAEFWKNDLGAIENYLQKTNWNHSVFDVPLHYNLYNASKSGGNYDMRNIFNGTVVQRHPSHAVTFVDNHDSQPEEALESFVETWFKPLAYALTLTREQGYPSVFYGDYYGIPTHGVPAMRSKIDPILEARQKYAYGPQHDYLDHPDVIGWTREGDSSHPKSGLATLITDGPGGSKRMYAGLKNAGETWYDITGNRSDTVKIGSDGWGEFHVNKASVSIYVQK

SEQ ID NO: 41185 - protein, 478 aa, Bacillus sp.
NKTMMQYFEWYLPNDGNHWNRLNSDASNLKSKGITAVWIPPAWKGASQNDVGYGAYDLYDLGEFNQKGTVRTKYGTRSQLQAAVTSLKNNGIQVYGDVVMNHKGGADATEMVRAVEVNPNNRNQEVTGEYTIEAWTRFDFPGRGNTHSSFKWRWYHFDGVDWDQSRRLNNRIYKFRGKAWDWEVDTEFGNYDYLMYADYDMDHPEVVNELRNWGVWYTNTLGLDGFRIDAVKHIKYSFMRDWINHVRSATGKNMFAVAEFWKNDLGAIENYLQKTNWNHSVFDVPLHYNLYNASKSGGNYDMRNIFNGTVVQAHPMHAVTFVDNHDSQPEEALESFVEEWFKPLAYALTLTREQGYPSVFYGDYYGIPTHGVPAMRSKIDPILEARQKYAYGPQHDYLDHPDVIGWTREGDSSHPKSGLATLITDGPGGSKRMYAGLKNAGETWYDITGNRSDTVKIGSDGWGEFHVNDGSVSIYVQK

SEQ ID NO: 41186 - protein, 478 aa, Bacillus sp.
NGTMMQYFEWYLPNDGNHWNRLNSDASNLKSKGITAVWIPPAWKGASQNDVGYGAYDLYDLGEFNQKGTVRTKYGTRSQLQAAVTSLKNNGIQVYGDVVMNHKGGADATEMVRAVEVNPNNRNQEVTGEYTIEAWTRFDFPGRGNTHSSFKWRWYHFDGVDWDQSRRLDNRIYKFRGKAWDWEVDTEFGNYDYLMYTDYDMDHPEVVNELRNWGVWYTNTLGLDGFRIDAVKHIKYSFTRDWINHVRSATGKNMFAVAEFWKNDLGAIENYLQKTNWNHSVFDVPLHYNLYNASKSGGNYDMRNIFNGTVVQRHPSHAVTFVDNHDSQPEEALESFVDPWFKPLAYALTLTREQGYPSVFYGDYYGIPTHGVPAMRSKIDPILEARQKYAYGPQHDYLDHPDVIGWTRKGDSSHPKSGLATLITDGPGGSKRMYAGLKNAGETWYDITGNRSDTVKIGSDGWGEFHVNDGSVSIYVQK

SEQ ID NO: 41187 - protein, 478 aa, Bacillus sp.
NGTMMQYFEWYLPNDGNHWNRLNSDASNLKSKGITAVWIPPAWKGASQNDVGYGAYDLYDLGEFNQKGTVRTKYGTRSQLQAAVTSLKNNGIQVYGDVVMNHKGGADATEMVRAVEVNPNNRNQEVTGEYTIEAWTRFDFPGRGNTHSSFKWRWYHFDGVDWDQSRRLNNRIYKFRGKAWDWEVDTEFGNYDYLMYADYDMDHPEVVNELRNWGVWYTNTLGLDGFRIDAVKHIKYSFTRDWINHVRSATGKNMFAVAEFWKNDLGAIENYLQKTNWNHSVFDVPLHYNLYNASKSGGNYDMRNIFNGTVVQRHPSHAVTFVDNHDSQPEEALESFVDPWFKPLAYALTLTREQGYPSVFYGDYYGIPTHGVPAMRSKIDPILEARQKYAYGPQHDYLDHPDVIGWTREGDSSHPKSGLATLITDGPGGSKRMYAGLKNAGETWYDITGNRSDTVKIGSDGWGEFHVNGTSVSIYVQK

SEQ ID NO: 41188 - protein, 478 aa, Bacillus sp.
NGTMMQYFEWYLPNDGNHWNRLNSDASNLKSKGITAVWIPPAWKGASQNDVGYGAYDLYDLGEFNQKGTVRTKYGTRSQLQAAVTSLKNNGIQVYGDVVMNHKGGADATEMVRAVEVNPNNRNQEVTGEYTIEAWTRFDFPGRGNTHSSFKWRWYHFDGVDWDQSRRLNNRIYKFRGKAWDWEVDTEFGNYDYLMYADYDMDHPEVVNELRNWGVWYTNTLGLDGFRIDAVKHIKYSFTRDWINHVRSATGKNMFAVAEFWKNDLGAIENYLQKTNWNHSVFDVPLHYNLYNASKSAGNYDMRNIFNGTVVQRHPSHAVTFVDNHDSQPEEALESFVDTWFKPLAYALTLTREQGYPSVFYGDYYGIPTHGVPAMRSKIDPILEARQKYAYGPQHDYLDHPDVIGWTREGDSSHPKSGLATLITDGPGGSKRMYAGLKNAGETWYDITGNRSDTVKIGSDGWGEFHVNQKSVSIYVQK

SEQ ID NO: 41189 - protein, 478 aa, Bacillus sp.
NGTMMQYFEWYLPNDGNHWNRLNSDASNLKSKGITAVWIPPAWKGASQNDVGYGAYDLYDLGEFNQKGTVRTKYGTRSQLQAAVTSLKNNGIQVYGDVVMNHKGGADATEMVRAVEVNPNNRNQEVTGEYTIEAWTRFDFPGRGNTHSSFKWRWYHFDGVDWDQSRRLNNRIYLFRPKAWSWEVPTENGNYDYLMYADIDMDHPEVVNELRNWGVWYTNTLGLDGFRIDAVKHIKYSFTRDWINHVRSATGKNMFAVAEFWKNDLGAIENYLQKTNWNHSVFDVPLHYNLYNASKSGGNYDMRNIFNGTVVQRHPSHAVTFVDNHDSQPEEALESFVEEWFKPLAYALTLTREQGYPSVFYGDYYGIPTHGVPAMRSKIDPILEARQKYAYGPQHDYLDHPDVIGWTREGDSSHPKSGLATLITDGPGGSKRMYAGLKNAGETWYDITGNRSDTVKIGSDGWGEFHVNDGSVSIYVQK

SEQ ID NO: 41190 - protein, 478 aa, Bacillus sp.
NGTMMQYFEWYLPNDGNHWNRLNSDASNLKSKGITAVWIPPAWKAVSQNDVGYGAYDLYDLGEFNQKGTVRTKYGTRSQLQAAVTSLKNNGIQVYGDVVMNHKGGADATEMVRAVEVNPNNRNQEVTGEYTIEAWTRFDFPGRGNTHSSFKWRWYHFDGVDWDQSRRFDNRIYKFRGKAWDWEVDTEFGNYDYLMYADYDMDHPEVVNELRNWGVWYTNTLGLDGFRIDAVKHIKYSFTRDWINHVRSATGKNMFAVAEFWKNDLGAIENYLQKTNWNHSVFDVPLHYNLYNASKSGGNYDMRNIFNGTVVQRHPSHAVTFVDNHDSQPEEALESFVDPWFKPLAYALTLTREQGYPSVFYGDYYGIPTHGVPAMRSKIDPILEARQKYAYGPQHDYLDHPDVIGWTREGDSSHPKSGLATLITDGPGGSKRMYAGLKNAGETWYDITGNRSDTVKIGSDGWGEFHVNGGSVSIYVQK

SEQ ID NO: 41191 - protein, 478 aa, Bacillus sp.
NGTMMQYFEWYLPNDGNHWNRLNSDASNLKSKGITAVWIPPAWKAVSQNDVGYGAYDLYDLGEFNQKGTVRTKYGTRSQLQAAVTSLKNNGIQVYGDVVMNHKGGADLTEMVDAVEVNPNNRNQEVTGEYTIEAWTRFDFPGRGNTHSSFKWRWYHFDGVDWDQSRDFNNRIYKFRGKAWDWEVDTEFGNYDYLMYADYDMDHPEVVNELRNWGVWYTNTLGLDGFRIDAVKHIKYSFTRDWINHVRSATGKNMFAVAEFWKNDLGAIENYLQKTNWNHSVFDVPLHYNLYNASKSGGNYDMRNIFNGTVVQRHPSHAVTFVDNHDSQPEEALESFVEEWFKPLAYALTLTREQGYPSVFYGDYYGIPTHGVPAMRSKIDPILEARQKYAYGPQHDYLDHPDVIGWTREGDSSHPKSGLATLITDGPGGSKRMYAGLKNAGETWYDITGNRSDTVKIGSDGWGEFHVNDGSVSIYVQK

SEQ ID NO: 41192 - protein, 478 aa, Bacillus sp.
NGTMMQYFEWYLPNDGNHWNRLNSDASNLKSKGITAVWIPPAWKGASQNDVGYGAYDLYDLGEFNQKGTVRTKYGTRSQLQAAVTSLKNNGISVYGDVVMNHKGGADATEMVRAVEVNPNNRNQEVTGEYTIEAWTRFDFPGRGNTHSSFKWRWYHFDGVDWDQSRRLNNRIYKFRGKAWDWEVDTEFGNYDYLMYADYDMDHPEVVNELRNWGVWYTNTLGLDGFRIDAVKHIKYSFTRDWINHVRSATGKNMFAVAEFWKNDLGAIENYLQKTNWNHSVFDVPLHYNLYNASKSGGNYDMRNIFNGTVVQAHPSHAVTFVDNHDSQPEEALESFVEEWFKPLAYALTLTREQGYPSVFYGDYYGIPTHGVPAMRSKIDPILEARQKYAYGPQHDYLDHPDVIGWTREGDSSHPKSGLATLITDGPGGSKRMYAGLKNAGETWYDITGNRSDTVKIGSDGWGEFHVNDGSVSIYVQK

SEQ ID NO: 41193 - protein, 478 aa, Bacillus sp.
NETMMQYFEWYLPNDGNHWNRLNSDASNLKSKGITAVWIPPAWKGASQNDVGYGAYDLYDLGEFNQKGTVRTKYGTRSQLQAAVTSLKNNGIQVYGDVVMNHKGGADATEMVRAVEVNPNNRNQEVTGEYTIEAWTRFDFPGRGNTHSSFKWRWYHFDGVDWDQSRRLNNRIYKFRGKAWDWEVDTEFGNYDYLMYADYDMDHPEVVNELRNWGVWYTNTLGLDGFRIDAVKHIKYSFTRDWINHVRSATGKNMFAVAEFWKNDLGAIENYLQKTNWNHSVFDVPLHYNLYNASKSGGNYDMRNIFNGTVVQAHPMHAVTFVDNHDSQPEEALESFVEEWFKPLAYALTLTREQGYPSVFYGDYYGIPTHGVPAMRSKIDPILEARQKYAYGPQHDYLDHPDVIGWTREGDSSHPKSGLATLITDGPGGSKRMYAGLKNAGETWYDITGNRSDTVKIGSDGWGEFHVNDGSVSIYVQK

SEQ ID NO: 41194 - protein, 478 aa, Bacillus sp.
NGTMMQYFEWYLPNDGNHWNRLNSDASNLKSKGITAVWIPPAWKAASQNDVGYGAYDLYDLGEFNQKGTVRTKYGTRSQLQAAVTSLKNNGIQVYGDVVMNHKGGADATEMVRAVEVNPNNRNQEVTGEYTIEAWTRFDFPGRGNTHSSFKWRWYHFDGVDWDQSRDLTNRIYKFRGKAWDWEVDTEFGNYDYLMYADYDMDHPEVVNELRNWGVWYTNTLGLDGFRIDAVKHIKYSFTRDWINHVRSATGKNMFAVAEFWKNDLGAIENYLQKTNWNHSVFDVPLHYNLYNASKSGGNYDMRNIFNGTVVQRHPSHAVTFVDNHDSQPEEALESFVDPWFKPLAYALTLTREQGYPSVFYGDYYGIPTHGVPAMRSKIDPILEARQKYAYGPQHDYLDHPDVIGWTREGDSSHPKSGLATLITDGPGGSKRMYAGLKNAGETWYDITGNRSDTVKIGSDGWGEFHVNGGSVSIYVQK

SEQ ID NO: 41195 - protein, 478 aa, Bacillus sp.
NGTMMQYFEWYLPNDGNHWNRLNSDASNLKSKGITAVWIPPAWKGASQNDVGYGAYDLYDLGEFNQKGTVRTKYGTRSQLQAAVTSLKNNGIQVYGDVVMNHKGGADATEMVRAVEVNPNNRNQEVTGEYTIEAWTRFDFPGRGNTHSSFKWRWYHFDGVDWDQSRRLNNRIYKFRGKAWDWEVDTEFGNYDYLMYADYDMDHPEVVNELRNWGVWYTNTLGLDGFRIDAVKHIKYSFTRDWINHVRSATGKNMFAVAEFWKNDLGAIENYLQKTNWNHSVFDVPLHYNLYNASKSAGNYDMRNIFNGTVVQRHPSHAVTFVDNHDSQPEEALESFVEKWFKPLAYALTLTREQGYPSVFYGDYYGIPTHGVPAMRSKIDPILEARQKYAYGPQHDYLDHPDVIGWTREGDSSHPKSGLATLITDGPGGSKRMYAGLKNAGETWYDITGNRSDTVKIGSDGWGEFHVNDKSVSIYVQK

SEQ ID NO: 41196 - protein, 478 aa, Bacillus sp.
NGTMMQYFEWYLPNDGNHWNRLNSDASNLKSKGITAVWIPPAWKGASQNDVGYGAYDLYDLGEFNQKGTVRTKYGTRSQLQAAVTSLKNNGIQVYGDVVMNHKGGADATEMVRAVEVNPNNRNQEVTGEYTIEAWTRFDFPGRGNTHSSFKWRWYHFDGVDFDQSRRLNNRIYKFRGKAWDWEVDTEFGNYDYLMYADYDMDHPEVVNELRNWGVWYTNTLGLDGFRIDAVKHIKYSFTRDWINHVRSATGKNMFAVAEFWKNDLGAIENYLQKTNWNHSVFDVPLHYNLYNASKSGGNYDMRNIFNGTVVQRHPSHAVTFVDNHDSQPEEALESFVETWFKPLAYALTLTREQGYPSVFYGDYYGIPTHGVPAMRSKIDPILEARQKYAYGPQHDYLDHPDVIGWTREGDSSHPKSGLATLITDGPGGSKRMYAGLKNAGETWYDITGNRSDTVKIGSDGWGEFHVNKASVSIYVQK

SEQ ID NO: 41197 - protein, 478 aa, Bacillus sp.
NGTMMQYFEWYLPNDGNHWNRLNSDASNLKSKGITAVWIPPAWKGASQNDVGYGAYDLYDLGEFNQKGTVRTKYGTRSQLQAAVTSLKNNGIQVYGDVVMNHKGGADATEMVRAVEVNPNNRNQEVTGEYTIEAWTRFDFPGRGNTHSSFKWRWYHFDGVDWDQSRRLNNRIYKFRGKAWDWEVDTEFGNYDYLMYADYDMDHPEVVNELRNWGVWYTNTLGLDGFRIDAVKHIKYSFTRDWINHVRSATGKNMFAVAEFWKNDLGAIENYLQKTNWNHSVFDVPLHYNLYNASNSGGNYDMRNIFNGTVVQRHPSHAVTFVDNHDSQPEEALESFVEPWFKPLAYALTLTREQGYPSVFYGDYYGIPTHGVPAMRSKIDPILEARQKYAYGPQHDYLDHPDVIGWTREGDSSHPKSGLATLITDGPGGSKRMYAGLKNAGETWYDITGNRSDTVKIGSDGWGEFHVNQKSVSIYVQK

SEQ ID NO: 41198 - protein, 478 aa, Bacillus sp.
NLTMMQYFEWYLPNDGNHWNRLNSDASNLKSKGITAVWIPPAWKGASQNDVGYGAYDLYDLGEFNQKGTVRTKYGTRSQLQAAVTSLKNNGIQVYGDVVMNHKGGADATEMVRAVEVNPNNRNQEVTGEYTIEAWTRFDFPGRGNTHSSFKWRWYHFDGVDWDQSRRLNNRIYKFRGKAWDWEVDTEFGNYDYLMYADYDMDHPEVVNELRNWGVWYTNTLGLDGFRIDAVKHIKYSFTRDWINHVRSATGKNMFAVAEFWKNDLGAIENYLQKTNWNHSVFDVPLHYNLYNASKSGGNYDMRNIFNGTVVQAHPMHAVTFVDNHDSQPEEALESFVEEWFKPLAYALTLTREQGYPSVFYGDYYGIPTHGVPAMRSKIDPILEARQKYAYGPQHDYLDHPDVIGWTREGDSSHPKSGLATLITDGPGGSKRMYAGLKNAGETWYDITGNRSDTVKIGSDGWGEFHVNDGSVSIYVQK

SEQ ID NO: 41199 - protein, 478 aa, Bacillus sp.
NGTMMQYFEWYLPNDGNHWNRLNSDASNLKSKGITAVWIPPAWKAASQNDVGYGAYDLYDLGEFNQKGTVRTKYGTRSQLQAAVTSLKNNGIQVYGDVVMNHKGGADATEMVRAVEVNPNNRNQEVTGEYTIEAWTRFDFPGRGNTHSSFKWRWYHFDGVDWDQSRNLTNRIYKFRGKAWDWEVDTEFGNYDYLMYADYDMDHPEVVNELRNWGVWYTNTLGLDGFRIDAVKHIKYSFTRDWINHVRIATGKNMFAVAEFWKNDLGAIENYLQKTNWNHSVFDVPLHYNLYNASKSGGNYDMRNIFNGTVVQRHPSHAVTFVDNHDSQPEEALESFVDEWFKPLAYALTLTREQGYPSVFYGDYYGIPTHGVPAMRSKIDPILEARQKYAYGPQHDYLDHPDVIGWTREGDSSHPKSGLATLITDGPGGSKRMYAGLKNAGETWYDITGNRSDTVKIGSDGWGEFHVNDQSVSIYVQK

SEQ ID NO: 41200 - protein, 478 aa, Bacillus sp.
NETMMQYFEWYLPNDGNHWNRLNSDASNLKSKGITAVWIPPAWKGASQNDVGYGAYDLYDLGEFNQKGTVRTKYGTRSQLQAAVTSLKNNGIQVYGDVVMNHKGGADATEMVRAVEVNPNNRNQEVTGEYTIEAWTRFDFPGRGNTHSSFKWRWYHFDGVDWDQSRRLNNRIYKFRGKAWDWEVDTEFGNYDYLMYADYDMDHPEVVNELRNWGVWYTNTLGLDGFRIDAVKHIKYSFTRDWINHVRSATGKNMFAVAEFWKNDLGAIENYLQKTNWNHSVFDVPLHYNLYNASKSGGNYDMRNIFNGTVVQMHPMHAVTFVDNHDSQPEEALESFVEEWFKPLAYALTLTREQGYPSVFYGDYYGIPTHGVPAMRSKIDPILEARQKYAYGPQHDYLDHPDVIGWTREGDSSHPKSGLATLITDGPGGSKRMYAGLKNAGETWYDITGNRSDTVKIGSDGWGEFHVNDGSVSIYVQK

SEQ ID NO: 41201 - protein, 478 aa, Bacillus sp.
NGTMMQYFEWYLPNDGNHWNRLNSDASNLKSKGITAVWIPPAWKAASQNDVGYGAYDLYDLGEFNQKGTVRTKYGTRSQLQAAVTSLKNNGIQVYGDVVMNHKGGADLTEMVRAVEVNPNNRNQEVTGEYTIEAWTRFDFPGRGNTHSSFKWRWYHFDGVDWDQSRDLQNRIYKFRGKAWDWEVDTEFGNYDYLMYADYDMDHPEVVNELRNWGVWYTNTLGLDGFRIDAVKHIKYSFTRDWINHVRSATGKNMFAVAEFWKNDLGAIENYLQKTNWNHSVFDVPLHYNLYNASKSGGNYDMRNIFNGTVVQRHPSHAVTFVDNHDSQPEEALESFVEEWFKPLAYALTLTREQGYPSVFYGDYYGIPTHGVPAMRSKIDPILEARQKYAYGPQHDYLDHPDVIGWTREGDSSHPKSGLATLITDGPGGSKRMYAGLKNAGETWYDITGNRSDTVKIGSDGWGEFHVNDGSVSIYVQK

SEQ ID NO: 41202 - protein, 478 aa, Bacillus sp.
NGTMMQYFEWYLPNDGNHWNRLNSDASNLKSKGITAVWIPPAWKGASQNDVGYGAYDLYDLGEFNQKGTVRTKYGTRSQLQAAVTSLKNNGIQVYGDVVMNHKGGADATEMVRAVEVNPNNRNQEVTGEYTIEAWTRFDFPGRGNTHSSFKWRWYHFDGVDWDQSRRLNNRIYKFRGKAWDWEVDTEFGNYDYLMYADYDMDHPEVVNELRNWGVWYTNTLGLDGFRIDAVKHIKYSFTRDWINHVRSATGKNMFAVAEFWKNDLGAIENYLQKTNWNHSVFDVPLHYNLYNASKSGGNYDMRNIFNGTVVQRHPSHAVTFVDNHDSQPEEALESFVEEWFKPLAYALTLTREQGYPSVFYGDYYGIPTHGVPAMRSKIDPILEARQKYAYGPQHDYLDHPDVIGWTREGDSSHPKSGLATLITDGPGGSKRMYAGLKNAGETWYDITGNRSDTVKIGSDGWGEFHVNKQSVSIYVQK

SEQ ID NO: 41203 - protein, 478 aa, Bacillus sp.
NGTMMQYFEWYLPNDGNHWNRLNSDASNLKSKGITAVWIPPAWKATSQNDVGYGAYDLYDLGEFNQKGTVRTKYGTRSQLQAAVTSLKNNGIQVYGDVVMNHKGGADLTEMVRAVEVNPNNRNQEVTGEYTIEAWTRFDFPGRGNTHSSFKWRWYHFDGVDWDQSRELSNRIYKFRGKAWDWEVDTEFGNYDYLMYADYDMDHPEVVNELRNWGVWYTNTLGLDGFRIDAVKHIKYSFTRDWINHVRSATGKNMFAVAEFWKNDLGAIENYLQKTNWNHSVFDVPLHYNLYNASKSQGNYDMRNIFNGTVVQRHPSHAVTFVDNHDSQPEEALESFVDTWFKPLAYALTLTREQGYPSVFYGDYYGIPTHGVPAMRSKIDPILEARQKYAYGPQHDYLDHPDVIGWTREGDSSHPKSGLATLITDGPGGSKRMYAGLKNAGETWYDITGNRSDTVKIGSDGWGEFHTNDGSVSIYVQK

SEQ ID NO: 41204 - protein, 478 aa, Bacillus sp.
NGTMMQYFEWYLPNDGNHWNRLNSDASNLKSKGITAVWIPPAWKGASQNDVGYGAYDLYDLGEFNQRGTVRTKYGTRSQLQAAVTSLKNNGIQVYGDVVMNHKGGADATEMVRAVEVNPNNRNQEVTGEYTIEAWTRFDFPGRGNTHSSFKWRWYHFDGVDFDQSRRLNNRIYKFRGKAWDWEVDTEFGNYDYLMYADYDMDHPEVVNELRNWGVWYTNTLGLDGFRIDAVKHIKYSFTRDWINHVRSATGKNMFAVAEFWKNDLGAIENYLQKTNWNHSVFDVPLHYNLYNASKSGGNYDMRNIFNGTVVQRHPSHAVTFVDNHDSQPEEALESFVETWFKPLAYALTLTREQGYPSVFYGDYYGIPTHGVPAMRSKIDPILEARQKYAYGPQHDYLDHPDVIGWTREGDSSHPKSGLATLITDGPGGSKRMYAGLKNAGETWYDITGNRSDTVKIGSDGWGEFHVNKGSVSIYVQK

SEQ ID NO: 41205 - protein, 478 aa, Synthetic construct
NGTMMQYFEWYLPNDGNHWNRLNSDASNLKSKGITAVWIPPAWKGASQNDVGYGAYDLYDLGEFNQKGTVRTKYGTRSQLQAAVTSLKNNGIQVYGDVVMNHKGGADATEMVRAVEVNPNNRNQEVTGEYTIEAWTRFDFPGRGNTHSSFKWRWYHFDGVDWDQSRRLNNRIYKFRGKAWDWEVDTEFGNYDYLMYADIDMDHPEGTNELRNWGVWYTNTLGLDGFRIDAVKHIKYSFTRDWINHVRSATGKNMFAVAEFWKNDLGAIENYLQKTNWNHSVFDVPLHYNLYNASKSGGNYDMRNIFNGTVVQRHPSHAVTFVDNHDSQPEEALESFVEEWFKPLAYALTLTREQGYPSVFYGDYYGIPTHGVPAMRSKIDPILEARQKYAYGPQHDYLDHPDVIGWTREGDSSHPKSGLATLITDGPGGSKRMYAGLKNAGETWYDITGNRSDTVKIGSDGWGEFHVNDGSVSIYVQK

SEQ ID NO: 41206 - protein, 478 aa, Bacillus sp.
NGTMMQYFEWYLPNDGNHWNRLNSDASNLKSKGITAVWIPPAWKGASQNDVGYGAYDLYDLGEFNQKGTVRTKYGTRSQLQAAVTSLKNNGIQVYGDVVMNHKGGADATEMVRAVEVNPNNRNQEVTGEYTIEAWTRFDFPGRGNTHSSFKWRWYHFDGVDWDQSRRLNNRIYKFRGKAWDWEVDTEFGNYDYLMYADYDMDHPEVVNELRNWGVWYTNTLGLDGFRIDAVKHIKYSFTRDWINHVRSATGKNMFAVAEFWKNDLGAIENYLQKTNWNHSVFDVPLHYNLYNASKSGGNYDMRNIFNGTVVQRHPSHAVTFVDNHDSQPEEALESFVEEWFKPLAYALTLTREQGYPSVFYGDYYGIPTHGVPAMRSKIDPILEARQKYAYGPQHDYLDHPDVIGWTREGDSSHPKSGLATLITDGPGGSKRMYAGLKNAGETWYDITGNRSDTVKIGFDGWGEFHVNKGSVSIYVQK

SEQ ID NO: 41207 - protein, 478 aa, Bacillus sp.
NGTMMQYFEWYLPNDGNHWNRLNSDASNLKSKGITAVWIPPAWKGASQNDVGYGAYDLYDLGEFNQKGTVRTKYGTRSQLQAAVTSLKNNGIQVYGDVVMNHKGGADATEMVRAVEVNPNNRNQEVTGEYTIEAWTRFDFPGRGNTHSSFKWRWYHFDGVDWDQSREFNNRIYKFRGKAWDWEVDTEFGNYDYLMYADYDMDHPEVVNELRNWGVWYTNTLGLDGFRIDAVKHIKYSFTRDWINHVRSATGKNMFAVAEFWKNDLGAIENYLQKTNWNHSVFDVPLHYNLYNASKSGGNYDMRNIFNGTVVQVHPSHAVTFVDNHDSQPEEALESFVEEWFKPLAYALTLTREQGYPSVFYGDYYGIPTHGVPAMRSKIDPILEARQKYAYGPQHDYLDHPDVIGWTREGDSSHPKSGLATLITDGPGGSKRMYAGLKNAGETWYDITGNRSDTVKIGSDGWGEFHVNYGSVSIYVQK

SEQ ID NO: 41208 - protein, 478 aa, Bacillus sp.
NGTMMQYFEWYLPNDGNHWNRLNSDASNLKSKGITAVWIPPAWKGASQNDVGYGAYDLYDLGEFNQKGTVRTKYGTRSQLQAAVTSLKNNGIQVYGDVVMNHKGGADATEMVRAVEVNPNNRNQEVTGEYTIEAWTRFDFPGRGNTHSSFKWRWYHFDGVDWDQSRRLNNRIYKFRGKAWDWEVDTEFGNYDYLMYADYDMDHPEVVNELRNWGVWYTNTLGLDGFRIDAVKHIKYSFTRDWINHVRSATGKNMFAVAEFWKNDLGAIENYLQKTNWNHSVFDVPLHYNLYNASQSGGNYDMRNIFNGTVVQRHPSHAVTFVDNHDSQPEEALESFVEPWFKPLAYALTLTREQGYPSVFYGDYYGIPTHGVPAMRSKIDPILEARQKYAYGPQHDYLDHPDVIGWTREGDSSHPKSGLATLITDGPGGSKRMYAGLKNAGETWYDITGNRSDTVKIGSDGWGEFHVNKQSVSIYVQK

SEQ ID NO: 41209 - protein, 478 aa, Bacillus sp.
NGTMMQYFEWYLPNDGNHWNRLNSDASNLKSKGITAVWIPPAWKGASQNDVGYGAYDLYDLGEFNQKGTVRTKYGTRSQLQAAVTSLKNNGIQVYGDVVMNHKGGADATEMVRAVEVNPNNRNQEVTGEYTIEAWTRFDFPGRGNTHSSFKWRWYHFDGVDWDQSRRLNNRIYKFRGKAWDWEVDTEFGNYDYLMYADYDMDHPEVVNELRNWGVWYTNTLGLDGFRIDAVKHIKYSFTRDWINHVRSATGKNMFAVAEFWKNDLGAIENYLQKTNWNHSVFDVPLHYNLYNASKSGSNYDMRNIFNGTVVQRHPSHAVTFVDNHDSQPEEALESFVETWFKPLAYALTLTREQGYPSVFYGDYYGIPTHGVPAMRSKIDPILEARQKYAYGPQHDYLDHPDVIGWTREGDSSHPKSGLATLITDGPGGSKRMYAGLKNAGETWYDITGNRSDTVKIGSDGWGEFHVNQQSVSIYVQK

SEQ ID NO: 41210 - protein, 478 aa, Bacillus sp.
NGTMMQYFEWYLPNDGNHWNRLNSDASNLKSKGITAVWIPPAWKGASQNDVGYGAYDLYDLGEFNQKGTVRTKYGTRSQLQAAVTSLKNNGIQVYGDVVMNHKGGADATEMVRAVEVNPNNRNQEVTGEYTIEAWTRFDFPGRGNTHSSFKWRWYHFDGVDWDQSRRLNNRIYKFRGKAWDWEVDTEFGNYDYLMYADYDMDHPEVVNELRNWGVWYTNTLGLDGFRIDAVKHIKYSFTRDWINHVRSATGKNMFAVAEFWKNDLGAIENYLQKTNWNHSVFDVPLHYNLYNASKSGGNYDMRNIFNGTVVQRHPSHAVTFVDNHDSQPEEALESFVDEWFKPLAYALTLTREQGYPSVFYGDYYGIPTHGVPAMRSKIDPILEARQKYAYGPQHDYLDHPDVIGWTREGDSSHPKSGLATLITDGPGGSKRMYAGLKNAGETWYDITGNRSDTVKIGSDGWGEFHVNQKSVSIYVQK

SEQ ID NO: 41211 - protein, 478 aa, Bacillus sp.
NGTMMQYFEWYLPNDGNHWNRLNSDASNLKSKGITAVWIPPAWKGASQNDVGYGAYDLYDLGEFNQKGTVRTKYGTRSQLQAAVTSLKNNGIQVYGDVVMNHKGGADATEMVRAVEVNPNNRNQEVTGEYTIEAWTRFDFPGRGNTHSSFKWRWYHFDGVDWDQSRRLNNRIYKFRGKAWDWEVDTEFGNYDYLMYADYDMDHPEVVNELRNWGVWYTNTLGLDGFRIDAVKHIKYSFTRDWINHVRSATGKNMFAVAEFWKNDLGAIENYLQKTNWNHSVFDVPLHYNLYNASKSGGNYDMRNIFNGTVVQRHPSHAVTFVDNHDSQPEEALESFVEPWFKPLAYALTLTREQGYPSVFYGDYYGIPTHGVPAMRSKIDPILEARQKYAYGPQHDYLDHPDVIGWTREGDSSHPKSGLATLITDGPGGSKRMYAGLKNAGETWYDITGNRSDTVKIGSDGWGEFHVNKSSVSIYVQK

SEQ ID NO: 41212 - protein, 478 aa, Bacillus sp.
NGTMMQYFEWYLPNDGNHWNRLNSDASNLKSKGITAVWIPPAWKAASQNDVGYGAYDLYDLGEFNQKGTVRTKYGTRSQLQAAVTSLKNNGIQVYGDVVMNHKGGADATEMVRAVEVNPNNRNQEVTGEYTIEAWTRFDFPGRGNTHSSFKWRWYHFDGVDWDQSRRLENRIYKFRGKAWDWEVDTEFGNYDYLMYTDYDMDHPEVVNELRNWGVWYTNTLGLDGFRIDAVKHIKYSFTRDWINHVRSATGKNMFAVAEFWKNDLGAIENYLQKTNWNHSVFDVPLHYNLYNASKSGGNYDMRNIFNGTVVQRHPSHAVTFVDNHDSQPEEALESFVEEWFKPLAYALTLTREQGYPSVFYGDYYGIPTHGVPAMRSKIDPILEARQKYAYGPQHDYLDHPDVIGWTREGDSSHPKSGLATLITDGPGGSKRMYAGLKNAGETWYDITGNRSDTVKIGSDGWGEFHVNDGSVSIYVQK

SEQ ID NO: 41213 - protein, 478 aa, Bacillus sp.
NGTMMQYFEWYLPNDGNHWNRLNSDASNLKSKGITAVWIPPAWKATSQNDVGYGAYDLYDLGEFNQKGTVRTKYGTRSQLQAAVTSLKNNGIQVYGDVVMNHKGGADATEMVRAVEVNPNNRNQEVTGEYTIEAWTRFDFPGRGNTHSSFKWRWYHFDGVDWDQSRELSNRIYKFRGKAWDWEVDTEFGNYDYLMYADIDYDHPETTNEMRNWGVWYTNTLGLDGFRIDAVKHIKYSFTRDWINHVRSATGKNMFAVAEFWKNDLGAIENYLQKTNWNHSVFDVPLHYNLYNASKSQGNYDMRNIFNGTVVQRHPSHAVTFVDNHDSQPEEALESFVDTWFKPLAYALTLTREQGYPSVFYGDYYGIPTHGVPAMRSKIDPILEARQKYAYGPQHDYLDHPDVIGWTREGDSSHPKSGLATLITDGPGGSKRMYAGLKNAGETWYDITGNRSDTVKIGSDGWGEFHVNGGSVSIYVQK

SEQ ID NO: 41214 - protein, 478 aa, Bacillus sp.
NGTMMQYFEWYLPNDGNHWNRLNSDASNLKSKGITAVWIPPAWKGASQNDVGYGAYDLYDLGEFNQKGTVRTKYGTRSQLQAAVTSLKNNGIQVYGDVVMNHKGGADATEMVRAVEVNPNNRNQEVTGEYTIEAWTRFDFPGRGNTHSSFKWRWYHFDGVDWDQSRRLNNRIYKFRGKAWDWEVDTEFGNYDYLMYADYDMDHPEVVNELRNWGVWYTNTLGLDGFRIDAVKHIKYSFTRDWINHVRSATGKNMFAVAEFWKNDLGAIENYLQKTNWNHSVFDVPLHYNLYNASKSGGNYDMRNIFNGTVVQAWPMQAVTFVDNHDSQPEEALESFVEEWFKPLAYALTLTREQGYPSVFYGDYYGIPTHGVPAMRSKIDPILEARQKYAYGPQHDYLDHPDVIGWTREGDSSHPKSGLATLITDGPGGSKRMYAGLKNAGETWYDITGNRSDTVKIGSDGWGEFHVNDGSVSIYVQK

SEQ ID NO: 41215 - protein, 478 aa, Bacillus sp.
NATMMQYFEWYLPNDGNHWNRLNSDASNLKSKGITAVWIPPAWKGASQNDVGYGAYDLYDLGEFNQKGTVRTKYGTRSQLQAAVTSLKNNGIQVYGDVVMNHKGGADATEMVRAVEVNPNNRNQEVTGEYTIEAWTRFDFPGRGNTHSSFKWRWYHFDGVDWDQSRRLNNRIYKFRGKAWDWEVDTEFGNYDYLMYADYDMDHPEVVNELRNWGVWYTNTLGLDGFRIDAVKHIKYSFTRDWINHVRSATGKNMFAVAEFWKNDLGAIENYLQKTNWNHSVFDVPLHYNLYNASKSGGNYDMRNIFNGTVVQMHPSHAVTFVDNHDSQPEEALESFVEEWFKPLAYALTLTREQGYPSVFYGDYYGIPTHGVPAMRSKIDPILEARQKYAYGPQHDYLDHPDVIGWTREGDSSHPKSGLATLITDGPGGSKRMYAGLKNAGETWYDITGNRSDTVKIGSDGWGEFHVNDGSVSIYVQK

SEQ ID NO: 41216 - protein, 478 aa, Bacillus sp.
NGTMMQYFEWYLPNDGNHWNRLNSDASNLKSKGITAVWIPPAWKAASQNDVGYGAYDLYDLGEFNQKGTVRTKYGTRSQLQAAVTSLKNNGIQVYGDVVMNHKGGADATEMVDAVEVNPNNRNQEVTGEYTIEAWTRFDFPGRGNTHSSFKWRWYHFDGVDFDQSRQITNRIYKFRGKAWDWEVDTEFGNYDYLMYTDYDMDHPEVVNELRNWGVWYTNTLGLDGFRIDAVKHIKYSFTRDWINHVRSATGKNMFAVAEFWKNDLGAIENYLQKTNWNHSVFDVPLHYNLYNASKSGGNYDMRNIFNGTVVQRHPSHAVTFVDNHDSQPEEALESFVEEWFKPLAYALTLTREQGYPSVFYGDYYGIPTHGVPAMRSKIDPILEARQKYAYGPQHDYLDHPDVIGWTREGDSSHPKSGLATLITDGPGGSKRMYAGLKNAGETWYDITGNRSDTVKIGSDGWGEFHVNDGSVSIYVQK

SEQ ID NO: 41217 - protein, 478 aa, Bacillus sp.
NGTMMQYFEWYLPNDGNHWNRLNSDASNLKSKGITAVWIPPAWKGASQNDVGYGAYDLYDLGEFNQKGTVRTKYGTRSQLQAAVTSLKNNGIQVYGDVVMNHKGGADATEMVRAVEVNPNNRNQEVTGEYTIEAWTRFDFPGRGNTHSSFKWRWYHFDGVDWDQSRRLNNRIYKFRGKAWDWEVDTEFGNYDYLMYADYDMDHPEVVNELRNWGVWYTNTLGLDGFRIDAVKHIKYSFTRDWINHVRSATGKNMFAVAEFWKNDLGAIENYLQKTNWNHSVFDVPLHYNLYNASQSGGNYDMRNIFNGTVVQRHPSHAVTFVDNHDSQPEEALESFVEEWFKPLAYALTLTREQGYPSVFYGDYYGIPTHGVPAMRSKIDPILEARQKYAYGPQHDYLDHPDVIGWTREGDSSHPKSGLATLITDGPGGSKRMYAGLKNAGETWYDITGNRSDTVKIGSDGWGEFHVNGASVSIYVQK

SEQ ID NO: 41218 - protein, 478 aa, Bacillus sp.
NGTMMQYFEWYLPNDGNHWNRLNSDASNLKSKGITAVWIPPAWKGASQNDVGYGAYDLYDLGEFNQKGTVRTKYGTRSQLQAAVTSLKNNGIQVYGDVVMNHKGGADATEMVRAVEVNPNNRNQEVTGEYTIEAWTRFDFPGRGNTHSSFKWRWYHFDGVDWDQSRRLNNRIYKFRGKAWDWEVDTEFGNYDYLMYADYDMDHPEVVNELRNWGVWYTNTLGLDGFRIDAVKHIKYSFTRDWINHVRSATGKNMFAVAEFWKNDLGAIENYLQKTNWNHSVFDVPLHYNLYNASKSGGNYDMRNIFNGTVVQRHPSHAVTFVDNHDSQPEEALESFVDPWFKPLAYALTLTREQGYPSVFYGDYYGIPTHGVPAMRSKIDPILEARQKYAYGPQHDYLDHPDVIGWTREGDSSHPKSGLATLITDGPGGSKRMYAGLKNAGETWYDITGNRSDTVKIGSDGWGEFHVNQKSVSIYVQK

SEQ ID NO: 41219 - protein, 478 aa, Bacillus sp.
NGTMMQYFEWYLPNDGNHWNRLNSDASNLKSKGITAVWIPPAWKGASQNDVGYGAYDLYDLGEFNQKGTVRTKYGTRSQLQAAVTSLKNNGIQVYGDVVMNHKGGADATEMVRAVEVNPNNRNQEVTGEYTIEAWTRFDFPGRGNTHSSFKWRWYHFDGVDWDQSRNFQNRIYKFRGKAWDWEVDTEFGNYDYLMYADYDMDHPEVVNELRNWGVWYTNTLGLDGFRIDAVKHIKYSFTRDWINHVRSATGKNMFAVAEFWKNDLGAIENYLQKTNWNHSVFDVPLHYNLYNASKSQGNYDMRNIFNGTVVQRHPSHAVTFVDNHDSQPEEALESFVDTWFKPLAYALTLTREQGYPSVFYGDYYGIPTHGVPAMRSKIDPILEARQKYAYGPQHDYLDHPDVIGWTREGDSSHPKSGLATLITDGPGGSKRMYAGLKNAGETWYDITGNRSDTVKIGSDGWGEFHVNGSSVSIYVQK

SEQ ID NO: 41220 - protein, 478 aa, Bacillus sp.
NGTMMQYFEWYLPNDGNHWNRLNSDASNLKSKGITAVWIPPAWKATSQNDVGYGAYDLYDLGEFNQKGTVRTKYGTRSQLQAAVTSLKNNGIQVYGDVVMNHKGGADATEMVRAVEVNPNNRNQEVTGEYTIEAWTRFDFPGRGNTHSSFKWRWYHFDGVDWDQSRDFTNRIYKFRGKAWDWEVDTEFGNYDYLMYADYDMDHPEVVNELRNWGVWYTNTLGLDGFRIDAVKHIKYSFTRDWINHVRSATGKNMFAVAEFWKNDLGAIENYLQKTNWNHSVFDVPLHYNLYNASKSGGNYDMRNIFNGTVVQRHPSHAVTFVDNHDSQPEEALESFVEEWFKPLAYALTLTREQGYPSVFYGDYYGIPTHGVPAMRSKIDPILEARQKYAYGPQHDYLDHPDVIGWTREGDSSHPPSGLATLITDGPGGSKRMYAGLKNAGETWYDITGNRSDTVKIGSDGWGEFHVNDGSVSIYVQK

SEQ ID NO: 41221 - protein, 478 aa, Bacillus sp.
NKTMMQYFEWYLPNDGNHWNRLNSDASNLKSKGITAVWIPPAWKGASQNDVGYGAYDLYDLGEFNQKGTVRTKYGTRSQLQAAVTSLKNNGIQVYGDVVMNHKGGADATEMVRAVEVNPNNRNQEVTGEYTIEAWTRFDFPGRGNTHSSFKWRWYHFDGVDWDQSRRLNNRIYKFRGKAWDWEVDTEFGNYDYLMYADYDMDHPEVVNELRNWGVWYTNTLGLDGFRIDAVKHIKYSFTRDWINHVRSATGKNMFAVAEFWKNDLGAIENYLQKTNWNHSVFDVPLHYNLYNASKSGGNYDMRNIFNGTVVQAHPSLAVTFVDNHDSQPEEALESFVEEWFKPLAYALTLTREQGYPSVFYGDYYGIPTHGVPAMRSKIDPILEARQKYAYGPQHDYLDHPDVIGWTREGDSSHPKSGLATLITDGPGGSKRMYAGLKNAGETWYDITGNRSDTVKIGSDGWGEFHVNDGSVSIYVQK

SEQ ID NO: 41222 - protein, 478 aa, Bacillus sp.
NGTMMQYFEWYLPNDGNHWNRLNSDASNLKSKGITAVWIPPAWKGISQNDVGYGAYDLYDLGEFNQKGTVRTKYGTRSQLQAAVTSLKNNGIQVYGDVVMNHKGGADATEMVRAVEVNPNNRNQEVTGEYTIEAWTRFDFPGRGNTHSSFKWRWYHFDGVDWDQSRRTNNRIYKFRGKAWDWEVDTEFGNYDYLMYTDYDMDHPEVVNELRNWGVWYTNTLGLDGFRIDAVKHIKYSFTRDWINHVRSATGKNMFAVAEFWKNDLGAIENYLQKTNWNHSVFDVPLHYNIYNASKSGGNYDMRNIFNGTVVQRHPSHAVTFVDNHDSQPEEALESFVEEWFKPLAYALTLTREQGYPSVFYGDYYGIPTHGVPAMRSKIDPILEARQKYAYGPQHDYLDHPDVIGWTREGDSSHPKSGLATLITDGPGGSKRMYAGLKNAGETWYDITGNRSDTVKIGSDGWGEFHVNDGSVSIYVQK

SEQ ID NO: 41223 - protein, 478 aa, Bacillus sp.
NGTMMQYFEWYLPNDGNHWNRLNSDASNLKSKGITAVWIPPAWKAASQNDVGYGAYDLYDLGEFNQKGTVRTKYGTRSQLQAAVTSLKNNGIQVYGDVVMNHKGGSDATEMVRAVEVNPNNRNQEVTGEYTIEAWTRFDFPGRGNTHSSFKWRWYHFDGVDWDQSRRFTNRIYKFRGKAWDWEVDTEFGNYDYLMYADYDMDHPEVVNELRNWGVWYTNTLGLDGFRIDAVKHIKYSFTRDWINHVRSATGKNMFAVAEFWKNDLGAIENYLQKTNWNHSVFDVPLHYNLYNASKSGGNYDMRNIFNGTVVQRHPSHAVTFVDNHDSQPEEALESFVEEWFKPLAYALTLTREQGYPSVFYGDYYGIPTHGVPAMRSKIDPILEARQKYAYGPQHDYLDHPDVIGWTREGDSSHPKSGLATLITDGPGGSKRMYAGLKNAGETWYDITGNRSDTVKIGSDGWGEFHVNDGSVSIYVQK

SEQ ID NO: 41224 - protein, 478 aa, Bacillus sp.
NGTMMQYFEWYLPNDGNHWNRLNSDASNLKSKGITAVWIPPAWKAVSQNDVGYGAYDLYDLGEFNQKGTVRTKYGTRSQLQAAVTSLKNNGIQVYGDVVMNHKGGADATEMVRAVEVNPNNRNQEVTGEYTIEAWTRFDFPGRGNTHSSFKWRWYHFDGVDWDQSRRFDNRIYKFRGKAWDWEVDTEFGNYDYLMYADYDMDHPEVVNELRNWGVWYTNTLGLDGFRIDAVKHIKYSFTRDWINHVRIATGKNMFAVAEFWKNDLGAIENYLQKTNWNHSVFDVPLHYNLYNASKSGGNYDMRNIFNGTVVQRHPSHAVTFVDNHDSQPEEALESFVDEWFKPLAYALTLTREQGYPSVFYGDYYGIPTHGVPAMRSKIDPILEARQKYAYGPQHDYLDHPDVIGWTREGDSSHPKSGLATLITDGPGGSKRMYAGLKNAGETWYDITGNRSDTVKIGSDGWGEFHVNDQSVSIYVQK

SEQ ID NO: 41225 - protein, 478 aa, Bacillus sp.
NGTMMQYFEWYLPNDGNHWNRLNSDASNLKSKGITAVWIPPAWKAASQNDVGYGAYDLYDLGEFNQKGTVRTKYGTRSQLQAAVTSLKNNGIQVYGDVVMNHKGGADLTEMVDAVEVNPNNRNQEVTGEYTIEAWTRFDFPGRGNTHSSFKWRWYHFDGVDWDQSRQLNNRIYKFRGKAWDWEVDTEFGNYDYLMYADYDMDHPEVVNELRNWGVWYTNTLGLDGFRIDAVKHIKYSFTRDWINHVRSATGKNMFAVAEFWKNDLGAIENYLQKTNWNHSVFDVPLHYNLYNASKSGGNYDMRNIFNGTVVQRHPSHAVTFVDNHDSQPEEALESFVEEWFKPLAYALTLTREQGYPSVFYGDYYGIPTHGVPAMRSKIDPILEARQKYAYGPQHDYLDHPDVIGWTREGDSSHPKSGLATLITDGPGGSKRMYAGLKNAGETWYDITGNRSDTVKIGSDGWGEFHVNDGSVSIYVQK

SEQ ID NO: 41226 - protein, 478 aa, Bacillus sp.
NGTMMQYFEWYLPNDGNHWNRLNSDASNLKSKGITAVWIPPAWKAASQNDVGYGAYDLYDLGEFNQKGTVRTKYGTRSQLQAAVTSLKNNGIQVYGDVVMNHKGGADATEMVRAVEVNPNNRNQEVTGEYTIEAWTRFDFPGRGNTHSSFKWRWYHFDGVDWDQSRQLNNRIYKFRGKAWDWEVDTEFGNYDYLMYTDYDMDHPEVVNELRNWGVWYTNTLGLDGFRIDAVKHIKYSFTRDWINHVRSATGKNMFAVAEFWKNDLGAIENYLQKTNWNHSVFDVPLHYNLYNASKSGGNYDMRNIFNGTVVQRHPSHAVTFVDNHDSQPEEALESFVEEWFKPLAYALTLTREQGYPSVFYGDYYGIPTHGVPAMRSKIDPILEARQKYAYGPQHDYLDHPDVIGWTREGDSSHPKSGLATLITDGPGGSKRMYAGLKNAGETWYDITGNRSDTVKIGSDGWGEFHVNDGSVSIYVQK

SEQ ID NO: 41227 - protein, 478 aa, Bacillus sp.
NGTMMQYFEWYLPNDGNHWNRLNSDASNLKSKGITAVWIPPAWKGASQNDVGYGAYDLYDLGEFNQKGTVRTKYGTRSQLQAAVTSLKNNGIQVYGDVVMNHKGGADATEMVRAVEVNPNNRNQEVTGEYTIEAWTRFDFPGRGNTHSSFKWRWYHFDGVDWDQSRNFQNRIYKFRGKAWDWEVDTEFGNYDYLMYADYDMDHPESTNEMRNWGVWYTNTLGLDGFRIDAVKHIKYSFTRDWINHVRSATGKNMFAVAEFWKNDLGAIENYLQKTNWNHSVFDVPLHYNLYNASKSQGNYDMRNIFNGTVVQRHPSHAVTFVDNHDSQPEEALESFVDTWFKPLAYALTLTREQGYPSVFYGDYYGIPTHGVPAMRSKIDPILEARQKYAYGPQHDYLDHPDVIGWTREGDSSHPKSGLATLITDGPGGSKRMYAGLKNAGETWYDITGNRSDTVKIGSDGWGEFHVNDGSVSIYVQK

SEQ ID NO: 41228 - protein, 478 aa, Bacillus sp.
NGTMMQYFEWYLPNDGNHWNRLNSDASNLKSKGITAVWIPPAWKGASQNDVGYGAYDLYDLGEFNQKGTVRTKYGTRSQLQAAVTSLKNNGIQVYGDVVMNHKGGADATEMVRAVEVNPNNRNQEVTGEYTIEAWTRFDFPGRGNTHSSFKWRWYHFDGVDWDQSRRLNNRIYKFRSKAWDWEVDTEFGNYDYLMYADYDMDYPEVVNELRNWGVWYTNTLGLDGFRIDAVKHIKYSFTRDWINHVRSATGKNMFAVAEFWKNDLGAIENYLQKTNWNHSVFDVPLHYNLYNASKSGGNYDMRNIFNGTVVQRHPSHAVTFVDNHDSQPEEALESFVEEWFKPLAYALTLTREQGYPSVFYGDYYGIPTHGVPAMRSKIDPILEARQKYAYGPQHDYLDHPDVIGWTREGDSSHPKSGLATLITDGPGGSKRMYAGLKNAGETWYDITGNRSDTVKIGSDGWGEFHVNDGSVSIYVQK

SEQ ID NO: 41229 - protein, 478 aa, Bacillus sp.
NGTMMQYFEWYLPNDGNHWNRLNSDASNLKSKGITAVWIPPAWKGASQNDVGYGAYDLYDLGEFNQKGTVRTKYGTRSQLQAAVTSLKNNGIQVYGDVVMNHKGGADATEMVRAVEVNPNNRNQEVTGEYTIEAWTRFDFPGRGNTHSSFKWRWYHFDGVDWDQSRRLNNRIYKFRGKAWDWEVDTEFGNYDYLMYADYDMDHPEVVNELRNWGVWYTNTLGLDGFRIDAVKHIKYSFTRDWINHVRSATGKNMFAVAEFWKNDLGAIENYLQKTNWNHSVFDVPLHYNLYNASKSGGNYDMRNIFNGTVVQRHPSHAVTFVDNHDSQPEEALESFVEPWFKPLAYALTLTREQGYPSVFYGDYYGIPTHGVPAMRSKIDPILEARQKYAYGPQHDYLDHPDVIGWTREGDSSHPKSGLATLITDGPGGSKRMYAGLKNAGETWYDITGNRSDTVKIGSDGWGEFHVNGKSVSIYVQK

SEQ ID NO: 41230 - protein, 478 aa, Bacillus sp.
NGTMMQYFEWYLPNDGNHWNRLNSDASNLKSKGITAVWIPPAWKAASQNDVGYGAYDLYDLGEFNQKGTVRTKYGTRSQLQAAVTSLKNNGIQVYGDVVMNHKGGADATEMVRAVEVNPNNRNQEVTGEYTIEAWTRFDFPGRGNTHSSFKWRWYHFDGVDWDQSRQLQNRIYKFRGKAWDWEVDTEFGNYDYLMYTDYDMDHPEVVNELRNWGVWYTNTLGLDGFRIDAVKHIKYSFTRDWINHVRSATGKNMFAVAEFWKNDLGAIENYLQKTNWNHSVFDVPLHYNLYNASKSGGNYDMRNIFNGTVVQRHPSHAVTFVDNHDSQPEEALESFVEEWFKPLAYALTLTREQGYPSVFYGDYYGIPTHGVPAMRSKIDPILEARQKYAYGPQHDYLDHPDVIGWTREGDSSHPKSGLATLITDGPGGSKRMYAGLKNAGETWYDITGNRSDTVKIGSDGWGEFHVNDGSVSIYVQK

SEQ ID NO: 41231 - protein, 478 aa, Bacillus sp.
NGTMMQYFEWYLPNDGNHWNRLNSDASNLKSKGITAVWIPPAWKAISQNDVGYGAYDLYDLGEFNQKGTVRTKYGTRSQLQAAVTSLKNNGIQVYGDVVMNHKGGADATEMIRAVEVNPNNRNQEVTGEYTIEAWTRFDFPGRGNTHSSFKWRWYHFDGVDWDQSRELNNRIYKFRGKAWDWEVDTEFGNYDYLMYADYDMDHPEVVNELRNWGVWYTNTLGLDGFRIDAVKHIKYSFTRDWINHVRSATGKNMFAVAEFWKNDLGAIENYLQKTNWNHSVFDVPLHYNLYNASKSGGNYDMRNIFNGTVVQRHPSHAVTFVDNHDSQPEEALESFVEEWFKPLAYALTLTREQGYPSVFYGDYYGIPTHGVPAMRSKIDPILEARQKYAYGPQHDYLDHPDVIGWTREGDSSHPKSGLATLITDGPGGSKRMYAGLKNAGETWYDITGNRSDTVKIGSDGWGEFHVNDGSVSIYVQK

SEQ ID NO: 41232 - protein, 478 aa, Bacillus sp.
NGTMMQYFEWYLPNDGNHWNRLNSDASNLKSKGITAVWIPPAWKSASQNDVGYGAYDLYDLGEFNQKGTVRTKYGTRSQLQAAVTSLKNNGIQVYGDVVMNHKGGADATEMVRAVEVNPNNRNQEVTGEYTIEAWTRFDFPGRGNTHSSFKWRWYHFDGVDWDQSRNLQNRIYKFRGKAWDWEVDTEFGNYDYLMYADYDMDHPEVVNELRNWGVWYTNTLGLDGFRIDAVKHIKYSFTRDWINHVRSATGKNMFAVAEFWKNDLGAIENYLQKTNWNHSVFDVPLHYNLYNASKSGGNYDMRNIFNGTVVQRHPSHAVTFVDNHDSQPEEALESFVDPWFKPLAYALTLTREQGYPSVFYGDYYGIPTHGVPAMRSKIDPILEARQKYAYGPQHDYLDHPDVIGWTREGDSSHPKSGLATLITDGPGGSKRMYAGLKNAGETWYDITGNRSDTVKIGSDGWGEFHVNGGSVSIYVQK

SEQ ID NO: 41233 - protein, 478 aa, Bacillus sp.
NGTMMQYFEWYLPNDGNHWNRLNSDASNLKSKGITAVWIPPAWKAASQNDVGYGAYDLYDLGEFNQKGTVRTKYGTRSQLQAAVTSLKNNGIQVYGDVVMNHKGGADATEMVRAVEVNPNNRNQEVTGEYTIEAWTRFDFPGRGNTHSSFKWRWYHFDGVDFDQSRQITNRIYKFRGKAWDWEVDTEFGNYDYLMYTDYDMDHPEVVNELRNWGVWYTNTLGLDGFRIDAVKHIKYSFTRDWINHVRSATGKNMFAVAEFWKNDLGAIENYLQKTNWNHSVFDVPLHYNLYNASKSGGNYDMRNIFNGTVVQRHPSHAVTFVDNHDSQPEEALESFVEEWFKPLAYALTLTREQGYPSVFYGDYYGIPTHGVPAMRSKIDPILEARQKYAYGPQHDYLDHPDVIGWTREGDSSHPKSGLATLITDGPGGSKRMYAGLKNAGETWYDITGNRSDTVKIGSDGWGEFHVNDGSVSIYVQK

SEQ ID NO: 41234 - protein, 478 aa, Bacillus sp.
NGTMMQYFEWYLPNDGNHWNRLNSDASNLKSKGITAVWIPPAWKATSQNDVGYGAYDLYDLGEFNQKGTVRTKYGTRSQLQAAVTSLKNNGIQVYGDVVMNHKGGADATEMVRAVEVNPNNRNQEVTGEYTIEAWTRFDFPGRGNTHSSFKWRWYHFDGVDWDQSRQLQNRIYKFRGKAWDWEVDTEFGNYDYLMYADYDMDHPEVVNELRNWGVWYTNTLGLDGFRIDAVKHIKYSFTRDWINHVRSATGKNMFAVAEFWKNDLGAIENYLQKTNWNHSVFDVPLHYNLYNASKSGGNYDMRNIFNGTVVQRHPSHAVTFVDNHDSQPEEALESFVEEWFKPLAYALTLTREQGYPSVFYGDYYGIPTHGVPAMRSKIDPILEARQKYAYGPQHDYLDHPDVIGWTREGDSSHPKSGLATLITDGPGGSKRMYAGLKNAGETWYDITGNRSDTVKIGSDGWGKFHVNDGSVSIYVQK

SEQ ID NO: 41235 - protein, 478 aa, Bacillus sp.
NGTMMQYFEWYLPNDGNHWNRLNSDASNLKSKGITAVWIPPAWKGASQNDVGYGAYDLYDLGEFNQKGTVRTKYGTRSQLQAAVTSLKNNGIQVYGDVVMNHKGGADATEMVRAVEVNPNNRNQEVTGEYTIEAWTRFDFPGRGNTHSSFKWRWYHFDGVDWDQSRRLNNRIYKFRGKAWDWEVDTEFGNYDYLMYADYDMDHPEVVNELRNWGVWYTNTLGLDGFRIDAVKHIKYSFTRDWINHVRSATGKNMFAVAEFWKNDLGAIENYLQKTNWNHSVFDVPLHYNLYNASQSGGNYDMRNIFNGTVVQRHPSHAVTFVDNHDSQPEEALESFVEPWFKPLAYALTLTREQGYPSVFYGDYYGIPTHGVPAMRSKIDPILEARQKYAYGPQHDYLDHPDVIGWTREGDSSHPKSGLATLITDGPGGSKRMYAGLKNAGETWYDITGNRSDTVKIGSDGWGEFHVNKASVSIYVQK

SEQ ID NO: 41236 - protein, 478 aa, Bacillus sp.
NGTMMQYFEWYLPNDGNHWNRLNSDASNLKSKGITAVWIPPAWKGASQNDVGYGAYDLYDLGEFNQKGTVRTKYGTRSQLQAAVTSLKNNGIQVYGDVVMNHKGGADATEMVRAVEVNPNNRNQEVTGEYTIEAWTRFDFPGRGNTHSSFKWRWYHFDGVDWDQSRRTNNRIYKFRSKAWDWEVDTEFGNYDYLMYTDYDMDHPEVVNELRNWGVWYTNTLGLDGFRIDAVKHIKYSFTRDWINHVRSATGKNMFAVAEFWKNDLGAIENYLQKTNWNHSVFDVPLHYNLYNASKSGGNYDMRNIFNGTVVQRHPSHAVTFVDNHDSQPEEALESFVEEWFKPLAYALTLTREQGYPSVFYGDYYGIPTHGVPAMRSKIDPILEARQKYAYGPQHDYLDHPDVIGWTREGDSSHPKSGLATLITDGPGGSKRMYAGLKNAGETWYDITGNRSDTVKIGSDGWGEFHVNDGSVSIYVQK

SEQ ID NO: 41237 - protein, 478 aa, Bacillus sp.
NGTMMQYFEWYLPNDGNHWNRLNSDASNLKSKGITAVWIPPAWKAVSQNDVGYGAYDLYDLGEFNQKGTVRTKYGTRSQLQAAVTSLKNNGIQVYGDVVMNHKGGADATEMVPAVEVNPNNRNQEVTGEYTIEAWTRFDFPGRGNTHSSFKWRWYHFDGVDWDQSRDLENRIYKFRSKAWDWEVDTEFGNYDYLMYADYDMDHPEVVNELRNWGVWYTNTLGLDGFRIDAVKHIKYSFTRDWINHVRSATGKNMFAVAEFWKNDLGAIENYLQKTNWNHSVFDVPLHYNLYNASKSGGNYDMRNIFNGTVVQRHPSHAVTFVDNHDSQPEEALESFVEEWFKPLAYALTLTREQGYPSVFYGDYYGIPTHGVPAMRSKIDPILEARQKYAYGPQHDYLDHPDVIGWTREGDSSHPKSGLATLITDGPGGSKRMYAGLKNAGETWYDITGNRSDTVKIGSDGWGEFHVNDGSVSIYVQK

SEQ ID NO: 41238 - protein, 478 aa, Bacillus sp.
NGTMMQYFEWYLPNDGNHWNRLNSDASNLKSKGITAVWIPPAWKGASQNDVGYGAYDLYDLGEFNQKGTVRTKYGTRSQLQAAVTSLKNNGIQVYGDVVMNHKGGADATEMVRAVEVNPNNRNQEVTGEYTIEAWTRFDFPGRGNTHSSFKWRWYHFDGVDWDQSRRLNNRIYKFRGKAWDWEVDTEFGNYDYLMYADYDMDHPEVVNELRNWGVWYTNTLGLDGFRIDAVKHIKYSFTRDWINHVRSATGKNMFAVAEFWKNDLGAIENYLQKTNWNHSVFDVPLHYNLYNASQSGGNYDMRNIFNGTVVQRHPSHAVTFVDNHDSQPEEALESFVEPWFKPLAYALTLTREQGYPSVFYGDYYGIPTHGVPAMRSKIDPILEARQKYAYGPQHDYLDHPDVIGWTREGDSSHPKSGLATLITDGPGGSKRMYAGLKNAGETWYDITGNRSDTVKIGSDGWGEFHVNKTSVSIYVQK

SEQ ID NO: 41239 - protein, 478 aa, Bacillus sp.
NGTMMQYFEWYLPNDGNHWNRLNSDASNLKSKGIKAVWIPPAWKGASQNDVGYGAYDLYDLGEFNQKGTVRTKYGTRSQLQAAVTSLKNNGIQVYGDVVMNHKGGADATEMVRAVEVNPNNRNQEVTGEYTIEAWTRFDFPGRGNTHSSFKWRWYHFDGVDWDQSERLNNRIYKFRGKAWDWEVDTEFGNYDYLMYADYDMDHPEVVNELRNWGVWYTNTLGLDGFRIDAVKHIKYSFTRDWINHVRSATGKNMFAVAEFWKNDLGAIENYLQKTNWNHSVFDVPLHYNLYNASKSGGNYDMRNIFNGTVVQRHPSHAVTFVDNHDSQPEEALESFVEEWFKPLAYALTLTREQGYPSVFYGDYYGIPTHGVPAMRSKIDPILEARQKYAYGPQHDYLDHPDVIGWTREGDSSHPKSGLATLITDGPGGSKRMYAGLKNAGETWYDITGNRSDTVKIGSDGWGEFHVNDGSVSIYVQK

SEQ ID NO: 41240 - protein, 478 aa, Bacillus sp.
NGTMMQYFEWYLPNDGNHWNRLNSDASNLKSKGITAVWIPPAWKGASQNDVGYGAYDLYDLGEFNQKGTVRTKYGTRSQLQAAVTSLKNNGINVYGDVVMNHKGGADATEMVRAVEVNPNNRNQEVTGEYTIEAWTRFDFPGRGNTHSSFKWRWYHFDGVDWDQSRRLNNRIYKFRGKAWDWEVDTEFGNYDYLMYADYDMDHPEVVNELRNWGVWYTNTLGLDGFRIDAVKHIKYSFTRDWINHVRSATGKNMFAVAEFWKNDLGAIENYLQKTNWNHSVFDVPLHYNLYNASKSGGNYDMRNIFNGTVVQAHPMHAVTFVDNHDSQPEEALESFVEEWFKPLAYALTLTREQGYPSVFYGDYYGIPTHGVPAMRSKIDPILLARQKYAYGPQHDYLDHPDVIGWTREGDSSHPKSGLATLITDGPGGSKRMYAGLKNAGETWYDITGNRSDTVKIGSDGWGEFHVNDGSVSIYVQK

SEQ ID NO: 41241 - protein, 478 aa, Bacillus sp.
NKTMMQYFEWYLPNDGNHWNRLNSDASNLKSKGITAVWIPPAWKGASQNDVGYGAYDLYDLGEFNQKGTVRTKYGTRSQLQAAVTSLKNNGIQVYGDVVMNHKGGADATEMVRAVEVNPNNRNQEVTGEYTIEAWTRFDFPGRGNTHSSFKWRWYHFDGVDWDQSRRLNNRIYKFRGKAWDWEVDTEFGNYDYLMYADYDMDHPEVVNELRNWGVWYTNTLGLDGFRIDAVKHIKYSFTRDWINHVRSATGKNMFAVAEFWKNDLGAIENYLQKTNWNHSVFDVPLHYNLYNASKSGGNYDMRNIFNGTVVQAHPMLAVTFVDNHDSQPEEALESFVEEWFKPLAYALTLTREQGYPSVFYGDYYGIPTHGVPAMRSKIDPILEARQKYAYGPQHDYLDHPDVIGWTREGDSSHPKSGLATLITDGPGGSKRMYAGLKNAGETWYDITGNRSDTVKIGSDGWGEFHVNDGSVSIYVQK

SEQ ID NO: 41242 - protein, 478 aa, Bacillus sp.
NGTMMQYFEWYLPNDGNHWNRLNSDASNLKSKGITAVWIPPAWKGASQNDVGYGAYDLYDLGEFNQKGTVRTKYGTRSQLQAAVTSLKNNGIAVYGDVVMNHKGGADATEMVRAVEVNPNNRNQEVTGEYTIEAWTRFDFPGRGNTHSSFKWRWYHFDGVDWDQSRRLNNRIYKFRGKAWDWEVDTEFGNYDYLMYADYDMDHPEVVNELRNWGVWYTNTLGLDGFRIDAVKHIKYSFTRDWINHVRSATGKNMFAVAEFWKNDLGAIENYLQKTNWNHSVFDVPLHYNLYNASKSGGNYDMRNIFNGTVVQAHPNHAVTFVDNHDSQPEEALESFVEEWFKPLAYALTLTREQGYPSVFYGDYYGIPTHGVPAMRSKIDPILEARQKYAYGPQHDYLDHPDVIGWTREGDSSHPKSGLATLITDGPGGSKRMYAGLKNAGETWYDITGNRSDTVKIGSDGWGEFHVNDGSVSIYVQK

SEQ ID NO: 41243 - protein, 478 aa, Bacillus sp.
NGTMMQYFEWYLPNDGNHWNRLNSDASNLKSKGITAVWIPPAWKGASQNDVGYGAYDLYDLGEFNQKGTVRTKYGTRSQLQAAVTSLKNNGINVYGDVVMNHKGGADATEMVRAVEVNPNNRNQEVTGEYTIEAWTRFDFPGRGNTHSSFKWRWYHFDGVDWDQSRRLNNRIYKFRGKAWDWEVDTEFGNYDYLMYADYDMDHPEVVNELRNWGVWYTNTLGLDGFRIDAVKHIKYSFTRDWINHVRSATGKNMFAVAEFWKNDLGAIENYLQKTNWNHSVFDVPLHYNLYNASKSGGNYDMRNIFNGTVVQAHPNHAVTFVDNHDSQPEEALESFVEEWFKPLAYALTLTREQGYPSVFYGDYYGIPTHGVPAMRSKIDPILEARQKYAYGPQHDYLDHPDVIGWTREGDSSHPKSGLATLITDGPGGSKRMYAGLKNAGETWYDITGNRSDTVKIGSDGWGEFHVNDGSVSIYVQK

SEQ ID NO: 41244 - protein, 478 aa, Bacillus sp.
NGTMMQYFEWYLPNDGNHWNRLNSDASNLKSKGITAVWIPPAWKATSQNDVGYGAYDLYDLGEFNQKGTVRTKYGTRSQLQAAVTSLKNNGIQVYGDVVMNHKGGADATEMVRAVEVNPNNRNQEVTGEYTIEAWTRFDFPGRGNTHSSFKWRWYHFDGVDWDQSRELSNRIYKFRGKAWDWEVDTEFGNYDYLMYADYDMDHPEVVNELRNWGVWYTNTLGLDGFRIDAVKHIKYSFTRDWINHVRSATGKNMFAVAEFWKNDLGAIENYLQKTNWNHSVFDVPLHYNLYNASKSQGNYDMRNIFNGTVVQRHPSHAVTFVDNHDSQPEEALESFVDTWFKPLAYALTLTREQGYPSVFYGDYYGIPTHGVPAMRSKIDPILEARQKYAYGPQHDYLDHPDVIGWTREGDSSHPKSGLATLITDGPGGSKRMYAGLKNAGETWYDITGNRSDTVKIGSDGWGEFHVNGSSVSIYVQK

SEQ ID NO: 41245 - protein, 478 aa, Bacillus sp.
NGTMMQYFEWYLPNDGNHWNRLNSDASNLKSKGITAVWIPPAWKGASQNDVGYGAYDLYDLGEFNQKGTVRTKYGTRSQLQAAVTSLKNNGIQVYGDVVMNHKGGADATEMVRAVEVNPNNRNQEVTGEYTIEAWTRFDFPGRGNTHSSFKWRWYHFDGVDFDQSRRLNNRIYKFRGKAWDWEVDTEFGNYDYLMYADYDMDHPEVVNELRNWGVWYTNTLGLDGFRIDAVKHIKYSFTRDWINHVRIATGKNMFAVAEFWKNDLGAIENYLQKTNWNHSVFDVPLHYNLYNASKSGGNYDMRNIFNGTVVQRHPSHAVTFVDNHDSQPEEALESFVDEWFKPLAYALTLTREQGYPSVFYGDYYGIPTHGVPAMRSKIDPILEARQKYAYGPQHDYLDHPDVIGWTREGDSSHPKSGLATLITDGPGGSKRMYAGLKNAGETWYDITGNRSDTVKIGSDGWGEFHVNDQSVSIYVQK

SEQ ID NO: 41246 - protein, 478 aa, Bacillus sp.
NGTMMQYFEWYLPNDGNHWNRLNSDASNLKSKGITAVWIPPAWKAVSQNDVGYGAYDLYDLGEFNQKGTVRTKYGTRSQLQAAVTSLKNNGIQVYGDVVMNHKGGADATEMVRAVEVNPNNRNQEVTGEYTIEAWTRFDFPGRGNTHSSFKWRWYHFDGVDWDQSREFTNRIYKFRGKAWDWEVDTEFGNYDYLMYVDYDMDHPEVVNELRNWGVWYTNTLGLDGFRIDAVKHIKYSFTRDWINHVRSATGKNMFAVAEFWKNDLGAIENYLQKTNWNHSVFDVPLHYNLYNASKSGGNYDMRNIFNGTVVQRHPSHAVTFVDNHDSQPEEALESFVEEWFKPLAYALTLTREQGYPSVFYGDYYGIPTHGVPAMRSKIDPILEARQKYAYGPQHDYLDHPDVIGWTREGDSSHPKSGLATLITDGPGGSKRMYAGLKNAGETWYDITGNRSDTVKIGSDGWGEFHVNDGSVSIYVQK

SEQ ID NO: 41247 - protein, 478 aa, Bacillus sp.
NQTMMQYFEWYLPNDGNHWNRLNSDASNLKSKGITAVWIPPAWKGASQNDVGYGAYDLYDLGEFNQKGTVRTKYGTRSQLQAAVTSLKNNGIQVYGDVVMNHKGGADATEMVRAVEVNPNNRNQEVTGEYTIEAWTRFDFPGRGNTHSSFKWRWYHFDGVDWDQSRRLNNRIYKFRGKAWDWEVDTEFGNYDYLMYADYDMDHPEVVNELRNWGVWYTNTLGLDGFRIDAVKHIKYSFTRDWINHVRSATGKNMFAVAEFWKNDLGAIENYLQKTNWNHSVFDVPLHYNLYNASKSGGNYDMRNIFNGTVVQAHPNHAVTFVDNHDSQPEEALESFVEEWFKPLAYALTLTREQGYPSVFYGDYYGIPTHGVPAMRSKIDPILEARQKYAYGPQHDYLDHPDVIGWTREGDSSHPKSGLATLITDGPGGSKRMYAGLKNAGETWYDITGNRSDTVKIGSDGWGEFHVNDGSVSIYVQK

SEQ ID NO: 41248 - protein, 478 aa, Bacillus sp.
NGTMMQYFEWYLPNDGNHWNRLNSDASNLKSKGITAVWIPPAWKGASQNDVGYGAYDLYDLGEFNQKGTVRTKYGTRSQLQAAVTSLKNNGIQVYGDVVMNHKGGADATEMVRAVEVNPNNRNQEVTGEYTIEAWTRFDFPGRGNTHSSFKWRWYHFDGVDWDQSRRLNNRIYLFRCKAWKWEVPTENGNYDYLMYADIDMDHPEVVNELRNWGVWYTNTLGLDGFRIDAVKHIKYSFTRDWINHVRSATGKNMFAVAEFWKNDLGAIENYLQKTNWNHSVFDVPLHYNLYNASKSGGNYDMRNIFNGTVVQRHPSHAVTFVDNHDSQPEEALESFVEEWFKPLAYALTLTREQGYPSVFYGDYYGIPTHGVPAMRSKIDPILEARQKYAYGPQHDYLDHPDVIGWTREGDSSHPKSGLATLITDGPGGSKRMYAGLKNAGETWYDITGNRSDTVKIGSDGWGEFHVNDGSVSIYVQK

SEQ ID NO: 41249 - protein, 478 aa, Bacillus sp.
NGTMMQYFEWYLPNDGNHWNRLNSDASNLKSKGITAVWIPPAWKGASQNDVGYGAYDLYDLGEFNQKGTVRTKYGTRSQLQAAVTSLKNNGIQVYGDVVMNHKGGADATEMVRAVEVNPNNRNQEVTGEYTIEAYTRFDFSGRGNTHSSFKWRWYHFDGVDWDQSRKLNNRIYKFRGKAWDWEVDTEFGNYDYLMYVDYDMDHPEVVNELRNWGVWYTNTLGLDGFRIDAVKHIKYSFTRDWINHVRSATGKNMFAVAEFWKNDLGAIENYLQKTNWNHSVFDVPLHYNLYNASKSGGNYDMRNIFNGTVVQRHPSHAVTFVDNHDSQPEEALESFVEEWFKPLAYALTLTREQGYPSVFYGDYYGIPTHGVPAMRSKIDPILEARQKYAYGPQHDYLDHPDVIGWTREGDSSHPKSGLATLITDGPGGSKRMYAGLKNAGETWYDITGNRSDTVKIGSDGWGEFHVNDGSVSIYVQK

SEQ ID NO: 41250 - protein, 478 aa, Bacillus sp.
NGTMMQYFEWYLPNDGNHWNRLNSDASNLKSKGITAVWIPPAWKAASQNDVGYGAYDLYDLGEFNQKGTVRTKYGTRSQLQAAVTSLKNNGIQVYGDVVMNHKGGADATEMVRAVEVNPNNRNQEVTGEYTIEAWTRFDFPGRGNTHSSFKWRWYHFDGVDWDQSRRLTNRIYKFRGKAWDWEVDTEFGNYDYLMYADYDMDHPEVVNELRNWGVWYTNTLGLDGFRIDAVKHIKYSFTRDWINHVRSATGKNMFAVAEFWKNDLGAIENYLQKTNWNHSVFDVPLHYNLYNASKSGGNYDMRNIFNGTVVQRHPSHAVTFVDNHDSQPEEALESFVDPWFKPLAYALTLTREQGYPSVFYGDYYGIPTHGVPAMRSKIDPILEARQKYAYGPQHDYLDHPDVIGWTREGDSSHPKSGLATLITDGPGGSKRMYAGLKNAGETWYDITGNRSDTVKIGSDGWGEFHVNGGSVSIYVQK

SEQ ID NO: 41251 - protein, 478 aa, Bacillus sp.
NGTMMQYFEWYLPNDGNHWNRLNSDASNLKSKGITAVWIPPAWKGASQNDVGYGAYDLYDLGEFNQKGTVRTKYGTRSQLQAAVTSLKNNGIQVYGDVVMNHKGGADATEMVSAVEVNPNNRNQEVTGDYTIEAWTRFDFPGRGNTHSSFKWRWYHFDGVDWDQSRRLNNRIYKFRSKAWDWEVDTEFGNYDYLMYADYDMDHPEVVNELRNWGVWYTNTLGLDGFRIDAVKHIKYSFTRDWINHVRSATGKNMFAVAEFWKNDLGAIENYLQKTNWNHSVFDVPLHYNLYNASKSGGNYDMRNIFNGTVVQRHPSHAVTFVDNHDSQPEEALESFVEEWFKPLAYALTLTREQGYPSVFYGDYYGIPTHGVPAMRSKIDPILEARQKYAYGPQHDYLDHPDVIGWTREGDSSHPKSGLATLITDGPGGSKRMYAGLKNAGETWYDITGNRSDTVKIGSDGWGEFHVNDGSVSIYVQK

SEQ ID NO: 41252 - protein, 478 aa, Bacillus sp.
NGTMMQYFEWYLPNDGNHWNRLNSDASNLKSKGITAVWIPPAWKGASQNDVGYGAYDLYDLGEFNQKGTVRTKYGTRSQLQAAVTSLKNNGIQVYGDVVMNHKGGADATEMVRAVEVNPNNRNQEVTGEYTIEAWTRFDFPGRGNTHSSFKWRWYHFDGVDWDQSRRLNNRIYKFRGKAWDWEVDTEFGNYDYLMYADYDMDHTETVNELRNWGVWYTNTLGLDGFRIDAVKHIKYSFTRDWINHVRSATGKNMFAVAEFWKNDLGAIENYLQKTNWNHSVFDVPLHYNLYNASKSGGNYDMRNIFNGTVVQRHPSHAVTFVDNHDSQPEEALESFVEEWFKPLAYALTLTREQGYPSVFYGDYYGIPTHGVPAMRSKIDPILEARQKYAYGPQHDYLDHPDVIGWTREGDSSHPKSGLATLITDGPGGSKRMYAGLKNAGETWYDITGNRSDTVKIGSDGWGEFHVNDGSVSIYVQK

SEQ ID NO: 41253 - protein, 478 aa, Bacillus sp.
NGTMMQYFEWYLPNDGNHWNRLNSDASNLKSKGITAVWIPPAWKAASQNDVGYGAYDLYDLGEFNQKGTVRTKYGTRSQLQAAVTSLKNNGIQVYGDVVMNHKGGADATEMVPAVEVNPNNRNQEVTGEYTIEAWTRFDFPGRGNTHSSFKWRWYHFDGVDWDQSRDLTNRIYKFRGKAWDWEVDTEFGNYDYLMYADYDMDHPEVVNELRNWGVWYTNTLGLDGFRIDAVKHIKYSFTRDWINHVRSATGKNMFAVAEFWKNDLGAIENYLQKTNWNHSVFDVPLHYNLYNASKSGGNYDMRNIFNGTVVQRHPSHAVTFVDNHDSQPEEALESFVDPWFKPLAYALTLTREQGYPSVFYGDYYGIPTHGVPAMRSKIDPILEARQKYAYGPQHDYLDHPDVIGWTREGDSSHPKSGLATLITDGPGGSKRMYAGLKNAGETWYDITGNRSDTVKIGSDGWGEFHVNGGSVSIYVQK

SEQ ID NO: 41254 - protein, 478 aa, Bacillus sp.
NGTMMQYFEWYLPNDGNHWNRLNSDASNLKSKGITAVWIPPAWKGASQNDVGYGAYDLYDLGEFNQKGTVRTKYGTRSQLQAAVTSLKNNGIQVYGDVVMNHKGGADATEMVRAVEVNPNNRNQEVTGEYTIEAWTRFDFPGRGNTHSSFKWRWYHFDGVDWDQSRRLNNRIYKFRGKAWDWEVDTEFGNYDYLMYADYDMDHPEVVNELRNWGVWYTNTLGLDGFRIDAVKHIKYSFTRDWINHVRSATGKNMFAVAEFWKNDLGAIENYLQKTNWNHSVFDVPLHYNLYNASKSGGNYDMRNIFNGTVVQRHPSHAVTFVDNHDSQPEEALESFVDPWFKPLAYALTLTREQGYPSVFYGDYYGIPTHGVPAMRSKIDPILEARQKYAYGPQHDYLDHPDVIGWTREGDSSHPKSGLATLITDGPGGSKRMYAGLKNAGETWYDITGNRSDTVKIGSDGWGEFHVNQASVSIYVQK

SEQ ID NO: 41255 - protein, 478 aa, Bacillus sp.
NGTMMQYFEWYLPNDGNHWNRLNSDASNLKSKGITAVWIPPAWKAASQNDVGYGAYDLYDLGEFNQKGTVRTKYGTRSQLQAAVTSLKNNGIQVYGDVVMNHKGGADATEMVRAVEVNPNNRNQEVTGEYTIEAYTRFDFPGRGNTHSSFKWRWYHFDGVDWDQSRDLDNRIYKFRGKAWDWEVDTEFGNYDYLMYADYDMDHPEVVNELRNWGVWYTNTLGLDGFRIDAVKHIKYSFTRDWINHVRSATGKNMFAVAEFWKNDLGAIENYLQKTNWNHSVFDVPLHYNLYNASKSGGNYDMRNIFNGTVVQRHPSHAVTFVDNHDSQPEEALESFVEEWFKPLAYALTLTREQGYPSVFYGDYYGIPTHGVPAMRSKIDPILEARQKYAYGPQHDYLDHPDVIGWTREGDSSHPKSGLATLITDGPGGSKRMYAGLKNAGETWYDITGNRSDTVKIGSDGWGEFHVNDGSVSIYVQK

SEQ ID NO: 41256 - protein, 478 aa, Bacillus sp.
NGTMMQYFEWYLPNDGNHWNRLNSDASNLKSKGITAVWIPPAWKGASQNDVGYGAYDLYDLGEFNQKGTVRTKYGTRSQLQAAVTSLKNNGIQVYGDVVMNHKGGADATEMVRAVEVNPNNRNQEVTGEYTIEAWTRFDFPGRGNTHSSFKWRWYHFDGVDWDQSRRLNNRIYKFRGKAWDWEVDTEFGNYDYLMYADYDMDHPEVVNELRNWGVWYTNTLGLDGFRIDAVKHIKYSFTRDWINHVRSATGKNMFAVAEFWKNDLGAIENYLQKTNWNHSVFDVPLHYNLYNASNSGGNYDMRNIFNGTVVQRHPSHAVTFVDNHDSQPEEALESFVDEWFKPLAYALTLTREQGYPSVFYGDYYGIPTHGVPAMRSKIDPILEARQKYAYGPQHDYLDHPDVIGWTREGDSSHPKSGLATLITDGPGGSKRMYAGLKNAGETWYDITGNRSDTVKIGSDGWGEFHVNGKSVSIYVQK

SEQ ID NO: 41257 - protein, 478 aa, Bacillus sp.
NGTMMQYFEWYLPNDGNHWNRLNSDASNLKSKGITAVWIPPAWKGASQNDVGYGAYDLYDLGEFNQKGTVRTKYGTRSQLQAAVTSLKNNGISVYGDVVMNHKGGADATEMVRAVEVNPNNRNQEVTGEYTIEAWTRFDFPGRGNTHSSFKWRWYHFDGVDWDQSRRLNNRIYKFRGKAWDWEVDTEFGNYDYLMYADYDMDHPEVVNELRNWGVWYTNTLGLDGFRIDAVKHIKYSFTRDWINHVRSATGKNMFAVAEFWKNDLGAIENYLQKTNWNHSVFDVPLHYNLYNASKSGGNYDMRNIFNGTVVQSHPSHAVTFVDNHDSQPEEALESFVEEWFKPLAYALTLTREQGYPSVFYGDYYGIPTHGVPAMRSKIDPILEARQKYAYGPQHDYLDHPDVIGWTREGDSSHPKSGLATLITDGPGGSKRMYAGLKNAGETWYDITGNRSDTVKIGSDGWGEFHVNDGSVSIYVQK

SEQ ID NO: 41258 - protein, 478 aa, Bacillus sp.
NGTMMQYFEWYLPNDGNHWNRLNSDASNLKSKGITAVWIPPAWKGASQNDVGYGAYDLYDLGEFNQKGTVRTKYGTRSQLQAAVTSLKNNGINVYGDVVMNHKGGADATEMVRAVEVNPNNRNQEVTGEYTIEAWTRFDFPGRGNTHSSFKWRWYHFDGVDWDMSRRLNNRIYKFRGKAWDWEVDTEFGNYDYLMYADYDMDHPEVVNELRNWGVWYTNTLGLDGFRIDAVKHIKYSFTRDWINHVRSATGKNMFAVAEFWKNDLGAIENYLQKTNWNHSVFDVPLHYNLYNASKSGGNYDMRNIFNGTVVQAHPMHAVTFVDNHDSQPEEALESFVEEWFKPLAYALTLTREQGYPSVFYGDYYGIPTHGVPAMRSKIDPILEARQKYAYGPQHDYLDHPDVIGWTREGDSSHPKSGLATLITDGPGGSKRMYAGLKNAGETWYDITGNRSDTVKIGSDGWGEFHVNDGSVSIYVQK

SEQ ID NO: 41259 - protein, 478 aa, Bacillus sp.
NGTMMQYFEWYLPNDGNHWNRLNSDASNLKSKGITAVWIPPAWKGASQNDVGYGAYDLYDLGEFNQKGTVRTKYGTRSQLQAAVTSLKNNGIQVYGDVVMNHKGGADATEMVRAVEVNPNNRNQEVTGEYTIEAWTRFDFPGRGNTHSSFKWRWYHFDGVDWDQSRRLNNRIYKFRGKAWDWEVDTEFGNYDYLMYADYDMDHPEVVNELRNWGVWYTNTLGLDGFRIDAVKHIKYSFTRDWINHVRSATGKNMFAVAEFWKNDLGAIENYLQKTNWNHSVFDVPLHYNLYNASKSQGNYDMRNIFNGTVVQRHPSHAVTFVDNHDSQPEEALESFVEPWFKPLAYALTLTREQGYPSVFYGDYYGIPTHGVPAMRSKIDPILEARQKYAYGPQHDYLDHPDVIGWTREGDSSHPKSGLATLITDGPGGSKRMYAGLKNAGETWYDITGNRSDTVKIGSDGWGEFHVNGGSVSIYVQK

SEQ ID NO: 41260 - protein, 478 aa, Synthetic construct
NGTMMQYFEWYLPNDGNHWNRLNSDASNLKSKGITAVWIPPAWKGASQNDVGYGAYDLYDLGEFNQKGTVRTKYGTRSQLQAAVTSLKNNGIQVYGDVVMNHKGGADATEMVRAVEVNPNNRNQEVTGEYTIEAWTRFDFPGRGNTHSSFKWRWYHFDGVDWDQSRRLNNRIYLFRGKKWDWPVDTENGNYDYLMYADIDMDHPEVVNELRNWGVWYTNTLGLDGFRIDAVKHIKYSFTRDWINHVRSATGKNMFAVAEFWKNDLGAIENYLQKTNWNHSVFDVPLHYNLYNASKSGGNYDMRNIFNGTVVQRHPSHAVTFVDNHDSQPEEALESFVEEWFKPLAYALTLTREQGYPSVFYGDYYGIPTHGVPAMRSKIDPILEARQKYAYGPQHDYLDHPDVIGWTREGDSSHPKSGLATLITDGPGGSKRMYAGLKNAGETWYDITGNRSDTVKIGSDGWGEFHVNDGSVSIYVQK

SEQ ID NO: 41261 - protein, 478 aa, Bacillus sp.
NGTMMQYFEWYLPNDGNHWNRLNSDASNLKSKGITAVWIPPAWKGASQNDVGYGAYDLYDLGEFNQKGTVRTKYGTRSQLQAAVTSLKNNGIQVYGDVVMNHKGGADATEMVRAVEVNPNNRNQEVTGEYTIEAWTRFDFPGRGNTHSSFKWRWYHFDGVDWDQSRRLNNRIYKFRGKAWDWEVDTEFGNYDYLMYADYDMDHPEVVNELRNWGVWYTNTLGLDGFRIDAVKHIKYSFTRDWINHVRSATGKNMFAVAEFWKNDLGAIENYLQKTNWNHSVFDVPLHYNLYNASQSGGNYDMRNIFNGTVVQRHPSHAVTFVDNHDSQPEEALESFVEEWFKPLAYALTLTREQGYPSVFYGDYYGIPTHGVPAMRSKIDPILEARQKYAYGPQHDYLDHPDVIGWTREGDSSHPKSGLATLITDGPGGSKRMYAGLKNAGETWYDITGNRSDTVKIGSDGWGEFHVNQQSVSIYVQK

SEQ ID NO: 41262 - protein, 478 aa, Bacillus sp.
NGTMMQYFEWYLPNDGNHWNRLNSDASNLKSKGITAVWIPPAWKGTSQNDVGYGAYDLYDLGEFNQKGTVRTKYGTRSQLQAAVTSLKNNGIQVYGDVVMNHKGGADATEMVRAVEVNPNNRNQEVTGEYTIEAWTRFDFPGRGNTHSSFKWRWYHFDGVDFDQSRNLNNRIYKFRGKAWDWEVDTEFGNYDYLMYVDYDMDHPEVVNELRNWGVWYTNTLGLDGFRIDAVKHIKYSFTRDWINHVRSATGKNMFAVAEFWKNDLGAIENYLQKTNWNHSVFDVPLHYNLYNASKSQGNYDMRNIFNGTVVQRHPSHAVTFVDNHDSQPEEALESFVDTWFKPLAYALTLTREQGYPSVFYGDYYGIPTHGVPAMRSKIDPILEARQKYAYGPQHDYLDHPDVIGWTREGDSSHPKSGLATLITDGPGGSKRMYAGLKNAGETWYDITGNRSDTVKIGSDGWGEFHVNDGSVSIYVQK

SEQ ID NO: 41263 - protein, 478 aa, Bacillus sp.
NGTMMQYFEWYLPNDGNHWNRLNSDASNLKSKGITAVWIPPAWKAASQNDVGYGAYDLYDLGEFNQKGTVRTKYGTRSQLQAAVTSLKNNGIQVYGDVVMNHKGGADATEMVRAVEVNPNNRNQEVTGEYTIEAWTRFDFPGRGNTHSSFKWRWYHFDGVDWDQSRRFQNRIYKFRGKAWDWEVDTEFGNYDYLMYVDYDMDHPEVVNELRNWGVWYTNTLGLDGFRIDAVKHIKYSFTRDWINHVRSATGKNMFAVAEFWKNDLGAIENYLQKTNWNHSVFDVPLHYNLYNASKSGGNYDMRNIFNGTVVQRHPSHAVTFVDNHDSQPEEALESFVEEWFKPLAYALTLTREQGYPSVFYGDYYGIPTHGVPAMRSKIDPILEARQKYAYGPQHDYLDHPDVIGWTREGDSSHPKSGLATLITDGPGGSKRMYAGLKNAGETWYDITGNRSDTVKIGSDGWGEFHVNDGSVSIYVQK

SEQ ID NO: 41264 - protein, 478 aa, Bacillus sp.
NKTMMQYFEWYLPNDGNHWNRLNSDASNLKSKGITAVWIPPAWKGASQNDVGYGAYDLYDLGEFNQKGTVRTKYGTRSQLQAAVTSLKNNGIQVYGDVVMNHKGGADATEMVRAVEVNPNNRNQEVTGEYTIEAWTRFDFPGRGNTHSSFKWRWYHFDGVDWDQSRRLNNRIYKFRGKAWDWEVDTEFGNYDYLMYADYDMDHPEVVNELRNWGVWYTNTLGLDGFRIDAVKHIKYSFTRDWINHVRSATGKNMFAVAEFWKNDLGAIENYLQKTNWNHSVFDVPLHYNLYNASKSGGNYDMRNIFNGTVVQMHPSHAVTFVDNHDSQPEEALESFVEEWFKPLAYALTLTREQGYPSVFYGDYYGIPTHGVPAMRSKIDPILEARQKYAYGPQHDYLDHPDVIGWTREGDSSHPKSGLATLITDGPGGSKRMYAGLKNAGETWYDITGNRSDTVKIGSDGWGEFHVNDGSVSIYVQK

SEQ ID NO: 41265 - protein, 478 aa, Bacillus sp.
NLTMMQYFEWYLPNDGNHWNRLNSDASNLKSKGITAVWIPPAWKGASQNDVGYGAYDLYDLGEFNQKGTVRTKYGTRSQLQAAVTSLKNNGIQVYGDVVMNHKGGADATEMVRAVEVNPNNRNQEVTGEYTIEAWTRFDFPGRGNTHSSFKWRWYHFDGVDWDQSRRLNNRIYKFRGKAWDWEVDTEFGNYDYLMYADYDMDHPEVVNELRNWGVWYTNTLGLDGFRIDAVKHIKYSFTRDWINHVRSATGKNMFAVAEFWKNDLGAIENYLQKTNWNHSVFDVPLHYNLYNASKSGGNYDMRNIFNGTVVQMHPNHAVTFVDNHDSQPEEALESFVEEWFKPLAYALTLTREQGYPSVFYGDYYGIPTHGVPAMRSKIDPILEARQKYAYGPQHDYLDHPDVIGWTREGDSSHPKSGLATLITDGPGGSKRMYAGLKNAGETWYDITGNRSDTVKIGSDGWGEFHVNDGSVSIYVQK

SEQ ID NO: 41266 - protein, 478 aa, Bacillus sp.
NGTMMQYFEWYLPNDGNHWNRLNSDASNLKSKGITAVWIPPAWKGASQNDVGYGAYDLYDLGEFNQKGTVRTKYGTRSQLQAAVTSLKNNGIQVYGDVVMNHKGGADATEMVRAVEVNPNNRNQEVTGEYTIEAWTRFDFPGRGNTHSSFKWRWYHFDGVDWDQSRRLNNRIYKFRGKAWDWEVDTEFGNYDYLMYADYDMDHPEVVNELRNWGVWYTNTLGLDGFRIDAVKHIKYSFTRDWINHVRSATGKNMFAVAEFWKNDLGAIENYLQKTNWNHSVFDVPLHYNLYNASKSGGNYDMRNIFNGTVVQANPNHAVTFVDNHDSQPEEALESFVEEWFKPLAYALTLTREQGYPSVFYGDYYGIPTHGVPAMRSKIDPILEARQKYAYGPQHDYLDHPDVIGWTREGDSSHPKSGLATLITDGPGGSKRMYAGLKNAGETWYDITGNRSDTVKIGSDGWGEFHVNDGSVSIYVQK

SEQ ID NO: 41267 - protein, 478 aa, Bacillus sp.
NGTMMQYFEWYLPNDGNHWNRLNSDASNLKSKGITAVWIPPAWKAASQNDVGYGAYDLYDLGEFNQKGTVRTKYGTRSQLQAAVTSLKNNGIQVYGDVVMNHKGGADATEMVRAVEVNPNNRNQEVTGEYTIEAWTRFDFPGRGNTHSSFKWRWYHFDGVDWDQSRRLQNRIYKFRGKAWDWEVDTEFGNYDYLMYTDYDMDHPEVVNELRNWGVWYTNTLGLDGFRIDAVKHIKYSFTRDWINHVRSATGKNMFAVAEFWKNDLGAIENYLQKTNWNHSVFDVPLHYNLYNASKSGGNYDMRNIFNGTVVQRHPSHAVTFVDNHDSQPEEALESFVEEWFKPLAYALTLTREQGYPSVFYGDYYGIPTHGVPAMRSKIDPILEARQKYAYGPQHDYLDHPDVIGWTREGDSSHPKSGLATLITDGPGGSKRMYAGLKNAGETWYDITGNRSDTVKIGSDGWGEFHVNDGSVSIYVQK

SEQ ID NO: 41268 - protein, 478 aa, Bacillus sp.
NGTMMQYFEWYLPNDGNHWNRLNSDASNLKSKGITAVWIPPAWKGASQNDVGYGAYDLYDLGEFNQKGTVRTKYGTRSQLQAAVTSLKNNGIQVYGDVVMNHKGGADATEMVSAVEVNPNNRLQEVTGEYTIEAWTRFDFPGRGNTHSSFKWRWYHFDGVDWDQSRRLNNRIYKFRSKAWDWEVDTEFGNYDYLMYADYDMDHPEVVNELRNWGVWYTNTLGLDGFRIDAVKHIKYSFTRDWINHVRSATGKNMFAVAEFWKNDLGAIENYLQKTNWNHSVFDVPLHYNLYNASKSGGNYDMRNIFNGTVVQRHPSHAVTFVDNHDSQPEEALESFVEEWFKPLAYALTLTREQGYPSVFYGDYYGIPTHGVPAMRSKIDPILEARQKYAYGPQHDYLDHPDVIGWTREGDSSHPKSGLATLITDGPGGSKRMYAGLKNAGETWYDITGNRSDTVKIGSDGWGEFHVNDGSVSIYVQK

SEQ ID NO: 41269 - protein, 478 aa, Bacillus sp.
NGTMMQYFEWYLPNDGNHWNRLNSDASNLKSKGITAVWIPPAWKGASQNDVGYGAYDLYDLGEFNQKGTVRTKYGTRSQLQAAVTSLKNNGIQVYGDVVMNHKGGADATEMVRAVEVNPNNRNQEVTGEYTIEAWTRFDFPGRGNTHSSFKWRWYHFDGVDWDQSRRLNNRIYKFRGKAWDWEVDTEFGNYDYLMYADYDMDHPEVVNELRNWGVWYTNTLGLDGFRIDAVKHIKYSFTRDWINHVRSATGKNMFAVAEFWKNDLGAIENYLQKTNWNHSVFDVPLHYNLYNASKSGGNYDMRNIFNGTVVQRHPSHAVTFVDNHDSQPEEALESFVDPWFKPLAYALTLTREQGYPSVFYGDYYGIPTHGVPAMRSKIDPILEARQKYAYGPQHDYLDHPDVIGWTREGDSSHPKSGLATLITDGPGGSKRMYAGLKNAGETWYDITGNRSDTVKIGSDGWGEFHVNGKSVSIYVQK

SEQ ID NO: 41270 - protein, 478 aa, Bacillus sp.
NGTMMQYFEWYLPNDGNHWNRLNSDASNLKSKGITAVWIPPAWKAASQNDVGYGAYDLYDLGEFNQKGTVRTKYGTRSQLQAAVTSLKNNGIQVYGDVVMNHKGGADATEMVRAVEVNPNNRNQEVTGEYTIEAWTRFDFPGRGNTHSSFKWRWYHFDGVDWDQSRNLNNRIYKFRGKAWDWEVDTEFGNYDYLMYTDYDMDHPEVVNELRNWGVWYTNTLGLDGFRIDAVKHIKYSFTRDWINHVRSATGKNMFAVAEFWKNDLGAIENYLQKTNWNHSVFDVPLHYNLYNASKSGGNYDMRNIFNGTVVQRHPSHAVTFVDNHDSQPEEALESFVEEWFKPLAYALTLTREQGYPSVFYGDYYGIPTHGVPAMRSKIDPILEARQKYAYGPQHDYLDHPDVIGWTREGDSSHPKSGLATLITDGPGGSKRMYAGLKNAGETWYDITGNRSDTVKIGSDGWGEFHVNDGSVSIYVQK

SEQ ID NO: 41271 - protein, 478 aa, Bacillus sp.
NGTMMQYFEWYLPNDGNHWNRLNSDASNLKSKGITAVWIPPAWKAASQNDVGYGAYDLYDLGEFNQKGTVRTKYGTRSQLQAAVTSLKNNGIQVYGDVVMNHKGGADATEMVRAVEVNPNNRNQEVTGEYTIEAWTRFDFPGRGNTHSSFKWRWYHFDGVDWDQSRNLTNRIYKFRGKAWDWEVDTEFGNYDYLMYADYDMDHPEVVNELRNWGVWYTNTLGLDGFRIDAVKHIKYSFTRDWINHVRSATGKNMFAVAEFWKNDLGAIENYLQKTNWNHSVFDVPLHYNLYNASKSGGNYDMRNIFNGTVVQRHPSHAVTFVDNHDSQPEEALESFVDPWFKPLAYALTLTREQGYPSVFYGDYYGIPTHGVPAMRSKIDPILEARQKYAYGPQHDYLDHPDVIGWTREGDSSHPKSGLATLITDGPGGSKRMYAGLKNAGETWYDITGNRSDTVKIGSDGWGEFHVNGGSVSIYVQK

SEQ ID NO: 41272 - protein, 478 aa, Bacillus sp.
NGTMMQYFEWYLPNDGNHWNRLNSDASNLKSKGITAVWIPPAWKATSQNDVGYGAYDLYDLGEFNQRGTVRTKYGTRSQLQAAVTSLKNNGIQVYGDVVMNHKGGADATEMVRAVEVNPNNRNQEVTGEYTIEAWTRFDFPGRGNTHSSFKWRWYHFDGVDFDMSRELSNRIYKFRGKAWDWEVDTEFGNYDYLMYADYDMDHPEVVNELRNWGVWYTNTLGLDGFRIDAVKHIKYSFTRDWINHVRSATGKNMFAVAEFWKNDLGAIENYLQKTNWNHSVFDVPLHYNLYNASKSQGNYDMRNIFNGTVVQRHPSHAVTFVDNHDSQPEEALESFVDTWFKPLAYALTLTREQGYPSVFYGDYYGIPTHGVPAMRSKIDPILEARQKYAYGPQHDYLDHPDVIGWTREGDSSHPKSGLATLITDGPGGSKRMYAGLKNAGETWYDITGNRSDTVKIGSDGWGEFHVNDGSVSIYVQK

SEQ ID NO: 41273 - protein, 478 aa, Bacillus sp.
NNTMMQYFEWYLPNDGNHWNRLNSDASNLKSKGITAVWIPPAWKGASQNDVGYGAYDLYDLGEFNQKGTVRTKYGTRSQLQAAVTSLKNNGIQVYGDVVMNHKGGADATEMVRAVEVNPNNRNQEVTGEYTIEAWTRFDFPGRGNTHSSFKWRWYHFDGVDWDQSRRLNNRIYKFRGKAWDWEVDTEFGNYDYLMYADYDMDHPEVVNELRNWGVWYTNTLGLDGFRIDAVKHIKYSFTRDWINHVRSATGKNMFAVAEFWKNDLGAIENYLQKTNWNHSVFDVPLHYNLYNASKSGGNYDMRNIFNGTVVQMHPSHAVTFVDNHDSQPEEALESFVEEWFKPLAYALTLTREQGYPSVFYGDYYGIPTHGVPAMRSKIDPILEARQKYAYGPQHDYLDHPDVIGWTREGDSSHPKSGLATLITDGPGGSKRMYAGLKNAGETWYDITGNRSDTVKIGSDGWGEFHVNDGSVSIYVQK

SEQ ID NO: 41274 - protein, 478 aa, Bacillus sp.
NGTMMQYFEWYLPNDGNHWNRLNSDASNLKSKGITAVWIPPAWKAASQNDVGYGAYDLYDLGEFNQKGTVRTKYGTRSQLQAAVTSLKNNGIQVYGDVVMNHKGGADATEMVRAVEVNPNNRNQEVTGEYTIEAWTRFDFPGRGNTHSSFKWRWYHFDGVDWDQSRQLNNRIYKFRGKAWDWEVDTEFGNYDYLMYVDYDMDHPEVVNELRNWGVWYTNTLGLDGFRIDAVKHIKYSFTRDWINHVRSATGKNMFAVAEFWKNDLGAIENYLQKTNWNHSVFDVPLHYNLYNASKSGGNYDMRNIFNGTVVQRHPSHAVTFVDNHDSQPEEALESFVEEWFKPLAYALTLTREQGYPSVFYGDYYGIPTHGVPAMRSKIDPILEARQKYAYGPQHDYLDHPDVIGWTREGDSSHPKSGLATLITDGPGGSKRMYAGLKNAGETWYDITGNRSDTVKIGSDGWGEFHVNDGSVSIYVQK

SEQ ID NO: 41275 - protein, 478 aa, Bacillus sp.
NGTMMQYFEWYLPNDGNHWNRLNSDASNLKSKGITAVWIPPAWKAASQNDVGYGAYDLYDLGEFNQKGTVRTKYGTRSQLQAAVTSLKNNGIQVYGDVVMNHKGGADATEMVRAVEVNPNNRNQEVTGEYTIEAWTRFDFPGRGNTHSSFKWRWYHFDGVDWDQSRRLDNRIYKFRGKAWDWEVDTEFGNYDYLMYTDYDMDHPEVVNELRNWGVWYTNTLGLDGFRIDAVKHIKYSFTRDWINHVRSATGKNMFAVAEFWKNDLGAIENYLQKTNWNHSVFDVPLHYNLYNASKSGGNYDMRNIFNGTVVQRHPSHAVTFVDNHDSQPEEALESFVEEWFKPLAYALTLTREQGYPSVFYGDYYGIPTHGVPAMRSKIDPILEARQKYAYGPQHDYLDHPDVIGWTREGDSSHPKSGLATLITDGPGGSKRMYAGLKNAGETWYDITGNRSDTVKIGSDGWGEFHVNDGSVSIYVQK

SEQ ID NO: 41276 - protein, 478 aa, Bacillus sp.
NGTMMQYFEWYLPNDGNHWNRLNSDASNLKSKGITAVWIPPAWKAASQNDVGYGAYDLYDLGEFNQKGTVRTKYGTRSQLQAAVTSLKNNGIQVYGDVVMNHKGGADATEMVRAVEVNPNNRNQEVTGEYTIEAWTRFDFPGRGNTHSSFKWRWYHFDGVDWDQSRDLQNRIYKFRGKAWDWEVDTEFGNYDYLMYADYDMDHPEVVNELRNWGVWYTNTLGLDGFRIDAVKHIKYSFTRDWINHVRSATGKNMFAVAEFWKNDLGAIENYLQKTNWNHSVFDVPLHYNLYNASKSGGNYDMRNIFNGTVVQRHPSHAVTFVDNHDSQPEEALESFVETWFKPLAYALTLTREQGYPSVFYGDYYGIPTHGVPAMRSKIDPILEARQKYAYGPQHDYLDHPDVIGWTREGDSSHPKSGLATLITDGPGGSKRMYAGLKNAGETWYDITGNRSDTVKIGSDGWGEFHVNKASVSIYVQK

SEQ ID NO: 41277 - protein, 478 aa, Bacillus sp.
NLTMMQYFEWYLPNDGNHWNRLNSDASNLKSKGITAVWIPPAWKGASQNDVGYGAYDLYDLGEFNQKGTVRTKYGTRSQLQAAVTSLKNNGIQVYGDVVMNHKGGADATEMVRAVEVNPNNRNQEVTGEYTIEAWTRFDFPGRGNTHSSFKWRWYHFDGVDWDQSRRLNNRIYKFRGKAWDWEVDTEFGNYDYLMYADYDMDHPEVVNELRNWGVWYTNTLGLDGFRIDAVKHIKYSFTRDWINHVRSATGKNMFAVAEFWKNDLGAIENYLQKTNWNHSVFDVPLHYNLYNASKSGGNYDMRNIFNGTVVQAHPSHAVTFVDNHDSQPEEALESFVEEWFKPLAYALTLTREQGYPSVFYGDYYGIPTHGVPAMRSKIDPILEARQKYAYGPQHDYLDHPDVIGWTREGDSSHPKSGLATLITDGPGGSKRMYAGLKNAGETWYDITGNRSDTVKIGSDGWGEFHVNDGSVSIYVQK

SEQ ID NO: 41278 - protein, 478 aa, Bacillus sp.
NGTMMQYFEWYLPNDGNHWNRLNSDASNLKSKGITAVWIPPAWKGASQNDVGYGAYDLYDLGEFNQKGTVRTKYGTRSQLQAAVTSLKNNGIQVYGDVVMNHKGGADATEMVPAVEVNPNNRNQEVTGEYTIEAWTRFDFPGRGNTHSSFKWRWYHFDGVDWDQSRRTNNRIYKFRSKAWDWEVDTEFGNYDYLMYTDYDMDHPEVVNELRNWGVWYTNTLGLDGFRIDAVKHIKYSFTRDWINHVRSATGKNMFAVAEFWKNDLGAIENYLQKTNWNHSVFDVPLHYNLYNASKSGGNYDMRNIFNGTVVQRHPSHAVTFVDNHDSQPEEALESFVEEWFKPLAYALTLTREQGYPSVFYGDYYGIPTHGVPAMRSKIDPILEARQKYAYGPQHDYLDHPDVIGWTREGDSSHPKSGLATLITDGPGGSKRMYAGLKNAGETWYDITGNRSDTVKIGSDGWGEFHVNDGSVSIYVQK

SEQ ID NO: 41279 - protein, 478 aa, Bacillus sp.
NGTMMQYFEWYLPNDGNHWNRLNSDASNLKSKGITAVWIPPAWKGASQNDVGYGAYDLYDLGEFNQKGTVRTKYGTRSQLQAAVTSLKNNGIQVYGDVVMNHKGGADATEMVRAVEVNPNNRNQEVTGEYTIEAWTRFDFPGRGNTHSSFKWRWYHFDGVDWDQSRRLNNRIYKFRNKAWDWEVDTEFGNYDYLMYADYDMDHPESVNELRNWGVWYTNTLGLDGFRIDAVKHIKYSFTRDWINHVRSATGKNMFAVAEFWKNDLGAIENYLQKTNWNHSVFDVPLHYNLYNASKSGGNYDMRNIFNGTVVQRHPSHAVTFVDNHDSQPEEALESFVEEWFKPLAYALTLTREQGYPSVFYGDYYGIPTHGVPAMRSKIDPILEARQKYAYGPQHDYLDHPDVIGWTREGDSSHPKSGLATLITDGPGGSKRMYAGLKNAGETWYDITGNRSDTVKIGSDGWGEFHVNDGSVSIYVQK

SEQ ID NO: 41280 - protein, 478 aa, Bacillus sp.
NGTMMQYFEWYLPNDGNHWNRLNSDASNLKSKGITAVWIPPAWKGASQNDVGYGAYDLYDLGEFNQKGTVRTKYGTRSQLQAAVTSLKNNGIQVYGDVVMNHKGGADATEMVRAVEVNPNNRNQEVTGEYTIEAWTRFDFPGRGNTHSSFKWRWYHFDGVDWDQSRRLNNRIYKFRGKAWDWEVDTEFGNYDYLMYADYDMDHPEVVNELRNWGVWYTNTLGLDGFRIDAVKHIKYSFTRDWINHVRSATGKNMFAVAEFWKNDLGAIENYLQKTNWNHSVFDVPLHYNLYNASKSGGNYDMRNIFNGTVVQRHPSHAVTFVDNHDSQPEEALESFVDPWFKPLAYALTLTREQGYPSVFYGDYYGIPTHGVPAMRSKIDPILEARQKYAYGPQHDYLDHPDVIGWTREGDSSHPKSGLATLITDGPGGSKRMYAGLKNAGETWYDITGNRSDTVKIGSDGWGEFHVNQQSVSIYVQK

SEQ ID NO: 41281 - protein, 478 aa, Bacillus sp.
NGTMMQYFEWYLPNDGNHWNRLNSDASNLKSKGITAVWIPPAWKATSQNDVGYGAYDLYDLGEFNQKGTVRTKYGTRSQLQAAVTSLKNNGIQVYGDVVMNHKGGADLTEMVRAVEVNPNNRNQEVTGEYTIEAWTRFDFPGRGNTHSSFKWRWYHFDGVDWDQSRNVNNRIYKFRGKAWDWEVDTEFGNYDYLMYADYDMDHPEVVNELRNWGVWYTNTLGLDGFRIDAVKHIKYSFTRDWINHVRSATGKNMFAVAEFWKNDLGAIENYLQKTNWNHSVFDVPLHYNLYNASKSGGNYDMRNIFNGTVVQRHPSHAVTFVDNHDSQPEEALESFVEEWFKPLAYALTLTREQGYPSVFYGDYYGIPTHGVPAMRSKIDPILEARQKYAYGPQHDYLDHPDVIGWTREGDSSHPKSGLATLITDGPGGSKRMYAGLKNAGETWYDITGNRSDTVKIGSDGWGEFHVNDGSVSIYVQK

SEQ ID NO: 41282 - protein, 478 aa, Bacillus sp.
NGTMMQYFEWYLPNDGNHWNRLNSDASNLKSKGITAVWIPPAWKGASQNDVGYGAYDLYDLGEFNQKGTVRTKYGTRSQLQAAVTSLKNNGIQVYGDVVMNHKGGADATEMVRAVEVNPNNRNQEVTGEYTIEAWTRFDFPGRGNTHSSFKWRWYHFDGVDWDQSRDFNNRIYKFRGKAWDWEVDTEFGNYDYLMYADYDMDHPEVVNELRNWGVWYTNTLGLDGFRIDAVKHIKYSFTRDWINHVRSATGKNMFAVAEFWKNDLGAIENYLQKTNWNHSVFDVPLHYNLYNASKSGGNYDMRNIFNGTVVQRHPSHAVTFVDNHDSQPEEALESFVEEWFKPLAYALTLTREQGYPSVFYGDYYGIPTHGVPAMRSKIDPILEARQKYAYGPQHDYLDHPDVIGWTREGDSSHPKSGLATLITDGPGGSKRMYAGLKNTGETWYNITGNRSDTVKIGSDGWGEFHVNDGSVSIYVQK

SEQ ID NO: 41283 - protein, 478 aa, Bacillus sp.
NGTMMQYFEWYLPNDGNHWNRLNSDASNLKSKGITAVWIPPAWKGASQNDVGYGAYDLYDLGEFNQKGTVRTKYGTRSQLQAAVTSLKNNGIQVYGDVVMNHKGGADATEMVRAVEVNPNNRNQEVTGEYTIEAWTRFDFPGRGNTHSSFKWRWYHFDGVDWDQSRNLTNRIYKFRSKAWDWEVDTEFGNYDYLMYTDYDMDHPEVVNELRNWGVWYTNTLGLDGFRIDAVKHIKYSFTRDWINHVRSATGKNMFAVAEFWKNDLGAIENYLQKTNWNHSVFDVPLHYNLYNASKSGGNYDMRNIFNGTVVQRHPSHAVTFVDNHDSQPEEALESFVEEWFKPLAYALTLTREQGYPSVFYGDYYGIPTHGVPAMRSKIDPILEARQKYAYGPQHDYLDHPDVIGWTREGDSSHPKSGLATLITDGPGGSKRMYAGLKNAGETWYDITGNRSDTVKIGSDGWGEFHVNDGSVSIYVQK

SEQ ID NO: 41284 - protein, 478 aa, Bacillus sp.
NGTMMQYFEWYLPNDGNHWNRLNSDASNLKSKGITAVWIPPAWKGASQNDVGYGAYDLYDLGEFNQKGTVRTKYGTRSQLQAAVTSLKNNGIQVYGDVVMNHKGGADATEMVRAVEVNPNNRNQEVTGEYTIEAWTRFDFPGRGNTHSSFKWRWYHFDGVDWDQSRRLNNRIYKFRGKAWDWEVDTEFGNYDYLMYADYDMDHPEVVNELRNWGVWYTNTLGLDGFRIDAVKHIKYSFTRDWINHVRSATGKNMFAVAEFWKNDLGAIENYLQKTNWNHSVFDVPLHYNLYNASKSGGNYDMRNIFNGTVVQRHPSHAVTFVDNHDSQPEEALESFVDPWFKPLAYALTLTREQGYPSVFYGDYYGIPTHGVPAMRSKIDPILEARQKYAYGPQHDYLDHPDVIGWTREGDSSHPKSGLATLITDGPGGSKRMYAGLKNAGETWYDITGNRSDTVKIGSDGWGEFHVNKSSVSIYVQK

SEQ ID NO: 41285 - protein, 478 aa, Bacillus sp.
NGTMMQYFEWYLPNDGNHWNRLNSDASNLKSKGITAVWIPPAWKGASQNDVGYGAYDLYDLGEFNQKGTVRTKYGTRSQLQAAVTSLKNNGIQVYGDVVMNHKGGADATEMVRAVEVNPNNRNQEVTGEYTIEAWTRFDFPGRGNTHSSFKWRWYHFDGVDWDQSRDLENRIYKFRGKAWDWEVDTEFGNYDYLMYADYDMDHPEVVNELRNWGVWYTNTLGLDGFRIDAVKHIKYSFTRDWINHVRSATGKNMFAVAEFWKNDLGAIENYLQKTNWNHSVFDVPLHYNLYNASQSGGNYDMRNIFNGTVVQRHPSHAVTFVDNHDSQPEEALESFVEPWFKPLAYALTLTREQGYPSVFYGDYYGIPTHGVPAMRSKIDPILEARQKYAYGPQHDYLDHPDVIGWTREGDSSHPKSGLATLITDGPGGSKRMYAGLKNAGETWYDITGNRSDTVKIGSDGWGEFHVNKSSVSIYVQK

SEQ ID NO: 41286 - protein, 478 aa, Bacillus sp.
NGTMMQYFEWYLPNDGNHWNRLNSDASNLKSKGITAVWIPPAWKAASQNDVGYGAYDLYDLGEFNQKGTVRTKYGTRSQLQAAVTSLKNNGIQVYGDVVMNHKGGADATEMVRAVEVNPNNRNQEVTGEYTIEAWTRFDFPGRGNTHSSFKWRWYHFDGVDWDQSRDLQNRIYKFRGKAWDWEVDTEFGNYDYLMYADYDMDHPEVVNELRNWGVWYTNTLGLDGFRIDAVKHIKYSFTRDWINHVRIATGKNMFAVAEFWKNDLGAIENYLQKTNWNHSVFDVPLHYNLYNASKSGGNYDMRNIFNGTVVQRHPSHAVTFVDNHDSQPEEALESFVDEWFKPLAYALTLTREQGYPSVFYGDYYGIPTHGVPAMRSKIDPILEARQKYAYGPQHDYLDHPDVIGWTREGDSSHPKSGLATLITDGPGGSKRMYAGLKNAGETWYDITGNRSDTVKIGSDGWGEFHVNDQSVSIYVQK

SEQ ID NO: 41287 - protein, 478 aa, Bacillus sp.
NGTMMQYFEWYLPNDGNHWNRLNSDASNLKSKGITAVWIPPAWKGASQNDVGYGAYDLYDLGEFNQKGTVRTKYGTRSQLQAAVTSLKNNGIQVYGDVVMNHKGGADATEMVRAVEVNPNNRNQEVTGEYTIEAWTRFDFPGRGNTHSSFKWRWYHFDGVDWDQSRRLNNRIYKFRGKAWDWEVDTEFGNYDYLMYADYDMDHPEVVNELRNWGVWYTNTLGLDGFRIDAVKHIKYSFTRDWINHVRSATGKNMFAVAEFWKNDLGAIENYLQKTNWNHSVFDVPLHYNLYNASQSGGNYDMRNIFNGTVVQRHPSHAVTFVDNHDSQPEEALESFVEPWFKPLAYALTLTREQGYPSVFYGDYYGIPTHGVPAMRSKIDPILEARQKYAYGPQHDYLDHPDVIGWTREGDSSHPKSGLATLITDGPGGSKRMYAGLKNAGETWYDITGNRSDTVKIGSDGWGEFHVNKSSVSIYVQK

SEQ ID NO: 41288 - protein, 478 aa, Bacillus sp.
NGTMMQYFEWYLPNDGNHWNRLNSDASNLKSKGITAVWIPPAWKATSQNDVGYGAYDLYDLGEFNQKGTVRTKYGTRSQLQAAVTSLKNNGIQVYGDVVMNHKGGADATEMVRAVEVNPNNRNQEVTGEYTIEAWTRFDFPGRGNTHSSFKWRWYHFDGVDWDQSRNLNNRIYKFRGKAWDWEVDTEFGNYDYLMYTDYDMDHPEVVNELRNWGVWYTNTLGLDGFRIDAVKHIKYSFTRDWINHVRSATGKNMFAVAEFWKNDLGAIENYLQKTNWNHSVFDVPLHYNLYNASKSGGNYDMRNIFNGTVVQRHPSHAVTFVDNHDSQPEEALESFVEEWFKPLAYALTLTREQGYPSVFYGDYYGIPTHGVPAMRSKIDPILEARQKYAYGPQHDYLDHPDVIGWTREGDSSHPKSGLATLITDGPGGSKRMYAGLKNAGETWYDITGNRSDTVKIGSDGWGEFHVNDGSVSIYVQK

SEQ ID NO: 41289 - protein, 478 aa, Bacillus sp.
NGTMMQYFEWYLPNDGNHWNRLNSDASNLKSKGITAVWIPPAWKGASQNDVGYGAYDLYDLGEFNQKGTVRTKYGTRSQLQAAVTSLKNNGINVYGDVVMNHKGGADATEMVRAVEVNPNNRNQEVTGEYTIEAWTRFDFPGRGNTHSSFKWRWYHFDGVDWDQSRRLNNRIYKFRGKAWDWEVDTEFGNYDYLMYADYDMDHPEVVNELRNWGVWYTNTLGLDGFRIDAVKHIKYSFTRDWINHVRSATGKNMFAVAEFWKNDLGAIENYLQKTNWNHSVFDVPLHYNLYNASKSGGNYDMRNIFNGTVVQSHPNHAVTFVDNHDSQPEEALESFVEEWFKPLAYALTLTREQGYPSVFYGDYYGIPTHGVPAMRSKIDPILEARQKYAYGPQHDYLDHPDVIGWTREGDSSHPKSGLATLITDGPGGSKRMYAGLKNAGETWYDITGNRSDTVKIGSDGWGEFHVNDGSVSIYVQK

SEQ ID NO: 41290 - protein, 478 aa, Bacillus sp.
NGTMMQYFEWYLPNDGNHWNRLNSDASNLKSKGITAVWIPPAWKGASQNDVGYGAYDLYDLGEFNQKGTVRTKYGTRSQLQAAVTSLKNNGIQVYGDVVMNHKGGADATEMVRAVEVNPNNRNQEVTGEYTIEAWTRFDFPGRGNTHSSFKWRWYHFDGVDWDQSRRLNNRIYKFRGKAWDWEVDTEFGNYDYLMYADYDMDHPEVVNELRNWGVWYTNTLGLDGFRIDAVKHIKYSFTRDWINHVRSATGKNMFAVAEFWKNDLGAIENYLQKTNWNHSVFDVPLHYNLYNASKSSGNYDMRNIFNGTVVQRHPSHAVTFVDNHDSQPEEALESFVDTWFKPLAYALTLTREQGYPSVFYGDYYGIPTHGVPAMRSKIDPILEARQKYAYGPQHDYLDHPDVIGWTREGDSSHPKSGLATLITDGPGGSKRMYAGLKNAGETWYDITGNRSDTVKIGSDGWGEFHVNQASVSIYVQK

SEQ ID NO: 41291 - protein, 478 aa, Bacillus sp.
NGTMMQYFEWYLPNDGNHWNRLNSDASNLKSKGITAVWIPPAWKGASQNDVGYGAYDLYDLGEFNQKGTVRTKYGTRSQLQAAVTSLKNNGIQVYGDVVMNHKGGADATEMVRAVEVNPNNRNQEVTGEYTIEAWTRFDFPGRGNTHSSFKWRWYHFDGVDWDQSRDLTNRIYKFRGKAWDWEVDTEFGNYDYLMYADYDMDHPEVVNELRNWGVWYTNTLGLDGFRIDAVKHIKYSFTRDWINHVRSATGKNMFAVAEFWKNDLGAIENYLQKTNWNHSVFDVPLHYNLYNASQSGGNYDMRNIFNGTVVQRHPSHAVTFVDNHDSQPEEALESFVEPWFKPLAYALTLTREQGYPSVFYGDYYGIPTHGVPAMRSKIDPILEARQKYAYGPQHDYLDHPDVIGWTREGDSSHPKSGLATLITDGPGGSKRMYAGLKNAGETWYDITGNRSDTVKIGSDGWGEFHVNKSSVSIYVQK

SEQ ID NO: 41292 - protein, 478 aa, Bacillus sp.
NGTMMQYFEWYLPNDGNHWNRLNSDASNLKSKGITAVWIPPAWKGASQNDVGYGAYDLYDLGEFNQKGTVRTKYGTRSQLQAAVTSLKNNGIQVYGDVVMNHKGGADATEMVRAVEVNPNNRNQEVTGEYTIEAWTRFDFPGRGNTHSSFKWRWYHFDGVDWDQSRRLNNRIYKFRGKAWDWEVDTEFGNYDYLMYADYDMDHPEVVNELRNWGVWYTNTLGLDGFRIDAVKHIKYSFTRDWINHVRSATGKNMFAVAEFWKNDLGAIENYLQKTNWNHSVFDVPLHYNLYNASKSAGNYDMRNIFNGTVVQRHPSHAVTFVDNHDSQPEEALESFVDTWFKPLAYALTLTREQGYPSVFYGDYYGIPTHGVPAMRSKIDPILEARQKYAYGPQHDYLDHPDVIGWTREGDSSHPKSGLATLITDGPGGSKRMYAGLKNAGETWYDITGNRSDTVKIGSDGWGEFHVNQQSVSIYVQK

SEQ ID NO: 41293 - protein, 478 aa, Bacillus sp.
NGTMMQYFEWYLPNDGNHWNRLNSDASNLKSKGITAVWIPPAWKGASQNDVGYGAYDLYDLGEFNQKGTVRTKYGTRSQLQAAVTSLKNNGIQVYGDVVMNHKGGADATEMVRAVEVNPNNRNQEVTGEYTIEAWTRFDFPGRGNTHSSFKWRWYHFDGVDWDQSRNVNNRIYKFRGKAWDWEVDTEFGNYDYLMYADYDMDHPEVVNELRNWGVWYTNTLGLDGFRIDAVKHIKYSFTRDWINHVRSATGKNMFAVAEFWKNDLGAIENYLQKTNWNHSVFDVPLHYNLYNASQSGGNYDMRNIFNGTVVQRHPSHAVTFVDNHDSQPEEALESFVEPWFKPLAYALTLTREQGYPSVFYGDYYGIPTHGVPAMRSKIDPILEARQKYAYGPQHDYLDHPDVIGWTREGDSSHPKSGLATLITDGPGGSKRMYAGLKNAGETWYDITGNRSDTVKIGSDGWGEFHVNKSSVSIYVQK

SEQ ID NO: 41294 - protein, 478 aa, Bacillus sp.
NGTMMQYFEWYLPNDGNHWNRLNSDASNLKSKGITAVWIPPAWKGASQNDVGYGAYDLYDLGEFNQKGTVRTKYGTRSQLQAAVTSLKNNGINVYGDVVMNHKGGADATEMVRAVEVNPNNRNQEVTGEYTIEAWTRFDFPGRGNTHSSFKWRWYHFDGVDWDQSRRLNNRIYKFRGKAWDWEVDTEFGNYDYLMYADYDMDHPEVVNELRNWGVWYTNTLGLDGFRIDAVKHIKYSFTRDWINHVRSATGKNMFAVAEFWKNDLGAIENYLQKTNWNHSVFDVPLHYNLYNASKSGGNYDMRNIFNGTVVQAHPMHAVTFVDNHDSQPEEALESFVEEWFKPLAYALTLTREQGYPSVFYGDYYGIPTHGVPAMRSKIDPILEARQKYAYGPQHDYLDHPDVIGWTREGDSSHPKSGLATLITDGPGGSKRMYAGLKNAGETWYDITGNRSDTVKIGSDGWGEFHVNDGSVSIYVQK

SEQ ID NO: 41295 - protein, 478 aa, Bacillus sp.
NGTMMQYFEWYLPNDGNHWNRLNSDASNLKSKGITAVWIPPAWKATSQNDVGYGAYDLYDLGEFNQKGTVRTKYGTRSQLQAAVTSLKNNGIQVYGDVVMNHKGGADATEMVRAVEVNPNNRNQEVTGEYTIEAWTRFDFPGRGNTHSSFKWRWYHFDGVDWDQSRRVNNRIYKFRGKAWDWEVDTEFGNYDYLMYVDYDMDHPEVVNELRNWGVWYTNTLGLDGFRIDAVKHIKYSFTRDWINHVRSATGKNMFAVAEFWKNDLGAIENYLQKTNWNHSVFDVPLHYNLYNASKSGGNYDMRNIFNGTVVQRHPSHAVTFVDNHDSQPEEALESFVEEWFKPLAYALTLTREQGYPSVFYGDYYGIPTHGVPAMRSKIDPILEARQKYAYGPQHDYLDHPDVIGWTREGDSSHPKSGLATLITDGPGGSKRMYAGLKNAGETWYDITGNRSDTVKIGSDGWGEFHVNDGSVSIYVQK

SEQ ID NO: 41296 - protein, 478 aa, Bacillus sp.
NGTMMQYFEWYLPNDGNHWNRLNSDASNLKSKGITAVWIPPAWKGASQNDVGYGAYDLYDLGEFNQKGTVRTKYGTRSQLQAAVTSLKNNGIQVYGDVVMNHKGGADYTEMVRAVEVNPNNRNQEVTGEYTIEAWTRFDFPGRGNTHSSFKWRWYHFDGVDWDQSERLNNRIYKFRGKAWDWEVDTEFGNYDYLMYADYDMDHPEVVNELRNWGVWYTNTLGLDGFRIDAVKHIKYSFTRDWINHVRSATGKNMFAVAEFWKNDLGAIENYLQKTNWNHSVFDVPLHYNLYNASKSGGNYDMRNIFNGTVVQRHPSHAVTFVDNHDSQPEEALESFVEEWFKPLAYALTLTREQGYPSVFYGDYYGIPTHGVPAMRSKIDPILLARQKYAYGPQHDYLDHPDVIGWTREGDSSHPKSGLATLITDGPGGSKRMYAGLKNAGETWYDITGNRSDTVKIGSDGWGEFHVNDGSVSIYVQK

SEQ ID NO: 41297 - protein, 478 aa, Bacillus sp.
NGTMMQYFEWYLPNDGNHWNRLNSDASNLKSKGITAVWIPPAWKGASQNDVGYGAYDLYDLGEFNQKGTVRTKYGTRSQLQAAVTSLKNNGIQVYGDVVMNHKGGADATEMVRAVEVNPNNRNQEVTGEYTIEAWTRFDFPGRGNTHSSFKWRWYHFDGVDWDQSRQTNNRIYKFRGKAWDWEVDTEFGNYDYLMYADYDMDHPEVVNELRNWGVWYTNTLGLDGFRIDAVKHIKYSFTRDWINHVRSATGKNMFAVAEFWKNDLGAIENYLQKTNWNHSVFDVPLHYNLYNASKSGGNYDMRNIFNGTVVQVHPSHAVTFVDNHDSQPEEALESFVEEWFKPLAYALTLTREQGYPSVFYGDYYGIPTHGVPAMRSKIDPILEARQKYAYGPQHDYLDHPDVIGWTREGDSSHPKSGLATLITDGPGGSKRMYAGLKNAGETWYDITGNRSDTVKIGSDGWGEFHVNYGSVSIYVQK

SEQ ID NO: 41298 - protein, 478 aa, Bacillus sp.
NGTMMQYFEWYLPNDGNHWNRLNSDASNLKSKGITAVWIPPAWKGASQNDVGYGAYDLYDLGEFNQKGTVRTKYGTRSQLQAAVTSLKNNGIQVYGDVVMNHKGGADATEMVRAVEVNPNNRNQEVTGEYTIEAWTRFDFPGRGNTHSSFKWRWYHFDGVDWDQSRQLDNRIYKFRGKAWDWEVDTEFGNYDYLMYADYDMDHPEVVNELRNWGVWYTNTLGLDGFRIDAVKHIKYSFTRDWINHVRSATGKNMFAVAEFWKNDLGAIENYLQKTNWNHSVFDVPLHYNLYNASKSQGNYDMRNIFNGTVVQRHPSHAVTFVDNHDSQPEEALESFVDTWFKPLAYALTLTREQGYPSVFYGDYYGIPTHGVPAMRSKIDPILEARQKYAYGPQHDYLDHPDVIGWTREGDSSHPKSGLATLITDGPGGSKRMYAGLKNAGETWYDITGNRSDTVKIGSDGWGEFHVNGSSVSIYVQK

SEQ ID NO: 41299 - protein, 478 aa, Bacillus sp.
NGTMMQYFEWYLPNDGNHWNRLNSDASNLKSKGITAVWIPPAWKGASQNDVGYGAYDLYDLGEFNQKGTVRTKYGTRSQLQAAVTSLKNNGIQVYGDVVMNHKGGADATEMVRAVEVNPNNRNQEVTGEYTIEAWTRFDFPGRGNTHSSFKWRWYHFDGVDWDQSERLNNRIYKFRGKAWDWEVDTEFGNYDYLMYADYDMDHPEVVNELRNWGVWYTNTLGLDGFRIDAVKHIKYSFTRDWINHVRSATGKNMFAVAEFWKNDLGAIENYLQKTNWNHSVFDVPLHYNLYNASKSGGNYDMRNIFNGTVVQRHPSHAVTFVDNHDSQPEEALESFVEEWFKPLAYALTLTREQGYPSVFYGDYYGIPTHGVPAMRSKIDPILEARQKYAYGPQHDYLDHPDVIGWTREGDSSHPPSGLATLITDGPGGSKRMYAGLKNAGETWYDITGNRSDTVKIGSDGWGEFHVNDGSVSIYVQK

SEQ ID NO: 41300 - protein, 478 aa, Bacillus sp.
NGTMMQYFEWYLPNDGNHWNRLNSDASNLKSKGITAVWIPPAWKGASQNDVGYGAYDLYDLGEFNQKGTVRTKYGTRSQLQAAVTSLKNNGIQVYGDVVMNHKGGADATEMVRAVEVNPNNRNQEVTGEYTIEAWTRFDFPGRGNTHSSFKWRWYHFDGVDWDQSRRLNNRIYKFRGKAWDWEVDTEFGNYDYLMYADYDMDHPEVVNELRNWGVWYTNTLGLDGFRIDAVKHIKYSFTRDWINHVRSATGKNMFAVAEFWKNDLGAIENYLQKTNWNHSVFDVPLHYNLYNASQSGGNYDMRNIFNGTVVQRHPSHAVTFVDNHDSQPEEALESFVDPWFKPLAYALTLTREQGYPSVFYGDYYGIPTHGVPAMRSKIDPILEARQKYAYGPQHDYLDHPDVIGWTREGDSSHPKSGLATLITDGPGGSKRMYAGLKNAGETWYDITGNRSDTVKIGSDGWGEFHVNKQSVSIYVQK

SEQ ID NO: 41301 - protein, 478 aa, Bacillus sp.
NGTMMQYFEWYLPNDGNHWNRLNSDASNLKSKGITAVWIPPAWKGASQNDVGYGAYDLYDLGEFNQKGTVRTKYGTRSQLQAAVTSLKNNGIQVYGDVVMNHKGGADATEMVRAVEVNPNNRNQEVTGEYTIEAWTRFDFPGRGNTHSSFKWRWYHFDGVDWDQSRRLNNRIYKFRGKAWDWEVDTEFGNYDYLMYADYDMDHPEVVNELRNWGVWYTNTLGLDGFRIDAVKHIKYSFTRDWINHVRSATGKNMFAVAEFWKNDLGAIENYLQKTNWNHSVFDVPLHYNLYNASKSAGNYDMRNIFNGTVVQRHPSHAVTFVDNHDSQPEEALESFVDTWFKPLAYALTLTREQGYPSVFYGDYYGIPTHGVPAMRSKIDPILEARQKYAYGPQHDYLDHPDVIGWTREGDSSHPKSGLATLITDGPGGSKRMYAGLKNAGETWYDITGNRSDTVKIGSDGWGEFHVNKASVSIYVQK

SEQ ID NO: 41302 - protein, 478 aa, Bacillus sp.
NGTMMQYFEWYLPNDGNHWNRLNSDASNLKSKGITAVWIPPAWKGASQNDVGYGAYDLYDLGEFNQKGTVRTKYGTRSQLQAAVTSLKNNGIQVYGDVVMNHKGGADATEMVRAVEVNPNNRNQEVTGEYTIEAWTRFDFPGRGNTHSSFKWRWYHFDGVDWDQSRRLNNRIYKFRGKAWDWEVDTEFGNYDYLMYADYDMDHPEVVNELRNWGVWYTNTLGLDGFRIDAVKHIKYSFTRDWINHVRSATGKNMFAVAEFWKNDLGAIENYLQKTNWNHSVFDVPLHYNLYNASKSGGNYDMRNIFNGTVVQRHPSHAVTFVDNHDSQPEEALESFVDEWFKPLAYALTLTREQGYPSVFYGDYYGIPTHGVPAMRSKIDPILEARQKYAYGPQHDYLDHPDVIGWTREGDSSHPKSGLATLITDGPGGSKRMYAGLKNAGETWYDITGNRSDTVKIGSDGWGEFHVNQASVSIYVQK

SEQ ID NO: 41303 - protein, 478 aa, Bacillus sp.
NQTMMQYFEWYLPNDGNHWNRLNSDASNLKSKGITAVWIPPAWKGASQNDVGYGAYDLYDLGEFNQKGTVRTKYGTRSQLQAAVTSLKNNGIQVYGDVVMNHKGGADATEMVRAVEVNPNNRNQEVTGEYTIEAWTRFDFPGRGNTHSSFKWRWYHFDGVDWDQSRRLNNRIYKFRGKAWDWEVDTEFGNYDYLMYADYDMDHPEVVNELRNWGVWYTNTLGLDGFRIDAVKHIKYSFTRDWINHVRSATGKNMFAVAEFWKNDLGAIENYLQKTNWNHSVFDVPLHYNLYNASKSGGNYDMRNIFNGTVVQMHPNWAVTFVDNHDSQPEEALESFVEEWFKPLAYALTLTREQGYPSVFYGDYYGIPTHGVPAMRSKIDPILEARQKYAYGPQHDYLDHPDVIGWTREGDSSHPKSGLATLITDGPGGSKRMYAGLKNAGETWYDITGNRSDTVKIGSDGWGEFHVNDGSVSIYVQK

SEQ ID NO: 41304 - protein, 478 aa, Bacillus sp.
NGTMMQYFEWYLPNDGNHWNRLNSDASNLKSKGITAVWIPPAWKGASQNDVGYGAYDLYDLGEFNQKGTVRTKYGTRSQLQAAVTSLKNNGIQVYGDVVMNHKGGADATEMVRAVEVNPNNRNQEVTGEYTIEAWTRFDFPGRGNTHSSFKWRWYHFDGVDWDQSRRLNNRIYKFRGKAWDWEVDTEFGNYDYLMYADYDMDHPEVVNELRNWGVWYTNTLGLDGFRIDAVKHIKYSFTRDWINHVRSATGKNMFAVAEFWKNDLGAIENYLQKTNWNHSVFDVPLHYNLYNASNSGGNYDMRNIFNGTVVQRHPSHAVTFVDNHDSQPEEALESFVDEWFKPLAYALTLTREQGYPSVFYGDYYGIPTHGVPAMRSKIDPILEARQKYAYGPQHDYLDHPDVIGWTREGDSSHPKSGLATLITDGPGGSKRMYAGLKNAGETWYDITGNRSDTVKIGSDGWGEFHVNQQSVSIYVQK

SEQ ID NO: 41305 - protein, 478 aa, Bacillus sp.
NGTMMQYFEWYLPNDGNHWNRLNSDASNLKSKGITAVWIPPAWKGASQNDVGYGAYDLYDLGEFNQKGTVRTKYGTRSQLQAAVTSLKNNGIQVYGDVVMNHKGGADATEMVRAVEVNPNNRQQEVTGEYTIEAWTRFDFPGRGNTHSSFKWRWYHFDGVDWDQSRRLNNRIYKFRGKAWDWEVDTEFGNYDYLMYADYDMDHPEVVNELRNWGVWYTNTLGLDGFRIDAVKHIKYSFTRDWINHVRSATGKNMFAVAEFWKNDLGAIENYLQKTNWNHSVFDVPLHYNLYNASKSGGNYDMRNIFNGTVVQRHPSHAVTFVDNHDSQPEEALESFVEEWFKPLAYALTLTREQGYPSVFYGDYYGIPTHGVPAMRSKIDPILEARQKYAYGPQHDYLDHPDVIGWTREGDSSHPKSGLATLITDGPGGSKRMYVGLKNAGETWYDITGNRSDTVKIGSDGWGEFHVNDGSVSIYVQK

SEQ ID NO: 41306 - protein, 478 aa, Bacillus sp.
NGTMMQYFEWYLPNDGNHWNRLNSDASNLKSKGITAVWIPPAWKGASQNDVGYGAYDLYDLGEFNQKGTVRTKYGTRSQLQAAVTSLKNNGIQVYGDVVMNHKGGADLTEMVRAVEVNPNNRNQEVTGEYTIEAWTRFDFPGRGNTHSSFKWRWYHFDGVDWDQSRRLNNRIYKFRGKAWDWEVDTEFGNYDYLMYADYDMDHPEVVNELRNWGVWYTNTLGLDGFRIDAVKHIKYSFTRDWINHVRIATGKNMFAVAEFWKNDLGAIENYLQKTNWNHSVFDVPLHYNLYNASKSGGNYDMRNIFNGTVVQRHPSHAVTFVDNHDSQPEEALESFVDEWFKPLAYALTLTREQGYPSVFYGDYYGIPTHGVPAMRSKIDPILEARQKYAYGPQHDYLDHPDVIGWTREGDSSHPKSGLATLITDGPGGSKRMYAGLKNAGETWYDITGNRSDTVKIGSDGWGEFHVNDQSVSIYVQK

SEQ ID NO: 41307 - protein, 478 aa, Bacillus sp.
NGTMMQYFEWYLPNDGNHWNRLNSDASNLKSKGITAVWIPPAWKAASQNDVGYGAYDLYDLGEFNQKGTVRTKYGTRSQLQAAVTSLKNNGIQVYGDVVMNHKGGADATEMVPAVEVNPNNRNQEVTGEYTIEAWTRFDFPGRGNTHSSFKWRWYHFDGVDWDQSRDLQNRIYKFRGKAWDWEVDTEFGNYDYLMYADYDMDHPEVVNELRNWGVWYTNTLGLDGFRIDAVKHIKYSFTRDWINHVRSATGKNMFAVAEFWKNDLGAIENYLQKTNWNHSVFDVPLHYNLYNASKSGGNYDMRNIFNGTVVQRHPSHAVTFVDNHDSQPEEALESFVETWFKPLAYALTLTREQGYPSVFYGDYYGIPTHGVPAMRSKIDPILEARQKYAYGPQHDYLDHPDVIGWTREGDSSHPKSGLATLITDGPGGSKRMYAGLKNAGETWYDITGNRSDTVKIGSDGWGEFHVNKASVSIYVQK

SEQ ID NO: 41308 - protein, 478 aa, Bacillus sp.
NGTMMQYFEWYLPNDGNHWNRLNSDASNLKSKGITAVWIPPAWKGASQNDVGYGAYDLYDLGEFNQKGTVRTKYGTRSQLQAAVTSLKNNGIQVYGDVVMNHKGGADATEMVRAVEVNPNNRNQEVTGEYTIEAWTRFDFPGRGNTHSSFKWRWYHFDGVDWDQSRRLNNRIYKFRGKAWDWEVDTEFGNYDYLMYADYDMDHPEVVNELRNWGVWYTNTLGLDGFRIDAVKHIKYSFTRDWINHVRSATGKNMFAVAEFWKNDLGAIENYLQKTNWNHSVFDVPLHYNLYNASKSGGNYDMRNIFNGTVVQRHPSHAVTFVDNHDSQPEEALESFVDPWFKPLAYALTLTREQGYPSVFYGDYYGIPTHGVPAMRSKIDPILEARQKYAYGPQHDYLDHPDVIGWTREGDSSHPKSGLATLITDGPGGSKRMYAGLKNAGETWYDITGNRSDTVKIGSDGWGEFHVNQSSVSIYVQK

SEQ ID NO: 41309 - protein, 478 aa, Synthetic construct
NGTMMQYFEWYLPNDGNHWNRLNSDASNLKSKGITAVWIPPAWKGASQNDVGYGAYDLYDLGEFNQKGTVRTKYGTRSQLQAAVTSLKNNGIQVYGDVVMNHKGGADATEMVRAVEVNPNNRNQEVTGEYTIEAWTRFDFPGRGNTHSSFKWRWYHFDGVDWDQSRRLSNRIYKFRGKAWDWEVDTENGNYDYLMYADIDMDHPEVVNELRNWGVWYTNTLGLDGFRIDAVKHIKYSFTRDWINHVRSATGKNMFAVAEFWKNDLGAIENYLQKTNWNHSVFDVPLHYNLYNASKSGGNYDMRKLLNGTVVSKHPSKAVTFVDNHDTQPEEALESFVQPWFKPLAYAFILTRESGYPSVFYGDMYGIPTHGVPAMKHKIEPILKARKQYAYGAQHDYLDHHDIVGWTREGDSSHPNSGLATLITDGPGGAKRMYVGRQNAGETWHDITGNRSEPVVINSEGWGEFHVNKGSVSIYVQR

SEQ ID NO: 41310 - protein, 478 aa, Bacillus sp.
NGTMMQYFEWYLPNDGNHWNRLNSDASNLKSKGITAVWIPPAWKAASQNDVGYGAYDLYDLGEFNQKGTVRTKYGTRSQLQAAVTSLKNNGIQVYGDVVMNHKGGADATEMVRAVEVNPNNRNQEVTGEYTIEAWTRFDFPGRGNTHSSFKWRWYHFDGVDWDQSRRVNNRIYKFRGKAWDWEVDTEFGNYDYLMYTDYDMDHPEVVNELRNWGVWYTNTLGLDGFRIDAVKHIKYSFTRDWINHVRSATGKNMFAVAEFWKNDLGAIENYLQKTNWNHSVFDVPLHYNLYNASKSGGNYDMRNIFNGTVVQRHPSHAVTFVDNHDSQPEEALESFVEEWFKPLAYALTLTREQGYPSVFYGDYYGIPTHGVPAMRSKIDPILEARQKYAYGPQHDYLDHPDVIGWTREGDSSHPKSGLATLITDGPGGSKRMYAGLKNAGETWYDITGNRSDTVKIGSDGWGEFHVNDGSVSIYVQK

SEQ ID NO: 41311 - protein, 478 aa, Bacillus sp.
NGTMMQYFEWYLPNDGNHWNRLNSDASNLKSKGITAVWIPPAWKAVSQNDVGYGAYDLYDLGEFNQKGTVRTKYGTRSQLQAAVTSLKNNGIQVYGDVVMNHKGGADATEMVRAVEVNPNNRNQEVTGEYTIEAWTRFDFPGRGNTHSSFKWRWYHFDGVDWDQSRQLNNRIYKFRGKAWDWEVDTEFGNYDYLMYVDYDMDHPEVVNELRNWGVWYTNTLGLDGFRIDAVKHIKYSFTRDWINHVRSATGKNMFAVAEFWKNDLGAIENYLQKTNWNHSVFDVPLHYNLYNASKSGGNYDMRNIFNGTVVQRHPSHAVTFVDNHDSQPEEALESFVEEWFKPLAYALTLTREQGYPSVFYGDYYGIPTHGVPAMRSKIDPILEARQKYAYGPQHDYLDHPDVIGWTREGDSSHPKSGLATLITDGPGGSKRMYAGLKNAGETWYDITGNRSDTVKIGSDGWGEFHVNDGSVSIYVQK

SEQ ID NO: 41312 - protein, 478 aa, Bacillus sp.
NGTMMQYFEWYLPNDGNHWNRLNSDASNLKSKGITAVWIPPAWKGASQNDVGYGAYDLYDLGEFNQKGTVRTKYGTRSQLQAAVTSLKNNGIQVYGDVVMNHKGGADATEMVRAVEVNPNNRNQEVTGEYTIEAWTRFDFPGRGNTHSSFKWRWYHFDGVDWDQSRRLNNRIYKFRGKAWDWEVDTEFGNYDYLMYADYDMDHPEVVNELRNWGVWYTNTLGLDGFRIDAVKHIKYSFTRDWINHVRSATGKNMFAVAEFWKNDLGAIENYLQKTNWNHSVFDVPLHYNLYNASKSGGNYDMRNIFNGTVVQRHPSHAVTFVDNHDSQPEEALESFVDEWFKPLAYALTLTREQGYPSVFYGDYYGIPTHGVPAMRSKIDPILEARQKYAYGPQHDYLDHPDVIGWTREGDSSHPKSGLATLITDGPGGSKRMYAGLKNAGETWYDITGNRSDTVKIGSDGWGEFHVNQQSVSIYVQK

SEQ ID NO: 41313 - protein, 478 aa, Bacillus sp.
NNTMMQYFEWYLPNDGNHWNRLNSDASNLKSKGITAVWIPPAWKGASQNDVGYGAYDLYDLGEFNQKGTVRTKYGTRSQLQAAVTSLKNNGIQVYGDVVMNHKGGADATEMVRAVEVNPNNRNQEVTGEYTIEAWTRFDFPGRGNTHSSFKWRWYHFDGVDWDQSRRLNNRIYKFRGKAWDWEVDTEFGNYDYLMYADYDMDHPEVVNELRNWGVWYTNTLGLDGFRIDAVKHIKYSFTRDWINHVRSATGKNMFAVAEFWKNDLGAIENYLQKTNWNHSVFDVPLHYNLYNASKSGGNYDMRNIFNGTVVQAHPNHAVTFVDNHDSQPEEALESFVEEWFKPLAYALTLTREQGYPSVFYGDYYGIPTHGVPAMRSKIDPILEARQKYAYGPQHDYLDHPDVIGWTREGDSSHPKSGLATLITDGPGGSKRMYAGLKNAGETWYDITGNRSDTVKIGSDGWGEFHVNDGSVSIYVQK

SEQ ID NO: 41314 - protein, 478 aa, Bacillus sp.
NGTMMQYFEWYLPNDGNHWNRLNSDASNLKSKGITAVWIPPAWKGASQNDVGYGAYDLYDLGEFNQKGTVRTKYGTRSQLQAAVTSLKNNGISVYGDVVMNHKGGADATEMVRAVEVNPNNRNQEVTGEYTIEAWTRFDFPGRGNTHSSFKWRWYHFDGVDWDQSRRLNNRIYKFRGKAWDWEVDTEFGNYDYLMYADYDMDHPEVVNELRNWGVWYTNTLGLDGFRIDAVKHIKYSFTRDWINHVRSATGKNMFAVAEFWKNDLGAIENYLQKTNWNHSVFDVPLHYNLYNASKSGGNYDMRNIFNGTVVQAHPNHAVTFVDNHDSQPEEALESFVEEWFKPLAYALTLTREQGYPSVFYGDYYGIPTHGVPAMRSKIDPILEARQKYAYGPQHDYLDHPDVIGWTREGDSSHPKSGLATLITDGPGGSKRMYAGLKNAGETWYDITGNRSDTVKIGSDGWGEFHVNDGSVSIYVQK

SEQ ID NO: 41315 - protein, 478 aa, Bacillus sp.
NGTMMQYFEWYLPNDGNHWNRLNSDASNLKSKGITAVWIPPAWKATSQNDVGYGAYDLYDLGEFNQKGTVRTKYGTRSQLQAAVTSLKNNGIQVYGDVVMNHKGGADATEMVRAVEVNPNNRNQEVTGEYTIEAWTRFDFPGRGNTHSSFKWRWYHFDGVDWDQSRQLNNRIYKFRGKAWDWEVDTEFGNYDYLMYVDYDMDHPEVVNELRNWGVWYTNTLGLDGFRIDAVKHIKYSFTRDWINHVRSATGKNMFAVAEFWKNDLGAIENYLQKTNWNHSVFDVPLHYNLYNASKSGGNYDMRNIFNGTVVQRHPSHAVTFVDNHDSQPEEALESFVEEWFKPLAYALTLTREQGYPSVFYGDYYGIPTHGVPAMRSKIDPILEARQKYAYGPQHDYLDHPDVIGWTREGDSSHPKSGLATLITDGPGGSKRMYAGLKNAGETWYDITGNRSDTVKIGSDGWGEFHVNDGSVSIYVQK

SEQ ID NO: 41316 - protein, 478 aa, Bacillus sp.
NGTMMQYFEWYLPNDGNHWNRLNSDASNLKSKGITAVWIPPAWKGTSQNDVGYGAYDLYDLGEFNQKGTVRTKYGTRSQLQAAVTSLKNNGIQVYGDVVMNHKGGADATEMVRAVEVNPNNRNQEVTGEYTIEAWTRFDFPGRGNTHSSFKWRWYHFDGVDWDQSRDLQNRIYKFRGKAWDWEVDTEFGNYDYLMYADYDMDHPEVVNELRNWGVWYTNTLGLDGFRIDAVKHIKYSFTRDWINHVRSATGKNMFAVAEFWKNDLGAIENYLQKTNWNHSVFDVPLHYNLYNASKSQGNYDMRNIFNGTVVQRHPSHAVTFVDNHDSQPEEALESFVDTWFKPLAYALTLTREQGYPSVFYGDYYGIPTHGVPAMRSKIDPILEARQKYAYGPQHDYLDHPDVIGWTREGDSSHPKSGLATLITDGPGGSKRMYAGLKNAGETWYDITGNRSDTVKIGSDGWGEFHVNGSSVSIYVQK

SEQ ID NO: 41317 - protein, 478 aa, Bacillus sp.
NGTMMQYFEWYLPNDGNHWNRLNSDASNLKSKGITAVWIPPAWKATSQNDVGYGAYDLYDLGEFNQKGTVRTKYGTRSQLQAAVTSLKNNGIQVYGDVVMNHKGGADATEMVRAVEVNPNNRNQEVTGEYTIEAWTRFDFPGRGNTHSSFKWRWYHFDGVDWDQSRELNNRIYKFRGKAWDWEVDTEFGNYDYLMYTDYDMDHPEVVNELRNWGVWYTNTLGLDGFRIDAVKHIKYSFTRDWINHVRSATGKNMFAVAEFWKNDLGAIENYLQKTNWNHSVFDVPLHYNLYNASKSGGNYDMRNIFNGTVVQRHPSHAVTFVDNHDSQPEEALESFVETWFKPLAYALTLTREQGYPSVFYGDYYGIPTHGVPAMRSKIDPILEARQKYAYGPQHDYLDHPDVIGWTREGDSSHPKSGLATLITDGPGGSKRMYAGLKNAGETWYDITGNRSDTVKIGSDGWGEFHVNDASVSIYVQK

SEQ ID NO: 41318 - protein, 478 aa, Bacillus sp.
NGTMMQYFEWYLPNDGNHWNRLNSDASNLKSKGITAVWIPPAWKAASQNDVGYGAYDLYDLGEFNQKGTVRTKYGTRSQLQAAVTSLKNNGIQVYGDVVMNHKGGADATEMVRAVEVNPNNRNQEVTGEYTIEAWTRFDFPGRGNTHSSFKWRWYHFDGVDWDQSRRLTNRIYKFRGKAWDWEVDTEFGNYDYLMYVDYDMDHPEVVNELRNWGVWYTNTLGLDGFRIDAVKHIKYSFTRDWINHVRSATGKNMFAVAEFWKNDLGAIENYLQKTNWNHSVFDVPLHYNLYNASKSGGNYDMRNIFNGTVVQRHPSHAVTFVDNHDSQPEEALESFVEEWFKPLAYALTLTREQGYPSVFYGDYYGIPTHGVPAMRSKIDPILEARQKYAYGPQHDYLDHPDVIGWTREGDSSHPKSGLATLITDGPGGSKRMYAGLKNAGETWYDITGNRSDTVKIGSDGWGEFHVNDGSVSIYVQK

SEQ ID NO: 41319 - protein, 478 aa, Bacillus sp.
NNTMMQYFEWYLPNDGNHWNRLNSDASNLKSKGITAVWIPPAWKGASQNDVGYGAYDLYDLGEFNQKGTVRTKYGTRSQLQAAVTSLKNNGIQVYGDVVMNHKGGADATEMVRAVEVNPNNRNQEVTGEYTIEAWTRFDFPGRGNTHSSFKWRWYHFDGVDWDQSRRLNNRIYKFRGKAWDWEVDTEFGNYDYLMYADYDMDHPEVVNELRNWGVWYTNTLGLDGFRIDAVKHIKYSFTRDWINHVRSATGKNMFAVAEFWKNDLGAIENYLQKTNWNHSVFDVPLHYNLYNASKSGGNYDMRNIFNGTVVQMHPMHAVTFVDNHDSQPEEALESFVEEWFKPLAYALTLTREQGYPSVFYGDYYGIPTHGVPAMRSKIDPILEARQKYAYGPQHDYLDHPDVIGWTREGDSSHPKSGLATLITDGPGGSKRMYAGLKNAGETWYDITGNRSDTVKIGSDGWGEFHVNDGSVSIYVQK

SEQ ID NO: 41320 - protein, 478 aa, Synthetic construct
NGTMMQYFEWYLPNDGNHWNRLNSDASNLKSKGITAVWIPPAWKGASQNDVGYGAYDLYDLGEFNQKGTVRTKYGTRSQLQAAVTSLKNNGIQVYGDVVMNHKGGADATEMVRAVEVNPNNRNQEVTGEYTIEAWTRFDFPGRGNTHSSFKWRWYHFDGVDWDQSRRLNNRIYLFRGKSWDWPVDTENGNYDYLMYADIDMDHPEVVNELRNWGVWYTNTLGLDGFRIDAVKHIKYSFTRDWINHVRSATGKNMFAVAEFWKNDLGAIENYLQKTNWNHSVFDVPLHYNLYNASKSGGNYDMRNIFNGTVVQRHPSHAVTFVDNHDSQPEEALESFVEEWFKPLAYALTLTREQGYPSVFYGDYYGIPTHGVPAMRSKIDPILEARQKYAYGPQHDYLDHPDVIGWTREGDSSHPKSGLATLITDGPGGSKRMYAGLKNAGETWYDITGNRSDTVKIGSDGWGEFHVNDGSVSIYVQK

SEQ ID NO: 41321 - protein, 478 aa, Bacillus sp.
NGTMMQYFEWYLPNDGNHWNRLNSDASNLKSKGITAVWIPPAWKGASQNDVGYGAYDLYDLGEFNQKGTVRTKYGTRSQLQAAVTSLKNNGIQVYGDVVMNHKGGADATEMVRAVEVNPNNRNQEVTGEYTIEAWTRFDFPGRGNTHSSFKWRWYHFDGVDWDQSRRLNNRIYKFRGKAWDWEVDTEFGNYDYLMYADYDMDHPEVVNELRNWGVWYTNTLGLDGFRIDAVKHIKYSFTRDWINHVRSATGKNMFAVAEFWKNDLGAIENYLQKTNWNHSVFDVPLHYNLYNASKSGGNYDMRNIFNGTVVQRHPSHAVTFVDNHDSQPEEALESFVEPWFKPLAYALTLTREQGYPSVFYGDYYGIPTHGVPAMRSKIDPILEARQKYAYGPQHDYLDHPDVIGWTREGDSSHPKSGLATLITDGPGGSKRMYAGLKNAGETWYDITGNRSDTVKIGSDGWGEFHVNKASVSIYVQK

SEQ ID NO: 41322 - protein, 478 aa, Bacillus sp.
NGTMMQYFEWYLPNDGNHWNRLNSDASNLKSKGITAVWIPPAWKGASQNDVGYGAYDLYDLGEFNQKGTVRTKYGTRSQLQAAVTSLKNNGITVYGDVVMNHKGGADATEMVRAVEVNPNNRNQEVTGEYTIEAWTRFDFPGRGNTHSSFKWRWYHFDGVDWDQSRRLNNRIYKFRGKAWDWEVDTEFGNYDYLMYADYDMDHPEVVNELRNWGVWYTNTLGLDGFRIDAVKHIKYSFTRDWINHVRSATGKNMFAVAEFWKNDLGAIENYLQKTNWNHSVFDVPLHYNLYNASKSGGNYDMRNIFNGTVVQSHPMHAVTFVDNHDSQPEEALESFVEEWFKPLAYALTLTREQGYPSVFYGDYYGIPTHGVPAMRSKIDPILEARQKYAYGPQHDYLDHPDVIGWTREGDSSHPKSGLATLITDGPGGSKRMYAGLKNAGETWYDITGNRSDTVKIGSDGWGEFHVNDGSVSIYVQK

SEQ ID NO: 41323 - protein, 478 aa, Bacillus sp.
NGTMMQYFEWYLPNDGNHWNRLNSDASNLKSKGITAVWIPPAWKAASQNDVGYGAYDLYDLGEFNQKGTVRTKYGTRSQLQAAVTSLKNNGIQVYGDVVMNHKGGADATEMVRAVEVNPNNRNQEVTGEYTIEAWTRFDFPGRGNTHSSFKWRWYHFDGVDWDQSRDFNNRIYKFRGKAWDWEVDTEFGNYDYLMYADYDMDHPEVVNELRNWGVWYTNTLGLDGFRIDAVKHIKYSFTRDWINHVRSATGKNMFAVAEFWKNDLGAIENYLQKTNWNHSVFDVPLHYNLYNASKSGGNYDMRNIFNGTVVQRHPSHAVTFVDNHDSQPEEALESFVEEWFKPLAYALTLTREQGYPSVFYGDYYGIPTHGVPAMRSKIDPILEARQKYAYGPQHDYLDHPDVIGWTREGDSSHPKSGLATLITDGPGGSKRMYAGLKNAGETWYDITGNRSDTVKIGSDGWGKFHVNDGSVSIYVQK

SEQ ID NO: 41324 - protein, 478 aa, Bacillus sp.
NLTMMQYFEWYLPNDGNHWNRLNSDASNLKSKGITAVWIPPAWKGASQNDVGYGAYDLYDLGEFNQKGTVRTKYGTRSQLQAAVTSLKNNGIQVYGDVVMNHKGGADATEMVRAVEVNPNNRNQEVTGEYTIEAWTRFDFPGRGNTHSSFKWRWYHFDGVDWDQSRRLNNRIYKFRGKAWDWEVDTEFGNYDYLMYADYDMDHPEVVNELRNWGVWYTNTLGLDGFRIDAVKHIKYSFTRDWINHVRSATGKNMFAVAEFWKNDLGAIENYLQKTNWNHSVFDVPLHYNLYNASKSGGNYDMRNIFNGTVVQSHPMHAVTFVDNHDSQPEEALESFVEEWFKPLAYALTLTREQGYPSVFYGDYYGIPTHGVPAMRSKIDPILEARQKYAYGPQHDYLDHPDVIGWTREGDSSHPKSGLATLITDGPGGSKRMYAGLKNAGETWYDITGNRSDTVKIGSDGWGEFHVNDGSVSIYVQK

SEQ ID NO: 41325 - protein, 478 aa, Bacillus sp.
NGTMMQYFEWYLPNDGNHWNRLNSDASNLKSKGITAVWIPPAWKGASQNDVGYGAYDLYDLGEFNQKGTVRTKYGTRSQLQAAVTSLKNNGIQVYGDVVMNHKGGADATEMVRAVEVNPNNRNQEVTGEYTIEAWTRFDFPGRGNTHSSFKWRWYHFDGVDWDQSRRLNNRIYKFRGKAWDWEVDTEFGNYDYLMYADYDMDSPEVVNELRNWGVWYTNTLGLDGFRIDAVKHIKYSFTRDWINHVRSATGKNMFAVAEFWKNDLGAIENYLQKTNWNHSVFDVPLHYNLYNASKSGGNYDMRNIFNGTVVQRHPSHAVTFVDNHDSQPEEALESFVEEWFKPLAYALTLTREQGYPSVFYGDYYGIPTHGVPAMRSKIDPILEARQKYAYGPQHDYLDHQDVIGWTREGDSSHPKSGLATLITDGPGGSKRMYAGLKNAGETWYDITGNRSDTVKIGSDGWGEFHVNDGSVSIYVQK

SEQ ID NO: 41326 - protein, 478 aa, Bacillus sp.
NGTMMQYFEWYLPNDGNHWNRLNSDASNLKSKGITAVWIPPAWKATSQNDVGYGAYDLYDLGEFNQKGTVRTKYGTRSQLQAAVTSLKNNGIQVYGDVVMNHKGGADATEMVRAVEVNPNNRNQEVTGEYTIEAWTRFDFPGRGNTHSSFKWRWYHFDGVDWDQSRRLSNRIYKFRGKAWDWEVDTEFGNYDYLMYTDYDMDHPEVVNELRNWGVWYTNTLGLDGFRIDAVKHIKYSFTRDWINHVRIATGKNMFAVAEFWKNDLGAIENYLQKTNWNHSVFDVPLHYNLYNASKSGGNYDMRNIFNGTVVQRHPSHAVTFVDNHDSQPEEALESFVDEWFKPLAYALTLTREQGYPSVFYGDYYGIPTHGVPAMRSKIDPILEARQKYAYGPQHDYLDHPDVIGWTREGDSSHPKSGLATLITDGPGGSKRMYAGLKNAGETWYDITGNRSDTVKIGSDGWGEFHVNDQSVSIYVQK

SEQ ID NO: 41327 - protein, 478 aa, Bacillus sp.
NGTMMQYFEWYLPNDGNHWNRLNSDASNLKSKGITAVWIPPAWKGASQNDVGYGAYDLYDLGEFNQKGTVRTKYGTRSQLQAAVTSLKNNGIQVYGDVVMNHKGGADATEMVRAVEVNPNNRNQEVTGEYTIEAWTRFDFPGRGNTHSSFKWRWYHFDGVDWDQSRRLNNRIYKFRGKAWDWEVDTEFGNYDYLMYADYDMDHPEVVNELRNWGVWYTNTLGLDGFRIDAVKHIKYSFTRDWINHVRSATGKNMFAVAEFWKNDLGAIENYLQKTNWNHSVFDVPLHYNLYNASKSGGNYDMRNIFNGTVVQRHPSHAVTFVDNHDSQPEEALESFVDPWFKPLAYALTLTREQGYPSVFYGDYYGIPTHGVPAMRSKIDPILEARQKYAYGPQHDYLDHPDVIGWTREGDSSHPKSGLATLITDGPGGSKRMYAGLKNAGETWYDITGNRSDTVKIGSDGWGEFHVNKQSVSIYVQK

SEQ ID NO: 41328 - protein, 478 aa, Bacillus sp.
NGTMMQYFEWYLPNDGNHWNRLNSDASNLKSKGITAVWIPPAWKAASQNDVGYGAYDLYDLGEFNQKGTVRTKYGTRSQLQAAVTSLKNNGIQVYGDVVMNHKGGADATEMVRAVEVNPNNRNQEVTGEYTIEAWTRFDFPGRGNTHSSFKWRWYHFDGVDWDQSRDLQNRIYKFRGKAWDWEVDTEFGNYDYLMYADYDMDHPEVVNELRNWGVWYTNTLGLDGFRIDAVKHIKYSFTRDWINHVRSATGKNMFAVAEFWKNDLGAIENYLQKTNWNHSVFDVPLHYNLYNASKSGGNYDMRNIFNGTVVQRHPSHAVTFVDNHDSQPEEALESFVDPWFKPLAYALTLTREQGYPSVFYGDYYGIPTHGVPAMRSKIDPILEARQKYAYGPQHDYLDHPDVIGWTREGDSSHPKSGLATLITDGPGGSKRMYAGLKNAGETWYDITGNRSDTVKIGSDGWGEFHVNGGSVSIYVQK

SEQ ID NO: 41329 - protein, 478 aa, Bacillus sp.
NGTMMQYFEWYLPNDGNHWNRLNSDASNLKSKGITAVWIPPAWKATSQNDVGYGAYDLYDLGEFNQKGTVRTKYGTRSQLQAAVTSLKNNGIQVYGDVVMNHKGGADATEMVRAVEVNPNNRNQEVTGEYTIEAWTRFDFPGRGNTHSSFKWRWYHFDGVDWDQSRDLNNRIYKFRGKAWDWEVDTEFGNYDYLMYADYDMDHPEVVNELRNWGVWYTNTLGLDGFRIDAVKHIKYSFTRDWINHVRSATGKNMFAVAEFWKNDLGAIENYLQKTNWNHSVFDVPLHYNLYNASKSGGNYDMRNIFNGTVVQAHPNHAVTFVDNHDSQPEEALESFVEEWFKPLAYALTLTREQGYPSVFYGDYYGIPTHGVPAMRSKIDPILEARQKYAYGPQHDYLDHPDVIGWTREGDSSHPKSGLATLITDGPGGSKRMYAGLKNAGETWYDITGNRSDTVKIGSDGWGEFHVNDGSVSIYVQK

SEQ ID NO: 41330 - protein, 478 aa, Bacillus sp.
NGTMMQYFEWYLPNDGNHWNRLNSDASNLKSKGITAVWIPPAWKGASQNDVGYGAYDLYDLGEFNQKGTVRTKYGTRSQLQAAVTSLKNNGIQVYGDVVMNHKGGADATEMVRAVEVNPNNRNQEVTGEYTIEAWTRFDFPGRGNTHSSFKWRWYHFDGVDWDQSRNVNNRIYKFRGKAWDWEVDTEFGNYDYLMYADYDMDHPEVVNELRNWGVWYTNTLGLDGFRIDAVKHIKYSFTRDWINHVRSATGKNMFAVAEFWKNDLGAIENYLQKTNWNHSVFDVPLHYNLYNASKSGGNYDMRNIFNGTVVQRHPSHAVTFVDNHDSQPEEALESFVDEWFKPLAYALTLTREQGYPSVFYGDYYGIPTHGVPAMRSKIDPILEARQKYAYGPQHDYLDHPDVIGWTREGDSSHPKSGLATLITDGPGGSKRMYAGLKNAGETWYDITGNRSDTVKIGSDGWGEFHVNKSSVSIYVQK

SEQ ID NO: 41331 - protein, 478 aa, Bacillus sp.
NKTMMQYFEWYLPNDGNHWNRLNSDASNLKSKGITAVWIPPAWKGASQNDVGYGAYDLYDLGEFNQKGTVRTKYGTRSQLQAAVTSLKNNGIQVYGDVVMNHKGGADATEMVRAVEVNPNNRNQEVTGEYTIEAWTRFDFPGRGNTHSSFKWRWYHFDGVDWDQSRRLNNRIYKFRGKAWDWEVDTEFGNYDYLMYADYDMDHPEVVNELRNWGVWYTNTLGLDGFRIDAVKHIKYSFTRDWINHVRSATGKNMFAVAEFWKNDLGAIENYLQKTNWNHSVFDVPLHYNLYNASKSGGNYDMRNIFNGTVVQAHPSHAVTFVDNHDSQPEEALESFVEEWFKPLAYALTLTREQGYPSVFYGDYYGIPTHGVPAMRSKIDPILEARQKYAYGPQHDYLDHPDVIGWTREGDSSHPKSGLATLITDGPGGSKRMYAGLKNAGETWYDITGNRSDTVKIGSDGWGEFHVNDGSVSIYVQK

SEQ ID NO: 41332 - protein, 478 aa, Bacillus sp.
NGTMMQYFEWYLPNDGNHWNRLNSDASNLKSKGITAVWIPPAWKGASQNDVGYGAYDLYDLGEFNQKGTVRTKYGTRSQLQAAVTSLKNNGIQVYGDVVMNHKGGADATEMVRAVEVNPNNRNQEVTGEYTIEAWTRFDFPGRGNTHSSFKWRWYHFDGVDWDQSRRLNNRIYKFRGKAWDWEVDTEFGNYDYLMYADYDMDHPEVVNELRNWGVWYTNTLGLDGFRIDAVKHIKYSFTRDWINHVRSATGKNMFAVAEFWKNDLGAIENYLQKTNWNHSVFDVPLHYNLYNASQSGGNYDMRNIFNGTVVQRHPSHAVTFVDNHDSQPEEALESFVDEWFKPLAYALTLTREQGYPSVFYGDYYGIPTHGVPAMRSKIDPILEARQKYAYGPQHDYLDHPDVIGWTREGDSSHPKSGLATLITDGPGGSKRMYAGLKNAGETWYDITGNRSDTVKIGSDGWGEFHVNKQSVSIYVQK

SEQ ID NO: 41333 - protein, 478 aa, Bacillus sp.
NGTMMQYFEWYLPNDGNHWNRLNSDASNLKSKGITAVWIPPAWKAASQNDVGYGAYDLYDLGEFNQKGTVRTKYGTRSQLQAAVTSLKNNGIQVYGDVVMNHKGGADATEMVDAVEVNPNNRNQEVTGEYTIEAWTRFDFPGRGNTHSSFKWRWYHFDGVDFDQSRDLQNRIYKFRGKAWDWEVDTEFGNYDYLMYADYDMDHPEVVNELRNWGVWYTNTLGLDGFRIDAVKHIKYSFTRDWINHVRSATGKNMFAVAEFWKNDLGAIENYLQKTNWNHSVFDVPLHYNLYNASKSGGNYDMRNIFNGTVVQRHPSHAVTFVDNHDSQPEEALESFVEEWFKPLAYALTLTREQGYPSVFYGDYYGIPTHGVPAMRSKIDPILEARQKYAYGPQHDYLDHPDVIGWTREGDSSHPKSGLATLITDGPGGSKRMYAGLKNAGETWYDITGNRSDTVKIGSDGWGEFHVNDGSVSIYVQK

SEQ ID NO: 41334 - protein, 478 aa, Bacillus sp.
NGTMMQYFEWYLPNDGNHWNRLNSDASNLKSKGITAVWIPPAWKGASQNDVGYGAYDLYDLGEFNQKGTVRTKYGTRSQLQAAVTSLKNNGIQVYGDVVMNHKGGADATEMVRAVEVNPNNRNQEVTGEYTIEAWTRFDFPGRGNTHSSFKWRWYHFDGVDWDQSRRLNNRIYKFRGKAWDWEVDTEFGNYDYLMYADYDMDHPEVVNELRNWGVWYTNTLGLDGFRIDAVKHIKYSFTRDWINHVRSATGKNMFAVAEFWKNDLGAIENYLQKTNWNHSVFDVPLHYNLYNASKSAGNYDMRNIFNGTVVQRHPSHAVTFVDNHDSQPEEALESFVDTWFKPLAYALTLTREQGYPSVFYGDYYGIPTHGVPAMRSKIDPILEARQKYAYGPQHDYLDHPDVIGWTREGDSSHPKSGLATLITDGPGGSKRMYAGLKNAGETWYDITGNRSDTVKIGSDGWGEFHVNGTSVSIYVQK

SEQ ID NO: 41335 - protein, 478 aa, Bacillus sp.
NGTMMQYFEWYLPNDGNHWNRLNSDASNLKSKGIKAVWIPPAWKGASQNDTGYGAYDLYDLGEFNQKGTVRTKYGTRSQLQAAVTSLKNNGIQVYGDVVMNHKGGADATEMVRAVEVNPNNRNQEVTGEYTIEAWTRFDFPGRGNTHSSFKWRWYHFDGVDWDQSERLNNRIYKFRGKAWDWEVDTEFGNYDYLMYADYDMDHPEVVNELRNWGVWYTNTLGLDGFRIDAVKHIKYSFTRDWINHVRSATGKNMFAVAEFWKNDLGAIENYLQKTNWNHSVFDVPLHYNLYNASKSGGNYDMRNIFNGTVVQRHPSHAVTFVDNHDSQPEEALESFVEEWFKPLAYALTLTREQGYPSVFYGDYYGIPTHGVPAMRSKIDPILEARQKYAYGPQHDYLDHPDVIGWTREGDSSHPKSGLATLITDGPGGSKRMYAGLKNAGETWYDITGNRSDTVKIGSDGWGEFHVNDGSVSIYVQK

SEQ ID NO: 41336 - protein, 478 aa, Bacillus sp.
NGTMMQYFEWYLPNDGNHWNRLNSDASNLKSKGITAVWIPPAWKGASQNDVGYGAYDLYDLGEFNQKGTVRTKYGTRSQLQAAVTSLKNNGIQVYGDVVMNHKGGADATEMVRAVEVNPNNRNQEVTGEYTIEAWTRFDFPGRGNTHSSFKWRWYHFDGVDWDQSRRLNNRIYKFRGKAWDWEVDTEFGNYDYLMYADYDMDHPEVVNELRNWGVWYTNTLGLDGFRIDAVKHIKYSFTRDWINHVRSATGKNMFAVAEFWKNDLGAIENYLQKTNWNHSVFDVPLHYNLYNASNSGGNYDMRNIFNGTVVQRHPSHAVTFVDNHDSQPEEALESFVDEWFKPLAYALTLTREQGYPSVFYGDYYGIPTHGVPAMRSKIDPILEARQKYAYGPQHDYLDHPDVIGWTREGDSSHPKSGLATLITDGPGGSKRMYAGLKNAGETWYDITGNRSDTVKIGSDGWGEFHVNKSSVSIYVQK

SEQ ID NO: 41337 - protein, 478 aa, Bacillus sp.
NGTMMQYFEWYLPNDGNHWNRLNSDASNLKSKGITAVWIPPAWKGASQNDVGYGAYDLYDLGEFNQKGTVRTKYGTRSQLQAAVTSLKNNGIQVYGDVVMNHKGGADATEMVRAVEVNPNNRNQEVTGEYTIEAWTRFDFPGRGNTHSSFKWRWYHFDGVDWDQSRRLNNRIYKFRGKAWDWEVDTEFGNYDYLMYADYDMDHPEVVNELRNWGVWYTNTLGLDGFRIDAVKHIKYSFTRDWINHVRSATGKNMFAVAEFWKNDLGAIENYLQKTNWNHSVFDVPLHYNLYNASKSGGNYDMRNIFNGTVVQRHPSHAVTFVDNHDSQPEEALESFVEPWFKPLAYALTLTREQGYPSVFYGDYYGIPTHGVPAMRSKIDPILEARQKYAYGPQHDYLDHPDVIGWTREGDSSHPKSGLATLITDGPGGSKRMYAGLKNAGETWYDITGNRSDTVKIGSDGWGEFHVNQSSVSIYVQK

SEQ ID NO: 41338 - protein, 478 aa, Bacillus sp.
NGTMMQYFEWYLPNDGNHWNRLNSDASNLKSKGITAVWIPPAWKAASQNDVGYGAYDLYDLGEFNQKGTVRTKYGTRSQLQAAVTSLKNNGIQVYGDVVMNHKGGADATEMVRAVEVNPNNRNQEVTGEYTIEAWTRFDFPGRGNTHSSFKWRWYHFDGVDWDQSRDLQNRIYKFRGKAWDWEVDTEFGNYDYLMYADYDMDHPEVVNELRNWGVWYTNTLGLDGFRIDAVKHIKYSFTRDWINHVRSATGKNMFAVAEFWKNDLGAIENYLQKTNWNHSVFDVPLHYNLYNASKSGGNYDMRNIFNGTVVQAHPNHAVTFVDNHDSQPEEALESFVEEWFKPLAYALTLTREQGYPSVFYGDYYGIPTHGVPAMRSKIDPILEARQKYAYGPQHDYLDHPDVIGWTREGDSSHPKSGLATLITDGPGGSKRMYAGLKNAGETWYDITGNRSDTVKIGSDGWGEFHVNDGSVSIYVQK

SEQ ID NO: 41339 - protein, 478 aa, Bacillus sp.
NGTMMQYFEWYLPNDGNHWNRLNSDASNLKSKGIKAVWIPPAWKGASQNDVGYGAYDLYDLGEFNQRGTVRTKYGTRSQLQAAVTSLKNNGIQVYGDVVMNHKGGADATEMVRAVEVNPNNRNQEVTGEYTIEAWTRFDFPGRGNTHSSFKWRWYHFDGVDWDQSRRLNNRIYKFRGKAWDWEVDTEFGNYDYLMYADYDMDHPEVVNELRNWGVWYTNTLGLDGFRIDAVKHIKYSFTRDWINHVRSATGKNMFAVAEFWKNDLGAIENYLQKTNWNHSVFDVPLHYNLYNASKSGGNYDMRNIFNGTVVQRHPSHAVTFVDNHDSQPEEALESFVEEWFKPLAYALTLTREQGYPSVFYGDYYGIPTHGVPAMRSKIDPILEARQKYAYGPQHDYLDHPDVIGWTREGDSSHPKSGLATLITDGPGGSKRMYAGLKNAGETWYDITGNRSDTVKIGSDGWGEFHVNDGSVSIYVQK

SEQ ID NO: 41340 - protein, 478 aa, Bacillus sp.
NGTMMQYFEWYLPNDGNHWNRLNSDASNLKSKGITAVWIPPAWKGASQNDVGYGAYDLYDLGEFNQKGTVRTKYGTRSQLQAAVTSLKNNGIQVYGDVVMNHKGGADATEMVRAVEVNPNNRNQEVTGEYTIEAWTRFDFPGRGNTHSSFKWRWYHFDGVDWDQSRRLNNRIYKFRGKAWDWEVDTEFGNYDYLMYADYDMDHPEVVNELRNWGVWYTNTLGLDGFRIDAVKHIKYSFTRDWINHVRSATGKNMFAVAEFWKNDLGAIENYLQKTNWNHSVFDVPLHYNLYNASKSQGNYDMRNIFNGTVVQRHPSHAVTFVDNHDSQPEEALESFVDTWFKPLAYALTLTREQGYPSVFYGDYYGIPTHGVPAMRSKIDPILEARQKYAYGPQHDYLDHPDVIGWTREGDSSHPKSGLATLITDGPGGSKRMYAGLKNAGETWYDITGNRSDTVKIGSDGWGEFHVNQTSVSIYVQK

SEQ ID NO: 41341 - protein, 478 aa, Bacillus sp.
NETMMQYFEWYLPNDGNHWNRLNSDASNLKSKGITAVWIPPAWKGASQNDVGYGAYDLYDLGEFNQKGTVRTKYGTRSQLQAAVTSLKNNGIQVYGDVVMNHKGGADATEMVRAVEVNPNNRNQEVTGEYTIEAWTRFDFPGRGNTHSSFKWRWYHFDGVDWDQSRRLNNRIYKFRGKAWDWEVDTEFGNYDYLMYADYDMDHPEVVNELRNWGVWYTNTLGLDGFRIDAVKHIKYSFTRDWINHVRSATGKNMFAVAEFWKNDLGAIENYLQKTNWNHSVFDVPLHYNLYNASKSGGNYDMRNIFNGTVVQQHPMHAVTFVDNHDSQPEEALESFVEEWFKPLAYALTLTREQGYPSVFYGDYYGIPTHGVPAMRSKIDPILEARQKYAYGPQHDYLDHPDVIGWTREGDSSHPKSGLATLITDGPGGSKRMYAGLKNAGETWYDITGNRSDTVKIGSDGWGEFHVNDGSVSIYVQK

SEQ ID NO: 41342 - protein, 478 aa, Bacillus sp.
NGTMMQYFEWYLPNDGNHWNRLNSDASNLKSKGITAVWIPPAWKAASQNDVGYGAYDLYDLGEFNQKGTVRTKYGTRSQLQAAVTSLKNNGIQVYGDVVMNHKGGADATEMVRAVEVNPNNRNQEVTGEYTIEAWTRFDFPGRGNTHSSFKWRWYHFDGVDWDQSRQLNNRIYKFRGKAWDWEVDTEFGNYDYLMYADYDMDHPEVVNELRNWGVWYTNTLGLDGFRIDAVKHIKYSFTRDWINHVRSATGKNMFAVAEFWKNDLGAIENYLQKTNWNHSVFDVPLHYNLYNASKSGGNYDMRNIFNGTVVQRHPSHAVTFVDNHDSQPEEALESFVEEWFKPLAYALTLTREQGYPSVFYGDYYGIPTHGVPAMRSKIDPILEARQKYAYGPQHDYLDHPDVIGWTREGDSSHPKSGLATLITDGPGGSKRMYAGPKNAGETWYDITGNRSDTVKIGSDGWGEFHVNDGSVSIYVQK

SEQ ID NO: 41343 - protein, 478 aa, Bacillus sp.
NNTMMQYFEWYLPNDGNHWNRLNSDASNLKSKGITAVWIPPAWKGASQNDVGYGAYDLYDLGEFNQKGTVRTKYGTRSQLQAAVTSLKNNGIQVYGDVVMNHKGGADATEMVRAVEVNPNNRNQEVTGEYTIEAWTRFDFPGRGNTHSSFKWRWYHFDGVDWDQSRRLNNRIYKFRGKAWDWEVDTEFGNYDYLMYADYDMDHPEVVNELRNWGVWYTNTLGLDGFRIDAVKHIKYSFTRDWINHVRSATGKNMFAVAEFWKNDLGAIENYLQKTNWNHSVFDVPLHYNLYNASKSGGNYDMRNIFNGTVVQSHPSHAVTFVDNHDSQPEEALESFVEEWFKPLAYALTLTREQGYPSVFYGDYYGIPTHGVPAMRSKIDPILEARQKYAYGPQHDYLDHPDVIGWTREGDSSHPKSGLATLITDGPGGSKRMYAGLKNAGETWYDITGNRSDTVKIGSDGWGEFHVNDGSVSIYVQK

SEQ ID NO: 41344 - protein, 478 aa, Bacillus sp.
NGTMMQYFEWYLPNDGNHWNRLNSDASNLKSKGITAVWIPPAWKGASQNDVGYGAYDLYDLGEFNQKGTVRTKYGTRSQLQAAVTSLKNNGIQVYGDVVMNHKGGADATEMVRAVEVNPNNRNQEVTGEYTIEAWTRFDFPGRGNTHSSFKWRWYHFDGVDWDQSRRLNNRIYKFRGKAWDWEVDTEFGNYDYLMYADYDMDHPEVVNELRNWGVWYTNTLGLDGFRIDAVKHIKYSFTRDWINHVRSATGKNMFAVAEFWKNDLGAIENYLQKTNWNHSVFDVPLHYNLYNASKSGGNYDMRNIFNGTVVQVHPSHAVTFVDNHDSQPEEALESFVEEWFKPLAYALTLTREQGYPSVFYGDYYGIPTHGVPAMRSKIDPILEARQKYAYGPQHDYLDHPDVIGWTREGDSSHPKSGLATLITDGPGGSKRMYAGLKNAGETWYDITGNRSDTVKIGSDGWGEFHVNYGSVSIYVQK

SEQ ID NO: 41345 - protein, 478 aa, Bacillus sp.
NGTMMQYFEWYLPNDGNHWNRLNSDASNLKSKGITAVWIPPAWKGASQNDVGYGAYDLYDLGEFNQKGTVRTKYGTRSQLQAAVTSLKNNGIQVYGDVVMNHKGGADATEMVRAVEVNPNNRNQEVTGEYTIEAWTRFDFPGRGNTHSSFKWRWYHFDGVDWDQSRRLNNRIYKFRGKAWDWEVDTEFGNYDYLMYADYDMDHPEVVNELRNWGVWYTNTLGLDGFRIDAVKHIKYSFTRDWINHVRSATGKNMFAVAEFWKNDLGAIENYLQKTNWNHSVFDVPLHYNLYNASKSGGNYDMRNIFNGTVVQRHPSHAVTFVDNHDSQPEEALESFVEEWFKPLAYALTLTREQGYPSVFYGDYYGIPTHGVPAMRSKIDPILEARQKYAYGPQHDYLDHPDVIGWTREGDSSHPKSGLATLITDGPGGSKRMYAGLKNAGETWYDITGNRSDTVKIGSDGWGEFHVNGSSVSIYVQK

SEQ ID NO: 41346 - protein, 478 aa, Bacillus sp.
NGTMMQYFEWYLPNDGNHWNRLNSDASNLKSKGITAVWIPPAWKAASQNDVGYGAYDLYDLGEFNQKGTVRTKYGTRSQLQAAVTSLKNNGIQVYGDVVMNHKGGADATEMVRAVEVNPNNRNQEVTGEYTIEAWTRFDFPGRGNTHSSFKWRWYHFDGVDWDQSRDLQNRIYKFRGKAWDWEVDTEFGNYDYLMYADYDMDHPEVVNELRNWGVWYTNTLGLDGFRIDAVKHIKYSFTRDWINHVRSATGKNMFAVAEFWKNDLGAIENYLQKTNWNHSVFDVPLHYNLYNASKSGGNYDMRNIFNGTVVQVHPSHAVTFVDNHDSQPEEALESFVEEWFKPLAYALTLTREQGYPSVFYGDYYGIPTHGVPAMRSKIDPILEARQKYAYGPQHDYLDHPDVIGWTREGDSSHPKSGLATLITDGPGGSKRMYAGLKNAGETWYDITGNRSDTVKIGSDGWGEFHVNDGSVSIYVQK

SEQ ID NO: 41347 - protein, 478 aa, Synthetic construct
NGTMMQYFEWYLPNDGNHWNRLNSDASNLKSKGITAVWIPPAWKGASQNDVGYGAYDLYDLGEFNQKGTVRTKYGTRSQLQAAVTSLKNNGIQVYGDVVMNHKGGADATEMVRAVEVNPNNRNQEVTGEYTIEAWTRFDFPGRGNTHSSFKWRWYHFDGVDWDQSRRLNNRIYKFRGKAWDWEVDTEFGNYDYLMYADYDMDYPETVNEVRNWGVWYTNTLGLDGFRIDAVKHIKYSFTRDWINHVRSATGKNMFAVAEFWKNDLGAIENYLQKTNWNHSVFDVPLHYNLYNASKSGGNYDMRNIFNGTVVQRHPSHAVTFVDNHDSQPEEALESFVEEWFKPLAYALTLTREQGYPSVFYGDYYGIPTHGVPAMRSKIDPILEARQKYAYGPQHDYLDHPDVIGWTREGDSSHPKSGLATLITDGPGGSKRMYAGLKNAGETWYDITGNRSDTVKIGSDGWGEFHVNDGSVSIYVQK

SEQ ID NO: 41348 - protein, 478 aa, Bacillus sp.
NGTMMQYFEWYLPNDGNHWNRLNSDASNLKSKGITAVWIPPAWKGASQNDVGYGAYDLYDLGEFNQKGTVRTKYGTRSQLQAAVTSLKNNGIQVYGDVVMNHKGGADATEMVRAVEVNPNNRNQEVTGEYTIEAWTRFDFPGRGNTHSSFKWRWYHFDGVDWDQSRRLNNRIYKFRGKAWDWEVDTEFGNYDYLMYADYDMDHPEVVNELRNWGVWYTNTLGLDGFRIDAVKHIKYSFTRDWINHVRSATGKNMFAVAEFWKNDLGAIENYLQKTNWNHSVFDVPLHYNLYNASKSGSNYDMRNIFNGTVVQRHPSHAVTFVDNHDSQPEEALESFVDPWFKPLAYALTLTREQGYPSVFYGDYYGIPTHGVPAMRSKIDPILEARQKYAYGPQHDYLDHPDVIGWTREGDSSHPKSGLATLITDGPGGSKRMYAGLKNAGETWYDITGNRSDTVKIGSDGWGEFHVNDQSVSIYVQK

SEQ ID NO: 41349 - protein, 478 aa, Bacillus sp.
NGTMMQYFEWYLPNDGNHWNRLNSDASNLKSKGITAVWIPPAWKGASQNDVGYGAYDLYDLGEFNQKGTVRTKYGTRSQLQAAVTSLKNNGIQVYGDVVMNHKGGADATEMVRAVEVNPNNRNQEVTGEYTIEAWTRFDFPGRGNTHSSFKWRWYHFDGVDWDQSRRLNNRIYLFRSKAWQWEVPTENGNYDYLMYADIDMDHPEVVNELRNWGVWYTNTLGLDGFRIDAVKHIKYSFTRDWINHVRSATGKNMFAVAEFWKNDLGAIENYLQKTNWNHSVFDVPLHYNLYNASKSGGNYDMRNIFNGTVVQRHPSHAVTFVDNHDSQPEEALESFVEEWFKPLAYALTLTREQGYPSVFYGDYYGIPTHGVPAMRSKIDPILEARQKYAYGPQHDYLDHPDVIGWTREGDSSHPKSGLATLITDGPGGSKRMYAGLKNAGETWYDITGNRSDTVKIGSDGWGEFHVNDGSVSIYVQK

SEQ ID NO: 41350 - protein, 478 aa, Bacillus sp.
NGTMMQYFEWYLPNDGNHWNRLNSDASNLKSKGITAVWIPPAWKGASQNDVGYGAYDLYDLGEFNQKGTVRTKYGTRSQLQAAVTSLKNNGINVYGDVVMNHKGGADATEMVRAVEVNPNNRNQEVTGEYTIEAWTRFDFPGRGNTHSSFKWRWYHFDGVDWDQSRRLNNRIYKFRGKAWDWEVDTEFGNYDYLMYADYDMDHPEVVNELRNWGVWYTNTLGLDGFRIDAVKHIKYSFTRDWINHVRSATGKNMFAVAEFWKNDLGAIENYLQKTNWNHSVFDVPLHYNLYNASKSGGNYDMRNIFNGTVVQSHPMLAVTFVDNHDSQPEEALESFVEEWFKPLAYALTLTREQGYPSVFYGDYYGIPTHGVPAMRSKIDPILEARQKYAYGPQHDYLDHPDVIGWTREGDSSHPKSGLATLITDGPGGSKRMYAGLKNAGETWYDITGNRSDTVKIGSDGWGEFHVNDGSVSIYVQK

SEQ ID NO: 41351 - protein, 478 aa, Bacillus sp.
NGTMMQYFEWYLPNDGNHWNRLNSDASNLKSKGITAVWIPPAWKGASQNDVGYGAYDLYDLGEFNQKGTVRTKYGTRSQLQAAVTSLKNNGIQVYGDVVMNHKGGADATEMVRAVEVNPNNRNQEVTGEYTIEAWTRFDFPGRGNTHSSFKWRWYHFDGVDWDQSRRLNNRIYKFRGKAWDWEVDTEFGNYDYLMYADYDMDHPEVVNELRNWGVWYTNTLGLDGFRIDAVKHIKYSFTRDWINHVRSATGKNMFAVAEFWKNDLGAIENYLQKTNWNHSVFDVPLHYNLYNASQSGGNYDMRNIFNGTVVQRHPSHAVTFVDNHDSQPEEALESFVEEWFKPLAYALTLTREQGYPSVFYGDYYGIPTHGVPAMRSKIDPILEARQKYAYGPQHDYLDHPDVIGWTREGDSSHPKSGLATLITDGPGGSKRMYAGLKNAGETWYDITGNRSDTVKIGSDGWGEFHVNQSSVSIYVQK

SEQ ID NO: 41352 - protein, 478 aa, Bacillus sp.
NGTMMQYFEWYLPNDGNHWNRLNSDASNLKSKGITAVWIPPAWKGASQNDVGYGAYDLYDLGEFNQKGTVRTKYGTRSQLQAAVTSLKNNGIQVYGDVVMNHKGGADATEMVRAVEVNPNNRNQEVTGEYTIEAWTRFDFPGRGNTHSSFKWRWYHFDGVDWDQSRRLNNRIYKFRGKAWDWEVDTEFGNYDYLMYADYDMDHPEVVNELRNWGVWYTNTLGLDGFRIDAVKHIKYSFTRDWINHVRSATGKNMFAVAEFWKNDLGAIENYLQKTNWNHSVFDVPLHYNLYNASNSQGNYDMRNIFNGTVVQRHPSHAVTFVDNHDSQPEEALESFVEPWFKPLAYALTLTREQGYPSVFYGDYYGIPTHGVPAMRSKIDPILEARQKYAYGPQHDYLDHPDVIGWTREGDSSHPKSGLATLITDGPGGSKRMYAGLKNAGETWYDITGNRSDTVKIGSDGWGEFHVNKGSVSIYVQK

SEQ ID NO: 41353 - protein, 478 aa, Bacillus sp.
NGTMMQYFEWYLPNDGNHWNRLNSDASNLKSKGITAVWIPPAWKATSQNDVGYGAYDLYDLGEFNQKGTVRTKYGTRSQLQAAVTSLKNNGIQVYGDVVMNHKGGADATEMVRAVEVNPNNRNQEVTGEYTIEAWTRFDFPGRGNTHSSFKWRWYHFDGVDWDQSRELNNRIYKFRGKAWDWEVDTEFGNYDYLMYTDYDMDHPEVVNELRNWGVWYTNTLGLDGFRIDAVKHIKYSFTRDWINHVRSATGKNMFAVAEFWKNDLGAIENYLQKTNWNHSVFDVPLHYNLYNASKSGGNYDMRNIFNGTVVQRHPSHAVTFVDNHDSQPEEALESFVEEWFKPLAYALTLTREQGYPSVFYGDYYGIPTHGVPAMRSKIDPILEARQKYAYGPQHDYLDHPDVIGWTREGDSSHPKSGLATLITDGPGGSKRMYAGLKNAGETWYDITGNRSDTVKIGSDGWGEFHVNDGSVSIYVQK

SEQ ID NO: 41354 - protein, 478 aa, Bacillus sp.
NGTMMQYFEWYLPNDGNHWNRLNSDASNLKSKGITAVWIPPAWKAVSQNDVGYGAYDLYDLGEFNQKGTVRTKYGTRSQLQAAVTSLKNNGIQVYGDVVMNHKGGADATEMVRAVEVNPNNRNQEVTGEYTIEAWTRFDFPGRGNTHSSFKWRWYHFDGVDWDQSRDLENRIYKFRGKAWDWEVDTEFGNYDYLMYADYDYDHPESTNEMRNWGVWYTNTLGLDGFRIDAVKHIKYSFTRDWINHVRSATGKNMFAVAEFWKNDLGAIENYLQKTNWNHSVFDVPLHYNLYNASKSGGNYDMRNIFNGTVVQRHPSHAVTFVDNHDSQPEEALESFVEEWFKPLAYALTLTREQGYPSVFYGDYYGIPTHGVPAMRSKIDPILEARQKYAYGPQHDYLDHPDVIGWTREGDSSHPKSGLATLITDGPGGSKRMYAGLKNAGETWYDITGNRSDTVKIGSDGWGEFHVNDGSVSIYVQK

SEQ ID NO: 41355 - protein, 478 aa, Bacillus sp.
NGTMMQYFEWYLPNDGNHWNRLNSDASNLKSKGITAVWIPPAWKAASQNDVGYGAYDLYDLGEFNQKGTVRTKYGTRSQLQAAVTSLKNNGIQVYGDVVMNHKGGADATEMVRAVEVNPNNRNQEVTGEYTIEAYTRFDFPGRGNTHSSFKWRWYHFDGVDWDQSRDLQNRIYKFRGKAWDWEVDTEFGNYDYLMYADYDMDHPEVVNELRNWGVWYTNTLGLDGFRIDAVKHIKYSFTRDWINHVRSATGKNMFAVAEFWKNDLGAIENYLQKTNWNHSVFDVPLHYNLYNASKSGGNYDMRNIFNGTVVQRHPSHAVTFVDNHDSQPEEALESFVEEWFKPLAYALTLTREQGYPSVFYGDYYGIPTHGVPAMRSKIDPILEARQKYAYGPQHDYLDHPDVIGWTREGDSSHPKSGLATLITDGPGGSKRMYAGLKNAGETWYDITGNRSDTVKIGSDGWGEFHVNDGSVSIYVQK

SEQ ID NO: 41356 - protein, 478 aa, Bacillus sp.
NGTMMQYFEWYLPNDGNHWNRLNSDASNLKSKGITAVWIPPAWKGASQNDVGYGAYDLYDLGEFNQKGTVRTKYGTRSQLQAAVTSLKNNGIQVYGDVVMNHKGGADATEMVRAVEVNPNNRNQEVTGEYTIEAWTRFDFPGRGNTHSSFKWRWYHFDGVDWDQSRRLNNRIYKFRGKAWDWEVDTEFGNYDYLMYADYDMDHPEVVNELRNWGVWYTNTLGLDGFRIDAVKHIKYSFTRDWINHVRSATGKNMFAVAEFWKNDLGAIENYLQKTNWNHSVFDVPLHYNLYNASKSGGNYDMRNIFNGTVVQRHPSHAVTFVDNHDSQPEEALESFVDEWFKPLAYALTLTREQGYPSVFYGDYYGIPTHGVPAMRSKIDPILEARQKYAYGPQHDYLDHPDVIGWTREGDSSHPKSGLATLITDGPGGSKRMYAGLKNAGETWYDITGNRSDTVKIGSDGWGEFHVNGQSVSIYVQK

SEQ ID NO: 41357 - protein, 478 aa, Bacillus sp.
NQTMMQYFEWYLPNDGNHWNRLNSDASNLKSKGITAVWIPPAWKGASQNDVGYGAYDLYDLGEFNQKGTVRTKYGTRSQLQAAVTSLKNNGIQVYGDVVMNHKGGADATEMVRAVEVNPNNRNQEVTGEYTIEAWTRFDFPGRGNTHSSFKWRWYHFDGVDWDQSRRLNNRIYKFRGKAWDWEVDTEFGNYDYLMYADYDMDHPEVVNELRNWGVWYTNTLGLDGFRIDAVKHIKYSFTRDWINHVRSATGKNMFAVAEFWKNDLGAIENYLQKTNWNHSVFDVPLHYNLYNASKSGGNYDMRNIFNGTVVQAHPMHAVTFVDNHDSQPEEALESFVEEWFKPLAYALTLTREQGYPSVFYGDYYGIPTHGVPAMRSKIDPILEARQKYAYGPQHDYLDHPDVIGWTREGDSSHPKSGLATLITDGPGGSKRMYAGLKNAGETWYDITGNRSDTVKIGSDGWGEFHVNDGSVSIYVQK

SEQ ID NO: 41358 - protein, 478 aa, Bacillus sp.
NGTMMQYFEWYLPNDGNHWNRLNSDASNLKSKGITAVWIPPAWKGASQNDVGYGAYDLYDLGEFNQKGTVRTKYGTRSQLQAAVTSLKNNGIQVYGDVVMNHKGGADATEMVRAVEVNPNNRNQEVTGEYTIEAWTRFDFPGRGNTHSSFKWRWYHFDGVDWDQSREFDNRIYKFRGKAWDWEVDTEFGNYDYLMYADYDMDHPETTNEMRNWGVWYTNTLGLDGFRIDAVKHIKYSFTRDWINHVRSATGKNMFAVAEFWKNDLGAIENYLQKTNWNHSVFDVPLHYNLYNASKSGGNYDMRNIFNGTVVQRHPSHAVTFVDNHDSQPEEALESFVEEWFKPLAYALTLTREQGYPSVFYGDYYGIPTHGVPAMRSKIDPILEARQKYAYGPQHDYLDHPDVIGWTREGDSSHPKSGLATLITDGPGGSKRMYAGLKNAGETWYDITGNRSDTVKIGSDGWGEFHVNDGSVSIYVQK

SEQ ID NO: 41359 - protein, 478 aa, Bacillus sp.
NGTMMQYFEWYLPNDGNHWNRLNSDASNLKSKGITAVWIPPAWKGASQNDVGYGAYDLYDLGEFNQKGTVRTKYGTRSQLQAAVTSLKNNGITVYGDVVMNHKGGADATEMVRAVEVNPNNRNQEVTGEYTIEAWTRFDFPGRGNTHSSFKWRWYHFDGVDWDQSRRLNNRIYKFRGKAWDWEVDTEFGNYDYLMYADYDMDHPEVVNELRNWGVWYTNTLGLDGFRIDAVKHIKYSFTRDWINHVRSATGKNMFAVAEFWKNDLGAIENYLQKTNWNHSVFDVPLHYNLYNASKSGGNYDMRNIFNGTVVQAHPSLAVTFVDNHDSQPEEALESFVEEWFKPLAYALTLTREQGYPSVFYGDYYGIPTHGVPAMRSKIDPILEARQKYAYGPQHDYLDHPDVIGWTREGDSSHPKSGLATLITDGPGGSKRMYAGLKNAGETWYDITGNRSDTVKIGSDGWGEFHVNDGSVSIYVQK

SEQ ID NO: 41360 - protein, 478 aa, Bacillus sp.
NGTMMQYFEWYLPNDGNHWNRLNSDASNLKSKGITAVWIPPAWKGASQNDVGYGAYDLYDLGEFNQKGTVRTKYGTRSQLQAAVTSLKNNGIQVYGDVVMNHKGGADATEMVRAVEVNPNNRNQEVTGEYTIEAWTRFDFPGRGNTHSSFKWRWYHFDGVDWDQSRRLNNRIYLFRPKAWVWEVPTENGNYDYLMYADIDMDHPEVVNELRNWGVWYTNTLGLDGFRIDAVKHIKYSFTRDWINHVRSATGKNMFAVAEFWKNDLGAIENYLQKTNWNHSVFDVPLHYNLYNASKSGGNYDMRNIFNGTVVQRHPSHAVTFVDNHDSQPEEALESFVEEWFKPLAYALTLTREQGYPSVFYGDYYGIPTHGVPAMRSKIDPILEARQKYAYGPQHDYLDHPDVIGWTREGDSSHPKSGLATLITDGPGGSKRMYAGLKNAGETWYDITGNRSDTVKIGSDGWGEFHVNDGSVSIYVQK

SEQ ID NO: 41361 - protein, 478 aa, Bacillus sp.
NGTMMQYFEWYLPNDGNHWNRLNSDASNLKSKGITAVWIPPAWKAVSQNDVGYGAYDLYDLGEFNQKGTVRTKYGTRSQLQAAVTSLKNNGIQVYGDVVMNHKGGADATEMVDAVEVNPNNRNQEVTGEYTIEAWTRFDFPGRGNTHSSFKWRWYHFDGVDWDQSREFTNRIYKFRGKAWDWEVDTEFGNYDYLMYVDYDMDHPEVVNELRNWGVWYTNTLGLDGFRIDAVKHIKYSFTRDWINHVRSATGKNMFAVAEFWKNDLGAIENYLQKTNWNHSVFDVPLHYNLYNASKSGGNYDMRNIFNGTVVQRHPSHAVTFVDNHDSQPEEALESFVEEWFKPLAYALTLTREQGYPSVFYGDYYGIPTHGVPAMRSKIDPILEARQKYAYGPQHDYLDHPDVIGWTREGDSSHPKSGLATLITDGPGGSKRMYAGLKNAGETWYDITGNRSDTVKIGSDGWGEFHVNDGSVSIYVQK

SEQ ID NO: 41362 - protein, 478 aa, Bacillus sp.
NGTMMQYFEWYLPNDGNHWNRLNSDASNLKSKGITAVWIPPAWKAVSQNDVGYGAYDLYDLGEFNQKGTVRTKYGTRSQLQAAVTSLKNNGIQVYGDVVMNHKGGADATEMVRAVEVNPNNRNQEVTGEYTIEAWTRFDFPGRGNTHSSFKWRWYHFDGVDWDQSRDFQNRIYKFRGKAWDWEVDTEFGNYDYLMYTDYDMDHPEVVNELRNWGVWYTNTLGLDGFRIDAVKHIKYSFTRDWINHVRSATGKNMFAVAEFWKNDLGAIENYLQKTNWNHSVFDVPLHYNLYNASKSGGNYDMRNIFNGTVVQRHPSHAVTFVDNHDSQPEEALESFVEEWFKPLAYALTLTREQGYPSVFYGDYYGIPTHGVPAMRSKIDPILEARQKYAYGPQHDYLDHPDVIGWTREGDSSHPKSGLATLITDGPGGSKRMYAGLKNAGETWYDITGNRSDTVKIGSDGWGEFHVNDGSVSIYVQK

SEQ ID NO: 41363 - protein, 478 aa, Bacillus sp.
NGTMMQYFEWYLPNDGNHWNRLNSDASNLKSKGITAVWIPPAWKGASQNDVGYGAYDLYDLGEFNQKGTVRTKYGTRSQLQAAVTSLKNNGIQVYGDVVMNHKGGADATEMVRAVEVNPNNRNQEVTGEYTIEAWTRFDFPGRGNTHSSFKWRWYHFDGVDWDQSRRLNNRIYKFRGKAWDWEVDTEFGNYDYLMYADYDMDHPEVVNELRNWGVWYTNTLGLDGFRIDAVKHIKYSFTRDWINHVRSATGKNMFAVAEFWKNDLGAIENYLQKTNWNHSVFDVPLHYNLYNASKSGGNYDMRNIFNGTVVQRHPSHAVTFVDNHDSQPEEALESFVDPWFKPLAYALTLTREQGYPSVFYGDYYGIPTHGVPAMRSKIDPILEARQKYAYGPQHDYLDHPDVIGWTREGDSSHPKSGLATLITDGPGGSKRMYAGLKNAGETWYDITGNRSDTVKIGSDGWGEFHVNKTSVSIYVQK

SEQ ID NO: 41364 - protein, 478 aa, Bacillus sp.
NGTMMQYFEWYLPNDGNHWNRLNSDASNLKSKGITAVWIPPAWKAVSQNDVGYGAYDLYDLGEFNQKGTVRTKYGTRSQLQAAVTSLKNNGIQVYGDVVMNHKGGADATEMVRAVEVNPNNRNQEVTGEYTIEAWTRFDFPGRGNTHSSFKWRWYHFDGVDWDQSRRLSNRIYKFRGKAWDWEVDTEFGNYDYLMYADYDMDHPEVVNELRNWGVWYTNTLGLDGFRIDAVKHIKYSFTRDWINHVRSATGKNMFAVAEFWKNDLGAIENYLQKTNWNHSVFDVPLHYNLYNASKSGGNYDMRNIFNGTVVQVHPSHAVTFVDNHDSQPEEALESFVEEWFKPLAYALTLTREQGYPSVFYGDYYGIPTHGVPAMRSKIDPILEARQKYAYGPQHDYLDHPDVIGWTREGDSSHPKSGLATLITDGPGGSKRMYAGLKNAGETWYDITGNRSDTVKIGSDGWGEFHVNYGSVSIYVQK

SEQ ID NO: 41365 - protein, 478 aa, Bacillus sp.
NGTMMQYFEWYLPNDGNHWNRLNSDASNLKSKGITAVWIPPAWKGASQNDVGYGAYDLYDLGEFNQKGTVRTKYGTRSQLQAAVTSLKNNGIQVYGDVVMNHKGGADATEMVRAVEVNPNNRNQEVTGEYTIEAWTRFDFPGRGNTHSSFKWRWYHFDGVDWDQSERLNNRIYKFRGKAWDWEVETEFGNYDYLMYADYDMDHPEVVNELRNWGVWYTNTLGLDGFRIDAVKHIKYSFTRDWINHVRSATGKNMFAVAEFWKNDLGAIENYLQKTNWNHSVFDVPLHYNLYNASKSGGNYDMRNIFNGTVVQRHPSHAVTFVDNHDSQPEEALESFVEEWFKPLAYALTLTREQGLPSVFYGDYYGIPTHGVPAMRSKIDPILEARQKYAYGPQHDYLDHPDVIGWTREGDSSHPKSGLATLITDGPGGSKRMYAGLKNAGETWYDITGNRSDTVKIGSDGWGEFHVNDGSVSIYVQK

SEQ ID NO: 41366 - protein, 478 aa, Bacillus sp.
NGTMMQYFEWYLPNDGNHWNRLNSDASNLKSKGITAVWIPPAWKATSQNDVGYGAYDLYDLGEFNQKGTVRTKYGTRSQLQAAVTSLKNNGIQVYGDVVMNHKGGADATEMVRAVEVNPNNRNQEVTGEYTIEAYTRFDFPGRGNTHSSFKWRWYHFDGVDWDQSRDLNNRIYKFRGKAWDWEVDTEFGNYDYLMYADYDMDHPEVVNELRNWGVWYTNTLGLDGFRIDAVKHIKYSFTRDWINHVRSATGKNMFAVAEFWKNDLGAIENYLQKTNWNHSVFDVPLHYNLYNASKSGGNYDMRNIFNGTVVQRHPSHAVTFVDNHDSQPEEALESFVEEWFKPLAYALTLTREQGYPSVFYGDYYGIPTHGVPAMRSKIDPILEARQKYAYGPQHDYLDHPDVIGWTREGDSSHPKSGLATLITDGPGGSKRMYAGLKNAGETWYDITGNRSDTVKIGSDGWGEFHVNDGSVSIYVQK

SEQ ID NO: 41367 - protein, 478 aa, Bacillus sp.
NGTMMQYFEWYLPNDGNHWNRLNSDASNLKSKGITAVWIPPAWKATSQNDVGYGAYDLYDLGEFNQKGTVRTKYGTRSQLQAAVTSLKNNGIQVYGDVVMNHKGGADLTEMVDAVEVNPNNRNQEVTGEYTIEAWTRFDFPGRGNTHSSFKWRWYHFDGVDWDQSRNVNNRIYKFRGKAWDWEVDTEFGNYDYLMYADYDMDHPEVVNELRNWGVWYTNTLGLDGFRIDAVKHIKYSFTRDWINHVRSATGKNMFAVAEFWKNDLGAIENYLQKTNWNHSVFDVPLHYNLYNASKSGGNYDMRNIFNGTVVQRHPSHAVTFVDNHDSQPEEALESFVEEWFKPLAYALTLTREQGYPSVFYGDYYGIPTHGVPAMRSKIDPILEARQKYAYGPQHDYLDHPDVIGWTREGDSSHPKSGLATLITDGPGGSKRMYAGLKNAGETWYDITGNRSDTVKIGSDGWGEFHVNDGSVSIYVQK

SEQ ID NO: 41368 - protein, 478 aa, Bacillus sp.
NGTMMQYFEWYLPNDGNHWNRLNSDASNLKSKGITAVWIPPAWKGASQNDVGYGAYDLYDLGEFNQKGTVRTKYGTRSQLQAAVTSLKNNGIQVYGDVVMNHKGGADATEMVSAVEVNPNNRNQEVTGDYTIEAWTRFDFPGRGNTHSSFKWRWYHFDGVDWDQSRRLNNRIYKFRAKAWDWEVDTEFGNYDYLMYADYDMDHPEVVNELRNWGVWYTNTLGLDGFRIDAVKHIKYSFTRDWINHVRSATGKNMFAVAEFWKNDLGAIENYLQKTNWNHSVFDVPLHYNLYNASKSGGNYDMRNIFNGTVVQRHPSHAVTFVDNHDSQPEEALESFVEEWFKPLAYALTLTREQGYPSVFYGDYYGIPTHGVPAMRSKIDPILEARQKYAYGPQHDYLDHPDVIGWTREGDSSHPKSGLATLITDGPGGSKRMYAGLKNAGETWYDITGNRSDTVKIGSDGWGEFHVNDGSVSIYVQK

SEQ ID NO: 41369 - protein, 478 aa, Bacillus sp.
NGTMMQYFEWYLPNDGNHWNRLNSDASNLKSKGITAVWIPPAWKAASQNDVGYGAYDLYDLGEFNQKGTVRTKYGTRSQLQAAVTSLKNNGIQVYGDVVMNHKGGADATEMVRAVEVNPNNRNQEVTGEYTIEAWTRFDFPGRGNTHSSFKWRWYHFDGVDWDQSRRFDNRIYKFRGKAWDWEVDTEFGNYDYLMYTDYDMDHPEVVNELRNWGVWYTNTLGLDGFRIDAVKHIKYSFTRDWINHVRSATGKNMFAVAEFWKNDLGAIENYLQKTNWNHSVFDVPLHYNLYNASKSGGNYDMRNIFNGTVVQRHPSHAVTFVDNHDSQPEEALESFVEEWFKPLAYALTLTREQGYPSVFYGDYYGIPTHGVPAMRSKIDPILEARQKYAYGPQHDYLDHPDVIGWTREGDSSHPKSGLATLITDGPGGSKRMYAGLKNAGETWYDITGNRSDTVKIGSDGWGEFHVNDGSVSIYVQK

SEQ ID NO: 41370 - protein, 478 aa, Bacillus sp.
NGTMMQYFEWYLPNDGNHWNRLNSDASNLKSKGITAVWIPPAWKGASQNDVGYGAYDLYDLGEFNQKGTVRTKYGTRSQLQAAVTSLKNNGILVYGDVVMNHKGGADATEMVRAVEVNPNNRNQEVTGEYTIEAWTRFDFPGRGNTHSSFKWRWYHFDGVDWDQSRRLNNRIYKFRGKAWDWEVDTEFGNYDYLMYADYDMDHPEVVNELRNWGVWYTNTLGLDGFRIDAVKHIKYSFTRDWINHVRSATGKNMFAVAEFWKNDLGAIENYLQKTNWNHSVFDVPLHYNLYNASKSGGNYDMRNIFNGTVVQMHPMHAVTFVDNHDSQPEEALESFVEEWFKPLAYALTLTREQGYPSVFYGDYYGIPTHGVPAMRSKIDPILEARQKYAYGPQHDYLDHPDVIGWTREGDSSHPKSGLATLITDGPGGSKRMYAGLKNAGETWYDITGNRSDTVKIGSDGWGEFHVNDGSVSIYVQK

SEQ ID NO: 41371 - protein, 478 aa, Bacillus sp.
NGTMMQYFEWYLPNDGNHWNRLNSDASNLKSKGITAVWIPPAWKGASQNDVGYGAYDLYDLGEFNQKGTVRTKYGTRSQLQAAVTSLKNNGIQVYGDVVMNHKGGADATEMVRAVEVNPNNRNQEVTGEYTIEAWTRFDFPGRGNTHSSFKWRWYHFDGVDWDQSRRLDNRIYKFRGKAWDWEVDTEFGNYDYLMYVDYDYDHPETTNEMRNWGVWYTNTLGLDGFRIDAVKHIKYSFTRDWINHVRSATGKNMFAVAEFWKNDLGAIENYLQKTNWNHSVFDVPLHYNLYNASKSGGNYDMRNIFNGTVVQRHPSHAVTFVDNHDSQPEEALESFVEEWFKPLAYALTLTREQGYPSVFYGDYYGIPTHGVPAMRSKIDPILEARQKYAYGPQHDYLDHPDVIGWTREGDSSHPKSGLATLITDGPGGSKRMYAGLKNAGETWYDITGNRSDTVKIGSDGWGEFHVNDGSVSIYVQK

SEQ ID NO: 41372 - protein, 478 aa, Synthetic construct
NGTMMQYFEWYLPNDGNHWNRLNSDASNLKSKGITAVWIPPAWKGASQNDVGYGAYDLYDLGEFNQKGTVRTKYGTRSQLQAAVTSLKNNGIQVYGDVVMNHKGGADATEMVRAVEVNPNNRNQEVTGEYTIEAWTRFDFPGRGNTHSSFKWRWYHFDGVDWDQSRRLNNRIYLFRGKRWDWPVDTENGNYDYLMYADIDMDHPEVVNELRNWGVWYTNTLGLDGFRIDAVKHIKYSFTRDWINHVRSATGKNMFAVAEFWKNDLGAIENYLQKTNWNHSVFDVPLHYNLYNASKSGGNYDMRNIFNGTVVQRHPSHAVTFVDNHDSQPEEALESFVEEWFKPLAYALTLTREQGYPSVFYGDYYGIPTHGVPAMRSKIDPILEARQKYAYGPQHDYLDHPDVIGWTREGDSSHPKSGLATLITDGPGGSKRMYAGLKNAGETWYDITGNRSDTVKIGSDGWGEFHVNDGSVSIYVQK

SEQ ID NO: 41373 - protein, 478 aa, Bacillus sp.
NGTMMQYFEWYLPNDGNHWNRLNSDASNLKSKGITAVWIPPAWKGASQNDVGYGAYDLYDLGEFNQKGTVRTKYGTRSQLQAAVTSLKNNGIQVYGDVVMNHKGGADATEMVRAVEVNPNNRNQEVTGEYTIEAWTRFDFPGRGNTHSSFKWRWYHFDGVDWDQSRRLNNRIYKFRGKAWDWEVDTEFGNYDYLMYADYDMDHHEVINELRNWGVWYTNTLGLDGFRIDAVKHIKYSFTRDWINHVRSATGKNMFAVAEFWKNDLGAIENYLQKTNWNHSVFDVPLHYNLYNASKSGGNYDMRNIFNGTVVQRHPSHAVTFVDNHDSQPEEALESFVEEWFKPLAYALTLTREQGYPSVFYGDYYGIPTHGVPAMRSKIDPILEARQKYAYGPQHDYLDHPDVIGWTREGDSSHPKSGLATLITDGPGGSKRMYAGLKNAGETWYDITGNRSDTVKIGSDGWGEFHVNDGSVSIYVQK

SEQ ID NO: 41374 - protein, 478 aa, Bacillus sp.
NGTMMQYFEWYLPNDGNHWNRLNSDASNLKSKGITAVWIPPAWKAASQNDVGYGAYDLYDLGEFNQKGTVRTKYGTRSQLQAAVTSLKNNGIQVYGDVVMNHKGGADATEMVRAVEVNPNNRNQEVTGEYTIEAWTRFDFPGRGNTHSSFKWRWYHFDGVDWDQSRRFNNRIYKFRGKAWDWEVDTEFGNYDYLMYVDYDMDHPEVVNELRNWGVWYTNTLGLDGFRIDAVKHIKYSFTRDWINHVRSATGKNMFAVAEFWKNDLGAIENYLQKTNWNHSVFDVPLHYNLYNASKSGGNYDMRNIFNGTVVQRHPSHAVTFVDNHDSQPEEALESFVEEWFKPLAYALTLTREQGYPSVFYGDYYGIPTHGVPAMRSKIDPILEARQKYAYGPQHDYLDHPDVIGWTREGDSSHPKSGLATLITDGPGGSKRMYAGLKNAGETWYDITGNRSDTVKIGSDGWGEFHVNDGSVSIYVQK

SEQ ID NO: 41375 - protein, 478 aa, Bacillus sp.
NGTMMQYFEWYLPNDGNHWNRLNSDASNLKSKGITAVWIPPAWKAASQNDVGYGAYDLYDLGEFNQKGTVRTKYGTRSQLQAAVTSLKNNGIQVYGDVVMNHKGGADATEMVRAVEVNPNNRNQEVTGEYTIEAWTRFDFPGRGNTHSSFKWRWYHFDGVDWDQSREFQNRIYKFRGKAWDWEVDTEFGNYDYLMYTDYDMDHPEVVNELRNWGVWYTNTLGLDGFRIDAVKHIKYSFTRDWINHVRSATGKNMFAVAEFWKNDLGAIENYLQKTNWNHSVFDVPLHYNLYNASKSGGNYDMRNIFNGTVVQRHPSHAVTFVDNHDSQPEEALESFVEEWFKPLAYALTLTREQGYPSVFYGDYYGIPTHGVPAMRSKIDPILEARQKYAYGPQHDYLDHPDVIGWTREGDSSHPKSGLATLITDGPGGSKRMYAGLKNAGETWYDITGNRSDTVKIGSDGWGEFHVNDGSVSIYVQK

SEQ ID NO: 41376 - protein, 478 aa, Bacillus sp.
NGTMMQYFEWYLPNDGNHWNRLNSDASNLKSKGITAVWIPPAWKAASQNDVGYGAYDLYDLGEFNQKGTVRTKYGTRSQLQAAVTSLKNNGIQVYGDVVMNHKGGADLTEMVDAVEVNPNNRNQEVTGEYTIEAWTRFDFPGRGNTHSSFKWRWYHFDGVDWDQSRQITNRIYKFRGKAWDWEVDTEFGNYDYLMYTDYDMDHPEVVNELRNWGVWYTNTLGLDGFRIDAVKHIKYSFTRDWINHVRSATGKNMFAVAEFWKNDLGAIENYLQKTNWNHSVFDVPLHYNLYNASKSGGNYDMRNIFNGTVVQRHPSHAVTFVDNHDSQPEEALESFVEEWFKPLAYALTLTREQGYPSVFYGDYYGIPTHGVPAMRSKIDPILEARQKYAYGPQHDYLDHPDVIGWTREGDSSHPKSGLATLITDGPGGSKRMYAGLKNAGETWYDITGNRSDTVKIGSDGWGEFHVNDGSVSIYVQK

SEQ ID NO: 41377 - protein, 478 aa, Bacillus sp.
NGTMMQYFEWYLPNDGNHWNRLNSDASNLKSKGITAVWIPPAWKAVSQNDVGYGAYDLYDLGEFNQKGTVRTKYGTRSQLQAAVTSLKNNGIQVYGDVVMNHKGGADATEMVRAVEVNPNNRNQEVTGEYTIEAWTRFDFPGRGNTHSSFKWRWYHFDGVDWDQSRDLENRIYKFRGKAWDWEVDTEFGNYDYLMYADYDMDHPEVVNELRNWGVWYTNTLGLDGFRIDAVKHIKYSFTRDWINHVRSATGKNMFAVAEFWKNDLGAIENYLQKTNWNHSVFDVPLHYNLYNASKSGGNYDMRNIFNGTVVQRHPSHAVTFVDNHDSQPEEALESFVETWFKPLAYALTLTREQGYPSVFYGDYYGIPTHGVPAMRSKIDPILEARQKYAYGPQHDYLDHPDVIGWTREGDSSHPKSGLATLITDGPGGSKRMYAGLKNAGETWYDITGNRSDTVKIGSDGWGEFHVNKASVSIYVQK

SEQ ID NO: 41378 - protein, 478 aa, Bacillus sp.
NGTMMQYFEWYLPNDGNHWNRLNSDASNLKSKGITAVWIPPAWKGASQNDVGYGAYDLYDLGEFNQKGTVRTKYGTRSQLQAAVTSLKNNGIQVYGDVVMNHKGGADATEMVRAVEVNPNNRNQEVTGEYTIEAWTRFDFPGRGNTHSSFKWRWYHFDGVDWDQSRRLNNRIYKFRGKAWDWEVDTEFGNYDYLMYADYDMDHPEVVNELRNWGVWYTNTLGLDGFRIDAVKHIKYSFTRDWINHVRSATGKNMFAVAEFWKNDLGAIENYLQKTNWNHSVFDVPLHYNLYNASKSAGNYDMRNIFNGTVVQRHPSHAVTFVDNHDSQPEEALESFVETWFKPLAYALTLTREQGYPSVFYGDYYGIPTHGVPAMRSKIDPILEARQKYAYGPQHDYLDHPDVIGWTREGDSSHPKSGLATLITDGPGGSKRMYAGLKNAGETWYDITGNRSDTVKIGSDGWGEFHVNKTSVSIYVQK

SEQ ID NO: 41379 - protein, 478 aa, Bacillus sp.
NGTMMQYFEWYLPNDGNHWNRLNSDASNLKSKGIKAVWIPPAWKGASQNDTGYGAYDLYDLGEFNQKGTVRTKYGTRSQLQAAVTSLKNNGIQVYGDVVMNHKGGADATEMVRAVEVNPNNRNQEVTGEYTIEAWTRFDFPGRGNTHSSFKWRWYHFDGVDWDQSRRLNNRIYKFRGKAWDWEVDTEFGNYDYLMYADYDMDHPEVVNELRNWGVWYTNTLGLDGFRIDAVKHIKYSFTRDWINHVRSATGKNMFAVAEFWKNDLGAIENYLQKTNWNHSVFDVPLHYNLYNASKSGGNYDMRNIFNGTVVQRHPSHAVTFVDNHDSQPEEALESFVEEWFKPLAYALTLTREQGYPSVFYGDYYGIPTHGVPAMRSKIDPILLARQKYAYGPQHDYLDHPDVIGWTREGDSSHPPSGLATLITDGPGGSKRMYAGLKNAGETWYDITGNRSDTVKIGSDGWGEFHVNDGSVSIYVQK

SEQ ID NO: 41380 - protein, 478 aa, Bacillus sp.
NETMMQYFEWYLPNDGNHWNRLNSDASNLKSKGITAVWIPPAWKGASQNDVGYGAYDLYDLGEFNQKGTVRTKYGTRSQLQAAVTSLKNNGIQVYGDVVMNHKGGADATEMVRAVEVNPNNRNQEVTGEYTIEAWTRFDFPGRGNTHSSFKWRWYHFDGVDWDQSRRLNNRIYKFRGKAWDWEVDTEFGNYDYLMYADYDMDHPEVVNELRNWGVWYTNTLGLDGFRIDAVKHIKYSFTRDWINHVRSATGKNMFAVAEFWKNDLGAIENYLQKTNWNHSVFDVPLHYNLYNASKSGGNYDMRNIFNGTVVQAHPSQAVTFVDNHDSQPEEALESFVEEWFKPLAYALTLTREQGYPSVFYGDYYGIPTHGVPAMRSKIDPILEARQKYAYGPQHDYLDHPDVIGWTREGDSSHPKSGLATLITDGPGGSKRMYAGLKNAGETWYDITGNRSDTVKIGSDGWGEFHVNDGSVSIYVQK

SEQ ID NO: 41381 - protein, 478 aa, Bacillus sp.
NGTMMQYFEWYLPNDGNHWNRLNSDASNLKSKGITAVWIPPAWKATSQNDVGYGAYDLYDLGEFNQKGTVRTKYGTRSQLQAAVTSLKNNGIQVYGDVVMNHKGGADATEMVRAVEVNPNNRNQEVTGEYTIEAWTRFDFPGRGNTHSSFKWRWYHFDGVDWDQSRNVNNRIYKFRGKAWDWEVDTEFGNYDYLMYADYDMDHPEVVNELRNWGVWYTNTLGLDGFRIDAVKHIKYSFTRDWINHVRSATGKNMFAVAEFWKNDLGAIENYLQKTNWNHSVFDVPLHYNLYNASKSGGNYDMRNIFNGTVVQRHPSHAVTFVDNHDSQPEEALESFVDPWFKPLAYALTLTREQGYPSVFYGDYYGIPTHGVPAMRSKIDPILEARQKYAYGPQHDYLDHPDVIGWTREGDSSHPKSGLATLITDGPGGSKRMYAGLKNAGETWYDITGNRSDTVKIGSDGWGEFHVNGGSVSIYVQK

SEQ ID NO: 41382 - protein, 478 aa, Bacillus sp.
NGTMMQYFEWYLPNDGNHWNRLNSDASNLKSKGITAVWIPPAWKATSQNDVGYGAYDLYDLGEFNQKGTVRTKYGTRSQLQAAVTSLKNNGIQVYGDVVMNHKGGADATEMVRAVEVNPNNRNQEVTGEYTIEAWTRFDFPGRGNTHSSFKWRWYHFDGVDWDQSRNLDNRIYKFRVKAWDWEVDTEFGNYDYLMYADYDMDHPEVVNELRNWGVWYTNTLGLDGFRIDAVKHIKYSFTRDWINHVRSATGKNMFAVAEFWKNDLGAIENYLQKTNWNHSVFDVPLHYNLYNASKSGGNYDMRNIFNGTVVQRHPSHAVTFVDNHDSQPEEALESFVEEWFKPLAYALTLTREQGYPSVFYGDYYGIPTHGVPAMRSKIDPILEARQKYAYGPQHDYLDHPDVIGWTREGDSSHPKSGLATLITDGPGGSKRMYAGLKNAGETWYDITGNRSDTVKIGSDGWGEFHVNDGSVSIYVQK

SEQ ID NO: 41383 - protein, 478 aa, Bacillus sp.
NGTMMQYFEWYLPNDGNHWNRLNSDASNLKSKGITAVWIPPAWKGASQNDVGYGAYDLYDLGEFNQKGTVRTKYGTRSQLQAAVTSLKNNGIQVYGDVVMNHKGGADATEMVRAVEVNPNNRNQEVTGEYTIEAWTRFDFPGRGNTHSSFKWRWYHFDGVDWDQSRRLNNRIYKFRGKAWDWEVDTEFGNYDYLMYADYDMDHPEVVNELRNWGVWYTNTLGLDGFRIDAVKHIKYSFTRDWINHVRSATGKNMFAVAEFWKNDLGAIENYLQKTNWNHSVFDVPLHYNLYNASKSQGNYDMRNIFNGTVVQRHPSHAVTFVDNHDSQPEEALESFVDTWFKPLAYALTLTREQGYPSVFYGDYYGIPTHGVPAMRSKIDPILEARQKYAYGPQHDYLDHPDVIGWTREGDSSHPKSGLATLITDGPGGSKRMYAGLKNAGETWYDITGNRSDTVKIGSDGWGEFHVNGSSVSIYVQK

SEQ ID NO: 41384 - protein, 478 aa, Bacillus sp.
NGTMMQYFEWYLPNDGNHWNRLNSDASNLKSKGITAVWIPPAWKGASQNDVGYGAYDLYDLGEFNQKGTVRTKYGTRSQLQAAVTSLKNNGINVYGDVVMNHKGGADATEMVRAVEVNPNNRNQEVTGEYTIEAWTRFDFPGRGNTHSSFKWRWYHFDGVDWDQSRRLNNRIYKFRGKAWDWEVDTEFGNYDYLMYADYDMDHPEVVNELRNWGVWYTNTLGLDGFRIDAVKHIKYSFTRDWINHVRSATGKNMFAVAEFWKNDLGAIENYLQKTNWNHSVFDVPLHYNLYNASKSGGNYDMRNIFNGTVVQSHPSHAVTFVDNHDSQPEEALESFVEEWFKPLAYALTLTREQGYPSVFYGDYYGIPTHGVPAMRSKIDPILEARQKYAYGPQHDYLDHPDVIGWTREGDSSHPKSGLATLITDGPGGSKRMYAGLKNAGETWYDITGNRSDTVKIGSDGWGEFHVNDGSVSIYVQK

SEQ ID NO: 41385 - protein, 478 aa, Bacillus sp.
NGTMMQYFEWYLPNDGNHWNRLNSDASNLKSKGITAVWIPPAWKGASQNDVGYGAYDLYDLGEFNQKGTVRTKYGTRSQLQAAVTSLKNNGIKVYGDVVMNHKGGADATEMVRAVEVNPNNRNQEVTGEYTIEAWTRFDFPGRGNTHSSFKWRWYHFDGVDWDQSRRLNNRIYKFRGKAWDWEVDTEFGNYDYLMYADYDMDHPEVVNELRNWGVWYTNTLGLDGFRIDAVKHIKYSFTRDWINHVRSATGKNMFAVAEFWNNDLGAIENYLQKTNWNHSVFDVPLHYNLYNASKSGGNYDMRNIFNGTVVQAHPMQAVTFVDNHDSQPEEALESFVEEWFKPLAYALTLTREQGYPSVFYGDYYGIPTHGVPAMRSKIDPILEARQKYAYGPQHDYLDHPDVIGWTREGDSSHPKSGLATLITDGPGGSKRMYAGLKNAGETWYDITGNRSDTVKIGSDGWGEFHVNDGSVSIYVQK

SEQ ID NO: 41386 - protein, 478 aa, Bacillus sp.
NGTMMQYFEWYLPNDGNHWNRLNSDASNLKSKGITAVWIPPAWKGASQNDVGYGAYDLYDLGEFNQKGTVRTKYGTRSQLQAAVTSLKNNGIQVYGDVVMNHKGGADATEMVRAVEVNPNNRNQEVTGEYTIEAWTRFDFPGRGNTHSSFKWRWYHFDGVDWDQSRRLNNRIYKFRGKAWDWEVDTEFGNYDYLMYADYDMDHPEVVNELRNWGVWYTNTLGLDGFRIDAVKHIKYSFTRDWINHVRSATGKNMFAVAEFWKNDLGAIENYLQKTNWNHSVFDVPLHYNLYNASKSGGNYDMRNIFNGTVVQRHPSHAVTFVDNHDSQPEEALESFVDEWFKPLAYALTLTREQGYPSVFYGDYYGIPTHGVPAMRSKIDPILEARQKYAYGPQHDYLDHPDVIGWTREGDSSHPKSGLATLITDGPGGSKRMYAGLKNAGETWYDITGNRSDTVKIGSDGWGEFHVNQSSVSIYVQK

SEQ ID NO: 41387 - protein, 478 aa, Bacillus sp.
NGTMMQYFEWYLPNDGNHWNRLNSDASNLKSKGITAVWIPPAWKGASQNDVGYGAYDLYDLGEFNQKGTVRTKYGTRSQLQAAVTSLKNNGIQVYGDVVMNHKGGADATEMVRAVEVNPNNRNQEVTGEYTIEAWTRFDFPGRGNTHSSFKWRWYHFDGVDWDQSRRLNNRIYKFRGKAWDWEVDTEFGNYDYLMYADYDMDHPEVVNELRNWGVWYTNTLGLDGFRIDAVKHIKYSFTRDWINHVRSATGKNMFAVAEFWKNDLGAIENYLQKTNWNHSVFDVPLHYNLYNASKSQGNYDMRNIFNGTVVQRHPSHAVTFVDNHDSQPEEALESFVDPWFKPLAYALTLTREQGYPSVFYGDYYGIPTHGVPAMRSKIDPILEARQKYAYGPQHDYLDHPDVIGWTREGDSSHPKSGLATLITDGPGGSKRMYAGLKNAGETWYDITGNRSDTVKIGSDGWGEFHVNGGSVSIYVQK

SEQ ID NO: 41388 - protein, 478 aa, Bacillus sp.
NGTMMQYFEWYLPNDGNHWNRLNSDASNLKSKGITAVWIPPAWKGASQNDVGYGAYDLYDLGEFNQKGTVRTKYGTRSQLQAAVTSLKNNGIQVYGDVVMNHKGGADATEMVRAVEVNPNNRNQEVTGEYTIEAWTRFDFPGRGNTHSSFKWRWYHFDGVDWDQSRRLNNRIYKFRGKAWDWEVDTEFGNYDYLMYADYDMDHPEVVNELRNWGVWYTNTLGLDGFRIDAVKHIKYSFTRDWINHVRSATGKNMFAVAEFWKNDLGAIENYLQKTNWNHSVFDVPLHYNLYNASQSGGNYDMRNIFNGTVVQRHPSHAVTFVDNHDSQPEEALESFVEEWFKPLAYALTLTREQGYPSVFYGDYYGIPTHGVPAMRSKIDPILEARQKYAYGPQHDYLDHPDVIGWTREGDSSHPKSGLATLITDGPGGSKRMYAGLKNAGETWYDITGNRSDTVKIGSDGWGEFHVNGQSVSIYVQK

SEQ ID NO: 41389 - protein, 478 aa, Bacillus sp.
NGTMMQYFEWYLPNDGNHWNRLNSDASNLKSKGITAVWIPPAWKGASQNDVGYGAYDLYDLGEFNQKGTVRTKYGTRSQLQAAVTSLKNNGIQVYGDVVMNHKGGADATEMVRAVEVNPNNRNQEVTGEYTIEAWTRFDFPGRQNTHSSFKWRWYHFDGVDWDQSERLNNRIYKFRGKAWDWEVDTEFGNYDYLMYADYDMDHPEVVNELRNWGVWYTNTLGLDGFRIDAVKHIKYSFTRDWINHVRSATGKNMFAVAEFWKNDLGAIENYLQKTNWNHSVFDVPLHYNLYNASKSGGNYDMRNIFNGTVVQRHPSHAVTFVDNHDSQPEEALESFVEEWFKPLAYALTLTREQGYPSVFYGDYYGIPTHGVPAMRSKIDPILEARQKYAYGPQHDYLDHPDVIGWTREGDSSHPKSGLATLITDGPGGSKRMYAGLKNAGETWYDITGNRSDTVKIGSDGWGEFHVNDGSVSIYVQK

SEQ ID NO: 41390 - protein, 478 aa, Bacillus sp.
NGTMMQYFEWYLPNDGNHWNRLNSDASNLKSKGITAVWIPPAWKGASQNDVGYGAYDLYDLGEFNQKGTVRTKYGTRSQLQAAVTSLKNNGIQVYGDVVMNHKGGADATEMVRAVEVNPNNRNQEVTGEYTIEAWTRFDFPGRGNTHSSFKWRWYHFDGVDWDQSRRLNNRIYKFRGKAWDWEVDTEFGNYDYLMYADYDMDHPEVVNELRNWGVWYTNTLGLDGFRIDAVKHIKYSFTRDWINHVRSATGKNMFAVAEFWKNDLGAIENYLQKTNWNHSVFDVPLHYNLYNASKSGGNYDMRNIFNGTVVQRHPSHAVTFVDNHDSQPEEALESFVEPWFKPLAYALTLTREQGYPSVFYGDYYGIPTHGVPAMRSKIDPILEARQKYAYGPQHDYLDHPDVIGWTREGDSSHPKSGLATLITDGPGGSKRMYAGLKNAGETWYDITGNRSDTVKIGSDGWGEFHVNQTSVSIYVQK

SEQ ID NO: 41391 - protein, 478 aa, Bacillus sp.
NGTMMQYFEWYLPNDGNHWNRLNSDASNLKSKGITAVWIPPAWKAASQNDVGYGAYDLYDLGEFNQKGTVRTKYGTRSQLQAAVTSLKNNGIQVYGDVVMNHKGGADATEMVRAVEVNPNNRNQEVTGEYTIEAWTRFDFPGRGNTHSSFKWRWYHFDGVDWDQSRNLTNRIYKFRGKAWDWEVDTEFGNYDYLMYADYDMDHPEVVNELRNWGVWYTNTLGLDGFRIDAVKHIKYSFTRDWINHVRSATGKNMFAVAEFWKNDLGAIENYLQKTNWNHSVFDVPLHYNLYNASKSGGNYDMRNIFNGTVVQRHPSHAVTFVDNHDSQPEEALESFVETWFKPLAYALTLTREQGYPSVFYGDYYGIPTHGVPAMRSKIDPILEARQKYAYGPQHDYLDHPDVIGWTREGDSSHPKSGLATLITDGPGGSKRMYAGLKNAGETWYDITGNRSDTVKIGSDGWGEFHVNKASVSIYVQK

SEQ ID NO: 41392 - protein, 478 aa, Bacillus sp.
NGTMMQYFEWYLPNDGNHWNRLNSDASNLKSKGITAVWIPPAWKGASQNDVGYGAYDLYDLGEFNQKGTVRTKYGTRSQLQAAVTSLKNNGIQVYGDVVMNHKGGADATEMVRAVEVNPNNRNQEVTGEYTIEAWTRFDFPGRGNTHSSFKWRWYHFDGVDWDQSRRLNNRIYKFRGKAWDWEVDTEFGNYDYLMYADYDMDHPEVVNELRNWGVWYTNTLGLDGFRIDAVKHIKYSFTRDWINHVRSATGKNMFAVAEFWKNDLGAIENYLQKTNWNHSVFDVPLHYNLYNASKSAGNYDMRNIFNGTVVQRHPSHAVTFVDNHDSQPEEALESFVDTWFKPLAYALTLTREQGYPSVFYGDYYGIPTHGVPAMRSKIDPILEARQKYAYGPQHDYLDHPDVIGWTREGDSSHPKSGLATLITDGPGGSKRMYAGLKNAGETWYDITGNRSDTVKIGSDGWGEFHVNKSSVSIYVQK

SEQ ID NO: 41393 - protein, 478 aa, Bacillus sp.
NGTMMQYFEWYLPNDGNHWNRLNSDASNLKSKGITAVWIPPAWKGASQNDVGYGAYDLYDLGEFNQKGTVRTKYGTRSQLQAAVTSLKNNGIQVYGDVVMNHKGGADYTEMVRAVEVNPNNRNQEVTGEYTIEAWTRFDFPGRGNTHSSFKWRWYHFDGVDWDQSERLNNRIYKFRGKAWDWEVDTEFGNYDYLMYADYDMDHPEVVNELRNWGVWYTNTLGLDGFRIDAVKHIKYSFTRDWINHVRSATGKNMFAVAEFWKNDLGAIENYLQKTNWNHSVFDVPLHYNLYNASKSGGNYDMRNIFNGTVVQRHPSHAVTFVDNHDSQPEEALESFVEEWFKPLAYALTLTREQGYPSVFYGDYYGIPTHGVPAMRSKIDPILEARQKYAYGPQHDYLDHPDVIGWTREGDSSHPKSGLATLITDGPGGSKRMYAGLKNAGETWYDITGNRSDTVKIGSDGWGEFHVNDGSVSIYVQK

SEQ ID NO: 41394 - protein, 478 aa, Bacillus sp.
NGTMMQYFEWYLPNDGNHWNRLNSDASNLKSKGITAVWIPPAWKGASQNDVGYGAYDLYDLGEFNQKGTVRTKYGTRSQLLAAVTSLKNNGIQVYGDVVMNHKGGADATEMVRAVEVNPNNRNQEVTGEYTIEAWTRFDFPGRGNTHSSFKWRWYHFDGVDWDQSRRLNNRIYKFRGKAWDWEVDTEFGNYDYLMYADYDMDHPEVVNELRNWGVWYTNTLGLDGFRIDAVKHIKYSFTRDWINHVRSATGKNMFAVAEFWKNDLGAIENYLQKTNWNHSVFDVPLHYNLYNASKSGGNYDMRNIFNGTVVQAHPMHAVTFVDNHDSQPEEALESFVEEWFKPLAYALTLTREQGYPSVFYGDYYGIPTHGVPAMRSKIDPILEARQKYAYGPQHDYLDHPDVIGWTREGDSSHPKSGLATLITDGPGGSKRMYAGLKNAGETWYDITGNRSDTVKIGSDGWGEFHVNDGSVSIYVQK

SEQ ID NO: 41395 - protein, 478 aa, Bacillus sp.
NGTMMQYFEWYLPNDGNHWNRLNSDASNLKSKGITAVWIPPAWKGASQNDVGYGAYDLYDLGEFNQKGTVRTKYGTRSQLQAAVTSLKNNGIQVYGDVVMNHKGGADATEMVRAVEVNPNNRNQEVTGEYTIEAWTRFDFPGRGNTHSSFKWRWYHFDGVDWDQSRRLNNRIYLFRGKSWDWEVDTEFGNYDYLMYADYDMDHPEVVNELRNWGVWYTNTLGLDGFRIDAVKHIKYSFTRDWINHVRSATGKNMFAVAEFWKNDLGAIENYLQKTNWNHSVFDVPLHYNLYNASKSGGNYDMRNIFNGTVVQRHPSHAVTFVDNHDSQPEEALESFVEEWFKPLAYALTLTREQGYPSVFYGDYYGIPTHGVPAMRSKIDPILEARQKYAYGPQHDYLDHPDVIGWTREGDSSHPKSGLATLITDGPGGSKRMYAGLKNAGETWYDITGNRSDTVKIGSDGWGEFHVNDGSVSIYVQK

SEQ ID NO: 41396 - protein, 478 aa, Bacillus sp.
NGTMMQYFEWYLPNDGNHWNRLNSDASNLKSKGITAVWIPPAWKGASQNDVGYGAYDLYDLGEFNQKGTVRTKYGTRSQLQAAVTSLKNNGIQVYGDVVMNHKGGADATEMVRAVEVNPNNRNQEVTGEYTIEAWTRFDFPGRGNTHSSFKWRWYHFDGVDWDQSRRLNNRIYKFRGKAWDWEVDTEFGNYDYLMYADYDMDHPEVVNELRNWGVWYTNTLGLDGFRIDAVKHIKYSFTRDWINHVRSATGKNMFAVAEFWKNDLGAIENYLQKTNWNHSVFDVPLHYNLYNASKSGGNYDMRNIFNGTVVQRHPSHAVTFVDNHDSQPEEALESFVDEWFKPLAYALTLTREQGYPSVFYGDYYGIPTHGVPAMRSKIDPILEARQKYAYGPQHDYLDHPDVIGWTREGDSSHPKSGLATLITDGPGGSKRMYAGLKNAGETWYDITGNRSDTVKIGSDGWGEFHVNKSSVSIYVQK

SEQ ID NO: 41397 - protein, 478 aa, Bacillus sp.
NGTMMQYFEWYLPNDGNHWNRLNSDASNLKSKGITAVWIPPAWKAASQNDVGYGAYDLYDLGEFNQKGTVRTKYGTRSQLQAAVTSLKNNGIQVYGDVVMNHKGGADATEMVRAVEVNPNNRNQEVTGEYTIEAWTRFDFPGRGNTHSSFKWRWYHFDGVDWDQSRDLDNRIYKFRGKAWDWEVDTEFGNYDYLMYADYDMDHPEVVNELRNWGVWYTNTLGLDGFRIDAVKHIKYSFTRDWINHVRSATGKNMFAVAEFWKNDLGAIENYLQKTNWNHSVFDVPLHYNLYNASKSGGNYDMRNIFNGTVVQVHPSHAVTFVDNHDSQPEEALESFVEEWFKPLAYALTLTREQGYPSVFYGDYYGIPTHGVPAMRSKIDPILEARQKYAYGPQHDYLDHPDVIGWTREGDSSHPKSGLATLITDGPGGSKRMYAGLKNAGETWYDITGNRSDTVKIGSDGWGEFHVNDGSVSIYVQK

SEQ ID NO: 41398 - protein, 478 aa, Bacillus sp.
NGTMMQYFEWYLPNDGNHWNRLNSDASNLKSKGITAVWIPPAWKATSQNDVGYGAYDLYDLGEFNQKGTVRTKYGTRSQLQAAVTSLKNNGIQVYGDVVMNHKGGADATEMVRAVEVNPNNRNQEVTGEYTIEAWTRFDFPGRGNTHSSFKWRWYHFDGVDWDQSRDLNNRIYKFRGKAWDWEVDTEFGNYDYLMYADYDMDHPEVVNELRNWGVWYTNTLGLDGFRIDAVKHIKYSFTRDWINHVRIATGKNMFAVAEFWKNDLGAIENYLQKTNWNHSVFDVPLHYNLYNASKSGGNYDMRNIFNGTVVQRHPSHAVTFVDNHDSQPEEALESFVDEWFKPLAYALTLTREQGYPSVFYGDYYGIPTHGVPAMRSKIDPILEARQKYAYGPQHDYLDHPDVIGWTREGDSSHPKSGLATLITDGPGGSKRMYAGLKNAGETWYDITGNRSDTVKIGSDGWGEFHVNDQSVSIYVQK

SEQ ID NO: 41399 - protein, 478 aa, Bacillus sp.
NGTMMQYFEWYLPNDGNHWNRLNSDASNLKSKGITAVWIPPAWKATSQNDVGYGAYDLYDLGEFNQKGTVRTKYGTRSQLQAAVTSLKNNGIQVYGDVVMNHKGGADATEMVRAVEVNPNNRNQEVTGEYTIEAWTRFDFPGRGNTHSSFKWRWYHFDGVDFDQSRNVNNRIYKFRGKAWDWEVDTEFGNYDYLMYADYDMDHPEVVNELRNWGVWYTNTLGLDGFRIDAVKHIKYSFTRDWINHVRSATGKNMFAVAEFWKNDLGAIENYLQKTNWNHSVFDVPLHYNLYNASKSGGNYDMRNIFNGTVVQRHPSHAVTFVDNHDSQPEEALESFVEEWFKPLAYALTLTREQGYPSVFYGDYYGIPTHGVPAMRSKIDPILEARQKYAYGPQHDYLDHPDVIGWTREGDSSHPKSGLATLITDGPGGSKRMYAGLKNAGETWYDITGNRSDTVKIGSDGWGEFHVNDGSVSIYVQK

SEQ ID NO: 41400 - protein, 478 aa, Bacillus sp.
NGTMMQYFEWYLPNDGNHWNRLNSDASNLKSKGITAVWIPPAWKATSQNDVGYGAYDLYDLGEFNQKGTVRTKYGTRSQLQAAVTSLKNNGIQVYGDVVMNHKGGADATEMVRAVEVNPNNRNQEVTGEYTIEAWTRFDFPGRGNTHSSFKWRWYHFDGVDWDQSRELSNRIYKFRGKAWDWEVDTEFGNYDYLMYADYDMDHPEVVNELRNWGVWYTNTLGLDGFRIDAVKHIKYSFTRDWINHVRSATGKNMFAVAEFWKNDLGAIENYLQKTNWNHSVFDVPLHYNLYNASKSQGNYDMRNIFNGTVVQRHPSHAVTFVDNHDSQPEEALESFVDTWFKPLAYALTLTREQGYPSVFYGDYYGIPTHGVPAMRSKIDPILLARQKYAYGPQHDYLDHPDVIGWTREGDSSHPKSGLATLITDGPGGSKRMYAGLKNAGETWYDITGNRSDTVKIGSDGWGEFHVNGSSVSIYVQK

SEQ ID NO: 41401 - protein, 478 aa, Bacillus sp.
NGTMMQYFEWYLPNDGNHWNRLNSDASNLKSKGITAVWIPPAWKGASQNDVGYGAYDLYDLGEFNQKGTVRTKYGTRSQLQAAVTSLKNNGIQVYGDVVMNHKGGADATEMVRAVEVNPNNRNQEVTGEYTIEAWTRFDFPGRGNTHSSFKWRWYHFDGVDWDQSRRLNNRIYKFRGKAWDWEVDTEFGNYDYLMYADYDMDHPEVVNELRNWGVWYTNTLGLDGFRIDAVKHIKYSFTRDWINHVRSATGKNMFAVAEFWKNDLGAIENYLQKTNWNHSVFDVPLHYNLYNASKSQGNYDMRNIFNGTVVQRHPSHAVTFVDNHDSQPEEALESFVETWFKPLAYALTLTREQGYPSVFYGDYYGIPTHGVPAMRSKIDPILEARQKYAYGPQHDYLDHPDVIGWTREGDSSHPKSGLATLITDGPGGSKRMYAGLKNAGETWYDITGNRSDTVKIGSDGWGEFHVNKQSVSIYVQK

SEQ ID NO: 41402 - protein, 478 aa, Bacillus sp.
NGTMMQYFEWYLPNDGNHWNRLNSDASNLKSKGITAVWIPPAWKGASQNDTGYGAYDLYDLGEFNQKGTVRTKYGTRSQLQAAVTSLKNNGIQVYGDVVMNHKGGADYTEMVRAVEVNPNNRNQEVTGEYTIEAWTRFDFPGRGNTHSSFKWRWYHFDGVDWDQSERLNNRIYKFRGKAWDWEVDTEFGNYDYLMYADYDMDHPEVVNELRNWGVWYTNTLGLDGFRIDAVKHIKYSFTRDWINHVRSATGKNMFAVAEFWKNDLGAIENYLQKTNWNHSVFDVPLHYNLYNASKSGGNYDMRNIFNGTVVQRHPSHAVTFVDNHDSQPEEALESFVEEWFKPLAYALTLTREQGYPSVFYGDYYGIPTHGVPAMRSKIDPILEARQKYAYGPQHDYLDHPDVIGWTREGDSSHPKSGLATLITDGPGGSKRMYAGLKNAGETWYDITGNRSDTVKIGSDGWGEFHVNDGSVSIYVQK

SEQ ID NO: 41403 - protein, 478 aa, Bacillus sp.
NGTMMQYFEWYLPNDGNHWNRLNSDASNLKSKGITAVWIPPAWKAVSQNDVGYGAYDLYDLGEFNQKGTVRTKYGTRSQLQAAVTSLKNNGIQVYGDVVMNHKGGADATEMVRAVEVNPNNRNQEVTGEYTIEAWTRFDFPGRGNTHSSFKWRWYHFDGVDWDQSRDLENRIYKFRGKAWDWEVDTEFGNYDYLMYADYDMDHPEVVNELRNWGVWYTNTLGLDGFRIDAVKHIKYSFTRDWINHVRIATGKNMFAVAEFWKNDLGAIENYLQKTNWNHSVFDVPLHYNLYNASKSGGNYDMRNIFNGTVVQRHPSHAVTFVDNHDSQPEEALESFVDEWFKPLAYALTLTREQGYPSVFYGDYYGIPTHGVPAMRSKIDPILEARQKYAYGPQHDYLDHPDVIGWTREGDSSHPKSGLATLITDGPGGSKRMYAGLKNAGETWYDITGNRSDTVKIGSDGWGEFHVNDQSVSIYVQK

SEQ ID NO: 41404 - protein, 478 aa, Bacillus sp.
NGTMMQYFEWYLPNDGNHWNRLNSDASNLKSKGITAVWIPPAWKGASQNDVGYGAYDLYDLGEFNQKGTVRTKYGTRSQLQAAVTSLKNNGIQVYGDVVMNHKGGADATEMVRAVEVNPNNRNQEVTGEYTIEAWTRFDFPGRGNTHSSFKWRWYHFDGVDWDQSRRTNNRIYKFRGKAWDWEVDTEFGNYDYLMYTDYDMDHPEVVNELRNWGVWYTNTLGLDGFRIDAVKHIKYSFTRDWINHVRIATGKNMFAVAEFWKNDLGAIENYLQKTNWNHSVFDVPLHYNLYNASKSGGNYDMRNIFNGTVVQRHPSHAVTFVDNHDSQPEEALESFVDEWFKPLAYALTLTREQGYPSVFYGDYYGIPTHGVPAMRSKIDPILEARQKYAYGPQHDYLDHPDVIGWTREGDSSHPKSGLATLITDGPGGSKRMYAGLKNAGETWYDITGNRSDTVKIGSDGWGEFHVNDQSVSIYVQK

SEQ ID NO: 41405 - protein, 478 aa, Bacillus sp.
NPTMMQYFEWYLPNDGNHWNRLNSDASNLKSKGITAVWIPPAWKGASQNDVGYGAYDLYDLGEFNQKGTVRTKYGTRSQLQAAVTSLKNNGIQVYGDVVMNHKGGADATEMVRAVEVNPNNRNQEVTGEYTIEAWTRFDFPGRGNTHSSFKWRWYHFDGVDWDQSRRLNNRIYKFRGKAWDWEVDTEFGNYDYLMYADYDMDHPEVVNELRNWGVWYTNTLGLDGFRIDAVKHIKYSFTRDWINHVRSATGKNMFAVAEFWKNDLGAIENYLQKTNWNHSVFDVPLHYNLYNASKSGGNYDMRNIFNGTVVQSHPKHAVTFVDNHDSQPEEALESFVEEWFKPLAYALTLTREQGYPSVFYGDYYGIPTHGVPAMRSKIDPILEARQKYAYGPQHDYLDHPDVIGWTREGDSSHPKSGLATLITDGPGGSKRMYAGLKNAGETWYDITGNRSDTVKIGSDGWGEFHVNDGSVSIYVQK

SEQ ID NO: 41406 - protein, 478 aa, Bacillus sp.
NGTMMQYFEWYLPNDGNHWNRLNSDASNLKSKGITAVWIPPAWKGASQNDVGYGAYDLYDLGEFNQKGTVRTKYGTRSQLQAAVTSLKNNGIQVYGDVVMNHKGGADATEMVRAVEVNPNNRNQEVTGEYTIEAWTRFDFPGRGNTHSSFKWRWYHFDGVDWDQSRRLNNRIYKFRGKAWDWEVDTEFGNYDYLMYADYDMDHPEVVNELRNWGVWYTNTLGLDGFRIDAVKHIKYSFTRDWINHVRSATGKNMFAVAEFWKNDLGAIENYLQKTNWNHSVFDVPLHYNLYNASKSSGNYDMRNIFNGTVVQRHPSHAVTFVDNHDSQPEEALESFVDTWFKPLAYALTLTREQGYPSVFYGDYYGIPTHGVPAMRSKIDPILEARQKYAYGPQHDYLDHPDVIGWTREGDSSHPKSGLATLITDGPGGSKRMYAGLKNAGETWYDITGNRSDTVKIGSDGWGEFHVNQQSVSIYVQK

SEQ ID NO: 41407 - protein, 478 aa, Bacillus sp.
NGTMMQYFEWYLPNDGNHWNRLNSDASNLKSKGITAVWIPPAWKGASQNDVGYGAYDLYDLGEFNQKGTIRTKYGTRSQLQAAVTSLKNNGIQVYGDVVMNHKGGADATEMVRAVEVNPNNRNQEVTGEYTIEAWTRFDFPGRGNTHSSFKWRWYHFDGVDWDQSRRLNNRIYKFRGKAWDWEVDTEFGNYDYLMYADYDMDHPEVVNELRNWGVWYTNTLGLDGFRIDAVKHIKYSFTRDWINHVRSATGKNMFAVAEFWKNDLGAIENYLQKTNWNHSVFDVPLHYNLYNASKSGGNYDMRNIFNGTVVQAHPNHAVTFVDNHDSQPEEALESFVEEWFKPLAYALTLTREQGYPSVFYGDYYGIPTHGVPAMRSKIDPILEARQKYAYGPQHDYLDHPDVIGWTREGDSSHPKSGLATLITDGPGGSKRMYAGLKNAGETWYDITGNRSDTVKIGSDGWGEFHVNDGSVSIYVQK

SEQ ID NO: 41408 - protein, 478 aa, Bacillus sp.
NGTMMQYFEWYLPNDGNHWNRLNSDASNLKSKGITAVWIPPAWKGASQNDVGYGAYDLYDLGEFNQKGTVRTKYGTRSQLQAAVTSLKNNGIAVYGDVVMNHKGGADATEMVRAVEVNPNNRNQEVTGEYTIEAWTRFDFPGRGNTHSSFKWRWYHFDGVDWDQSRRLNNRIYKFRGKAWDWEVDTEFGNYDYLMYADYDMDHPEVVNELRNWGVWYTNTLGLDGFRIDAVKHIKYSFTRDWINHVRSATGKNMFAVAEFWKNDLGAIENYLQKTNWNHSVFDVPLHYNLYNASKSGGNYDMRNIFNGTVVQSHPMHAVTFVDNHDSQPEEALESFVEEWFKPLAYALTLTREQGYPSVFYGDYYGIPTHGVPAMRSKIDPILEARQKYAYGPQHDYLDHPDVIGWTREGDSSHPKSGLATLITDGPGGSKRMYAGLKNAGETWYDITGNRSDTVKIGSDGWGEFHVNDGSVSIYVQK

SEQ ID NO: 41409 - protein, 478 aa, Bacillus sp.
NGTMMQYFEWYLPNDGNHWNRLNSDASNLKSKGITAVWIPPAWKGASQNDVGYGAYDLYDLGEFNQKGTVRTKYGTRSQLQAAVTSLKNNGIQVYGDVVMNHKGGADATEMVRAVEVNPNNRNQEVTGEYTIEAWTRFDFPGRGNTHSSFKWRWYHFDGVDWDQSRRLNNRIYKFRGKAWDWEVDTEFGNYDYLMYADYDMDSPEVTNELRNWGVWYTNTLGLDGFRIDAVKHIKYSFTRDWINHVRSATGKNMFAVAEFWKNDLGAIENYLQKTNWNHSVFDVPLHYNLYNASKSGGNYDMRNIFNGTVVQRHPSHAVTFVDNHDSQPEEALESFVEEWFKPLAYALTLTREQGYPSVFYGDYYGIPTHGVPAMRSKIDPILEARQKYAYGPQHDYLDHPDVIGWTREGDSSHPKSGLATLITDGPGGSKRMYAGLKNAGETWYDITGNRSDTVKIGSDGWGEFHVNDGSVSIYVQK

SEQ ID NO: 41410 - protein, 478 aa, Bacillus sp.
NGTMMQYFEWYLPNDGNHWNRLNSDASNLKSKGITAVWIPPAWKGASQNDVGYGAYDLYDLGEFNQKGTVRTKYGTRSQLQAAVTSLKNNGIQVYGDVVMNHKGGADATEMVRAVEVNPNNRNQEVTGEYTIEAWTRFDFPGRGNTHSSFKWRWYHFDGVDWDQSRRLNNRIYKFRGKAWDWEVDTEFGNYDYLMYADYDMDHPEVVNELRNWGVWYTNTLGLDGFRIDAVKHIKYSFTRDWINHVRSATGKNMFAVAEFWKNDLGAIENYLQKTNWNHSVFDVPLHYNLYNASQSAGNYDMRNIFNGTVVQRHPSHAVTFVDNHDSQPEEALESFVDTWFKPLAYALTLTREQGYPSVFYGDYYGIPTHGVPAMRSKIDPILEARQKYAYGPQHDYLDHPDVIGWTREGDSSHPKSGLATLITDGPGGSKRMYAGLKNAGETWYDITGNRSDTVKIGSDGWGEFHVNQQSVSIYVQK

SEQ ID NO: 41411 - protein, 478 aa, Bacillus sp.
NGTMMQYFEWYLPNDGNHWNRLNSDASNLKSKGITAVWIPPAWKGASQNDVGYGAYDLYDLGEFNQKGTVRTKYGTRSQLQAAVTSLKNNGIQVYGDVVMNHKGGADATEMVRAVEVNPNNRNQEVTGEYTIEAWTRFDFPGRGNTHSSFKWRWYHFDGVDWDQSRKLNNRIYKFRGKAWDWEVDTEFGNYDYLMYVDYDMDHPEVVNELRNWGVWYTNTLGLDGFRIDAVKHIKYSFTRDWINHVRSATGKNMFAVAEFWKNDLGAIENYLQKTNWNHSVFDVPLHYNLYNASKSGGNYDMRNIFNGTVVQRHPSHAVTFVDNHDSQPEEALESFVDEWFKPLAYALTLTREQGYPSVFYGDYYGIPTHGVPAMRSKIDPILEARQKYAYGPQHDYLDHPDVIGWTREGDSSHPKSGLATLITDGPGGSKRMYAGLKNAGETWYDITGNRSDTVKIGSDGWGEFHVNKSSVSIYVQK

SEQ ID NO: 41412 - protein, 478 aa, Bacillus sp.
NKTMMQYFEWYLPNDGNHWNRLNSDASNLKSKGITAVWIPPAWKGASQNDVGYGAYDLYDLGEFNQKGTVRTKYGTRSQLQAAVTSLKNNGIQVYGDVVMNHKGGADATEMVRAVEVNPNNRNQEVTGEYTIEAWTRFDFPGRGNTHSSFKWRWYHFDGVDWDQSRRLNNRIYKFRGKAWDWEVDTEFGNYDYLMYADYDMDHPEVVNELRNWGVWYTNTLGLDGFRIDAVKHIKYSFTRDWINHVRSATGKNMFAVAEFWKNDLGAIENYLQKTNWNHSVFDVPLHYNLYNASKSGGNYDMRNIFNGTVVQAHPNHAVTFVDNHDSQPEEALESFVEEWFKPLAYALTLTREQGYPSVFYGDYYGIPTHGVPAMRSKIDPILEARQKYAYGPQHDYLDHPDVIGWTREGDSSHPKSGLATLITDGPGGSKRMYAGLKNAGETWYDITGNRSDTVKIGSDGWGEFHVNDGSVSIYVQK

SEQ ID NO: 41413 - protein, 478 aa, Bacillus sp.
NGTMMQYFEWYLPNDGNHWNRLNSDASNLKSKGITAVWIPPAWKGASQNDVGYGAYDLYDLGEFNQKGTVRTKYGTRSQLQAAVTSLKNNGIQVYGDVVMNHKGGADATEMVRAVEVNPNNRNQEVTGEYTIEAWTRFDFPGRGNTHSSFKWRWYHFDGVDWDQSRKLNNRIYKFRGKAWDWEVDTEFGNYDYLMYVDYDMDHPEVVNELRNWGVWYTNTLGLDGFRIDAVKHIKYSFTRDWINHVRSATGKNMFAVAEFWKNDLGAIENYLQKTNWNHSVFDVPLHYNLYNASQSGGNYDMRNIFNGTVVQRHPSHAVTFVDNHDSQPEEALESFVEPWFKPLAYALTLTREQGYPSVFYGDYYGIPTHGVPAMRSKIDPILEARQKYAYGPQHDYLDHPDVIGWTREGDSSHPKSGLATLITDGPGGSKRMYAGLKNAGETWYDITGNRSDTVKIGSDGWGEFHVNKSSVSIYVQK

SEQ ID NO: 41414 - protein, 478 aa, Synthetic construct
NGTMMQYFEWYLPNDGNHWNRLNSDASNLKSKGITAVWIPPAWKGASQNDVGYGAYDLYDLGEFNQKGTVRTKYGTRSQLQAAVTSLKNNGIQVYGDVVMNHKGGADATEMVRAVEVNPNNRNQEVTGEYTIEAWTRFDFPGRGNTHSSFKWRWYHFDGVDWDQSRRLNNRIYKFRGKAWDWEVDTEFGNYDYLMYADYDMDHPEGTNELRNWGVWYTNTLGLDGFRIDAVKHIKYSFTRDWINHVRSATGKNMFAVAEFWKNDLGAIENYLQKTNWNHSVFDVPLHYNLYNASKSGGNYDMRNIFNGTVVQRHPSHAVTFVDNHDSQPEEALESFVEEWFKPLAYALTLTREQGYPSVFYGDYYGIPTHGVPAMRSKIDPILEARQKYAYGPQHDYLDHPDVIGWTREGDSSHPKSGLATLITDGPGGSKRMYAGLKNAGETWYDITGNRSDTVKIGSDGWGEFHVNDGSVSIYVQK

SEQ ID NO: 41415 - protein, 478 aa, Bacillus sp.
NNTMMQYFEWYLPNDGNHWNRLNSDASNLKSKGITAVWIPPAWKGASQNDVGYGAYDLYDLGEFNQKGTVRTKYGTRSQLQAAVTSLKNNGIQVYGDVVMNHKGGADATEMVRAVEVNPNNRNQEVTGEYTIEAWTRFDFPGRGNTHSSFKWRWYHFDGVDWDQSRRLNNRIYKFRGKAWDWEVDTEFGNYDYLMYADYDMDHPEVVNELRNWGVWYTNTLGLDGFRIDAVKHIKYSFTRDWINHVRSATGKNMFAVAEFWKNDLGAIENYLQKTNWNHSVFDVPLHYNLYNASKSGGNYDMRNIFNGTVVQAHPSHAVTFVDNHDSQPEEALESFVEEWFKPLAYALTLTREQGYPSVFYGDYYGIPTHGVPAMRSKIDPILEARQKYAYGPQHDYLDHPDVIGWTREGDSSHPKSGLATLITDGPGGSKRMYAGLKNAGETWYDITGNRSDTVKIGSDGWGEFHVNDGSVSIYVQK

SEQ ID NO: 41416 - protein, 478 aa, Bacillus sp.
NGTMMQYFEWYLPNDGNHWNRLNSDASNLKSKGITAVWIPPAWKGASQNDVGYGAYDLYDLGEFNQKGTVRTKYGTRSQLQAAVTSLKNNGIQVYGDVVMNHKGGADATEMVRAVEVNPNNRNQEVTGEYTIEAWTRFDFPGRGNTHSSFKWRWYHFDGVDWDQSRRLNNRIYKFRGKAWDWEVDTEFGNYDYLMYADYDMDHPEVVNELRNWGVWYTNTLGLDGFRIDAVKHIKYSFTRDWINHVRSATGKNMFAVAEFWKNDLGAIENYLQKTNWNHSVFDVPLHYNLYNASKSQGNYDMRNIFNGTVVQRHPSHAVTFVDNHDSQPEEALESFVDTWFKPLAYALTLTREQGYPSVFYGDYYGIPTHGVPAMRSKIDPILEARQKYAYGPQHDYLDHPDVIGWTREGDSSHPKSGLATLITDGPGGSKRMYAGLKNAGETWYDITGNRSDTVKIGSDGWGEFHVNGTSVSIYVQK

SEQ ID NO: 41417 - protein, 478 aa, Bacillus sp.
NGTMMQYFEWYLPNDGNHWNRLNSDASNLKSKGITAVWIPPAWKAASQNDVGYGAYDLYDLGEFNQKGTVRTKYGTRSQLQAAVTSLKNNGIQVYGDVVMNHKGGADATEMVRAVEVNPNNRNQEVTGEYTIEAWTRFDFPGRGNTHSSFKWRWYHFDGVDWDQSRDLQNRIYKFRGKAWDWEVDTEFGNYDYLMYVDYDMDHPEVVNELRNWGVWYTNTLGLDGFRIDAVKHIKYSFTRDWINHVRSATGKNMFAVAEFWKNDLGAIENYLQKTNWNHSVFDVPLHYNLYNASKSGGNYDMRNIFNGTVVQRHPSHAVTFVDNHDSQPEEALESFVEEWFKPLAYALTLTREQGYPSVFYGDYYGIPTHGVPAMRSKIDPILEARQKYAYGPQHDYLDHPDVIGWTREGDSSHPKSGLATLITDGPGGSKRMYAGLKNAGETWYDITGNRSDTVKIGSDGWGEFHVNDGSVSIYVQK

SEQ ID NO: 41418 - protein, 478 aa, Bacillus sp.
NGTMMQYFEWYLPNDGNHWNRLNSDASNLKSKGITAVWIPPAWKAASQNDVGYGAYDLYDLGEFNQKGTVRTKYGTRSQLQAAVTSLKNNGIQVYGDVVMNHKGGADATEMVRAVEVNPNNRNQEVTGEYTIEAWTRFDFPGRGNTHSSFKWRWYHFDGVDWDQSRDLDNRIYKFRGKAWDWEVDTEFGNYDYLMYADYDMDHPEVVNELRNWGVWYTNTLGLDGFRIDAVKHIKYSFTRDWINHVRSATGKNMFAVAEFWKNDLGAIENYLQKTNWNHSVFDVPLHYNLYNASKSGGNYDMRNIFNGTVVQRHPSHAVTFVDNHDSQPEEALESFVDPWFKPLAYALTLTREQGYPSVFYGDYYGIPTHGVPAMRSKIDPILEARQKYAYGPQHDYLDHPDVIGWTREGDSSHPKSGLATLITDGPGGSKRMYAGLKNAGETWYDITGNRSDTVKIGSDGWGEFHVNGGSVSIYVQK

SEQ ID NO: 41419 - protein, 478 aa, Bacillus sp.
NGTMMQYFEWYLPNDGNHWNRLNSDASNLKSKGITAVWIPPAWKGASQNDVGYGAYDLYDLGEFNQKGTVRTKYGTRSQLQAAVTSLKNNGIQVYGDVVMNHKGGADATEMVRAVEVNPNNRNQEVTGEYTIEAYTRFDFPGRGNTHSSFKWRWYHFDGVDFDQSRRLDNRIYKFRGKAWDWEVDTEFGNYDYLMYADYDMDHPEVVNELRNWGVWYTNTLGLDGFRIDAVKHIKYSFTRDWINHVRSATGKNMFAVAEFWKNDLGAIENYLQKTNWNHSVFDVPLHYNLYNASKSGGNYDMRNIFNGTVVQRHPSHAVTFVDNHDSQPEEALESFVEEWFKPLAYALTLTREQGYPSVFYGDYYGIPTHGVPAMRSKIDPILEARQKYAYGPQHDYLDHPDVIGWTREGDSSHPKSGLATLITDGPGGSKRMYAGLKNAGETWYDITGNRSDTVKIGSDGWGEFHVNDGSVSIYVQK

SEQ ID NO: 41420 - protein, 478 aa, Bacillus sp.
NGTMMQYFEWYLPNDGNHWNRLNSDASNLKSKGITAVWIPPAWKGASQNDVGYGAYDLYDLGEFNQKGTVRTKYGTRSQLQAAVTSLKNNGIQVYGDVVMNHKGGADATEMVRAVEVNPNNRNQEVTGEYTIEAYTRFDFPGRGNTHSSFKWRWYHFDGVDWDQSRRLNNRIYKFRGKAWDWEVDTEFGNYDYLMYADYDMDHPEVVNELRNWGVWYTNTLGLDGFRIDAVKHIKYSFTRDWINHVRSATGKNMFAVAEFWKNDLGAIENYLQKTNWNHSVFDVPLHYNLYNASKSGGNYDMRNIFNGTVVQAHPSHAVTFVDNHDSQPEEALESFVEEWFKPLAYALTLTREQGYPSVFYGDYYGIPTHGVPAMRSKIDPILEARQKYAYGPQHDYLDHPDVIGWTREGDSSHPKSGLATLITDGPGGSKRMYAGLKNAGETWYDITGNRSDTVKIGSDGWGEFHVNDGSVSIYVQK

SEQ ID NO: 41421 - protein, 478 aa, Bacillus sp.
NGTMMQYFEWYLPNDGNHWNRLNSDASNLKSKGITAVWIPPAWKGASQNDVGYGAYDLYDLGEFNQKGTVRTKYGTRSQLQAAVTSLKNNGIAVYGDVVMNHKGGADATEMVRAVEVNPNNRNQEVTGEYTIEAWTRFDFPGRGNTHSSFKWRWYHFDGVDWDQSRRLNNRIYKFRGKAWDWEVDTEFGNYDYLMYADYDMDHPEVVNELRNWGVWYTNTLGLDGFRIDAVKHIKYSFTRDWINHVRSATGKNMFAVAEFWKNDLGAIENYLQKTNWNHSVFDVPLHYNLYNASKSGGNYDMRNIFNGTVVQAHPMHAVTFVDNHDSQPEEALESFVEEWFKPLAYALTLTREQGYPSVFYGDYYGIPTHGVPAMRSKIDPILEARQKYAYGPQHDYLDHPDVIGWTREGDSSHPKSGLATLITDGPGGSKRMYAGLKNAGETWYDITGNRSDTVKIGSDGWGEFHVNDGSVSIYVQK

SEQ ID NO: 41422 - protein, 478 aa, Bacillus sp.
NGTMMQYFEWYLPNDGNHWNRLNSDASNLKSKGITAVWIPPAWKAASQNDVGYGAYDLYDLGEFNQKGTVRTKYGTRSQLQAAVTSLKNNGIQVYGDVVMNHKGGADATEMVRAVEVNPNNRNQEVTGEYTIEAWTRFDFPGRGNTHSSFKWRWYHFDGVDWDQSRRLNNRIYKFRGKAWDWEVDTEFGNYDYLMYTDYDMDHPEVVNELRNWGVWYTNTLGLDGFRIDAVKHIKYSFTRDWINHVRSATGKNMFAVAEFWKNDLGAIENYLQKTNWNHSVFDVPLHYNLYNASKSGGNYDMRNIFNGTVVQRHPSHAVTFVDNHDSQPEEALESFVEEWFKPLAYALTLTREQGYPSVFYGDYYGIPTHGVPAMRSKIDPILEARQKYAYGPQHDYLDHPDVIGWTREGDSSHPKSGLATLITDGPGGSKRMYAGLKNAGETWYDITGNRSDTVKIGSDGWGEFHVNDGSVSIYVQK

SEQ ID NO: 41423 - protein, 478 aa, Bacillus sp.
NGTMMQYFEWYLPNDGNHWNRLNSDASNLKSKGITAVWIPPAWKAVSQNDVGYGAYDLYDLGEFNQKGTVRTKYGTRSQLQAAVTSLKNNGIQVYGDVVMNHKGGADATEMVRAVEVNPNNRNQEVTGEYTIEAWTRFDFPGRGNTHSSFKWRWYHFDGVDWDQSRNLTNRIYKFRGKAWDWEVDTEFGNYDYLMYTDYDMDHPEVVNELRNWGVWYTNTLGLDGFRIDAVKHIKYSFTRDWINHVRSATGKNMFAVAEFWKNDLGAIENYLQKTNWNHSVFDVPLHYNLYNASKSGGNYDMRNIFNGTVVQRHPSHAVTFVDNHDSQPEEALESFVETWFKPLAYALTLTREQGYPSVFYGDYYGIPTHGVPAMRSKIDPILEARQKYAYGPQHDYLDHPDVIGWTREGDSSHPKSGLATLITDGPGGSKRMYAGLKNAGETWYDITGNRSDTVKIGSDGWGEFHVNDASVSIYVQK

SEQ ID NO: 41424 - protein, 478 aa, Synthetic construct
NGTMMQYFEWYLPNDGNHWNRLNSDASNLKSKGITAVWIPPAWKGASQNDVGYGAYDLYDLGEFNQKGTVRTKYGTRSQLQAAVTSLKNNGIQVYGDVVMNHKGGADATEMVRAVEVNPNNRNQEVTGEYTIEAWTRFDFPGRGNTHSSFKWRWYHFDGVDWDQSRRLNNRIYKFRGKAWDWEVDTEFGNYDYLMYADIDMDHPEIPNELRNWGVWYTNTLGLDGFRIDAVKHIKYSFTRDWINHVRSATGKNMFAVAEFWKNDLGAIENYLQKTNWNHSVFDVPLHYNLYNASKSGGNYDMRNIFNGTVVQRHPSHAVTFVDNHDSQPEEALESFVEEWFKPLAYALTLTREQGYPSVFYGDYYGIPTHGVPAMRSKIDPILEARQKYAYGPQHDYLDHPDVIGWTREGDSSHPKSGLATLITDGPGGSKRMYAGLKNAGETWYDITGNRSDTVKIGSDGWGEFHVNDGSVSIYVQK

SEQ ID NO: 41425 - protein, 478 aa, Synthetic construct
NGTMMQYFEWYLPNDGNHWNRLNSDASNLKSKGITAVWIPPAWKGASQNDVGYGAYDLYDLGEFNQKGTVRTKYGTRSQLQAAVTSLKNNGIQVYGDVVMNHKGGADATEMVRAVEVNPNNRNQEVTGEYTIEAWTRFDFPGRGNTHSSFKWRWYHFDGVDWDQSRRLNNRIYLFRGKHWDWPVDTENGNYDYLMYADIDMDHPEVVNELRNWGVWYTNTLGLDGFRIDAVKHIKYSFTRDWINHVRSATGKNMFAVAEFWKNDLGAIENYLQKTNWNHSVFDVPLHYNLYNASKSGGNYDMRNIFNGTVVQRHPSHAVTFVDNHDSQPEEALESFVEEWFKPLAYALTLTREQGYPSVFYGDYYGIPTHGVPAMRSKIDPILEARQKYAYGPQHDYLDHPDVIGWTREGDSSHPKSGLATLITDGPGGSKRMYAGLKNAGETWYDITGNRSDTVKIGSDGWGEFHVNDGSVSIYVQK

SEQ ID NO: 41426 - protein, 512 aa, Geobacillus stearothermophilus
NGTMMQYFEWHLPXDGXXWXKLXXDAXNLXXXGITAIWIPPAWKGTSXXDVGYGXYDLYDLGEFNQKGTVRTKYGTKAQXXXAIXAXXXXGMQVYADVVXXHKGGADATEXVXAVEVNPXXRNQEISGXYXIXAWTKFDFPGRGNTYSXFKWRWYHFDGVDWDXSRQXXXRIYKFRGXGKAWDWEVDSENGNYDYLMYADLDMDHPEVVXELKXWGXWYXNTXNIDGFRIDAVKHIKFSFXXDWLSHVRXXTGKXLFXVAEFWXXDIXXLXNYIXKTNXXXSLFDXPLHXXXYXASXSGGXFDMXXLLXXTLMXXXPXXAVTFVDNHDSXPGXALXSFVXXWFKPLAYAXILTRXXGYPXVFYGDYYGIPXHXIPALKAKIDPILXARXXFAYGTQHDYXDHXXIIGWTREGXTXXPXSGLAXIISDGPGGXKWMYVGXNXAGXVFHDITGNKXXTVTINADGWAXFXVNGGSVSIWVXRKTTVSTIARPITTRPWTGEFVRWTEPRLVAWP

SEQ ID NO: 41427 - protein, 512 aa, Synthetic construct
NGTMMQYFEWHLPXDGXXWXKLXXDAXNLXXXGITAIWIPPAWKGTSXXDVGYGXYDLYDLGEFNQKGTVRTKYGTKAQXXXAIXAXXXXGMQVYADVVXXHKGGADATEXVXAVEVNPXXRNQEISGXYXIXAWTKFDFPGRGNTYSXFKWRWYHFDGVDWDXSREXXXRIYKFRGXGKAWDWEVDSENGNYDYLMYADLDMDHPEVVXELKXWGXWYXNTXNIDGFRIDAVKHIKFSFXXDWLSHVRXXTGKXLFXVAEFWXXDIXXLXNYIXKTNXXXSLFDXPLHXXXYXASXSGGXFDMXXLLXXTLMXXXPXXAVTFVDNHDSXPGXALXSFVXXWFKPLAYAXILTRXXGYPXVFYGDYYGIPXHXIPALKAKIDPILXARXXFAYGTQHDYXDHXXIIGWTREGXTXXPXSGLAXIISDGPGGXKWMYVGXNXAGXVFHDITGNKXXTVTINADGWAXFXVNGGSVSIWVXRKTTVSTIARPITTRPWTGEFVRWTEPRLVAWP

SEQ ID NO: 41428 - protein, 482 aa, Cytophaga sp.
NGTMMQYFEWYVPNDGQQWNRLRTDAPYLSSVGITAVWTPPAYKGTSQADVGYGPYDLYDLGEFNQKGTVRTKYGTKGELKSAVNTLHSNGIQVYGDVVMNHKAGADYTENVTAVEVNPSNRYQETSGHYNIQAWTGFNFPGRGTTYSNWKWQWFHFDGTDWDQSRSLSRIFKFDGTGKAWDWEVSSENGNYDYLMYYDIDYDHPDVVNEMKKWGVWYANEVGLDGYRLDAVKHIQFSFLKDWVDNARAATGKEMFTVGEYWQNDLGALNNFLAKVNYNQSLFDAPLHYNFYAASTGGGYYDMRNILNNTLVASNPTKAVTLVENHDTQPGQSLESTVQPWFKPLAYAFILTRSGGYPSVFYGDMYGTKGTTTREIPALKSKIEPLLKARKDYAYGTQRDYIDNPDVIGWTREGDSTKAKSGLATVITDGPGGSKRMYVGTSNAGEIWYDLTGNRTDKITIGSDGYATFPVNGGSVSVWVQQ

SEQ ID NO: 41429 - protein, 482 aa, Cytophaga sp.
NGTMMQYFEWYVPNDGQQWNRLRTDAPYLSSVGITAVWTPPAYKGTSQADVGYGPYDLYDLGEFNQKGTVRTKYGTKGELKSAVNTLHSNGIQVYGDVVMNHKAGADYTENVTAVEVNPSNRYQETSGHYNIQAWTGFNFPGRGTTYSNWKWQWFHFDGTDWDESRSLSRIFKFDGTGKAWDWEVSSENGNYDYLMYYDIDYDHPDVVNEMKKWGVWYANEVGLDGYRLDAVKHIQFSFLKDWVDNARAATGKEMFTVGEYWQNDLGALNNFLAKVNYNQSLFDAPLHYNFYAASTGGGYYDMRNILNNTLVASNPTKAVTLVENHDTQPGQSLESTVQPWFKPLAYAFILTRSGGYPSVFYGDMYGTKGTTTREIPALKSKIEPLLKARKDYAKGTQRDYIDNPDVIGWTREGDSTKAKSGLATVITDGPGGSKRMYVGTSNAGEIWYDLTGNRTDKITIGSDGYATFPVNGGSVSVWVQQ

SEQ ID NO: 41430 - protein, 480 aa, Synthetic construct
HHDGLNGTIMQYFEWNVPNDGQHWRRLQNNAQYLAEHGITAWIPPAWKGTSQADTGYGAYDLYDLGEFHQKGTVRTKYGTKGELERAKSLHARGINVYGDVVMNHKAGADQTEDVNAVEVNPQNRNQVVSGTYLIKAYTHFHFPGRGSQYSDFKWYWYHFDGTDWDQSRSLNNRIYKFQGHTKAWDWPVDTEFGNYDYLMYADLDMDHPEVNELNRWGVWYANELQLDGFRLDAVKHIKFSFMRDWLGHVRGQTGKNLFAVAEYWKNDLGALENYLNFTNWTMSAFDVPLHYNLYSASNSSGNYDMRNLLNGTLVQKHPSHAVTFVDNHDTQPGESLESFVQPWFKPLAYATLTRESGYPSVFYGDYYGIPSDGVPSYRQQIDPLLAARQQYAYGAQHDYLDNQDIGWTREGDSAHPGSGLATVMSDGPGGSKTMYVGTAHAGQVFKDITGNRSEPVVINSAGTGTFRCNKGSVSIWVKQ

SEQ ID NO: 41431 - protein, 478 aa, Bacillus sp.
TNETMMQYFEWDLPNDGTLWNRLHNNAQNLKNAGITALWLPPAYKGTSQSDVGYGVYDLYDLGEFNQKGTIRTKYGTKTQLERAIRSLKANGIQVYADVVFNHKAGADGTEFVDAVEVDPSNRNQEVSGTYQIEAWTKFDFPGRGNTYSSFKWRWYHFDGTDWDESRKLNRIYKFRGKAWDWEVDTENGNYDYLMFADLDMDHPEVVTELKNWGTWYVNTTNIDGFRLDAVKHIKFSFMRDWLTYVRNQTGKNLFAVGEFWKNDLGALENYITKTNGSMSLFDAPLHNNFYTASKSSGYFDMRNLLNGTLVQRHPSHAVTLVDNHDTQPGQSLQSWVEPWFKPLAYAFILTRQEGYPCVFYGDYYGIPKYNIPGLKSKIDPLLIARQDYAYGTQRDYIDHQDIIGWTREGDSSHPNSGLAALITDGPGGSKWMYVGKKHAGKVFYDLTGNRSDTVTINADGWGEFKVNGGSVSIWVAK

SEQ ID NO: 41432 - protein, 480 aa, Geobacillus stearothermophilus
NGTMMQYFEWHLPXDGXXWXKLXXDAXNLXXXGITAIWIPPAWKGTSXXDVGYGXYDLYDLGEFNQKGTVRTKYGTKAQXXXAIXAXXXXGMQVYADVVXXHKGGADATEXVXAVEVNPXXRNQEISGXYXIXAWTKFDFPGRGNTYSXFKWRWYHFDGVDWDXSRXXXXRIYKFRGXGKAWDWEVDSENGNYDYLMYADLDMDHPEVVXELKXWGXWYXNTXNIDGFRIDAVKHIKFSFXXDWLSHVRXXTGKXLFXVAEFWXXDIXXLXNYIXKTNXXXSLFDXPLHXXXYXASXSGGXFDMXXLLXXTLMXXXPXXAVTFVDNHDSXPGXALXSFVXXWFKPLAYAXILTRXXGYPXVFYGDYYGIPXHXIPALKAKIDPILXARXXFAYGTQHDYXDHXXIIGWTREGXTXXPXSGLAXIISDGPGGXKWMYVGXNXAGXVFHDITGNKXXTVTINADGWAXFXVNGGSVSIWVXR

SEQ ID NO: 41433 - protein, 477 aa, Synthetic construct
NGTMMQYFEWYLPNDGNHWNRLNSDASNLKSKGITAVWIPPAWKGASQNDVGYGAYDIYDLGFNQKGTVRTKYGTRSQLQAAVTSLKNNGIQVYGDVVMNHKGGADATEMVRAVEVNPNNRNQEVTGEYTIEAWTRFDFPGRGNTHSSFKWRWYHFDGVDWDQSRRLNNRIYKFRGKAWDWEVDTEFGNYDYLMYADYDMDSPEVVNELRNWGVWYTNTLGLDGFRIDAVKHIKYSFTRDWINHVRSATGKNMFAVAEFWKNDLGAIENYLQKTNWNHSVFDVPLHYNLYNASKSGGNYDMRNIFNGTVVQRHPSHAVTFVDNHDSQPEEALESFVEEWFKPLAYALTLTREQGYPSVFYGDYYGIPTHGVPAMRSKIDPILEARQKYAYGPQHDYLDHPDVIGWTREGDSSHPKSGLATLITDGPGGSKRMYAGLKNAGETWYDITGNRSDTVKIGSDGWGEFHVNDGSVSIYVQK

SEQ ID NO: 41434 - protein, 477 aa, Synthetic construct
NGTMMQYFEWYLPNDGNHWNRLNSDASNLKSKGITAVWIPPAWKGASQNDVGYGAYDVYDLGFNQKGTVRTKYGTRSQLQAAVTSLKNNGIQVYGDVVMNHKGGADATEMVRAVEVNPNNRNQEVTGEYTIEAWTRFDFPGRGNTHSSFKWRWYHFDGVDWDQSRRLNNRIYKFRGKAWDWEVDTEFGNYDYLMYADYDMDSPEVVNELRNWGVWYTNTLGLDGFRIDAVKHIKYSFTRDWINHVRSATGKNMFAVAEFWKNDLGAIENYLQKTNWNHSVFDVPLHYNLYNASKSGGNYDMRNIFNGTVVQRHPSHAVTFVDNHDSQPEEALESFVEEWFKPLAYALTLTREQGYPSVFYGDYYGIPTHGVPAMRSKIDPILEARQKYAYGPQHDYLDHPDVIGWTREGDSSHPKSGLATLITDGPGGSKRMYAGLKNAGETWYDITGNRSDTVKIGSDGWGEFHVNDGSVSIYVQK

SEQ ID NO: 41435 - protein, 477 aa, Bacillus sp.
NGTMMQYFEWYLPNDGNHWNRLNSDASNLKSKGITAVWIPPAWKAASQNDVGYGAYDLYDLGEFNQKGTVRTKYGTRSQLQAAVTSLKNNGIQVYGDVVMNHKGGADATEMVPAVEVNPNNRNQEVTGEYTIEAWTRFDFPGRGNTHSSFKWRWYHFDGVDWDQSRDLDNRIYKFRKAWDWEVDTEFGNYDYLMYADYDMDHPEVVNELRNWGVWYTNTLGLDGFRIDAVKHIKYSFTRDWINHVRSATGKNMFAVAEFWKNDLGAIENYLQKTNWNHSVFDVPLHYNLYNASKSGGNYDMRNIFNGTVVQRHPSHAVTFVDNHDSQPEEALESFVETWFKPLAYALTLTREQGYPSVFYGDYYGIPTHGVPAMRSKIDPILEARQKYAYGPQHDYLDHPDVIGWTREGDSSHPKSGLATLITDGPGGSKRMYAGLKNAGETWYDITGNRSDTVKIGSDGWGEFHVNKASVSIYVQK

SEQ ID NO: 41436 - protein, 477 aa, Bacillus sp.
NKTMMQYFEWYLPNDGNHWNRLNSDASNLKSKGITAVWIPPAWKGASQNDVGYGAYDLYDLGEFNQKGTVRTKYGTRSQLQAAVTSLKNNGIQVYGDVVMNHKGGADATEMVRAVEVNPNNRNQEVTGEYTIEAWTRFDFPGRGNTHSSFKWRWYHFDGVDWDQSRRLNNRIYKFRGKAWDWEVDTEFGNYDYLMYADYDMDHPEVVNELRNWGVWYTNTLGLDGFRIDAVKHIKYSFTRDWINHVRSATGKNMFAVAEFWKNDLGAIENYLQKTNWNHSVFDVPLHYNLYNASKSGGNYDMRNIFNGTVVQAHPNHAVTFVDNHDSQPEEALESFVEEWFKPLAYALTLTREQGYSVFYGDYYGIPTHGVPAMRSKIDPILEARQKYAYGPQHDYLDHPDVIGWTREGDSSHPKSGLATLITDGPGGSKRMYAGLKNAGETWYDITGNRSDTVKIGSDGWGEFHVNDGSVSIYVQK

SEQ ID NO: 41437 - protein, 494 aa, Aspergillus niger
TIFLFLAIFVATALAATPAEWRSQSIYFLLTDRFARTDNSTTASCDLSARQYCGGSWQGIINQLDYIQGMGFTAIWITPVTAQIPQDTGYGQAYHGYWQQDAYALNSHYGTADDLKALASALHSRGMYLMVDVVANHMGHNGTGSSVDYSVYRPFNSQKYFHNLCWISDYNNQTNVEDCWLGDNTVALPDLDTTSTEVKNMWYDWVESLVSNYSVDGLRVDTVKNVQKNFWPGYNNASGVYCIGEVFDGDASYTCPYQEDLDGVLNYPMYYPLLRAFESTNGSISDLYNMINTVKSTCRDSTLLGTFVENHDNPRFANYTSDMSLAKNAATFTILADGIPIIYAGQEQHYSGGNDPYNREATWLSGYKTTSELYTHIAASNKIRTHAIKQDTGYLTYKNYPIYQDTSTLAMRKGYNGTQTITVLSNLGASGSSYTLSLPGTGYTAGQKITEIYTCTNLTVNSNGSVPVPMKSGLPRILYPADKLVNGSSFCSSA

SEQ ID NO: 41438 - protein, 477 aa, Bacillus licheniformis
NGTLMQYFEWYTPNDGQHWNRLRNDSAYLKEHGITAVWIPPAYKGTSQADVGYGAYDLYDLGEFNQKGTVRTKYGTKGQLQSAINSLKSNGINVYGDVVINHKGGADATEDVTAVEVDPADRNRVISGEHLIKAYTHFHFPGRGSTYSDFKWHWYHFDGTDWDESRKLNRIYKFQGKAWDWEVSNENGNYDYLTYADIDYDHPDVAAEIRNWGTWYANTLQLDGFRLDAVKHIKFSFLRDWVNHVRSATGKNMFTVAEYWQNDLGALENYLNKTNFNHSVFDVPLHYQFHAASTQGGGYDMQNLLNGTVVSKHPLHSVTFVDNHDTQPGQSLESTVEEWFKPLAYAFILTRESGYPQVFYGDMYGIPTHGVPALKHKIEPILEARQKYAYGAQHDYFDHHDIVGWTREGDSSVANSGLAALITDGPGGAKRMYVGRQNAGETWHDITGNRSEPVVINSEGWGEFHVNGGSVSIYVQR

SEQ ID NO: 41439 - protein, 477 aa, Bacillus sp.
NETMMQYFEWDLPNDGTLWNRLHNNAQNLKNAGITALWLPPAYKGTSQSDVGYGVYDLYDLGEFNQKGTIRTKYGTKTQLERAIRSLKANGIQVYADVVFNHKAGADGTEFVDAVEVDPSNRNQEVSGTYQIEAWTKFDFPGRGNTYSSFKWRWYHFDGTDWDESRKLNRIYKFRGKAWDWEVDTENGNYDYLMFADLDMDHPEVVTELKNWGTWYVNTTNIDGFRLDAVKHIKFSFMRDWLTYVRNQTGKNLFAVGEFWKNDLGALENYITKTNGSMSLFDAPLHNNFYTASKSSGYFDMRNLLNGTLVQRHPSHAVTLVDNHDTQPGQSLQSWVEPWFKPLAYAFILTRQEGYPCVFYGDYYGIPKHGIPGLKSKIDPLLIARRDYAYGTQRDYIDHQDIIGWTREGIDTKPNSGLAALITDGPGGSKWMYVGKKHAGKVFYDLTGNRSDTVTINADGWGEFKVNGGSVSIWVAK

SEQ ID NO: 41440 - protein, 480 aa, Synthetic construct
NGTMMQYFEWYLPNDGNHWNRLNSDASNLKSKGITAVWIPPAWKGASQNDVGYGAYDLYDLGEFNQKGTVRTKYGTRSQLQAAVTSLKNNGIQVYGDVVMNHKGGADATEMVRAVEVNPNNRNQEVTGEYTIEAWTRFDFPGRGNTHSSFKWRWYHFDGVDWDQSRRLNNRIYKFRGHGKAWDWEVDTEFGNYDYLMYADYDMDHPESTNELRNWGVWYTNTLGLDGFRIDAVKHIKYSFTRDWINHVRSATGKNMFAVAEFWKNDLGAIENYLQKTNWNHSVFDVPLHYNLYNASKSGGNYDMRNIFNGTVVQRHPSHAVTFVDNHDSQPEEALESFVEEWFKPLAYALTLTREQGYPSVFYGDYYGIPTHGVPAMRSKIDPILEARQKYAYGPQHDYLDHPDVIGWTREGDSSHPKSGLATLITDGPGGSKRMYAGLKNAGETWYDITGNRSDTVKIGSDGWGEFHVNDGSVSIYVQK

SEQ ID NO: 41441 - protein, 480 aa, Bacillus sp.
NGTMMQYFEWYLPNDGNHWNRLNSDASNLKSKGITAVWIPPAWKATSQNDVGYGAYDLYDLGEFNQKGTVRTKYGTRSQLQAAVTSLKNNGIQVYGDVVMNHKGGADATEMVRAVEVNPNNRNQEVTGEYTIEAWTRFDFPGRGNTHSSFKWRWYHFDGVDWDQSRNVNNRIYKFRGHGKAWDWEVDTEFGNYDYLMYADYDMDHPEVVNELRNWGVWYTNTLGLDGFRIDAVKHIKYSFTRDWINHVRSATGKNMFAVAEFWKNDLGAIENYLQKTNWNHSVFDVPLHYNLYNASKSGGNYDMRNIFNGTVVQRHPSHAVTFVDNHDSQPEEALESFVETWFKPLAYALTLTREQGYPSVFYGDYYGIPTHGVPAMRSKIDPILEARQKYAYGPQHDYLDHPDVIGWTREGDSSHPKSGLATLITDGPGGSKRMYAGLKNAGETWYDITGNRSDTVKIGSDGWGEFHVNKASVSIYVQK

SEQ ID NO: 41442 - protein, 480 aa, Bacillus sp.
NGTMMQYFEWYLPNDGNHWNRLNSDASNLKSKGITAVWIPPAWKAASQNDVGYGAYDLYDLGEFNQKGTVRTKYGTRSQLQAAVTSLKNNGIQVYGDVVMNHKGGADATEMVDAVEVNPNNRNQEVTGEYTIEAWTRFDFPGRGNTHSSFKWRWYHFDGVDFDQSRDLQNRIYKFRGHGKAWDWEVDTEFGNYDYLMYADYDMDHPEVVNELRNWGVWYTNTLGLDGFRIDAVKHIKYSFTRDWINHVRSATGKNMFAVAEFWKNDLGAIENYLQKTNWNHSVFDVPLHYNLYNASKSGGNYDMRNIFNGTVVQRHPSHAVTFVDNHDSQPEEALESFVEEWFKPLAYALTLTREQGYPSVFYGDYYGIPTHGVPAMRSKIDPILEARQKYAYGPQHDYLDHPDVIGWTREGDSSHPKSGLATLITDGPGGSKRMYAGLKNAGETWYDITGNRSDTVKIGSDGWGEFHVNDGSVSIYVQK

SEQ ID NO: 41443 - protein, 480 aa, Bacillus sp.
NGTMMQYFEWYLPNDGNHWNRLNSDASNLKSKGITAVWIPPAWKGASQNDVGYGAYDLYDLGEFNQKGTVRTKYGTRSQLQAAVTSLKNNGIQVYGDVVMNHKGGADATEMVRAVEVNPNNRNQEVTGEYTIEAWTRFDFPGRGNTHSSFKWRWYHFDGVDWDQSRNVNNRIYKFRGHGKAWDWEVDTEFGNYDYLMYADYDMDHPEVVNELRNWGVWYTNTLGLDGFRIDAVKHIKYSFTRDWINHVRSATGKNMFAVAEFWKNDLGAIENYLQKTNWNHSVFDVPLHYNLYNASQSGGNYDMRNIFNGTVVQRHPSHAVTFVDNHDSQPEEALESFVEPWFKPLAYALTLTREQGYPSVFYGDYYGIPTHGVPAMRSKIDPILEARQKYAYGPQHDYLDHPDVIGWTREGDSSHPKSGLATLITDGPGGSKRMYAGLKNAGETWYDITGNRSDTVKIGSDGWGEFHVNKSSVSIYVQK

SEQ ID NO: 41444 - protein, 480 aa, Bacillus sp.
NGTMMQYFEWYLPNDGNHWNRLNSDASNLKSKGITAVWIPPAWKAASQNDVGYGAYDLYDLGEFNQKGTVRTKYGTRSQLQAAVTSLKNNGIQVYGDVVMNHKGGADLTEMVRAVEVNPNNRNQEVTGEYTIEAWTRFDFPGRGNTHSSFKWRWYHFDGVDWDQSRDLQNRIYKFRGHGKAWDWEVDTEFGNYDYLMYADYDMDHPEVVNELRNWGVWYTNTLGLDGFRIDAVKHIKYSFTRDWINHVRSATGKNMFAVAEFWKNDLGAIENYLQKTNWNHSVFDVPLHYNLYNASKSGGNYDMRNIFNGTVVQRHPSHAVTFVDNHDSQPEEALESFVEEWFKPLAYALTLTREQGYPSVFYGDYYGIPTHGVPAMRSKIDPILEARQKYAYGPQHDYLDHPDVIGWTREGDSSHPKSGLATLITDGPGGSKRMYAGLKNAGETWYDITGNRSDTVKIGSDGWGEFHVNDGSVSIYVQK

SEQ ID NO: 41445 - protein, 480 aa, Bacillus sp.
NGTMMQYFEWYLPNDGNHWNRLNSDASNLKSKGITAVWIPPAWKGASQNDVGYGAYDLYDLGEFNQKGTVRTKYGTRSQLQAAVTSLKNNGIQVYGDVVMNHKGGADATEMVRAVEVNPNNRNQEVTGEYTIEAWTRFDFPGRGNTHSSFKWRWYHFDGVDWDQSRQTNNRIYKFRGHGKAWDWEVDTEFGNYDYLMYADYDMDHPEVVNELRNWGVWYTNTLGLDGFRIDAVKHIKYSFTRDWINHVRSATGKNMFAVAEFWKNDLGAIENYLQKTNWNHSVFDVPLHYNLYNASKSGGNYDMRNIFNGTVVQVHPSHAVTFVDNHDSQPEEALESFVEEWFKPLAYALTLTREQGYPSVFYGDYYGIPTHGVPAMRSKIDPILEARQKYAYGPQHDYLDHPDVIGWTREGDSSHPKSGLATLITDGPGGSKRMYAGLKNAGETWYDITGNRSDTVKIGSDGWGEFHVNYGSVSIYVQK

SEQ ID NO: 41446 - protein, 480 aa, Bacillus sp.
NGTMMQYFEWYLPNDGNHWNRLNSDASNLKSKGITAVWIPPAWKAVSQNDVGYGAYDLYDLGEFNQKGTVRTKYGTRSQLQAAVTSLKNNGIQVYGDVVMNHKGGADLTEMVDAVEVNPNNRNQEVTGEYTIEAWTRFDFPGRGNTHSSFKWRWYHFDGVDWDQSRDFNNRIYKFRGHGKAWDWEVDTEFGNYDYLMYADYDMDHPEVVNELRNWGVWYTNTLGLDGFRIDAVKHIKYSFTRDWINHVRSATGKNMFAVAEFWKNDLGAIENYLQKTNWNHSVFDVPLHYNLYNASKSGGNYDMRNIFNGTVVQRHPSHAVTFVDNHDSQPEEALESFVEEWFKPLAYALTLTREQGYPSVFYGDYYGIPTHGVPAMRSKIDPILEARQKYAYGPQHDYLDHPDVIGWTREGDSSHPKSGLATLITDGPGGSKRMYAGLKNAGETWYDITGNRSDTVKIGSDGWGEFHVNDGSVSIYVQK

SEQ ID NO: 41447 - protein, 480 aa, Bacillus sp.
NGTMMQYFEWYLPNDGNHWNRLNSDASNLKSKGITAVWIPPAWKGASQNDVGYGAYDLYDLGEFNQKGTVRTKYGTRSQLQAAVTSLKNNGIAVYGDVVMNHKGGADATEMVRAVEVNPNNRNQEVTGEYTIEAWTRFDFPGRGNTHSSFKWRWYHFDGVDWDQSRRLNNRIYKFRGHGKAWDWEVDTEFGNYDYLMYADYDMDHPEVVNELRNWGVWYTNTLGLDGFRIDAVKHIKYSFTRDWINHVRSATGKNMFAVAEFWKNDLGAIENYLQKTNWNHSVFDVPLHYNLYNASKSGGNYDMRNIFNGTVVQSHPMHAVTFVDNHDSQPEEALESFVEEWFKPLAYALTLTREQGYPSVFYGDYYGIPTHGVPAMRSKIDPILEARQKYAYGPQHDYLDHPDVIGWTREGDSSHPKSGLATLITDGPGGSKRMYAGLKNAGETWYDITGNRSDTVKIGSDGWGEFHVNDGSVSIYVQK

SEQ ID NO: 41448 - protein, 480 aa, Bacillus sp.
NGTMMQYFEWYLPNDGNHWNRLNSDASNLKSKGITAVWIPPAWKGASQNDVGYGAYDLYDLGEFNQKGTVRTKYGTRSQLQAAVTSLKNNGIQVYGDVVMNHKGGADATEMVRAVEVNPNNRNQEVTGEYTIEAWTRFDFPGRGNTHSSFKWRWYHFDGVDWDQSRRLNNRIYKFRGHGKAWDWEVDTEFGNYDYLMYADYDMDHPEVVNELRNWGVWYTNTLGLDGFRIDAVKHIKYSFTRDWINHVRSATGKNMFAVAEFWKNDLGAIENYLQKTNWNHSVFDVPLHYNLYNASKSQGNYDMRNIFNGTVVQRHPSHAVTFVDNHDSQPEEALESFVDTWFKPLAYALTLTREQGYPSVFYGDYYGIPTHGVPAMRSKIDPILEARQKYAYGPQHDYLDHPDVIGWTREGDSSHPKSGLATLITDGPGGSKRMYAGLKNAGETWYDITGNRSDTVKIGSDGWGEFHVNQTSVSIYVQK

SEQ ID NO: 41449 - protein, 480 aa, Bacillus sp.
NGTMMQYFEWYLPNDGNHWNRLNSDASNLKSKGITAVWIPPAWKATSQNDVGYGAYDLYDLGEFNQKGTVRTKYGTRSQLQAAVTSLKNNGIQVYGDVVMNHKGGADATEMVRAVEVNPNNRNQEVTGEYTIEAWTRFDFPGRGNTHSSFKWRWYHFDGVDWDQSRDLNNRIYKFRGHGKAWDWEVDTEFGNYDYLMYADYDMDHPEVVNELRNWGVWYTNTLGLDGFRIDAVKHIKYSFTRDWINHVRSATGKNMFAVAEFWKNDLGAIENYLQKTNWNHSVFDVPLHYNLYNASKSGGNYDMRNIFNGTVVQRHPSHAVTFVDNHDSQPEEALESFVDPWFKPLAYALTLTREQGYPSVFYGDYYGIPTHGVPAMRSKIDPILEARQKYAYGPQHDYLDHPDVIGWTREGDSSHPKSGLATLITDGPGGSKRMYAGLKNAGETWYDITGNRSDTVKIGSDGWGEFHVNGGSVSIYVQK

SEQ ID NO: 41450 - protein, 480 aa, Bacillus sp.
NGTMMQYFEWYLPNDGNHWNRLNSDASNLKSKGITAVWIPPAWKGASQNDVGYGAYDLYDLGEFNQKGTVRTKYGTRSQLQAAVTSLKNNGIQVYGDVVMNHKGGADATEMVRAVEVNPNNRNQEVTGEYTIEAWTRFDFPGRGNTHSSFKWRWYHFDGVDWDQSRNFQNRIYKFRGHGKAWDWEVDTEFGNYDYLMYADYDMDHPEVVNELRNWGVWYTNTLGLDGFRIDAVKHIKYSFTRDWINHVRSATGKNMFAVAEFWKNDLGAIENYLQKTNWNHSVFDVPLHYNLYNASKSQGNYDMRNIFNGTVVQRHPSHAVTFVDNHDSQPEEALESFVDTWFKPLAYALTLTREQGYPSVFYGDYYGIPTHGVPAMRSKIDPILEARQKYAYGPQHDYLDHPDVIGWTREGDSSHPKSGLATLITDGPGGSKRMYAGLKNAGETWYDITGNRSDTVKIGSDGWGEFHVNGSSVSIYVQK

SEQ ID NO: 41451 - protein, 480 aa, Bacillus sp.
NGTMMQYFEWYLPNDGNHWNRLNSDASNLKSKGITAVWIPPAWKGASQNDVGYGAYDLYDLGEFNQKGTVRTKYGTRSQLQAAVTSLKNNGIQVYGDVVMNHKGGADATEMVRAVEVNPNNRNQEVTGEYTIEAWTRFDFPGRGNTHSSFKWRWYHFDGVDWDQSRRLNNRIYKFRGHGKAWDWEVDTEFGNYDYLMYADYDMDHPEVVNELRNWGVWYTNTLGLDGFRIDAVKHIKYSFTRDWINHVRSATGKNMFAVAEFWKNDLGAIENYLQKTNWNHSVFDVPLHYNLYNASQSGGNYDMRNIFNGTVVQRHPSHAVTFVDNHDSQPEEALESFVEEWFKPLAYALTLTREQGYPSVFYGDYYGIPTHGVPAMRSKIDPILEARQKYAYGPQHDYLDHPDVIGWTREGDSSHPKSGLATLITDGPGGSKRMYAGLKNAGETWYDITGNRSDTVKIGSDGWGEFHVNQQSVSIYVQK

SEQ ID NO: 41452 - protein, 480 aa, Bacillus sp.
NGTMMQYFEWYLPNDGNHWNRLNSDASNLKSKGITAVWIPPAWKATSQNDVGYGAYDLYDLGEFNQKGTVRTKYGTRSQLQAAVTSLKNNGIQVYGDVVMNHKGGADATEMVRAVEVNPNNRNQEVTGEYTIEAWTRFDFPGRGNTHSSFKWRWYHFDGVDWDQSRRLSNRIYKFRGHGKAWDWEVDTEFGNYDYLMYTDYDMDHPEVVNELRNWGVWYTNTLGLDGFRIDAVKHIKYSFTRDWINHVRIATGKNMFAVAEFWKNDLGAIENYLQKTNWNHSVFDVPLHYNLYNASKSGGNYDMRNIFNGTVVQRHPSHAVTFVDNHDSQPEEALESFVDEWFKPLAYALTLTREQGYPSVFYGDYYGIPTHGVPAMRSKIDPILEARQKYAYGPQHDYLDHPDVIGWTREGDSSHPKSGLATLITDGPGGSKRMYAGLKNAGETWYDITGNRSDTVKIGSDGWGEFHVNDQSVSIYVQK

SEQ ID NO: 41453 - protein, 480 aa, Bacillus sp.
NGTMMQYFEWYLPNDGNHWNRLNSDASNLKSKGITAVWIPPAWKGASQNDVGYGAYDLYDLGEFNQKGTVRTKYGTRSQLQAAVTSLKNNGIQVYGDVVMNHKGGADYTEMVRAVEVNPNNRNQEVTGEYTIEAWTRFDFPGRGNTHSSFKWRWYHFDGVDWDQSERLNNRIYKFRGHGKAWDWEVDTEFGNYDYLMYADYDMDHPEVVNELRNWGVWYTNTLGLDGFRIDAVKHIKYSFTRDWINHVRSATGKNMFAVAEFWKNDLGAIENYLQKTNWNHSVFDVPLHYNLYNASKSGGNYDMRNIFNGTVVQRHPSHAVTFVDNHDSQPEEALESFVEEWFKPLAYALTLTREQGYPSVFYGDYYGIPTHGVPAMRSKIDPILEARQKYAYGPQHDYLDHPDVIGWTREGDSSHPKSGLATLITDGPGGSKRMYAGLKNAGETWYDITGNRSDTVKIGSDGWGEFHVNDGSVSIYVQK

SEQ ID NO: 41454 - protein, 480 aa, Bacillus sp.
NGTMMQYFEWYLPNDGNHWNRLNSDASNLKSKGITAVWIPPAWKAVSQNDVGYGAYDLYDLGEFNQKGTVRTKYGTRSQLQAAVTSLKNNGIQVYGDVVMNHKGGADATEMVRAVEVNPNNRNQEVTGEYTIEAWTRFDFPGRGNTHSSFKWRWYHFDGVDWDQSRRFDNRIYKFRGHGKAWDWEVDTEFGNYDYLMYADYDMDHPEVVNELRNWGVWYTNTLGLDGFRIDAVKHIKYSFTRDWINHVRIATGKNMFAVAEFWKNDLGAIENYLQKTNWNHSVFDVPLHYNLYNASKSGGNYDMRNIFNGTVVQRHPSHAVTFVDNHDSQPEEALESFVDEWFKPLAYALTLTREQGYPSVFYGDYYGIPTHGVPAMRSKIDPILEARQKYAYGPQHDYLDHPDVIGWTREGDSSHPKSGLATLITDGPGGSKRMYAGLKNAGETWYDITGNRSDTVKIGSDGWGEFHVNDQSVSIYVQK

SEQ ID NO: 41455 - protein, 480 aa, Bacillus sp.
NGTMMQYFEWYLPNDGNHWNRLNSDASNLKSKGITAVWIPPAWKGASQNDVGYGAYDLYDLGEFNQKGTVRTKYGTRSQLQAAVTSLKNNGIQVYGDVVMNHKGGADTTEMVRAVEVNPNNRNQEVTGEYTIEAWTRFDFPGRGNTHSSFKWRWYHFDGVDWDQSRRLNNRIYKFRGHGKAWDWEVDTEFGNYDYLMYADYDMDHPEVVNELRNWGVWYTNTLGLDGFRIDAVKHIKYSFTRDWINHVRSATGKNMFAVAEFWKNDLGAIENYLQKTNWNHSVFDVPLHYNLYNASQSGGNYDMRNIFNGTVVQRHPSHAVTFVDNHDSQPEEALESFVETWFKPLAYALTLTREQGYPSVFYGDYYGIPTHGVPAMRSKIDPILEARQKYAYGPQHDYLDHPDVIGWTREGDSSHPKSGLATLITDGPGGSKRMYAGLKNAGETWYDITGNRSDTVKIGSDGWGEFHVNGKSVSIYVQK

SEQ ID NO: 41456 - protein, 480 aa, Bacillus sp.
NGTMMQYFEWYLPNDGNHWNRLNSDASNLKSKGITAVWIPPAWKGASQNDVGYGAYDLYDLGEFNQKGTVRTKYGTRSQLQAAVTSLKNNGIQVYGDVVMNHKGGADATEMVRAVEVNPNNRNQEVTGEYTIEAWTRFDFPGRGNTHSSFKWRWYHFDGVDWDQSERLNNRIYKFRGHGKAWDWEVDTEFGNYDYLMYADYDMDHPEVVNELRNWGVWYTNTLGLDGFRIDAVKHIKYSFTRDWINHVRSATGKNMFAVAEFWKNDLGAIENYLQKTNWNHSVFDVPLHYNLYNASKSGGNYDMRNIFNGTVVQRHPSHAVTFVDNHDSQPEEALESFVEEWFKPLAYALTLTREQGYPSVFYGDYYGIPTHGVPAMRSKIDPILEARQKYAYGPQHDYLDHPDVIGWTREGDSSHPPSGLATLITDGPGGSKRMYAGLKNAGETWYDITGNRSDTVKIGSDGWGEFHVNDGSVSIYVQK

SEQ ID NO: 41457 - protein, 480 aa, Bacillus sp.
NGTMMQYFEWYLPNDGNHWNRLNSDASNLKSKGITAVWIPPAWKGASQNDVGYGAYDLYDLGEFNQKGTVRTKYGTRSQLQAAVTSLKNNGIQVYGDVVMNHKGGADATEMVRAVEVNPNNRNQEVTGEYTIEAWTRFDFPGRGNTHSSFKWRWYHFDGVDWDQSRRLNNRIYKFRGHGKAWDWEVDTEFGNYDYLMYADYDMDHPEVVNELRNWGVWYTNTLGLDGFRIDAVKHIKYSFTRDWINHVRSATGKNMFAVAEFWKNDLGAIENYLQKTNWNHSVFDVPLHYNLYNASKSGGNYDMRNIFNGTVVQRHPSHAVTFVDNHDSQPEEALESFVDPWFKPLAYALTLTREQGYPSVFYGDYYGIPTHGVPAMRSKIDPILEARQKYAYGPQHDYLDHPDVIGWTREGDSSHPKSGLATLITDGPGGSKRMYAGLKNAGETWYDITGNRSDTVKIGSDGWGEFHVNQASVSIYVQK

SEQ ID NO: 41458 - protein, 480 aa, Bacillus sp.
NGTMMQYFEWYLPNDGNHWNRLNSDASNLKSKGITAVWIPPAWKGASQNDVGYGAYDLYDLGEFNQKGTVRTKYGTRSQLQAAVTSLKNNGIQVYGDVVMNHKGGADLTEMVRAVEVNPNNRNQEVTGEYTIEAWTRFDFPGRGNTHSSFKWRWYHFDGVDFDQSRQLNNRIYKFRGHGKAWDWEVDTEFGNYDYLMYADYDMDHPEVVGELRNWGVWYTNTLGLDGFRIDAVKHIKYSFTRDWINHVRSATGKNMFAVAEFWKNDLGAIENYLQKTNWNHSVFDVPLHYNLYNASKSGGNYDMRNIFNGTVVQRHPSHAVTFVDNHDSQPEEALESFVEEWFKPLAYALTLTREQGYPSVFYGDYYGIPTHGVPAMRSKIDPILEARQKYAYGPQHDYLDHPDVIGWTREGDSSHPKSGLATLITDGPGGSKRMYAGLKNAGETWYDITGNRSDTVKIGSDGWGEFHVNDGSVSIYVQK

SEQ ID NO: 41459 - protein, 480 aa, Bacillus sp.
NGTMMQYFEWYLPNDGNHWNRLNSDASNLKSKGITAVWIPPAWKAASQNDVGYGAYDLYDLGEFNQKGTVRTKYGTRSQLQAAVTSLKNNGIQVYGDVVMNHKGGADATEMVPAVEVNPNNRNQEVTGEYTIEAWTRFDFPGRGNTHSSFKWRWYHFDGVDWDQSRDLQNRIYKFRGHGKAWDWEVDTEFGNYDYLMYADYDMDHPEVVNELRNWGVWYTNTLGLDGFRIDAVKHIKYSFTRDWINHVRSATGKNMFAVAEFWKNDLGAIENYLQKTNWNHSVFDVPLHYNLYNASKSGGNYDMRNIFNGTVVQRHPSHAVTFVDNHDSQPEEALESFVETWFKPLAYALTLTREQGYPSVFYGDYYGIPTHGVPAMRSKIDPILEARQKYAYGPQHDYLDHPDVIGWTREGDSSHPKSGLATLITDGPGGSKRMYAGLKNAGETWYDITGNRSDTVKIGSDGWGEFHVNKASVSIYVQK

SEQ ID NO: 41460 - protein, 480 aa, Bacillus sp.
NGTMMQYFEWYLPNDGNHWNRLNSDASNLKSKGITAVWIPPAWKGASQNDVGYGAYDLYDLGEFNQKGTVRTKYGTRSQLQAAVTSLKNNGIQVYGDVVMNHKGGADATEMVRAVEVNPNNRNQEVTGEYTIEAWTRFDFPGRGNTHSSFKWRWYHFDGVDWDQSRDFNNRIYKFRGHGKAWDWEVDTEFGNYDYLMYADYDMDHPEVVNELRNWGVWYTNTLGLDGFRIDAVKHIKYSFTRDWINHVRSATGKNMFAVAEFWKNDLGAIENYLQKTNWNHSVFDVPLHYNLYNASKSGGNYDMRNIFNGTVVQRHPSHAVTFVDNHDSQPEEALESFVEEWFKPLAYALTLTREQGYPSVFYGDYYGIPTHGVPAMRSKIDPILEARQKYAYGPQHDYLDHPDVIGWTREGDSSHPKSGLATLITDGPGGSKRMYAGLKNTGETWYNITGNRSDTVKIGSDGWGEFHVNDGSVSIYVQK

SEQ ID NO: 41461 - protein, 480 aa, Bacillus sp.
NGTMMQYFEWYLPNDGNHWNRLNSDASNLKSKGITAVWIPPAWKATSQNDVGYGAYDLYDLGEFNQKGTVRTKYGTRSQLQAAVTSLKNNGIQVYGDVVMNHKGGADATEMVRAVEVNPNNRNQEVTGEYTIEAWTRFDFPGRGNTHSSFKWRWYHFDGVDWDQSRQVNNRIYKFRGHGKAWDWEVDTEFGNYDYLMYVDYDMDHPEVVNELRNWGVWYTNTLGLDGFRIDAVKHIKYSFTRDWINHVRSATGKNMFAVAEFWKNDLGAIENYLQKTNWNHSVFDVPLHYNLYNASKSGGNYDMRNIFNGTVVQRHPSHAVTFVDNHDSQPEEALESFVEEWFKPLAYALTLTREQGYPSVFYGDYYGIPTHGVPAMRSKIDPILEARQKYAYGPQHDYLDHPDVIGWTREGDSSHPKSGLATLITDGPGGSKRMYAGLKNAGETWYDITGNRSDTVKIGSDGWGEFHVNDGSVSIYVQK

SEQ ID NO: 41462 - protein, 480 aa, Bacillus sp.
NATMMQYFEWYLPNDGNHWNRLNSDASNLKSKGITAVWIPPAWKGASQNDVGYGAYDLYDLGEFNQKGTVRTKYGTRSQLQAAVTSLKNNGIQVYGDVVMNHKGGADATEMVRAVEVNPNNRNQEVTGEYTIEAWTRFDFPGRGNTHSSFKWRWYHFDGVDWDQSRRLNNRIYKFRGHGKAWDWEVDTEFGNYDYLMYADYDMDHPEVVNELRNWGVWYTNTLGLDGFRIDAVKHIKYSFTRDWINHVRSATGKNMFAVAEFWKNDLGAIENYLQKTNWNHSVFDVPLHYNLYNASKSGGNYDMRNIFNGTVVQAHPMHAVTFVDNHDSQPEEALESFVEEWFKPLAYALTLTREQGYPSVFYGDYYGIPTHGVPAMRSKIDPILEARQKYAYGPQHDYLDHPDVIGWTREGDSSHPKSGLATLITDGPGGSKRMYAGLKNAGETWYDITGNRSDTVKIGSDGWGEFHVNDGSVSIYVQK

SEQ ID NO: 41463 - protein, 480 aa, Bacillus sp.
NGTMMQYFEWYLPNDGNHWNRLNSDASNLKSKGITAVWIPPAWKAVSQNDVGYGAYDLYDLGEFNQKGTVRTKYGTRSQLQAAVTSLKNNGIQVYGDVVMNHKGGADATEMVRAVEVNPNNRNQEVTGEYTIEAWTRFDFPGRGNTHSSFKWRWYHFDGVDWDQSRRFENRIYKFRGHGKAWDWEVDTEFGNYDYLMYADYDMDHPEVVNELRNWGVWYTNTLGLDGFRIDAVKHIKYSFTRDWINHVRSATGKNMFAVAEFWKNDLGAIENYLQKTNWNHSVFDVPLHYNLYNASKSGGNYDMRNIFNGTVVQRHPSHAVTFVDNHDSQPEEALESFVEEWFKPLAYALTLTREQGYPSVFYGDYYGIPTHGVPAMRSKIDPILEARQKYAYGPQHDYLDHPDVIGWTREGDSSHPKSGLATLITDGPGGSKRMYAGLKNAGETWYDITGNRSDTVKIGSDGWGKFHVNDGSVSIYVQK

SEQ ID NO: 41464 - protein, 480 aa, Bacillus sp.
NGTMMQYFEWYLPNDGNHWNRLNSDASNLKSKGITAVWIPPAWKGASQNDVGYGAYDLYDLGEFNQKGTVRTKYGTRSQLQAAVTSLKNNGIQVYGDVVMNHKGGADYTEMVRAVEVNPNNRNQEVTGEYTIEAWTRFDFPGRGNTHSSFKWRWYHFDGVDWDQSERLNNRIYKFRGHGKAWDWEVDTEFGNYDYLMYADYDMDHPEVVNELRNWGVWYTNTLGLDGFRIDAVKHIKYSFTRDWINHVRSATGKNMFAVAEFWKNDLGAIENYLQKTNWNHSVFDVPLHYNLYNASKSGGNYDMRNIFNGTVVQRHPSHAVTFVDNHDSQPEEALESFVEEWFKPLAYALTLTREQGYPSVFYGDYYGIPTHGVPAMRSKIDPILLARQKYAYGPQHDYLDHPDVIGWTREGDSSHPKSGLATLITDGPGGSKRMYAGLKNAGETWYDITGNRSDTVKIGSDGWGEFHVNDGSVSIYVQK

SEQ ID NO: 41465 - protein, 480 aa, Bacillus sp.
NGTMMQYFEWYLPNDGNHWNRLNSDASNLKSKGITAVWIPPAWKAASQNDVGYGAYDLYDLGEFNQKGTVRTKYGTRSQLQAAVTSLKNNGIQVYGDVVMNHKGGADATEMVRAVEVNPNNRNQEVTGEYTIEAWTRFDFPGRGNTHSSFKWRWYHFDGVDWDQSRQLQNRIYKFRGHGKAWDWEVDTEFGNYDYLMYTDYDMDHPEVVNELRNWGVWYTNTLGLDGFRIDAVKHIKYSFTRDWINHVRSATGKNMFAVAEFWKNDLGAIENYLQKTNWNHSVFDVPLHYNLYNASKSGGNYDMRNIFNGTVVQRHPSHAVTFVDNHDSQPEEALESFVEEWFKPLAYALTLTREQGYPSVFYGDYYGIPTHGVPAMRSKIDPILEARQKYAYGPQHDYLDHPDVIGWTREGDSSHPKSGLATLITDGPGGSKRMYAGLKNAGETWYDITGNRSDTVKIGSDGWGEFHVNDGSVSIYVQK

SEQ ID NO: 41466 - protein, 480 aa, Bacillus sp.
NGTMMQYFEWYLPNDGNHWNRLNSDASNLKSKGITAVWIPPAWKGASQNDVGYGAYDLYDLGEFNQKGTVRTKYGTRSQLQAAVTSLKNNGIQVYGDVVMNHKGGADATEMVRAVEVNPNNRNQEVTGEYTIEAWTRFDFPGRGNTHSSFKWRWYHFDGVDWDQSRRLNNRIYKFRGHGKAWDWEVDTEFGNYDYLMYADYDMDHPEVVNELRNWGVWYTNTLGLDGFRIDAVKHIKYSFTRDWINHVRSATGKNMFAVAEFWKNDLGAIENYLQKTNWNHSVFDVPLHYNLYNASQSGGNYDMRNIFNGTVVQRHPSHAVTFVDNHDSQPEEALESFVEEWFKPLAYALTLTREQGYPSVFYGDYYGIPTHGVPAMRSKIDPILEARQKYAYGPQHDYLDHPDVIGWTREGDSSHPKSGLATLITDGPGGSKRMYAGLKNAGETWYDITGNRSDTVKIGSDGWGEFHVNGQSVSIYVQK

SEQ ID NO: 41467 - protein, 480 aa, Bacillus sp.
NGTMMQYFEWYLPNDGNHWNRLNSDASNLKSKGITAVWIPPAWKGASQNDVGYGAYDLYDLGEFNQKGTVRTKYGTRSQLQAAVTSLKNNGIQVYGDVVMNHKGGADATEMVRAVEVNPNNRNQEVTGEYTIEAWTRFDFPGRGNTHSSFKWRWYHFDGVDWDQSRRLNNRIYKFRGHGKAWDWEVDTEFGNYDYLMYADYDMDHPEVVNELRNWGVWYTNTLGLDGFRIDAVKHIKYSFTRDWINHVRSATGKNMFAVAEFWKNDLGAIENYLQKTNWNHSVFDVPLHYNLYNASKSGGNYDMRNIFNGTVVQRHPSHAVTFVDNHDSQPEEALESFVDEWFKPLAYALTLTREQGYPSVFYGDYYGIPTHGVPAMRSKIDPILEARQKYAYGPQHDYLDHPDVIGWTREGDSSHPKSGLATLITDGPGGSKRMYAGLKNAGETWYDITGNRSDTVKIGSDGWGEFHVNQSSVSIYVQK

SEQ ID NO: 41468 - protein, 480 aa, Bacillus sp.
NGTMMQYFEWYLPNDGNHWNRLNSDASNLKSKGITAVWIPPAWKAASQNDVGYGAYDLYDLGEFNQKGTVRTKYGTRSQLQAAVTSLKNNGIQVYGDVVMNHKGGADATEMVRAVEVNPNNRNQEVTGEYTIEAWTRFDFPGRGNTHSSFKWRWYHFDGVDWDQSRDLQNRIYKFRGHGKAWDWEVDTEFGNYDYLMYVDYDMDHPEVVNELRNWGVWYTNTLGLDGFRIDAVKHIKYSFTRDWINHVRSATGKNMFAVAEFWKNDLGAIENYLQKTNWNHSVFDVPLHYNLYNASKSGGNYDMRNIFNGTVVQRHPSHAVTFVDNHDSQPEEALESFVEEWFKPLAYALTLTREQGYPSVFYGDYYGIPTHGVPAMRSKIDPILEARQKYAYGPQHDYLDHPDVIGWTREGDSSHPKSGLATLITDGPGGSKRMYAGLKNAGETWYDITGNRSDTVKIGSDGWGEFHVNDGSVSIYVQK

SEQ ID NO: 41469 - protein, 480 aa, Bacillus sp.
NGTMMQYFEWYLPNDGNHWNRLNSDASNLKSKGITAVWIPPAWKAASQNDVGYGAYDLYDLGEFNQKGTVRTKYGTRSQLQAAVTSLKNNGIQVYGDVVMNHKGGSDATEMVRAVEVNPNNRNQEVTGEYTIEAWTRFDFPGRGNTHSSFKWRWYHFDGVDWDQSRRFTNRIYKFRGHGKAWDWEVDTEFGNYDYLMYADYDMDHPEVVNELRNWGVWYTNTLGLDGFRIDAVKHIKYSFTRDWINHVRSATGKNMFAVAEFWKNDLGAIENYLQKTNWNHSVFDVPLHYNLYNASKSGGNYDMRNIFNGTVVQRHPSHAVTFVDNHDSQPEEALESFVEEWFKPLAYALTLTREQGYPSVFYGDYYGIPTHGVPAMRSKIDPILEARQKYAYGPQHDYLDHPDVIGWTREGDSSHPKSGLATLITDGPGGSKRMYAGLKNAGETWYDITGNRSDTVKIGSDGWGEFHVNDGSVSIYVQK

SEQ ID NO: 41470 - protein, 480 aa, Bacillus sp.
NGTMMQYFEWYLPNDGNHWNRLNSDASNLKSKGITAVWIPPAWKGASQNDVGYGAYDLYDLGEFNQKGTVRTKYGTRSQLQAAVTSLKNNGIQVYGDVVMNHKGGADATEMVRAVEVNPNNRNQEVTGEYTIEAWTRFDFPGRGNTHSSFKWRWYHFDGVDWDQSRRTNNRIYKFRGHGKAWDWEVDTEFGNYDYLMYTDYDMDHPEVVNELRNWGVWYTNTLGLDGFRIDAVKHIKYSFTRDWINHVRIATGKNMFAVAEFWKNDLGAIENYLQKTNWNHSVFDVPLHYNLYNASKSGGNYDMRNIFNGTVVQRHPSHAVTFVDNHDSQPEEALESFVDEWFKPLAYALTLTREQGYPSVFYGDYYGIPTHGVPAMRSKIDPILEARQKYAYGPQHDYLDHPDVIGWTREGDSSHPKSGLATLITDGPGGSKRMYAGLKNAGETWYDITGNRSDTVKIGSDGWGEFHVNDQSVSIYVQK

SEQ ID NO: 41471 - protein, 480 aa, Bacillus sp.
NGTMMQYFEWYLPNDGNHWNRLNSDASNLKSKGIKAVWIPPAWKAVSQNDVGYGAYDLYDLGEFNQKGTVRTKYGTRSQLQAAVTSLKNNGIQVYGDVVMNHKGGADATEMVRAVEVNPNNRNQEVTGEYTIEAWTRFDFPGRGNTHSSFKWRWYHFDGVDFDQSRRLSNRIYKFRGHGKAWDWEVDTEFGNYDYLMYADYDMDHPEVVNELRNWGVWYTNTLGLDGFRIDAVKHIKYSFTRDWINHVRSATGKNMFAVAEFWKNDLGAIENYLQKTNWNHSVFDVPLHYNLYNASKSGGNYDMRNIFNGTVVQRHPSHAVTFVDNHDSQPEEALESFVEEWFKPLAYALTLTREQGYPSVFYGDYYGIPTHGVPAMRSKIDPILEARQKYAYGPQHDYLDHPDVIGWTREGDSSHPKSGLATLITDGPGGSKRMYAGLKNAGETWYDITGNRSDTVKIGSDGWGEFHVNDGSVSIYVQK

SEQ ID NO: 41472 - protein, 480 aa, Bacillus sp.
NGTMMQYFEWYLPNDGNHWNRLNSDASNLKSKGITAVWIPPAWKGASQNDVGYGAYDLYDLGEFNQKGTVRTKYGTRSQLQAAVTSLKNNGIQVYGDVVMNHKGGADATEMVRAVEVNPNNRNQEVTGEYTIEAWTRFDFPGRGNTHSSFKWRWYHFDGVDWDQSRRLNNRIYKFRGHGKAWDWEVDTEFGNYDYLMYADYDMDHPEVVNELRNWGVWYTNTLGLDGFRIDAVKHIKYSFTRDWINHVRSATGKNMFAVAEFWKNDLGAIENYLQKTNWNHSVFDVPLHYNLYNASKSAGNYDMRNIFNGTVVQRHPSHAVTFVDNHDSQPEEALESFVEKWFKPLAYALTLTREQGYPSVFYGDYYGIPTHGVPAMRSKIDPILEARQKYAYGPQHDYLDHPDVIGWTREGDSSHPKSGLATLITDGPGGSKRMYAGLKNAGETWYDITGNRSDTVKIGSDGWGEFHVNDKSVSIYVQK

SEQ ID NO: 41473 - protein, 480 aa, Bacillus sp.
NNTMMQYFEWYLPNDGNHWNRLNSDASNLKSKGITAVWIPPAWKGASQNDVGYGAYDLYDLGEFNQKGTVRTKYGTRSQLQAAVTSLKNNGIQVYGDVVMNHKGGADATEMVRAVEVNPNNRNQEVTGEYTIEAWTRFDFPGRGNTHSSFKWRWYHFDGVDWDQSRRLNNRIYKFRGHGKAWDWEVDTEFGNYDYLMYADYDMDHPEVVNELRNWGVWYTNTLGLDGFRIDAVKHIKYSFTRDWINHVRSATGKNMFAVAEFWKNDLGAIENYLQKTNWNHSVFDVPLHYNLYNASKSGGNYDMRNIFNGTVVQAHPMHAVTFVDNHDSQPEEALESFVEEWFKPLAYALTLTREQGYPSVFYGDYYGIPTHGVPAMRSKIDPILEARQKYAYGPQHDYLDHPDVIGWTREGDSSHPKSGLATLITDGPGGSKRMYAGLKNAGETWYDITGNRSDTVKIGSDGWGEFHVNDGSVSIYVQK

SEQ ID NO: 41474 - protein, 480 aa, Bacillus sp.
NGTMMQYFEWYLPNDGNHWNRLNSDASNLKSKGITAVWIPPAWKGASQNDVGYGAYDLYDLGEFNQKGTVRTKYGTRSQLQAAVTSLKNNGILVYGDVVMNHKGGADATEMVRAVEVNPNNRNQEVTGEYTIEAWTRFDFPGRGNTHSSFKWRWYHFDGVDWDQSRRLNNRIYKFRGHGKAWDWEVDTEFGNYDYLMYADYDMDHPEVVNELRNWGVWYTNTLGLDGFRIDAVKHIKYSFTRDWINHVRSATGKNMFAVAEFWKNDLGAIENYLQKTNWNHSVFDVPLHYNLYNASKSGGNYDMRNIFNGTVVQMHPMHAVTFVDNHDSQPEEALESFVEEWFKPLAYALTLTREQGYPSVFYGDYYGIPTHGVPAMRSKIDPILEARQKYAYGPQHDYLDHPDVIGWTREGDSSHPKSGLATLITDGPGGSKRMYAGLKNAGETWYDITGNRSDTVKIGSDGWGEFHVNDGSVSIYVQK

SEQ ID NO: 41475 - protein, 480 aa, Bacillus sp.
NGTMMQYFEWYLPNDGNHWNRLNSDASNLKSKGITAVWIPPAWKAASQNDVGYGAYDLYDLGEFNQKGTVRTKYGTRSQLQAAVTSLKNNGIQVYGDVVMNHKGGADATEMVRAVEVNPNNRNQEVTGEYTIEAWTRFDFPGRGNTHSSFKWRWYHFDGVDWDQSRNLTNRIYKFRGHGKAWDWEVDTEFGNYDYLMYADYDMDHPEVVNELRNWGVWYTNTLGLDGFRIDAVKHIKYSFTRDWINHVRSATGKNMFAVAEFWKNDLGAIENYLQKTNWNHSVFDVPLHYNLYNASKSGGNYDMRNIFNGTVVQRHPSHAVTFVDNHDSQPEEALESFVDPWFKPLAYALTLTREQGYPSVFYGDYYGIPTHGVPAMRSKIDPILEARQKYAYGPQHDYLDHPDVIGWTREGDSSHPKSGLATLITDGPGGSKRMYAGLKNAGETWYDITGNRSDTVKIGSDGWGEFHVNGGSVSIYVQK

SEQ ID NO: 41476 - protein, 480 aa, Bacillus sp.
NGTMMQYFEWYLPNDGNHWNRLNSDASNLKSKGITAVWIPPAWKGASQNDVGYGAYDLYDLGEFNQKGTVRTKYGTRSQLQAAVTSLKNNGIQVYGDVVMNHKGGADATEMVRAVEVNPNNRNQEVTGEYTIEAWTRFDFPGRGNTHSSFKWRWYHFDGVDWDQSRRLNNRIYKFRGHGKAWDWEVDTEFGNYDYLMYADYDMDHPEVVNELRNWGVWYTNTLGLDGFRIDAVKHIKYSFTRDWINHVRSATGKNMFAVAEFWKNDLGAIENYLQKTNWNHSVFDVPLHYNLYNASKSGGNYDMRNIFNGTVVQRHPSHAVTFVDNHDSQPEEALESFVDEWFKPLAYALTLTREQGYPSVFYGDYYGIPTHGVPAMRSKIDPILEARQKYAYGPQHDYLDHPDVIGWTREGDSSHPKSGLATLITDGPGGSKRMYAGLKNAGETWYDITGNRSDTVKIGSDGWGEFHVNQASVSIYVQK

SEQ ID NO: 41477 - protein, 480 aa, Bacillus sp.
NNTMMQYFEWYLPNDGNHWNRLNSDASNLKSKGITAVWIPPAWKGASQNDVGYGAYDLYDLGEFNQKGTVRTKYGTRSQLQAAVTSLKNNGIQVYGDVVMNHKGGADATEMVRAVEVNPNNRNQEVTGEYTIEAWTRFDFPGRGNTHSSFKWRWYHFDGVDWDQSRRLNNRIYKFRGHGKAWDWEVDTEFGNYDYLMYADYDMDHPEVVNELRNWGVWYTNTLGLDGFRIDAVKHIKYSFTRDWINHVRSATGKNMFAVAEFWKNDLGAIENYLQKTNWNHSVFDVPLHYNLYNASKSGGNYDMRNIFNGTVVQMHPSHAVTFVDNHDSQPEEALESFVEEWFKPLAYALTLTREQGYPSVFYGDYYGIPTHGVPAMRSKIDPILEARQKYAYGPQHDYLDHPDVIGWTREGDSSHPKSGLATLITDGPGGSKRMYAGLKNAGETWYDITGNRSDTVKIGSDGWGEFHVNDGSVSIYVQK

SEQ ID NO: 41478 - protein, 480 aa, Synthetic construct
NGTMMQYFEWYLPNDGNHWNRLNSDASNLKSKGITAVWIPPAWKGASQNDVGYGAYDLYDLGEFNQKGTVRTKYGTRSQLQAAVTSLKNNGIQVYGDVVMNHKGGADATEMVRAVEVNPNNRNQEVTGEYTIEAWTRFDFPGRGNTHSSFKWRWYHFDGVDWDQSRRLNNRIYKFRGHGKAWDWEVDTEFGNYDYLMYADYDMDHPEGTNELRNWGVWYTNTLGLDGFRIDAVKHIKYSFTRDWINHVRSATGKNMFAVAEFWKNDLGAIENYLQKTNWNHSVFDVPLHYNLYNASKSGGNYDMRNIFNGTVVQRHPSHAVTFVDNHDSQPEEALESFVEEWFKPLAYALTLTREQGYPSVFYGDYYGIPTHGVPAMRSKIDPILEARQKYAYGPQHDYLDHPDVIGWTREGDSSHPKSGLATLITDGPGGSKRMYAGLKNAGETWYDITGNRSDTVKIGSDGWGEFHVNDGSVSIYVQK

SEQ ID NO: 41479 - protein, 480 aa, Bacillus sp.
NGTMMQYFEWYLPNDGNHWNRLNSDASNLKSKGITAVWIPPAWKAASQNDVGYGAYDLYDLGEFNQKGTVRTKYGTRSQLQAAVTSLKNNGIQVYGDVVMNHKGGADATEMVRAVEVNPNNRNQEVTGEYTIEAWTRFDFPGRGNTHSSFKWRWYHFDGVDWDQSRDLDNRIYKFRGHGKAWDWEVDTEFGNYDYLMYADYDMDHPEVVNELRNWGVWYTNTLGLDGFRIDAVKHIKYSFTRDWINHVRSATGKNMFAVAEFWKNDLGAIENYLQKTNWNHSVFDVPLHYNLYNASKSGGNYDMRNIFNGTVVQRHPSHAVTFVDNHDSQPEEALESFVETWFKPLAYALTLTREQGYPSVFYGDYYGIPTHGVPAMRSKIDPILEARQKYAYGPQHDYLDHPDVIGWTREGDSSHPKSGLATLITDGPGGSKRMYAGLKNAGETWYDITGNRSDTVKIGSDGWGEFHVNKASVSIYVQK

SEQ ID NO: 41480 - protein, 480 aa, Synthetic construct
NGTMMQYFEWYLPNDGNHWNRLNSDASNLKSKGITAVWIPPAWKGASQNDVGYGAYDLYDLGEFNQKGTVRTKYGTRSQLQAAVTSLKNNGIQVYGDVVMNHKGGADATEMVRAVEVNPNNRNQEVTGEYTIEAWTRFDFPGRGNTHSSFKWRWYHFDGVDWDQSRRLNNRIYLFRGHGKHWDWPVDTENGNYDYLMYADIDMDHPEVVNELRNWGVWYTNTLGLDGFRIDAVKHIKYSFTRDWINHVRSATGKNMFAVAEFWKNDLGAIENYLQKTNWNHSVFDVPLHYNLYNASKSGGNYDMRNIFNGTVVQRHPSHAVTFVDNHDSQPEEALESFVEEWFKPLAYALTLTREQGYPSVFYGDYYGIPTHGVPAMRSKIDPILEARQKYAYGPQHDYLDHPDVIGWTREGDSSHPKSGLATLITDGPGGSKRMYAGLKNAGETWYDITGNRSDTVKIGSDGWGEFHVNDGSVSIYVQK

SEQ ID NO: 41481 - protein, 480 aa, Bacillus sp.
NGTMMQYFEWYLPNDGNHWNRLNSDASNLKSKGITAVWIPPAWKAASQNDVGYGAYDLYDLGEFNQKGTVRTKYGTRSQLQAAVTSLKNNGIQVYGDVVMNHKGGADATEMVDAVEVNPNNRNQEVTGEYTIEAWTRFDFPGRGNTHSSFKWRWYHFDGVDFDQSRQITNRIYKFRGHGKAWDWEVDTEFGNYDYLMYTDYDMDHPEVVNELRNWGVWYTNTLGLDGFRIDAVKHIKYSFTRDWINHVRSATGKNMFAVAEFWKNDLGAIENYLQKTNWNHSVFDVPLHYNLYNASKSGGNYDMRNIFNGTVVQRHPSHAVTFVDNHDSQPEEALESFVEEWFKPLAYALTLTREQGYPSVFYGDYYGIPTHGVPAMRSKIDPILEARQKYAYGPQHDYLDHPDVIGWTREGDSSHPKSGLATLITDGPGGSKRMYAGLKNAGETWYDITGNRSDTVKIGSDGWGEFHVNDGSVSIYVQK

SEQ ID NO: 41482 - protein, 480 aa, Bacillus sp.
NGTMMQYFEWYLPNDGNHWNRLNSDASNLKSKGITAVWIPPAWKGASQNDVGYGAYDLYDLGEFNQKGTVRTKYGTRSQLQAAVTSLKNNGIQVYGDVVMNHKGGADATEMVRAVEVNPNNRNQEVTGEYTIEAWTRFDFPGRGNTHSSFKWRWYHFDGVDWDQSRRLNNRIYKFRGHGKAWDWEVDTEFGNYDYLMYADYDMDHPEVVNELRNWGVWYTNTLGLDGFRIDAVKHIKYSFTRDWINHVRSATGKNMFAVAEFWKNDLGAIENYLQKTNWNHSVFDVPLHYNLYNASKSGGNYDMRNIFNGTVVQRHPSHAVTFVDNHDSQPEEALESFVDEWFKPLAYALTLTREQGYPSVFYGDYYGIPTHGVPAMRSKIDPILEARQKYAYGPQHDYLDHPDVIGWTREGDSSHPKSGLATLITDGPGGSKRMYAGLKNAGETWYDITGNRSDTVKIGSDGWGEFHVNGSSVSIYVQK

SEQ ID NO: 41483 - protein, 480 aa, Bacillus sp.
NGTMMQYFEWYLPNDGNHWNRLNSDASNLKSKGITAVWIPPAWKGASQNDVGYGAYDLYDLGEFNQKGTVRTKYGTRSQLQAAVTSLKNNGIQVYGDVVMNHKGGADATEMVRAVEVNPNNRNQEVTGEYTIEAWTRFDFPGRGNTHSSFKWRWYHFDGVDWDQSRRLNNRIYKFRGHGKAWDWEVDTEFGNYDYLMYADYDMDHPEVVNELRNWGVWYTNTLGLDGFRIDAVKHIKYSFTRDWINHVRSATGKNMFAVAEFWKNDLGAIENYLQKTNWNHSVFDVPLHYNLYNASKSQGNYDMRNIFNGTVVQRHPSHAVTFVDNHDSQPEEALESFVEPWFKPLAYALTLTREQGYPSVFYGDYYGIPTHGVPAMRSKIDPILEARQKYAYGPQHDYLDHPDVIGWTREGDSSHPKSGLATLITDGPGGSKRMYAGLKNAGETWYDITGNRSDTVKIGSDGWGEFHVNGGSVSIYVQK

SEQ ID NO: 41484 - protein, 480 aa, Bacillus sp.
NLTMMQYFEWYLPNDGNHWNRLNSDASNLKSKGITAVWIPPAWKGASQNDVGYGAYDLYDLGEFNQKGTVRTKYGTRSQLQAAVTSLKNNGIQVYGDVVMNHKGGADATEMVRAVEVNPNNRNQEVTGEYTIEAWTRFDFPGRGNTHSSFKWRWYHFDGVDWDQSRRLNNRIYKFRGHGKAWDWEVDTEFGNYDYLMYADYDMDHPEVVNELRNWGVWYTNTLGLDGFRIDAVKHIKYSFTRDWINHVRSATGKNMFAVAEFWKNDLGAIENYLQKTNWNHSVFDVPLHYNLYNASKSGGNYDMRNIFNGTVVQSHPNWAVTFVDNHDSQPEEALESFVEEWFKPLAYALTLTREQGYPSVFYGDYYGIPTHGVPAMRSKIDPILEARQKYAYGPQHDYLDHPDVIGWTREGDSSHPKSGLATLITDGPGGSKRMYAGLKNAGETWYDITGNRSDTVKIGSDGWGEFHVNDGSVSIYVQK

SEQ ID NO: 41485 - protein, 480 aa, Bacillus sp.
NGTMMQYFEWYLPNDGNHWNRLNSDASNLKSKGITAVWIPPAWKGASQNDVGYGAYDLYDLGEFNQKGTVRTKYGTRSQLQAAVTSLKNNGIQVYGDVVMNHKGGADATEMVRAVEVNPNNRNQEVTGEYTIEAWTRFDFPGRGNTHSSFKWRWYHFDGVDWDQSRRTNNRIYKFRGHSKAWDWEVDTEFGNYDYLMYTDYDMDHPEVVNELRNWGVWYTNTLGLDGFRIDAVKHIKYSFTRDWINHVRSATGKNMFAVAEFWKNDLGAIENYLQKTNWNHSVFDVPLHYNLYNASKSGGNYDMRNIFNGTVVQRHPSHAVTFVDNHDSQPEEALESFVEEWFKPLAYALTLTREQGYPSVFYGDYYGIPTHGVPAMRSKIDPILEARQKYAYGPQHDYLDHPDVIGWTREGDSSHPKSGLATLITDGPGGSKRMYAGLKNAGETWYDITGNRSDTVKIGSDGWGEFHVNDGSVSIYVQK

SEQ ID NO: 41486 - protein, 480 aa, Bacillus sp.
NETMMQYFEWYLPNDGNHWNRLNSDASNLKSKGITAVWIPPAWKGASQNDVGYGAYDLYDLGEFNQKGTVRTKYGTRSQLQAAVTSLKNNGIQVYGDVVMNHKGGADATEMVRAVEVNPNNRNQEVTGEYTIEAWTRFDFPGRGNTHSSFKWRWYHFDGVDWDQSRRLNNRIYKFRGHGKAWDWEVDTEFGNYDYLMYADYDMDHPEVVNELRNWGVWYTNTLGLDGFRIDAVKHIKYSFTRDWINHVRSATGKNMFAVAEFWKNDLGAIENYLQKTNWNHSVFDVPLHYNLYNASKSGGNYDMRNIFNGTVVQAHPSQAVTFVDNHDSQPEEALESFVEEWFKPLAYALTLTREQGYPSVFYGDYYGIPTHGVPAMRSKIDPILEARQKYAYGPQHDYLDHPDVIGWTREGDSSHPKSGLATLITDGPGGSKRMYAGLKNAGETWYDITGNRSDTVKIGSDGWGEFHVNDGSVSIYVQK

SEQ ID NO: 41487 - protein, 480 aa, Bacillus sp.
NGTMMQYFEWYLPNDGNHWNRLNSDASNLKSKGITAVWIPPAWKGASQNDVGYGAYDLYDLGEFNQKGTVRTKYGTRSQLQAAVTSLKNNGIQVYGDVVMNHKGGADATEMVRAVEVNPNNRNQEVTGDYTIEAWTRFDFPGRGNTHSSFKWRWYHFDGVDWDQSRRLNNRIYLFRGHGKAWDWEVDTEFGNYDYLMYADYDMDHPEVVNELRNWGVWYTNTLGLDGFRIDAVKHIKYSFTRDWINHVRSATGKNMFAVAEFWKNDLGAIENYLQKTNWNHSVFDVPLHYNLYNASKSGGNYDMRNIFNGTVVQRHPSHAVTFVDNHDSQPEEALESFVEEWFKPLAYALTLTREQGYPSVFYGDYYGIPTHGVPAMRSKIDPILEARQKYAYGPQHDYLDHPDVIGWTREGDSSHPKSGLATLITDGPGGSKRMYAGLKNAGETWYDITGNRSDTVKIGSDGWGEFHVNDGSVSIYVQK

SEQ ID NO: 41488 - protein, 480 aa, Bacillus sp.
NGTMMQYFEWYLPNDGNHWNRLNSDASNLKSKGIKAVWIPPAWKGASQNDVGYGAYDLYDLGEFNQKGTVRTKYGTRSQLQAAVTSLKNNGIQVYGDVVMNHKGGADATEMVRAVEVNPNNRNQEVTGEYTIEAWTRFDFPGRGNTHSSFKWRWYHFDGVDWDQSERLNNRIYKFRGHGKAWDWEVDTEFGNYDYLMYADYDMDHPEVVNELRNWGVWYTNTLGLDGFRIDAVKHIKYSFTRDWINHVRSATGKNMFAVAEFWKNDLGAIENYLQKTNWNHSVFDVPLHYNLYNASKSGGNYDMRNIFNGTVVQRHPSHAVTFVDNHDSQPEEALESFVEEWFKPLAYALTLTREQGYPSVFYGDYYGIPTHGVPAMRSKIDPILEARQKYAYGPQHDYLDHPDVIGWTREGDSSHPKSGLATLITDGPGGSKRMYAGLKNAGETWYDITGNRSDTVKIGSDGWGEFHVNDGSVSIYVQK

SEQ ID NO: 41489 - protein, 480 aa, Bacillus sp.
NGTMMQYFEWYLPNDGNHWNRLNSDASNLKSKGITAVWIPPAWKAVSQNDVGYGAYDLYDLGEFNQKGTVRTKYGTRSQLQAAVTSLKNNGIQVYGDVVMNHKGGADATEMVRAVEVNPNNRNQEVTGEYTIEAWTRFDFPGRGNTHSSFKWRWYHFDGVDWDQSRRFDNRIYKFRGHGKAWDWEVDTEFGNYDYLMYADYDMDHPEVVNELRNWGVWYTNTLGLDGFRIDAVKHIKYSFTRDWINHVRSATGKNMFAVAEFWKNDLGAIENYLQKTNWNHSVFDVPLHYNLYNASKSGGNYDMRNIFNGTVVQRHPSHAVTFVDNHDSQPEEALESFVDPWFKPLAYALTLTREQGYPSVFYGDYYGIPTHGVPAMRSKIDPILEARQKYAYGPQHDYLDHPDVIGWTREGDSSHPKSGLATLITDGPGGSKRMYAGLKNAGETWYDITGNRSDTVKIGSDGWGEFHVNGGSVSIYVQK

SEQ ID NO: 41490 - protein, 480 aa, Bacillus sp.
NQTMMQYFEWYLPNDGNHWNRLNSDASNLKSKGITAVWIPPAWKGASQNDVGYGAYDLYDLGEFNQKGTVRTKYGTRSQLQAAVTSLKNNGIQVYGDVVMNHKGGADATEMVRAVEVNPNNRNQEVTGEYTIEAWTRFDFPGRGNTHSSFKWRWYHFDGVDWDQSRRLNNRIYKFRGHGKAWDWEVDTEFGNYDYLMYADYDMDHPEVVNELRNWGVWYTNTLGLDGFRIDAVKHIKYSFTRDWINHVRSATGKNMFAVAEFWKNDLGAIENYLQKTNWNHSVFDVPLHYNLYNASKSGGNYDMRNIFNGTVVQAHPMHAVTFVDNHDSQPEEALESFVEEWFKPLAYALTLTREQGYPSVFYGDYYGIPTHGVPAMRSKIDPILEARQKYAYGPQHDYLDHPDVIGWTREGDSSHPKSGLATLITDGPGGSKRMYAGLKNAGETWYDITGNRSDTVKIGSDGWGEFHVNDGSVSIYVQK

SEQ ID NO: 41491 - protein, 480 aa, Bacillus sp.
NQTMMQYFEWYLPNDGNHWNRLNSDASNLKSKGITAVWIPPAWKGASQNDVGYGAYDLYDLGEFNQKGTVRTKYGTRSQLQAAVTSLKNNGIQVYGDVVMNHKGGADATEMVRAVEVNPNNRNQEVTGEYTIEAWTRFDFPGRGNTHSSFKWRWYHFDGVDWDQSRRLNNRIYKFRGHGKAWDWEVDTEFGNYDYLMYADYDMDHPEVVNELRNWGVWYTNTLGLDGFRIDAVKHIKYSFTRDWINHVRSATGKNMFAVAEFWKNDLGAIENYLQKTNWNHSVFDVPLHYNLYNASKSGGNYDMRNIFNGTVVQAHPNHAVTFVDNHDSQPEEALESFVEEWFKPLAYALTLTREQGYPSVFYGDYYGIPTHGVPAMRSKIDPILEARQKYAYGPQHDYLDHPDVIGWTREGDSSHPKSGLATLITDGPGGSKRMYAGLKNAGETWYDITGNRSDTVKIGSDGWGEFHVNDGSVSIYVQK

SEQ ID NO: 41492 - protein, 480 aa, Bacillus sp.
NGTMMQYFEWYLPNDGNHWNRLNSDASNLKSKGITAVWIPPAWKGASQNDVGYGAYDLYDLGEFNQKGTVRTKYGTRSQLQAAVTSLKNNGIQVYGDVVMNHKGGADATEMVRAVEVNPNNRNQEVTGEYTIEAWTRFDFPGRGNTHSSFKWRWYHFDGVDWDQSRRLNNRIYLFRGHGKSWDWEVDTEFGNYDYLMYADYDMDHPEVVNELRNWGVWYTNTLGLDGFRIDAVKHIKYSFTRDWINHVRSATGKNMFAVAEFWKNDLGAIENYLQKTNWNHSVFDVPLHYNLYNASKSGGNYDMRNIFNGTVVQRHPSHAVTFVDNHDSQPEEALESFVEEWFKPLAYALTLTREQGYPSVFYGDYYGIPTHGVPAMRSKIDPILEARQKYAYGPQHDYLDHPDVIGWTREGDSSHPKSGLATLITDGPGGSKRMYAGLKNAGETWYDITGNRSDTVKIGSDGWGEFHVNDGSVSIYVQK

SEQ ID NO: 41493 - protein, 480 aa, Bacillus sp.
NGTMMQYFEWYLPNDGNHWNRLNSDASNLKSKGITAVWIPPAWKAISQNDVGYGAYDLYDLGEFNQKGTVRTKYGTRSQLQAAVTSLKNNGIQVYGDVVMNHKGGADATEMVRAVEVNPNNRNQEVTGEYTIEAWTRFDFPGRGNTHSSFKWRWYHFDGVDWDQSRRLNNRIYKFRGHGKAWDWEVDTEFGNYDYLMYVDYDMDHPEVVNELRNWGVWYTNTLGLDGFRIDAVKHIKYSFTRDWINHVRSATGKNMFAVAEFWKNDLGAIENYLQKTNWNHSVFDVPLHYNLYNASKSGGNYDMRNIFNGTVVQRHPSHAVTFVDNHDSQPEEALESFVEEWFKPLAYALTLTREQGYPSVFYGDYYGIPTHGVPAMRSKIDPILEARQKYAYGPQHDYLDHPDVIGWTREGDSSHPKSGLATLITDGPGGSKRMYAGLKNAGETWYDITGNRSDTVKIGSDGWGEFHVNDGSVSIYVQK

SEQ ID NO: 41494 - protein, 480 aa, Bacillus sp.
NGTMMQYFEWYLPNDGNHWNRLNSDASNLKSKGITAVWIPPAWKGASQNDVGYGAYDLYDLGEFNQKGTVRTKYGTRSQLQAAVTSLKNNGIQVYGDVVMNHKGGADATEMVRAVEVNPNNRNQEVTGEYTIEAWTRFDFPGRGNTHSSFKWRWYHFDGVDWDQSRDLENRIYKFRGHGKAWDWEVDTEFGNYDYLMYADYDMDHPEVVNELRNWGVWYTNTLGLDGFRIDAVKHIKYSFTRDWINHVRSATGKNMFAVAEFWKNDLGAIENYLQKTNWNHSVFDVPLHYNLYNASQSGGNYDMRNIFNGTVVQRHPSHAVTFVDNHDSQPEEALESFVEPWFKPLAYALTLTREQGYPSVFYGDYYGIPTHGVPAMRSKIDPILEARQKYAYGPQHDYLDHPDVIGWTREGDSSHPKSGLATLITDGPGGSKRMYAGLKNAGETWYDITGNRSDTVKIGSDGWGEFHVNKSSVSIYVQK

SEQ ID NO: 41495 - protein, 480 aa, Bacillus sp.
NGTMMQYFEWYLPNDGNHWNRLNSDASNLKSKGITAVWIPPAWKGASQNDVGYGAYDLYDLGEFNQKGTVRTKYGTRSQLQAAVTSLKNNGIQVYGDVVMNHKGGADATEMVRAVEVNPNNRNQEVTGEYTIEAWTRFDFPGRGNTHSSFKWRWYHFDGVDWDQSERLNNRIYKFRGHGKAWDWEVETEFGNYDYLMYADYDMDHPEVVNELRNWGVWYTNTLGLDGFRIDAVKHIKYSFTRDWINHVRIATGKNMFAVAEFWKNDLGAIENYLQKTNWNHSVFDVPLHYNLYNASKSGGNYDMRNIFNGTVVQRHPSHAVTFVDNHDSQPEEALESFVDEWFKPLAYALTLTREQGYPSVFYGDYYGIPTHGVPAMRSKIDPILEARQKYAYGPQHDYLDHPDVIGWTREGDSSHPKSGLATLITDGPGGSKRMYAGLKNAGETWYDITGNRSDTVKIGSDGWGEFHVNDQSVSIYVQK

SEQ ID NO: 41496 - protein, 480 aa, Bacillus sp.
NGTMMQYFEWYLPNDGNHWNRLNSDASNLKSKGITAVWIPPAWKAASQNDVGYGAYDLYDLGEFNQKGTVRTKYGTRSQLQAAVTSLKNNGIQVYGDVVMNHKGGADATEMVRAVEVNPNNRNQEVTGEYTIEAWTRFDFPGRGNTHSSFKWRWYHFDGVDWDQSRDLQNRIYKFRGHGKAWDWEVDTEFGNYDYLMYADYDMDHPEVVNELRNWGVWYTNTLGLDGFRIDAVKHIKYSFTRDWINHVRSATGKNMFAVAEFWKNDLGAIENYLQKTNWNHSVFDVPLHYNLYNASKSGGNYDMRNIFNGTVVQRHPSHAVTFVDNHDSQPEEALESFVDPWFKPLAYALTLTREQGYPSVFYGDYYGIPTHGVPAMRSKIDPILEARQKYAYGPQHDYLDHPDVIGWTREGDSSHPKSGLATLITDGPGGSKRMYAGLKNAGETWYDITGNRSDTVKIGSDGWGEFHVNGGSVSIYVQK

SEQ ID NO: 41497 - protein, 480 aa, Bacillus sp.
NKTMMQYFEWYLPNDGNHWNRLNSDASNLKSKGITAVWIPPAWKGASQNDVGYGAYDLYDLGEFNQKGTVRTKYGTRSQLQAAVTSLKNNGIQVYGDVVMNHKGGADATEMVRAVEVNPNNRNQEVTGEYTIEAWTRFDFPGRGNTHSSFKWRWYHFDGVDWDQSRRLNNRIYKFRGHGKAWDWEVDTEFGNYDYLMYADYDMDHPEVVNELRNWGVWYTNTLGLDGFRIDAVKHIKYSFMRDWINHVRSATGKNMFAVAEFWKNDLGAIENYLQKTNWNHSVFDVPLHYNLYNASKSGGNYDMRNIFNGTVVQAHPMHAVTFVDNHDSQPEEALESFVEEWFKPLAYALTLTREQGYPSVFYGDYYGIPTHGVPAMRSKIDPILEARQKYAYGPQHDYLDHPDVIGWTREGDSSHPKSGLATLITDGPGGSKRMYAGLKNAGETWYDITGNRSDTVKIGSDGWGEFHVNDGSVSIYVQK

SEQ ID NO: 41498 - protein, 480 aa, Bacillus sp.
NGTMMQYFEWYLPNDGNHWNRLNSDASNLKSKGITAVWIPPAWKGASQNDVGYGAYDLYDLGEFNQKGTVRTKYGTRSQLQAAVTSLKNNGIQVYGDVVMNHKGGADATEMVRAVEVNPNNRNQEVTGEYTIEAWTRFDFPGRGNTHSSFKWRWYHFDGVDWDQSRRLNNRIYKFRGHGKAWDWEVDTEFGNYDYLMYADYDMDHPETSNELRNWGVWYTNTLGLDGFRIDAVKHIKYSFTRDWINHVRSATGKNMFAVAEFWKNDLGAIENYLQKTNWNHSVFDVPLHYNLYNASKSGGNYDMRNIFNGTVVQRHPSHAVTFVDNHDSQPEEALESFVEEWFKPLAYALTLTREQGYPSVFYGDYYGIPTHGVPAMRSKIDPILEARQKYAYGPQHDYLDHPDVIGWTREGDSSHPKSGLATLITDGPGGSKRMYAGLKNAGETWYDITGNRSDTVKIGSDGWGEFHVNDGSVSIYVQK

SEQ ID NO: 41499 - protein, 480 aa, Bacillus sp.
NGTMMQYFEWYLPNDGNHWNRLNSDASNLKSKGITAVWIPPAWKGASQNDVGYGAYDLYDLGEFNQKGTVRTKYGTRSQLQAAVTSLKNNGIQVYGDVVMNHKGGADATEMVRAVEVNPNNRNQEVTGEYTIEAWTRFDFPGRGNTHSSFKWRWYHFDGVDWDQSRRLNNRIYKFRNHGKAWDWEVDTEFGNYDYLMYADYDMDHPESVNELRNWGVWYTNTLGLDGFRIDAVKHIKYSFTRDWINHVRSATGKNMFAVAEFWKNDLGAIENYLQKTNWNHSVFDVPLHYNLYNASKSGGNYDMRNIFNGTVVQRHPSHAVTFVDNHDSQPEEALESFVEEWFKPLAYALTLTREQGYPSVFYGDYYGIPTHGVPAMRSKIDPILEARQKYAYGPQHDYLDHPDVIGWTREGDSSHPKSGLATLITDGPGGSKRMYAGLKNAGETWYDITGNRSDTVKIGSDGWGEFHVNDGSVSIYVQK

SEQ ID NO: 41500 - protein, 480 aa, Bacillus sp.
NGTMMQYFEWYLPNDGNHWNRLNSDASNLKSKGITAVWIPPAWKGASQNDVGYGAYDLYDLGEFNQKGTVRTKYGTRSQLQAAVTSLKNNGIQVYGDVVMNHKGGADATEMVRAVEVNPNNRNQEVTGEYTIEAWTRFDFPGRGNTHSSFKWRWYHFDGVDWDQSRRLNNRIYKFRGHGKAWDWEVDTEFGNYDYLMYADYDMDHPEVVNELRNWGVWYTNTLGLDGFRIDAVKHIKYSFTRDWINHVRSATGKNMFAVAEFWKNDLGAIENYLQKTNWNHSVFDVPLHYNLYNASKSGGNYDMRNIFNGTVVQRHPSHAVTFVDNHDSQPEEALESFVDEWFKPLAYALTLTREQGYPSVFYGDYYGIPTHGVPAMRSKIDPILEARQKYAYGPQHDYLDHPDVIGWTREGDSSHPKSGLATLITDGPGGSKRMYAGLKNAGETWYDITGNRSDTVKIGSDGWGEFHVNGQSVSIYVQK

SEQ ID NO: 41501 - protein, 480 aa, Bacillus sp.
NGTMMQYFEWYLPNDGNHWNRLNSDASNLKSKGITAVWIPPAWKGASQNDVGYGAYDLYDLGEFNQKGTVRTKYGTRSQLQAAVTSLKNNGIQVYGDVVMNHKGGADATEMVRAVEVNPNNRNQEVTGEYTIEAWTRFDFPGRGNTHSSFKWRWYHFDGVDWDQSRRLNNRIYKFRGHGKAWDWEVDTEFGNYDYLMYADYDMDHPEVVNELRNWGVWYTNTLGLDGFRIDAVKHIKYSFTRDWINHVRSATGKNMFAVAEFWKNDLGAIENYLQKTNWNHSVFDVPLHYNLYNASKSGGNYDMRNIFNGTVVQRHPSHAVTFVDNHDSQPEEALESFVEPWFKPLAYALTLTREQGYPSVFYGDYYGIPTHGVPAMRSKIDPILEARQKYAYGPQHDYLDHPDVIGWTREGDSSHPKSGLATLITDGPGGSKRMYAGLKNAGETWYDITGNRSDTVKIGSDGWGEFHVNKTSVSIYVQK

SEQ ID NO: 41502 - protein, 480 aa, Bacillus sp.
NNTMMQYFEWYLPNDGNHWNRLNSDASNLKSKGITAVWIPPAWKGASQNDVGYGAYDLYDLGEFNQKGTVRTKYGTRSQLQAAVTSLKNNGIQVYGDVVMNHKGGADATEMVRAVEVNPNNRNQEVTGEYTIEAWTRFDFPGRGNTHSSFKWRWYHFDGVDWDQSRRLNNRIYKFRGHGKAWDWEVDTEFGNYDYLMYADYDMDHPEVVNELRNWGVWYTNTLGLDGFRIDAVKHIKYSFTRDWINHVRSATGKNMFAVAEFWKNDLGAIENYLQKTNWNHSVFDVPLHYNLYNASKSGGNYDMRNIFNGTVVQAHPSHAVTFVDNHDSQPEEALESFVEEWFKPLAYALTLTREQGYPSVFYGDYYGIPTHGVPAMRSKIDPILEARQKYAYGPQHDYLDHPDVIGWTREGDSSHPKSGLATLITDGPGGSKRMYAGLKNAGETWYDITGNRSDTVKIGSDGWGEFHVNDGSVSIYVQK

SEQ ID NO: 41503 - protein, 480 aa, Bacillus sp.
NGTMMQYFEWYLPNDGNHWNRLNSDASNLKSKGITAVWIPPAWKGASQNDVGYGAYDLYDLGEFNQKGTVRTKYGTRSQLQAAVTSLKNNGIQVYGDVVMNHKGGADATEMVRAVEVNPNNRNQEVTGEYTIEAWTRFDFPGRGNTHSSFKWRWYHFDGVDWDQSRRLNNRIYKFRGHGKAWDWEVDTEFGNYDYLMYADYDMDHPEVVNELRNWGVWYTNTLGLDGFRIDAVKHIKYSFTRDWINHVRSATGKNMFAVAEFWKNDLGAIENYLQKTNWNHSVFDVPLHYNLYNASKSGGNYDMRNIFNGTVVQRHPSHAVTFVDNHDSQPEEALESFVEPWFKPLAYALTLTREQGYPSVFYGDYYGIPTHGVPAMRSKIDPILEARQKYAYGPQHDYLDHPDVIGWTREGDSSHPKSGLATLITDGPGGSKRMYAGLKNAGETWYDITGNRSDTVKIGSDGWGEFHVNGKSVSIYVQK

SEQ ID NO: 41504 - protein, 480 aa, Bacillus sp.
NGTMMQYFEWYLPNDGNHWNRLNSDASNLKSKGITAVWIPPAWKAASQNDVGYGAYDLYDLGEFNQKGTVRTKYGTRSQLQAAVTSLKNNGIQVYGDVVMNHKGGADATEMVRAVEVNPNNRNQEVTGEYTIEAWTRFDFPGRGNTHSSFKWRWYHFDGVDWDQSRDLTNRIYKFRGHGKAWDWEVDTEFGNYDYLMYADYDMDHPEVVNELRNWGVWYTNTLGLDGFRIDAVKHIKYSFTRDWINHVRSATGKNMFAVAEFWKNDLGAIENYLQKTNWNHSVFDVPLHYNLYNASKSGGNYDMRNIFNGTVVQRHPSHAVTFVDNHDSQPEEALESFVDPWFKPLAYALTLTREQGYPSVFYGDYYGIPTHGVPAMRSKIDPILEARQKYAYGPQHDYLDHPDVIGWTREGDSSHPKSGLATLITDGPGGSKRMYAGLKNAGETWYDITGNRSDTVKIGSDGWGEFHVNGGSVSIYVQK

SEQ ID NO: 41505 - protein, 480 aa, Bacillus sp.
NGTMMQYFEWYLPNDGNHWNRLNSDASNLKSKGITAVWIPPAWKGASQNDVGYGAYDLYDLGEFNQKGTVRTKYGTRSQLQAAVTSLKNNGIQVYGDVVMNHKGGADATEMVRAVEVNPNNRNQEVTGEYTIEAYTRFDFPGRGNTHSSFKWRWYHFDGVDFDQSRRLDNRIYKFRGHGKAWDWEVDTEFGNYDYLMYADYDMDHPEVVNELRNWGVWYTNTLGLDGFRIDAVKHIKYSFTRDWINHVRSATGKNMFAVAEFWKNDLGAIENYLQKTNWNHSVFDVPLHYNLYNASKSGGNYDMRNIFNGTVVQRHPSHAVTFVDNHDSQPEEALESFVEEWFKPLAYALTLTREQGYPSVFYGDYYGIPTHGVPAMRSKIDPILEARQKYAYGPQHDYLDHPDVIGWTREGDSSHPKSGLATLITDGPGGSKRMYAGLKNAGETWYDITGNRSDTVKIGSDGWGEFHVNDGSVSIYVQK

SEQ ID NO: 41506 - protein, 480 aa, Bacillus sp.
NGTMMQYFEWYLPNDGNHWNRLNSDASNLKSKGITAVWIPPAWKGASQNDVGYGAYDLYDLGEFNQKGTVRTKYGTRSQLQAAVTSLKNNGIQVYGDVVMNHKGGADATEMVRAVEVNPNNRNQEVTGEYTIEAWTRFDFPGRGNTHSSFKWRWYHFDGVDWDQSRRLNNRIYKFRGHGKAWDWEVDTEFGNYDYLMYADYDMDHPEVVNELRNWGVWYTNTLGLDGFRIDAVKHIKYSFTRDWINHVRSATGKNMFAVAEFWKNDLGAIENYLQKTNWNHSVFDVPLHYNLYNASKSGGNYDMRNIFNGTVVQRHPSHAVTFVDNHDSQPEEALESFVDPWFKPLAYALTLTREQGYPSVFYGDYYGIPTHGVPAMRSKIDPILEARQKYAYGPQHDYLDHPDVIGWTREGDSSHPKSGLATLITDGPGGSKRMYAGLKNAGETWYDITGNRSDTVKIGSDGWGEFHVNKSSVSIYVQK

SEQ ID NO: 41507 - protein, 480 aa, Bacillus sp.
NGTMMQYFEWYLPNDGNHWNRLNSDASNLKSKGITAVWIPPAWKAVSQNDVGYGAYDLYDLGEFNQKGTVRTKYGTRSQLQAAVTSLKNNGIQVYGDVVMNHKGGADATEMVRAVEVNPNNRNQEVTGEYTIEAWTRFDFPGRGNTHSSFKWRWYHFDGVDWDQSRDLENRIYKFRGHGKAWDWEVDTEFGNYDYLMYADYDMDHPEVVNELRNWGVWYTNTLGLDGFRIDAVKHIKYSFTRDWINHVRSATGKNMFAVAEFWKNDLGAIENYLQKTNWNHSVFDVPLHYNLYNASKSGGNYDMRNIFNGTVVQAHPNHAVTFVDNHDSQPEEALESFVEEWFKPLAYALTLTREQGYPSVFYGDYYGIPTHGVPAMRSKIDPILEARQKYAYGPQHDYLDHPDVIGWTREGDSSHPKSGLATLITDGPGGSKRMYAGLKNAGETWYDITGNRSDTVKIGSDGWGEFHVNDGSVSIYVQK

SEQ ID NO: 41508 - protein, 480 aa, Bacillus sp.
NGTMMQYFEWYLPNDGNHWNRLNSDASNLKSKGITAVWIPPAWKATSQNDVGYGAYDLYDLGEFNQKGTVRTKYGTRSQLQAAVTSLKNNGIQVYGDVVMNHKGGADATEMVRAVEVNPNNRNQEVTGEYTIEAWTRFDFPGRGNTHSSFKWRWYHFDGVDWDQSRELSNRIYKFRGHGKAWDWEVDTEFGNYDYLMYADYDMDHPEVVNELRNWGVWYTNTLGLDGFRIDAVKHIKYSFTRDWINHVRSATGKNMFAVAEFWKNDLGAIENYLQKTNWNHSVFDVPLHYNLYNASKSQGNYDMRNIFNGTVVQRHPSHAVTFVDNHDSQPEEALESFVDTWFKPLAYALTLTREQGYPSVFYGDYYGIPTHGVPAMRSKIDPILEARQKYAYGPQHDYLDHPDVIGWTREGDSSHPKSGLATLITDGPGGSKRMYAGLKNAGETWYDITGNRSDTVKIGSDGWGEFHVNGSSVSIYVQK

SEQ ID NO: 41509 - protein, 480 aa, Bacillus sp.
NGTMMQYFEWYLPNDGNHWNRLNSDASNLKSKGITAVWIPPAWKGASQNDVGYGAYDLYDLGEFNQKGTVRTKYGTRSQLQAAVTSLKNNGIQVYGDVVMNHKGGADATEMVRAVEVNPNNRNQEVTGEYTIEAWTRFDFPGRGNTHSSFKWRWYHFDGVDWDQSRRLNNRIYKFRAHGKAWDWEVDTEFGNYDYLMYADYDMDHPEVVNELRNWGVWYTNTLGLDGFRIDAVKHIKYSFTRDWINHVRSATGKNMFAVAEFWKNDLGAIENYLQKTNWNHSVFDVPLHYNLYNASKSGGNYDMRNIFNGTVVQRHPSHAVTFVDNHDSQPEEALESFVEEWFKPLAYALTLTREQGYPSVFYGDYYGIPTHGVPAMRSKIDPILEARQKYAYGPQHDYLDHPDVIGWTREGDSSHPKSGLATLITHGPGGSKRMYAGLKNAGETWYDITGNRSDTVKIGSDGWGEFHVNDGSVSIYVQK

SEQ ID NO: 41510 - protein, 480 aa, Bacillus sp.
NGTMMQYFEWYLPNDGNHWNRLNSDASNLKSKGITAVWIPPAWKGASQNDVGYGAYDLYDLGEFNQKGTVRTKYGTRSQLQAAVTSLKNNGITVYGDVVMNHKGGADATEMVRAVEVNPNNRNQEVTGEYTIEAWTRFDFPGRGNTHSSFKWRWYHFDGVDWDQSRRLNNRIYKFRGHGKAWDWEVDTEFGNYDYLMYADYDMDHPEVVNELRNWGVWYTNTLGLDGFRIDAVKHIKYSFTRDWINHVRSATGKNMFAVAEFWKNDLGAIENYLQKTNWNHSVFDVPLHYNLYNASKSGGNYDMRNIFNGTVVQAHPSLAVTFVDNHDSQPEEALESFVEEWFKPLAYALTLTREQGYPSVFYGDYYGIPTHGVPAMRSKIDPILEARQKYAYGPQHDYLDHPDVIGWTREGDSSHPKSGLATLITDGPGGSKRMYAGLKNAGETWYDITGNRSDTVKIGSDGWGEFHVNDGSVSIYVQK

SEQ ID NO: 41511 - protein, 480 aa, Bacillus sp.
NGTMMQYFEWYLPNDGNHWNRLNSDASNLKSKGITAVWIPPAWKATSQNDVGYGAYDLYDLGEFNQKGTVRTKYGTRSQLQAAVTSLKNNGIQVYGDVVMNHKGGADATEMVRAVEVNPNNRNQEVTGEYTIEAWTRFDFPGRGNTHSSFKWRWYHFDGVDWDQSRNLNNRIYKFRGHGKAWDWEVDTEFGNYDYLMYTDYDMDHPEVVNELRNWGVWYTNTLGLDGFRIDAVKHIKYSFTRDWINHVRSATGKNMFAVAEFWKNDLGAIENYLQKTNWNHSVFDVPLHYNLYNASKSGGNYDMRNIFNGTVVQRHPSHAVTFVDNHDSQPEEALESFVEEWFKPLAYALTLTREQGYPSVFYGDYYGIPTHGVPAMRSKIDPILEARQKYAYGPQHDYLDHPDVIGWTREGDSSHPKSGLATLITDGPGGSKRMYAGLKNAGETWYDITGNRSDTVKIGSDGWGEFHVNDGSVSIYVQK

SEQ ID NO: 41512 - protein, 480 aa, Bacillus sp.
NGTMMQYFEWYLPNDGNHWNRLNSDASNLKSKGITAVWIPPAWKGASQNDVGYGAYDLYDLGEFNQKGTVRTKYGTRSQLQAAVTSLKNNGIQVYGDVVMNHKGGAHATEMVRAVEVNPNNRNQEVTGEYTIEAWTRFDFPGRGNTHSSFKWRWYHFDGVDWDQSRRLNNRIYKFRGHGKAWDWEVDTEFGNYDYLMYADYDMDHPEVVNELRNWGVWYTNTLGLDGFRIDAVKHIKYSFTRDWINHVRSATGKNMFAVAEFWKNDLGAIENYLQKTNWNHSVFDVPLHYNLYNASKSGGNYDMRNIFNGTVVQAHPNHAVTFVDNHDSQPEEALESFVEEWFKPLAYALTLTREQGYPSVFYGDYYGIPTHGVPAMRSKIDPILEARQKYAYGPQHDYLDHPDVIGWTREGDSSHPKSGLATLITDGPGGSKRMYAGLKNAGETWYDITGNRSDTVKIGSDGWGEFHVNDGSVSIYVQK

SEQ ID NO: 41513 - protein, 480 aa, Bacillus sp.
NGTMMQYFEWYLPNDGNHWNRLNSDASNLKSKGITAVWIPPAWKGASQNDVGYGAYDLYDLGEFNQKGTVRTKYGTRSQLQAAVTSLKNNGIQVYGDVVMNHKGGADATEMVRAVEVNPNNRNQEVTGEYTIEAWTRFDFPGRGNTHSSFKWRWYHFDGVDWDQSREFDNRIYKFRGHGKAWDWEVDTEFGNYDYLMYADYDMDHPEVVNELRNWGVWYTNTLGLDGFRIDAVKHIKYSFTRDWINHVRSATGKNMFAVAEFWKNDLGAIENYLQKTNWNHSVFDVPLHYNLYNASKSGGNYDMRNIFNGTVVQRHPSHAVTFVDNHDSQPEEALESFVDEWFKPLAYALTLTREQGYPSVFYGDYYGIPTHGVPAMRSKIDPILEARQKYAYGPQHDYLDHPDVIGWTREGDSSHPKSGLATLITDGPGGSKRMYAGLKNAGETWYDITGNRSDTVKIGSDGWGEFHVNKSSVSIYVQK

SEQ ID NO: 41514 - protein, 480 aa, Synthetic construct
NGTMMQYFEWYLPNDGNHWNRLNSDASNLKSKGITAVWIPPAWKGASQNDVGYGAYDLYDLGEFNQKGTVRTKYGTRSQLQAAVTSLKNNGIQVYGDVVMNHKGGADATEMVRAVEVNPNNRNQEVTGEYTIEAWTRFDFPGRGNTHSSFKWRWYHFDGVDWDQSRRLNNRIYLFRGHGKKWDWPVDTENGNYDYLMYADIDMDHPEVVNELRNWGVWYTNTLGLDGFRIDAVKHIKYSFTRDWINHVRSATGKNMFAVAEFWKNDLGAIENYLQKTNWNHSVFDVPLHYNLYNASKSGGNYDMRNIFNGTVVQRHPSHAVTFVDNHDSQPEEALESFVEEWFKPLAYALTLTREQGYPSVFYGDYYGIPTHGVPAMRSKIDPILEARQKYAYGPQHDYLDHPDVIGWTREGDSSHPKSGLATLITDGPGGSKRMYAGLKNAGETWYDITGNRSDTVKIGSDGWGEFHVNDGSVSIYVQK

SEQ ID NO: 41515 - protein, 480 aa, Bacillus sp.
NGTMMQYFEWYLPNDGNHWNRLNSDASNLKSKGITAVWIPPAWKGASQNDVGYGAYDLYDLGEFNQKGTVRTKYGTRSQLQAAVTSLKNNGIQVYGDVVMNHKGGADATEMVRAVEVNPNNRNQEVTGEYTIEAWTRFDFPGRGNTHSSFKWRWYHFDGVDWDQSRRLNNRIYKFRGHGKAWDWEVDTEFGNYDYLMYADYDMDHPEVVNELRNWGVWYTNTLGLDGFRIDAVKHIKYSFTRDWINHVRSATGKNMFAVAEFWKNDLGAIENYLQKTNWNHSVFDVPLHYNLYNASKSGGNYDMRNIFNGTVVQVHPSHAVTFVDNHDSQPEEALESFVEEWFKPLAYALTLTREQGYPSVFYGDYYGIPTHGVPAMRSKIDPILEARQKYAYGPQHDYLDHPDVIGWTREGDSSHPKSGLATLITDGPGGSKRMYAGLKNAGETWYDITGNRSDTVKIGSDGWGEFHVNYGSVSIYVQK

SEQ ID NO: 41516 - protein, 480 aa, Bacillus sp.
NGTMMQYFEWYLPNDGNHWNRLNSDASNLKSKGITAVWIPPAWKGASQNDVGYGAYDLYDLGEFNQKGTVRTKYGTRSQLQAAVTSLKNNGIQVYGDVVMNHKGGADATEMVRAVEVNPNNRNQEVTGEYTIEAWTRFDFPGRGNTHSSFKWRWYHFDGVDWDQSREFNNRIYKFRGHGKAWDWEVDTEFGNYDYLMYADYDMDHPEVVNELRNWGVWYTNTLGLDGFRIDAVKHIKYSFTRDWINHVRSATGKNMFAVAEFWKNDLGAIENYLQKTNWNHSVFDVPLHYNLYNASQSGGNYDMRNIFNGTVVQRHPSHAVTFVDNHDSQPEEALESFVEPWFKPLAYALTLTREQGYPSVFYGDYYGIPTHGVPAMRSKIDPILEARQKYAYGPQHDYLDHPDVIGWTREGDSSHPKSGLATLITDGPGGSKRMYAGLKNAGETWYDITGNRSDTVKIGSDGWGEFHVNKSSVSIYVQK

SEQ ID NO: 41517 - protein, 480 aa, Bacillus sp.
NGTMMQYFEWYLPNDGNHWNRLNSDASNLKSKGITAVWIPPAWKATSQNDVGYGAYDLYDLGEFNQKGTVRTKYGTRSQLQAAVTSLKNNGIQVYGDVVMNHKGGADATEMVRAVEVNPNNRNQEVTGEYTIEAWTRFDFPGRGNTHSSFKWRWYHFDGVDFDQSRNVNNRIYKFRGHGKAWDWEVDTEFGNYDYLMYADYDMDHPEVVNELRNWGVWYTNTLGLDGFRIDAVKHIKYSFTRDWINHVRSATGKNMFAVAEFWKNDLGAIENYLQKTNWNHSVFDVPLHYNLYNASKSGGNYDMRNIFNGTVVQRHPSHAVTFVDNHDSQPEEALESFVEEWFKPLAYALTLTREQGYPSVFYGDYYGIPTHGVPAMRSKIDPILEARQKYAYGPQHDYLDHPDVIGWTREGDSSHPKSGLATLITDGPGGSKRMYAGLKNAGETWYDITGNRSDTVKIGSDGWGEFHVNDGSVSIYVQK

SEQ ID NO: 41518 - protein, 480 aa, Bacillus sp.
NGTMMQYFEWYLPNDGNHWNRLNSDASNLKSKGITAVWIPPAWKATSQNDVGYGAYDLYDLGEFNQKGTVRTKYGTRSQLQAAVTSLKNNGIQVYGDVVMNHKGGADATEMVRAVEVNPNNRNQEVTGEYTIEAYTRFDFPGRGNTHSSFKWRWYHFDGVDWDQSRDLNNRIYKFRGHGKAWDWEVDTEFGNYDYLMYADYDMDHPEVVNELRNWGVWYTNTLGLDGFRIDAVKHIKYSFTRDWINHVRSATGKNMFAVAEFWKNDLGAIENYLQKTNWNHSVFDVPLHYNLYNASKSGGNYDMRNIFNGTVVQRHPSHAVTFVDNHDSQPEEALESFVEEWFKPLAYALTLTREQGYPSVFYGDYYGIPTHGVPAMRSKIDPILEARQKYAYGPQHDYLDHPDVIGWTREGDSSHPKSGLATLITDGPGGSKRMYAGLKNAGETWYDITGNRSDTVKIGSDGWGEFHVNDGSVSIYVQK

SEQ ID NO: 41519 - protein, 480 aa, Bacillus sp.
NGTMMQYFEWYLPNDGNHWNRLNSDASNLKSKGITAVWIPPAWKAVSQNDVGYGAYDLYDLGEFNQKGTVRTKYGTRSQLQAAVTSLKNNGIQVYGDVVMNHKGGADATEMVRAVEVNPNNRNQEVTGEYTIEAWTRFDFPGRGNTHSSFKWRWYHFDGVDWDQSRNLTNRIYKFRGHGKAWDWEVDTEFGNYDYLMYTDYDMDHPEVVNELRNWGVWYTNTLGLDGFRIDAVKHIKYSFTRDWINHVRSATGKNMFAVAEFWKNDLGAIENYLQKTNWNHSVFDVPLHYNLYNASKSGGNYDMRNIFNGTVVQRHPSHAVTFVDNHDSQPEEALESFVETWFKPLAYALTLTREQGYPSVFYGDYYGIPTHGVPAMRSKIDPILEARQKYAYGPQHDYLDHPDVIGWTREGDSSHPKSGLATLITDGPGGSKRMYAGLKNAGETWYDITGNRSDTVKIGSDGWGEFHVNDASVSIYVQK

SEQ ID NO: 41520 - protein, 480 aa, Bacillus sp.
NGTMMQYFEWYLPNDGNHWNRLNSDASNLKSKGITAVWIPPAWKAVSQNDVGYGAYDLYDLGEFNQKGTVRTKYGTRSQLQAAVTSLKNNGIQVYGDVVMNHKGGADATEMVRAVEVNPNNRNQEVTGEYTIEAWTRFDFPGRGNTHSSFKWRWYHFDGVDWDQSRNLTNRIYKFRGHGKAWDWEVDTEFGNYDYLMYTDYDMDHPEVVNELRNWGVWYTNTLGLDGFRIDAVKHIKYSFTRDWINHVRIATGKNMFAVAEFWKNDLGAIENYLQKTNWNHSVFDVPLHYNLYNASKSGGNYDMRNIFNGTVVQRHPSHAVTFVDNHDSQPEEALESFVDEWFKPLAYALTLTREQGYPSVFYGDYYGIPTHGVPAMRSKIDPILEARQKYAYGPQHDYLDHPDVIGWTREGDSSHPKSGLATLITDGPGGSKRMYAGLKNAGETWYDITGNRSDTVKIGSDGWGEFHVNDGSVSIYVQK

SEQ ID NO: 41521 - protein, 480 aa, Bacillus sp.
NGTMMQYFEWYLPNDGNHWNRLNSDASNLKSKGITAVWIPPAWKGASQNDVGYGAYDLYDLGEFNQKGTVRTKYGTRSQLQAAVTSLKNNGIQVYGDVVMNHKGGADATEMVRAVEVNPNNRNQEVTGEYTIEAWTRFDFPGRGNTHSSFKWRWYHFDGVDWDQSRRLNNRIYKFRGHGKAWDWEVDTEFGNYDYLMYADYDMDHPEVVNELRNWGVWYTNTLGLDGFRIDAVKHIKYSFTRDWINHVRSATGKNMFAVAEFWKNDLGAIENYLQKTNWNHSVFDVPLHYNLYNASKSAGNYDMRNIFNGTVVQRHPSHAVTFVDNHDSQPEEALESFVETWFKPLAYALTLTREQGYPSVFYGDYYGIPTHGVPAMRSKIDPILEARQKYAYGPQHDYLDHPDVIGWTREGDSSHPKSGLATLITDGPGGSKRMYAGLKNAGETWYDITGNRSDTVKIGSDGWGEFHVNKTSVSIYVQK

SEQ ID NO: 41522 - protein, 480 aa, Bacillus sp.
NGTMMQYFEWYLPNDGNHWNRLNSDASNLKSKGITAVWIPPAWKGASQNDVGYGAYDLYDLGEFNQKGTVRTKYGTRSQLQAAVTSLKNNGIQVYGDVVMNHKGGADATEMVRAVEVNPNNRNQEVTGEYTIEAWTRFDFPGRGNTHSSFKWRWYHFDGVDWDQSRRLNNRIYKFRGHGKAWDWEVDTEFGNYDYLMYADYDMDHPEVVNELRNWGVWYTNTLGLDGFRIDAVKHIKYSFTRDWINHVRSATGKNMFAVAEFWKNDLGAIENYLQKTNWNHSVFDVPLHYNLYNASQSGGNYDMRNIFNGTVVQRHPSHAVTFVDNHDSQPEEALESFVDPWFKPLAYALTLTREQGYPSVFYGDYYGIPTHGVPAMRSKIDPILEARQKYAYGPQHDYLDHPDVIGWTREGDSSHPKSGLATLITDGPGGSKRMYAGLKNAGETWYDITGNRSDTVKIGSDGWGEFHVNKQSVSIYVQK

SEQ ID NO: 41523 - protein, 480 aa, Bacillus sp.
NGTMMQYFEWYLPNDGNHWNRLNSDASNLKSKGITAVWIPPAWKAASQNDVGYGAYDLYDLGEFNQKGTVRTKYGTRSQLQAAVTSLKNNGIQVYGDVVMNHKGGADATEMVRAVEVNPNNRNQEVTGEYTIEAYTRFDFPGRGNTHSSFKWRWYHFDGVDWDQSRDLDNRIYKFRGHGKAWDWEVDTEFGNYDYLMYADYDMDHPEVVNELRNWGVWYTNTLGLDGFRIDAVKHIKYSFTRDWINHVRSATGKNMFAVAEFWKNDLGAIENYLQKTNWNHSVFDVPLHYNLYNASKSGGNYDMRNIFNGTVVQRHPSHAVTFVDNHDSQPEEALESFVEEWFKPLAYALTLTREQGYPSVFYGDYYGIPTHGVPAMRSKIDPILEARQKYAYGPQHDYLDHPDVIGWTREGDSSHPKSGLATLITDGPGGSKRMYAGLKNAGETWYDITGNRSDTVKIGSDGWGEFHVNDGSVSIYVQK

SEQ ID NO: 41524 - protein, 480 aa, Bacillus sp.
NGTMMQYFEWYLPNDGNHWNRLNSDASNLKSKGITAVWIPPAWKGASQNDVGYGAYDLYDLGEFNQKGTVRTKYGTRSQLQAAVTSLKNNGIQVYGDVVMNHKGGADATEMVRAVEVNPNNRQQEVTGEYTIEAWTRFDFPGRGNTHSSFKWRWYHFDGVDWDQSRRLNNRIYKFRGHGKAWDWEVDTEFGNYDYLMYADYDMDHPEVVNELRNWGVWYTNTLGLDGFRIDAVKHIKYSFTRDWINHVRSATGKNMFAVAEFWKNDLGAIENYLQKTNWNHSVFDVPLHYNLYNASKSGGNYDMRNIFNGTVVQRHPSHAVTFVDNHDSQPEEALESFVEEWFKPLAYALTLTREQGYPSVFYGDYYGIPTHGVPAMRSKIDPILEARQKYAYGPQHDYLDHPDVIGWTREGDSSHPKSGLATLITDGPGGSKRMYVGLKNAGETWYDITGNRSDTVKIGSDGWGEFHVNDGSVSIYVQK

SEQ ID NO: 41525 - protein, 480 aa, Bacillus sp.
NGTMMQYFEWYLPNDGNHWNRLNSDASNLKSKGITAVWIPPAWKGASQNDVGYGAYDLYDLGEFNQKGTVRTKYGTRSQLQAAVTSLKNNGIQVYGDVVMNHKGGADATEMVRAVEVNPNNRNQEVTGEYTIEAWTRFDFPGRGNTHSSFKWRWYHFDGVDWDQSRRLDNRIYKFRGHGKAWDWEVDTEFGNYDYLMYTDYDMDHPEVVNELRNWGVWYTNTLGLDGFRIDAVKHIKYSFTRDWINHVRSATGKNMFAVAEFWKNDLGAIENYLQKTNWNHSVFDVPLHYNLYNASKSGGNYDMRNIFNGTVVQRHPSHAVTFVDNHDSQPEEALESFVDPWFKPLAYALTLTREQGYPSVFYGDYYGIPTHGVPAMRSKIDPILEARQKYAYGPQHDYLDHPDVIGWTRKGDSSHPKSGLATLITDGPGGSKRMYAGLKNAGETWYDITGNRSDTVKIGSDGWGEFHVNDGSVSIYVQK

SEQ ID NO: 41526 - protein, 480 aa, Bacillus sp.
NGTMMQYFEWYLPNDGNHWNRLNSDASNLKSKGITAVWIPPAWKGASQNDVGYGAYDLYDLGEFNQKGTVRTKYGTRSQLQAAVTSLKNNGIQVYGDVVMNHKGGADATEMVRAVEVNPNNRNQEVTGEYTIEAWTRFDFPGRGNTHSSFKWRWYHFDGVDWDQSRKLNNRIYKFRGHGKAWDWEVDTEFGNYDYLMYVDYDYDHPETTNEMRNWGVWYTNTLGLDGFRIDAVKHIKYSFTRDWINHVRIATGKNMFAVAEFWKNDLGAIENYLQKTNWNHSVFDVPLHYNLYNASKSGGNYDMRNIFNGTVVQRHPSHAVTFVDNHDSQPEEALESFVDEWFKPLAYALTLTREQGYPSVFYGDYYGIPTHGVPAMRSKIDPILEARQKYAYGPQHDYLDHPDVIGWTREGDSSHPKSGLATLITDGPGGSKRMYAGLKNAGETWYDITGNRSDTVKIGSDGWGEFHVNDQSVSIYVQK

SEQ ID NO: 41527 - protein, 480 aa, Bacillus sp.
NLTMMQYFEWYLPNDGNHWNRLNSDASNLKSKGITAVWIPPAWKGASQNDVGYGAYDLYDLGEFNQKGTVRTKYGTRSQLQAAVTSLKNNGIQVYGDVVMNHKGGADATEMVRAVEVNPNNRNQEVTGEYTIEAWTRFDFPGRGNTHSSFKWRWYHFDGVDWDQSRRLNNRIYKFRGHGKAWDWEVDTEFGNYDYLMYADYDMDHPEVVNELRNWGVWYTNTLGLDGFRIDAVKHIKYSFTRDWINHVRSATGKNMFAVAEFWKNDLGAIENYLQKTNWNHSVFDVPLHYNLYNASKSGGNYDMRNIFNGTVVQMHPNHAVTFVDNHDSQPEEALESFVEEWFKPLAYALTLTREQGYPSVFYGDYYGIPTHGVPAMRSKIDPILEARQKYAYGPQHDYLDHPDVIGWTREGDSSHPKSGLATLITDGPGGSKRMYAGLKNAGETWYDITGNRSDTVKIGSDGWGEFHVNDGSVSIYVQK

SEQ ID NO: 41528 - protein, 480 aa, Bacillus sp.
NQTMMQYFEWYLPNDGNHWNRLNSDASNLKSKGITAVWIPPAWKGASQNDVGYGAYDLYDLGEFNQKGTVRTKYGTRSQLQAAVTSLKNNGIQVYGDVVMNHKGGADATEMVRAVEVNPNNRNQEVTGEYTIEAWTRFDFPGRGNTHSSFKWRWYHFDGVDWDQSRRLNNRIYKFRGHGKAWDWEVDTEFGNYDYLMYADYDMDHPEVVNELRNWGVWYTNTLGLDGFRIDAVKHIKYSFTRDWINHVRSATGKNMFAVAEFWKNDLGAIENYLQKTNWNHSVFDVPLHYNLYNASKSGGNYDMRNIFNGTVVQSHPMHAVTFVDNHDSQPEEALESFVEEWFKPLAYALTLTREQGYPSVFYGDYYGIPTHGVPAMRSKIDPILEARQKYAYGPQHDYLDHPDVIGWTREGDSSHPKSGLATLITDGPGGSKRMYAGLKNAGETWYDITGNRSDTVKIGSDGWGEFHVNDGSVSIYVQK

SEQ ID NO: 41529 - protein, 480 aa, Bacillus sp.
NGTMMQYFEWYLPNDGNHWNRLNSDASNLKSKGITAVWIPPAWKGASQNDVGYGAYDLYDLGEFNQKGTVRTKYGTRSQLQAAVTSLKNNGIQVYGDVVMNHKGGADATEMVRAVEVNPNNRNQEVTGEYTIEAWTRFDFPGRGNTHSSFKWRWYHFDGVDWDQSRRLNNRIYKFRGHGKAWDWEVDTEFGNYDYLMYADYDMDHPEVVNELRNWGVWYTNTLGLDGFRIDAVKHIKYSFTRDWINHVRSATGKNMFAVAEFWKNDLGAIENYLQKTNWNHSVFDVPLHYNLYNASKSGGNYDMRNIFNGTVVQRHPSHAVTFVDNHDSQPEEALESFVEPWFKPLAYALTLTREQGYPSVFYGDYYGIPTHGVPAMRSKIDPILEARQKYAYGPQHDYLDHPDVIGWTREGDSSHPKSGLATLITDGPGGSKRMYAGLKNAGETWYDITGNRSDTVKIGSDGWGEFHVNQSSVSIYVQK

SEQ ID NO: 41530 - protein, 480 aa, Bacillus sp.
NGTMMQYFEWYLPNDGNHWNRLNSDASNLKSKGITAVWIPPAWKAASQNDVGYGAYDLYDLGEFNQKGTVRTKYGTRSQLQAAVTSLKNNGIQVYGDVVMNHKGGADATEMVRAVEVNPNNRNQEVTGEYTIEAWTRFDFPGRGNTHSSFKWRWYHFDGVDWDQSRDLDNRIYKFRGHGKAWDWEVDTEFGNYDYLMYADYDMDHPEVVNELRNWGVWYTNTLGLDGFRIDAVKHIKYSFTRDWINHVRSATGKNMFAVAEFWKNDLGAIENYLQKTNWNHSVFDVPLHYNLYNASKSGGNYDMRNIFNGTVVQVHPSHAVTFVDNHDSQPEEALESFVEEWFKPLAYALTLTREQGYPSVFYGDYYGIPTHGVPAMRSKIDPILEARQKYAYGPQHDYLDHPDVIGWTREGDSSHPKSGLATLITDGPGGSKRMYAGLKNAGETWYDITGNRSDTVKIGSDGWGEFHVNDGSVSIYVQK

SEQ ID NO: 41531 - protein, 480 aa, Bacillus sp.
NGTMMQYFEWYLPNDGNHWNRLNSDASNLKSKGITAVWIPPAWKGASQNDVGYGAYDLYDLGEFNQKGTVRTKYGTRSQLQAAVTSLKNNGIQVYGDVVMNHKGGADATEMVRAVEVNPNNRNQEVTGEYTIEAWTRFDFPGRGNTHSSFKWRWYHFDGVDWDQSRNFQNRIYKFRGHGKAWDWEVDTEFGNYDYLMYADYDMDHPESTNEMRNWGVWYTNTLGLDGFRIDAVKHIKYSFTRDWINHVRSATGKNMFAVAEFWKNDLGAIENYLQKTNWNHSVFDVPLHYNLYNASKSQGNYDMRNIFNGTVVQRHPSHAVTFVDNHDSQPEEALESFVDTWFKPLAYALTLTREQGYPSVFYGDYYGIPTHGVPAMRSKIDPILEARQKYAYGPQHDYLDHPDVIGWTREGDSSHPKSGLATLITDGPGGSKRMYAGLKNAGETWYDITGNRSDTVKIGSDGWGEFHVNDGSVSIYVQK

SEQ ID NO: 41532 - protein, 480 aa, Bacillus sp.
NGTMMQYFEWYLPNDGNHWNRLNSDASNLKSKGITAVWIPPAWKGASQNDVGYGAYDLYDLGEFNQKGTVRTKYGTRSQLQAAVTSLKNNGIQVYGDVVMNHKGGADATEMVRAVEVNPNNRNQEVTGEYTIEAWTRFDFPGRGNTHSSFKWRWYHFDGVDWDQSERLNNRIYKFRGHGKAWDWEVDTEFGNYDYLMYADYDMDHPEVVNELRNWGVWYTNTLGLDGFRIDAVKHIKYSFTRDWINHVRSATGKNMFAVAEFWKNDLGAIENYLQKTNWNHSVFDVPLHYNLYNASKSGGNYDMRNIFNGTVVQRHPSLAVTFVDNHDSQPEEALESFVEEWFKPLAYALTLTREAGLPSVFYGDYYGIPTHGVPAMRSKIDPILEARQKYAYGPQHDYLDHPDVIGWTREGDSSHPKSGLATLITDGPGGSKRMYAGLKNAGETWYDITGNRSDTVKIGSDGWGEFHVNDGSVSIYVQK

SEQ ID NO: 41533 - protein, 480 aa, Bacillus sp.
NGTMMQYFEWYLPNDGNHWNRLNSDASNLKSKGITAVWIPPAWKGASQNDVGYGAYDLYDLGEFNQKGTVRTKYGTRSQLQAAVTSLKNNGIQVYGDVVMNHKGGADATEMVRAVEVNPNNRNQEVTGEYTIEAWTRFDFPGRGNTHSSFKWRWYHFDGVDWDQSRRLNNRIYKFRGHGKAWDWEVDTEFGNYDYLMYADYDMDHPEVVNELRNWGVWYTNTLGLDGFRIDAVKHIKYSFTRDWINHVRSATGKNMFAVAEFWKNDLGAIENYLQKTNWNHSVFDVPLHYNLYNASKSGGNYDMRNIFNGTVVQRHPSHAVTFVDNHDSQPEEALESFVDEWFKPLAYALTLTREQGYPSVFYGDYYGIPTHGVPAMRSKIDPILEARQKYAYGPQHDYLDHPDVIGWTREGDSSHPKSGLATLITDGPGGSKRMYAGLKNAGETWYDITGNRSDTVKIGSDGWGEFHVNQQSVSIYVQK

SEQ ID NO: 41534 - protein, 480 aa, Bacillus sp.
NGTMMQYFEWYLPNDGNHWNRLNSDASNLKSKGIKAVWIPPAWKGASQNDVGYGAYDLYDLGEFNQKGTVRTKYGTRSQLQAAVTSLKNNGIQVYGDVVMNHKGGADATEMVRAVEVNPNNRNQEVTGEYTIEAWTRFDFPGRGNTHSSFKWRWYHFDGVDWDQSRRLNNRIYSFRGHGKAWDWEVDTEFGNYDYLMYADYDMDHPEVVNELRNWGVWYTNTLGLDGFRIDAVKHIKYSFTRDWINHVRSATGKNMFAVAEFWKNDLGAIENYLQKTNWNHSVFDVPLHYNLYNASKSGGNYDMRNIFNGTVVQRHPSHAVTFVDNHDSQPEEALESFVEEWFKPLAYALTLTREQGYPSVFYGDYYGIPTHGVPAMRSKIDPILEARQKYAYGPQHDYLDHPDVIGWTREGDSSHPKSGLATLITDGPGGSKRMYAGLKNAGETWYDITGNRSDTVKIGSDGWGEFHVNDGSVSIYVQK

SEQ ID NO: 41535 - protein, 480 aa, Bacillus sp.
NGTMMQYFEWYLPNDGNHWNRLNSDASNLKSKGITAVWIPPAWKGASQNDVGYGAYDLYDLGEFNQKGTVRTKYGTRSQLQAAVTSLKNNGIKVYGDVVMNHKGGADATEMVRAVEVNPNNRNQEVTGEYTIEAWTRFDFPGRGNTHSSFKWRWYHFDGVDWDQSRRLNNRIYKFRGHGKAWDWEVDTEFGNYDYLMYADYDMDHPEVVNELRNWGVWYTNTLGLDGFRIDAVKHIKYSFTRDWINHVRSATGKNMFAVAEFWNNDLGAIENYLQKTNWNHSVFDVPLHYNLYNASKSGGNYDMRNIFNGTVVQAHPMQAVTFVDNHDSQPEEALESFVEEWFKPLAYALTLTREQGYPSVFYGDYYGIPTHGVPAMRSKIDPILEARQKYAYGPQHDYLDHPDVIGWTREGDSSHPKSGLATLITDGPGGSKRMYAGLKNAGETWYDITGNRSDTVKIGSDGWGEFHVNDGSVSIYVQK

SEQ ID NO: 41536 - protein, 480 aa, Bacillus sp.
NGTMMQYFEWYLPNDGNHWNRLNSDASNLKSKGITAVWIPPAWKAASQNDVGYGAYDLYDLGEFNQKGTVRTKYGTRSQLQAAVTSLKNNGIQVYGDVVMNHKGGADATEMVRAVEVNPNNRNQEVTGEYTIEAWTRFDFPGRGNTHSSFKWRWYHFDGVDWDQSRQLNNRIYKFRGHGKAWDWEVDTEFGNYDYLMYADYDMDHPEVVNELRNWGVWYTNTLGLDGFRIDAVKHIKYSFTRDWINHVRSATGKNMFAVAEFWKNDLGAIENYLQKTNWNHSVFDVPLHYNLYNASKSGGNYDMRNIFNGTVVQRHPSHAVTFVDNHDSQPEEALESFVEEWFKPLAYALTLTREQGYPSVFYGDYYGIPTHGVPAMRSKIDPILEARQKYAYGPQHDYLDHPDVIGWTREGDSSHPKSGLATLITDGPGGSKRMYAGPKNAGETWYDITGNRSDTVKIGSDGWGEFHVNDGSVSIYVQK

SEQ ID NO: 41537 - protein, 480 aa, Bacillus sp.
NGTMMQYFEWYLPNDGNHWNRLNSDASNLKSKGITAVWIPPAWKGASQNDVGYGAYDLYDLGEFNQKGTVRTKYGTRSQLQAAVTSLKNNGIQVYGDVVMNHKGGADATEMVRAVEVNPNNRNQEVTGEYTIEAWTRFDFPGRQNTHSSFKWRWYHFDGVDWDQSERLNNRIYKFRGHGKAWDWEVDTEFGNYDYLMYADYDMDHPEVVNELRNWGVWYTNTLGLDGFRIDAVKHIKYSFTRDWINHVRSATGKNMFAVAEFWKNDLGAIENYLQKTNWNHSVFDVPLHYNLYNASKSGGNYDMRNIFNGTVVQRHPSHAVTFVDNHDSQPEEALESFVEEWFKPLAYALTLTREQGYPSVFYGDYYGIPTHGVPAMRSKIDPILEARQKYAYGPQHDYLDHPDVIGWTREGDSSHPKSGLATLITDGPGGSKRMYAGLKNAGETWYDITGNRSDTVKIGSDGWGEFHVNDGSVSIYVQK

SEQ ID NO: 41538 - protein, 480 aa, Bacillus sp.
NGTMMQYFEWYLPNDGNHWNRLNSDASNLKSKGITAVWIPPAWKGASQNDVGYGAYDLYDLGEFNQKGTVRTKYGTRSQLQAAVTSLKNNGIQVYGDVVMNHKGGADATEMVRAVEVNPNNRNQEVTGEYTIEAWTRFDFPGRGNTHSSFKWRWYHFDGVDWDQSRRLNNRIYKFRGHGKAWDWEVDTEFGNYDYLMYADYDMDHPEVVNELRNWGVWYTNTLGLDGFRIDAVKHIKYSFTRDWINHVRSATGKNMFAVAEFWKNDLGAIENYLQKTNWNHSVFDVPLHYNLYNASKSGGNYDMRNIFNGTVVQRHPSHAVTFVDNHDSQPEEALESFVDPWFKPLAYALTLTREQGYPSVFYGDYYGIPTHGVPAMRSKIDPILEARQKYAYGPQHDYLDHPDVIGWTREGDSSHPKSGLATLITDGPGGSKRMYAGLKNAGETWYDITGNRSDTVKIGSDGWGEFHVNQSSVSIYVQK

SEQ ID NO: 41539 - protein, 480 aa, Bacillus sp.
NGTMMQYFEWYLPNDGNHWNRLNSDASNLKSKGITAVWIPPAWKGASQNDVGYGAYDLYDLGEFNQKGTVRTKYGTRSQLQAAVTSLKNNGITVYGDVVMNHKGGADATEMVRAVEVNPNNRNQEVTGEYTIEAWTRFDFPGRGNTHSSFKWRWYHFDGVDWDQSRRLNNRIYKFRGHGKAWDWEVDTEFGNYDYLMYADYDMDHPEVVNELRNWGVWYTNTLGLDGFRIDAVKHIKYSFTRDWINHVRSATGKNMFAVAEFWKNDLGAIENYLQKTNWNHSVFDVPLHYNLYNASKSGGNYDMRNIFNGTVVQSHPMHAVTFVDNHDSQPEEALESFVEEWFKPLAYALTLTREQGYPSVFYGDYYGIPTHGVPAMRSKIDPILEARQKYAYGPQHDYLDHPDVIGWTREGDSSHPKSGLATLITDGPGGSKRMYAGLKNAGETWYDITGNRSDTVKIGSDGWGEFHVNDGSVSIYVQK

SEQ ID NO: 41540 - protein, 480 aa, Bacillus sp.
NGTMMQYFEWYLPNDGNHWNRLNSDASNLKSKGITAVWIPPAWKGASQNDVGYGAYDLYDLGEFNQKGTVRTKYGTRSQLQAAVTSLKNNGIQVYGDVVMNHKGGADATEMVRAVEVNPNNRNQEVTGEYTIEAWTRFDFPGRGNTHSSFKWRWYHFDGVDWDQSRRLNNRIYKFRGHGKAWDWEVDTEFGNYDYLMYADYDMDHPEVVNELRNWGVWYTNTLGLDGFRIDAVKHIKYSFTRDWINHVRSATGKNMFAVAEFWKNDLGAIENYLQKTNWNHSVFDVPLHYNLYNASQSAGNYDMRNIFNGTVVQRHPSHAVTFVDNHDSQPEEALESFVDTWFKPLAYALTLTREQGYPSVFYGDYYGIPTHGVPAMRSKIDPILEARQKYAYGPQHDYLDHPDVIGWTREGDSSHPKSGLATLITDGPGGSKRMYAGLKNAGETWYDITGNRSDTVKIGSDGWGEFHVNQQSVSIYVQK

SEQ ID NO: 41541 - protein, 480 aa, Bacillus sp.
NGTMMQYFEWYLPNDGNHWNRLNSDASNLKSKGITAVWIPPAWKAVSQNDVGYGAYDLYDLGEFNQKGTVRTKYGTRSQLQAAVTSLKNNGIQVYGDVVMNHKGGADATEMVRAVEVNPNNRNQEVTGEYTIEAWTRFDFPGRGNTHSSFKWRWYHFDGVDWDQSRDLENRIYKFRGHGKAWDWEVDTEFGNYDYLMYADYDMDHPEVVNELRNWGVWYTNTLGLDGFRIDAVKHIKYSFTRDWINHVRIATGKNMFAVAEFWKNDLGAIENYLQKTNWNHSVFDVPLHYNLYNASKSGGNYDMRNIFNGTVVQRHPSHAVTFVDNHDSQPEEALESFVDEWFKPLAYALTLTREQGYPSVFYGDYYGIPTHGVPAMRSKIDPILEARQKYAYGPQHDYLDHPDVIGWTREGDSSHPKSGLATLITDGPGGSKRMYAGLKNAGETWYDITGNRSDTVKIGSDGWGEFHVNDQSVSIYVQK

SEQ ID NO: 41542 - protein, 480 aa, Bacillus sp.
NGTMMQYFEWYLPNDGNHWNRLNSDASNLKSKGITAVWIPPAWKGASQNDVGYGAYDLYDLGEFNQKGTVRTKYGTRSQLQAAVTSLKNNGIQVYGDVVMNHKGGADATEMVRAVEVNPNNRNQEVTGEYTIEAWTRFDFPGRGNTHSSFKWRWYHFDGVDWDQSRRLNNRIYKFRGHGKAWDWEVDTEFGNYDYLMYADYDMDHPEVVNELRNWGVWYTNTLGLDGFRIDAVKHIKYSFTRDWINHVRSATGKNMFAVAEFWKNDLGAIENYLQKTNWNHSVFDVPLHYNLYNASKSGGNYDMRNIFNGTVVQRHPSHAVTFVDNHDSQPEEALESFVDEWFKPLAYALTLTREQGYPSVFYGDYYGIPTHGVPAMRSKIDPILEARQKYAYGPQHDYLDHPDVIGWTREGDSSHPKSGLATLITDGPGGSKRMYAGLKNAGETWYDITGNRSDTVKIGSDGWGEFHVNQKSVSIYVQK

SEQ ID NO: 41543 - protein, 480 aa, Bacillus sp.
NGTMMQYFEWYLPNDGNHWNRLNSDASNLKSKGITAVWIPPAWKGASQNDVGYGAYDLYDLGEFNQKGTVRTKYGTRSQLQAAVTSLKNNGIQVYGDVVMNHKGGADATEMVRAVEVNPNNRNQEVTGEYTIEAWTRFDFPGRGNTHSSFKWRWYHFDGVDWDQSRRLNNRIYKFRGHGKAWDWEVDTEFGNYDYLMYADYDMDHPEVVNELRNWGVWYTNTLGLDGFRIDAVKHIKYSFTRDWINHVRSATGKNMFAVAEFWKNDLGAIENYLQKTNWNHSVFDVPLHYNLYNASKSGSNYDMRNIFNGTVVQRHPSHAVTFVDNHDSQPEEALESFVDPWFKPLAYALTLTREQGYPSVFYGDYYGIPTHGVPAMRSKIDPILEARQKYAYGPQHDYLDHPDVIGWTREGDSSHPKSGLATLITDGPGGSKRMYAGLKNAGETWYDITGNRSDTVKIGSDGWGEFHVNDQSVSIYVQK

SEQ ID NO: 41544 - protein, 480 aa, Bacillus sp.
NGTMMQYFEWYLPNDGNHWNRLNSDASNLKSKGITAVWIPPAWKAASQNDVGYGAYDLYDLGEFNQKGTVRTKYGTRSQLQAAVTSLKNNGIQVYGDVVMNHKGGADLTEMVDAVEVNPNNRNQEVTGEYTIEAWTRFDFPGRGNTHSSFKWRWYHFDGVDWDQSRQLNNRIYKFRGHGKAWDWEVDTEFGNYDYLMYADYDMDHPEVVNELRNWGVWYTNTLGLDGFRIDAVKHIKYSFTRDWINHVRSATGKNMFAVAEFWKNDLGAIENYLQKTNWNHSVFDVPLHYNLYNASKSGGNYDMRNIFNGTVVQRHPSHAVTFVDNHDSQPEEALESFVEEWFKPLAYALTLTREQGYPSVFYGDYYGIPTHGVPAMRSKIDPILEARQKYAYGPQHDYLDHPDVIGWTREGDSSHPKSGLATLITDGPGGSKRMYAGLKNAGETWYDITGNRSDTVKIGSDGWGEFHVNDGSVSIYVQK

SEQ ID NO: 41545 - protein, 480 aa, Bacillus sp.
NGTMMQYFEWYLPNDGNHWNRLNSDASNLKSKGITAVWIPPAWKGASQNDVGYGAYDLYDLGEFNQKGTVRTKYGTRSQLQAAVTSLKNNGIQVYGDVVMNHKGGADATEMVDAVEVNPNNRNQEVTGEYTIEAWTRFDFPGRGNTHSSFKWRWYHFDGVDFDQSRRLNNRIYKFRGHGKAWDWEVDTEFGNYDYLMYADYDMDHPEVVNELRNWGVWYTNTLGLDGFRIDAVKHIKYSFTRDWINHVRIATGKNMFAVAEFWKNDLGAIENYLQKTNWNHSVFDVPLHYNLYNASKSGGNYDMRNIFNGTVVQRHPSHAVTFVDNHDSQPEEALESFVDEWFKPLAYALTLTREQGYPSVFYGDYYGIPTHGVPAMRSKIDPILEARQKYAYGPQHDYLDHPDVIGWTREGDSSHPKSGLATLITDGPGGSKRMYAGLKNAGETWYDITGNRSDTVKIGSDGWGEFHVNDQSVSIYVQK

SEQ ID NO: 41546 - protein, 480 aa, Bacillus sp.
NGTMMQYFEWYLPNDGNHWNRLNSDASNLKSKGITAVWIPPAWKATSQNDVGYGAYDLYDLGEFNQKGTVRTKYGTRSQLQAAVTSLKNNGIQVYGDVVMNHKGGADATEMVRAVEVNPNNRNQEVTGEYTIEAWTRFDFPGRGNTHSSFKWRWYHFDGVDWDQSRRVNNRIYKFRGHGKAWDWEVDTEFGNYDYLMYVDYDMDHPEVVNELRNWGVWYTNTLGLDGFRIDAVKHIKYSFTRDWINHVRSATGKNMFAVAEFWKNDLGAIENYLQKTNWNHSVFDVPLHYNLYNASKSGGNYDMRNIFNGTVVQRHPSHAVTFVDNHDSQPEEALESFVEEWFKPLAYALTLTREQGYPSVFYGDYYGIPTHGVPAMRSKIDPILEARQKYAYGPQHDYLDHPDVIGWTREGDSSHPKSGLATLITDGPGGSKRMYAGLKNAGETWYDITGNRSDTVKIGSDGWGEFHVNDGSVSIYVQK

SEQ ID NO: 41547 - protein, 480 aa, Bacillus sp.
NGTMMQYFEWYLPNDGNHWNRLNSDASNLKSKGITAVWIPPAWKGASQNDVGYGAYDLYDLGEFNQKGTVRTKYGTRSQLQAAVTSLKNNGIQVYGDVVMNHKGGADATEMVSAVEVNPNNRLQEVTGEYTIEAWTRFDFPGRGNTHSSFKWRWYHFDGVDWDQSRRLNNRIYKFRSHGKAWDWEVDTEFGNYDYLMYADYDMDHPEVVNELRNWGVWYTNTLGLDGFRIDAVKHIKYSFTRDWINHVRSATGKNMFAVAEFWKNDLGAIENYLQKTNWNHSVFDVPLHYNLYNASKSGGNYDMRNIFNGTVVQRHPSHAVTFVDNHDSQPEEALESFVEEWFKPLAYALTLTREQGYPSVFYGDYYGIPTHGVPAMRSKIDPILEARQKYAYGPQHDYLDHPDVIGWTREGDSSHPKSGLATLITDGPGGSKRMYAGLKNAGETWYDITGNRSDTVKIGSDGWGEFHVNDGSVSIYVQK

SEQ ID NO: 41548 - protein, 480 aa, Bacillus sp.
NGTMMQYFEWYLPNDGNHWNRLNSDASNLKSKGITAVWIPPAWKGASQNDVGYGAYDLYDLGEFNQKGTVRTKYGTRSQLQAAVTSLKNNGINVYGDVVMNHKGGADATEMVRAVEVNPNNRNQEVTGEYTIEAWTRFDFPGRGNTHSSFKWRWYHFDGVDWDQSRRLNNRIYKFRGHGKAWDWEVDTEFGNYDYLMYADYDMDHPEVVNELRNWGVWYTNTLGLDGFRIDAVKHIKYSFTRDWINHVRSATGKNMFAVAEFWKNDLGAIENYLQKTNWNHSVFDVPLHYNLYNASKSGGNYDMRNIFNGTVVQSHPMLAVTFVDNHDSQPEEALESFVEEWFKPLAYALTLTREQGYPSVFYGDYYGIPTHGVPAMRSKIDPILEARQKYAYGPQHDYLDHPDVIGWTREGDSSHPKSGLATLITDGPGGSKRMYAGLKNAGETWYDITGNRSDTVKIGSDGWGEFHVNDGSVSIYVQK

SEQ ID NO: 41549 - protein, 480 aa, Bacillus sp.
NGTMMQYFEWYLPNDGNHWNRLNSDASNLKSKGITAVWIPPAWKAASQNDVGYGAYDLYDLGEFNQKGTVRTKYGTRSQLQAAVTSLKNNGIQVYGDVVMNHKGGADATEMVRAVEVNPNNRNQEVTGEYTIEAWTRFDFPGRGNTHSSFKWRWYHFDGVDWDQSRRFQNRIYKFRGHGKAWDWEVDTEFGNYDYLMYVDYDMDHPEVVNELRNWGVWYTNTLGLDGFRIDAVKHIKYSFTRDWINHVRSATGKNMFAVAEFWKNDLGAIENYLQKTNWNHSVFDVPLHYNLYNASKSGGNYDMRNIFNGTVVQRHPSHAVTFVDNHDSQPEEALESFVEEWFKPLAYALTLTREQGYPSVFYGDYYGIPTHGVPAMRSKIDPILEARQKYAYGPQHDYLDHPDVIGWTREGDSSHPKSGLATLITDGPGGSKRMYAGLKNAGETWYDITGNRSDTVKIGSDGWGEFHVNDGSVSIYVQK

SEQ ID NO: 41550 - protein, 480 aa, Bacillus sp.
NGTMMQYFEWYLPNDGNHWNRLNSDASNLKSKGITAVWIPPAWKGASQNDVGYGAYDLYDLGEFNQKGTVRTKYGTRSQLQAAVTSLKNNGIQVYGDVVMNHKGGADATEMVRAVEVNPNNRNQEVTGEYTIEAWTRFDFPGRGNTHSSFKWRWYHFDGVDWDQSRRLNNRIYKFRGHGKAWDWEVDTEFGNYDYLMYADYDMDSPEVTNELRNWGVWYTNTLGLDGFRIDAVKHIKYSFTRDWINHVRSATGKNMFAVAEFWKNDLGAIENYLQKTNWNHSVFDVPLHYNLYNASKSGGNYDMRNIFNGTVVQRHPSHAVTFVDNHDSQPEEALESFVEEWFKPLAYALTLTREQGYPSVFYGDYYGIPTHGVPAMRSKIDPILEARQKYAYGPQHDYLDHPDVIGWTREGDSSHPKSGLATLITDGPGGSKRMYAGLKNAGETWYDITGNRSDTVKIGSDGWGEFHVNDGSVSIYVQK

SEQ ID NO: 41551 - protein, 480 aa, Bacillus sp.
NGTMMQYFEWYLPNDGNHWNRLNSDASNLKSKGITAVWIPPAWKAASQNDVGYGAYDLYDLGEFNQKGTVRTKYGTRSQLQAAVTSLKNNGIQVYGDVVMNHKGGADATEMVRAVEVNPNNRNQEVTGEYTIEAWTRFDFPGRGNTHSSFKWRWYHFDGVDWDQSREFQNRIYKFRGHGKAWDWEVDTEFGNYDYLMYTDYDMDHPEVVNELRNWGVWYTNTLGLDGFRIDAVKHIKYSFTRDWINHVRSATGKNMFAVAEFWKNDLGAIENYLQKTNWNHSVFDVPLHYNLYNASKSGGNYDMRNIFNGTVVQRHPSHAVTFVDNHDSQPEEALESFVEEWFKPLAYALTLTREQGYPSVFYGDYYGIPTHGVPAMRSKIDPILEARQKYAYGPQHDYLDHPDVIGWTREGDSSHPKSGLATLITDGPGGSKRMYAGLKNAGETWYDITGNRSDTVKIGSDGWGEFHVNDGSVSIYVQK

SEQ ID NO: 41552 - protein, 480 aa, Synthetic construct
NGTMMQYFEWYLPNDGNHWNRLNSDASNLKSKGITAVWIPPAWKGASQNDVGYGAYDLYDLGEFNQKGTVRTKYGTRSQLQAAVTSLKNNGIQVYGDVVMNHKGGADATEMVRAVEVNPNNRNQEVTGEYTIEAWTRFDFPGRGNTHSSFKWRWYHFDGVDWDQSRRLNNRIYKFRGHGKEWDWEVDTEFGNYDYLMYADYDMDSPEVVNELRNWGVWYTNTLGLDGFRIDAVKHIKYSFTRDWINHVRSATGKNMFAVAEFWKNDLGAIENYLQKTNWNHSVFDVPLHYNLYNASKSGGNYDMRNIFNGTVVQRHPSHAVTFVDNHDSQPEEALESFVEEWFKPLAYALTLTREQGYPSVFYGDYYGIPTHGVPAMRSKIDPILEARQKYAYGPQHDYLDHPDVIGWTREGDSSHPKSGLATLITDGPGGSKRMYAGLKNAGETWYDITGNRSDTVKIGSDGWGEFHVNDGSVSIYVQK

SEQ ID NO: 41553 - protein, 480 aa, Bacillus sp.
NGTMMQYFEWYLPNDGNHWNRLNSDASNLKSKGITAVWIPPAWKGASQNDVGYGAYDLYDLGEFNQKGTVRTKYGTRSQLQAAVTSLKNNGIQVYGDVVMNHKGGADATEMVPAVEVNPNNRNQEVTGEYTIEAWTRFDFPGRGNTHSSFKWRWYHFDGVDWDQSRRTNNRIYKFRGHSKAWDWEVDTEFGNYDYLMYTDYDMDHPEVVNELRNWGVWYTNTLGLDGFRIDAVKHIKYSFTRDWINHVRSATGKNMFAVAEFWKNDLGAIENYLQKTNWNHSVFDVPLHYNLYNASKSGGNYDMRNIFNGTVVQRHPSHAVTFVDNHDSQPEEALESFVEEWFKPLAYALTLTREQGYPSVFYGDYYGIPTHGVPAMRSKIDPILEARQKYAYGPQHDYLDHPDVIGWTREGDSSHPKSGLATLITDGPGGSKRMYAGLKNAGETWYDITGNRSDTVKIGSDGWGEFHVNDGSVSIYVQK

SEQ ID NO: 41554 - protein, 480 aa, Bacillus sp.
NGTMMQYFEWYLPNDGNHWNRLNSDASNLKSKGITAVWIPPAWKGASQNDVGYGAYDLYDLGEFNQKGTVRTKYGTRSQLQAAVTSLKNNGIQVYGDVVMNHKGGADATEMVRAVEVNPNNRNQEVTGEYTIEAWTRFDFPGRGNTHSSFKWRWYHFDGVDWDQSRRLNNRIYKFRGHGKAWDWEVDTEFGNYDYLMYADYDMDHPEVVNELRNWGVWYTNTLGLDGFRIDAVKHIKYSFTRDWINHVRSATGKNMFAVAEFWKNDLGAIENYLQKTNWNHSVFDVPLHYNLYNASNSGGNYDMRNIFNGTVVQRHPSHAVTFVDNHDSQPEEALESFVDPWFKPLAYALTLTREQGYPSVFYGDYYGIPTHGVPAMRSKIDPILEARQKYAYGPQHDYLDHPDVIGWTREGDSSHPKSGLATLITDGPGGSKRMYAGLKNAGETWYDITGNRSDTVKIGSDGWGEFHVNQSSVSIYVQK

SEQ ID NO: 41555 - protein, 480 aa, Bacillus sp.
NGTMMQYFEWYLPNDGNHWNRLNSDASNLKSKGITAVWIPPAWKATSQNDVGYGAYDLYDLGEFNQKGTVRTKYGTRSQLQAAVTSLKNNGIQVYGDVVMNHKGGADATEMVRAVEVNPNNRNQEVTGEYTIEAWTRFDFPGRGNTHSSFKWRWYHFDGVDWDQSRNVNNRIYKFRGHGKAWDWEVDTEFGNYDYLMYADYDMDHPEVVNELRNWGVWYTNTLGLDGFRIDAVKHIKYSFTRDWINHVRSATGKNMFAVAEFWKNDLGAIENYLQKTNWNHSVFDVPLHYNLYNASKSGGNYDMRNIFNGTVVQRHPSHAVTFVDNHDSQPEEALESFVDPWFKPLAYALTLTREQGYPSVFYGDYYGIPTHGVPAMRSKIDPILEARQKYAYGPQHDYLDHPDVIGWTREGDSSHPKSGLATLITDGPGGSKRMYAGLKNAGETWYDITGNRSDTVKIGSDGWGEFHVNGGSVSIYVQK

SEQ ID NO: 41556 - protein, 480 aa, Bacillus sp.
NETMMQYFEWYLPNDGNHWNRLNSDASNLKSKGITAVWIPPAWKGASQNDVGYGAYDLYDLGEFNQKGTVRTKYGTRSQLQAAVTSLKNNGIQVYGDVVMNHKGGADATEMVRAVEVNPNNRNQEVTGEYTIEAWTRFDFPGRGNTHSSFKWRWYHFDGVDWDQSRRLNNRIYKFRGHGKAWDWEVDTEFGNYDYLMYADYDMDHPEVVNELRNWGVWYTNTLGLDGFRIDAVKHIKYSFTRDWINHVRSATGKNMFAVAEFWKNDLGAIENYLQKTNWNHSVFDVPLHYNLYNASKSGGNYDMRNIFNGTVVQAHPSHAVTFVDNHDSQPEEALESFVEEWFKPLAYALTLTREQGYPSVFYGDYYGIPTHGVPAMRSKIDPILEARQKYAYGPQHDYLDHPDVIGWTREGDSSHPKSGLATLITDGPGGSKRMYAGLKNAGETWYDITGNRSDTVKIGSDGWGEFHVNDGSVSIYVQK

SEQ ID NO: 41557 - protein, 480 aa, Bacillus sp.
NGTMMQYFEWYLPNDGNHWNRLNSDASNLKSKGITAVWIPPAWKATSQNDVGYGAYDLYDLGEFNQKGTVRTKYGTRSQLQAAVTSLKNNGIQVYGDVVMNHKGGADATEMVRAVEVNPNNRNQEVTGEYTIEAWTRFDFPGRGNTHSSFKWRWYHFDGVDWDQSRELSNRIYKFRGHGKAWDWEVDTEFGNYDYLMYADYDMDHPEVVNELRNWGVWYTNTLGLDGFRIDAVKHIKYSFTRDWINHVRSATGKNMFAVAEFWKNDLGAIENYLQKTNWNHSVFDVPLHYNLYNASKSQGNYDMRNIFNGTVVQRHPSHAVTFVDNHDSQPEEALESFVDTWFKPLAYALTLTREQGYPSVFYGDYYGIPTHGVPAMRSKIDPILLARQKYAYGPQHDYLDHPDVIGWTREGDSSHPKSGLATLITDGPGGSKRMYAGLKNAGETWYDITGNRSDTVKIGSDGWGEFHVNGSSVSIYVQK

SEQ ID NO: 41558 - protein, 480 aa, Bacillus sp.
NGTMMQYFEWYLPNDGNHWNRLNSDASNLKSKGITAVWIPPAWKGASQNDVGYGAYDLYDLGEFNQKGTVRTKYGTRSQLQAAVTSLKNNGIQVYGDVVMNHKGGADATEMVRAVEVNPNNRNQEVTGEYTIEAWTRFDFPGRGNTHSSFKWRWYHFDGVDWDQSRKLNNRIYKFRGHGKAWDWEVDTEFGNYDYLMYVDYDMDHPEVVNELRNWGVWYTNTLGLDGFRIDAVKHIKYSFTRDWINHVRSATGKNMFAVAEFWKNDLGAIENYLQKTNWNHSVFDVPLHYNLYNASQSGGNYDMRNIFNGTVVQRHPSHAVTFVDNHDSQPEEALESFVEPWFKPLAYALTLTREQGYPSVFYGDYYGIPTHGVPAMRSKIDPILEARQKYAYGPQHDYLDHPDVIGWTREGDSSHPKSGLATLITDGPGGSKRMYAGLKNAGETWYDITGNRSDTVKIGSDGWGEFHVNKSSVSIYVQK

SEQ ID NO: 41559 - protein, 480 aa, Bacillus sp.
NGTMMQYFEWYLPNDGNHWNRLNSDASNLKSKGITAVWIPPAWKATSQNDVGYGAYDLYDLGEFNQRGTVRTKYGTRSQLQAAVTSLKNNGIQVYGDVVMNHKGGADATEMVRAVEVNPNNRNQEVTGEYTIEAWTRFDFPGRGNTHSSFKWRWYHFDGVDFDMSRELSNRIYKFRGHGKAWDWEVDTEFGNYDYLMYADYDMDHPEVVNELRNWGVWYTNTLGLDGFRIDAVKHIKYSFTRDWINHVRSATGKNMFAVAEFWKNDLGAIENYLQKTNWNHSVFDVPLHYNLYNASKSQGNYDMRNIFNGTVVQRHPSHAVTFVDNHDSQPEEALESFVDTWFKPLAYALTLTREQGYPSVFYGDYYGIPTHGVPAMRSKIDPILEARQKYAYGPQHDYLDHPDVIGWTREGDSSHPKSGLATLITDGPGGSKRMYAGLKNAGETWYDITGNRSDTVKIGSDGWGEFHVNDGSVSIYVQK

SEQ ID NO: 41560 - protein, 480 aa, Bacillus sp.
NGTMMQYFEWYLPNDGNHWNRLNSDASNLKSKGITAVWIPPAWKGASQNDVGYGAYDLYDLGEFNQKGTVRTKYGTRSQLQAAVTSLKNNGIQVYGDVVMNHKGGADATEMVRAVEVNPNNRNQEVTGEYTIEAWTRFDFPGRGNTHSSFKWRWYHFDGVDWDQSREFDNRIYKFRGHGKAWDWEVDTEFGNYDYLMYADYDMDHPEVVNELRNWGVWYTNTLGLDGFRIDAVKHIKYSFTRDWINHVRSATGKNMFAVAEFWKNDLGAIENYLQKTNWNHSVFDVPLHYNLYNASKSGGNYDMRNIFNGTVVQVHPSHAVTFVDNHDSQPEEALESFVEEWFKPLAYALTLTREQGYPSVFYGDYYGIPTHGVPAMRSKIDPILEARQKYAYGPQHDYLDHPDVIGWTREGDSSHPKSGLATLITDGPGGSKRMYAGLKNAGETWYDITGNRSDTVKIGSDGWGEFHVNYGSVSIYVQK

SEQ ID NO: 41561 - protein, 480 aa, Bacillus sp.
NGTMMQYFEWYLPNDGNHWNRLNSDASNLKSKGITAVWIPPAWKGASQNDVGYGAYDLYDLGEFNQKGTVRTKYGTRSQLQAAVTSLKNNGIQVYGDVVMNHKGGADATEMVRAVEVNPNNRNQEVTGEYTIEAWTRFDFPGRGNTHSSFKWRWYHFDGVDWDQSRRLNNRIYKFRGHGKAWDWEVDTEFGNYDYLMYADYDMDHPEVVNELRNWGVWYTNTLGLDGFRIDAVKHIKYSFTRDWINHVRSATGKNMFAVAEFWKNDLGAIENYLQKTNWNHSVFDVPLHYNLYNASQSGGNYDMRNIFNGTVVQRHPSHAVTFVDNHDSQPEEALESFVDEWFKPLAYALTLTREQGYPSVFYGDYYGIPTHGVPAMRSKIDPILEARQKYAYGPQHDYLDHPDVIGWTREGDSSHPKSGLATLITDGPGGSKRMYAGLKNAGETWYDITGNRSDTVKIGSDGWGEFHVNKKSVSIYVQK

SEQ ID NO: 41562 - protein, 480 aa, Bacillus sp.
NNTMMQYFEWYLPNDGNHWNRLNSDASNLKSKGITAVWIPPAWKGASQNDVGYGAYDLYDLGEFNQKGTVRTKYGTRSQLQAAVTSLKNNGIQVYGDVVMNHKGGADATEMVRAVEVNPNNRNQEVTGEYTIEAWTRFDFPGRGNTHSSFKWRWYHFDGVDWDQSRRLNNRIYKFRGHGKAWDWEVDTEFGNYDYLMYADYDMDHPEVVNELRNWGVWYTNTLGLDGFRIDAVKHIKYSFTRDWINHVRSATGKNMFAVAEFWKNDLGAIENYLQKTNWNHSVFDVPLHYNLYNASKSGGNYDMRNIFNGTVVQMHPMHAVTFVDNHDSQPEEALESFVEEWFKPLAYALTLTREQGYPSVFYGDYYGIPTHGVPAMRSKIDPILEARQKYAYGPQHDYLDHPDVIGWTREGDSSHPKSGLATLITDGPGGSKRMYAGLKNAGETWYDITGNRSDTVKIGSDGWGEFHVNDGSVSIYVQK

SEQ ID NO: 41563 - protein, 480 aa, Bacillus sp.
NNTMMQYFEWYLPNDGNHWNRLNSDASNLKSKGITAVWIPPAWKGASQNDVGYGAYDLYDLGEFNQKGTVRTKYGTRSQLQAAVTSLKNNGIQVYGDVVMNHKGGADATEMVRAVEVNPNNRNQEVTGEYTIEAWTRFDFPGRGNTHSSFKWRWYHFDGVDWDQSRRLNNRIYKFRGHGKAWDWEVDTEFGNYDYLMYADYDMDHPEVVNELRNWGVWYTNTLGLDGFRIDAVKHIKYSFTRDWINHVRSATGKNMFAVAEFWKNDLGAIENYLQKTNWNHSVFDVPLHYNLYNASKSGGNYDMRNIFNGTVVQSHPSHAVTFVDNHDSQPEEALESFVEEWFKPLAYALTLTREQGYPSVFYGDYYGIPTHGVPAMRSKIDPILEARQKYAYGPQHDYLDHPDVIGWTREGDSSHPKSGLATLITDGPGGSKRMYAGLKNAGETWYDITGNRSDTVKIGSDGWGEFHVNDGSVSIYVQK

SEQ ID NO: 41564 - protein, 480 aa, Bacillus sp.
NGTMMQYFEWYLPNDGNHWNRLNSDASNLKSKGITAVWIPPAWKAASQNDVGYGAYDLYDLGEFNQKGTVRTKYGTRSQLQAAVTSLKNNGIQVYGDVVMNHKGGADLTEMVDAVEVNPNNRNQEVTGEYTIEAWTRFDFPGRGNTHSSFKWRWYHFDGVDWDQSRQITNRIYKFRGHGKAWDWEVDTEFGNYDYLMYTDYDMDHPEVVNELRNWGVWYTNTLGLDGFRIDAVKHIKYSFTRDWINHVRSATGKNMFAVAEFWKNDLGAIENYLQKTNWNHSVFDVPLHYNLYNASKSGGNYDMRNIFNGTVVQRHPSHAVTFVDNHDSQPEEALESFVEEWFKPLAYALTLTREQGYPSVFYGDYYGIPTHGVPAMRSKIDPILEARQKYAYGPQHDYLDHPDVIGWTREGDSSHPKSGLATLITDGPGGSKRMYAGLKNAGETWYDITGNRSDTVKIGSDGWGEFHVNDGSVSIYVQK

SEQ ID NO: 41565 - protein, 480 aa, Bacillus sp.
NGTMMQYFEWYLPNDGNHWNRLNSDASNLKSKGITAVWIPPAWKGASQNDVGYGAYDLYDLGEFNQKGTVRTKYGTRSQLQAAVTSLKNNGINVYGDVVMNHKGGADATEMVRAVEVNPNNRNQEVTGEYTIEAWTRFDFPGRGNTHSSFKWRWYHFDGVDWDMSRRLNNRIYKFRGHGKAWDWEVDTEFGNYDYLMYADYDMDHPEVVNELRNWGVWYTNTLGLDGFRIDAVKHIKYSFTRDWINHVRSATGKNMFAVAEFWKNDLGAIENYLQKTNWNHSVFDVPLHYNLYNASKSGGNYDMRNIFNGTVVQAHPMHAVTFVDNHDSQPEEALESFVEEWFKPLAYALTLTREQGYPSVFYGDYYGIPTHGVPAMRSKIDPILEARQKYAYGPQHDYLDHPDVIGWTREGDSSHPKSGLATLITDGPGGSKRMYAGLKNAGETWYDITGNRSDTVKIGSDGWGEFHVNDGSVSIYVQK

SEQ ID NO: 41566 - protein, 480 aa, Bacillus sp.
NGTMMQYFEWYLPNDGNHWNRLNSDASNLKSKGITAVWIPPAWKGASQNDVGYGAYDLYDLGEFNQKGTVRTKYGTRSQLQAAVTSLKNNGINVYGDVVMNHKGGADATEMVRAVEVNPNNRNQEVTGEYTIEAWTRFDFPGRGNTHSSFKWRWYHFDGVDWDQSRRLNNRIYKFRGHGKAWDWEVDTEFGNYDYLMYADYDMDHPEVVNELRNWGVWYTNTLGLDGFRIDAVKHIKYSFTRDWINHVRSATGKNMFAVAEFWKNDLGAIENYLQKTNWNHSVFDVPLHYNLYNASKSGGNYDMRNIFNGTVVQAHPMHAVTFVDNHDSQPEEALESFVEEWFKPLAYALTLTREQGYPSVFYGDYYGIPTHGVPAMRSKIDPILEARQKYAYGPQHDYLDHPDVIGWTREGDSSHPKSGLATLITDGPGGSKRMYAGLKNAGETWYDITGNRSDTVKIGSDGWGEFHVNDGSVSIYVQK

SEQ ID NO: 41567 - protein, 480 aa, Bacillus sp.
NGTMMQYFEWYLPNDGNHWNRLNSDASNLKSKGITAVWIPPAWKGASQNDVGYGAYDLYDLGEFNQKGTVRTKYGTRSQLQAAVTSLKNNGIQVYGDVVMNHKGGADATEMVRAVEVNPNNRNQEVTGEYTIEAWTRFDFPGRGNTHSSFKWRWYHFDGVDWDQSRRLNNRIYKFRGHGKAWDWEVDTEFGNYDYLMYADYDMDHPEVVNELRNWGVWYTNTLGLDGFRIDAVKHIKYSFTRDWINHVRSATGKNMFAVAEFWKNDLGAIENYLQKTNWNHSVFDVPLHYNLYNASKSGGNYDMRNIFNGTVVQRHPSHAVTFVDNHDSQPEEALESFVDPWFKPLAYALTLTREQGYPSVFYGDYYGIPTHGVPAMRSKIDPILEARQKYAYGPQHDYLDHPDVIGWTREGDSSHPKSGLATLITDGPGGSKRMYAGLKNAGETWYDITGNRSDTVKIGSDGWGEFHVNGTSVSIYVQK

SEQ ID NO: 41568 - protein, 480 aa, Bacillus sp.
NGTMMQYFEWYLPNDGNHWNRLNSDASNLKSKGITAVWIPPAWKGASQNDVGYGAYDLYDLGEFNQKGTVRTKYGTRSQLQAAVTSLKNNGIQVYGDVVMNHKGGADATEMVRAVEVNPNNRNQEVTGEYTIEAWTRFDFPGRGNTHSSFKWRWYHFDGVDWDQSRRLNNRIYKFRGHGKAWDWEVDTEFGNYDYLMYADYDMDHPEVVNELRNWGVWYTNTLGLDGFRIDAVKHIKYSFTRDWINHVRSATGKNMFAVAEFWKNDLGAIENYLQKTNWNHSVFDVPLHYNLYNASKSQGNYDMRNIFNGTVVQRHPSHAVTFVDNHDSQPEEALESFVETWFKPLAYALTLTREQGYPSVFYGDYYGIPTHGVPAMRSKIDPILEARQKYAYGPQHDYLDHPDVIGWTREGDSSHPKSGLATLITDGPGGSKRMYAGLKNAGETWYDITGNRSDTVKIGSDGWGEFHVNKQSVSIYVQK

SEQ ID NO: 41569 - protein, 480 aa, Bacillus sp.
NGTMMQYFEWYLPNDGNHWNRLNSDASNLKSKGITAVWIPPAWKAASQNDVGYGAYDLYDLGEFNQKGTVRTKYGTRSQLQAAVTSLKNNGIQVYGDVVMNHKGGADATEMVRAVEVNPNNRNQEVTGEYTIEAWTRFDFPGRGNTHSSFKWRWYHFDGVDWDQSRRFDNRIYKFRGHGKAWDWEVDTEFGNYDYLMYTDYDMDHPEVVNELRNWGVWYTNTLGLDGFRIDAVKHIKYSFTRDWINHVRSATGKNMFAVAEFWKNDLGAIENYLQKTNWNHSVFDVPLHYNLYNASKSGGNYDMRNIFNGTVVQRHPSHAVTFVDNHDSQPEEALESFVEEWFKPLAYALTLTREQGYPSVFYGDYYGIPTHGVPAMRSKIDPILEARQKYAYGPQHDYLDHPDVIGWTREGDSSHPKSGLATLITDGPGGSKRMYAGLKNAGETWYDITGNRSDTVKIGSDGWGEFHVNDGSVSIYVQK

SEQ ID NO: 41570 - protein, 480 aa, Bacillus sp.
NGTMMQYFEWYLPNDGNHWNRLNSDASNLKSKGITAVWIPPAWKGASQNDVGYGAYDLYDLGEFNQKGTVRTKYGTRSQLQAAVTSLKNNGIQVYGDVVMNHKGGADATEMVRAVEVNPNNRNQEVTGEYTIEAWTRFDFPGRGNTHSSFKWRWYHFDGVDWDQSRNLTNRIYKFRGHSKAWDWEVDTEFGNYDYLMYTDYDMDHPEVVNELRNWGVWYTNTLGLDGFRIDAVKHIKYSFTRDWINHVRSATGKNMFAVAEFWKNDLGAIENYLQKTNWNHSVFDVPLHYNLYNASKSGGNYDMRNIFNGTVVQRHPSHAVTFVDNHDSQPEEALESFVEEWFKPLAYALTLTREQGYPSVFYGDYYGIPTHGVPAMRSKIDPILEARQKYAYGPQHDYLDHPDVIGWTREGDSSHPKSGLATLITDGPGGSKRMYAGLKNAGETWYDITGNRSDTVKIGSDGWGEFHVNDGSVSIYVQK

SEQ ID NO: 41571 - protein, 480 aa, Bacillus sp.
NGTMMQYFEWYLPNDGNHWNRLNSDASNLKSKGITAVWIPPAWKAASQNDVGYGAYDLYDLGEFNQKGTVRTKYGTRSQLQAAVTSLKNNGIQVYGDVVMNHKGGADATEMVRAVEVNPNNRNQEVTGEYTIEAWTRFDFPGRGNTHSSFKWRWYHFDGVDWDQSRRLDNRIYKFRGHGKAWDWEVDTEFGNYDYLMYTDYDMDHPEVVNELRNWGVWYTNTLGLDGFRIDAVKHIKYSFTRDWINHVRSATGKNMFAVAEFWKNDLGAIENYLQKTNWNHSVFDVPLHYNLYNASKSGGNYDMRNIFNGTVVQRHPSHAVTFVDNHDSQPEEALESFVEEWFKPLAYALTLTREQGYPSVFYGDYYGIPTHGVPAMRSKIDPILEARQKYAYGPQHDYLDHPDVIGWTREGDSSHPKSGLATLITDGPGGSKRMYAGLKNAGETWYDITGNRSDTVKIGSDGWGEFHVNDGSVSIYVQK

SEQ ID NO: 41572 - protein, 480 aa, Bacillus sp.
NGTMMQYFEWYLPNDGNHWNRLNSDASNLKSKGITAVWIPPAWKGASQNDVGYGAYDLYDLGEFNQKGTVRTKYGTRSQLQAAVTSLKNNGIQVYGDVVMNHKGGADATEMVRAVEVNPNNRNQEVTGEYTIEAWTRFDFPGRGNTHSSFKWRWYHFDGVDWDQSRRLNNRIYKFRGHGKAWDWEVDTEFGNYDYLMYADYDMDHPEVVNELRNWGVWYTNTLGLDGFRIDAVKHIKYSFTRDWINHVRSATGKNMFAVAEFWKNDLGAIENYLQKTNWNHSVFDVPLHYNLYNASKSGGNYDMRNIFNGTVVQAWPMQAVTFVDNHDSQPEEALESFVEEWFKPLAYALTLTREQGYPSVFYGDYYGIPTHGVPAMRSKIDPILEARQKYAYGPQHDYLDHPDVIGWTREGDSSHPKSGLATLITDGPGGSKRMYAGLKNAGETWYDITGNRSDTVKIGSDGWGEFHVNDGSVSIYVQK

SEQ ID NO: 41573 - protein, 480 aa, Bacillus sp.
NGTMMQYFEWYLPNDGNHWNRLNSDASNLKSKGITAVWIPPAWKGASQNDVGYGAYDLYDLGEFNQKGTVRTKYGTRSQLQAAVTSLKNNGIQVYGDVVMNHKGGADATEMVRAVEVNPNNRNQEVTGEYTIEAWTRFDFPGRGNTHSSFKWRWYHFDGVDWDQSRRLNNRIYKFRGHGKAWDWEVDTEFGNYDYLMYADYDMDHPEVVNELRNWGVWYTNTLGLDGFRIDAVKHIKYSFTRDWINHVRSATGKNMFAVAEFWKNDLGAIENYLQKTNWNHSVFDVPLHYNLYNASKSAGNYDMRNIFNGTVVQRHPSHAVTFVDNHDSQPEEALESFVDTWFKPLAYALTLTREQGYPSVFYGDYYGIPTHGVPAMRSKIDPILEARQKYAYGPQHDYLDHPDVIGWTREGDSSHPKSGLATLITDGPGGSKRMYAGLKNAGETWYDITGNRSDTVKIGSDGWGEFHVNQQSVSIYVQK

SEQ ID NO: 41574 - protein, 480 aa, Bacillus sp.
NGTMMQYFEWYLPNDGNHWNRLNSDASNLKSKGITAVWIPPAWKAASQNDVGYGAYDLYDLGEFNQKGTVRTKYGTRSQLQAAVTSLKNNGIQVYGDVVMNHKGGADATEMVRAVEVNPNNRNQEVTGEYTIEAWTRFDFPGRGNTHSSFKWRWYHFDGVDFDQSRQLNNRIYKFRGHGKAWDWEVDTEFGNYDYLMYADYDMDHPEVVNELRNWGVWYTNTLGLDGFRIDAVKHIKYSFTRDWINHVRSATGKNMFAVAEFWKNDLGAIENYLQKTNWNHSVFDVPLHYNLYNASKSGGNYDMRNIFNGTVVQRHPSHAVTFVDNHDSQPEEALESFVEEWFKPLAYALTLTREQGYPSVFYGDYYGIPTHGVPAMRSKIDPILEARQKYAYGPQHDYLDHPDVIGWTREGDSSHPKSGLATLITDGPGGSKRMYAGLKNAGETWYDITGNRSDTVKIGSDGWGEFHVNDGSVSIYVQK

SEQ ID NO: 41575 - protein, 480 aa, Bacillus sp.
NGTMMQYFEWYLPNDGNHWNRLNSDASNLKSKGITAVWIPPAWKGASQNDVGYGAYDLYDLGEFNQKGTVRTKYGTRSQLQAAVTSLKNNGIQVYGDVVMNHKGGADATEMVRAVEVNPNNRNQEVTGEYTIEAWTRFDFPGRGNTHSSFKWRWYHFDGVDWDQSRRLDNRIYKFRGHGKAWDWEVDTEFGNYDYLMYVDYDYDHPETTNEMRNWGVWYTNTLGLDGFRIDAVKHIKYSFTRDWINHVRSATGKNMFAVAEFWKNDLGAIENYLQKTNWNHSVFDVPLHYNLYNASKSGGNYDMRNIFNGTVVQRHPSHAVTFVDNHDSQPEEALESFVEEWFKPLAYALTLTREQGYPSVFYGDYYGIPTHGVPAMRSKIDPILEARQKYAYGPQHDYLDHPDVIGWTREGDSSHPKSGLATLITDGPGGSKRMYAGLKNAGETWYDITGNRSDTVKIGSDGWGEFHVNDGSVSIYVQK

SEQ ID NO: 41576 - protein, 480 aa, Bacillus sp.
NGTMMQYFEWYLPNDGNHWNRLNSDASNLKSKGITAVWIPPAWKGASQNDVGYGAYDLYDLGEFNQKGTVRTKYGTRSQLQAAVTSLKNNGIQVYGDVVMNHKGGADATEMVRAVEVNPNNRNQEVTGEYTIEAWTRFDFPGRGNTHSSFKWRWYHFDGVDWDQSRRLNNRIYKFRGHGKAWDWEVDTEFGNYDYLMYADYDMDSPEVVNELRNWGVWYTNTLGLDGFRIDAVKHIKYSFTRDWINHVRSATGKNMFAVAEFWKNDLGAIENYLQKTNWNHSVFDVPLHYNLYNASKSGGNYDMRNIFNGTVVQRHPSHAVTFVDNHDSQPEEALESFVEEWFKPLAYALTLTREQGYPSVFYGDYYGIPTHGVPAMRSKIDPILEARQKYAYGPQHDYLDHQDVIGWTREGDSSHPKSGLATLITDGPGGSKRMYAGLKNAGETWYDITGNRSDTVKIGSDGWGEFHVNDGSVSIYVQK

SEQ ID NO: 41577 - protein, 480 aa, Bacillus sp.
NGTMMQYFEWYLPNDGNHWNRLNSDASNLKSKGITAVWIPPAWKAVSQNDVGYGAYDLYDLGEFNQKGTVRTKYGTRSQLQAAVTSLKNNGIQVYGDVVMNHKGGADATEMVRAVEVNPNNRNQEVTGEYTIEAWTRFDFPGRGNTHSSFKWRWYHFDGVDWDQSRDLENRIYKFRGHGKAWDWEVDTEFGNYDYLMYADYDMDHPEVVNELRNWGVWYTNTLGLDGFRIDAVKHIKYSFTRDWINHVRSATGKNMFAVAEFWKNDLGAIENYLQKTNWNHSVFDVPLHYNLYNASKSGGNYDMRNIFNGTVVQRHPSHAVTFVDNHDSQPEEALESFVDPWFKPLAYALTLTREQGYPSVFYGDYYGIPTHGVPAMRSKIDPILEARQKYAYGPQHDYLDHPDVIGWTREGDSSHPKSGLATLITDGPGGSKRMYAGLKNAGETWYDITGNRSDTVKIGSDGWGEFHVNGGSVSIYVQK

SEQ ID NO: 41578 - protein, 480 aa, Bacillus sp.
NGTMMQYFEWYLPNDGNHWNRLNSDASNLKSKGITAVWIPPAWKGASQNDVGYGAYDLYDLGEFNQKGTVRTKYGTRSQLQAAVTSLKNNGIQVYGDVVMNHKGGADATEMVRAVEVNPNNRNQEVTGEYTIEAWTRFDFPGRGNTHSSFKWRWYHFDGVDWDQSRRLNNRIYKFRGHGKAWDWEVDTEFGNYDYLMYADYDMDHPEVVNELRNWGVWYTNTLGLDGFRIDAVKHIKYSFTRDWINHVRSATGKNMFAVAEFWKNDLGAIENYLQKTNWNHSVFDVPLHYNLYNASKSSGNYDMRNIFNGTVVQRHPSHAVTFVDNHDSQPEEALESFVDTWFKPLAYALTLTREQGYPSVFYGDYYGIPTHGVPAMRSKIDPILEARQKYAYGPQHDYLDHPDVIGWTREGDSSHPKSGLATLITDGPGGSKRMYAGLKNAGETWYDITGNRSDTVKIGSDGWGEFHVNQQSVSIYVQK

SEQ ID NO: 41579 - protein, 480 aa, Bacillus sp.
NLTMMQYFEWYLPNDGNHWNRLNSDASNLKSKGITAVWIPPAWKGASQNDVGYGAYDLYDLGEFNQKGTVRTKYGTRSQLQAAVTSLKNNGIQVYGDVVMNHKGGADATEMVRAVEVNPNNRNQEVTGEYTIEAWTRFDFPGRGNTHSSFKWRWYHFDGVDWDQSRRLNNRIYKFRGHGKAWDWEVDTEFGNYDYLMYADYDMDHPEVVNELRNWGVWYTNTLGLDGFRIDAVKHIKYSFTRDWINHVRSATGKNMFAVAEFWKNDLGAIENYLQKTNWNHSVFDVPLHYNLYNASKSGGNYDMRNIFNGTVVQAHPMHAVTFVDNHDSQPEEALESFVEEWFKPLAYALTLTREQGYPSVFYGDYYGIPTHGVPAMRSKIDPILEARQKYAYGPQHDYLDHPDVIGWTREGDSSHPKSGLATLITDGPGGSKRMYAGLKNAGETWYDITGNRSDTVKIGSDGWGEFHVNDGSVSIYVQK

SEQ ID NO: 41580 - protein, 480 aa, Bacillus sp.
NGTMMQYFEWYLPNDGNHWNRLNSDASNLKSKGITAVWIPPAWKGASQNDVGYGAYDLYDLEEFNQKGTVRTKYGTRSQLQAAVTSLKNNGIQVYGDVVMNHKGGANATEMVRAVEVNPNNRNQEVTGEYTIEAWTRFDFPGRGNTHSSFKWRWYHFDGVDWDQSRDFSNRIYKFRGHGKAWDWEVDTEFGNYDYLMYADYDMDHPEVVNELRNWGVWYTNTLGLDGFRIDAVKHIKYSFTRDWINHVRSATGKNMFAVAEFWKNDLGAIENYLQKTNWNHSVFDVPLHYNLYNASKSGGNYDMRNIFNGTVVQRHPSHAVTFVDNHDSQPEEALESFVEEWFKPLAYALTLTREQGYPSVFYGDYYGIPTHGVPAMRSKIDPILEARQKYAYGPQHDYLDHPDVIGWTREGDSSHPKSGLATLITDGPGGSKRMYAGLKNAGETWYDITGNRSDTVKIGFDGWGEFHVNDGSVSIYVQK

SEQ ID NO: 41581 - protein, 480 aa, Bacillus sp.
NGTMMQYFEWYLPNDGNHWNRLNSDASNLKSKGITAVWIPPAWKATSQNDVGYGAYDLYDLGEFNQKGTVRTKYGTRSQLQAAVTSLKNNGIQVYGDVVMNHKGGADLTEMVRAVEVNPNNRNQEVTGEYTIEAWTRFDFPGRGNTHSSFKWRWYHFDGVDWDQSRELSNRIYKFRGHGKAWDWEVDTEFGNYDYLMYADYDMDHPEVVNELRNWGVWYTNTLGLDGFRIDAVKHIKYSFTRDWINHVRSATGKNMFAVAEFWKNDLGAIENYLQKTNWNHSVFDVPLHYNLYNASKSQGNYDMRNIFNGTVVQRHPSHAVTFVDNHDSQPEEALESFVDTWFKPLAYALTLTREQGYPSVFYGDYYGIPTHGVPAMRSKIDPILEARQKYAYGPQHDYLDHPDVIGWTREGDSSHPKSGLATLITDGPGGSKRMYAGLKNAGETWYDITGNRSDTVKIGSDGWGEFHTNDGSVSIYVQK

SEQ ID NO: 41582 - protein, 480 aa, Bacillus sp.
NGTMMQYFEWYLPNDGNHWNRLNSDASNLKSKGITAVWIPPAWKAVSQNDVGYGAYDLYDLGEFNQKGTVRTKYGTRSQLQAAVTSLKNNGIQVYGDVVMNHKGGADATEMVDAVEVNPNNRNQEVTGEYTIEAWTRFDFPGRGNTHSSFKWRWYHFDGVDWDQSREFTNRIYKFRGHGKAWDWEVDTEFGNYDYLMYVDYDMDHPEVVNELRNWGVWYTNTLGLDGFRIDAVKHIKYSFTRDWINHVRSATGKNMFAVAEFWKNDLGAIENYLQKTNWNHSVFDVPLHYNLYNASKSGGNYDMRNIFNGTVVQRHPSHAVTFVDNHDSQPEEALESFVEEWFKPLAYALTLTREQGYPSVFYGDYYGIPTHGVPAMRSKIDPILEARQKYAYGPQHDYLDHPDVIGWTREGDSSHPKSGLATLITDGPGGSKRMYAGLKNAGETWYDITGNRSDTVKIGSDGWGEFHVNDGSVSIYVQK

SEQ ID NO: 41583 - protein, 480 aa, Bacillus sp.
NQTMMQYFEWYLPNDGNHWNRLNSDASNLKSKGITAVWIPPAWKGASQNDVGYGAYDLYDLGEFNQKGTVRTKYGTRSQLQAAVTSLKNNGIQVYGDVVMNHKGGADATEMVRAVEVNPNNRNQEVTGEYTIEAWTRFDFPGRGNTHSSFKWRWYHFDGVDWDQSRRLNNRIYKFRGHGKAWDWEVDTEFGNYDYLMYADYDMDHPEVVNELRNWGVWYTNTLGLDGFRIDAVKHIKYSFTRDWINHVRSATGKNMFAVAEFWKNDLGAIENYLQKTNWNHSVFDVPLHYNLYNASKSGGNYDMRNIFNGTVVQMHPNWAVTFVDNHDSQPEEALESFVEEWFKPLAYALTLTREQGYPSVFYGDYYGIPTHGVPAMRSKIDPILEARQKYAYGPQHDYLDHPDVIGWTREGDSSHPKSGLATLITDGPGGSKRMYAGLKNAGETWYDITGNRSDTVKIGSDGWGEFHVNDGSVSIYVQK

SEQ ID NO: 41584 - protein, 480 aa, Bacillus sp.
NGTMMQYFEWYLPNDGNHWNRLNSDASNLKSKGITAVWIPPAWKGASQNDVGYGAYDLYDLGEFNQKGTVRTKYGTRSQLQAAVTSLKNNGIQVYGDVVMNHKGGADATEMVRAVEVNPNNRNQEVTGEYTIEAWTRFDFPGRGNTHSSFKWRWYHFDGVDWDQSERLNNRIYKFRGHGKAWDWEVDTEFGNYDYLMYADYDMDHPEVVNELRNWGVWYTNTLGLDGFRIDAVKHIKYSFTRDWINHVRSATGKNMFAVAEFWKNDLGAIENYLQKTNWNHSVFDVPLHYNLYNASKSGGNYDMRNIFNGTVVQRHPSHAVTFVDNHDSQPEEALESFVEEWFKPLAYALTLTREQGLPSVFYGDYYGIPTHGVPAMRSKIDPILEARQKYAYGPQHDYLDHPDVIGWTREGDSSHPKSGLATLITDGPGGSKRMYAGLKNAGETWYDITGNRSDTVKIGSDGWGEFHVNDGSVSIYVQK

SEQ ID NO: 41585 - protein, 480 aa, Bacillus sp.
NGTMMQYFEWYLPNDGNHWNRLNSDASNLKSKGITAVWIPPAWKAVSQNDVGYGAYDLYDLGEFNQKGTVRTKYGTRSQLQAAVTSLKNNGIQVYGDVVMNHKGGADATEMVRAVEVNPNNRNQEVTGEYTIEAWTRFDFPGRGNTHSSFKWRWYHFDGVDWDQSRNLTNRIYKFRGHGKAWDWEVDTEFGNYDYLMYTDYDMDHPEVVNELRNWGVWYTNTLGLDGFRIDAVKHIKYSFTRDWINHVRSATGKNMFAVAEFWKNDLGAIENYLQKTNWNHSVFDVPLHYNLYNASKSGGNYDMRNIFNGTVVQRHPSHAVTFVDNHDSQPEEALESFVEEWFKPLAYALTLTREQGYPSVFYGDYYGIPTHGVPAMRSKIDPILEARQKYAYGPQHDYLDHPDVIGWTREGDSSHPKSGLATLITDGPGGSKRMYAGLKNAGETWYDITGNRSDTVKIGSDGWGEFHVNDGSVSIYVQK

SEQ ID NO: 41586 - protein, 480 aa, Bacillus sp.
NGTMMQYFEWYLPNDGNHWNRLNSDASNLKSKGITAVWIPPAWKGASQNDVGYGAYDLYDLGEFNQKGTVRTKYGTRSQLQAAVTSLKNNGIQVYGDVVMNHKGGADATEMVRAVEVNPNNRNQEVTGEYTIEAWTRFDFPGRGNTHSSFKWRWYHFDGVDWDQSRRLNNRIYKFRGHGKAWDWEVDTEFGNYDYLMYADYDMDHPEVVNELRNWGVWYTNTLGLDGFRIDAVKHIKYSFTRDWINHVRSATGKNMFAVAEFWKNDLGAIENYLQKTNWNHSVFDVPLHYNLYNASKSQGNYDMRNIFNGTVVQRHPSHAVTFVDNHDSQPEEALESFVDPWFKPLAYALTLTREQGYPSVFYGDYYGIPTHGVPAMRSKIDPILEARQKYAYGPQHDYLDHPDVIGWTREGDSSHPKSGLATLITDGPGGSKRMYAGLKNAGETWYDITGNRSDTVKIGSDGWGEFHVNGGSVSIYVQK

SEQ ID NO: 41587 - protein, 480 aa, Bacillus sp.
NGTMMQYFEWYLPNDGNHWNRLNSDASNLKSKGITAVWIPPAWKGTSQNDVGYGAYDLYDLGEFNQKGTVRTKYGTRSQLQAAVTSLKNNGIQVYGDVVMNHKGGADATEMVRAVEVNPNNRNQEVTGEYTIEAWTRFDFPGRGNTHSSFKWRWYHFDGVDFDQSRNLNNRIYKFRGHGKAWDWEVDTEFGNYDYLMYVDYDMDHPEVVNELRNWGVWYTNTLGLDGFRIDAVKHIKYSFTRDWINHVRSATGKNMFAVAEFWKNDLGAIENYLQKTNWNHSVFDVPLHYNLYNASKSQGNYDMRNIFNGTVVQRHPSHAVTFVDNHDSQPEEALESFVDTWFKPLAYALTLTREQGYPSVFYGDYYGIPTHGVPAMRSKIDPILEARQKYAYGPQHDYLDHPDVIGWTREGDSSHPKSGLATLITDGPGGSKRMYAGLKNAGETWYDITGNRSDTVKIGSDGWGEFHVNDGSVSIYVQK

SEQ ID NO: 41588 - protein, 480 aa, Bacillus sp.
NGTMMQYFEWYLPNDGNHWNRLNSDASNLKSKGITAVWIPPAWKAISQNDVGYGAYDLYDLGEFNQKGTVRTKYGTRSQLQAAVTSLKNNGIQVYGDVVMNHKGGADATEMIRAVEVNPNNRNQEVTGEYTIEAWTRFDFPGRGNTHSSFKWRWYHFDGVDWDQSRELNNRIYKFRGHGKAWDWEVDTEFGNYDYLMYADYDMDHPEVVNELRNWGVWYTNTLGLDGFRIDAVKHIKYSFTRDWINHVRSATGKNMFAVAEFWKNDLGAIENYLQKTNWNHSVFDVPLHYNLYNASKSGGNYDMRNIFNGTVVQRHPSHAVTFVDNHDSQPEEALESFVEEWFKPLAYALTLTREQGYPSVFYGDYYGIPTHGVPAMRSKIDPILEARQKYAYGPQHDYLDHPDVIGWTREGDSSHPKSGLATLITDGPGGSKRMYAGLKNAGETWYDITGNRSDTVKIGSDGWGEFHVNDGSVSIYVQK

SEQ ID NO: 41589 - protein, 480 aa, Bacillus sp.
NGTMMQYFEWYLPNDGNHWNRLNSDASNLKSKGITAVWIPPAWKGASQNDVGYGAYDLYDLGEFNQKGTVRTKYGTRSQLQAAVTSLKNNGIQVYGDVVMNHKGGADATEMVRAVEVNPNNRNQEVTGEYTIEAWTRFDFPGRGNTHSSFKWRWYHFDGVDWDQSRRLNNRIYKFRGHGKAWDWEVDTEFGNYDYLMYADYDMDHTETVNELRNWGVWYTNTLGLDGFRIDAVKHIKYSFTRDWINHVRSATGKNMFAVAEFWKNDLGAIENYLQKTNWNHSVFDVPLHYNLYNASKSGGNYDMRNIFNGTVVQRHPSHAVTFVDNHDSQPEEALESFVEEWFKPLAYALTLTREQGYPSVFYGDYYGIPTHGVPAMRSKIDPILEARQKYAYGPQHDYLDHPDVIGWTREGDSSHPKSGLATLITDGPGGSKRMYAGLKNAGETWYDITGNRSDTVKIGSDGWGEFHVNDGSVSIYVQK

SEQ ID NO: 41590 - protein, 480 aa, Bacillus sp.
NQTMMQYFEWYLPNDGNHWNRLNSDASNLKSKGITAVWIPPAWKGASQNDVGYGAYDLYDLGEFNQKGTVRTKYGTRSQLQAAVTSLKNNGIQVYGDVVMNHKGGADATEMVRAVEVNPNNRNQEVTGEYTIEAWTRFDFPGRGNTHSSFKWRWYHFDGVDWDQSRRLNNRIYKFRGHGKAWDWEVDTEFGNYDYLMYADYDMDHPEVVNELRNWGVWYTNTLGLDGFRIDAVKHIKYSFTRDWINHVRSATGKNMFAVAEFWKNDLGAIENYLQKTNWNHSVFDVPLHYNLYNASKSGGNYDMRNIFNGTVVQAHPRHAVTFVDNHDSQPEEALESFVEEWFKPLAYALTLTREQGYPSVFYGDYYGIPTHGVPAMRSKIDPILEARQKYAYGPQHDYLDHPDVIGWTREGDSSHPKSGLATLITDGPGGSKRMYAGLKNAGETWYDITGNRSDTVKIGSDGWGEFHVNDGSVSIYVQK

SEQ ID NO: 41591 - protein, 480 aa, Synthetic construct
NGTMMQYFEWYLPNDGNHWNRLNSDASNLKSKGITAVWIPPAWKGASQNDVGYGAYDLYDLGEFNQKGTVRTKYGTRSQLQAAVTSLKNNGIQVYGDVVMNHKGGADATEMVRAVEVNPNNRNQEVTGEYTIEAWTRFDFPGRGNTHSSFKWRWYHFDGVDWDQSRRLNNRIYKFRGHGKAWDWEVDTEFGNYDYLMYADYDMDHPEPTNELRNWGVWYTNTLGLDGFRIDAVKHIKYSFTRDWINHVRSATGKNMFAVAEFWKNDLGAIENYLQKTNWNHSVFDVPLHYNLYNASKSGGNYDMRNIFNGTVVQRHPSHAVTFVDNHDSQPEEALESFVEEWFKPLAYALTLTREQGYPSVFYGDYYGIPTHGVPAMRSKIDPILEARQKYAYGPQHDYLDHPDVIGWTREGDSSHPKSGLATLITDGPGGSKRMYAGLKNAGETWYDITGNRSDTVKIGSDGWGEFHVNDGSVSIYVQK

SEQ ID NO: 41592 - protein, 480 aa, Bacillus sp.
NGTMMQYFEWYLPNDGNHWNRLNSDASNLKSKGITAVWIPPAWKGASQNDVGYGAYDLYDLGEFNQKGTVRTKYGTRSQLQAAVTSLKNNGIQVYGDVVMNHKGGADATEMVRAVEVNPNNRNQEVTGEYTIEAWTRFDFPGRGNTHSSFKWRWYHFDGVDWDQSRRLNNRIYKFRGHGKAWDWEVDTEFGNYDYLMYADYDMDHPEVVNELRNWGVWYTNTLGLDGFRIDAVKHIKYSFTRDWINHVRSATGKNMFAVAEFWKNDLGAIENYLQKTNWNHSVFDVPLHYNLYNASNSGGNYDMRNIFNGTVVQRHPSHAVTFVDNHDSQPEEALESFVDEWFKPLAYALTLTREQGYPSVFYGDYYGIPTHGVPAMRSKIDPILEARQKYAYGPQHDYLDHPDVIGWTREGDSSHPKSGLATLITDGPGGSKRMYAGLKNAGETWYDITGNRSDTVKIGSDGWGEFHVNQQSVSIYVQK

SEQ ID NO: 41593 - protein, 480 aa, Bacillus sp.
NGTMMQYFEWYLPNDGNHWNRLNSDASNLKSKGITAVWIPPAWKAASQNDVGYGAYDLYDLGEFNQKGTVRTKYGTRSQLQAAVTSLKNNGIQVYGDVVMNHKGGADATEMVRAVEVNPNNRNQEVTGEYTIEAWTRFDFPGRGNTHSSFKWRWYHFDGVDWDQSRRTNNRIYKFRGHGKAWDWEVDTEFGNYDYLMYTDYDMDHPEVVNELRNWGVWYTNTLGLDGFRIDAVKHIKYSFTRDWINHVRSATGKNMFAVAEFWKNDLGAIENYLQKTNWNHSVFDVPLHYNLYNASKSGGNYDMRNIFNGTVVQRHPSHAVTFVDNHDSQPEEALESFVEEWFKPLAYALTLTREQGYPSVFYGDYYGIPTHGVPAMRSKIDPILEARQKYAYGPQHDYLDHPDVIGWTREGDSSHPKSGLATLITDGPGGSKRMYAGLKNAGETWYDITGNRSDTVKIGSDGWGEFHVNDGSVSIYVQK

SEQ ID NO: 41594 - protein, 480 aa, Bacillus sp.
NGTMMQYFEWYLPNDGNHWNRLNSDASNLKSKGITAVWIPPAWKGASQNDVGYGAYDLYDLGEFNQKGTVRTKYGTRSQLQAAVTSLKNNGIQVYGDVVMNHKGGADATEMVRAVEVNPNNRNQEVTGEYTIEAWTRFDFPGRGNTHSSFKWRWYHFDGVDWDQSRRLNNRIYKFRGHGKAWDWEVDTEFGNYDYLMYADYDMDHPEVVNELRNWGVWYTNTLGLDGFRIDAVKHIKYSFTRDWINHVRSATGKNMFAVAEFWKNDLGAIENYLQKTNWNHSVFDVPLHYNLYNASQSGGNYDMRNIFNGTVVQRHPSHAVTFVDNHDSQPEEALESFVDEWFKPLAYALTLTREQGYPSVFYGDYYGIPTHGVPAMRSKIDPILEARQKYAYGPQHDYLDHPDVIGWTREGDSSHPKSGLATLITDGPGGSKRMYAGLKNAGETWYDITGNRSDTVKIGSDGWGEFHVNKQSVSIYVQK

SEQ ID NO: 41595 - protein, 480 aa, Bacillus sp.
NGTMMQYFEWYLPNDGNHWNRLNSDASNLKSKGITAVWIPPAWKGASQNDVGYGAYDLYDLGEFNQKGTVRTKYGTRSQLQAAVTSLKNNGIQVYGDVVMNHKGGADATEMVRAVEVNPNNRNQEVTGEYTIEAWTRFDFPGRGNTHSSFKWRWYHFDGVDWDQSRRLNNRIYKFRGHGKAWDWEVDTEFGNYDYLMYADYDMDHPEVVNELRNWGVWYTNTLGLDGFRIDAVKHIKYSFTRDWINHVRSATGKNMFAVAEFWKNDLGAIENYLQKTNWNHSVFDVPLHYNLYNASKSQGNYDMRNIFNGTVVQRHPSHAVTFVDNHDSQPEEALESFVDTWFKPLAYALTLTREQGYPSVFYGDYYGIPTHGVPAMRSKIDPILEARQKYAYGPQHDYLDHPDVIGWTREGDSSHPKSGLATLITDGPGGSKRMYAGLKNAGETWYDITGNRSDTVKIGSDGWGEFHVNGSSVSIYVQK

SEQ ID NO: 41596 - protein, 480 aa, Bacillus sp.
NGTMMQYFEWYLPNDGNHWNRLNSDASNLKSKGITAVWIPPAWKGASQNDVGYGAYDLYDLGEFNQKGTVRTKYGTRSQLQAAVTSLKNNGIQVYGDVVMNHKGGADATEMVRAVEVNPNNRFQEVTGEYTIEAWTRFDFPGRGNTHSSFKWRWYHFDGVDWDQSRRLNNRIYLFRGHGKAWDWEVDTEFGNYDYLMYADYDMDHPEVVNELRNWGVWYTNTLGLDGFRIDAVKHIKYSFTRDWINHVRSATGKNMFAVAEFWKNDLGAIENYLQKTNWNHSVFDVPLHYNLYNASKSGGNYDMRNIFNGTVVQRHPSHAVTFVDNHDSQPEEALESFVEEWFKPLAYALTLTREQGYPSVFYGDYYGIPTHGVPAMRSKIDPILEARQKYAYGPQHDYLDHPDVIGWTREGDSSHPKSGLATLITDGPGGSKRMYAGLKNAGETWYDITGNRSDTVKIGSDGWGEFHVNDGSVSIYVQK

SEQ ID NO: 41597 - protein, 480 aa, Bacillus sp.
NGTMMQYFEWYLPNDGNHWNRLNSDASNLKSKGITAVWIPPAWKGASQNDVGYGAYDLYDLGEFNQKGTVRTKYGTRSQLQAAVTSLKNNGIQVYGDVVMNHKGGADATEMVRAVEVNPNNRNQEVTGEYTIEAWTRFDFPGRGNTHSSFKWRWYHFDGVDWDQSREFDNRIYKFRGHGKAWDWEVDTEFGNYDYLMYADYDMDHPEVVNELRNWGVWYTNTLGLDGFRIDAVKHIKYSFTRDWINHVRSATGKNMFAVAEFWKNDLGAIENYLQKTNWNHSVFDVPLHYNLYNASQSGGNYDMRNIFNGTVVQRHPSHAVTFVDNHDSQPEEALESFVEPWFKPLAYALTLTREQGYPSVFYGDYYGIPTHGVPAMRSKIDPILEARQKYAYGPQHDYLDHPDVIGWTREGDSSHPKSGLATLITDGPGGSKRMYAGLKNAGETWYDITGNRSDTVKIGSDGWGEFHVNKSSVSIYVQK

SEQ ID NO: 41598 - protein, 480 aa, Bacillus sp.
NGTMMQYFEWYLPNDGNHWNRLNSDASNLKSKGITAVWIPPAWKGASQNDVGYGAYDLYDLGEFNQKGTVRTKYGTRSQLQAAVTSLKNNGIQVYGDVVMNHKGGADATEMVRAVEVNPNNRNQEVTGEYTIEAWTRFDFPGRGNTHSSFKWRWYHFDGVDWDQSRRLNNRIYKFRGHGKAWDWEVDTEFGNYDYLMYADYDMDHPEVVNELRNWGVWYTNTLGLDGFRIDAVKHIKYSFTRDWINHVRSATGKNMFAVAEFWKNDLGAIENYLQKTNWNHSVFDVPLHYNLYNASKSGGNYDMRNIFNGTVVQSWPMHAVTFVDNHDSQPEEALESFVEEWFKPLAYALTLTREQGYPSVFYGDYYGIPTHGVPAMRSKIDPILEARQKYAYGPQHDYLDHPDVIGWTREGDSSHPKSGLATLITDGPGGSKRMYAGLKNAGETWYDITGNRSDTVKIGSDGWGEFHVNDGSVSIYVQK

SEQ ID NO: 41599 - protein, 480 aa, Bacillus sp.
NGTMMQYFEWYLPNDGNHWNRLNSDASNLKSKGITAVWIPPAWKGASQNDVGYGAYDLYDLGEFNQKGTVRTKYGTRSQLQAAVTSLKNNGIQVYGDVVMNHKGGADATEMVRAVEVNPNNRNQEVTGEYTIEAWTRFDFPGRGNTHSSFKWRWYHFDGVDWDQSRRLNNRIYKFRGHGKAWDWEVDTEFGNYDYLMYADYDMDHPEVVNELRNWGVWYTNTLGLDGFRIDAVKHIKYSFTRDWINHVRSATGKNMFAVAEFWKNDLGAIENYLQKTNWNHSVFDVPLHYNLYNASKSGGNYDMRNIFNGTVVQANPNHAVTFVDNHDSQPEEALESFVEEWFKPLAYALTLTREQGYPSVFYGDYYGIPTHGVPAMRSKIDPILEARQKYAYGPQHDYLDHPDVIGWTREGDSSHPKSGLATLITDGPGGSKRMYAGLKNAGETWYDITGNRSDTVKIGSDGWGEFHVNDGSVSIYVQK

SEQ ID NO: 41600 - protein, 480 aa, Bacillus sp.
NKTMMQYFEWYLPNDGNHWNRLNSDASNLKSKGITAVWIPPAWKGASQNDVGYGAYDLYDLGEFNQKGTVRTKYGTRSQLQAAVTSLKNNGIQVYGDVVMNHKGGADATEMVRAVEVNPNNRNQEVTGEYTIEAWTRFDFPGRGNTHSSFKWRWYHFDGVDWDQSRRLNNRIYKFRGHGKAWDWEVDTEFGNYDYLMYADYDMDHPEVVNELRNWGVWYTNTLGLDGFRIDAVKHIKYSFTRDWINHVRSATGKNMFAVAEFWKNDLGAIENYLQKTNWNHSVFDVPLHYNLYNASKSGGNYDMRNIFNGTVVQAHPSHAVTFVDNHDSQPEEALESFVEEWFKPLAYALTLTREQGYPSVFYGDYYGIPTHGVPAMRSKIDPILEARQKYAYGPQHDYLDHPDVIGWTREGDSSHPKSGLATLITDGPGGSKRMYAGLKNAGETWYDITGNRSDTVKIGSDGWGEFHVNDGSVSIYVQK

SEQ ID NO: 41601 - protein, 480 aa, Bacillus sp.
NGTMMQYFEWYLPNDGNHWNRLNSDASNLKSKGITAVWIPPAWKAASQNDVGYGAYDLYDLGEFNQKGTVRTKYGTRSQLQAAVTSLKNNGIQVYGDVVMNHKGGADATEMVRAVEVNPNNRNQEVTGEYTIEAWTRFDFPGRGNTHSSFKWRWYHFDGVDWDQSRNLNNRIYKFRGHGKAWDWEVDTEFGNYDYLMYTDYDMDHPEVVNELRNWGVWYTNTLGLDGFRIDAVKHIKYSFTRDWINHVRSATGKNMFAVAEFWKNDLGAIENYLQKTNWNHSVFDVPLHYNLYNASKSGGNYDMRNIFNGTVVQRHPSHAVTFVDNHDSQPEEALESFVEEWFKPLAYALTLTREQGYPSVFYGDYYGIPTHGVPAMRSKIDPILEARQKYAYGPQHDYLDHPDVIGWTREGDSSHPKSGLATLITDGPGGSKRMYAGLKNAGETWYDITGNRSDTVKIGSDGWGEFHVNDGSVSIYVQK

SEQ ID NO: 41602 - protein, 480 aa, Bacillus sp.
NGTMMQYFEWYLPNDGNHWNRLNSDASNLKSKGITAVWIPPAWKGASQNDVGYGAYDLYDLGEFNQKGTVRTKYGTRSQLQAAVTSLKNNGIQVYGDVVMNHKGGADATEMVRAVEVNPNNRNQEVTGEYTIEAWTRFDFPGRGNTHSSFKWRWYHFDGVDWDQSREFDNRIYKFRGHGKAWDWEVDTEFGNYDYLMYADYDMDHPETTNEMRNWGVWYTNTLGLDGFRIDAVKHIKYSFTRDWINHVRSATGKNMFAVAEFWKNDLGAIENYLQKTNWNHSVFDVPLHYNLYNASKSGGNYDMRNIFNGTVVQRHPSHAVTFVDNHDSQPEEALESFVEEWFKPLAYALTLTREQGYPSVFYGDYYGIPTHGVPAMRSKIDPILEARQKYAYGPQHDYLDHPDVIGWTREGDSSHPKSGLATLITDGPGGSKRMYAGLKNAGETWYDITGNRSDTVKIGSDGWGEFHVNDGSVSIYVQK

SEQ ID NO: 41603 - protein, 480 aa, Bacillus sp.
NGTMMQYFEWYLPNDGNHWNRLNSDASNLKSKGITAVWIPPAWKGASQNDVGYGAYDLYDLGEFNQKGTVRTKYGTRSQLQAAVTSLKNNGIQVYGDVVMNHKGGADATEMVRAVEVNPNNRNQEVTGEYTIEAYTRFDFSGRGNTHSSFKWRWYHFDGVDWDQSRKLNNRIYKFRGHGKAWDWEVDTEFGNYDYLMYVDYDMDHPEVVNELRNWGVWYTNTLGLDGFRIDAVKHIKYSFTRDWINHVRSATGKNMFAVAEFWKNDLGAIENYLQKTNWNHSVFDVPLHYNLYNASKSGGNYDMRNIFNGTVVQRHPSHAVTFVDNHDSQPEEALESFVEEWFKPLAYALTLTREQGYPSVFYGDYYGIPTHGVPAMRSKIDPILEARQKYAYGPQHDYLDHPDVIGWTREGDSSHPKSGLATLITDGPGGSKRMYAGLKNAGETWYDITGNRSDTVKIGSDGWGEFHVNDGSVSIYVQK

SEQ ID NO: 41604 - protein, 480 aa, Bacillus sp.
NGTMMQYFEWYLPNDGNHWNRLNSDASNLKSKGITAVWIPPAWKGASQNDVGYGAYDLYDLGEFNQKGTVRTKYGTRSQLQAAVTSLKNNGIQVYGDVVMNHKGGADATEMVRAVEVNPNNRNQEVTGEYTIEAWTRFDFPGRGNTHSSFKWRWYHFDGVDWDQSRRLNNRIYKFRGHGKAWDWEVDTEFGNYDYLMYADYDMDHPEVVNELRNWGVWYTNTLGLDGFRIDAVKHIKYSFTRDWINHVRSATGKNMFAVAEFWKNDLGAIENYLQKTNWNHSVFDVPLHYNLYNASKSAGNYDMRNIFNGTVVQRHPSHAVTFVDNHDSQPEEALESFVDTWFKPLAYALTLTREQGYPSVFYGDYYGIPTHGVPAMRSKIDPILEARQKYAYGPQHDYLDHPDVIGWTREGDSSHPKSGLATLITDGPGGSKRMYAGLKNAGETWYDITGNRSDTVKIGSDGWGEFHVNGTSVSIYVQK

SEQ ID NO: 41605 - protein, 480 aa, Bacillus sp.
NGTMMQYFEWYLPNDGNHWNRLNSDASNLKSKGITAVWIPPAWKATSQNDVGYGAYDLYDLGEFNQKGTVRTKYGTRSQLQAAVTSLKNNGIQVYGDVVMNHKGGADATEMVRAVEVNPNNRNQEVTGEYTIEAYTRFDFPGRGNTHSSFKWRWYHFDGVDWDQSRNVNNRIYKFRGHGKAWDWEVDTEFGNYDYLMYADYDMDHPEVVNELRNWGVWYTNTLGLDGFRIDAVKHIKYSFTRDWINHVRSATGKNMFAVAEFWKNDLGAIENYLQKTNWNHSVFDVPLHYNLYNASKSGGNYDMRNIFNGTVVQRHPSHAVTFVDNHDSQPEEALESFVEEWFKPLAYALTLTREQGYPSVFYGDYYGIPTHGVPAMRSKIDPILEARQKYAYGPQHDYLDHPDVIGWTREGDSSHPKSGLATLITDGPGGSKRMYAGLKNAGETWYDITGNRSDTVKIGSDGWGEFHVNDGSVSIYVQK

SEQ ID NO: 41606 - protein, 480 aa, Bacillus sp.
NGTMMQYFEWYLPNDGNHWNRLNSDASNLKSKGITAVWIPPAWKGASQNDVGYGAYDLYDLGEFNQKGTVRTKYGTRSQLQAAVTSLKNNGIQVYGDVVMNHKGGADATEMVRAVEVNPNNRNQEVTGEYTIEAWTRFDFPGRGNTHSSFKWRWYHFDGVDWDQSRRLNNRIYKFRGHGKAWDWEVDTEFGNYDYLMYADYDMDHPEVVNELRNWGVWYTNTLGLDGFRIDAVKHIKYSFTRDWINHVRSATGKNMFAVAEFWKNDLGAIENYLQKTNWNHSVFDVPLHYNLYNASNSGGNYDMRNIFNGTVVQRHPSHAVTFVDNHDSQPEEALESFVEPWFKPLAYALTLTREQGYPSVFYGDYYGIPTHGVPAMRSKIDPILEARQKYAYGPQHDYLDHPDVIGWTREGDSSHPKSGLATLITDGPGGSKRMYAGLKNAGETWYDITGNRSDTVKIGSDGWGEFHVNQKSVSIYVQK

SEQ ID NO: 41607 - protein, 480 aa, Bacillus sp.
NGTMMQYFEWYLPNDGNHWNRLNSDASNLKSKGITAVWIPPAWKAASQNDVGYGAYDLYDLGEFNQKGTVRTKYGTRSQLQAAVTSLKNNGIQVYGDVVMNHKGGADATEMVRAVEVNPNNRNQEVTGEYTIEAYTRFDFPGRGNTHSSFKWRWYHFDGVDWDQSRNLTNRIYKFRGHGKAWDWEVDTEFGNYDYLMYADYDMDHPEVVNELRNWGVWYTNTLGLDGFRIDAVKHIKYSFTRDWINHVRSATGKNMFAVAEFWKNDLGAIENYLQKTNWNHSVFDVPLHYNLYNASKSGGNYDMRNIFNGTVVQRHPSHAVTFVDNHDSQPEEALESFVEEWFKPLAYALTLTREQGYPSVFYGDYYGIPTHGVPAMRSKIDPILEARQKYAYGPQHDYLDHPDVIGWTREGDSSHPKSGLATLITDGPGGSKRMYAGLKNAGETWYDITGNRSDTVKIGSDGWGEFHVNDGSVSIYVQK

SEQ ID NO: 41608 - protein, 480 aa, Bacillus sp.
NGTMMQYFEWYLPNDGNHWNRLNSDASNLKSKGITAVWIPPAWKGASQNDVGYGAYDLYDLGEFNQKGTVRTKYGTRSQLQAAVTSLKNNGIQVYGDVVMNHKGGADATEMVRAVEVNPNNRNQEVTGEYTIEAWTRFDFPGRGNTHSSFKWRWYHFDGVDWDQSRRLNNRIYKFRGHGKAWDWEVDTEFGNYDYLMYADYDMDHPEVVNELRNWGVWYTNTLGLDGFRIDAVKHIKYSFTRDWINHVRSATGKNMFAVAEFWKNDLGAIENYLQKTNWNHSVFDVPLHYNLYNASQSGGNYDMRNIFNGTVVQRHPSHAVTFVDNHDSQPEEALESFVEPWFKPLAYALTLTREQGYPSVFYGDYYGIPTHGVPAMRSKIDPILEARQKYAYGPQHDYLDHPDVIGWTREGDSSHPKSGLATLITDGPGGSKRMYAGLKNAGETWYDITGNRSDTVKIGSDGWGEFHVNKASVSIYVQK

SEQ ID NO: 41609 - protein, 480 aa, Bacillus sp.
NGTMMQYFEWYLPNDGNHWNRLNSDASNLKSKGITAVWIPPAWKAASQNDVGYGAYDLYDLGEFNQKGTVRTKYGTRSQLQAAVTSLKNNGIQVYGDVVMNHKGGADATEMVRAVEVNPNNRNQEVTGEYTIEAWTRFDFPGRGNTHSSFKWRWYHFDGVDWDQSRQLNNRIYKFRGHGKAWDWEVDTEFGNYDYLMYVDYDMDHPEVVNELRNWGVWYTNTLGLDGFRIDAVKHIKYSFTRDWINHVRSATGKNMFAVAEFWKNDLGAIENYLQKTNWNHSVFDVPLHYNLYNASKSGGNYDMRNIFNGTVVQRHPSHAVTFVDNHDSQPEEALESFVEEWFKPLAYALTLTREQGYPSVFYGDYYGIPTHGVPAMRSKIDPILEARQKYAYGPQHDYLDHPDVIGWTREGDSSHPKSGLATLITDGPGGSKRMYAGLKNAGETWYDITGNRSDTVKIGSDGWGEFHVNDGSVSIYVQK

SEQ ID NO: 41610 - protein, 480 aa, Bacillus sp.
NGTMMQYFEWYLPNDGNHWNRLNSDASNLKSKGITAVWIPPAWKGASQNDTGYGAYDLYDLGEFNQKGTVRTKYGTRSQLQAAVTSLKNNGIQVYGDVVMNHKGGADYTEMVRAVEVNPNNRNQEVTGEYTIEAWTRFDFPGRGNTHSSFKWRWYHFDGVDWDQSERLNNRIYKFRGHGKAWDWEVDTEFGNYDYLMYADYDMDHPEVVNELRNWGVWYTNTLGLDGFRIDAVKHIKYSFTRDWINHVRSATGKNMFAVAEFWKNDLGAIENYLQKTNWNHSVFDVPLHYNLYNASKSGGNYDMRNIFNGTVVQRHPSHAVTFVDNHDSQPEEALESFVEEWFKPLAYALTLTREQGYPSVFYGDYYGIPTHGVPAMRSKIDPILEARQKYAYGPQHDYLDHPDVIGWTREGDSSHPKSGLATLITDGPGGSKRMYAGLKNAGETWYDITGNRSDTVKIGSDGWGEFHVNDGSVSIYVQK

SEQ ID NO: 41611 - protein, 480 aa, Bacillus sp.
NGTMMQYFEWYLPNDGNHWNRLNSDASNLKSKGITAVWIPPAWKGASQNDVGYGAYDLYDLGEFNQKGTVRTKYGTRSQLQAAVTSLKNNGIQVYGDVVMNHKGGADATEMVRAVEVNPNNRNQEVTGEYTIEAWTRFDFPGRGNTHSSFKWRWYHFDGVDWDQSRRLNNRIYKFRGHGKAWDWEVDTEFGNYDYLMYADYDMDHPEVVNELRNWGVWYTNTLGLDGFRIDAVKHIKYSFTRDWINHVRSATGKNMFAVAEFWKNDLGAIENYLQKTNWNHSVFDVPLHYNLYNASKSGGNYDMRNIFNGTVVQRHPSHAVTFVDNHDSQPEEALESFVEPWFKPLAYALTLTREQGYPSVFYGDYYGIPTHGVPAMRSKIDPILEARQKYAYGPQHDYLDHPDVIGWTREGDSSHPKSGLATLITDGPGGSKRMYAGLKNAGETWYDITGNRSDTVKIGSDGWGEFHVNKSSVSIYVQK

SEQ ID NO: 41612 - protein, 480 aa, Bacillus sp.
NGTMMQYFEWYLPNDGNHWNRLNSDASNLKSKGIKAVWIPPAWKGASQNDTGYGAYDLYDLGEFNQKGTVRTKYGTRSQLQAAVTSLKNNGIQVYGDVVMNHKGGADATEMVRAVEVNPNNRNQEVTGEYTIEAWTRFDFPGRGNTHSSFKWRWYHFDGVDWDQSERLNNRIYKFRGHGKAWDWEVDTEFGNYDYLMYADYDMDHPEVVNELRNWGVWYTNTLGLDGFRIDAVKHIKYSFTRDWINHVRSATGKNMFAVAEFWKNDLGAIENYLQKTNWNHSVFDVPLHYNLYNASKSGGNYDMRNIFNGTVVQRHPSHAVTFVDNHDSQPEEALESFVEEWFKPLAYALTLTREQGYPSVFYGDYYGIPTHGVPAMRSKIDPILEARQKYAYGPQHDYLDHPDVIGWTREGDSSHPKSGLATLITDGPGGSKRMYAGLKNAGETWYDITGNRSDTVKIGSDGWGEFHVNDGSVSIYVQK

SEQ ID NO: 41613 - protein, 480 aa, Bacillus sp.
NGTMMQYFEWYLPNDGNHWNRLNSDASNLKSKGITAVWIPPAWKGASQNDVGYGAYDLYDLGEFNQKGTVRTKYGTRSQLQAAVTSLKNNGIQVYGDVVMNHKGGADATEMVRAVEVNPNNRNQEVTGEYTIEAWTRFDFPGRGNTHSSFKWRWYHFDGVDWDQSREFNNRIYKFRGHGKAWDWEVDTEFGNYDYLMYADYDMDHPEVVNELRNWGVWYTNTLGLDGFRIDAVKHIKYSFTRDWINHVRSATGKNMFAVAEFWKNDLGAIENYLQKTNWNHSVFDVPLHYNLYNASKSGGNYDMRNIFNGTVVQVHPSHAVTFVDNHDSQPEEALESFVEEWFKPLAYALTLTREQGYPSVFYGDYYGIPTHGVPAMRSKIDPILEARQKYAYGPQHDYLDHPDVIGWTREGDSSHPKSGLATLITDGPGGSKRMYAGLKNAGETWYDITGNRSDTVKIGSDGWGEFHVNYGSVSIYVQK

SEQ ID NO: 41614 - protein, 480 aa, Bacillus sp.
NGTMMQYFEWYLPNDGNHWNRLNSDASNLKSKGITAVWIPPAWKATSQNDVGYGAYDLYDLGEFNQKGTVRTKYGTRSQLQAAVTSLKNNGIQVYGDVVMNHKGGADATEMVRAVEVNPNNRNQEVTGEYTIEAWTRFDFPGRGNTHSSFKWRWYHFDGVDWDQSRDFTNRIYKFRGHGKAWDWEVDTEFGNYDYLMYADYDMDHPEVVNELRNWGVWYTNTLGLDGFRIDAVKHIKYSFTRDWINHVRSATGKNMFAVAEFWKNDLGAIENYLQKTNWNHSVFDVPLHYNLYNASKSGGNYDMRNIFNGTVVQRHPSHAVTFVDNHDSQPEEALESFVEEWFKPLAYALTLTREQGYPSVFYGDYYGIPTHGVPAMRSKIDPILEARQKYAYGPQHDYLDHPDVIGWTREGDSSHPPSGLATLITDGPGGSKRMYAGLKNAGETWYDITGNRSDTVKIGSDGWGEFHVNDGSVSIYVQK

SEQ ID NO: 41615 - protein, 480 aa, Bacillus sp.
NETMMQYFEWYLPNDGNHWNRLNSDASNLKSKGITAVWIPPAWKGASQNDVGYGAYDLYDLGEFNQKGTVRTKYGTRSQLQAAVTSLKNNGIQVYGDVVMNHKGGADATEMVRAVEVNPNNRNQEVTGEYTIEAWTRFDFPGRGNTHSSFKWRWYHFDGVDWDQSRRLNNRIYKFRGHGKAWDWEVDTEFGNYDYLMYADYDMDHPEVVNELRNWGVWYTNTLGLDGFRIDAVKHIKYSFTRDWINHVRSATGKNMFAVAEFWKNDLGAIENYLQKTNWNHSVFDVPLHYNLYNASKSGGNYDMRNIFNGTVVQAHPMHAVTFVDNHDSQPEEALESFVEEWFKPLAYALTLTREQGYPSVFYGDYYGIPTHGVPAMRSKIDPILEARQKYAYGPQHDYLDHPDVIGWTREGDSSHPKSGLATLITDGPGGSKRMYAGLKNAGETWYDITGNRSDTVKIGSDGWGEFHVNDGSVSIYVQK

SEQ ID NO: 41616 - protein, 480 aa, Bacillus sp.
NGTMMQYFEWYLPNDGNHWNRLNSDASNLKSKGITAVWIPPAWKGASQNDVGYGAYDLYDLGEFNQKGTVRTKYGTRSQLQAAVTSLKNNGIQVYGDVVMNHKGGADATEMVRAVEVNPNNRNQEVTGEYTIEAWTRFDFPGRGNTHSSFKWRWYHFDGVDWDQSRRLNNRIYKFRGHGKAWDWEVDTEFGNYDYLMYADYDMDHPEVVNELRNWGVWYTNTLGLDGFRIDAVKHIKYSFTRDWINHVRSATGKNMFAVAEFWKNDLGAIENYLQKTNWNHSVFDVPLHYNLYNASQSGGNYDMRNIFNGTVVQRHPSHAVTFVDNHDSQPEEALESFVEPWFKPLAYALTLTREQGYPSVFYGDYYGIPTHGVPAMRSKIDPILEARQKYAYGPQHDYLDHPDVIGWTREGDSSHPKSGLATLITDGPGGSKRMYAGLKNAGETWYDITGNRSDTVKIGSDGWGEFHVNKTSVSIYVQK

SEQ ID NO: 41617 - protein, 480 aa, Bacillus sp.
NGTMMQYFEWYLPNDGNHWNRLNSDASNLKSKGITAVWIPPAWKGASQNDVGYGAYDLYDLGEFNQKGTVRTKYGTRSQLQAAVTSLKNNGIAVYGDVVMNHKGGADATEMVRAVEVNPNNRNQEVTGEYTIEAWTRFDFPGRGNTHSSFKWRWYHFDGVDWDQSRRLNNRIYKFRGHGKAWDWEVDTEFGNYDYLMYADYDMDHPEVVNELRNWGVWYTNTLGLDGFRIDAVKHIKYSFTRDWINHVRSATGKNMFAVAEFWKNDLGAIENYLQKTNWNHSVFDVPLHYNLYNASKSGGNYDMRNIFNGTVVQAHPMHAVTFVDNHDSQPEEALESFVEEWFKPLAYALTLTREQGYPSVFYGDYYGIPTHGVPAMRSKIDPILEARQKYAYGPQHDYLDHPDVIGWTREGDSSHPKSGLATLITDGPGGSKRMYAGLKNAGETWYDITGNRSDTVKIGSDGWGEFHVNDGSVSIYVQK

SEQ ID NO: 41618 - protein, 480 aa, Bacillus sp.
NGTMMQYFEWYLPNDGNHWNRLNSDASNLKSKGITAVWIPPAWKGISQNDVGYGAYDLYDLGEFNQKGTVRTKYGTRSQLQAAVTSLKNNGIQVYGDVVMNHKGGADATEMVRAVEVNPNNRNQEVTGEYTIEAWTRFDFPGRGNTHSSFKWRWYHFDGVDWDQSRRTNNRIYKFRGHGKAWDWEVDTEFGNYDYLMYTDYDMDHPEVVNELRNWGVWYTNTLGLDGFRIDAVKHIKYSFTRDWINHVRSATGKNMFAVAEFWKNDLGAIENYLQKTNWNHSVFDVPLHYNIYNASKSGGNYDMRNIFNGTVVQRHPSHAVTFVDNHDSQPEEALESFVEEWFKPLAYALTLTREQGYPSVFYGDYYGIPTHGVPAMRSKIDPILEARQKYAYGPQHDYLDHPDVIGWTREGDSSHPKSGLATLITDGPGGSKRMYAGLKNAGETWYDITGNRSDTVKIGSDGWGEFHVNDGSVSIYVQK

SEQ ID NO: 41619 - protein, 480 aa, Bacillus sp.
NGTMMQYFEWYLPNDGNHWNRLNSDASNLKSKGITAVWIPPAWKAASQNDVGYGAYDLYDLGEFNQKGTVRTKYGTRSQLQAAVTSLKNNGIQVYGDVVMNHKGGADATEMVRAVEVNPNNRNQEVTGEYTIEAWTRFDFPGRGNTHSSFKWRWYHFDGVDWDQSRDLDNRIYKFRGHGKAWDWEVDTEFGNYDYLMYADYDMDHPEVVNELRNWGVWYTNTLGLDGFRIDAVKHIKYSFTRDWINHVRIATGKNMFAVAEFWKNDLGAIENYLQKTNWNHSVFDVPLHYNLYNASKSGGNYDMRNIFNGTVVQRHPSHAVTFVDNHDSQPEEALESFVDEWFKPLAYALTLTREQGYPSVFYGDYYGIPTHGVPAMRSKIDPILEARQKYAYGPQHDYLDHPDVIGWTREGDSSHPKSGLATLITDGPGGSKRMYAGLKNAGETWYDITGNRSDTVKIGSDGWGEFHVNDQSVSIYVQK

SEQ ID NO: 41620 - protein, 480 aa, Bacillus sp.
NGTMMQYFEWYLPNDGNHWNRLNSDASNLKSKGIKAVWIPPAWKGASQNDVGYGAYDLYDLGEFNQRGTVRTKYGTRSQLQAAVTSLKNNGIQVYGDVVMNHKGGADATEMVRAVEVNPNNRNQEVTGEYTIEAWTRFDFPGRGNTHSSFKWRWYHFDGVDWDQSRRLNNRIYKFRGHGKAWDWEVDTEFGNYDYLMYADYDMDHPEVVNELRNWGVWYTNTLGLDGFRIDAVKHIKYSFTRDWINHVRSATGKNMFAVAEFWKNDLGAIENYLQKTNWNHSVFDVPLHYNLYNASKSGGNYDMRNIFNGTVVQRHPSHAVTFVDNHDSQPEEALESFVEEWFKPLAYALTLTREQGYPSVFYGDYYGIPTHGVPAMRSKIDPILEARQKYAYGPQHDYLDHPDVIGWTREGDSSHPKSGLATLITDGPGGSKRMYAGLKNAGETWYDITGNRSDTVKIGSDGWGEFHVNDGSVSIYVQK

SEQ ID NO: 41621 - protein, 480 aa, Bacillus sp.
NGTMMQYFEWYLPNDGNHWNRLNSDASNLKSKGITAVWIPPAWKGASQNDVGYGAYDLYDLGEFNQKGTVRTKYGTRSQLQAAVTSLKNNGIQVYGDVVMNHKGGADATEMVRAVEVNPNNRNQEVTGEYTIEAWTRFDFPGRGNTHSSFKWRWYHFDGVDWDQSRKLNNRIYKFRGHGKAWDWEVDTEFGNYDYLMYVDYDMDHPEVVNELRNWGVWYTNTLGLDGFRIDAVKHIKYSFTRDWINHVRSATGKNMFAVAEFWKNDLGAIENYLQKTNWNHSVFDVPLHYNLYNASKSGGNYDMRNIFNGTVVQRHPSHAVTFVDNHDSQPEEALESFVDEWFKPLAYALTLTREQGYPSVFYGDYYGIPTHGVPAMRSKIDPILEARQKYAYGPQHDYLDHPDVIGWTREGDSSHPKSGLATLITDGPGGSKRMYAGLKNAGETWYDITGNRSDTVKIGSDGWGEFHVNKSSVSIYVQK

SEQ ID NO: 41622 - protein, 480 aa, Bacillus sp.
NLTMMQYFEWYLPNDGNHWNRLNSDASNLKSKGITAVWIPPAWKGASQNDVGYGAYDLYDLGEFNQKGTVRTKYGTRSQLQAAVTSLKNNGIQVYGDVVMNHKGGADATEMVRAVEVNPNNRNQEVTGEYTIEAWTRFDFPGRGNTHSSFKWRWYHFDGVDWDQSRRLNNRIYKFRGHGKAWDWEVDTEFGNYDYLMYADYDMDHPEVVNELRNWGVWYTNTLGLDGFRIDAVKHIKYSFTRDWINHVRSATGKNMFAVAEFWKNDLGAIENYLQKTNWNHSVFDVPLHYNLYNASKSGGNYDMRNIFNGTVVQSHPMHAVTFVDNHDSQPEEALESFVEEWFKPLAYALTLTREQGYPSVFYGDYYGIPTHGVPAMRSKIDPILEARQKYAYGPQHDYLDHPDVIGWTREGDSSHPKSGLATLITDGPGGSKRMYAGLKNAGETWYDITGNRSDTVKIGSDGWGEFHVNDGSVSIYVQK

SEQ ID NO: 41623 - protein, 480 aa, Bacillus sp.
NGTMMQYFEWYLPNDGNHWNRLNSDASNLKSKGITAVWIPPAWKAASQNDVGYGAYDLYDLGEFNQKGTVRTKYGTRSQLQAAVTSLKNNGIQVYGDVVMNHKGGADATEMVRAVEVNPNNRNQEVTGEYTIEAWTRFDFPGRGNTHSSFKWRWYHFDGVDWDQSRRVNNRIYKFRGHGKAWDWEVDTEFGNYDYLMYTDYDMDHPEVVNELRNWGVWYTNTLGLDGFRIDAVKHIKYSFTRDWINHVRSATGKNMFAVAEFWKNDLGAIENYLQKTNWNHSVFDVPLHYNLYNASKSGGNYDMRNIFNGTVVQRHPSHAVTFVDNHDSQPEEALESFVEEWFKPLAYALTLTREQGYPSVFYGDYYGIPTHGVPAMRSKIDPILEARQKYAYGPQHDYLDHPDVIGWTREGDSSHPKSGLATLITDGPGGSKRMYAGLKNAGETWYDITGNRSDTVKIGSDGWGEFHVNDGSVSIYVQK

SEQ ID NO: 41624 - protein, 480 aa, Bacillus sp.
NGTMMQYFEWYLPNDGNHWNRLNSDASNLKSKGITAVWIPPAWKGASQNDVGYGAYDLYDLGEFNQKGTVRTKYGTRSQLQAAVTSLKNNGISVYGDVVMNHKGGADATEMVRAVEVNPNNRNQEVTGEYTIEAWTRFDFPGRGNTHSSFKWRWYHFDGVDWDQSRRLNNRIYKFRGHGKAWDWEVDTEFGNYDYLMYADYDMDHPEVVNELRNWGVWYTNTLGLDGFRIDAVKHIKYSFTRDWINHVRSATGKNMFAVAEFWKNDLGAIENYLQKTNWNHSVFDVPLHYNLYNASKSGGNYDMRNIFNGTVVQSHPSHAVTFVDNHDSQPEEALESFVEEWFKPLAYALTLTREQGYPSVFYGDYYGIPTHGVPAMRSKIDPILEARQKYAYGPQHDYLDHPDVIGWTREGDSSHPKSGLATLITDGPGGSKRMYAGLKNAGETWYDITGNRSDTVKIGSDGWGEFHVNDGSVSIYVQK

SEQ ID NO: 41625 - protein, 480 aa, Bacillus sp.
NGTMMQYFEWYLPNDGNHWNRLNSDASNLKSKGITAVWIPPAWKAASQNDVGYGAYDLYDLGEFNQKGTVRTKYGTRSQLQAAVTSLKNNGIQVYGDVVMNHKGGADATEMVRAVEVNPNNRNQEVTGEYTIEAWTRFDFPGRGNTHSSFKWRWYHFDGVDWDQSRDLQNRIYKFRGHGKAWDWEVDTEFGNYDYLMYADYDMDHPEVVNELRNWGVWYTNTLGLDGFRIDAVKHIKYSFTRDWINHVRSATGKNMFAVAEFWKNDLGAIENYLQKTNWNHSVFDVPLHYNLYNASKSGGNYDMRNIFNGTVVQRHPSHAVTFVDNHDSQPEEALESFVETWFKPLAYALTLTREQGYPSVFYGDYYGIPTHGVPAMRSKIDPILEARQKYAYGPQHDYLDHPDVIGWTREGDSSHPKSGLATLITDGPGGSKRMYAGLKNAGETWYDITGNRSDTVKIGSDGWGEFHVNKASVSIYVQK

SEQ ID NO: 41626 - protein, 480 aa, Bacillus sp.
NGTMMQYFEWYLPNDGNHWNRLNSDASNLKSKGITAVWIPPAWKAASQNDVGYGAYDLYDLGEFNQKGTVRTKYGTRSQLQAAVTSLKNNGIQVYGDVVMNHKGGADLTEMVRAVEVNPNNRNQEVTGEYTIEAWTRFDFPGRGNTHSSFKWRWYHFDGVDWDQSRQITNRIYKFRGHGKAWDWEVDTEFGNYDYLMYTDYDMDHPEVVNELRNWGVWYTNTLGLDGFRIDAVKHIKYSFTRDWINHVRSATGKNMFAVAEFWKNDLGAIENYLQKTNWNHSVFDVPLHYNLYNASKSGGNYDMRNIFNGTVVQRHPSHAVTFVDNHDSQPEEALESFVEEWFKPLAYALTLTREQGYPSVFYGDYYGIPTHGVPAMRSKIDPILEARQKYAYGPQHDYLDHPDVIGWTREGDSSHPKSGLATLITDGPGGSKRMYAGLKNAGETWYDITGNRSDTVKIGSDGWGEFHVNDGSVSIYVQK

SEQ ID NO: 41627 - protein, 480 aa, Bacillus sp.
NGTMMQYFEWYLPNDGNHWNRLNSDASNLKSKGITAVWIPPAWKGASQNDVGYGAYDLYDLGEFNQKGTVRTKYGTRSQLQAAVTSLKNNGIQVYGDVVMNHKGGADATEMVRAVEVNPNNRNQEVTGEYTIEAWTRFDFPGRGNTHSSFKWRWYHFDGVDWDQSERLNNRIYKFRGHGKAWDWEVETEFGNYDYLMYADYDMDHPEVVNELRNWGVWYTNTLGLDGFRIDAVKHIKYSFTRDWINHVRSATGKNMFAVAEFWKNDLGAIENYLQKTNWNHSVFDVPLHYNLYNASKSGGNYDMRNIFNGTVVQRHPSHAVTFVDNHDSQPEEALESFVDPWFKPLAYALTLTREQGYPSVFYGDYYGIPTHGVPAMRSKIDPILEARQKYAYGPQHDYLDHPDVIGWTREGDSSHPKSGLATLITDGPGGSKRMYAGLKNAGETWYDITGNRSDTVKIGSDGWGEFHVNGGSVSIYVQK

SEQ ID NO: 41628 - protein, 480 aa, Bacillus sp.
NGTMMQYFEWYLPNDGNHWNRLNSDASNLKSKGITAVWIPPAWKGASQNDVGYGAYDLYDLGEFNQKGTVRTKYGTRSQLQAAVTSLKNNGIQVYGDVVMNHKGGADATEMVRAVEVNPNNRNQEVTGEYTIEAWTRFDFPGRGNTHSSFKWRWYHFDGVDWDQSRDLTNRIYKFRGHGKAWDWEVDTEFGNYDYLMYADYDMDHPEVVNELRNWGVWYTNTLGLDGFRIDAVKHIKYSFTRDWINHVRSATGKNMFAVAEFWKNDLGAIENYLQKTNWNHSVFDVPLHYNLYNASQSGGNYDMRNIFNGTVVQRHPSHAVTFVDNHDSQPEEALESFVEPWFKPLAYALTLTREQGYPSVFYGDYYGIPTHGVPAMRSKIDPILEARQKYAYGPQHDYLDHPDVIGWTREGDSSHPKSGLATLITDGPGGSKRMYAGLKNAGETWYDITGNRSDTVKIGSDGWGEFHVNKSSVSIYVQK

SEQ ID NO: 41629 - protein, 480 aa, Bacillus sp.
NGTMMQYFEWYLPNDGNHWNRLNSDASNLKSKGITAVWIPPAWKGASQNDVGYGAYDLYDLGEFNQKGTVRTKYGTRSQLQAAVTSLKNNGIQVYGDVVMNHKGGADATEMVRAVEVNPNNRNQEVTGEYTIEAYTRFDFPGRGNTHSSFKWRWYHFDGVDFDQSRKLNNRIYKFRGHGKAWDWEVDTEFGNYDYLMYVDYDMDHPEVVNELRNWGVWYTNTLGLDGFRIDAVKHIKYSFTRDWINHVRSATGKNMFAVAEFWKNDLGAIENYLQKTNWNHSVFDVPLHYNLYNASKSGGNYDMRNIFNGTVVQRHPSHAVTFVDNHDSQPEEALESFVEEWFKPLAYALTLTREQGYPSVFYGDYYGIPTHGVPAMRSKIDPILEARQKYAYGPQHDYLDHPDVIGWTREGDSSHPKSGLATLITDGPGGSKRMYAGLKNAGETWYDITGNRSDTVKIGSDGWGEFHVNDGSVSIYVQK

SEQ ID NO: 41630 - protein, 480 aa, Bacillus sp.
NGTMMQYFEWYLPNDGNHWNRLNSDASNLKSKGITAVWIPPAWKATSQNDVGYGAYDLYDLGEFNQKGTVRTKYGTRSQLQAAVTSLKNNGIQVYGDVVMNHKGGADATEMVRAVEVNPNNRNQEVTGEYTIEAWTRFDFPGRGNTHSSFKWRWYHFDGVDWDQSRQLQNRIYKFRGHGKAWDWEVDTEFGNYDYLMYADYDMDHPEVVNELRNWGVWYTNTLGLDGFRIDAVKHIKYSFTRDWINHVRSATGKNMFAVAEFWKNDLGAIENYLQKTNWNHSVFDVPLHYNLYNASKSGGNYDMRNIFNGTVVQRHPSHAVTFVDNHDSQPEEALESFVEEWFKPLAYALTLTREQGYPSVFYGDYYGIPTHGVPAMRSKIDPILEARQKYAYGPQHDYLDHPDVIGWTREGDSSHPKSGLATLITDGPGGSKRMYAGLKNAGETWYDITGNRSDTVKIGSDGWGKFHVNDGSVSIYVQK

SEQ ID NO: 41631 - protein, 480 aa, Bacillus sp.
NSTMMQYFEWYLPNDGNHWNRLNSDASNLKSKGITAVWIPPAWKGASQNDVGYGAYDLYDLGEFNQKGTVRTKYGTRSQLQAAVTSLKNNGIQVYGDVVMNHKGGADATEMVRAVEVNPNNRNQEVTGEYTIEAWTRFDFPGRGNTHSSFKWRWYHFDGVDWDQSRRLNNRIYKFRGHGKAWDWEVDTEFGNYDYLMYADYDMDHPEVVNELRNWGVWYTNTLGLDGFRIDAVKHIKYSFTRDWINHVRSATGKNMFAVAEFWKNDLGAIENYLQKTNWNHSVFDVPLHYNLYNASKSGGNYDMRNIFNGTVVQAHPNQAVTFVDNHDSQPEEALESFVEEWFKPLAYALTLTREQGYPSVFYGDYYGIPTHGVPAMRSKIDPILEARQKYAYGPQHDYLDHPDVIGWTREGDSSHPKSGLATLITDGPGGSKRMYAGLKNAGETWYDITGNRSDTVKIGSDGWGEFHVNDGSVSIYVQK

SEQ ID NO: 41632 - protein, 480 aa, Synthetic construct
NGTMMQYFEWYLPNDGNHWNRLNSDASNLKSKGITAVWIPPAWKGASQNDVGYGAYDLYDLGEFNQKGTVRTKYGTRSQLQAAVTSLKNNGIQVYGDVVMNHKGGADATEMVRAVEVNPNNRNQEVTGEYTIEAWTRFDFPGRGNTHSSFKWRWYHFDGVDWDQSRRLNNRIYLFRGHGKRWDWPVDTENGNYDYLMYADIDMDHPEVVNELRNWGVWYTNTLGLDGFRIDAVKHIKYSFTRDWINHVRSATGKNMFAVAEFWKNDLGAIENYLQKTNWNHSVFDVPLHYNLYNASKSGGNYDMRNIFNGTVVQRHPSHAVTFVDNHDSQPEEALESFVEEWFKPLAYALTLTREQGYPSVFYGDYYGIPTHGVPAMRSKIDPILEARQKYAYGPQHDYLDHPDVIGWTREGDSSHPKSGLATLITDGPGGSKRMYAGLKNAGETWYDITGNRSDTVKIGSDGWGEFHVNDGSVSIYVQK

SEQ ID NO: 41633 - protein, 480 aa, Bacillus sp.
NGTMMQYFEWYLPNDGNHWNRLNSDASNLKSKGITAVWIPPAWKAVSQNDVGYGAYDLYDLGEFNQKGTVRTKYGTRSQLQAAVTSLKNNGIQVYGDVVMNHKGGADATEMVRAVEVNPNNRNQEVTGEYTIEAWTRFDFPGRGNTHSSFKWRWYHFDGVDWDQSRDLENRIYKFRGHGKAWDWEVDTEFGNYDYLMYADYDMDHPEVVNELRNWGVWYTNTLGLDGFRIDAVKHIKYSFTRDWINHVRSATGKNMFAVAEFWKNDLGAIENYLQKTNWNHSVFDVPLHYNLYNASKSGGNYDMRNIFNGTVVQRHPSHAVTFVDNHDSQPEEALESFVETWFKPLAYALTLTREQGYPSVFYGDYYGIPTHGVPAMRSKIDPILEARQKYAYGPQHDYLDHPDVIGWTREGDSSHPKSGLATLITDGPGGSKRMYAGLKNAGETWYDITGNRSDTVKIGSDGWGEFHVNKASVSIYVQK

SEQ ID NO: 41634 - protein, 480 aa, Bacillus sp.
NGTMMQYFEWYLPNDGNHWNRLNSDASNLKSKGITAVWIPPAWKAASQNDVGYGAYDLYDLGEFNQKGTVRTKYGTRSQLQAAVTSLKNNGIQVYGDVVMNHKGGADATEMVRAVEVNPNNRNQEVTGEYTIEAWTRFDFPGRGNTHSSFKWRWYHFDGVDWDQSRDLQNRIYKFRGHGKAWDWEVDTEFGNYDYLMYADYDMDHPEVVNELRNWGVWYTNTLGLDGFRIDAVKHIKYSFTRDWINHVRSATGKNMFAVAEFWKNDLGAIENYLQKTNWNHSVFDVPLHYNLYNASKSGGNYDMRNIFNGTVVQVHPSHAVTFVDNHDSQPEEALESFVEEWFKPLAYALTLTREQGYPSVFYGDYYGIPTHGVPAMRSKIDPILEARQKYAYGPQHDYLDHPDVIGWTREGDSSHPKSGLATLITDGPGGSKRMYAGLKNAGETWYDITGNRSDTVKIGSDGWGEFHVNDGSVSIYVQK

SEQ ID NO: 41635 - protein, 480 aa, Bacillus sp.
NGTMMQYFEWYLPNDGNHWNRLNSDASNLKSKGITAVWIPPAWKGASQNDVGYGAYDLYDLGEFNQKGTVRTKYGTRSQLQAAVTSLKNNGIQVYGDVVMNHKGGADATEMVRAVEVNPNNRNQEVTGEYTIEAWTRFDFPGRGNTHSSFKWRWYHFDGVDWDQSRRLNNRIYKFRGHGKAWDWEVDTEFGNYDYLMYADYDMDHPEVVNELRNWGVWYTNTLGLDGFRIDAVKHIKYSFTRDWINHVRSATGKNMFAVAEFWKNDLGAIENYLQKTNWNHSVFDVPLHYNLYNASKSAGNYDMRNIFNGTVVQRHPSHAVTFVDNHDSQPEEALESFVDTWFKPLAYALTLTREQGYPSVFYGDYYGIPTHGVPAMRSKIDPILEARQKYAYGPQHDYLDHPDVIGWTREGDSSHPKSGLATLITDGPGGSKRMYAGLKNAGETWYDITGNRSDTVKIGSDGWGEFHVNGKSVSIYVQK

SEQ ID NO: 41636 - protein, 480 aa, Bacillus sp.
NGTMMQYFEWYLPNDGNHWNRLNSDASNLKSKGITAVWIPPAWKGASQNDVGYGAYDLYDLGEFNQKGTVRTKYGTRSQLQAAVTSLKNNGIQVYGDVVMNHKGGADATEMVRAVEVNPNNRNQEVTGEYTIEAWTRFDFPGRGNTHSSFKWRWYHFDGVDWDQSRRLNNRIYKFRGHGKAWDWEVDTEFGNYDYLMYADYDMDHPEVVNELRNWGVWYTNTLGLDGFRIDAVKHIKYSFTRDWINHVRSATGKNMFAVAEFWKNDLGAIENYLQKTNWNHSVFDVPLHYNLYNASKSGGNYDMRNIFNGTVVQRHPSHAVTFVDNHDSQPEEALESFVDPWFKPLAYALTLTREQGYPSVFYGDYYGIPTHGVPAMRSKIDPILEARQKYAYGPQHDYLDHPDVIGWTREGDSSHPKSGLATLITDGPGGSKRMYAGLKNAGETWYDITGNRSDTVKIGSDGWGEFHVNKQSVSIYVQK

SEQ ID NO: 41637 - protein, 480 aa, Bacillus sp.
NGTMMQYFEWYLPNDGNHWNRLNSDASNLKSKGITAVWIPPAWKGASQNDVGYGAYDLYDLGEFNQKGTVRTKYGTRSQLQAAVTSLKNNGIQVYGDVVMNHKGGADATEMVRAVEVNPNNRNQEVTGEYTIEAWTRFDFPGRGNTHSSFKWRWYHFDGVDWDQSRRLNNRIYKFRGHGKAWDWEVDTEFGNYDYLMYADYDMDHPEVVNELRNWGVWYTNTLGLDGFRIDAVKHIKYSFTRDWINHVRSATGKNMFAVAEFWKNDLGAIENYLQKTNWNHSVFDVPLHYNLYNASKSSGNYDMRNIFNGTVVQRHPSHAVTFVDNHDSQPEEALESFVDTWFKPLAYALTLTREQGYPSVFYGDYYGIPTHGVPAMRSKIDPILEARQKYAYGPQHDYLDHPDVIGWTREGDSSHPKSGLATLITDGPGGSKRMYAGLKNAGETWYDITGNRSDTVKIGSDGWGEFHVNQASVSIYVQK

SEQ ID NO: 41638 - protein, 480 aa, Bacillus sp.
NGTMMQYFEWYLPNDGNHWNRLNSDASNLKSKGITAVWIPPAWKGASQNDVGYGAYDLYDLGEFNQKGTVRTKYGTRSQLQAAVTSLKNNGINVYGDVVMNHKGGADATEMVRAVEVNPNNRNQEVTGEYTIEAWTRFDFPGRGNTHSSFKWRWYHFDGVDWDQSRRLNNRIYKFRGHGKAWDWEVDTEFGNYDYLMYADYDMDHPEVVNELRNWGVWYTNTLGLDGFRIDAVKHIKYSFTRDWINHVRSATGKNMFAVAEFWKNDLGAIENYLQKTNWNHSVFDVPLHYNLYNASKSGGNYDMRNIFNGTVVQAHPNHAVTFVDNHDSQPEEALESFVEEWFKPLAYALTLTREQGYPSVFYGDYYGIPTHGVPAMRSKIDPILEARQKYAYGPQHDYLDHPDVIGWTREGDSSHPKSGLATLITDGPGGSKRMYAGLKNAGETWYDITGNRSDTVKIGSDGWGEFHVNDGSVSIYVQK

SEQ ID NO: 41639 - protein, 480 aa, Bacillus sp.
NGTMMQYFEWYLPNDGNHWNRLNSDASNLKSKGITAVWIPPAWKGASQNDVGYGAYDLYDLGEFNQKGTVRTKYGTRSQLQAAVTSLKNNGIQVYGDVVMNHKGGADATEMVDAVEVNPNNRNQEVTGEYTIEAWTRFDFPGRGNTHSSFKWRWYHFDGVDWDQSRRLNNRIYLFRAHGKAWDWEVDTEFGNYDYLMYADYDMDHPEVVNELRNWGVWYTNTLGLDGFRIDAVKHIKYSFTRDWINHVRSATGKNMFAVAEFWKNDLGAIENYLQKTNWNHSVFDVPLHYNLYNASKSGGNYDMRNIFNGTVVQRHPSHAVTFVDNHDSQPEEALESFVEEWFKPLAYALTLTREQGYPSVFYGDYYGIPTHGVPAMRSKIDPILEARQKYAYGPQHDYLDHPDVIGWTREGDSSHPKSGLATLITDGPGGSKRMYAGLKNAGETWYDITGNRSDTVKIGSDGWGEFHVNDGSVSIYVQK

SEQ ID NO: 41640 - protein, 480 aa, Bacillus sp.
NGTMMQYFEWYLPNDGNHWNRLNSDASNLKSKGITAVWIPPAWKGASQNDVGYGAYDLYDLGEFNQKGTVRTKYGTRSQLQAAVTSLKNNGIQVYGDVVMNHKGGADATEMVRAVEVNPNNRNQEVTGEYTIEAWTRFDFPGRGNTHSSFKWRWYHFDGVDWDQSRRLNNRIYKFRGHGKAWDWEVDTEFGNYDYLMYADYDMDHPEVVNELRNWGVWYTNTLGLDGFRIDAVKHIKYSFTRDWINHVRSATGKNMFAVAEFWKNDLGAIENYLQKTNWNHSVFDVPLHYNLYNASQSGGNYDMRNIFNGTVVQRHPSHAVTFVDNHDSQPEEALESFVEEWFKPLAYALTLTREQGYPSVFYGDYYGIPTHGVPAMRSKIDPILEARQKYAYGPQHDYLDHPDVIGWTREGDSSHPKSGLATLITDGPGGSKRMYAGLKNAGETWYDITGNRSDTVKIGSDGWGEFHVNGASVSIYVQK

SEQ ID NO: 41641 - protein, 480 aa, Bacillus sp.
NGTMMQYFEWYLPNDGNHWNRLNSDASNLKSKGITAVWIPPAWKGASQNDVGYGAYDLYDLGEFNQKGTVRTKYGTRSQLQAAVTSLKNNGIQVYGDVVMNHKGGADATEMVRAVEVNPNNRNQEVTGEYTIEAWTRFDFPGRGNTHSSFKWRWYHFDGVDWDQSRRLNNRIYKFRGHGKAWDWEVDTEFGNYDYLMYADYDMDHPEVVNELRNWGVWYTNTLGLDGFRIDAVKHIKYSFTRDWINHVRSATGKNMFAVAEFWKNDLGAIENYLQKTNWNHSVFDVPLHYNLYNASKSAGNYDMRNIFNGTVVQRHPSHAVTFVDNHDSQPEEALESFVDTWFKPLAYALTLTREQGYPSVFYGDYYGIPTHGVPAMRSKIDPILEARQKYAYGPQHDYLDHPDVIGWTREGDSSHPKSGLATLITDGPGGSKRMYAGLKNAGETWYDITGNRSDTVKIGSDGWGEFHVNKASVSIYVQK

SEQ ID NO: 41642 - protein, 480 aa, Bacillus sp.
NGTMMQYFEWYLPNDGNHWNRLNSDASNLKSKGITAVWIPPAWKAVSQNDVGYGAYDLYDLGEFNQKGTVRTKYGTRSQLQAAVTSLKNNGIQVYGDVVMNHKGGADATEMVRAVEVNPNNRNQEVTGEYTIEAWTRFDFPGRGNTHSSFKWRWYHFDGVDWDQSRDLENRIYKFRGHGKAWDWEVDTEFGNYDYLMYADYDYDHPESTNEMRNWGVWYTNTLGLDGFRIDAVKHIKYSFTRDWINHVRSATGKNMFAVAEFWKNDLGAIENYLQKTNWNHSVFDVPLHYNLYNASKSGGNYDMRNIFNGTVVQRHPSHAVTFVDNHDSQPEEALESFVEEWFKPLAYALTLTREQGYPSVFYGDYYGIPTHGVPAMRSKIDPILEARQKYAYGPQHDYLDHPDVIGWTREGDSSHPKSGLATLITDGPGGSKRMYAGLKNAGETWYDITGNRSDTVKIGSDGWGEFHVNDGSVSIYVQK

SEQ ID NO: 41643 - protein, 480 aa, Bacillus sp.
NGTMMQYFEWYLPNDGNHWNRLNSDASNLKSKGITAVWIPPAWKATSQNDVGYGAYDLYDLGEFNQKGTVRTKYGTRSQLQAAVTSLKNNGIQVYGDVVMNHKGGADATEMVRAVEVNPNNRNQEVTGEYTIEAWTRFDFPGRGNTHSSFKWRWYHFDGVDWDQSRDLNNRIYKFRGHGKAWDWEVDTEFGNYDYLMYADYDMDHPEVVNELRNWGVWYTNTLGLDGFRIDAVKHIKYSFTRDWINHVRSATGKNMFAVAEFWKNDLGAIENYLQKTNWNHSVFDVPLHYNLYNASKSGGNYDMRNIFNGTVVQAHPNHAVTFVDNHDSQPEEALESFVEEWFKPLAYALTLTREQGYPSVFYGDYYGIPTHGVPAMRSKIDPILEARQKYAYGPQHDYLDHPDVIGWTREGDSSHPKSGLATLITDGPGGSKRMYAGLKNAGETWYDITGNRSDTVKIGSDGWGEFHVNDGSVSIYVQK

SEQ ID NO: 41644 - protein, 480 aa, Bacillus sp.
NKTMMQYFEWYLPNDGNHWNRLNSDASNLKSKGITAVWIPPAWKGASQNDVGYGAYDLYDLGEFNQKGTVRTKYGTRSQLQAAVTSLKNNGIQVYGDVVMNHKGGADATEMVRAVEVNPNNRNQEVTGEYTIEAWTRFDFPGRGNTHSSFKWRWYHFDGVDWDQSRRLNNRIYKFRGHGKAWDWEVDTEFGNYDYLMYADYDMDHPEVVNELRNWGVWYTNTLGLDGFRIDAVKHIKYSFTRDWINHVRSATGKNMFAVAEFWKNDLGAIENYLQKTNWNHSVFDVPLHYNLYNASKSGGNYDMRNIFNGTVVQAHPSLAVTFVDNHDSQPEEALESFVEEWFKPLAYALTLTREQGYPSVFYGDYYGIPTHGVPAMRSKIDPILEARQKYAYGPQHDYLDHPDVIGWTREGDSSHPKSGLATLITDGPGGSKRMYAGLKNAGETWYDITGNRSDTVKIGSDGWGEFHVNDGSVSIYVQK

SEQ ID NO: 41645 - protein, 480 aa, Bacillus sp.
NGTMMQYFEWYLPNDGNHWNRLNSDASNLKSKGITAVWIPPAWKATSQNDVGYGAYDLYDLGEFNQKGTVRTKYGTRSQLQAAVTSLKNNGIQVYGDVVMNHKGGADATEMVRAVEVNPNNRNQEVTGEYTIEAWTRFDFPGRGNTHSSFKWRWYHFDGVDWDQSRQLNNRIYKFRGHGKAWDWEVDTEFGNYDYLMYVDYDMDHPEVVNELRNWGVWYTNTLGLDGFRIDAVKHIKYSFTRDWINHVRSATGKNMFAVAEFWKNDLGAIENYLQKTNWNHSVFDVPLHYNLYNASKSGGNYDMRNIFNGTVVQRHPSHAVTFVDNHDSQPEEALESFVEEWFKPLAYALTLTREQGYPSVFYGDYYGIPTHGVPAMRSKIDPILEARQKYAYGPQHDYLDHPDVIGWTREGDSSHPKSGLATLITDGPGGSKRMYAGLKNAGETWYDITGNRSDTVKIGSDGWGEFHVNDGSVSIYVQK

SEQ ID NO: 41646 - protein, 480 aa, Bacillus sp.
NGTMMQYFEWYLPNDGNHWNRLNSDASNLKSKGITAVWIPPAWKGASQNDVGYGAYDLYDLGEFNQKGTVRTKYGTRSQLQAAVTSLKNNGIQVYGDVVMNHKGGADATEMVRAVEVNPNNRNQEVTGDYTIEAWTRFDFPGRGNTHSSFKWRWYHFDGVDWDQSRRLNNRIYKFRGHGKEWDWEVDTEFGNYDYLMYADYDMDHPEVVNELRNWGVWYTNTLGLDGFRIDAVKHIKYSFTRDWINHVRSATGKNMFAVAEFWKNDLGAIENYLQKTNWNHSVFDVPLHYNLYNASKSGGNYDMRNIFNGTVVQRHPSHAVTFVDNHDSQPEEALESFVEEWFKPLAYALTLTREQGYPSVFYGDYYGIPTHGVPAMRSKIDPILEARQKYAYGPQHDYLDHPDVIGWTREGDSSHPKSGLATLITDGPGGSKRMYAGLKNAGETWYDITGNRSDTVKIGSDGWGEFHVNDGSVSIYVQK

SEQ ID NO: 41647 - protein, 480 aa, Bacillus sp.
NGTMMQYFEWYLPNDGNHWNRLNSDASNLKSKGITAVWIPPAWKGASQNDVGYGAYDLYDLGEFNQKGTVRTKYGTRSQLQAAVTSLKNNGIQVYGDVVMNHKGGADATEMVRAVEVNPNNRNQEVTGEYTIEAWTRFDFPGRGNTHSSFKWRWYHFDGVDWDQSRRLNNRIYKFRSHGKVWDWEVDTEFGNYDYLMYADYDMDHPEVVNELRNWGVWYTNTLGLDGFRIDAVKHIKYSFTRDWINHVRSATGKNMFAVAEFWKNDLGAIENYLQKTNWNHSVFDVPLHYNLYNASKSGGNYDMRNIFNGTVVQRHPSHAVTFVDNHDSQPEEALESFVEEWFKPLAYALTLTREQGYPSVFYGDYYGIPTHGVPAMRSKIDPILEARQKYAYGPQHDYLDHPDVIGWTREGDSSHPKSGLATLITDGPGGSKRMYAGLKNAGETWYDITGNRSDTVKIGSDGWGEFHVNDGSVSIYVQK

SEQ ID NO: 41648 - protein, 480 aa, Bacillus sp.
NGTMMQYFEWYLPNDGNHWNRLNSDASNLKSKGITAVWIPPAWKGASQNDVGYGAYDLYDLGEFNQKGTVRTKYGTRSQLQAAVTSLKNNGIAVYGDVVMNHKGGADATEMVRAVEVNPNNRNQEVTGEYTIEAWTRFDFPGRGNTHSSFKWRWYHFDGVDWDQSRRLNNRIYKFRGHGKAWDWEVDTEFGNYDYLMYADYDMDHPEVVNELRNWGVWYTNTLGLDGFRIDAVKHIKYSFTRDWINHVRSATGKNMFAVAEFWKNDLGAIENYLQKTNWNHSVFDVPLHYNLYNASKSGGNYDMRNIFNGTVVQAHPNHAVTFVDNHDSQPEEALESFVEEWFKPLAYALTLTREQGYPSVFYGDYYGIPTHGVPAMRSKIDPILEARQKYAYGPQHDYLDHPDVIGWTREGDSSHPKSGLATLITDGPGGSKRMYAGLKNAGETWYDITGNRSDTVKIGSDGWGEFHVNDGSVSIYVQK

SEQ ID NO: 41649 - protein, 480 aa, Bacillus sp.
NGTMMQYFEWYLPNDGNHWNRLNSDASNLKSKGITAVWIPPAWKATSQNDVGYGAYDLYDLGEFNQKGTVRTKYGTRSQLQAAVTSLKNNGIQVYGDVVMNHKGGADLTEMVRAVEVNPNNRNQEVTGEYTIEAWTRFDFPGRGNTHSSFKWRWYHFDGVDWDQSRNVNNRIYKFRGHGKAWDWEVDTEFGNYDYLMYADYDMDHPEVVNELRNWGVWYTNTLGLDGFRIDAVKHIKYSFTRDWINHVRSATGKNMFAVAEFWKNDLGAIENYLQKTNWNHSVFDVPLHYNLYNASKSGGNYDMRNIFNGTVVQRHPSHAVTFVDNHDSQPEEALESFVEEWFKPLAYALTLTREQGYPSVFYGDYYGIPTHGVPAMRSKIDPILEARQKYAYGPQHDYLDHPDVIGWTREGDSSHPKSGLATLITDGPGGSKRMYAGLKNAGETWYDITGNRSDTVKIGSDGWGEFHVNDGSVSIYVQK

SEQ ID NO: 41650 - protein, 480 aa, Bacillus sp.
NGTMMQYFEWYLPNDGNHWNRLNSDASNLKSKGITAVWIPPAWKATSQNDVGYGAYDLYDLGEFNQKGTVRTKYGTRSQLQAAVTSLKNNGIQVYGDVVMNHKGGADATEMVRAVEVNPNNRNQEVTGEYTIEAWTRFDFPGRGNTHSSFKWRWYHFDGVDWDQSRELNNRIYKFRGHGKAWDWEVDTEFGNYDYLMYVDYDMDHPEVVNELRNWGVWYTNTLGLDGFRIDAVKHIKYSFTRDWINHVRSATGKNMFAVAEFWKNDLGAIENYLQKTNWNHSVFDVPLHYNLYNASKSGGNYDMRNIFNGTVVQRHPSHAVTFVDNHDSQPEEALESFVEEWFKPLAYALTLTREQGYPSVFYGDYYGIPTHGVPAMRSKIDPILEARQKYAYGPQHDYLDHPDVIGWTREGDSSHPKSGLATLITDGPGGSKRMYAGLKNAGETWYDITGNRSDTVKIGSDGWGEFHVNDGSVSIYVQK

SEQ ID NO: 41651 - protein, 480 aa, Bacillus sp.
NGTMMQYFEWYLPNDGNHWNRLNSDASNLKSKGITAVWIPPAWKGASQNDVGYGAYDLYDLGEFNQKGTVRTKYGTRSQLQAAVTSLKNNGIQVYGDVVMNHKGGADATEMVRAVEVNPNNRNQEVTGEYTIEAYTRFDFPGRGNTHSSFKWRWYHFDGVDWDQSRRLNNRIYKFRGHGKAWDWEVDTEFGNYDYLMYADYDMDHPEVVNELRNWGVWYTNTLGLDGFRIDAVKHIKYSFTRDWINHVRSATGKNMFAVAEFWKNDLGAIENYLQKTNWNHSVFDVPLHYNLYNASKSGGNYDMRNIFNGTVVQAHPSHAVTFVDNHDSQPEEALESFVEEWFKPLAYALTLTREQGYPSVFYGDYYGIPTHGVPAMRSKIDPILEARQKYAYGPQHDYLDHPDVIGWTREGDSSHPKSGLATLITDGPGGSKRMYAGLKNAGETWYDITGNRSDTVKIGSDGWGEFHVNDGSVSIYVQK

SEQ ID NO: 41652 - protein, 480 aa, Bacillus sp.
NGTMMQYFEWYLPNDGNHWNRLNSDASNLKSKGITAVWIPPAWKATSQNDVGYGAYDLYDLGEFNQKGTVRTKYGTRSQLQAAVTSLKNNGIQVYGDVVMNHKGGADATEMVRAVEVNPNNRNQEVTGEYTIEAWTRFDFPGRGNTHSSFKWRWYHFDGVDWDQSRNLDNRIYKFRVHGKAWDWEVDTEFGNYDYLMYADYDMDHPEVVNELRNWGVWYTNTLGLDGFRIDAVKHIKYSFTRDWINHVRSATGKNMFAVAEFWKNDLGAIENYLQKTNWNHSVFDVPLHYNLYNASKSGGNYDMRNIFNGTVVQRHPSHAVTFVDNHDSQPEEALESFVEEWFKPLAYALTLTREQGYPSVFYGDYYGIPTHGVPAMRSKIDPILEARQKYAYGPQHDYLDHPDVIGWTREGDSSHPKSGLATLITDGPGGSKRMYAGLKNAGETWYDITGNRSDTVKIGSDGWGEFHVNDGSVSIYVQK

SEQ ID NO: 41653 - protein, 480 aa, Bacillus sp.
NGTMMQYFEWYLPNDGNHWNRLNSDASNLKSKGITAVWIPPAWKGASQNDVGYGAYDLYDLGEFNQKGTVRTKYGTRSQLQAAVTSLKNNGIQVYGDVVMNHKGGADATEMVRAVEVNPNNRNQEVTGEYTIEAWTRFDFPGRGNTHSSFKWRWYHFDGVDWDQSRRLNNRIYKFRGHGKAWDWEVDTEFGNYDYLMYADYDMDHPEVVNELRNWGVWYTNTLGLDGFRIDAVKHIKYSFTRDWINHVRSATGKNMFAVAEFWKNDLGAIENYLQKTNWNHSVFDVPLHYNLYNASKSGSNYDMRNIFNGTVVQRHPSHAVTFVDNHDSQPEEALESFVETWFKPLAYALTLTREQGYPSVFYGDYYGIPTHGVPAMRSKIDPILEARQKYAYGPQHDYLDHPDVIGWTREGDSSHPKSGLATLITDGPGGSKRMYAGLKNAGETWYDITGNRSDTVKIGSDGWGEFHVNKKSVSIYVQK

SEQ ID NO: 41654 - protein, 480 aa, Bacillus sp.
NGTMMQYFEWYLPNDGNHWNRLNSDASNLKSKGITAVWIPPAWKGASQNDVGYGAYDLYDLGEFNQKGTVRTKYGTRSQLQAAVTSLKNNGIQVYGDVVMNHKGGADATEMVRAVEVNPNNRNQEVTGEYTIEAWTRFDFPGRGNTHSSFKWRWYHFDGVDWDQSRKLNNRIYKFRGHGKAWDWEVDTEFGNYDYLMYVDYDMDHPEVVNELRNWGVWYTNTLGLDGFRIDAVKHIKYSFTRDWINHVRIATGKNMFAVAEFWKNDLGAIENYLQKTNWNHSVFDVPLHYNLYNASKSGGNYDMRNIFNGTVVQRHPSHAVTFVDNHDSQPEEALESFVDEWFKPLAYALTLTREQGYPSVFYGDYYGIPTHGVPAMRSKIDPILEARQKYAYGPQHDYLDHPDVIGWTREGDSSHPPSGLATLITDGPGGSKRMYAGLKNAGETWYDITGNRSDTVKIGSDGWGEFHVNDQSVSIYVQK

SEQ ID NO: 41655 - protein, 480 aa, Bacillus sp.
NGTMMQYFEWYLPNDGNHWNRLNSDASNLKSKGITAVWIPPAWKAVSQNDVGYGAYDLYDLGEFNQKGTVRTKYGTRSQLQAAVTSLKNNGIQVYGDVVMNHKGGADATEMVRAVEVNPNNRNQEVTGEYTIEAWTRFDFPGRGNTHSSFKWRWYHFDGVDWDQSRQLNNRIYKFRGHGKAWDWEVDTEFGNYDYLMYVDYDMDHPEVVNELRNWGVWYTNTLGLDGFRIDAVKHIKYSFTRDWINHVRSATGKNMFAVAEFWKNDLGAIENYLQKTNWNHSVFDVPLHYNLYNASKSGGNYDMRNIFNGTVVQRHPSHAVTFVDNHDSQPEEALESFVEEWFKPLAYALTLTREQGYPSVFYGDYYGIPTHGVPAMRSKIDPILEARQKYAYGPQHDYLDHPDVIGWTREGDSSHPKSGLATLITDGPGGSKRMYAGLKNAGETWYDITGNRSDTVKIGSDGWGEFHVNDGSVSIYVQK

SEQ ID NO: 41656 - protein, 480 aa, Bacillus sp.
NPTMMQYFEWYLPNDGNHWNRLNSDASNLKSKGITAVWIPPAWKGASQNDVGYGAYDLYDLGEFNQKGTVRTKYGTRSQLQAAVTSLKNNGIQVYGDVVMNHKGGADATEMVRAVEVNPNNRNQEVTGEYTIEAWTRFDFPGRGNTHSSFKWRWYHFDGVDWDQSRRLNNRIYKFRGHGKAWDWEVDTEFGNYDYLMYADYDMDHPEVVNELRNWGVWYTNTLGLDGFRIDAVKHIKYSFTRDWINHVRSATGKNMFAVAEFWKNDLGAIENYLQKTNWNHSVFDVPLHYNLYNASKSGGNYDMRNIFNGTVVQSHPKHAVTFVDNHDSQPEEALESFVEEWFKPLAYALTLTREQGYPSVFYGDYYGIPTHGVPAMRSKIDPILEARQKYAYGPQHDYLDHPDVIGWTREGDSSHPKSGLATLITDGPGGSKRMYAGLKNAGETWYDITGNRSDTVKIGSDGWGEFHVNDGSVSIYVQK

SEQ ID NO: 41657 - protein, 480 aa, Bacillus sp.
NGTMMQYFEWYLPNDGNHWNRLNSDASNLKSKGITAVWIPPAWKATSQNDVGYGAYDLYDLGEFNQKGTVRTKYGTRSQLQAAVTSLKNNGIQVYGDVVMNHKGGADATEMVDAVEVNPNNRNQEVTGEYTIEAWTRFDFPGRGNTHSSFKWRWYHFDGVDFDQSRNVNNRIYKFRGHGKAWDWEVDTEFGNYDYLMYADYDMDHPEVVNELRNWGVWYTNTLGLDGFRIDAVKHIKYSFTRDWINHVRSATGKNMFAVAEFWKNDLGAIENYLQKTNWNHSVFDVPLHYNLYNASKSGGNYDMRNIFNGTVVQRHPSHAVTFVDNHDSQPEEALESFVEEWFKPLAYALTLTREQGYPSVFYGDYYGIPTHGVPAMRSKIDPILEARQKYAYGPQHDYLDHPDVIGWTREGDSSHPKSGLATLITDGPGGSKRMYAGLKNAGETWYDITGNRSDTVKIGSDGWGEFHVNDGSVSIYVQK

SEQ ID NO: 41658 - protein, 480 aa, Bacillus sp.
NGTMMQYFEWYLPNDGNHWNRLNSDASNLKSKGITAVWIPPAWKGASQNDVGYGAYDLYDLGEFNQKGTVRTKYGTRSQLQAAVTSLKNNGIQVYGDVVMNHKGGADATEMVRAVEVNPNNRNQEVTGEYTIEAWTRFDFPGRGNTHSSFKWRWYHFDGVDWDQSRRLNNRIYKFRGHGKAWDWEVDTEFGNYDYLMYADYDMDHPEVVNELRNWGVWYTNTLGLDGFRIDAVKHIKYSFTRDWINHVRSATGKNMFAVAEFWKNDLGAIENYLQKTNWNHSVFDVPLHYNLYNASNSGGNYDMRNIFNGTVVQRHPSHAVTFVDNHDSQPEEALESFVDEWFKPLAYALTLTREQGYPSVFYGDYYGIPTHGVPAMRSKIDPILEARQKYAYGPQHDYLDHPDVIGWTREGDSSHPKSGLATLITDGPGGSKRMYAGLKNAGETWYDITGNRSDTVKIGSDGWGEFHVNKSSVSIYVQK

SEQ ID NO: 41659 - protein, 480 aa, Bacillus sp.
NLTMMQYFEWYLPNDGNHWNRLNSDASNLKSKGITAVWIPPAWKGASQNDVGYGAYDLYDLGEFNQKGTVRTKYGTRSQLQAAVTSLKNNGIQVYGDVVMNHKGGADATEMVRAVEVNPNNRNQEVTGEYTIEAWTRFDFPGRGNTHSSFKWRWYHFDGVDWDQSRRLNNRIYKFRGHGKAWDWEVDTEFGNYDYLMYADYDMDHPEVVNELRNWGVWYTNTLGLDGFRIDAVKHIKYSFTRDWINHVRSATGKNMFAVAEFWKNDLGAIENYLQKTNWNHSVFDVPLHYNLYNASKSGGNYDMRNIFNGTVVQAHPSHAVTFVDNHDSQPEEALESFVEEWFKPLAYALTLTREQGYPSVFYGDYYGIPTHGVPAMRSKIDPILEARQKYAYGPQHDYLDHPDVIGWTREGDSSHPKSGLATLITDGPGGSKRMYAGLKNAGETWYDITGNRSDTVKIGSDGWGEFHVNDGSVSIYVQK

SEQ ID NO: 41660 - protein, 480 aa, Bacillus sp.
NGTMMQYFEWYLPNDGNHWNRLNSDASNLKSKGIKAVWIPPAWKGASQNDVGYGAYDLYDLGEFNQKGTVRTKYGTRSQLQAAVTSLKNNGIQVYGDVVMNHKGGADATEMVRAVEVNPNNRNQEVTGEYTIEAWTRFDFPGRGNTHSSFKWRWYHFDGVDWDQSRRLDNRIYKFRGHGKAWDWEVDTEFGNYDYLMYTDYDMDHPEVVNELRNWGVWYTNTLGLDGFRIDAVKHIKYSFTRDWINHVRSATGKNMFAVAEFWKNDLGAIENYLQKTNWNHSVFDVPLHYNLYNASKSGGNYDMRNIFNGTVVQRHPSHAVTFVDNHDSQPEEALESFVEEWFKPLAYALTLTREQGYPSVFYGDYYGIPTHGVPAMRSKIDPILEARQKYAYGPQHDYLDHPDVIGWTREGDSSHPKSGLATLITDGPGGSKRMYAGLKNAGETWYDITGNRSDTVKIGSDGWGEFHVNDGSVSIYVQK

SEQ ID NO: 41661 - protein, 480 aa, Bacillus sp.
NGTMMQYFEWYLPNDGNHWNRLNSDASNLKSKGITAVWIPPAWKAASQNDVGYGAYDLYDLGEFNQKGTVRTKYGTRSQLQAAVTSLKNNGIQVYGDVVMNHKGGADATEMVRAVEVNPNNRNQEVTGEYTIEAWTRFDFPGRGNTHSSFKWRWYHFDGVDWDQSRRLQNRIYKFRGHGKAWDWEVDTEFGNYDYLMYTDYDMDHPEVVNELRNWGVWYTNTLGLDGFRIDAVKHIKYSFTRDWINHVRSATGKNMFAVAEFWKNDLGAIENYLQKTNWNHSVFDVPLHYNLYNASKSGGNYDMRNIFNGTVVQRHPSHAVTFVDNHDSQPEEALESFVEEWFKPLAYALTLTREQGYPSVFYGDYYGIPTHGVPAMRSKIDPILEARQKYAYGPQHDYLDHPDVIGWTREGDSSHPKSGLATLITDGPGGSKRMYAGLKNAGETWYDITGNRSDTVKIGSDGWGEFHVNDGSVSIYVQK

SEQ ID NO: 41662 - protein, 480 aa, Bacillus sp.
NGTMMQYFEWYLPNDGNHWNRLNSDASNLKSKGITAVWIPPAWKGASQNDVGYGAYDLYDLGEFNQKGTVRTKYGTRSQLQAAVTSLKNNGIQVYGDVVMNHKGGADATEMVRAVEVNPNNRNQEVTGEYTIEAWTRFDFPGRGNTHSSFKWRWYHFDGVDWDQSRRLNNRIYKFRGHGKAWDWEVDTEFGNYDYLMYADYDMDHPEVVNELRNWGVWYTNTLGLDGFRIDAVKHIKYSFTRDWINHVRSATGKNMFAVAEFWKNDLGAIENYLQKTNWNHSVFDVPLHYNLYNASKSQGNYDMRNIFNGTVVQRHPSHAVTFVDNHDSQPEEALESFVDTWFKPLAYALTLTREQGYPSVFYGDYYGIPTHGVPAMRSKIDPILEARQKYAYGPQHDYLDHPDVIGWTREGDSSHPKSGLATLITDGPGGSKRMYAGLKNAGETWYDITGNRSDTVKIGSDGWGEFHVNGTSVSIYVQK

SEQ ID NO: 41663 - protein, 480 aa, Bacillus sp.
NGTMMQYFEWYLPNDGNHWNRLNSDASNLKSKGITAVWIPPAWKGTSQNDVGYGAYDLYDLGEFNQKGTVRTKYGTRSQLQAAVTSLKNNGIQVYGDVVMNHKGGADATEMVRAVEVNPNNRNQEVTGEYTIEAWTRFDFPGRGNTHSSFKWRWYHFDGVDWDQSRDLQNRIYKFRGHGKAWDWEVDTEFGNYDYLMYADYDMDHPEVVNELRNWGVWYTNTLGLDGFRIDAVKHIKYSFTRDWINHVRSATGKNMFAVAEFWKNDLGAIENYLQKTNWNHSVFDVPLHYNLYNASKSQGNYDMRNIFNGTVVQRHPSHAVTFVDNHDSQPEEALESFVDTWFKPLAYALTLTREQGYPSVFYGDYYGIPTHGVPAMRSKIDPILEARQKYAYGPQHDYLDHPDVIGWTREGDSSHPKSGLATLITDGPGGSKRMYAGLKNAGETWYDITGNRSDTVKIGSDGWGEFHVNGSSVSIYVQK

SEQ ID NO: 41664 - protein, 480 aa, Bacillus sp.
NGTMMQYFEWYLPNDGNHWNRLNSDASNLKSKGITAVWIPPAWKSASQNDVGYGAYDLYDLGEFNQKGTVRTKYGTRSQLQAAVTSLKNNGIQVYGDVVMNHKGGADATEMVRAVEVNPNNRNQEVTGEYTIEAWTRFDFPGRGNTHSSFKWRWYHFDGVDWDQSRNLQNRIYKFRGHGKAWDWEVDTEFGNYDYLMYADYDMDHPEVVNELRNWGVWYTNTLGLDGFRIDAVKHIKYSFTRDWINHVRSATGKNMFAVAEFWKNDLGAIENYLQKTNWNHSVFDVPLHYNLYNASKSGGNYDMRNIFNGTVVQRHPSHAVTFVDNHDSQPEEALESFVDPWFKPLAYALTLTREQGYPSVFYGDYYGIPTHGVPAMRSKIDPILEARQKYAYGPQHDYLDHPDVIGWTREGDSSHPKSGLATLITDGPGGSKRMYAGLKNAGETWYDITGNRSDTVKIGSDGWGEFHVNGGSVSIYVQK

SEQ ID NO: 41665 - protein, 480 aa, Bacillus sp.
NGTMMQYFEWYLPNDGNHWNRLNSDASNLKSKGITAVWIPPAWKGASQNDVGYGAYDLYDLGEFNQKGTVRTKYGTRSQLQAAVTSLKNNGIQVYGDVVMNHKGGADATEMVRAVEVNPNNRNQEVTGEYTIEAWTRFDFPGRGNTHSSFKWRWYHFDGVDWDQSRRLNNRIYKFRGHGKAWDWEVDTEFGNYDYLMYADYDMDHPEVVNELRNWGVWYTNTLGLDGFRIDAVKHIKYSFTRDWINHVRSATGKNMFAVAEFWKNDLGAIENYLQKTNWNHSVFDVPLHYNLYNASKSAGNYDMRNIFNGTVVQRHPSHAVTFVDNHDSQPEEALESFVDTWFKPLAYALTLTREQGYPSVFYGDYYGIPTHGVPAMRSKIDPILEARQKYAYGPQHDYLDHPDVIGWTREGDSSHPKSGLATLITDGPGGSKRMYAGLKNAGETWYDITGNRSDTVKIGSDGWGEFHVNKSSVSIYVQK

SEQ ID NO: 41666 - protein, 480 aa, Bacillus sp.
NNTMMQYFEWYLPNDGNHWNRLNSDASNLKSKGITAVWIPPAWKGASQNDVGYGAYDLYDLGEFNQKGTVRTKYGTRSQLQAAVTSLKNNGIQVYGDVVMNHKGGADATEMVRAVEVNPNNRNQEVTGEYTIEAWTRFDFPGRGNTHSSFKWRWYHFDGVDWDQSRRLNNRIYKFRGHGKAWDWEVDTEFGNYDYLMYADYDMDHPEVVNELRNWGVWYTNTLGLDGFRIDAVKHIKYSFTRDWINHVRSATGKNMFAVAEFWKNDLGAIENYLQKTNWNHSVFDVPLHYNLYNASKSGGNYDMRNIFNGTVVQAHPNHAVTFVDNHDSQPEEALESFVEEWFKPLAYALTLTREQGYPSVFYGDYYGIPTHGVPAMRSKIDPILEARQKYAYGPQHDYLDHPDVIGWTREGDSSHPKSGLATLITDGPGGSKRMYAGLKNAGETWYDITGNRSDTVKIGSDGWGEFHVNDGSVSIYVQK

SEQ ID NO: 41667 - protein, 480 aa, Bacillus sp.
NGTMMQYFEWYLPNDGNHWNRLNSDASNLKSKGITAVWIPPAWKAASQNDVGYGAYDLYDLGEFNQKGTVRTKYGTRSQLQAAVTSLKNNGIQVYGDVVMNHKGGADATEMVRAVEVNPNNRNQEVTGEYTIEAWTRFDFPGRGNTHSSFKWRWYHFDGVDWDQSRDLTNRIYKFRGHGKAWDWEVDTEFGNYDYLMYADYDMDHPEVVNELRNWGVWYTNTLGLDGFRIDAVKHIKYSFTRDWINHVRIATGKNMFAVAEFWKNDLGAIENYLQKTNWNHSVFDVPLHYNLYNASKSGGNYDMRNIFNGTVVQRHPSHAVTFVDNHDSQPEEALESFVDEWFKPLAYALTLTREQGYPSVFYGDYYGIPTHGVPAMRSKIDPILEARQKYAYGPQHDYLDHPDVIGWTREGDSSHPKSGLATLITDGPGGSKRMYAGLKNAGETWYDITGNRSDTVKIGSDGWGEFHVNDQSVSIYVQK

SEQ ID NO: 41668 - protein, 480 aa, Bacillus sp.
NGTMMQYFEWYLPNDGNHWNRLNSDASNLKSKGITAVWIPPAWKAASQNDVGYGAYDLYDLGEFNQKGTVRTKYGTRSQLQAAVTSLKNNGIQVYGDVVMNHKGGADATEMVRAVEVNPNNRNQEVTGEYTIEAYTRFDFPGRGNTHSSFKWRWYHFDGVDWDQSRDLQNRIYKFRGHGKAWDWEVDTEFGNYDYLMYADYDMDHPEVVNELRNWGVWYTNTLGLDGFRIDAVKHIKYSFTRDWINHVRSATGKNMFAVAEFWKNDLGAIENYLQKTNWNHSVFDVPLHYNLYNASKSGGNYDMRNIFNGTVVQRHPSHAVTFVDNHDSQPEEALESFVEEWFKPLAYALTLTREQGYPSVFYGDYYGIPTHGVPAMRSKIDPILEARQKYAYGPQHDYLDHPDVIGWTREGDSSHPKSGLATLITDGPGGSKRMYAGLKNAGETWYDITGNRSDTVKIGSDGWGEFHVNDGSVSIYVQK

SEQ ID NO: 41669 - protein, 480 aa, Bacillus sp.
NGTMMQYFEWYLPNDGNHWNRLNSDASNLKSKGITAVWIPPAWKGASQNDVGYGAYDLYDLGEFNQKGTVRTKYGTRSQLQAAVTSLKNNGIQVYGDVVMNHKGGADATEMVRAVEVNPNNRNQEVTGEYTIEAWTRFDFPGRGNTHSSFKWRWYHFDGVDWDQSRRLNNRIYKFRGHGKAWDWEVDTEFGNYDYLMYADYDMDHPEVVNELRNWGVWYTNTLGLDGFRIDAVKHIKYSFTRDWINHVRSATGKNMFAVAEFWKNDLGAIENYLQKTNWNHSVFDVPLHYNLYNASQSGGNYDMRNIFNGTVVQRHPSHAVTFVDNHDSQPEEALESFVEPWFKPLAYALTLTREQGYPSVFYGDYYGIPTHGVPAMRSKIDPILEARQKYAYGPQHDYLDHPDVIGWTREGDSSHPKSGLATLITDGPGGSKRMYAGLKNAGETWYDITGNRSDTVKIGSDGWGEFHVNKSSVSIYVQK

SEQ ID NO: 41670 - protein, 480 aa, Bacillus sp.
NGTMMQYFEWYLPNDGNHWNRLNSDASNLKSKGITAVWIPPAWKGASQNDVGYGAYDLYDLGEFNQKGTVRTKYGTRSQLQAAVTSLKNNGIQVYGDVVMNHKGGADATEMVRAVEVNPNNRNQEVTGEYTIEAWTRFDFPGRGNTHSSFKWRWYHFDGVDWDQSRRLNNRIYKFRGHGKAWDWEVDTEFGNYDYLMYADYDMDHPEVVNELRNWGVWYTNTLGLDGFRIDAVKHIKYSFTRDWINHVRSATGKNMFAVAEFWKNDLGAIENYLQKTNWNHSVFDVPLHYNLYNASNSQGNYDMRNIFNGTVVQRHPSHAVTFVDNHDSQPEEALESFVEPWFKPLAYALTLTREQGYPSVFYGDYYGIPTHGVPAMRSKIDPILEARQKYAYGPQHDYLDHPDVIGWTREGDSSHPKSGLATLITDGPGGSKRMYAGLKNAGETWYDITGNRSDTVKIGSDGWGEFHVNKGSVSIYVQK

SEQ ID NO: 41671 - protein, 480 aa, Bacillus sp.
NGTMMQYFEWYLPNDGNHWNRLNSDASNLKSKGITAVWIPPAWKGASQNDVGYGAYDLYDLGEFNQKGTVRTKYGTRSQLQAAVTSLKNNGIQVYGDVVMNHKGGADATEMVRAVEVNPNNRNQEVTGEYTIEAWTRFDFPGRGNTHSSFKWRWYHFDGVDWDQSRRLNNRIYKFRGHGKAWDWEVDTEFGNYDYLMYADYDMDHPEVVNELRNWGVWYTNTLGLDGFRIDAVKHIKYSFTRDWINHVRSATGKNMFAVAEFWKNDLGAIENYLQKTNWNHSVFDVPLHYNLYNASKSGGNYDMRNIFNGTVVQRHPSHAVTFVDNHDSQPEEALESFVDPWFKPLAYALTLTREQGYPSVFYGDYYGIPTHGVPAMRSKIDPILEARQKYAYGPQHDYLDHPDVIGWTREGDSSHPKSGLATLITDGPGGSKRMYAGLKNAGETWYDITGNRSDTVKIGSDGWGEFHVNGSSVSIYVQK

SEQ ID NO: 41672 - protein, 480 aa, Bacillus sp.
NGTMMQYFEWYLPNDGNHWNRLNSDASNLKSKGITAVWIPPAWKATSQNDVGYGAYDLYDLGEFNQKGTVRTKYGTRSQLQAAVTSLKNNGIQVYGDVVMNHKGGADATEMVRAVEVNPNNRNQEVTGEYTIEAWTRFDFPGRGNTHSSFKWRWYHFDGVDWDQSRDLNNRIYKFRGHGKAWDWEVDTEFGNYDYLMYADYDMDHPEVVNELRNWGVWYTNTLGLDGFRIDAVKHIKYSFTRDWINHVRIATGKNMFAVAEFWKNDLGAIENYLQKTNWNHSVFDVPLHYNLYNASKSGGNYDMRNIFNGTVVQRHPSHAVTFVDNHDSQPEEALESFVDEWFKPLAYALTLTREQGYPSVFYGDYYGIPTHGVPAMRSKIDPILEARQKYAYGPQHDYLDHPDVIGWTREGDSSHPKSGLATLITDGPGGSKRMYAGLKNAGETWYDITGNRSDTVKIGSDGWGEFHVNDQSVSIYVQK

SEQ ID NO: 41673 - protein, 480 aa, Bacillus sp.
NGTMMQYFEWYLPNDGNHWNRLNSDASNLKSKGITAVWIPPAWKGASQNDVGYGAYDLYDLGEFNQKGTVRTKYGTRSQLQAAVTSLKNNGIQVYGDVVMNHKGGADATEMVRAVEVNPNNRNQEVTGEYTIEAWTRFDFPGRGNTHSSFKWRWYHFDGVDWDQSRRLNNRIYKFRGHGKAWDWEVDTEFGNYDYLMYADYDMDHPEVVNELRNWGVWYTNTLGLDGFRIDAVKHIKYSFTRDWINHVRSATGKNMFAVAEFWKNDLGAIENYLQKTNWNHSVFDVPLHYNLYNASKSGGNYDMRNIFNGTVVQRHPSHAVTFVDNHDSQPEEALESFVEPWFKPLAYALTLTREQGYPSVFYGDYYGIPTHGVPAMRSKIDPILEARQKYAYGPQHDYLDHPDVIGWTREGDSSHPKSGLATLITDGPGGSKRMYAGLKNAGETWYDITGNRSDTVKIGSDGWGEFHVNQTSVSIYVQK

SEQ ID NO: 41674 - protein, 480 aa, Bacillus sp.
NGTMMQYFEWYLPNDGNHWNRLNSDASNLKSKGITAVWIPPAWKAASQNDVGYGAYDLYDLGEFNQKGTVRTKYGTRSQLQAAVTSLKNNGIQVYGDVVMNHKGGANATEMVRAVEVNPNNRNQEVTGEYTIEAWTRFDFPGRGNTHSSFKWRWYHFDGVDWDQSRRLNNRIYKFRGHGKAWDWEVDTEFGNYDYLMYADYDMDHPEVVNELRNWGVWYTNTLGLDGFRIDAVKHIKYSFTRDWINHVRSATGKNMFAVAEFWKNDLGAIENYLQKTNWNHSVFDVPLHYNLYNASKSGGNYDMRNIFNGTVVQRHPSHAVTFVDNHDSQPEEALESFVEEWFKPLAYALTLTREQGYPSVFYGDYYGIPTHGVPAMRSKIDPILEARQKYAYGPQHDYLDHPDVIGWTREGDSSHPKSGLATLITDGPGGSKRMYAGLKNAGETWYDITGNRSDTVKIGSDGWGEFHVNDGSVSIYVQK

SEQ ID NO: 41675 - protein, 480 aa, Bacillus sp.
NETMMQYFEWYLPNDGNHWNRLNSDASNLKSKGITAVWIPPAWKGASQNDVGYGAYDLYDLGEFNQKGTVRTKYGTRSQLQAAVTSLKNNGIQVYGDVVMNHKGGADATEMVRAVEVNPNNRNQEVTGEYTIEAWTRFDFPGRGNTHSSFKWRWYHFDGVDWDQSRRLNNRIYKFRGHGKAWDWEVDTEFGNYDYLMYADYDMDHPEVVNELRNWGVWYTNTLGLDGFRIDAVKHIKYSFTRDWINHVRSATGKNMFAVAEFWKNDLGAIENYLQKTNWNHSVFDVPLHYNLYNASKSGGNYDMRNIFNGTVVQMHPMHAVTFVDNHDSQPEEALESFVEEWFKPLAYALTLTREQGYPSVFYGDYYGIPTHGVPAMRSKIDPILEARQKYAYGPQHDYLDHPDVIGWTREGDSSHPKSGLATLITDGPGGSKRMYAGLKNAGETWYDITGNRSDTVKIGSDGWGEFHVNDGSVSIYVQK

SEQ ID NO: 41676 - protein, 480 aa, Bacillus sp.
NGTMMQYFEWYLPNDGNHWNRLNSDASNLKSKGITAVWIPPAWKGASQNDVGYGAYDLYDLGEFNQKGTVRTKYGTRSQLQAAVTSLKNNGIQVYGDVVMNHKGGADATEMVRAVEVNPNNRNQEVTGEYTIEAWTRFDFPGRGNTHSSFKWRWYHFDGVDWDQSRRLNNRIYKFRGHGKAWDWEVDTEFGNYDYLMYADYDMDHPEVVNELRNWGVWYTNTLGLDGFRIDAVKHIKYSFTRDWINHVRSATGKNMFAVAEFWKNDLGAIENYLQKTNWNHSVFDVPLHYNLYNASKSAGNYDMRNIFNGTVVQRHPSHAVTFVDNHDSQPEEALESFVDPWFKPLAYALTLTREQGYPSVFYGDYYGIPTHGVPAMRSKIDPILEARQKYAYGPQHDYLDHPDVIGWTREGDSSHPKSGLATLITDGPGGSKRMYAGLKNAGETWYDITGNRSDTVKIGSDGWGEFHVNKGSVSIYVQK

SEQ ID NO: 41677 - protein, 480 aa, Bacillus sp.
NGTMMQYFEWYLPNDGNHWNRLNSDASNLKSKGITAVWIPPAWKATSQNDVGYGAYDLYDLGEFNQKGTVRTKYGTRSQLQAAVTSLKNNGIQVYGDVVMNHKGGADLTEMVDAVEVNPNNRNQEVTGEYTIEAWTRFDFPGRGNTHSSFKWRWYHFDGVDWDQSRNVNNRIYKFRGHGKAWDWEVDTEFGNYDYLMYADYDMDHPEVVNELRNWGVWYTNTLGLDGFRIDAVKHIKYSFTRDWINHVRSATGKNMFAVAEFWKNDLGAIENYLQKTNWNHSVFDVPLHYNLYNASKSGGNYDMRNIFNGTVVQRHPSHAVTFVDNHDSQPEEALESFVEEWFKPLAYALTLTREQGYPSVFYGDYYGIPTHGVPAMRSKIDPILEARQKYAYGPQHDYLDHPDVIGWTREGDSSHPKSGLATLITDGPGGSKRMYAGLKNAGETWYDITGNRSDTVKIGSDGWGEFHVNDGSVSIYVQK

SEQ ID NO: 41678 - protein, 480 aa, Bacillus sp.
NGTMMQYFEWYLPNDGNHWNRLNSDASNLKSKGITAVWIPPAWKGVSQNDVGYGAYDLYDLGEFNQKGTVRTKYGTRSQLQAAVTSLKNNGIQVYGDVVMNHKGGADATEMVRAVEVNPNNRNQEVTGEYTIEAWTRFDFPGRGNTHSSFKWRWYHFDGVDWDQSRDLSNRIYKFRGHGKAWDWEVDTEFGNYDYLMYADYDMDHPEVVNELRNWGVWYTNTLGLDGFRIDAVKHIKYSFTRDWINHVRSATGKNMFAVAEFWKNDLGAIENYLQKTNWNHSVFDVPLHYNLYNASKSGNNYDMRNIFNGTVVQRHPSHAVTFVDNHDSQPEEALESFVEEWFKPLAYALTLTREQGYPSVFYGDYYGIPTHGVPAMRSKIDPILEARQKYAYGPQHDYLDHPDVIGWTREGDSSHPKSGLATLITDGPGGSKRMYAGLKNAGETWYDITGNRSDTVKILSGGWGEFHVNDGSVSIYVQK

SEQ ID NO: 41679 - protein, 480 aa, Bacillus sp.
NGTMMQYFEWYLPNDGNHWNRLNSDASNLKSKGITAVWIPPAWKGASQNDVGYGAYDLYDLGEFNQKGTVRTKYGTRSQLQAAVTSLKNNGIQVYGDVVMNHKGGADATEMVRAVEVNPNNRNQEVTGEYTIEAWTRFDFPGRGNTHSSFKWRWYHFDGVDWDQSRRLNNRIYKFRGHGKAWDWEVDTEFGNYDYLMYADYDMDHPEVVNELRNWGVWYTNTLGLDGFRIDAVKHIKYSFTRDWINHVRSATGKNMFAVAEFWKNDLGAIENYLQKTNWNHSVFDVPLHYNLYNASKSGGNYDMRNIFNGTVVQRHPSHAVTFVDNHDSQPEEALESFVEEWFKPLAYALTLTREQGYPSVFYGDYYGIPTHGVPAMRSKIDPILEARQKYAYGPQHDYLDHPDVIGWTREGDSSHPKSGLATLITDGPGGSKRMYAGLKNAGETWYDITGNRSDTVKIGSDGWGEFHVNGSSVSIYVQK

SEQ ID NO: 41680 - protein, 480 aa, Bacillus sp.
NGTMMQYFEWYLPNDGNHWNRLNSDASNLKSKGITAVWIPPAWKGASQNDVGYGAYDLYDLGEFNQKGTVRTKYGTRSQLQAAVTSLKNNGISVYGDVVMNHKGGADATEMVRAVEVNPNNRNQEVTGEYTIEAWTRFDFPGRGNTHSSFKWRWYHFDGVDWDQSRRLNNRIYKFRGHGKAWDWEVDTEFGNYDYLMYADYDMDHPEVVNELRNWGVWYTNTLGLDGFRIDAVKHIKYSFTRDWINHVRSATGKNMFAVAEFWKNDLGAIENYLQKTNWNHSVFDVPLHYNLYNASKSGGNYDMRNIFNGTVVQAHPNHAVTFVDNHDSQPEEALESFVEEWFKPLAYALTLTREQGYPSVFYGDYYGIPTHGVPAMRSKIDPILEARQKYAYGPQHDYLDHPDVIGWTREGDSSHPKSGLATLITDGPGGSKRMYAGLKNAGETWYDITGNRSDTVKIGSDGWGEFHVNDGSVSIYVQK

SEQ ID NO: 41681 - protein, 480 aa, Bacillus sp.
NKTMMQYFEWYLPNDGNHWNRLNSDASNLKSKGITAVWIPPAWKGASQNDVGYGAYDLYDLGEFNQKGTVRTKYGTRSQLQAAVTSLKNNGIQVYGDVVMNHKGGADATEMVRAVEVNPNNRNQEVTGEYTIEAWTRFDFPGRGNTHSSFKWRWYHFDGVDWDQSRRLNNRIYKFRGHGKAWDWEVDTEFGNYDYLMYADYDMDHPEVVNELRNWGVWYTNTLGLDGFRIDAVKHIKYSFTRDWINHVRSATGKNMFAVAEFWKNDLGAIENYLQKTNWNHSVFDVPLHYNLYNASKSGGNYDMRNIFNGTVVQAHPMLAVTFVDNHDSQPEEALESFVEEWFKPLAYALTLTREQGYPSVFYGDYYGIPTHGVPAMRSKIDPILEARQKYAYGPQHDYLDHPDVIGWTREGDSSHPKSGLATLITDGPGGSKRMYAGLKNAGETWYDITGNRSDTVKIGSDGWGEFHVNDGSVSIYVQK

SEQ ID NO: 41682 - protein, 480 aa, Bacillus sp.
NGTMMQYFEWYLPNDGNHWNRLNSDASNLKSKGITAVWIPPAWKATSQNDVGYGAYDLYDLGEFNQKGTVRTKYGTRSQLQAAVTSLKNNGIQVYGDVVMNHKGGADATEMVRAVEVNPNNRNQEVTGEYTIEAWTRFDFPGRGNTHSSFKWRWYHFDGVDWDMSRELSNRIYKFRGHGKAWDWEVDTEFGNYDYLMYADYDMDHPEVVNELRNWGVWYTNTLGLDGFRIDAVKHIKYSFTRDWINHVRSATGKNMFAVAEFWKNDLGAIENYLQKTNWNHSVFDVPLHYNLYNASKSQGNYDMRNIFNGTVVQRHPSHAVTFVDNHDSQPEEALESFVDTWFKPLAYALTLTREQGYPSVFYGDYYGIPTHGVPAMRSKIDPILEARQKYAYGPQHDYLDHPDVIGWTREGDSSHPKSGLATLITDGPGGSKRMYAGLKNAGETWYDITGNRSDTVKIGSDGWGEFHVNGSSVSIYVQK

SEQ ID NO: 41683 - protein, 480 aa, Bacillus sp.
NGTMMQYFEWYLPNDGNHWNRLNSDASNLKSKGITAVWIPPAWKGASQNDVGYGAYDLYDLGEFNQKGTVRTKYGTRSQLQAAVTSLKNNGINVYGDVVMNHKGGADATEMVRAVEVNPNNRNQEVTGEYTIEAWTRFDFPGRGNTHSSFKWRWYHFDGVDWDQSRRLNNRIYKFRGHGKAWDWEVDTEFGNYDYLMYADYDMDHPEVVNELRNWGVWYTNTLGLDGFRIDAVKHIKYSFTRDWINHVRSATGKNMFAVAEFWKNDLGAIENYLQKTNWNHSVFDVPLHYNLYNASKSGGNYDMRNIFNGTVVQSHPSHAVTFVDNHDSQPEEALESFVEEWFKPLAYALTLTREQGYPSVFYGDYYGIPTHGVPAMRSKIDPILEARQKYAYGPQHDYLDHPDVIGWTREGDSSHPKSGLATLITDGPGGSKRMYAGLKNAGETWYDITGNRSDTVKIGSDGWGEFHVNDGSVSIYVQK

SEQ ID NO: 41684 - protein, 480 aa, Bacillus sp.
NGTMMQYFEWYLPNDGNHWNRLNSDASNLKSKGITAVWIPPAWKGASQNDVGYGAYDLYDLGEFNQKGTVRTKYGTRSQLQAAVTSLKNNGINVYGDVVMNHKGGADATEMVRAVEVNPNNRNQEVTGEYTIEAWTRFDFPGRGNTHSSFKWRWYHFDGVDWDQSRRLNNRIYKFRGHGKAWDWEVDTEFGNYDYLMYADYDMDHPEVVNELRNWGVWYTNTLGLDGFRIDAVKHIKYSFTRDWINHVRSATGKNMFAVAEFWKNDLGAIENYLQKTNWNHSVFDVPLHYNLYNASKSGGNYDMRNIFNGTVVQSHPNHAVTFVDNHDSQPEEALESFVEEWFKPLAYALTLTREQGYPSVFYGDYYGIPTHGVPAMRSKIDPILEARQKYAYGPQHDYLDHPDVIGWTREGDSSHPKSGLATLITDGPGGSKRMYAGLKNAGETWYDITGNRSDTVKIGSDGWGEFHVNDGSVSIYVQK

SEQ ID NO: 41685 - protein, 480 aa, Synthetic construct
NGTMMQYFEWYLPNDGNHWNRLNSDASNLKSKGITAVWIPPAWKGASQNDVGYGAYDIYDLGEFNQKGTVRTKYGTRSQLQAAVTSLKNNGIQVYGDVVMNHKGGADATEMVRAVEVNPNNRNQEVTGEYTIEAWTRFDFPGRGNTHSSFKWRWYHFDGVDWDQSRRLNNRIYKFRGHGKAWDWEVDTEFGNYDYLMYADYDMDSPEVVNELRNWGVWYTNTLGLDGFRIDAVKHIKYSFTRDWINHVRSATGKNMFAVAEFWKNDLGAIENYLQKTNWNHSVFDVPLHYNLYNASKSGGNYDMRNIFNGTVVQRHPSHAVTFVDNHDSQPEEALESFVEEWFKPLAYALTLTREQGYPSVFYGDYYGIPTHGVPAMRSKIDPILEARQKYAYGPQHDYLDHPDVIGWTREGDSSHPKSGLATLITDGPGGSKRMYAGLKNAGETWYDITGNRSDTVKIGSDGWGEFHVNDGSVSIYVQK

SEQ ID NO: 41686 - protein, 480 aa, Bacillus sp.
NGTMMQYFEWYLPNDGNHWNRLNSDASNLKSKGITAVWIPPAWKAASQNDVGYGAYDLYDLGEFNQKGTVRTKYGTRSQLQAAVTSLKNNGIQVYGDVVMNHKGGADATEMVRAVEVNPNNRNQEVTGEYTIEAWTRFDFPGRGNTHSSFKWRWYHFDGVDWDQSRDLDNRIYKFRGHGKAWDWEVDTEFGNYDYLMYADYDMDHPEVVNELRNWGVWYTNTLGLDGFRIDAVKHIKYSFTRDWINHVRSATGKNMFAVAEFWKNDLGAIENYLQKTNWNHSVFDVPLHYNLYNASKSGGNYDMRNIFNGTVVQRHPSHAVTFVDNHDSQPEEALESFVDPWFKPLAYALTLTREQGYPSVFYGDYYGIPTHGVPAMRSKIDPILEARQKYAYGPQHDYLDHPDVIGWTREGDSSHPKSGLATLITDGPGGSKRMYAGLKNAGETWYDITGNRSDTVKIGSDGWGEFHVNGGSVSIYVQK

SEQ ID NO: 41687 - protein, 480 aa, Bacillus sp.
NGTMMQYFEWYLPNDGNHWNRLNSDASNLKSKGITAVWIPPAWKGASQNDVGYGAYDLYDLGEFNQKGTVRTKYGTRSQLQAAVTSLKNNGIQVYGDVVMNHKGGADYTEMVRAVEVNPNNRNQEVTGEYTIEAWTRFDFPGRGNTHSSFKWRWYHFDGVDWDQSERLNNRIYKFRGHGKAWDWEVETEFGNYDYLMYADYDMDHPEVVNELRNWGVWYTNTLGLDGFRIDAVKHIKYSFTRDWINHVRSATGKNMFAVAEFWKNDLGAIENYLQKTNWNHSVFDVPLHYNLYNASKSGGNYDMRNIFNGTVVQRHPSHAVTFVDNHDSQPEEALESFVEEWFKPLAYALTLTREQGYPSVFYGDYYGIPTHGVPAMRSKIDPILEARQKYAYGPQHDYLDHPDVIGWTREGDSSHPKSGLATLITDGPGGSKRMYAGLKNAGETWYDITGNRSDTVKIGSDGWGEFHVNDGSVSIYVQK

SEQ ID NO: 41688 - protein, 480 aa, Bacillus sp.
NGTMMQYFEWYLPNDGNHWNRLNSDASNLKSKGITAVWIPPAWKAVSQNDVGYGAYDLYDLGEFNQKGTVRTKYGTRSQLQAAVTSLKNNGIQVYGDVVMNHKGGADATEMVDAVEVNPNNRNQEVTGEYTIEAWTRFDFPGRGNTHSSFKWRWYHFDGVDWDQSRNLTNRIYKFRGHGKAWDWEVDTEFGNYDYLMYTDYDMDHPEVVNELRNWGVWYTNTLGLDGFRIDAVKHIKYSFTRDWINHVRSATGKNMFAVAEFWKNDLGAIENYLQKTNWNHSVFDVPLHYNLYNASKSGGNYDMRNIFNGTVVQRHPSHAVTFVDNHDSQPEEALESFVEEWFKPLAYALTLTREQGYPSVFYGDYYGIPTHGVPAMRSKIDPILEARQKYAYGPQHDYLDHPDVIGWTREGDSSHPKSGLATLITDGPGGSKRMYAGLKNAGETWYDITGNRSDTVKIGSDGWGEFHVNDGSVSIYVQK

SEQ ID NO: 41689 - protein, 480 aa, Bacillus sp.
NGTMMQYFEWYLPNDGNHWNRLNSDASNLKSKGITAVWIPPAWKAASQNDVGYGAYDLYDLGEFNQKGTVRTKYGTRSQLQAAVTSLKNNGIQVYGDVVMNHKGGADATEMVRAVEVNPNNRNQEVTGEYTIEAWTRFDFPGRGNTHSSFKWRWYHFDGVDWDQSRNLTNRIYKFRGHGKAWDWEVDTEFGNYDYLMYADYDMDHPEVVNELRNWGVWYTNTLGLDGFRIDAVKHIKYSFTRDWINHVRIATGKNMFAVAEFWKNDLGAIENYLQKTNWNHSVFDVPLHYNLYNASKSGGNYDMRNIFNGTVVQRHPSHAVTFVDNHDSQPEEALESFVDEWFKPLAYALTLTREQGYPSVFYGDYYGIPTHGVPAMRSKIDPILEARQKYAYGPQHDYLDHPDVIGWTREGDSSHPKSGLATLITDGPGGSKRMYAGLKNAGETWYDITGNRSDTVKIGSDGWGEFHVNDQSVSIYVQK

SEQ ID NO: 41690 - protein, 480 aa, Bacillus sp.
NGTMMQYFEWYLPNDGNHWNRLNSDASNLKSKGITAVWIPPAWKGASQNDVGYGAYDLYDLGEFNQKGTVRTKYGTRSQLQAAVTSLKNNGIQVYGDVVMNHKGGADATEMVRAVEVNPNNRNQEVTGEYTIEAWTRFDFPGRGNTHSSFKWRWYHFDGVDWDQSRQLDNRIYKFRGHGKAWDWEVDTEFGNYDYLMYADYDMDHPEVVNELRNWGVWYTNTLGLDGFRIDAVKHIKYSFTRDWINHVRSATGKNMFAVAEFWKNDLGAIENYLQKTNWNHSVFDVPLHYNLYNASKSQGNYDMRNIFNGTVVQRHPSHAVTFVDNHDSQPEEALESFVDTWFKPLAYALTLTREQGYPSVFYGDYYGIPTHGVPAMRSKIDPILEARQKYAYGPQHDYLDHPDVIGWTREGDSSHPKSGLATLITDGPGGSKRMYAGLKNAGETWYDITGNRSDTVKIGSDGWGEFHVNGSSVSIYVQK

SEQ ID NO: 41691 - protein, 480 aa, Bacillus sp.
NGTMMQYFEWYLPNDGNHWNRLNSDASNLKSKGITAVWIPPAWKGASQNDVGYGAYDLYDLGEFNQKGTVRTKYGTRSQLQAAVTSLKNNGIQVYGDVVMNHKGGADATEMVRAVEVNPNNRNQEVTGEYTIEAWTRFDFPGRGNTHSSFKWRWYHFDGVDWDQSRRLNNRIYKFRGHGKAWDWEVDTEFGNYDYLMYADYDMDHHEVINELRNWGVWYTNTLGLDGFRIDAVKHIKYSFTRDWINHVRSATGKNMFAVAEFWKNDLGAIENYLQKTNWNHSVFDVPLHYNLYNASKSGGNYDMRNIFNGTVVQRHPSHAVTFVDNHDSQPEEALESFVEEWFKPLAYALTLTREQGYPSVFYGDYYGIPTHGVPAMRSKIDPILEARQKYAYGPQHDYLDHPDVIGWTREGDSSHPKSGLATLITDGPGGSKRMYAGLKNAGETWYDITGNRSDTVKIGSDGWGEFHVNDGSVSIYVQK

SEQ ID NO: 41692 - protein, 480 aa, Bacillus sp.
NGTMMQYFEWYLPNDGNHWNRLNSDASNLKSKGITAVWIPPAWKGASQNDVGYGAYDLYDLGEFNQKGTVRTKYGTRSQLQAAVTSLKNNGIQVYGDVVMNHKGGADATEMVRAVEVNPNNRNQEVTGEYTIEAWTRFDFPGRGNTHSSFKWRWYHFDGVDWDQSRRLNNRIYKFRGHGKAWDWEVDTEFGNYDYLMYADYDMDHPEVVNELRNWGVWYTNTLGLDGFRIDAVKHIKYSFTRDWINHVRSATGKNMFAVAEFWKNDLGAIENYLQKTNWNHSVFDVPLHYNLYNASQSGGNYDMRNIFNGTVVQRHPSHAVTFVDNHDSQPEEALESFVEEWFKPLAYALTLTREQGYPSVFYGDYYGIPTHGVPAMRSKIDPILEARQKYAYGPQHDYLDHPDVIGWTREGDSSHPKSGLATLITDGPGGSKRMYAGLKNAGETWYDITGNRSDTVKIGSDGWGEFHVNQSSVSIYVQK

SEQ ID NO: 41693 - protein, 480 aa, Bacillus sp.
NGTMMQYFEWYLPNDGNHWNRLNSDASNLKSKGITAVWIPPAWKGASQNDVGYGAYDLYDLGEFNQKGTVRTKYGTRSQLQAAVTSLKNNGIQVYGDVVMNHKGGADATEMVRAVEVNPNNRNQEVTGEYTIEAWTRFDFPGRGNTHSSFKWRWYHFDGVDWDQSRRLNNRIYKFRGHGKAWDWEVDTEFGNYDYLMYADYDMDHPEVVNELRNWGVWYTNTLGLDGFRIDAVKHIKYSFTRDWINHVRSATGKNMFAVAEFWKNDLGAIENYLQKTNWNHSVFDVPLHYNLYNASKSGGNYDMRNIFNGTVVQRHPSHAVTFVDNHDSQPEEALESFVDEWFKPLAYALTLTREQGYPSVFYGDYYGIPTHGVPAMRSKIDPILEARQKYAYGPQHDYLDHPDVIGWTREGDSSHPKSGLATLITDGPGGSKRMYAGLKNAGETWYDITGNRSDTVKIGSDGWGEFHVNKSSVSIYVQK

SEQ ID NO: 41694 - protein, 480 aa, Bacillus sp.
NGTMMQYFEWYLPNDGNHWNRLNSDASNLKSKGITAVWIPPAWKGASQNDVGYGAYDLYDLGEFNQKGTVRTKYGTRSQLQAAVTSLKNNGIQVYGDVVMNHKGGADATEMVRAVEVNPNNRNQEVTGEYTIEAWTRFDFPGRGNTHSSFKWRWYHFDGVDWDQSRRLNNRIYKFRGHGKAWDWEVDTEFGNYDYLMYADYDMDHPEVVNELRNWGVWYTNTLGLDGFRIDAVKHIKYSFTRDWINHVRSATGKNMFAVAEFWKNDLGAIENYLQKTNWNHSVFDVPLHYNLYNASKSGGNYDMRNIFNGTVVQRHPSHAVTFVDNHDSQPEEALESFVEEWFKPLAYALTLTREQGYPSVFYGDYYGIPTHGVPAMRSKIDPILEARQKYAYGPQHDYLDHPDVIGWTREGDSSHPKSGLATLITDGPGGSKRMYAGLKNAGETWYDITGNRSDTVKIGSDGWGEFHVNKQSVSIYVQK

SEQ ID NO: 41695 - protein, 480 aa, Bacillus sp.
NGTMMQYFEWYLPNDGNHWNRLNSDASNLKSKGITAVWIPPAWKGASQNDVGYGAYDLYDLGEFNQKGTVRTKYGTRSQLQAAVTSLKNNGIQVYGDVVMNHKGGADATEMVRAVEVNPNNRNQEVTGEYTIEAWTRFDFPGRGNTHSSFKWRWYHFDGVDWDQSRRLNNRIYKFRGHGKAWDWEVDTEFGNYDYLMYADYDMDHPETTNELRNWGVWYTNTLGLDGFRIDAVKHIKYSFTRDWINHVRSATGKNMFAVAEFWKNDLGAIENYLQKTNWNHSVFDVPLHYNLYNASKSGGNYDMRNIFNGTVVQRHPSHAVTFVDNHDSQPEEALESFVEEWFKPLAYALTLTREQGYPSVFYGDYYGIPTHGVPAMRSKIDPILEARQKYAYGPQHDYLDHPDVIGWTREGDSSHPKSGLATLITDGPGGSKRMYAGLKNAGETWYDITGNRSDTVKIGSDGWGEFHVNDGSVSIYVQK

SEQ ID NO: 41696 - protein, 480 aa, Bacillus sp.
NGTMMQYFEWYLPNDGNHWNRLNSDASNLKSKGITAVWIPPAWKGASQNDVGYGAYDLYDLGEFNQKGTVRTKYGTRSQLQAAVTSLKNNGIQVYGDVVMNHKGGADATEMVRAVEVNPNNRNQEVTGEYTIEAWTRFDFPGRGNTHSSFKWRWYHFDGVDWDQSRRLNNRIYKFRGHGKAWDWEVDTEFGNYDYLMYADYDMDHPEVVNELRNWGVWYTNTLGLDGFRIDAVKHIKYSFTRDWINHVRSATGKNMFAVAEFWKNDLGAIENYLQKTNWNHSVFDVPLHYNLYNASKSAGNYDMRNIFNGTVVQRHPSHAVTFVDNHDSQPEEALESFVDEWFKPLAYALTLTREQGYPSVFYGDYYGIPTHGVPAMRSKIDPILEARQKYAYGPQHDYLDHPDVIGWTREGDSSHPKSGLATLITDGPGGSKRMYAGLKNAGETWYDITGNRSDTVKIGSDGWGEFHVNQGSVSIYVQK

SEQ ID NO: 41697 - protein, 480 aa, Bacillus sp.
NGTMMQYFEWYLPNDGNHWNRLNSDASNLKSKGITAVWIPPAWKGASQNDVGYGAYDLYDLGEFNQKGTVRTKYGTRSQLQAAVTSLKNNGIQVYGDVVMNHKGGADATEMVRAVEVNPNNRNQEVTGEYTIEAWTRFDFPGRGNTHSSFKWRWYHFDGVDWDQSERLNNRIYKFRGHGKAWDWEVETEFGNYDYLMYADYDMDHPEVVNELRNWGVWYTNTLGLDGFRIDAVKHIKYSFTRDWINHVRSATGKNMFAVAEFWKNDLGAIENYLQKTNWNHSVFDVPLHYNLYNASKSGGNYDMRNIFNGTVVQRHPSHAVTFVDNHDSQPEEALESFVEEWFKPLAYALTLTREAGLPSVFYGDYYGIPTHGVPAMRSKIDPILEARQKYAYGPQHDYLDHPDVIGWTREGDSSHPKSGLATLITDGPGGSKRMYAGLKNAGETWYDITGNRSDTVKIGSDGWGEFHVNDGSVSIYVQK

SEQ ID NO: 41698 - protein, 480 aa, Bacillus sp.
NGTMMQYFEWYLPNDGNHWNRLNSDASNLKSKGITAVWIPPAWKAVSQNDVGYGAYDLYDLGEFNQKGTVRTKYGTRSQLQAAVTSLKNNGIQVYGDVVMNHKGGADATEMVRAVEVNPNNRNQEVTGEYTIEAWTRFDFPGRGNTHSSFKWRWYHFDGVDWDQSRDFQNRIYKFRGHGKAWDWEVDTEFGNYDYLMYTDYDMDHPEVVNELRNWGVWYTNTLGLDGFRIDAVKHIKYSFTRDWINHVRSATGKNMFAVAEFWKNDLGAIENYLQKTNWNHSVFDVPLHYNLYNASKSGGNYDMRNIFNGTVVQRHPSHAVTFVDNHDSQPEEALESFVEEWFKPLAYALTLTREQGYPSVFYGDYYGIPTHGVPAMRSKIDPILEARQKYAYGPQHDYLDHPDVIGWTREGDSSHPKSGLATLITDGPGGSKRMYAGLKNAGETWYDITGNRSDTVKIGSDGWGEFHVNDGSVSIYVQK

SEQ ID NO: 41699 - protein, 480 aa, Bacillus sp.
NGTMMQYFEWYLPNDGNHWNRLNSDASNLKSKGITAVWIPPAWKGASQNDVGYGAYDLYDLGEFNQKGTIRTKYGTRSQLQAAVTSLKNNGIQVYGDVVMNHKGGADATEMVRAVEVNPNNRNQEVTGEYTIEAWTRFDFPGRGNTHSSFKWRWYHFDGVDWDQSRRLNNRIYKFRGHGKAWDWEVDTEFGNYDYLMYADYDMDHPEVVNELRNWGVWYTNTLGLDGFRIDAVKHIKYSFTRDWINHVRSATGKNMFAVAEFWKNDLGAIENYLQKTNWNHSVFDVPLHYNLYNASKSGGNYDMRNIFNGTVVQAHPNHAVTFVDNHDSQPEEALESFVEEWFKPLAYALTLTREQGYPSVFYGDYYGIPTHGVPAMRSKIDPILEARQKYAYGPQHDYLDHPDVIGWTREGDSSHPKSGLATLITDGPGGSKRMYAGLKNAGETWYDITGNRSDTVKIGSDGWGEFHVNDGSVSIYVQK

SEQ ID NO: 41700 - protein, 480 aa, Synthetic construct
NGTMMQYFEWYLPNDGNHWNRLNSDASNLKSKGITAVWIPPAWKGASQNDVGYGAYDLYDLGEFNQKGTVRTKYGTRSQLQAAVTSLKNNGIQVYGDVVMNHKGGADATEMVRAVEVNPNNRNQEVTGEYTIEAWTRFDFPGRGNTHSSFKWRWYHFDGVDWDQSRRLNNRIYKFRGHGKAWDWEVDTEFGNYDYLMYADIDMDHPEGTNELRNWGVWYTNTLGLDGFRIDAVKHIKYSFTRDWINHVRSATGKNMFAVAEFWKNDLGAIENYLQKTNWNHSVFDVPLHYNLYNASKSGGNYDMRNIFNGTVVQRHPSHAVTFVDNHDSQPEEALESFVEEWFKPLAYALTLTREQGYPSVFYGDYYGIPTHGVPAMRSKIDPILEARQKYAYGPQHDYLDHPDVIGWTREGDSSHPKSGLATLITDGPGGSKRMYAGLKNAGETWYDITGNRSDTVKIGSDGWGEFHVNDGSVSIYVQK

SEQ ID NO: 41701 - protein, 480 aa, Synthetic construct
NGTMMQYFEWYLPNDGNHWNRLNSDASNLKSKGITAVWIPPAWKGASQNDVGYGAYDLYDLGEFNQKGTVRTKYGTRSQLQAAVTSLKNNGIQVYGDVVMNHKGGADATEMVRAVEVNPNNRNQEVTGEYTIEAWTRFDFPGRGNTHSSFKWRWYHFDGVDWDQSRRLNNRIYKFRGHGKAWDWEVDTEFGNYDYLMYADYDFDHPETTNEVRNWGVWYTNTLGLDGFRIDAVKHIKYSFTRDWINHVRSATGKNMFAVAEFWKNDLGAIENYLQKTNWNHSVFDVPLHYNLYNASKSGGNYDMRNIFNGTVVQRHPSHAVTFVDNHDSQPEEALESFVEEWFKPLAYALTLTREQGYPSVFYGDYYGIPTHGVPAMRSKIDPILEARQKYAYGPQHDYLDHPDVIGWTREGDSSHPKSGLATLITDGPGGSKRMYAGLKNAGETWYDITGNRSDTVKIGSDGWGEFHVNDGSVSIYVQK

SEQ ID NO: 41702 - protein, 480 aa, Bacillus sp.
NGTMMQYFEWYLPNDGNHWNRLNSDASNLKSKGITAVWIPPAWKGASQNDVGYGAYDLYDLGEFNQKGTVRTKYGTRSQLQAAVTSLKNNGIQVYGDVVMNHKGGADATEMVRAVEVNPNNRNQEVTGEYTIEAWTRFDFPGRGNTHSSFKWRWYHFDGVDWDQSRRLNNRIYKFRGHGKAWDWEVDTEFGNYDYLMYADYDMDHPEVVNELRNWGVWYTNTLGLDGFRIDAVKHIKYSFTRDWINHVRSATGKNMFAVAEFWKNDLGAIENYLQKTNWNHSVFDVPLHYNLYNASKSGGNYDMRNIFNGTVVQRHPSHAVTFVDNHDSQPEEALESFVEEWFKPLAYALTLTREQGYPSVFYGDYYGIPTHGVPAMRSKIDPILEARQKYAYGPQHDYLDHPDVIGWTREGDSSHPKSGLATLITDGPGGSKRMYAGLKNAGETWYDITGNRSDTVKIGFDGWGEFHVNKGSVSIYVQK

SEQ ID NO: 41703 - protein, 480 aa, Bacillus sp.
NGTMMQYFEWYLPNDGNHWNRLNSDASNLKSKGITAVWIPPAWKGASQNDVGYGAYDLYDLGEFNQKGTVRTKYGTRSQLQAAVTSLKNNGINVYGDVVMNHKGGADATEMVRAVEVNPNNRNQEVTGEYTIEAWTRFDFPGRGNTHSSFKWRWYHFDGVDWDQSRRLNNRIYKFRGHGKAWDWEVDTEFGNYDYLMYADYDMDHPEVVNELRNWGVWYTNTLGLDGFRIDAVKHIKYSFTRDWINHVRSATGKNMFAVAEFWKNDLGAIENYLQKTNWNHSVFDVPLHYNLYNASKSGGNYDMRNIFNGTVVQAHPMHAVTFVDNHDSQPEEALESFVEEWFKPLAYALTLTREQGYPSVFYGDYYGIPTHGVPAMRSKIDPILLARQKYAYGPQHDYLDHPDVIGWTREGDSSHPKSGLATLITDGPGGSKRMYAGLKNAGETWYDITGNRSDTVKIGSDGWGEFHVNDGSVSIYVQK

SEQ ID NO: 41704 - protein, 480 aa, Bacillus sp.
NGTMMQYFEWYLPNDGNHWNRLNSDASNLKSKGITAVWIPPAWKAVSQNDVGYGAYDLYDLGEFNQKGTVRTKYGTRSQLQAAVTSLKNNGIQVYGDVVMNHKGGADATEMVRAVEVNPNNRNQEVTGEYTIEAWTRFDFPGRGNTHSSFKWRWYHFDGVDWDQSRRLSNRIYKFRGHGKAWDWEVDTEFGNYDYLMYADYDMDHPEVVNELRNWGVWYTNTLGLDGFRIDAVKHIKYSFTRDWINHVRSATGKNMFAVAEFWKNDLGAIENYLQKTNWNHSVFDVPLHYNLYNASKSGGNYDMRNIFNGTVVQVHPSHAVTFVDNHDSQPEEALESFVEEWFKPLAYALTLTREQGYPSVFYGDYYGIPTHGVPAMRSKIDPILEARQKYAYGPQHDYLDHPDVIGWTREGDSSHPKSGLATLITDGPGGSKRMYAGLKNAGETWYDITGNRSDTVKIGSDGWGEFHVNYGSVSIYVQK

SEQ ID NO: 41705 - protein, 480 aa, Bacillus sp.
NLTMMQYFEWYLPNDGNHWNRLNSDASNLKSKGITAVWIPPAWKGSSQNDVGYGAYDLYDLGEFNQKGTVRTKYGTRSQLQAAVTSLKNNGIQVYGDVVMNHKGGADATEMVRAVEVNPNNRNQEVTGEYTIEAWTRFDFPGRGNTHSSFKWRWYHFDGVDWDQSRRLNNRIYKFRGHGKAWDWEVDTEFGNYDYLMYADYDMDHPEVVNELRNWGVWYTNTLGLDGFRIDAVKHIKYSFTRDWINHVRSATGKNMFAVAEFWKNDLGAIENYLQKTNWNHSVFDVPLHYNLYNASKSGGNYDMRNIFNGTVVQSHPMHAVTFVDNHDSQPEEALESFVEEWFKPLAYALTLTREQGYPSVFYGDYYGIPTHGVPAMRSKIDPILEARQKYAYGPQHDYLDHPDVIGWTREGDSSHPKSGLATLITDGPGGSKRMYAGLKNAGETWYDITGNRSDTVKIGSDGWGEFHVNDGSVSIYVQK

SEQ ID NO: 41706 - protein, 480 aa, Bacillus sp.
NGTMMQYFEWYLPNDGNHWNRLNSDASNLKSKGITAVWIPPAWKGASQNDVGYGAYDLYDLGEFNQKGTVRTKYGTRSQLQAAVTSLKNNGIQVYGDVVMNHKGGADLTEMVRAVEVNPNNRNQEVTGEYTIEAWTRFDFPGRGNTHSSFKWRWYHFDGVDWDQSRRLNNRIYKFRGHGKAWDWEVDTEFGNYDYLMYADYDMDHPEVVNELRNWGVWYTNTLGLDGFRIDAVKHIKYSFTRDWINHVRIATGKNMFAVAEFWKNDLGAIENYLQKTNWNHSVFDVPLHYNLYNASKSGGNYDMRNIFNGTVVQRHPSHAVTFVDNHDSQPEEALESFVDEWFKPLAYALTLTREQGYPSVFYGDYYGIPTHGVPAMRSKIDPILEARQKYAYGPQHDYLDHPDVIGWTREGDSSHPKSGLATLITDGPGGSKRMYAGLKNAGETWYDITGNRSDTVKIGSDGWGEFHVNDQSVSIYVQK

SEQ ID NO: 41707 - protein, 480 aa, Bacillus sp.
NATMMQYFEWYLPNDGNHWNRLNSDASNLKSKGITAVWIPPAWKGASQNDVGYGAYDLYDLGEFNQKGTVRTKYGTRSQLQAAVTSLKNNGIQVYGDVVMNHKGGADATEMVRAVEVNPNNRNQEVTGEYTIEAWTRFDFPGRGNTHSSFKWRWYHFDGVDWDQSRRLNNRIYKFRGHGKAWDWEVDTEFGNYDYLMYADYDMDHPEVVNELRNWGVWYTNTLGLDGFRIDAVKHIKYSFTRDWINHVRSATGKNMFAVAEFWKNDLGAIENYLQKTNWNHSVFDVPLHYNLYNASKSGGNYDMRNIFNGTVVQMHPSHAVTFVDNHDSQPEEALESFVEEWFKPLAYALTLTREQGYPSVFYGDYYGIPTHGVPAMRSKIDPILEARQKYAYGPQHDYLDHPDVIGWTREGDSSHPKSGLATLITDGPGGSKRMYAGLKNAGETWYDITGNRSDTVKIGSDGWGEFHVNDGSVSIYVQK

SEQ ID NO: 41708 - protein, 480 aa, Bacillus sp.
NGTMMQYFEWYLPNDGNHWNRLNSDASNLKSKGITAVWIPPAWKGASQNDVGYGAYDLYDLGEFNQKGTVRTKYGTRSQLQAAVTSLKNNGIQVYGDVVMNHKGGADATEMVRAVEVNPNNRNQEVTGEYTIEAWTRFDFPGRGNTHSSFKWRWYHFDGVDWDQSRRLNNRIYKFRGHGKAWDWEVDTEFGNYDYLMYADYDMDHPEVVNELRNWGVWYTNTLGLDGFRIDAVKHIKYSFTRDWINHVRSATGKNMFAVAEFWKNDLGAIENYLQKTNWNHSVFDVPLHYNLYNASKSGRNYDMRNIFNGTVVQRHPSHAVTFVDNHDSQPEEALESFVEPWFKPLAYALTLTREQGYPSVFYGDYYGIPTHGVPAMRSKIDPILEARQKYAYGPQHDYLDHPDVIGWTREGDSSHPKSGLATLITDGPGGSKRMYAGLKNAGKTWYDITGNRSDTVKIGSDGWGEFHVNDGSVSIYVQK

SEQ ID NO: 41709 - protein, 480 aa, Bacillus sp.
NGTMMQYFEWYLPNDGNHWNRLNSDASNLKSKGITAVWIPPAWKGASQNDVGYGAYDLYDLGEFNQKGTVRTKYGTRSQLQAAVTSLKNNGIQVYGDVVMNHKGGADATEMVRAVEVNPNNRNQEVTGEYTIEAWTRFDFPGRGNTHSSFKWRWYHFDGVDFDQSRRLNNRIYKFRGHGKAWDWEVDTEFGNYDYLMYADYDMDHPEVVNELRNWGVWYTNTLGLDGFRIDAVKHIKYSFTRDWINHVRSATGKNMFAVAEFWKNDLGAIENYLQKTNWNHSVFDVPLHYNLYNASKSGGNYDMRNIFNGTVVQRHPSHAVTFVDNHDSQPEEALESFVETWFKPLAYALTLTREQGYPSVFYGDYYGIPTHGVPAMRSKIDPILEARQKYAYGPQHDYLDHPDVIGWTREGDSSHPKSGLATLITDGPGGSKRMYAGLKNAGETWYDITGNRSDTVKIGSDGWGEFHVNKASVSIYVQK

SEQ ID NO: 41710 - protein, 480 aa, Synthetic construct
NGTMMQYFEWYLPNDGNHWNRLNSDASNLKSKGITAVWIPPAWKGASQNDVGYGAYDLYDLGEFNQKGTVRTKYGTRSQLQAAVTSLKNNGIQVYGDVVMNHKGGADATEMVRAVEVNPNNRNQEVTGEYTIEAWTRFDFPGRGNTHSSFKWRWYHFDGVDWDQSRRLNNRIYKFRGHGKAWDWEVDTEFGNYDYLMYADIDMDHPEIPNELRNWGVWYTNTLGLDGFRIDAVKHIKYSFTRDWINHVRSATGKNMFAVAEFWKNDLGAIENYLQKTNWNHSVFDVPLHYNLYNASKSGGNYDMRNIFNGTVVQRHPSHAVTFVDNHDSQPEEALESFVEEWFKPLAYALTLTREQGYPSVFYGDYYGIPTHGVPAMRSKIDPILEARQKYAYGPQHDYLDHPDVIGWTREGDSSHPKSGLATLITDGPGGSKRMYAGLKNAGETWYDITGNRSDTVKIGSDGWGEFHVNDGSVSIYVQK

SEQ ID NO: 41711 - protein, 480 aa, Bacillus sp.
NGTMMQYFEWYLPNDGNHWNRLNSDASNLKSKGITAVWIPPAWKGASQNDVGYGAYDLYDLGEFNQKGTVRTKYGTRSQLQAAVTSLKNNGIQVYGDVVMNHKGGADATEMVSAVEVNPNNRQQEVTGEYTIEAWTRFDFPGRGNTHSSFKWRWYHFDGVDWDQSRRLNNRIYLFRGHGKAWDWEVDTEFGNYDYLMYADYDMDHPEVVNELRNWGVWYTNTLGLDGFRIDAVKHIKYSFTRDWINHVRSATGKNMFAVAEFWKNDLGAIENYLQKTNWNHSVFDVPLHYNLYNASKSGGNYDMRNIFNGTVVQRHPSHAVTFVDNHDSQPEEALESFVEEWFKPLAYALTLTREQGYPSVFYGDYYGIPTHGVPAMRSKIDPILEARQKYAYGPQHDYLDHPDVIGWTREGDSSHPKSGLATLITDGPGGSKRMYAGLKNAGETWYDITGNRSDTVKIGSDGWGEFHVNDGSVSIYVQK

SEQ ID NO: 41712 - protein, 480 aa, Bacillus sp.
NGTMMQYFEWYLPNDGNHWNRLNSDASNLKSKGITAVWIPPAWKAASQNDVGYGAYDLYDLGEFNQKGTVRTKYGTRSQLQAAVTSLKNNGIQVYGDVVMNHKGGADATEMVRAVEVNPNNRNQEVTGEYTIEAWTRFDFPGRGNTHSSFKWRWYHFDGVDWDQSRRLTNRIYKFRGHGKAWDWEVDTEFGNYDYLMYVDYDMDHPEVVNELRNWGVWYTNTLGLDGFRIDAVKHIKYSFTRDWINHVRSATGKNMFAVAEFWKNDLGAIENYLQKTNWNHSVFDVPLHYNLYNASKSGGNYDMRNIFNGTVVQRHPSHAVTFVDNHDSQPEEALESFVEEWFKPLAYALTLTREQGYPSVFYGDYYGIPTHGVPAMRSKIDPILEARQKYAYGPQHDYLDHPDVIGWTREGDSSHPKSGLATLITDGPGGSKRMYAGLKNAGETWYDITGNRSDTVKIGSDGWGEFHVNDGSVSIYVQK

SEQ ID NO: 41713 - protein, 480 aa, Bacillus sp.
NGTMMQYFEWYLPNDGNHWNRLNSDASNLKSKGITAVWIPPAWKAASQNDVGYGAYDLYDLGEFNQKGTVRTKYGTRSQLQAAVTSLKNNGIQVYGDVVMNHKGGADATEMVRAVEVNPNNRNQEVTGEYTIEAWTRFDFPGRGNTHSSFKWRWYHFDGVDWDQSRRLENRIYKFRGHGKAWDWEVDTEFGNYDYLMYTDYDMDHPEVVNELRNWGVWYTNTLGLDGFRIDAVKHIKYSFTRDWINHVRSATGKNMFAVAEFWKNDLGAIENYLQKTNWNHSVFDVPLHYNLYNASKSGGNYDMRNIFNGTVVQRHPSHAVTFVDNHDSQPEEALESFVEEWFKPLAYALTLTREQGYPSVFYGDYYGIPTHGVPAMRSKIDPILEARQKYAYGPQHDYLDHPDVIGWTREGDSSHPKSGLATLITDGPGGSKRMYAGLKNAGETWYDITGNRSDTVKIGSDGWGEFHVNDGSVSIYVQK

SEQ ID NO: 41714 - protein, 480 aa, Bacillus sp.
NGTMMQYFEWYLPNDGNHWNRLNSDASNLKSKGITAVWIPPAWKATSQNDVGYGAYDLYDLGEFNQKGTVRTKYGTRSQLQAAVTSLKNNGIQVYGDVVMNHKGGADATEMVRAVEVNPNNRNQEVTGEYTIEAWTRFDFPGRGNTHSSFKWRWYHFDGVDWDQSRELNNRIYKFRGHGKAWDWEVDTEFGNYDYLMYTDYDMDHPEVVNELRNWGVWYTNTLGLDGFRIDAVKHIKYSFTRDWINHVRSATGKNMFAVAEFWKNDLGAIENYLQKTNWNHSVFDVPLHYNLYNASKSGGNYDMRNIFNGTVVQRHPSHAVTFVDNHDSQPEEALESFVEEWFKPLAYALTLTREQGYPSVFYGDYYGIPTHGVPAMRSKIDPILEARQKYAYGPQHDYLDHPDVIGWTREGDSSHPKSGLATLITDGPGGSKRMYAGLKNAGETWYDITGNRSDTVKIGSDGWGEFHVNDGSVSIYVQK

SEQ ID NO: 41715 - protein, 480 aa, Bacillus sp.
NGTMMQYFEWYLPNDGNHWNRLNSDASNLKSKGITAVWIPPAWKGASQNDVGYGAYDLYDLGEFNQKGTVRTKYGTRSQLQAAVTSLKNNGIQVYGDVVMNHKGGADATEMVSAVEVNPNNRNQEVTGDYTIEAWTRFDFPGRGNTHSSFKWRWYHFDGVDWDQSRRLNNRIYKFRSHGKAWDWEVDTEFGNYDYLMYADYDMDHPEVVNELRNWGVWYTNTLGLDGFRIDAVKHIKYSFTRDWINHVRSATGKNMFAVAEFWKNDLGAIENYLQKTNWNHSVFDVPLHYNLYNASKSGGNYDMRNIFNGTVVQRHPSHAVTFVDNHDSQPEEALESFVEEWFKPLAYALTLTREQGYPSVFYGDYYGIPTHGVPAMRSKIDPILEARQKYAYGPQHDYLDHPDVIGWTREGDSSHPKSGLATLITDGPGGSKRMYAGLKNAGETWYDITGNRSDTVKIGSDGWGEFHVNDGSVSIYVQK

SEQ ID NO: 41716 - protein, 480 aa, Bacillus sp.
NGTMMQYFEWYLPNDGNHWNRLNSDASNLKSKGITAVWIPPAWKAASQNDVGYGAYDLYDLGEFNQKGTVRTKYGTRSQLQAAVTSLKNNGIQVYGDVVMNHKGGADATEMVRAVEVNPNNRNQEVTGEYTIEAWTRFDFPGRGNTHSSFKWRWYHFDGVDWDQSRDFNNRIYKFRGHGKAWDWEVDTEFGNYDYLMYADYDMDHPEVVNELRNWGVWYTNTLGLDGFRIDAVKHIKYSFTRDWINHVRSATGKNMFAVAEFWKNDLGAIENYLQKTNWNHSVFDVPLHYNLYNASKSGGNYDMRNIFNGTVVQRHPSHAVTFVDNHDSQPEEALESFVEEWFKPLAYALTLTREQGYPSVFYGDYYGIPTHGVPAMRSKIDPILEARQKYAYGPQHDYLDHPDVIGWTREGDSSHPKSGLATLITDGPGGSKRMYAGLKNAGETWYDITGNRSDTVKIGSDGWGKFHVNDGSVSIYVQK

SEQ ID NO: 41717 - protein, 480 aa, Synthetic construct
NGTMMQYFEWYLPNDGNHWNRLNSDASNLKSKGITAVWIPPAWKGASQNDVGYGAYDLYDLGEFNQKGTVRTKYGTRSQLQAAVTSLKNNGIQVYGDVVMNHKGGADATEMVRAVEVNPNNRNQEVTGEYTIEAWTRFDFPGRGNTHSSFKWRWYHFDGVDWDQSRRLNNRIYKFRGHGKAWDWEVDTEFGNYDYLMYADYDLDHPETTNEMRNWGVWYTNTLGLDGFRIDAVKHIKYSFTRDWINHVRSATGKNMFAVAEFWKNDLGAIENYLQKTNWNHSVFDVPLHYNLYNASKSGGNYDMRNIFNGTVVQRHPSHAVTFVDNHDSQPEEALESFVEEWFKPLAYALTLTREQGYPSVFYGDYYGIPTHGVPAMRSKIDPILEARQKYAYGPQHDYLDHPDVIGWTREGDSSHPKSGLATLITDGPGGSKRMYAGLKNAGETWYDITGNRSDTVKIGSDGWGEFHVNDGSVSIYVQK

SEQ ID NO: 41718 - protein, 480 aa, Bacillus sp.
NGTMMQYFEWYLPNDGNHWNRLNSDASNLKSKGITAVWIPPAWKAVSQNDVGYGAYDLYDLGEFNQKGTVRTKYGTRSQLQAAVTSLKNNGIQVYGDVVMNHKGGADATEMVRAVEVNPNNRNQEVTGEYTIEAWTRFDFPGRGNTHSSFKWRWYHFDGVDWDQSREFTNRIYKFRGHGKAWDWEVDTEFGNYDYLMYVDYDMDHPEVVNELRNWGVWYTNTLGLDGFRIDAVKHIKYSFTRDWINHVRSATGKNMFAVAEFWKNDLGAIENYLQKTNWNHSVFDVPLHYNLYNASKSGGNYDMRNIFNGTVVQRHPSHAVTFVDNHDSQPEEALESFVEEWFKPLAYALTLTREQGYPSVFYGDYYGIPTHGVPAMRSKIDPILEARQKYAYGPQHDYLDHPDVIGWTREGDSSHPKSGLATLITDGPGGSKRMYAGLKNAGETWYDITGNRSDTVKIGSDGWGEFHVNDGSVSIYVQK

SEQ ID NO: 41719 - protein, 480 aa, Synthetic construct
NGTMMQYFEWYLPNDGNHWNRLNSDASNLKSKGITAVWIPPAWKGASQNDVGYGAYDLYDLGEFNQKGTVRTKYGTRSQLQAAVTSLKNNGIQVYGDVVMNHKGGADATEMVRAVEVNPNNRNQEVTGEYTIEAWTRFDFPGRGNTHSSFKWRWYHFDGVDWDQSRRLNNRIYKFRGHGKAWDWEVDTEFGNYDYLMYADIDMDHPESTNELRNWGVWYTNTLGLDGFRIDAVKHIKYSFTRDWINHVRSATGKNMFAVAEFWKNDLGAIENYLQKTNWNHSVFDVPLHYNLYNASKSGGNYDMRNIFNGTVVQRHPSHAVTFVDNHDSQPEEALESFVEEWFKPLAYALTLTREQGYPSVFYGDYYGIPTHGVPAMRSKIDPILEARQKYAYGPQHDYLDHPDVIGWTREGDSSHPKSGLATLITDGPGGSKRMYAGLKNAGETWYDITGNRSDTVKIGSDGWGEFHVNDGSVSIYVQK

SEQ ID NO: 41720 - protein, 480 aa, Bacillus sp.
NGTMMQYFEWYLPNDGNHWNRLNSDASNLKSKGITAVWIPPAWKGASQNDVGYGAYDLYDLGEFNQKGTVRTKYGTRSQLQAAVTSLKNNGIQVYGDVVMNHKGGADATEMVRAVEVNPNNRNQEVTGEYTIEAWTRFDFPGRGNTHSSFKWRWYHFDGVDWDQSRRLNNRIYLFRAHGKAWDWEVDTEFGNYDYLMYADYDMDHPEVVNELRNWGVWYTNTLGLDGFRIDAVKHIKYSFTRDWINHVRSATGKNMFAVAEFWKNDLGAIENYLQKTNWNHSVFDVPLHYNLYNASKSGGNYDMRNIFNGTVVQRHPSHAVTFVDNHDSQPEEALESFVEEWFKPLAYALTLTREQGYPSVFYGDYYGIPTHGVPAMRSKIDPILEARQKYAYGPQHDYLDHPDVIGWTREGDSSHPKSGLATLITDGPGGSKRMYAGLKNAGETWYDITGNRSDTVKIGSDGWGEFHVNDGSVSIYVQK

SEQ ID NO: 41721 - protein, 480 aa, Bacillus sp.
NGTMMQYFEWYLPNDGNHWNRLNSDASNLKSKGITAVWIPPAWKAASQNDVGYGAYDLYDLGEFNQKGTVRTKYGTRSQLQAAVTSLKNNGIQVYGDVVMNHKGGADATEMVPAVEVNPNNRNQEVTGEYTIEAWTRFDFPGRGNTHSSFKWRWYHFDGVDWDQSRDLTNRIYKFRGHGKAWDWEVDTEFGNYDYLMYADYDMDHPEVVNELRNWGVWYTNTLGLDGFRIDAVKHIKYSFTRDWINHVRSATGKNMFAVAEFWKNDLGAIENYLQKTNWNHSVFDVPLHYNLYNASKSGGNYDMRNIFNGTVVQRHPSHAVTFVDNHDSQPEEALESFVDPWFKPLAYALTLTREQGYPSVFYGDYYGIPTHGVPAMRSKIDPILEARQKYAYGPQHDYLDHPDVIGWTREGDSSHPKSGLATLITDGPGGSKRMYAGLKNAGETWYDITGNRSDTVKIGSDGWGEFHVNGGSVSIYVQK

SEQ ID NO: 41722 - protein, 480 aa, Bacillus sp.
NGTMMQYFEWYLPNDGNHWNRLNSDASNLKSKGITAVWIPPAWKAASQNDVGYGAYDLYDLGEFNQKGTVRTKYGTRSQLQAAVTSLKNNGIQVYGDVVMNHKGGADATEMVRAVEVNPNNRNQEVTGEYTIEAWTRFDFPGRGNTHSSFKWRWYHFDGVDWDQSRDLQNRIYKFRGHGKAWDWEVDTEFGNYDYLMYADYDMDHPEVVNELRNWGVWYTNTLGLDGFRIDAVKHIKYSFTRDWINHVRIATGKNMFAVAEFWKNDLGAIENYLQKTNWNHSVFDVPLHYNLYNASKSGGNYDMRNIFNGTVVQRHPSHAVTFVDNHDSQPEEALESFVDEWFKPLAYALTLTREQGYPSVFYGDYYGIPTHGVPAMRSKIDPILEARQKYAYGPQHDYLDHPDVIGWTREGDSSHPKSGLATLITDGPGGSKRMYAGLKNAGETWYDITGNRSDTVKIGSDGWGEFHVNDQSVSIYVQK

SEQ ID NO: 41723 - protein, 480 aa, Bacillus sp.
NGTMMQYFEWYLPNDGNHWNRLNSDASNLKSKGITAVWIPPAWKGASQNDVGYGAYDLYDLGEFNQKGTVRTKYGTRSQLQAAVTSLKNNGIQVYGDVVMNHKGGADATEMVSAVEVNPNNRNQEVTGDYTIEAWTRFDFPGRGNTHSSFKWRWYHFDGVDWDQSRRLNNRIYKFRAHGKAWDWEVDTEFGNYDYLMYADYDMDHPEVVNELRNWGVWYTNTLGLDGFRIDAVKHIKYSFTRDWINHVRSATGKNMFAVAEFWKNDLGAIENYLQKTNWNHSVFDVPLHYNLYNASKSGGNYDMRNIFNGTVVQRHPSHAVTFVDNHDSQPEEALESFVEEWFKPLAYALTLTREQGYPSVFYGDYYGIPTHGVPAMRSKIDPILEARQKYAYGPQHDYLDHPDVIGWTREGDSSHPKSGLATLITDGPGGSKRMYAGLKNAGETWYDITGNRSDTVKIGSDGWGEFHVNDGSVSIYVQK

SEQ ID NO: 41724 - protein, 480 aa, Bacillus sp.
NGTMMQYFEWYLPNDGNHWNRLNSDASNLKSKGITAVWIPPAWKGASQNDVGYGAYDLYDLGEFNQKGTVRTKYGTRSQLQAAVTSLKNNGIQVYGDVVMNHKGGADATEMVRAVEVNPNNRNQEVTGEYTIEAWTRFDFPGRGNTHSSFKWRWYHFDGVDWDQSRRTNNRIYKFRGHGKAWDWEVDTEFGNYDYLMYTDYDMDHPEVVNELRNWGVWYTNTLGLDGFRIDAVKHIKYSFTRDWINHVRSATGKNMFAVAEFWKNDLGAIENYLQKTNWNHSVFDVPLHYNLYNASKSGGNYDMRNIFNGTVVQRHPSHAVTFVDNHDSQPEEALESFVETWFKPLAYALTLTREQGYPSVFYGDYYGIPTHGVPAMRSKIDPILEARQKYAYGPQHDYLDHPDVIGWTREGDSSHPKSGLATLITDGPGGSKRMYAGLKNAGETWYDITGNRSDTVKIGSDGWGEFHVNKASVSIYVQK

SEQ ID NO: 41725 - protein, 480 aa, Bacillus sp.
NGTMMQYFEWYLPNDGNHWNRLNSDASNLKSKGITAVWIPPAWKGASQNDVGYGAYDLYDLGEFNQKGTVRTKYGTRSQLQAAVTSLKNNGIQVYGDVVMNHKGGADATEMVRAVEVNPNNRNQEVTGEYTIEAWTRFDFPGRGNTHSSFKWRWYHFDGVDWDQSRRLNNRIYKFRGHGKAWDWEVDTEFGNYDYLMYADYDMDHPEVVNELRNWGVWYTNTLGLDGFRIDAVKHIKYSFTRDWINHVRSATGKNMFAVAEFWKNDLGAIENYLQKTNWNHSVFDVPLHYNLYNASNSGGNYDMRNIFNGTVVQRHPSHAVTFVDNHDSQPEEALESFVDEWFKPLAYALTLTREQGYPSVFYGDYYGIPTHGVPAMRSKIDPILEARQKYAYGPQHDYLDHPDVIGWTREGDSSHPKSGLATLITDGPGGSKRMYAGLKNAGETWYDITGNRSDTVKIGSDGWGEFHVNGKSVSIYVQK

SEQ ID NO: 41726 - protein, 480 aa, Bacillus sp.
NGTMMQYFEWYLPNDGNHWNRLNSDASNLKSKGITAVWIPPAWKGASQNDVGYGAYDLYDLGEFNQRGTVRTKYGTRSQLQAAVTSLKNNGIQVYGDVVMNHKGGADATEMVRAVEVNPNNRNQEVTGEYTIEAWTRFDFPGRGNTHSSFKWRWYHFDGVDFDQSRRLNNRIYKFRGHGKAWDWEVDTEFGNYDYLMYADYDMDHPEVVNELRNWGVWYTNTLGLDGFRIDAVKHIKYSFTRDWINHVRSATGKNMFAVAEFWKNDLGAIENYLQKTNWNHSVFDVPLHYNLYNASKSGGNYDMRNIFNGTVVQRHPSHAVTFVDNHDSQPEEALESFVETWFKPLAYALTLTREQGYPSVFYGDYYGIPTHGVPAMRSKIDPILEARQKYAYGPQHDYLDHPDVIGWTREGDSSHPKSGLATLITDGPGGSKRMYAGLKNAGETWYDITGNRSDTVKIGSDGWGEFHVNKGSVSIYVQK

SEQ ID NO: 41727 - protein, 480 aa, Bacillus sp.
NGTMMQYFEWYLPNDGNHWNRLNSDASNLKSKGITAVWIPPAWKGASQNDVGYGAYDLYDLGEFNQKGTVRTKYGTRSQLQAAVTSLKNNGIQVYGDVVMNHKGGADATEMVRAVEVNPNNRNQEVTGEYTIEAWTRFDFPGRGNTHSSFKWRWYHFDGVDWDQSRRLNNRIYKFRGHGKAWDWEVDTEFGNYDYLMYADYDMDHPEVVNELRNWGVWYTNTLGLDGFRIDAVKHIKYSFTRDWINHVRSATGKNMFAVAEFWKNDLGAIENYLQKTNWNHSVFDVPLHYNLYNASKSGSNYDMRNIFNGTVVQRHPSHAVTFVDNHDSQPEEALESFVETWFKPLAYALTLTREQGYPSVFYGDYYGIPTHGVPAMRSKIDPILEARQKYAYGPQHDYLDHPDVIGWTREGDSSHPKSGLATLITDGPGGSKRMYAGLKNAGETWYDITGNRSDTVKIGSDGWGEFHVNQQSVSIYVQK

SEQ ID NO: 41728 - protein, 480 aa, Bacillus sp.
NGTMMQYFEWYLPNDGNHWNRLNSDASNLKSKGITAVWIPPAWKAASQNDVGYGAYDLYDLGEFNQKGTVRTKYGTRSQLQAAVTSLKNNGIQVYGDVVMNHKGGADATEMVRAVEVNPNNRNQEVTGEYTIEAWTRFDFPGRGNTHSSFKWRWYHFDGVDWDQSRNLTNRIYKFRGHGKAWDWEVDTEFGNYDYLMYADYDMDHPEVVNELRNWGVWYTNTLGLDGFRIDAVKHIKYSFTRDWINHVRSATGKNMFAVAEFWKNDLGAIENYLQKTNWNHSVFDVPLHYNLYNASKSGGNYDMRNIFNGTVVQRHPSHAVTFVDNHDSQPEEALESFVETWFKPLAYALTLTREQGYPSVFYGDYYGIPTHGVPAMRSKIDPILEARQKYAYGPQHDYLDHPDVIGWTREGDSSHPKSGLATLITDGPGGSKRMYAGLKNAGETWYDITGNRSDTVKIGSDGWGEFHVNKASVSIYVQK

SEQ ID NO: 41729 - protein, 480 aa, Bacillus sp.
NGTMMQYFEWYLPNDGNHWNRLNSDASNLKSKGITAVWIPPAWKAASQNDVGYGAYDLYDLGEFNQKGTVRTKYGTRSQLQAAVTSLKNNGIQVYGDVVMNHKGGADATEMVRAVEVNPNNRNQEVTGEYTIEAWTRFDFPGRGNTHSSFKWRWYHFDGVDWDQSRDLQNRIYKFRGHGKAWDWEVDTEFGNYDYLMYADYDMDHPEVVNELRNWGVWYTNTLGLDGFRIDAVKHIKYSFTRDWINHVRSATGKNMFAVAEFWKNDLGAIENYLQKTNWNHSVFDVPLHYNLYNASKSGGNYDMRNIFNGTVVQAHPNHAVTFVDNHDSQPEEALESFVEEWFKPLAYALTLTREQGYPSVFYGDYYGIPTHGVPAMRSKIDPILEARQKYAYGPQHDYLDHPDVIGWTREGDSSHPKSGLATLITDGPGGSKRMYAGLKNAGETWYDITGNRSDTVKIGSDGWGEFHVNDGSVSIYVQK

SEQ ID NO: 41730 - protein, 480 aa, Bacillus sp.
NETMMQYFEWYLPNDGNHWNRLNSDASNLKSKGITAVWIPPAWKGASQNDVGYGAYDLYDLGEFNQKGTVRTKYGTRSQLQAAVTSLKNNGIQVYGDVVMNHKGGADATEMVRAVEVNPNNRNQEVTGEYTIEAWTRFDFPGRGNTHSSFKWRWYHFDGVDWDQSRRLNNRIYKFRGHGKAWDWEVDTEFGNYDYLMYADYDMDHPEVVNELRNWGVWYTNTLGLDGFRIDAVKHIKYSFTRDWINHVRSATGKNMFAVAEFWKNDLGAIENYLQKTNWNHSVFDVPLHYNLYNASKSGGNYDMRNIFNGTVVQQHPMHAVTFVDNHDSQPEEALESFVEEWFKPLAYALTLTREQGYPSVFYGDYYGIPTHGVPAMRSKIDPILEARQKYAYGPQHDYLDHPDVIGWTREGDSSHPKSGLATLITDGPGGSKRMYAGLKNAGETWYDITGNRSDTVKIGSDGWGEFHVNDGSVSIYVQK

SEQ ID NO: 41731 - protein, 480 aa, Synthetic construct
NGTMMQYFEWYLPNDGNHWNRLNSDASNLKSKGITAVWIPPAWKGASQNDVGYGAYDLYDLGEFNQKGTVRTKYGTRSQLQAAVTSLKNNGIQVYGDVVMNHKGGADATEMVRAVEVNPNNRNQEVTGEYTIEAWTRFDFPGRGNTHSSFKWRWYHFDGVDWDQSRRLNNRIYLFRGHGKSWDWPVDTENGNYDYLMYADIDMDHPEVVNELRNWGVWYTNTLGLDGFRIDAVKHIKYSFTRDWINHVRSATGKNMFAVAEFWKNDLGAIENYLQKTNWNHSVFDVPLHYNLYNASKSGGNYDMRNIFNGTVVQRHPSHAVTFVDNHDSQPEEALESFVEEWFKPLAYALTLTREQGYPSVFYGDYYGIPTHGVPAMRSKIDPILEARQKYAYGPQHDYLDHPDVIGWTREGDSSHPKSGLATLITDGPGGSKRMYAGLKNAGETWYDITGNRSDTVKIGSDGWGEFHVNDGSVSIYVQK

SEQ ID NO: 41732 - protein, 480 aa, Bacillus sp.
NGTMMQYFEWYLPNDGNHWNRLNSDASNLKSKGITAVWIPPAWKAASQNDVGYGAYDLYDLGEFNQKGTVRTKYGTRSQLQAAVTSLKNNGIQVYGDVVMNHKGGADATEMVRAVEVNPNNRNQEVTGEYTIEAWTRFDFPGRGNTHSSFKWRWYHFDGVDWDQSRRLTNRIYKFRGHGKAWDWEVDTEFGNYDYLMYADYDMDHPEVVNELRNWGVWYTNTLGLDGFRIDAVKHIKYSFTRDWINHVRSATGKNMFAVAEFWKNDLGAIENYLQKTNWNHSVFDVPLHYNLYNASKSGGNYDMRNIFNGTVVQRHPSHAVTFVDNHDSQPEEALESFVDPWFKPLAYALTLTREQGYPSVFYGDYYGIPTHGVPAMRSKIDPILEARQKYAYGPQHDYLDHPDVIGWTREGDSSHPKSGLATLITDGPGGSKRMYAGLKNAGETWYDITGNRSDTVKIGSDGWGEFHVNGGSVSIYVQK

SEQ ID NO: 41733 - protein, 480 aa, Bacillus sp.
NGTMMQYFEWYLPNDGNHWNRLNSDASNLKSKGITAVWIPPAWKAASQNDVGYGAYDLYDLGEFNQKGTVRTKYGTRSQLQAAVTSLKNNGIQVYGDVVMNHKGGADATEMVRAVEVNPNNRNQEVTGEYTIEAWTRFDFPGRGNTHSSFKWRWYHFDGVDWDQSRQLNNRIYKFRGHGKAWDWEVDTEFGNYDYLMYTDYDMDHPEVVNELRNWGVWYTNTLGLDGFRIDAVKHIKYSFTRDWINHVRSATGKNMFAVAEFWKNDLGAIENYLQKTNWNHSVFDVPLHYNLYNASKSGGNYDMRNIFNGTVVQRHPSHAVTFVDNHDSQPEEALESFVEEWFKPLAYALTLTREQGYPSVFYGDYYGIPTHGVPAMRSKIDPILEARQKYAYGPQHDYLDHPDVIGWTREGDSSHPKSGLATLITDGPGGSKRMYAGLKNAGETWYDITGNRSDTVKIGSDGWGEFHVNDGSVSIYVQK

SEQ ID NO: 41734 - protein, 480 aa, Bacillus sp.
NGTMMQYFEWYLPNDGNHWNRLNSDASNLKSKGITAVWIPPAWKGASQNDVGYGAYDLYDLGEFNQKGTVRTKYGTRSQLQAAVTSLKNNGIQVYGDVVMNHKGGADATEMVRAVEVNPNNRNQEVTGEYTIEAWTRFDFPGRGNTHSSFKWRWYHFDGVDWDQSRRLNNRIYKFRGHGKAWDWEVDTEFGNYDYLMYADYDMDHPEVVNELRNWGVWYTNTLGLDGFRIDAVKHIKYSFTRDWINHVRSATGKNMFAVAEFWKNDLGAIENYLQKTNWNHSVFDVPLHYNLYNASKSGGNYDMRNIFNGTVVQRHPSHAVTFVDNHDSQPEEALESFVDEWFKPLAYALTLTREQGYPSVFYGDYYGIPTHGVPAMRSKIDPILEARQKYAYGPQHDYLDHPDVIGWTREGDSSHPKSGLATLITDGPGGSKRMYAGLKNAGETWYDITGNRSDTVKIGSDGWGEFHVNKQSVSIYVQK

SEQ ID NO: 41735 - protein, 480 aa, Bacillus sp.
NGTMMQYFEWYLPNDGNHWNRLNSDASNLKSKGITAVWIPPAWKGASQNDVGYGAYDLYDLGEFNQKGTVRTKYGTRSQLQAAVTSLKNNGIQVYGDVVMNHKGGADATEMVRAVEVNPNNRNQEVTGEYTIEAWTRFDFPGRGNTHSSFKWRWYHFDGVDWDQSRRLNNRIYKFRGHGKAWDWEVDTEFGNYDYLMYADYDMDHPEVVNELRNWGVWYTNTLGLDGFRIDAVKHIKYSFTRDWINHVRSATGKNMFAVAEFWKNDLGAIENYLQKTNWNHSVFDVPLHYNLYNASKSGGNYDMRNIFNGTVVQRHPSHAVTFVDNHDSQPEEALESFVDPWFKPLAYALTLTREQGYPSVFYGDYYGIPTHGVPAMRSKIDPILEARQKYAYGPQHDYLDHPDVIGWTREGDSSHPKSGLATLITDGPGGSKRMYAGLKNAGETWYDITGNRSDTVKIGSDGWGEFHVNKTSVSIYVQK

SEQ ID NO: 41736 - protein, 480 aa, Bacillus sp.
NETMMQYFEWYLPNDGNHWNRLNSDASNLKSKGITAVWIPPAWKGASQNDVGYGAYDLYDLGEFNQKGTVRTKYGTRSQLQAAVTSLKNNGIQVYGDVVMNHKGGADATEMVRAVEVNPNNRNQEVTGEYTIEAWTRFDFPGRGNTHSSFKWRWYHFDGVDWDQSRRLNNRIYKFRGHGKAWDWEVDTEFGNYDYLMYADYDMDHPEVVNELRNWGVWYTNTLGLDGFRIDAVKHIKYSFTRDWINHVRSATGKNMFAVAEFWKNDLGAIENYLQKTNWNHSVFDVPLHYNLYNASKSGGNYDMRNIFNGTVVQMHPSHAVTFVDNHDSQPEEALESFVEEWFKPLAYALTLTREQGYPSVFYGDYYGIPTHGVPAMRSKIDPILEARQKYAYGPQHDYLDHPDVIGWTREGDSSHPKSGLATLITDGPGGSKRMYAGLKNAGETWYDITGNRSDTVKIGSDGWGEFHVNDGSVSIYVQK

SEQ ID NO: 41737 - protein, 480 aa, Bacillus sp.
NGTMMQYFEWYLPNDGNHWNRLNSDASNLKSKGITAVWIPPAWKGASQNDVGYGAYDLYDLGEFNQKGTVRTKYGTRSQLQAAVTSLKNNGIQVYGDVVMNHKGGADATEMVRAVEVNPNNRNQEVTGEYTIEAWTRFDFPGRGNTHSSFKWRWYHFDGVDWDQSRRLDNRIYKFRGHGKAWDWEVDTEFGNYDYLMYTDYDMDHPEVVNELRNWGVWYTNTLGLDGFRIDAVKHIKYSFTRDWINHVRSATGKNMFAVAEFWKNDLGAIENYLQKTNWNHSVFDVPLHYNLYNASKSGGNYDMRNIFNGTVVQRHPSHAVTFVDNHDSQPEEALESFVETWFKPLAYALTLTREQGYPSVFYGDYYGIPTHGVPAMRSKIDPILEARQKYAYGPQHDYLDHPDVIGWTREGDSSHPKSGLATLITDGPGGSKRMYAGLKNAGETWYDITGNRSDTVKIGSDGWGEFHVNKASVSIYVQK

SEQ ID NO: 41738 - protein, 480 aa, Bacillus sp.
NGTMMQYFEWYLPNDGNHWNRLNSDASNLKSKGITAVWIPPAWKGASQNDVGYGAYDLYDLGEFNQKGTVRTKYGTRSQLQAAVTSLKNNGIQVYGDVVMNHKGGADATEMVRAVEVNPNNRNQEVTGEYTIEAWTRFDFPGRGNTHSSFKWRWYHFDGVDWDQSRRLNNRIYKFRGHGKAWDWEVDTEFGNYDYLMYADYDMDHPEVVNELRNWGVWYTNTLGLDGFRIDAVKHIKYSFTRDWINHVRSATGKNMFAVAEFWKNDLGAIENYLQKTNWNHSVFDVPLHYNLYNASKSGGNYDMRNIFNGTVVQRHPSHAVTFVDNHDSQPEEALESFVDPWFKPLAYALTLTREQGYPSVFYGDYYGIPTHGVPAMRSKIDPILEARQKYAYGPQHDYLDHPDVIGWTREGDSSHPKSGLATLITDGPGGSKRMYAGLKNAGETWYDITGNRSDTVKIGSDGWGEFHVNGASVSIYVQK

SEQ ID NO: 41739 - protein, 480 aa, Bacillus sp.
NGTMMQYFEWYLPNDGNHWNRLNSDASNLKSKGITAVWIPPAWKAASQNDVGYGAYDLYDLGEFNQKGTVRTKYGTRSQLQAAVTSLKNNGIQVYGDVVMNHKGGADATEMVRAVEVNPNNRNQEVTGEYTIEAWTRFDFPGRGNTHSSFKWRWYHFDGVDFDQSRQITNRIYKFRGHGKAWDWEVDTEFGNYDYLMYTDYDMDHPEVVNELRNWGVWYTNTLGLDGFRIDAVKHIKYSFTRDWINHVRSATGKNMFAVAEFWKNDLGAIENYLQKTNWNHSVFDVPLHYNLYNASKSGGNYDMRNIFNGTVVQRHPSHAVTFVDNHDSQPEEALESFVEEWFKPLAYALTLTREQGYPSVFYGDYYGIPTHGVPAMRSKIDPILEARQKYAYGPQHDYLDHPDVIGWTREGDSSHPKSGLATLITDGPGGSKRMYAGLKNAGETWYDITGNRSDTVKIGSDGWGEFHVNDGSVSIYVQK

SEQ ID NO: 41740 - protein, 480 aa, Bacillus sp.
NGTMMQYFEWYLPNDGNHWNRLNSDASNLKSKGITAVWIPPAWKGASQNDVGYGAYDLYDLGEFNQKGTVRTKYGTRSQLQAAVTSLKNNGIQVYGDVVMNHKGGADATEMVRAVEVNPNNRNQEVTGEYTIEAWTRFDFPGRGNTHSSFKWRWYHFDGVDWDQSRRLNNRIYKFRGHGKAWDWEVDTEFGNYDYLMYADYDMDHPEVVNELRNWGVWYTNTLGLDGFRIDAVKHIKYSFTRDWINHVRSATGKNMFAVAEFWKNDLGAIENYLQKTNWNHSVFDVPLHYNLYNASQSGGNYDMRNIFNGTVVQRHPSHAVTFVDNHDSQPEEALESFVEPWFKPLAYALTLTREQGYPSVFYGDYYGIPTHGVPAMRSKIDPILEARQKYAYGPQHDYLDHPDVIGWTREGDSSHPKSGLATLITDGPGGSKRMYAGLKNAGETWYDITGNRSDTVKIGSDGWGEFHVNKQSVSIYVQK

SEQ ID NO: 41741 - protein, 480 aa, Synthetic construct
NGTMMQYFEWYLPNDGNHWNRLNSDASNLKSKGITAVWIPPAWKGASQNDVGYGAYDLYDLGEFNQKGTVRTKYGTRSQLQAAVTSLKNNGIQVYGDVVMNHKGGADATEMVRAVEVNPNNRNQEVTGEYTIEAWTRFDFPGRGNTHSSFKWRWYHFDGVDWDQSRRLNNRIYKFRGHGKAWDWEVDTEFGNYDYLMYADYDLDHPETTNEVRNWGVWYTNTLGLDGFRIDAVKHIKYSFTRDWINHVRSATGKNMFAVAEFWKNDLGAIENYLQKTNWNHSVFDVPLHYNLYNASKSGGNYDMRNIFNGTVVQRHPSHAVTFVDNHDSQPEEALESFVEEWFKPLAYALTLTREQGYPSVFYGDYYGIPTHGVPAMRSKIDPILEARQKYAYGPQHDYLDHPDVIGWTREGDSSHPKSGLATLITDGPGGSKRMYAGLKNAGETWYDITGNRSDTVKIGSDGWGEFHVNDGSVSIYVQK

SEQ ID NO: 41742 - protein, 480 aa, Bacillus sp.
NGTMMQYFEWYLPNDGNHWNRLNSDASNLKSKGITAVWIPPAWKATSQNDVGYGAYDLYDLGEFNQKGTVRTKYGTRSQLQAAVTSLKNNGIQVYGDVVMNHKGGADATEMVRAVEVNPNNRNQEVTGEYTIEAWTRFDFPGRGNTHSSFKWRWYHFDGVDWDQSRELNNRIYKFRGHGKAWDWEVDTEFGNYDYLMYTDYDMDHPEVVNELRNWGVWYTNTLGLDGFRIDAVKHIKYSFTRDWINHVRSATGKNMFAVAEFWKNDLGAIENYLQKTNWNHSVFDVPLHYNLYNASKSGGNYDMRNIFNGTVVQRHPSHAVTFVDNHDSQPEEALESFVETWFKPLAYALTLTREQGYPSVFYGDYYGIPTHGVPAMRSKIDPILEARQKYAYGPQHDYLDHPDVIGWTREGDSSHPKSGLATLITDGPGGSKRMYAGLKNAGETWYDITGNRSDTVKIGSDGWGEFHVNDASVSIYVQK

SEQ ID NO: 41743 - protein, 480 aa, Bacillus sp.
NGTMMQYFEWYLPNDGNHWNRLNSDASNLKSKGITAVWIPPAWKASSQNDVGYGAYDLYDLGEFNQKGTVRTKYGTRSQLQAAVTSLKNNGIQVYGDVVMNHKGGADLTEMVDAVEVNPNNRNQEVTGEYTIEAWTRFDFPGRGNTHSSFKWRWYHFDGVDWDQSRDLQNRIYKFRGHGKAWDWEVDTEFGNYDYLMYADYDMDHPEVVNELRNWGVWYTNTLGLDGFRIDAVKHIKYSFTRDWINHVRSATGKNMFAVAEFWKNDLGAIENYLQKTNWNHSVFDVPLHYNLYNASKSGGNYDMRNIFNGTVVQRHPSHAVTFVDNHDSQPEEALESFVEEWFKPLAYALTLTREQGYPSVFYGDYYGIPTHGVPAMRSKIDPILEARQKYAYGPQHDYLDHPDVIGWTREGDSSHPKSGLATLITDGPGGSKRMYAGLKNAGETWYDITGNRSDTVKIGSDGWGEFHVNDGSVSIYVQK

SEQ ID NO: 41744 - protein, 480 aa, Bacillus sp.
NGTMMQYFEWYLPNDGNHWNRLNSDASNLKSKGITAVWIPPAWKGASQNDVGYGAYDLYDLGEFNQKGTVRTKYGTRSQLQAAVTSLKNNGIQVYGDVVMNHKGGADATEMVRAVEVNPNNRNQEVTGEYTIEAWTRFDFPGRGNTHSSFKWRWYHFDGVDFDQSRRLNNRIYKFRGHGKAWDWEVDTEFGNYDYLMYADYDMDHPEVVNELRNWGVWYTNTLGLDGFRIDAVKHIKYSFTRDWINHVRIATGKNMFAVAEFWKNDLGAIENYLQKTNWNHSVFDVPLHYNLYNASKSGGNYDMRNIFNGTVVQRHPSHAVTFVDNHDSQPEEALESFVDEWFKPLAYALTLTREQGYPSVFYGDYYGIPTHGVPAMRSKIDPILEARQKYAYGPQHDYLDHPDVIGWTREGDSSHPKSGLATLITDGPGGSKRMYAGLKNAGETWYDITGNRSDTVKIGSDGWGEFHVNDQSVSIYVQK

SEQ ID NO: 41745 - protein, 480 aa, Bacillus sp.
NGTMMQYFEWYLPNDGNHWNRLNSDASNLKSKGITAVWIPPAWKGASQNDVGYGAYDLYDLGEFNQKGTVRTKYGTRSQLQAAVTSLKNNGIQVYGDVVMNHKGGADATEMVRAVEVNPNNRNQEVTGEYTIEAWTRFDFPGRGNTHSSFKWRWYHFDGVDWDQSRNVNNRIYKFRGHGKAWDWEVDTEFGNYDYLMYADYDMDHPEVVNELRNWGVWYTNTLGLDGFRIDAVKHIKYSFTRDWINHVRSATGKNMFAVAEFWKNDLGAIENYLQKTNWNHSVFDVPLHYNLYNASKSGGNYDMRNIFNGTVVQRHPSHAVTFVDNHDSQPEEALESFVDEWFKPLAYALTLTREQGYPSVFYGDYYGIPTHGVPAMRSKIDPILEARQKYAYGPQHDYLDHPDVIGWTREGDSSHPKSGLATLITDGPGGSKRMYAGLKNAGETWYDITGNRSDTVKIGSDGWGEFHVNKSSVSIYVQK

SEQ ID NO: 41746 - protein, 480 aa, Synthetic construct
NGTMMQYFEWYLPNDGNHWNRLNSDASNLKSKGITAVWIPPAWKGASQNDVGYGAYDLYDLGEFNQKGTVRTKYGTRSQLQAAVTSLKNNGIQVYGDVVMNHKGGADATEMVRAVEVNPNNRNQEVTGEYTIEAWTRFDFPGRGNTHSSFKWRWYHFDGVDWDQSRRLNNRIYKFRGHGKAWDWEVDTEFGNYDYLMYADYDFDHPETTNEMRNWGVWYTNTLGLDGFRIDAVKHIKYSFTRDWINHVRSATGKNMFAVAEFWKNDLGAIENYLQKTNWNHSVFDVPLHYNLYNASKSGGNYDMRNIFNGTVVQRHPSHAVTFVDNHDSQPEEALESFVEEWFKPLAYALTLTREQGYPSVFYGDYYGIPTHGVPAMRSKIDPILEARQKYAYGPQHDYLDHPDVIGWTREGDSSHPKSGLATLITDGPGGSKRMYAGLKNAGETWYDITGNRSDTVKIGSDGWGEFHVNDGSVSIYVQK

SEQ ID NO: 41747 - protein, 480 aa, Bacillus sp.
NGTMMQYFEWYLPNDGNHWNRLNSDASNLKSKGITAVWIPPAWKAVSQNDVGYGAYDLYDLGEFNQKGTVRTKYGTRSQLQAAVTSLKNNGIQVYGDVVMNHKGGADATEMVPAVEVNPNNRNQEVTGEYTIEAWTRFDFPGRGNTHSSFKWRWYHFDGVDWDQSRDLENRIYKFRGHSKAWDWEVDTEFGNYDYLMYADYDMDHPEVVNELRNWGVWYTNTLGLDGFRIDAVKHIKYSFTRDWINHVRSATGKNMFAVAEFWKNDLGAIENYLQKTNWNHSVFDVPLHYNLYNASKSGGNYDMRNIFNGTVVQRHPSHAVTFVDNHDSQPEEALESFVEEWFKPLAYALTLTREQGYPSVFYGDYYGIPTHGVPAMRSKIDPILEARQKYAYGPQHDYLDHPDVIGWTREGDSSHPKSGLATLITDGPGGSKRMYAGLKNAGETWYDITGNRSDTVKIGSDGWGEFHVNDGSVSIYVQK

SEQ ID NO: 41748 - protein, 480 aa, Bacillus sp.
NGTMMQYFEWYLPNDGNHWNRLNSDASNLKSKGITAVWIPPAWKGASQNDVGYGAYDLYDLGEFNQKGTVRTKYGTRSQLQAAVTSLKNNGISVYGDVVMNHKGGADATEMVRAVEVNPNNRNQEVTGEYTIEAWTRFDFPGRGNTHSSFKWRWYHFDGVDWDQSRRLNNRIYKFRGHGKAWDWEVDTEFGNYDYLMYADYDMDHPEVVNELRNWGVWYTNTLGLDGFRIDAVKHIKYSFTRDWINHVRSATGKNMFAVAEFWKNDLGAIENYLQKTNWNHSVFDVPLHYNLYNASKSGGNYDMRNIFNGTVVQAHPSHAVTFVDNHDSQPEEALESFVEEWFKPLAYALTLTREQGYPSVFYGDYYGIPTHGVPAMRSKIDPILEARQKYAYGPQHDYLDHPDVIGWTREGDSSHPKSGLATLITDGPGGSKRMYAGLKNAGETWYDITGNRSDTVKIGSDGWGEFHVNDGSVSIYVQK

SEQ ID NO: 41749 - protein, 479 aa, Bacillus sp.
NGTMMQYFEWYLPNDGNHWNRLNSDASNLKSKGITAVWIPPAWKGASQNDVGYGAYDLYDLGEFNQGTVRTKYGTRSQLQAAVTSLKNNGIQVYGDVVMNHKGGADATEMVSAVEVNPNNRNQEVTGDYTIEAWTRFDFPGRGNTHSSFKWRWYHFDGVDWDQSRRLNNRIYKFRAHGKAWDWEVDTEFGNYDYLMYADYDMDHPEVVNELRNWGVWYTNTLGLDGFRIDAVKHIKYSFTRDWINHVRSATGKNMFAVAEFWKNDLGAIENYLQKTNWNHSVFDVPLHYNLYNASKSGGNYDMRNIFNGTVVQRHPSHAVTFVDNHDSQPEEALESFVEEWFKPLAYALTLTREQGYPSVFYGDYYGIPTHGVPAMRSKIDPILEARQKYAYGPQHDYLDHPDVIGWTREGDSSHPKSGLATLITDGPGGSKRMYAGLKNAGETWYDITGNRSDTVKIGSDGWGEFHVNDGSVSIYVQK

SEQ ID NO: 41750 - protein, 480 aa, Bacillus sp.
NGTIMQYFEWNVPNDGQHWNRLHNNAQNLKNAGITAIWIPPAWKGTSQNDVGYGAYDLYDLGEFNQKGTVRTKYGTKAELERAIRSLKANGIQVYGDVVMNHKGGADFTERVQAVEVNPQNRNQEVSGTYEIEAWTGFNFPGRGNQHSSFKWRWSHFDGTDWDQSRQLSNRIYKFRGDGKAWDWEVDTENGNYDYLMYADVDMNHPEVINELNRWGVWYANTLNLDGFRLDAVKHIQFSFMRNWLGHVRGQTGKNLFAVAEYWKNDLGALENYLSKTNWTMSAFDVPLHYNLYQASNSKGNYDMRNLLNGTLVQRHPSHAVTFVDNHDTQPGEALESFVQGWFKPLAYATILTREQGYPQVFYGDYYGIPSDGVPSYRQQIDPLLKARQKYAYGPQHDYLDHPDVIGWTREGDSSHPKSGLATLITDGPGGSKRMYAGLKNAGETWYDITGNRSDTVKIGSDGWGEFHVNDGSVSIYVQK

SEQ ID NO: 41751 - protein, 480 aa, Bacillus sp.
NGTIMQYFEWNVPNDGQHWNRLHNNAQNLKNAGITAIWIPPAWKGTSQNDVGYGAYDLYDLGEFNQKGTVRTKYGTKAELERAIRSLKANGIQVYGDVVMNHKGGADFTERVQAVEVNPQNRNQEVSGTYEIEAYTGFNFPGRGNQHSSFKWRWYHFDGTDWDQSRQLSNRIYKFRGDGKAWDWEVDTENGNYDYLMYADVDMNHPDVINELNRWGVWYANTLNLDGFRLDAVKHIQFSFMRNWLGHVRGQTGKNLFAVAEYWKNDLGALENYLSKTNWTMSAFDVPLHYNLYQASNSRGNYDMRNLLNGTLVQRHPSHAVTFVDNHDTQPGEALESFVQGWFKPLAYATILTREQGYPQVFYGDYYGIPSDGVPSYRQQIDPLLKARQKYAYGPQHDYLDHPDVIGWTREGDSSHPKSGLATLITDGPGGSKRMYAGLKNAGETWYDITGNRSDTVKIGSDGWGEFHVNDKSVSIYVQK

SEQ ID NO: 41752 - protein, 480 aa, Bacillus sp.
NGTIMQYFEWNVPNDGQHWNRLHNNAQNLKNAGITAIWIPPAWKGTSQNDVGYGAYDLYDLGEFNQKGTVRTKYGTKAELERAIRSLKANGIQVYGDVVMNHKGGADFTERVQAVEVNPQNRNQEVSGTYEIEAWTGFNFPGRGNQHSSFKWRWYHFDGTDWDQSRQLSNRIYKFRGDGKAWDWEVDTENGNYDYLMYADVDMNHPEVINELNRWGVWYANTLNLDGFRLDAVKHIQFSFMRNWLGHVRGQTGKNLFAVAEYWKNDLGALENYTSKTNGTMSAFDVPLHYNLYQASNSKGNYDMRNLLNGTLVQRHPSNAVTFVDNHDTQPGEALESFVQGWFKPLAYATILTREQGYPQVFYGDYYGIPSDGVPSYRQQIDPLLKARQKYAYGPQHDYLDHPDVIGWTREGDSSHPKSGLATLITDGPGGSKRMYAGLKNAGETWYDITGNRSDTVKIGSDGWGEFHVNDGSVSIYVQK

SEQ ID NO: 41753 - protein, 480 aa, Bacillus sp.
NGTIMQYFEWNVPNDGQHWNRLHNNAQNLKNAGITAIWIPPAWKGTSQNDVGYGAYDLYDLGEFNQKGTVRTKYGTKAELERAIRSLKANGIQVYGDVVMNHKGGADFTERVQAVEVNPQNRNQEVSGTYEIEAWTGFNFPGRGNQHSSFKWRWSHFDGTDWDQSRQLSNRIYKFRGDGKAWDWEVDTENGNYDYLMYADVDMNHPEVINELNRWGVWYANTLNLDGFRLDAVKHIQFSFMRNWLGHVRGQTGKNLFAVAEYWKNDLGALENYLSKTNWTMSAFDVPLHYNLYQASNSGGNYDMRNLLNGTLVQRHPSHAVTFVDNHDTQPGEALESFVQGWFKPLAYATILTREQGYPQVFYGDYYGIPSDGVPSYRQQIDPLLKARQKYAYGPQHDYLDHPDVIGWTREGDSSHPKSGLATLITDGPGGSKTMYAGLKNAGETWYDITGNRSDTVKIGSDGWGEFHVNDGSVSIYVQK

SEQ ID NO: 41754 - protein, 480 aa, Bacillus sp.
NGTIMQYFEWNVPNDGQHWNRLHNNAQNLKNAGITAIWIPPAWKGTSQNDVGYGAYDLYDLGEFNQKGTVRTKYGTKAELERAIRSLKANGIQVYGDVVMNHKGGADFTERVQAVEVNPQNRNQEVSGTYEIEAWTGFNFPGRGNQHSSFKWRWYHFDGTDWDQSRQLSNRIYKFRGDGKAWDWEVDTENGNYDYLMYADVDMNHPEVINELNRWGVWYANTLNLDGFRLDAVKHIQFSFMRNWLGHVRGQTGKNLFAVAEYWKNDLGALENYLSKTNWTMSAFDVPLHYNLYQASNSKGNYDMRNLLNGTLVQRHPSHAVTFVDNHDTQPGEALESFVQGWFKPLAYATILTREQGYPQVFYGDYYGIPSDGVPSYRQQIDPLLKARQKYAYGPQHDYLDHPDVIGWTREGDSSHPKSGLATLITDGPGGSKRMYAGLKNAGETWYDITGNRSDTVKIGSDGRGEFHVNDGSVSIYVQK

SEQ ID NO: 41755 - protein, 480 aa, Synthetic construct
NGTMMQYFEWYLPNDGNHWNRLNSDASNLKSKGITAVWIPPAWKGASQNDVGYGAYDLYDLGEFNQKGTVRTKYGTRSQLQAAVTSLKNNGIQVYGDVVMNHKGGADATEMVRAVEVNPNNRNQEVTGEYTIEAWTRFDFPGRGNTHSSFKWRWYHFDGVDWDQSRRLNNRIYKFRGHGKAWDWEVDTENGNYDYLMYADIDMDHPEVVNELRNWGVWYTNTLGLDGFRIDAVKHIKYSFTRDWINHVRSATGKNMFAVAEFWKNDLGAIENYLQKTNWNHSVFDVPLHYNLYNASKSGGNYDMRNIFNGTVVQRHPSHAVTFVDNHDSQPEEALESFVEEWFKPLAYALTLTREQGYPSVFYGDYYGIPSHGVPAMRSKIDPILEARQKYAYGPQHDYLDHPDVIGWTREGDSSHPKSGLATLITDGPGGSKRMYAGLKNAGETWYDITGNRSDTVKIGSDGWGEFHVNDGSVSIYVQK

SEQ ID NO: 41756 - protein, 480 aa, Bacillus sp.
NGTIMQYFEWNVPNDGQHWNRLHNNAQNLKNAGITAIWIPPAWKGTSQNDVGYGAYDLYDLGEFNQKGTVRTKYGTKAELERAIRSLKANGIQVYGDVVMNHKGGADFTERVQAVEVNPQNRNQEVSGTYEIEAYTGFNFPGRGNQHSSFKWRWYHFDGTDWDQSRQLSNRIYKFRGDGKAWDWEVDTDNGNYDYLMYADVDMNHPEVINELNRWGVWYANTLNLDGFRLDAVKHIQFSFMRNWLGHVRGQTGKNLFAVAEYWKNDLGALENYLSKTNWTMSAFDVPLHYNLYQASNSGGNYDMRNLLNGTLVQRHPSHAVTFVDNHDTQPGEALESFVQGWFKPLAYATILTREQGYPQVFYGDYYGIPSDGVPSYRQQIDPLLKARQKYAYGPQHDYLDHPDVIGWTREGDSSHPKSGLATLITDGPGGSKRMYAGLKNAGETWYDITGNRSDTVKIGSDGWGEFHVNDGSVSIYVQK

SEQ ID NO: 41757 - protein, 480 aa, Bacillus sp.
NGTIMQYFEWNVPNDGQHWNRLHNNAQNLKNAGITAIWIPPAWKGTSQNDVGYGAYDLYDLGEFNQKGTVRTKYGTKAELERAIRSLKANGIQVYGDVVMNHKGGADFTERVQAVEVNPQNRNQEVSGTYEIEAYTGFNFPGRGNQHSSFKWRWYHFDGTDWDQSRQLSNRIYKFRGDGKAWDWEVDTENGNYDYLMYADVDMNHPDVINELNRWGVWYANTLNLDGFRLDAVKHIQFSFMRNWLGHVRGQTGKNLFAVAEYWKNDLGALENYLSKTNWTMSAFDVPLHYNLYQASNSGKNYDMRNLLNGTLVQRHPSHAVTFVDNHDTQPGEALESFVQGWFKPLAYATILTREQGYPQVFYGDYYGIPSDGVPSYRQQIDPLLKARQKYAYGPQHDYLDHPDVIGWTREGDSSHPKSGLATLITDGPGGSKRMYAGLKNAGETWYDITGNRSDTVKIGSDGWGEFHVNKGSVSIYVQK

SEQ ID NO: 41758 - protein, 480 aa, Bacillus sp.
NGTIMQYFEWNVPNDGQHWNRLHNNAQNLKNAGITAIWIPPAWKGTSQNDVGYGAYDLYDLGEFNQKGTVRTKYGTKAELERAIRSLKANGIQVYGDVVMNHKGGADFTERVQAVEVNPQNRNQEVSGTYEIEAWTGFNFPGRGNQHSSFKWRWSHFDGTDWDQSRQLSNRIYKFRGDGKAWDWEVDTENGNYDYLMYADVDMNHPEVINELNRWGVWYANTLNLDGFRLDAVKHIQFSFMRNWLGHVRGQTGKNLFAVAEYWKNDLGALENYLSKTNWTMSAFDVPLHYNLYQASNSRGNYDMRNLLNGTLVQRHPSHAVTFVDNHDTQPGEALESFVQGWFKPLAYATILTREQGYPQVFYGDYYGIPSDGVPSYRQQIDPLLKARQKYAYGPQHDYLDHPDVIGWTREGDSSHPKSGLATLITDGPGGSKRMYAGLKNAGETWYDITGNRSDTVKIGSDGWGEFHVNDGSVSIYVQK

SEQ ID NO: 41759 - protein, 480 aa, Bacillus sp.
NGTIMQYFEWNVPNDGQHWNRLHNNAQNLKNAGITAIWIPPAWKGTSQNDVGYGAYDLYDLGEFNQKGTVRTKYGTKAELERAIRSLKANGIQVYGDVVMNHKGGADFTERVQAVEVNPQNRNQEVSGTYEIEAWTGFNFPGRGNQHSSFKWRWYHFDGTDWDQSRQLSNRIYKFRGDGKAWDWEVDTENGNYDYLMYADVDMNHPEVINELNRWGVWYANTLNLDGFRLDAVKHIQFSFMRNWLGHVRGQTGKNLFAVAEYWKNDLGALENYLSKTNWTMSAFDVPLHYNLYQASNSGGNYDMRNLLNGTLVQRHPSHAVTFVDNHDTQPGEALESFVQGWFKPLAYATILTREQGYPQVFYGDYYGIPSDGVPSYRQQIDPLLKARQKYAYGPQHDYLDHPDVIGWTREGDSSHPKSGLATLITDGPGGSKNMYAGLKNAGETWYDITGNRSDTVKIGSDGRGEFHVNDGSVSIYVQK

SEQ ID NO: 41760 - protein, 480 aa, Bacillus sp.
NGTIMQYFEWNVPNDGQHWNRLHNNAQNLKNAGITAIWIPPAWKGTSQNDVGYGAYDLYDLGEFNQKGTVRTKYGTKAELERAIRSLKANGIQVYGDVVMNHKGGADFTERVQAVEVNPQNRNQEVSGTYEIEAWTGFNFPGRGNQHSSFKWRWYHFDGTDWDQSRQLSNRIYKFRGDGKAWDWEVDTENGNYDYLMYADVDMNHPEVINELNRWGVWYANTLNLDGFRLDAVKHIQFSFMRNWLGHVRGQTGKNLFAVAEYWKNDLGALENYLSKTNWTMSAFDVPLHYNLYQASNSKGNYDMRNLLNGTLVQRHPSHAVTFVDNHDTQPGEALESFVQGWFKPLAYATILTREQGYPQVFYGDYYGIPSDGVPSYRQQIDPLLKARQKYAYGPQHDYLDHPDVIGWTREGDSSHPKSGLATLITDGPGGSKRMYAGLKNAGETWYDITGNRSDTVKIGSDGWGEFHVNDRSVSIYVQK

SEQ ID NO: 41761 - protein, 480 aa, Bacillus sp.
NGTIMQYFEWNVPNDGQHWNRLHNNAQNLKNAGITAIWIPPAWKGTSQNDVGYGAYDLYDLGEFNQKGTVRTKYGTKAELERAIRSLKANGIQVYGDVVMNHKGGADFTERVQAVEVNPQNRNQEVSGTYEIEAWTGFNFPGRGNQHSSFKWRWSHFDGTDWDQSRQLSNRIYKFRGDGKAWDWEVDTENGNYDYLMYADVDMNHPEVINELNRWGVWYANTLNLDGFRLDAVKHIQFSFMRNWLGHVRGQTGKNLFAVAEYWKNDLGALENYLSKTNWTMSAFDVPLHYNLYQASNSGGNYDMRNLLNGTLVQRHPSHAVTFVDNHDTQPGEALESFVQGWFKPLAYATILTREQGYPQVFYGDYYGIPSDGVPSYRQQIDPLLKARQKYAYGPQHDYLDHPDVIGWTREGDSSHPKSGLATLITDGPGGSKRMYAGLKNAGETWYDITGNRSDTVKIGSDGWGEFHVNDRSVSIYVQK

SEQ ID NO: 41762 - protein, 480 aa, Bacillus sp.
NGTIMQYFEWNVPNDGQHWNRLHNNAQNLKNAGITAIWIPPAWKGTSQNDVGYGAYDLYDLGEFNQKGTVRTKYGTKAELERAIRSLKANGIQVYGDVVMNHKGGADFTERVQAVEVNPQNRNQEVSGTYEIEAWTGFNFPGRGNQHSSFKWRWYHFDGTDWDQSRQLSNRIYKFRGDGKAWDWEVDTENGNYDYLMYADVDMNHPEVINELNRWGVWYANTLNLDGFRLDAVKHIQFSFMRNWLGHVRGQTGKNLFAVAEYWKNDLGALENYLSKTNWTMSAFDVPLHYNLYQASNSGGNYDMRNLLNGTLVQRHPSHAVTFVDNHDTQPGEALESFVQGWFKPLAYATILTREQGYPQVFYGDYYGIPSDGVPSYRQQIDPLLKARQKYAYGPQHDYLDHPDVIGWTREGDSSHPKSGLATLITDGPGGSKRMYAGLKNAGETWYDITGNRSDTVKIGSDGTGEFHVNDRSVSIYVQK

SEQ ID NO: 41763 - protein, 480 aa, Bacillus sp.
NGTIMQYFEWNVPNDGQHWNRLHNNAQNLKNAGITAIWIPPAWKGTSQNDVGYGAYDLYDLGEFNQKGTVRTKYGTKAELERAIRSLKANGIQVYGDVVMNHKGGADFTERVQAVEVNPQNRNQEVSGTYEIEAWTGFNFPGRGNQHSSFKWRWYHFDGTDWDQSRQLSNRIYKFRGDGKAWDWEVDTENGNYDYLMYADVDMNHPEVINELNRWGVWYANTLNLDGFRLDAVKHIQFSFMRNWLGHVRGQTGKNLFAVAEYWKNDLGALENYTSKTNGTMSAFDVPLHYNLYQASNSGRNYDMRNLLNGTLVQRHPSNAVTFVDNHDTQPGEALESFVQGWFKPLAYATILTREQGYPQVFYGDYYGIPSDGVPSYRQQIDPLLKARQKYAYGPQHDYLDHPDVIGWTREGDSSHPKSGLATLITDGPGGSKRMYAGLKNAGETWYDITGNRSDTVKIGSDGWGEFHVNDGSVSIYVQK

SEQ ID NO: 41764 - protein, 480 aa, Bacillus sp.
NGTIMQYFEWNVPNDGQHWNRLHNNAQNLKNAGITAIWIPPAWKGTSQNDVGYGAYDLYDLGEFNQKGTVRTKYGTKAELERAIRSLKANGIQVYGDVVMNHKGGADFTERVQAVEVNPQNRNQEVSGTYEIEAWTGFNFPGRGNQHSSFKWRWYHFDGTDWDQSRQLSNRIYKFRGDGKAWDWEVDTENGNYDYLMYADVDMNHPEVINELNRWGVWYANTLNLDGFRLDAVKHIQFSFMRNWLGHVRGQTGKNLFAVAEYWKNDLGALENYTSKTNGTMSAFDVPLHYNLYQASNSGGNYDMRNLLNGTLVQRHPSNAVTFVDNHDTQPGEALESFVQGWFKPLAYATILTREQGYPQVFYGDYYGIPSDGVPSYRQQIDPLLKARQKYAYGPQHDYLDHPDVIGWTREGDSSHPKSGLATLITDGPGGSKNMYAGLKNAGETWYDITGNRSDTVKIGSDGWGEFHVNDGSVSIYVQK

SEQ ID NO: 41765 - protein, 480 aa, Bacillus sp.
NGTIMQYFEWNVPNDGQHWNRLHNNAQNLKNAGITAIWIPPAWKGTSQNDVGYGAYDLYDLGEFNQKGTVRTKYGTKAELERAIRSLKANGIQVYGDVVMNHKGGADFTERVQAVEVNPQNRNQEVSGTYEIEAYTGFNFPGRGNQHSSFKWRWYHFDGTDWDQSRQLSNRIYKFRGDGKAWDWEVDTENGNYDYLMYADVDMNHPEVINELNRWGVWYANTLNLDGFRLDAVKHIQFSFMRNWLGHVRGQTGKNLFAVAEYWKNDLGALENYLSKTNWTMSAFDVPLHYNLYQASNSGGNYDMRNLLNGTLVQRHPSHAVTFVDNHDTQPGEALESFVQGWFKPLAYATILTREQGYPQVFYGDYYGIPSDGVPSYRQQIDPLLKARQKYAYGPQHDYLDHPDVIGWTREGDSSHPKSGLATLITDGPGGSKRMYAGLKNAGETWYDITGNRSDTVKIGSDGWGEFHVNKGSVSIYVQK

SEQ ID NO: 41766 - protein, 480 aa, Bacillus sp.
NGTIMQYFEWNVPNDGQHWNRLHNNAQNLKNAGITAIWIPPAWKGTSQNDVGYGAYDLYDLGEFNQKGTVRTKYGTKAELERAIRSLKANGIQVYGDVVMNHKGGADFTERVQAVEVNPQNRNQEVSGTYEIEAWTGFNFPGRGNQHSSFKWRWYHFDGTDWDQSRQLSNRIYKFRGDGKAWDWEVDTENGNYDYLMYADVDMNHPEVINELNRWGVWYANTLNLDGFRLDAVKHIQFSFMRNWLGHVRGQTGKNLFAVAEYWKNDLGALENYTSKTNGTMSAFDVPLHYNLYQASNSGGNYDMRNLLNGTLVQRHPSNAVTFVDNHDTQPGEALESFVQGWFKPLAYATILTREQGYPQVFYGDYYGIPSDGVPSYRQQIDPLLKARQKYAYGPQHDYLDHPDVIGWTREGDSSHPKSGLATLITDGPGGSKRMYAGLKNAGETWYDITGNRSDTVKIGSDGTGEFHVNDGSVSIYVQK

SEQ ID NO: 41767 - protein, 480 aa, Bacillus sp.
NGTIMQYFEWNVPNDGQHWNRLHNNAQNLKNAGITAIWIPPAWKGTSQNDVGYGAYDLYDLGEFNQKGTVRTKYGTKAELERAIRSLKANGIQVYGDVVMNHKGGADFTERVQAVEVNPQNRNQEVSGTYEIEAWTGFNFPGRGNQHSSFKWRWYHFDGTDWDQSRQLSNRIYKFRGDGKAWDWEVDTENGNYDYLMYADVDMNHPEVINELNRWGVWYANTLNLDGFRLDAVKHIQFSFMRNWLGHVRGQTGKNLFAVAEYWKNDLGALENYLSKTNWTMSAFDVPLHYNLYQASNSKGNYDMRNLLNGTLVQRHPSHAVTFVDNHDTQPGEALESFVQGWFKPLAYATILTREQGYPQVFYGDYYGIPSDGVPSYRQQIDPLLKARQKYAYGPQHDYLDHPDVIGWTREGDSSHPKSGLATLITDGPGGSKRMYAGLKNAGETWYDITGNRSDTVKIGSDGWGEFHVNKGSVSIYVQK

SEQ ID NO: 41768 - protein, 480 aa, Bacillus sp.
NGTIMQYFEWNVPNDGQHWNRLHNNAQNLKNAGITAIWIPPAWKGTSQNDVGYGAYDLYDLGEFNQKGTVRTKYGTKAELERAIRSLKANGIQVYGDVVMNHKGGADFTERVQAVEVNPQNRNQEVSGTYEIEAYTGFNFPGRGNQHSSFKWRWYHFDGTDWDQSRQLSNRIYKFRGDGKAWDWEVDTENGNYDYLMYADVDMNHPEVINELNRWGVWYANTLNLDGFRLDAVKHIQFSFMRNWLGHVRGQTGKNLFAVAEYWKNDLGALENYLSKTNWTMSAFDVPLHYNLYQASNSGGNYDMRNLLNGTLVQRHPSHAVTFVDNHDTQPGEALESFVQGWFKPLAYATILTREQGYPQVFYGDYYGIPSDGVPSYRQQIDPLLKARQKYAYGPQHDYLDHPDVIGWTREGDSSHPKSGLATLITDGPGGSKRMYAGLKNAGETWYDITGNRSDTVKIGSDGWGEFHVNDRSVSIYVQK

SEQ ID NO: 41769 - protein, 480 aa, Bacillus sp.
NGTIMQYFEWNVPNDGQHWNRLHNNAQNLKNAGITAIWIPPAWKGTSQNDVGYGAYDLYDLGEFNQKGTVRTKYGTKAELERAIRSLKANGIQVYGDVVMNHKGGADFTERVQAVEVNPQNRNQEVSGTYEIEAWTGFNFPGRGNQHSSFKWRWYHFDGTDWDQSRQLSNRIYKFRGDGKAWDWEVDTENGNYDYLMYADVDMNHPEVINELNRWGVWYANTLNLDGFRLDAVKHIQFSFMRNWLGHVRGQTGKNLFAVAEYWKNDLGALENYLSKTNWTMSAFDVPLHYNLYQASNSGGNYDMRNLLNGTLVQRHPSHAVTFVDNHDTQPGEALESFVQGWFKPLAYATILTREQGYPQVFYGDYYGIPSDGVPSYRQQIDPLLKARQKYAYGPQHDYLDHPDVIGWTREGDSSHPKSGLATLITDGPGGSKNMYAGLKNAGETWYDITGNRSDTVKIGSDGWGEFHVNDRSVSIYVQK

SEQ ID NO: 41770 - protein, 480 aa, Bacillus sp.
NGTIMQYFEWNVPNDGQHWNRLHNNAQNLKNAGITAIWIPPAWKGTSQNDVGYGAYDLYDLGEFNQKGTVRTKYGTKAELERAIRSLKANGIQVYGDVVMNHKGGADFTERVQAVEVNPQNRNQEVSGTYEIEAWTGFNFPGRGNQHSSFKWRWSHFDGTDWDQSRQLSNRIYKFRGDGKAWDWEVDTDNGNYDYLMYADVDMNHPEVINELNRWGVWYANTLNLDGFRLDAVKHIQFSFMRNWLGHVRGQTGKNLFAVAEYWKNDLGALENYLSKTNWTMSAFDVPLHYNLYQASNSGGNYDMRNLLNGTLVQRHPSHAVTFVDNHDTQPGEALESFVQGWFKPLAYATILTREQGYPQVFYGDYYGIPSDGVPSYRQQIDPLLKARQKYAYGPQHDYLDHPDVIGWTREGDSSHPKSGLATLITDGPGGSKRMYAGLKNAGETWYDITGNRSDTVKIGSDGWGEFHVNDGSVSIYVQK

SEQ ID NO: 41771 - protein, 480 aa, Bacillus sp.
NGTIMQYFEWNVPNDGQHWNRLHNNAQNLKNAGITAIWIPPAWKGTSQNDVGYGAYDLYDLGEFNQKGTVRTKYGTKAELERAIRSLKANGIQVYGDVVMNHKGGADFTERVQAVEVNPQNRNQEVSGTYEIEAYTGFNFPGRGNQHSSFKWRWSHFDGTDWDQSRQLSNRIYKFRGDGKAWDWEVDTENGNYDYLMYADVDMNHPEVINELNRWGVWYANTLNLDGFRLDAVKHIQFSFMRNWLGHVRGQTGKNLFAVAEYWKNDLGALENYLSKTNWTMSAFDVPLHYNLYQASNSGGNYDMRNLLNGTLVQRHPSHAVTFVDNHDTQPGEALESFVQGWFKPLAYATILTREQGYPQVFYGDYYGIPSDGVPSYRQQIDPLLKARQKYAYGPQHDYLDHPDVIGWTREGDSSHPKSGLATLITDGPGGSKRMYAGLKNAGETWYDITGNRSDTVKIGSDGWGEFHVNDGSVSIYVQK

SEQ ID NO: 41772 - protein, 480 aa, Bacillus sp.
NGTIMQYFEWNVPNDGQHWNRLHNNAQNLKNAGITAIWIPPAWKGTSQNDVGYGAYDLYDLGEFNQKGTVRTKYGTKAELERAIRSLKANGIQVYGDVVMNHKGGADFTERVQAVEVNPQNRNQEVSGTYEIEAYTGFNFPGRGNQHSSFKWRWYHFDGTDWDQSRQLSNRIYKFRGDGKAWDWEVDTENGNYDYLMYADVDMNHPEVINELNRWGVWYANTLNLDGFRLDAVKHIQFSFMRNWLGHVRGQTGKNLFAVAEYWKNDLGALENYLSKTNWTMSAFDVPLHYNLYQASNSRGNYDMRNLLNGTLVQRHPSHAVTFVDNHDTQPGEALESFVQGWFKPLAYATILTREQGYPQVFYGDYYGIPSDGVPSYRQQIDPLLKARQKYAYGPQHDYLDHPDVIGWTREGDSSHPKSGLATLITDGPGGSKRMYAGLKNAGETWYDITGNRSDTVKIGSDGWGEFHVNDGSVSIYVQK

SEQ ID NO: 41773 - protein, 480 aa, Bacillus sp.
NGTIMQYFEWNVPNDGQHWNRLHNNAQNLKNAGITAIWIPPAWKGTSQNDVGYGAYDLYDLGEFNQKGTVRTKYGTKAELERAIRSLKANGIQVYGDVVMNHKGGADFTERVQAVEVNPQNRNQEVSGTYEIEAYTGFNFPGRGNQHSSFKWRWYHFDGTDWDQSRQLSNRIYKFRGDGKAWDWEVDTENGNYDYLMYADVDMNHPDVINELNRWGVWYANTLNLDGFRLDAVKHIQFSFMRNWLGHVRGQTGKNLFAVAEYWKNDLGALENYLSKTNWTMSAFDVPLHYNLYQASNSRGNYDMRNLLNGTLVQRHPSHAVTFVDNHDTQPGEALESFVQGWFKPLAYATILTREQGYPQVFYGDYYGIPSDGVPSYRQQIDPLLKARQKYAYGPQHDYLDHPDVIGWTREGDSSHPKSGLATLITDGPGGSKRMYAGLKNAGETWYDITGNRSDTVKIGSDGWGEFHVKDGSVSIYVQK

SEQ ID NO: 41774 - protein, 480 aa, Bacillus sp.
NGTIMQYFEWNVPNDGQHWNRLHNNAQNLKNAGITAIWIPPAWKGTSQNDVGYGAYDLYDLGEFNQKGTVRTKYGTKAELERAIRSLKANGIQVYGDVVMNHKGGADFTERVQAVEVNPQNRNQEVSGTYEIEAYTGFNFPGRGNQHSSFKWRWYHFDGTDWDQSRQLSNRIYKFRGDGKAWDWEVDTENGNYDYLMYADVDMNHPEVINELNRWGVWYANTLNLDGFRLDAVKHIQFSFMRNWLGHVRGQTGKNLFAVAEYWKNDLGALENYLSKTNWTMSAFDVPLHYNLYQASNSKGNYDMRNLLNGTLVQRHPSHAVTFVDNHDTQPGEALESFVQGWFKPLAYATILTREQGYPQVFYGDYYGIPSDGVPSYRQQIDPLLKARQKYAYGPQHDYLDHPDVIGWTREGDSSHPKSGLATLITDGPGGSKRMYAGLKNAGETWYDITGNRSDTVKIGSDGWGEFHVNDGSVSIYVQK

SEQ ID NO: 41775 - protein, 480 aa, Bacillus sp.
NGTIMQYFEWNVPNDGQHWNRLHNNAQNLKNAGITAIWIPPAWKGTSQNDVGYGAYDLYDLGEFNQKGTVRTKYGTKAELERAIRSLKANGIQVYGDVVMNHKGGADFTERVQAVEVNPQNRNQEVSGTYEIEAYTGFNFPGRGNQHSSFKWRWYHFDGTDWDQSRQLSNRIYKFRGDGKAWDWEVDTENGNYDYLMYADVDMNHPEVINELNRWGVWYANTLNLDGFRLDAVKHIQFSFMRNWLGHVRGQTGKNLFAVAEYWKNDLGALENYLSKTNWTMSAFDVPLHYNLYQASNSGGNYDMRNLLNGTLVQRHPSHAVTFVDNHDTQPGEALESFVQGWFKPLAYATILTREQGYPQVFYGDYYGIPSDGVPSYRQQIDPLLKARQKYAYGPQHDYLDHPDVIGWTREGDSSHPKSGLATLITDGPGGSKTMYAGLKNAGETWYDITGNRSDTVKIGSDGWGEFHVNDGSVSIYVQK

SEQ ID NO: 41776 - protein, 480 aa, Bacillus sp.
NGTIMQYFEWNVPNDGQHWNRLHNNAQNLKNAGITAIWIPPAWKGTSQNDVGYGAYDLYDLGEFNQKGTVRTKYGTKAELERAIRSLKANGIQVYGDVVMNHKGGADFTERVQAVEVNPQNRNQEVSGTYEIEAWTGFNFPGRGNQHSSFKWRWYHFDGTDWDQSRQLSNRIYKFRGDGKAWDWEVDTENGNYDYLMYADVDMNHPEVINELNRWGVWYANTLNLDGFRLDAVKHIQFSFMRNWLGHVRGQTGKNLFAVAEYWKNDLGALENYTSKTNGTMSAFDVPLHYNLYQASNSGGNYDMRNLLNGTLVQRHPSNAVTFVDNHDTQPGEALESFVQGWFKPLAYATILTREQGYPQVFYGDYYGIPSDGVPSYRQQIDPLLKARQKYAYGPQHDYLDHPDVIGWTREGDSSHPKSGLATLITDGPGGSKRMYAGLKNAGETWYDITGNRSDTVKIGSDGWGEFHVNDRSVSIYVQK

SEQ ID NO: 41777 - protein, 480 aa, Bacillus sp.
NGTIMQYFEWNVPNDGQHWNRLHNNAQNLKNAGITAIWIPPAWKGTSQNDVGYGAYDLYDLGEFNQKGTVRTKYGTKAELERAIRSLKANGIQVYGDVVMNHKGGADFTERVQAVEVNPQNRNQEVSGTYEIEAYTGFNFPGRGNQHSSFKWRWYHFDGTDWDQSRQLSNRIYKFRGDGKAWDWEVDTENGNYDYLMYADVDMNHPEVINELNRWGVWYANTLNLDGFRLDAVKHIQFSFMRNWLGHVRGQTGKNLFAVAEYWKNDLGALENYLSKTNWTMSAFDVPLHYNLYQASNSGGNYDMRNLLNGTLVQRHPSHAVTFVDNHDTQPGEALESFVQGWFKPLAYATILTREQGYPQVFYGDYYGIPSDGVPSYRQQIDPLLKARQKYAYGPQHDYLDHPDVIGWTREGDSSHPKSGLATLITDGPGGSKRMYAGLKNAGETWYDITGNRSDTVKIGSDGTGEFHVNDGSVSIYVQK

SEQ ID NO: 41778 - protein, 480 aa, Bacillus sp.
NGTIMQYFEWNVPNDGQHWNRLHNNAQNLKNAGITAIWIPPAWKGTSQNDVGYGAYDLYDLGEFNQKGTVRTKYGTKAELERAIRSLKANGIQVYGDVVMNHKGGADFTERVQAVEVNPQNRNQEVSGTYEIEAWTGFNFPGRGNQHSSFKWRWYHFDGTDWDQSRQLSNRIYKFRGDGKAWDWEVDTENGNYDYLMYADVDMNHPEVINELNRWGVWYANTLNLDGFRLDAVKHIQFSFMRNWLGHVRGQTGKNLFAVAEYWKNDLGALENYTSKTNGTMSAFDVPLHYNLYQASNSGGNYDMRNLLNGTLVQRHPSNAVTFVDNHDTQPGEALESFVQGWFKPLAYATILTREQGYPQVFYGDYYGIPSDGVPSYRQQIDPLLKARQKYAYGPQHDYLDHPDVIGWTREGDSSHPKSGLATLITDGPGGSKRMYAGLKNAGETWYDITGNRSDTVKIGSDGWGEFHVNKGSVSIYVQK

SEQ ID NO: 41779 - protein, 480 aa, Bacillus sp.
NGTIMQYFEWNVPNDGQHWNRLHNNAQNLKNAGITAIWIPPAWKGTSQNDVGYGAYDLYDLGEFNQKGTVRTKYGTKAELERAIRSLKANGIQVYGDVVMNHKGGADFTERVQAVEVNPQNRNQEVSGTYEIEAWTGFNFPGRGNQHSSFKWRWYHFDGTDWDQSRQLSNRIYKFRGDGKAWDWEVDTENGNYDYLMYADVDMNHPEVINELNRWGVWYANTLNLDGFRLDAVKHIQFSFMRNWLGHVRGQTGKNLFAVAEYWKNDLGALENYLSKTNWTMSAFDVPLHYNLYQASNSGKNYDMRNLLNGTLVQRHPSHAVTFVDNHDTQPGEALESFVQGWFKPLAYATILTREQGYPQVFYGDYYGIPSDGVPSYRQQIDPLLKARQKYAYGPQHDYLDHPDVIGWTREGDSSHPKSGLATLITDGPGGSKKMYAGLKNAGETWYDITGNRSDTVKIGSDGWGEFHVNDGSVSIYVQK

SEQ ID NO: 41780 - protein, 480 aa, Bacillus sp.
NGTIMQYFEWNVPNDGQHWNRLHNNAQNLKNAGITAIWIPPAWKGTSQNDVGYGAYDLYDLGEFNQKGTVRTKYGTKAELERAIRSLKANGIQVYGDVVMNHKGGADFTERVQAVEVNPQNRNQEVSGTYEIEAWTGFNFPGRGNQHSSFKWRWYHFDGTDWDQSRQLSNRIYKFRGDGKAWDWEVDTENGNYDYLMYADVDMNHPEVINELNRWGVWYANTLNLDGFRLDAVKHIQFSFMRNWLGHVRGQTGKNLFAVAEYWKNDLGALENYLSKTNWTMSAFDVPLHYNLYQASNSGGNYDMRNLLNGTLVQRHPSHAVTFVDNHDTQPGEALESFVQGWFKPLAYATILTREQGYPQVFYGDYYGIPSDGVPSYRQQIDPLLKARQKYAYGPQHDYLDHPDVIGWTREGDSSHPKSGLATLITDGPGGSKRMYAGLKNAGETWYDITGNRSDTVKIGSDGTGEFHVNKGSVSIYVQK

SEQ ID NO: 41781 - protein, 480 aa, Bacillus sp.
NGTIMQYFEWNVPNDGQHWNRLHNNAQNLKNAGITAIWIPPAWKGTSQNDVGYGAYDLYDLGEFNQKGTVRTKYGTKAELERAIRSLKANGIQVYGDVVMNHKGGADFTERVQAVEVNPQNRNQEVSGTYEIEAWTGFNFPGRGNQHSSFKWRWYHFDGTDWDQSRQLSNRIYKFRGDGKAWDWEVDTENGNYDYLMYADVDMNHPEVINELNRWGVWYANTLNLDGFRLDAVKHIQFSFMRNWLGHVRGQTGKNLFAVAEYWKNDLGALENYLSKTNWTMSAFDVPLHYNLYQASNSGKNYDMRNLLNGTLVQRHPSHAVTFVDNHDTQPGEALESFVQGWFKPLAYATILTREQGYPQVFYGDYYGIPSDGVPSYRQQIDPLLKARQKYAYGPQHDYLDHPDVIGWTREGDSSHPKSGLATLITDGPGGSKRMYAGLKNAGETWYDITGNRSDTVKIGSDGWGEFHVNDRSVSIYVQK

SEQ ID NO: 41782 - protein, 480 aa, Bacillus sp.
NGTIMQYFEWNVPNDGQHWNRLHNNAQNLKNAGITAIWIPPAWKGTSQNDVGYGAYDLYDLGEFNQKGTVRTKYGTKAELERAIRSLKANGIQVYGDVVMNHKGGADFTERVQAVEVNPQNRNQEVSGTYEIEAWTGFNFPGRGNQHSSFKWRWYHFDGTDWDQSRQLSNRIYKFRGDGKAWDWEVDTENGNYDYLMYADVDMNHPEVINELNRWGVWYANTLNLDGFRLDAVKHIQFSFMRNWLGHVRGQTGKNLFAVAEYWKNDLGALENYLSKTNWTMSAFDVPLHYNLYQASNSGKNYDMRNLLNGTLVQRHPSHAVTFVDNHDTQPGEALESFVQGWFKPLAYATILTREQGYPQVFYGDYYGIPSDGVPSYRQQIDPLLKARQKYAYGPQHDYLDHPDVIGWTREGDSSHPKSGLATLITDGPGGSKRMYAGLKNAGETWYDITGNRSDTVKIGSDGRGEFHVNDGSVSIYVQK

SEQ ID NO: 41783 - protein, 480 aa, Bacillus sp.
NGTIMQYFEWNVPNDGQHWNRLHNNAQNLKNAGITAIWIPPAWKGTSQNDVGYGAYDLYDLGEFNQKGTVRTKYGTKAELERAIRSLKANGIQVYGDVVMNHKGGADFTERVQAVEVNPQNRNQEVSGTYEIEAWTGFNFPGRGNQHSSFKWRWSHFDGTDWDQSRQLSNRIYKFRGDGKAWDWEVDTENGNYDYLMYADVDMNHPEVINELNRWGVWYANTLNLDGFRLDAVKHIQFSFMRNWLGHVRGQTGKNLFAVAEYWKNDLGALENYLSKTNWTMSAFDVPLHYNLYQASNSGGNYDMRNLLNGTLVQRHPSHAVTFVDNHDTQPGEALESFVQGWFKPLAYATILTREQGYPQVFYGDYYGIPSDGVPSYRQQIDPLLKARQKYAYGPQHDYLDHPDVIGWTREGDSSHPKSGLATLITDGPGGSKRMYAGLKNAGETWYDITGNRSDTVKIGSDGTGEFHVNDGSVSIYVQK

SEQ ID NO: 41784 - protein, 480 aa, Bacillus sp.
NGTIMQYFEWNVPNDGQHWNRLHNNAQNLKNAGITAIWIPPAWKGTSQNDVGYGAYDLYDLGEFNQKGTVRTKYGTKAELERAIRSLKANGIQVYGDVVMNHKGGADFTERVQAVEVNPQNRNQEVSGTYEIEAWTGFNFPGRGNQHSSFKWRWYHFDGTDWDQSRQLSNRIYKFRGDGKAWDWEVDTENGNYDYLMYADVDMNHPEVINELNRWGVWYANTLNLDGFRLDAVKHIQFSFMRNWLGHVRGQTGKNLFAVAEYWKNDLGALENYLSKTNWTMSAFDVPLHYNLYQASNSGGNYDMRNLLNGTLVQRHPSHAVTFVDNHDTQPGEALESFVQGWFKPLAYATILTREQGYPQVFYGDYYGIPSDGVPSYRQQIDPLLKARQKYAYGPQHDYLDHPDVIGWTREGDSSHPKSGLATLITDGPGGSKNMYAGLKNAGETWYDITGNRSDTVKIGSDGWGEFHVNKGSVSIYVQK

SEQ ID NO: 41785 - protein, 480 aa, Bacillus sp.
NGTIMQYFEWNVPNDGQHWNRLHNNAQNLKNAGITAIWIPPAWKGTSQNDVGYGAYDLYDLGEFNQKGTVRTKYGTKAELERAIRSLKANGIQVYGDVVMNHKGGADFTERVQAVEVNPQNRNQEVSGTYEIEAWTGFNFPGRGNQHSSFKWRWYHFDGTDWDQSRQLSNRIYKFRGDGKAWDWEVDTENGNYDYLMYADVDMNHPEVINELNRWGVWYANTLNLDGFRLDAVKHIQFSFMRNWLGHVRGQTGKNLFAVAEYWKNDLGALENYLSKTNWTMSAFDVPLHYNLYQASNSGKNYDMRNLLNGTLVQRHPSHAVTFVDNHDTQPGEALESFVQGWFKPLAYATILTREQGYPQVFYGDYYGIPSDGVPSYRQQIDPLLKARQKYAYGPQHDYLDHPDVIGWTREGDSSHPKSGLATLITDGPGGSKRMYAGLKNAGETWYDITGNRSDTVKIGSDGWGEFHVNKGSVSIYVQK

SEQ ID NO: 41786 - protein, 480 aa, Bacillus sp.
NGTIMQYFEWNVPNDGQHWNRLHNNAQNLKNAGITAIWIPPAWKGTSQNDVGYGAYDLYDLGEFNQKGTVRTKYGTKAELERAIRSLKANGIQVYGDVVMNHKGGADFTERVQAVEVNPQNRNQEVSGTYEIEAWTGFNFPGRGNQHSSFKWRWYHFDGTDWDQSRQLSNRIYKFRGDGKAWDWEVDTENGNYDYLMYADVDMNHPEVINELNRWGVWYANTLNLDGFRLDAVKHIQFSFMRNWLGHVRGQTGKNLFAVAEYWKNDLGALENYLSKTNWTMSAFDVPLHYNLYQASNSKGNYDMRNLLNGTLVQRHPSHAVTFVDNHDTQPGEALESFVQGWFKPLAYATILTREQGYPQVFYGDYYGIPSDGVPSYRQQIDPLLKARQKYAYGPQHDYLDHPDVIGWTREGDSSHPKSGLATLITDGPGGSKKMYAGLKNAGETWYDITGNRSDTVKIGSDGWGEFHVNDGSVSIYVQK

SEQ ID NO: 41787 - protein, 480 aa, Bacillus sp.
NGTIMQYFEWNVPNDGQHWNRLHNNAQNLKNAGITAIWIPPAWKGTSQNDVGYGAYDLYDLGEFNQKGTVRTKYGTKAELERAIRSLKANGIQVYGDVVMNHKGGADFTERVQAVEVNPQNRNQEVSGTYEIEAWTGFNFPGRGNQHSSFKWRWSHFDGTDWDQSRQLSNRIYKFRGDGKAWDWEVDTENGNYDYLMYADVDMNHPEVINELNRWGVWYANTLNLDGFRLDAVKHIQFSFMRNWLGHVRGQTGKNLFAVAEYWKNDLGALENYLSKTNWTMSAFDVPLHYNLYQASNSGGNYDMRNLLNGTLVQRHPSHAVTFVDNHDTQPGEALESFVQGWFKPLAYATILTREQGYPQVFYGDYYGIPSDGVPSYRQQIDPLLKARQKYAYGPQHDYLDHPDVIGWTREGDSSHPKSGLATLITDGPGGSKRMYAGLKNAGETWYDITGNRSDTVKIGSDGWGEFHVNKGSVSIYVQK

SEQ ID NO: 41788 - protein, 480 aa, Bacillus sp.
NGTIMQYFEWNVPNDGQHWNRLHNNAQNLKNAGITAIWIPPAWKGTSQNDVGYGAYDLYDLGEFNQKGTVRTKYGTKAELERAIRSLKANGIQVYGDVVMNHKGGADFTERVQAVEVNPQNRNQEVSGTYEIEAYTGFNFPGRGNQHSSFKWRWYHFDGTDWDQSRQLSNRIYKFRGDGKAWDWEVDTENGNYDYLMYADVDMNHPDVINELNRWGVWYANTLNLDGFRLDAVKHIQFSFMRNWLGHVRGQTGKNLFAVAEYWKNDLGALENYLSKTNWTMSAFDVPLHYNLYQASNSGKNYDMRNLLNGTLVQRHPSHAVTFVDNHDTQPGEALESFVQGWFKPLAYATILTREQGYPQVFYGDYYGIPSDGVPSYRQQIDPLLKARQKYAYGPQHDYLDHPDVIGWTREGDSSHPKSGLATLITDGPGGSKRMYAGLKNAGETWYDITGNRSDTVKIGSDGWGEFHVNDKSVSIYVQK

SEQ ID NO: 41789 - protein, 480 aa, Synthetic construct
NGTMMQYFEWYLPNDGNHWNRLNSDASNLKSKGITAVWIPPAWKGASQNDVGYGAYDLYDLGEFNQKGTVRTKYGTRSQLQAAVTSLKNNGIQVYGDVVMNHKGGADATEMVRAVEVNPNNRNQEVTGEYTIEAWTRFDFPGRGNTHSSFKWRWYHFDGVDWDQSRRLNNRIYKFRGHGKAWDWEVDTENGNYDYLMYADIDMDHPEVVNELRNWGVWYTNTLGLDGFRIDAVKHIKYSFTRDWINHVRSATGKNMFAVAEFWKNDLGAIENYLQKTNWNHSVFDVPLHYNLYNASKSGGNYDMRNIFNGTVVQRHPSHAVTFVDNHDSQPEEALESFVEEWFKPLAYALTLTREQGYPSVFYGDYYGITTHGVPAMRSKIDPILEARQKYAYGPQHDYLDHPDVIGWTREGDSSHPKSGLATLITDGPGGSKRMYAGLKNAGETWYDITGNRSDTVKIGSDGWGEFHVNDGSVSIYVQK

SEQ ID NO: 41790 - protein, 477 aa, Bacillus sp.
NGTMMQYFEWYLPNDGNHWNRLNSDASNLKSKGITAVWIPPAWKAVSQNDVGYGAYDLYDLGEFNQKGTVRTKYGTRSQLQAAVTSLKNNGIQVYGDVVMNHKGGADATEMVRAVEVNPNNRNQEVTGEYTIEAWTRFDFPGRGNTHSSFKWRWYHFDGVDWDQSRQTNRIYKFRGKAWDWEVDTEFGNYDYLMYADYDMDHPEVVNELRNWGVWYTNTLGLDGFRIDAVKHIKYSFTRDWINHVRSATGKNMFAVAEFWKNDLGAIENYLQKTNWNHSVFDVPLHYNLYNASKSGSNYDMRNIFNGTVVQRHPSHAVTFVDNHDSQPEEALESFVEPWFKPLAYALTLTREQGYPSVFYGDYYGIPTHGVPAMRSKIDPILEARQKYAYGPQHDYLDHPDVIGWTREGDSSHPKSGLATLITDGPGGSKRMYAGLKNAGETWYDITGNRSDTVKIGSDGWGEFHVNDTSVSIYVQK

SEQ ID NO: 41791 - protein, 478 aa, Bacillus sp.
NGTMMQYFEWYLPNDGNHWNRLNSDASNLKSKGITAVWIPPAWKGASQNDVGYGAYDLYDLGEFNQKGTVRTKYGTRSQLQAAVTSLKNNGIQVYGDVVMNHKGGADATEMVRAVEVNPNNRNQEVTGEYTIEAWTRFDFPGRGNTHSSFKWRWYHFDGVDWDQSRRLNNRIYKFRGKAWDWEVDTEFGNYDYLMYADYDMDHPEVVNELRNWGVWYTNTLGLDGFRIDAVKHIKYSFTRDWINHVRSATGKNMFAVAEFWKNDLGAIENYLQKTNWNHSVFDVPLHYNLYNASKSAGNYDMRNIFNGTVVQRHPSHAVTFVDNHDSQPEEALESFVDEWFKPLAYALTLTREQGYPSVFYGDYYGIPTHGVPAMRSKIDPILEARQKYAYGPQHDYLDHPDVIGWTREGDSSHPKSGLATLITDGPGGSKRMYAGLKNAGETWYDITGNRSDTVKIGSDGWGEFHVNKSSVSIYVQK

SEQ ID NO: 41792 - protein, 478 aa, Bacillus sp.
NGTMMQYFEWYLPNDGNHWNRLNSDASNLKSKGIKAVWIPPAWKGASQNDVGYGAYDLYDLGEFNQRGTVRTKYGTRSQLQAAVTSLKNNGIQVYGDVVMNHKGGADATEMVDAVEVNPNNRNQEVTGEYTIEAWTRFDFPGRGNTHSSFKWRWYHFDGVDFDQSRRLNNRIYKFRGKAWDWEVDTEFGNYDYLMYADYDMDHPEVVNELRNWGVWYTNTLGLDGFRIDAVKHIKYSFTRDWINHVRSATGKNMFAVAEFWKNDLGAIENYLQKTNWNHSVFDVPLHYNLYNASKSGGNYDMRNIFNGTVVQRHPSHAVTFVDNHDSQPEEALESFVEEWFKPLAYALTLTREQGYPSVFYGDYYGIPTHGVPAMRSKIDPILEARQKYAYGPQHDYLDHPDVIGWTREGDSSHPKSGLATLITDGPGGSKRMYAGLKNAGETWYDITGNRSDTVKIGSDGWGEFHVNDGSVSIYVQK

SEQ ID NO: 41793 - protein, 478 aa, Bacillus sp.
NGTMMQYFEWYLPNDGNHWNRLNSDASNLKSKGITAVWIPPAWKAVSQNDVGYGAYDLYDLGEFNQKGTVRTKYGTRSQLQAAVTSLKNNGIQVYGDVVMNHKGGADLTEMVDAVEVNPNNRNQEVTGEYTIEAWTRFDFPGRGNTHSSFKWRWYHFDGVDWDQSREFTNRIYKFRGKAWDWEVDTEFGNYDYLMYVDYDMDHPEVVNELRNWGVWYTNTLGLDGFRIDAVKHIKYSFTRDWINHVRSATGKNMFAVAEFWKNDLGAIENYLQKTNWNHSVFDVPLHYNLYNASKSGGNYDMRNIFNGTVVQRHPSHAVTFVDNHDSQPEEALESFVEEWFKPLAYALTLTREQGYPSVFYGDYYGIPTHGVPAMRSKIDPILEARQKYAYGPQHDYLDHPDVIGWTREGDSSHPKSGLATLITDGPGGSKRMYAGLKNAGETWYDITGNRSDTVKIGSDGWGEFHVNDGSVSIYVQK

SEQ ID NO: 41794 - protein, 478 aa, Bacillus sp.
NGTMMQYFEWYLPNDGNHWNRLNSDASNLKSKGITAVWIPPAWKGASQNDVGYGAYDLYDLGEFNQKGTVRTKYGTRSQLQAAVTSLKNNGIQVYGDVVMNHKGGADVTEMVRAVEVNPNNRNQEVTGEYTIEAWTRFDFPGRGNTHSSFKWRWYHFDGVDWDQSRRLNNRIYKFRGKAWDWEVDTEFGNYDYLMYADYDMDHPEVVNELRNWGVWYTNTLGLDGFRIDAVKHIKYSFTRDWINHVRSATGKNMFAVAEFWKNDLGAIENYLQKTNWNHSVFDVPLHYNLYNASKSGGNYDMRNIFNGTVVQRHPSHAVTFVDNHDSQPEEALESFVEPWFKPLAYALTLTREQGYPSVFYGDYYGIPTHGVPAMRSKIDPILEARQKYAYGPQHDYLDHPDVIGWTREGDSSHPKSGLATLITDGPGGSKRMYAGLKNAGETWYDITGNRSDTVKIGSDGWGEFHVNGKSVSIYVQK

SEQ ID NO: 41795 - protein, 478 aa, Bacillus sp.
NGTMMQYFEWYLPNDGNHWNRLNSDASNLKSKGITAVWIPPAWKAASQNDVGYGAYDLYDLGEFNQKGTVRTKYGTRSQLQAAVTSLKNNGIQVYGDVVMNHKGGADATEMVRAVEVNPNNRNQEVTGEYTIEAWTRFDFPGRGNTHSSFKWRWYHFDGVDWDQSRQITNRIYKFRGKAWDWEVDTEFGNYDYLMYTDYDMDHPEVVNELRNWGVWYTNTLGLDGFRIDAVKHIKYSFTRDWINHVRSATGKNMFAVAEFWKNDLGAIENYLQKTNWNHSVFDVPLHYNLYNASKSQGNYDMRNIFNGTVVQRHPSHAVTFVDNHDSQPEEALESFVDTWFKPLAYALTLTREQGYPSVFYGDYYGIPTHGVPAMRSKIDPILEARQKYAYGPQHDYLDHPDVIGWTREGDSSHPKSGLATLITDGPGGSKRMYAGLKNAGETWYDITGNRSDTVKIGSDGWGEFHVNGSSVSIYVQK

SEQ ID NO: 41796 - protein, 478 aa, Bacillus sp.
NGTMMQYFEWYLPNDGNHWNRLNSDASNLKSKGITAVWIPPAWKGASQNDVGYGAYDLYDLGEFNQKGTVRTKYGTRSQLQAAVTSLKNNGIQVYGDVVMNHKGGADATEMVRAVEVNPNNRNQEVTGEYTIEAWTRFDFPGRGNTHSSFKWRWYHFDGVDWDQSRRLNNRIYKFRGKAWDWEVDTEFGNYDYLMYADYDMDHPEVVNELRNWGVWYTNTLGLDGFRIDAVKHIKYSFTRDWINHVRSATGKNMFAVAEFWKNDLGAIENYLQKTNWNHSVFDVPLHYNLYNASKSQGNYDMRNIFNGTVVQRHPSHAVTFVDNHDSQPEEALESFVDPWFKPLAYALTLTREQGYPSVFYGDYYGIPTHGVPAMRSKIDPILEARQKYAYGPQHDYLDHPDVIGWTREGDSSHPKSGLATLITDGPGGSKRMYAGLKNAGETWYDITGNRSDTVKIGSDGWGEFHVNKQSVSIYVQK

SEQ ID NO: 41797 - protein, 478 aa, Bacillus sp.
NGTMMQYFEWYLPNDGNHWNRLNSDASNLKSKGITAVWIPPAWKAVSQNDVGYGAYDLYDLGEFNQKGTVRTKYGTRSQLQAAVTSLKNNGIQVYGDVVMNHKGGADATEMVRAVEVNPNNRNQEVTGEYTIEAWTRFDFPGRGNTHSSFKWRWYHFDGVDWDQSREFTNRIYKFRGKAWDWEVDTEFGNYDYLMYVDYDMDHPEVVNELRNWGVWYTNTLGLDGFRIDAVKHIKYSFTRDWINHVRIATGKNMFAVAEFWKNDLGAIENYLQKTNWNHSVFDVPLHYNLYNASKSGGNYDMRNIFNGTVVQRHPSHAVTFVDNHDSQPEEALESFVDEWFKPLAYALTLTREQGYPSVFYGDYYGIPTHGVPAMRSKIDPILEARQKYAYGPQHDYLDHPDVIGWTREGDSSHPKSGLATLITDGPGGSKRMYAGLKNAGETWYDITGNRSDTVKIGSDGWGEFHVNDQSVSIYVQK

SEQ ID NO: 41798 - protein, 478 aa, Bacillus sp.
NGTMMQYFEWYLPNDGNHWNRLNSDASNLKSKGITAVWIPPAWKATSQNDVGYGAYDLYDLGEFNQKGTVRTKYGTRSQLQSAVTSLKNNGIQVYGDVVMNHKGGADATEMVRAVEVNPNNRNQEVTGEYTIEAWTRFDFPGRGNTHSSFKWRWYHFDGVDWDQSRNTDNRIYKFRGKAWDWEVDTEFGNYDYLMYADYDMDHPEVVNELRNWGVWYTNTLGLDGFRIDAVKHIKYSFTRDWINHVRSATGKNMFAVAEFWKNDLGAIENYLQKTNWNHSVFDVPLHYNLYNASKSQGNYDMRNIFNGTVVQRHPSHAVTFVDNHDSQPEEALESFVDTWFKPLAYALTLTREQGYPSVFYGDYYGIPTHGVPAMRSKIDPILEARQKYAYGPQHDYLDHPDVIGWTREGDSSHPKSGLATLITDGPGGSKRMYAGLKNAGETWYDITGNRSDTVKIGSDGWGEFHVNGSSVSIYVQK

SEQ ID NO: 41799 - protein, 478 aa, Bacillus sp.
NGTMMQYFEWYLPNDGNHWNRLNSDASNLKSKGIKAVWIPPAWKGASQNDVGYGAYDLYDLGEFNQRGTVRTKYGTRSQLQAAVTSLKNNGIQVYGDVVMNHKGGADATEMVRAVEVNPNNRNQEVTGEYTIEAWTRFDFPGRGNTHSSFKWRWYHFDGVDFDQSRKLNNRIYKFRGKAWDWEVDTEFGNYDYLMYVDYDMDHPEVVNELRNWGVWYTNTLGLDGFRIDAVKHIKYSFTRDWINHVRSATGKNMFAVAEFWKNDLGAIENYLQKTNWNHSVFDVPLHYNLYNASKSGGNYDMRNIFNGTVVQRHPSHAVTFVDNHDSQPEEALESFVEEWFKPLAYALTLTREQGYPSVFYGDYYGIPTHGVPAMRSKIDPILEARQKYAYGPQHDYLDHPDVIGWTREGDSSHPKSGLATLITDGPGGSKRMYAGLKNAGETWYDITGNRSDTVKIGSDGWGEFHVNDGSVSIYVQK

SEQ ID NO: 41800 - protein, 478 aa, Bacillus sp.
NGTMMQYFEWYLPNDGNHWNRLNSDASNLKSKGITAVWIPPAWKAVSQNDVGYGAYDLYDLGEFNQKGTVRTKYGTRSQLQAAVTSLKNNGIQVYGDVVMNHKGGADATEMVRAVEVNPNNRNQEVTGEYTIEAWTRFDFPGRGNTHSSFKWRWYHFDGVDWDQSRDLENRIYKFRGKAWDWEVDTEFGNYDYLMYADYDMDHPEVVNELRNWGVWYTNTLGLDGFRIDAVKHIKYSFTRDWINHVRSATGKNMFAVAEFWKNDLGAIENYLQKTNWNHSVFDVPLHYNLYNASKSGGNYDMRNIFNGTVVQSHPNHAVTFVDNHDSQPEEALESFVEEWFKPLAYALTLTREQGYPSVFYGDYYGIPTHGVPAMRSKIDPILEARQKYAYGPQHDYLDHPDVIGWTREGDSSHPKSGLATLITDGPGGSKRMYAGLKNAGETWYDITGNRSDTVKIGSDGWGEFHVNYGSVSIYVQK

SEQ ID NO: 41801 - protein, 478 aa, Bacillus sp.
NGTMMQYFEWYLPNDGNHWNRLNSDASNLKSKGITAVWIPPAWKAVSQNDVGYGAYDLYDLGEFNQKGTVRTKYGTRSQLQAAVTSLKNNGIQVYGDVVMNHKGGADATEMVRAVEVNPNNRNQEVTGEYTIEAWTRFDFPGRGNTHSSFKWRWYHFDGVDFDQSREFTNRIYKFRGKAWDWEVDTEFGNYDYLMYVDYDMDHPEVVNELRNWGVWYTNTLGLDGFRIDAVKHIKYSFTRDWINHVRSATGKNMFAVAEFWKNDLGAIENYLQKTNWNHSVFDVPLHYNLYNASKSGGNYDMRNIFNGTVVQRHPSHAVTFVDNHDSQPEEALESFVEEWFKPLAYALTLTREQGYPSVFYGDYYGIPTHGVPAMRSKIDPILEARQKYAYGPQHDYLDHPDVIGWTREGDSSHPKSGLATLITDGPGGSKRMYAGLKNAGETWYDITGNRSDTVKIGSDGWGEFHVNDGSVSIYVQK

SEQ ID NO: 41802 - protein, 478 aa, Bacillus sp.
NLTMMQYFEWYLPNDGNHWNRLNSDASNLKSKGITAVWIPPAWKGASQNDVGYGAYDLYDLGEFNQKGTVRTKYGTRSQLQAAVTSLKNNGIQVYGDVVMNHKGGADATEMVRAVEVNPNNRNQEVTGEYTIEAWTRFDFPGRGNTHSSFKWRWYHFDGVDWDQSRRLNNRIYKFRGKAWDWEVDTEFGNYDYLMYADYDMDHQEVVNELRNWGVWYTNTLGLDGFRIDAVKHIKYSFTRDWINHVRSATGKNMFAVAEFWKNDLGAIENYLQKTNWNHSVFDVPLHYNLYNASKGGGNYDMRNIFNGTVVQAHPSHAVTFVDNHDSQPEEALESFVEEWFKPLAYALTLTREQGYPSVFYGDYYGIPTHGVPAMRSKIDPILEARQKYAYGPQHDYLDHPDVIGWTREGDSSHPKSGLATLITDGPGGSKRMYAGLKNAGETWYDITGNRSDTVKIGSDGWGEFHVNDGSVSIYVQK

SEQ ID NO: 41803 - protein, 478 aa, Bacillus sp.
NGTMMQYFEWYLPNDGNHWNRLNSDASNLKSKGITAVWIPPAWKGTSQNDVGYGAYDLYDLGEFNQKGTVRTKYGTRSQLQAAVTSLKNNGIQVYGDVVMNHKGGADATEMVRAVEVNPNNRNQEVTGEYTIEAWTRFDFPGRGNTHSSFKWRWYHFDGVDWDQSRNLNNRIYKFRGKAWDWEVDTEFGNYDYLMYVDYDMDHPEVVNELRNWGVWYTNTLGLDGFRIDAVKHIKYSFTRDWINHVRSATGKNMFAVAEFWKNDLGAIENYLQKTNWNHSVFDVPLHYNLYNASKSQGNYDMRNIFNGTVVQRHPSHAVTFVDNHDSQPEEALESFVDTWFKPLAYALTLTREQGYPSVFYGDYYGIPTHGVPAMRSKIDPILEARQKYAYGPQHDYLDHPDVIGWTREGDSSHPKSGLATLITDGPGGSKRMYAGLKNAGETWYDITGNRSDTVKIGSDGWGEFHVNGSSVSIYVQK

SEQ ID NO: 41804 - protein, 478 aa, Bacillus sp.
NGTMMQYFEWYLPNDGNHWNRLNSDASNLKSKGITAVWIPPAWKGASQNDVGYGAYDLYDLGEFNQKGTVRTKYGTRSQLQAAVTSLKNNGIQVYGDVVMNHKGGADATEMVRAVEVNPNNRNQEVTGEYTIEAYTRFDFSGRGNTHSSFKWRWYHFDGVDWDQSRRLDNRIYKFRGKAWDWEVDTEFGNYDYLMYTDYDMDHPEVVNELRNWGVWYTNTLGLDGFRIDAVKHIKYSFTRDWINHVRSATGKNMFAVAEFWKNDLGAIENYLQKTNWNHSVFDVPLHYNLYNASKSGGNYDMRNIFNGTVVQRHPSHAVTFVDNHDSQPEEALESFVEEWFKPLAYALTLTREQGYPSVFYGDYYGIPTHGVPAMRSKIDPILEARQKYAYGPQHDYLDHPDVIGWTREGDSSHPKSGLATLITDGPGGSKRMYAGLKNAGETWYDITGNRSDTVKIGSDGWGEFHVNDGSVSIYVQK

SEQ ID NO: 41805 - protein, 478 aa, Bacillus sp.
NDTMMQYFEWYLPNDGNHWNRLNSDASNLKSKGITAVWIPPAWKGASQNDVGYGAYDLYDLGEFNQKGTVRTKYGTRSQLQAAVTSLKNNGIAVYGDVVMNHKGGADATEMVRAVEVNPNNRNQEVTGEYTIEAWTRFDFPGRGNTHSSFKWRWYHFDGVDWDQSRRLNNRIYKFRGKAWDWEVDTEFGNYDYLMYADYDMDHPEVVNELRNWGVWYTNTLGLDGFRIDAVKHIKYSFTRDWINHVRSATGKNMFAVAEFWKNDLGAIENYLQKTNWNHSVFDVPLHYNLYNASKSGGNYDMRNIFNGTVVQMHPSHAVTFVDNHDSQPEEALESFVEEWFKPLAYALTLTREQGYPSVFYGDYYGIPTHGVPAMRSKIDPILEARQKYAYGPQHDYLDHPDVIGWTREGDSSHPKSGLATLITDGPGGSKRMYAGLKNAGETWYDITGNRSDTVKIGSDGWGEFHVNDGSVSIYVQK

SEQ ID NO: 41806 - protein, 478 aa, Bacillus sp.
NGTMMQYFEWYLPNDGNHWNRLNSDASNLKSKGIKAVWIPPAWKGASQNDVGYGAYDLYDLGEFNQRGTVRTKYGTRSQLQAAVTSLKNNGIQVYGDVVMNHKGGADATEMVRAVEVNPNNRNQEVTGEYTIEAWTRFDFPGRGNTHSSFKWRWYHFDGVDHDQSRRLNNRIYKFRGKAWDWEVDTEFGNYDYLMYADYDMDHPEVVNELRNWGVWYTNTLGLDGFRIDAVKHIKYSFTRDWINHVRSATGKNMFAVAEFWKNDLGAIENYLQKTNWNHSVFDVPLHYNLYNASKSGGNYDMRNIFNGTVVQRHPSHAVTFVDNHDSQPEEALESFVEEWFKPLAYALTLTREQGYPSVFYGDYYGIPTHGVPAMRSKIDPILEARQKYAYGPQHDYLDHPDVIGWTREGDSSHPKSGLATLITDGPGGSKRMYAGLKNAGETWYDITGNRSDTVKIGSDGWGEFHVNDGSVSIYVQK

SEQ ID NO: 41807 - protein, 478 aa, Bacillus sp.
NGTMMQYFEWYLPNDGNHWNRLNSDASNLKSKGITAVWIPPAWKATSQNDVGYGAYDLYDLGEFNQKGTVRTKYGTRSQLQAAVTSLKNNGIQVYGDVVMNHKGGADATEMVRAVEVNPNNRNQEVTGEYTIEAWTRFDFPGRGNTHSSFKWRWYHFDGVDWDQSRNVNNRIYKFRGKAWDWEVDTEFGNYDYLMYADYDMDHPEVVNELRNWGVWYTNTLGLDGFRIDAVKHIKYSFTRDWINHVRSATGKNMFAVAEFWKNDLGAIENYLQKTNWNHSVFDVPLHYNLYNASKSGGNYDMRNIFNGTVVQAHPMHAVTFVDNHDSQPEEALESFVEEWFKPLAYALTLTREQGYPSVFYGDYYGIPTHGVPAMRSKIDPILEARQKYAYGPQHDYLDHPDVIGWTREGDSSHPKSGLATLITDGPGGSKRMYAGLKNAGETWYDITGNRSDTVKIGSDGWGEFHVNYGSVSIYVQK

SEQ ID NO: 41808 - protein, 478 aa, Bacillus sp.
NGTMMQYFEWYLPNDGNHWNRLNSDASNLKSKGIKAVWIPPAWKGASQNDVGYGAYDLYDLGEFNQRGTVRTKYGTRSQLQAAVTSLKNNGIQVYGDVVMNHKGGADATEMVRAVEVNPNNRNQEVTGEYTIEAWTRFDFPGRGNTHSSFKWRWYHFDGVDWDQSRNFQNRIYKFRGKAWDWEVDTEFGNYDYLMYADYDMDHPEVVNELRNWGVWYTNTLGLDGFRIDAVKHIKYSFTRDWINHVRSATGKNMFAVAEFWKNDLGAIENYLQKTNWNHSVFDVPLHYNLYNASKSQGNYDMRNIFNGTVVQRHPSHAVTFVDNHDSQPEEALESFVDTWFKPLAYALTLTREQGYPSVFYGDYYGIPTHGVPAMRSKIDPILEARQKYAYGPQHDYLDHPDVIGWTREGDSSHPKSGLATLITDGPGGSKRMYAGLKNAGETWYDITGNRSDTVKIGSDGWGEFHVNGGSVSIYVQK

SEQ ID NO: 41809 - protein, 478 aa, Bacillus sp.
NGTMMQYFEWYLPNDGNHWNRLNSDASNLKSKGITAVWIPPAWKATSQNDVGYGAYDLYDLGEFNQKGTVRTKYGTRSQLQAAVTSLKNNGIQVYGDVVMNHKGGADATEMVRAVEVNPNNRNQEVTGEYTIEAWTRFDFPGRGNTHSSFKWRWYHFDGVDFDQSRNVNNRIYKFRGKAWDWEVDTEFGNYDYLMYADIDYDHPETTNEMRNWGVWYTNTLGLDGFRIDAVKHIKYSFTRDWINHVRSATGKNMFAVAEFWKNDLGAIENYLQKTNWNHSVFDVPLHYNLYNASKSGGNYDMRNIFNGTVVQRHPSHAVTFVDNHDSQPEEALESFVEEWFKPLAYALTLTREQGYPSVFYGDYYGIPTHGVPAMRSKIDPILEARQKYAYGPQHDYLDHPDVIGWTREGDSSHPKSGLATLITDGPGGSKRMYAGLKNAGETWYDITGNRSDTVKIGSDGWGEFHVNDGSVSIYVQK

SEQ ID NO: 41810 - protein, 478 aa, Bacillus sp.
NGTMMQYFEWYLPNDGNHWNRLNSDASNLKSKGITAVWIPPAWKGASQNDVGYGAYDLYDLGEFNQKGTVRTKYGTRSQLQAAVTSLKNNGIQVYGDVVMNHKGGADATEMVRAVEVNPNNRNQEVTGEYTIEAWTRFDFPGRGNTHSSFKWRWYHFDGVDWDQSRRLNNRIYKFRGKAWDWEVDTEFGNYDYLMYADYDMDHPEVVNELRNWGVWYTNTLGLDGFRIDAVKHIKYSFTRDWINHVRSATGKNMFAVAEFWKNDLGAIENYLQKTNWNHSVFDVPLHYNLYNASKSQGNYDMRNIFNGTVVQRHPSHAVTFVDNHDSQPEEALESFVDEWFKPLAYALTLTREQGYPSVFYGDYYGIPTHGVPAMRSKIDPILEARQKYAYGPQHDYLDHPDVIGWTREGDSSHPKSGLATLITDGPGGSKRMYAGLKNAGETWYDITGNRSDTVKIGSDGWGEFHVNGQSVSIYVQK

SEQ ID NO: 41811 - protein, 478 aa, Bacillus sp.
NGTMMQYFEWYLPNDGNHWNRLNSDASNLKSKGITAVWIPPAWKATSQNDVGYGAYDLYDLGEFNQKGTVRTKYGTRSQLQAAVTSLKNNGIQVYGDVVMNHKGGADATEMVRAVEVNPNNRNQEVTGEYTIEAWTRFDFPGRANTHSSFKWRWYHFDGVDFDQSRNVNNRIYKFRGKAWDWEVDTEFGNYDYLMYADYDMDHPEVVNELRNWGVWYTNTLGLDGFRIDAVKHIKYSFTRDWINHVRSATGKNMFAVAEFWKNDLGAIENYLQKTNWNHSVFDVPLHYNLYNASKSGGNYDMRNIFNGTVVQRHPSHAVTFVDNHDSQPEEALESFVEEWFKPLAYALTLTREQGYPSVFYGDYYGIPTHGVPAMRSKIDPILEARQKYAYGPQHDYLDHPDVIGWTREGDSSHPKSGLATLITDGPGGSKRMYAGLKNAGETWYDITGNRSDTVKIGSDGWGEFHVNDGSVSIYVQK

SEQ ID NO: 41812 - protein, 478 aa, Bacillus sp.
NGTMMQYFEWYLPNDGNHWNRLNSDASNLKSKGITAVWIPPAWKGASQNDVGYGAYDLYDLGEFNQKGTVRTKYGTRSQLQAAVTSLKNNGIQVYGDVVMNHKGGADLTEMVDAVEVNPNNRNQEVTGEYTIEAWTRFDFPGRGNTHSSFKWRWYHFDGVDFDQSRRLNNRIYKFRGKAWDWEVDTEFGNYDYLMYADYDMDHPEVVNELRNWGVWYTNTLGLDGFRIDAVKHIKYSFTRDWINHVRIATGKNMFAVAEFWKNDLGAIENYLQKTNWNHSVFDVPLHYNLYNASKSGGNYDMRNIFNGTVVQRHPSHAVTFVDNHDSQPEEALESFVDEWFKPLAYALTLTREQGYPSVFYGDYYGIPTHGVPAMRSKIDPILEARQKYAYGPQHDYLDHPDVIGWTREGDSSHPKSGLATLITDGPGGSKRMYAGLKNAGETWYDITGNRSDTVKIGSDGWGEFHVNDQSVSIYVQK

SEQ ID NO: 41813 - protein, 478 aa, Bacillus sp.
NQTMMQYFEWYLPNDGNHWNRLNSDASNLKSKGITAVWIPPAWKGASQNDVGYGAYDLYDLGEFNQKGTVRTKYGTRSQLQAAVTSLKNNGITVYGDVVMNHKGGADATEMVRAVEVNPNNRNQEVTGEYTIEAWTRFDFPGRGNTHSSFKWRWYHFDGVDWDQSRRLNNRIYKFRGKAWDWEVDTEFGNYDYLMYADYDMDHPEVVNELRNWGVWYTNTLGLDGFRIDAVKHIKYSFTRDWINHVRSATGKNMFAVAEFWKNDLGAIENYLQKTNWNHSVFDVPLHYNLYNASKSGGNYDMRNIFNGTVVQAHPSHAVTFVDNHDSQPEEALESFVEEWFKPLAYALTLTREQGYPSVFYGDYYGIPTHGVPAMRSKIDPILEARQKYAYGPQHDYLDHPDVIGWTREGDSSHPKSGLATLITDGPGGSKRMYAGLKNAGETWYDITGNRSDTVKIGSDGWGEFHVNDGSVSIYVQK

SEQ ID NO: 41814 - protein, 478 aa, Bacillus sp.
NGTMMQYFEWYLPNDGNHWNRLNSDASNLKSKGITAVWIPPAWKAVSQNDVGYGAYDLYDLGEFNQKGTVRTKYGTRSQLQAAVTSLKNNGIQVYGDVVMNHKGGADLTEMVDAVEVNPNNRNQEVTGEYTIEAWTRFDFPGRGNTHSSFKWRWYHFDGVDWDQSRNLTNRIYKFRGKAWDWEVDTEFGNYDYLMYTDYDMDHPEVVNELRNWGVWYTNTLGLDGFRIDAVKHIKYSFTRDWINHVRSATGKNMFAVAEFWKNDLGAIENYLQKTNWNHSVFDVPLHYNLYNASKSGGNYDMRNIFNGTVVQRHPSHAVTFVDNHDSQPEEALESFVEEWFKPLAYALTLTREQGYPSVFYGDYYGIPTHGVPAMRSKIDPILEARQKYAYGPQHDYLDHPDVIGWTREGDSSHPKSGLATLITDGPGGSKRMYAGLKNAGETWYDITGNRSDTVKIGSDGWGEFHVNDGSVSIYVQK

SEQ ID NO: 41815 - protein, 478 aa, Bacillus sp.
NGTMMQYFEWYLPNDGNHWNRLNSDASNLKSKGITAVWIPPAWKGASQNDVGYGAYDLYDLGEFNQKGTVRTKYGTRSQLQAAVTSLKNNGINVYGDVVMNHKGGADATEMVRAVEVNPNNRNQEVTGEYTIEAWTRFDFPGRGNTHSSFKWRWYHFDGVDWDQSRRLNNRIYKFRGKAWDWEVDTEFGNYDYLMYADIDYDHPESTNEMRNWGVWYTNTLGLDGFRIDAVKHIKYSFTRDWINHVRSATGKNMFAVAEFWKNDLGAIENYLQKTNWNHSVFDVPLHYNLYNASKSGGNYDMRNIFNGTVVQAHPMHAVTFVDNHDSQPEEALESFVEEWFKPLAYALTLTREQGYPSVFYGDYYGIPTHGVPAMRSKIDPILEARQKYAYGPQHDYLDHPDVIGWTREGDSSHPKSGLATLITDGPGGSKRMYAGLKNAGETWYDITGNRSDTVKIGSDGWGEFHVNDGSVSIYVQK

SEQ ID NO: 41816 - protein, 478 aa, Bacillus sp.
NGTMMQYFEWYLPNDGNHWNRLNSDASNLKSKGIKAVWIPPAWKGASQNDVGYGAYDLYDLGEFNQRGTVRTKYGTRSQLQAAVTSLKNNGIQVYGDVVMNHKGGADATEMVRAVEVNPNNRNQEVTGEYTIEAWTRFDFPGRGNTHSSFKWRWYHFDGVDYDQSRRLNNRIYKFRGKAWDWEVDTEFGNYDYLMYADYDMDHPEVVNELRNWGVWYTNTLGLDGFRIDAVKHIKYSFTRDWINHVRSATGKNMFAVAEFWKNDLGAIENYLQKTNWNHSVFDVPLHYNLYNASKSGGNYDMRNIFNGTVVQRHPSHAVTFVDNHDSQPEEALESFVEEWFKPLAYALTLTREQGYPSVFYGDYYGIPTHGVPAMRSKIDPILEARQKYAYGPQHDYLDHPDVIGWTREGDSSHPKSGLATLITDGPGGSKRMYAGLKNAGETWYDITGNRSDTVKIGSDGWGEFHVNDGSVSIYVQK

SEQ ID NO: 41817 - protein, 478 aa, Bacillus sp.
NGTMMQYFEWYLPNDGNHWNRLNSDASNLKSKGITAVWIPPAWKGASQNDVGYGAYDLYDLGEFNQKGTVRTKYGTRSQLQAAVTSLKNNGIQVYGDVVMNHKGGADATEMVRAVEVNPNNRNQEVTGEYTIEAWTRFDFPGRGNTHSSFKWRWYHFDGVDWDQSRRLNNRIYKFRSKAWDWEVDTEFGNYDYLMYADYDMDHPETSNELRNWGVWYTNTLGLDGFRIDAVKHIKYSFTRDWINHVRSATGKNMFAVAEFWKNDLGAIENYLQKTNWNHSVFDVPLHYNLYNASKSGGNYDMRNIFNGTVVQRHPSHAVTFVDNHDSQPEEALESFVEEWFKPLAYALTLTREQGYPSVFYGDYYGIPTHGVPAMRSKIDPILEARQKYAYGPQHDYLDHPDVIGWTREGDSSHPKSGLATLITDGPGGSKRMYAGLKNAGETWYDITGNRSDTVKIGSDGWGEFHVNDGSVSIYVQK

SEQ ID NO: 41818 - protein, 478 aa, Bacillus sp.
NGTMMQYFEWYLPNDGNHWNRLNSDASNLKSKGIKAVWIPPAWKGASQNDVGYGAYDLYDLGEFNQRGTVRTKYGTRSQLQAAVTSLKNNGIQVYGDVVMNHKGGADATEMVRAVEVNPNNRNQEVTGEYTIEAWTRFDFPGRGNTHSSFKWRWYHFDGVDFDQSRRLNNRIYKFRGKAWDWEVDTEFGNYDYLMYADYDMDHPEVVNELRNWGVWYTNTLGLDGFRIDAVKHIKYSFTRDWINHVRSATGKNMFAVAEFWKNDLGAIENYLQKTNWNHSVFDVPLHYNLYNASKSGGNYDMRNIFNGTVVQRHPSHAVTFVDNHDSQPEEALESFVEEWFKPLAYALTLTREQGYPSVFYGDYYGIPTHGVPAMRSKIDPILEARQKYAYGPQHDYLDHPDVIGWTREGDSSHPKSGLATLITDGPGGSKRMYAGLKNAGETWYDITGNRSDTVKIGSDGWGEFHVNDGSVSIYVQK

SEQ ID NO: 41819 - protein, 478 aa, Bacillus sp.
NETMMQYFEWYLPNDGNHWNRLNSDASNLKSKGITAVWIPPAWKGASQNDVGYGAYDLYDLGEFNQKGTVRTKYGTRSQLQAAVTSLKNNGIAVYGDVVMNHKGGADATEMVRAVEVNPNNRNQEVTGEYTIEAWTRFDFPGRGNTHSSFKWRWYHFDGVDWDQSRRLNNRIYKFRGKAWDWEVDTEFGNYDYLMYADYDMDHPEVVNELRNWGVWYTNTLGLDGFRIDAVKHIKYSFTRDWINHVRSATGKNMFAVAEFWKNDLGAIENYLQKTNWNHSVFDVPLHYNLYNASRSGGNYDMRNIFNGTVVQAHPNHAVTFVDNHDSQPEEALESFVEEWFKPLAYALTLTREQGYPSVFYGDYYGIPTHGVPAMRSKIDPILEARQKYAYGPQHDYLDHPDVIGWTREGDSSHPKSGLATLITDGPGGSKRMYAGLKNAGETWYDITGNRSDTVKIGSDGWGEFHVNDGSVSIYVQK

SEQ ID NO: 41820 - protein, 478 aa, Bacillus sp.
NGTMMQYFEWYLPNDGNHWNRLNSDASNLKSKGITAVWIPPAWKAVSQNDVGYGAYDLYDLGEFNQKGTVRTKYGTRSQLQAAVTSLKNNGIQVYGDVVMNHKGGADATEMVRAVEVNPNNRNQEVTGEYTIEAWTRFDFPGRGNTHSSFKWRWYHFDGVDFDQSRNLTNRIYKFRGKAWDWEVDTEFGNYDYLMYTDYDMDHPEVVNELRNWGVWYTNTLGLDGFRIDAVKHIKYSFTRDWINHVRSATGKNMFAVAEFWKNDLGAIENYLQKTNWNHSVFDVPLHYNLYNASKSGGNYDMRNIFNGTVVQRHPSHAVTFVDNHDSQPEEALESFVEEWFKPLAYALTLTREQGYPSVFYGDYYGIPTHGVPAMRSKIDPILEARQKYAYGPQHDYLDHPDVIGWTREGDSSHPKSGLATLITDGPGGSKRMYAGLKNAGETWYDITGNRSDTVKIGSDGWGEFHVNDGSVSIYVQK

SEQ ID NO: 41821 - protein, 478 aa, Bacillus sp.
NGTMMQYFEWYLPNDGNHWNRLNSDASNLKSKGITAVWIPPAWKGASQNDVGYGAYDLYDLGEFNQKGTVRTKYGTRSQLQAAVTSLKNNGIQVYGDVVMNHKGGADATEMVRAVEVNPNNRYQEVTGEYTIEAWTRFDFPGRGNTHSSFKWRWYHFDGVDWDQSRRLNNRIYKFRAKEWDWEVDTEFGNYDYLMYADYDMDHPEVVNELRNWGVWYTNTLGLDGFRIDAVKHIKYSFTRDWINHVRSATGKNMFAVAEFWKNDLGAIENYLQKTNWNHSVFDVPLHYNLYNASKSGGNYDMRNIFNGTVVQRHPSHAVTFVDNHDSQPEEALESFVEEWFKPLAYALTLTREQGYPSVFYGDYYGIPTHGVPAMRSKIDPILEARQKYAYGPQHDYLDHPDVIGWTREGDSSHPKSGLATLITDGPGGSKRMYAGLKNAGETWYDITGNRSDTVKIGSDGWGEFHVNDGSVSIYVQK

SEQ ID NO: 41822 - protein, 478 aa, Bacillus sp.
NGTMMQYFEWYLPNDGNHWNRLNSDASNLKSKGITAVWIPPAWKAVSQNDVGYGAYDLYDLGEFNQKGTVRTKYGTRSQLQAAVTSLKNNGIQVYGDVVMNHKGGADATEMVRAVEVNPNNRNQEVTGEYTIEAWTRFDFPGRGNTHSSFKWRWYHFDGVDWDQSRRFDNRIYKFRGKAWDWEVDTEFGNYDYLMYADYDMDHPEVVNELRNWGVWYTNTLGLDGFRIDAVKHIKYSFTRDWINHVRSATGKNMFAVAEFWKNDLGAIENYLQKTNWNHSVFDVPLHYNLYNASKSGGNYDMRNIFNGTVVQANPNHAVTFVDNHDSQPEEALESFVEEWFKPLAYALTLTREQGYPSVFYGDYYGIPTHGVPAMRSKIDPILEARQKYAYGPQHDYLDHPDVIGWTREGDSSHPKSGLATLITDGPGGSKRMYAGLKNAGETWYDITGNRSDTVKIGSDGWGEFHVNDGSVSIYVQK

SEQ ID NO: 41823 - protein, 478 aa, Bacillus sp.
NGTMMQYFEWYLPNDGNHWNRLNSDASNLKSKGITAVWIPPAWKAASQNDVGYGAYDLYDLGEFNQKGTVRTKYGTRSQLQAAVTSLKNNGIQVYGDVVMNHKGGADATEMVRAVEVNPNNRNQEVTGEYTIEAYTRFDFPGRGNTHSSFKWRWYHFDGVDWDQSRNLNNRIYKFRGKAWDWEVDTEFGNYDYLMYTDYDMDHPEVVNELRNWGVWYTNTLGLDGFRIDAVKHIKYSFTRDWINHVRSATGKNMFAVAEFWKNDLGAIENYLQKTNWNHSVFDVPLHYNLYNASKSGGNYDMRNIFNGTVVQRHPSHAVTFVDNHDSQPEEALESFVEEWFKPLAYALTLTREQGYPSVFYGDYYGIPTHGVPAMRSKIDPILEARQKYAYGPQHDYLDHPDVIGWTREGDSSHPKSGLATLITDGPGGSKRMYAGLKNAGETWYDITGNRSDTVKIGSDGWGEFHVNDGSVSIYVQK

SEQ ID NO: 41824 - protein, 478 aa, Bacillus sp.
NGTMMQYFEWYLPNDGNHWNRLNSDASNLKSKGITAVWIPPAWKAVSQNDVGYGAYDLYDLGEFNQKGTVRTKYGTRSQLQAAVTSLKNNGIQVYGDVVMNHKGGADATEMVRAVEVNPNNRNQEVTGEYTIEAYTRFDFPGRGNTHSSFKWRWYHFDGVDWDQSRNLTNRIYKFRGKAWDWEVDTEFGNYDYLMYTDYDMDHPEVVNELRNWGVWYTNTLGLDGFRIDAVKHIKYSFTRDWINHVRSATGKNMFAVAEFWKNDLGAIENYLQKTNWNHSVFDVPLHYNLYNASKSGGNYDMRNIFNGTVVQRHPSHAVTFVDNHDSQPEEALESFVEEWFKPLAYALTLTREQGYPSVFYGDYYGIPTHGVPAMRSKIDPILEARQKYAYGPQHDYLDHPDVIGWTREGDSSHPKSGLATLITDGPGGSKRMYAGLKNAGETWYDITGNRSDTVKIGSDGWGEFHVNDGSVSIYVQK

SEQ ID NO: 41825 - protein, 478 aa, Bacillus sp.
NGTMMQYFEWYLPNDGNHWNRLNSDASNLKSKGITAVWIPPAWKATSQNDVGYGAYDLYDLGEFNQKGTVRTKYGTRSQLQAAVTSLKNNGIQVYGDVVMNHKGGADATEMVRAVEVNPNNRNQEVTGEYTIEAWTRFDFPGRGNTHSSFKWRWYHFDGVDFDQSRNVNNRIYKFRGKAWDWEVDTEFGNYDYLMYADYDMDHPEVVNELRNWGVWYTNTLGLDGFRIDAVKHIKYSFTRDWINHVRSATGKNMFAVAEFWKNDLGAIENYLQKTNWNHSVFDVPLHYNLYNASKSGGNYDMRNIFNGTVVQAHPNHAVTFVDNHDSQPEEALESFVEEWFKPLAYALTLTREQGYPSVFYGDYYGIPTHGVPAMRSKIDPILEARQKYAYGPQHDYLDHPDVIGWTREGDSSHPKSGLATLITDGPGGSKRMYAGLKNAGETWYDITGNRSDTVKIGSDGWGEFHVNDGSVSIYVQK

SEQ ID NO: 41826 - protein, 478 aa, Bacillus sp.
NGTMMQYFEWYLPNDGNHWNRLNSDASNLKSKGITAVWIPPAWKAVSQNDVGYGAYDLYDLGEFNQKGTVRTKYGTRSQLQAAVTSLKNNGIQVYGDVVMNHKGGADATEMVRAVEVNPNNRNQEVTGEYTIEAWTRFDFPGRGNTHSSFKWRWYHFDGVDWDQSRNLTNRIYKFRGKAWDWEVDTEFGNYDYLMYTDYDMDHPEVVNELRNWGVWYTNTLGLDGFRIDAVKHIKYSFTRDWINHVRSATGKNMFAVAEFWKNDLGAIENYLQKTNWNHSVFDVPLHYNLYNASKSGGNYDMRNIFNGTVVQAHPNHAVTFVDNHDSQPEEALESFVEEWFKPLAYALTLTREQGYPSVFYGDYYGIPTHGVPAMRSKIDPILEARQKYAYGPQHDYLDHPDVIGWTREGDSSHPKSGLATLITDGPGGSKRMYAGLKNAGETWYDITGNRSDTVKIGSDGWGEFHVNDGSVSIYVQK

SEQ ID NO: 41827 - protein, 478 aa, Bacillus sp.
NGTMMQYFEWYLPNDGNHWNRLNSDASNLKSKGITAVWIPPAWKAVSQNDVGYGAYDLYDLGEFNQKGTVRTKYGTRSQLQAAVTSLKNNGIQVYGDVVMNHKGGADATEMVPAVEVNPNNRNQEVTGEYTIEAWTRFDFPGRGNTHSSFKWRWYHFDGVDWDQSRNLTNRIYKFRSKAWDWEVDTEFGNYDYLMYTDYDMDHPEVVNELRNWGVWYTNTLGLDGFRIDAVKHIKYSFTRDWINHVRSATGKNMFAVAEFWKNDLGAIENYLQKTNWNHSVFDVPLHYNLYNASKSGGNYDMRNIFNGTVVQRHPSHAVTFVDNHDSQPEEALESFVEEWFKPLAYALTLTREQGYPSVFYGDYYGIPTHGVPAMRSKIDPILEARQKYAYGPQHDYLDHPDVIGWTREGDSSHPKSGLATLITDGPGGSKRMYAGLKNAGETWYDITGNRSDTVKIGSDGWGEFHVNDGSVSIYVQK

SEQ ID NO: 41828 - protein, 478 aa, Bacillus sp.
NGTMMQYFEWYLPNDGNHWNRLNSDASNLKSKGITAVWIPPAWKGASQNDVGYGAYDLYDLGEFNQKGTVRTKYGTRSQLQAAVTSLKNNGIQVYGDVVMNHKGGANATEMVRAVEVNPNNRNQEVTGEYTIEAWTRFDFPGRGNTHSSFKWRWYHFDGVDWDQSRRLNNRIYKFRGKAWDWEVDTEFGNYDYLMYADYDMDHPEVVNELRNWGVWYTNTLGLDGFRIDAVKHIKYSFTRDWINHVRSATGKNMFAVAEFWKNDLGAIENYLQKTNWNHSVFDVPLHYNLYNASKSGGNYDMRNIFNGTVVQMHPMHAVTFVDNHDSQPEEALESFVEEWFKPLAYALTLTREQGYPSVFYGDYYGIPTHGVPAMRSKIDPILEARQKYAYGPQHDYLDHPDVIGWTREGDSSHPKSGLATLITDGPGGSKRMYAGLKNAGGTWYDITGNRSDTVKIGSDGWGEFHVNDGSVSIYVQK

SEQ ID NO: 41829 - protein, 478 aa, Bacillus sp.
NETMMQYFEWYLPNDGNHWNRLNSDASNLKSKGITAVWIPPAWKGASQNDVGYGAYDLYDLGEFNQKGTVRTKYGTRSQLQAAVTSLKNNGIAVYGDVVMNHKGGADATEMVRAVEVNPNNRNQEVTGEYTIEAWTRFDFPGRGNTHSSFKWRWYHFDGVDWDQSRRLNNRIYKFRGKAWDWEVDTEFGNYDYLMYADYDMDHPEVVNELRNWGVWYTNTLGLDGFRIDAVKHIKYSFTRDWINHVRSATGKNMFAVAEFWKNDLGAIENYLQKTNWNHSVFDVPLHYNLYNASKSGGNYDMRNIFNGTVVQMHPSHAVTFVDNHDSQPEEALESFVEEWFKPLAYALTLTREQGYPSVFYGDYYGIPTHGVPAMRSKIDPILEARQKYAYGPQHDYLDHPDVIGWTREGDSSHPKSGLATLITDGPGGSKRMYAGLKNAGETWYDITGNRSDTVKIGSDGWGEFHVNDGSVSIYVQK

SEQ ID NO: 41830 - protein, 478 aa, Bacillus sp.
NGTMMQYFEWYLPNDGNHWNRLNSDASNLKSKGITAVWIPPAWKAVSQNDVGYGAYDLYDLGEFNQKGTVRTKYGTRSQLQAAVTSLKNNGIQVYGDVVMNHKGGADATEMVRAVEVNPNNRNQEVTGEYTIEAWTRFDFPGRGNTHSSFKWRWYHFDGVDWDQSRDLENRIYKFRGKAWDWEVDTEFGNYDYLMYADYDMDHPEVVNELRNWGVWYTNTLGLDGFRIDAVKHIKYSFTRDWINHVRSATGKNMFAVAEFWKNDLGAIENYLQKTNWNHSVFDVPLHYNLYNASKSGGNYDMRNIFNETVVQAHPNHAVTFVDNHDSQPEEALESFVEEWFKPLAYALTLTREQGYPSVFYGDYYGIPTHGVPAMRSKIDPILEARQKYAYGPQHDYLDHPDVIGWTREGDSSHPKSGLATLITDGPGGSKRMYAGLKNAGETWYDITGNRSDTVKIGSDGWGEFHVNDGSVSIYVQK

SEQ ID NO: 41831 - protein, 478 aa, Bacillus sp.
NQTMMQYFEWYLPNDGNHWNRLNSDASNLKSKGITAVWIPPAWKGASQNDVGYGAYDLYDLGEFNQKGTVRTKYGTRSQLQAAVTSLKNNGISVYGDVVMNHKGGADATEMVRAVEVNPNNRNQEVTGEYTIEAWTRFDFPGRGNTHSSFKWRWYHFDGVDWDQSRRLNNRIYKFRGKAWDWEVDTEFGNYDYLMYADYDMDHPEVVNELRNWGVWYTNTLGLDGFRIDAVKHIKYSFTRDWINHVRSATGKNMFAVAEFWKNDLGAIENYLQKTNWNHSVFDVPLHYNLYNASKSGGNYDMRNIFNGTVVQSHPSQAVTFVDNHDSQPEEALESFVEEWFKPLAYALTLTREQGYPSVFYGDYYGIPTHGVPAMRSKIDPILEARQKYAYGPQHDYLDHPDVIGWTREGDSSHPKSGLATLITDGPGGSKRMYAGLKNAGETWYDITGNRSDTVKIGSDGWGEFHVNDGSVSIYVQK

SEQ ID NO: 41832 - protein, 478 aa, Bacillus sp.
NGTMMQYFEWYLPNDGNHWNRLNSDASNLKSKGITAVWIPPAWKATSQNDVGYGAYDLYDLGEFNQKGTVRTKYGTRSQLQAAVTSLKNNGIQVYGDVVMNHKGGADATEMVRAVEVNPNNRNQEVTGEYTIEAYTRFDFSGRGNTHSSFKWRWYHFDGVDWDQSRDLNNRIYKFRGKAWDWEVDTEFGNYDYLMYADYDMDHPEVVNELRNWGVWYTNTLGLDGFRIDAVKHIKYSFTRDWINHVRSATGKNMFAVAEFWKNDLGAIENYLQKTNWNHSVFDVPLHYNLYNASKSGGNYDMRNIFNGTVVQRHPSHAVTFVDNHDSQPEEALESFVEEWFKPLAYALTLTREQGYPSVFYGDYYGIPTHGVPAMRSKIDPILEARQKYAYGPQHDYLDHPDVIGWTREGDSSHPKSGLATLITDGPGGSKRMYAGLKNAGETWYDITGNRSDTVKIGSDGWGEFHVNDGSVSIYVQK

SEQ ID NO: 41833 - protein, 478 aa, Bacillus sp.
NGTMMQYFEWYLPNDGNHWNRLNSDASNLKSKGITAVWIPPAWKAASQNDVGYGAYDLYDLGEFNQKGTVRTKYGTRSQLQAAVTSLKNNGIQVYGDVVMNHKGGADATEMVRAVEVNPNNRNQEVTGEYTIEAWTRFDFPGRGNTHSSFKWRWYHFDGVDWDQSRNLNNRIYKFRGKAWDWEVDTEFGNYDYLMYTDYDYDHPESTNEMRNWGVWYTNTLGLDGFRIDAVKHIKYSFTRDWINHVRSATGKNMFAVAEFWKNDLGAIENYLQKTNWNHSVFDVPLHYNLYNASKSGGNYDMRNIFNGTVVQRHPSHAVTFVDNHDSQPEEALESFVEEWFKPLAYALTLTREQGYPSVFYGDYYGIPTHGVPAMRSKIDPILEARQKYAYGPQHDYLDHPDVIGWTREGDSSHPKSGLATLITDGPGGSKRMYAGLKNAGETWYDITGNRSDTVKIGSDGWGEFHVNDGSVSIYVQK

SEQ ID NO: 41834 - protein, 478 aa, Bacillus sp.
NGTMMQYFEWYLPNDGNHWNRLNSDASNLKSKGITAVWIPPAWKAASQNDVGYGAYDLYDLGEFNQKGTVRTKYGTRSQLQAAVTSLKNNGIQVYGDVVMNHKGGADLTEMVRAVEVNPNNRNQEVTGEYTIEAWTRFDFPGRGNTHSSFKWRWYHFDGVDFDQSRQLNNRIYKFRGKAWDWEVDTEFGNYDYLMYADYDMDHPEVVNELRNWGVWYTNTLGLDGFRIDAVKHIKYSFTRDWINHVRSATGKNMFAVAEFWKNDLGAIENYLQKTNWNHSVFDVPLHYNLYNASKSGGNYDMRNIFNGTVVQRHPSHAVTFVDNHDSQPEEALESFVEEWFKPLAYALTLTREQGYPSVFYGDYYGIPTHGVPAMRSKIDPILEARQKYAYGPQHDYLDHPDVIGWTREGDSSHPKSGLATLITDGPGGSKRMYAGLKNAGETWYDITGNRSDTVKIGSDGWGEFHVNDGSVSIYVQK

SEQ ID NO: 41835 - protein, 478 aa, Bacillus sp.
NGTMMQYFEWYLPNDGNHWNRLNSDASNLKSKGITAVWIPPAWKGASQNDVGYGAYDLYDLGEFNQKGTVRTKYGTRSQLQAAVTSLKNNGIQVYGDVVMNHKGGADATEMVRAVEVNPNNRNQEVTGEYTIEAYTRFDFPGRGNTHSSFKWRWYHFDGVDFDQSRRLNNRIYKFRGKAWDWEVDTEFGNYDYLMYADYDMDHPEVVNELRNWGVWYTNTLGLDGFRIDAVKHIKYSFTRDWINHVRIATGKNMFAVAEFWKNDLGAIENYLQKTNWNHSVFDVPLHYNLYNASKSGGNYDMRNIFNGTVVQRHPSHAVTFVDNHDSQPEEALESFVDEWFKPLAYALTLTREQGYPSVFYGDYYGIPTHGVPAMRSKIDPILEARQKYAYGPQHDYLDHPDVIGWTREGDSSHPKSGLATLITDGPGGSKRMYAGLKNAGETWYDITGNRSDTVKIGSDGWGEFHVNDQSVSIYVQK

SEQ ID NO: 41836 - protein, 478 aa, Synthetic construct
NGTMMQYFEWYLPNDGNHWNRLNSDASNLKSKGITAVWIPPAWKGASQNDVGYGAYDLYDLGEFNQKGTVRTKYGTRSQLQAAVTSLKNNGIQVYGDVVMNHKGGADATEMVRAVEVNPNNRNQEVTGEYTIEAWTRFDFPGRGNTHSSFKWRWYHFDGVDWDQSRRLNNRIYLFRCKKWDWPVDTENGNYDYLMYADIDMDHPEVVNELRNWGVWYTNTLGLDGFRIDAVKHIKYSFTRDWINHVRSATGKNMFAVAEFWKNDLGAIENYLQKTNWNHSVFDVPLHYNLYNASKSGGNYDMRNIFNGTVVQRHPSHAVTFVDNHDSQPEEALESFVEEWFKPLAYALTLTREQGYPSVFYGDYYGIPTHGVPAMRSKIDPILEARQKYAYGPQHDYLDHPDVIGWTREGDSSHPKSGLATLITDGPGGSKRMYAGLKNAGETWYDITGNRSDTVKIGSDGWGEFHVNDGSVSIYVQK

SEQ ID NO: 41837 - protein, 478 aa, Bacillus sp.
NGTMMQYFEWYLPNDGNHWNRLNSDASNLKSKGITAVWIPPAWKATSQNDVGYGAYDLYDLGEFNQKGTVRTKYGTRSQLQAAVTSLKNNGIQVYGDVVMNHKGGADATEMVRAVEVNPNNRNQEVTGEYTIEAWTRFDFPGRGNTHSSFKWRWYHFDGVDWDMSRELSNRIYKFRGKAWDWEVDTEFGNYDYLMYADYDYDHPETTNEMRNWGVWYTNTLGLDGFRIDAVKHIKYSFTRDWINHVRSATGKNMFAVAEFWKNDLGAIENYLQKTNWNHSVFDVPLHYNLYNASKSQGNYDMRNIFNGTVVQRHPSHAVTFVDNHDSQPEEALESFVDTWFKPLAYALTLTREQGYPSVFYGDYYGIPTHGVPAMRSKIDPILEARQKYAYGPQHDYLDHPDVIGWTREGDSSHPKSGLATLITDGPGGSKRMYAGLKNAGETWYDITGNRSDTVKIGSDGWGEFHVNGSSVSIYVQK

SEQ ID NO: 41838 - protein, 478 aa, Bacillus sp.
NGTMMQYFEWYLPNDGNHWNRLNSDASNLKSKGITAVWIPPAWKAASQNDVGYGAYDLYDLGEFNQKGTVRTKYGTRSQLQAAVTSLKNNGIQVYGDVVMNHKGGADATEMVRAVEVNPNNRNQEVTGEYTIEAWTRFDFPGRGNTHSSFKWRWYHFDGVDWDQSRDLQNRIYKFRGKAWDWEVDTEFGNYDYLMYVDYDMDHPEVVNELRNWGVWYTNTLGLDGFRIDAVKHIKYSFTRDWINHVRSATGKNMFAVAEFWKNDLGAIENYLQKTNWNHSVFDVPLHYNLYNASKSGGNYDMRNIFNGTVVQRHPSHAVTFVDNHDSQPEEALESFVDPWFKPLAYALTLTREQGYPSVFYGDYYGIPTHGVPAMRSKIDPILEARQKYAYGPQHDYLDHPDVIGWTREGDSSHPKSGLATLITDGPGGSKRMYAGLKNAGETWYDITGNRSDTVKIGSDGWGEFHVNGGSVSIYVQK

SEQ ID NO: 41839 - protein, 478 aa, Bacillus sp.
NGTMMQYFEWYLPNDGNHWNRLNSDASNLKSKGITAVWIPPAWKGASQNDVGYGAYDLYDLGEFNQKGTVRTKYGTRSQLQAAVTSLKNNGIQVYGDVVMNHKGGADATEMVRAVEVNPNNRNQEVTGEYTIEAWTRFDFPGRGNTHSSFKWRWYHFDGVDWDQSRNLNNRIYKFRGKAWDWEVDTEFGNYDYLMYADIDYDHPETTNEMRNWGVWYTNTLGLDGFRIDAVKHIKYSFTRDWINHVRSATGKNMFAVAEFWKNDLGAIENYLQKTNWNHSVFDVPLHYNLYNASKSQGNYDMRNIFNGTVVQRHPSHAVTFVDNHDSQPEEALESFVDTWFKPLAYALTLTREQGYPSVFYGDYYGIPTHGVPAMRSKIDPILEARQKYAYGPQHDYLDHPDVIGWTREGDSSHPKSGLATLITDGPGGSKRMYAGLKNAGETWYDITGNRSDTVKIGSDGWGEFHVNGSSVSIYVQK

SEQ ID NO: 41840 - protein, 478 aa, Bacillus sp.
NGTMMQYFEWYLPNDGNHWNRLNSDASNLKSKGITAVWIPPAWKGASQNDVGYGAYDLYDLGEFNQKGTVRTKYGTRSQLQAAVTSLKNNGIQVYGDVVMNHKGGADATEMVRAVEVNPNNRNQEVTGEYTIEAWTRFDFPGRGNTHSSFKWRWYHFDGVDWDQSRRLNNRIYKFRGKAWDWEVDTEFGNYDYLMYADYDMDHPEVVNELRNWGVWYTNTLGLDGFRIDAVKHIKYSFTRDWINHVRSATGKNMFAVAEFWKNDLGAIENYLQKTNWNHSVFDVPLHYNLYNASKSQGNYDMRNIFNGTVVQRHPSHAVTFVDNHDSQPEEALESFVEPWFKPLAYALTLTREQGYPSVFYGDYYGIPTHGVPAMRSKIDPILEARQKYAYGPQHDYLDHPDVIGWTREGDSSHPKSGLATLITDGPGGSKRMYAGLKNAGETWYDITGNRSDTVKIGSDGWGEFHVNKASVSIYVQK

SEQ ID NO: 41841 - protein, 478 aa, Bacillus sp.
NGTMMQYFEWYLPNDGNHWNRLNSDASNLKSKGITAVWIPPAWKGASQNDVGYGAYDLYDLGEFNQKGTVRTKYGTRSQLQAAVTSLKNNGIQVYGDVVMNHKGGADATEMVRAVEVNPNNRNQEVTGEYTIEAWTRFDFPGRGNTHSSFKWRWYHFDGVDWDQSRRLNNRIYKFRGKAWDWEVDTEFGNYDYLMYADYDMDHPEVVNELRNWGVWYTNTLGLDGFRIDAVKHIKYSFTRDWINHVRSATGKNMFAVAEFWKNDLGAIENYLQKTNWNHSVFDVPLHYNLYNASKSGGNYDMRNIFNGTVVQANPNHAVTFVDNHDSQPEEALESFVDPWFKPLAYALTLTREQGYPSVFYGDYYGIPTHGVPAMRSKIDPILEARQKYAYGPQHDYLDHPDVIGWTREGDSSHPKSGLATLITDGPGGSKRMYAGLKNAGETWYDITGNRSDTVKIGSDGWGEFHVNGGSVSIYVQK

SEQ ID NO: 41842 - protein, 478 aa, Bacillus sp.
NQTMMQYFEWYLPNDGNHWNRLNSDASNLKSKGITAVWIPPAWKGASQNDVGYGAYDLYDLGEFNQKGTVRTKYGTRSQLHAAVTSLKNNGIQVYGDVVMNHKGGADATEMVRAVEVNPNNRNQEVTGEYTIEAWTRFDFPGRGNTHSSFKWRWYHFDGVDWDQSRRLNNRIYKFRGKAWDWEVDTEFGNYDYLMYADYDMDHPEVVNELRNWGVWYTNTLGLDGFRIDAVKHIKYSFTRDWINHVRSATGKNMFAVAEFWKNDLGAIENYLQKTNWNHSVFDVPLHYNLYNASKSGGNYDMRNIFNGTVVQAHPMHAVTFVDNHDSQPEEALESFVEEWFKPLAYALTLTREQGYPSVFYGDYYGIPTHGVPAMRSKIDPILEARQKYAYGPQHDYLDHPDVIGWTREGDSSHPKSGLATLITDGPGGSKRMYAGLKNAGETWYDITGNRSDTVKIGSDGWGEFHVNDGSVSIYVQK

SEQ ID NO: 41843 - protein, 478 aa, Bacillus sp.
NGTMMQYFEWYLPNDGNHWNRLNSDASNLKSKGITAVWIPPAWKGASQNDVGYGAYDLYDLGEFNQKGTVRTKYGTRSQLQAAVTSLKNNGIQVYGDVVMNHKGGADATEMVRAVEVNPNNRNQEVTGEYTIEAWTRFDFPGRGNTHSSFKWRWYHFDGVDWDQSRRLNNRIYKFRGKAWDWEVDTEFGNYDYLMYADYDMDHPEVVNELRNWGVWYTNTLGLDGFRIDAVKHIKYSFTRDWINHVRSATGKNMFAVAEFWKNDLGAIENYLQKTNWNHSVFDVPLHYNLYNASKSAGNYDMRNIFNGTVVQRHPSHAVTFVDNHDSQPEEALESFVDEWFKPLAYALTLTREQGYPSVFYGDYYGIPTHGVPAMRSKIDPILEARQKYAYGPQHDYLDHPDVIGWTREGDSSHPKSGLATLITDGPGGSKRMYAGLKNAGETWYDITGNRSDTVKIGSDGWGEFHVNQASVSIYVQK

SEQ ID NO: 41844 - protein, 478 aa, Bacillus sp.
NHTMMQYFEWYLPNDGNHWNRLNSDASNLKSKGITAVWIPPAWKGASQNDVGYGAYDLYDLGEFNQKGTVRTKYGTRSQLQAAVTSLKNNGISVYGDVVMNHKGGADATEMVRAVEVNPNNRNQEVTGEYTIEAWTRFDFPGRGNTHSSFKWRWYHFDGVDWDQSRRLNNRIYKFRGKAWDWEVDTEFGNYDYLMYADYDMDHPEVVNELRNWGVWYTNTLGLDGFRIDAVKHIKYSFTRDWINHVRSATGKNMFAVAEFWKNDLGAIENYLQKTNWNHSVFDVPLHYNLYNASKSGGNYDMRNIFNGTVVQAHPMLAVTFVDNHDSQPEEALESFVEEWFKPLAYALTLTREQGYPSVFYGDYYGIPTHGVPAMRSKIDPILEARQKYAYGPQHDYLDHPDVIGWTREGDSSHPKSGLATLITDGPGGSKRMYAGLKNAGETWYDITGNRSDTVKIGSDGWGEFHVNDGSVSIYVQK

SEQ ID NO: 41845 - protein, 478 aa, Bacillus sp.
NGTMMQYFEWYLPNDGNHWNRLNSDASNLKSKGITAVWIPPAWKAVSQNDVGYGAYDLYDLGEFNQKGTVRTKYGTRSQLQAAVTSLKNNGIQVYGDVVMNHKGGADLTEMVRAVEVNPNNRNQEVTGEYTIEAWTRFDFPGRGNTHSSFKWRWYHFDGVDWDQSREFTNRIYKFRGKAWDWEVDTEFGNYDYLMYVDYDMDHPEVVNELRNWGVWYTNTLGLDGFRIDAVKHIKYSFTRDWINHVRSATGKNMFAVAEFWKNDLGAIENYLQKTNWNHSVFDVPLHYNLYNASKSGGNYDMRNIFNGTVVQRHPSHAVTFVDNHDSQPEEALESFVEEWFKPLAYALTLTREQGYPSVFYGDYYGIPTHGVPAMRSKIDPILEARQKYAYGPQHDYLDHPDVIGWTREGDSSHPKSGLATLITDGPGGSKRMYAGLKNAGETWYDITGNRSDTVKIGSDGWGEFHVNDGSVSIYVQK

SEQ ID NO: 41846 - protein, 478 aa, Bacillus sp.
NGTMMQYFEWYLPNDGNHWNRLNSDASNLKSKGIKAVWIPPAWKAVSQNDVGYGAYDLYDLGEFNQRGTVRTKYGTRSQLQAAVTSLKNNGIQVYGDVVMNHKGGADATEMVRAVEVNPNNRNQEVTGEYTIEAWTRFDFPGRGNTHSSFKWRWYHFDGVDFDQSRELSNRIYKFRGKAWDWEVDTEFGNYDYLMYADYDMDHPEVVNELRNWGVWYTNTLGLDGFRIDAVKHIKYSFTRDWINHVRSATGKNMFAVAEFWKNDLGAIENYLQKTNWNHSVFDVPLHYNLYNASKSGGNYDMRNIFNGTVVQRHPSHAVTFVDNHDSQPEEALESFVEEWFKPLAYALTLTREQGYPSVFYGDYYGIPTHGVPAMRSKIDPILEARQKYAYGPQHDYLDHPDVIGWTREGDSSHPKSGLATLITDGPGGSKRMYAGLKNAGETWYDITGNRSDTVKIGSDGWGEFHVNDGSVSIYVQK

SEQ ID NO: 41847 - protein, 478 aa, Bacillus sp.
NGTMMQYFEWYLPNDGNHWNRLNSDASNLKSKGITAVWIPPAWKAASQNDVGYGAYDLYDLGEFNQKGTVRTKYGTRSQLQAAVTSLKNNGIQVYGDVVMNHKGGADATEMVRAVEVNPNNRNQEVTGEYTIEAWTRFDFPGRGNTHSSFKWRWYHFDGVDWDQSRRTENRIYKFRGKAWDWEVDTEFGNYDYLMYTDYDMDHPEVVNELRNWGVWYTNTLGLDGFRIDAVKHIKYSFTRDWINHVRSATGKNMFAVAEFWKNDLGAIENYLQKTNWNHSVFDVPLHYNLYNASKSGGNYDMRNIFNGTVVQRHPSHAVTFVDNHDSQPEEALESFVDEWFKPLAYALTLTREQGYPSVFYGDYYGIPTHGVPAMRSKIDPILEARQKYAYGPQHDYLDHPDVIGWTREGDSSHPKQGLATLITDGPGGSKRMYAGLKNAGETWYDITGNRSDTVKIGSDGWGEFHVNDGSVSIYVQK

SEQ ID NO: 41848 - protein, 478 aa, Bacillus sp.
NGTMMQYFEWYLPNDGNHWNRLNSDASNLKSKGITAVWIPPAWKGASQNDVGYGAYDLYDLGEFNQKGTVRTKYGTRSQLQAAVTSLKNNGIQVYGDVVMNHKGGADATEMVRAVEVNPNNRNQEVTGEYTIEAWTRFDFPGRGNTHSSFKWRWYHFDGVDWDQSRRLNNRIYKFRGKAWDWEVDTEFGNYDYLMYADYDMDHPEVVNELRNWGVWYTNTLGLDGFRIDAVKHIKYSFTRDWINHVRSATGKNMFAVAEFWKNDLGAIENYLQKTNWNHSVFDVPLHYNLYNASKSQGNYDMRNIFNGTVVQRHPSHAVTFVDNHDSQPEEALESFVEEWFKPLAYALTLTREQGYPSVFYGDYYGIPTHGVPAMRSKIDPILEARQKYAYGPQHDYLDHPDVIGWTREGDSSHPKSGLATLITDGPGGSKRMYAGLKNAGETWYDITGNRSDTVKIGSDGWGEFHVNGKSVSIYVQK

SEQ ID NO: 41849 - protein, 478 aa, Bacillus sp.
NGTMMQYFEWYLPNDGNHWNRLNSDASNLKSKGITAVWIPPAWKGASQNDVGYGAYDLYDLGEFNQKGTVRTKYGTRSQLQAAVTSLKNNGIQVYGDVVMNHKGGADATEMVRAVEVNPNNRNQEVTGEYTIEAWTRFDFPGRGNTHSSFKWRWYHFDGVDWDQSRRLNNRIYKFRGKAWDWEVDTEFGNYDYLMYADYDMDHPEVVNELRNWGVWYTNTLGLDGFRIDAVKHIKYSFTRDWINHVRSATGKNMFAVAEFWKNDLGAIENYLQKTNWNHSVFDVPLHYNLYNASKSQGNYDMRNIFNGTVVQRHPSHAVTFVDNHDSQPEEALESFVEPWFKPLAYALTLTREQGYPSVFYGDYYGIPTHGVPAMRSKIDPILEARQKYAYGPQHDYLDHPDVIGWTREGDSSHPKSGLATLITDGPGGSKRMYAGLKNAGETWYDITGNRSDTVKIGSDGWGEFHVNGKSVSIYVQK

SEQ ID NO: 41850 - protein, 478 aa, Bacillus sp.
NGTMMQYFEWYLPNDGNHWNRLNSDASNLKSKGITAVWIPPAWKGASQNDVGYGAYDLYDLGEFNQKGTVRTKYGTRSQLQAAVTSLKNNGIQVYGDVVMNHKGGADATEMVRAVEVNPNNRNQEVTGEYTIEAYTRFDFPGRGNTHSSFKWRWYHFDGVDWDQSRNFQNRIYKFRGKAWDWEVDTEFGNYDYLMYADYDMDHPEVVNELRNWGVWYTNTLGLDGFRIDAVKHIKYSFTRDWINHVRSATGKNMFAVAEFWKNDLGAIENYLQKTNWNHSVFDVPLHYNLYNASKSQGNYDMRNIFNGTVVQRHPSHAVTFVDNHDSQPEEALESFVDTWFKPLAYALTLTREQGYPSVFYGDYYGIPTHGVPAMRSKIDPILEARQKYAYGPQHDYLDHPDVIGWTREGDSSHPKSGLATLITDGPGGSKRMYAGLKNAGETWYDITGNRSDTVKIGSDGWGEFHVNGSSVSIYVQK

SEQ ID NO: 41851 - protein, 478 aa, Bacillus sp.
NGTMMQYFEWYLPNDGNHWNRLNSDASNLKSKGITAVWIPPAWKGASQNDVGYGAYDLYDLGEFNQKGTVRTKYGTRSQLQAAVTSLKNNGIQVYGDVVMNHKGGADATEMVRAVEVNPNNRNQEVTGEYTIEAWTRFDFPGRGNTHSSFKWRWYHFDGVDWDQSRELSNRIYKFRGKAWDWEVDTEFGNYDYLMYADYDMDHPEVVNELRNWGVWYTNTLGLDGFRIDAVKHIKYSFTRDWINHVRSATGKNMFAVAEFWKNDLGAIENYLQKTNWNHSVFDVPLHYNLYNASKSQGNYDMRNIFNGTVVQANPNHAVTFVDNHDSQPEEALESFVDTWFKPLAYALTLTREQGYPSVFYGDYYGIPTHGVPAMRSKIDPILEARQKYAYGPQHDYLDHPDVIGWTREGDSSHPKSGLATLITDGPGGSKRMYAGLKNAGETWYDITGNRSDTVKIGSDGWGEFHVNGSSVSIYVQK

SEQ ID NO: 41852 - protein, 478 aa, Bacillus sp.
NGTMMQYFEWYLPNDGNHWNRLNSDASNLKSKGITAVWIPPAWKATSQNDVGYGAYDLYDLGEFNQKGTVRTKYGTRSQLQAAVTSLKNNGIQVYGDVVMNHKGGADATEMVRAVEVNPNNRNQEVTGEYTIEAWTRFDFPGRGNTHSSFKWRWYHFDGVDWDQSRDLNNRIYKFRGKAWDWEVDTEFGNYDYLMYADYDMDHPEVVNELRNWGVWYTNTLGLDGFRIDAVKHIKYSFTRDWINHVRSATGKNMFAVAEFWKNDLGAIENYLQKTNWNHSVFDVPLHYNLYNASKSGGNYDMRNIFNGTVVQRHPSHAVTFVDNHDSQPEEALESFVDEWFKPLAYALTLTREQGYPSVFYGDYYGIPTHGVPAMRSKIDPILEARQKYAYGPQHDYLDHPDVIGWTREGDSSHPKSGLATLITDGPGGSKRMYAGLKNAGETWYDITGNRSDTVKIGSDGWGEFHVNKSSVSIYVQK

SEQ ID NO: 41853 - protein, 478 aa, Bacillus sp.
NQTMMQYFEWYLPNDGNHWNRLNSDASNLKSKGITAVWIPPAWKGASQNDVGYGAYDLYDLGEFNQKGTVRTKYGTRSQLQAAVTSLKNNGIQVYGDVVMNHKGGADATEMVRAVEVNPNNRNQEVTGEYTIEAWTRFDFPGRGNTHSSFKWRWYHFDGVDWDQSRRLNNRIYKFRGKAWDWEVDTEFGNYDYLMYADYDMDHPEVVNELRNWGVWYTNTLGLDGFRIDAVKHIKYSFTRDWINHVRSATGKNMFAVAEFWKNDLGAIENYLQKTNWNHSVFDVPLHYNLYNASKSGGNYDMRNIFNGTVVQAQPMHAVTFVDNHDSQPEEALESFVEEWFKPLAYALTLTREQGYPSVFYGDYYGIPTHGVPAMRSKIDPILEARQKYAYGPQHDYLDHPDVIGWTREGDSSHPKSGLATLITDGPGGSKRMYAGLKNAGETWYDITGNRSDTVKIGSDGWGEFHVNDGSVSIYVQK

SEQ ID NO: 41854 - protein, 478 aa, Bacillus sp.
NQTMMQYFEWYLPNDGNHWNRLNSDASNLKSKGITAVWIPPAWKGASQNDVGYGAYDLYDLGEFNQKGTVRTKYGTRSQLQAAVTSLKNNGIQVYGDVVMNHKGGADATEMVRAVEVNPNNRNQEVTGEYTIEAWTRFDFPGRGNTHSSFKWRWYHFDGVDWDQSRRLNNRIYKFRGKAWDWEVDTEFGNYDYLMYADYDMDHPEVVNELRNWGVWYTNTLGLDGFRIDAVKHIKYSFTRDWINHVRSATGKNMFAVAEFWKNDLGAIENYLQKTNWNHSVFDVPLHYNLYNASKSGGNYDMRNIFNGTVVQSNPSHAVTFVDNHDSQPEEALESFVEEWFKPLAYALTLTREQGYPSVFYGDYYGIPTHGVPAMRSKIDPILEARQKYAYGPQHDYLDHPDVIGWTREGDSSHPKSGLATLITDGPGGSKRMYAGLKNAGETWYDITGNRSDTVKIGSDGWGEFHVNDGSVSIYVQK

SEQ ID NO: 41855 - protein, 478 aa, Bacillus sp.
NGTMMQYFEWYLPNDGNHWNRLNSDASNLKSKGITAVWIPPAWKAASQNDVGYGAYDLYDLGEFNQKGTVRTKYGTRSQLQAAVTSLKNNGIQVYGDVVMNHKGGADLTEMVRAVEVNPNNRNQEVTGEYTIEAWTRFDFPGRGNTHSSFKWRWYHFDGVDFDQSRQITNRIYKFRGKAWDWEVDTEFGNYDYLMYTDYDMDHPEVVNELRNWGVWYTNTLGLDGFRIDAVKHIKYSFTRDWINHVRSATGKNMFAVAEFWKNDLGAIENYLQKTNWNHSVFDVPLHYNLYNASKSGGNYDMRNIFNGTVVQRHPSHAVTFVDNHDSQPEEALESFVEEWFKPLAYALTLTREQGYPSVFYGDYYGIPTHGVPAMRSKIDPILEARQKYAYGPQHDYLDHPDVIGWTREGDSSHPKSGLATLITDGPGGSKRMYAGLKNAGETWYDITGNRSDTVKIGSDGWGEFHVNDGSVSIYVQK

SEQ ID NO: 41856 - protein, 478 aa, Synthetic construct
NGTMMQYFEWYLPNDGNHWNRLNSDASNLKSKGITAVWIPPAWKGASQNDVGYGAYDLYDLGEFNQKGTVRTKYGTRSQLQAAVTSLKNNGIQVYGDVVMNHKGGADATEMVRAVEVNPNNRNQEVTGEYTIEAWTRFDFPGRGNTHSSFKWRWYHFDGVDWDQSRRLNNRIYLFRPKSWDWPVDTENGNYDYLMYADIDMDHPEVVNELRNWGVWYTNTLGLDGFRIDAVKHIKYSFTRDWINHVRSATGKNMFAVAEFWKNDLGAIENYLQKTNWNHSVFDVPLHYNLYNASKSGGNYDMRNIFNGTVVQRHPSHAVTFVDNHDSQPEEALESFVEEWFKPLAYALTLTREQGYPSVFYGDYYGIPTHGVPAMRSKIDPILEARQKYAYGPQHDYLDHPDVIGWTREGDSSHPKSGLATLITDGPGGSKRMYAGLKNAGETWYDITGNRSDTVKIGSDGWGEFHVNDGSVSIYVQK

SEQ ID NO: 41857 - protein, 478 aa, Bacillus sp.
NGTMMQYFEWYLPNDGNHWNRLNSDASNLKSKGITAVWIPPAWKAASQNDVGYGAYDLYDLGEFNQKGTVRTKYGTRSQLQAAVTSLKNNGIQVYGDVVMNHKGGADATEMVRAVEVNPNNRNQEVTGEYTIEAWTRFDFPGRGNTHSSFKWRWYHFDGVDWDQSRRLTNRIYKFRGKAWDWEVDTEFGNYDYLMYADYDMDHPEVVNELRNWGVWYTNTLGLDGFRIDAVKHIKYSFTRDWINHVRSATGKNMFAVAEFWKNDLGAIENYLQKTNWNHSVFDVPLHYNLYNASKSGGNYDMRNIFNGTVVQANPNHAVTFVDNHDSQPEEALESFVEEWFKPLAYALTLTREQGYPSVFYGDYYGIPTHGVPAMRSKIDPILEARQKYAYGPQHDYLDHPDVIGWTREGDSSHPKSGLATLITDGPGGSKRMYAGLKNAGETWYDITGNRSDTVKIGSDGWGEFHVNDGSVSIYVQK

SEQ ID NO: 41858 - protein, 478 aa, Bacillus sp.
NATMMQYFEWYLPNDGNHWNRLNSDASNLKSKGITAVWIPPAWKGASQNDVGYGAYDLYDLGEFNQKGTVRTKYGTRSQLQAAVTSLKNNGIQVYGDVVMNHKGGADATEMVRAVEVNPNNRNQEVTGEYTIEAWTRFDFPGRGNTHSSFKWRWYHFDGVDWDQSRRLNNRIYKFRGKAWDWEVDTEFGNYDYLMYADYDMDHPEVVNELRNWGVWYTNTLGLDGFRIDAVKHIKYSFTRDWINHVRSATGKNMFAVAEFWKNDLGAIENYLQKTNWNHSVFDVPLHYNLYNASKSGGNYDMRNIFNGTVVQSWPMHAVTFVDNHDSQPEEALESFVEEWFKPLAYALTLTREQGYPSVFYGDYYGIPTHGVPAMRSKIDPILEARQKYAYGPQHDYLDHPDVIGWTREGDSSHPKSGLATLITDGPGGSKRMYAGLKNAGETWYDITGNRSDTVKIGSDGWGEFHVNDGSVSIYVQK

SEQ ID NO: 41859 - protein, 478 aa, Bacillus sp.
NGTMMQYFEWYLPNDGNHWNRLNSDASNLKSKGITAVWIPPAWKGASQNDVGYGAYDLYDLGEFNQKGTVRTKYGTRSQLQAAVTSLKNNGIQVYGDVVMNHKGGADLTEMVRAVEVNPNNRNQEVTGEYTIEAWTRFDFPGRGNTHSSFKWRWYHFDGVDFDQSRQLNNRIYKFRGKAWDWEVDTEFGNYDYLMYADYDMDHPEVVNELRNWGVWYTNTLGLDGFRIDAVKHIKYSFTRDWINHVRSATGKNMFAVAEFWKNDLGAIENYLQKTNWNHSVFDVPLHYNLYNASKSGGNYDMRNIFNGTVVQRHPSHAVTFVDNHDSQPEEALESFVEEWFKPLAYALTLTREQGLPSVFYGDYYGIPTHGVPAMRSKIDPILEARQKYAYGPQHDYLDHPDVIGWTREGDSSHPKSGLATLITDGPGGSKRMYAGLKNAGETWYDITGNRSDTVKIGSDGWGEFHVNDGSVSIYVQK

SEQ ID NO: 41860 - protein, 478 aa, Bacillus sp.
NGTMMQYFEWYLPNDGNHWNRLNSDASNLKSKGITAVWIPPAWKAASQNDVGYGAYDLYDLGEFNQKGTVRTKYGTRSQLQAAVTSLKNNGIQVYGDVVMNHKGGADATEMVRAVEVNPNNRNQEVTGEYTIEAWTRFDFPGRGNTHSSFKWRWYHFDGVDWDQSRDLDNRIYKFRGKAWDWEVDTEFGNYDYLMYADYDMDHPEVVNELRNWGVWYTNTLGLDGFRIDAVKHIKYSFTRDWINHVRSATGKNMFAVAEFWKNDLGAIENYLQKTNWNHSVFDVPLHYNLYNASKSQGNYDMRNIFNGTVVQRHPSHAVTFVDNHDSQPEEALESFVDTWFKPLAYALTLTREQGYPSVFYGDYYGIPTHGVPAMRSKIDPILEARQKYAYGPQHDYLDHPDVIGWTREGDSSHPKSGLATLITDGPGGSKRMYAGLKNAGETWYDITGNRSDTVKIGSDGWGEFHVNGSSVSIYVQK

SEQ ID NO: 41861 - protein, 478 aa, Bacillus sp.
NGTMMQYFEWYLPNDGNHWNRLNSDASNLKSKGITAVWIPPAWKGASQNDVGYGAYDLYDLGEFNQKGTVRTKYGTRSQLQAAVTSLKNNGIQVYGDVVMNHKGGADATEMVRAVEVNPNNRNQEVTGEYTIEAWTRFDFPGRGNTHSSFKWRWYHFDGVDWDQSRRLNNRIYKFRGKAWDWEVDTEFGNYDYLMYADYDMDHPEVVNELRNWGVWYTNTLGLDGFRIDAVKHIKYSFTRDWINHVRSATGKNMFAVAEFWKNDLGAIENYLQKTNWNHSVFDVPLHYNLYNASKSAGNYDMRNIFNGTVVQRHPSHAVTFVDNHDSQPEEALESFVEPWFKPLAYALTLTREQGYPSVFYGDYYGIPTHGVPAMRSKIDPILEARQKYAYGPQHDYLDHPDVIGWTREGDSSHPKSGLATLITDGPGGSKRMYAGLKNAGETWYDITGNRSDTVKIGSDGWGEFHVNQTSVSIYVQK

SEQ ID NO: 41862 - protein, 478 aa, Bacillus sp.
NGTMMQYFEWYLPNDGNHWNRLNSDASNLKSKGITAVWIPPAWKAVSQNDVGYGAYDLYDLGEFNQKGTVRTKYGTRSQLQAAVTSLKNNGIQVYGDVVMNHKGGADATEMVDAVEVNPNNRNQEVTGEYTIEAWTRFDFPGRGNTHSSFKWRWYHFDGVDFDQSRNLTNRIYKFRGKAWDWEVDTEFGNYDYLMYTDYDMDHPEVVNELRNWGVWYTNTLGLDGFRIDAVKHIKYSFTRDWINHVRSATGKNMFAVAEFWKNDLGAIENYLQKTNWNHSVFDVPLHYNLYNASKSGGNYDMRNIFNGTVVQRHPSHAVTFVDNHDSQPEEALESFVEEWFKPLAYALTLTREQGYPSVFYGDYYGIPTHGVPAMRSKIDPILEARQKYAYGPQHDYLDHPDVIGWTREGDSSHPKSGLATLITDGPGGSKRMYAGLKNAGETWYDITGNRSDTVKIGSDGWGEFHVNDGSVSIYVQK

SEQ ID NO: 41863 - protein, 478 aa, Synthetic construct
NGTMMQYFEWYLPNDGNHWNRLNSDASNLKSKGITAVWIPPAWKGASQNDVGYGAYDLYDLGEFNQKGTVRTKYGTRSQLQAAVTSLKNNGIQVYGDVVMNHKGGADATEMVRAVEVNPNNRNQEVTGEYTIEAWTRFDFPGRGNTHSSFKWRWYHFDGVDWDQSRRLNNRIYKFRGKAWDWEVDTEFGNYDYLMYADYDMDLPETTNEVRNWGVWYTNTLGLDGFRIDAVKHIKYSFTRDWINHVRSATGKNMFAVAEFWKNDLGAIENYLQKTNWNHSVFDVPLHYNLYNASKSGGNYDMRNIFNGTVVQRHPSHAVTFVDNHDSQPEEALESFVEEWFKPLAYALTLTREQGYPSVFYGDYYGIPTHGVPAMRSKIDPILEARQKYAYGPQHDYLDHPDVIGWTREGDSSHPKSGLATLITDGPGGSKRMYAGLKNAGETWYDITGNRSDTVKIGSDGWGEFHVNDGSVSIYVQK

SEQ ID NO: 41864 - protein, 478 aa, Bacillus sp.
NGTMMQYFEWYLPNDGNHWNRLNSDASNLKSKGITAVWIPPAWKAVSQNDVGYGAYDLYDLGEFNQKGTVRTKYGTRSQLQAAVTSLKNNGIQVYGDVVMNHKGGADATEMVRAVEVNPNNRNQEVTGEYTIEAWTRFDFPGRGNTHSSFKWRWYHFDGVDWDQSRDLENRIYKFRGKAWDWEVDTEFGNYDYLMYADYDMDHPEVVNELRNWGVWYTNTLGLDGFRIDAVKHIKYSFTRDWINHVRSATGKNMFAVAEFWKNDLGAIENYLQKTNWNHSVFDVPLHYNLYNASQSGGNYDMRNIFNGTVVQRHPSHAVTFVDNHDSQPEEALESFVEPWFKPLAYALTLTREQGYPSVFYGDYYGIPTHGVPAMRSKIDPILEARQKYAYGPQHDYLDHPDVIGWTREGDSSHPKSGLATLITDGPGGSKRMYAGLKNAGETWYDITGNRSDTVKIGSDGWGEFHVNKSSVSIYVQK

SEQ ID NO: 41865 - protein, 478 aa, Bacillus sp.
NGTMMQYFEWYLPNDGNHWNRLNSDASNLKSKGITAVWIPPAWKGASQNDVGYGAYDLYDLGEFNQKGTVRTKYGTRSQLQAAVTSLKNNGINVYGDVVMNHKGGADATEMVRAVEVNPNNRNQEVTGEYTIEAWTRFDFPGRGNTHSSFKWRWYHFDGVDWDQSRRLNNRIYKFRGKAWDWEVDTEFGNYDYLMYADYDMDHPEVVNELRNWGVWYTNTLGLDGFRIDAVKHIKYSFTRDWINHVRSATGKNMFAVAEFWKNDLGAIENYLQKTNWNHSVFDVPLHYNLYNASKSVGNYDMRNIFNGTVVQAHPMHAVTFVDNHDSQPEEALESFVEEWFKPLAYALTLTREQGYPSVFYGDYYGIPTHGVPAMRSKIDPILEARQKYAYGPQHDYLDHPDVIGWTREGDSSHPKSGLATLITDGPGGSKRMYAGLKNAGETWYDITGNRSDTVKIGSDGWGEFHVNDGSVSIYVQK

SEQ ID NO: 41866 - protein, 478 aa, Bacillus sp.
NGTMMQYFEWYLPNDGNHWNRLNSDASNLKSKGITAVWIPPAWKATSQNDVGYGAYDLYDLGEFNQKGTVRTKYGTRSQLQAAVTSLKNNGIQVYGDVVMNHKGGADATEMVRAVEVNPNNRNQEVTGEYTIEAWTRFDFPGRGNTHSSFKWRWYHFDGVDWDMSRELSNRIYKFRGKAWDWEVDTEFGNYDYLMYADYDYDHPESTNEMRNWGVWYTNTLGLDGFRIDAVKHIKYSFTRDWINHVRSATGKNMFAVAEFWKNDLGAIENYLQKTNWNHSVFDVPLHYNLYNASKSQGNYDMRNIFNGTVVQRHPSHAVTFVDNHDSQPEEALESFVDTWFKPLAYALTLTREQGYPSVFYGDYYGIPTHGVPAMRSKIDPILEARQKYAYGPQHDYLDHPDVIGWTREGDSSHPKSGLATLITDGPGGSKRMYAGLKNAGETWYDITGNRSDTVKIGSDGWGEFHVNGSSVSIYVQK

SEQ ID NO: 41867 - protein, 478 aa, Bacillus sp.
NNTVMQYFEWYLPNDGNHWNRLNSDASNLKSKGITAVWIPPAWKGASQNDVGYGAYDLYDLGEFNQKGTVRTKYGTRSQLQAAVTSLKNNGIAVYGDVVMNHKGGADATEMVRAVEVNPNNRNQEVTGEYTIEAWTRFDFPGRGNTHSSFKWRWYHFDGVDWDQSRRLNNRIYKFRGKAWDWEVDTEFGNYDYLMYADYDMDHPEVVNELRNWGVWYTNTLGLDGFRIDAVKHIKYSFTRDWINHVRSATGKNMFAVAEFWKNDLGAIENYLQKTNWNHSVFDVPLHYNLYNASKSGGNYDMRNIFNGTVVQSHPMHAVTFVDNHDSQPEEALESFVEEWFKPLAYALTLTREQGYPSVFYGDYYGIPTHGVPAMRSKIDPILEARQKYAYGPQHDYLDHPDVIGWTREGDSSHPKSGLATLITDGPGGSKRMYAGLKNAGETWYDITGNRSDTVKIGSDGWGEFHVNDGSVSIYVQK

SEQ ID NO: 41868 - protein, 478 aa, Bacillus sp.
NGTMMQYFEWYLPNDGNHWNRLNSDASNLKSKGITAVWIPPAWKAVSQNDVGYGAYDLYDLGEFNQKGTVRTKYGTRSQLQAAVTSLKNNGIQVYGDVVMNHKGGADLTEMVRAVEVNPNNRNQEVTGEYTIEAWTRFDFPGRGNTHSSFKWRWYHFDGVDWDQSREFTNRIYKFRGKAWDWEVDTEFGNYDYLMYVDYDMDHPEVVNELRNWGVWYTNTLGLDGFRIDAVKHIKYSFTRDWINHVRSATGKNMFAVAEFWKNDLGAIENYLQKTNWNHSVFDVPLHYNLYNASKSGGNYDMRNIFNGTVVQRHPSHAVTFVDNHDSQPEEALESFVETWFKPLAYALTLTREQGYPSVFYGDYYGIPTHGVPAMRSKIDPILEARQKYAYGPQHDYLDHPDVIGWTREGDSSHPKSGLATLITDGPGGSKRMYAGLKNAGETWYDITGNRSDTVKIGSDGWGEFHVNDASVSIYVQK

SEQ ID NO: 41869 - protein, 478 aa, Bacillus sp.
NGTMMQYFEWYLPNDGNHWNRLNSDASNLKSKGIKAVWIPPAWKGASQNDVGYGAYDLYDLGEFNQRGTVRTKYGTRSQLQAAVTSLKNNGIQVYGDVVMNHKGGADATEMVRAVEVNPNNRNQEVTGEYTIEAWTRFDFPGRGNTHSSFKWRWYHFDGVDFDQSRRLNNRIYKFRGKAWDWEVDTEFGNYDYLMYADYDMDHPEVVNELRNWGVWYTNTLGLDGFRIDAVKHIKYSFTRDWINHVRSATGKNMFAVAEFWKNDLGAIENYLQKTNWNHSVFDVPLHYNLYNASKSGGNYDMRNIFNGTVVQRHPSHAVTFVDNHDSQPEEALESFVETWFKPLAYALTLTREQGYPSVFYGDYYGIPTHGVPAMRSKIDPILEARQKYAYGPQHDYLDHPDVIGWTREGDSSHPKSGLATLITDGPGGSKRMYAGLKNAGETWYDITGNRSDTVKIGSDGWGEFHVNDASVSIYVQK

SEQ ID NO: 41870 - protein, 478 aa, Synthetic construct
NGTMMQYFEWYLPNDGNHWNRLNSDASNLKSKGITAVWIPPAWKGASQNDVGYGAYDLYDLGEFNQKGTVRTKYGTRSQLQAAVTSLKNNGIQVYGDVVMNHKGGADATEMVRAVEVNPNNRNQEVTGEYTIEAWTRFDFPGRGNTHSSFKWRWYHFDGVDWDQSRRLNNRIYKFRGKAWDWEVDTEFGNYDYLMYADYDMDLPETTNEMRNWGVWYTNTLGLDGFRIDAVKHIKYSFTRDWINHVRSATGKNMFAVAEFWKNDLGAIENYLQKTNWNHSVFDVPLHYNLYNASKSGGNYDMRNIFNGTVVQRHPSHAVTFVDNHDSQPEEALESFVEEWFKPLAYALTLTREQGYPSVFYGDYYGIPTHGVPAMRSKIDPILEARQKYAYGPQHDYLDHPDVIGWTREGDSSHPKSGLATLITDGPGGSKRMYAGLKNAGETWYDITGNRSDTVKIGSDGWGEFHVNDGSVSIYVQK

SEQ ID NO: 41871 - protein, 478 aa, Bacillus sp.
NGTMMQYFEWYLPNDGNHWNRLNSDASNLKSKGITAVWIPPAWKGASQNDVGYGAYDLYDLGEFNQKGTVRTKYGTRSQLQAAVTSLKNNGIQVYGDVVMNHKGGADATEMVRAVEVNPNNRNQEVTGEYTIEAWTRFDFPGRGNTHSSFKWRWYHFDGVDWDQSRRLNNRIYKFRGKAWDWEVDTEFGNYDYLMYADYDMDHPEVVNELRNWGVWYTNTLGLDGFRIDAVKHIKYSFTRDWINHVRSATGKNMFAVAEFWKNDLGAIENYLQKTNWNHSVFDVPLHYNLYNASKSQGNYDMRNIFNGTVVQRHPSHAVTFVDNHDSQPEEALESFVDPWFKPLAYALTLTREQGYPSVFYGDYYGIPTHGVPAMRSKIDPILEARQKYAYGPQHDYLDHPDVIGWTREGDSSHPKSGLATLITDGPGGSKRMYAGLKNAGETWYDITGNRSDTVKIGSDGWGEFHVNGTSVSIYVQK

SEQ ID NO: 41872 - protein, 478 aa, Bacillus sp.
NGTMMQYFEWYLPNDGNHWNRLNSDASNLKSKGITAVWIPPAWKAASQNDVGYGAYDLYDLGEFNQKGTVRTKYGTRSQLQAAVTSLKNNGIQVYGDVVMNHKGGADATEMVRAVEVNPNNRNQEVTGEYTIEAWTRFDFPGRGNTHSSFKWRWYHFDGVDWDQSRDLQNRIYKFRGKAWDWEVDTEFGNYDYLMYADYDMDHPEVVNELRNWGVWYTNTLGLDGFRIDAVKHIKYSFTRDWINHVRSATGKNMFAVAEFWKNDLGAIENYLQKTNWNHSVFDVPLHYNLYNASQSGGNYDMRNIFNGTVVQRHPSHAVTFVDNHDSQPEEALESFVEPWFKPLAYALTLTREQGYPSVFYGDYYGIPTHGVPAMRSKIDPILEARQKYAYGPQHDYLDHPDVIGWTREGDSSHPKSGLATLITDGPGGSKRMYAGLKNAGETWYDITGNRSDTVKIGSDGWGEFHVNKSSVSIYVQK

SEQ ID NO: 41873 - protein, 478 aa, Synthetic construct
NGTMMQYFEWYLPNDGNHWNRLNSDASNLKSKGITAVWIPPAWKGASQNDVGYGAYDLYDLGEFNQKGTVRTKYGTRSQLQAAVTSLKNNGIQVYGDVVMNHKGGADATEMVRAVEVNPNNRNQEVTGEYTIEAWTRFDFPGRGNTHSSFKWRWYHFDGVDWDQSRRLNNRIYKFRGKAWDWEVDTEFGNYDYLMYADYDMDYPETTNELRNWGVWYTNTLGLDGFRIDAVKHIKYSFTRDWINHVRSATGKNMFAVAEFWKNDLGAIENYLQKTNWNHSVFDVPLHYNLYNASKSGGNYDMRNIFNGTVVQRHPSHAVTFVDNHDSQPEEALESFVEEWFKPLAYALTLTREQGYPSVFYGDYYGIPTHGVPAMRSKIDPILEARQKYAYGPQHDYLDHPDVIGWTREGDSSHPKSGLATLITDGPGGSKRMYAGLKNAGETWYDITGNRSDTVKIGSDGWGEFHVNDGSVSIYVQK

SEQ ID NO: 41874 - protein, 478 aa, Bacillus sp.
NGTMMQYFEWYLPNDGNHWNRLNSDASNLKSKGITAVWIPPAWKGASQNDVGYGAYDLYDLGEFNQKGTVRTKYGTRSQLQAAVTSLKNNGIQVYGDVVMNHKGGADATEMVRAVEVNPNNRNQEVTGEYTIEAWTRFDFPGRGNTHSSFKWRWYHFDGVDWDQSRRLNNRIYKFRGKAWDWEVDTEFGNYDYLMYADYDMDHPEVVNELRNWGVWYTNTLGLDGFRIDAVKHIKYSFTRDWINHVRSATGKNMFAVAEFWKNDLGAIENYLQKTNWNHSVFDVPLHYNLYNASKSSGNYDMRNIFNGTVVQRHPSHAVTFVDNHDSQPEEALESFVDPWFKPLAYALTLTREQGYPSVFYGDYYGIPTHGVPAMRSKIDPILEARQKYAYGPQHDYLDHPDVIGWTREGDSSHPKSGLATLITDGPGGSKRMYAGLKNAGETWYDITGNRSDTVKIGSDGWGEFHVNKQSVSIYVQK

SEQ ID NO: 41875 - protein, 478 aa, Bacillus sp.
NGTMMQYFEWYLPNDGNHWNRLNSDASNLKSKGITAVWIPPAWKATSQNDVGYGAYDLYDLGEFNQKGTVRTKYGTRSQLQAAVTSLKNNGIQVYGDVVMNHKGGADATEMVRAVEVNPNNRNQEVTGEYTIEAWTRFDFPGRGNTHSSFKWRWYHFDGVDWDQSRELNNRIYKFRGKAWDWEVDTEFGNYDYLMYTDYDMDHPEVVNELRNWGVWYTNTLGLDGFRIDAVKHIKYSFTRDWINHVRSATGKNMFAVAEFWKNDLGAIENYLQKTNWNHSVFDVPLHYNLYNASKSGGNYDMRNIFNGTVVQRHPSHAVTFVDNHDSQPEEALESFVETWFKPLAYALTLTREQGYPSVFYGDYYGIPTHGVPAMRSKIDPILEARQKYAYGPQHDYLDHPDVIGWTREGDSSHPKSGLATLITDGPGGSKRMYAGLKNAGETWYDITGNRSDTVKIGSDGWGEFHVNKASVSIYVQK

SEQ ID NO: 41876 - protein, 478 aa, Bacillus sp.
NGTMMQYFEWYLPNDGNHWNRLNSDASNLKSKGITAVWIPPAWKAVSQNDVGYGAYDLYDLGEFNQKGTVRTKYGTRSQLQAAVTSLKNNGIQVYGDVVMNHKGGADATEMVDAVEVNPNNRNQEVTGEYTIEAWTRFDFPGRGNTHSSFKWRWYHFDGVDFDQSREFTNRIYKFRGKAWDWEVDTEFGNYDYLMYTDYDMDHPEVVNELRNWGVWYTNTLGLDGFRIDAVKHIKYSFTRDWINHVRSATGKNMFAVAEFWKNDLGAIENYLQKTNWNHSVFDVPLHYNLYNASKSGGNYDMRNIFNGTVVQRHPSHAVTFVDNHDSQPEEALESFVEEWFKPLAYALTLTREQGYPSVFYGDYYGIPTHGVPAMRSKIDPILEARQKYAYGPQHDYLDHPDVIGWTREGDSSHPKSGLATLITDGPGGSKRMYAGLKNAGETWYDITGNRSDTVKIGSDGWGEFHVNDGSVSIYVQK

SEQ ID NO: 41877 - protein, 478 aa, Bacillus sp.
NGTMMQYFEWYLPNDGNHWNRLNSDASNLKSKGITAVWIPPAWKGASQNDVGYGAYDLYDLGEFNQKGTVRTKYGTRSQLQAAVTSLKNNGINVYGDVVMNHKGGADATEMVRAVEVNPNNRNQEVTGEYTIEAWTRFDFPGRGNTHSSFKWRWYHFDGVDWDQSRRLNNRIYKFRGKAWDWEVDTEFGNYDYLMYADYDMDHPEVVNELRNWGVWYTNTLGLDGFRIDAVKHIKYSFTRDWINHVRSATGKNMFAVAEFWKNDLGAIENYLQKTNWNHSVFDVPLHYNLYNASKSGGNYDMRNIFNGTVVQAHPMHAVTFVDNHDSQPEEALESFVEEWFKPLAYVLTLTREQGYPSVFYGDYYGIPTHGVPAMRSKIDPILEARQKYAYGPQHDYLDHPDVIGWTREGDSSHPKSGLATLITDGPGGSKRMYAGLKNAGETWYDITGNRSDTVKIGSDGWGEFHVNDGSVSIYVQK

SEQ ID NO: 41878 - protein, 478 aa, Bacillus sp.
NGTMMQYFEWYLPNDGNHWNRLNSDASNLKSKGITAVWIPPAWKAASQNDVGYGAYDLYDLGEFNQKGTVRTKYGTRSQLQAAVTSLKNNGIQVYGDVVMNHKGGADATEMVRAVEVNPNNRNQEVTGEYTIEAWTRFDFPGRGNTHSSFKWRWYHFDGVDWDQSRDLQNRIYKFRGKAWDWEVDTEFGNYDYLMYVDYDMDHPEVVNELRNWGVWYTNTLGLDGFRIDAVKHIKYSFTRDWINHVRSATGKNMFAVAEFWKNDLGAIENYLQKTNWNHSVFDVPLHYNLYNASKSGGNYDMRNIFNGTVVQAHPNHAVTFVDNHDSQPEEALESFVEEWFKPLAYALTLTREQGYPSVFYGDYYGIPTHGVPAMRSKIDPILEARQKYAYGPQHDYLDHPDVIGWTREGDSSHPKSGLATLITDGPGGSKRMYAGLKNAGETWYDITGNRSDTVKIGSDGWGEFHVNDGSVSIYVQK

SEQ ID NO: 41879 - protein, 478 aa, Bacillus sp.
NATMMQYFEWYLPNDGNHWNRLNSDASNLKSKGITAVWIPPAWKGASQNDVGYGAYDLYDLGEFNQKGTVRTKYGTRSQLQAAVTSLKNNGILVYGDVVMNHKGGADATEMVRAVEVNPNNRNQEVTGEYTIEAWTRFDFPGRGNTHSSFKWRWYHFDGVDWDQSRRLNNRIYKFRGKAWDWEVDTEFGNYDYLMYADYDMDHPEVVNELRNWGVWYTNTLGLDGFRIDAVKHIKYSFTRDWINHVRSATGKNMFAVAEFWKNDLGAIENYLQKTNWNHSVFDVPLHYNLYNASKSGGNYDMRNIFNGTVVQMHPSHAVTFVDNHDSQPEEALESFVEEWFKPLAYALTLTREQGYPSVFYGDYYGIPTHGVPAMRSKIDPILEARQKYAYGPQHDYLDHPDVIGWTREGDSSHPKSGLATLITDGPGGSKRMYAGLKNAGETWYDITGNRSDTVKIGSDGWGEFHVNDGSVSIYVQK

SEQ ID NO: 41880 - protein, 478 aa, Synthetic construct
NGTMMQYFEWYLPNDGNHWNRLNSDASNLKSKGITAVWIPPAWKGASQNDVGYGAYDLYDLGEFNQKGTVRTKYGTRSQLQAAVTSLKNNGIQVYGDVVMNHKGGADATEMVRAVEVNPNNRNQEVTGEYTIEAWTRFDFPGRGNTHSSFKWRWYHFDGVDWDQSRRLNNRIYKFRGKAWDWEVDTEFGNYDYLMYADYDMDYPETTNEVRNWGVWYTNTLGLDGFRIDAVKHIKYSFTRDWINHVRSATGKNMFAVAEFWKNDLGAIENYLQKTNWNHSVFDVPLHYNLYNASKSGGNYDMRNIFNGTVVQRHPSHAVTFVDNHDSQPEEALESFVEEWFKPLAYALTLTREQGYPSVFYGDYYGIPTHGVPAMRSKIDPILEARQKYAYGPQHDYLDHPDVIGWTREGDSSHPKSGLATLITDGPGGSKRMYAGLKNAGETWYDITGNRSDTVKIGSDGWGEFHVNDGSVSIYVQK

SEQ ID NO: 41881 - protein, 478 aa, Bacillus sp.
NGTMMQYFEWYLPNDGNHWNRLNSDASNLKSKGITAVWIPPAWKGASQNDVGYGAYDLYDLGEFNQKGTVRTKYGTRSQLQAAVTSLKNNGIQVYGDVVMNHKGGADATEMVRAVEVNPNNRNQEVTGEYTIEAWTRFDFPGRGNTHSSFKWRWYHFDGVDWDQSRRLNNRIYKFRGKAWDWEVDTEFGNYDYLMYADYDMDHPEVVNELRNWGVWYTNTLGLDGFRIDAVKHIKYSFTRDWINHVRSATGKNMFAVAEFWKNDLGAIENYLQKTNWNHSVFDVPLHYNLYNASKSGNNYDMRNIFNGTVVQRHPSHAVTFVDNHDSQPEEALESFVEPWFKPLAYALTLTREQGYPSVFYGDYYGIPTHGVPAMRSKIDPILEARQKYAYGPQHDYLDHPDVIGWTREGDSSHPKSGLATLITDGPGGSKRMYAGLKNAGETWYDITGNRSDTVKIGSDGWGEFHVNKTSVSIYVQK

SEQ ID NO: 41882 - protein, 478 aa, Bacillus sp.
NGTMMQYFEWYLPNDGNHWNRLNSDASNLKSKGITAVWIPPAWKGASQNDVGYGAYDLYDLGEFNQKGTVRTKYGTRSQLQAAVTSLKNNGIQVYGDVVMNHKGGADATEMVRAVEVNPNNRNQEVTGEYTIEAYTRFDFPGRGNTHSSFKWRWYHFDGVDFDQSRRLNNRIYKFRGKAWDWEVDTEFGNYDYLMYVDYDMDHPEVVNELRNWGVWYTNTLGLDGFRIDAVKHIKYSFTRDWINHVRSATGKNMFAVAEFWKNDLGAIENYLQKTNWNHSVFDVPLHYNLYNASKSGGNYDMRNIFNGTVVQRHPSHAVTFVDNHDSQPEEALESFVEEWFKPLAYALTLTREQGYPSVFYGDYYGIPTHGVPAMRSKIDPILEARQKYAYGPQHDYLDHPDVIGWTREGDSSHPKSGLATLITDGPGGSKRMYAGLKNAGETWYDITGNRSDTVKIGSDGWGEFHVNDGSVSIYVQK

SEQ ID NO: 41883 - protein, 478 aa, Bacillus sp.
NGTMMQYFEWYLPNDGNHWNRLNSDASNLKSKGITAVWIPPAWKGASQNDVGYGAYDLYDLGEFNQKGTVRTKYGTRSQLQAAVTSLKNNGIQVYGDVVMNHKGGADATEMVRAVEVNPNNRNQEVTGEYTIEAWTRFDFPGRGNTHSSFKWRWYHFDGVDFDQSRNFQNRIYKFRGKAWDWEVDTEFGNYDYLMYADYDMDHPEVVNELRNWGVWYTNTLGLDGFRIDAVKHIKYSFTRDWINHVRSATGKNMFAVAEFWKNDLGAIENYLQKTNWNHSVFDVPLHYNLYNASKSQGNYDMRNIFNGTVVQRHPSHAVTFVDNHDSQPEEALESFVDTWFKPLAYALTLTREQGYPSVFYGDYYGIPTHGVPAMRSKIDPILEARQKYAYGPQHDYLDHPDVIGWTREGDSSHPKSGLATLITDGPGGSKRMYAGLKNAGETWYDITGNRSDTVKIGSDGWGEFHVNGSSVSIYVQK

SEQ ID NO: 41884 - protein, 478 aa, Bacillus sp.
NGTMMQYFEWYLPNDGNHWNRLNSDASNLKSKGITAVWIPPAWKATSQNDVGYGAYDLYDLGEFNQKGTVRTKYGTRSQLQAAVTSLKNNGIQVYGDVVMNHKGGADLTEMVRAVEVNPNNRNQEVTGEYTIEAWTRFDFPGRGNTHSSFKWRWYHFDGVDFDQSRNVNNRIYKFRGKAWDWEVDTEFGNYDYLMYADYDMDHPEVVNELRNWGVWYTNTLGLDGFRIDAVKHIKYSFTRDWINHVRSATGKNMFAVAEFWKNDLGAIENYLQKTNWNHSVFDVPLHYNLYNASKSGGNYDMRNIFNGTVVQRHPSHAVTFVDNHDSQPEEALESFVEEWFKPLAYALTLTREQGYPSVFYGDYYGIPTHGVPAMRSKIDPILEARQKYAYGPQHDYLDHPDVIGWTREGDSSHPKSGLATLITDGPGGSKRMYAGLKNAGETWYDITGNRSDTVKIGSDGWGEFHVNDGSVSIYVQK

SEQ ID NO: 41885 - protein, 478 aa, Synthetic construct
NGTMMQYFEWYLPNDGNHWNRLNSDASNLKSKGITAVWIPPAWKGASQNDVGYGAYDLYDLGEFNQKGTVRTKYGTRSQLQAAVTSLKNNGIQVYGDVVMNHKGGADATEMVRAVEVNPNNRNQEVTGEYTIEAWTRFDFPGRGNTHSSFKWRWYHFDGVDWDQSRRLNNRIYLFRPKVWDWPVDTENGNYDYLMYADIDMDHPEVVNELRNWGVWYTNTLGLDGFRIDAVKHIKYSFTRDWINHVRSATGKNMFAVAEFWKNDLGAIENYLQKTNWNHSVFDVPLHYNLYNASKSGGNYDMRNIFNGTVVQRHPSHAVTFVDNHDSQPEEALESFVEEWFKPLAYALTLTREQGYPSVFYGDYYGIPTHGVPAMRSKIDPILEARQKYAYGPQHDYLDHPDVIGWTREGDSSHPKSGLATLITDGPGGSKRMYAGLKNAGETWYDITGNRSDTVKIGSDGWGEFHVNDGSVSIYVQK

SEQ ID NO: 41886 - protein, 478 aa, Bacillus sp.
NGTMMQYFEWYLPNDGNHWNRLNSDASNLKSKGIKAVWIPPAWKGASQNDVGYGAYDLYDLGEFNQRGTVRTKYGTRSQLQAAVTSLKNNGIQVYGDVVMNHKGGADATEMVRAVEVNPNNRNQEVTGEYTIEAWTRFDFPGRGNTHSSFKWRWYHFDGVDWDQSRRLNNRIYKFRGKAWDWEVDTEFGNYDYLMYADYDMDHPEVVNELRNWGVWYTNTLGLDGFRIDAVKHIKYSFTRDWINHVRSATGKNMFAVAEFWKNDLGAIENYLQKTNWNHSVFDVPLHYNLYNASKSGGNYDMRNIFNGTVVQRHPSHAVTFVDNHDSQPEEALESFVDPWFKPLAYALTLTREQGYPSVFYGDYYGIPTHGVPAMRSKIDPILEARQKYAYGPQHDYLDHPDVIGWTREGDSSHPKSGLATLITDGPGGSKRMYAGLKNAGETWYDITGNRSDTVKIGSDGWGEFHVNGGSVSIYVQK

SEQ ID NO: 41887 - protein, 478 aa, Bacillus sp.
NGTMMQYFEWYLPNDGNHWNRLNSDASNLKSKGITAVWIPPAWKGASQNDVGYGAYDLYDLGEFNQKGTVRTKYGTRSQLQAAVTSLKNNGIQVYGDVVMNHKGGADATEMVRAVEVNPNNRNQEVTGEYTIEAWTRFDFPGRGNTHSSFKWRWYHFDGVDWDQSRRTNNRIYKFRGKAWDWEVDTEFGNYDYLMYTDYDMDHPEVVNELRNWGVWYTNTLGLDGFRIDAVKHIKYSFTRDWINHVRSATGKNMFAVAEFWKNDLGAIENYLQKTNWNHSVFDVPLHYNLYNASQSGGNYDMRNIFNGTVVQRHPSHAVTFVDNHDSQPEEALESFVEPWFKPLAYALTLTREQGYPSVFYGDYYGIPTHGVPAMRSKIDPILEARQKYAYGPQHDYLDHPDVIGWTREGDSSHPKSGLATLITDGPGGSKRMYAGLKNAGETWYDITGNRSDTVKIGSDGWGEFHVNKSSVSIYVQK

SEQ ID NO: 41888 - protein, 478 aa, Bacillus sp.
NGTMMQYFEWYLPNDGNHWNRLNSDASNLKSKGITAVWIPPAWKAASQNDVGYGAYDLYDLGEFNQKGTVRTKYGTRSQLQAAVTSLKNNGIQVYGDVVMNHKGGADATEMVRAVEVNPNNRNQEVTGEYTIEAWTRFDFPGRGNTHSSFKWRWYHFDGVDWDQSRDLQNRIYKFRGKAWDWEVDTEFGNYDYLMYADYDMDHPEVVNELRNWGVWYTNTLGLDGFRIDAVKHIKYSFTRDWINHVRSATGKNMFAVAEFWKNDLGAIENYLQKTNWNHSVFDVPLHYNLYNASKSGGNYDMRNIFNGTVVQVHPSHAVTFVDNHDSQPEEALESFVEEWFKPLAYALTLTREQGYPSVFYGDYYGIPTHGVPAMRSKIDPILEARQKYAYGPQHDYLDHPDVIGWTREGDSSHPKSGLATLITDGPGGSKRMYAGLKNAGETWYDITGNRSDTVKIGSDGWGEFHVNYGSVSIYVQK

SEQ ID NO: 41889 - protein, 478 aa, Bacillus sp.
NGTMMQYFEWYLPNDGNHWNRLNSDASNLKSKGITAVWIPPAWKGASQNDVGYGAYDLYDLGEFNQKGTVRTKYGTRSQLQAAVTSLKNNGIQVYGDVVMNHKGGADATEMVRAVEVNPNNRNQEVTGEYTIEAWTRFDFPGRGNTHSSFKWRWYHFDGVDWDQSRRLNNRIYKFRGKAWDWEVDTEFGNYDYLMYADYDMDHPEVVNELRNWGVWYTNTLGLDGFRIDAVKHIKYSFTRDWINHVRSATGKNMFAVAEFWKNDLGAIENYLQKTNWNHSVFDVPLHYNLYNASKSAGNYDMRNIFNGTVVQRHPSHAVTFVDNHDSQPEEALESFVEPWFKPLAYALTLTREQGYPSVFYGDYYGIPTHGVPAMRSKIDPILEARQKYAYGPQHDYLDHPDVIGWTREGDSSHPKSGLATLITDGPGGSKRMYAGLKNAGETWYDITGNRSDTVKIGSDGWGEFHVNGASVSIYVQK

SEQ ID NO: 41890 - protein, 478 aa, Bacillus sp.
NGTMMQYFEWYLPNDGNHWNRLNSDASNLKSKGITAVWIPPAWKGASQNDVGYGAYDLYDLGEFNQKGTVRTKYGTRSQLQAAVTSLKNNGIQVYGDVVMNHKGGADATEMVRAVEVNPNNRNQEVTGEYTIEAWTRFDFPGRGNTHSSFKWRWYHFDGVDWDQSRRLDNRIYKFRGKAWDWEVDTEFGNYDYLMYTDYDMDHPEVVNELRNWGVWYTNTLGLDGFRIDAVKHIKYSFTRDWINHVRSATGKNMFAVAEFWKNDLGAIENYLQKTNWNHSVFDVPLHYNLYNASQSGGNYDMRNIFNGTVVQRHPSHAVTFVDNHDSQPEEALESFVEPWFKPLAYALTLTREQGYPSVFYGDYYGIPTHGVPAMRSKIDPILEARQKYAYGPQHDYLDHPDVIGWTREGDSSHPKSGLATLITDGPGGSKRMYAGLKNAGETWYDITGNRSDTVKIGSDGWGEFHVNKSSVSIYVQK

SEQ ID NO: 41891 - protein, 478 aa, Bacillus sp.
NGTMMQYFEWYLPNDGNHWNRLNSDASNLKSKGITAVWIPPAWKAVSQNDVGYGAYDLYDLGEFNQKGTVRTKYGTRSQLQAAVTSLKNNGIQVYGDVVMNHKGGADATEMVRAVEVNPNNRNQEVTGEYTIEAWTRFDFPGRGNTHSSFKWRWYHFDGVDWDQSRNLTNRIYKFRGKAWDWEVDTEFGNYDYLMYTDYDYDHPETTNEMRNWGVWYTNTLGLDGFRIDAVKHIKYSFTRDWINHVRSATGKNMFAVAEFWKNDLGAIENYLQKTNWNHSVFDVPLHYNLYNASKSGGNYDMRNIFNGTVVQRHPSHAVTFVDNHDSQPEEALESFVEEWFKPLAYALTLTREQGYPSVFYGDYYGIPTHGVPAMRSKIDPILEARQKYAYGPQHDYLDHPDVIGWTREGDSSHPKSGLATLITDGPGGSKRMYAGLKNAGETWYDITGNRSDTVKIGSDGWGEFHVNDGSVSIYVQK

SEQ ID NO: 41892 - protein, 478 aa, Bacillus sp.
NGTMMQYFEWYLPNDGNHWNRLNSDASNLKSKGITAVWIPPAWKAVSQNDVGYGAYDLYDLGEFNQKGTVRTKYGTRSQLQAAVTSLKNNGIQVYGDVVMNHKGGADLTEMVDAVEVNPNNRNQEVTGEYTIEAWTRFDFPGRGNTHSSFKWRWYHFDGVDFDQSRDFNNRIYKFRGKAWDWEVDTEFGNYDYLMYADYDMDHPEVVNELRNWGVWYTNTLGLDGFRIDAVKHIKYSFTRDWINHVRSATGKNMFAVAEFWKNDLGAIENYLQKTNWNHSVFDVPLHYNLYNASKSGGNYDMRNIFNGTVVQRHPSHAVTFVDNHDSQPEEALESFVEEWFKPLAYALTLTREQGYPSVFYGDYYGIPTHGVPAMRSKIDPILEARQKYAYGPQHDYLDHPDVIGWTREGDSSHPKSGLATLITDGPGGSKRMYAGLKNAGETWYDITGNRSDTVKIGSDGWGEFHVNDGSVSIYVQK

SEQ ID NO: 41893 - protein, 478 aa, Bacillus sp.
NGTMMQYFEWYLPNDGNHWNRLNSDASNLKSKGITAVWIPPAWKAASQNDVGYGAYDLYDLGEFNQKGTVRTKYGTRSQLQAAVTSLKNNGIQVYGDVVMNHKGGADATEMVRAVEVNPNNRNQEVTGEYTIEAWTRFDFPGRGNTHSSFKWRWYHFDGVDWDQSRNLNNRIYKFRGKAWDWEVDTEFGNYDYLMYTDYDMDHPEVVNELRNWGVWYTNTLGLDGFRIDAVKHIKYSFTRDWINHVRSATGKNMFAVAEFWKNDLGAIENYLQKTNWNHSVFDVPLHYNLYNASKSGGNYDMRNIFNGTVVQRHPSHAVTFVDNHDSQPEEALESFVETWFKPLAYALTLTREQGYPSVFYGDYYGIPTHGVPAMRSKIDPILEARQKYAYGPQHDYLDHPDVIGWTREGDSSHPKSGLATLITDGPGGSKRMYAGLKNAGETWYDITGNRSDTVKIGSDGWGEFHVNKASVSIYVQK

SEQ ID NO: 41894 - protein, 478 aa, Bacillus sp.
NKTMMQYFEWYLPNDGNHWNRLNSDASNLKSKGITAVWIPPAWKGASQNDVGYGAYDLYDLGEFNQKGTVRTKYGTRSQLQAAVTSLKNNGIQVYGDVVMNHKGGADATEMVRAVEVNPNNRNQEVTGEYTIEAWTRFDFPGRGNTHSSFKWRWYHFDGVDWDQSRRLNNRIYKFRGKAWDWEVDTEFGNYDYLMYADYDMDHPEVVNELRNWGVWYTNTLGLDGFRIDAVKHIKYSFTRDWINHVRSATGKNMFAVAEFWKNDLGAIENYLQKTNWNHSVFDVPLHYNLYNASKSGGNYDMRNIFNGTVVQAHPSHAVTFVDNHDSQPEEALESFVEEWFKPLAYALTLTREQGYPSVFYGDYYGIPTHGVPAMRSKIDPILEARQKYAYGPQHDYLDHQDVIGWTREGDSSHPKSGLATLITDGPGGSKRMYAGLKNAGETWYDITGNRSDTVKIGSDGWGEFHVNDGSVSIYVQK

SEQ ID NO: 41895 - protein, 478 aa, Bacillus sp.
NGTMMQYFEWYLPNDGNHWNRLNSDASNLKSKGITAVWIPPAWKAASQNDVGYGAYDLYDLGEFNQKGTVRTKYGTRSQLQAAVTSLKNNGIQVYGDVVMNHKGGADATEMVRAVEVNPNNRNQEVTGEYTIEAWTRFDFPGRGNTHSSFKWRWYHFDGVDWDQSRDLDNRIYKFRGKAWDWEVDTEFGNYDYLMYADYDYDHPESTNEMRNWGVWYTNTLGLDGFRIDAVKHIKYSFTRDWINHVRSATGKNMFAVAEFWKNDLGAIENYLQKTNWNHSVFDVPLHYNLYNASKSGGNYDMRNIFNGTVVQRHPSHAVTFVDNHDSQPEEALESFVETWFKPLAYALTLTREQGYPSVFYGDYYGIPTHGVPAMRSKIDPILEARQKYAYGPQHDYLDHPDVIGWTREGDSSHPKSGLATLITDGPGGSKRMYAGLKNAGETWYDITGNRSDTVKIGSDGWGEFHVNKASVSIYVQK

SEQ ID NO: 41896 - protein, 478 aa, Bacillus sp.
NQTMMQYFEWYLPNDGNHWNRLNSDASNLKSKGITAVWIPPAWKGASQNDVGYGAYDLYDLGEFNQKGTVRTKYGTRSQLQAAVTSLKNNGITVYGDVVMNHKGGADATEMVRAVEVNPNNRNQEVTGEYTIEAWTRFDFPGRGNTHSSFKWRWYHFDGVDWDQSRRLNNRIYKFRGKAWDWEVDTEFGNYDYLMYADYDMDHPEVVNELRNWGVWYTNTLGLDGFRIDAVKHIKYSFTRDWINHVRSATGKNMFAVAEFWKNDLGAIENYLQKTNWNHSVFDVPLHYNLYNASKSGGNYDMRNIFNGTVVQAHPMHAVTFVDNHDSQPEEALESFVEEWFKPLAYALTLTREQGYPSVFYGDYYGIPTHGVPAMRSKIDPILEARQKYAYGPQHDYLDHPDVIGWTREGDSSHPKSGLATLITDGPGGSKRMYAGLKNAGETWYDITGNRSDTVKIGSDGWGEFHVNDGSVSIYVQK

SEQ ID NO: 41897 - protein, 478 aa, Bacillus sp.
NGTMMQYFEWYLPNDGNHWNRLNSDASNLKSKGIKAVWIPPAWKAASQNDVGYGAYDLYDLGEFNQKGTVRTKYGTRSQLQAAVTSLKNNGIQVYGDVVMNHKGGADATEMVRAVEVNPNNRNQEVTGEYTIEAWTRFDFPGRGNTHSSFKWRWYHFDGVDFDQSRNLSNRIYKFRGKAWDWEVDTEFGNYDYLMYTDYDMDHPEVVNELRNWGVWYTNTLGLDGFRIDAVKHIKYSFTRDWINHVRSATGKNMFAVAEFWKNDLGAIENYLQKTNWNHSVFDVPLHYNLYNASKSGGNYDMRNIFNGTVVQRHPSHAVTFVDNHDSQPEEALESFVEEWFKPLAYALTLTREQGYPSVFYGDYYGIPTHGVPAMRSKIDPILEARQKYAYGPQHDYLDHPDVIGWTREGDSSHPKSGLATLITDGPGGSKRMYAGLKNAGETWYDITGNRSDTVKIGSDGWGEFHVNDGSVSIYVQK

SEQ ID NO: 41898 - protein, 478 aa, Bacillus sp.
NGTMMQYFEWYLPNDGNHWNRLNSDASNLKSKGITAVWIPPAWKGASQNDVGYGAYDLYDLGEFNQKGTVRTKYGTRSQLQAAVTSLKNNGIQVYGDVVMNHKGGADATEMVRAVEVNPNNRNQEVTGEYTIEAWTRFDFPGRGNTHSSFKWRWYHFDGVDWDQSRRTNNRIYKFRGKAWDWEVDTEFGNYDYLMYTDYDMDHPEVVNELRNWGVWYTNTLGLDGFRIDAVKHIKYSFTRDWINHVRSATGKNMFAVAEFWKNDLGAIENYLQKTNWNHSVFDVPLHYNLYNASKSGGNYDMRNIFNGTVVQVHPSHAVTFVDNHDSQPEEALESFVEEWFKPLAYALTLTREQGYPSVFYGDYYGIPTHGVPAMRSKIDPILEARQKYAYGPQHDYLDHPDVIGWTREGDSSHPKSGLATLITDGPGGSKRMYAGLKNAGETWYDITGNRSDTVKIGSDGWGEFHVNYGSVSIYVQK

SEQ ID NO: 41899 - protein, 478 aa, Bacillus sp.
NGTMMQYFEWYLPNDGNHWNRLNSDASNLKSKGITAVWIPPAWKGASQNDVGYGAYDLYDLGEFNQKGTVRTKYGTRSQLQAAVTSLKNNGIQVYGDVVMNHKGGADATEMVRAVEVNPNNRNQEVTGEYTIEAWTRFDFPGRGNTHSSFKWRWYHFDGVDWDQSRRTNNRIYKFRGKAWDWEVDTEFGNYDYLMYTDYDMDHPEVVNELRNWGVWYTNTLGLDGFRIDAVKHIKYSFTRDWINHVRSATGKNMFAVAEFWKNDLGAIENYLQKTNWNHSVFDVPLHYNLYNASKSGGNYDMRNIFNGTVVQRHPSHAVTFVDNHDSQPEEALESFVDEWFKPLAYALTLTREQGYPSVFYGDYYGIPTHGVPAMRSKIDPILEARQKYAYGPQHDYLDHPDVIGWTREGDSSHPKSGLATLITDGPGGSKRMYAGLKNAGETWYDITGNRSDTVKIGSDGWGEFHVNKSSVSIYVQK

SEQ ID NO: 41900 - protein, 478 aa, Bacillus sp.
NGTMMQYFEWYLPNDGNHWNRLNSDASNLKSKGITAVWIPPAWKAASQNDVGYGAYDLYDLGEFNQKGTVRTKYGTRSQLQAAVTSLKNNGIQVYGDVVMNHKGGADATEMVPAVEVNPNNRNQEVTGEYTIEAWTRFDFPGRGNTHSSFKWRWYHFDGVDWDQSRELNNRIYKFRSKAWDWEVDTEFGNYDYLMYTDYDMDHPEVVNELRNWGVWYTNTLGLDGFRIDAVKHIKYSFTRDWINHVRSATGKNMFAVAEFWKNDLGAIENYLQKTNWNHSVFDVPLHYNLYNASKSGGNYDMRNIFNGTVVQRHPSHAVTFVDNHDSQPEEALESFVEEWFKPLAYALTLTREQGYPSVFYGDYYGIPTHGVPAMRSKIDPILEARQKYAYGPQHDYLDHPDVIGWTREGDSSHPKSGLATLITDGPGGSKRMYAGLKNAGETWYDITGNRSDTVKIGSDGWGEFHVNDGSVSIYVQK

SEQ ID NO: 41901 - protein, 478 aa, Bacillus sp.
NGTMMQYFEWYLPNDGNHWNRLNSDASNLKSKGITAVWIPPAWKGASQNDVGYGAYDLYDLGEFNQKGTVRTKYGTRSQLQAAVTSLKNNGIQVYGDVVMNHKGGADATEMVRAVEVNPNNRNQEVTGEYTIEAWTRFDFPGRGNTHSSFKWRWYHFDGVDWDQSREFDNRIYKFRGKAWDWEVDTEFGNYDYLMYADYDMDHPEVVNELRNWGVWYTNTLGLDGFRIDAVKHIKYSFTRDWINHVRSATGKNMFAVAEFWKNDLGAIENYLQKTNWNHSVFDVPLHYNLYNASKSSGNYDMRNIFNGTVVQRHPSHAVTFVDNHDSQPEEALESFVDEWFKPLAYALTLTREQGYPSVFYGDYYGIPTHGVPAMRSKIDPILEARQKYAYGPQHDYLDHPDVIGWTREGDSSHPKSGLATLITDGPGGSKRMYAGLKNAGETWYDITGNRSDTVKIGSDGWGEFHVNKQSVSIYVQK

SEQ ID NO: 41902 - protein, 478 aa, Bacillus sp.
NGTMMQYFEWYLPNDGNHWNRLNSDASNLKSKGITAVWIPPAWKGASQNDVGYGAYDLYDLGEFNQKGTVRTKYGTRSQLQAAVTSLKNNGIAVYGDVVMNHKGGADATEMVRAVEVNPNNRNQEVTGEYTIEAWTRFDFPGRGNTHSSFKWRWYHFDGVDWDQSRRLNNRIYKFRGKAWDWEVDTEFGNYDYLMYADYDMDHPEVVNELRNWGVWYTNTLGLDGFRIDAVKHIKYSFTRDWINHVRSATGKNMFAVSEFWKNDLGAIENYLQKTNWNHSVFDVPLHYNLYNASKSGGNYDMRNIFNGTVVQAHPSHAVTFVDNHDSQPEEALESFVEEWFKPLAYALTLTREQGYPSVFYGDYYGIPTHGVPAMRSKIDPILEARQKYAYGPQHDYLDHPDVIGWTREGDSSHPKSGLATLITDGPGGSKRMYAGLKNAGETWYDITGNRSDTVKIGSDGWGEFHVNDGSVSIYVQK

SEQ ID NO: 41903 - protein, 478 aa, Bacillus sp.
NGTMMQYFEWYLPNDGNHWNRLNSDASNLKSKGIKAVWIPPAWKGASQNDVGYGAYDLYDLGEFNQKGTVRTKYGTRSQLQAAVTSLKNNGIQVYGDVVMNHKGGADATEMVRAVEVNPNNRNQEVTGEYTIEAWTRFDFPGRGNTHSSFKWRWYHFDGVDFDQSRRTNNRIYKFRGKAWDWEVDTEFGNYDYLMYTDYDMDHPEVVNELRNWGVWYTNTLGLDGFRIDAVKHIKYSFTRDWINHVRSATGKNMFAVAEFWKNDLGAIENYLQKTNWNHSVFDVPLHYNLYNASKSGGNYDMRNIFNGTVVQRHPSHAVTFVDNHDSQPEEALESFVEEWFKPLAYALTLTREQGYPSVFYGDYYGIPTHGVPAMRSKIDPILEARQKYAYGPQHDYLDHPDVIGWTREGDSSHPKSGLATLITDGPGGSKRMYAGLKNAGETWYDITGNRSDTVKIGSDGWGEFHVNDGSVSIYVQK

SEQ ID NO: 41904 - protein, 478 aa, Bacillus sp.
NGTMMQYFEWYLPNDGNHWNRLNSDASNLKSKGITAVWIPPAWKAVSQNDVGYGAYDLYDLGEFNQKGTVRTKYGTRSQLQAAVTSLKNNGIQVYGDVVMNHKGGADLTEMVRAVEVNPNNRNQEVTGEYTIEAWTRFDFPGRGNTHSSFKWRWYHFDGVDWDQSRNLTNRIYKFRGKAWDWEVDTEFGNYDYLMYTDYDMDHPEVVNELRNWGVWYTNTLGLDGFRIDAVKHIKYSFTRDWINHVRSATGKNMFAVAEFWKNDLGAIENYLQKTNWNHSVFDVPLHYNLYNASKSGGNYDMRNIFNGTVVQRHPSHAVTFVDNHDSQPEEALESFVEEWFKPLAYALTLTREQGYPSVFYGDYYGIPTHGVPAMRSKIDPILEARQKYAYGPQHDYLDHPDVIGWTREGDSSHPKSGLATLITDGPGGSKRMYAGLKNAGETWYDITGNRSDTVKIGSDGWGEFHVNDGSVSIYVQK

SEQ ID NO: 41905 - protein, 478 aa, Bacillus sp.
NGTMMQYFEWYLPNDGNHWNRLNSDASNLKSKGITAVWIPPAWKAVSQNDVGYGAYDLYDLGEFNQKGTVRTKYGTRSQLQAAVTSLKNNGIQVYGDVVMNHKGGADATEMVRAVEVNPNNRNQEVTGEYTIEAWTRFDFPGRGNTHSSFKWRWYHFDGVDWDQSRNLTNRIYKFRGKAWDWEVDTEFGNYDYLMYTDYDMDHPEVVNELRNWGVWYTNTLGLDGFRIDAVKHIKYSFTRDWINHVRSATGKNMFAVAEFWKNDLGAIENYLQKTNWNHSVFDVPLHYNLYNASKSGGNYDMRNIFNGTVVQRHPSHAVTFVDNHDSQPEEALESFVDPWFKPLAYALTLTREQGYPSVFYGDYYGIPTHGVPAMRSKIDPILEARQKYAYGPQHDYLDHPDVIGWTREGDSSHPKSGLATLITDGPGGSKRMYAGLKNAGETWYDITGNRSDTVKIGSDGWGEFHVNGGSVSIYVQK

SEQ ID NO: 41906 - protein, 478 aa, Synthetic construct
NGTMMQYFEWYLPNDGNHWNRLNSDASNLKSKGITAVWIPPAWKGASQNDVGYGAYDLYDLGEFNQKGTVRTKYGTRSQLQAAVTSLKNNGIQVYGDVVMNHKGGADATEMVRAVEVNPNNRNQEVTGEYTIEAWTRFDFPGRGNTHSSFKWRWYHFDGVDWDQSRRLNNRIYKFRGKAWDWEVDTEFGNYDYLMYADYDMDYPETTNEIRNWGVWYTNTLGLDGFRIDAVKHIKYSFTRDWINHVRSATGKNMFAVAEFWKNDLGAIENYLQKTNWNHSVFDVPLHYNLYNASKSGGNYDMRNIFNGTVVQRHPSHAVTFVDNHDSQPEEALESFVEEWFKPLAYALTLTREQGYPSVFYGDYYGIPTHGVPAMRSKIDPILEARQKYAYGPQHDYLDHPDVIGWTREGDSSHPKSGLATLITDGPGGSKRMYAGLKNAGETWYDITGNRSDTVKIGSDGWGEFHVNDGSVSIYVQK

SEQ ID NO: 41907 - protein, 478 aa, Bacillus sp.
NGTMMQYFEWYLPNDGNHWNRLNSDASNLKSKGITAVWIPPAWKGASQNDVGYGAYDLYDLGEFNQKGTVRTKYGTRSQLQAAVTSLKNNGIQVYGDVVMNHKGGADATEMVRAVEVNPNNRNQEVTGEYTIEAWTRFDFPGRGNTHSSFKWRWYHFDGVDWDQSRRLNNRIYKFRGKAWDWEVDTEFGNYDYLMYADYDMDHPEVVNELRNWGVWYTNTLGLDGFRIDAVKHIKYSFTRDWINHVRSATGKNMFAVAEFWKNDLGAIENYLQKTNWNHSVFDVPLHYNLYNASKSAGNYDMRNIFNGTVVQRHPSHAVTFVDNHDSQPEEALESFVEPWFKPLAYALTLTREQGYPSVFYGDYYGIPTHGVPAMRSKIDPILEARQKYAYGPQHDYLDHPDVIGWTREGDSSHPKSGLATLITDGPGGSKRMYAGLKNAGETWYDITGNRSDTVKIGSDGWGEFHVNGSSVSIYVQK

SEQ ID NO: 41908 - protein, 478 aa, Bacillus sp.
NGTMMQYFEWYLPNDGNHWNRLNSDASNLKSKGITAVWIPPAWKGASQNDVGYGAYDLYDLGEFNQKGTVRTKYGTRSQLQAAVTSLKNNGIQVYGDVVMNHKGGADATEMVRAVEVNPNNRNQEVTGEYTIEAWTRFDFPGRGNTHSSFKWRWYHFDGVDWDQSRRLNNRIYKFRGKAWDWEVDTEFGNYDYLMYADYDMDHPEVVNELRNWGVWYTNTLGLDGFRIDAVKHIKYSFTRDWINHVRSATGKNMFAVAEFWKNDLGAIENYLQKTNWNHSVFDVPLHYNLYNASKSSGNYDMRNIFNGTVVQRHPSHAVTFVDNHDSQPEEALESFVEPWFKPLAYALTLTREQGYPSVFYGDYYGIPTHGVPAMRSKIDPILEARQKYAYGPQHDYLDHPDVIGWTREGDSSHPKSGLATLITDGPGGSKRMYAGLKNAGETWYDITGNRSDTVKIGSDGWGEFHVNQSSVSIYVQK

SEQ ID NO: 41909 - protein, 478 aa, Bacillus sp.
NGTMMQYFEWYLPNDGNHWNRLNSDASNLKSKGITAVWIPPAWKATSQNDVGYGAYDLYDLGEFNQKGTVRTKYGTRSQLQAAVTSLKNNGIQVYGDVVMNHKGGADLTEMVRAVEVNPNNRNQEVTGEYTIEAWTRFDFPGRGNTHSSFKWRWYHFDGVDWDQSRELSNRIYKFRGKAWDWEVDTEFGNYDYLMYADYDMDHPEVVNELRNWGVWYTNTLGLDGFRIDAVKHIKYSFTRDWINHVRSATGKNMFAVAEFWKNDLGAIENYLQKTNWNHSVFDVPLHYNLYNASKSVGNYDMRNIFNGTVVQRHPSHAVTFVDNHDSQPEEALESFVDTWFKPLAYALTLTREQGYPSVFYGDYYGIPTHGVPAMRSKIDPILEARQKYAYGPQHDYLDHPDVIGWTREGDSSHPKSGLATLITDGPGGSKRMYAGLKNAGETWYDITGNRSDTVKIGSDGWGEFHVNGSSVSIYVQK

SEQ ID NO: 41910 - protein, 478 aa, Bacillus sp.
NGTMMQYFEWYLPNDGNHWNRLNSDASNLKSKGITAVWIPPAWKGASQNDVGYGAYDLYDLGEFNQKGTVRTKYGTRSQLQAAVTSLKNNGIQVYGDVVMNHKGGADATEMVRAVEVNPNNRNQEVTGEYTIEAWTRFDFPGRGNTHSSFKWRWYHFDGVDWDQSRRLNNRIYKFRGKAWDWEVDTEFGNYDYLMYADYDMDHPEVVNELRNWGVWYTNTLGLDGFRIDAVKHIKYSFTRDWINHVRSATGKNMFAVAEFWKNDLGAIENYLQKTNWNHSVFDVPLHYNLYNASQSGANYDMRNIFNGTVVQRHPSHAVTFVDNHDSQPEEALESFVDEWFKPLAYALTLTREQGYPSVFYGDYYGIPTHGVPAMRSKIDPILEARQKYAYGPQHDYLDHPDVIGWTREGDSSHPKSGLATLITDGPGGSKRMYAGLKNAGETWYDITGNRSDTVKIGSDGWGEFHVNGKSVSIYVQK

SEQ ID NO: 41911 - protein, 478 aa, Bacillus sp.
NGTMMQYFEWYLPNDGNHWNRLNSDASNLKSKGITAVWIPPAWKGASQNDVGYGAYDLYDLGEFNQKGTVRTKYGTRSQLQAAVTSLKNNGIQVYGDVVMNHKGGADATEMVRAVEVNPNNRNQEVTGEYTIEAWTRFDFPGRGNTHSSFKWRWYHFDGVDWDQSRRLNNRIYKFRGKAWDWEVDTEFGNYDYLMYTDYDMDHPEVVNELRNWGVWYTNTLGLDGFRIDAVKHIKYSFTRDWINHVRSATGKNMFAVAEFWKNDLGAIENYLQKTNWNHSVFDVPLHYNLYNASKSQGNYDMRNIFNGTVVQRHPSHAVTFVDNHDSQPEEALESFVDTWFKPLAYALTLTREQGYPSVFYGDYYGIPTHGVPAMRSKIDPILEARQKYAYGPQHDYLDHPDVIGWTREGDSSHPKSGLATLITDGPGGSKRMYAGLKNAGETWYDITGNRSDTVKIGSDGWGEFHVNGSSVSIYVQK

SEQ ID NO: 41912 - protein, 478 aa, Bacillus sp.
NGTMMQYFEWYLPNDGNHWNRLNSDASNLKSKGITAVWIPPAWKGASQNDVGYGAYDLYDLGEFNQKGTVRTKYGTRSQLQAAVTSLKNNGIQVYGDVVMNHKGGADATEMVRAVEVNPNNRNQEVTGEYTIEAWTRFDFPGRGNTHSSFKWRWYHFDGVDWDQSRNFQNRIYKFRGKAWDWEVDTEFGNYDYLMYADIDYDHPESTNEMRNWGVWYTNTLGLDGFRIDAVKHIKYSFTRDWINHVRSATGKNMFAVAEFWKNDLGAIENYLQKTNWNHSVFDVPLHYNLYNASKSQGNYDMRNIFNGTVVQRHPSHAVTFVDNHDSQPEEALESFVDTWFKPLAYALTLTREQGYPSVFYGDYYGIPTHGVPAMRSKIDPILEARQKYAYGPQHDYLDHPDVIGWTREGDSSHPKSGLATLITDGPGGSKRMYAGLKNAGETWYDITGNRSDTVKIGSDGWGEFHVNGSSVSIYVQK

SEQ ID NO: 41913 - protein, 478 aa, Bacillus sp.
NGTMMQYFEWYLPNDGNHWNRLNSDASNLKSKGITAVWIPPAWKGASQNDVGYGAYDLYDLGEFNQKGTVRTKYGTRSQLQAAVTSLKNNGIQVYGDVVMNHKGGADATEMVRAVEVNPNNRNQEVTGEYTIEAWTRFDFPGRGNTHSSFKWRWYHFDGVDWDQSRRLNNRIYKFRGKAWDWEVDTEFGNYDYLMYADYDMDHPEVVNELRNWGVWYTNTLGLDGFRIDAVKHIKYSFTRDWINHVRSATGKNMFAVAEFWKNDLGAIENYLQKTNWNHSVFDVPLHYNLYNASKSQGNYDMRNIFNGTVVQRHPSHAVTFVDNHDSQPEEALESFVDPWFKPLAYALTLTREQGYPSVFYGDYYGIPTHGVPAMRSKIDPILEARQKYAYGPQHDYLDHPDVIGWTREGDSSHPKSGLATLITDGPGGSKRMYAGLKNAGETWYDITGNRSDTVKIGSDGWGEFHVNGQSVSIYVQK

SEQ ID NO: 41914 - protein, 478 aa, Bacillus sp.
NGTMMQYFEWYLPNDGNHWNRLNSDASNLKSKGITAVWIPPAWKAVSQNDVGYGAYDLYDLGEFNQKGTVRTKYGTRSQLQAAVTSLKNNGIQVYGDVVMNHKGGADATEMVRAVEVNPNNRNQEVTGEYTIEAWTRFDFPGRGNTHSSFKWRWYHFDGVDWDQSRNLTNRIYKFRGKAWDWEVDTEFGNYDYLMYTDYDMDHPEVVNELRNWGVWYTNTLGLDGFRIDAVKHIKYSFTRDWINHVRSATGKNMFAVAEFWKNDLGAIENYLQKTNWNHSVFDVPLHYNLYNASKSGGNYDMRNIFNGTVVQVHPSHAVTFVDNHDSQPEEALESFVEEWFKPLAYALTLTREQGYPSVFYGDYYGIPTHGVPAMRSKIDPILEARQKYAYGPQHDYLDHPDVIGWTREGDSSHPKSGLATLITDGPGGSKRMYAGLKNAGETWYDITGNRSDTVKIGSDGWGEFHVNDGSVSIYVQK

SEQ ID NO: 41915 - protein, 478 aa, Bacillus sp.
NLTMMQYFEWYLPNDGNHWNRLNSDASNLKSKGITAVWIPPAWKGASQNDVGYGAYDLYDLGEFNQKGTVRTKYGTRSQLQAAVTSLKNNGIAVYGDVVMNHKGGADATEMVRAVEVNPNNRNQEVTGEYTIEAWTRFDFPGRGNTHSSFKWRWYHFDGVDWDQSRRLNNRIYKFRGKAWDWEVDTEFGNYDYLMYADYDMDHPEVVNELRNWGVWYTNTLGLDGFRIDAVKHIKYSFTRDWINHVRSATGKNMFAVAEFWKNDLGAIENYLQKTNWNHSVFDVPLHYNLYNASKSGGNYDMRNIFNGTVVQAHPMHAVTFVDNHDSQPEEALESFVEEWFKPLAYALTLTREQGYPSVFYGDYYGIPTHGVPAMRSKIDPILEARQKYAYGPQHDYLDHPDVIGWTREGDSSHPKSGLATLITDGPGGSKRMYAGLKNAGETWYDITGNRSDTVKIGSDGWGEFHVNDGSVSIYVQK

SEQ ID NO: 41916 - protein, 478 aa, Bacillus sp.
NGTMMQYFEWYLPNDGNHWNRLNSDASNLKSKGITAVWIPPAWKGASQNDVGYGAYDLYDLGEFNQKGTVRTKYGTRSQLQAAVTSLKNNGIQVYGDVVMNHKGGADATEMVRAVEVNPNNRNQEVTGEYTIEAWTRFDFPGRGNTHSSFKWRWYHFDGVDWDQSRRLNNRIYKFRGKAWDWEVDTEFGNYDYLMYADYDMDHPEVVNELRNWGVWYTNTLGLDGFRIDAVKHIKYSFTRDWINHVRSATGKNMFAVAEFWKNDLGAIENYLQKTNWNHSVFDVPLHYNLYNASKSSGNYDMRNIFNGTVVQRHPSHAVTFVDNHDSQPEEALESFVDEWFKPLAYALTLTREQGYPSVFYGDYYGIPTHGVPAMRSKIDPILEARQKYAYGPQHDYLDHPDVIGWTREGDSSHPKSGLATLITDGPGGSKRMYAGLKNAGETWYDITGNRSDTVKIGSDGWGEFHVNKQSVSIYVQK

SEQ ID NO: 41917 - protein, 478 aa, Bacillus sp.
NGTMMQYFEWYLPNDGNHWNRLNSDASNLKSKGITAVWIPPAWKAVSQNDVGYGAYDLYDLGEFNQKGTVRTKYGTRSQLQAAVTSLKNNGIQVYGDVVMNHKGGADATEMVRAVEVNPNNRNQEVTGEYTIEAWTRFDFPGRGNTHSSFKWRWYHFDGVDWDQSRNLTNRIYKFRGKAWDWEVDTEFGNYDYLMYTDYDYDHPESTNEMRNWGVWYTNTLGLDGFRIDAVKHIKYSFTRDWINHVRSATGKNMFAVAEFWKNDLGAIENYLQKTNWNHSVFDVPLHYNLYNASKSGGNYDMRNIFNGTVVQRHPSHAVTFVDNHDSQPEEALESFVEEWFKPLAYALTLTREQGYPSVFYGDYYGIPTHGVPAMRSKIDPILEARQKYAYGPQHDYLDHPDVIGWTREGDSSHPKSGLATLITDGPGGSKRMYAGLKNAGETWYDITGNRSDTVKIGSDGWGEFHVNDGSVSIYVQK

SEQ ID NO: 41918 - protein, 478 aa, Bacillus sp.
NGTMMQYFEWYLPNDGNHWNRLNSDASNLKSKGITAVWIPPAWKAASQNDVGYGAYDLYDLGEFNQKGTVRTKYGTRSQLQAAVTSLKNNGIQVYGDVVMNHKGGADATEMVRAVEVNPNNRNQEVTGEYTIEAWTRFDFPGRGNTHSSFKWRWYHFDGVDWDQSRQLTNRIYKFRGKAWDWEVDTEFGNYDYLMYADYDMDHPEVVNELRNWGVWYTNTLGLDGFRIDAVKHIKYSFTRDWINHVRSATGKNMFAVAEFWKNDLGAIENYLQKTNWNHSVFDVPLHYNLYNASKSQGNYDMRNIFNGTVVQRHPSHAVTFVDNHDSQPEEALESFVDTWFKPLAYALTLTREQGYPSVFYGDYYGIPTHGVPAMRSKIDPILEARQKYAYGPQHDYLDHPDVIGWTREGDSSHPKSGLATLITDGPGGSKRMYAGLKNAGETWYDITGNRSDTVKIGSDGWGEFHVNGSSVSIYVQK

SEQ ID NO: 41919 - protein, 478 aa, Bacillus sp.
NGTMMQYFEWYLPNDGNHWNRLNSDASNLKSKGIKAVWIPPAWKAVSQNDVGYGAYDLYDLGEFNQKGTVRTKYGTRSQLQAAVTSLKNNGIQVYGDVVMNHKGGADATEMVRAVEVNPNNRNQEVTGEYTIEAWTRFDFPGRGNTHSSFKWRWYHFDGVDWDQSRNLTNRIYKFRGKAWDWEVDTEFGNYDYLMYTDYDMDHPEVVNELRNWGVWYTNTLGLDGFRIDAVKHIKYSFTRDWINHVRSATGKNMFAVAEFWKNDLGAIENYLQKTNWNHSVFDVPLHYNLYNASKSGGNYDMRNIFNGTVVQRHPSHAVTFVDNHDSQPEEALESFVEEWFKPLAYALTLTREQGYPSVFYGDYYGIPTHGVPAMRSKIDPILEARQKYAYGPQHDYLDHPDVIGWTREGDSSHPKSGLATLITDGPGGSKRMYAGLKNAGETWYDITGNRSDTVKIGSDGWGEFHVNDGSVSIYVQK

SEQ ID NO: 41920 - protein, 478 aa, Bacillus sp.
NQTMMQYFEWYLPNDGNHWNRLNSDASNLKSKGITAVWIPPAWKGASQNDVGYGAYDLYDLGEFNQKGTVRTKYGTRSQLQAAVTSLKNNGIQVYGDVVMNHKGGADATEMVRAVEVNPNNRNQEVTGEYTIEAWTRFDFPGRGNTHSSFKWRWYHFDGVDWDQSRRLNNRIYKFRGKAWDWEVDTEFGNYDYLMYADYDMDHPEVVNELRNWGVWYTNTLGLDGFRIDAVKHIKYSFTRDWINHVRSATGKNMFAVAEFWKNDLGAIENYLQKTNWNHSVFDVPLHYNLYNASKSGGNYDMRNIFNGTVVQSNPMHAVTFVDNHDSQPEEALESFVEEWFKPLAYALTLTREQGYPSVFYGDYYGIPTHGVPAMRSKIDPILEARQKYAYGPQHDYLDHPDVIGWTREGDSSHPKSGLATLITDGPGGSKRMYAGLKNAGETWYDITGNRSDTVKIGSDGWGEFHVNDGSVSIYVQK

SEQ ID NO: 41921 - protein, 478 aa, Bacillus sp.
NGTMMQYFEWYLPNDGNHWNRLNSDASNLKSKGITAVWIPPAWKGASQNDVGYGAYDLYDLGEFNQKGTVRTKYGTRSQLQAAVTSLKNNGIQVYGDVVMNHKGGADATEMVRAVEVNPNNRNQEVTGEYTIEAWTRFDFPGRGNTHSSFKWRWYHFDGVDWDQSRRLNNRIYKFRAKAWDWEVDTEFGNYDYLMYADYDMDHPETINELRNWGVWYTNTLGLDGFRIDAVKHIKYSFTRDWINHVRSATGKNMFAVAEFWKNDLGAIENYLQKTNWNHSVFDVPLHYNLYNASKSGGNYDMRNIFNGTVVQRHPSHAVTFVDNHDSQPEEALESFVEEWFKPLAYALTLTREQGYPSVFYGDYYGIPTHGVPAMRSKIDPILEARQKYAYGPQHDYLDHPDVIGWTREGDSSHPKSGLATLITDGPGGSKRMYAGLKNAGETWYDITGNRSDTVKIGSDGWGEFHVNDGSVSIYVQK

SEQ ID NO: 41922 - protein, 478 aa, Bacillus sp.
NQTMMQYFEWYLPNDGNHWNRLNSDASNLKSKGITAVWIPPAWKGASQNDVGYGAYDLYDLGEFNQKGTVRTKYGTRSQLQAAVTSLKNNGIAVYGDVVMNHKGGADATEMVRAVEVNPNNRNQEVTGEYTIEAWTRFDFPGRGNTHSSFKWRWYHFDGVDWDQSRRLNNRIYKFRGKAWDWEVDTEFGNYDYLMYADYDMDHPEVVNELRNWGVWYTNTLGLDGFRIDAVKHIKYSFTRDWINHVRSATGKNMFAVAEFWKNDLGAIENYLQKTNWNHSVFDVPLHYNLYNASKSGGNYDMRNIFNGTVVQMHPMHAVTFVDNHDSQPEEALESFVEEWFKPLAYALTLTREQGYPSVFYGDYYGIPTHGVPAMRSKIDPILEARQKYAYGPQHDYLDHPDVIGWTREGDSSHPKSGLATLITDGPGGSKRMYAGLKNAGETWYDITGNRSDTVKIGSDGWGEFHVNDGSVSIYVQK

SEQ ID NO: 41923 - protein, 478 aa, Bacillus sp.
NGTMMQYFEWYLPNDGNHWNRLNSDASNLKSKGITAVWIPPAWKATSQNDVGYGAYDLYDLGEFNQHGTVRTKYGTRSQLQAAVTSLKNNGIQVYGDVVMNHKGGADATEMVRAVEVNPNNRNQEVTGEYTIEAWTRFDFPGRGNTHSSFKWRWYHFDGVDWDQSRQLQNRIYKFRGKAWDWEVDTEFGNYDYLMYVDYDMDHPEVVNELRNWGVWYTNTLGLDGFRIDAVKHIKYSFTRDWINHVRSATGKNMFAVAEFWKNDLGAIENYLQKTNWNHSVFDVPLHYNLYNASKSGGNYDMRNIFNGTVVQRHPSHAVTFVDNHDSQPEEALESFVEEWFKPLAYALTLTREQGYPSVFYGDYYGIPTHGVPAMRSKIDPILEARQKYAYGPQHDYLDHPDVIGWTREGDSSHPKSGLATLITDGPGGSKRMYAGLKNAGETWYDITGNRSDTVKIGSDGWGEFHVNDGSVSIYVQK

SEQ ID NO: 41924 - protein, 478 aa, Bacillus sp.
NGTMMQYFEWYLPNDGNHWNRLNSDASNLKSKGITAVWIPPAWKGASQNDVGYGAYDLYDLGEFNQRGTVRTKYGTRSQLQAAVTSLKNNGIQVYGDVVMNHKGGADLTEMVRAVEVNPNNRNQEVTGEYTIEAWTRFDFPGRGNTHSSFKWRWYHFDGVDWDQSRRLNNRIYKFRGKAWDWEVDTEFGNYDYLMYADYDMDHPEVVNELRNWGVWYTNTLGLDGFRIDAVKHIKYSFTRDWINHVRIATGKNMFAVAEFWKNDLGAIENYLQKTNWNHSVFDVPLHYNLYNASKSGGNYDMRNIFNGTVVQRHPSHAVTFVDNHDSQPEEALESFVDEWFKPLAYALTLTREQGYPSVFYGDYYGIPTHGVPAMRSKIDPILEARQKYAYGPQHDYLDHPDVIGWTREGDSSHPKSGLATLITDGPGGSKRMYAGLKNAGETWYDITGNRSDTVKIGSDGWGEFHVNDQSVSIYVQK

SEQ ID NO: 41925 - protein, 478 aa, Synthetic construct
NGTMMQYFEWYLPNDGNHWNRLNSDASNLKSKGITAVWIPPAWKGASQNDVGYGAYDLYDLGEFNQKGTVRTKYGTRSQLQAAVTSLKNNGIQVYGDVVMNHKGGADATEMVRAVEVNPNNRNQEVTGEYTIEAWTRFDFPGRGNTHSSFKWRWYHFDGVDWDQSRRLNNRIYKFRGKAWDWEVDTEFGNYDYLMYADIDMDYPETTNEVRNWGVWYTNTLGLDGFRIDAVKHIKYSFTRDWINHVRSATGKNMFAVAEFWKNDLGAIENYLQKTNWNHSVFDVPLHYNLYNASKSGGNYDMRNIFNGTVVQRHPSHAVTFVDNHDSQPEEALESFVEEWFKPLAYALTLTREQGYPSVFYGDYYGIPTHGVPAMRSKIDPILEARQKYAYGPQHDYLDHPDVIGWTREGDSSHPKSGLATLITDGPGGSKRMYAGLKNAGETWYDITGNRSDTVKIGSDGWGEFHVNDGSVSIYVQK

SEQ ID NO: 41926 - protein, 478 aa, Bacillus sp.
NGTMMQYFEWYLPNDGNHWNRLNSDASNLKSKGIKAVWIPPAWKAASQNDVGYGAYDLYDLGEFNQKGTVRTKYGTRSQLQAAVTSLKNNGIQVYGDVVMNHKGGADATEMVRAVEVNPNNRNQEVTGEYTIEAWTRFDFPGRGNTHSSFKWRWYHFDGVDWDQSRQLNNRIYKFRGKAWDWEVDTEFGNYDYLMYADYDMDHPEVVNELRNWGVWYTNTLGLDGFRIDAVKHIKYSFTRDWINHVRSATGKNMFAVAEFWKNDLGAIENYLQKTNWNHSVFDVPLHYNLYNASKSGGNYDMRNIFNGTVVQRHPSHAVTFVDNHDSQPEEALESFVEEWFKPLAYALTLTREQGYPSVFYGDYYGIPTHGVPAMRSKIDPILEARQKYAYGPQHDYLDHPDVIGWTREGDSSHPKSGLATLETDGPGGSKRMYAGLKNAGETWYDITGNRSDTVKIGSDGWGEFHVNDGSVSIYVQK

SEQ ID NO: 41927 - protein, 478 aa, Bacillus sp.
NGTMMQYFEWYLPNDGNHWNRLNSDASNLKSKGITAVWIPPAWKGASQNDVGYGAYDLYDLGEFNQKGTVRTKYGTRSQLQAAVTSLKNNGIQVYGDVVMNHKGGADATEMVRAVEVNPNNRNQEVTGEYTIEAWTRFDFPGRGNTHSSFKWRWYHFDGVDWDQSRELDNRIYKFRGKAWDWEVDTEFGNYDYLMYTDYDMDHPEVVNELRNWGVWYTNTLGLDGFRIDAVKHIKYSFTRDWINHVRSATGKNMFAVAEFWKNDLGAIENYLQKTNWNHSVFDVPLHYNLYNASKSQGNYDMRNIFNGTVVQRHPSHAVTFVDNHDSQPEEALESFVDTWFKPLAYALTLTREQGYPSVFYGDYYGIPTHGVPAMRSKIDPILLARQKYAYGPQHDYLDHPDVIGWTREGDSSHPKSGLATLITDGPGGSKRMYAGLKNAGETWYDITGNRSDTVKIGSDGWGEFHVNGSSVSIYVQK

SEQ ID NO: 41928 - protein, 478 aa, Bacillus sp.
NGTMMQYFEWYLPNDGNHWNRLNSDASNLKSKGITAVWIPPAWKGASQNDVGYGAYDLYDLGEFNQKGTVRTKYGTRSQLQAAVTSLKNNGIQVYGDVVMNHKGGADATEMVRAVEVNPNNRNQEVTGEYTIEAWTRFDFPGRGNTHSSFKWRWYHFDGVDWDQSRRLNNRIYKFRGKAWDWEVDTEFGNYDYLMYADYDMDHPEVVNELRNWGVWYTNTLGLDGFRIDAVKHIKYSFTRDWINHVRSATGKNMFAVAEFWKNDLGAIENYLQKTNWNHSVFDVPLHYNLYNASQSSGNYDMRNIFNGTVVQRHPSHAVTFVDNHDSQPEEALESFVDEWFKPLAYALTLTREQGYPSVFYGDYYGIPTHGVPAMRSKIDPILEARQKYAYGPQHDYLDHPDVIGWTREGDSSHPKSGLATLITDGPGGSKRMYAGLKNAGETWYDITGNRSDTVKIGSDGWGEFHVNGQSVSIYVQK

SEQ ID NO: 41929 - protein, 478 aa, Bacillus sp.
NGTMMQYFEWYLPNDGNHWNRLNSDASNLKSKGITAVWIPPAWKATSQNDVGYGAYDLYDLGEFNQKGTVRTKYGTRSQLQAAVTSLKNNGIQVYGDVVMNHKGGADATEMVRAVEVNPNNRNQEVTGEYTIEAWTRFDFPGRGNTHSSFKWRWYHFDGVDFDQSRNVNNRIYKFRGKAWDWEVDTEFGNYDYLMYADIDYDHPESTNEMRNWGVWYTNTLGLDGFRIDAVKHIKYSFTRDWINHVRSATGKNMFAVAEFWKNDLGAIENYLQKTNWNHSVFDVPLHYNLYNASKSGGNYDMRNIFNGTVVQRHPSHAVTFVDNHDSQPEEALESFVEEWFKPLAYALTLTREQGYPSVFYGDYYGIPTHGVPAMRSKIDPILEARQKYAYGPQHDYLDHPDVIGWTREGDSSHPKSGLATLITDGPGGSKRMYAGLKNAGETWYDITGNRSDTVKIGSDGWGEFHVNDGSVSIYVQK

SEQ ID NO: 41930 - protein, 478 aa, Bacillus sp.
NGTMMQYFEWYLPNDGNHWNRLNSDASNLKSKGITAVWIPPAWKGASQNDVGYGAYDLYDLGEFNQKGTVRTKYGTRSQLQAAVTSLKNNGIQVYGDVVMNHKGGADATEMVRAVEVNPNNRNQEVTGEYTIEAWTRFDFPGRGNTHSSFKWRWYHFDGVDWDQSRRLNNRIYKFRGKAWDWEVDTEFGNYDYLMYADYDMDHPEVVNELRNWGVWYTNTLGLDGFRIDAVKHIKYSFTRDWINHVRSATGKNMFAVAEFWKNDLGAIENYLQKTNWNHSVFDVPLHYNLYNASKSGSNYDMRNIFNGTVVQRHPSHAVTFVDNHDSQPEEALESFVEPWFKPLAYALTLTREQGYPSVFYGDYYGIPTHGVPAMRSKIDPILEARQKYAYGPQHDYLDHPDVIGWTREGDSSHPKSGLATLITDGPGGSKRMYAGLKNAGETWYDITGNRSDTVKIGSDGWGEFHVNKQSVSIYVQK

SEQ ID NO: 41931 - protein, 478 aa, Bacillus sp.
NGTMMQYFEWYLPNDGNHWNRLNSDASNLKSKGITAVWIPPAWKATSQNDVGYGAYDLYDLGEFNQKGTVRTKYGTRSQLQAAVTSLKNNGIQVYGDVVMNHKGGADATEMVRAVEVNPNNRNQEVTGEYTIEAWTRFDFPGRGNTHSSFKWRWYHFDGVDWDQSRNVNNRIYKFRGKAWDWEVDTEFGNYDYLMYADYDMDHPEVVNELRNWGVWYTNTLGLDGFRIDAVKHIKYSFTRDWINHVRSATGKNMFAVAEFWKNDLGAIENYLQKTNWNHSVFDVPLHYNLYNASKSQGNYDMRNIFNGTVVQRHPSHAVTFVDNHDSQPEEALESFVDTWFKPLAYALTLTREQGYPSVFYGDYYGIPTHGVPAMRSKIDPILEARQKYAYGPQHDYLDHPDVIGWTREGDSSHPKSGLATLITDGPGGSKRMYAGLKNAGETWYDITGNRSDTVKIGSDGWGEFHVNGTSVSIYVQK

SEQ ID NO: 41932 - protein, 478 aa, Bacillus sp.
NGTMMQYFEWYLPNDGNHWNRLNSDASNLKSKGITAVWIPPAWKGTSQNDVGYGAYDLYDLGEFNQKGTVRTKYGTRSQLQAAVTSLKNNGIQVYGDVVMNHKGGADATEMVRAVEVNPNNRNQEVTGEYTIEAWTRFDFPGRGNTHSSFKWRWYHFDGVDWDQSRNLNNRIYKFRGKAWDWEVDTEFGNYDYLMYADIDYDHPESTNEMRNWGVWYTNTLGLDGFRIDAVKHIKYSFTRDWINHVRSATGKNMFAVAEFWKNDLGAIENYLQKTNWNHSVFDVPLHYNLYNASKSQGNYDMRNIFNGTVVQRHPSHAVTFVDNHDSQPEEALESFVDTWFKPLAYALTLTREQGYPSVFYGDYYGIPTHGVPAMRSKIDPILEARQKYAYGPQHDYLDHPDVIGWTREGDSSHPKSGLATLITDGPGGSKRMYAGLKNAGETWYDITGNRSDTVKIGSDGWGEFHVNGSSVSIYVQK

SEQ ID NO: 41933 - protein, 478 aa, Bacillus sp.
NGTMMQYFEWYLPNDGNHWNRLNSDASNLKSKGITAVWIPPAWKAASQNDVGYGAYDLYDLGEFNQKGTVRTKYGTRSQLQAAVTSLKNNGIQVYGDVVMNHKGGADATEMVRAVEVNPNNRNQEVTGEYTIEAWTRFDFPGRGNTHSSFKWRWYHFDGVDWDQSRNLTNRIYKFRGKAWDWEVDTEFGNYDYLMYADYDMDHPEVVNELRNWGVWYTNTLGLDGFRIDAVKHIKYSFTRDWINHVRSATGKNMFAVAEFWKNDLGAIENYLQKTNWNHSVFDVPLHYNLYNASKSGGNYDMRNIFNGTVVQANPNHAVTFVDNHDSQPEEALESFVEEWFKPLAYALTLTREQGYPSVFYGDYYGIPTHGVPAMRSKIDPILEARQKYAYGPQHDYLDHPDVIGWTREGDSSHPKSGLATLITDGPGGSKRMYAGLKNAGETWYDITGNRSDTVKIGSDGWGEFHVNDGSVSIYVQK

SEQ ID NO: 41934 - protein, 478 aa, Bacillus sp.
NGTMMQYFEWYLPNDGNHWNRLNSDASNLKSKGITAVWIPPAWKGASQNDVGYGAYDLYDLGEFNQKGTVRTKYGTRSQLQAAVTSLKNNGIQVYGDVVMNHKGGADATEMVRAVEVNPNNRNQEVTGEYTIEAWTRFDFPGRGNTHSSFKWRWYHFDGVDWDQSRNLQNRIYKFRGKAWDWEVDTEFGNYDYLMYADYDMDHPEVVNELRNWGVWYTNTLGLDGFRIDAVKHIKYSFTRDWINHVRSATGKNMFAVAEFWKNDLGAIENYLQKTNWNHSVFDVPLHYNLYNASKSGGNYDMRNIFNGTVVQRHPSHAVTFVDNHDSQPEEALESFVDEWFKPLAYALTLTREQGYPSVFYGDYYGIPTHGVPAMRSKIDPILEARQKYAYGPQHDYLAHPDVMGWTREGDSSHPKSGLATLITDGPGGSKRMYAGLKKAGETWYDITGNRSDTVKIGSDGWGEFHVNDGSVSIYVQK

SEQ ID NO: 41935 - protein, 478 aa, Bacillus sp.
NGTMMQYFEWYLPNDGNHWNRLNSDASNLKSKGITAVWIPPAWKGASQNDVGYGAYDLYDLGEFNQKGTVRTKYGTRSQLQAAVTSLKNNGIQVYGDVVMNHKGGADYTEMVRAVEVNPNNRNQEVTGEYTIEAWTRFDFPGRQNTHSSFKWRWYHFDGVDWDQSERLNNRIYKFRGKAWDWEVETEFGNYDYLMYADYDMDHPEVVNELRNWGVWYTNTLGLDGFRIDAVKHIKYSFTRDWINHVRSATGKNMFAVAEFWKNDLGAIENYLSKTNWNHSVFDVPLHYNLYNASKSGGNYDMRNIFNGTVVQRHPSHAVTFVDNHDSQPEEALESFVEEWFKPLAYALTLTREQGYPSVFYGDYYGIPTHGVPAMRSKIDPILEARQKYAYGPQHDYLDHPDVIGWTREGDSSHPKSGLATLITDGPGGSKRMYAGLKNAGETWYDITGNRSDTVKIGSDGWGEFHVNDGSVSIYVQK

SEQ ID NO: 41936 - protein, 478 aa, Bacillus sp.
NGTMMQYFEWYLPNDGNHWNRLNSDASNLKSKGITAVWIPPAWKGASQNDVGYGAYDLYDLGEFNQKGTVRTKYGTRSQLQAAVTSLKNNGIQVYGDVVMNHKGGADATEMVRAVEVNPNNRNQEVTGEYTIEAWTRFDFPGRGNTHSSFKWRWYHFDGVDWDQSRRLNNRIYKFRGKAWDWEVDTEFGNYDYLMYADYDMDHPEVVNELRNWGVWYTNTLGLDGFRIDAVKHIKYSFTRDWINHVRSATGKNMFAVAEFWKNDLGAIENYLQKTNWNHSVFDVPLHYNLYNASKSAGNYDMRNIFNGTVVQRHPSHAVTFVDNHDSQPEEALESFVEPWFKPLAYALTLTREQGYPSVFYGDYYGIPTHGVPAMRSKIDPILEARQKYAYGPQHDYLDHPDVIGWTREGDSSHPKSGLATLITDGPGGSKRMYAGLKNAGETWYDITGNRSDTVKIGSDGWGEFHVNKQSVSIYVQK

SEQ ID NO: 41937 - protein, 478 aa, Bacillus sp.
NGTMMQYFEWYLPNDGNHWNRLNSDASNLKSKGIKAVWIPPAWKAASQNDVGYGAYDLYDLGEFNQKGTVRTKYGTRSQLQAAVTSLKNNGIQVYGDVVMNHKGGADATEMVRAVEVNPNNRNQEVTGEYTIEAWTRFDFPGRGNTHSSFKWRWYHFDGVDWDQSRDLDNRIYKFRGKAWDWEVDTEFGNYDYLMYADYDMDHPEVVNELRNWGVWYTNTLGLDGFRIDAVKHIKYSFTRDWINHVRSATGKNMFAVAEFWKNDLGAIENYLQKTNWNHSVFDVPLHYNLYNASKSGGNYDMRNIFNGTVVQRHPSHAVTFVDNHDSQPEEALESFVETWFKPLAYALTLTREQGYPSVFYGDYYGIPTHGVPAMRSKIDPILEARQKYAYGPQHDYLDHPDVIGWTREGDSSHPKSGLATLITDGPGGSKRMYAGLKNAGETWYDITGNRSDTVKIGSDGWGEFHVNKASVSIYVQK

SEQ ID NO: 41938 - protein, 478 aa, Bacillus sp.
NGTMMQYFEWYLPNDGNHWNRLNSDASNLKSKGITAVWIPPAWKGASQNDVGYGAYDLYDLGEFNQKGTVRTKYGTRSQLQAAVTSLKNNGIQVYGDVVMNHKGGADATEMVRAVEVNPNNRNQEVTGEYTIEAWTRFDFPGRGNTHSSFKWRWYHFDGVDWDQSRRLNNRIYKFRGKAWDWEVDTEFGNYDYLMYADYDMDHPEVVNELRNWGVWYTNTLGLDGFRIDAVKHIKYSFTRDWINHVRSATGKNMFAVAEFWKNDLGAIENYLQKTNWNHSVFDVPLHYNLYNASKSAGNYDMRNIFNGTVVQRHPSHAVTFVDNHDSQPEEALESFVEEWFKPLAYALTLTREQGYPSVFYGDYYGIPTHGVPAMRSKIDPILEARQKYAYGPQHDYLDHPDVIGWTREGDSSHPKSGLATLITDGPGGSKRMYAGLKNAGETWYDITGNRSDTVKIGSDGWGEFHVNKSSVSIYVQK

SEQ ID NO: 41939 - protein, 478 aa, Bacillus sp.
NGTMMQYFEWYLPNDGNHWNRLNSDASNLKSKGITAVWIPPAWKAASQNDVGYGAYDLYDLGEFNQKGTVRTKYGTRSQLQAAVTSLKNNGIQVYGDVVMNHKGGADATEMVRAVEVNPNNRNQEVTGEYTIEAYTRFDFPGRGNTHSSFKWRWYHFDGVDWDQSRDLTNRIYKFRGKAWDWEVDTEFGNYDYLMYADYDMDHPEVVNELRNWGVWYTNTLGLDGFRIDAVKHIKYSFTRDWINHVRSATGKNMFAVAEFWKNDLGAIENYLQKTNWNHSVFDVPLHYNLYNASKSGGNYDMRNIFNGTVVQRHPSHAVTFVDNHDSQPEEALESFVDPWFKPLAYALTLTREQGYPSVFYGDYYGIPTHGVPAMRSKIDPILEARQKYAYGPQHDYLDHPDVIGWTREGDSSHPKSGLATLITDGPGGSKRMYAGLKNAGETWYDITGNRSDTVKIGSDGWGEFHVNGGSVSIYVQK

SEQ ID NO: 41940 - protein, 478 aa, Bacillus sp.
NGTMMQYFEWYLPNDGNHWNRLNSDASNLKSKGITAVWIPPAWKGASQNDVGYGAYDLYDLGEFNQKGTVRTKYGTRSQLQAAVTSLKNNGIQVYGDVVMNHKGGADATEMVRAVEVNPNNRNQEVTGEYTIEAWTRFDFPGRGNTHSSFKWRWYHFDGVDWDQSRRLNNRIYKFRGKAWDWEVDTEFGNYDYLMYADYDMDHPEVVNELRNWGVWYTNTLGLDGFRIDAVKHIKYSFTRDWINHVRSATGKNMFAVAEFWKNDLGAIENYLQKTNWNHSVFDVPLHYNLYNASKSQGNYDMRNIFNGTVVQRHPSHAVTFVDNHDSQPEEALESFVEPWFKPLAYALTLTREQGYPSVFYGDYYGIPTHGVPAMRSKIDPILEARQKYAYGPQHDYLDHPDVIGWTREGDSSHPKSGLATLITDGPGGSKRMYAGLKNAGETWYDITGNRSDTVKIGSDGWGEFHVNGSSVSIYVQK

SEQ ID NO: 41941 - protein, 478 aa, Bacillus sp.
NGTMMQYFEWYLPNDGNHWNRLNSDASNLKSKGITAVWIPPAWKATSQNDVGYGAYDLYDLGEFNQKGTVRTKYGTRSQLQAAVTSLKNNGIQVYGDVVMNHKGGADATEMVRAVEVNPNNRNQEVTGEYTIEAWTRFDFPGRGNTHSSFKWRWYHFDGVDWDQSRNVNNRIYKFRGKAWDWEVDTEFGNYDYLMYADYDMDHPEVVNELRNWGVWYTNTLGLDGFRIDAVKHIKYSFTRDWINHVRSATGKNMFAVAEFWKNDLGAIENYLQKTNWNHSVFDVPLHYNLYNASKSGGNYDMRNIFNGTVVQRHPSHAVTFVDNHDSQPEEALESFVDEWFKPLAYALTLTREQGYPSVFYGDYYGIPTHGVPAMRSKIDPILEARQKYAYGPQHDYLDHPDVIGWTREGDSSHPKSGLATLITDGPGGSKRMYAGLKNAGETWYDITGNRSDTVKIGSDGWGEFHVNKSSVSIYVQK

SEQ ID NO: 41942 - protein, 478 aa, Bacillus sp.
NGTMMQYFEWYLPNDGNHWNRLNSDASNLKSKGITAVWIPPAWKGASQNDVGYGAYDLYDLGEFNQKGTVRTKYGTRSQLQAAVTSLKNNGIQVYGDVVMNHKGGADATEMVRAVEVNPNNRNQEVTGEYTIEAWTRFDFPGRGNTHSSFKWRWYHFDGVDWDQSRRLNNRIYKFRGKAWDWEVDTEFGNYDYLMYADYDMDHPEVVNELRNWGVWYTNTLGLDGFRIDAVKHIKYSFTRDWINHVRSATGKNMFAVAEFWKNDLGAIENYLQKTNWNHSVFDVPLHYNLYNASKSAGNYDMRNIFNGTVVQRHPSHAVTFVDNHDSQPEEALESFVEPWFKPLAYALTLTREQGYPSVFYGDYYGIPTHGVPAMRSKIDPILEARQKYAYGPQHDYLDHPDVIGWTREGDSSHPKSGLATLITDGPGGSKRMYAGLKNAGETWYDITGNRSDTVKIGSDGWGEFHVNKASVSIYVQK

SEQ ID NO: 41943 - protein, 478 aa, Bacillus sp.
NNTMMQYFEWYLPNDGNHWNRLNSDASNLKSKGITAVWIPPAWKGASQNDVGYGAYDLYDLGEFNQKGTVRTKYGTRSQLQAAVTSLKNNGISVYGDVVMNHKGGADATEMVRAVEVNPNNRNQEVTGEYTIEAWTRFDFPGRGNTHSSFKWRWYHFDGVDWDQSRRLNNRIYKFRGKAWDWEVDTEFGNYDYLMYADYDMDHPEVVNELRNWGVWYTNTLGLDGFRIDAVKHIKYSFTRDWINHVRSATGKNMFAVAEFWKNDLGAIENYLQKTNWNHSVFDVPLHYNLYNASKSGGNYDMRNIFNGTVVQMHPNHAVTFVDNHDSQPEEALESFVEEWFKPLAYALTLTREQGYPSVFYGDYYGIPTHGVPAMRSKIDPILEARQKYAYGPQHDYLDHPDVIGWTREGDSSHPKSGLATLITDGPGGSKRMYAGLKNAGETWYDITGNRSDTVKIGSDGWGEFHVNDGSVSIYVQK

SEQ ID NO: 41944 - protein, 478 aa, Bacillus sp.
NGTMMQYFEWYLPNDGNHWNRLNSDASNLKSKGITAVWIPPAWKAASQNDVGYGAYDLYDLGEFNQKGTVRTKYGTRSQLQAAVTSLKNNGIQVYGDVVMNHKGGADATEMVRAVEVNPNNRNQEVTGEYTIEAWTRFDFPGRGNTHSSFKWRWYHFDGVDWDQSRQTNNRIYKFRGKAWDWEVDTEFGNYDYLMYADYDMDHPEVVNELRNWGVWYTNTLGLDGFRIDAVKHIKYSFTRDWINHVRSATGKNMFAVAEFWKNDLGAIENYLQKTNWNHSVFDVPLHYNLYNASKSQGNYDMRNIFNGTVVQRHPSHAVTFVDNHDSQPEEALESFVDTWFKPLAYALTLTREQGYPSVFYGDYYGIPTHGVPAMRSKIDPILEARQKYAYGPQHDYLDHPDVIGWTREGDSSHPKSGLATLITDGPGGSKRMYAGLKNAGETWYDITGNRSDTVKIGSDGWGEFHVNGTSVSIYVQK

SEQ ID NO: 41945 - protein, 478 aa, Bacillus sp.
NGTMMQYFEWYLPNDGNHWNRLNSDASNLKSKGITAVWIPPAWKGASQNDVGYGAYDLYDLGEFNQKGTVRTKYGTRSQLQAAVTSLKNNGIQVYGDVVMNHKGGADATEMVRAVEVNPNNRNQEVTGEYTIEAWTRFDFPGRGNTHSSFKWRWYHFDGVDWDQSRRLNNRIYKFRAKAWDWEVDTEFGNYDYLMYADYDMDYPEVSNELRNWGVWYTNTLGLDGFRIDAVKHIKYSFTRDWINHVRSATGKNMFAVAEFWKNDLGAIENYLQKTNWNHSVFDVPLHYNLYNASKSGGNYDMRNIFNGTVVQRHPSHAVTFVDNHDSQPEEALESFVEEWFKPLAYALTLTREQGYPSVFYGDYYGIPTHGVPAMRSKIDPILEARQKYAYGPQHDYLDHPDVIGWTREGDSSHPKSGLATLITDGPGGSKRMYAGLKNAGETWYDITGNRSDTVKIGSDGWGEFHVNDGSVSIYVQK

SEQ ID NO: 41946 - protein, 478 aa, Bacillus sp.
NGTMMQYFEWYLPNDGNHWNRLNSDASNLKSKGITAVWIPPAWKAASQNDVGYGAYDLYDLGEFNQKGTVRTKYGTRSQLQAAVTSLKNNGIQVYGDVVMNHKGGADATEMVRAVEVNPNNRNQEVTGEYTIEAWTRFDFPGRGNTHSSFKWRWYHFDGVDWDQSRDLDNRIYKFRGKAWDWEVDTEFGNYDYLMYADYDMDHPEVVNELRNWGVWYTNTLGLDGFRIDAVKHIKYSFTRDWINHVRSATGKNMFAVAEFWKNDLGAIENYLQKTNWNHSVFDVPLHYNLYNASKSGGNYDMRNIFNGTVVQVHPSHAVTFVDNHDSQPEEALESFVEEWFKPLAYALTLTREQGYPSVFYGDYYGIPTHGVPAMRSKIDPILEARQKYAYGPQHDYLDHPDVIGWTREGDSSHPKSGLATLITDGPGGSKRMYAGLKNAGETWYDITGNRSDTVKIGSDGWGEFHVNYGSVSIYVQK

SEQ ID NO: 41947 - protein, 478 aa, Bacillus sp.
NGTMMQYFEWYLPNDGNHWNRLNSDASNLKSKGIKAVWIPPAWKAASQNDVGYGAYDLYDLGEFNQKGTVRTKYGTRSQLQAAVTSLKNNGIQVYGDVVMNHKGGADATEMVRAVEVNPNNRNQEVTGEYTIEAWTRFDFPGRGNTHSSFKWRWYHFDGVDWDQSRNLNNRIYKFRGKAWDWEVDTEFGNYDYLMYTDYDMDHPEVVNELRNWGVWYTNTLGLDGFRIDAVKHIKYSFTRDWINHVRSATGKNMFAVAEFWKNDLGAIENYLQKTNWNHSVFDVPLHYNLYNASKSGGNYDMRNIFNGTVVQRHPSHAVTFVDNHDSQPEEALESFVEEWFKPLAYALTLTREQGYPSVFYGDYYGIPTHGVPAMRSKIDPILEARQKYAYGPQHDYLDHPDVIGWTREGDSSHPKSGLATLITDGPGGSKRMYAGLKNAGETWYDITGNRSDTVKIGSDGWGEFHVNDGSVSIYVQK

SEQ ID NO: 41948 - protein, 478 aa, Synthetic construct
NGTMMQYFEWYLPNDGNHWNRLNSDASNLKSKGITAVWIPPAWKGASQNDVGYGAYDLYDLGEFNQKGTVRTKYGTRSQLQAAVTSLKNNGIQVYGDVVMNHKGGADATEMVRAVEVNPNNRNQEVTGEYTIEAWTRFDFPGRGNTHSSFKWRWYHFDGVDWDQSRRLNNRIYLFRSKQWDWPVDTENGNYDYLMYADIDMDHPEVVNELRNWGVWYTNTLGLDGFRIDAVKHIKYSFTRDWINHVRSATGKNMFAVAEFWKNDLGAIENYLQKTNWNHSVFDVPLHYNLYNASKSGGNYDMRNIFNGTVVQRHPSHAVTFVDNHDSQPEEALESFVEEWFKPLAYALTLTREQGYPSVFYGDYYGIPTHGVPAMRSKIDPILEARQKYAYGPQHDYLDHPDVIGWTREGDSSHPKSGLATLITDGPGGSKRMYAGLKNAGETWYDITGNRSDTVKIGSDGWGEFHVNDGSVSIYVQK

SEQ ID NO: 41949 - protein, 478 aa, Bacillus sp.
NGTMMQYFEWYLPNDGNHWNRLNSDASNLKSKGITAVWIPPAWKGASQNDVGYGAYDLYDLGEFNQKGTVRTKYGTRSQLQAAVTSLKNNGIQVYGDVVMNHKGGADATEMVRAVEVNPNNRQQEVTGDYTIEAWTRFDFPGRGNTHSSFKWRWYHFDGVDWDQSRRLNNRIYLFRGKAWDWEVDTEFGNYDYLMYADYDMDHPEVVNELRNWGVWYTNTLGLDGFRIDAVKHIKYSFTRDWINHVRSATGKNMFAVAEFWKNDLGAIENYLQKTNWNHSVFDVPLHYNLYNASKSGGNYDMRNIFNGTVVQRHPSHAVTFVDNHDSQPEEALESFVEEWFKPLAYALTLTREQGYPSVFYGDYYGIPTHGVPAMRSKIDPILEARQKYAYGPQHDYLDHPDVIGWTREGDSSHPKSGLATLITDGPGGSKRMYAGLKNAGETWYDITGNRSDTVKIGSDGWGEFHVNDGSVSIYVQK

SEQ ID NO: 41950 - protein, 478 aa, Bacillus sp.
NGTMMQYFEWYLPNDGNHWNRLNSDASNLKSKGITAVWIPPAWKGASQNDVGYGAYDLYDLGEFNQKGTVRTKYGTRSQLQAAVTSLKNNGIQVYGDVVMNHKGGADATEMVRAVEVNPNNRNQEVTGEYTIEAWTRFDFPGRGNTHSSFKWRWYHFDGVDWDQSRRLNNRIYKFRGKAWDWEVDTEFGNYDYLMYADYDMDHPEVVNELRNWGVWYTNTLGLDGFRIDAVKHIKYSFTRDWINHVRSATGKNMFAVAEFWKNDLGAIENYLQKTNWNHSVFDVPLHYNLYNASKSGGNYDMRNIFNGTVVQRHPSHAVTFVDNHDSQPEEALESFVEPWFKPLAYALTLTREQGYPSVFYGDYYGIPTHGVPAMRSKIDPILEARQKYAYGPQHDYLDHPDVIGWTREGDSSHPKSGLATLITDGPGGSKRMYAGLKNAGETWYDITGNRSDTVKIGSDGWGEFHVNGQSVFIYVQK

SEQ ID NO: 41951 - protein, 478 aa, Bacillus sp.
NGTMMQYFEWYLPNDGNHWNRLNSDASNLKSKGITAVWIPPAWKGASQNDVGYGAYDLYDLGEFNQKGTVRTKYGTRSQLQAAVTSLKNNGIQVYGDVVMNHKGGADATEMVRAVEVNPNNRNQEVTGEYTIEAWTRFDFPGRGNTHSSFKWRWYHFDGVDWDQSRRLNNRIYKFRSKAWDWEVDTEFGNYDYLMYADYDMDSPEVSNELRNWGVWYTNTLGLDGFRIDAVKHIKYSFTRDWINHVRSATGKNMFAVAEFWKNDLGAIENYLQKTNWNHSVFDVPLHYNLYNASKSGGNYDMRNIFNGTVVQRHPSHAVTFVDNHDSQPEEALESFVEEWFKPLAYALTLTREQGYPSVFYGDYYGIPTHGVPAMRSKIDPILEARQKYAYGPQHDYLDHPDVIGWTREGDSSHPKSGLATLITDGPGGSKRMYAGLKNAGETWYDITGNRSDTVKIGSDGWGEFHVNDGSVSIYVQK

SEQ ID NO: 41952 - protein, 478 aa, Bacillus sp.
NGTMMQYFEWYLPNDGNHWNRLNSDASNLKSKGITAVWIPPAWKAVSQNDVGYGAYDLYDLGEFNQKGTVRTKYGTRSQLQAAVTSLKNNGIQVYGDVVMNHKGGADATEMVRAVEVNPNNRNQEVTGEYTIEAWTRFDFPGRGNTHSSFKWRWYHFDGVDFDQSREFTNRIYKFRGKAWDWEVDTEFGNYDYLMYVDYDMDHPEVVNELRNWGVWYTNTLGLDGFRIDAVKHIKYSFTRDWINHVRSATGKNMFAVAEFWKNDLGAIENYLQKTNWNHSVFDVPLHYNLYNASKSGGNYDMRNIFNGTVVQRHPSHAVTFVDNHDSQPEEALESFVETWFKPLAYALTLTREQGYPSVFYGDYYGIPTHGVPAMRSKIDPILEARQKYAYGPQHDYLDHPDVIGWTREGDSSHPKSGLATLITDGPGGSKRMYAGLKNAGETWYDITGNRSDTVKIGSDGWGEFHVNDASVSIYVQK

SEQ ID NO: 41953 - protein, 478 aa, Bacillus sp.
NGTMMQYFEWYLPNDGNHWNRLNSDASNLKSKGITAVWIPPAWKATSQNDVGYGAYDLYDLGEFNQKGTVRTKYGTRSQLQAAVTSLKNNGIQVYGDVVMNHKGGADATEMVPAVEVNPNNRNQEVTGEYTIEAWTRFDFPGRGNTHSSFKWRWYHFDGVDWDQSRELNNRIYKFRSKAWDWEVDTEFGNYDYLMYTDYDMDHPEVVNELRNWGVWYTNTLGLDGFRIDAVKHIKYSFTRDWINHVRSATGKNMFAVAEFWKNDLGAIENYLQKTNWNHSVFDVPLHYNLYNASKSGGNYDMRNIFNGTVVQRHPSHAVTFVDNHDSQPEEALESFVEEWFKPLAYALTLTREQGYPSVFYGDYYGIPTHGVPAMRSKIDPILEARQKYAYGPQHDYLDHPDVIGWTREGDSSHPKSGLATLITDGPGGSKRMYAGLKNAGETWYDITGNRSDTVKIGSDGWGEFHVNDGSVSIYVQK

SEQ ID NO: 41954 - protein, 478 aa, Bacillus sp.
NGTMMQYFEWYLPNDGNHWNRLNSDASNLKSKGITAVWIPPAWKAASQNDVGYGAYDLYDLGEFNQKGTVRTKYGTRSQLQAAVTSLKNNGIQVYGDVVMNHKGGADATEMVRAVEVNPNNRNQEVTGEYTIEAWTRFDFPGRGNTHSSFKWRWYHFDGVDWDQSRNLNNRIYKFRGKAWDWEVDTEFGNYDYLMYTDYDYDHPETTNEMRNWGVWYTNTLGLDGFRIDAVKHIKYSFTRDWINHVRSATGKNMFAVAEFWKNDLGAIENYLQKTNWNHSVFDVPLHYNLYNASKSGGNYDMRNIFNGTVVQRHPSHAVTFVDNHDSQPEEALESFVEEWFKPLAYALTLTREQGYPSVFYGDYYGIPTHGVPAMRSKIDPILEARQKYAYGPQHDYLDHPDVIGWTREGDSSHPKSGLATLITDGPGGSKRMYAGLKNAGETWYDITGNRSDTVKIGSDGWGEFHVNDGSVSIYVQK

SEQ ID NO: 41955 - protein, 478 aa, Bacillus sp.
NGTMMQYFEWYLPNDGNHWNRLNSDASNLKSKGITAVWIPPAWKGASQNDVGYGAYDLYDLGEFNQKGTVRTKYGTRSQLQAAVTSLKNNGIQVYGDVVMNHKGGADATEMVRAVEVNPNNRNQEVTGEYTIEAWTRFDFPGRGNTHSSFKWRWYHFDGVDWDQSRNFQNRIYKFRGKAWDWEVDTEFGNYDYLMYADIDYDHPETTNEMRNWGVWYTNTLGLDGFRIDAVKHIKYSFTRDWINHVRSATGKNMFAVAEFWKNDLGAIENYLQKTNWNHSVFDVPLHYNLYNASKSQGNYDMRNIFNGTVVQRHPSHAVTFVDNHDSQPEEALESFVDTWFKPLAYALTLTREQGYPSVFYGDYYGIPTHGVPAMRSKIDPILEARQKYAYGPQHDYLDHPDVIGWTREGDSSHPKSGLATLITDGPGGSKRMYAGLKNAGETWYDITGNRSDTVKIGSDGWGEFHVNGSSVSIYVQK

SEQ ID NO: 41956 - protein, 478 aa, Bacillus sp.
NGTMMQYFEWYLPNDGNHWNRLNSDASNLKSKGIKAVWIPPAWKAVSQNDVGYGAYDLYDLGEFNQKGTVRTKYGTRSQLQAAVTSLKNNGIQVYGDVVMNHKGGADATEMVRAVEVNPNNRNQEVTGEYTIEAWTRFDFPGRGNTHSSFKWRWYHFDGVDFDQSRDLENRIYKFRGKAWDWEVDTEFGNYDYLMYADYDMDHPEVVNELRNWGVWYTNTLGLDGFRIDAVKHIKYSFTRDWINHVRSATGKNMFAVAEFWKNDLGAIENYLQKTNWNHSVFDVPLHYNLYNASKSGGNYDMRNIFNGTVVQRHPSHAVTFVDNHDSQPEEALESFVEEWFKPLAYALTLTREQGYPSVFYGDYYGIPTHGVPAMRSKIDPILEARQKYAYGPQHDYLDHPDVIGWTREGDSSHPKSGLATLITDGPGGSKRMYAGLKNAGETWYDITGNRSDTVKIGSDGWGEFHVNDGSVSIYVQK

SEQ ID NO: 41957 - protein, 478 aa, Bacillus sp.
NGTMMQYFEWYLPNDGNHWNRLNSDASNLKSKGITAVWIPPAWKAVSQNDVGYGAYDLYDLGEFNQKGTVRTKYGTRSQLQAAVTSLKNNGIQVYGDVVMNHKGGADATEMVRAVEVNPNNRNQEVTGEYTIEAWTRFDFPGRGNTHSSFKWRWYHFDGVDWDQSRDFNNRIYKFRGKAWDWEVDTEFGNYDYLMYADYDMDHPEVVNELRNWGVWYTNTLGLDGFRIDAVKHIKYSFTRDWINHVRSATGKNMFAVAEFWKNDLGAIENYLQKTNWNHSVFDVPLHYNLYNASKSQGNYDMRNIFNGTVVQRHPSHAVTFVDNHDSQPEEALESFVDTWFKPLAYALTLTREQGYPSVFYGDYYGIPTHGVPAMRSKIDPILEARQKYAYGPQHDYLDHPDVIGWTREGDSSHPKSGLATLITDGPGGSKRMYAGLKNAGETWYDITGNRSDTVKIGSDGWGEFHVNGSSVSIYVQK

SEQ ID NO: 41958 - protein, 478 aa, Synthetic construct
NGTMMQYFEWYLPNDGNHWNRLNSDASNLKSKGITAVWIPPAWKGASQNDVGYGAYDLYDLGEFNQKGTVRTKYGTRSQLQAAVTSLKNNGIQVYGDVVMNHKGGADATEMVRAVEVNPNNRNQEVTGEYTIEAWTRFDFPGRGNTHSSFKWRWYHFDGVDWDQSRRLNNRIYKFRGKEWDWEVDTEFGNYDYLMYTDYDMDSPEVVNELRNWGVWYTNTLGLDGFRIDAVKHIKYSFTRDWINHVRSATGKNMFAVAEFWKNDLGAIENYLQKTNWNHSVFDVPLHYNLYNASKSGGNYDMRNIFNGTVVQRHPSHAVTFVDNHDSQPEEALESFVEEWFKPLAYALTLTREQGYPSVFYGDYYGIPTHGVPAMRSKIDPILEARQKYAYGPQHDYLDHPDVIGWTREGDSSHPKSGLATLITDGPGGSKRMYAGLKNAGETWYDITGNRSDTVKIGSDGWGEFHVNDGSVSIYVQK

SEQ ID NO: 41959 - protein, 478 aa, Bacillus sp.
NGTMMQYFEWYLPNDGNHWNRLNSDASNLKSKGITAVWIPPAWKGASQNDVGYGAYDLYDLGEFNQKGTVRTKYGTRSQLQAAVTSLKNNGIQVYGDVVMNHKGGADATEMVRAVEVNPNNRNQEVTGEYTIEAWTRFDFPGRGNTHSSFKWRWYHFDGVDWDQSRKLNNRIYKFRGKAWDWEVDTEFGNYDYLMYVDYDMDHPEVVNELRNWGVWYTNTLGLDGFRIDAVKHIKYSFTRDWINHVRSATGKNMFAVAEFWKNDLGAIENYLQKTNWNHSVFDVPLHYNLYNASKSSGNYDMRNIFNGTVVQRHPSHAVTFVDNHDSQPEEALESFVDEWFKPLAYALTLTREQGYPSVFYGDYYGIPTHGVPAMRSKIDPILEARQKYAYGPQHDYLDHPDVIGWTREGDSSHPKSGLATLITDGPGGSKRMYAGLKNAGETWYDITGNRSDTVKIGSDGWGEFHVNKQSVSIYVQK

SEQ ID NO: 41960 - protein, 478 aa, Synthetic construct
NGTMMQYFEWYLPNDGNHWNRLNSDASNLKSKGITAVWIPPAWKGASQNDVGYGAYDLYDLGEFNQKGTVRTKYGTRSQLQAAVTSLKNNGIQVYGDVVMNHKGGADATEMVRAVEVNPNNRNQEVTGEYTIEAWTRFDFPGRGNTHSSFKWRWYHFDGVDWDQSRRLNNRIYKFRGKAWDWEVDTEFGNYDYLMYADYDMDYPETTNEQRNWGVWYTNTLGLDGFRIDAVKHIKYSFTRDWINHVRSATGKNMFAVAEFWKNDLGAIENYLQKTNWNHSVFDVPLHYNLYNASKSGGNYDMRNIFNGTVVQRHPSHAVTFVDNHDSQPEEALESFVEEWFKPLAYALTLTREQGYPSVFYGDYYGIPTHGVPAMRSKIDPILEARQKYAYGPQHDYLDHPDVIGWTREGDSSHPKSGLATLITDGPGGSKRMYAGLKNAGETWYDITGNRSDTVKIGSDGWGEFHVNDGSVSIYVQK

SEQ ID NO: 41961 - protein, 478 aa, Bacillus sp.
NGTMMQYFEWYLPNDGNHWNRLNSDASNLKSKGITAVWIPPAWKGASQNDVGYGAYDLYDLGEFNQKGTVRTKYGTRSQLQAAVTSLKNNGIQVYGDVVMNHKGGADATEMVRAVEVNPNNRNQEVTGEYTIEAWTRFDFPGRGNTHSSFKWRWYHFDGVDWDQSRRLNNRIYKFRGKAWDWEVDTEFGNYDYLMYADYDMDHPEVVNELRNWGVWYTNTLGLDGFRIDAVKHIKYSFTRDWINHVRSATGKNMFAVAEFWKNDLGAIENYLQKTNWNHSVFDVPLHYNLYNASKSQGNYDMRNIFNGTVVQRHPSHAVTFVDNHDSQPEEALESFVEEWFKPLAYALTLTREQGYPSVFYGDYYGIPTHGVPAMRSKIDPILEARQKYAYGPQHDYLDHPDVIGWTREGDSSHPKSGLATLITDGPGGSKRMYAGLKNAGETWYDITGNRSDTVKIGSDGWGEFHVNKKSVSIYVQK

SEQ ID NO: 41962 - protein, 478 aa, Synthetic construct
NGTMMQYFEWYLPNDGNHWNRLNSDASNLKSKGITAVWIPPAWKGASQNDVGYGAYDLYDLGEFNQKGTVRTKYGTRSQLQAAVTSLKNNGIQVYGDVVMNHKGGADATEMVRAVEVNPNNRNQEVTGEYTIEAWTRFDFPGRGNTHSSFKWRWYHFDGVDWDQSRRLNNRIYKFRGKAWDWEVDTEFGNYDYLMYADYDMDFPETTNEVRNWGVWYTNTLGLDGFRIDAVKHIKYSFTRDWINHVRSATGKNMFAVAEFWKNDLGAIENYLQKTNWNHSVFDVPLHYNLYNASKSGGNYDMRNIFNGTVVQRHPSHAVTFVDNHDSQPEEALESFVEEWFKPLAYALTLTREQGYPSVFYGDYYGIPTHGVPAMRSKIDPILEARQKYAYGPQHDYLDHPDVIGWTREGDSSHPKSGLATLITDGPGGSKRMYAGLKNAGETWYDITGNRSDTVKIGSDGWGEFHVNDGSVSIYVQK

SEQ ID NO: 41963 - protein, 478 aa, Bacillus sp.
NGTMMQYFEWYLPNDGNHWNRLNSDASNLKSKGITAVWIPPAWKAASQNDVGYGAYDLYDLGEFNQKGTVRTKYGTRSQLQAAVTSLKNNGIQVYGDVVMNHKGGADATEMVRAVEVNPNNRNQEVTGEYTIEAWTRFDFPGRGNTHSSFKWRWYHFDGVDWDQSRDLQNRIYKFRGKAWDWEVDTEFGNYDYLMYADYDMDHPEVVNELRNWGVWYTNTLGLDGFRIDAVKHIKYSFTRDWINHVRSATGKNMFAVAEFWKNDLGAIENYLQKTNWNHSVFDVPLHYNLYNASKSGGNYDMRNIFNGTVVQAHPNHAVTFVDNHDSQPEEALESFVEEWFKPLAYALTLTREQGYPSVFYGDYYGIPTHGVPAMRSKIDPILEARQKYAYGPQHDYLDHPDVIGWTREGDSSHPKSGLATLITDGPGGSKRMYAGLKNAGETWYDITGNRSDTVKIGSDGWGEFHVNDGSVSIFVQK

SEQ ID NO: 41964 - protein, 478 aa, Bacillus sp.
NGTMMQYFEWYLPNDGNHWNRLNSDASNLKSKGITAVWIPPAWKAASQNDVGYGAYDLYDLGEFNQKGTVRTKYGTRSQLQAAVTSLKNNGIQVYGDVVMNHKGGADATEMVRAVEVNPNNRNQEVTGEYTIEAWTRFDFPGRGNTHSSFKWRWYHFDGVDWDQSRRLDNRIYKFRGKAWDWEVDTEFGNYDYLMYTDYDMDHPEVVNELRNWGVWYTNTLGLDGFRIDAVKHIKYSFTRDWINHVRIATGKNMFAVAEFWKNDLGAIENYLQKTNWNHSVFDVPLHYNLYNASKSGGNYDMRNIFNGTVVQRHPSHAVTFVDNHDSQPEEALESFVDEWFKPLAYALTLTREQGYPSVFYGDYYGIPTHGVPAMRSKIDPILEARQKYAYGPQHDYLDHPDVIGWTREGDSSHPKSGLATLITDGPGGSKRMYAGLKNAGETWYDITGNRSDTVKIGSDGWGEFHVNDQSVSIYVQK

SEQ ID NO: 41965 - protein, 478 aa, Bacillus sp.
NGTMMQYFEWYLPNDGNHWNRLNSDASNLKSKGITAVWIPPAWKAVSQNDVGYGAYDLYDLGEFNQKGTVRTKYGTRSQLQAAVTSLKNNGIQVYGDVVMNHKGGADATEMVRAVEVNPNNRNQEVTGEYTIEAYTRFDFPGRGNTHSSFKWRWYHFDGVDWDQSREFTNRIYKFRGKAWDWEVDTEFGNYDYLMYVDYDMDHPEVVNELRNWGVWYTNTLGLDGFRIDAVKHIKYSFTRDWINHVRSATGKNMFAVAEFWKNDLGAIENYLQKTNWNHSVFDVPLHYNLYNASKSGGNYDMRNIFNGTVVQRHPSHAVTFVDNHDSQPEEALESFVEEWFKPLAYALTLTREQGYPSVFYGDYYGIPTHGVPAMRSKIDPILEARQKYAYGPQHDYLDHPDVIGWTREGDSSHPKSGLATLITDGPGGSKRMYAGLKNAGETWYDITGNRSDTVKIGSDGWGEFHVNDGSVSIYVQK

SEQ ID NO: 41966 - protein, 478 aa, Bacillus sp.
NGTMMQYFEWYLPNDGNHWNRLNSDASNLKSKGITAVWIPPAWKGASQNDVGYGAYDLYDLGEFNQKGTVRTKYGTRSQLQAAVTSLKNNGIQVYGDVVMNHKGGADATEMVRAVEVNPNNRNQEVTGEYTIEAWTRFDFPGRGNTHSSFKWRWYHFDGVDWDQSRRLNNRIYKFRGKAWDWEVDTEFGNYDYLMYADYDMDHPEVVNELRNWGVWYTNTLGLDGFRIDAVKHIKYSFTRDWINHVRSATGKNMFAVAEFWKNDLGAIENYLQKTNWNHSVFDVPLHYNLYNASKSSGNYDMRNIFNGTVVQRHPSHAVTFVDNHDSQPEEALESFVEPWFKPLAYALTLTREQGYPSVFYGDYYGIPTHGVPAMRSKIDPILEARQKYAYGPQHDYLDHPDVIGWTREGDSSHPKSGLATLITDGPGGSKRMYAGLKNAGETWYDITGNRSDTVKIGSDGWGEFHVNKSSVSIYVQK

SEQ ID NO: 41967 - protein, 478 aa, Bacillus sp.
NGTMMQYFEWYLPNDGNHWNRLNSDASNLKSKGITAVWIPPAWKGASQNDVGYGAYDLYDLGEFNQKGTVRTKYGTRSQLQAAVTSLKNNGIQVYGDVVMNHKGGADATEMVRAVEVNPNNRNQEVTGEYTIEAWTRFDFPGRGNTHSSFKWRWYHFDGVDWDQSRRLNNRIYKFRGKAWDWEVDTEFGNYDYLMYADYDMDHPEVVNELRNWGVWYTNTLGLDGFRIDAVKHIKYSFTRDWINHVRIATGKNMFAVAEFWKNDLGAIENYLQKTNWNHSVFDVPLHYNLYNASKSGGNYDMRNIFNGTVVQANPNHAVTFVDNHDSQPEEALESFVDEWFKPLAYALTLTREQGYPSVFYGDYYGIPTHGVPAMRSKIDPILEARQKYAYGPQHDYLDHPDVIGWTREGDSSHPKSGLATLITDGPGGSKRMYAGLKNAGETWYDITGNRSDTVKIGSDGWGEFHVNDQSVSIYVQK

SEQ ID NO: 41968 - protein, 478 aa, Bacillus sp.
NGTMMQYFEWYLPNDGNHWNRLNSDASNLKSKGITAVWIPPAWKAASQNDVGYGAYDLYDLGEFNQKGTVRTKYGTRSQLQAAVTSLKNNGIQVYGDVVMNHKGGADATEMVPAVEVNPNNRNQEVTGEYTIEAWTRFDFPGRGNTHSSFKWRWYHFDGVDWDQSRDLQNRIYKFRSKAWDWEVDTEFGNYDYLMYADYDMDHPEVVNELRNWGVWYTNTLGLDGFRIDAVKHIKYSFTRDWINHVRSATGKNMFAVAEFWKNDLGAIENYLQKTNWNHSVFDVPLHYNLYNASKSGGNYDMRNIFNGTVVQRHPSHAVTFVDNHDSQPEEALESFVETWFKPLAYALTLTREQGYPSVFYGDYYGIPTHGVPAMRSKIDPILEARQKYAYGPQHDYLDHPDVIGWTREGDSSHPKSGLATLITDGPGGSKRMYAGLKNAGETWYDITGNRSDTVKIGSDGWGEFHVNKASVSIYVQK

SEQ ID NO: 41969 - protein, 478 aa, Bacillus sp.
NGTMMQYFEWYLPNDGNHWNRLNSDASNLKSKGITAVWIPPAWKAASQNDVGYGAYDLYDLGEFNQKGTVRTKYGTRSQLQAAVTSLKNNGIQVYGDVVMNHKGGADATEMVRAVEVNPNNRNQEVTGEYTIEAWTRFDFPGRGNTHSSFKWRWYHFDGVDWDQSRDLQNRIYKFRGKAWDWEVDTEFGNYDYLMYADYDMDHPEVVNELRNWGVWYTNTLGLDGFRIDAVKHIKYSFTRDWINHVRSATGKNMFAVAEFWKNDLGAIENYLQKTNWNHSVFDVPLHYNLYNASKSGGNYDMRNIFNGTVVQANPNHAVTFVDNHDSQPEEALESFVEEWFKPLAYALTLTREQGYPSVFYGDYYGIPTHGVPAMRSKIDPILEARQKYAYGPQHDYLDHPDVIGWTREGDSSHPKSGLATLITDGPGGSKRMYAGLKNAGETWYDITGNRSDTVKIGSDGWGEFHVNDGSVSIYVQK

SEQ ID NO: 41970 - protein, 478 aa, Bacillus sp.
NGTMMQYFEWYLPNDGNHWNRLNSDASNLKSKGITAVWIPPAWKGASQNDVGYGAYDLYDLGEFNQKGTVRTKYGTRSQLQAAVTSLKNNGIQVYGDVVMNHKGGADATEMVRAVEVNPNNRNQEVTGEYTIEAWTRFDFPGRGNTHSSFKWRWYHFDGVDWDQSRRLNNRIYKFRGKAWDWEVDTEFGNYDYLMYADYDMDHPEVVNELRNWGVWYTNTLGLDGFRIDAVKHIKYSFTRDWINHVRSATGKNMFAVAEFWKNDLGAIENYLQKTNWNHSVFDVPLHYNLYNASKSAGNYDMRNIFNGTVVQRHPSHAVTFVDNHDSQPEEALESFVDPWFKPLAYALTLTREQGYPSVFYGDYYGIPTHGVPAMRSKIDPILEARQKYAYGPQHDYLDHPDVIGWTREGDSSHPKSGLATLITDGPGGSKRMYAGLKNAGETWYDITGNRSDTVKIGSDGWGEFHVNDTSVFIYVQK

SEQ ID NO: 41971 - protein, 478 aa, Bacillus sp.
NGTMMQYFEWYLPNDGNHWNRLNSDASNLKSKGITAVWIPPAWKGASQNDVGYGAYDLYDLGEFNQKGTVRTKYGTRSQLQAAVTSLKNNGINVYGDVVMNHKGGADATEMVRAVEVNPNNRNQEVTGEYTIEAWTRFDFPGRGNTHSSFKWRWYHFDGVDWDQSRRLNNRIYKFRGKAWDWEVDTEFGNYDYLMYADYDMDHPEVVNELRNWGVWYTNTLGLDGFRIDAVKHIKYSFTRDWINHVRSATGKNMFAVAEFWKNDLGAIENYLQKTNWNHSVFDVPLHYNLYNASKSGGNYDMRNIFNGTVVQANPNHAVTFVDNHDSQPEEALESFVEEWFKPLAYALTLTREQGYPSVFYGDYYGIPTHGVPAMRSKIDPILEARQKYAYGPQHDYLDHPDVIGWTREGDSSHPKSGLATLITDGPGGSKRMYAGLKNAGETWYDITGNRSDTVKIGSDGWGEFHVNDGSVSIYVQK

SEQ ID NO: 41972 - protein, 478 aa, Synthetic construct
NGTMMQYFEWYLPNDGNHWNRLNSDASNLKSKGITAVWIPPAWKGASQNDVGYGAYDLYDLGEFNQKGTVRTKYGTRSQLQAAVTSLKNNGIQVYGDVVMNHKGGADATEMVRAVEVNPNNRNQEVTGEYTIEAWTRFDFPGRGNTHSSFKWRWYHFDGVDWDQSRRLNNRIYKFRGKAWDWEVDTEFGNYDYLMYADYDMDYPETTNEMRNWGVWYTNTLGLDGFRIDAVKHIKYSFTRDWINHVRSATGKNMFAVAEFWKNDLGAIENYLQKTNWNHSVFDVPLHYNLYNASKSGGNYDMRNIFNGTVVQRHPSHAVTFVDNHDSQPEEALESFVEEWFKPLAYALTLTREQGYPSVFYGDYYGIPTHGVPAMRSKIDPILEARQKYAYGPQHDYLDHPDVIGWTREGDSSHPKSGLATLITDGPGGSKRMYAGLKNAGETWYDITGNRSDTVKIGSDGWGEFHVNDGSVSIYVQK

SEQ ID NO: 41973 - protein, 478 aa, Bacillus sp.
NLTMMQYFEWYLPNDGNHWNRLNSDASNLKSKGITAVWIPPAWKGASQNDVGYGAYDLYDLGEFNQKGTVRTKYGTRSQLQAAVTSLKNNGINVYGDVVMNHKGGADATEMVRAVEVNPNNRNQEVTGEYTIEAWTRFDFPGRGNTHSSFKWRWYHFDGVDWDQSRRLNNRIYKFRGKAWDWEVDTEFGNYDYLMYADYDMDHPEVVNELRNWGVWYTNTLGLDGFRIDAVKHIKYSFTRDWINHVRSATGKNMFAVAEFWKNDLGAIENYLQKTNWNHSVFDVPLHYNLYNASKSGGNYDMRNIFNGTVVQAHPNHAVTFVDNHDSQPEEALESFVEEWFKPLAYALTLTREQGYPSVFYGDYYGIPTHGVPAMRSKIDPILEARQKYAYGPQHDYLDHPDVIGWTREGDSSHPKSGLATLITDGPGGSKRMYAGLKNAGETWYDITGNRSDTVKIGSDGWGEFHVNDGSVSIYVQK

SEQ ID NO: 41974 - protein, 478 aa, Bacillus sp.
NGTMMQYFEWYLPNDGNHWNRLNSDASNLKSKGITAVWIPPAWKAASQNDVGYGAYDLYDLGEFNQKGTVRTKYGTRSQLQAAVTSLKNNGIQVYGDVVMNHKGGADATEMVRAVEVNPNNRNQEVTGEYTIEAWTRFDFPGRGNTHSSFKWRWYHFDGVDWDQSRDLQNRIYKFRGKAWDWEVDTEFGNYDYLMYADYDMDHPEVVNELRNWGVWYTNTLGLDGFRIDAVKHIKYSFTRDWINHVRSATGKNMFAVAEFWKNDLGAIENYLQKTNWNHSVFDVPLHYNLYNASKSGGNYDMRNIFNGTVVQRHPSHAVTFVDNHDSQPEEALESFVDEWFKPLAYALTLTREQGYPSVFYGDYYGIPTHGVPAMRSKIDPILEARQKYAYGPQHDYLDHPDVIGWTREGDSSHPKSGLATLITDGPGGSKRMYAGLKNAGETWYDITGNRSDTVKIGSDGWGEFHVNKSSVSIYVQK

SEQ ID NO: 41975 - protein, 478 aa, Bacillus sp.
NGTMMQYFEWYLPNDGNHWNRLNSDASNLKSKGITAVWIPPAWKGASQNDVGYGAYDLYDLGEFNQKGTVRTKYGTRSQLQAAVTSLKNNGIQVYGDVVMNHKGGADATEMVRAVEVNPNNRNQEVTGEYTIEAWTRFDFPGRGNTHSSFKWRWYHFDGVDWDQSRRLNNRIYKFRGKAWDWEVDTEFGNYDYLMYADYDMDHPEVVNELRNWGVWYTNTLGLDGFRIDAVKHIKYSFTRDWINHVRSATGKNMFAVAEFWKNDLGAIENYLQKTNWNHSVFDVPLHYNLYNASKSAGNYDMRNIFNGTVVQRHPSHAVTFVDNHDSQPEEALESFVDPWFKPLAYALTLTREQGYPSVFYGDYYGIPTHGVPAMRSKIDPILEARQKYAYGPQHDYLDHPDVIGWTREGDSSHPKSGLATLITDGPGGSKRMYAGLKNAGETWYDITGNRSDTVKIGSDGWGEFHVNKQSVSIYVQK

SEQ ID NO: 41976 - protein, 478 aa, Bacillus sp.
NGTMMQYFEWYLPNDGNHWNRLNSDASNLKSKGITAVWIPPAWKATSQNDVGYGAYDLYDLGEFNQKGTVRTKYGTRSQLQAAVTSLKNNGIQVYGDVVMNHKGGADATEMVRAVEVNPNNRNQEVTGEYTIEAWTRFDFPGRGNTHSSFKWRWYHFDGVDWDQSRNVNNRIYKFRGKAWDWEVDTEFGNYDYLMYADYDMDHPEVVNELRNWGVWYTNTLGLDGFRIDAVKHIKYSFTRDWINHVRSATGKNMFAVAEFWKNDLGAIENYLQKTNWNHSVFDVPLHYNLYNASKSGGNYDMRNIFNGTVVQVHPSHAVTFVDNHDSQPEEALESFVEEWFKPLAYALTLTREQGYPSVFYGDYYGIPTHGVPAMRSKIDPILEARQKYAYGPQHDYLDHPDVIGWTREGDSSHPKSGLATLITDGPGGSKRMYAGLKNAGETWYDITGNRSDTVKIGSDGWGEFHVNYGSVSIYVQK

SEQ ID NO: 41977 - protein, 478 aa, Bacillus sp.
NGTMMQYFEWYLPNDGNHWNRLNSDASNLKSKGITAVWIPPAWKGASQNDVGYGAYDLYDLGEFNQKGTVRTKYGTRSQLQAAVTSLKNNGINVYGDVVMNHKGGADLTEMVRAVEVNPNNRNQEVTGEYTIEAWTRFDFPGRGNTHSSFKWRWYHFDGVDWDQSRRLNNRIYKFRGKAWDWEVDTEFGNYDYLMYADYDMDHPEVVNELRNWGVWYTNTLGLDGFRIDAVKHIKYSFTRDWINHVRSATGKNMFAVAEFWKNDLGAIENYLQKTNWNHSVFDVPLHYNLYNASKSGGNYDMRNIFNGTVVQAHPMHAVTFVDNHDSQPEEALESFVEEWFKPLAYALTLTREQGYPSVFYGDYYGIPTHGVPAMRSKIDPILEARQKYAYGPQHDYLDHPDVIGWTREGDSSHPKSGLATLITDGPGGSKRMYAGLKNAGETWYDITGNRSDTVKIGSDGWGEFHVNDGSVSIYVQK

SEQ ID NO: 41978 - protein, 478 aa, Bacillus sp.
NGTMMQYFEWYLPNDGNHWNRLNSDASNLKSKGITAVWIPPAWKGASQNDVGYGAYDLYDLGEFNQKGTVRTKYGTRSQLQAAVTSLKNNGIQVYGDVVMNHKGGADATEMVRAVEVNPNNRNQEVTGEYTIEAWTRFDFPGRGNTHSSFKWRWYHFDGVDWDQSRRLNNRIYKFRGKAWDWEVDTEFGNYDYLMYADYDMDHPEVVNELRNWGVWYTNTLGLDGFRIDAVKHIKYSFTRDWINHVRSATGKNMFAVAEFWKNDLGAIENYLQKTNWNHSVFDVPLHYNLYNASKSAGNYDMRNIFNGTVVQRHPSHAVTFVDNHDSQPEEALESFVDPWFKPLAYALTLTREQGYPSVFYGDYYGIPTHGVPAMRSKIDPILEARQKYAYGPQHDYLDHPDVIGWTREGDSSHPKSGLATLITDGPGGSKRMYAGLKNAGETWYDITGNRSDTVKIGSDGWGEFHVNGKSVSIYVQK

SEQ ID NO: 41979 - protein, 478 aa, Bacillus sp.
NGTMMQYFEWYLPNDGNHWNRLNSDASNLKSKGITAVWIPPAWKGASQNDVGYGAYDLYDLGEFNQKGTVRTKYGTRSQLQAAVTSLKNNGIQVYGDVVMNHKGGADATEMVRAVEVNPNNRNQEVTGEYTIEAWTRFDFPGRGNTHSSFKWRWYHFDGVDWDQSERLNNRIYKFRGKAWDWEVETEFGNYDYLMYADYDMDHPEVVNELRNWGVWYTNTLGLDGFRIDAVKHIKYSFTRDWINHVRSATGKNMFAVAEFWKNDLGAIENYLSKTNWNHSVFDVPLHYNLYNASKSGGNYDMRNIFNGTVVQRHPSHAVTFVDNHDSQPEEALESFVEEWFKPLAYALTLTREAGLPSVFYGDYYGIPTHGVPAMRSKIDPILLARQKYAYGPQHDYLDHPDVIGWTREGDSSHPPSGLATLITDGPGGSKRMYAGLKNAGETWYDITGNRSDTVKIGSDGWGEFHVNDGSVSIYVQK

SEQ ID NO: 41980 - protein, 478 aa, Bacillus sp.
NGTMMQYFEWYLPNDGNHWNRLNSDASNLKSKGITAVWIPPAWKAVSQNDVGYGAYDLYDLGEFNQKGTVRTKYGTRSQLQAAVTSLKNNGIQVYGDVVMNHKGGADATEMVRAVEVNPNNRNQEVTGEYTIEAWTRFDFPGRGNTHSSFKWRWYHFDGVDFDQSREFTNRIYKFRGKAWDWEVDTEFGNYDYLMYADIDYDHPETTNEMRNWGVWYTNTLGLDGFRIDAVKHIKYSFTRDWINHVRSATGKNMFAVAEFWKNDLGAIENYLQKTNWNHSVFDVPLHYNLYNASKSGGNYDMRNIFNGTVVQRHPSHAVTFVDNHDSQPEEALESFVEEWFKPLAYALTLTREQGYPSVFYGDYYGIPTHGVPAMRSKIDPILEARQKYAYGPQHDYLDHPDVIGWTREGDSSHPKSGLATLITDGPGGSKRMYAGLKNAGETWYDITGNRSDTVKIGSDGWGEFHVNDGSVSIYVQK

SEQ ID NO: 41981 - protein, 478 aa, Bacillus sp.
NGTMMQYFEWYLPNDGNHWNRLNSDASNLKSKGITAVWIPPAWKAVSQNDVGYGAYDLYDLGEFNQKGTVRTKYGTRSQLQAAVTSLKNNGIQVYGDVVMNHKGGADATEMVRAVEVNPNNRNQEVTGEYTIEAWTRFDFPGRGNTHSSFKWRWYHFDGVDWDQSRDLENRIYKFRGKAWDWEVDTEFGNYDYLMYADYDMDHPEVVNELRNWGVWYTNTLGLDGFRIDAVKHIKYSFTRDWINHVRSATGKNMFAVAEFWKNDLGAIENYLQKTNWNHSVFDVPLHYNLYNASKSGGNYDMRNIFNGTVVQVHPSHAVTFVDNHDSQPEEALESFVEEWFKPLAYALTLTREQGYPSVFYGDYYGIPTHGVPAMRSKIDPILEARQKYAYGPQHDYLDHPDVIGWTREGDSSHPKSGLATLITDGPGGSKRMYAGLKNAGETWYDITGNRSDTVKIGSDGWGEFHVNYGSVSIYVQK

SEQ ID NO: 41982 - protein, 478 aa, Bacillus sp.
NGTMMQYFEWYLPNDGNHWNRLNSDASNLKSKGITAVWIPPAWKGASQNDVGYGAYDLYDLGEFNQKGTVRTKYGTRSQLQAAVTSLKNNGIQVYGDVVMNHKGGADATEMVRAVEVNPNNRNQEVTGEYTIEAWTRFDFPGRGNTHSSFKWRWYHFDGVDFDQSRDLTNRIYKFRGKAWDWEVDTEFGNYDYLMYVDYDMDHPEVVNELRNWGVWYTNTLGLDGFRIDAVKHIKYSFTRDWINHVRIATGKNMFAVAEFWKNDLGAIENYLQKTNWNHSVFDVPLHYNLYNASKSGGNYDMRNIFNGTVVQRHPSHAVTFVDNHDSQPEEALESFVDEWFKPLAYALTLTREQGYPSVFYGDYYGIPTHGVPAMRSKIDPILEARQKYAYGPQHDYLDHPDVIGWTREGDSSHPKSGLATLITDGPGGSKRMYAGLKNAGETWYDITGNRSDTVKIGSDGWGEFHVNDQSVSIYVQK

SEQ ID NO: 41983 - protein, 478 aa, Bacillus sp.
NGTMMQYFEWYLPNDGNHWNRLNSDASNLKSKGITAVWIPPAWKAASQNDVGYGAYDLYDLGEFNQKGTVRTKYGTRSQLQAAVTSLKNNGIQVYGDVVMNHKGGADATEMVRAVEVNPNNRNQEVTGEYTIEAWTRFDFPGRGNTHSSFKWRWYHFDGVDWDQSRDLQNRIYKFRGKAWDWEVDTEFGNYDYLMYADYDMDHPEVVNELRNWGVWYTNTLGLDGFRIDAVKHIKYSFTRDWINHVRSATGKNMFAVAEFWKNDLGAIENYLQKTNWNHSVFDVPLHYNLYNASKSGGNYDMRNIFNGTVVQAHPMHAVTFVDNHDSQPEEALESFVEEWFKPLAYALTLTREQGYPSVFYGDYYGIPTHGVPAMRSKIDPILEARQKYAYGPQHDYLDHPDVIGWTREGDSSHPKSGLATLITDGPGGSKRMYAGLKNAGETWYDITGNRSDTVKIGSDGWGEFHVNYGSVSIYVQK

SEQ ID NO: 41984 - protein, 478 aa, Bacillus sp.
NGTMMQYFEWYLPNDGNHWNRLNSDASNLKSKGITAVWIPPAWKAVSQNDVGYGAYDLYDLGEFNQKGTVRTKYGTRSQLQAAVTSLKNNGIQVYGDVVMNHKGGADATEMVRAVEVNPNNRNQEVTGEYTIEAWTRFDFPGRGNTHSSFKWRWYHFDGVDFDQSREFTNRIYKFRGKAWDWEVDTEFGNYDYLMYADIDYDHPESTNEMRNWGVWYTNTLGLDGFRIDAVKHIKYSFTRDWINHVRSATGKNMFAVAEFWKNDLGAIENYLQKTNWNHSVFDVPLHYNLYNASKSGGNYDMRNIFNGTVVQRHPSHAVTFVDNHDSQPEEALESFVEEWFKPLAYALTLTREQGYPSVFYGDYYGIPTHGVPAMRSKIDPILEARQKYAYGPQHDYLDHPDVIGWTREGDSSHPKSGLATLITDGPGGSKRMYAGLKNAGETWYDITGNRSDTVKIGSDGWGEFHVNDGSVSIYVQK

SEQ ID NO: 41985 - protein, 478 aa, Bacillus sp.
NGTMMQYFEWYLPNDGNHWNRLNSDASNLKSKGITAVWIPPAWKGASQNDVGYGAYDLYDLGEFNQKGTVRTKYGTRSQLQAAVTSLKNNGIQVYGDVVMNHKGGADATEMVRAVEVNPNNRNQEVTGEYTIEAWTRFDFPGRGNTHSSFKWRWYHFDGVDWDQSRRLNNRIYKFRGKAWDWEVDTEFGNYDYLMYADYDMDHPEVVNELRNWGVWYTNTLGLDGFRIDAVKHIKYSFTRDWINHVRSATGKNMFAVAEFWKNDLGAIENYLQKTNWNHSVFDVPLHYNLYNASKSQGNYDMRNIFNGTVVQRHPSHAVTFVDNHDSQPEEALESFVEPWFKPLAYALTLTREQGYPSVFYGDYYGIPTHGVPAMRSKIDPILEARQKYAYGPQHDYLDHPDVIGWTREGDSSHPKSGLATLITDGPGGSKRMYAGLKNAGETWYDITGNRSDTVKIGSDGWGEFHVNKSSVSIYVQK

SEQ ID NO: 41986 - protein, 478 aa, Bacillus sp.
NGTMMQYFEWYLPNDGNHWNRLNSDASNLKSKGITAVWIPPAWKATSQNDVGYGAYDLYDLGEFNQKGTVRTKYGTRSQLQSAVTSLKNNGIQVYGDVVMNHKGGADATEMVRAVEVNPNNRNQEVTGEYTIEAWTRFDFPGRGNTHSSFKWRWYHFDGVDWDMSRNTDNRIYKFRGKAWDWEVDTEFGNYDYLMYADYDMDHPEVVNELRNWGVWYTNTLGLDGFRIDAVKHIKYSFTRDWINHVRSATGKNMFAVAEFWKNDLGAIENYLQKTNWNHSVFDVPLHYNLYNASKSQGNYDMRNIFNGTVVQRHPSHAVTFVDNHDSQPEEALESFVDTWFKPLAYALTLTREQGYPSVFYGDYYGIPTHGVPAMRSKIDPILEARQKYAYGPQHDYLDHPDVIGWTREGDSSHPKSGLATLITDGPGGSKRMYAGLKNAGETWYDITGNRSDTVKIGSDGWGEFHVNGSSVSIYVQK

SEQ ID NO: 41987 - protein, 478 aa, Synthetic construct
NGTMMQYFEWYLPNDGNHWNRLNSDASNLKSKGITAVWIPPAWKGASQNDVGYGAYDLYDLGEFNQKGTVRTKYGTRSQLQAAVTSLKNNGIQVYGDVVMNHKGGADATEMVRAVEVNPNNRNQEVTGEYTIEAWTRFDFPGRGNTHSSFKWRWYHFDGVDWDQSRRLNNRIYKFRGKEWDWEVDTEFGNYDYLMYTDYDMDHSEVVNELRNWGVWYTNTLGLDGFRIDAVKHIKYSFTRDWINHVRSATGKNMFAVAEFWKNDLGAIENYLQKTNWNHSVFDVPLHYNLYNASKSGGNYDMRNIFNGTVVQRHPSHAVTFVDNHDSQPEEALESFVEEWFKPLAYALTLTREQGYPSVFYGDYYGIPTHGVPAMRSKIDPILEARQKYAYGPQHDYLDHPDVIGWTREGDSSHPKSGLATLITDGPGGSKRMYAGLKNAGETWYDITGNRSDTVKIGSDGWGEFHVNDGSVSIYVQK

SEQ ID NO: 41988 - protein, 478 aa, Synthetic construct
NGTMMQYFEWYLPNDGNHWNRLNSDASNLKSKGITAVWIPPAWKGASQNDVGYGAYDLYDLGEFNQKGTVRTKYGTRSQLQAAVTSLKNNGIQVYGDVVMNHKGGADATEMVRAVEVNPNNRNQEVTGEYTIEAWTRFDFPGRGNTHSSFKWRWYHFDGVDWDQSRRLNNRIYKFRGKAWDWEVDTEFGNYDYLMYADYDMDYPESTNEMRNWGVWYTNTLGLDGFRIDAVKHIKYSFTRDWINHVRSATGKNMFAVAEFWKNDLGAIENYLQKTNWNHSVFDVPLHYNLYNASKSGGNYDMRNIFNGTVVQRHPSHAVTFVDNHDSQPEEALESFVEEWFKPLAYALTLTREQGYPSVFYGDYYGIPTHGVPAMRSKIDPILEARQKYAYGPQHDYLDHPDVIGWTREGDSSHPKSGLATLITDGPGGSKRMYAGLKNAGETWYDITGNRSDTVKIGSDGWGEFHVNDGSVSIYVQK

SEQ ID NO: 41989 - protein, 478 aa, Bacillus sp.
NGTMMQYFEWYLPNDGNHWNRLNSDASNLKSKGITAVWIPPAWKGASQNDVGYGAYDLYDLGEFNQKGTVRTKYGTRSQLQAAVTSLKNNGIQVYGDVVMNHKGGADATEMVRAVEVNPNNRNQEVTGEYTIEAWTRFDFPGRGNTHSSFKWRWYHFDGVDWDQSRRLNNRIYKFRGKAWDWEVDTEFGNYDYLMYADYDMDHPEVVNELRNWGVWYTNTLGLDGFRIDAVKHIKYSFTRDWINHVRSATGKNMFAVAEFWKNDLGAIENYLQKTNWNHSVFDVPLHYNLYNASKSGSNYDMRNIFNGTVVQRHPSHAVTFVDNHDSQPEEALESFVDEWFKPLAYALTLTREQGYPSVFYGDYYGIPTHGVPAMRSKIDPILEARQKYAYGPQHDYLDHPDVIGWTREGDSSHPKSGLATLITDGPGGSKRMYAGLKNAGETWYDITGNRSDTVKIGSDGWGEFHVNKQSVSIYVQK

SEQ ID NO: 41990 - protein, 478 aa, Bacillus sp.
NGTMMQYFEWYLPNDGNHWNRLNSDASNLKSKGITAVWIPPAWKGASQNDVGYGAYDLYDLGEFNQKGTVRTKYGTRSQLQAAVTSLKNNGINVYGDVVMNHKGGADATEMVRAVEVNPNNRNQEVTGEYTIEAWTRFDFPGRGNTHSSFKWRWYHFDGVDFDQSRRLNNRIYKFRGKAWDWEVDTEFGNYDYLMYADYDMDHPEVVNELRNWGVWYTNTLGLDGFRIDAVKHIKYSFTRDWINHVRSATGKNMFAVAEFWKNDLGAIENYLQKTNWNHSVFDVPLHYNLYNASKSGGNYDMRNIFNGTVVQAHPMHAVTFVDNHDSQPEEALESFVEEWFKPLAYALTLTREQGYPSVFYGDYYGIPTHGVPAMRSKIDPILEARQKYAYGPQHDYLDHPDVIGWTREGDSSHPKSGLATLITDGPGGSKRMYAGLKNAGETWYDITGNRSDTVKIGSDGWGEFHVNDGSVSIYVQK

SEQ ID NO: 41991 - protein, 478 aa, Bacillus sp.
NGTMMQYFEWYLPNDGNHWNRLNSDASNLKSKGITAVWIPPAWKGASQNDVGYGAYDLYDLGEFNQKGTVRTKYGTRSQLQAAVTSLKNNGIQVYGDVVMNHKGGADATEMVRAVEVNPNNRNQEVTGEYTIEAWTRFDFPGRGNTHSSFKWRWYHFDGVDWDQSRRLNNRIYKFRNKEWDWEVDTEFGNYDYLMYADYDMDHPEVSNELRNWGVWYTNTLGLDGFRIDAVKHIKYSFTRDWINHVRSATGKNMFAVAEFWKNDLGAIENYLQKTNWNHSVFDVPLHYNLYNASKSGGNYDMRNIFNGTVVQRHPSHAVTFVDNHDSQPEEALESFVEEWFKPLAYALTLTREQGYPSVFYGDYYGIPTHGVPAMRSKIDPILEARQKYAYGPQHDYLDHPDVIGWTREGDSSHPKSGLATLITDGPGGSKRMYAGLKNAGETWYDITGNRSDTVKIGSDGWGEFHVNDGSVSIYVQK

SEQ ID NO: 41992 - protein, 478 aa, Bacillus sp.
NGTMMQYFEWYLPNDGNHWNRLNSDASNLKSKGITAVWIPPAWKGASQNDVGYGAYDLYDLGEFNQKGTVRTKYGTRSQLQAAVTSLKNNGIQVYGDVVMNHKGGADATEMVRAVEVNPNNRNQEVTGEYTIEAWTRFDFPGRGNTHSSFKWRWYHFDGVDWDQSRRLNNRIYKFRGKAWDWEVDTEFGNYDYLMYADYDMDHPEVVNELRNWGVWYTNTLGLDGFRIDAVKHIKYSFTRDWINHVRSATGKNMFAVAEFWKNDLGAIENYLQKTNWNHSVFDVPLHYNLYNASKSQGNYDMRNIFNGTVVQRHPSHAVTFVDNHDSQPEEALESFVDPWFKPLAYALTLTREQGYPSVFYGDYYGIPTHGVPAMRSKIDPILEARQKYAYGPQHDYLDHPDVIGWTREGDSSHPKSGLATLITDGPGGSKRMYAGLKNAGETWYDITGNRSDTVKIGSDGWGEFHVNQQSVSIYVQK

SEQ ID NO: 41993 - protein, 478 aa, Bacillus sp.
NGTMMQYFEWYLPNDGNHWNRLNSDASNLKSKGITAVWIPPAWKGASQNDVGYGAYDLYDLGEFNQKGTVRTKYGTRSQLQAAVTSLKNNGIQVYGDVVMNHKGGADATEMVRAVEVNPNNRNQEVTGDYTIEAWTRFDFPGRGNTHSSFKWRWYHFDGVDWDQSRRLNNRIYLFRNKAWDWEVDTEFGNYDYLMYADYDMDHPEVVNELRNWGVWYTNTLGLDGFRIDAVKHIKYSFTRDWINHVRSATGKNMFAVAEFWKNDLGAIENYLQKTNWNHSVFDVPLHYNLYNASKSGGNYDMRNIFNGTVVQRHPSHAVTFVDNHDSQPEEALESFVEEWFKPLAYALTLTREQGYPSVFYGDYYGIPTHGVPAMRSKIDPILEARQKYAYGPQHDYLDHPDVIGWTREGDSSHPKSGLATLITDGPGGSKRMYAGLKNAGETWYDITGNRSDTVKIGSDGWGEFHVNDGSVSIYVQK

SEQ ID NO: 41994 - protein, 478 aa, Bacillus sp.
NGTMMQYFEWYLPNDGNHWNRLNSDASNLKSKGITAVWIPPAWKGASQNDVGYGAYDLYDLGEFNQKGTVRTKYGTRSQLQAAVTSLKNNGIQVYGDVVMNHKGGADATEMVRAVEVNPNNRNQEVTGEYTIEAWTRFDFPGRGNTHSSFKWRWYHFDGVDFDQSRRLNNRIYKFRGKAWDWEVDTEFGNYDYLMYADYDMDHPEVVNELRNWGVWYTNTLGLDGFRIDAVKHIKYSFTRDWINHVRSATGKNMFAVAEFWKNDLGAIENYLQKTNWNHSVFDVPLHYNLYNASKSGGNYDMRNIFNGTVVQRHPSHAVTFVDNHDSQPEEALESFVDEWFKPLAYALTLTREQGYPSVFYGDYYGIPTHGVPAMRSKIDPILEARQKYAYGPQHDYLDHPDVIGWTREGDSSHPKSGLATLITDGPGGSKRMYAGLKNAGETWYDITGNRSDTVKIGSDGWGEFHVNKSSVSIYVQK

SEQ ID NO: 41995 - protein, 478 aa, Bacillus sp.
NGTMMQYFEWYLPNDGNHWNRLNSDASNLKSKGITAVWIPPAWKGASQNDVGYGAYDLYDLGEFNQKGTVRTKYGTRSQLQAAVTSLKNNGIQVYGDVVMNHKGGADATEMVRAVEVNPNNRNQEVTGEYTIEAWTRFDFPGRGNTHSSFKWRWYHFDGVDWDQSRRLNNRIYKFRGKAWDWEVDTEFGNYDYLMYADYDMDHPEVVNELRNWGVWYTNTLGLDGFRIDAVKHIKYSFTRDWINHVRSATGKNMFAVAEFWKNDLGAIENYLQKTNWNHSVFDVPLHYNLYNASKSSGNYDMRNIFNGTVVQRHPSHAVTFVDNHDSQPEEALESFVEPWFKPLAYALTLTREQGYPSVFYGDYYGIPTHGVPAMRSKIDPILEARQKYAYGPQHDYLDHPDVIGWTREGDSSHPKSGLATLITDGPGGSKRMYAGLKNAGETWYDITGNRSDTVKIGSDGWGEFHVNKKSVSIYVQK

SEQ ID NO: 41996 - protein, 478 aa, Bacillus sp.
NGTMMQYFEWYLPNDGNHWNRLNSDASNLKSKGITAVWIPPAWKGASQNDVGYGAYDLYDLGEFNQKGTVRTKYGTRSQLQAAVTSLKNNGIQVYGDVVMNHKGGADATEMVRAVEVNPNNRNQEVTGEYTIEAWTRFDFPGRGNTHSSFKWRWYHFDGVDWDQSRRLNNRIYKFRAKAWDWEVDTEFGNYDYLMYADYDMDHPETSNELRNWGVWYTNTLGLDGFRIDAVKHIKYSFTRDWINHVRSATGKNMFAVAEFWKNDLGAIENYLQKTNWNHSVFDVPLHYNLYNASKSGGNYDMRNIFNGTVVQRHPSHAVTFVDNHDSQPEEALESFVEEWFKPLAYALTLTREQGYPSVFYGDYYGIPTHGVPAMRSKIDPILEARQKYAYGPQHDYLDHPDVIGWTREGDSSHPKSGLATLITDGPGGSKRMYAGLKNAGETWYDITGNRSDTVKIGSDGWGEFHVNDGSVSIYVQK

SEQ ID NO: 41997 - protein, 478 aa, Bacillus sp.
NGTMMQYFEWYLPNDGNHWNRLNSDASNLKSKGITAVWIPPAWKAASQNDVGYGAYDLYDLGEFNQKGTVRTKYGTRSQLQAAVTSLKNNGIQVYGDVVMNHKGGADATEMVRAVEVNPNNRNQEVTGEYTIEAWTRFDFPGRGNTHSSFKWRWYHFDGVDWDQSRDLDNRIYKFRGKAWDWEVDTEFGNYDYLMYADYDMDHPEVVNELRNWGVWYTNTLGLDGFRIDAVKHIKYSFTRDWINHVRSATGKNMFAVAEFWKNDLGAIENYLQKTNWNHSVFDVPLHYNLYNASKSGGNYDMRNIFNGTVVQANPNHAVTFVDNHDSQPEEALESFVEEWFKPLAYALTLTREQGYPSVFYGDYYGIPTHGVPAMRSKIDPILEARQKYAYGPQHDYLDHPDVIGWTREGDSSHPKSGLATLITDGPGGSKRMYAGLKNAGETWYDITGNRSDTVKIGSDGWGEFHVNDGSVSIYVQK

SEQ ID NO: 41998 - protein, 478 aa, Bacillus sp.
NGTMMQYFEWYLPNDGNHWNRLNSDASNLKSKGITAVWIPPAWKGASQNDVGYGAYDLYDLGEFNQKGTVRTKYGTRSQLQAAVTSLKNNGIQVYGDVVMNHKGGADATEMVRAVEVNPNNRNQEVTGEYTIEAWTRFDFPGRGNTHSSFKWRWYHFDGVDWDQSRRLNNRIYKFRGKAWDWEVDTEFGNYDYLMYADYDMDHPEVVNELRNWGVWYTNTLGLDGFRIDAVKHIKYSFTRDWINHVRSATGKNMFAVAEFWKNDLGAIENYLQKTNWNHSVFDVPLHYNLYNASQSQGNYDMRNIFNGTVVQRHPSHAVTFVDNHDSQPEEALESFVEEWFKPLAYALTLTREQGYPSVFYGDYYGIPTHGVPAMRSKIDPILEARQKYAYGPQHDYLDHPDVIGWTREGDSSHPKSGLATLITDGPGGSKRMYAGLKNAGETWYDITGNRSDTVKIGSDGWGEFHVNKKSVSIYVQK

SEQ ID NO: 41999 - protein, 478 aa, Bacillus sp.
NGTMMQYFEWYLPNDGNHWNRLNSDASNLKSKGITAVWIPPAWKGASQNDVGYGAYDLYDLGEFNQKGTVRTKYGTRSQLQAAVTSLKNNGIQVYGDVVMNHKGGADATEMVRAVEVNPNNRNQEVTGEYTIEAWTRFDFPGRGNTHSSFKWRWYHFDGVDWDQSRRLNNRIYKFRGKAWDWEVDTEFGNYDYLMYADYDMDHPEVVNELRNWGVWYTNTLGLDGFRIDAVKHIKYSFTRDWINHVRSATGKNMFAVAEFWKNDLGAIENYLQKTNWNHSVFDVPLHYNLYNASKSAGNYDMRNIFNGTVVQRHPSHAVTFVDNHDSQPEEALESFVDEWFKPLAYALTLTREQGYPSVFYGDYYGIPTHGVPAMRSKIDPILEARQKYAYGPQHDYLDHPDVIGWTREGDSSHPKSGLATLITDGPGGSKRMYAGLKNAGETWYDITGNRSDTVKIGSDGWGEFHVNQQSVSIYVQK

SEQ ID NO: 42000 - protein, 478 aa, Bacillus sp.
NGTMMQYFEWYLPNDGNHWNRLNSDASNLKSKGITAVWIPPAWKATSQNDVGYGAYDLYDLGEFNQKGTVRTKYGTRSQFQAAVTSLKNNGIQVYGDVVMNHKGGADATEMVRAVEVNPNNRNQEVTGEYTIEAWTRFDFPGRGNTHSSFKWRWYHFDGVDWDQSRNVNNRIYKFRGKAWDWEVDTEFGNYDYLMYADYDMDHPEVVNELRNWGVWYTNTLGLDGFRIDAVKHIKYSFTRDWINHVRSATGKNMFAVAEFWKNDLGAIENYLQKTNWNHSVFDVPLHYNLYNASKSGGNYDMRNIFNGTVVKAHPNHAVTFVDNHDSQPEEALESFVEEWFKPLAYALTLTREQGYPSVFYGDYYGIPTHGVPAMRSKIDPILEARQKYAYGPQHDYLDHPDVIGWTREGDSSHPKSGLATLITDGPGGSKRMYAGLKNAGETWYDITGNRSDTVKIGSDGWGEFHVNDGSVSIYVQK

SEQ ID NO: 42001 - protein, 478 aa, Bacillus sp.
NGTMMQYFEWYLPNDGNHWNRLNSDASNLKSKGITAVWIPPAWKGASQNDVGYGAYDLYDLGEFNQKGTVRTKYGTRSQLQAAVTSLKNNGIQVYGDVVMNHKGGADATEMVRAVEVNPNNRNQEVTGEYTIEAWTRFDFPGRGNTHSSFKWRWYHFDGVDWDQSRELDNRIYKFRGKAWDWEVDTEFGNYDYLMYTDYDMDHPEVVNELRNWGVWYTNTLGLDGFRIDAVKHIKYSFTRDWINHVRSATGKNMFAVAEFWKNDLGAIENYLQKTNWNHSVFDVPLHYNLYNASKSQGNYDMRNIFNGTVVQRHPSHAVTFVDNHDSQPEEALESFVDTWFKPLAYALTLTREQGYPSVFYGDYYGIPTHGVPAMRSKIDPILEARQKYAYGPQHDYLDHPDVIGWTREGDSSHPKSGLATLITDGPGGSKRMYAGLKNAGETWYDITGNRSDTVKIGSDGWGEFHVNGSSVSIYVQK

SEQ ID NO: 42002 - protein, 478 aa, Bacillus sp.
NGTMMQYFEWYLPNDGNHWNRLNSDASNLKSKGITAVWIPPAWKAVSQNDVGYGAYDLYDLGEFNQKGTVRTKYGTRSQLQAAVTSLKNNGIQVYGDVVMNHKGGADATEMVRAVEVNPNNRNQEVTGEYTIEAWTRFDFPGRGNTHSSFKWRWYHFDGVDWDQSREFTNRIYKFRGKAWDWEVDTEFGNYDYLMYVDYDMDHPEVVNELRNWGVWYTNTLGLDGFRIDAVKHIKYSFTRDWINHVRSATGKNMFAVAEFWKNDLGAIENYLQKTNWNHSVFDVPLHYNLYNASKSGGNYDMRNIFNGTVVQRHPSHAVTFVDNHDSQPEEALESFVDPWFKPLAYALTLTREQGYPSVFYGDYYGIPTHGVPAMRSKIDPILEARQKYAYGPQHDYLDHPDVIGWTREGDSSHPKSGLATLITDGPGGSKRMYAGLKNAGETWYDITGNRSDTVKIGSDGWGEFHVNGGSVSIYVQK

SEQ ID NO: 42003 - protein, 478 aa, Bacillus sp.
NKTMMQYFEWYLPNDGNHWNRLNSDASNLKSKGITAVWIPPAWKGASQNDVGYGAYDLYDLGEFNQKGTVRTKYGTRSQLQAAVTSLKNNGIQVYGDVVMNHKGGADATEMVRAVEVNPNNRNQEVTGEYTIEAWTRFDFPGRGNTHSSFKWRWYHFDGVDWDQSRRLNNRIYKFRGKAWDWEVDTEFGNYDYLMYADYDMDHPEVVNELRNWGVWYTNTLGLDGFRIDAVKHIKYSFTRDWINHVRSATGKNMFAVAEFWKNDLGAIENYLQKTNWNHSVFDVPLHYNLYNASKSGGNYDMRNIFNGTVVQMQPSHAVTFVDNHDSQPEEALESFVEEWFKPLAYALTLTREQGYPSVFYGDYYGIPTHGVPAMRSKIDPILEARQKYAYGPQHDYLDHPDVIGWTREGDSSHPKSGLATLITDGPGGSKRMYAGLKNAGETWYDITGNRSDTVKIGSDGWGEFHVNDGSVSIYVQK

SEQ ID NO: 42004 - protein, 478 aa, Bacillus sp.
NGTMMQYFEWYLPNDGNHWNRLNSDASNLKSKGITAVWIPPAWKGASQNDVGYGAYDLYDLGEFNQKGTVRTKYGTRSQLQAAVTSLKNNGIQVYGDVVMNHKGGADATEMVRAVEVNPNNRNQEVTGEYTIEAWTRFDFPGRGNTHSSFKWRWYHFDGVDWDQSRRLNNRIYKFRGKAWDWEVDTEFGNYDYLMYADYDMDHPEVVNELRNWGVWYTNTLGLDGFRIDAVKHIKYSFTRDWINHVRSATGKNMFAVAEFWKNDLGAIENYLQKTNWNHSVFDVPLHYNLYNASKSGSNYDMRNIFNGTVVQRHPSHAVTFVDNHDSQPEEALESFVEPWFKPLAYALTLTREQGYPSVFYGDYYGIPTHGVPAMRSKIDPILEARQKYAYGPQHDYLDHPDVIGWTREGDSSHPKSGLATLITDGPGGSKRMYAGLKNAGETWYDITGNRSDTVKIGSDGWGEFHVNQTSVSIYVQK

SEQ ID NO: 42005 - protein, 478 aa, Bacillus sp.
NGTMMQYFEWYLPNDGNHWNRLNSDASNLKSKGITAVWIPPAWKAQSQNDVGYGAYDLYDLGEFNQKGTVRTKYGTRSQLQAAVTSLKNNGIQVYGDVVMNHKGGADATEMVRAVEVNPNNRNQEVTGEYTIEAWTRFDFPGRGNTHSSFKWRWYHFDGVDWDQSRQLNNRIYKFRGKAWDWEVDTEFGNYDYLMYADYDMDHPEVVNELRNWGVWYTNTLGLDGFRIDAVKHIKYSFTRDWINHVRSATGKNMFAVAEFWKNDLGAIENYLQKTNWNHSVFDVPLHYNLYNASKSQGNYDMRNIFNGTVVQRHPSHAVTFVDNHDSQPEEALESFVDTWFKPLAYALTLTREQGYPSVFYGDYYGIPTHGVPAMRSKIDPILEARQKYAYGPQHDYLDHPDVIGWTREGDSSHPKSGLATLITDGPGGSKRMYAGLKNAGETWYDITGNRSDTVKIGSDGWGEFHVNGSSVSIYVQK

SEQ ID NO: 42006 - protein, 478 aa, Bacillus sp.
NETMMQYFEWYLPNDGNHWNRLNSDASNLKSKGITAVWIPPAWKGASQNDVGYGAYDLYDLGEFNQKGTVRTKYGTRSQLQAAVTSLKNNGITVYGDVVMNHKGGADATEMVRAVEVNPNNRNQEVTGEYTIEAWTRFDFPGRGNTHSSFKWRWYHFDGVDWDQSRRLNNRIYKFRGKAWDWEVDTEFGNYDYLMYADYDMDHPEVVNELRNWGVWYTNTLGLDGFRIDAVKHIKYSFTRDWINHVRSATGKNMFAVAEFWKNDLGAIENYLQKTNWNHSVFDVPLHYNLYNASKSGGNYDMRNIFNGTVVQAHPSHAVTFVDNHDSQPEEALESFVEEWFKPLAYALTLTREQGYPSVFYGDYYGIPTHGVPAMRSKIDPILEARQKYAYGPQHDYLDHPDVIGWTREGDSSHPKSGLATLITDGPGGSKRMYAGLKNAGETWYDITGNRSDTVKIGSDGWGEFHVNDGSVSIYVQK

SEQ ID NO: 42007 - protein, 478 aa, Bacillus sp.
NGTMMQYFEWYLPNDGNHWNRLNSDASNLKSKGITAVWIPPAWKGASQNDVGYGAYDLYDLGEFNQKGTVRTKYGTRSQLQAAVTSLKNNGIQVYGDVVMNHKGGADATEMVRAVEVNPNNRQQEVTGEYTIEAWTRFDFPGRGNTHSSFKWRWYHFDGVDWDQSRRLNNRIYLFRGKSWDWEVDTEFGNYDYLMYADYDMDHPEVVNELRNWGVWYTNTLGLDGFRIDAVKHIKYSFTRDWINHVRSATGKNMFAVAEFWKNDLGAIENYLQKTNWNHSVFDVPLHYNLYNASKSGGNYDMRNIFNGTVVQRHPSHAVTFVDNHDSQPEEALESFVEEWFKPLAYALTLTREQGYPSVFYGDYYGIPTHGVPAMRSKIDPILEARQKYAYGPQHDYLDHPDVIGWTREGDSSHPKSGLATLITDGPGGSKRMYAGLKNAGETWYDITGNRSDTVKIGSDGWGEFHVNDGSVSIYVQK

SEQ ID NO: 42008 - protein, 478 aa, Bacillus sp.
NGTMMQYFEWDLPNDGNHWNRLNSDASNLKSKGIKAVWIPPAWKAASQNDVGYGAYDLYDLGEFNQKGTVRTKYGTRSQLQAAVTSLKNNGIQVYGDVVMNHKGGADATEMVRAVEVNPNNRNQEVTGEYTIEAWTRFDFPGRGNTHSSFKWRWYHFDGVDWDQSRNLSNRIYKFRGKAWDWEVDTEFGNYDYLMYTDYDMDHPEVVNELRNWGVWYTNTLGLDGFRIDAVKHIKYSFTRDWINHVRSATGKNMFAVAEFWKNDLGAIENYLQKTNWNHSVFDVPLHYNLYNASKSGGNYDMRNIFNGTVVQRHPSHAVTFVDNHDSQPEEALESFVEEWFKPLAYALTLTREQGYPSVFYGDYYGIPTHGVPAMRSKIDPILEARQKYAYGPQHDYLDHPDVIGWTREGDSSHPKSGLATLITDGPGGSKRMYAGLKNAGETWYDITGNRSDTVKIGSDGWGEFHVNDGSVSIYVQK

SEQ ID NO: 42009 - protein, 478 aa, Synthetic construct
NGTMMQYFEWYLPNDGNHWNRLNSDASNLKSKGITAVWIPPAWKGASQNDVGYGAYDLYDLGEFNQKGTVRTKYGTRSQLQAAVTSLKNNGIQVYGDVVMNHKGGADATEMVRAVEVNPNNRNQEVTGEYTIEAWTRFDFPGRGNTHSSFKWRWYHFDGVDWDQSRRLNNRIYKFRGKAWDWEVDTEFGNYDYLMYADYDMDFPETTNEMRNWGVWYTNTLGLDGFRIDAVKHIKYSFTRDWINHVRSATGKNMFAVAEFWKNDLGAIENYLQKTNWNHSVFDVPLHYNLYNASKSGGNYDMRNIFNGTVVQRHPSHAVTFVDNHDSQPEEALESFVEEWFKPLAYALTLTREQGYPSVFYGDYYGIPTHGVPAMRSKIDPILEARQKYAYGPQHDYLDHPDVIGWTREGDSSHPKSGLATLITDGPGGSKRMYAGLKNAGETWYDITGNRSDTVKIGSDGWGEFHVNDGSVSIYVQK

SEQ ID NO: 42010 - protein, 478 aa, Bacillus sp.
NGTMMQYFEWYLPNDGNHWNRLNSDASNLKSKGITAVWIPPAWKGASQNDVGYGAYDLYDLGEFNQKGTVRTKYGTRSQLQAAVTSLKNNGIQVYGDVVMNHKGGAHATEMVRAVEVNPNNRNQEVTGEYTIEAWTRFDFPGRGNTHSSFKWRWYHFDGVDWDQSRRLNNRIYKFRGKAWDWEVDTEFGNYDYLMYADYDMDHPEVVNELRNWGVWYTNTLGLDGFRIDAVKHIKYSFTRDWINHVRSATGKNMFAVAEFWKNDLGAIENYLQKTNWNHSVFDVPLHYNLYNASKSAGNYDMRNIFNGTVVQRHPSHAVTFVDNHDSQPEEALESFVDTWFKPLAYALTLTREQGYPSVFYGDYYGIPTHGVPAMRSKIDPILEARQKYAYGPQHDYLDHPDVIGWTREGDSSHPKSGLATLITDGPGGSKRMYAGLKNAGETWYDITGNRSDTVKIGSDGWGEFHVNQSSVSIYVQK

SEQ ID NO: 42011 - protein, 478 aa, Bacillus sp.
NGTMMQYFEWYLPNDGNHWNRLNSDASNLKSKGITAVWIPPAWKAASQNDVGYGAYDLYDLGEFNQKGTVRTKYGTRSQLQAAVTSLKNNGIQVYGDVVMNHKGGADATEMVRAVEVNPNNRNQEVTGEYTIEAWTRFDFPGRGNTHSSFKWRWYHFDGVDWDQSRDLQNRIYKFRGKAWDWEVDTEFGNYDYLMYADYDYDHPESTNEMRNWGVWYTNTLGLDGFRIDAVKHIKYSFTRDWINHVRSATGKNMFAVAEFWKNDLGAIENYLQKTNWNHSVFDVPLHYNLYNASKSGGNYDMRNIFNGTVVQRHPSHAVTFVDNHDSQPEEALESFVETWFKPLAYALTLTREQGYPSVFYGDYYGIPTHGVPAMRSKIDPILEARQKYAYGPQHDYLDHPDVIGWTREGDSSHPKSGLATLITDGPGGSKRMYAGLKNAGETWYDITGNRSDTVKIGSDGWGEFHVNKASVSIYVQK

SEQ ID NO: 42012 - protein, 478 aa, Bacillus sp.
NGTMMQYFEWYLPNDGNHWNRLNSDASNLKSKGITAVWIPPAWKGASQNDVGYGAYDLYDLGEFNQKGTVRTKYGTRSQLQAAVTSLKNNGINVYGDVVMNHKGGADATEMVRAVEVNPNNRNQEVTGEYTIEAWTRFDFPGRGNTHSSFKWRWYHFDGVDWDQSRRLNNRIYKFRGKAWDWEVDTEFGNYDYLMYADIDYDHPETTNEMRNWGVWYTNTLGLDGFRIDAVKHIKYSFTRDWINHVRSATGKNMFAVAEFWKNDLGAIENYLQKTNWNHSVFDVPLHYNLYNASKSGGNYDMRNIFNGTVVQAHPMHAVTFVDNHDSQPEEALESFVEEWFKPLAYALTLTREQGYPSVFYGDYYGIPTHGVPAMRSKIDPILEARQKYAYGPQHDYLDHPDVIGWTREGDSSHPKSGLATLITDGPGGSKRMYAGLKNAGETWYDITGNRSDTVKIGSDGWGEFHVNDGSVSIYVQK

SEQ ID NO: 42013 - protein, 478 aa, Bacillus sp.
NGTMMQYFEWYLPNDGNHWNRLNSDASNLKSKGITAVWIPPAWKGASQNDVGYGAYDLYDLGEFNQKGTVRTKYGTRSQLQAAVTSLKNNGIQVYGDVVMNHKGGADATEMVRAVEVNPNNRNQEVTGEYTIEAWTRFDFPGRGNTHSSFKWRWYHFDGVDWDQSRRLNNRIYKFRSKAWDWEVDTEFGNYDYLMYADYDMDDPEVINELRNWGVWYTNTLGLDGFRIDAVKHIKYSFTRDWINHVRSATGKNMFAVAEFWKNDLGAIENYLQKTNWNHSVFDVPLHYNLYNASKSGGNYDMRNIFNGTVVQRHPSHAVTFVDNHDSQPEEALESFVEEWFKPLAYALTLTREQGYPSVFYGDYYGIPTHGVPAMRSKIDPILEARQKYAYGPQHDYLDHPDVIGWTREGDSSHPKSGLATLITDGPGGSKRMYAGLKNAGETWYDITGNRSDTVKIGSDGWGEFHVNDGSVSIYVQK

SEQ ID NO: 42014 - protein, 478 aa, Synthetic construct
NGTMMQYFEWYLPNDGNHWNRLNSDASNLKSKGITAVWIPPAWKGASQNDVGYGAYDLYDLGEFNQKGTVRTKYGTRSQLQAAVTSLKNNGIQVYGDVVMNHKGGADATEMVRAVEVNPNNRNQEVTGEYTIEAWTRFDFPGRGNTHSSFKWRWYHFDGVDWDQSRRLNNRIYKFRGKAWDWEVDTEFGNYDYLMYADYDMDYPESTNELRNWGVWYTNTLGLDGFRIDAVKHIKYSFTRDWINHVRSATGKNMFAVAEFWKNDLGAIENYLQKTNWNHSVFDVPLHYNLYNASKSGGNYDMRNIFNGTVVQRHPSHAVTFVDNHDSQPEEALESFVEEWFKPLAYALTLTREQGYPSVFYGDYYGIPTHGVPAMRSKIDPILEARQKYAYGPQHDYLDHPDVIGWTREGDSSHPKSGLATLITDGPGGSKRMYAGLKNAGETWYDITGNRSDTVKIGSDGWGEFHVNDGSVSIYVQK

SEQ ID NO: 42015 - protein, 478 aa, Bacillus sp.
NGTMMQYFEWYLPNDGNHWNRLNSDASNLKSKGITAVWIPPAWKAASQNDVGYGAYDLYDLGEFNQKGTVRTKYGTRSQLQAAVTSLKNNGIQVYGDVVMNHKGGADATEMVRAVEVNPNNRNQEVTGEYTIEAWTRFDFPGRGNTHSSFKWRWYHFDGVDWDQSRNLNNRIYKFRGKAWDWEVDTEFGNYDYLMYTDYDMDHPEVVNELRNWGVWYTNTLGLDGFRIDAVKHIKYSFTRDWINHVRSATGKNMFAVAEFWKNDLGAIENYLQKTNWNHSVFDVPLHYNLYNASKSGGNYDMRNIFNGTVVQRHPSHAVTFVDNHDSQPEEALESFVDPWFKPLAYALTLTREQGYPSVFYGDYYGIPTHGVPAMRSKIDPILEARQKYAYGPQHDYLDHPDVIGWTREGDSSHPKSGLATLITDGPGGSKRMYAGLKNAGETWYDITGNRSDTVKIGSDGWGEFHVNGGSVSIYVQK

SEQ ID NO: 42016 - protein, 478 aa, Bacillus sp.
NGTMMQYFEWYLPNDGNHWNRLNSDASNLKSKGITAVWIPPAWKGASQNDVGYGAYDLYDLGEFNQKGTVRTKYGTRSQLQAAVTSLKNNGIQVYGDVVMNHKGGADATEMVRAVEVNPNNRNQEVTGEYTIEAWTRFDFPGRGNTHSSFKWRWYHFDGVDWDQSRRLDNRIYKFRGKAWDWEVDTEFGNYDYLMYTDYDMDHPEVVNELRNWGVWYTNTLGLDGFRIDAVKHIKYSFTRDWINHVRSATGKNMFAVAEFWKNDLGAIENYLQKTNWNHSVFDVPLHYNLYNASKSGGNYDMRNIFNGTVVQVHPSHAVTFVDNHDSQPEEALESFVEEWFKPLAYALTLTREQGYPSVFYGDYYGIPTHGVPAMRSKIDPILEARQKYAYGPQHDYLDHPDVIGWTREGDSSHPKSGLATLITDGPGGSKRMYAGLKNAGETWYDITGNRSDTVKIGSDGWGEFHVNYGSVSIYVQK

SEQ ID NO: 42017 - protein, 478 aa, Bacillus sp.
NGTMMQYFEWYLPNDGNHWNRLNSDASNLKSKGITAVWIPPAWKGASQNDVGYGAYDLYDLGEFNQKGTVRTKYGTRSQLQAAVTSLKNNGIQVYGDVVMNHKGGADATEMVRAVEVNPNNRNQEVTGEYTIEAWTRFDFPGRGNTHSSFKWRWYHFDGVDWDQSRNFQNRIYKFRGKAWDWEVDTEFGNYDYLMYADYDMDHPEVVNELRNWGVWYTNTLGLDGFRIDAVKHIKYSFTRDWINHVRSATGKNMFAVAEFWKNDLGAIENYLQKTNWNHSVFDVPLHYNLYNASKSQGNYDMRNIFNGTVVQAHPNHAVTFVDNHDSQPEEALESFVDTWFKPLAYALTLTREQGYPSVFYGDYYGIPTHGVPAMRSKIDPILEARQKYAYGPQHDYLDHPDVIGWTREGDSSHPKSGLATLITDGPGGSKRMYAGLKNAGETWYDITGNRSDTVKIGSDGWGEFHVNGSSVSIYVQK

SEQ ID NO: 42018 - protein, 478 aa, Bacillus sp.
NGTMMQYFEWYLPNDGNHWNRLNSDASNLKSKGITAVWIPPAWKGTSQNDVGYGAYDLYDLGEFNQKGTVRTKYGTRSQLQAAVTSLKNNGIQVYGDVVMNHKGGADATEMVRAVEVNPNNRNQEVTGEYTIEAWTRFDFPGRGNTHSSFKWRWYHFDGVDWDQSRNLNNRIYKFRGKAWDWEVDTEFGNYDYLMYVDYDMDHPEVVNELRNWGVWYTNTLGLDGFRIDAVKHIKYSFTRDWINHVRSATGKNMFAVAEFWKNDLGAIENYLQKTNWNHSVFDVPLHYNLYNASKSQGNYDMRNIFNGTVVQRHPSHAVTFVDNHDSQPEEALESFVDTWFKPLAYALTLTREQGYPSVFYGDYYGIPTHGVPAMRSKIDPILLARQKYAYGPQHDYLDHPDVIGWTREGDSSHPKSGLATLITDGPGGSKRMYAGLKNAGETWYDITGNRSDTVKIGSDGWGEFHVNGSSVSIYVQK

SEQ ID NO: 42019 - protein, 478 aa, Bacillus sp.
NGTMMQYFEWYLPNDGNHWNRLNSDASNLKSKGITAVWIPPAWKAVSQNDVGYGAYDLYDLGEFNQKGTVRTKYGTRSQLQAAVTSLKNNGIQVYGDVVMNHKGGADATEMVRAVEVNPNNRNQEVTGEYTIEAYTRFDFSGRGNTHSSFKWRWYHFDGVDWDQSRRFDNRIYKFRGKAWDWEVDTEFGNYDYLMYADYDMDHPEVVNELRNWGVWYTNTLGLDGFRIDAVKHIKYSFTRDWINHVRSATGKNMFAVAEFWKNDLGAIENYLQKTNWNHSVFDVPLHYNLYNASKSGGNYDMRNIFNGTVVQRHPSHAVTFVDNHDSQPEEALESFVEEWFKPLAYALTLTREQGYPSVFYGDYYGIPTHGVPAMRSKIDPILEARQKYAYGPQHDYLDHPDVIGWTREGDSSHPKSGLATLITDGPGGSKRMYAGLKNAGETWYDITGNRSDTVKIGSDGWGEFHVNDGSVSIYVQK

SEQ ID NO: 42020 - protein, 478 aa, Bacillus sp.
NGTMMQYFEWYLPNDGNHWNRLNSDASNLKSKGITAVWIPPAWKGASQNDVGYGAYDLYDLGEFNQKGTVRTKYGTRSQLQAAVTSLKNNGIQVYGDVVMNHKGGADATEMVRAVEVNPNNRNQEVTGEYTIEAWTRFDFPGRGNTHSSFKWRWYHFDGVDWDQSRRLNNRIYKFRGKAWDWEVDTEFGNYDYLMYADYDMDHPEVVNELRNWGVWYTNTLGLDGFRIDAVKHIKYSFTRDWINHVRSATGKNMFAVAEFWKNDLGAIENYLQKTNWNHSVFDVPLHYNLYNASKSAGNYDMRNIFNGTVVQRHPSHAVTFVDNHDSQPEEALESFVDPWFKPLAYALTLTREQGYPSVFYGDYYGIPTHGVPAMRSKIDPILEARQKYAYGPQHDYLDHPDVIGWTREGDSSHPKSGLATLITDGPGGSKRMYAGLKNAGETWYDITGNRSDTVKIGSDGWGEFHVNQSSVSIYVQK

SEQ ID NO: 42021 - protein, 478 aa, Bacillus sp.
NGTMMQYFEWYLPNDGNHWNRLNSDASNLKSKGITAVWIPPAWKATSQNDVGYGAYDLYDLGEFNQKGTVRTKYGTRSQLQAAVTSLKNNGIQVYGDVVMNHKGGADATEMVRAVEVNPNNRNQEVTGEYTIEAWTRFDFPGRGNTHSSFKWRWYHFDGVDWDQSRDLNNRIYKFRGKAWDWEVDTEFGNYDYLMYADYDMDHPEVVNELRNWGVWYTNTLGLDGFRIDAVKHIKYSFTRDWINHVRSATGKNMFAVAEFWKNDLGAIENYLQKTNWNHSVFDVPLHYNLYNASQSGGNYDMRNIFNGTVVQRHPSHAVTFVDNHDSQPEEALESFVEPWFKPLAYALTLTREQGYPSVFYGDYYGIPTHGVPAMRSKIDPILEARQKYAYGPQHDYLDHPDVIGWTREGDSSHPKSGLATLITDGPGGSKRMYAGLKNAGETWYDITGNRSDTVKIGSDGWGEFHVNKSSVSIYVQK

SEQ ID NO: 42022 - protein, 478 aa, Bacillus sp.
NNTMMQYFEWYLPNDGNHWNRLNSDASNLKSKGITAVWIPPAWKGASQNDVGYGAYDLYDLGEFNQKGTVRTKYGTRSQLQAAVTSLKNNGILVYGDVVMNHKGGADATEMVRAVEVNPNNRNQEVTGEYTIEAWTRFDFPGRGNTHSSFKWRWYHFDGVDWDQSRRLNNRIYKFRGKAWDWEVDTEFGNYDYLMYADYDMDHPEVVNELRNWGVWYTNTLGLDGFRIDAVKHIKYSFTRDWINHVRSATGKNMFAVAEFWKNDLGAIENYLQKTNWNHSVFDVPLHYNLYNASKSGGNYDMRNIFNGTVVQAHPMHAVTFVDNHDSQPEEALESFVEEWFKPLAYALTLTREQGYPSVFYGDYYGIPTHGVPAMRSKIDPILEARQKYAYGPQHDYLDHPDVIGWTREGDSSHPKSGLATLITDGPGGSKRMYAGLKNAGETWYDITGNRSDTVKIGSDGWGEFHVNDGSVSIYVQK

SEQ ID NO: 42023 - protein, 482 aa, Cytophaga sp.
NGTMMQYFEWYVPNDGQQWNRLRTDAPYLSSVGITAVWTPPAYKGTSQADVGYGPYDLYDLGEFNQKGTVRTKYGTKGELKSAVNTLHSNGIQVYGDVVMNHKAGADYTENVTAVEVNPSNRYQETSGHYNIQAWTGFNFPGRGTTYSNFKWQWFHFDGTDWDQSRSLSRIFKFDGTGKAWPWEVSSENGNYDYLMYYDIDYDHPDVVNEMKKWGVWYANEVGLDGYRLDAVKHIKFSFLKDWVDNARAATGKEMFTVGEYWQNDLGALNNYLAKVNYNQSLFDAPLHYNFYAASTGDGYYDMRNILNNTLVASNPTKAVTLVENHDTQPGQSLESTVQPWFKPLAYAFILTRSGGYPSVFYGDMYGTKGTTTREIPALKSKIEPLLKARKDYAYGTQRDYIDNPDVIGWTREGDSTKAKSGLATVITDGPGGSKRMYVGTSNAGEIWYDLTGNRTDKITIGSDGYATFPTEGGSVSVWVQQ

SEQ ID NO: 42024 - protein, 478 aa, Bacillus sp.
TNETMMQYFEWDLPNDGTLWNRLHNNAQNLKNAGITALWLPPAYKGTSQSDVGYGVYDLYDLGEFNQKGTIRTKYGTKTQLERAIRSLKANGIQVYADVVFNHKAGADGTEFVDAVEVDPSNRNQEVSGTYQIEAWTKFDFPGRGNTYSSFKWRWYHFDGTDWDESRKLNRIYKFRGKAWDWEVDTENGNYDYLMFADLDMDHPEVVTELKNWGTWYVNTTNIDGFRLDAVKHIKFSFMRDWLTYVRNQTGKNLFAVGEFWKNDLGALENYITKTNGSMSLFDAPLHNNFYTASKSSGYFDMRNLLNGTLVQRHPSHAVTLVDNHDTQPGQSLQSWVEPWFKPLAYAFILTRQEGYPCVFYGDYYGIPKYNIPGLKSKIDPLLIARRDYAYGTQRDYIDHQDIIGWTREGDSSHPNSGLAALITDGPGGSKWMYVGKKHAGKVFYDLTGNRSDTVTINADGWGEFKVNGGSVSIWVAK

SEQ ID NO: 42025 - protein, 480 aa, Synthetic construct
NGTMMQYFEWDLPNDGTLWTKVKNEATNLFSLGITALWLPPAYKGTSQSDVGYGVYDLYDLGEFNQKGTIRTKYGTKTQYIQAIQAAKAAGMQVYADVVFNHKGGADATENVLAVEVNPNNRNQEISGDYTIEAWTKFDFPGRGNTYSDFKWRWYHFDGVDWDQSRQFQNRIYKFRGDGKAWDWEVDSENGNYDYLMYADVDMDHPEVVTELKNWGTWYVNTTNIDGFRLDAVKHIKYSFFPDWLTYVRNQTGKNLFAVGEFWSYDVNKLHNYITKTNGSMSLFDAPLHNNFYTASKSSGYFDMRYLLNNTLMKDQPSLAVTLVDNHDTQPGQSLQSWVEPWFKPLAYAFILTRQEGYPCVFYGDYYGIPKYNIPGLKSKIDPLLIARRDYAYGTQRDYIDHQDIIGWTREGIDTKPNSGLAALITDGPGGSKWMYVGKKHAGKVFYDLTGNRSDTVTINADGWGEFKVNGGSVSIWVAK

SEQ ID NO: 42026 - protein, 478 aa, Bacillus sp.
NETMMQYFEWDLPNDGTLWNRLHNNAQNLKNAGITALWLPPAYKGTSQSDVGYGVYDLYDLGEFNQKGTIRTKYGTKTQLERAIRSLKANGIQVYADVVFNHKAGADGTEFVDAVEVDPSNRNQEVSGTYQIEAWTKFDFPGRGNTYSSFKWRWYHFDGTDWDESRALQNRIYKFRGKAWDWEVDTENGNYDYLMFADLDMDHPEVVTELQHWGTWYVNTTNIDGFRLDAVKHIKFSFMRDWLTYVRNQTGKNLFAVGEFWKNDLGALENYITKTNGSMSLFDAPLHENFYTASKSNGYFDMRDLLNGTLVQRHPSHAVTFVDNHDTDPEQSLDSWVEEWFKPLAYAFILTRQEGYPCVFYGDYYGIPKRNIPGLKSKIDPLLIARRDYAYGTQRDYIDHQDIIGWTREGIDTKPNSGLAALITDGPGGSKWMYVGKKHAGKVFYDLTGNRSDTVTINADGWGEFKVNGGSVSIWVAK

SEQ ID NO: 42027 - protein, 481 aa, Synthetic construct
HDGLNGTIMQYFEWNVPNDGQHWRRLQNNAQYLAEHGITAIWIPPAWKGTSQADTGYGAYDLYDLGEFHQKGTVRTKYGTKGELERAIKSLHARGINVYGDVVMNHKAGADQTEDVNAVEVNPQNRNQVVSGTYLIKAYTHFHFPGRGSQYSDFKWYWYHFDGTDWDQSRSLNRIYKFQTKAWDWPVDTEFGNYDYLMYADLDMDHPEVINELNRWGVWYANELQLDGFRLDAVKHIKFSFMRDWLGHVRGQTGKNLFAVAEYWKNDLGALENYLNFTNWTMSAFDVPLHYNLYSASNSSGNYDMRNLLNGTLVQKHPSHAVTFVDNHDTQPGESLESFVQPWFKPLAYATILTRESGYPSVFYGDMYGTSQREVPSYRQQIDPLLAARQQYAYGAQHDYLDNQDIIGWTREGDSAHPGSGLATVMSDGPGGSKTMYVGTAHAGQVFKDITGNRTDTVTINSAGTGTFRCNKGSVSIWVKQ

SEQ ID NO: 42028 - protein, 477 aa, Bacillus sp.
NETMMQYFEWDLPNDGTLWNRLHNNAQNLKNAGITALWLPPAYKGTSQSDVGYGVYDLYDLGEFNQKGTIRTKYGTKTQLERAIRSLKANGIQVYADVVFNHKAGADGTEFVDAVEVDPSNRNQEVSGTYQIEAWTKFDFPGRGNTYSSFKWRWYHFDGTDWDESRKLNRIYKFRGKAWDWEVDTENGNYDYLMFADLDMDHPEVVTELKNWGTWYVNTTNIDGFRLDAVKHIKFSFMRDWLTYVRNQTGKNLFAVGEFWKNDLGALENYITKTNGSMSLFDAPLHNNFYTASKSSGYFDMRNLLNGTLVQRHPSHAVTLVDNHDTQPGQSLQSWVEPWFKPLAYAFILTRQEGYPCVFYGDYYGIPKYNIPGLKSKIDPLLIARRDYAYGTQRDYIDHQDIIGWTREGIDTKPNSGLAALITDGPGGSKWMYVGKKHAGKVFYDLTGNRSDTVTINADGWGEFKVNGGSVSIWVAK

SEQ ID NO: 42029 - protein, 477 aa, Bacillus sp.
NETMMQYFEWDLPNDGTLWNRLHNNAQNLKNAGITALWLPPAYKGTSQSDVGYGVYDLYDLGEFNQKGTIRTKYGTKTQLERAIRSLKANGIQVYADVVFNHKAGADGTEFVDAVEVDPSNRNQEVSGTYQIEAWTKFDFPGRGNTYSSFKWRWYHFDGTDWDESRKLNRIYKFRGKAWDWEVDTENGNYDYLMFADLDMDHPEVVTELKNWGTWYVNTTNIDGFRLDAVKHIKFSFMRDWLTYVRNQTGKNLFAVGEFWKNDLGALENYITKTNGSMSLFDAPLHNNFYTASKSSGYFDMRNLLNGTLVQRHPSHAVTLVDNHDTQPGQSLQSWVEPWFKPLAYAFILTRQEGYPCVFYGDYYGIPKYNIPGLKSKIDPLLIARRDYAYGTQRDYIDHQDIIGWTREGDSSHPNSGLAALITDGPGGSKWMYVGKKHAGKVFYDLTGNRSDTVTINADGWGEFKVNGGSVSIWVAK

SEQ ID NO: 42030 - protein, 477 aa, Bacillus sp.
NETMMQYFEWDLPNDGTLWNRLHNNAQNLKNAGITALWLPPAYKGTSQSDVGYGVYDLYDLGEFNQKGTIRTKYGTKTQYIQAIQAAKAAGMQVYADVVFNHKAGADGTEFVDAVEVDPSNRNQEVSGTYQIEAWTKFDFPGRGNTYSSFKWRWYHFDGTDWDESRKLNRIYKFRGKAWDWEVDTENGNYDYLMFADLDMDHPEVVTELKNWGTWYVNTTNIDGFRLDAVKHIKFSFMRDWLTYVRNQTGKNLFAVGEFWKNDLGALENYITKTNGSMSLFDAPLHNNFYTASKSSGYFDMRNLLNGTLVQRHPSHAVTLVDNHDTQPGEALESFVQGWFKPLAYAFILTRQEGYPCVFYGDYYGIPKYNIPGLKSKIDPLLIARRDYAYGTQRDYIDHQDIIGWTREGIDTKPNSGLAALITDGPGGSKWMYVGKKHAGKVFYDLTGNRSDTVTINADGWGEFKVNGGSVSIWVAK

SEQ ID NO: 42031 - protein, 480 aa, Bacillus sp.
NQTMMQYFEWYLPNDGNHWNRLNSDASNLKSKGITAVWIPPAWKGASQNDVGYGAYDLYDLGEFNQKGTVRTKYGTRSQLQAAVTSLKNNGISVYGDVVMNHKGGADATEMVRAVEVNPNNRNQEVTGEYTIEAWTRFDFPGRGNTHSSFKWRWYHFDGVDWDQSRRLNNRIYKFRGHGKAWDWEVDTEFGNYDYLMYADYDMDHPEVVNELRNWGVWYTNTLGLDGFRIDAVKHIKYSFTRDWINHVRSATGKNMFAVAEFWKNDLGAIENYLQKTNWNHSVFDVPLHYNLYNASKSGGNYDMRNIFNGTVVQSHPSQAVTFVDNHDSQPEEALESFVEEWFKPLAYALTLTREQGYPSVFYGDYYGIPTHGVPAMRSKIDPILEARQKYAYGPQHDYLDHPDVIGWTREGDSSHPKSGLATLITDGPGGSKRMYAGLKNAGETWYDITGNRSDTVKIGSDGWGEFHVNDGSVSIYVQK

SEQ ID NO: 42032 - protein, 480 aa, Bacillus sp.
NGTMMQYFEWYLPNDGNHWNRLNSDASNLKSKGITAVWIPPAWKAASQNDVGYGAYDLYDLGEFNQKGTVRTKYGTRSQLQAAVTSLKNNGIQVYGDVVMNHKGGADATEMVRAVEVNPNNRNQEVTGEYTIEAWTRFDFPGRGNTHSSFKWRWYHFDGVDWDQSRDLDNRIYKFRGHGKAWDWEVDTEFGNYDYLMYADYDYDHPESTNEMRNWGVWYTNTLGLDGFRIDAVKHIKYSFTRDWINHVRSATGKNMFAVAEFWKNDLGAIENYLQKTNWNHSVFDVPLHYNLYNASKSGGNYDMRNIFNGTVVQRHPSHAVTFVDNHDSQPEEALESFVETWFKPLAYALTLTREQGYPSVFYGDYYGIPTHGVPAMRSKIDPILEARQKYAYGPQHDYLDHPDVIGWTREGDSSHPKSGLATLITDGPGGSKRMYAGLKNAGETWYDITGNRSDTVKIGSDGWGEFHVNKASVSIYVQK

SEQ ID NO: 42033 - protein, 480 aa, Bacillus sp.
NGTMMQYFEWYLPNDGNHWNRLNSDASNLKSKGIKAVWIPPAWKAASQNDVGYGAYDLYDLGEFNQKGTVRTKYGTRSQLQAAVTSLKNNGIQVYGDVVMNHKGGADATEMVRAVEVNPNNRNQEVTGEYTIEAWTRFDFPGRGNTHSSFKWRWYHFDGVDWDQSRQLNNRIYKFRGHGKAWDWEVDTEFGNYDYLMYADYDMDHPEVVNELRNWGVWYTNTLGLDGFRIDAVKHIKYSFTRDWINHVRSATGKNMFAVAEFWKNDLGAIENYLQKTNWNHSVFDVPLHYNLYNASKSGGNYDMRNIFNGTVVQRHPSHAVTFVDNHDSQPEEALESFVEEWFKPLAYALTLTREQGYPSVFYGDYYGIPTHGVPAMRSKIDPILEARQKYAYGPQHDYLDHPDVIGWTREGDSSHPKSGLATLETDGPGGSKRMYAGLKNAGETWYDITGNRSDTVKIGSDGWGEFHVNDGSVSIYVQK

SEQ ID NO: 42034 - protein, 480 aa, Bacillus sp.
NGTMMQYFEWYLPNDGNHWNRLNSDASNLKSKGITAVWIPPAWKAASQNDVGYGAYDLYDLGEFNQKGTVRTKYGTRSQLQAAVTSLKNNGIQVYGDVVMNHKGGADATEMVRAVEVNPNNRNQEVTGEYTIEAWTRFDFPGRGNTHSSFKWRWYHFDGVDWDQSRNLNNRIYKFRGHGKAWDWEVDTEFGNYDYLMYTDYDMDHPEVVNELRNWGVWYTNTLGLDGFRIDAVKHIKYSFTRDWINHVRSATGKNMFAVAEFWKNDLGAIENYLQKTNWNHSVFDVPLHYNLYNASKSGGNYDMRNIFNGTVVQRHPSHAVTFVDNHDSQPEEALESFVDPWFKPLAYALTLTREQGYPSVFYGDYYGIPTHGVPAMRSKIDPILEARQKYAYGPQHDYLDHPDVIGWTREGDSSHPKSGLATLITDGPGGSKRMYAGLKNAGETWYDITGNRSDTVKIGSDGWGEFHVNGGSVSIYVQK

SEQ ID NO: 42035 - protein, 480 aa, Bacillus sp.
NETMMQYFEWYLPNDGNHWNRLNSDASNLKSKGITAVWIPPAWKGASQNDVGYGAYDLYDLGEFNQKGTVRTKYGTRSQLQAAVTSLKNNGIAVYGDVVMNHKGGADATEMVRAVEVNPNNRNQEVTGEYTIEAWTRFDFPGRGNTHSSFKWRWYHFDGVDWDQSRRLNNRIYKFRGHGKAWDWEVDTEFGNYDYLMYADYDMDHPEVVNELRNWGVWYTNTLGLDGFRIDAVKHIKYSFTRDWINHVRSATGKNMFAVAEFWKNDLGAIENYLQKTNWNHSVFDVPLHYNLYNASRSGGNYDMRNIFNGTVVQAHPNHAVTFVDNHDSQPEEALESFVEEWFKPLAYALTLTREQGYPSVFYGDYYGIPTHGVPAMRSKIDPILEARQKYAYGPQHDYLDHPDVIGWTREGDSSHPKSGLATLITDGPGGSKRMYAGLKNAGETWYDITGNRSDTVKIGSDGWGEFHVNDGSVSIYVQK

SEQ ID NO: 42036 - protein, 480 aa, Bacillus sp.
NGTMMQYFEWYLPNDGNHWNRLNSDASNLKSKGITAVWIPPAWKGASQNDVGYGAYDLYDLGEFNQKGTVRTKYGTRSQLQAAVTSLKNNGIQVYGDVVMNHKGGADATEMVRAVEVNPNNRNQEVTGEYTIEAWTRFDFPGRGNTHSSFKWRWYHFDGVDWDQSRRLNNRIYKFRGHGKAWDWEVDTEFGNYDYLMYADYDMDHPEVVNELRNWGVWYTNTLGLDGFRIDAVKHIKYSFTRDWINHVRSATGKNMFAVAEFWKNDLGAIENYLQKTNWNHSVFDVPLHYNLYNASKSQGNYDMRNIFNGTVVQRHPSHAVTFVDNHDSQPEEALESFVEPWFKPLAYALTLTREQGYPSVFYGDYYGIPTHGVPAMRSKIDPILEARQKYAYGPQHDYLDHPDVIGWTREGDSSHPKSGLATLITDGPGGSKRMYAGLKNAGETWYDITGNRSDTVKIGSDGWGEFHVNKSSVSIYVQK

SEQ ID NO: 42037 - protein, 480 aa, Bacillus sp.
NGTMMQYFEWYLPNDGNHWNRLNSDASNLKSKGITAVWIPPAWKATSQNDVGYGAYDLYDLGEFNQKGTVRTKYGTRSQLQSAVTSLKNNGIQVYGDVVMNHKGGADATEMVRAVEVNPNNRNQEVTGEYTIEAWTRFDFPGRGNTHSSFKWRWYHFDGVDWDMSRNTDNRIYKFRGHGKAWDWEVDTEFGNYDYLMYADIDMDHPEVVNELRNWGVWYTNTLGLDGFRIDAVKHIKYSFTRDWINHVRSATGKNMFAVAEFWKNDLGAIENYLQKTNWNHSVFDVPLHYNLYNASKSQGNYDMRNIFNGTVVQRHPSHAVTFVDNHDSQPEEALESFVDTWFKPLAYALTLTREQGYPSVFYGDYYGIPTHGVPAMRSKIDPILEARQKYAYGPQHDYLDHPDVIGWTREGDSSHPKSGLATLITDGPGGSKRMYAGLKNAGETWYDITGNRSDTVKIGSDGWGEFHVNGSSVSIYVQK

SEQ ID NO: 42038 - protein, 480 aa, Bacillus sp.
NGTMMQYFEWYLPNDGNHWNRLNSDASNLKSKGITAVWIPPAWKAASQNDVGYGAYDLYDLGEFNQKGTVRTKYGTRSQLQAAVTSLKNNGIQVYGDVVMNHKGGADATEMVRAVEVNPNNRNQEVTGEYTIEAWTRFDFPGRGNTHSSFKWRWYHFDGVDWDQSRRLDNRIYKFRGHGKAWDWEVDTEFGNYDYLMYTDYDMDHPEVVNELRNWGVWYTNTLGLDGFRIDAVKHIKYSFTRDWINHVRIATGKNMFAVAEFWKNDLGAIENYLQKTNWNHSVFDVPLHYNLYNASKSGGNYDMRNIFNGTVVQRHPSHAVTFVDNHDSQPEEALESFVDEWFKPLAYALTLTREQGYPSVFYGDYYGIPTHGVPAMRSKIDPILEARQKYAYGPQHDYLDHPDVIGWTREGDSSHPKSGLATLITDGPGGSKRMYAGLKNAGETWYDITGNRSDTVKIGSDGWGEFHVNDQSVSIYVQK

SEQ ID NO: 42039 - protein, 480 aa, Bacillus sp.
NGTMMQYFEWYLPNDGNHWNRLNSDASNLKSKGITAVWIPPAWKATSQNDVGYGAYDLYDLGEFNQKGTVRTKYGTRSQLQAAVTSLKNNGIQVYGDVVMNHKGGADATEMVRAVEVNPNNRNQEVTGEYTIEAWTRFDFPGRGNTHSSFKWRWYHFDGVDFDQSRNVNNRIYKFRGHGKAWDWEVDTEFGNYDYLMYADIDYDHPESTNEMRNWGVWYTNTLGLDGFRIDAVKHIKYSFTRDWINHVRSATGKNMFAVAEFWKNDLGAIENYLQKTNWNHSVFDVPLHYNLYNASKSGGNYDMRNIFNGTVVQRHPSHAVTFVDNHDSQPEEALESFVEEWFKPLAYALTLTREQGYPSVFYGDYYGIPTHGVPAMRSKIDPILEARQKYAYGPQHDYLDHPDVIGWTREGDSSHPKSGLATLITDGPGGSKRMYAGLKNAGETWYDITGNRSDTVKIGSDGWGEFHVNDGSVSIYVQK

SEQ ID NO: 42040 - protein, 480 aa, Bacillus sp.
NGTMMQYFEWYLPNDGNHWNRLNSDASNLKSKGITAVWIPPAWKAVSQNDVGYGAYDLYDLGEFNQKGTVRTKYGTRSQLQAAVTSLKNNGIQVYGDVVMNHKGGADATEMVRAVEVNPNNRNQEVTGEYTIEAWTRFDFPGRGNTHSSFKWRWYHFDGVDFDQSREFTNRIYKFRGHGKAWDWEVDTEFGNYDYLMYADYDYDHPETTNEMRNWGVWYTNTLGLDGFRIDAVKHIKYSFTRDWINHVRSATGKNMFAVAEFWKNDLGAIENYLQKTNWNHSVFDVPLHYNLYNASKSGGNYDMRNIFNGTVVQRHPSHAVTFVDNHDSQPEEALESFVEEWFKPLAYALTLTREQGYPSVFYGDYYGIPTHGVPAMRSKIDPILEARQKYAYGPQHDYLDHPDVIGWTREGDSSHPKSGLATLITDGPGGSKRMYAGLKNAGETWYDITGNRSDTVKIGSDGWGEFHVNDGSVSIYVQK

SEQ ID NO: 42041 - protein, 480 aa, Bacillus sp.
NGTMMQYFEWYLPNDGNHWNRLNSDASNLKSKGITAVWIPPAWKGASQNDVGYGAYDLYDLGEFNQKGTVRTKYGTRSQLQAAVTSLKNNGIQVYGDVVMNHKGGADATEMVRAVEVNPNNRNQEVTGEYTIEAWTRFDFPGRGNTHSSFKWRWYHFDGVDWDQSRRLNNRIYKFRNHGKEWDWEVDTEFGNYDYLMYADYDMDHPEVSNELRNWGVWYTNTLGLDGFRIDAVKHIKYSFTRDWINHVRSATGKNMFAVAEFWKNDLGAIENYLQKTNWNHSVFDVPLHYNLYNASKSGGNYDMRNIFNGTVVQRHPSHAVTFVDNHDSQPEEALESFVEEWFKPLAYALTLTREQGYPSVFYGDYYGIPTHGVPAMRSKIDPILEARQKYAYGPQHDYLDHPDVIGWTREGDSSHPKSGLATLITDGPGGSKRMYAGLKNAGETWYDITGNRSDTVKIGSDGWGEFHVNDGSVSIYVQK

SEQ ID NO: 42042 - protein, 480 aa, Bacillus sp.
NGTMMQYFEWYLPNDGNHWNRLNSDASNLKSKGIKAVWIPPAWKGASQNDVGYGAYDLYDLGEFNQRGTVRTKYGTRSQLQAAVTSLKNNGIQVYGDVVMNHKGGADATEMVDAVEVNPNNRNQEVTGEYTIEAWTRFDFPGRGNTHSSFKWRWYHFDGVDFDQSRRLNNRIYKFRGHGKAWDWEVDTEFGNYDYLMYADYDMDHPEVVNELRNWGVWYTNTLGLDGFRIDAVKHIKYSFTRDWINHVRSATGKNMFAVAEFWKNDLGAIENYLQKTNWNHSVFDVPLHYNLYNASKSGGNYDMRNIFNGTVVQRHPSHAVTFVDNHDSQPEEALESFVEEWFKPLAYALTLTREQGYPSVFYGDYYGIPTHGVPAMRSKIDPILEARQKYAYGPQHDYLDHPDVIGWTREGDSSHPKSGLATLITDGPGGSKRMYAGLKNAGETWYDITGNRSDTVKIGSDGWGEFHVNDGSVSIYVQK

SEQ ID NO: 42043 - protein, 480 aa, Bacillus sp.
NGTMMQYFEWYLPNDGNHWNRLNSDASNLKSKGITAVWIPPAWKGASQNDVGYGAYDLYDLGEFNQKGTVRTKYGTRSQLQAAVTSLKNNGINVYGDVVMNHKGGADLTEMVRAVEVNPNNRNQEVTGEYTIEAWTRFDFPGRGNTHSSFKWRWYHFDGVDWDQSRRLNNRIYKFRGHGKAWDWEVDTEFGNYDYLMYADYDMDHPEVVNELRNWGVWYTNTLGLDGFRIDAVKHIKYSFTRDWINHVRSATGKNMFAVAEFWKNDLGAIENYLQKTNWNHSVFDVPLHYNLYNASKSGGNYDMRNIFNGTVVQAHPMHAVTFVDNHDSQPEEALESFVEEWFKPLAYALTLTREQGYPSVFYGDYYGIPTHGVPAMRSKIDPILEARQKYAYGPQHDYLDHPDVIGWTREGDSSHPKSGLATLITDGPGGSKRMYAGLKNAGETWYDITGNRSDTVKIGSDGWGEFHVNDGSVSIYVQK

SEQ ID NO: 42044 - protein, 480 aa, Bacillus sp.
NKTMMQYFEWYLPNDGNHWNRLNSDASNLKSKGITAVWIPPAWKGASQNDVGYGAYDLYDLGEFNQKGTVRTKYGTRSQLQAAVTSLKNNGIQVYGDVVMNHKGGADATEMVRAVEVNPNNRNQEVTGEYTIEAWTRFDFPGRGNTHSSFKWRWYHFDGVDWDQSRRLNNRIYKFRGHGKAWDWEVDTEFGNYDYLMYADYDMDHPEVVNELRNWGVWYTNTLGLDGFRIDAVKHIKYSFTRDWINHVRSATGKNMFAVAEFWKNDLGAIENYLQKTNWNHSVFDVPLHYNLYNASKSGGNYDMRNIFNGTVVQAHPNHAVTFVDNHDSQPEEALESFVEEWFKPLAYALTLTREQGYSSVFYGDYYGIPTHGVPAMRSKIDPILEARQKYAYGPQHDYLDHPDVIGWTREGDSSHPKSGLATLITDGPGGSKRMYAGLKNAGETWYDITGNRSDTVKIGSDGWGEFHVNDGSVSIYVQK

SEQ ID NO: 42045 - protein, 480 aa, Bacillus sp.
NGTMMQYFEWYLPNDGNHWNRLNSDASNLKSKGITAVWIPPAWKAASQNDVGYGAYDLYDLGEFNQKGTVRTKYGTRSQLQAAVTSLKNNGIQVYGDVVMNHKGGADATEMVRAVEVNPNNRNQEVTGEYTIEAWTRFDFPGRGNTHSSFKWRWYHFDGVDWDQSRQITNRIYKFRGHGKAWDWEVDTEFGNYDYLMYTDYDMDHPEVVNELRNWGVWYTNTLGLDGFRIDAVKHIKYSFTRDWINHVRSATGKNMFAVAEFWKNDLGAIENYLQKTNWNHSVFDVPLHYNLYNASKSQGNYDMRNIFNGTVVQRHPSHAVTFVDNHDSQPEEALESFVDTWFKPLAYALTLTREQGYPSVFYGDYYGIPTHGVPAMRSKIDPILEARQKYAYGPQHDYLDHPDVIGWTREGDSSHPKSGLATLITDGPGGSKRMYAGLKNAGETWYDITGNRSDTVKIGSDGWGEFHVNGSSVSIYVQK

SEQ ID NO: 42046 - protein, 480 aa, Bacillus sp.
NGTMMQYFEWYLPNDGNHWNRLNSDASNLKSKGITAVWIPPAWKAASQNDVGYGAYDLYDLGEFNQKGTVRTKYGTRSQLQAAVTSLKNNGIQVYGDVVMNHKGGADATEMVRAVEVNPNNRNQEVTGEYTIEAWTRFDFPGRGNTHSSFKWRWYHFDGVDWDQSRDLQNRIYKFRGHGKAWDWEVDTEFGNYDYLMYVDYDMDHPEVVNELRNWGVWYTNTLGLDGFRIDAVKHIKYSFTRDWINHVRSATGKNMFAVAEFWKNDLGAIENYLQKTNWNHSVFDVPLHYNLYNASKSGGNYDMRNIFNGTVVQRHPSHAVTFVDNHDSQPEEALESFVDPWFKPLAYALTLTREQGYPSVFYGDYYGIPTHGVPAMRSKIDPILEARQKYAYGPQHDYLDHPDVIGWTREGDSSHPKSGLATLITDGPGGSKRMYAGLKNAGETWYDITGNRSDTVKIGSDGWGEFHVNGGSVSIYVQK

SEQ ID NO: 42047 - protein, 480 aa, Bacillus sp.
NGTMMQYFEWYLPNDGNHWNRLNSDASNLKSKGITAVWIPPAWKAVSQNDVGYGAYDLYDLGEFNQKGTVRTKYGTRSQLQAAVTSLKNNGIQVYGDVVMNHKGGADATEMVRAVEVNPNNRNQEVTGEYTIEAWTRFDFPGRGNTHSSFKWRWYHFDGVDWDQSRDLENRIYKFRGHGKAWDWEVDTEFGNYDYLMYADYDMDHPEVVNELRNWGVWYTNTLGLDGFRIDAVKHIKYSFTRDWINHVRSATGKNMFAVAEFWKNDLGAIENYLQKTNWNHSVFDVPLHYNLYNASKSGGNYDMRNIFNGTVVQSHPNHAVTFVDNHDSQPEEALESFVEEWFKPLAYALTLTREQGYPSVFYGDYYGIPTHGVPAMRSKIDPILEARQKYAYGPQHDYLDHPDVIGWTREGDSSHPKSGLATLITDGPGGSKRMYAGLKNAGETWYDITGNRSDTVKIGSDGWGEFHVNYGSVSIYVQK

SEQ ID NO: 42048 - protein, 480 aa, Bacillus sp.
NGTMMQYFEWYLPNDGNHWNRLNSDASNLKSKGITAVWIPPAWKGASQNDVGYGAYDLYDLGEFNQKGTVRTKYGTRSQLQAAVTSLKNNGIQVYGDVVMNHKGGADATEMVRAVEVNPNNRNQEVTGEYTIEAWTRFDFPGRGNTHSSFKWRWYHFDGVDWDQSRRLNNRIYKFRSHGKAWDWEVDTEFGNYDYLMYADYDMDDPEVINELRNWGVWYTNTLGLDGFRIDAVKHIKYSFTRDWINHVRSATGKNMFAVAEFWKNDLGAIENYLQKTNWNHSVFDVPLHYNLYNASKSGGNYDMRNIFNGTVVQRHPSHAVTFVDNHDSQPEEALESFVEEWFKPLAYALTLTREQGYPSVFYGDYYGIPTHGVPAMRSKIDPILEARQKYAYGPQHDYLDHPDVIGWTREGDSSHPKSGLATLITDGPGGSKRMYAGLKNAGETWYDITGNRSDTVKIGSDGWGEFHVNDGSVSIYVQK

SEQ ID NO: 42049 - protein, 480 aa, Bacillus sp.
NGTMMQYFEWYLPNDGNHWNRLNSDASNLKSKGITAVWIPPAWKGASQNDVGYGAYDLYDLGEFNQKGTVRTKYGTRSQLQAAVTSLKNNGIQVYGDVVMNHKGGADATEMVRAVEVNPNNRNQEVTGEYTIEAWTRFDFPGRGNTHSSFKWRWYHFDGVDWDQSRRLNNRIYKFRGHGKAWDWEVDTEFGNYDYLMYADYDMDHPEVVNELRNWGVWYTNTLGLDGFRIDAVKHIKYSFTRDWINHVRSATGKNMFAVAEFWKNDLGAIENYLQKTNWNHSVFDVPLHYNLYNASKSAGNYDMRNIFNGTVVQRHPSHAVTFVDNHDSQPEEALESFVEEWFKPLAYALTLTREQGYPSVFYGDYYGIPTHGVPAMRSKIDPILEARQKYAYGPQHDYLDHPDVIGWTREGDSSHPKSGLATLITDGPGGSKRMYAGLKNAGETWYDITGNRSDTVKIGSDGWGEFHVNKSSVSIYVQK

SEQ ID NO: 42050 - protein, 480 aa, Bacillus sp.
NGTMMQYFEWYLPNDGNHWNRLNSDASNLKSKGITAVWIPPAWKAVSQNDVGYGAYDLYDLGEFNQKGTVRTKYGTRSQLQAAVTSLKNNGIQVYGDVVMNHKGGADLTEMVDAVEVNPNNRNQEVTGEYTIEAWTRFDFPGRGNTHSSFKWRWYHFDGVDWDQSREFTNRIYKFRGHGKAWDWEVDTEFGNYDYLMYVDYDMDHPEVVNELRNWGVWYTNTLGLDGFRIDAVKHIKYSFTRDWINHVRSATGKNMFAVAEFWKNDLGAIENYLQKTNWNHSVFDVPLHYNLYNASKSGGNYDMRNIFNGTVVQRHPSHAVTFVDNHDSQPEEALESFVEEWFKPLAYALTLTREQGYPSVFYGDYYGIPTHGVPAMRSKIDPILEARQKYAYGPQHDYLDHPDVIGWTREGDSSHPKSGLATLITDGPGGSKRMYAGLKNAGETWYDITGNRSDTVKIGSDGWGEFHVNDGSVSIYVQK

SEQ ID NO: 42051 - protein, 480 aa, Bacillus sp.
NGTMMQYFEWYLPNDGNHWNRLNSDASNLKSKGITAVWIPPAWKGTSQNDVGYGAYDLYDLGEFNQKGTVRTKYGTRSQLQAAVTSLKNNGIQVYGDVVMNHKGGADATEMVRAVEVNPNNRNQEVTGEYTIEAWTRFDFPGRGNTHSSFKWRWYHFDGVDWDQSRNLNNRIYKFRGHGKAWDWEVDTEFGNYDYLMYVDYDMDHPEVVNELRNWGVWYTNTLGLDGFRIDAVKHIKYSFTRDWINHVRSATGKNMFAVAEFWKNDLGAIENYLQKTNWNHSVFDVPLHYNLYNASKSQGNYDMRNIFNGTVVQRHPSHAVTFVDNHDSQPEEALESFVDTWFKPLAYALTLTREQGYPSVFYGDYYGIPTHGVPAMRSKIDPILEARQKYAYGPQHDYLDHPDVIGWTREGDSSHPKSGLATLITDGPGGSKRMYAGLKNAGETWYDITGNRSDTVKIGSDGWGEFHVNGSSVSIYVQK

SEQ ID NO: 42052 - protein, 480 aa, Bacillus sp.
NGTMMQYFEWYLPNDGNHWNRLNSDASNLKSKGITAVWIPPAWKATSQNDVGYGAYDLYDLGEFNQKGTVRTKYGTRSQLQAAVTSLKNNGIQVYGDVVMNHKGGADATEMVRAVEVNPNNRNQEVTGEYTIEAWTRFDFPGRGNTHSSFKWRWYHFDGVDWDQSRNVNNRIYKFRGHGKAWDWEVDTEFGNYDYLMYADYDMDHPEVVNELRNWGVWYTNTLGLDGFRIDAVKHIKYSFTRDWINHVRSATGKNMFAVAEFWKNDLGAIENYLQKTNWNHSVFDVPLHYNLYNASKSQGNYDMRNIFNGTVVQRHPSHAVTFVDNHDSQPEEALESFVDTWFKPLAYALTLTREQGYPSVFYGDYYGIPTHGVPAMRSKIDPILEARQKYAYGPQHDYLDHPDVIGWTREGDSSHPKSGLATLITDGPGGSKRMYAGLKNAGETWYDITGNRSDTVKIGSDGWGEFHVNGTSVSIYVQK

SEQ ID NO: 42053 - protein, 480 aa, Bacillus sp.
NGTMMQYFEWYLPNDGNHWNRLNSDASNLKSKGITAVWIPPAWKAASQNDVGYGAYDLYDLGEFNQKGTVRTKYGTRSQLQAAVTSLKNNGIQVYGDVVMNHKGGADATEMVRAVEVNPNNRNQEVTGEYTIEAWTRFDFPGRGNTHSSFKWRWYHFDGVDWDQSRDLQNRIYKFRGHGKAWDWEVDTEFGNYDYLMYADYDYDHPESTNEMRNWGVWYTNTLGLDGFRIDAVKHIKYSFTRDWINHVRSATGKNMFAVAEFWKNDLGAIENYLQKTNWNHSVFDVPLHYNLYNASKSGGNYDMRNIFNGTVVQRHPSHAVTFVDNHDSQPEEALESFVETWFKPLAYALTLTREQGYPSVFYGDYYGIPTHGVPAMRSKIDPILEARQKYAYGPQHDYLDHPDVIGWTREGDSSHPKSGLATLITDGPGGSKRMYAGLKNAGETWYDITGNRSDTVKIGSDGWGEFHVNKASVSIYVQK

SEQ ID NO: 42054 - protein, 480 aa, Bacillus sp.
NGTMMQYFEWYLPNDGNHWNRLNSDASNLKSKGITAVWIPPAWKGASQNDVGYGAYDLYDLGEFNQKGTVRTKYGTRSQLQAAVTSLKNNGIQVYGDVVMNHKGGADATEMVRAVEVNPNNRNQEVTGEYTIEAWTRFDFPGRGNTHSSFKWRWYHFDGVDWDQSRNFQNRIYKFRGHGKAWDWEVDTEFGNYDYLMYADIDYDHPETTNEMRNWGVWYTNTLGLDGFRIDAVKHIKYSFTRDWINHVRSATGKNMFAVAEFWKNDLGAIENYLQKTNWNHSVFDVPLHYNLYNASKSQGNYDMRNIFNGTVVQRHPSHAVTFVDNHDSQPEEALESFVDTWFKPLAYALTLTREQGYPSVFYGDYYGIPTHGVPAMRSKIDPILEARQKYAYGPQHDYLDHPDVIGWTREGDSSHPKSGLATLITDGPGGSKRMYAGLKNAGETWYDITGNRSDTVKIGSDGWGEFHVNGSSVSIYVQK

SEQ ID NO: 42055 - protein, 480 aa, Bacillus sp.
NGTMMQYFEWYLPNDGNHWNRLNSDASNLKSKGITAVWIPPAWKGASQNDVGYGAYDLYDLGEFNQKGTVRTKYGTRSQLQAAVTSLKNNGINVYGDVVMNHKGGADATEMVRAVEVNPNNRNQEVTGEYTIEAWTRFDFPGRGNTHSSFKWRWYHFDGVDWDQSRRLNNRIYKFRGHGKAWDWEVDTEFGNYDYLMYADIDYDHPESTNEMRNWGVWYTNTLGLDGFRIDAVKHIKYSFTRDWINHVRSATGKNMFAVAEFWKNDLGAIENYLQKTNWNHSVFDVPLHYNLYNASKSGGNYDMRNIFNGTVVQAHPMHAVTFVDNHDSQPEEALESFVEEWFKPLAYALTLTREQGYPSVFYGDYYGIPTHGVPAMRSKIDPILEARQKYAYGPQHDYLDHPDVIGWTREGDSSHPKSGLATLITDGPGGSKRMYAGLKNAGETWYDITGNRSDTVKIGSDGWGEFHVNDGSVSIYVQK

SEQ ID NO: 42056 - protein, 480 aa, Bacillus sp.
NGTMMQYFEWYLPNDGNHWNRLNSDASNLKSKGITAVWIPPAWKAASQNDVGYGAYDLYDLGEFNQKGTVRTKYGTRSQLQAAVTSLKNNGIQVYGDVVMNHKGGADATEMVRAVEVNPNNRNQEVTGEYTIEAWTRFDFPGRGNTHSSFKWRWYHFDGVDWDQSRNLNNRIYKFRGHGKAWDWEVDTEFGNYDYLMYTDYDMDHPEVVNELRNWGVWYTNTLGLDGFRIDAVKHIKYSFTRDWINHVRSATGKNMFAVAEFWKNDLGAIENYLQKTNWNHSVFDVPLHYNLYNASKSGGNYDMRNIFNGTVVQRHPSHAVTFVDNHDSQPEEALESFVETWFKPLAYALTLTREQGYPSVFYGDYYGIPTHGVPAMRSKIDPILEARQKYAYGPQHDYLDHPDVIGWTREGDSSHPKSGLATLITDGPGGSKRMYAGLKNAGETWYDITGNRSDTVKIGSDGWGEFHVNKASVSIYVQK

SEQ ID NO: 42057 - protein, 480 aa, Bacillus sp.
NGTMMQYFEWYLPNDGNHWNRLNSDASNLKSKGIKAVWIPPAWKGASQNDVGYGAYDLYDLGEFNQRGTVRTKYGTRSQLQAAVTSLKNNGIQVYGDVVMNHKGGADATEMVRAVEVNPNNRNQEVTGEYTIEAWTRFDFPGRGNTHSSFKWRWYHFDGVDYDQSRRLNNRIYKFRGHGKAWDWEVDTEFGNYDYLMYADYDMDHPEVVNELRNWGVWYTNTLGLDGFRIDAVKHIKYSFTRDWINHVRSATGKNMFAVAEFWKNDLGAIENYLQKTNWNHSVFDVPLHYNLYNASKSGGNYDMRNIFNGTVVQRHPSHAVTFVDNHDSQPEEALESFVEEWFKPLAYALTLTREQGYPSVFYGDYYGIPTHGVPAMRSKIDPILEARQKYAYGPQHDYLDHPDVIGWTREGDSSHPKSGLATLITDGPGGSKRMYAGLKNAGETWYDITGNRSDTVKIGSDGWGEFHVNDGSVSIYVQK

SEQ ID NO: 42058 - protein, 480 aa, Bacillus sp.
NGTMMQYFEWYLPNDGNHWNRLNSDASNLKSKGIKAVWIPPAWKGASQNDVGYGAYDLYDLGEFNQRGTVRTKYGTRSQLQAAVTSLKNNGIQVYGDVVMNHKGGADATEMVRAVEVNPNNRNQEVTGEYTIEAWTRFDFPGRGNTHSSFKWRWYHFDGVDHDQSRRLNNRIYKFRGHGKAWDWEVDTEFGNYDYLMYADYDMDHPEVVNELRNWGVWYTNTLGLDGFRIDAVKHIKYSFTRDWINHVRSATGKNMFAVAEFWKNDLGAIENYLQKTNWNHSVFDVPLHYNLYNASKSGGNYDMRNIFNGTVVQRHPSHAVTFVDNHDSQPEEALESFVEEWFKPLAYALTLTREQGYPSVFYGDYYGIPTHGVPAMRSKIDPILEARQKYAYGPQHDYLDHPDVIGWTREGDSSHPKSGLATLITDGPGGSKRMYAGLKNAGETWYDITGNRSDTVKIGSDGWGEFHVNDGSVSIYVQK

SEQ ID NO: 42059 - protein, 480 aa, Bacillus sp.
NGTMMQYFEWYLPNDGNHWNRLNSDASNLKSKGITAVWIPPAWKAASQNDVGYGAYDLYDLGEFNQKGTVRTKYGTRSQLQAAVTSLKNNGIQVYGDVVMNHKGGADATEMVRAVEVNPNNRNQEVTGEYTIEAWTRFDFPGRGNTHSSFKWRWYHFDGVDWDQSRDLDNRIYKFRGHGKAWDWEVDTEFGNYDYLMYADYDMDHPEVVNELRNWGVWYTNTLGLDGFRIDAVKHIKYSFTRDWINHVRSATGKNMFAVAEFWKNDLGAIENYLQKTNWNHSVFDVPLHYNLYNASKSGGNYDMRNIFNGTVVQANPNHAVTFVDNHDSQPEEALESFVEEWFKPLAYALTLTREQGYPSVFYGDYYGIPTHGVPAMRSKIDPILEARQKYAYGPQHDYLDHPDVIGWTREGDSSHPKSGLATLITDGPGGSKRMYAGLKNAGETWYDITGNRSDTVKIGSDGWGEFHVNDGSVSIYVQK

SEQ ID NO: 42060 - protein, 480 aa, Bacillus sp.
NGTMMQYFEWYLPNDGNHWNRLNSDASNLKSKGITAVWIPPAWKGASQNDVGYGAYDLYDLGEFNQKGTVRTKYGTRSQLQAAVTSLKNNGIQVYGDVVMNHKGGADATEMVRAVEVNPNNRNQEVTGEYTIEAWTRFDFPGRGNTHSSFKWRWYHFDGVDWDQSRRLDNRIYKFRGHGKAWDWEVDTEFGNYDYLMYTDYDMDHPEVVNELRNWGVWYTNTLGLDGFRIDAVKHIKYSFTRDWINHVRSATGKNMFAVAEFWKNDLGAIENYLQKTNWNHSVFDVPLHYNLYNASKSGGNYDMRNIFNGTVVQVHPSHAVTFVDNHDSQPEEALESFVEEWFKPLAYALTLTREQGYPSVFYGDYYGIPTHGVPAMRSKIDPILEARQKYAYGPQHDYLDHPDVIGWTREGDSSHPKSGLATLITDGPGGSKRMYAGLKNAGETWYDITGNRSDTVKIGSDGWGEFHVNYGSVSIYVQK

SEQ ID NO: 42061 - protein, 480 aa, Bacillus sp.
NGTMMQYFEWYLPNDGNHWNRLNSDASNLKSKGITAVWIPPAWKGASQNDVGYGAYDLYDLGEFNQKGTVRTKYGTRSQLQAAVTSLKNNGIQVYGDVVMNHKGGADATEMVRAVEVNPNNRNQEVTGEYTIEAYTRFDFPGRGNTHSSFKWRWYHFDGVDWDQSRNFQNRIYKFRGHGKAWDWEVDTEFGNYDYLMYADYDMDHPEVVNELRNWGVWYTNTLGLDGFRIDAVKHIKYSFTRDWINHVRSATGKNMFAVAEFWKNDLGAIENYLQKTNWNHSVFDVPLHYNLYNASKSQGNYDMRNIFNGTVVQRHPSHAVTFVDNHDSQPEEALESFVDTWFKPLAYALTLTREQGYPSVFYGDYYGIPTHGVPAMRSKIDPILEARQKYAYGPQHDYLDHPDVIGWTREGDSSHPKSGLATLITDGPGGSKRMYAGLKNAGETWYDITGNRSDTVKIGSDGWGEFHVNGSSVSIYVQK

SEQ ID NO: 42062 - protein, 480 aa, Bacillus sp.
NGTMMQYFEWYLPNDGNHWNRLNSDASNLKSKGITAVWIPPAWKGASQNDVGYGAYDLYDLGEFNQKGTVRTKYGTRSQLQAAVTSLKNNGIAVYGDVVMNHKGGADATEMVRAVEVNPNNRNQEVTGEYTIEAWTRFDFPGRGNTHSSFKWRWYHFDGVDWDQSRRLNNRIYKFRGHGKAWDWEVDTEFGNYDYLMYADYDMDHPEVVNELRNWGVWYTNTLGLDGFRIDAVKHIKYSFTRDWINHVRSATGKNMFAVSEFWKNDLGAIENYLQKTNWNHSVFDVPLHYNLYNASKSGGNYDMRNIFNGTVVQAHPSHAVTFVDNHDSQPEEALESFVEEWFKPLAYALTLTREQGYPSVFYGDYYGIPTHGVPAMRSKIDPILEARQKYAYGPQHDYLDHPDVIGWTREGDSSHPKSGLATLITDGPGGSKRMYAGLKNAGETWYDITGNRSDTVKIGSDGWGEFHVNDGSVSIYVQK

SEQ ID NO: 42063 - protein, 480 aa, Bacillus sp.
NGTMMQYFEWYLPNDGNHWNRLNSDASNLKSKGITAVWIPPAWKGASQNDVGYGAYDLYDLGEFNQKGTVRTKYGTRSQLQAAVTSLKNNGIQVYGDVVMNHKGGADATEMVRAVEVNPNNRNQEVTGDYTIEAWTRFDFPGRGNTHSSFKWRWYHFDGVDWDQSRRLNNRIYLFRNHGKAWDWEVDTEFGNYDYLMYADYDMDHPEVVNELRNWGVWYTNTLGLDGFRIDAVKHIKYSFTRDWINHVRSATGKNMFAVAEFWKNDLGAIENYLQKTNWNHSVFDVPLHYNLYNASKSGGNYDMRNIFNGTVVQRHPSHAVTFVDNHDSQPEEALESFVEEWFKPLAYALTLTREQGYPSVFYGDYYGIPTHGVPAMRSKIDPILEARQKYAYGPQHDYLDHPDVIGWTREGDSSHPKSGLATLITDGPGGSKRMYAGLKNAGETWYDITGNRSDTVKIGSDGWGEFHVNDGSVSIYVQK

SEQ ID NO: 42064 - protein, 480 aa, Bacillus sp.
NGTMMQYFEWYLPNDGNHWNRLNSDASNLKSKGITAVWIPPAWKAVSQNDVGYGAYDLYDLGEFNQKGTVRTKYGTRSQLQAAVTSLKNNGIQVYGDVVMNHKGGADATEMVRAVEVNPNNRNQEVTGEYTIEAWTRFDFPGRGNTHSSFKWRWYHFDGVDWDQSREFTNRIYKFRGHGKAWDWEVDTEFGNYDYLMYVDYDMDHPEVVNELRNWGVWYTNTLGLDGFRIDAVKHIKYSFTRDWINHVRIATGKNMFAVAEFWKNDLGAIENYLQKTNWNHSVFDVPLHYNLYNASKSGGNYDMRNIFNGTVVQRHPSHAVTFVDNHDSQPEEALESFVDEWFKPLAYALTLTREQGYPSVFYGDYYGIPTHGVPAMRSKIDPILEARQKYAYGPQHDYLDHPDVIGWTREGDSSHPKSGLATLITDGPGGSKRMYAGLKNAGETWYDITGNRSDTVKIGSDGWGEFHVNDQSVSIYVQK

SEQ ID NO: 42065 - protein, 480 aa, Bacillus sp.
NLTMMQYFEWYLPNDGNHWNRLNSDASNLKSKGITAVWIPPAWKGASQNDVGYGAYDLYDLGEFNQKGTVRTKYGTRSQLQAAVTSLKNNGINVYGDVVMNHKGGADATEMVRAVEVNPNNRNQEVTGEYTIEAWTRFDFPGRGNTHSSFKWRWYHFDGVDWDQSRRLNNRIYKFRGHGKAWDWEVDTEFGNYDYLMYADYDMDHPEVVNELRNWGVWYTNTLGLDGFRIDAVKHIKYSFTRDWINHVRSATGKNMFAVAEFWKNDLGAIENYLQKTNWNHSVFDVPLHYNLYNASKSGGNYDMRNIFNGTVVQAHPNHAVTFVDNHDSQPEEALESFVEEWFKPLAYALTLTREQGYPSVFYGDYYGIPTHGVPAMRSKIDPILEARQKYAYGPQHDYLDHPDVIGWTREGDSSHPKSGLATLITDGPGGSKRMYAGLKNAGETWYDITGNRSDTVKIGSDGWGEFHVNDGSVSIYVQK

SEQ ID NO: 42066 - protein, 480 aa, Bacillus sp.
NGTMMQYFEWYLPNDGNHWNRLNSDASNLKSKGITAVWIPPAWKAVSQNDVGYGAYDLYDLGEFNQKGTVRTKYGTRSQLQAAVTSLKNNGIQVYGDVVMNHKGGADATEMVRAVEVNPNNRNQEVTGEYTIEAWTRFDFPGRGNTHSSFKWRWYHFDGVDWDQSRDLENRIYKFRGHGKAWDWEVDTEFGNYDYLMYADYDMDHPEVVNELRNWGVWYTNTLGLDGFRIDAVKHIKYSFTRDWINHVRSATGKNMFAVAEFWKNDLGAIENYLQKTNWNHSVFDVPLHYNLYNASQSGGNYDMRNIFNGTVVQRHPSHAVTFVDNHDSQPEEALESFVEPWFKPLAYALTLTREQGYPSVFYGDYYGIPTHGVPAMRSKIDPILEARQKYAYGPQHDYLDHPDVIGWTREGDSSHPKSGLATLITDGPGGSKRMYAGLKNAGETWYDITGNRSDTVKIGSDGWGEFHVNKSSVSIYVQK

SEQ ID NO: 42067 - protein, 480 aa, Bacillus sp.
NGTMMQYFEWYLPNDGNHWNRLNSDASNLKSKGITAVWIPPAWKAVSQNDVGYGAYDLYDLGEFNQKGTVRTKYGTRSQLQAAVTSLKNNGIQVYGDVVMNHKGGADATEMVRAVEVNPNNRNQEVTGEYTIEAWTRFDFPGRGNTHSSFKWRWYHFDGVDFDQSREFTNRIYKFRGHGKAWDWEVDTEFGNYDYLMYADIDYDHPESTNEMRNWGVWYTNTLGLDGFRIDAVKHIKYSFTRDWINHVRSATGKNMFAVAEFWKNDLGAIENYLQKTNWNHSVFDVPLHYNLYNASKSGGNYDMRNIFNGTVVQRHPSHAVTFVDNHDSQPEEALESFVEEWFKPLAYALTLTREQGYPSVFYGDYYGIPTHGVPAMRSKIDPILEARQKYAYGPQHDYLDHPDVIGWTREGDSSHPKSGLATLITDGPGGSKRMYAGLKNAGETWYDITGNRSDTVKIGSDGWGEFHVNDGSVSIYVQK

SEQ ID NO: 42068 - protein, 480 aa, Bacillus sp.
NGTMMQYFEWYLPNDGNHWNRLNSDASNLKSKGITAVWIPPAWKAVSQNDVGYGAYDLYDLGEFNQKGTVRTKYGTRSQLQAAVTSLKNNGIQVYGDVVMNHKGGADATEMVRAVEVNPNNRNQEVTGEYTIEAWTRFDFPGRGNTHSSFKWRWYHFDGVDWDQSRNLTNRIYKFRGHGKAWDWEVDTEFGNYDYLMYTDYDMDHPEVVNELRNWGVWYTNTLGLDGFRIDAVKHIKYSFTRDWINHVRSATGKNMFAVAEFWKNDLGAIENYLQKTNWNHSVFDVPLHYNLYNASKSGGNYDMRNIFNGTVVQAHPNHAVTFVDNHDSQPEEALESFVEEWFKPLAYALTLTREQGYPSVFYGDYYGIPTHGVPAMRSKIDPILEARQKYAYGPQHDYLDHPDVIGWTREGDSSHPKSGLATLITDGPGGSKRMYAGLKNAGETWYDITGNRSDTVKIGSDGWGEFHVNDGSVSIYVQK

SEQ ID NO: 42069 - protein, 480 aa, Bacillus sp.
NGTMMQYFEWYLPNDGNHWNRLNSDASNLKSKGITAVWIPPAWKAASQNDVGYGAYDLYDLGEFNQKGTVRTKYGTRSQLQAAVTSLKNNGIQVYGDVVMNHKGGADATEMVRAVEVNPNNRNQEVTGEYTIEAWTRFDFPGRGNTHSSFKWRWYHFDGVDWDQSRQTNNRIYKFRGHGKAWDWEVDTEFGNYDYLMYADYDMDHPEVVNELRNWGVWYTNTLGLDGFRIDAVKHIKYSFTRDWINHVRSATGKNMFAVAEFWKNDLGAIENYLQKTNWNHSVFDVPLHYNLYNASKSQGNYDMRNIFNGTVVQRHPSHAVTFVDNHDSQPEEALESFVDTWFKPLAYALTLTREQGYPSVFYGDYYGIPTHGVPAMRSKIDPILEARQKYAYGPQHDYLDHPDVIGWTREGDSSHPKSGLATLITDGPGGSKRMYAGLKNAGETWYDITGNRSDTVKIGSDGWGEFHVNGTSVSIYVQK

SEQ ID NO: 42070 - protein, 480 aa, Bacillus sp.
NGTMMQYFEWYLPNDGNHWNRLNSDASNLKSKGITAVWIPPAWKGASQNDVGYGAYDLYDLGEFNQKGTVRTKYGTRSQLQAAVTSLKNNGIQVYGDVVMNHKGGADATEMVRAVEVNPNNRNQEVTGEYTIEAWTRFDFPGRGNTHSSFKWRWYHFDGVDWDQSRRLDNRIYKFRGHGKAWDWEVDTEFGNYDYLMYTDYDMDHPEVVNELRNWGVWYTNTLGLDGFRIDAVKHIKYSFTRDWINHVRSATGKNMFAVAEFWKNDLGAIENYLQKTNWNHSVFDVPLHYNLYNASQSGGNYDMRNIFNGTVVQRHPSHAVTFVDNHDSQPEEALESFVEPWFKPLAYALTLTREQGYPSVFYGDYYGIPTHGVPAMRSKIDPILEARQKYAYGPQHDYLDHPDVIGWTREGDSSHPKSGLATLITDGPGGSKRMYAGLKNAGETWYDITGNRSDTVKIGSDGWGEFHVNKSSVSIYVQK

SEQ ID NO: 42071 - protein, 480 aa, Bacillus sp.
NGTMMQYFEWYLPNDGNHWNRLNSDASNLKSKGITAVWIPPAWKAASQNDVGYGAYDLYDLGEFNQKGTVRTKYGTRSQLQAAVTSLKNNGIQVYGDVVMNHKGGADATEMVRAVEVNPNNRNQEVTGEYTIEAWTRFDFPGRGNTHSSFKWRWYHFDGVDWDQSRDLQNRIYKFRGHGKAWDWEVDTEFGNYDYLMYADYDMDHPEVVNELRNWGVWYTNTLGLDGFRIDAVKHIKYSFTRDWINHVRSATGKNMFAVAEFWKNDLGAIENYLQKTNWNHSVFDVPLHYNLYNASKSGGNYDMRNIFNGTVVQANPNHAVTFVDNHDSQPEEALESFVEEWFKPLAYALTLTREQGYPSVFYGDYYGIPTHGVPAMRSKIDPILEARQKYAYGPQHDYLDHPDVIGWTREGDSSHPKSGLATLITDGPGGSKRMYAGLKNAGETWYDITGNRSDTVKIGSDGWGEFHVNDGSVSIYVQK

SEQ ID NO: 42072 - protein, 480 aa, Bacillus sp.
NGTMMQYFEWYLPNDGNHWNRLNSDASNLKSKGITAVWIPPAWKGASQNDVGYGAYDLYDLGEFNQKGTVRTKYGTRSQLQAAVTSLKNNGIQVYGDVVMNHKGGADATEMVRAVEVNPNNRNQEVTGEYTIEAWTRFDFPGRGNTHSSFKWRWYHFDGVDWDQSRRLNNRIYKFRGHGKAWDWEVDTEFGNYDYLMYADYDMDHPEVVNELRNWGVWYTNTLGLDGFRIDAVKHIKYSFTRDWINHVRSATGKNMFAVAEFWKNDLGAIENYLQKTNWNHSVFDVPLHYNLYNASKSSGNYDMRNIFNGTVVQRHPSHAVTFVDNHDSQPEEALESFVEPWFKPLAYALTLTREQGYPSVFYGDYYGIPTHGVPAMRSKIDPILEARQKYAYGPQHDYLDHPDVIGWTREGDSSHPKSGLATLITDGPGGSKRMYAGLKNAGETWYDITGNRSDTVKIGSDGWGEFHVNQSSVSIYVQK

SEQ ID NO: 42073 - protein, 480 aa, Bacillus sp.
NGTMMQYFEWYLPNDGNHWNRLNSDASNLKSKGITAVWIPPAWKATSQNDVGYGAYDLYDLGEFNQKGTVRTKYGTRSQLQAAVTSLKNNGIQVYGDVVMNHKGGADLTEMVRAVEVNPNNRNQEVTGEYTIEAWTRFDFPGRGNTHSSFKWRWYHFDGVDFDQSRNVNNRIYKFRGHGKAWDWEVDTEFGNYDYLMYADYDMDHPEVVNELRNWGVWYTNTLGLDGFRIDAVKHIKYSFTRDWINHVRSATGKNMFAVAEFWKNDLGAIENYLQKTNWNHSVFDVPLHYNLYNASKSGGNYDMRNIFNGTVVQRHPSHAVTFVDNHDSQPEEALESFVEEWFKPLAYALTLTREQGYPSVFYGDYYGIPTHGVPAMRSKIDPILEARQKYAYGPQHDYLDHPDVIGWTREGDSSHPKSGLATLITDGPGGSKRMYAGLKNAGETWYDITGNRSDTVKIGSDGWGEFHVNDGSVSIYVQK

SEQ ID NO: 42074 - protein, 480 aa, Bacillus sp.
NQTMMQYFEWYLPNDGNHWNRLNSDASNLKSKGITAVWIPPAWKGASQNDVGYGAYDLYDLGEFNQKGTVRTKYGTRSQLQAAVTSLKNNGIQVYGDVVMNHKGGADATEMVRAVEVNPNNRNQEVTGEYTIEAWTRFDFPGRGNTHSSFKWRWYHFDGVDWDQSRRLNNRIYKFRGHGKAWDWEVDTEFGNYDYLMYADYDMDHPEVVNELRNWGVWYTNTLGLDGFRIDAVKHIKYSFTRDWINHVRSATGKNMFAVAEFWKNDLGAIENYLQKTNWNHSVFDVPLHYNLYNASKSGGNYDMRNIFNGTVVQSNPSHAVTFVDNHDSQPEEALESFVEEWFKPLAYALTLTREQGYPSVFYGDYYGIPTHGVPAMRSKIDPILEARQKYAYGPQHDYLDHPDVIGWTREGDSSHPKSGLATLITDGPGGSKRMYAGLKNAGETWYDITGNRSDTVKIGSDGWGEFHVNDGSVSIYVQK

SEQ ID NO: 42075 - protein, 480 aa, Bacillus sp.
NGTMMQYFEWYLPNDGNHWNRLNSDASNLKSKGITAVWIPPAWKGASQNDVGYGAYDLYDLGEFNQKGTVRTKYGTRSQLQAAVTSLKNNGIQVYGDVVMNHKGGADATEMVRAVEVNPNNRNQEVTGEYTIEAWTRFDFPGRGNTHSSFKWRWYHFDGVDWDQSRRLNNRIYKFRGHGKAWDWEVDTEFGNYDYLMYADYDMDHPEVVNELRNWGVWYTNTLGLDGFRIDAVKHIKYSFTRDWINHVRSATGKNMFAVAEFWKNDLGAIENYLQKTNWNHSVFDVPLHYNLYNASKSQGNYDMRNIFNGTVVQRHPSHAVTFVDNHDSQPEEALESFVEPWFKPLAYALTLTREQGYPSVFYGDYYGIPTHGVPAMRSKIDPILEARQKYAYGPQHDYLDHPDVIGWTREGDSSHPKSGLATLITDGPGGSKRMYAGLKNAGETWYDITGNRSDTVKIGSDGWGEFHVNGKSVSIYVQK

SEQ ID NO: 42076 - protein, 480 aa, Bacillus sp.
NGTMMQYFEWYLPNDGNHWNRLNSDASNLKSKGITAVWIPPAWKGASQNDVGYGAYDLYDLGEFNQKGTVRTKYGTRSQLQAAVTSLKNNGIQVYGDVVMNHKGGADATEMVRAVEVNPNNRNQEVTGEYTIEAWTRFDFPGRGNTHSSFKWRWYHFDGVDWDQSRRLNNRIYKFRGHGKAWDWEVDTEFGNYDYLMYADYDMDHPEVVNELRNWGVWYTNTLGLDGFRIDAVKHIKYSFTRDWINHVRSATGKNMFAVAEFWKNDLGAIENYLQKTNWNHSVFDVPLHYNLYNASKSAGNYDMRNIFNGTVVQRHPSHAVTFVDNHDSQPEEALESFVDPWFKPLAYALTLTREQGYPSVFYGDYYGIPTHGVPAMRSKIDPILEARQKYAYGPQHDYLDHPDVIGWTREGDSSHPKSGLATLITDGPGGSKRMYAGLKNAGETWYDITGNRSDTVKIGSDGWGEFHVNDTSVFIYVQK

SEQ ID NO: 42077 - protein, 480 aa, Bacillus sp.
NGTMMQYFEWYLPNDGNHWNRLNSDASNLKSKGITAVWIPPAWKATSQNDVGYGAYDLYDLGEFNQKGTVRTKYGTRSQLQAAVTSLKNNGIQVYGDVVMNHKGGADATEMVRAVEVNPNNRNQEVTGEYTIEAWTRFDFPGRGNTHSSFKWRWYHFDGVDWDQSRDLNNRIYKFRGHGKAWDWEVDTEFGNYDYLMYADYDMDHPEVVNELRNWGVWYTNTLGLDGFRIDAVKHIKYSFTRDWINHVRSATGKNMFAVAEFWKNDLGAIENYLQKTNWNHSVFDVPLHYNLYNASQSGGNYDMRNIFNGTVVQRHPSHAVTFVDNHDSQPEEALESFVEPWFKPLAYALTLTREQGYPSVFYGDYYGIPTHGVPAMRSKIDPILEARQKYAYGPQHDYLDHPDVIGWTREGDSSHPKSGLATLITDGPGGSKRMYAGLKNAGETWYDITGNRSDTVKIGSDGWGEFHVNKSSVSIYVQK

SEQ ID NO: 42078 - protein, 480 aa, Bacillus sp.
NGTMMQYFEWYLPNDGNHWNRLNSDASNLKSKGITAVWIPPAWKATSQNDVGYGAYDLYDLGEFNQKGTVRTKYGTRSQLQAAVTSLKNNGIQVYGDVVMNHKGGADATEMVRAVEVNPNNRNQEVTGEYTIEAWTRFDFPGRGNTHSSFKWRWYHFDGVDWDQSRELNNRIYKFRGHGKAWDWEVDTEFGNYDYLMYTDYDMDHPEVVNELRNWGVWYTNTLGLDGFRIDAVKHIKYSFTRDWINHVRSATGKNMFAVAEFWKNDLGAIENYLQKTNWNHSVFDVPLHYNLYNASKSGGNYDMRNIFNGTVVQRHPSHAVTFVDNHDSQPEEALESFVETWFKPLAYALTLTREQGYPSVFYGDYYGIPTHGVPAMRSKIDPILEARQKYAYGPQHDYLDHPDVIGWTREGDSSHPKSGLATLITDGPGGSKRMYAGLKNAGETWYDITGNRSDTVKIGSDGWGEFHVNKASVSIYVQK

SEQ ID NO: 42079 - protein, 480 aa, Bacillus sp.
NGTMMQYFEWYLPNDGNHWNRLNSDASNLKSKGITAVWIPPAWKAVSQNDVGYGAYDLYDLGEFNQKGTVRTKYGTRSQLQAAVTSLKNNGIQVYGDVVMNHKGGADATEMVRAVEVNPNNRNQEVTGEYTIEAWTRFDFPGRGNTHSSFKWRWYHFDGVDWDQSRNLTNRIYKFRGHGKAWDWEVDTEFGNYDYLMYTDYDMDHPEVVNELRNWGVWYTNTLGLDGFRIDAVKHIKYSFTRDWINHVRSATGKNMFAVAEFWKNDLGAIENYLQKTNWNHSVFDVPLHYNLYNASKSGGNYDMRNIFNGTVVQVHPSHAVTFVDNHDSQPEEALESFVEEWFKPLAYALTLTREQGYPSVFYGDYYGIPTHGVPAMRSKIDPILEARQKYAYGPQHDYLDHPDVIGWTREGDSSHPKSGLATLITDGPGGSKRMYAGLKNAGETWYDITGNRSDTVKIGSDGWGEFHVNDGSVSIYVQK

SEQ ID NO: 42080 - protein, 480 aa, Bacillus sp.
NGTMMQYFEWYLPNDGNHWNRLNSDASNLKSKGITAVWIPPAWKATSQNDVGYGAYDLYDLGEFNQKGTVRTKYGTRSQLQAAVTSLKNNGIQVYGDVVMNHKGGADATEMVRAVEVNPNNRNQEVTGEYTIEAWTRFDFPGRGNTHSSFKWRWYHFDGVDFDQSRNVNNRIYKFRGHGKAWDWEVDTEFGNYDYLMYADIDYDHPETTNEMRNWGVWYTNTLGLDGFRIDAVKHIKYSFTRDWINHVRSATGKNMFAVAEFWKNDLGAIENYLQKTNWNHSVFDVPLHYNLYNASKSGGNYDMRNIFNGTVVQRHPSHAVTFVDNHDSQPEEALESFVEEWFKPLAYALTLTREQGYPSVFYGDYYGIPTHGVPAMRSKIDPILEARQKYAYGPQHDYLDHPDVIGWTREGDSSHPKSGLATLITDGPGGSKRMYAGLKNAGETWYDITGNRSDTVKIGSDGWGEFHVNDGSVSIYVQK

SEQ ID NO: 42081 - protein, 480 aa, Bacillus sp.
NGTMMQYFEWYLPNDGNHWNRLNSDASNLKSKGITAVWIPPAWKAASQNDVGYGAYDLYDLGEFNQKGTVRTKYGTRSQLQAAVTSLKNNGIQVYGDVVMNHKGGADATEMVRAVEVNPNNRNQEVTGEYTIEAYTRFDFPGRGNTHSSFKWRWYHFDGVDWDQSRDLTNRIYKFRGHGKAWDWEVDTEFGNYDYLMYADYDMDHPEVVNELRNWGVWYTNTLGLDGFRIDAVKHIKYSFTRDWINHVRSATGKNMFAVAEFWKNDLGAIENYLQKTNWNHSVFDVPLHYNLYNASKSGGNYDMRNIFNGTVVQRHPSHAVTFVDNHDSQPEEALESFVDPWFKPLAYALTLTREQGYPSVFYGDYYGIPTHGVPAMRSKIDPILEARQKYAYGPQHDYLDHPDVIGWTREGDSSHPKSGLATLITDGPGGSKRMYAGLKNAGETWYDITGNRSDTVKIGSDGWGEFHVNGGSVSIYVQK

SEQ ID NO: 42082 - protein, 480 aa, Bacillus sp.
NETMMQYFEWYLPNDGNHWNRLNSDASNLKSKGITAVWIPPAWKGASQNDVGYGAYDLYDLGEFNQKGTVRTKYGTRSQLQAAVTSLKNNGITVYGDVVMNHKGGADATEMVRAVEVNPNNRNQEVTGEYTIEAWTRFDFPGRGNTHSSFKWRWYHFDGVDWDQSRRLNNRIYKFRGHGKAWDWEVDTEFGNYDYLMYADYDMDHPEVVNELRNWGVWYTNTLGLDGFRIDAVKHIKYSFTRDWINHVRSATGKNMFAVAEFWKNDLGAIENYLQKTNWNHSVFDVPLHYNLYNASKSGGNYDMRNIFNGTVVQAHPSHAVTFVDNHDSQPEEALESFVEEWFKPLAYALTLTREQGYPSVFYGDYYGIPTHGVPAMRSKIDPILEARQKYAYGPQHDYLDHPDVIGWTREGDSSHPKSGLATLITDGPGGSKRMYAGLKNAGETWYDITGNRSDTVKIGSDGWGEFHVNDGSVSIYVQK

SEQ ID NO: 42083 - protein, 480 aa, Bacillus sp.
NGTMMQYFEWYLPNDGNHWNRLNSDASNLKSKGITAVWIPPAWKAASQNDVGYGAYDLYDLGEFNQKGTVRTKYGTRSQLQAAVTSLKNNGIQVYGDVVMNHKGGADATEMVRAVEVNPNNRNQEVTGEYTIEAWTRFDFPGRGNTHSSFKWRWYHFDGVDWDQSRDLDNRIYKFRGHGKAWDWEVDTEFGNYDYLMYADYDMDHPEVVNELRNWGVWYTNTLGLDGFRIDAVKHIKYSFTRDWINHVRSATGKNMFAVAEFWKNDLGAIENYLQKTNWNHSVFDVPLHYNLYNASKSQGNYDMRNIFNGTVVQRHPSHAVTFVDNHDSQPEEALESFVDTWFKPLAYALTLTREQGYPSVFYGDYYGIPTHGVPAMRSKIDPILEARQKYAYGPQHDYLDHPDVIGWTREGDSSHPKSGLATLITDGPGGSKRMYAGLKNAGETWYDITGNRSDTVKIGSDGWGEFHVNGSSVSIYVQK

SEQ ID NO: 42084 - protein, 480 aa, Bacillus sp.
NGTMMQYFEWYLPNDGNHWNRLNSDASNLKSKGITAVWIPPAWKGASQNDVGYGAYDLYDLGEFNQKGTVRTKYGTRSQLQAAVTSLKNNGIQVYGDVVMNHKGGADATEMVRAVEVNPNNRNQEVTGEYTIEAWTRFDFPGRGNTHSSFKWRWYHFDGVDWDQSRRLNNRIYKFRGHGKAWDWEVDTEFGNYDYLMYADYDMDHPEVVNELRNWGVWYTNTLGLDGFRIDAVKHIKYSFTRDWINHVRSATGKNMFAVAEFWKNDLGAIENYLQKTNWNHSVFDVPLHYNLYNASKSAGNYDMRNIFNGTVVQRHPSHAVTFVDNHDSQPEEALESFVDPWFKPLAYALTLTREQGYPSVFYGDYYGIPTHGVPAMRSKIDPILEARQKYAYGPQHDYLDHPDVIGWTREGDSSHPKSGLATLITDGPGGSKRMYAGLKNAGETWYDITGNRSDTVKIGSDGWGEFHVNKQSVSIYVQK

SEQ ID NO: 42085 - protein, 480 aa, Bacillus sp.
NGTMMQYFEWYLPNDGNHWNRLNSDASNLKSKGITAVWIPPAWKAVSQNDVGYGAYDLYDLGEFNQKGTVRTKYGTRSQLQAAVTSLKNNGIQVYGDVVMNHKGGADLTEMVDAVEVNPNNRNQEVTGEYTIEAWTRFDFPGRGNTHSSFKWRWYHFDGVDWDQSRNLTNRIYKFRGHGKAWDWEVDTEFGNYDYLMYTDYDMDHPEVVNELRNWGVWYTNTLGLDGFRIDAVKHIKYSFTRDWINHVRSATGKNMFAVAEFWKNDLGAIENYLQKTNWNHSVFDVPLHYNLYNASKSGGNYDMRNIFNGTVVQRHPSHAVTFVDNHDSQPEEALESFVEEWFKPLAYALTLTREQGYPSVFYGDYYGIPTHGVPAMRSKIDPILEARQKYAYGPQHDYLDHPDVIGWTREGDSSHPKSGLATLITDGPGGSKRMYAGLKNAGETWYDITGNRSDTVKIGSDGWGEFHVNDGSVSIYVQK

SEQ ID NO: 42086 - protein, 480 aa, Bacillus sp.
NGTMMQYFEWYLPNDGNHWNRLNSDASNLKSKGITAVWIPPAWKAVSQNDVGYGAYDLYDLGEFNQKGTVRTKYGTRSQLQAAVTSLKNNGIQVYGDVVMNHKGGADLTEMVRAVEVNPNNRNQEVTGEYTIEAWTRFDFPGRGNTHSSFKWRWYHFDGVDWDQSREFTNRIYKFRGHGKAWDWEVDTEFGNYDYLMYVDYDMDHPEVVNELRNWGVWYTNTLGLDGFRIDAVKHIKYSFTRDWINHVRSATGKNMFAVAEFWKNDLGAIENYLQKTNWNHSVFDVPLHYNLYNASKSGGNYDMRNIFNGTVVQRHPSHAVTFVDNHDSQPEEALESFVEEWFKPLAYALTLTREQGYPSVFYGDYYGIPTHGVPAMRSKIDPILEARQKYAYGPQHDYLDHPDVIGWTREGDSSHPKSGLATLITDGPGGSKRMYAGLKNAGETWYDITGNRSDTVKIGSDGWGEFHVNDGSVSIYVQK

SEQ ID NO: 42087 - protein, 480 aa, Bacillus sp.
NGTMMQYFEWYLPNDGNHWNRLNSDASNLKSKGITAVWIPPAWKAVSQNDVGYGAYDLYDLGEFNQKGTVRTKYGTRSQLQAAVTSLKNNGIQVYGDVVMNHKGGADATEMVRAVEVNPNNRNQEVTGEYTIEAWTRFDFPGRGNTHSSFKWRWYHFDGVDWDQSRDLENRIYKFRGHGKAWDWEVDTEFGNYDYLMYADYDMDHPEVVNELRNWGVWYTNTLGLDGFRIDAVKHIKYSFTRDWINHVRSATGKNMFAVAEFWKNDLGAIENYLQKTNWNHSVFDVPLHYNLYNASKSGGNYDMRNIFNETVVQAHPNHAVTFVDNHDSQPEEALESFVEEWFKPLAYALTLTREQGYPSVFYGDYYGIPTHGVPAMRSKIDPILEARQKYAYGPQHDYLDHPDVIGWTREGDSSHPKSGLATLITDGPGGSKRMYAGLKNAGETWYDITGNRSDTVKIGSDGWGEFHVNDGSVSIYVQK

SEQ ID NO: 42088 - protein, 480 aa, Bacillus sp.
NGTMMQYFEWYLPNDGNHWNRLNSDASNLKSKGITAVWIPPAWKAASQNDVGYGAYDLYDLGEFNQKGTVRTKYGTRSQLQAAVTSLKNNGIQVYGDVVMNHKGGADATEMVRAVEVNPNNRNQEVTGEYTIEAWTRFDFPGRGNTHSSFKWRWYHFDGVDWDQSRDLQNRIYKFRGHGKAWDWEVDTEFGNYDYLMYADYDMDHPEVVNELRNWGVWYTNTLGLDGFRIDAVKHIKYSFTRDWINHVRSATGKNMFAVAEFWKNDLGAIENYLQKTNWNHSVFDVPLHYNLYNASKSGGNYDMRNIFNGTVVQRHPSHAVTFVDNHDSQPEEALESFVDEWFKPLAYALTLTREQGYPSVFYGDYYGIPTHGVPAMRSKIDPILEARQKYAYGPQHDYLDHPDVIGWTREGDSSHPKSGLATLITDGPGGSKRMYAGLKNAGETWYDITGNRSDTVKIGSDGWGEFHVNKSSVSIYVQK

SEQ ID NO: 42089 - protein, 480 aa, Bacillus sp.
NGTMMQYFEWYLPNDGNHWNRLNSDASNLKSKGITAVWIPPAWKGASQNDVGYGAYDLYDLGEFNQKGTVRTKYGTRSQLQAAVTSLKNNGINVYGDVVMNHKGGADATEMVRAVEVNPNNRNQEVTGEYTIEAWTRFDFPGRGNTHSSFKWRWYHFDGVDWDQSRRLNNRIYKFRGHGKAWDWEVDTEFGNYDYLMYADYDMDHPEVVNELRNWGVWYTNTLGLDGFRIDAVKHIKYSFTRDWINHVRSATGKNMFAVAEFWKNDLGAIENYLQKTNWNHSVFDVPLHYNLYNASKSVGNYDMRNIFNGTVVQAHPMHAVTFVDNHDSQPEEALESFVEEWFKPLAYALTLTREQGYPSVFYGDYYGIPTHGVPAMRSKIDPILEARQKYAYGPQHDYLDHPDVIGWTREGDSSHPKSGLATLITDGPGGSKRMYAGLKNAGETWYDITGNRSDTVKIGSDGWGEFHVNDGSVSIYVQK

SEQ ID NO: 42090 - protein, 480 aa, Bacillus sp.
NGTMMQYFEWYLPNDGNHWNRLNSDASNLKSKGITAVWIPPAWKAVSQNDVGYGAYDLYDLGEFNQKGTVRTKYGTRSQLQAAVTSLKNNGIQVYGDVVMNHKGGADATEMVRAVEVNPNNRNQEVTGEYTIEAWTRFDFPGRGNTHSSFKWRWYHFDGVDFDQSREFTNRIYKFRGHGKAWDWEVDTEFGNYDYLMYVDYDMDHPEVVNELRNWGVWYTNTLGLDGFRIDAVKHIKYSFTRDWINHVRSATGKNMFAVAEFWKNDLGAIENYLQKTNWNHSVFDVPLHYNLYNASKSGGNYDMRNIFNGTVVQRHPSHAVTFVDNHDSQPEEALESFVEEWFKPLAYALTLTREQGYPSVFYGDYYGIPTHGVPAMRSKIDPILEARQKYAYGPQHDYLDHPDVIGWTREGDSSHPKSGLATLITDGPGGSKRMYAGLKNAGETWYDITGNRSDTVKIGSDGWGEFHVNDGSVSIYVQK

SEQ ID NO: 42091 - protein, 480 aa, Bacillus sp.
NGTMMQYFEWYLPNDGNHWNRLNSDASNLKSKGITAVWIPPAWKGASQNDVGYGAYDLYDLGEFNQKGTVRTKYGTRSQLQAAVTSLKNNGIQVYGDVVMNHKGGADATEMVRAVEVNPNNRNQEVTGEYTIEAWTRFDFPGRGNTHSSFKWRWYHFDGVDWDQSRRLNNRIYKFRAHGKAWDWEVDTEFGNYDYLMYADYDMDYPEVSNELRNWGVWYTNTLGLDGFRIDAVKHIKYSFTRDWINHVRSATGKNMFAVAEFWKNDLGAIENYLQKTNWNHSVFDVPLHYNLYNASKSGGNYDMRNIFNGTVVQRHPSHAVTFVDNHDSQPEEALESFVEEWFKPLAYALTLTREQGYPSVFYGDYYGIPTHGVPAMRSKIDPILEARQKYAYGPQHDYLDHPDVIGWTREGDSSHPKSGLATLITDGPGGSKRMYAGLKNAGETWYDITGNRSDTVKIGSDGWGEFHVNDGSVSIYVQK

SEQ ID NO: 42092 - protein, 480 aa, Synthetic construct
NGTMMQYFEWYLPNDGNHWNRLNSDASNLKSKGITAVWIPPAWKGASQNDVGYGAYDLYDLGEFNQKGTVRTKYGTRSQLQAAVTSLKNNGIQVYGDVVMNHKGGADATEMVRAVEVNPNNRNQEVTGEYTIEAWTRFDFPGRGNTHSSFKWRWYHFDGVDWDQSRRLNNRIYLFRPHGKVWDWPVDTENGNYDYLMYADIDMDHPEVVNELRNWGVWYTNTLGLDGFRIDAVKHIKYSFTRDWINHVRSATGKNMFAVAEFWKNDLGAIENYLQKTNWNHSVFDVPLHYNLYNASKSGGNYDMRNIFNGTVVQRHPSHAVTFVDNHDSQPEEALESFVEEWFKPLAYALTLTREQGYPSVFYGDYYGIPTHGVPAMRSKIDPILEARQKYAYGPQHDYLDHPDVIGWTREGDSSHPKSGLATLITDGPGGSKRMYAGLKNAGETWYDITGNRSDTVKIGSDGWGEFHVNDGSVSIYVQK

SEQ ID NO: 42093 - protein, 480 aa, Bacillus sp.
NGTMMQYFEWYLPNDGNHWNRLNSDASNLKSKGITAVWIPPAWKGASQNDVGYGAYDLYDLGEFNQKGTVRTKYGTRSQLQAAVTSLKNNGIQVYGDVVMNHKGGADATEMVRAVEVNPNNRNQEVTGEYTIEAWTRFDFPGRGNTHSSFKWRWYHFDGVDWDQSRRLNNRIYKFRGHGKAWDWEVDTEFGNYDYLMYADYDMDHPEVVNELRNWGVWYTNTLGLDGFRIDAVKHIKYSFTRDWINHVRSATGKNMFAVAEFWKNDLGAIENYLQKTNWNHSVFDVPLHYNLYNASKSAGNYDMRNIFNGTVVQRHPSHAVTFVDNHDSQPEEALESFVEPWFKPLAYALTLTREQGYPSVFYGDYYGIPTHGVPAMRSKIDPILEARQKYAYGPQHDYLDHPDVIGWTREGDSSHPKSGLATLITDGPGGSKRMYAGLKNAGETWYDITGNRSDTVKIGSDGWGEFHVNGSSVSIYVQK

SEQ ID NO: 42094 - protein, 480 aa, Bacillus sp.
NKTMMQYFEWYLPNDGNHWNRLNSDASNLKSKGITAVWIPPAWKGASQNDVGYGAYDLYDLGEFNQKGTVRTKYGTRSQLQAAVTSLKNNGIQVYGDVVMNHKGGADATEMVRAVEVNPNNRNQEVTGEYTIEAWTRFDFPGRGNTHSSFKWRWYHFDGVDWDQSRRLNNRIYKFRGHGKAWDWEVDTEFGNYDYLMYADYDMDHPEVVNELRNWGVWYTNTLGLDGFRIDAVKHIKYSFTRDWINHVRSATGKNMFAVAEFWKNDLGAIENYLQKTNWNHSVFDVPLHYNLYNASKSGGNYDMRNIFNGTVVQMQPSHAVTFVDNHDSQPEEALESFVEEWFKPLAYALTLTREQGYPSVFYGDYYGIPTHGVPAMRSKIDPILEARQKYAYGPQHDYLDHPDVIGWTREGDSSHPKSGLATLITDGPGGSKRMYAGLKNAGETWYDITGNRSDTVKIGSDGWGEFHVNDGSVSIYVQK

SEQ ID NO: 42095 - protein, 480 aa, Bacillus sp.
NQTMMQYFEWYLPNDGNHWNRLNSDASNLKSKGITAVWIPPAWKGASQNDVGYGAYDLYDLGEFNQKGTVRTKYGTRSQLQAAVTSLKNNGIAVYGDVVMNHKGGADATEMVRAVEVNPNNRNQEVTGEYTIEAWTRFDFPGRGNTHSSFKWRWYHFDGVDWDQSRRLNNRIYKFRGHGKAWDWEVDTEFGNYDYLMYADYDMDHPEVVNELRNWGVWYTNTLGLDGFRIDAVKHIKYSFTRDWINHVRSATGKNMFAVAEFWKNDLGAIENYLQKTNWNHSVFDVPLHYNLYNASKSGGNYDMRNIFNGTVVQMHPMHAVTFVDNHDSQPEEALESFVEEWFKPLAYALTLTREQGYPSVFYGDYYGIPTHGVPAMRSKIDPILEARQKYAYGPQHDYLDHPDVIGWTREGDSSHPKSGLATLITDGPGGSKRMYAGLKNAGETWYDITGNRSDTVKIGSDGWGEFHVNDGSVSIYVQK

SEQ ID NO: 42096 - protein, 480 aa, Bacillus sp.
NGTMMQYFEWYLPNDGNHWNRLNSDASNLKSKGITAVWIPPAWKGASQNDVGYGAYDLYDLGEFNQKGTVRTKYGTRSQLQAAVTSLKNNGIQVYGDVVMNHKGGADATEMVRAVEVNPNNRNQEVTGEYTIEAWTRFDFPGRGNTHSSFKWRWYHFDGVDWDQSRRLNNRIYKFRGHGKAWDWEVDTEFGNYDYLMYADYDMDHPEVVNELRNWGVWYTNTLGLDGFRIDAVKHIKYSFTRDWINHVRSATGKNMFAVAEFWKNDLGAIENYLQKTNWNHSVFDVPLHYNLYNASKSSGNYDMRNIFNGTVVQRHPSHAVTFVDNHDSQPEEALESFVEPWFKPLAYALTLTREQGYPSVFYGDYYGIPTHGVPAMRSKIDPILEARQKYAYGPQHDYLDHPDVIGWTREGDSSHPKSGLATLITDGPGGSKRMYAGLKNAGETWYDITGNRSDTVKIGSDGWGEFHVNKSSVSIYVQK

SEQ ID NO: 42097 - protein, 480 aa, Bacillus sp.
NGTMMQYFEWYLPNDGNHWNRLNSDASNLKSKGITAVWIPPAWKATSQNDVGYGAYDLYDLGEFNQKGTVRTKYGTRSQLQSAVTSLKNNGIQVYGDVVMNHKGGADATEMVRAVEVNPNNRNQEVTGEYTIEAWTRFDFPGRGNTHSSFKWRWYHFDGVDWDQSRNTDNRIYKFRGHGKAWDWEVDTEFGNYDYLMYADYDMDHPEVVNELRNWGVWYTNTLGLDGFRIDAVKHIKYSFTRDWINHVRSATGKNMFAVAEFWKNDLGAIENYLQKTNWNHSVFDVPLHYNLYNASKSQGNYDMRNIFNGTVVQRHPSHAVTFVDNHDSQPEEALESFVDTWFKPLAYALTLTREQGYPSVFYGDYYGIPTHGVPAMRSKIDPILEARQKYAYGPQHDYLDHPDVIGWTREGDSSHPKSGLATLITDGPGGSKRMYAGLKNAGETWYDITGNRSDTVKIGSDGWGEFHVNGSSVSIYVQK

SEQ ID NO: 42098 - protein, 480 aa, Bacillus sp.
NGTMMQYFEWYLPNDGNHWNRLNSDASNLKSKGITAVWIPPAWKGASQNDVGYGAYDLYDLGEFNQKGTVRTKYGTRSQLQAAVTSLKNNGINVYGDVVMNHKGGADATEMVRAVEVNPNNRNQEVTGEYTIEAWTRFDFPGRGNTHSSFKWRWYHFDGVDWDQSRRLNNRIYKFRGHGKAWDWEVDTEFGNYDYLMYADYDMDHPEVVNELRNWGVWYTNTLGLDGFRIDAVKHIKYSFTRDWINHVRSATGKNMFAVAEFWKNDLGAIENYLQKTNWNHSVFDVPLHYNLYNASKSGGNYDMRNIFNGTVVQAHPMHAVTFVDNHDSQPEEALESFVEEWFKPLAYVLTLTREQGYPSVFYGDYYGIPTHGVPAMRSKIDPILEARQKYAYGPQHDYLDHPDVIGWTREGDSSHPKSGLATLITDGPGGSKRMYAGLKNAGETWYDITGNRSDTVKIGSDGWGEFHVNDGSVSIYVQK

SEQ ID NO: 42099 - protein, 480 aa, Bacillus sp.
NGTMMQYFEWYLPNDGNHWNRLNSDASNLKSKGITAVWIPPAWKAASQNDVGYGAYDLYDLGEFNQKGTVRTKYGTRSQLQAAVTSLKNNGIQVYGDVVMNHKGGADLTEMVRAVEVNPNNRNQEVTGEYTIEAWTRFDFPGRGNTHSSFKWRWYHFDGVDFDQSRQITNRIYKFRGHGKAWDWEVDTEFGNYDYLMYTDYDMDHPEVVNELRNWGVWYTNTLGLDGFRIDAVKHIKYSFTRDWINHVRSATGKNMFAVAEFWKNDLGAIENYLQKTNWNHSVFDVPLHYNLYNASKSGGNYDMRNIFNGTVVQRHPSHAVTFVDNHDSQPEEALESFVEEWFKPLAYALTLTREQGYPSVFYGDYYGIPTHGVPAMRSKIDPILEARQKYAYGPQHDYLDHPDVIGWTREGDSSHPKSGLATLITDGPGGSKRMYAGLKNAGETWYDITGNRSDTVKIGSDGWGEFHVNDGSVSIYVQK

SEQ ID NO: 42100 - protein, 480 aa, Bacillus sp.
NGTMMQYFEWYLPNDGNHWNRLNSDASNLKSKGITAVWIPPAWKAASQNDVGYGAYDLYDLGEFNQKGTVRTKYGTRSQLQAAVTSLKNNGIQVYGDVVMNHKGGADATEMVRAVEVNPNNRNQEVTGEYTIEAWTRFDFPGRGNTHSSFKWRWYHFDGVDWDQSRQLTNRIYKFRGHGKAWDWEVDTEFGNYDYLMYADYDMDHPEVVNELRNWGVWYTNTLGLDGFRIDAVKHIKYSFTRDWINHVRSATGKNMFAVAEFWKNDLGAIENYLQKTNWNHSVFDVPLHYNLYNASKSQGNYDMRNIFNGTVVQRHPSHAVTFVDNHDSQPEEALESFVDTWFKPLAYALTLTREQGYPSVFYGDYYGIPTHGVPAMRSKIDPILEARQKYAYGPQHDYLDHPDVIGWTREGDSSHPKSGLATLITDGPGGSKRMYAGLKNAGETWYDITGNRSDTVKIGSDGWGEFHVNGSSVSIYVQK

SEQ ID NO: 42101 - protein, 480 aa, Bacillus sp.
NGTMMQYFEWYLPNDGNHWNRLNSDASNLKSKGITAVWIPPAWKAVSQNDVGYGAYDLYDLGEFNQKGTVRTKYGTRSQLQAAVTSLKNNGIQVYGDVVMNHKGGADATEMVRAVEVNPNNRNQEVTGEYTIEAWTRFDFPGRGNTHSSFKWRWYHFDGVDWDQSRRFDNRIYKFRGHGKAWDWEVDTEFGNYDYLMYADYDMDHPEVVNELRNWGVWYTNTLGLDGFRIDAVKHIKYSFTRDWINHVRSATGKNMFAVAEFWKNDLGAIENYLQKTNWNHSVFDVPLHYNLYNASKSGGNYDMRNIFNGTVVQANPNHAVTFVDNHDSQPEEALESFVEEWFKPLAYALTLTREQGYPSVFYGDYYGIPTHGVPAMRSKIDPILEARQKYAYGPQHDYLDHPDVIGWTREGDSSHPKSGLATLITDGPGGSKRMYAGLKNAGETWYDITGNRSDTVKIGSDGWGEFHVNDGSVSIYVQK

SEQ ID NO: 42102 - protein, 480 aa, Bacillus sp.
NGTMMQYFEWYLPNDGNHWNRLNSDASNLKSKGIKAVWIPPAWKGASQNDVGYGAYDLYDLGEFNQRGTVRTKYGTRSQLQAAVTSLKNNGIQVYGDVVMNHKGGADATEMVRAVEVNPNNRNQEVTGEYTIEAWTRFDFPGRGNTHSSFKWRWYHFDGVDFDQSRKLNNRIYKFRGHGKAWDWEVDTEFGNYDYLMYVDYDMDHPEVVNELRNWGVWYTNTLGLDGFRIDAVKHIKYSFTRDWINHVRSATGKNMFAVAEFWKNDLGAIENYLQKTNWNHSVFDVPLHYNLYNASKSGGNYDMRNIFNGTVVQRHPSHAVTFVDNHDSQPEEALESFVEEWFKPLAYALTLTREQGYPSVFYGDYYGIPTHGVPAMRSKIDPILEARQKYAYGPQHDYLDHPDVIGWTREGDSSHPKSGLATLITDGPGGSKRMYAGLKNAGETWYDITGNRSDTVKIGSDGWGEFHVNDGSVSIYVQK

SEQ ID NO: 42103 - protein, 480 aa, Bacillus sp.
NGTMMQYFEWYLPNDGNHWNRLNSDASNLKSKGITAVWIPPAWKGASQNDVGYGAYDLYDLGEFNQKGTVRTKYGTRSQLQAAVTSLKNNGIQVYGDVVMNHKGGADATEMVRAVEVNPNNRNQEVTGEYTIEAWTRFDFPGRGNTHSSFKWRWYHFDGVDWDQSRRLNNRIYKFRGHGKAWDWEVDTEFGNYDYLMYTDYDMDHPEVVNELRNWGVWYTNTLGLDGFRIDAVKHIKYSFTRDWINHVRSATGKNMFAVAEFWKNDLGAIENYLQKTNWNHSVFDVPLHYNLYNASKSQGNYDMRNIFNGTVVQRHPSHAVTFVDNHDSQPEEALESFVDTWFKPLAYALTLTREQGYPSVFYGDYYGIPTHGVPAMRSKIDPILEARQKYAYGPQHDYLDHPDVIGWTREGDSSHPKSGLATLITDGPGGSKRMYAGLKNAGETWYDITGNRSDTVKIGSDGWGEFHVNGSSVSIYVQK

SEQ ID NO: 42104 - protein, 480 aa, Bacillus sp.
NGTMMQYFEWYLPNDGNHWNRLNSDASNLKSKGITAVWIPPAWKAASQNDVGYGAYDLYDLGEFNQKGTVRTKYGTRSQLQAAVTSLKNNGIQVYGDVVMNHKGGADATEMVRAVEVNPNNRNQEVTGEYTIEAWTRFDFPGRGNTHSSFKWRWYHFDGVDWDQSRDLQNRIYKFRGHGKAWDWEVDTEFGNYDYLMYADYDMDHPEVVNELRNWGVWYTNTLGLDGFRIDAVKHIKYSFTRDWINHVRSATGKNMFAVAEFWKNDLGAIENYLQKTNWNHSVFDVPLHYNLYNASKSGGNYDMRNIFNGTVVQVHPSHAVTFVDNHDSQPEEALESFVEEWFKPLAYALTLTREQGYPSVFYGDYYGIPTHGVPAMRSKIDPILEARQKYAYGPQHDYLDHPDVIGWTREGDSSHPKSGLATLITDGPGGSKRMYAGLKNAGETWYDITGNRSDTVKIGSDGWGEFHVNYGSVSIYVQK

SEQ ID NO: 42105 - protein, 480 aa, Bacillus sp.
NGTMMQYFEWYLPNDGNHWNRLNSDASNLKSKGITAVWIPPAWKGASQNDVGYGAYDLYDLGEFNQKGTVRTKYGTRSQLQAAVTSLKNNGINVYGDVVMNHKGGADATEMVRAVEVNPNNRNQEVTGEYTIEAWTRFDFPGRGNTHSSFKWRWYHFDGVDFDQSRRLNNRIYKFRGHGKAWDWEVDTEFGNYDYLMYADYDMDHPEVVNELRNWGVWYTNTLGLDGFRIDAVKHIKYSFTRDWINHVRSATGKNMFAVAEFWKNDLGAIENYLQKTNWNHSVFDVPLHYNLYNASKSGGNYDMRNIFNGTVVQAHPMHAVTFVDNHDSQPEEALESFVEEWFKPLAYALTLTREQGYPSVFYGDYYGIPTHGVPAMRSKIDPILEARQKYAYGPQHDYLDHPDVIGWTREGDSSHPKSGLATLITDGPGGSKRMYAGLKNAGETWYDITGNRSDTVKIGSDGWGEFHVNDGSVSIYVQK

SEQ ID NO: 42106 - protein, 480 aa, Bacillus sp.
NATMMQYFEWYLPNDGNHWNRLNSDASNLKSKGITAVWIPPAWKGASQNDVGYGAYDLYDLGEFNQKGTVRTKYGTRSQLQAAVTSLKNNGILVYGDVVMNHKGGADATEMVRAVEVNPNNRNQEVTGEYTIEAWTRFDFPGRGNTHSSFKWRWYHFDGVDWDQSRRLNNRIYKFRGHGKAWDWEVDTEFGNYDYLMYADYDMDHPEVVNELRNWGVWYTNTLGLDGFRIDAVKHIKYSFTRDWINHVRSATGKNMFAVAEFWKNDLGAIENYLQKTNWNHSVFDVPLHYNLYNASKSGGNYDMRNIFNGTVVQMHPSHAVTFVDNHDSQPEEALESFVEEWFKPLAYALTLTREQGYPSVFYGDYYGIPTHGVPAMRSKIDPILEARQKYAYGPQHDYLDHPDVIGWTREGDSSHPKSGLATLITDGPGGSKRMYAGLKNAGETWYDITGNRSDTVKIGSDGWGEFHVNDGSVSIYVQK

SEQ ID NO: 42107 - protein, 480 aa, Bacillus sp.
NGTMMQYFEWYLPNDGNHWNRLNSDASNLKSKGITAVWIPPAWKGASQNDVGYGAYDLYDLGEFNQKGTVRTKYGTRSQLQAAVTSLKNNGIQVYGDVVMNHKGGADATEMVRAVEVNPNNRNQEVTGEYTIEAWTRFDFPGRGNTHSSFKWRWYHFDGVDWDQSRELDNRIYKFRGHGKAWDWEVDTEFGNYDYLMYTDYDMDHPEVVNELRNWGVWYTNTLGLDGFRIDAVKHIKYSFTRDWINHVRSATGKNMFAVAEFWKNDLGAIENYLQKTNWNHSVFDVPLHYNLYNASKSQGNYDMRNIFNGTVVQRHPSHAVTFVDNHDSQPEEALESFVDTWFKPLAYALTLTREQGYPSVFYGDYYGIPTHGVPAMRSKIDPILEARQKYAYGPQHDYLDHPDVIGWTREGDSSHPKSGLATLITDGPGGSKRMYAGLKNAGETWYDITGNRSDTVKIGSDGWGEFHVNGSSVSIYVQK

SEQ ID NO: 42108 - protein, 480 aa, Bacillus sp.
NGTMMQYFEWYLPNDGNHWNRLNSDASNLKSKGITAVWIPPAWKAVSQNDVGYGAYDLYDLGEFNQKGTVRTKYGTRSQLQAAVTSLKNNGIQVYGDVVMNHKGGADATEMVRAVEVNPNNRNQEVTGEYTIEAWTRFDFPGRGNTHSSFKWRWYHFDGVDFDQSRNLTNRIYKFRGHGKAWDWEVDTEFGNYDYLMYTDYDMDHPEVVNELRNWGVWYTNTLGLDGFRIDAVKHIKYSFTRDWINHVRSATGKNMFAVAEFWKNDLGAIENYLQKTNWNHSVFDVPLHYNLYNASKSGGNYDMRNIFNGTVVQRHPSHAVTFVDNHDSQPEEALESFVEEWFKPLAYALTLTREQGYPSVFYGDYYGIPTHGVPAMRSKIDPILEARQKYAYGPQHDYLDHPDVIGWTREGDSSHPKSGLATLITDGPGGSKRMYAGLKNAGETWYDITGNRSDTVKIGSDGWGEFHVNDGSVSIYVQK

SEQ ID NO: 42109 - protein, 480 aa, Bacillus sp.
NGTMMQYFEWYLPNDGNHWNRLNSDASNLKSKGITAVWIPPAWKAASQNDVGYGAYDLYDLGEFNQKGTVRTKYGTRSQLQAAVTSLKNNGIQVYGDVVMNHKGGADATEMVRAVEVNPNNRNQEVTGEYTIEAWTRFDFPGRGNTHSSFKWRWYHFDGVDWDQSRNLTNRIYKFRGHGKAWDWEVDTEFGNYDYLMYADYDMDHPEVVNELRNWGVWYTNTLGLDGFRIDAVKHIKYSFTRDWINHVRSATGKNMFAVAEFWKNDLGAIENYLQKTNWNHSVFDVPLHYNLYNASKSGGNYDMRNIFNGTVVQANPNHAVTFVDNHDSQPEEALESFVEEWFKPLAYALTLTREQGYPSVFYGDYYGIPTHGVPAMRSKIDPILEARQKYAYGPQHDYLDHPDVIGWTREGDSSHPKSGLATLITDGPGGSKRMYAGLKNAGETWYDITGNRSDTVKIGSDGWGEFHVNDGSVSIYVQK

SEQ ID NO: 42110 - protein, 480 aa, Bacillus sp.
NGTMMQYFEWYLPNDGNHWNRLNSDASNLKSKGITAVWIPPAWKGASQNDVGYGAYDLYDLGEFNQKGTVRTKYGTRSQLQAAVTSLKNNGIQVYGDVVMNHKGGADATEMVRAVEVNPNNRNQEVTGEYTIEAWTRFDFPGRGNTHSSFKWRWYHFDGVDWDQSRRLNNRIYKFRGHGKAWDWEVDTEFGNYDYLMYADYDMDHPEVVNELRNWGVWYTNTLGLDGFRIDAVKHIKYSFTRDWINHVRSATGKNMFAVAEFWKNDLGAIENYLQKTNWNHSVFDVPLHYNLYNASKSQGNYDMRNIFNGTVVQRHPSHAVTFVDNHDSQPEEALESFVEPWFKPLAYALTLTREQGYPSVFYGDYYGIPTHGVPAMRSKIDPILEARQKYAYGPQHDYLDHPDVIGWTREGDSSHPKSGLATLITDGPGGSKRMYAGLKNAGETWYDITGNRSDTVKIGSDGWGEFHVNGSSVSIYVQK

SEQ ID NO: 42111 - protein, 480 aa, Bacillus sp.
NGTMMQYFEWYLPNDGNHWNRLNSDASNLKSKGITAVWIPPAWKGASQNDVGYGAYDLYDLGEFNQKGTVRTKYGTRSQLQAAVTSLKNNGIQVYGDVVMNHKGGADATEMVRAVEVNPNNRNQEVTGEYTIEAWTRFDFPGRGNTHSSFKWRWYHFDGVDWDQSREFDNRIYKFRGHGKAWDWEVDTEFGNYDYLMYADYDMDHPEVVNELRNWGVWYTNTLGLDGFRIDAVKHIKYSFTRDWINHVRSATGKNMFAVAEFWKNDLGAIENYLQKTNWNHSVFDVPLHYNLYNASKSSGNYDMRNIFNGTVVQRHPSHAVTFVDNHDSQPEEALESFVDEWFKPLAYALTLTREQGYPSVFYGDYYGIPTHGVPAMRSKIDPILEARQKYAYGPQHDYLDHPDVIGWTREGDSSHPKSGLATLITDGPGGSKRMYAGLKNAGETWYDITGNRSDTVKIGSDGWGEFHVNKQSVSIYVQK

SEQ ID NO: 42112 - protein, 480 aa, Bacillus sp.
NGTMMQYFEWYLPNDGNHWNRLNSDASNLKSKGITAVWIPPAWKGASQNDVGYGAYDLYDLGEFNQKGTVRTKYGTRSQLQAAVTSLKNNGIQVYGDVVMNHKGGADLTEMVDAVEVNPNNRNQEVTGEYTIEAWTRFDFPGRGNTHSSFKWRWYHFDGVDFDQSRRLNNRIYKFRGHGKAWDWEVDTEFGNYDYLMYADYDMDHPEVVNELRNWGVWYTNTLGLDGFRIDAVKHIKYSFTRDWINHVRIATGKNMFAVAEFWKNDLGAIENYLQKTNWNHSVFDVPLHYNLYNASKSGGNYDMRNIFNGTVVQRHPSHAVTFVDNHDSQPEEALESFVDEWFKPLAYALTLTREQGYPSVFYGDYYGIPTHGVPAMRSKIDPILEARQKYAYGPQHDYLDHPDVIGWTREGDSSHPKSGLATLITDGPGGSKRMYAGLKNAGETWYDITGNRSDTVKIGSDGWGEFHVNDQSVSIYVQK

SEQ ID NO: 42113 - protein, 480 aa, Bacillus sp.
NGTMMQYFEWYLPNDGNHWNRLNSDASNLKSKGITAVWIPPAWKGASQNDVGYGAYDLYDLGEFNQKGTVRTKYGTRSQLQAAVTSLKNNGIQVYGDVVMNHKGGADATEMVRAVEVNPNNRNQEVTGEYTIEAWTRFDFPGRGNTHSSFKWRWYHFDGVDWDQSRNFQNRIYKFRGHGKAWDWEVDTEFGNYDYLMYADYDMDHPEVVNELRNWGVWYTNTLGLDGFRIDAVKHIKYSFTRDWINHVRSATGKNMFAVAEFWKNDLGAIENYLQKTNWNHSVFDVPLHYNLYNASKSQGNYDMRNIFNGTVVQAHPNHAVTFVDNHDSQPEEALESFVDTWFKPLAYALTLTREQGYPSVFYGDYYGIPTHGVPAMRSKIDPILEARQKYAYGPQHDYLDHPDVIGWTREGDSSHPKSGLATLITDGPGGSKRMYAGLKNAGETWYDITGNRSDTVKIGSDGWGEFHVNGSSVSIYVQK

SEQ ID NO: 42114 - protein, 480 aa, Bacillus sp.
NGTMMQYFEWYLPNDGNHWNRLNSDASNLKSKGIKAVWIPPAWKGASQNDVGYGAYDLYDLGEFNQRGTVRTKYGTRSQLQAAVTSLKNNGIQVYGDVVMNHKGGADATEMVRAVEVNPNNRNQEVTGEYTIEAWTRFDFPGRGNTHSSFKWRWYHFDGVDFDQSRRLNNRIYKFRGHGKAWDWEVDTEFGNYDYLMYADYDMDHPEVVNELRNWGVWYTNTLGLDGFRIDAVKHIKYSFTRDWINHVRSATGKNMFAVAEFWKNDLGAIENYLQKTNWNHSVFDVPLHYNLYNASKSGGNYDMRNIFNGTVVQRHPSHAVTFVDNHDSQPEEALESFVEEWFKPLAYALTLTREQGYPSVFYGDYYGIPTHGVPAMRSKIDPILEARQKYAYGPQHDYLDHPDVIGWTREGDSSHPKSGLATLITDGPGGSKRMYAGLKNAGETWYDITGNRSDTVKIGSDGWGEFHVNDGSVSIYVQK

SEQ ID NO: 42115 - protein, 480 aa, Bacillus sp.
NGTMMQYFEWYLPNDGNHWNRLNSDASNLKSKGIKAVWIPPAWKAVSQNDVGYGAYDLYDLGEFNQKGTVRTKYGTRSQLQAAVTSLKNNGIQVYGDVVMNHKGGADATEMVRAVEVNPNNRNQEVTGEYTIEAWTRFDFPGRGNTHSSFKWRWYHFDGVDFDQSRDLENRIYKFRGHGKAWDWEVDTEFGNYDYLMYADYDMDHPEVVNELRNWGVWYTNTLGLDGFRIDAVKHIKYSFTRDWINHVRSATGKNMFAVAEFWKNDLGAIENYLQKTNWNHSVFDVPLHYNLYNASKSGGNYDMRNIFNGTVVQRHPSHAVTFVDNHDSQPEEALESFVEEWFKPLAYALTLTREQGYPSVFYGDYYGIPTHGVPAMRSKIDPILEARQKYAYGPQHDYLDHPDVIGWTREGDSSHPKSGLATLITDGPGGSKRMYAGLKNAGETWYDITGNRSDTVKIGSDGWGEFHVNDGSVSIYVQK

SEQ ID NO: 42116 - protein, 480 aa, Bacillus sp.
NNTMMQYFEWYLPNDGNHWNRLNSDASNLKSKGITAVWIPPAWKGASQNDVGYGAYDLYDLGEFNQKGTVRTKYGTRSQLQAAVTSLKNNGILVYGDVVMNHKGGADATEMVRAVEVNPNNRNQEVTGEYTIEAWTRFDFPGRGNTHSSFKWRWYHFDGVDWDQSRRLNNRIYKFRGHGKAWDWEVDTEFGNYDYLMYADYDMDHPEVVNELRNWGVWYTNTLGLDGFRIDAVKHIKYSFTRDWINHVRSATGKNMFAVAEFWKNDLGAIENYLQKTNWNHSVFDVPLHYNLYNASKSGGNYDMRNIFNGTVVQAHPMHAVTFVDNHDSQPEEALESFVEEWFKPLAYALTLTREQGYPSVFYGDYYGIPTHGVPAMRSKIDPILEARQKYAYGPQHDYLDHPDVIGWTREGDSSHPKSGLATLITDGPGGSKRMYAGLKNAGETWYDITGNRSDTVKIGSDGWGEFHVNDGSVSIYVQK

SEQ ID NO: 42117 - protein, 480 aa, Bacillus sp.
NQTMMQYFEWYLPNDGNHWNRLNSDASNLKSKGITAVWIPPAWKGASQNDVGYGAYDLYDLGEFNQKGTVRTKYGTRSQLQAAVTSLKNNGIQVYGDVVMNHKGGADATEMVRAVEVNPNNRNQEVTGEYTIEAWTRFDFPGRGNTHSSFKWRWYHFDGVDWDQSRRLNNRIYKFRGHGKAWDWEVDTEFGNYDYLMYADYDMDHPEVVNELRNWGVWYTNTLGLDGFRIDAVKHIKYSFTRDWINHVRSATGKNMFAVAEFWKNDLGAIENYLQKTNWNHSVFDVPLHYNLYNASKSGGNYDMRNIFNGTVVQSNPMHAVTFVDNHDSQPEEALESFVEEWFKPLAYALTLTREQGYPSVFYGDYYGIPTHGVPAMRSKIDPILEARQKYAYGPQHDYLDHPDVIGWTREGDSSHPKSGLATLITDGPGGSKRMYAGLKNAGETWYDITGNRSDTVKIGSDGWGEFHVNDGSVSIYVQK

SEQ ID NO: 42118 - protein, 480 aa, Bacillus sp.
NGTMMQYFEWYLPNDGNHWNRLNSDASNLKSKGITAVWIPPAWKGASQNDVGYGAYDLYDLGEFNQKGTVRTKYGTRSQLQAAVTSLKNNGIQVYGDVVMNHKGGADATEMVRAVEVNPNNRNQEVTGEYTIEAWTRFDFPGRGNTHSSFKWRWYHFDGVDWDQSRKLNNRIYKFRGHGKAWDWEVDTEFGNYDYLMYVDYDMDHPEVVNELRNWGVWYTNTLGLDGFRIDAVKHIKYSFTRDWINHVRSATGKNMFAVAEFWKNDLGAIENYLQKTNWNHSVFDVPLHYNLYNASKSSGNYDMRNIFNGTVVQRHPSHAVTFVDNHDSQPEEALESFVDEWFKPLAYALTLTREQGYPSVFYGDYYGIPTHGVPAMRSKIDPILEARQKYAYGPQHDYLDHPDVIGWTREGDSSHPKSGLATLITDGPGGSKRMYAGLKNAGETWYDITGNRSDTVKIGSDGWGEFHVNKQSVSIYVQK

SEQ ID NO: 42119 - protein, 480 aa, Bacillus sp.
NGTMMQYFEWYLPNDGNHWNRLNSDASNLKSKGITAVWIPPAWKAASQNDVGYGAYDLYDLGEFNQKGTVRTKYGTRSQLQAAVTSLKNNGIQVYGDVVMNHKGGADATEMVRAVEVNPNNRNQEVTGEYTIEAWTRFDFPGRGNTHSSFKWRWYHFDGVDWDQSRRTENRIYKFRGHGKAWDWEVDTEFGNYDYLMYTDYDMDHPEVVNELRNWGVWYTNTLGLDGFRIDAVKHIKYSFTRDWINHVRSATGKNMFAVAEFWKNDLGAIENYLQKTNWNHSVFDVPLHYNLYNASKSGGNYDMRNIFNGTVVQRHPSHAVTFVDNHDSQPEEALESFVDEWFKPLAYALTLTREQGYPSVFYGDYYGIPTHGVPAMRSKIDPILEARQKYAYGPQHDYLDHPDVIGWTREGDSSHPKQGLATLITDGPGGSKRMYAGLKNAGETWYDITGNRSDTVKIGSDGWGEFHVNDGSVSIYVQK

SEQ ID NO: 42120 - protein, 480 aa, Bacillus sp.
NGTMMQYFEWYLPNDGNHWNRLNSDASNLKSKGITAVWIPPAWKAVSQNDVGYGAYDLYDLGEFNQKGTVRTKYGTRSQLQAAVTSLKNNGIQVYGDVVMNHKGGADATEMVRAVEVNPNNRNQEVTGEYTIEAWTRFDFPGRGNTHSSFKWRWYHFDGVDWDQSRNLTNRIYKFRGHGKAWDWEVDTEFGNYDYLMYTDYDYDHPESTNEMRNWGVWYTNTLGLDGFRIDAVKHIKYSFTRDWINHVRSATGKNMFAVAEFWKNDLGAIENYLQKTNWNHSVFDVPLHYNLYNASKSGGNYDMRNIFNGTVVQRHPSHAVTFVDNHDSQPEEALESFVEEWFKPLAYALTLTREQGYPSVFYGDYYGIPTHGVPAMRSKIDPILEARQKYAYGPQHDYLDHPDVIGWTREGDSSHPKSGLATLITDGPGGSKRMYAGLKNAGETWYDITGNRSDTVKIGSDGWGEFHVNDGSVSIYVQK

SEQ ID NO: 42121 - protein, 480 aa, Bacillus sp.
NGTMMQYFEWYLPNDGNHWNRLNSDASNLKSKGITAVWIPPAWKAASQNDVGYGAYDLYDLGEFNQKGTVRTKYGTRSQLQAAVTSLKNNGIQVYGDVVMNHKGGADATEMVPAVEVNPNNRNQEVTGEYTIEAWTRFDFPGRGNTHSSFKWRWYHFDGVDWDQSRDLDNRIYKFRGHSKAWDWEVDTEFGNYDYLMYADYDMDHPEVVNELRNWGVWYTNTLGLDGFRIDAVKHIKYSFTRDWINHVRSATGKNMFAVAEFWKNDLGAIENYLQKTNWNHSVFDVPLHYNLYNASKSGGNYDMRNIFNGTVVQRHPSHAVTFVDNHDSQPEEALESFVETWFKPLAYALTLTREQGYPSVFYGDYYGIPTHGVPAMRSKIDPILEARQKYAYGPQHDYLDHPDVIGWTREGDSSHPKSGLATLITDGPGGSKRMYAGLKNAGETWYDITGNRSDTVKIGSDGWGEFHVNKASVSIYVQK

SEQ ID NO: 42122 - protein, 480 aa, Bacillus sp.
NGTMMQYFEWYLPNDGNHWNRLNSDASNLKSKGITAVWIPPAWKGASQNDVGYGAYDLYDLGEFNQKGTVRTKYGTRSQLQAAVTSLKNNGIQVYGDVVMNHKGGADATEMVRAVEVNPNNRNQEVTGEYTIEAWTRFDFPGRGNTHSSFKWRWYHFDGVDWDQSRRLNNRIYKFRGHGKAWDWEVDTEFGNYDYLMYADYDMDHPEVVNELRNWGVWYTNTLGLDGFRIDAVKHIKYSFTRDWINHVRSATGKNMFAVAEFWKNDLGAIENYLQKTNWNHSVFDVPLHYNLYNASKSAGNYDMRNIFNGTVVQRHPSHAVTFVDNHDSQPEEALESFVEPWFKPLAYALTLTREQGYPSVFYGDYYGIPTHGVPAMRSKIDPILEARQKYAYGPQHDYLDHPDVIGWTREGDSSHPKSGLATLITDGPGGSKRMYAGLKNAGETWYDITGNRSDTVKIGSDGWGEFHVNQTSVSIYVQK

SEQ ID NO: 42123 - protein, 480 aa, Bacillus sp.
NGTMMQYFEWYLPNDGNHWNRLNSDASNLKSKGITAVWIPPAWKAASQNDVGYGAYDLYDLGEFNQKGTVRTKYGTRSQLQAAVTSLKNNGIQVYGDVVMNHKGGADATEMVRAVEVNPNNRNQEVTGEYTIEAWTRFDFPGRGNTHSSFKWRWYHFDGVDWDQSRNLNNRIYKFRGHGKAWDWEVDTEFGNYDYLMYTDYDYDHPESTNEMRNWGVWYTNTLGLDGFRIDAVKHIKYSFTRDWINHVRSATGKNMFAVAEFWKNDLGAIENYLQKTNWNHSVFDVPLHYNLYNASKSGGNYDMRNIFNGTVVQRHPSHAVTFVDNHDSQPEEALESFVEEWFKPLAYALTLTREQGYPSVFYGDYYGIPTHGVPAMRSKIDPILEARQKYAYGPQHDYLDHPDVIGWTREGDSSHPKSGLATLITDGPGGSKRMYAGLKNAGETWYDITGNRSDTVKIGSDGWGEFHVNDGSVSIYVQK

SEQ ID NO: 42124 - protein, 480 aa, Bacillus sp.
NGTMMQYFEWYLPNDGNHWNRLNSDASNLKSKGITAVWIPPAWKAASQNDVGYGAYDLYDLGEFNQKGTVRTKYGTRSQLQAAVTSLKNNGIQVYGDVVMNHKGGADATEMVRAVEVNPNNRNQEVTGEYTIEAWTRFDFPGRGNTHSSFKWRWYHFDGVDWDQSRDLQNRIYKFRGHGKAWDWEVDTEFGNYDYLMYADYDMDHPEVVNELRNWGVWYTNTLGLDGFRIDAVKHIKYSFTRDWINHVRSATGKNMFAVAEFWKNDLGAIENYLQKTNWNHSVFDVPLHYNLYNASKSGGNYDMRNIFNGTVVQAHPNHAVTFVDNHDSQPEEALESFVEEWFKPLAYALTLTREQGYPSVFYGDYYGIPTHGVPAMRSKIDPILEARQKYAYGPQHDYLDHPDVIGWTREGDSSHPKSGLATLITDGPGGSKRMYAGLKNAGETWYDITGNRSDTVKIGSDGWGEFHVNDGSVSIFVQK

SEQ ID NO: 42125 - protein, 480 aa, Bacillus sp.
NQTMMQYFEWYLPNDGNHWNRLNSDASNLKSKGITAVWIPPAWKGASQNDVGYGAYDLYDLGEFNQKGTVRTKYGTRSQLQAAVTSLKNNGIQVYGDVVMNHKGGADATEMVRAVEVNPNNRNQEVTGEYTIEAWTRFDFPGRGNTHSSFKWRWYHFDGVDWDQSRRLNNRIYKFRGHGKAWDWEVDTEFGNYDYLMYADYDMDHPEVVNELRNWGVWYTNTLGLDGFRIDAVKHIKYSFTRDWINHVRSATGKNMFAVAEFWKNDLGAIENYLQKTNWNHSVFDVPLHYNLYNASKSGGNYDMRNIFNGTVVQAQPMHAVTFVDNHDSQPEEALESFVEEWFKPLAYALTLTREQGYPSVFYGDYYGIPTHGVPAMRSKIDPILEARQKYAYGPQHDYLDHPDVIGWTREGDSSHPKSGLATLITDGPGGSKRMYAGLKNAGETWYDITGNRSDTVKIGSDGWGEFHVNDGSVSIYVQK

SEQ ID NO: 42126 - protein, 480 aa, Bacillus sp.
NGTMMQYFEWYLPNDGNHWNRLNSDASNLKSKGITAVWIPPAWKGASQNDVGYGAYDLYDLGEFNQKGTVRTKYGTRSQLQAAVTSLKNNGIQVYGDVVMNHKGGADATEMVRAVEVNPNNRNQEVTGEYTIEAWTRFDFPGRGNTHSSFKWRWYHFDGVDWDQSRNLQNRIYKFRGHGKAWDWEVDTEFGNYDYLMYADYDMDHPEVVNELRNWGVWYTNTLGLDGFRIDAVKHIKYSFTRDWINHVRSATGKNMFAVAEFWKNDLGAIENYLQKTNWNHSVFDVPLHYNLYNASKSGGNYDMRNIFNGTVVQRHPSHAVTFVDNHDSQPEEALESFVDEWFKPLAYALTLTREQGYPSVFYGDYYGIPTHGVPAMRSKIDPILEARQKYAYGPQHDYLAHPDVMGWTREGDSSHPKSGLATLITDGPGGSKRMYAGLKKAGETWYDITGNRSDTVKIGSDGWGEFHVNDGSVSIYVQK

SEQ ID NO: 42127 - protein, 480 aa, Bacillus sp.
NLTMMQYFEWYLPNDGNHWNRLNSDASNLKSKGITAVWIPPAWKGASQNDVGYGAYDLYDLGEFNQKGTVRTKYGTRSQLQAAVTSLKNNGIQVYGDVVMNHKGGADATEMVRAVEVNPNNRNQEVTGEYTIEAWTRFDFPGRGNTHSSFKWRWYHFDGVDWDQSRRLNNRIYKFRGHGKAWDWEVDTEFGNYDYLMYADYDMDHQEVVNELRNWGVWYTNTLGLDGFRIDAVKHIKYSFTRDWINHVRSATGKNMFAVAEFWKNDLGAIENYLQKTNWNHSVFDVPLHYNLYNASKGGGNYDMRNIFNGTVVQAHPSHAVTFVDNHDSQPEEALESFVEEWFKPLAYALTLTREQGYPSVFYGDYYGIPTHGVPAMRSKIDPILEARQKYAYGPQHDYLDHPDVIGWTREGDSSHPKSGLATLITDGPGGSKRMYAGLKNAGETWYDITGNRSDTVKIGSDGWGEFHVNDGSVSIYVQK

SEQ ID NO: 42128 - protein, 480 aa, Bacillus sp.
NGTMMQYFEWYLPNDGNHWNRLNSDASNLKSKGITAVWIPPAWKGASQNDVGYGAYDLYDLGEFNQKGTVRTKYGTRSQLQAAVTSLKNNGIQVYGDVVMNHKGGADLTEMVRAVEVNPNNRNQEVTGEYTIEAWTRFDFPGRGNTHSSFKWRWYHFDGVDFDQSRQLNNRIYKFRGHGKAWDWEVDTEFGNYDYLMYADYDMDHPEVVNELRNWGVWYTNTLGLDGFRIDAVKHIKYSFTRDWINHVRSATGKNMFAVAEFWKNDLGAIENYLQKTNWNHSVFDVPLHYNLYNASKSGGNYDMRNIFNGTVVQRHPSHAVTFVDNHDSQPEEALESFVEEWFKPLAYALTLTREQGLPSVFYGDYYGIPTHGVPAMRSKIDPILEARQKYAYGPQHDYLDHPDVIGWTREGDSSHPKSGLATLITDGPGGSKRMYAGLKNAGETWYDITGNRSDTVKIGSDGWGEFHVNDGSVSIYVQK

SEQ ID NO: 42129 - protein, 480 aa, Bacillus sp.
NGTMMQYFEWYLPNDGNHWNRLNSDASNLKSKGITAVWIPPAWKAVSQNDVGYGAYDLYDLGEFNQKGTVRTKYGTRSQLQAAVTSLKNNGIQVYGDVVMNHKGGADATEMVRAVEVNPNNRNQEVTGEYTIEAYTRFDFPGRGNTHSSFKWRWYHFDGVDWDQSREFTNRIYKFRGHGKAWDWEVDTEFGNYDYLMYVDYDMDHPEVVNELRNWGVWYTNTLGLDGFRIDAVKHIKYSFTRDWINHVRSATGKNMFAVAEFWKNDLGAIENYLQKTNWNHSVFDVPLHYNLYNASKSGGNYDMRNIFNGTVVQRHPSHAVTFVDNHDSQPEEALESFVEEWFKPLAYALTLTREQGYPSVFYGDYYGIPTHGVPAMRSKIDPILEARQKYAYGPQHDYLDHPDVIGWTREGDSSHPKSGLATLITDGPGGSKRMYAGLKNAGETWYDITGNRSDTVKIGSDGWGEFHVNDGSVSIYVQK

SEQ ID NO: 42130 - protein, 480 aa, Bacillus sp.
NGTMMQYFEWYLPNDGNHWNRLNSDASNLKSKGITAVWIPPAWKAASQNDVGYGAYDLYDLGEFNQKGTVRTKYGTRSQLQAAVTSLKNNGIQVYGDVVMNHKGGADATEMVPAVEVNPNNRNQEVTGEYTIEAWTRFDFPGRGNTHSSFKWRWYHFDGVDWDQSRDLQNRIYKFRGHSKAWDWEVDTEFGNYDYLMYADYDMDHPEVVNELRNWGVWYTNTLGLDGFRIDAVKHIKYSFTRDWINHVRSATGKNMFAVAEFWKNDLGAIENYLQKTNWNHSVFDVPLHYNLYNASKSGGNYDMRNIFNGTVVQRHPSHAVTFVDNHDSQPEEALESFVETWFKPLAYALTLTREQGYPSVFYGDYYGIPTHGVPAMRSKIDPILEARQKYAYGPQHDYLDHPDVIGWTREGDSSHPKSGLATLITDGPGGSKRMYAGLKNAGETWYDITGNRSDTVKIGSDGWGEFHVNKASVSIYVQK

SEQ ID NO: 42131 - protein, 480 aa, Bacillus sp.
NGTMMQYFEWYLPNDGNHWNRLNSDASNLKSKGITAVWIPPAWKATSQNDVGYGAYDLYDLGEFNQKGTVRTKYGTRSQLQAAVTSLKNNGIQVYGDVVMNHKGGADATEMVRAVEVNPNNRNQEVTGEYTIEAYTRFDFSGRGNTHSSFKWRWYHFDGVDWDQSRDLNNRIYKFRGHGKAWDWEVDTEFGNYDYLMYADYDMDHPEVVNELRNWGVWYTNTLGLDGFRIDAVKHIKYSFTRDWINHVRSATGKNMFAVAEFWKNDLGAIENYLQKTNWNHSVFDVPLHYNLYNASKSGGNYDMRNIFNGTVVQRHPSHAVTFVDNHDSQPEEALESFVEEWFKPLAYALTLTREQGYPSVFYGDYYGIPTHGVPAMRSKIDPILEARQKYAYGPQHDYLDHPDVIGWTREGDSSHPKSGLATLITDGPGGSKRMYAGLKNAGETWYDITGNRSDTVKIGSDGWGEFHVNDGSVSIYVQK

SEQ ID NO: 42132 - protein, 480 aa, Bacillus sp.
NGTMMQYFEWYLPNDGNHWNRLNSDASNLKSKGITAVWIPPAWKGASQNDVGYGAYDLYDLGEFNQKGTVRTKYGTRSQLQAAVTSLKNNGIQVYGDVVMNHKGGADATEMVRAVEVNPNNRNQEVTGEYTIEAWTRFDFPGRGNTHSSFKWRWYHFDGVDWDQSRRLNNRIYKFRGHGKAWDWEVDTEFGNYDYLMYADYDMDHPEVVNELRNWGVWYTNTLGLDGFRIDAVKHIKYSFTRDWINHVRSATGKNMFAVAEFWKNDLGAIENYLQKTNWNHSVFDVPLHYNLYNASKSQGNYDMRNIFNGTVVQRHPSHAVTFVDNHDSQPEEALESFVDPWFKPLAYALTLTREQGYPSVFYGDYYGIPTHGVPAMRSKIDPILEARQKYAYGPQHDYLDHPDVIGWTREGDSSHPKSGLATLITDGPGGSKRMYAGLKNAGETWYDITGNRSDTVKIGSDGWGEFHVNQQSVSIYVQK

SEQ ID NO: 42133 - protein, 480 aa, Bacillus sp.
NGTMMQYFEWYLPNDGNHWNRLNSDASNLKSKGITAVWIPPAWKGASQNDVGYGAYDLYDLGEFNQKGTVRTKYGTRSQLQAAVTSLKNNGIQVYGDVVMNHKGGADATEMVRAVEVNPNNRNQEVTGEYTIEAWTRFDFPGRGNTHSSFKWRWYHFDGVDWDQSRRLNNRIYKFRGHGKAWDWEVDTEFGNYDYLMYADYDMDHPEVVNELRNWGVWYTNTLGLDGFRIDAVKHIKYSFTRDWINHVRSATGKNMFAVAEFWKNDLGAIENYLQKTNWNHSVFDVPLHYNLYNASKSAGNYDMRNIFNGTVVQRHPSHAVTFVDNHDSQPEEALESFVDPWFKPLAYALTLTREQGYPSVFYGDYYGIPTHGVPAMRSKIDPILEARQKYAYGPQHDYLDHPDVIGWTREGDSSHPKSGLATLITDGPGGSKRMYAGLKNAGETWYDITGNRSDTVKIGSDGWGEFHVNQSSVSIYVQK

SEQ ID NO: 42134 - protein, 480 aa, Bacillus sp.
NETMMQYFEWYLPNDGNHWNRLNSDASNLKSKGITAVWIPPAWKGASQNDVGYGAYDLYDLGEFNQKGTVRTKYGTRSQLQAAVTSLKNNGIAVYGDVVMNHKGGADATEMVRAVEVNPNNRNQEVTGEYTIEAWTRFDFPGRGNTHSSFKWRWYHFDGVDWDQSRRLNNRIYKFRGHGKAWDWEVDTEFGNYDYLMYADYDMDHPEVVNELRNWGVWYTNTLGLDGFRIDAVKHIKYSFTRDWINHVRSATGKNMFAVAEFWKNDLGAIENYLQKTNWNHSVFDVPLHYNLYNASKSGGNYDMRNIFNGTVVQMHPSHAVTFVDNHDSQPEEALESFVEEWFKPLAYALTLTREQGYPSVFYGDYYGIPTHGVPAMRSKIDPILEARQKYAYGPQHDYLDHPDVIGWTREGDSSHPKSGLATLITDGPGGSKRMYAGLKNAGETWYDITGNRSDTVKIGSDGWGEFHVNDGSVSIYVQK

SEQ ID NO: 42135 - protein, 480 aa, Bacillus sp.
NGTMMQYFEWYLPNDGNHWNRLNSDASNLKSKGITAVWIPPAWKGASQNDVGYGAYDLYDLGEFNQKGTVRTKYGTRSQLQAAVTSLKNNGIQVYGDVVMNHKGGADATEMVRAVEVNPNNRNQEVTGEYTIEAWTRFDFPGRGNTHSSFKWRWYHFDGVDWDQSRRLNNRIYKFRGHGKAWDWEVDTEFGNYDYLMYADYDMDHPEVVNELRNWGVWYTNTLGLDGFRIDAVKHIKYSFTRDWINHVRSATGKNMFAVAEFWKNDLGAIENYLQKTNWNHSVFDVPLHYNLYNASKSGSNYDMRNIFNGTVVQRHPSHAVTFVDNHDSQPEEALESFVDEWFKPLAYALTLTREQGYPSVFYGDYYGIPTHGVPAMRSKIDPILEARQKYAYGPQHDYLDHPDVIGWTREGDSSHPKSGLATLITDGPGGSKRMYAGLKNAGETWYDITGNRSDTVKIGSDGWGEFHVNKQSVSIYVQK

SEQ ID NO: 42136 - protein, 480 aa, Bacillus sp.
NDTMMQYFEWYLPNDGNHWNRLNSDASNLKSKGITAVWIPPAWKGASQNDVGYGAYDLYDLGEFNQKGTVRTKYGTRSQLQAAVTSLKNNGIAVYGDVVMNHKGGADATEMVRAVEVNPNNRNQEVTGEYTIEAWTRFDFPGRGNTHSSFKWRWYHFDGVDWDQSRRLNNRIYKFRGHGKAWDWEVDTEFGNYDYLMYADYDMDHPEVVNELRNWGVWYTNTLGLDGFRIDAVKHIKYSFTRDWINHVRSATGKNMFAVAEFWKNDLGAIENYLQKTNWNHSVFDVPLHYNLYNASKSGGNYDMRNIFNGTVVQMHPSHAVTFVDNHDSQPEEALESFVEEWFKPLAYALTLTREQGYPSVFYGDYYGIPTHGVPAMRSKIDPILEARQKYAYGPQHDYLDHPDVIGWTREGDSSHPKSGLATLITDGPGGSKRMYAGLKNAGETWYDITGNRSDTVKIGSDGWGEFHVNDGSVSIYVQK

SEQ ID NO: 42137 - protein, 480 aa, Bacillus sp.
NQTMMQYFEWYLPNDGNHWNRLNSDASNLKSKGITAVWIPPAWKGASQNDVGYGAYDLYDLGEFNQKGTVRTKYGTRSQLHAAVTSLKNNGIQVYGDVVMNHKGGADATEMVRAVEVNPNNRNQEVTGEYTIEAWTRFDFPGRGNTHSSFKWRWYHFDGVDWDQSRRLNNRIYKFRGHGKAWDWEVDTEFGNYDYLMYADYDMDHPEVVNELRNWGVWYTNTLGLDGFRIDAVKHIKYSFTRDWINHVRSATGKNMFAVAEFWKNDLGAIENYLQKTNWNHSVFDVPLHYNLYNASKSGGNYDMRNIFNGTVVQAHPMHAVTFVDNHDSQPEEALESFVEEWFKPLAYALTLTREQGYPSVFYGDYYGIPTHGVPAMRSKIDPILEARQKYAYGPQHDYLDHPDVIGWTREGDSSHPKSGLATLITDGPGGSKRMYAGLKNAGETWYDITGNRSDTVKIGSDGWGEFHVNDGSVSIYVQK

SEQ ID NO: 42138 - protein, 480 aa, Bacillus sp.
NGTMMQYFEWYLPNDGNHWNRLNSDASNLKSKGITAVWIPPAWKAVSQNDVGYGAYDLYDLGEFNQKGTVRTKYGTRSQLQAAVTSLKNNGIQVYGDVVMNHKGGADATEMVPAVEVNPNNRNQEVTGEYTIEAWTRFDFPGRGNTHSSFKWRWYHFDGVDWDQSRNLTNRIYKFRGHSKAWDWEVDTEFGNYDYLMYTDYDMDHPEVVNELRNWGVWYTNTLGLDGFRIDAVKHIKYSFTRDWINHVRSATGKNMFAVAEFWKNDLGAIENYLQKTNWNHSVFDVPLHYNLYNASKSGGNYDMRNIFNGTVVQRHPSHAVTFVDNHDSQPEEALESFVEEWFKPLAYALTLTREQGYPSVFYGDYYGIPTHGVPAMRSKIDPILEARQKYAYGPQHDYLDHPDVIGWTREGDSSHPKSGLATLITDGPGGSKRMYAGLKNAGETWYDITGNRSDTVKIGSDGWGEFHVNDGSVSIYVQK

SEQ ID NO: 42139 - protein, 480 aa, Bacillus sp.
NATMMQYFEWYLPNDGNHWNRLNSDASNLKSKGITAVWIPPAWKGASQNDVGYGAYDLYDLGEFNQKGTVRTKYGTRSQLQAAVTSLKNNGIQVYGDVVMNHKGGADATEMVRAVEVNPNNRNQEVTGEYTIEAWTRFDFPGRGNTHSSFKWRWYHFDGVDWDQSRRLNNRIYKFRGHGKAWDWEVDTEFGNYDYLMYADYDMDHPEVVNELRNWGVWYTNTLGLDGFRIDAVKHIKYSFTRDWINHVRSATGKNMFAVAEFWKNDLGAIENYLQKTNWNHSVFDVPLHYNLYNASKSGGNYDMRNIFNGTVVQSWPMHAVTFVDNHDSQPEEALESFVEEWFKPLAYALTLTREQGYPSVFYGDYYGIPTHGVPAMRSKIDPILEARQKYAYGPQHDYLDHPDVIGWTREGDSSHPKSGLATLITDGPGGSKRMYAGLKNAGETWYDITGNRSDTVKIGSDGWGEFHVNDGSVSIYVQK

SEQ ID NO: 42140 - protein, 480 aa, Bacillus sp.
NGTMMQYFEWYLPNDGNHWNRLNSDASNLKSKGITAVWIPPAWKGASQNDVGYGAYDLYDLGEFNQKGTVRTKYGTRSQLQAAVTSLKNNGIQVYGDVVMNHKGGADATEMVRAVEVNPNNRNQEVTGEYTIEAWTRFDFPGRGNTHSSFKWRWYHFDGVDWDQSRRLNNRIYKFRGHGKAWDWEVDTEFGNYDYLMYADYDMDHPEVVNELRNWGVWYTNTLGLDGFRIDAVKHIKYSFTRDWINHVRSATGKNMFAVAEFWKNDLGAIENYLQKTNWNHSVFDVPLHYNLYNASKSAGNYDMRNIFNGTVVQRHPSHAVTFVDNHDSQPEEALESFVDEWFKPLAYALTLTREQGYPSVFYGDYYGIPTHGVPAMRSKIDPILEARQKYAYGPQHDYLDHPDVIGWTREGDSSHPKSGLATLITDGPGGSKRMYAGLKNAGETWYDITGNRSDTVKIGSDGWGEFHVNKSSVSIYVQK

SEQ ID NO: 42141 - protein, 480 aa, Bacillus sp.
NGTMMQYFEWYLPNDGNHWNRLNSDASNLKSKGITAVWIPPAWKGASQNDVGYGAYDLYDLGEFNQKGTVRTKYGTRSQLQAAVTSLKNNGIQVYGDVVMNHKGGADATEMVRAVEVNPNNRNQEVTGEYTIEAWTRFDFPGRGNTHSSFKWRWYHFDGVDWDQSRRLNNRIYKFRGHGKAWDWEVDTEFGNYDYLMYADYDMDHPEVVNELRNWGVWYTNTLGLDGFRIDAVKHIKYSFTRDWINHVRSATGKNMFAVAEFWKNDLGAIENYLQKTNWNHSVFDVPLHYNLYNASQSSGNYDMRNIFNGTVVQRHPSHAVTFVDNHDSQPEEALESFVDEWFKPLAYALTLTREQGYPSVFYGDYYGIPTHGVPAMRSKIDPILEARQKYAYGPQHDYLDHPDVIGWTREGDSSHPKSGLATLITDGPGGSKRMYAGLKNAGETWYDITGNRSDTVKIGSDGWGEFHVNGQSVSIYVQK

SEQ ID NO: 42142 - protein, 480 aa, Bacillus sp.
NGTMMQYFEWYLPNDGNHWNRLNSDASNLKSKGIKAVWIPPAWKAVSQNDVGYGAYDLYDLGEFNQRGTVRTKYGTRSQLQAAVTSLKNNGIQVYGDVVMNHKGGADATEMVRAVEVNPNNRNQEVTGEYTIEAWTRFDFPGRGNTHSSFKWRWYHFDGVDFDQSRELSNRIYKFRGHGKAWDWEVDTEFGNYDYLMYADYDMDHPEVVNELRNWGVWYTNTLGLDGFRIDAVKHIKYSFTRDWINHVRSATGKNMFAVAEFWKNDLGAIENYLQKTNWNHSVFDVPLHYNLYNASKSGGNYDMRNIFNGTVVQRHPSHAVTFVDNHDSQPEEALESFVEEWFKPLAYALTLTREQGYPSVFYGDYYGIPTHGVPAMRSKIDPILEARQKYAYGPQHDYLDHPDVIGWTREGDSSHPKSGLATLITDGPGGSKRMYAGLKNAGETWYDITGNRSDTVKIGSDGWGEFHVNDGSVSIYVQK

SEQ ID NO: 42143 - protein, 480 aa, Bacillus sp.
NGTMMQYFEWYLPNDGNHWNRLNSDASNLKSKGITAVWIPPAWKGASQNDVGYGAYDLYDLGEFNQKGTVRTKYGTRSQLQAAVTSLKNNGIQVYGDVVMNHKGGADATEMVRAVEVNPNNRNQEVTGEYTIEAWTRFDFPGRGNTHSSFKWRWYHFDGVDWDQSRRLNNRIYKFRGHGKAWDWEVDTEFGNYDYLMYADYDMDHPEVVNELRNWGVWYTNTLGLDGFRIDAVKHIKYSFTRDWINHVRSATGKNMFAVAEFWKNDLGAIENYLQKTNWNHSVFDVPLHYNLYNASKSSGNYDMRNIFNGTVVQRHPSHAVTFVDNHDSQPEEALESFVEPWFKPLAYALTLTREQGYPSVFYGDYYGIPTHGVPAMRSKIDPILEARQKYAYGPQHDYLDHPDVIGWTREGDSSHPKSGLATLITDGPGGSKRMYAGLKNAGETWYDITGNRSDTVKIGSDGWGEFHVNKKSVSIYVQK

SEQ ID NO: 42144 - protein, 480 aa, Bacillus sp.
NGTMMQYFEWYLPNDGNHWNRLNSDASNLKSKGITAVWIPPAWKGASQNDVGYGAYDLYDLGEFNQKGTVRTKYGTRSQLQAAVTSLKNNGIQVYGDVVMNHKGGADATEMVRAVEVNPNNRNQEVTGEYTIEAWTRFDFPGRGNTHSSFKWRWYHFDGVDWDQSRRLNNRIYKFRGHGKAWDWEVDTEFGNYDYLMYADYDMDHPEVVNELRNWGVWYTNTLGLDGFRIDAVKHIKYSFTRDWINHVRSATGKNMFAVAEFWKNDLGAIENYLQKTNWNHSVFDVPLHYNLYNASKSQGNYDMRNIFNGTVVQRHPSHAVTFVDNHDSQPEEALESFVEPWFKPLAYALTLTREQGYPSVFYGDYYGIPTHGVPAMRSKIDPILEARQKYAYGPQHDYLDHPDVIGWTREGDSSHPKSGLATLITDGPGGSKRMYAGLKNAGETWYDITGNRSDTVKIGSDGWGEFHVNKASVSIYVQK

SEQ ID NO: 42145 - protein, 480 aa, Bacillus sp.
NGTMMQYFEWYLPNDGNHWNRLNSDASNLKSKGITAVWIPPAWKGASQNDVGYGAYDLYDLGEFNQKGTVRTKYGTRSQLQAAVTSLKNNGIQVYGDVVMNHKGGADATEMVRAVEVNPNNRNQEVTGEYTIEAWTRFDFPGRGNTHSSFKWRWYHFDGVDWDQSRRLNNRIYKFRGHGKAWDWEVDTEFGNYDYLMYADYDMDHPEVVNELRNWGVWYTNTLGLDGFRIDAVKHIKYSFTRDWINHVRSATGKNMFAVAEFWKNDLGAIENYLQKTNWNHSVFDVPLHYNLYNASKSAGNYDMRNIFNGTVVQRHPSHAVTFVDNHDSQPEEALESFVEPWFKPLAYALTLTREQGYPSVFYGDYYGIPTHGVPAMRSKIDPILEARQKYAYGPQHDYLDHPDVIGWTREGDSSHPKSGLATLITDGPGGSKRMYAGLKNAGETWYDITGNRSDTVKIGSDGWGEFHVNKQSVSIYVQK

SEQ ID NO: 42146 - protein, 480 aa, Bacillus sp.
NGTMMQYFEWYLPNDGNHWNRLNSDASNLKSKGITAVWIPPAWKGASQNDVGYGAYDLYDLGEFNQKGTVRTKYGTRSQLQAAVTSLKNNGIQVYGDVVMNHKGGADATEMVRAVEVNPNNRNQEVTGEYTIEAWTRFDFPGRGNTHSSFKWRWYHFDGVDWDQSRRLNNRIYKFRAHGKAWDWEVDTEFGNYDYLMYADYDMDHPETINELRNWGVWYTNTLGLDGFRIDAVKHIKYSFTRDWINHVRSATGKNMFAVAEFWKNDLGAIENYLQKTNWNHSVFDVPLHYNLYNASKSGGNYDMRNIFNGTVVQRHPSHAVTFVDNHDSQPEEALESFVEEWFKPLAYALTLTREQGYPSVFYGDYYGIPTHGVPAMRSKIDPILEARQKYAYGPQHDYLDHPDVIGWTREGDSSHPKSGLATLITDGPGGSKRMYAGLKNAGETWYDITGNRSDTVKIGSDGWGEFHVNDGSVSIYVQK

SEQ ID NO: 42147 - protein, 480 aa, Bacillus sp.
NGTMMQYFEWYLPNDGNHWNRLNSDASNLKSKGITAVWIPPAWKATSQNDVGYGAYDLYDLGEFNQKGTVRTKYGTRSQLQAAVTSLKNNGIQVYGDVVMNHKGGADLTEMVRAVEVNPNNRNQEVTGEYTIEAWTRFDFPGRGNTHSSFKWRWYHFDGVDWDQSRELSNRIYKFRGHGKAWDWEVDTEFGNYDYLMYADYDMDHPEVVNELRNWGVWYTNTLGLDGFRIDAVKHIKYSFTRDWINHVRSATGKNMFAVAEFWKNDLGAIENYLQKTNWNHSVFDVPLHYNLYNASKSVGNYDMRNIFNGTVVQRHPSHAVTFVDNHDSQPEEALESFVDTWFKPLAYALTLTREQGYPSVFYGDYYGIPTHGVPAMRSKIDPILEARQKYAYGPQHDYLDHPDVIGWTREGDSSHPKSGLATLITDGPGGSKRMYAGLKNAGETWYDITGNRSDTVKIGSDGWGEFHVNGSSVSIYVQK

SEQ ID NO: 42148 - protein, 480 aa, Bacillus sp.
NGTMMQYFEWYLPNDGNHWNRLNSDASNLKSKGITAVWIPPAWKATSQNDVGYGAYDLYDLGEFNQKGTVRTKYGTRSQLQAAVTSLKNNGIQVYGDVVMNHKGGADATEMVRAVEVNPNNRNQEVTGEYTIEAWTRFDFPGRGNTHSSFKWRWYHFDGVDWDQSRNVNNRIYKFRGHGKAWDWEVDTEFGNYDYLMYADYDMDHPEVVNELRNWGVWYTNTLGLDGFRIDAVKHIKYSFTRDWINHVRSATGKNMFAVAEFWKNDLGAIENYLQKTNWNHSVFDVPLHYNLYNASKSGGNYDMRNIFNGTVVQRHPSHAVTFVDNHDSQPEEALESFVDEWFKPLAYALTLTREQGYPSVFYGDYYGIPTHGVPAMRSKIDPILEARQKYAYGPQHDYLDHPDVIGWTREGDSSHPKSGLATLITDGPGGSKRMYAGLKNAGETWYDITGNRSDTVKIGSDGWGEFHVNKSSVSIYVQK

SEQ ID NO: 42149 - protein, 480 aa, Bacillus sp.
NGTMMQYFEWYLPNDGNHWNRLNSDASNLKSKGITAVWIPPAWKAVSQNDVGYGAYDLYDLGEFNQKGTVRTKYGTRSQLQAAVTSLKNNGIQVYGDVVMNHKGGADATEMVRAVEVNPNNRNQEVTGEYTIEAYTRFDFPGRGNTHSSFKWRWYHFDGVDWDQSRNLTNRIYKFRGHGKAWDWEVDTEFGNYDYLMYTDYDMDHPEVVNELRNWGVWYTNTLGLDGFRIDAVKHIKYSFTRDWINHVRSATGKNMFAVAEFWKNDLGAIENYLQKTNWNHSVFDVPLHYNLYNASKSGGNYDMRNIFNGTVVQRHPSHAVTFVDNHDSQPEEALESFVEEWFKPLAYALTLTREQGYPSVFYGDYYGIPTHGVPAMRSKIDPILEARQKYAYGPQHDYLDHPDVIGWTREGDSSHPKSGLATLITDGPGGSKRMYAGLKNAGETWYDITGNRSDTVKIGSDGWGEFHVNDGSVSIYVQK

SEQ ID NO: 42150 - protein, 480 aa, Bacillus sp.
NGTMMQYFEWYLPNDGNHWNRLNSDASNLKSKGITAVWIPPAWKGTSQNDVGYGAYDLYDLGEFNQKGTVRTKYGTRSQLQAAVTSLKNNGIQVYGDVVMNHKGGADATEMVRAVEVNPNNRNQEVTGEYTIEAWTRFDFPGRGNTHSSFKWRWYHFDGVDWDQSRNLNNRIYKFRGHGKAWDWEVDTEFGNYDYLMYADIDYDHPESTNEMRNWGVWYTNTLGLDGFRIDAVKHIKYSFTRDWINHVRSATGKNMFAVAEFWKNDLGAIENYLQKTNWNHSVFDVPLHYNLYNASKSQGNYDMRNIFNGTVVQRHPSHAVTFVDNHDSQPEEALESFVDTWFKPLAYALTLTREQGYPSVFYGDYYGIPTHGVPAMRSKIDPILEARQKYAYGPQHDYLDHPDVIGWTREGDSSHPKSGLATLITDGPGGSKRMYAGLKNAGETWYDITGNRSDTVKIGSDGWGEFHVNGSSVSIYVQK

SEQ ID NO: 42151 - protein, 480 aa, Bacillus sp.
NGTMMQYFEWYLPNDGNHWNRLNSDASNLKSKGITAVWIPPAWKAVSQNDVGYGAYDLYDLGEFNQKGTVRTKYGTRSQLQAAVTSLKNNGIQVYGDVVMNHKGGADATEMVRAVEVNPNNRNQEVTGEYTIEAWTRFDFPGRGNTHSSFKWRWYHFDGVDFDQSREFTNRIYKFRGHGKAWDWEVDTEFGNYDYLMYVDYDMDHPEVVNELRNWGVWYTNTLGLDGFRIDAVKHIKYSFTRDWINHVRSATGKNMFAVAEFWKNDLGAIENYLQKTNWNHSVFDVPLHYNLYNASKSGGNYDMRNIFNGTVVQRHPSHAVTFVDNHDSQPEEALESFVETWFKPLAYALTLTREQGYPSVFYGDYYGIPTHGVPAMRSKIDPILEARQKYAYGPQHDYLDHPDVIGWTREGDSSHPKSGLATLITDGPGGSKRMYAGLKNAGETWYDITGNRSDTVKIGSDGWGEFHVNDASVSIYVQK

SEQ ID NO: 42152 - protein, 480 aa, Bacillus sp.
NGTMMQYFEWYLPNDGNHWNRLNSDASNLKSKGITAVWIPPAWKGASQNDVGYGAYDLYDLGEFNQKGTVRTKYGTRSQLQAAVTSLKNNGIQVYGDVVMNHKGGADATEMVRAVEVNPNNRNQEVTGEYTIEAWTRFDFPGRGNTHSSFKWRWYHFDGVDWDQSRELSNRIYKFRGHGKAWDWEVDTEFGNYDYLMYADYDMDHPEVVNELRNWGVWYTNTLGLDGFRIDAVKHIKYSFTRDWINHVRSATGKNMFAVAEFWKNDLGAIENYLQKTNWNHSVFDVPLHYNLYNASKSQGNYDMRNIFNGTVVQANPNHAVTFVDNHDSQPEEALESFVDTWFKPLAYALTLTREQGYPSVFYGDYYGIPTHGVPAMRSKIDPILEARQKYAYGPQHDYLDHPDVIGWTREGDSSHPKSGLATLITDGPGGSKRMYAGLKNAGETWYDITGNRSDTVKIGSDGWGEFHVNGSSVSIYVQK

SEQ ID NO: 42153 - protein, 480 aa, Bacillus sp.
NGTMMQYFEWYLPNDGNHWNRLNSDASNLKSKGITAVWIPPAWKAVSQNDVGYGAYDLYDLGEFNQKGTVRTKYGTRSQLQAAVTSLKNNGIQVYGDVVMNHKGGADATEMVRAVEVNPNNRNQEVTGEYTIEAWTRFDFPGRGNTHSSFKWRWYHFDGVDWDQSRNLTNRIYKFRGHGKAWDWEVDTEFGNYDYLMYTDYDYDHPETTNEMRNWGVWYTNTLGLDGFRIDAVKHIKYSFTRDWINHVRSATGKNMFAVAEFWKNDLGAIENYLQKTNWNHSVFDVPLHYNLYNASKSGGNYDMRNIFNGTVVQRHPSHAVTFVDNHDSQPEEALESFVEEWFKPLAYALTLTREQGYPSVFYGDYYGIPTHGVPAMRSKIDPILEARQKYAYGPQHDYLDHPDVIGWTREGDSSHPKSGLATLITDGPGGSKRMYAGLKNAGETWYDITGNRSDTVKIGSDGWGEFHVNDGSVSIYVQK

SEQ ID NO: 42154 - protein, 480 aa, Bacillus sp.
NGTMMQYFEWYLPNDGNHWNRLNSDASNLKSKGITAVWIPPAWKGASQNDVGYGAYDLYDLGEFNQKGTVRTKYGTRSQLQAAVTSLKNNGIQVYGDVVMNHKGGADATEMVRAVEVNPNNRNQEVTGEYTIEAWTRFDFPGRGNTHSSFKWRWYHFDGVDFDQSRNFQNRIYKFRGHGKAWDWEVDTEFGNYDYLMYADYDMDHPEVVNELRNWGVWYTNTLGLDGFRIDAVKHIKYSFTRDWINHVRSATGKNMFAVAEFWKNDLGAIENYLQKTNWNHSVFDVPLHYNLYNASKSQGNYDMRNIFNGTVVQRHPSHAVTFVDNHDSQPEEALESFVDTWFKPLAYALTLTREQGYPSVFYGDYYGIPTHGVPAMRSKIDPILEARQKYAYGPQHDYLDHPDVIGWTREGDSSHPKSGLATLITDGPGGSKRMYAGLKNAGETWYDITGNRSDTVKIGSDGWGEFHVNGSSVSIYVQK

SEQ ID NO: 42155 - protein, 480 aa, Bacillus sp.
NGTMMQYFEWYLPNDGNHWNRLNSDASNLKSKGITAVWIPPAWKGASQNDVGYGAYDLYDLGEFNQKGTVRTKYGTRSQLQAAVTSLKNNGINVYGDVVMNHKGGADATEMVRAVEVNPNNRNQEVTGEYTIEAWTRFDFPGRGNTHSSFKWRWYHFDGVDWDQSRRLNNRIYKFRGHGKAWDWEVDTEFGNYDYLMYADYDMDHPEVVNELRNWGVWYTNTLGLDGFRIDAVKHIKYSFTRDWINHVRSATGKNMFAVAEFWKNDLGAIENYLQKTNWNHSVFDVPLHYNLYNASKSGGNYDMRNIFNGTVVQANPNHAVTFVDNHDSQPEEALESFVEEWFKPLAYALTLTREQGYPSVFYGDYYGIPTHGVPAMRSKIDPILEARQKYAYGPQHDYLDHPDVIGWTREGDSSHPKSGLATLITDGPGGSKRMYAGLKNAGETWYDITGNRSDTVKIGSDGWGEFHVNDGSVSIYVQK

SEQ ID NO: 42156 - protein, 480 aa, Bacillus sp.
NQTMMQYFEWYLPNDGNHWNRLNSDASNLKSKGITAVWIPPAWKGASQNDVGYGAYDLYDLGEFNQKGTVRTKYGTRSQLQAAVTSLKNNGITVYGDVVMNHKGGADATEMVRAVEVNPNNRNQEVTGEYTIEAWTRFDFPGRGNTHSSFKWRWYHFDGVDWDQSRRLNNRIYKFRGHGKAWDWEVDTEFGNYDYLMYADYDMDHPEVVNELRNWGVWYTNTLGLDGFRIDAVKHIKYSFTRDWINHVRSATGKNMFAVAEFWKNDLGAIENYLQKTNWNHSVFDVPLHYNLYNASKSGGNYDMRNIFNGTVVQAHPMHAVTFVDNHDSQPEEALESFVEEWFKPLAYALTLTREQGYPSVFYGDYYGIPTHGVPAMRSKIDPILEARQKYAYGPQHDYLDHPDVIGWTREGDSSHPKSGLATLITDGPGGSKRMYAGLKNAGETWYDITGNRSDTVKIGSDGWGEFHVNDGSVSIYVQK

SEQ ID NO: 42157 - protein, 480 aa, Bacillus sp.
NGTMMQYFEWYLPNDGNHWNRLNSDASNLKSKGITAVWIPPAWKATSQNDVGYGAYDLYDLGEFNQKGTVRTKYGTRSQLQAAVTSLKNNGIQVYGDVVMNHKGGADATEMVRAVEVNPNNRNQEVTGEYTIEAWTRFDFPGRGNTHSSFKWRWYHFDGVDWDQSRDLNNRIYKFRGHGKAWDWEVDTEFGNYDYLMYADYDMDHPEVVNELRNWGVWYTNTLGLDGFRIDAVKHIKYSFTRDWINHVRSATGKNMFAVAEFWKNDLGAIENYLQKTNWNHSVFDVPLHYNLYNASKSGGNYDMRNIFNGTVVQRHPSHAVTFVDNHDSQPEEALESFVDEWFKPLAYALTLTREQGYPSVFYGDYYGIPTHGVPAMRSKIDPILEARQKYAYGPQHDYLDHPDVIGWTREGDSSHPKSGLATLITDGPGGSKRMYAGLKNAGETWYDITGNRSDTVKIGSDGWGEFHVNKSSVSIYVQK

SEQ ID NO: 42158 - protein, 480 aa, Bacillus sp.
NGTMMQYFEWYLPNDGNHWNRLNSDASNLKSKGITAVWIPPAWKGASQNDVGYGAYDLYDLGEFNQKGTVRTKYGTRSQLQAAVTSLKNNGIQVYGDVVMNHKGGAHATEMVRAVEVNPNNRNQEVTGEYTIEAWTRFDFPGRGNTHSSFKWRWYHFDGVDWDQSRRLNNRIYKFRGHGKAWDWEVDTEFGNYDYLMYADYDMDHPEVVNELRNWGVWYTNTLGLDGFRIDAVKHIKYSFTRDWINHVRSATGKNMFAVAEFWKNDLGAIENYLQKTNWNHSVFDVPLHYNLYNASKSAGNYDMRNIFNGTVVQRHPSHAVTFVDNHDSQPEEALESFVDTWFKPLAYALTLTREQGYPSVFYGDYYGIPTHGVPAMRSKIDPILEARQKYAYGPQHDYLDHPDVIGWTREGDSSHPKSGLATLITDGPGGSKRMYAGLKNAGETWYDITGNRSDTVKIGSDGWGEFHVNQSSVSIYVQK

SEQ ID NO: 42159 - protein, 480 aa, Bacillus sp.
NGTMMQYFEWYLPNDGNHWNRLNSDASNLKSKGITAVWIPPAWKATSQNDVGYGAYDLYDLGEFNQKGTVRTKYGTRSQFQAAVTSLKNNGIQVYGDVVMNHKGGADATEMVRAVEVNPNNRNQEVTGEYTIEAWTRFDFPGRGNTHSSFKWRWYHFDGVDWDQSRNVNNRIYKFRGHGKAWDWEVDTEFGNYDYLMYADYDMDHPEVVNELRNWGVWYTNTLGLDGFRIDAVKHIKYSFTRDWINHVRSATGKNMFAVAEFWKNDLGAIENYLQKTNWNHSVFDVPLHYNLYNASKSGGNYDMRNIFNGTVVKAHPNHAVTFVDNHDSQPEEALESFVEEWFKPLAYALTLTREQGYPSVFYGDYYGIPTHGVPAMRSKIDPILEARQKYAYGPQHDYLDHPDVIGWTREGDSSHPKSGLATLITDGPGGSKRMYAGLKNAGETWYDITGNRSDTVKIGSDGWGEFHVNDGSVSIYVQK

SEQ ID NO: 42160 - protein, 480 aa, Bacillus sp.
NGTMMQYFEWYLPNDGNHWNRLNSDASNLKSKGITAVWIPPAWKAASQNDVGYGAYDLYDLGEFNQKGTVRTKYGTRSQLQAAVTSLKNNGIQVYGDVVMNHKGGADLTEMVRAVEVNPNNRNQEVTGEYTIEAWTRFDFPGRGNTHSSFKWRWYHFDGVDFDQSRQLNNRIYKFRGHGKAWDWEVDTEFGNYDYLMYADYDMDHPEVVNELRNWGVWYTNTLGLDGFRIDAVKHIKYSFTRDWINHVRSATGKNMFAVAEFWKNDLGAIENYLQKTNWNHSVFDVPLHYNLYNASKSGGNYDMRNIFNGTVVQRHPSHAVTFVDNHDSQPEEALESFVEEWFKPLAYALTLTREQGYPSVFYGDYYGIPTHGVPAMRSKIDPILEARQKYAYGPQHDYLDHPDVIGWTREGDSSHPKSGLATLITDGPGGSKRMYAGLKNAGETWYDITGNRSDTVKIGSDGWGEFHVNDGSVSIYVQK

SEQ ID NO: 42161 - protein, 480 aa, Bacillus sp.
NGTMMQYFEWYLPNDGNHWNRLNSDASNLKSKGITAVWIPPAWKGASQNDVGYGAYDLYDLGEFNQKGTVRTKYGTRSQLQAAVTSLKNNGIQVYGDVVMNHKGGADATEMVRAVEVNPNNRNQEVTGEYTIEAWTRFDFPGRGNTHSSFKWRWYHFDGVDWDQSRRLNNRIYKFRGHGKAWDWEVDTEFGNYDYLMYADYDMDHPEVVNELRNWGVWYTNTLGLDGFRIDAVKHIKYSFTRDWINHVRIATGKNMFAVAEFWKNDLGAIENYLQKTNWNHSVFDVPLHYNLYNASKSGGNYDMRNIFNGTVVQANPNHAVTFVDNHDSQPEEALESFVDEWFKPLAYALTLTREQGYPSVFYGDYYGIPTHGVPAMRSKIDPILEARQKYAYGPQHDYLDHPDVIGWTREGDSSHPKSGLATLITDGPGGSKRMYAGLKNAGETWYDITGNRSDTVKIGSDGWGEFHVNDQSVSIYVQK

SEQ ID NO: 42162 - protein, 480 aa, Bacillus sp.
NGTMMQYFEWYLPNDGNHWNRLNSDASNLKSKGITAVWIPPAWKAQSQNDVGYGAYDLYDLGEFNQKGTVRTKYGTRSQLQAAVTSLKNNGIQVYGDVVMNHKGGADATEMVRAVEVNPNNRNQEVTGEYTIEAWTRFDFPGRGNTHSSFKWRWYHFDGVDWDQSRQLNNRIYKFRGHGKAWDWEVDTEFGNYDYLMYADYDMDHPEVVNELRNWGVWYTNTLGLDGFRIDAVKHIKYSFTRDWINHVRSATGKNMFAVAEFWKNDLGAIENYLQKTNWNHSVFDVPLHYNLYNASKSQGNYDMRNIFNGTVVQRHPSHAVTFVDNHDSQPEEALESFVDTWFKPLAYALTLTREQGYPSVFYGDYYGIPTHGVPAMRSKIDPILEARQKYAYGPQHDYLDHPDVIGWTREGDSSHPKSGLATLITDGPGGSKRMYAGLKNAGETWYDITGNRSDTVKIGSDGWGEFHVNGSSVSIYVQK

SEQ ID NO: 42163 - protein, 480 aa, Bacillus sp.
NGTMMQYFEWYLPNDGNHWNRLNSDASNLKSKGITAVWIPPAWKGASQNDVGYGAYDLYDLGEFNQKGTVRTKYGTRSQLQAAVTSLKNNGIQVYGDVVMNHKGGADATEMVRAVEVNPNNRNQEVTGEYTIEAWTRFDFPGRGNTHSSFKWRWYHFDGVDWDQSRNLNNRIYKFRGHGKAWDWEVDTEFGNYDYLMYADIDYDHPETTNEMRNWGVWYTNTLGLDGFRIDAVKHIKYSFTRDWINHVRSATGKNMFAVAEFWKNDLGAIENYLQKTNWNHSVFDVPLHYNLYNASKSQGNYDMRNIFNGTVVQRHPSHAVTFVDNHDSQPEEALESFVDTWFKPLAYALTLTREQGYPSVFYGDYYGIPTHGVPAMRSKIDPILEARQKYAYGPQHDYLDHPDVIGWTREGDSSHPKSGLATLITDGPGGSKRMYAGLKNAGETWYDITGNRSDTVKIGSDGWGEFHVNGSSVSIYVQK

SEQ ID NO: 42164 - protein, 480 aa, Bacillus sp.
NGTMMQYFEWYLPNDGNHWNRLNSDASNLKSKGITAVWIPPAWKGASQNDVGYGAYDLYDLGEFNQKGTVRTKYGTRSQLQAAVTSLKNNGIQVYGDVVMNHKGGADATEMVRAVEVNPNNRNQEVTGEYTIEAWTRFDFPGRGNTHSSFKWRWYHFDGVDWDQSRRLNNRIYKFRGHGKAWDWEVDTEFGNYDYLMYADYDMDHPEVVNELRNWGVWYTNTLGLDGFRIDAVKHIKYSFTRDWINHVRSATGKNMFAVAEFWKNDLGAIENYLQKTNWNHSVFDVPLHYNLYNASQSQGNYDMRNIFNGTVVQRHPSHAVTFVDNHDSQPEEALESFVEEWFKPLAYALTLTREQGYPSVFYGDYYGIPTHGVPAMRSKIDPILEARQKYAYGPQHDYLDHPDVIGWTREGDSSHPKSGLATLITDGPGGSKRMYAGLKNAGETWYDITGNRSDTVKIGSDGWGEFHVNKKSVSIYVQK

SEQ ID NO: 42165 - protein, 480 aa, Bacillus sp.
NGTMMQYFEWYLPNDGNHWNRLNSDASNLKSKGITAVWIPPAWKAVSQNDVGYGAYDLYDLGEFNQKGTVRTKYGTRSQLQAAVTSLKNNGIQVYGDVVMNHKGGADATEMVRAVEVNPNNRNQEVTGEYTIEAWTRFDFPGRGNTHSSFKWRWYHFDGVDWDQSRDLENRIYKFRGHGKAWDWEVDTEFGNYDYLMYADYDMDHPEVVNELRNWGVWYTNTLGLDGFRIDAVKHIKYSFTRDWINHVRSATGKNMFAVAEFWKNDLGAIENYLQKTNWNHSVFDVPLHYNLYNASKSGGNYDMRNIFNGTVVQVHPSHAVTFVDNHDSQPEEALESFVEEWFKPLAYALTLTREQGYPSVFYGDYYGIPTHGVPAMRSKIDPILEARQKYAYGPQHDYLDHPDVIGWTREGDSSHPKSGLATLITDGPGGSKRMYAGLKNAGETWYDITGNRSDTVKIGSDGWGEFHVNYGSVSIYVQK

SEQ ID NO: 42166 - protein, 480 aa, Bacillus sp.
NGTMMQYFEWYLPNDGNHWNRLNSDASNLKSKGITAVWIPPAWKGASQNDVGYGAYDLYDLGEFNQKGTVRTKYGTRSQLQAAVTSLKNNGIQVYGDVVMNHKGGADATEMVRAVEVNPNNRNQEVTGEYTIEAWTRFDFPGRGNTHSSFKWRWYHFDGVDWDQSRRTNNRIYKFRGHGKAWDWEVDTEFGNYDYLMYTDYDMDHPEVVNELRNWGVWYTNTLGLDGFRIDAVKHIKYSFTRDWINHVRSATGKNMFAVAEFWKNDLGAIENYLQKTNWNHSVFDVPLHYNLYNASQSGGNYDMRNIFNGTVVQRHPSHAVTFVDNHDSQPEEALESFVEPWFKPLAYALTLTREQGYPSVFYGDYYGIPTHGVPAMRSKIDPILEARQKYAYGPQHDYLDHPDVIGWTREGDSSHPKSGLATLITDGPGGSKRMYAGLKNAGETWYDITGNRSDTVKIGSDGWGEFHVNKSSVSIYVQK

SEQ ID NO: 42167 - protein, 480 aa, Bacillus sp.
NGTMMQYFEWYLPNDGNHWNRLNSDASNLKSKGITAVWIPPAWKGASQNDVGYGAYDLYDLGEFNQKGTVRTKYGTRSQLQAAVTSLKNNGIQVYGDVVMNHKGGADATEMVRAVEVNPNNRNQEVTGEYTIEAWTRFDFPGRGNTHSSFKWRWYHFDGVDWDQSRELDNRIYKFRGHGKAWDWEVDTEFGNYDYLMYTDYDMDHPEVVNELRNWGVWYTNTLGLDGFRIDAVKHIKYSFTRDWINHVRSATGKNMFAVAEFWKNDLGAIENYLQKTNWNHSVFDVPLHYNLYNASKSQGNYDMRNIFNGTVVQRHPSHAVTFVDNHDSQPEEALESFVDTWFKPLAYALTLTREQGYPSVFYGDYYGIPTHGVPAMRSKIDPILLARQKYAYGPQHDYLDHPDVIGWTREGDSSHPKSGLATLITDGPGGSKRMYAGLKNAGETWYDITGNRSDTVKIGSDGWGEFHVNGSSVSIYVQK

SEQ ID NO: 42168 - protein, 480 aa, Bacillus sp.
NGTMMQYFEWYLPNDGNHWNRLNSDASNLKSKGITAVWIPPAWKGASQNDVGYGAYDLYDLGEFNQKGTVRTKYGTRSQLQAAVTSLKNNGIQVYGDVVMNHKGGADATEMVRAVEVNPNNRNQEVTGEYTIEAWTRFDFPGRGNTHSSFKWRWYHFDGVDWDQSRNFQNRIYKFRGHGKAWDWEVDTEFGNYDYLMYADIDYDHPESTNEMRNWGVWYTNTLGLDGFRIDAVKHIKYSFTRDWINHVRSATGKNMFAVAEFWKNDLGAIENYLQKTNWNHSVFDVPLHYNLYNASKSQGNYDMRNIFNGTVVQRHPSHAVTFVDNHDSQPEEALESFVDTWFKPLAYALTLTREQGYPSVFYGDYYGIPTHGVPAMRSKIDPILEARQKYAYGPQHDYLDHPDVIGWTREGDSSHPKSGLATLITDGPGGSKRMYAGLKNAGETWYDITGNRSDTVKIGSDGWGEFHVNGSSVSIYVQK

SEQ ID NO: 42169 - protein, 480 aa, Bacillus sp.
NGTMMQYFEWYLPNDGNHWNRLNSDASNLKSKGITAVWIPPAWKAVSQNDVGYGAYDLYDLGEFNQKGTVRTKYGTRSQLQAAVTSLKNNGIQVYGDVVMNHKGGADATEMVDAVEVNPNNRNQEVTGEYTIEAWTRFDFPGRGNTHSSFKWRWYHFDGVDFDQSRNLTNRIYKFRGHGKAWDWEVDTEFGNYDYLMYTDYDMDHPEVVNELRNWGVWYTNTLGLDGFRIDAVKHIKYSFTRDWINHVRSATGKNMFAVAEFWKNDLGAIENYLQKTNWNHSVFDVPLHYNLYNASKSGGNYDMRNIFNGTVVQRHPSHAVTFVDNHDSQPEEALESFVEEWFKPLAYALTLTREQGYPSVFYGDYYGIPTHGVPAMRSKIDPILEARQKYAYGPQHDYLDHPDVIGWTREGDSSHPKSGLATLITDGPGGSKRMYAGLKNAGETWYDITGNRSDTVKIGSDGWGEFHVNDGSVSIYVQK

SEQ ID NO: 42170 - protein, 480 aa, Bacillus sp.
NGTMMQYFEWYLPNDGNHWNRLNSDASNLKSKGITAVWIPPAWKGASQNDVGYGAYDLYDLGEFNQKGTVRTKYGTRSQLQAAVTSLKNNGIQVYGDVVMNHKGGADATEMVRAVEVNPNNRNQEVTGEYTIEAWTRFDFPGRGNTHSSFKWRWYHFDGVDWDQSRRLNNRIYKFRGHGKAWDWEVDTEFGNYDYLMYADYDMDHPEVVNELRNWGVWYTNTLGLDGFRIDAVKHIKYSFTRDWINHVRSATGKNMFAVAEFWKNDLGAIENYLQKTNWNHSVFDVPLHYNLYNASKSGGNYDMRNIFNGTVVQRHPSHAVTFVDNHDSQPEEALESFVEPWFKPLAYALTLTREQGYPSVFYGDYYGIPTHGVPAMRSKIDPILEARQKYAYGPQHDYLDHPDVIGWTREGDSSHPKSGLATLITDGPGGSKRMYAGLKNAGETWYDITGNRSDTVKIGSDGWGEFHVNGQSVFIYVQK

SEQ ID NO: 42171 - protein, 480 aa, Bacillus sp.
NGTMMQYFEWYLPNDGNHWNRLNSDASNLKSKGITAVWIPPAWKAASQNDVGYGAYDLYDLGEFNQKGTVRTKYGTRSQLQAAVTSLKNNGIQVYGDVVMNHKGGADATEMVRAVEVNPNNRNQEVTGEYTIEAWTRFDFPGRGNTHSSFKWRWYHFDGVDWDQSRDLQNRIYKFRGHGKAWDWEVDTEFGNYDYLMYADYDMDHPEVVNELRNWGVWYTNTLGLDGFRIDAVKHIKYSFTRDWINHVRSATGKNMFAVAEFWKNDLGAIENYLQKTNWNHSVFDVPLHYNLYNASKSGGNYDMRNIFNGTVVQAHPMHAVTFVDNHDSQPEEALESFVEEWFKPLAYALTLTREQGYPSVFYGDYYGIPTHGVPAMRSKIDPILEARQKYAYGPQHDYLDHPDVIGWTREGDSSHPKSGLATLITDGPGGSKRMYAGLKNAGETWYDITGNRSDTVKIGSDGWGEFHVNYGSVSIYVQK

SEQ ID NO: 42172 - protein, 480 aa, Bacillus sp.
NGTMMQYFEWYLPNDGNHWNRLNSDASNLKSKGITAVWIPPAWKAASQNDVGYGAYDLYDLGEFNQKGTVRTKYGTRSQLQAAVTSLKNNGIQVYGDVVMNHKGGADATEMVRAVEVNPNNRNQEVTGEYTIEAWTRFDFPGRGNTHSSFKWRWYHFDGVDWDQSRDLQNRIYKFRGHGKAWDWEVDTEFGNYDYLMYVDYDMDHPEVVNELRNWGVWYTNTLGLDGFRIDAVKHIKYSFTRDWINHVRSATGKNMFAVAEFWKNDLGAIENYLQKTNWNHSVFDVPLHYNLYNASKSGGNYDMRNIFNGTVVQAHPNHAVTFVDNHDSQPEEALESFVEEWFKPLAYALTLTREQGYPSVFYGDYYGIPTHGVPAMRSKIDPILEARQKYAYGPQHDYLDHPDVIGWTREGDSSHPKSGLATLITDGPGGSKRMYAGLKNAGETWYDITGNRSDTVKIGSDGWGEFHVNDGSVSIYVQK

SEQ ID NO: 42173 - protein, 480 aa, Bacillus sp.
NGTMMQYFEWYLPNDGNHWNRLNSDASNLKSKGITAVWIPPAWKAVSQNDVGYGAYDLYDLGEFNQKGTVRTKYGTRSQLQAAVTSLKNNGIQVYGDVVMNHKGGADLTEMVRAVEVNPNNRNQEVTGEYTIEAWTRFDFPGRGNTHSSFKWRWYHFDGVDWDQSRNLTNRIYKFRGHGKAWDWEVDTEFGNYDYLMYTDYDMDHPEVVNELRNWGVWYTNTLGLDGFRIDAVKHIKYSFTRDWINHVRSATGKNMFAVAEFWKNDLGAIENYLQKTNWNHSVFDVPLHYNLYNASKSGGNYDMRNIFNGTVVQRHPSHAVTFVDNHDSQPEEALESFVEEWFKPLAYALTLTREQGYPSVFYGDYYGIPTHGVPAMRSKIDPILEARQKYAYGPQHDYLDHPDVIGWTREGDSSHPKSGLATLITDGPGGSKRMYAGLKNAGETWYDITGNRSDTVKIGSDGWGEFHVNDGSVSIYVQK

SEQ ID NO: 42174 - protein, 480 aa, Bacillus sp.
NHTMMQYFEWYLPNDGNHWNRLNSDASNLKSKGITAVWIPPAWKGASQNDVGYGAYDLYDLGEFNQKGTVRTKYGTRSQLQAAVTSLKNNGISVYGDVVMNHKGGADATEMVRAVEVNPNNRNQEVTGEYTIEAWTRFDFPGRGNTHSSFKWRWYHFDGVDWDQSRRLNNRIYKFRGHGKAWDWEVDTEFGNYDYLMYADYDMDHPEVVNELRNWGVWYTNTLGLDGFRIDAVKHIKYSFTRDWINHVRSATGKNMFAVAEFWKNDLGAIENYLQKTNWNHSVFDVPLHYNLYNASKSGGNYDMRNIFNGTVVQAHPMLAVTFVDNHDSQPEEALESFVEEWFKPLAYALTLTREQGYPSVFYGDYYGIPTHGVPAMRSKIDPILEARQKYAYGPQHDYLDHPDVIGWTREGDSSHPKSGLATLITDGPGGSKRMYAGLKNAGETWYDITGNRSDTVKIGSDGWGEFHVNDGSVSIYVQK

SEQ ID NO: 42175 - protein, 480 aa, Bacillus sp.
NGTMMQYFEWYLPNDGNHWNRLNSDASNLKSKGITAVWIPPAWKGASQNDVGYGAYDLYDLGEFNQKGTVRTKYGTRSQLQAAVTSLKNNGIQVYGDVVMNHKGGADATEMVRAVEVNPNNRNQEVTGEYTIEAWTRFDFPGRGNTHSSFKWRWYHFDGVDWDQSRRLNNRIYKFRGHGKAWDWEVDTEFGNYDYLMYADYDMDHPEVVNELRNWGVWYTNTLGLDGFRIDAVKHIKYSFTRDWINHVRSATGKNMFAVAEFWKNDLGAIENYLQKTNWNHSVFDVPLHYNLYNASKSAGNYDMRNIFNGTVVQRHPSHAVTFVDNHDSQPEEALESFVDEWFKPLAYALTLTREQGYPSVFYGDYYGIPTHGVPAMRSKIDPILEARQKYAYGPQHDYLDHPDVIGWTREGDSSHPKSGLATLITDGPGGSKRMYAGLKNAGETWYDITGNRSDTVKIGSDGWGEFHVNQASVSIYVQK

SEQ ID NO: 42176 - protein, 480 aa, Bacillus sp.
NGTMMQYFEWYLPNDGNHWNRLNSDASNLKSKGITAVWIPPAWKGASQNDVGYGAYDLYDLGEFNQKGTVRTKYGTRSQLQAAVTSLKNNGIQVYGDVVMNHKGGADATEMVRAVEVNPNNRNQEVTGEYTIEAYTRFDFPGRGNTHSSFKWRWYHFDGVDFDQSRRLNNRIYKFRGHGKAWDWEVDTEFGNYDYLMYADYDMDHPEVVNELRNWGVWYTNTLGLDGFRIDAVKHIKYSFTRDWINHVRIATGKNMFAVAEFWKNDLGAIENYLQKTNWNHSVFDVPLHYNLYNASKSGGNYDMRNIFNGTVVQRHPSHAVTFVDNHDSQPEEALESFVDEWFKPLAYALTLTREQGYPSVFYGDYYGIPTHGVPAMRSKIDPILEARQKYAYGPQHDYLDHPDVIGWTREGDSSHPKSGLATLITDGPGGSKRMYAGLKNAGETWYDITGNRSDTVKIGSDGWGEFHVNDQSVSIYVQK

SEQ ID NO: 42177 - protein, 480 aa, Bacillus sp.
NGTMMQYFEWYLPNDGNHWNRLNSDASNLKSKGITAVWIPPAWKATSQNDVGYGAYDLYDLGEFNQKGTVRTKYGTRSQLQAAVTSLKNNGIQVYGDVVMNHKGGADATEMVRAVEVNPNNRNQEVTGEYTIEAWTRFDFPGRANTHSSFKWRWYHFDGVDFDQSRNVNNRIYKFRGHGKAWDWEVDTEFGNYDYLMYADYDMDHPEVVNELRNWGVWYTNTLGLDGFRIDAVKHIKYSFTRDWINHVRSATGKNMFAVAEFWKNDLGAIENYLQKTNWNHSVFDVPLHYNLYNASKSGGNYDMRNIFNGTVVQRHPSHAVTFVDNHDSQPEEALESFVEEWFKPLAYALTLTREQGYPSVFYGDYYGIPTHGVPAMRSKIDPILEARQKYAYGPQHDYLDHPDVIGWTREGDSSHPKSGLATLITDGPGGSKRMYAGLKNAGETWYDITGNRSDTVKIGSDGWGEFHVNDGSVSIYVQK

SEQ ID NO: 42178 - protein, 480 aa, Bacillus sp.
NGTMMQYFEWYLPNDGNHWNRLNSDASNLKSKGITAVWIPPAWKATSQNDVGYGAYDLYDLGEFNQKGTVRTKYGTRSQLQAAVTSLKNNGIQVYGDVVMNHKGGADATEMVPAVEVNPNNRNQEVTGEYTIEAWTRFDFPGRGNTHSSFKWRWYHFDGVDWDQSRELNNRIYKFRGHSKAWDWEVDTEFGNYDYLMYTDYDMDHPEVVNELRNWGVWYTNTLGLDGFRIDAVKHIKYSFTRDWINHVRSATGKNMFAVAEFWKNDLGAIENYLQKTNWNHSVFDVPLHYNLYNASKSGGNYDMRNIFNGTVVQRHPSHAVTFVDNHDSQPEEALESFVEEWFKPLAYALTLTREQGYPSVFYGDYYGIPTHGVPAMRSKIDPILEARQKYAYGPQHDYLDHPDVIGWTREGDSSHPKSGLATLITDGPGGSKRMYAGLKNAGETWYDITGNRSDTVKIGSDGWGEFHVNDGSVSIYVQK

SEQ ID NO: 42179 - protein, 480 aa, Bacillus sp.
NGTMMQYFEWYLPNDGNHWNRLNSDASNLKSKGITAVWIPPAWKAASQNDVGYGAYDLYDLGEFNQKGTVRTKYGTRSQLQAAVTSLKNNGIQVYGDVVMNHKGGADATEMVRAVEVNPNNRNQEVTGEYTIEAYTRFDFPGRGNTHSSFKWRWYHFDGVDWDQSRNLNNRIYKFRGHGKAWDWEVDTEFGNYDYLMYTDYDMDHPEVVNELRNWGVWYTNTLGLDGFRIDAVKHIKYSFTRDWINHVRSATGKNMFAVAEFWKNDLGAIENYLQKTNWNHSVFDVPLHYNLYNASKSGGNYDMRNIFNGTVVQRHPSHAVTFVDNHDSQPEEALESFVEEWFKPLAYALTLTREQGYPSVFYGDYYGIPTHGVPAMRSKIDPILEARQKYAYGPQHDYLDHPDVIGWTREGDSSHPKSGLATLITDGPGGSKRMYAGLKNAGETWYDITGNRSDTVKIGSDGWGEFHVNDGSVSIYVQK

SEQ ID NO: 42180 - protein, 480 aa, Bacillus sp.
NGTMMQYFEWYLPNDGNHWNRLNSDASNLKSKGITAVWIPPAWKGASQNDVGYGAYDLYDLGEFNQKGTVRTKYGTRSQLQAAVTSLKNNGIQVYGDVVMNHKGGADATEMVRAVEVNPNNRNQEVTGEYTIEAWTRFDFPGRGNTHSSFKWRWYHFDGVDWDQSRRLNNRIYKFRGHGKAWDWEVDTEFGNYDYLMYADYDMDHPEVVNELRNWGVWYTNTLGLDGFRIDAVKHIKYSFTRDWINHVRSATGKNMFAVAEFWKNDLGAIENYLQKTNWNHSVFDVPLHYNLYNASKSQGNYDMRNIFNGTVVQRHPSHAVTFVDNHDSQPEEALESFVDPWFKPLAYALTLTREQGYPSVFYGDYYGIPTHGVPAMRSKIDPILEARQKYAYGPQHDYLDHPDVIGWTREGDSSHPKSGLATLITDGPGGSKRMYAGLKNAGETWYDITGNRSDTVKIGSDGWGEFHVNGTSVSIYVQK

SEQ ID NO: 42181 - protein, 480 aa, Bacillus sp.
NGTMMQYFEWYLPNDGNHWNRLNSDASNLKSKGITAVWIPPAWKGASQNDVGYGAYDLYDLGEFNQKGTVRTKYGTRSQLQAAVTSLKNNGIQVYGDVVMNHKGGADATEMVRAVEVNPNNRNQEVTGEYTIEAWTRFDFPGRGNTHSSFKWRWYHFDGVDWDQSRRLNNRIYKFRGHGKAWDWEVDTEFGNYDYLMYADYDMDHPEVVNELRNWGVWYTNTLGLDGFRIDAVKHIKYSFTRDWINHVRSATGKNMFAVAEFWKNDLGAIENYLQKTNWNHSVFDVPLHYNLYNASKSGNNYDMRNIFNGTVVQRHPSHAVTFVDNHDSQPEEALESFVEPWFKPLAYALTLTREQGYPSVFYGDYYGIPTHGVPAMRSKIDPILEARQKYAYGPQHDYLDHPDVIGWTREGDSSHPKSGLATLITDGPGGSKRMYAGLKNAGETWYDITGNRSDTVKIGSDGWGEFHVNKTSVSIYVQK

SEQ ID NO: 42182 - protein, 480 aa, Bacillus sp.
NGTMMQYFEWYLPNDGNHWNRLNSDASNLKSKGITAVWIPPAWKGASQNDVGYGAYDLYDLGEFNQKGTVRTKYGTRSQLQAAVTSLKNNGIQVYGDVVMNHKGGADATEMVRAVEVNPNNRNQEVTGEYTIEAWTRFDFPGRGNTHSSFKWRWYHFDGVDWDQSRRLNNRIYKFRGHGKAWDWEVDTEFGNYDYLMYADYDMDHPEVVNELRNWGVWYTNTLGLDGFRIDAVKHIKYSFTRDWINHVRSATGKNMFAVAEFWKNDLGAIENYLQKTNWNHSVFDVPLHYNLYNASKSAGNYDMRNIFNGTVVQRHPSHAVTFVDNHDSQPEEALESFVDEWFKPLAYALTLTREQGYPSVFYGDYYGIPTHGVPAMRSKIDPILEARQKYAYGPQHDYLDHPDVIGWTREGDSSHPKSGLATLITDGPGGSKRMYAGLKNAGETWYDITGNRSDTVKIGSDGWGEFHVNQQSVSIYVQK

SEQ ID NO: 42183 - protein, 480 aa, Bacillus sp.
NGTMMQYFEWYLPNDGNHWNRLNSDASNLKSKGITAVWIPPAWKGASQNDVGYGAYDLYDLGEFNQKGTVRTKYGTRSQLQAAVTSLKNNGIQVYGDVVMNHKGGADATEMVRAVEVNPNNRNQEVTGEYTIEAYTRFDFPGRGNTHSSFKWRWYHFDGVDFDQSRRLNNRIYKFRGHGKAWDWEVDTEFGNYDYLMYVDYDMDHPEVVNELRNWGVWYTNTLGLDGFRIDAVKHIKYSFTRDWINHVRSATGKNMFAVAEFWKNDLGAIENYLQKTNWNHSVFDVPLHYNLYNASKSGGNYDMRNIFNGTVVQRHPSHAVTFVDNHDSQPEEALESFVEEWFKPLAYALTLTREQGYPSVFYGDYYGIPTHGVPAMRSKIDPILEARQKYAYGPQHDYLDHPDVIGWTREGDSSHPKSGLATLITDGPGGSKRMYAGLKNAGETWYDITGNRSDTVKIGSDGWGEFHVNDGSVSIYVQK

SEQ ID NO: 42184 - protein, 480 aa, Synthetic construct
NGTMMQYFEWYLPNDGNHWNRLNSDASNLKSKGITAVWIPPAWKGASQNDVGYGAYDLYDLGEFNQKGTVRTKYGTRSQLQAAVTSLKNNGIQVYGDVVMNHKGGADATEMVRAVEVNPNNRNQEVTGEYTIEAWTRFDFPGRGNTHSSFKWRWYHFDGVDWDQSRRLNNRIYLFRCHGKKWDWPVDTENGNYDYLMYADIDMDHPEVVNELRNWGVWYTNTLGLDGFRIDAVKHIKYSFTRDWINHVRSATGKNMFAVAEFWKNDLGAIENYLQKTNWNHSVFDVPLHYNLYNASKSGGNYDMRNIFNGTVVQRHPSHAVTFVDNHDSQPEEALESFVEEWFKPLAYALTLTREQGYPSVFYGDYYGIPTHGVPAMRSKIDPILEARQKYAYGPQHDYLDHPDVIGWTREGDSSHPKSGLATLITDGPGGSKRMYAGLKNAGETWYDITGNRSDTVKIGSDGWGEFHVNDGSVSIYVQK

SEQ ID NO: 42185 - protein, 480 aa, Bacillus sp.
NGTMMQYFEWYLPNDGNHWNRLNSDASNLKSKGITAVWIPPAWKGTSQNDVGYGAYDLYDLGEFNQKGTVRTKYGTRSQLQAAVTSLKNNGIQVYGDVVMNHKGGADATEMVRAVEVNPNNRNQEVTGEYTIEAWTRFDFPGRGNTHSSFKWRWYHFDGVDWDQSRNLNNRIYKFRGHGKAWDWEVDTEFGNYDYLMYVDYDMDHPEVVNELRNWGVWYTNTLGLDGFRIDAVKHIKYSFTRDWINHVRSATGKNMFAVAEFWKNDLGAIENYLQKTNWNHSVFDVPLHYNLYNASKSQGNYDMRNIFNGTVVQRHPSHAVTFVDNHDSQPEEALESFVDTWFKPLAYALTLTREQGYPSVFYGDYYGIPTHGVPAMRSKIDPILLARQKYAYGPQHDYLDHPDVIGWTREGDSSHPKSGLATLITDGPGGSKRMYAGLKNAGETWYDITGNRSDTVKIGSDGWGEFHVNGSSVSIYVQK

SEQ ID NO: 42186 - protein, 479 aa, Bacillus sp.
NGTMMQYFEWYLPNDGNHWNRLNSDASNLKSKGITAVWIPPAWKAVSQNDVGYGAYDLYDLGEFNQKGTVRTKYGTRSQLQAAVTSLKNNGIQVYGDVVMNHKGGADATEMVRAVEVNPNNRNQEVTGEYTIEAWTRFDFPGRGNTHSSFKWRWYHFDGVDWDQSRQTNRIYKFRGHGKAWDWEVDTEFGNYDYLMYADYDMDHPEVVNELRNWGVWYTNTLGLDGFRIDAVKHIKYSFTRDWINHVRSATGKNMFAVAEFWKNDLGAIENYLQKTNWNHSVFDVPLHYNLYNASKSGSNYDMRNIFNGTVVQRHPSHAVTFVDNHDSQPEEALESFVEPWFKPLAYALTLTREQGYPSVFYGDYYGIPTHGVPAMRSKIDPILEARQKYAYGPQHDYLDHPDVIGWTREGDSSHPKSGLATLITDGPGGSKRMYAGLKNAGETWYDITGNRSDTVKIGSDGWGEFHVNDTSVSIYVQK

SEQ ID NO: 42187 - protein, 480 aa, Bacillus sp.
NGTMMQYFEWYLPNDGNHWNRLNSDASNLKSKGITAVWIPPAWKGASQNDVGYGAYDLYDLGEFNQKGTVRTKYGTRSQLQAAVTSLKNNGIQVYGDVVMNHKGGADATEMVRAVEVNPNNRNQEVTGEYTIEAWTRFDFPGRGNTHSSFKWRWYHFDGVDWDQSRRLNNRIYKFRGHGKAWDWEVDTEFGNYDYLMYADYDMDHPEVVNELRNWGVWYTNTLGLDGFRIDAVKHIKYSFTRDWINHVRSATGKNMFAVAEFWKNDLGAIENYLQKTNWNHSVFDVPLHYNLYNASKSAGNYDMRNIFNGTVVQRHPSHAVTFVDNHDSQPEEALESFVDPWFKPLAYALTLTREQGYPSVFYGDYYGIPTHGVPAMRSKIDPILEARQKYAYGPQHDYLDHPDVIGWTREGDSSHPKSGLATLITDGPGGSKRMYAGLKNAGETWYDITGNRSDTVKIGSDGWGEFHVNGKSVSIYVQK

SEQ ID NO: 42188 - protein, 480 aa, Bacillus sp.
NKTMMQYFEWYLPNDGNHWNRLNSDASNLKSKGITAVWIPPAWKGASQNDVGYGAYDLYDLGEFNQKGTVRTKYGTRSQLQAAVTSLKNNGIQVYGDVVMNHKGGADATEMVRAVEVNPNNRNQEVTGEYTIEAWTRFDFPGRGNTHSSFKWRWYHFDGVDWDQSRRLNNRIYKFRGHGKAWDWEVDTEFGNYDYLMYADYDMDHPEVVNELRNWGVWYTNTLGLDGFRIDAVKHIKYSFTRDWINHVRSATGKNMFAVAEFWKNDLGAIENYLQKTNWNHSVFDVPLHYNLYNASKSGGNYDMRNIFNGTVVQAHPSHAVTFVDNHDSQPEEALESFVEEWFKPLAYALTLTREQGYPSVFYGDYYGIPTHGVPAMRSKIDPILEARQKYAYGPQHDYLDHQDVIGWTREGDSSHPKSGLATLITDGPGGSKRMYAGLKNAGETWYDITGNRSDTVKIGSDGWGEFHVNDGSVSIYVQK

SEQ ID NO: 42189 - protein, 480 aa, Bacillus sp.
NGTMMQYFEWYLPNDGNHWNRLNSDASNLKSKGITAVWIPPAWKGASQNDVGYGAYDLYDLGEFNQKGTVRTKYGTRSQLQAAVTSLKNNGIQVYGDVVMNHKGGADATEMVRAVEVNPNNRNQEVTGEYTIEAWTRFDFPGRGNTHSSFKWRWYHFDGVDFDQSRDLTNRIYKFRGHGKAWDWEVDTEFGNYDYLMYVDYDMDHPEVVNELRNWGVWYTNTLGLDGFRIDAVKHIKYSFTRDWINHVRIATGKNMFAVAEFWKNDLGAIENYLQKTNWNHSVFDVPLHYNLYNASKSGGNYDMRNIFNGTVVQRHPSHAVTFVDNHDSQPEEALESFVDEWFKPLAYALTLTREQGYPSVFYGDYYGIPTHGVPAMRSKIDPILEARQKYAYGPQHDYLDHPDVIGWTREGDSSHPKSGLATLITDGPGGSKRMYAGLKNAGETWYDITGNRSDTVKIGSDGWGEFHVNDQSVSIYVQK

SEQ ID NO: 42190 - protein, 480 aa, Bacillus sp.
NGTMMQYFEWDLPNDGNHWNRLNSDASNLKSKGIKAVWIPPAWKAASQNDVGYGAYDLYDLGEFNQKGTVRTKYGTRSQLQAAVTSLKNNGIQVYGDVVMNHKGGADATEMVRAVEVNPNNRNQEVTGEYTIEAWTRFDFPGRGNTHSSFKWRWYHFDGVDWDQSRNLSNRIYKFRGHGKAWDWEVDTEFGNYDYLMYTDYDMDHPEVVNELRNWGVWYTNTLGLDGFRIDAVKHIKYSFTRDWINHVRSATGKNMFAVAEFWKNDLGAIENYLQKTNWNHSVFDVPLHYNLYNASKSGGNYDMRNIFNGTVVQRHPSHAVTFVDNHDSQPEEALESFVEEWFKPLAYALTLTREQGYPSVFYGDYYGIPTHGVPAMRSKIDPILEARQKYAYGPQHDYLDHPDVIGWTREGDSSHPKSGLATLITDGPGGSKRMYAGLKNAGETWYDITGNRSDTVKIGSDGWGEFHVNDGSVSIYVQK

SEQ ID NO: 42191 - protein, 480 aa, Bacillus sp.
NGTMMQYFEWYLPNDGNHWNRLNSDASNLKSKGITAVWIPPAWKATSQNDVGYGAYDLYDLGEFNQHGTVRTKYGTRSQLQAAVTSLKNNGIQVYGDVVMNHKGGADATEMVRAVEVNPNNRNQEVTGEYTIEAWTRFDFPGRGNTHSSFKWRWYHFDGVDWDQSRQLQNRIYKFRGHGKAWDWEVDTEFGNYDYLMYVDYDMDHPEVVNELRNWGVWYTNTLGLDGFRIDAVKHIKYSFTRDWINHVRSATGKNMFAVAEFWKNDLGAIENYLQKTNWNHSVFDVPLHYNLYNASKSGGNYDMRNIFNGTVVQRHPSHAVTFVDNHDSQPEEALESFVEEWFKPLAYALTLTREQGYPSVFYGDYYGIPTHGVPAMRSKIDPILEARQKYAYGPQHDYLDHPDVIGWTREGDSSHPKSGLATLITDGPGGSKRMYAGLKNAGETWYDITGNRSDTVKIGSDGWGEFHVNDGSVSIYVQK

SEQ ID NO: 42192 - protein, 480 aa, Synthetic construct
NGTMMQYFEWYLPNDGNHWNRLNSDASNLKSKGITAVWIPPAWKGASQNDVGYGAYDLYDLGEFNQKGTVRTKYGTRSQLQAAVTSLKNNGIQVYGDVVMNHKGGADATEMVRAVEVNPNNRNQEVTGEYTIEAWTRFDFPGRGNTHSSFKWRWYHFDGVDWDQSRRLNNRIYLFRPHGKSWDWPVDTENGNYDYLMYADIDMDHPEVVNELRNWGVWYTNTLGLDGFRIDAVKHIKYSFTRDWINHVRSATGKNMFAVAEFWKNDLGAIENYLQKTNWNHSVFDVPLHYNLYNASKSGGNYDMRNIFNGTVVQRHPSHAVTFVDNHDSQPEEALESFVEEWFKPLAYALTLTREQGYPSVFYGDYYGIPTHGVPAMRSKIDPILEARQKYAYGPQHDYLDHPDVIGWTREGDSSHPKSGLATLITDGPGGSKRMYAGLKNAGETWYDITGNRSDTVKIGSDGWGEFHVNDGSVSIYVQK

SEQ ID NO: 42193 - protein, 480 aa, Bacillus sp.
NNTMMQYFEWYLPNDGNHWNRLNSDASNLKSKGITAVWIPPAWKGASQNDVGYGAYDLYDLGEFNQKGTVRTKYGTRSQLQAAVTSLKNNGISVYGDVVMNHKGGADATEMVRAVEVNPNNRNQEVTGEYTIEAWTRFDFPGRGNTHSSFKWRWYHFDGVDWDQSRRLNNRIYKFRGHGKAWDWEVDTEFGNYDYLMYADYDMDHPEVVNELRNWGVWYTNTLGLDGFRIDAVKHIKYSFTRDWINHVRSATGKNMFAVAEFWKNDLGAIENYLQKTNWNHSVFDVPLHYNLYNASKSGGNYDMRNIFNGTVVQMHPNHAVTFVDNHDSQPEEALESFVEEWFKPLAYALTLTREQGYPSVFYGDYYGIPTHGVPAMRSKIDPILEARQKYAYGPQHDYLDHPDVIGWTREGDSSHPKSGLATLITDGPGGSKRMYAGLKNAGETWYDITGNRSDTVKIGSDGWGEFHVNDGSVSIYVQK

SEQ ID NO: 42194 - protein, 480 aa, Bacillus sp.
NGTMMQYFEWYLPNDGNHWNRLNSDASNLKSKGITAVWIPPAWKATSQNDVGYGAYDLYDLGEFNQKGTVRTKYGTRSQLQAAVTSLKNNGIQVYGDVVMNHKGGADATEMVRAVEVNPNNRNQEVTGEYTIEAWTRFDFPGRGNTHSSFKWRWYHFDGVDWDQSRNVNNRIYKFRGHGKAWDWEVDTEFGNYDYLMYADYDMDHPEVVNELRNWGVWYTNTLGLDGFRIDAVKHIKYSFTRDWINHVRSATGKNMFAVAEFWKNDLGAIENYLQKTNWNHSVFDVPLHYNLYNASKSGGNYDMRNIFNGTVVQVHPSHAVTFVDNHDSQPEEALESFVEEWFKPLAYALTLTREQGYPSVFYGDYYGIPTHGVPAMRSKIDPILEARQKYAYGPQHDYLDHPDVIGWTREGDSSHPKSGLATLITDGPGGSKRMYAGLKNAGETWYDITGNRSDTVKIGSDGWGEFHVNYGSVSIYVQK

SEQ ID NO: 42195 - protein, 480 aa, Bacillus sp.
NGTMMQYFEWYLPNDGNHWNRLNSDASNLKSKGITAVWIPPAWKAVSQNDVGYGAYDLYDLGEFNQKGTVRTKYGTRSQLQAAVTSLKNNGIQVYGDVVMNHKGGADATEMVRAVEVNPNNRNQEVTGEYTIEAWTRFDFPGRGNTHSSFKWRWYHFDGVDWDQSRNLTNRIYKFRGHGKAWDWEVDTEFGNYDYLMYTDYDMDHPEVVNELRNWGVWYTNTLGLDGFRIDAVKHIKYSFTRDWINHVRSATGKNMFAVAEFWKNDLGAIENYLQKTNWNHSVFDVPLHYNLYNASKSGGNYDMRNIFNGTVVQRHPSHAVTFVDNHDSQPEEALESFVDPWFKPLAYALTLTREQGYPSVFYGDYYGIPTHGVPAMRSKIDPILEARQKYAYGPQHDYLDHPDVIGWTREGDSSHPKSGLATLITDGPGGSKRMYAGLKNAGETWYDITGNRSDTVKIGSDGWGEFHVNGGSVSIYVQK

SEQ ID NO: 42196 - protein, 480 aa, Bacillus sp.
NGTMMQYFEWYLPNDGNHWNRLNSDASNLKSKGITAVWIPPAWKGASQNDVGYGAYDLYDLGEFNQKGTVRTKYGTRSQLQAAVTSLKNNGIQVYGDVVMNHKGGADATEMVRAVEVNPNNRNQEVTGEYTIEAWTRFDFPGRGNTHSSFKWRWYHFDGVDFDQSRRLNNRIYKFRGHGKAWDWEVDTEFGNYDYLMYADYDMDHPEVVNELRNWGVWYTNTLGLDGFRIDAVKHIKYSFTRDWINHVRSATGKNMFAVAEFWKNDLGAIENYLQKTNWNHSVFDVPLHYNLYNASKSGGNYDMRNIFNGTVVQRHPSHAVTFVDNHDSQPEEALESFVDEWFKPLAYALTLTREQGYPSVFYGDYYGIPTHGVPAMRSKIDPILEARQKYAYGPQHDYLDHPDVIGWTREGDSSHPKSGLATLITDGPGGSKRMYAGLKNAGETWYDITGNRSDTVKIGSDGWGEFHVNKSSVSIYVQK

SEQ ID NO: 42197 - protein, 480 aa, Bacillus sp.
NGTMMQYFEWYLPNDGNHWNRLNSDASNLKSKGITAVWIPPAWKGASQNDVGYGAYDLYDLGEFNQKGTVRTKYGTRSQLQAAVTSLKNNGIQVYGDVVMNHKGGADATEMVRAVEVNPNNRNQEVTGEYTIEAWTRFDFPGRGNTHSSFKWRWYHFDGVDWDQSRRTNNRIYKFRGHGKAWDWEVDTEFGNYDYLMYTDYDMDHPEVVNELRNWGVWYTNTLGLDGFRIDAVKHIKYSFTRDWINHVRSATGKNMFAVAEFWKNDLGAIENYLQKTNWNHSVFDVPLHYNLYNASKSGGNYDMRNIFNGTVVQVHPSHAVTFVDNHDSQPEEALESFVEEWFKPLAYALTLTREQGYPSVFYGDYYGIPTHGVPAMRSKIDPILEARQKYAYGPQHDYLDHPDVIGWTREGDSSHPKSGLATLITDGPGGSKRMYAGLKNAGETWYDITGNRSDTVKIGSDGWGEFHVNYGSVSIYVQK

SEQ ID NO: 42198 - protein, 480 aa, Bacillus sp.
NGTMMQYFEWYLPNDGNHWNRLNSDASNLKSKGITAVWIPPAWKATSQNDVGYGAYDLYDLGEFNQKGTVRTKYGTRSQLQAAVTSLKNNGIQVYGDVVMNHKGGADATEMVRAVEVNPNNRNQEVTGEYTIEAWTRFDFPGRGNTHSSFKWRWYHFDGVDWDMSRELSNRIYKFRGHGKAWDWEVDTEFGNYDYLMYADYDYDHPESTNEMRNWGVWYTNTLGLDGFRIDAVKHIKYSFTRDWINHVRSATGKNMFAVAEFWKNDLGAIENYLQKTNWNHSVFDVPLHYNLYNASKSQGNYDMRNIFNGTVVQRHPSHAVTFVDNHDSQPEEALESFVDTWFKPLAYALTLTREQGYPSVFYGDYYGIPTHGVPAMRSKIDPILEARQKYAYGPQHDYLDHPDVIGWTREGDSSHPKSGLATLITDGPGGSKRMYAGLKNAGETWYDITGNRSDTVKIGSDGWGEFHVNGSSVSIYVQK

SEQ ID NO: 42199 - protein, 480 aa, Bacillus sp.
NGTMMQYFEWYLPNDGNHWNRLNSDASNLKSKGITAVWIPPAWKAVSQNDVGYGAYDLYDLGEFNQKGTVRTKYGTRSQLQAAVTSLKNNGIQVYGDVVMNHKGGADLTEMVRAVEVNPNNRNQEVTGEYTIEAWTRFDFPGRGNTHSSFKWRWYHFDGVDWDQSREFTNRIYKFRGHGKAWDWEVDTEFGNYDYLMYVDYDMDHPEVVNELRNWGVWYTNTLGLDGFRIDAVKHIKYSFTRDWINHVRSATGKNMFAVAEFWKNDLGAIENYLQKTNWNHSVFDVPLHYNLYNASKSGGNYDMRNIFNGTVVQRHPSHAVTFVDNHDSQPEEALESFVETWFKPLAYALTLTREQGYPSVFYGDYYGIPTHGVPAMRSKIDPILEARQKYAYGPQHDYLDHPDVIGWTREGDSSHPKSGLATLITDGPGGSKRMYAGLKNAGETWYDITGNRSDTVKIGSDGWGEFHVNDASVSIYVQK

SEQ ID NO: 42200 - protein, 480 aa, Bacillus sp.
NGTMMQYFEWYLPNDGNHWNRLNSDASNLKSKGITAVWIPPAWKAVSQNDVGYGAYDLYDLGEFNQKGTVRTKYGTRSQLQAAVTSLKNNGIQVYGDVVMNHKGGADATEMVDAVEVNPNNRNQEVTGEYTIEAWTRFDFPGRGNTHSSFKWRWYHFDGVDFDQSREFTNRIYKFRGHGKAWDWEVDTEFGNYDYLMYVDYDMDHPEVVNELRNWGVWYTNTLGLDGFRIDAVKHIKYSFTRDWINHVRSATGKNMFAVAEFWKNDLGAIENYLQKTNWNHSVFDVPLHYNLYNASKSGGNYDMRNIFNGTVVQRHPSHAVTFVDNHDSQPEEALESFVEEWFKPLAYALTLTREQGYPSVFYGDYYGIPTHGVPAMRSKIDPILEARQKYAYGPQHDYLDHPDVIGWTREGDSSHPKSGLATLITDGPGGSKRMYAGLKNAGETWYDITGNRSDTVKIGSDGWGEFHVNDGSVSIYVQK

SEQ ID NO: 42201 - protein, 480 aa, Bacillus sp.
NGTMMQYFEWYLPNDGNHWNRLNSDASNLKSKGITAVWIPPAWKAVSQNDVGYGAYDLYDLGEFNQKGTVRTKYGTRSQLQAAVTSLKNNGIQVYGDVVMNHKGGADATEMVRAVEVNPNNRNQEVTGEYTIEAYTRFDFSGRGNTHSSFKWRWYHFDGVDWDQSRRFDNRIYKFRGHGKAWDWEVDTEFGNYDYLMYADYDMDHPEVVNELRNWGVWYTNTLGLDGFRIDAVKHIKYSFTRDWINHVRSATGKNMFAVAEFWKNDLGAIENYLQKTNWNHSVFDVPLHYNLYNASKSGGNYDMRNIFNGTVVQRHPSHAVTFVDNHDSQPEEALESFVEEWFKPLAYALTLTREQGYPSVFYGDYYGIPTHGVPAMRSKIDPILEARQKYAYGPQHDYLDHPDVIGWTREGDSSHPKSGLATLITDGPGGSKRMYAGLKNAGETWYDITGNRSDTVKIGSDGWGEFHVNDGSVSIYVQK

SEQ ID NO: 42202 - protein, 480 aa, Synthetic construct
NGTMMQYFEWYLPNDGNHWNRLNSDASNLKSKGITAVWIPPAWKGASQNDVGYGAYDLYDLGEFNQKGTVRTKYGTRSQLQAAVTSLKNNGIQVYGDVVMNHKGGADATEMVRAVEVNPNNRNQEVTGEYTIEAWTRFDFPGRGNTHSSFKWRWYHFDGVDWDQSRRLNNRIYKFRGHGKEWDWEVDTEFGNYDYLMYTDYDMDHSEVVNELRNWGVWYTNTLGLDGFRIDAVKHIKYSFTRDWINHVRSATGKNMFAVAEFWKNDLGAIENYLQKTNWNHSVFDVPLHYNLYNASKSGGNYDMRNIFNGTVVQRHPSHAVTFVDNHDSQPEEALESFVEEWFKPLAYALTLTREQGYPSVFYGDYYGIPTHGVPAMRSKIDPILEARQKYAYGPQHDYLDHPDVIGWTREGDSSHPKSGLATLITDGPGGSKRMYAGLKNAGETWYDITGNRSDTVKIGSDGWGEFHVNDGSVSIYVQK

SEQ ID NO: 42203 - protein, 480 aa, Bacillus sp.
NGTMMQYFEWYLPNDGNHWNRLNSDASNLKSKGIKAVWIPPAWKAASQNDVGYGAYDLYDLGEFNQKGTVRTKYGTRSQLQAAVTSLKNNGIQVYGDVVMNHKGGADATEMVRAVEVNPNNRNQEVTGEYTIEAWTRFDFPGRGNTHSSFKWRWYHFDGVDWDQSRDLDNRIYKFRGHGKAWDWEVDTEFGNYDYLMYADYDMDHPEVVNELRNWGVWYTNTLGLDGFRIDAVKHIKYSFTRDWINHVRSATGKNMFAVAEFWKNDLGAIENYLQKTNWNHSVFDVPLHYNLYNASKSGGNYDMRNIFNGTVVQRHPSHAVTFVDNHDSQPEEALESFVETWFKPLAYALTLTREQGYPSVFYGDYYGIPTHGVPAMRSKIDPILEARQKYAYGPQHDYLDHPDVIGWTREGDSSHPKSGLATLITDGPGGSKRMYAGLKNAGETWYDITGNRSDTVKIGSDGWGEFHVNKASVSIYVQK

SEQ ID NO: 42204 - protein, 480 aa, Bacillus sp.
NGTMMQYFEWYLPNDGNHWNRLNSDASNLKSKGIKAVWIPPAWKGASQNDVGYGAYDLYDLGEFNQKGTVRTKYGTRSQLQAAVTSLKNNGIQVYGDVVMNHKGGADATEMVRAVEVNPNNRNQEVTGEYTIEAWTRFDFPGRGNTHSSFKWRWYHFDGVDFDQSRRTNNRIYKFRGHGKAWDWEVDTEFGNYDYLMYTDYDMDHPEVVNELRNWGVWYTNTLGLDGFRIDAVKHIKYSFTRDWINHVRSATGKNMFAVAEFWKNDLGAIENYLQKTNWNHSVFDVPLHYNLYNASKSGGNYDMRNIFNGTVVQRHPSHAVTFVDNHDSQPEEALESFVEEWFKPLAYALTLTREQGYPSVFYGDYYGIPTHGVPAMRSKIDPILEARQKYAYGPQHDYLDHPDVIGWTREGDSSHPKSGLATLITDGPGGSKRMYAGLKNAGETWYDITGNRSDTVKIGSDGWGEFHVNDGSVSIYVQK

SEQ ID NO: 42205 - protein, 480 aa, Bacillus sp.
NGTMMQYFEWYLPNDGNHWNRLNSDASNLKSKGITAVWIPPAWKGASQNDVGYGAYDLYDLGEFNQKGTVRTKYGTRSQLQAAVTSLKNNGIQVYGDVVMNHKGGADATEMVRAVEVNPNNRQQEVTGEYTIEAWTRFDFPGRGNTHSSFKWRWYHFDGVDWDQSRRLNNRIYLFRGHGKSWDWEVDTEFGNYDYLMYADYDMDHPEVVNELRNWGVWYTNTLGLDGFRIDAVKHIKYSFTRDWINHVRSATGKNMFAVAEFWKNDLGAIENYLQKTNWNHSVFDVPLHYNLYNASKSGGNYDMRNIFNGTVVQRHPSHAVTFVDNHDSQPEEALESFVEEWFKPLAYALTLTREQGYPSVFYGDYYGIPTHGVPAMRSKIDPILEARQKYAYGPQHDYLDHPDVIGWTREGDSSHPKSGLATLITDGPGGSKRMYAGLKNAGETWYDITGNRSDTVKIGSDGWGEFHVNDGSVSIYVQK

SEQ ID NO: 42206 - protein, 480 aa, Synthetic construct
NGTMMQYFEWYLPNDGNHWNRLNSDASNLKSKGITAVWIPPAWKGASQNDVGYGAYDLYDLGEFNQKGTVRTKYGTRSQLQAAVTSLKNNGIQVYGDVVMNHKGGADATEMVRAVEVNPNNRNQEVTGEYTIEAWTRFDFPGRGNTHSSFKWRWYHFDGVDWDQSRRLNNRIYLFRSHGKQWDWPVDTENGNYDYLMYADIDMDHPEVVNELRNWGVWYTNTLGLDGFRIDAVKHIKYSFTRDWINHVRSATGKNMFAVAEFWKNDLGAIENYLQKTNWNHSVFDVPLHYNLYNASKSGGNYDMRNIFNGTVVQRHPSHAVTFVDNHDSQPEEALESFVEEWFKPLAYALTLTREQGYPSVFYGDYYGIPTHGVPAMRSKIDPILEARQKYAYGPQHDYLDHPDVIGWTREGDSSHPKSGLATLITDGPGGSKRMYAGLKNAGETWYDITGNRSDTVKIGSDGWGEFHVNDGSVSIYVQK

SEQ ID NO: 42207 - protein, 480 aa, Bacillus sp.
NGTMMQYFEWYLPNDGNHWNRLNSDASNLKSKGITAVWIPPAWKGASQNDVGYGAYDLYDLGEFNQKGTVRTKYGTRSQLQAAVTSLKNNGIQVYGDVVMNHKGGADATEMVRAVEVNPNNRNQEVTGEYTIEAWTRFDFPGRGNTHSSFKWRWYHFDGVDWDQSRRLNNRIYKFRGHGKAWDWEVDTEFGNYDYLMYADYDMDHPEVVNELRNWGVWYTNTLGLDGFRIDAVKHIKYSFTRDWINHVRSATGKNMFAVAEFWKNDLGAIENYLQKTNWNHSVFDVPLHYNLYNASKSGSNYDMRNIFNGTVVQRHPSHAVTFVDNHDSQPEEALESFVEPWFKPLAYALTLTREQGYPSVFYGDYYGIPTHGVPAMRSKIDPILEARQKYAYGPQHDYLDHPDVIGWTREGDSSHPKSGLATLITDGPGGSKRMYAGLKNAGETWYDITGNRSDTVKIGSDGWGEFHVNKQSVSIYVQK

SEQ ID NO: 42208 - protein, 480 aa, Bacillus sp.
NGTMMQYFEWYLPNDGNHWNRLNSDASNLKSKGITAVWIPPAWKGASQNDVGYGAYDLYDLGEFNQKGTVRTKYGTRSQLQAAVTSLKNNGIQVYGDVVMNHKGGADATEMVRAVEVNPNNRNQEVTGEYTIEAWTRFDFPGRGNTHSSFKWRWYHFDGVDWDQSRRLNNRIYKFRGHGKAWDWEVDTEFGNYDYLMYADYDMDHPEVVNELRNWGVWYTNTLGLDGFRIDAVKHIKYSFTRDWINHVRSATGKNMFAVAEFWKNDLGAIENYLQKTNWNHSVFDVPLHYNLYNASKSQGNYDMRNIFNGTVVQRHPSHAVTFVDNHDSQPEEALESFVDEWFKPLAYALTLTREQGYPSVFYGDYYGIPTHGVPAMRSKIDPILEARQKYAYGPQHDYLDHPDVIGWTREGDSSHPKSGLATLITDGPGGSKRMYAGLKNAGETWYDITGNRSDTVKIGSDGWGEFHVNGQSVSIYVQK

SEQ ID NO: 42209 - protein, 480 aa, Bacillus sp.
NGTMMQYFEWYLPNDGNHWNRLNSDASNLKSKGITAVWIPPAWKGASQNDVGYGAYDLYDLGEFNQKGTVRTKYGTRSQLQAAVTSLKNNGIQVYGDVVMNHKGGADATEMVRAVEVNPNNRNQEVTGEYTIEAWTRFDFPGRGNTHSSFKWRWYHFDGVDWDQSRRTNNRIYKFRGHGKAWDWEVDTEFGNYDYLMYTDYDMDHPEVVNELRNWGVWYTNTLGLDGFRIDAVKHIKYSFTRDWINHVRSATGKNMFAVAEFWKNDLGAIENYLQKTNWNHSVFDVPLHYNLYNASKSGGNYDMRNIFNGTVVQRHPSHAVTFVDNHDSQPEEALESFVDEWFKPLAYALTLTREQGYPSVFYGDYYGIPTHGVPAMRSKIDPILEARQKYAYGPQHDYLDHPDVIGWTREGDSSHPKSGLATLITDGPGGSKRMYAGLKNAGETWYDITGNRSDTVKIGSDGWGEFHVNKSSVSIYVQK

SEQ ID NO: 42210 - protein, 480 aa, Bacillus sp.
NGTMMQYFEWYLPNDGNHWNRLNSDASNLKSKGITAVWIPPAWKGASQNDVGYGAYDLYDLGEFNQKGTVRTKYGTRSQLQAAVTSLKNNGIQVYGDVVMNHKGGADATEMVRAVEVNPNNRNQEVTGEYTIEAWTRFDFPGRGNTHSSFKWRWYHFDGVDWDQSRRLNNRIYKFRGHGKAWDWEVDTEFGNYDYLMYADYDMDHPEVVNELRNWGVWYTNTLGLDGFRIDAVKHIKYSFTRDWINHVRSATGKNMFAVAEFWKNDLGAIENYLQKTNWNHSVFDVPLHYNLYNASKSSGNYDMRNIFNGTVVQRHPSHAVTFVDNHDSQPEEALESFVDPWFKPLAYALTLTREQGYPSVFYGDYYGIPTHGVPAMRSKIDPILEARQKYAYGPQHDYLDHPDVIGWTREGDSSHPKSGLATLITDGPGGSKRMYAGLKNAGETWYDITGNRSDTVKIGSDGWGEFHVNKQSVSIYVQK

SEQ ID NO: 42211 - protein, 480 aa, Bacillus sp.
NGTMMQYFEWYLPNDGNHWNRLNSDASNLKSKGITAVWIPPAWKAVSQNDVGYGAYDLYDLGEFNQKGTVRTKYGTRSQLQAAVTSLKNNGIQVYGDVVMNHKGGADLTEMVDAVEVNPNNRNQEVTGEYTIEAWTRFDFPGRGNTHSSFKWRWYHFDGVDFDQSRDFNNRIYKFRGHGKAWDWEVDTEFGNYDYLMYADYDMDHPEVVNELRNWGVWYTNTLGLDGFRIDAVKHIKYSFTRDWINHVRSATGKNMFAVAEFWKNDLGAIENYLQKTNWNHSVFDVPLHYNLYNASKSGGNYDMRNIFNGTVVQRHPSHAVTFVDNHDSQPEEALESFVEEWFKPLAYALTLTREQGYPSVFYGDYYGIPTHGVPAMRSKIDPILEARQKYAYGPQHDYLDHPDVIGWTREGDSSHPKSGLATLITDGPGGSKRMYAGLKNAGETWYDITGNRSDTVKIGSDGWGEFHVNDGSVSIYVQK

SEQ ID NO: 42212 - protein, 480 aa, Bacillus sp.
NGTMMQYFEWYLPNDGNHWNRLNSDASNLKSKGITAVWIPPAWKGASQNDVGYGAYDLYDLGEFNQKGTVRTKYGTRSQLQAAVTSLKNNGIQVYGDVVMNHKGGADATEMVRAVEVNPNNRNQEVTGEYTIEAWTRFDFPGRGNTHSSFKWRWYHFDGVDWDQSRRLNNRIYKFRGHGKAWDWEVDTEFGNYDYLMYADYDMDHPEVVNELRNWGVWYTNTLGLDGFRIDAVKHIKYSFTRDWINHVRSATGKNMFAVAEFWKNDLGAIENYLQKTNWNHSVFDVPLHYNLYNASKSQGNYDMRNIFNGTVVQRHPSHAVTFVDNHDSQPEEALESFVEEWFKPLAYALTLTREQGYPSVFYGDYYGIPTHGVPAMRSKIDPILEARQKYAYGPQHDYLDHPDVIGWTREGDSSHPKSGLATLITDGPGGSKRMYAGLKNAGETWYDITGNRSDTVKIGSDGWGEFHVNGKSVSIYVQK

SEQ ID NO: 42213 - protein, 480 aa, Bacillus sp.
NGTMMQYFEWYLPNDGNHWNRLNSDASNLKSKGITAVWIPPAWKAASQNDVGYGAYDLYDLGEFNQKGTVRTKYGTRSQLQAAVTSLKNNGIQVYGDVVMNHKGGADATEMVPAVEVNPNNRNQEVTGEYTIEAWTRFDFPGRGNTHSSFKWRWYHFDGVDWDQSRELNNRIYKFRGHSKAWDWEVDTEFGNYDYLMYTDYDMDHPEVVNELRNWGVWYTNTLGLDGFRIDAVKHIKYSFTRDWINHVRSATGKNMFAVAEFWKNDLGAIENYLQKTNWNHSVFDVPLHYNLYNASKSGGNYDMRNIFNGTVVQRHPSHAVTFVDNHDSQPEEALESFVEEWFKPLAYALTLTREQGYPSVFYGDYYGIPTHGVPAMRSKIDPILEARQKYAYGPQHDYLDHPDVIGWTREGDSSHPKSGLATLITDGPGGSKRMYAGLKNAGETWYDITGNRSDTVKIGSDGWGEFHVNDGSVSIYVQK

SEQ ID NO: 42214 - protein, 480 aa, Bacillus sp.
NGTMMQYFEWYLPNDGNHWNRLNSDASNLKSKGITAVWIPPAWKGASQNDVGYGAYDLYDLGEFNQKGTVRTKYGTRSQLQAAVTSLKNNGIQVYGDVVMNHKGGADATEMVRAVEVNPNNRNQEVTGEYTIEAWTRFDFPGRGNTHSSFKWRWYHFDGVDWDQSRRLNNRIYKFRGHGKAWDWEVDTEFGNYDYLMYADYDMDHPEVVNELRNWGVWYTNTLGLDGFRIDAVKHIKYSFTRDWINHVRSATGKNMFAVAEFWKNDLGAIENYLQKTNWNHSVFDVPLHYNLYNASKSGSNYDMRNIFNGTVVQRHPSHAVTFVDNHDSQPEEALESFVEPWFKPLAYALTLTREQGYPSVFYGDYYGIPTHGVPAMRSKIDPILEARQKYAYGPQHDYLDHPDVIGWTREGDSSHPKSGLATLITDGPGGSKRMYAGLKNAGETWYDITGNRSDTVKIGSDGWGEFHVNQTSVSIYVQK

SEQ ID NO: 42215 - protein, 480 aa, Bacillus sp.
NGTMMQYFEWYLPNDGNHWNRLNSDASNLKSKGITAVWIPPAWKAASQNDVGYGAYDLYDLGEFNQKGTVRTKYGTRSQLQAAVTSLKNNGIQVYGDVVMNHKGGADATEMVRAVEVNPNNRNQEVTGEYTIEAWTRFDFPGRGNTHSSFKWRWYHFDGVDWDQSRDLDNRIYKFRGHGKAWDWEVDTEFGNYDYLMYADYDMDHPEVVNELRNWGVWYTNTLGLDGFRIDAVKHIKYSFTRDWINHVRSATGKNMFAVAEFWKNDLGAIENYLQKTNWNHSVFDVPLHYNLYNASKSGGNYDMRNIFNGTVVQVHPSHAVTFVDNHDSQPEEALESFVEEWFKPLAYALTLTREQGYPSVFYGDYYGIPTHGVPAMRSKIDPILEARQKYAYGPQHDYLDHPDVIGWTREGDSSHPKSGLATLITDGPGGSKRMYAGLKNAGETWYDITGNRSDTVKIGSDGWGEFHVNYGSVSIYVQK

SEQ ID NO: 42216 - protein, 480 aa, Bacillus sp.
NGTMMQYFEWYLPNDGNHWNRLNSDASNLKSKGIKAVWIPPAWKAASQNDVGYGAYDLYDLGEFNQKGTVRTKYGTRSQLQAAVTSLKNNGIQVYGDVVMNHKGGADATEMVRAVEVNPNNRNQEVTGEYTIEAWTRFDFPGRGNTHSSFKWRWYHFDGVDWDQSRNLNNRIYKFRGHGKAWDWEVDTEFGNYDYLMYTDYDMDHPEVVNELRNWGVWYTNTLGLDGFRIDAVKHIKYSFTRDWINHVRSATGKNMFAVAEFWKNDLGAIENYLQKTNWNHSVFDVPLHYNLYNASKSGGNYDMRNIFNGTVVQRHPSHAVTFVDNHDSQPEEALESFVEEWFKPLAYALTLTREQGYPSVFYGDYYGIPTHGVPAMRSKIDPILEARQKYAYGPQHDYLDHPDVIGWTREGDSSHPKSGLATLITDGPGGSKRMYAGLKNAGETWYDITGNRSDTVKIGSDGWGEFHVNDGSVSIYVQK

SEQ ID NO: 42217 - protein, 480 aa, Bacillus sp.
NGTMMQYFEWYLPNDGNHWNRLNSDASNLKSKGITAVWIPPAWKGASQNDVGYGAYDLYDLGEFNQKGTVRTKYGTRSQLQAAVTSLKNNGIQVYGDVVMNHKGGADATEMVRAVEVNPNNRNQEVTGEYTIEAWTRFDFPGRGNTHSSFKWRWYHFDGVDWDQSRRLNNRIYKFRGHGKAWDWEVDTEFGNYDYLMYADYDMDHPEVVNELRNWGVWYTNTLGLDGFRIDAVKHIKYSFTRDWINHVRSATGKNMFAVAEFWKNDLGAIENYLQKTNWNHSVFDVPLHYNLYNASKSQGNYDMRNIFNGTVVQRHPSHAVTFVDNHDSQPEEALESFVDPWFKPLAYALTLTREQGYPSVFYGDYYGIPTHGVPAMRSKIDPILEARQKYAYGPQHDYLDHPDVIGWTREGDSSHPKSGLATLITDGPGGSKRMYAGLKNAGETWYDITGNRSDTVKIGSDGWGEFHVNKQSVSIYVQK

SEQ ID NO: 42218 - protein, 480 aa, Bacillus sp.
NGTMMQYFEWYLPNDGNHWNRLNSDASNLKSKGITAVWIPPAWKGASQNDVGYGAYDLYDLGEFNQKGTVRTKYGTRSQLQAAVTSLKNNGIQVYGDVVMNHKGGADATEMVRAVEVNPNNRQQEVTGDYTIEAWTRFDFPGRGNTHSSFKWRWYHFDGVDWDQSRRLNNRIYLFRGHGKAWDWEVDTEFGNYDYLMYADYDMDHPEVVNELRNWGVWYTNTLGLDGFRIDAVKHIKYSFTRDWINHVRSATGKNMFAVAEFWKNDLGAIENYLQKTNWNHSVFDVPLHYNLYNASKSGGNYDMRNIFNGTVVQRHPSHAVTFVDNHDSQPEEALESFVEEWFKPLAYALTLTREQGYPSVFYGDYYGIPTHGVPAMRSKIDPILEARQKYAYGPQHDYLDHPDVIGWTREGDSSHPKSGLATLITDGPGGSKRMYAGLKNAGETWYDITGNRSDTVKIGSDGWGEFHVNDGSVSIYVQK

SEQ ID NO: 42219 - protein, 480 aa, Bacillus sp.
NGTMMQYFEWYLPNDGNHWNRLNSDASNLKSKGIKAVWIPPAWKAVSQNDVGYGAYDLYDLGEFNQKGTVRTKYGTRSQLQAAVTSLKNNGIQVYGDVVMNHKGGADATEMVRAVEVNPNNRNQEVTGEYTIEAWTRFDFPGRGNTHSSFKWRWYHFDGVDWDQSRNLTNRIYKFRGHGKAWDWEVDTEFGNYDYLMYTDYDMDHPEVVNELRNWGVWYTNTLGLDGFRIDAVKHIKYSFTRDWINHVRSATGKNMFAVAEFWKNDLGAIENYLQKTNWNHSVFDVPLHYNLYNASKSGGNYDMRNIFNGTVVQRHPSHAVTFVDNHDSQPEEALESFVEEWFKPLAYALTLTREQGYPSVFYGDYYGIPTHGVPAMRSKIDPILEARQKYAYGPQHDYLDHPDVIGWTREGDSSHPKSGLATLITDGPGGSKRMYAGLKNAGETWYDITGNRSDTVKIGSDGWGEFHVNDGSVSIYVQK

SEQ ID NO: 42220 - protein, 480 aa, Bacillus sp.
NGTMMQYFEWYLPNDGNHWNRLNSDASNLKSKGIKAVWIPPAWKGASQNDVGYGAYDLYDLGEFNQRGTVRTKYGTRSQLQAAVTSLKNNGIQVYGDVVMNHKGGADATEMVRAVEVNPNNRNQEVTGEYTIEAWTRFDFPGRGNTHSSFKWRWYHFDGVDWDQSRNFQNRIYKFRGHGKAWDWEVDTEFGNYDYLMYADYDMDHPEVVNELRNWGVWYTNTLGLDGFRIDAVKHIKYSFTRDWINHVRSATGKNMFAVAEFWKNDLGAIENYLQKTNWNHSVFDVPLHYNLYNASKSQGNYDMRNIFNGTVVQRHPSHAVTFVDNHDSQPEEALESFVDTWFKPLAYALTLTREQGYPSVFYGDYYGIPTHGVPAMRSKIDPILEARQKYAYGPQHDYLDHPDVIGWTREGDSSHPKSGLATLITDGPGGSKRMYAGLKNAGETWYDITGNRSDTVKIGSDGWGEFHVNGGSVSIYVQK

SEQ ID NO: 42221 - protein, 480 aa, Bacillus sp.
NGTMMQYFEWYLPNDGNHWNRLNSDASNLKSKGITAVWIPPAWKGASQNDVGYGAYDLYDLGEFNQKGTVRTKYGTRSQLQAAVTSLKNNGIQVYGDVVMNHKGGADATEMVRAVEVNPNNRNQEVTGEYTIEAWTRFDFPGRGNTHSSFKWRWYHFDGVDWDQSRRLNNRIYKFRGHGKAWDWEVDTEFGNYDYLMYADYDMDHPEVVNELRNWGVWYTNTLGLDGFRIDAVKHIKYSFTRDWINHVRSATGKNMFAVAEFWKNDLGAIENYLQKTNWNHSVFDVPLHYNLYNASKSAGNYDMRNIFNGTVVQRHPSHAVTFVDNHDSQPEEALESFVEPWFKPLAYALTLTREQGYPSVFYGDYYGIPTHGVPAMRSKIDPILEARQKYAYGPQHDYLDHPDVIGWTREGDSSHPKSGLATLITDGPGGSKRMYAGLKNAGETWYDITGNRSDTVKIGSDGWGEFHVNKASVSIYVQK

SEQ ID NO: 42222 - protein, 480 aa, Bacillus sp.
NGTMMQYFEWYLPNDGNHWNRLNSDASNLKSKGITAVWIPPAWKGASQNDVGYGAYDLYDLGEFNQRGTVRTKYGTRSQLQAAVTSLKNNGIQVYGDVVMNHKGGADLTEMVRAVEVNPNNRNQEVTGEYTIEAWTRFDFPGRGNTHSSFKWRWYHFDGVDWDQSRRLNNRIYKFRGHGKAWDWEVDTEFGNYDYLMYADYDMDHPEVVNELRNWGVWYTNTLGLDGFRIDAVKHIKYSFTRDWINHVRIATGKNMFAVAEFWKNDLGAIENYLQKTNWNHSVFDVPLHYNLYNASKSGGNYDMRNIFNGTVVQRHPSHAVTFVDNHDSQPEEALESFVDEWFKPLAYALTLTREQGYPSVFYGDYYGIPTHGVPAMRSKIDPILEARQKYAYGPQHDYLDHPDVIGWTREGDSSHPKSGLATLITDGPGGSKRMYAGLKNAGETWYDITGNRSDTVKIGSDGWGEFHVNDQSVSIYVQK

SEQ ID NO: 42223 - protein, 480 aa, Bacillus sp.
NGTMMQYFEWYLPNDGNHWNRLNSDASNLKSKGITAVWIPPAWKAVSQNDVGYGAYDLYDLGEFNQKGTVRTKYGTRSQLQAAVTSLKNNGIQVYGDVVMNHKGGADATEMVRAVEVNPNNRNQEVTGEYTIEAWTRFDFPGRGNTHSSFKWRWYHFDGVDWDQSREFTNRIYKFRGHGKAWDWEVDTEFGNYDYLMYVDYDMDHPEVVNELRNWGVWYTNTLGLDGFRIDAVKHIKYSFTRDWINHVRSATGKNMFAVAEFWKNDLGAIENYLQKTNWNHSVFDVPLHYNLYNASKSGGNYDMRNIFNGTVVQRHPSHAVTFVDNHDSQPEEALESFVDPWFKPLAYALTLTREQGYPSVFYGDYYGIPTHGVPAMRSKIDPILEARQKYAYGPQHDYLDHPDVIGWTREGDSSHPKSGLATLITDGPGGSKRMYAGLKNAGETWYDITGNRSDTVKIGSDGWGEFHVNGGSVSIYVQK

SEQ ID NO: 42224 - protein, 480 aa, Bacillus sp.
NQTMMQYFEWYLPNDGNHWNRLNSDASNLKSKGITAVWIPPAWKGASQNDVGYGAYDLYDLGEFNQKGTVRTKYGTRSQLQAAVTSLKNNGITVYGDVVMNHKGGADATEMVRAVEVNPNNRNQEVTGEYTIEAWTRFDFPGRGNTHSSFKWRWYHFDGVDWDQSRRLNNRIYKFRGHGKAWDWEVDTEFGNYDYLMYADYDMDHPEVVNELRNWGVWYTNTLGLDGFRIDAVKHIKYSFTRDWINHVRSATGKNMFAVAEFWKNDLGAIENYLQKTNWNHSVFDVPLHYNLYNASKSGGNYDMRNIFNGTVVQAHPSHAVTFVDNHDSQPEEALESFVEEWFKPLAYALTLTREQGYPSVFYGDYYGIPTHGVPAMRSKIDPILEARQKYAYGPQHDYLDHPDVIGWTREGDSSHPKSGLATLITDGPGGSKRMYAGLKNAGETWYDITGNRSDTVKIGSDGWGEFHVNDGSVSIYVQK

SEQ ID NO: 42225 - protein, 480 aa, Synthetic construct
NGTMMQYFEWYLPNDGNHWNRLNSDASNLKSKGITAVWIPPAWKGASQNDVGYGAYDLYDLGEFNQKGTVRTKYGTRSQLQAAVTSLKNNGIQVYGDVVMNHKGGADATEMVRAVEVNPNNRNQEVTGEYTIEAWTRFDFPGRGNTHSSFKWRWYHFDGVDWDQSRRLNNRIYKFRGHGKEWDWEVDTEFGNYDYLMYTDYDMDSPEVVNELRNWGVWYTNTLGLDGFRIDAVKHIKYSFTRDWINHVRSATGKNMFAVAEFWKNDLGAIENYLQKTNWNHSVFDVPLHYNLYNASKSGGNYDMRNIFNGTVVQRHPSHAVTFVDNHDSQPEEALESFVEEWFKPLAYALTLTREQGYPSVFYGDYYGIPTHGVPAMRSKIDPILEARQKYAYGPQHDYLDHPDVIGWTREGDSSHPKSGLATLITDGPGGSKRMYAGLKNAGETWYDITGNRSDTVKIGSDGWGEFHVNDGSVSIYVQK

SEQ ID NO: 42226 - protein, 480 aa, Bacillus sp.
NGTMMQYFEWYLPNDGNHWNRLNSDASNLKSKGIKAVWIPPAWKGASQNDVGYGAYDLYDLGEFNQRGTVRTKYGTRSQLQAAVTSLKNNGIQVYGDVVMNHKGGADATEMVRAVEVNPNNRNQEVTGEYTIEAWTRFDFPGRGNTHSSFKWRWYHFDGVDFDQSRRLNNRIYKFRGHGKAWDWEVDTEFGNYDYLMYADYDMDHPEVVNELRNWGVWYTNTLGLDGFRIDAVKHIKYSFTRDWINHVRSATGKNMFAVAEFWKNDLGAIENYLQKTNWNHSVFDVPLHYNLYNASKSGGNYDMRNIFNGTVVQRHPSHAVTFVDNHDSQPEEALESFVETWFKPLAYALTLTREQGYPSVFYGDYYGIPTHGVPAMRSKIDPILEARQKYAYGPQHDYLDHPDVIGWTREGDSSHPKSGLATLITDGPGGSKRMYAGLKNAGETWYDITGNRSDTVKIGSDGWGEFHVNDASVSIYVQK

SEQ ID NO: 42227 - protein, 480 aa, Bacillus sp.
NGTMMQYFEWYLPNDGNHWNRLNSDASNLKSKGITAVWIPPAWKAASQNDVGYGAYDLYDLGEFNQKGTVRTKYGTRSQLQAAVTSLKNNGIQVYGDVVMNHKGGADATEMVRAVEVNPNNRNQEVTGEYTIEAWTRFDFPGRGNTHSSFKWRWYHFDGVDWDQSRNLNNRIYKFRGHGKAWDWEVDTEFGNYDYLMYTDYDYDHPETTNEMRNWGVWYTNTLGLDGFRIDAVKHIKYSFTRDWINHVRSATGKNMFAVAEFWKNDLGAIENYLQKTNWNHSVFDVPLHYNLYNASKSGGNYDMRNIFNGTVVQRHPSHAVTFVDNHDSQPEEALESFVEEWFKPLAYALTLTREQGYPSVFYGDYYGIPTHGVPAMRSKIDPILEARQKYAYGPQHDYLDHPDVIGWTREGDSSHPKSGLATLITDGPGGSKRMYAGLKNAGETWYDITGNRSDTVKIGSDGWGEFHVNDGSVSIYVQK

SEQ ID NO: 42228 - protein, 480 aa, Bacillus sp.
NGTMMQYFEWYLPNDGNHWNRLNSDASNLKSKGITAVWIPPAWKGASQNDVGYGAYDLYDLGEFNQKGTVRTKYGTRSQLQAAVTSLKNNGINVYGDVVMNHKGGADATEMVRAVEVNPNNRNQEVTGEYTIEAWTRFDFPGRGNTHSSFKWRWYHFDGVDWDQSRRLNNRIYKFRGHGKAWDWEVDTEFGNYDYLMYADIDYDHPETTNEMRNWGVWYTNTLGLDGFRIDAVKHIKYSFTRDWINHVRSATGKNMFAVAEFWKNDLGAIENYLQKTNWNHSVFDVPLHYNLYNASKSGGNYDMRNIFNGTVVQAHPMHAVTFVDNHDSQPEEALESFVEEWFKPLAYALTLTREQGYPSVFYGDYYGIPTHGVPAMRSKIDPILEARQKYAYGPQHDYLDHPDVIGWTREGDSSHPKSGLATLITDGPGGSKRMYAGLKNAGETWYDITGNRSDTVKIGSDGWGEFHVNDGSVSIYVQK

SEQ ID NO: 42229 - protein, 480 aa, Bacillus sp.
NGTMMQYFEWYLPNDGNHWNRLNSDASNLKSKGITAVWIPPAWKATSQNDVGYGAYDLYDLGEFNQKGTVRTKYGTRSQLQAAVTSLKNNGIQVYGDVVMNHKGGADATEMVRAVEVNPNNRNQEVTGEYTIEAWTRFDFPGRGNTHSSFKWRWYHFDGVDFDQSRNVNNRIYKFRGHGKAWDWEVDTEFGNYDYLMYADYDMDHPEVVNELRNWGVWYTNTLGLDGFRIDAVKHIKYSFTRDWINHVRSATGKNMFAVAEFWKNDLGAIENYLQKTNWNHSVFDVPLHYNLYNASKSGGNYDMRNIFNGTVVQAHPNHAVTFVDNHDSQPEEALESFVEEWFKPLAYALTLTREQGYPSVFYGDYYGIPTHGVPAMRSKIDPILEARQKYAYGPQHDYLDHPDVIGWTREGDSSHPKSGLATLITDGPGGSKRMYAGLKNAGETWYDITGNRSDTVKIGSDGWGEFHVNDGSVSIYVQK

SEQ ID NO: 42230 - protein, 480 aa, Bacillus sp.
NLTMMQYFEWYLPNDGNHWNRLNSDASNLKSKGITAVWIPPAWKGASQNDVGYGAYDLYDLGEFNQKGTVRTKYGTRSQLQAAVTSLKNNGIAVYGDVVMNHKGGADATEMVRAVEVNPNNRNQEVTGEYTIEAWTRFDFPGRGNTHSSFKWRWYHFDGVDWDQSRRLNNRIYKFRGHGKAWDWEVDTEFGNYDYLMYADYDMDHPEVVNELRNWGVWYTNTLGLDGFRIDAVKHIKYSFTRDWINHVRSATGKNMFAVAEFWKNDLGAIENYLQKTNWNHSVFDVPLHYNLYNASKSGGNYDMRNIFNGTVVQAHPMHAVTFVDNHDSQPEEALESFVEEWFKPLAYALTLTREQGYPSVFYGDYYGIPTHGVPAMRSKIDPILEARQKYAYGPQHDYLDHPDVIGWTREGDSSHPKSGLATLITDGPGGSKRMYAGLKNAGETWYDITGNRSDTVKIGSDGWGEFHVNDGSVSIYVQK

SEQ ID NO: 42231 - protein, 480 aa, Bacillus sp.
NGTMMQYFEWYLPNDGNHWNRLNSDASNLKSKGITAVWIPPAWKATSQNDVGYGAYDLYDLGEFNQKGTVRTKYGTRSQLQAAVTSLKNNGIQVYGDVVMNHKGGADATEMVRAVEVNPNNRNQEVTGEYTIEAWTRFDFPGRGNTHSSFKWRWYHFDGVDWDQSRELSNRIYKFRGHGKAWDWEVDTEFGNYDYLMYADYDYDHPETTNEMRNWGVWYTNTLGLDGFRIDAVKHIKYSFTRDWINHVRSATGKNMFAVAEFWKNDLGAIENYLQKTNWNHSVFDVPLHYNLYNASKSQGNYDMRNIFNGTVVQRHPSHAVTFVDNHDSQPEEALESFVDTWFKPLAYALTLTREQGYPSVFYGDYYGIPTHGVPAMRSKIDPILEARQKYAYGPQHDYLDHPDVIGWTREGDSSHPKSGLATLITDGPGGSKRMYAGLKNAGETWYDITGNRSDTVKIGSDGWGEFHVNGSSVSIYVQK

SEQ ID NO: 42232 - protein, 480 aa, Homo sapiens
NGTMMQYFEWYLPNDGNHWNRLNSDASNLKSKGITAVWIPPAWKATSQNDVGYGAYDLYDLGEFNQKGTVRTKYGTRSQLQAAVTSLKNNGIQVYGDVVMNHKGGADATEMVRAVEVNPNNRNQEVTGEYTIEAWTRFDFPGRGNTHSSFKWRWYHFDGVDWDMSRELSNRIYKFRGHGKAWDWEVDTEFGNYDYLMYADYDYDHPETTNEMRNWGVWYTNTLGLDGFRIDAVKHIKYSFTRDWINHVRSATGKNMFAVAEFWKNDLGAIENYLQKTNWNHSVFDVPLHYNLYNASKSQGNYDMRNIFNGTVVQRHPSHAVTFVDNHDSQPEEALESFVDTWFKPLAYALTLTREQGYPSVFYGDYYGIPTHGVPAMRSKIDPILEARQKYAYGPQHDYLDHPDVIGWTREGDSSHPKSGLATLITDGPGGSKRMYAGLKNAGETWYDITGNRSDTVKIGSDGWGEFHVNGSSVSIYVQK

SEQ ID NO: 42233 - protein, 480 aa, Bacillus sp.
NGTMMQYFEWYLPNDGNHWNRLNSDASNLKSKGITAVWIPPAWKGASQNDVGYGAYDLYDLGEFNQKGTVRTKYGTRSQLQAAVTSLKNNGIQVYGDVVMNHKGGADATEMVRAVEVNPNNRNQEVTGEYTIEAYTRFDFSGRGNTHSSFKWRWYHFDGVDWDQSRRLDNRIYKFRGHGKAWDWEVDTEFGNYDYLMYTDYDMDHPEVVNELRNWGVWYTNTLGLDGFRIDAVKHIKYSFTRDWINHVRSATGKNMFAVAEFWKNDLGAIENYLQKTNWNHSVFDVPLHYNLYNASKSGGNYDMRNIFNGTVVQRHPSHAVTFVDNHDSQPEEALESFVEEWFKPLAYALTLTREQGYPSVFYGDYYGIPTHGVPAMRSKIDPILEARQKYAYGPQHDYLDHPDVIGWTREGDSSHPKSGLATLITDGPGGSKRMYAGLKNAGETWYDITGNRSDTVKIGSDGWGEFHVNDGSVSIYVQK

SEQ ID NO: 42234 - protein, 480 aa, Bacillus sp.
NGTMMQYFEWYLPNDGNHWNRLNSDASNLKSKGITAVWIPPAWKAASQNDVGYGAYDLYDLGEFNQKGTVRTKYGTRSQLQAAVTSLKNNGIQVYGDVVMNHKGGADATEMVRAVEVNPNNRNQEVTGEYTIEAWTRFDFPGRGNTHSSFKWRWYHFDGVDWDQSRRLTNRIYKFRGHGKAWDWEVDTEFGNYDYLMYADYDMDHPEVVNELRNWGVWYTNTLGLDGFRIDAVKHIKYSFTRDWINHVRSATGKNMFAVAEFWKNDLGAIENYLQKTNWNHSVFDVPLHYNLYNASKSGGNYDMRNIFNGTVVQANPNHAVTFVDNHDSQPEEALESFVEEWFKPLAYALTLTREQGYPSVFYGDYYGIPTHGVPAMRSKIDPILEARQKYAYGPQHDYLDHPDVIGWTREGDSSHPKSGLATLITDGPGGSKRMYAGLKNAGETWYDITGNRSDTVKIGSDGWGEFHVNDGSVSIYVQK

SEQ ID NO: 42235 - protein, 480 aa, Bacillus sp.
NNTVMQYFEWYLPNDGNHWNRLNSDASNLKSKGITAVWIPPAWKGASQNDVGYGAYDLYDLGEFNQKGTVRTKYGTRSQLQAAVTSLKNNGIAVYGDVVMNHKGGADATEMVRAVEVNPNNRNQEVTGEYTIEAWTRFDFPGRGNTHSSFKWRWYHFDGVDWDQSRRLNNRIYKFRGHGKAWDWEVDTEFGNYDYLMYADYDMDHPEVVNELRNWGVWYTNTLGLDGFRIDAVKHIKYSFTRDWINHVRSATGKNMFAVAEFWKNDLGAIENYLQKTNWNHSVFDVPLHYNLYNASKSGGNYDMRNIFNGTVVQSHPMHAVTFVDNHDSQPEEALESFVEEWFKPLAYALTLTREQGYPSVFYGDYYGIPTHGVPAMRSKIDPILEARQKYAYGPQHDYLDHPDVIGWTREGDSSHPKSGLATLITDGPGGSKRMYAGLKNAGETWYDITGNRSDTVKIGSDGWGEFHVNDGSVSIYVQK

SEQ ID NO: 42236 - protein, 480 aa, Bacillus sp.
NGTMMQYFEWYLPNDGNHWNRLNSDASNLKSKGITAVWIPPAWKATSQNDVGYGAYDLYDLGEFNQKGTVRTKYGTRSQLQAAVTSLKNNGIQVYGDVVMNHKGGADATEMVRAVEVNPNNRNQEVTGEYTIEAWTRFDFPGRGNTHSSFKWRWYHFDGVDWDQSRNVNNRIYKFRGHGKAWDWEVDTEFGNYDYLMYADYDMDHPEVVNELRNWGVWYTNTLGLDGFRIDAVKHIKYSFTRDWINHVRSATGKNMFAVAEFWKNDLGAIENYLQKTNWNHSVFDVPLHYNLYNASKSGGNYDMRNIFNGTVVQAHPMHAVTFVDNHDSQPEEALESFVEEWFKPLAYALTLTREQGYPSVFYGDYYGIPTHGVPAMRSKIDPILEARQKYAYGPQHDYLDHPDVIGWTREGDSSHPKSGLATLITDGPGGSKRMYAGLKNAGETWYDITGNRSDTVKIGSDGWGEFHVNYGSVSIYVQK

SEQ ID NO: 42237 - protein, 480 aa, Bacillus sp.
NGTMMQYFEWYLPNDGNHWNRLNSDASNLKSKGITAVWIPPAWKGASQNDVGYGAYDLYDLGEFNQKGTVRTKYGTRSQLQAAVTSLKNNGIQVYGDVVMNHKGGADATEMVRAVEVNPNNRNQEVTGEYTIEAWTRFDFPGRGNTHSSFKWRWYHFDGVDWDQSRRLNNRIYKFRGHGKAWDWEVDTEFGNYDYLMYADYDMDHPEVVNELRNWGVWYTNTLGLDGFRIDAVKHIKYSFTRDWINHVRSATGKNMFAVAEFWKNDLGAIENYLQKTNWNHSVFDVPLHYNLYNASKSGGNYDMRNIFNGTVVQANPNHAVTFVDNHDSQPEEALESFVDPWFKPLAYALTLTREQGYPSVFYGDYYGIPTHGVPAMRSKIDPILEARQKYAYGPQHDYLDHPDVIGWTREGDSSHPKSGLATLITDGPGGSKRMYAGLKNAGETWYDITGNRSDTVKIGSDGWGEFHVNGGSVSIYVQK

SEQ ID NO: 42238 - protein, 480 aa, Bacillus sp.
NGTMMQYFEWYLPNDGNHWNRLNSDASNLKSKGITAVWIPPAWKGASQNDVGYGAYDLYDLGEFNQKGTVRTKYGTRSQLQAAVTSLKNNGIQVYGDVVMNHKGGADYTEMVRAVEVNPNNRNQEVTGEYTIEAWTRFDFPGRQNTHSSFKWRWYHFDGVDWDQSERLNNRIYKFRGHGKAWDWEVETEFGNYDYLMYADYDMDHPEVVNELRNWGVWYTNTLGLDGFRIDAVKHIKYSFTRDWINHVRSATGKNMFAVAEFWKNDLGAIENYLSKTNWNHSVFDVPLHYNLYNASKSGGNYDMRNIFNGTVVQRHPSHAVTFVDNHDSQPEEALESFVEEWFKPLAYALTLTREQGYPSVFYGDYYGIPTHGVPAMRSKIDPILEARQKYAYGPQHDYLDHPDVIGWTREGDSSHPKSGLATLITDGPGGSKRMYAGLKNAGETWYDITGNRSDTVKIGSDGWGEFHVNDGSVSIYVQK

SEQ ID NO: 42239 - protein, 480 aa, Bacillus sp.
NGTMMQYFEWYLPNDGNHWNRLNSDASNLKSKGITAVWIPPAWKGASQNDVGYGAYDLYDLGEFNQKGTVRTKYGTRSQLQAAVTSLKNNGIQVYGDVVMNHKGGADATEMVRAVEVNPNNRNQEVTGEYTIEAWTRFDFPGRGNTHSSFKWRWYHFDGVDWDQSRRLNNRIYKFRGHGKAWDWEVDTEFGNYDYLMYADYDMDHPEVVNELRNWGVWYTNTLGLDGFRIDAVKHIKYSFTRDWINHVRSATGKNMFAVAEFWKNDLGAIENYLQKTNWNHSVFDVPLHYNLYNASKSQGNYDMRNIFNGTVVQRHPSHAVTFVDNHDSQPEEALESFVDPWFKPLAYALTLTREQGYPSVFYGDYYGIPTHGVPAMRSKIDPILEARQKYAYGPQHDYLDHPDVIGWTREGDSSHPKSGLATLITDGPGGSKRMYAGLKNAGETWYDITGNRSDTVKIGSDGWGEFHVNGQSVSIYVQK

SEQ ID NO: 42240 - protein, 480 aa, Bacillus sp.
NGTMMQYFEWYLPNDGNHWNRLNSDASNLKSKGITAVWIPPAWKAVSQNDVGYGAYDLYDLGEFNQKGTVRTKYGTRSQLQAAVTSLKNNGIQVYGDVVMNHKGGADATEMVRAVEVNPNNRNQEVTGEYTIEAWTRFDFPGRGNTHSSFKWRWYHFDGVDWDQSRDFNNRIYKFRGHGKAWDWEVDTEFGNYDYLMYADYDMDHPEVVNELRNWGVWYTNTLGLDGFRIDAVKHIKYSFTRDWINHVRSATGKNMFAVAEFWKNDLGAIENYLQKTNWNHSVFDVPLHYNLYNASKSQGNYDMRNIFNGTVVQRHPSHAVTFVDNHDSQPEEALESFVDTWFKPLAYALTLTREQGYPSVFYGDYYGIPTHGVPAMRSKIDPILEARQKYAYGPQHDYLDHPDVIGWTREGDSSHPKSGLATLITDGPGGSKRMYAGLKNAGETWYDITGNRSDTVKIGSDGWGEFHVNGSSVSIYVQK

SEQ ID NO: 42241 - protein, 480 aa, Bacillus sp.
NGTMMQYFEWYLPNDGNHWNRLNSDASNLKSKGITAVWIPPAWKAASQNDVGYGAYDLYDLGEFNQKGTVRTKYGTRSQLQAAVTSLKNNGIQVYGDVVMNHKGGADATEMVRAVEVNPNNRNQEVTGEYTIEAWTRFDFPGRGNTHSSFKWRWYHFDGVDWDQSRDLQNRIYKFRGHGKAWDWEVDTEFGNYDYLMYADYDMDHPEVVNELRNWGVWYTNTLGLDGFRIDAVKHIKYSFTRDWINHVRSATGKNMFAVAEFWKNDLGAIENYLQKTNWNHSVFDVPLHYNLYNASQSGGNYDMRNIFNGTVVQRHPSHAVTFVDNHDSQPEEALESFVEPWFKPLAYALTLTREQGYPSVFYGDYYGIPTHGVPAMRSKIDPILEARQKYAYGPQHDYLDHPDVIGWTREGDSSHPKSGLATLITDGPGGSKRMYAGLKNAGETWYDITGNRSDTVKIGSDGWGEFHVNKSSVSIYVQK

SEQ ID NO: 42242 - protein, 480 aa, Bacillus sp.
NGTMMQYFEWYLPNDGNHWNRLNSDASNLKSKGITAVWIPPAWKGASQNDVGYGAYDLYDLGEFNQKGTVRTKYGTRSQLQAAVTSLKNNGIQVYGDVVMNHKGGADATEMVRAVEVNPNNRNQEVTGEYTIEAWTRFDFPGRGNTHSSFKWRWYHFDGVDWDQSRRLNNRIYKFRAHGKAWDWEVDTEFGNYDYLMYADYDMDHPETSNELRNWGVWYTNTLGLDGFRIDAVKHIKYSFTRDWINHVRSATGKNMFAVAEFWKNDLGAIENYLQKTNWNHSVFDVPLHYNLYNASKSGGNYDMRNIFNGTVVQRHPSHAVTFVDNHDSQPEEALESFVEEWFKPLAYALTLTREQGYPSVFYGDYYGIPTHGVPAMRSKIDPILEARQKYAYGPQHDYLDHPDVIGWTREGDSSHPKSGLATLITDGPGGSKRMYAGLKNAGETWYDITGNRSDTVKIGSDGWGEFHVNDGSVSIYVQK

SEQ ID NO: 42243 - protein, 480 aa, Bacillus sp.
NGTMMQYFEWYLPNDGNHWNRLNSDASNLKSKGIKAVWIPPAWKAASQNDVGYGAYDLYDLGEFNQKGTVRTKYGTRSQLQAAVTSLKNNGIQVYGDVVMNHKGGADATEMVRAVEVNPNNRNQEVTGEYTIEAWTRFDFPGRGNTHSSFKWRWYHFDGVDFDQSRNLSNRIYKFRGHGKAWDWEVDTEFGNYDYLMYTDYDMDHPEVVNELRNWGVWYTNTLGLDGFRIDAVKHIKYSFTRDWINHVRSATGKNMFAVAEFWKNDLGAIENYLQKTNWNHSVFDVPLHYNLYNASKSGGNYDMRNIFNGTVVQRHPSHAVTFVDNHDSQPEEALESFVEEWFKPLAYALTLTREQGYPSVFYGDYYGIPTHGVPAMRSKIDPILEARQKYAYGPQHDYLDHPDVIGWTREGDSSHPKSGLATLITDGPGGSKRMYAGLKNAGETWYDITGNRSDTVKIGSDGWGEFHVNDGSVSIYVQK

SEQ ID NO: 42244 - protein, 480 aa, Bacillus sp.
NGTMMQYFEWYLPNDGNHWNRLNSDASNLKSKGITAVWIPPAWKGASQNDVGYGAYDLYDLGEFNQKGTVRTKYGTRSQLQAAVTSLKNNGIQVYGDVVMNHKGGADATEMVRAVEVNPNNRNQEVTGEYTIEAWTRFDFPGRGNTHSSFKWRWYHFDGVDWDQSRRLNNRIYKFRGHGKAWDWEVDTEFGNYDYLMYADYDMDHPEVVNELRNWGVWYTNTLGLDGFRIDAVKHIKYSFTRDWINHVRSATGKNMFAVAEFWKNDLGAIENYLQKTNWNHSVFDVPLHYNLYNASKSAGNYDMRNIFNGTVVQRHPSHAVTFVDNHDSQPEEALESFVEPWFKPLAYALTLTREQGYPSVFYGDYYGIPTHGVPAMRSKIDPILEARQKYAYGPQHDYLDHPDVIGWTREGDSSHPKSGLATLITDGPGGSKRMYAGLKNAGETWYDITGNRSDTVKIGSDGWGEFHVNGASVSIYVQK

SEQ ID NO: 42245 - protein, 480 aa, Bacillus sp.
NGTMMQYFEWYLPNDGNHWNRLNSDASNLKSKGIKAVWIPPAWKGASQNDVGYGAYDLYDLGEFNQRGTVRTKYGTRSQLQAAVTSLKNNGIQVYGDVVMNHKGGADATEMVRAVEVNPNNRNQEVTGEYTIEAWTRFDFPGRGNTHSSFKWRWYHFDGVDWDQSRRLNNRIYKFRGHGKAWDWEVDTEFGNYDYLMYADYDMDHPEVVNELRNWGVWYTNTLGLDGFRIDAVKHIKYSFTRDWINHVRSATGKNMFAVAEFWKNDLGAIENYLQKTNWNHSVFDVPLHYNLYNASKSGGNYDMRNIFNGTVVQRHPSHAVTFVDNHDSQPEEALESFVDPWFKPLAYALTLTREQGYPSVFYGDYYGIPTHGVPAMRSKIDPILEARQKYAYGPQHDYLDHPDVIGWTREGDSSHPKSGLATLITDGPGGSKRMYAGLKNAGETWYDITGNRSDTVKIGSDGWGEFHVNGGSVSIYVQK

SEQ ID NO: 42246 - protein, 480 aa, Bacillus sp.
NGTMMQYFEWYLPNDGNHWNRLNSDASNLKSKGITAVWIPPAWKGASQNDVGYGAYDLYDLGEFNQKGTVRTKYGTRSQLQAAVTSLKNNGIQVYGDVVMNHKGGANATEMVRAVEVNPNNRNQEVTGEYTIEAWTRFDFPGRGNTHSSFKWRWYHFDGVDWDQSRRLNNRIYKFRGHGKAWDWEVDTEFGNYDYLMYADYDMDHPEVVNELRNWGVWYTNTLGLDGFRIDAVKHIKYSFTRDWINHVRSATGKNMFAVAEFWKNDLGAIENYLQKTNWNHSVFDVPLHYNLYNASKSGGNYDMRNIFNGTVVQMHPMHAVTFVDNHDSQPEEALESFVEEWFKPLAYALTLTREQGYPSVFYGDYYGIPTHGVPAMRSKIDPILEARQKYAYGPQHDYLDHPDVIGWTREGDSSHPKSGLATLITDGPGGSKRMYAGLKNAGGTWYDITGNRSDTVKIGSDGWGEFHVNDGSVSIYVQK

SEQ ID NO: 42247 - protein, 480 aa, Bacillus sp.
NGTMMQYFEWYLPNDGNHWNRLNSDASNLKSKGITAVWIPPAWKGASQNDVGYGAYDLYDLGEFNQKGTVRTKYGTRSQLQAAVTSLKNNGIQVYGDVVMNHKGGADATEMVRAVEVNPNNRNQEVTGEYTIEAWTRFDFPGRGNTHSSFKWRWYHFDGVDWDQSRRLNNRIYKFRGHGKAWDWEVDTEFGNYDYLMYADYDMDHPEVVNELRNWGVWYTNTLGLDGFRIDAVKHIKYSFTRDWINHVRSATGKNMFAVAEFWKNDLGAIENYLQKTNWNHSVFDVPLHYNLYNASKSSGNYDMRNIFNGTVVQRHPSHAVTFVDNHDSQPEEALESFVDEWFKPLAYALTLTREQGYPSVFYGDYYGIPTHGVPAMRSKIDPILEARQKYAYGPQHDYLDHPDVIGWTREGDSSHPKSGLATLITDGPGGSKRMYAGLKNAGETWYDITGNRSDTVKIGSDGWGEFHVNKQSVSIYVQK

SEQ ID NO: 42248 - protein, 480 aa, Bacillus sp.
NGTMMQYFEWYLPNDGNHWNRLNSDASNLKSKGITAVWIPPAWKGASQNDVGYGAYDLYDLGEFNQKGTVRTKYGTRSQLQAAVTSLKNNGIQVYGDVVMNHKGGADATEMVRAVEVNPNNRNQEVTGEYTIEAWTRFDFPGRGNTHSSFKWRWYHFDGVDWDQSERLNNRIYKFRGHGKAWDWEVETEFGNYDYLMYADYDMDHPEVVNELRNWGVWYTNTLGLDGFRIDAVKHIKYSFTRDWINHVRSATGKNMFAVAEFWKNDLGAIENYLSKTNWNHSVFDVPLHYNLYNASKSGGNYDMRNIFNGTVVQRHPSHAVTFVDNHDSQPEEALESFVEEWFKPLAYALTLTREAGLPSVFYGDYYGIPTHGVPAMRSKIDPILLARQKYAYGPQHDYLDHPDVIGWTREGDSSHPPSGLATLITDGPGGSKRMYAGLKNAGETWYDITGNRSDTVKIGSDGWGEFHVNDGSVSIYVQK

SEQ ID NO: 42249 - protein, 493 aa, Aspergillus terreus NIH2624
TIFLFLAIFVATALAATPAEWRSQSIYFLLTDRFARTDNSTTASCDLSARQYCGGSWQGIINQLDYIQGMGFTAIWITPVTAQIPQDTGYGQAYHGYWQQDAYALNSHYGTADDLKALASALHSRGMYLMVDVVANHMGHNGTGSSVDYSVYRPFNSQKYFHNLCWISDYNNQTNVEDCWLGDNTVALPDLDTTSTEVKNMWYDWVESLVSNYSVDGLRVDTVKNVQKNFWPGYNNASGVYCIGEVFDGDASYTCPYQEDLDGVLNYPMYYPLLRAFESTNGSISDLYNMINTVKSTCRDSTLLGTFVENHDNPRFANYTSDMSLAKNAATFTILADGIPIIYAGQEQHYSGGNDPYNREATWLSGYKTTSELYTHIAASNKIRTHAIKQDTGYLTYKNYPIYQDTSTLAMRKGYNGTQTITVLSNLGASGSSYTLSLPGTGYTAGQKITEIYTCTNLTVNSNGSVPVPMKSGLPRILYPADKLVNGSSFCNT

SEQ ID NO: 42250 - protein, 488 aa, Penicillium expansum
WLAGLVSTAVAATPAEWRSQSIYFMLTDRFARTDGSTTAACDTADRKYCGGTWQGIIDKLDYIQGMGFTAIWITPVTGQLSGETAYGDAYHGYWQQDIYSLDSNYGTADDLKALAAALHERNMYLMVDVVANHMGYNGPGTDVDYTKFNPFNDAKYFHSYCPITDYNDDTMSQNCWLGDNKVSLPDLNTQSKEVQDLWYDWVGSLVSNYSIDGLRVDTVKHVQKDFWPGYNKAAGVYCVGEILDGDPDYTCPYQEVMDGVLNYPIYYPLLKAFQSTSGSMTDLYNMINTVKSTCKDSTLLGNFLENHDNPRFAHVTDDIALAKNAATFTIMADGIPIVYAGQEQHYSGGEDPANREALWLSGYNTDSELYKLIAKANGARSQAIAKGTNYTIYQNQPIYKDESTIAMRKGFDGGQTITVLTNLGAGGKEDSVSIPDTGFKAGAKLTEVVSCASVTVGDNGEVSVPMAAGAPRILLPTFLLEGSTLCSS

SEQ ID NO: 42251 - protein, 485 aa, Geobacillus stearothermophilus
HXXXXNGTMMQYFEWHLPXDGXXWXKLXXDAXNLXXXGITAIWIPPAWKGTSXXDVGYGXYDLYDLGEFNQKGTVRTKYGTKAQXXXAIXAXXXXGMQVYADVVXXHKGGADATEXVXAVEVNPXXRNQEISGXYXIXAWTKFDFPGRGNTYSXFKWRWYHFDGVDWDXSRQXXXRIYKFRGXGKAWDWEVDSENGNYDYLMYADLDMDHPEVVXELKXWGXWYXNTXNIDGFRIDAVKHIKFSFXXDWLSHVRXXTGKXLFXVAEFWXXDIXXLXNYIXKTNXXXSLFDXPLHXXXYXASXSGGXFDMXXLLXXTLMXXXPXXAVTFVDNHDSXPGXALXSFVXXWFKPLAYAXILTRXXGYPXVFYGDYYGIPXHXIPALKAKIDPILXARXXFAYGTQHDYXDHXXIIGWTREGXTXXPXSGLAXIISDGPGGXKWMYVGXNXAGXVFHDITGNKXXTVTINADGWAXFXVNGGSVSIWVXR

SEQ ID NO: 42252 - protein, 480 aa, Bacillus sp.
NGTIMQYFEWNVPNDGQHWNRLHNNAQNLKNAGITAIWIPPAWKGTSQNDVGYGAYDLYDLGEFNQKGTVRTKYGTKAELERAIRSLKANGIQVYGDVVMNHKGGADFTERVQAVEVNPQNRNQEVSGTYEIEAYTGFNFPGRGNQHSSFKWRWYHFDGTDWDQSRQLSNRIYKFRGDGKAWDWEVDTENGNYDYLMYADVDMNHPEVINELNRWGVWYANTLNLDGFRLDAVKHIQFSFMRNWLGHVRGQTGKNLFAVAEYWKNDLGALENYLSKTNWTMSAFDVPLHYNLYQASNSRGNYDMRNLLNGTLVQRHPSHAVTFVDNHDTQPGEALESFVQGWFKPLAYATILTREQGYPQVFYGDYYGIPSDGVPSYRQQIDPLLKARQKYAYGPQHDYLDHPDVIGWTREGDSSHPKSGLATLITDGPGGSKRMYAGLKNAGETWYDITGNRSDTVKIGSDGWGEFHVKDGSVSIYVQK

SEQ ID NO: 42253 - protein, 480 aa, Bacillus sp.
NGTIMQYFEWNVPNDGQHWNRLHNNAQNLKNAGITAIWIPPAWKGTSQNDVGYGAYDLYDLGEFNQKGTVRTKYGTKAELERAIRSLKANGIQVYGDVVMNHKGGADFTERVQAVEVNPQNRNQEVSGTYEIEAYTGFNFPGRGNQHSSFKWRWYHFDGTDWDQSRQLSNRIYKFRGDGKAWDWEVDTENGNYDYLMYADVDMNHPEVINELNRWGVWYANTLNLDGFRLDAVKHIQFSFMRNWLGHVRGQTGKNLFAVAEYWKNDLGALENYLSKTNWTMSAFDVPLHYNLYQASNSGKNYDMRNLLNGTLVQRHPSHAVTFVDNHDTQPGEALESFVQGWFKPLAYATILTREQGYPQVFYGDYYGIPSDGVPSYRQQIDPLLKARQKYAYGPQHDYLDHPDVIGWTREGDSSHPKSGLATLITDGPGGSKRMYAGLKNAGETWYDITGNRSDTVKIGSDGWGEFHVNDKSVSIYVQK

SEQ ID NO: 42254 - protein, 480 aa, Bacillus sp.
NGTIMQYFEWNVPNDGQHWNRLHNNAQNLKNAGITAIWIPPAWKGTSQNDVGYGAYDLYDLGEFNQKGTVRTKYGTKAELERAIRSLKANGIQVYGDVVMNHKGGADFTERVQAVEVNPQNRNQEVSGTYEIEAYTGFNFPGRGNQHSSFKWRWYHFDGTDWDQSRQLSNRIYKFRGDGKAWDWEVDTENGNYDYLMYADVDMNHPEVINELNRWGVWYANTLNLDGFRLDAVKHIQFSFMRNWLGHVRGQTGKPLFAVAEYWKNDLGALENYLSKTNWTMSAFDVPLHYNLYQASNSRGNYDMRNLLNGTLVQRHPSHAVTFVDNHDTQPGEALESFVQGWFKPLAYATILTREQGYPQVFYGDYYGIPSDGVPSYRQQIDPLLKARQKYAYGPQHDYLDHPDVIGWTREGDSSHPKSGLATLITDGPGGSKRMYAGLKNAGETWYDITGNRSDTVKIGSDGWGEFHVKDGSVSIYVQK

SEQ ID NO: 42255 - protein, 480 aa, Bacillus sp.
NGTIMQYFEWNVPNDGQHWNRLHNNAQNLKNAGITAIWIPPAWKGTSQNDVGYGAYDLYDLGEFNQKGTVRTKYGTKAELERAIRSLKANGIQVYGDVVMNHKGGADFTERVQAVEVNPQNRNQEVSGTYEIEAYTGFNFPGRGNQHSSFKWRWYHFDGTDWDQSRQLSNRIYKFRGDGKAWDWEVDTENGNYDYLMYADVDMNHPEVINELNRWGVWYANTLNLDGFRLDAVKHIQFSFMRNWLGHVRGQTGKPLFAVAEYWKNDLGALENYLSKTNWTMSAFDVPLHYNLYQASNSGKNYDMRNLLNGTLVQRHPSHAVTFVDNHDTQPGEALESFVQGWFKPLAYATILTREQGYPQVFYGDYYGIPSDGVPSYRQQIDPLLKARQKYAYGPQHDYLDHPDVIGWTREGDSSHPKSGLATLITDGPGGSKRMYAGLKNAGETWYDITGNRSDTVKIGSDGWGEFHVNKGSVSIYVQK

SEQ ID NO: 42256 - protein, 480 aa, Bacillus sp.
NGTIMQYFEWNVPNDGQHWNRLHNNAQNLKNAGITAIWIPPAWKGTSQNDVGYGAYDLYDLGEFNQKGTVRTKYGTKAELERAIRSLKANGIQVYGDVVMNHKGGADFTERVQAVEVNPQNRNQEVSGTYEIEAYTGFNFPGRGNQHSSFKWRWYHFDGTDWDQSRQLSNRIYKFRGDGKAWDWEVDTENGNYDYLMYADVDMNHPEVINELNRWGVWYANTLNLDGFRLDAVKHIQFSFMRNWLGHVRGQTGKNLFAVAEYWKNDLGALENYLSKTNWTMSAFDVPLHYNLYQASNSRGNYDMRNLLNGTLVQRHPSHAVTFVDNHDTQPGEALESFVQGWFKPLAYATILTREQGYPQVFYGDYYGIPSDGVPSYRQQIDPLLKARQKYAYGPQHDYLDHPDVIGWTREGDSSHPKSGLATLITDGPGGSKRMYAGLKNAGETWYDITGNRSDTVKIGSDGWGEFHVNKGSVSIYVQK

SEQ ID NO: 42257 - protein, 480 aa, Bacillus sp.
NGTIMQYFEWNVPNDGQHWNRLHNNAQNLKNAGITAIWIPPAWKGTSQNDVGYGAYDLYDLGEFNQKGTVRTKYGTKAELERAIRSLKANGIQVYGDVVMNHKGGADFTERVQAVEVNPQNRNQEVSGTYEIEAYTGFNFPGRGNQHSSFKWRWYHFDGTDWDQSRQLSNRIYKFRGDGKAWDWEVDTENGNYDYLMYADVDMNHPEVINELNRWGVWYANTLNLDGFRLDAVKHIQFSFMRNWLGHVRGQTGKPLFAVAEYWKNDLGALENYLSKTNWTMSAFDVPLHYNLYQASNSRGNYDMRNLLNGTLVQRHPSHAVTFVDNHDTQPGEALESFVQGWFKPLAYATILTREQGYPQVFYGDYYGIPSDGVPSYRQQIDPLLKARQKYAYGPQHDYLDHPDVIGWTREGDSSHPKSGLATLITDGPGGSKRMYAGLKNAGETWYDITGNRSDTVKIGSDGWGEFHVNDKSVSIYVQK

SEQ ID NO: 42258 - protein, 480 aa, Bacillus sp.
NGTIMQYFEWNVPNDGQHWNRLHNNAQNLKNAGITAIWIPPAWKGTSQNDVGYGAYDLYDLGEFNQKGTVRTKYGTKAELERAIRSLKANGIQVYGDVVMNHKGGADFTERVQAVEVNPQNRNQEVSGTYEIEAYTGFNFPGRGNQHSSFKWRWYHFDGTDWDQSRQLSNRIYKFRGDGKAWDWEVDTENGNYDYLMYADVDMNHPEVINELNRWGVWYANTLNLDGFRLDAVKHIQFSFMRNWLGHVRGQTGKNLFAVAEYWKNDLGALENYLSKTNWTMSAFDVPLHYNLYQASNSGKNYDMRNLLNGTLVQRHPSHAVTFVDNHDTQPGEALESFVQGWFKPLAYATILTREQGYPQVFYGDYYGIPSDGVPSYRQQIDPLLKARQKYAYGPQHDYLDHPDVIGWTREGDSSHPKSGLATLITDGPGGSKRMYAGLKNAGETWYDITGNRSDTVKIGSDGWGEFHVKDGSVSIYVQK

SEQ ID NO: 42259 - protein, 480 aa, Bacillus sp.
NGTIMQYFEWNVPNDGQHWNRLHNNAQNLKNAGITAIWIPPAWKGTSQNDVGYGAYDLYDLGEFNQKGTVRTKYGTKAELERAIRSLKANGIQVYGDVVMNHKGGADFTERVQAVEVNPQNRNQEVSGTYEIEAYTGFNFPGRGNQHSSFKWRWYHFDGTDWDQSRQLSNRIYKFRGDGKAWDWEVDTENGNYDYLMYADVDMNHPEVINELNRWGVWYANTLNLDGFRLDAVKHIQFSFMRNWLGHVRGQTGKPLFAVAEYWKNDLGALENYLSKTNWTMSAFDVPLHYNLYQASNSGKNYDMRNLLNGTLVQRHPSHAVTFVDNHDTQPGEALESFVQGWFKPLAYATILTREQGYPQVFYGDYYGIPSDGVPSYRQQIDPLLKARQKYAYGPQHDYLDHPDVIGWTREGDSSHPKSGLATLITDGPGGSKRMYAGLKNAGETWYDITGNRSDTVKIGSDGWGEFHVNDKSVSIYVQK

SEQ ID NO: 42260 - protein, 480 aa, Bacillus sp.
NGTIMQYFEWNVPNDGQHWNRLHNNAQNLKNAGITAIWIPPAWKGTSQNDVGYGAYDLYDLGEFNQKGTVRTKYGTKAELERAIRSLKANGIQVYGDVVMNHKGGADFTERVQAVEVNPQNRNQEVSGTYEIEAYTGFNFPGRGNQHSSFKWRWYHFDGTDWDQSRQLSNRIYKFRGDGKAWDWEVDTENGNYDYLMYADVDMNHPEVINELNRWGVWYANTLNLDGFRLDAVKHIQFSFMRNWLGHVRGQTGKNLFAVAEYWKNDLGALENYLSKTNKTMSAFDVPLHYNLYQASNSGKNYDMRNLLNGTLVQRHPSHAVTFVDNHDTQPGEALESFVQGWFKPLAYATILTREQGYPQVFYGDYYGIPSDGVPSYRQQIDPLLKARQKYAYGPQHDYLDHPDVIGWTREGDSSHPKSGLATLITDGPGGSKRMYAGLKNAGETWYDITGNRSDTVKIGSDGWGEFHVNDKSVSIYVQK

SEQ ID NO: 42261 - protein, 512 aa, Bacillus sp. 707
NGTMMQYFEWYLPXDGXXWXKLXXDAXNLXXXGISALWIPPAWKGXSXXDVGYGXYDLYDLGEFNQKGTIRTKYGTKXQXXXAINAXXAXGIQVYADVVXXHKGGADATEXVXAVEVNPXXRNQEISGXYXIXAWTKFDFPGRGNTHSXFKWRWYHFDGVDWDXSRKLXNRIYKFRGXGKAWDWEVDTENGNYDYLMYADIDMDHPEVVXELKNWGXWYXNTXXIDGFRIDAVKHIKFSFXXDWIXHVRSXTGKXLFXVAEFWXXDIXXIXNYIXKTNXXXSLFDXPLHXXXYXASKSGGXFDMRXIXXXTLMXXXPXXAVTFVDNHDSXPXXALXSFVDXWFKPLAYAXXLTRXXGYPXVFYGDYYGIPXHXIPALKSKIDPILXARXXYAYGXQXDYLDHXXIIGWTREGXTXXPXSGLAXIISDGXGGXKWMFVGKNXAGXVFXDITGNRAXTVTINADGWGXFXVNGGSVSIWVXKKTTVSTIARPITTRPWTGEFVRWTEPRLVAWP

SEQ ID NO: 42262 - protein, 478 aa, Bacillus sp.
NGTMMQYFEWYLPNDGNHWNRLNSDASNLKSKGITAVWIPPAWKGASQNDVGYGAYDLYDLGEFNQKGTVRTKYGTRSQLQAAVTSLKNNGIQVYGDVVMNHKGGADATEMVRAVEVNPNNRNQEVTGEYTIEAWTRFDFPGRGNTHSSFKWRWYHFDGVDWDQSRRLDNRIYKFRGKAWDWEVDTEFGNYDYLMYTDYDMDHPEVVNELRNWGVWYTNTLGLDGFRIDAVKHIKYSFTRDWINHVRSATGKNMFAVAEFWKNDLGAIENYLQKTNWNHSVFDVPLHYNLYNASKSSGNYDMRNIFNGTVVQRHPSHAVTFVDNHDSQPEEALESFVDEWFKPLAYALTLTREQGYPSVFYGDYYGIPTHGVPAMRSKIDPILEARQKYAYGPQHDYLDHPDVIGWTREGDSSHPKSGLATLITDGPGGSKRMYAGLKNAGETWYDITGNRSDTVKIGSDGWGEFHVNKQSVSIYVQK

SEQ ID NO: 42263 - protein, 478 aa, Bacillus sp.
NGTMMQYFEWYLPNDGNHWNRLNSDASNLKSKGITAVWIPPAWKGASQNDVGYGAYDLYDLGEFNQKGTVRTKYGTRSQLQAAVTSLKNNGIQVYGDVVMNHKGGADATEMVRAVEVNPNNRNQEVTGEYTIEAWTRFDFPGRGNTHSSFKWRWYHFDGVDWDQSRELDNRIYKFRGKAWDWEVDTEFGNYDYLMYTDYDMDHPEVVNELRNWGVWYTNTLGLDGFRIDAVKHIKYSFTRDWINHVRSATGKNMFAVAEFWKNDLGAIENYLQKTNWNHSVFDVPLHYNLYNASKSQGNYDMRNIFNGTVVQAHPNHAVTFVDNHDSQPEEALESFVDTWFKPLAYALTLTREQGYPSVFYGDYYGIPTHGVPAMRSKIDPILEARQKYAYGPQHDYLDHPDVIGWTREGDSSHPKSGLATLITDGPGGSKRMYAGLKNAGETWYDITGNRSDTVKIGSDGWGEFHVNGSSVSIYVQK

SEQ ID NO: 42264 - protein, 478 aa, Bacillus sp.
NGTMMQYFEWYLPNDGNHWNRLNSDASNLKSKGITAVWIPPAWKAVSQNDVGYGAYDLYDLGEFNQKGTVRTKYGTRSQLQAAVTSLKNNGIQVYGDVVMNHKGGADATEMVRAVEVNPNNRNQEVTGEYTIEAYTRFDFPGRGNTHSSFKWRWYHFDGVDFDQSREFTNRIYKFRGKAWDWEVDTEFGNYDYLMYADYDYDHPESTNEMRNWGVWYTNTLGLDGFRIDAVKHIKYSFTRDWINHVRSATGKNMFAVAEFWKNDLGAIENYLQKTNWNHSVFDVPLHYNLYNASKSGGNYDMRNIFNGTVVQRHPSHAVTFVDNHDSQPEEALESFVEEWFKPLAYALTLTREQGYPSVFYGDYYGIPTHGVPAMRSKIDPILEARQKYAYGPQHDYLDHPDVIGWTREGDSSHPKSGLATLITDGPGGSKRMYAGLKNAGETWYDITGNRSDTVKIGSDGWGEFHVNDGSVSIYVQK

SEQ ID NO: 42265 - protein, 478 aa, Bacillus sp.
NGTMMQYFEWYLPNDGNHWNRLNSDASNLKSKGITAVWIPPAWKGASQNDVGYGAYDLYDLGEFNQRGTVRTKYGTRSQLQAAVTSLKNNGIQVYGDVVMNHKGGADLTEMVRAVEVNPNNRNQEVTGEYTIEAWTRFDFPGRGNTHSSFKWRWYHFDGVDFDQSRRLNNRIYKFRGKAWDWEVDTEFGNYDYLMYADYDMDHPEVVNELRNWGVWYTNTLGLDGFRIDAVKHIKYSFTRDWINHVRIATGKNMFAVAEFWKNDLGAIENYLQKTNWNHSVFDVPLHYNLYNASKSGGNYDMRNIFNGTVVQRHPSHAVTFVDNHDSQPEEALESFVDEWFKPLAYALTLTREQGYPSVFYGDYYGIPTHGVPAMRSKIDPILEARQKYAYGPQHDYLDHPDVIGWTREGDSSHPKSGLATLITDGPGGSKRMYAGLKNAGETWYDITGNRSDTVKIGSDGWGEFHVNDQSVSIYVQK

SEQ ID NO: 42266 - protein, 478 aa, Bacillus sp.
NGTMMQYFEWYLPNDGNHWNRLNSDASNLKSKGIKAVWIPPAWKGASQNDVGYGAYDLYDLGEFNQRGTVRTKYGTRSQLQAAVTSLKNNGIQVYGDVVMNHKGGADATEMVRAVEVNPNNRNQEVTGEYTIEAWTRFDFPGRGNTHSSFKWRWYHFDGVDWDQSRNFQNRIYKFRGKAWDWEVDTEFGNYDYLMYADYDMDHPEVVNELRNWGVWYTNTLGLDGFRIDAVKHIKYSFTRDWINHVRSATGKNMFAVAEFWKNDLGAIENYLQKTNWNHSVFDVPLHYNLYNASKSQGNYDMRNIFNGTVVQRHPSHAVTFVDNHDSQPEEALESFVDTWFKPLAYALTLTREQGYPSVFYGDYYGIPTHGVPAMRSKIDPILEARQKYAYGPQHDYLDHPDVIGWTREGDSSHPKSGLATLITDGPGGSKRMYAGLKNAGETWYDITGNRSDTVKIGSDGWGEFHVNGSSVSIYVQK

SEQ ID NO: 42267 - protein, 478 aa, Bacillus sp.
NGTMMQYFEWYLPNDGNHWNRLNSDASNLKSKGITAVWIPPAWKGASQNDVGYGAYDLYDLGEFNQKGTVRTKYGTRSQLQAAVTSLKNNGIQVYGDVVMNHKGGADATEMVRAVEVNPNNRNQEVTGEYTIEAYTRFDFPGRGNTHSSFKWRWYHFDGVDFDQSRDLTNRIYKFRGKAWDWEVDTEFGNYDYLMYVDYDMDHPEVVNELRNWGVWYTNTLGLDGFRIDAVKHIKYSFTRDWINHVRNATGKNMFAVAEFWKNDLGAIENYLQKTNWNHSVFDVPLHYNLYNASKSGGNYDMRNIFNGTVVQRHPSHAVTFVDNHDSQPEEALESFVDEWFKPLAYALTLTREQGYPSVFYGDYYGIPTHGVPAMRSKIDPILEARQKYAYGPQHDYLDHPDVIGWTREGDSSHPKSGLATLITDGPGGSKRMYAGLKNAGETWYDITGNRSDTVKIGSDGWGEFHVNDQSVSIYVQK

SEQ ID NO: 42268 - protein, 478 aa, Bacillus sp.
NGTMMQYFEWYLPNDGNHWNRLNSDASNLKSKGITAVWIPPAWKGASQNDVGYGAYDLYDLGEFNQKGTVRTKYGTRSQLQAAVTSLKNNGIQVYGDVVMNHKGGADATEMVRAVEVNPNNRNQEVTGEYTIEAYTRFDFPGRGNTHSSFKWRWYHFDGVDFDQSRDLTNRIYKFRGKAWDWEVDTEFGNYDYLMYVDYDMDHPEVVNELRNWGVWYTNTLGLDGFRIDAVKHIKYSFTRDWINHVRIATGKNMFAVAEFWKNDLGAIENYLQKTNWNHSVFDVPLHYNLYNASKSGGNYDMRNIFNGTVVQRHPSHAVTFVDNHDSQPEEALESFVDPWFKPLAYALTLTREQGYPSVFYGDYYGIPTHGVPAMRSKIDPILEARQKYAYGPQHDYLDHPDVIGWTREGDSSHPKSGLATLITDGPGGSKRMYAGLKNAGETWYDITGNRSDTVKIGSDGWGEFHVNDQSVSIYVQK

SEQ ID NO: 42269 - protein, 478 aa, Bacillus sp.
NGTMMQYFEWYLPNDGNHWNRLNSDASNLKSKGIKAVWIPPAWKGASQNDVGYGAYDLYDLGEFNQRGTVRTKYGTRSQLQAAVTSLKNNGIQVYGDVVMNHKGGADATEMVRAVEVNPNNRNQEVTGEYTIEAWTRFDFPGRGNTHSSFKWRWYHFDGVDFDQSRRLNNRIYKFRGKAWDWEVDTEFGNYDYLMYADYDMDHPEVVNELRNWGVWYTNTLGLDGFRIDAVKHIKYSFTRDWINHVRSATGKNMFAVAEFWKNDLGAIENYLQKTNWNHSVFDVPLHYNLYNASKSGGNYDMRNIFNGTVVQAHPSQAVTFVDNHDSQPEEALESFVEEWFKPLAYALTLTREQGYPSVFYGDYYGIPTHGVPAMRSKIDPILEARQKYAYGPQHDYLDHPDVIGWTREGDSSHPKSGLATLITDGPGGSKRMYAGLKNAGETWYDITGNRSDTVKIGSDGWGEFHVNDGSVSIYVQK

SEQ ID NO: 42270 - protein, 478 aa, Bacillus sp.
NGTMMQYFEWYLPNDGNHWNRLNSDASNLKSKGITAVWIPPAWKGTSQNDVGYGAYDLYDLGEFNQKGTVRTKYGTRSQLQAAVTSLKNNGIQVYGDVVMNHKGGADATEMVRAVEVNPNNRNQEVTGEYTIEAWTRFDFPGRGNTHSSFKWRWYHFDGVDWDQSRNLNNRIYKFRGKAWDWEVDTEFGNYDYLMYVDYDYDHPETTNEMRNWGVWYTNTLGLDGFRIDAVKHIKYSFTRDWINHVRSATGKNMFAVAEFWKNDLGAIENYLQKTNWNHSVFDVPLHYNLYNASKSQGNYDMRNIFNGTVVQRHPSHAVTFVDNHDSQPEEALESFVDTWFKPLAYALTLTREQGYPSVFYGDYYGIPTHGVPAMRSKIDPILEARQKYAYGPQHDYLDHPDVIGWTRKGDSSHPKSGLATLITDGPGGSNRMYAGLKNAGETWYDITGNRSDTVKIGSDGWGEFHVNDGSVSIYVQK

SEQ ID NO: 42271 - protein, 478 aa, Bacillus sp.
NGTMMQYFEWYLPNDGNHWNRLNSDASNLKSKGITAVWIPPAWKAVSQNDVGYGAYDLYDLGEFNQKGTVRTKYGTRSQLQAAVTSLKNNGIQVYGDVVMNHKGGADATEMVRAVEVNPNNRNQEVTGEYTIEAWTRFDFPGRGNTHSSFKWRWYHFDGVDFDQSREFTNRIYKFRGKAWDWEVDTEFGNYDYLMYADYDYDHPESTNEMRNWGVWYTNTLGLDGFRIDAVKHIKYSFTRDWINHVRSATGKNMFAVAEFWKNDLGAIENYLQKTNWNHSVFDVPLHYNLYNASKSGGNYDMRNIFNGTVVQRHPSHAVTFVDNHDSQPEEALESFVPEWFKPLAYALTLTREQGYPSVFYGDYYGIPTHGVPAMRSKIDPILEARQKYAYGPQHDYLDHPDVIGWTREGDSSHPKSGLATLITDGPGGSKRMYAGLKNAGETWYDITGNRSDTVKIGSDGWGEFHVNGGSVSIYVQK

SEQ ID NO: 42272 - protein, 478 aa, Bacillus sp.
NGTMMQYFEWYLPNDGNHWNRLNSDASNLKSKGITAVWIPPAWKATSQNDVGYGAYDLYDLGEFNQKGTVRTKYGTRSQLQAAVTSLKNNGIQVYGDVVMNHKGGADATEMVRAVEVNPNNRNQEVTGEYTIEAWTRFDFPGRGNTHSSFKWRWYHFDGVDWDQSRELNNRIYKFRGKAWDWEVDTEFGNYDYLMYTDYDMDHPEVVNELRNWGVWYTNTLGLDGFRIDAVKHIKYSFTRDWINHVRSATGKNMFAVAEFWKNDLGAIENYLQKTNWNHSVFDVPLHYNLYNASKSGGNYDMRNIFNGTVVQRHPSHAVTFVDNHDSQPEEALESFVDEWFKPLAYALTLTREQGYPSVFYGDYYGIPTHGVPAMRSKIDPILEARQKYAYGPQHDYLDHPDVIGWTREGDSSHPKSGLATLITDGPGGSKRMYAGLKNAGETWYDITGNRSDTVKIGSDGWGEFHVNKSSVSIYVQK

SEQ ID NO: 42273 - protein, 478 aa, Bacillus sp.
NGTMMQYFEWYLPNDGNHWNRLNSDASNLKSKGITAVWIPPAWKGTSQNDVGYGAYDLYDLGEFNQRGTVRTKYGTRSQLQAAVTSLKNNGIQVYGDVVMNHKGGADATEMVRAVEVNPNNRNQEVTGEYTIEAWTRFDFPGRGNTHSSFKWRWYHFDGVDWDQSRNLNNRIYKFRGKAWDWEVDTEFGNYDYLMYVDYDMDHPEVVNELRNWGVWYTNTLGLDGFRIDAVKHIKYSFTRDWINHVRSATGKNMFAVAEFWKNDLGAIENYLQKTNWNHSVFDVPLHYNLYNASKSQGNYDMRNIFNGTVVQRHPSHAVTFVDNHDSQPEEALESFVDTWFKPLAYALTLTREQGYPSVFYGDYYGIPTHGVPAMRSKIDPILEARQKYAYGPQHDYLDHPDVIGWTREGDSSHPKSGLATLITDGPGGSKRMYAGLKNAGETWYDITGNRSDTVKIGSDGWGEFHVNGSSVSIYVQK

SEQ ID NO: 42274 - protein, 478 aa, Bacillus sp.
NGTMMQYFEWYLPNDGNHWNRLNSDASNLKSKGIKAVWIPPAWKGASQNDVGYGAYDLYDLGEFNQKGTVRTKYGTRSQLQAAVTSLKNNGIQVYGDVVMNHKGGADATEMVRAVEVNPNNRNQEVTGEYTIEAWTRFDFPGRGNTHSSFKWRWYHFDGVDWDQSRELDNRIYKFRGKAWDWEVDTEFGNYDYLMYTDYDMDHPEVVNELRNWGVWYTNTLGLDGFRIDAVKHIKYSFTRDWINHVRSATGKNMFAVAEFWKNDLGAIENYLQKTNWNHSVFDVPLHYNLYNASKSQGNYDMRNIFNGTVVQRHPSHAVTFVDNHDSQPEEALESFVDTWFKPLAYALTLTREQGYPSVFYGDYYGIPTHGVPAMRSKIDPILEARQKYAYGPQHDYLDHPDVIGWTREGDSSHPKSGLATLITDGPGGSKRMYAGLKNAGETWYDITGNRSDTVKIGSDGWGEFHVNGSSVSIYVQK

SEQ ID NO: 42275 - protein, 478 aa, Bacillus sp.
NGTMMQYFEWYLPNDGNHWNRLNSDASNLKSKGITAVWIPPAWKAVSQNDVGYGAYDLYDLGEFNQKGTVRTKYGTRSQLQAAVTSLKNNGIQVYGDVVMNHKGGADLTEMVRAVEVNPNNRNQEVTGEYTIEAWTRFDFPGRGNTHSSFKWRWYHFDGVDWDQSREFTNRIYKFRGKAWDWEVDTEFGNYDYLMYVDYDMDHPEVVNELRNWGVWYTNTLGLDGFRIDAVKHIKYSFTRDWINHVRSATGKNMFAVAEFWKNDLGAIENYLQKTNWNHSVFDVPLHYNLYNASKSGGNYDMRNIFNGTVVQAHPNHAVTFVDNHDSQPEEALESFVEEWFKPLAYALTLTREQGYPSVFYGDYYGIPTHGVPAMRSKIDPILEARQKYAYGPQHDYLDHPDVIGWTREGDSSHPKSGLATLITDGPGGSKRMYAGLKNAGETWYDITGNRSDTVKIGSDGWGEFHVNDGSVSIYVQK

SEQ ID NO: 42276 - protein, 478 aa, Bacillus sp.
NGTMMQYFEWYLPNDGNHWNRLNSDASNLKSKGIKAVWIPPAWKGASQNDVGYGAYDLYDLGEFNQRGTVRTKYGTRSQLQAAVTSLKNNGIQVYGDVVMNHKGGADLTEMVRAVEVNPNNRNQEVTGEYTIEAWTRFDFPGRGNTHSSFKWRWYHFDGVDFDQSRRLNNRIYKFRGKAWDWEVDTEFGNYDYLMYADYDMDHPEVVNELRNWGVWYTNTLGLDGFRIDAVKHIKYSFTRDWINHVRSATGKNMFAVAEFWKNDLGAIENYLQKTNWNHSVFDVPLHYNLYNASKSGGNYDMRNIFNGTVVQRHPSHAVTFVDNHDSQPEEALESFVEEWFKPLAYALTLTREQGYPSVFYGDYYGIPTHGVPAMRSKIDPILEARQKYAYGPQHDYLDHPDVIGWTREGDSSHPKSGLATLITDGPGGSKRMYAGLKNAGETWYDITGNRSDTVKIGSDGWGEFHVNDGSVSIYVQK

SEQ ID NO: 42277 - protein, 478 aa, Bacillus sp.
NGTMMQYFEWYLPNDGNHWNRLNSDASNLKSKGIKAVWIPPAWKGTSQNDVGYGAYDLYDLGEFNQKGTVRTKYGTRSQLQAAVTSLKNNGIQVYGDVVMNHKGGADATEMVRAVEVNPNNRNQEVTGEYTIEAWTRFDFPGRGNTHSSFKWRWYHFDGVDWDQSRNLNNRIYKFRGKAWDWEVDTEFGNYDYLMYVDYDMDHPEVVNELRNWGVWYTNTLGLDGFRIDAVKHIKYSFTRDWINHVRSATGKNMFAVAEFWKNDLGAIENYLQKTNWNHSVFDVPLHYNLYNASKSQGNYDMRNIFNGTVVQRHPSHAVTFVDNHDSQPEEALESFVDTWFKPLAYALTLTREQGYPSVFYGDYYGIPTHGVPAMRSKIDPILEARQKYAYGPQHDYLDHPDVIGWTREGDSSHPKSGLATLITDGPGGSKRMYAGLKNAGETWYDITGNRSDTVKIGSDGWGEFHVNGSSVSIYVQK

SEQ ID NO: 42278 - protein, 478 aa, Bacillus sp.
NGTMMQYFEWYLPNDGNHWNRLNSDASNLKSKGITAVWIPPAWKAASQNDVGYGAYDLYDLGEFNQKGTVRTKYGTRSQLQAAVTSLKNNGIQVYGDVVMNHKGGADATEMVRAVEVNPNNRNQEVTGEYTIEAWTRFDFPGRGNTHSSFKWRWYHFDGVDWDQSRNLNNRIYKFRGKAWDWEVDTEFGNYDYLMYTDYDMDHPEVVNELRNWGVWYTNTLGLDGFRIDAVKHIKYSFTRDWINHVRSATGKNMFAVAEFWKNDLGAIENYLQKTNWNHSVFDVPLHYNLYNASQSGGNYDMRNIFNGTVVQRHPSHAVTFVDNHDSQPEEALESFVEPWFKPLAYALTLTREQGYPSVFYGDYYGIPTHGVPAMRSKIDPILEARQKYAYGPQHDYLDHPDVIGWTREGDSSHPKSGLATLITDGPGGSKRMYAGLKNAGETWYDITGNRSDTVKIGSDGWGEFHVNKSSVSIYVQK

SEQ ID NO: 42279 - protein, 478 aa, Bacillus sp.
NGTMMQYFEWYLPNDGNHWNRLNSDASNLKSKGITAVWIPPAWKAASQNDVGYGAYDLYDLGEFNQKGTVRTKYGTRSQLQAAVTSLKNNGIQVYGDVVMNHKGGADATEMVRAVEVNPNNRNQEVTGEYTIEAWTRFDFPGRGNTHSSFKWRWYHFDGVDWDQSRDLQNRIYKFRGKAWDWEVDTEFGNYDYLMYVDYDMDHPEVVNELRNWGVWYTNTLGLDGFRIDAVKHIKYSFTRDWINHVRSATGKNMFAVAEFWKNDLGAIENYLQKTNWNHSVFDVPLHYNLYNASKSGGNYDMRNIFNGTVVQRHPSHAVTFVDNHDSQPEEALESFVDEWFKPLAYALTLTREQGYPSVFYGDYYGIPTHGVPAMRSKIDPILEARQKYAYGPQHDYLDHPDVIGWTREGDSSHPKSGLATLITDGPGGSKRMYAGLKNAGETWYDITGNRSDTVKIGSDGWGEFHVNKSSVSIYVQK

SEQ ID NO: 42280 - protein, 478 aa, Bacillus sp.
NGTMMQYFEWYLPNDGNHWNRLNSDASNLKSKGITAVWIPPAWKAVSQNDVGYGAYDLYDLGEFNQKGTVRTKYGTRSQLQAAVTSLKNNGIQVYGDVVMNHKGGADLTEMVRAVEVNPNNRNQEVTGEYTIEAWTRFDFPGRGNTHSSFKWRWYHFDGVDWDQSREFTNRIYKFRGKAWDWEVDTEFGNYDYLMYVDYDMDHPEVVNELRNWGVWYTNTLGLDGFRIDAVKHIKYSFTRDWINHVRSATGKNMFAVAEFWKNDLGAIENYLQKTNWNHSVFDVPLHYNLYNASKSGGNYDMRNIFNGTVVQVHPSHAVTFVDNHDSQPEEALESFVEEWFKPLAYALTLTREQGYPSVFYGDYYGIPTHGVPAMRSKIDPILEARQKYAYGPQHDYLDHPDVIGWTREGDSSHPKSGLATLITDGPGGSKRMYAGLKNAGETWYDITGNRSDTVKIGSDGWGEFHVNDGSVSIYVQK

SEQ ID NO: 42281 - protein, 478 aa, Bacillus sp.
NGTMMQYFEWYLPNDGNHWNRLNSDASNLKSKGIKAVWIPPAWKAVSQNDVGYGAYDLYDLGEFNQRGTVRTKYGTRSQLQAAVTSLKNNGIQVYGDVVMNHKGGADATEMVRAVEVNPNNRNQEVTGEYTIEAWTRFDFPGRGNTHSSFKWRWYHFDGVDFDQSRDLENRIYKFRGKAWDWEVDTEFGNYDYLMYADYDMDHPEVVNELRNWGVWYTNTLGLDGFRIDAVKHIKYSFTRDWINHVRSATGKNMFAVAEFWKNDLGAIENYLQKTNWNHSVFDVPLHYNLYNASKSGGNYDMRNIFNGTVVQRHPSHAVTFVDNHDSQPEEALESFVEEWFKPLAYALTLTREQGYPSVFYGDYYGIPTHGVPAMRSKIDPILEARQKYAYGPQHDYLDHPDVIGWTREGDSSHPKSGLATLITDGPGGSKRMYAGLKNAGETWYDITGNRSDTVKIGSDGWGEFHVNDGSVSIYVQK

SEQ ID NO: 42282 - protein, 478 aa, Bacillus sp.
NGTMMQYFEWYLPNDGNHWNRLNSDASNLKSKGITAVWIPPAWKAVSQNDVGYGAYDLYDLGEFNQKGTVRTKYGTRSQLQAAVTSLKNNGIQVYGDVVMNHKGGADATEMVRAVEVNPNNRNQEVTGEYTIEAWTRFDFPGRGNTHSSFKWRWYHFDGVDWDQSRNLTNRIYKFRGKAWDWEVDTEFGNYDYLMYTDYDMDHPEVVNELRNWGVWYTNTLGLDGFRIDAVKHIKYSFTRDWINHVRSATGKNMFAVAEFWKNDLGAIENYLQKTNWNHSVFDVPLHYNLYNASKSQGNYDMRNIFNGTVVQRHPSHAVTFVDNHDSQPEEALESFVDTWFKPLAYALTLTREQGYPSVFYGDYYGIPTHGVPAMRSKIDPILEARQKYAYGPQHDYLDHPDVIGWTREGDSSHPKSGLATLITDGPGGSKRMYAGLKNAGETWYDITGNRSDTVKIGSDGWGEFHVNGTSVSIYVQK

SEQ ID NO: 42283 - protein, 478 aa, Bacillus sp.
NGTMMQYFEWYLPNDGNHWNRLNSDASNLKSKGITAVWIPPAWKAVSQNDVGYGAYDLYDLGEFNQKGTVRTKYGTRSQLQAAVTSLKNNGIQVYGDVVMNHKGGADATEMVRAVEVNPNNRNQEVTGEYTIEAWTRFDFPGRGNTHSSFKWRWYHFDGVDFDQSREFTNRIYKFRGKAWDWEVDTEFGNYDYLMYADYDYDHPESTNEMRNWGVWYTNTLGLDGFRIDAVKHIKYSFTRDWINHVRSATGKNMFAVAEFWKNDLGAIENYLQKTNWNHSVFDVPLHYNLYNASKSGGNYDMRNIFNGTVVQRHPSHAVTFVDNHDSQPEEALESFVETWFKPLAYALTLTREQGYPSVFYGDYYGIPTHGVPAMRSKIDPILEARQKYAYGPQHDYLDHPDVIGWTREGDSSHPKSGLATLITDGPGGSKRMYAGLKNAGETWYDITGNRSDTVKIGSDGWGEFHVNKASVSIYVQK

SEQ ID NO: 42284 - protein, 478 aa, Bacillus sp.
NGTMMQYFEWYLPNDGNHWNRLNSDASNLKSKGITAVWIPPAWKAVSQNDVGYGAYDLYDLGEFNQKGTVRTKYGTRSQLQAAVTSLKNNGIQVYGDVVMNHKGGADATEMVRAVEVNPNNRNQEVTGEYTIEAWTRFDFPGRGNTHSSFKWRWYHFDGVDFDQSREFTNRIYKFRGKAWDWEVDTEFGNYDYLMYVDYDMDHPEVVNELRNWGVWYTNTLGLDGFRIDAVKHIKYSFTRDWINHVRSATGKNMFAVAEFWKNDLGAIENYLQKTNWNHSVFDVPLHYNLYNASKSGGNYDMRNIFNGTVVQAHPNHAVTFVDNHDSQPEEALESFVEEWFKPLAYALTLTREQGYPSVFYGDYYGIPTHGVPAMRSKIDPILEARQKYAYGPQHDYLDHPDVIGWTREGDSSHPKSGLATLITDGPGGSKRMYAGLKNAGETWYDITGNRSDTVKIGSDGWGEFHVNDGSVSIYVQK

SEQ ID NO: 42285 - protein, 478 aa, Bacillus sp.
NGTMMQYFEWYLPNDGNHWNRLNSDASNLKSKGITAVWIPPAWKAVSQNDVGYGAYDLYDLGEFNQKGTVRTKYGTRSQLQAAVTSLKNNGIQVYGDVVMNHKGGADATEMVRAVEVNPNNRNQEVTGEYTIEAWTRFDFPGRGNTHSSFKWRWYHFDGVDWDQSRNLTNRIYKFRGKAWDWEVDTEFGNYDYLMYTDYDMDHPEVVNELRNWGVWYTNTLGLDGFRIDAVKHIKYSFTRDWINHVRSATGKNMFAVAEFWKNDLGAIENYLQKTNWNHSVFDVPLHYNLYNASKSGGNYDMRNIFNGTVVQVHPSHAVTFVDNHDSQPEEALESFVEEWFKPLAYALTLTREQGYPSVFYGDYYGIPTHGVPAMRSKIDPILEARQKYAYGPQHDYLDHPDVIGWTREGDSSHPKSGLATLITDGPGGSKRMYAGLKNAGETWYDITGNRSDTVKIGSDGWGEFHVNYGSVSIYVQK

SEQ ID NO: 42286 - protein, 478 aa, Bacillus sp.
NETMMQYFEWYLPNDGNHWNRLNSDASNLKSKGIKAVWIPPAWKGASQNDVGYGAYDLYDLGEFNQRGTVRTKYGTRSQLQAAVTSLKNNGIQVYGDVVMNHKGGADATEMVRAVEVNPNNRNQEVTGEYTIEAWTRFDFPGRGNTHSSFKWRWYHFDGVDFDQSRRLNNRIYKFRGKAWDWEVDTEFGNYDYLMYADYDMDHPEVVNELRNWGVWYTNTLGLDGFRIDAVKHIKYSFTRDWINHVRSATGKNMFAVAEFWKNDLGAIENYLQKTNWNHSVFDVPLHYNLYNASKSGGNYDMRNIFNGTVVQRHPSHAVTFVDNHDSQPEEALESFVEEWFKPLAYALTLTREQGYPSVFYGDYYGIPTHGVPAMRSKIDPILEARQKYAYGPQHDYLDHPDVIGWTREGDSSHPKSGLATLITDGPGGSKRMYAGLKNAGETWYDITGNRSDTVKIGSDGWGEFHVNDGSVSIYVQK

SEQ ID NO: 42287 - protein, 478 aa, Bacillus sp.
NGTMMQYFEWYLPNDGNHWNRLNSDASNLKSKGITAVWIPPAWKATSQNDVGYGAYDLYDLGEFNQKGTVRTKYGTRSQLQAAVTSLKNNGIQVYGDVVMNHKGGADATEMVRAVEVNPNNRNQEVTGEYTIEAWTRFDFPGRGNTHSSFKWRWYHFDGVDWDQSRELSNRIYKFRGKAWDWEVDTEFGNYDYLMYADYDMDHPEVVNELRNWGVWYTNTLGLDGFRIDAVKHIKYSFTRDWINHVRSATGKNMFAVAEFWKNDLGAIENYLQKTNWNHSVFDVPLHYNLYNASKSQGNYDMRNIFNGTVVQANPNHAVTFVDNHDSQPEEALESFVDTWFKPLAYALTLTREQGYPSVFYGDYYGIPTHGVPAMRSKIDPILEARQKYAYGPQHDYLDHPDVIGWTREGDSSHPKSGLATLITDGPGGSKRMYAGLKNAGETWYDITGNRSDTVKIGSDGWGEFHVNGSSVSIYVQK

SEQ ID NO: 42288 - protein, 478 aa, Bacillus sp.
NGTMMQYFEWYLPNDGNHWNRLNSDASNLKSKGITAVWIPPAWKGTSQNDVGYGAYDLYDLGEFNQKGTVRTKYGTRSQLQAAVTSLKNNGIQVYGDVVMNHKGGADATEMVRAVEVNPNNRNQEVTGEYTIEAWTRFDFPGRGNTHSSFKWRWYHFDGVDFDQSRNLNNRIYKFRGKAWDWEVDTEFGNYDYLMYVDYDMDHPEVVNELRNWGVWYTNTLGLDGFRIDAVKHIKYSFTRDWINHVRSATGKNMFAVAEFWKNDLGAIENYLQKTNWNHSVFDVPLHYNLYNASKSQGNYDMRNIFNGTVVQRHPSHAVTFVDNHDSQPEEALESFVDTWFKPLAYALTLTREQGYPSVFYGDYYGIPTHGVPAMRSKIDPILEARQKYAYGPQHDYLDHPDVIGWTREGDSSHPKSGLATLITDGPGGSKRMYAGLKNAGETWYDITGNRSDTVKIGSDGWGEFHVNGSSVSIYVQK

SEQ ID NO: 42289 - protein, 478 aa, Bacillus sp.
NGTMMQYFEWYLPNDGNHWNRLNSDASNLKSKGIKAVWIPPAWKGASQNDVGYGAYDLYDLGEFNQRGTVRTKYGTRSQLQAAVTSLKNNGIQVYGDVVMNHKGGADATEMVRAVEVNPNNRNQEVTGEYTIEAWTRFDFPGRGNTHSSFKWRWYHFDGVDFDQSRNFQNRIYKFRGKAWDWEVDTEFGNYDYLMYADYDMDHPEVVNELRNWGVWYTNTLGLDGFRIDAVKHIKYSFTRDWINHVRSATGKNMFAVAEFWKNDLGAIENYLQKTNWNHSVFDVPLHYNLYNASKSQGNYDMRNIFNGTVVQRHPSHAVTFVDNHDSQPEEALESFVDTWFKPLAYALTLTREQGYPSVFYGDYYGIPTHGVPAMRSKIDPILEARQKYAYGPQHDYLDHPDVIGWTREGDSSHPKSGLATLITDGPGGSKRMYAGLKNAGETWYDITGNRSDTVKIGSDGWGEFHVNGGSVSIYVQK

SEQ ID NO: 42290 - protein, 478 aa, Bacillus sp.
NGTMMQYFEWYLPNDGNHWNRLNSDASNLKSKGITAVWIPPAWKAASQNDVGYGAYDLYDLGEFNQKGTVRTKYGTRSQLQAAVTSLKNNGIQVYGDVVMNHKGGADATEMVRAVEVNPNNRNQEVTGEYTIEAYTRFDFPGRGNTHSSFKWRWYHFDGVDFDQSRNLNNRIYKFRGKAWDWEVDTEFGNYDYLMYTDYDMDHPEVVNELRNWGVWYTNTLGLDGFRIDAVKHIKYSFTRDWINHVRSATGKNMFAVAEFWKNDLGAIENYLQKTNWNHSVFDVPLHYNLYNASKSGGNYDMRNIFNGTVVQRHPSHAVTFVDNHDSQPEEALESFVEEWFKPLAYALTLTREQGYPSVFYGDYYGIPTHGVPAMRSKIDPILEARQKYAYGPQHDYLDHPDVIGWTREGDSSHPKSGLATLITDGPGGSKRMYAGLKNAGETWYDITGNRSDTVKIGSDGWGEFHVNDGSVSIYVQK

SEQ ID NO: 42291 - protein, 478 aa, Bacillus sp.
NGTMMQYFEWYLPNDGNHWNRLNSDASNLKSKGITAVWIPPAWKAVSQNDVGYGAYDLYDLGEFNQKGTVRTKYGTRSQLQAAVTSLKNNGIQVYGDVVMNHKGGADLTEMVRAVEVNPNNRNQEVTGEYTIEAWTRFDFPGRGNTHSSFKWRWYHFDGVDWDQSREFTNRIYKFRGKAWDWEVDTEFGNYDYLMYVDYDMDHPEVVNELRNWGVWYTNTLGLDGFRIDAVKHIKYSFTRDWINHVRSATGKNMFAVAEFWKNDLGAIENYLQKTNWNHSVFDVPLHYNLYNASKSGGNYDMRNIFNGTVVQRHPSHAVTFVDNHDSQPEEALESFVETWFKPLAYALTLTREQGYPSVFYGDYYGIPTHGVPAMRSKIDPILEARQKYAYGPQHDYLDHPDVIGWTREGDSSHPKSGLATLITDGPGGSKRMYAGLKNAGETWYDITGNRSDTVKIGSDGWGEFHVNKASVSIYVQK

SEQ ID NO: 42292 - protein, 478 aa, Bacillus sp.
NQTMMQYFEWYLPNDGNHWNRLNSDASNLKSKGIKAVWIPPAWKGASQNDVGYGAYDLYDLGEFNQRGTVRTKYGTRSQLQAAVTSLKNNGIQVYGDVVMNHKGGADATEMVRAVEVNPNNRNQEVTGEYTIEAWTRFDFPGRGNTHSSFKWRWYHFDGVDFDQSRRLNNRIYKFRGKAWDWEVDTEFGNYDYLMYADYDMDHPEVVNELRNWGVWYTNTLGLDGFRIDAVKHIKYSFTRDWINHVRSATGKNMFAVAEFWKNDLGAIENYLQKTNWNHSVFDVPLHYNLYNASKSGGNYDMRNIFNGTVVQRHPSHAVTFVDNHDSQPEEALESFVEEWFKPLAYALTLTREQGYPSVFYGDYYGIPTHGVPAMRSKIDPILEARQKYAYGPQHDYLDHPDVIGWTREGDSSHPKSGLATLITDGPGGSKRMYAGLKNAGETWYDITGNRSDTVKIGSDGWGEFHVNDGSVSIYVQK

SEQ ID NO: 42293 - protein, 478 aa, Bacillus sp.
NGTMMQYFEWYLPNDGNHWNRLNSDASNLKSKGITAVWIPPAWKAVSQNDVGYGAYDLYDLGEFNQKGTVRTKYGTRSQLQAAVTSLKNNGIQVYGDVVMNHKGGADATEMVRAVEVNPNNRNQEVTGEYTIEAWTRFDFPGRGNTHSSFKWRWYHFDGVDFDQSREFTNRIYKFRGKAWDWEVDTEFGNYDYLMYVDYDMDHPEVVNELRNWGVWYTNTLGLDGFRIDAVKHIKYSFTRDWINHVRIATGKNMFAVAEFWKNDLGAIENYLQKTNWNHSVFDVPLHYNLYNASKSGGNYDMRNIFNGTVVQRHPSHAVTFVDNHDSQPEEALESFVDEWFKPLAYALTLTREQGYPSVFYGDYYGIPTHGVPAMRSKIDPILEARQKYAYGPQHDYLDHPDVIGWTREGDSSHPKSGLATLITDGPGGSKRMYAGLKNAGETWYDITGNRSDTVKIGSDGWGEFHVNDQSVSIYVQK

SEQ ID NO: 42294 - protein, 478 aa, Bacillus sp.
NGTMMQYFEWYLPNDGNHWNRLNSDASNLKSKGIKAVWIPPAWKGASQNDVGYGAYDLYDLGEFNQRGTVRTKYGTRSQLQAAVTSLKNNGIQVYGDVVMNHKGGADATEMVRAVEVNPNNRNQEVTGEYTIEAWTRFDFPGRGNTHSSFKWRWYHFDGVDFDQSRRLNNRIYKFRGKAWDWEVDTEFGNYDYLMYADIDYDHPESTNEMRNWGVWYTNTLGLDGFRIDAVKHIKYSFTRDWINHVRSATGKNMFAVAEFWKNDLGAIENYLQKTNWNHSVFDVPLHYNLYNASKSGGNYDMRNIFNGTVVQRHPSHAVTFVDNHDSQPEEALESFVEEWFKPLAYALTLTREQGYPSVFYGDYYGIPTHGVPAMRSKIDPILEARQKYAYGPQHDYLDHPDVIGWTREGDSSHPKSGLATLITDGPGGSKRMYAGLKNAGETWYDITGNRSDTVKIGSDGWGEFHVNDGSVSIYVQK

SEQ ID NO: 42295 - protein, 478 aa, Bacillus sp.
NGTMMQYFEWYLPNDGNHWNRLNSDASNLKSKGITAVWIPPAWKAASQNDVGYGAYDLYDLGEFNQKGTVRTKYGTRSQLQAAVTSLKNNGIQVYGDVVMNHKGGADATEMVRAVEVNPNNRNQEVTGEYTIEAWTRFDFPGRGNTHSSFKWRWYHFDGVDWDQSRDLDNRIYKFRGKAWDWEVDTEFGNYDYLMYADYDMDHPEVVNELRNWGVWYTNTLGLDGFRIDAVKHIKYSFTRDWINHVRSATGKNMFAVAEFWKNDLGAIENYLQKTNWNHSVFDVPLHYNLYNASKSGGNYDMRNIFNGTVVQAHPMHAVTFVDNHDSQPEEALESFVEEWFKPLAYALTLTREQGYPSVFYGDYYGIPTHGVPAMRSKIDPILEARQKYAYGPQHDYLDHPDVIGWTREGDSSHPKSGLATLITDGPGGSKRMYVGLKNAGETWYDITGNRSDTVKIGSDGWGEFHVNYGSVSIYVQK

SEQ ID NO: 42296 - protein, 478 aa, Bacillus sp.
NKTMMQYFEWYLPNDGNHWNRLNSDASNLKSKGITAVWIPPAWKGASQNDVGYGAYDLYDLGEFNQKGTVRTKYGTRSQLQAAVTSLKNNGIQVYGDVVMNHKGGADATEMVRAVEVNPNNRNQEVTGEYTIEAWTRFDFPGRGNTHSSFKWRWYHFDGVDFDQSRRLNNRIYKFRGKAWDWEVDTEFGNYDYLMYADYDMDHPEVVNELRNWGVWYTNTLGLDGFRIDAVKHIKYSFTRDWINHVRSATGKNMFAVAEFWKNDLGAIENYLQKTNWNHSVFDVPLHYNLYNASKSGGNYDMRNIFNGTVVQMQPSHAVTFVDNHDSQPEEALESFVEEWFKPLAYALTLTREQGYPSVFYGDYYGIPTHGVPAMRSKIDPILEARQKYAYGPQHDYLDHPDVIGWTREGDSSHPKSGLATLITDGPGGSKRMYAGLKNAGETWYDITGNRSDTVKIGSDGWGEFHVNDGSVSIYVQK

SEQ ID NO: 42297 - protein, 478 aa, Bacillus sp.
NGTMMQYFEWYLPNDGNHWNRLNSDASNLKSKGITAVWIPPAWKGASQNDVGYGAYDLYDLGEFNQKGTVRTKYGTRSQLQAAVTSLKNNGIQVYGDVVMNHKGGADLTEMVRAVEVNPNNRNQEVTGEYTIEAWTRFDFPGRGNTHSSFKWRWYHFDGVDFDQSRRLNNRIYKFRGKAWDWEVDTEFGNYDYLMYADYDMDHPEVVNELRNWGVWYTNTLGLDGFRIDAVKHIKYSFTRDWINHVRSATGKNMFAVAEFWKNDLGAIENYLQKTNWNHSVFDVPLHYNLYNASKSGGNYDMRNIFNGTVVQRHPSHAVTFVDNHDSQPEEALESFVDEWFKPLAYALTLTREQGYPSVFYGDYYGIPTHGVPAMRSKIDPILEARQKYAYGPQHDYLDHPDVIGWTREGDSSHPKSGLATLITDGPGGSKRMYAGLKNAGETWYDITGNRSDTVKIGSDGWGEFHVNKSSVSIYVQK

SEQ ID NO: 42298 - protein, 478 aa, Bacillus sp.
NGTMMQYFEWYLPNDGNHWNRLNSDASNLKSKGITAVWIPPAWKGASQNDVGYGAYDLYDLGEFNQKGTVRTKYGTRSQLQAAVTSLKNNGIQVYGDVVMNHKGGADTTEMVRAVEVNPNNRNQEVTGEYTIEAWTRFDFPGRGNTHSSFKWRWYHFDGVDWDQSRRLNNRIYKFRGKAWDWEVDTEFGNYDYLMYADYDMDHPEVVNELRNWGVWYTNTLGLDGFRIDAVKHIKYSFTRDWINHVRSATGKNMFAVAEFWKNDLGAIENYLQKTNWNHSVFDVPLHYNLYNASKSSGNYDMRNIFNGTVVQRHPSHAVTFVDNHDSQPEEALESFVDPWFKPLAYALTLTREQGYPSVFYGDYYGIPTHGVPAMRSKIDPILEARQKYAYGPQHDYLDHPDVIGWTREGDSSHPKSGLATLITDGPGGSKRMYAGLKNAGETWYDITGNRSDTVKIGSDGWGEFHVNGQSVSIYVQK

SEQ ID NO: 42299 - protein, 478 aa, Bacillus sp.
NGTMMQYFEWYLPNDGNHWNRLNSDASNLKSKGIKAVWIPPAWKAVSQNDVGYGAYDLYDLGEFNQKGTVRTKYGTRSQLQAAVTSLKNNGIQVYGDVVMNHKGGADATEMVRAVEVNPNNRNQEVTGEYTIEAWTRFDFPGRGNTHSSFKWRWYHFDGVDFDQSRNLTNRIYKFRGKAWDWEVDTEFGNYDYLMYTDYDMDHPEVVNELRNWGVWYTNTLGLDGFRIDAVKHIKYSFTRDWINHVRSATGKNMFAVAEFWKNDLGAIENYLQKTNWNHSVFDVPLHYNLYNASKSGGNYDMRNIFNGTVVQRHPSHAVTFVDNHDSQPEEALESFVEEWFKPLAYALTLTREQGYPSVFYGDYYGIPTHGVPAMRSKIDPILEARQKYAYGPQHDYLDHPDVIGWTREGDSSHPKSGLATLITDGPGGSKRMYAGLKNAGETWYDITGNRSDTVKIGSDGWGEFHVNDGSVSIYVQK

SEQ ID NO: 42300 - protein, 478 aa, Bacillus sp.
NGTMMQYFEWYLPNDGNHWNRLNSDASNLKSKGITAVWIPPAWKAVSQNDVGYGAYDLYDLGEFNQKGTVRTKYGTRSQLQAAVTSLKNNGIQVYGDVVMNHKGGADLTEMVRAVEVNPNNRNQEVTGEYTIEAWTRFDFPGRGNTHSSFKWRWYHFDGVDFDQSRNLTNRIYKFRGKAWDWEVDTEFGNYDYLMYTDYDMDHPEVVNELRNWGVWYTNTLGLDGFRIDAVKHIKYSFTRDWINHVRSATGKNMFAVAEFWKNDLGAIENYLQKTNWNHSVFDVPLHYNLYNASKSGGNYDMRNIFNGTVVQRHPSHAVTFVDNHDSQPEEALESFVEEWFKPLAYALTLTREQGYPSVFYGDYYGIPTHGVPAMRSKIDPILEARQKYAYGPQHDYLDHPDVIGWTREGDSSHPKSGLATLITDGPGGSKRMYAGLKNAGETWYDITGNRSDTVKIGSDGWGEFHVNDGSVSIYVQK

SEQ ID NO: 42301 - protein, 478 aa, Bacillus sp.
NGTMMQYFEWYLPNDGNHWNRLNSDASNLKSKGITAVWIPPAWKAVSQNDVGYGAYDLYDLGEFNQKGTVRTKYGTRSQLQAAVTSLKNNGIQVYGDVVMNHKGGADLTEMVRAVEVNPNNRNQEVTGEYTIEAWTRFDFPGRGNTHSSFKWRWYHFDGVDWDQSREFTNRIYKFRGKAWDWEVDTEFGNYDYLMYVDYDMDHPEVVNELRNWGVWYTNTLGLDGFRIDAVKHIKYSFTRDWINHVRSATGKNMFAVAEFWKNDLGAIENYLQKTNWNHSVFDVPLHYNLYNASKSGGNYDMRNIFNGTVVQRHPSHAVTFVDNHDSQPEEALESFVDEWFKPLAYALTLTREQGYPSVFYGDYYGIPTHGVPAMRSKIDPILEARQKYAYGPQHDYVDHPDVIGWKREGDSSHPKSGLATLITDGPGGSKRMYAGLKNAGETWYDITGNRSDTVKIGSDGWGEFHVNDGSVSIYVQK

SEQ ID NO: 42302 - protein, 478 aa, Bacillus sp.
NGTMMQYFEWYLPNDGNHWNRLNSDASNLKSKGITAVWIPPAWKAASQNDVGYGAYDLYDLGEFNQKGTVRTKYGTRSQLQAAVTSLKNNGIQVYGDVVMNHKGGADATEMVRAVEVNPNNRNQEVTGEYTIEAWTRFDFPGRGNTHSSFKWRWYHFDGVDWDQSRRTNNRIYKFRGKAWDWEVDTEFGNYDYLMYTDYDMDHPEVVNELRNWGVWYTNTLGLDGFRIDAVKHIKYSFTRDWINHVRSATGKNMFAVAEFWKNDLGAIENYLQKTNWNHSVFDVPLHYNLYNASQSGGNYDMRNIFNGTVVQRHPSHAVTFVDNHDSQPEEALESFVEPWFKPLAYALTLTREQGYPSVFYGDYYGIPTHGVPAMRSKIDPILEARQKYAYGPQHDYLDHPDVIGWTREGDSSHPKSGLATLITDGPGGSKRMYAGLKNAGETWYDITGNRSDTVKIGSDGWGEFHVNKSSVSIYVQK

SEQ ID NO: 42303 - protein, 478 aa, Bacillus sp.
NGTMMQYFEWYLPNDGNHWNRLNSDASNLKSKGITAVWIPPAWKGASQNDVGYGAYDLYDLGEFNQKGTVRTKYGTRSQLQAAVTSLKNNGIQVYGDVVMNHKGGADATEMVRAVEVNPNNRNQEVTGEYTIEAYTRFDFPGRGNTHSSFKWRWYHFDGVDWDQSRELDNRIYKFRGKAWDWEVDTEFGNYDYLMYTDYDMDHPEVVNELRNWGVWYTNTLGLDGFRIDAVKHIKYSFTRDWINHVRSATGKNMFAVAEFWKNDLGAIENYLQKTNWNHSVFDVPLHYNLYNASKSQGNYDMRNIFNGTVVQRHPSHAVTFVDNHDSQPEEALESFVDTWFKPLAYALTLTREQGYPSVFYGDYYGIPTHGVPAMRSKIDPILEARQKYAYGPQHDYLDHPDVIGWTREGDSSHPKSGLATLITDGPGGSKRMYAGLKNAGETWYDITGNRSDTVKIGSDGWGEFHVNGSSVSIYVQK

SEQ ID NO: 42304 - protein, 478 aa, Bacillus sp.
NGTMMQYFEWYLPNDGNHWNRLNSDASNLKSKGITAVWIPPAWKATSQNDVGYGAYDLYDLGEFNQKGTVRTKYGTRSQLQAAVTSLKNNGIQVYGDVVMNHKGGADATEMVRAVEVNPNNRNQEVTGEYTIEAWTRFDFPGRGNTHSSFKWRWYHFDGVDWDQSRELNNRIYKFRGKAWDWEVDTEFGNYDYLMYTDYDMDHPEVVNELRNWGVWYTNTLGLDGFRIDAVKHIKYSFTRDWINHVRSATGKNMFAVAEFWKNDLGAIENYLQKTNWNHSVFDVPLHYNLYNASQSGGNYDMRNIFNGTVVQRHPSHAVTFVDNHDSQPEEALESFVEPWFKPLAYALTLTREQGYPSVFYGDYYGIPTHGVPAMRSKIDPILEARQKYAYGPQHDYLDHPDVIGWTREGDSSHPKSGLATLITDGPGGSKRMYAGLKNAGETWYDITGNRSDTVKIGSDGWGEFHVNKSSVSIYVQK

SEQ ID NO: 42305 - protein, 478 aa, Bacillus sp.
NGTMMQYFEWYLPNDGNHWNRLNSDASNLKSKGITAVWIPPAWKAVSQNDVGYGAYDLYDLGEFNQKGTVRTKYGTRSQLQAAVTSLKNNGIQVYGDVVMNHKGGADATEMVRAVEVNPNNRNQEVTGEYTIEAWTRFDFPGRGNTHSSFKWRWYHFDGVDFDQSREFTNRIYKFRGKAWDWEVDTEFGNYDYLMYVDYDYDHPETTNEMRNWGVWYTNTLGLDGFRIDAVKHIKYSFTRDWINHVRSATGKNMFAVAEFWKNDLGAIENYLQKTNWNHSVFDVPLHYNLYNASKSGGNYDMRNIFNGTVVQRHPSHAVTFVDNHDSQPEEALESFVEEWFKPLAYALTLTREQGYPSVFYGDYYGIPTHGVPAMRSKIDPILEARQKYAYGPQHDYLDHPDVIGWTREGDSSHPKSGLATLITDGPGGSKRMYAGLKNAGETWYDITGNRSDTVKIGSDGWGEFHVNDGSVSIYVQK

SEQ ID NO: 42306 - protein, 478 aa, Bacillus sp.
NGTMMQYFEWYLPNDGNHWNRLNSDASNLKSKGITAVWIPPAWKAASQNDVGYGAYDLYDLGEFNQKGTVRTKYGTRSQLQAAVTSLKNNGIQVYGDVVMNHKGGADATEMVRAVEVNPNNRNQEVTGEYTIEAYTRFDFPGRGNTHSSFKWRWYHFDGVDFDQSRRLDNRIYKFRGKAWDWEVDTEFGNYDYLMYTDYDMDHPEVVNELRNWGVWYTNTLGLDGFRIDAVKHIKYSFTRDWINHVRSATGKNMFAVAEFWKNDLGAIENYLQKTNWNHSVFDVPLHYNLYNASKSGGNYDMRNIFNGTVVQRHPSHAVTFVDNHDSQPEEALESFVEEWFKPLAYALTLTREQGYPSVFYGDYYGIPTHGVPAMRSKIDPILEARQKYAYGPQHDYLDHPDVIGWTREGDSSHPKSGLATLITDGPGGSKRMYAGLKNAGETWYDITGNRSDTVKIGSDGWGEFHVNDGSVSIYVQK

SEQ ID NO: 42307 - protein, 478 aa, Bacillus sp.
NGTMMQYFEWYLPNDGNHWNRLNSDASNLKSKGIKAVWIPPAWKAVSQNDVGYGAYDLYDLGEFNQRGTVRTKYGTRSQLQAAVTSLKNNGIQVYGDVVMNHKGGADATEMVRAVEVNPNNRNQEVTGEYTIEAWTRFDFPGRGNTHSSFKWRWYHFDGVDWDQSRNLTNRIYKFRGKAWDWEVDTEFGNYDYLMYTDYDMDHPEVVNELRNWGVWYTNTLGLDGFRIDAVKHIKYSFTRDWINHVRSATGKNMFAVAEFWKNDLGAIENYLQKTNWNHSVFDVPLHYNLYNASKSGGNYDMRNIFNGTVVQRHPSHAVTFVDNHDSQPEEALESFVEEWFKPLAYALTLTREQGYPSVFYGDYYGIPTHGVPAMRSKIDPILEARQKYAYGPQHDYLDHPDVIGWTREGDSSHPKSGLATLITDGPGGSKRMYAGLKNAGETWYDITGNRSDTVKIGSDGWGEFHVNDGSVSIYVQK

SEQ ID NO: 42308 - protein, 478 aa, Bacillus sp.
NGTMMQYFEWYLPNDGNHWNRLNSDASNLKSKGIKAVWIPPAWKAASQNDVGYGAYDLYDLGEFNQRGTVRTKYGTRSQLQAAVTSLKNNGIQVYGDVVMNHKGGADATEMVRAVEVNPNNRNQEVTGEYTIEAWTRFDFPGRGNTHSSFKWRWYHFDGVDFDQSRNLSNRIYKFRGKAWDWEVDTEFGNYDYLMYTDYDMDHPEVVNELRNWGVWYTNTLGLDGFRIDAVKHIKYSFTRDWINHVRSATGKNMFAVAEFWKNDLGAIENYLQKTNWNHSVFDVPLHYNLYNASKSGGNYDMRNIFNGTVVQRHPSHAVTFVDNHDSQPEEALESFVEEWFKPLAYALTLTREQGYPSVFYGDYYGIPTHGVPAMRSKIDPILEARQKYAYGPQHDYLDHPDVIGWTREGDSSHPKSGLATLITDGPGGSKRMYAGLKNAGETWYDITGNRSDTVKIGSDGWGEFHVNDGSVSIYVQK

SEQ ID NO: 42309 - protein, 478 aa, Bacillus sp.
NGTMMQYFEWYLPNDGNHWNRLNSDASNLKSKGITAVWIPPAWKAASQNDVGYGAYDLYDLGEFNQKGTVRTKYGTRSQLQAAVTSLKNNGIQVYGDVVMNHKGGADATEMVRAVEVNPNNRNQEVTGEYTIEAWTRFDFPGRGNTHSSFKWRWYHFDGVDWDQSRDLQNRIYKFRGKAWDWEVDTEFGNYDYLMYADYDMDHPEVVNELRNWGVWYTNTLGLDGFRIDAVKHIKYSFTRDWINHVRSATGKNMFAVAEFWKNDLGAIENYLQKTNWNHSVFDVPLHYNLYNASKSSGNYDMRNIFNGTVVQRHPSHAVTFVDNHDSQPEEALESFVDEWFKPLAYALTLTREQGYPSVFYGDYYGIPTHGVPAMRSKIDPILEARQKYAYGPQHDYLDHPDVIGWTREGDSSHPKSGLATLITDGPGGSKRMYAGLKNAGETWYDITGNRSDTVKIGSDGWGEFHVNKQSVSIYVQK

SEQ ID NO: 42310 - protein, 478 aa, Bacillus sp.
NGTMMQYFEWYLPNDGNHWNRLNSDASNLKSKGIKAVWIPPAWKGASQNDVGYGAYDLYDLGEFNQRGTVRTKYGTRSQLQAAVTSLKNNGIQVYGDVVMNHKGGADATEMVRAVEVNPNNRNQEVTGEYTIEAWTRFDFPGRGNTHSSFKWRWYHFDGVDFDQSRRLNNRIYKFRGKAWDWEVDTEFGNYDYLMYADYDMDHPEVVNELRNWGVWYTNTLGLDGFRIDAVKHIKYSFTRDWINHVRSATGKNMFAVAEFWKNDLGAIENYLQKTNWNHSVFDVPLHYNLYNASQSGGNYDMRNIFNGTVVQRHPSHAVTFVDNHDSQPEEALESFVEPWFKPLAYALTLTREQGYPSVFYGDYYGIPTHGVPAMRSKIDPILEARQKYAYGPQHDYLDHPDVIGWTREGDSSHPKSGLATLITDGPGGSKRMYAGLKNAGETWYDITGNRSDTVKIGSDGWGEFHVNKGSVSIYVQK

SEQ ID NO: 42311 - protein, 478 aa, Bacillus sp.
NGTMMQYFEWYLPNDGNHWNRLNSDASNLKSKGIKAVWIPPAWKGASQNDVGYGAYDLYDLGEFNQRGTVRTKYGTRSQLQAAVTSLKNNGINVYGDVVMNHKGGADATEMVRAVEVNPNNRNQEVTGEYTIEAWTRFDFPGRGNTHSSFKWRWYHFDGVDWDQSRRLNNRIYKFRGKAWDWEVDTEFGNYDYLMYADYDMDHPEVVNELRNWGVWYTNTLGLDGFRIDAVKHIKYSFTRDWINHVRSATGKNMFAVAEFWKNDLGAIENYLQKTNWNHSVFDVPLHYNLYNASKSGGNYDMRNIFNGTVVQAHPMHAVTFVDNHDSQPEEALESFVEEWFKPLAYALTLTREQGYPSVFYGDYYGIPTHGVPAMRSKIDPILEARQKYAYGPQHDYLDHPDVIGWTREGDSSHPKSGLATLITDGPGGSKRMYAGLKNAGETWYDITGNRSDTVKIGSDGWGEFHVNDGSVSIYVQK

SEQ ID NO: 42312 - protein, 478 aa, Bacillus sp.
NGTMMQYFEWYLPNDGNHWNRLNSDASNLKSKGIKAVWIPPAWKGASQNDVGYGAYDLYDLGEFNQRGTVRTKYGTRSQLQAAVTSLKNNGIQVYGDVVMNHKGGADATEMVRAVEVNPNNRNQEVTGEYTIEAWTRFDFPGRGNTHSSFKWRWYHFDGVDFDQSRRLDNRIYKFRGKAWDWEVDTEFGNYDYLMYTDYDMDHPEVVNELRNWGVWYTNTLGLDGFRIDAVKHIKYSFTRDWINHVRSATGKNMFAVAEFWKNDLGAIENYLQKTNWNHSVFDVPLHYNLYNASKSGGNYDMRNIFNGTVVQRHPSHAVTFVDNHDSQPEEALESFVEEWFKPLAYALTLTREQGYPSVFYGDYYGIPTHGVPAMRSKIDPILEARQKYAYGPQHDYLDHPDVIGWTREGDSSHPKSGLATLITDGPGGSKRMYAGLKNAGETWYDITGNRSDTVKIGSDGWGEFHVNDGSVSIYVQK

SEQ ID NO: 42313 - protein, 478 aa, Bacillus sp.
NGTMMQYFEWYLPNDGNHWNRLNSDASNLKSKGITAVWIPPAWKGASQNDVGYGAYDLYDLGEFNQRGTVRTKYGTRSQLQAAVTSLKNNGIQVYGDVVMNHKGGADATEMVRAVEVNPNNRNQEVTGEYTIEAWTRFDFPGRGNTHSSFKWRWYHFDGVDFDQSRRLNNRIYKFRGKAWDWEVDTEFGNYDYLMYADYDMDHPEVVNELRNWGVWYTNTLGLDGFRIDAVKHIKYSFTRDWINHVRSATGKNMFAVAEFWKNDLGAIENYLQKTNWNHSVFDVPLHYNLYNASKSGGNYDMRNIFNGTVVQRHPSHAVTFVDNHDSQPEEALESFVETWFKPLAYALTLTREQGYPSVFYGDYYGIPTHGVPAMRSKIDPILEARQKYAYGPQHDYLDHPDVIGWTREGDSSHPKSGLATLITDGPGGSKRMYAGLKNAGETWYDITGNRSDTVKIGSDGWGEFHVNKASVSIFVQK

SEQ ID NO: 42314 - protein, 478 aa, Bacillus sp.
NGTMMQYFEWYLPNDGNHWNRLNSDASNLKSKGITAVWIPPAWKAASQNDVGYGAYDLYDLGEFNQKGTVRTKYGTRSQLQAAVTSLKNNGIQVYGDVVMNHKGGADATEMVRAVEVNPNNRNQEVTGEYTIEAYTRFDFSGRGNTHSSFKWRWYHFDGVDWDQSRDLDNRIYKFRGKAWDWEVDTEFGNYDYLMYADYDMDHPEVVNELRNWGVWYTNTLGLDGFRIDAVKHIKYSFTRDWINHVRSATGKNMFAVAEFWKNDLGAIENYLQKTNWNHSVFDVPLHYNLYNASKSGGNYDMRNIFNGTVVQRHPSHAVTFVDNHDSQPEEALESFVEEWFKPLAYALTLTREQGYPSVFYGDYYGIPTHGVPAMRSKIDPILEARQKYAYGPQHDYLDHPDVIGWTREGDSSHPKSGLATLITDGPGGSKRMYAGLKNAGETWYDITGNRSDTVKIGSDGWGKFHVNDGSVSIYVQK

SEQ ID NO: 42315 - protein, 478 aa, Bacillus sp.
NGTMMQYFEWYLPNDGNHWNRLNSDASNLKSKGITAVWIPPAWKAVSQNDVGYGAYDLYDLGEFNQRGTVRTKYGTRSQLQAAVTSLKNNGIQVYGDVVMNHKGGADATEMVRAVEVNPNNRNQEVTGEYTIEAWTRFDFPGRGNTHSSFKWRWYHFDGVDFDQSREFTNRIYKFRGKAWDWEVDTEFGNYDYLMYVDYDMDHPEVVNELRNWGVWYTNTLGLDGFRIDAVKHIKYSFTRDWINHVRSATGKNMFAVAEFWKNDLGAIENYLQKTNWNHSVFDVPLHYNLYNASKSGGNYDMRNIFNGTVVQRHPSHAVTFVDNHDSQPEEALESFVEEWFKPLAYALTLTREQGYPSVFYGDYYGIPTHGVPAMRSKIDPILEARQKYAYGPQHDYLDHPDVIGWTREGDSSHPKSGLATLITDGPGGSKRMYAGLKNAGETWYDITGNRSDTVKIGSDGWGEFHVNDGSVSIYVQK

SEQ ID NO: 42316 - protein, 478 aa, Bacillus sp.
NGTMMQYFEWYLPNDGNHWNRLNSDASNLKSKGITAVWIPPAWKGTSQNDVGYGAYDLYDLGEFNQKGTVRTKYGTRSQLQAAVTSLKNNGIQVYGDVVMNHKGGADATEMVRAVEVNPNNRNQEVTGEYTIEAYTRFDFPGRGNTHSSFKWRWYHFDGVDWDQSRNLNNRIYKFRGKAWDWEVDTEFGNYDYLMYVDYDMDHPEVVNELRNWGVWYTNTLGLDGFRIDAVKHIKYSFTRDWINHVRSATGKNMFAVAEFWKNDLGAIENYLQKTNWNHSVFDVPLHYNLYNASKSQGNYDMRNIFNGTVVQRHPSHAVTFVDNHDSQPEEALESFVDTWFKPLAYALTLTREQGYPSVFYGDYYGIPTHGVPAMRSKIDPILEARQKYAYGPQHDYLDHPDVIGWTREGDSSHPKSGLATLITDGPGGSKRMYAGLKNAGETWYDITGNRSDTVKIGSDGWGEFHVNGSSVSIYVQK

SEQ ID NO: 42317 - protein, 478 aa, Bacillus sp.
NGTMMQYFEWYLPNDGNHWNRLNSDASNLKSKGITAVWIPPAWKAVSQNDVGYGAYDLYDLGEFNQKGTVRTKYGTRSQLQAAVTSLKNNGIQVYGDVVMNHKGGADATEMVRAVEVNPNNRNQEVTGEYTIEAWTRFDFPGRGNTHSSFKWRWYHFDGVDWDQSRNLTNRIYKFRGKAWDWEVDTEFGNYDYLMYTDYDMDHPEVVNELRNWGVWYTNTLGLDGFRIDAVKHIKYSFTRDWINHVRSATGKNMFAVAEFWKNDLGAIENYLQKTNWNHSVFDVPLHYNLYNASQSGGNYDMRNIFNGTVVQRHPSHAVTFVDNHDSQPEEALESFVEPWFKPLAYALTLTREQGYPSVFYGDYYGIPTHGVPAMRSKIDPILEARQKYAYGPQHDYLDHPDVIGWTREGDSSHPKSGLATLITDGPGGSKRMYAGLKNAGETWYDITGNRSDTVKIGSDGWGEFHVNKSSVSIYVQK

SEQ ID NO: 42318 - protein, 478 aa, Bacillus sp.
NGTMMQYFEWYLPNDGNHWNRLNSDASNLKSKGITAVWIPPAWKGASQNDVGYGAYDLYDLGEFNQKGTVRTKYGTRSQLQAAVTSLKNNGIQVYGDVVMNHKGGADATEMVRAVEVNPNNRNQEVTGEYTIEAWTRFDFPGRGNTHSSFKWRWYHFDGVDWDQSRRTNNRIYKFRGKAWDWEVDTEFGNYDYLMYTDYDMDHPEVVNELRNWGVWYTNTLGLDGFRIDAVKHIKYSFTRDWINHVRSATGKNMFAVAEFWKNDLGAIENYLQKTNWNHSVFDVPLHYNLYNASKSSGNYDMRNIFNGTVVQRHPSHAVTFVDNHDSQPEEALESFVDEWFKPLAYALTLTREQGYPSVFYGDYYGIPTHGVPAMRSKIDPILEARQKYAYGPQHDYLDHPDVIGWTREGDSSHPKSGLATLITDGPGGSKRMYAGLKNAGETWYDITGNRSDTVKIGSDGWGEFHVNKQSVSIYVQK

SEQ ID NO: 42319 - protein, 478 aa, Bacillus sp.
NGTMMQYFEWYLPNDGNHWNRLNSDASNLKSKGITAVWIPPAWKGASQNDVGYGAYDLYDLGEFNQKGTVRTKYGTRSQLQAAVTSLKNNGIQVYGDVVMNHKGGADATEMVPAVEVNPNNRNQEVTGEYTIEAWTRFDFPGRGNTHSSFKWRWYHFDGVDWDQSRELDNRIYKFRSKAWDWEVDTEFGNYDYLMYTDYDMDHPEVVNELRNWGVWYTNTLGLDGFRIDAVKHIKYSFTRDWINHVRSATGKNMFAVAEFWKNDLGAIENYLQKTNWNHSVFDVPLHYNLYNASKSQGNYDMRNIFNGTVVQRHPSHAVTFVDNHDSQPEEALESFVDTWFKPLAYALTLTREQGYPSVFYGDYYGIPTHGVPAMRSKIDPILLARQKYAYGPQHDYLDHPDVIGWTREGDSSHPKSGLATLITDGPGGSKRMYAGLKNAGETWYDITGNRSDTVKIGSDGWGEFHVNGSSVSIYVQK

SEQ ID NO: 42320 - protein, 478 aa, Bacillus sp.
NGTMMQYFEWYLPNDGNHWNRLNSDASNLKSKGIKAVWIPPAWKGASQNDVGYGAYDLYDLGEFNQRGTVRTKYGTRSQLQAAVTSLKNNGIQVYGDVVMNHKGGADATEMVRAVEVNPNNRNQEVTGEYTIEAWTRFDFPGRGNTHSSFKWRWYHFDGVDFDQSRRLNNRIYKFRGKAWDWEVDTEFGNYDYLMYADYDYDHPETTNEMRNWGVWYTNTLGLDGFRIDAVKHIKYSFTRDWINHVRSATGKNMFAVAEFWKNDLGAIENYLQKTNWNHSVFDVPLHYNLYNASKSGGNYDMRNIFNGTVVQRHPSHAVTFVDNHDSQPEEALESFVEEWFKPLAYALTLTREQGYPSVFYGDYYGIPTHGVPAMRSKIDPILEARQKYAYGPQHDYLDHPDVIGWTREGDSSHPKSGLATLITDGPGGSKRMYAGLKNAGETWYDITGNRSDTVKIGSDGWGEFHVNDGSVSIYVQK

SEQ ID NO: 42321 - protein, 478 aa, Bacillus sp.
NGTMMQYFEWYLPNDGNHWNRLNSDASNLKSKGITAVWIPPAWKGASQNDVGYGAYDLYDLGEFNQKGTVRTKYGTRSQLQAAVTSLKNNGIQVYGDVVMNHKGGADATEMVRAVEVNPNNRNQEVTGEYTIEAWTRFDFPGRGNTHSSFKWRWYHFDGVDWDQSRELDNRIYKFRGKAWDWEVDTEFGNYDYLMYTDYDYDHPETTNEMRNWGVWYTNTLGLDGFRIDAVKHIKYSFTRDWINHVRSATGKNMFAVAEFWKNDLGAIENYLQKTNWNHSVFDVPLHYNLYNASKSQGNYDMRNIFNGTVVQRHPSHAVTFVDNHDSQPEEALESFVDTWFKPLAYALTLTREQGYPSVFYGDYYGIPTHGVPAMRSKIDPILEARQKYAYGPQHDYLDHPDVIGWTREGDSSHPKSGLATLITDGPGGSKRMYAGLKNAGETWYDITGNRSDTVKIGSDGWGEFHVNGSSVSIYVQK

SEQ ID NO: 42322 - protein, 478 aa, Bacillus sp.
NGTMMQYFEWYLPNDGNHWNRLNSDASNLKSKGITAVWIPPAWKGASQNDVGYGAYDLYDLGEFNQKGTVRTKYGTRSQLQAAVTSLKNNGIQVYGDVVMNHKGGADYTEMVRAVEVNPNNRNQEVTGEYTIEAWTRFDFPGRGNTHSSFKWRWYHFDGVDWDQSERLNNRIYKFRGKAWDWEVDTEFGNYDYLMYADYDMDHPEVVNELRNWGVWYTNTLGLDGFRIDAVKHIKYSFTRDWINHVRSATGKNMFAVAEFWKNDLGAIENYLQKTNWNHSVFDVPLHYNLYNASKSGGNYDMRNIFNGTVVQRHPSHAVTFVDNHDSQPEEALESFVEEWFKPLAYALTLTREQGLPSVFYGDYYGIPTHGVPAMRSKIDPILLARQKYAYGPQHDYLDHPDVIGWTREGDSSHPPSGLATLITDGPGGSKRMYAGLKNAGETWYDITGNRSDTVKIGSDGWGEFHVNDGSVSIYVQK

SEQ ID NO: 42323 - protein, 478 aa, Bacillus sp.
NGTMMQYFEWYLPNDGNHWNRLNSDASNLKSKGITAVWIPPAWKAVSQNDVGYGAYDLYDLGEFNQKGTVRTKYGTRSQLQAAVTSLKNNGIQVYGDVVMNHKGGADATEMVRAVEVNPNNRNQEVTGEYTIEAWTRFDFPGRGNTHSSFKWRWYHFDGVDWDQSRNLTNRIYKFRGKAWDWEVDTEFGNYDYLMYTDYDMDHPEVVNELRNWGVWYTNTLGLDGFRIDAVKHIKYSFTRDWINHVRSATGKNMFAVAEFWKNDLGAIENYLQKTNWNHSVFDVPLHYNLYNASKSGGNYDMRNIFNGTVVQANPNHAVTFVDNHDSQPEEALESFVEEWFKPLAYALTLTREQGYPSVFYGDYYGIPTHGVPAMRSKIDPILEARQKYAYGPQHDYLDHPDVIGWTREGDSSHPKSGLATLITDGPGGSKRMYAGLKNAGETWYDITGNRSDTVKIGSDGWGEFHVNDGSVSIYVQK

SEQ ID NO: 42324 - protein, 478 aa, Bacillus sp.
NGTMMQYFEWYLPNDGNHWNRLNSDASNLKSKGITAVWIPPAWKATSQNDVGYGAYDLYDLGEFNQKGTVRTKYGTRSQLQSAVTSLKNNGIQVYGDVVMNHKGGADATEMVRAVEVNPNNRNQEVTGEYTIEAWTRFDFPGRGNTHSSFKWRWYHFDGVDWDMSRNTDNRIYKFRGKAWDWEVDTEFGNYDYLMYADIDMDHPEVVNELRNWGVWYTNTLGLDGFRIDAVKHIKYSFTRDWINHVRSATGKNMFAVAEFWKNDLGAIENYLQKTNWNHSVFDVPLHYNLYNASKSQGNYDMRNIFNGTVVQRHPSHAVTFVDNHDSQPEEALESFVTEWFKPLAYALTLTREQGYPSVFYGDYYGIPTHGVPAMRSKIDPILEARQKYAYGPQHDYLDHPDVIGWTREGDSSHPKSGLATLITDGPGGSKRMYAGLKNAGETWYDITGNRSDTVKIGSDGWGEFHVNGSSVSIYVQK

SEQ ID NO: 42325 - protein, 478 aa, Bacillus sp.
NGTMMQYFEWYLPNDGNHWNRLNSDASNLKSKGITAVWIPPAWKAVSQNDVGYGAYDLYDLGEFNQKGTVRTKYGTRSQLQAAVTSLKNNGIQVYGDVVMNHKGGADATEMVRAVEVNPNNRNQEVTGEYTIEAWTRFDFPGRGNTHSSFKWRWYHFDGVDWDQSRDLENRIYKFRGKAWDWEVDTEFGNYDYLMYADYDMDHPEVVNELRNWGVWYTNTLGLDGFRIDAVKHIKYSFTRDWINHVRSATGKNMFAVAEFWKNDLGAIENYLQKTNWNHSVFDVPLHYNLYNASKSSGNYDMRNIFNGTVVQRHPSHAVTFVDNHDSQPEEALESFVDEWFKPLAYALTLTREQGYPSVFYGDYYGIPTHGVPAMRSKIDPILEARQKYAYGPQHDYLDHPDVIGWTREGDSSHPKSGLATLITDGPGGSKRMYAGLKNAGETWYDITGNRSDTVKIGSDGWGEFHVNKQSVSIYVQK

SEQ ID NO: 42326 - protein, 478 aa, Bacillus sp.
NGTMMQYFEWYLPNDGNHWNRLNSDASNLKSKGIKAVWIPPAWKGASQNDVGYGAYDLYDLGEFNQRGTVRTKYGTRSQLQAAVTSLKNNGIQVYGDVVMNHKGGADATEMVRAVEVNPNNRNQEVTGEYTIEAYTRFDFPGRGNTHSSFKWRWYHFDGVDFDQSRRLNNRIYKFRGKAWDWEVDTEFGNYDYLMYADYDMDHPEVVNELRNWGVWYTNTLGLDGFRIDAVKHIKYSFTRDWINHVRSATGKNMFAVAEFWKNDLGAIENYLQKTNWNHSVFDVPLHYNLYNASKSGGNYDMRNIFNGTVVQRHPSHAVTFVDNHDSQPEEALESFVEEWFKPLAYALTLTREQGYPSVFYGDYYGIPTHGVPAMRSKIDPILEARQKYAYGPQHDYLDHPDVIGWTREGDSSHPKSGLATLITDGPGGSKRMYAGLKNAGETWYDITGNRSDTVKIGSDGWGEFHVNDGSVSIYVQK

SEQ ID NO: 42327 - protein, 478 aa, Bacillus sp.
NGTMMQYFEWYLPNDGNHWNRLNSDASNLKSKGITAVWIPPAWKGASQNDVGYGAYDLYDLGEFNQKGTVRTKYGTRSQLQAAVTSLKNNGIQVYGDVVMNHKGGADATEMVRAVEVNPNNRNQEVTGEYTIEAWTRFDFPGRGNTHSSFKWRWYHFDGVDWDQSRRLNNRIYKFRGKAWDWEVDTEFGNYDYLMYADYDMDHPEVVNELRNWGVWYTNTLGLDGFRIDAVKHIKYSFTRDWINHVRSATGKNMFAVAEFWKNDLVAIENYLQKTNWNHSVFDVPLHYNLYNASKSSGNYDMRNIFNGTVVQRHPSHAVTFVDNHDSQPEEALESFVEPWFKPLAYALTLTREQGYPSVFYGDYYGIPTHGVPAMRSKIDPILEARQKYAYGPQHDYLDHPDVIGWTREGDSSHPKSGLATLITDGPGGSKRMYAGLKNAGETWYDITGNRSDTVKIGSDGWGEFHVNGTSVSIYVQK

SEQ ID NO: 42328 - protein, 478 aa, Bacillus sp.
NGTMMQYFEWYLPNDGNHWNRLNSDASNLKSKGITAVWIPPAWKAASQNDVGYGAYDLYDLGEFNQKGTVRTKYGTRSQLQAAVTSLKNNGIQVYGDVVMNHKGGADATEMVRAVEVNPNNRNQEVTGEYTIEAWTRFDFPGRGNTHSSFKWRWYHFDGVDWDQSRNLNNRIYKFRGKAWDWEVDTEFGNYDYLMYTDYDMDHPEVVNELRNWGVWYTNTLGLDGFRIDAVKHIKYSFTRDWINHVRSATGKNMFAVAEFWKNDLGAIENYLQKTNWNHSVFDVPLHYNLYNASKSGGNYDMRNIFNGTVVQRHPSHAVTFVDNHDSQPEEALESFVETWFKPLAYALTLTREQGYPSVFYGDYYGIPTHGVPAMRSKIDPILEARQKYAYGPQHDYLDHPDVIGWTREGDSSHPKSGLATLITAGPGGSKRMYAGLKNAGETWYDITGNRSDTVKIGSDGWGEFHVNKASVSIYVQK

SEQ ID NO: 42329 - protein, 478 aa, Bacillus sp.
NGTMMQYFEWYLPNDGNHWNRLNSDASNLKSKGITAVWIPPAWKATSQNDVGYGAYDLYDLGEFNQKGTVRTKYGTRSQLQAAVTSLKNNGIQVYGDVVMNHKGGADATEMVRAVEVNPNNRNQEVTGEYTIEAWTRFDFPGRGNTHSSFKWRWYHFDGVDWDQSRELNNRIYKFRGKAWDWEVDTEFGNYDYLMYTDYDMDHPEVVNELRNWGVWYTNTLGLDGFRIDAVKHIKYSFTRDWINHVRSATGKNMFAVAEFWKNDLGAIENYLQKTNWNHSVFDVPLHYNLYNASKSGGNYDMRNIFNGTVVQVHPSHAVTFVDNHDSQPEEALESFVEEWFKPLAYALTLTREQGYPSVFYGDYYGIPTHGVPAMRSKIDPILEARQKYAYGPQHDYLDHPDVIGWTREGDSSHPKSGLATLITDGPGGSKRMYAGLKNAGETWYDITGNRSDTVKIGSDGWGEFHVNYGSVSIYVQK

SEQ ID NO: 42330 - protein, 478 aa, Bacillus sp.
NGTMMQYFEWYLPNDGNHWNRLNSDASNLKSKGITAVWIPPAWKGASQNDVGYGAYDLYDLGEFNQRGTVRTKYGTRSQLQAAVTSLKNNGINVYGDVVMNHKGGADATEMVRAVEVNPNNRNQEVTGEYTIEAWTRFDFPGRGNTHSSFKWRWYHFDGVDFDQSRRLNNRIYKFRGKAWDWEVDTEFGNYDYLMYADYDMDHPEVVNELRNWGVWYTNTLGLDGFRIDAVKHIKYSFTRDWINHVRSATGKNMFAVAEFWKNDLGAIENYLQKTNWNHSVFDVPLHYNLYNASKSGGNYDMRNIFNGTVVQAHPMHAVTFVDNHDSQPEEALESFVEEWFKPLAYALTLTREQGYPSVFYGDYYGIPTHGVPAMRSKIDPILEARQKYAYGPQHDYLDHPDVIGWTREGDSSHPKSGLATLITDGPGGSKRMYAGLKNAGETWYDITGNRSDTVKIGSDGWGEFHVNDGSVSIYVQK

SEQ ID NO: 42331 - protein, 478 aa, Bacillus sp.
NGTMMQYFEWYLPNDGNHWNRLNSDASNLKSKGIKAVWIPPAWKAASQNDVGYGAYDLYDLGEFNQKGTVRTKYGTRSQLQAAVTSLKNNGIQVYGDVVMNHKGGADATEMVRAVEVNPNNRNQEVTGEYTIEAWTRFDFPGRGNTHSSFKWRWYHFDGVDFDQSRNLNNRIYKFRGKAWDWEVDTEFGNYDYLMYTDYDMDHPEVVNELRNWGVWYTNTLGLDGFRIDAVKHIKYSFTRDWINHVRSATGKNMFAVAEFWKNDLGAIENYLQKTNWNHSVFDVPLHYNLYNASKSGGNYDMRNIFNGTVVQRHPSHAVTFVDNHDSQPEEALESFVEEWFKPLAYALTLTREQGYPSVFYGDYYGIPTHGVPAMRSKIDPILEARQKYAYGPQHDYLDHPDVIGWTREGDSSHPKSGLATLITDGPGGSKRMYAGLKNAGETWYDITGNRSDTVKIGSDGWGEFHVNDGSVSIYVQK

SEQ ID NO: 42332 - protein, 478 aa, Bacillus sp.
NGTMMQYFEWYLPNDGNHWNRLNSDASNLKSKGITAVWIPPAWKGASQNDVGYGAYDLYDLGEFNQRGTVRTKYGTRSQLQAAVTSLKNNGIQVYGDVVMNHKGGADLTEMVRAVEVNPNNRNQEVTGEYTIEAWTRFDFPGRGNTHSSFKWRWYHFDGVDFDQSRQLNNRIYKFRGKAWDWEVDTEFGNYDYLMYADYDMDHPEVVGELRNWGVWYTNTLGLDGFRIDAVKHIKYSFTRDWINHVRSATGKNMFAVAEFWKNDLGAIENYLQKTNWNHSVFDVPLHYNLYNASKSGGNYDMRNIFNGTVVQRHPSHAVTFVDNHDSQPEEALESFVEEWFKPLAYALTLTREQGLPSVFYGDYYGIPTHGVPAMRSKIDPILEARQKYAYGPQHDYLDHPDVIGWTREGDSSHPKSGLATLITDGPGGSKRMYAGLKNAGETWYDITGNRSDTVKIGSDGWGEFHVNDGSVSIYVQK

SEQ ID NO: 42333 - protein, 478 aa, Bacillus sp.
NGTMMQYFEWYLPNDGNHWNRLNSDASNLKSKGITAVWIPPAWKGASQNDVGYGAYDLYDLGEFNQKGTVRTKYGTRSQLQAAVTSLKNNGIQVYGDVVMNHKGGADATEMVRAVEVNPNNRNQEVTGEYTIEAWTRFDFPGRGNTHSSFKWRWYHFDGVDWDQSRELNNRIYKFRGKAWDWEVDTEFGNYDYLMYTDYDMDHPEVVNELRNWGVWYTNTLGLDGFRIDAVKHIKYSFTRDWINHVRSATGKNMFAVAEFWKNDLGAIENYLQKTNWNHSVFDVPLHYNLYNASKSSGNYDMRNIFNGTVVQRHPSHAVTFVDNHDSQPEEALESFVDEWFKPLAYALTLTREQGYPSVFYGDYYGIPTHGVPAMRSKIDPILEARQKYAYGPQHDYLDHPDVIGWTREGDSSHPKSGLATLITDGPGGSKRMYAGLKNAGETWYDITGNRSDTVKIGSDGWGEFHVNKQSVSIYVQK

SEQ ID NO: 42334 - protein, 478 aa, Bacillus sp.
NGTMMQYFEWYLPNDGNHWNRLNSDASNLKSKGITAVWIPPAWKAVSQNDVGYGAYDLYDLGEFNQKGTVRTKYGTRSQLQAAVTSLKNNGIQVYGDVVMNHKGGADATEMVRAVEVNPNNRNQEVTGEYTIEAWTRFDFPGRGNTHSSFKWRWYHFDGVDWDQSRDFQNRIYKFRGKAWDWEVDTEFGNYDYLMYTDYDMDHPEVVNELRNWGVWYTNTLGLDGFRIDAVKHIKYSFTRDWINHVRSATGKNMFAVAEFWKNDLGAIENYLQKTNWNHSVFDVPLHYNLYNASKSQGNYDMRNIFNGTVVQRHPSHAVTFVDNHDSQPEEALESFVDTWFKPLAYALTLTREQGYPSVFYGDYYGIPTHGVPAMRSKIDPILEARQKYAYGPQHDYLDHPDVIGWTREGDSSHPKSGLATLITDGPGGSKRMYAGLKNAGETWYDITGNRSDTVKIGSDGWGEFHVNGSSVSIYVQK

SEQ ID NO: 42335 - protein, 478 aa, Bacillus sp.
NGTMMQYFEWYLPNDGNHWNRLNSDASNLKSKGITAVWIPPAWKGASQNDVGYGAYDLYDLGEFNQKGTVRTKYGTRSQLQAAVTSLKNNGIQVYGDVVMNHKGGADATEMVRAVEVNPNNRNQEVTGEYTIEAWTRFDFPGRGNTHSSFKWRWYHFDGVDWDQSRRLNNRIYKFRGKAWDWEVDTEFGNYDYLMYADYDMDHPEVVNELRNWGVWYTNTLGLDGFRIDAVKHIKYSFTRDWINHVRSATGKNMFAVAEFWKNDLGEIENYLQKTNWNHSVFDVPLHYNLYNASKSQSNYDMRNIFNGTVVQRHPSHAVTFVDNHDSQPEEALESFVDEWFKPLAYALTLTREQGYPSVFYGDYYGIPTHGVPAMRSKIDPILEARQKYAYGPQHDYLDHPDVIGWTREGDSSHPKSGLATLITDGPGGSKRMYAGLKNAGETWYDITGNRSDTVKIGSDGWGEFHVNKQSVSIYVQK

SEQ ID NO: 42336 - protein, 478 aa, Bacillus sp.
NGTMMQYFEWYLPNDGNHWNRLNSDASNLKSKGIKAVWIPPAWKGASQNDVGYGAYDLYDLGEFNQRGTVRTKYGTRSQLQAAVTSLKNNGIQVYGDVVMNHKGGADATEMVRAVEVNPNNRNQEVTGEYTIEAWTRFDFPGRGNTHSSFKWRWYHFDGVDFDQSRRLNNRIYKFRGKAWDWEVDTEFGNYDYLMYADYDMDHPEVVNELRNWGVWYTNTLGLDGFRIDAVKHIKYSFTRDWINHVRSATGKNMFAVAEFWKNDLGAIENYLQKTNWNHSVFDVPLHYNLYNASKSGGNYDMRNIFNGTVVQAHPNHAVTFVDNHDSQPEEALESFVEEWFKPLAYALTLTREQGYPSVFYGDYYGIPTHGVPAMRSKIDPILEARQKYAYGPQHDYLDHPDVIGWTREGDSSHPKSGLATLITDGPGGSKRMYAGLKNAGETWYDITGNRSDTVKIGSDGWGEFHVNDGSVSIYVQK

SEQ ID NO: 42337 - protein, 478 aa, Bacillus sp.
NGTMMQYFEWYLPNDGNHWNRLNSDASNLKSKGITAVWIPPAWKGASQNDVGYGAYDLYDLGEFNQKGTVRTKYGTRSQLQAAVTSLKNNGIQVYGDVVMNHKGGADATEMVRAVEVNPNNRNQEVTGEYTIEAWTRFDFPGRGNTHSSFKWRWYHFDGVDWDQSRELDNRIYKFRGKAWDWEVDTEFGNYDYLMYTDYDYDHPESTNEMRNWGVWYTNTLGLDGFRIDAVKHIKYSFTRDWINHVRSATGKNMFAVAEFWKNDLGAIENYLQKTNWNHSVFDVPLHYNLYNASKSQGNYDMRNIFNGTVVQRHPSHAVTFVDNHDSQPEEALESFVDTWFKPLAYALTLTREQGYPSVFYGDYYGIPTHGVPAMRSKIDPILEARQKYAYGPQHDYLDHPDVIGWTREGDSSHPKSGLATLITDGPGGSKRMYAGLKNAGETWYDITGNRSDTVKIGSDGWGEFHVNGSSVSIYVQK

SEQ ID NO: 42338 - protein, 478 aa, Bacillus sp.
NGTMMQYFEWYLPNDGNHWNRLNSDASNLKSKGITAVWIPPAWKATSQNDVGYGAYDLYDLGEFNQKGTVRTKYGTRSQFQAAVTSLKNNGIQVYGDVVMNHKGGADATEMVRAVEVNPNNRNQEVTGEYTIEAWTRFDFPGRGNTHSSFKWRWYHFDGVDWDQSRELNNRIYKFRGKAWDWEVDTEFGNYDYLMYTDYDMDHPEVVNELRNWGVWYTNTLGLDGFRIDAVKHIKYSFTRDWINHVRSATGKNMFAVAEFWKNDLGAIENYLQKTNWNHSVFDVPLHYNLYNASKSGGNYDMRNIFNGTVVQRHPSHAVTFVDNHDSQPEEALESFVDPWFKPLAYALTLTREQGYPSVFYGDYYGIPTHGVPAMRSKIDPILEARQKYAYGPQHDYLDHPDVIGWTREGDSSHPKSGLATLITDGPGGSKRMYAGLKNAGETWYDITGNRSDTVKIGSDGWGEFHVNGGSVSIYVQK

SEQ ID NO: 42339 - protein, 478 aa, Bacillus sp.
NGTMMQYFEWYLPNDGNHWNRLNSDASNLKSKGITAVWIPPAWKAASQNDVGYGAYDLYDLGEFNQKGTVRTKYGTRSQLQAAVTSLKNNGIQVYGDVVMNHKGGADATEMVRAVEVNPNNRNQEVTGEYTIEAWTRFDFPGRGNTHSSFKWRWYHFDGVDWDQSRNLNNRIYKFRGKAWDWEVDTEFGNYDYLMYTDYDMDHPEVVNELRNWGVWYTNTLGLDGFRIDAVKHIKYSFTRDWINHVRSATGKNMFAVAEFWKNDLGAIENYLQKTNWNHSVFDVPLHYNLYNASKSGGNYDMRNIFNGTVVQRHPSHAVTFVDNHDSQPEEALESFVDEWFKPLAYALTLTREQGYPSVFYGDYYGIPTHGVPAMRSKIDPILEARQKYAYGPQHDYLDHPDVIGWTREGDSSHPKSGLATLITDGPGGSKRMYAGLKNAGETWYDITGNRSDTVKIGSDGWGEFHVNKSSVSIYVQK

SEQ ID NO: 42340 - protein, 478 aa, Bacillus sp.
NGTMMQYFEWYLPNDGNHWNRLNSDASNLKSKGIKAVWIPPAWKGASQNDVGYGAYDLYDLGEFNQRGTVRTKYGTRSQLQAAVTSLKNNGIQVYGDVVMNHKGGADATEMVRAVEVNPNNRNQEVTGEYTIEAWTRFDFPGRGNTHSSFKWRWYHFDGVDFDQSRRLNNRIYKFRGKAWDWEVDTEFGNYDYLMYADYDMDHPEVVNELRNWGVWYTNTLGLDGFRIDAVKHIKYSFTRDWINHVRIATGKNMFAVAEFWKNDLGAIENYLQKTNWNHSVFDVPLHYNLYNASKSGGNYDMRNIFNGTVVQRHPSHAVTFVDNHDSQPEEALESFVDEWFKPLAYALTLTREQGYPSVFYGDYYGIPTHGVPAMRSKIDPILEARQKYAYGPQHDYLDHPDVIGWTREGDSSHPKSGLATLITDGPGGSKRMYAGLKNAGETWYDITGNRSDTVKIGSDGWGEFHVNDQSVSIYVQK

SEQ ID NO: 42341 - protein, 478 aa, Bacillus sp.
NGTMMQYFEWYLPNDGNHWNRLNSDASNLKSKGITAVWIPPAWKGTSQNDVGYGAYDLYDLGEFNQKGTVRTKYGTRSQLQAAVTSLKNNGIQVYGDVVMNHKGGADATEMVRAVEVNPNNRNQEVTGEYTIEAWTRFDFPGRGNTHSSFKWRWYHFDGVDWDQSRNLNNRIYKFRGKAWDWEVDTEFGNYDYLMYVDYDYDHPESTNEMRNWGVWYTNTLGLDGFRIDAVKHIKYSFTRDWINHVRSATGKNMFAVAEFWKNDLGAIENYLQKTNWNHSVFDVPLHYNLYNASKSQGNYDMRNIFNGTVVQRHPSHAVTFVDNHDSQPEEALESFVDTWFKPLAYALTLTREQGYPSVFYGDYYGIPTHGVPAMRSKIDPILEARQKYAYGPQHDYLDHPDVIGWTREGDSSHPKSGLATLITDGPGGSKRMYAGLKNAGETWYDITGNRSDTVKIGSDGWGEFHVNGSSVSIYVQK

SEQ ID NO: 42342 - protein, 478 aa, Bacillus sp.
NGTMMQYFEWYLPNDGNHWNRLNSDASNLKSKGITAVWIPPAWKGTSQNDVGYGAYDLYDLGEFNQKGTVRTKYGTRSQLQAAVTSLKNNGIQVYGDVVMNHKGGADATEMVRAVEVNPNNRNQEVTGEYTIEAWTRFDFPGRGNTHSSFKWRWYHFDGVDWDQSRNLNNRIYKFRGKAWDWEVDTEFGNYDYLMYVDYDYDHPETTNEMRNWGVWYTNTLGLDGFRIDAVKHIKYSFTRDWINHVRSATGKNMFAVAEFWKNDLGAIENYLQKTNWNHSVFDVPLHYNLYNASKSQGNYDMRNIFNGTVVQRHPSHAVTFVDNHDSQPEEALESFVDTWFKPLAYALTLTREQGYPSVFYGDYYGIPTHGVPAMRSKIDPILEARQKYAYGPQHDYLDHPDVIGWTREGDSSHPKSGLATLITDGPGGSKRMYAGLKNAGETWYDITGNRSDTVKIGSDGWGEFHVNGSSVSIYVQK

SEQ ID NO: 42343 - protein, 478 aa, Bacillus sp.
NGTMMQYFEWYLPNDGNHWNRLNSDASNLKSKGITAVWIPPAWKGASQNDVGYGAYDLYDLGEFNQKGTVRTKYGTRSQLQAAVTSLKNNGIQVYGDVVMNHKGGADATEMVRAVEVNPNNRNQEVTGEYTIEAWTRFDFPGRGNTHSSFKWRWYHFDGVDWDQSRRLNNRIYKFRGKAWDWEVDTEFGNYDYLMYADYDMDHPEVVNELRNWGVWYTNTLGLDGFRIDAVKHIKYSFTRDWINHVRSATGKNMFAVAEFWKNDLGAIENYLQKTNWNHSVFDVPLHYNLYNASKSAGNYDMRNIFNGTVVQRHPSHAVTFVDNHDSQPEEALESFVDPWFKPLAYALTLTREQGYPSVFYGDYYGIPTHGVPAMRSKIDPILEARQKYAYGPQHDYLDHPDVIGWTREGDSSHPKSGLATLITDGPGGSKRMYAGLKNAGETWYDITGNRSDTVKIGSDGWGEFHVNKSSVFIYVQK

SEQ ID NO: 42344 - protein, 478 aa, Bacillus sp.
NGTMMQYFEWYLPNDGNHWNRLNSDASNLKSKGITAVWIPPAWKGASQNDVGYGAYDLYDLGEFNQKGTVRTKYGTRSQLQAAVTSLKNNGINVYGDVVMNHKGGADLTEMVRAVEVNPNNRNQEVTGEYTIEAWTRFDFPGRGNTHSSFKWRWYHFDGVDWDQSRRLNNRIYKFRGKAWDWEVDTEFGNYDYLMYADYDMDHPEVVNELRNWGVWYTNTLGLDGFRIDAVKHIKYSFTRDWINHVRSATGKNMFAVAEFWKNDLGAIENYLQKTNWNHSVFDVPLHYNLYNASKSVGNYDMRNIFNGTVVQAHPMHAVTFVDNHDSQPEEALESFVEEWFKPLAYALTLTREQGYPSVFYGDYYGIPTHGVPAMRSKIDPILEARQKYAYGPQHDYLDHPDVIGWTREGDSSHPKSGLATLITDGPGGSKRMYAGLKNAGETWYDITGNRSDTVKIGSDGWGEFHVNDGSVSIYVQK

SEQ ID NO: 42345 - protein, 478 aa, Bacillus sp.
NGTMMQYFEWYLPNDGNHWNRLNSDASNLKSKGITAVWIPPAWKAVSQNDVGYGAYDLYDLGEFNQKGTVRTKYGTRSQLQAAVTSLKNNGIQVYGDVVMNHKGGADATEMVRAVEVNPNNRNQEVTGEYTIEAWTRFDFPGRGNTHSSFKWRWYHFDGVDWDQSRDFNNRIYKFRGKAWDWEVDTEFGNYDYLMYVDYDMDHPEVVNELRNWGVWYTNTLGLDGFRIDAVKHIKYSFTRDWINHVRSATGKNMFAVAEFWKNDLGAIENYLQKTNWNHSVFDVPLHYNLYNASQSGGNYDMRNIFNGTVVQRHPSHAVTFVDNHDSQPEEALESFVEEWFKPLAYALTLTREQGYPSVFYGDYYGIPTHGVPAMRSKIDPILEARQKYAYGPQHDYLDHPDVIGWTREGDSSHPKSGLATLITDGPGGSKRMYAGLKNAGETWYDITGNRSDTVKIGSDGWGEFHVNGSSVSIYVQK

SEQ ID NO: 42346 - protein, 478 aa, Bacillus sp.
NGTMMQYFEWYLPNDGNHWNRLNSDASNLKSKGITAVWIPPAWKAVSQNDVGYGAYDLYDLGEFNQKGTVRTKYGTRSQLQAAVTSLKNNGIQVYGDVVMNHKGGADATEMVRAVEVNPNNRNQEVTGEYTIEAWTRFDFPGRGNTHSSFKWRWYHFDGVDFDQSREFTNRIYKFRGKAWDWEVDTEFGNYDYLMYVDYDYDHPESTNEMRNWGVWYTNTLGLDGFRIDAVKHIKYSFTRDWINHVRSATGKNMFAVAEFWKNDLGAIENYLQKTNWNHSVFDVPLHYNLYNASKSGGNYDMRNIFNGTVVQRHPSHAVTFVDNHDSQPEEALESFVEEWFKPLAYALTLTREQGYPSVFYGDYYGIPTHGVPAMRSKIDPILEARQKYAYGPQHDYLDHPDVIGWTREGDSSHPKSGLATLITDGPGGSKRMYAGLKNAGETWYDITGNRSDTVKIGSDGWGEFHVNDGSVSIYVQK

SEQ ID NO: 42347 - protein, 478 aa, Bacillus sp.
NGTMMQYFEWYLPNDGNHWNRLNSDASNLKSKGITAVWIPPAWKAVSQNDVGYGAYDLYDLGEFNQKGTVRTKYGTRSQLQAAVTSLKNNGIQVYGDVVMNHKGGADATEMVRAVEVNPNNRNQEVTGEYTIEAWTRFDFPGRGNTHSSFKWRWYHFDGVDFDQSREFTNRIYKFRGKAWDWEVDTEFGNYDYLMYADYDYDHPESTNEMRNWGVWYTNTLGLDGFRIDAVKHIKYSFTRDWINHVRIATGKNMFAVAEFWKNDLGAIENYLQKTNWNHSVFDVPLHYNLYNASKSGGNYDMRNIFNGTVVQRHPSHAVTFVDNHDSQPEEALESFVDEWFKPLAYALTLTREQGYPSVFYGDYYGIPTHGVPAMRSKIDPILEARQKYAYGPQHDYLDHPDVIGWTREGDSSHPKSGLATLITDGPGGSKRMYAGLKNAGETWYDITGNRSDTVKIGSDGWGEFHVNDQSVSIYVQK

SEQ ID NO: 42348 - protein, 478 aa, Bacillus sp.
NGTMMQYFEWYLPNDGNHWNRLNSDASNLKSKGITAVWIPPAWKAASQNDVGYGAYDLYDLGEFNQKGTVRTKYGTRSQLQAAVTSLKNNGIQVYGDVVMNHKGGADATEMVRAVEVNPNNRNQEVTGEYTIEAWTRFDFPGRGNTHSSFKWRWYHFDGVDWDQSRRLDNRIYKFRGKAWDWEVDTEFGNYDYLMYTDYDMDHPEVVNELRNWGVWYTNTLGLDGFRIDAVKHIKYSFTRDWINHVRSATGKNMFAVAEFWKNDLGAIENYLQKTNWNHSVFDVPLHYNLYNASKSGGNYDMRNIFNGTVVQRHPSHAVTFVDNHDSQPEEALESFVDEWFKPLAYALTLTREQGYPSVFYGDYYGIPTHGVPAMRSKIDPILEARQKYAYGPQHDYLDHPDVIGWTREGDSSHPKSGLATLITDGPGGSKRMYAGLKNAGETWYDITGNRSDTVKIGSDGWGEFHVNKSSVSIYVQK

SEQ ID NO: 42349 - protein, 478 aa, Bacillus sp.
NGTMMQYFEWYLPNDGNHWNRLNSDASNLKSKGITAVWIPPAWKAVSQNDVGYGAYDLYDLGEFNQKGTVRTKYGTRSQLQAAVTSLKNNGIQVYGDVVMNHKGGADLTEMVRAVEVNPNNRNQEVTGEYTIEAWTRFDFPGRGNTHSSFKWRWYHFDGVDWDQSREFTNRIYKFRGKAWDWEVDTEFGNYDYLMYVDYDMDHPEVVNELRNWGVWYTNTLGLDGFRIDAVKHIKYSFTRDWINHVRSATGKNMFAVAEFWKNDLGAIENYLQKTNWNHSVFDVPLHYNLYNASKSGGNYDMRNIFNGTVVQRHPSHAVTFVDNHDSQPEEALESFVDPWFKPLAYALTLTREQGYPSVFYGDYYGIPTHGVPAMRSKIDPILEARQKYAYGPQHDYLDHPDVIGWTREGDSSHPKSGLATLITDGPGGSKRMYAGLKNAGETWYDITGNRSDTVKIGSDGWGEFHVNGGSVSIYVQK

SEQ ID NO: 42350 - protein, 478 aa, Bacillus sp.
NGTMMQYFEWYLPNDGNHWNRLNSDASNLKSKGIKAVWIPPAWKAASQNDVGYGAYDLYDLGEFNQKGTVRTKYGTRSQLQAAVTSLKNNGIQVYGDVVMNHKGGADATEMVRAVEVNPNNRNQEVTGEYTIEAWTRFDFPGRGNTHSSFKWRWYHFDGVDFDQSRDLTNRIYKFRGKAWDWEVDTEFGNYDYLMYADYDMDHPEVVNELRNWGVWYTNTLGLDGFRIDAVKHIKYSFTRDWINHVRSATGKNMFAVAEFWKNDLGAIENYLQKTNWNHSVFDVPLHYNLYNASKSGGNYDMRNIFNGTVVQRHPSHAVTFVDNHDSQPEEALESFVDPWFKPLAYALTLTREQGYPSVFYGDYYGIPTHGVPAMRSKIDPILEARQKYAYGPQHDYLDHPDVIGWTREGDSSHPKSGLATLITDGPGGSKRMYAGLKNAGETWYDITGNRSDTVKIGSDGWGEFHVNGGSVSIYVQK

SEQ ID NO: 42351 - protein, 478 aa, Bacillus sp.
NKTMMQYFEWYLPNDGNHWNRLNSDASNLKSKGIKAVWIPPAWKGASQNDVGYGAYDLYDLGEFNQRGTVRTKYGTRSQLQAAVTSLKNNGIQVYGDVVMNHKGGADATEMVRAVEVNPNNRNQEVTGEYTIEAWTRFDFPGRGNTHSSFKWRWYHFDGVDFDQSRRLNNRIYKFRGKAWDWEVDTEFGNYDYLMYADYDMDHPEVVNELRNWGVWYTNTLGLDGFRIDAVKHIKYSFTRDWINHVRSATGKNMFAVAEFWKNDLGAIENYLQKTNWNHSVFDVPLHYNLYNASKSGGNYDMRNIFNGTVVQRHPSHAVTFVDNHDSQPEEALESFVEEWFKPLAYALTLTREQGYPSVFYGDYYGIPTHGVPAMRSKIDPILEARQKYAYGPQHDYLDHPDVIGWTREGDSSHPKSGLATLITDGPGGSKRMYAGLKNAGETWYDITGNRSDTVKIGSDGWGEFHVNDGSVSIYVQK

SEQ ID NO: 42352 - protein, 478 aa, Bacillus sp.
NGTMMQYFEWYLPNDGNHWNRLNSDASNLKSKGITAVWIPPAWKAVSQNDVGYGAYDLYDLGEFNQKGTVRTKYGTRSQLQAAVTSLKNNGIQVYGDVVMNHKGGADATEMVRAVEVNPNNRNQEVTGEYTIEAWTRFDFPGRGNTHSSFKWRWYHFDGVDWDQSRNLTNRIYKFRGKAWDWEVDTEFGNYDYLMYTDYDMDHPEVVNELRNWGVWYTNTLGLDGFRIDAVKHIKYSFTRDWINHVRSATGKNMFAVAEFWKNDLGAIENYLQKTNWNHSVFDVPLHYNLYNASKSGGNYDMRNIFNGTVVQRHPSHAVTFVDNHDSQPEEALESFVDEWFKPLAYALTLTREQGYPSVFYGDYYGIPTHGVPAMRSKIDPILEARQKYAYGPQHDYLDHPDVIGWTREGDSSHPKSGLATLITDGPGGSKRMYAGLKNAGETWYDITGNRSDTVKIGSDGWGEFHVNKSSVSIYVQK

SEQ ID NO: 42353 - protein, 478 aa, Bacillus sp.
NGTMMQYFEWYLPNDGNHWNRLNSDASNLKSKGITAVWIPPAWKAVSQNDVGYGAYDLYDLGEFNQKGTVRTKYGTRSQLQAAVTSLKNNGIQVYGDVVMNHKGGADATEMVRAVEVNPNNRNQEVTGEYTIEAWTRFDFPGRGNTHSSFKWRWYHFDGVDWDQSRQLNNRIYKFRGKAWDWEVDTEFGNYDYLMYVDYDMDHPEVVNELRNWGVWYTNTLGLDGFRIDAVKHIKYSFTRDWINHVRSATGKNMFAVAEFWKNDLGAIENYLQKTNWNHSVFDVPLHYNLYNASKSQGNYDMRNIFNGTVVQRHPSHAVTFVDNHDSQPEEALESFVDTWFKPLAYALTLTREQGYPSVFYGDYYGIPTHGVPAMRSKIDPILEARQKYAYGPQHDYLDHPDVIGWTREGDSSHPKSGLATLITDGPGGSKRMYAGLKNAGETWYDITGNRSDTVKIGSDGWGEFHVNGSSVSIYVQK

SEQ ID NO: 42354 - protein, 482 aa, Synthetic construct
NGTMMQYFEWYLPNDGNHWTRLQNDAANLSSKGVTAVWIPPAYKGTSQNDVGYGAYDLYDLGEFNQKGTVRTKYGTKAQLKSAIAELHKQNIHVYGDVVMNHKGGADFTETVTAVEVDPNNRNRETSGDYQISAWTGFTFPGRGNTYSPFKWNWYHFDGTDWDESRKINRIYKFRGTGKAWDWEVSSENGNYDYLMYADIDYEHPDVINEMKKWGTWYAKELNLDGFTLDAVKHIKHDYLRDWVTHVRNQTGKELFTVAEYWQNDIGQLNNYLAKTNYNQSVFDAPLHYHFHADSSYLGNYDMRNILKGTVMESNPRLAVTLVENHDSQPGQSLESVVSTWFKPLAYAFILTRAEGYPSVFYGDYYGTKGNSNYEIPSLKTQLDPILTARKNYAYGLQRDYIDHWDIIGWTREGEAARDKSGLATLITDGPGGYKWMEVGKQNAGEVWYDITGNRKETVTINNDGWGQFYVNGGSVSIYVQK

SEQ ID NO: 42355 - protein, 481 aa, Bacillus licheniformis
NGTLMQYFEWYTPNDGQHWKRLQNDSAYLAEHGITAVWIPPAYKGASQNDVGYGAYDLYDLGEFHQKGTVRTKYGTKGELQSAIKSLHSRDINVYGDVVINHKGGADATELVRAVEVNPNNRNQEVSGEYTIEAYTYFDFPGRGNTHSNFKWRWYHFDGVDWDQSRRLNNRIYKFRGKGWDWEVDTEFGNYDYLTYADIDYDHPDVAAEIKRWGTWYANELQLDGFRLDAVKHIKYSFLRDWVNHVREKTGKEMFTVAEFWKNDLGALENYLNKTNFNHSVFDVPLHYQFYAASKQGGGYDMRKLLNGTVVSKHPLKSVTFVDNHDTQPEEALESTVQTWFKPLAYAFILTRESGYPQVFYGDMYGTKGDSQREIPALKHKIEPILKARKQYAYGAQHDYFDHHDIVGWTREGDSSVANSGLAALITDGPGGAKRMYVGRQNAGETWHDITGNRSEPVVINSEGWGEFHVNGGSVSIYVQR

SEQ ID NO: 42356 - protein, 483 aa, Synthetic construct
NGTLMQYFEWYMPNDGQHWKRLQNDSAYLAEHGITAVWIPPAYKGTSQADVGYGAYDLYDLGEFHQKGTVRTKYGTKGELQSAIKSLHSRDINVYGDVVINHKGGADATEMVRAVEVNPNNRNQEVSGEYTIEAWTKFDFPGRGNTHSNFKWRWYHFDGVDWDQSRKLNNRIYKFRGDGKGWDWEVDTENGNYDYLMYADIDYDHPDVAAEIKRWGTWYANELQLDGFRLDAVKHIKFSFLRDWVNHVREKTGKEMFTVAEYWSYDLGALENYLNKTNFNHSVFDVPLHYQFHAASTQGGGYDMRKLLNGTVVSKHPLKSVTFVDNHDTQPGQSLESTVQTWFKPLAYAFILTRESGYPQVFYGDMYGTKGDSQREIPALKHKIEPILKARKQYAYGAQHDYFDHHDIVGWTREGDSSVANSGLAALITDGPGGAKRMYVGRQNAGETWHDITGNRSEPVVINSAGWGEFHVNGGSVSIYVQR

SEQ ID NO: 42357 - protein, 480 aa, Synthetic construct
NETMMQYFEWDLPNDGTLWTKVKNEAANLSSLGITALWLPPAYKGTSQSDVGYGVYDLYDLGEFNQKGTIRTKYGTKTQYIQAIQAAKAAGMQVYADVVFNHKGGADATENVLAVEVNPNNRNQEISGDYTIEAWTKFDFPGRGNTYSDFKWRWYHFDGVDWDQSRQFQNRIYKFRGDGKAWDWEVDSENGNYDYLMYADVDMDHPEVVTELKNWGTWYVNTTNIDGFRLDAVKHIKYSFFPDWLTYVRNQTGKNLFAVGEFWSYDVNKLHNYITKTNGSMSLFDAPLHNNFYTASKSSGYFDMRYLLNNTLMKDQPSLAVTLVDNHDTQPGQSLQSWVEPWFKPLAYAFILTRQEGYPCVFYGDYYGIPKYNIPGLKSKIDPLLIARRDYAYGTQRDYIDHQDIIGWTREGIDTKPNSGLAALITDGPGGSKWMYVGKKHAGKVFYDLTGNRSDTVTINADGWGEFKVNGGSVSIWVAK

SEQ ID NO: 42358 - protein, 478 aa, Bacillus sp.
NETMMQYFEWDLPNDGTLWNRLHNNAQNLKNAGITALWLPPAYKGTSQSDVGYGVYDLYDLGEFNQKGTIRTKYGTKTQLERAIRSLKANGIQVYADVVFNHKAGADGTEFVDAVEVDPSNRNQEVSGTYQIEAWTKFDFPGRGNTYSSFKWRWYHFDGTDWDESRKLQNRIYKFRGKAWDWEVDTENGNYDYLMFADLDMDHPEVVTELKNWGTWYVNTTNIDGFRLDAVKHIKFSFMRDWLTYVRNQTGKNLFAVGEFWKDDLGALENYITKTNGSMSLFDAPLHNNFYTASKSSGYFDMRNLLNGTLVQRHPSHAVTLVDNHDTDPGQSLESWVEPWFKPLAYAFILTRQEGYPCVFYGDYYGIPKYEIPGLKSKIDPLLIARRDYAYGTQRDYIDHQDIIGWTREGIDTKPNSGLAALITDGPGGSKWMYVGKKHAGKVFYDLTGNRSDTVTINADGWGEFKVNGGSVSIWVAK

SEQ ID NO: 42359 - protein, 477 aa, Bacillus sp.
NGTMMQYFEWYLPNDGNHWNRLNSDASNLKSKGITAVWIPPAWKGASQNDVGYGAYDLYDLGEFNQKGTVRTKYGTRSQLQAAVTSLKNNGINVYGDVVMNHKGGADATEMVRAVEVNPNNRNQEVTGEYTIEAYTRFDFPGRGNTHSSFKWRWYHFDGVDWDQSRKLNNRIYKFRGKAWDWEVDTEFGNYDYLMYVDYDYDHPETTNEMRNWGVWYTNTLGLDGFRIDAVKHIKYSFTRDWINHVRIATGKNMFAVAEFWKNDLGAIENYLQKTNWNHSVFDVPLHYNLYNASKSGGNYDMRNIFNGTVVQAHPMHAVTFVDNHDSQPEEALESFVDEWFKPLAYALTLTREQGYPSVFYGDYYGIPTHGVPAMRSKIDPILEARQKYAYGPQHDYLDHPDVIGWTREGDSSHPKSGLATLITDGPGGSKRMYAGLKNAGETWYDITGNRSDTVKIGSDGWGEFHNDGSVSIYVQK

SEQ ID NO: 42360 - protein, 477 aa, Bacillus sp.
NETMMQYFEWDLPDDGTLWNRLHNNAQNLKNAGITALWLPPAYKGTSQSDVGYGVYDLYDLGEFNQKGTIRTKYGTKTQLERAIRSLKANGIQVYADVVFNHKAGADGTEFVDAVEVDPSNRNQEVSGTYQIEAWTKFDFPGRGNTYSSFKWRWYHFDGTDWDESRKLNRIYKFRGKAWDWEVDTENGNYDYLMFADLDMDHPEVVTELNRWGTWYVNTTNIDGFRLDAVKHIKFSFMRDWLTYVRNQTGKNLFAVGEFWKEDLGALENYITKTNGSMSLFDAPLHENFYTASKSSGYFDMRELLNGTLVQRHPSHAVTLVDEHDTQPGQSLESWVEPWFKPLAYAFILTRQEGYPCVFYGDYYGIPKYEIPGLKSKIDPLLIARRDYAYGTQRDYIDHQDIIGWTREGIDTKPNSGLAALITDGPGGSKWMYVGKKHAGKVFYDLTGNRSDTVTINADGWGEFKVNGGSVSIWVAK

SEQ ID NO: 42361 - protein, 480 aa, Bacillus sp.
NGTMMQYFEWYLPNDGNHWNRLNSDASNLKSKGITAVWIPPAWKGASQNDVGYGAYDLYDLGEFNQKGTVRTKYGTRSQLQAAVTSLKNNGIQVYGDVVMNHKGGADATEMVRAVEVNPNNRNQEVTGEYTIEAWTRFDFPGRGNTHSSFKWRWYHFDGVDWDQSRRTNNRIYKFRGHGKAWDWEVDTEFGNYDYLMYTDYDMDHPEVVNELRNWGVWYTNTLGLDGFRIDAVKHIKYSFTRDWINHVRSATGKNMFAVAEFWKNDLGAIENYLQKTNWNHSVFDVPLHYNLYNASKSSGNYDMRNIFNGTVVQRHPSHAVTFVDNHDSQPEEALESFVDEWFKPLAYALTLTREQGYPSVFYGDYYGIPTHGVPAMRSKIDPILEARQKYAYGPQHDYLDHPDVIGWTREGDSSHPKSGLATLITDGPGGSKRMYAGLKNAGETWYDITGNRSDTVKIGSDGWGEFHVNKQSVSIYVQK

SEQ ID NO: 42362 - protein, 480 aa, Bacillus sp.
NGTMMQYFEWYLPNDGNHWNRLNSDASNLKSKGITAVWIPPAWKAVSQNDVGYGAYDLYDLGEFNQKGTVRTKYGTRSQLQAAVTSLKNNGIQVYGDVVMNHKGGADATEMVRAVEVNPNNRNQEVTGEYTIEAWTRFDFPGRGNTHSSFKWRWYHFDGVDWDQSRNLTNRIYKFRGHGKAWDWEVDTEFGNYDYLMYTDYDMDHPEVVNELRNWGVWYTNTLGLDGFRIDAVKHIKYSFTRDWINHVRSATGKNMFAVAEFWKNDLGAIENYLQKTNWNHSVFDVPLHYNLYNASKSGGNYDMRNIFNGTVVQRHPSHAVTFVDNHDSQPEEALESFVDEWFKPLAYALTLTREQGYPSVFYGDYYGIPTHGVPAMRSKIDPILEARQKYAYGPQHDYLDHPDVIGWTREGDSSHPKSGLATLITDGPGGSKRMYAGLKNAGETWYDITGNRSDTVKIGSDGWGEFHVNKSSVSIYVQK

SEQ ID NO: 42363 - protein, 480 aa, Bacillus sp.
NGTMMQYFEWYLPNDGNHWNRLNSDASNLKSKGIKAVWIPPAWKGASQNDVGYGAYDLYDLGEFNQRGTVRTKYGTRSQLQAAVTSLKNNGIQVYGDVVMNHKGGADATEMVRAVEVNPNNRNQEVTGEYTIEAWTRFDFPGRGNTHSSFKWRWYHFDGVDFDQSRRLNNRIYKFRGHGKAWDWEVDTEFGNYDYLMYADYDMDHPEVVNELRNWGVWYTNTLGLDGFRIDAVKHIKYSFTRDWINHVRSATGKNMFAVAEFWKNDLGAIENYLQKTNWNHSVFDVPLHYNLYNASKSGGNYDMRNIFNGTVVQAHPSQAVTFVDNHDSQPEEALESFVEEWFKPLAYALTLTREQGYPSVFYGDYYGIPTHGVPAMRSKIDPILEARQKYAYGPQHDYLDHPDVIGWTREGDSSHPKSGLATLITDGPGGSKRMYAGLKNAGETWYDITGNRSDTVKIGSDGWGEFHVNDGSVSIYVQK

SEQ ID NO: 42364 - protein, 480 aa, Bacillus sp.
NGTMMQYFEWYLPNDGNHWNRLNSDASNLKSKGITAVWIPPAWKAVSQNDVGYGAYDLYDLGEFNQKGTVRTKYGTRSQLQAAVTSLKNNGIQVYGDVVMNHKGGADATEMVRAVEVNPNNRNQEVTGEYTIEAWTRFDFPGRGNTHSSFKWRWYHFDGVDWDQSRQLNNRIYKFRGHGKAWDWEVDTEFGNYDYLMYVDYDMDHPEVVNELRNWGVWYTNTLGLDGFRIDAVKHIKYSFTRDWINHVRSATGKNMFAVAEFWKNDLGAIENYLQKTNWNHSVFDVPLHYNLYNASKSQGNYDMRNIFNGTVVQRHPSHAVTFVDNHDSQPEEALESFVDTWFKPLAYALTLTREQGYPSVFYGDYYGIPTHGVPAMRSKIDPILEARQKYAYGPQHDYLDHPDVIGWTREGDSSHPKSGLATLITDGPGGSKRMYAGLKNAGETWYDITGNRSDTVKIGSDGWGEFHVNGSSVSIYVQK

SEQ ID NO: 42365 - protein, 480 aa, Bacillus sp.
NGTMMQYFEWYLPNDGNHWNRLNSDASNLKSKGITAVWIPPAWKAVSQNDVGYGAYDLYDLGEFNQKGTVRTKYGTRSQLQAAVTSLKNNGIQVYGDVVMNHKGGADATEMVRAVEVNPNNRNQEVTGEYTIEAWTRFDFPGRGNTHSSFKWRWYHFDGVDFDQSREFTNRIYKFRGHGKAWDWEVDTEFGNYDYLMYVDYDMDHPEVVNELRNWGVWYTNTLGLDGFRIDAVKHIKYSFTRDWINHVRSATGKNMFAVAEFWKNDLGAIENYLQKTNWNHSVFDVPLHYNLYNASKSGGNYDMRNIFNGTVVQAHPNHAVTFVDNHDSQPEEALESFVEEWFKPLAYALTLTREQGYPSVFYGDYYGIPTHGVPAMRSKIDPILEARQKYAYGPQHDYLDHPDVIGWTREGDSSHPKSGLATLITDGPGGSKRMYAGLKNAGETWYDITGNRSDTVKIGSDGWGEFHVNDGSVSIYVQK

SEQ ID NO: 42366 - protein, 480 aa, Bacillus sp.
NGTMMQYFEWYLPNDGNHWNRLNSDASNLKSKGITAVWIPPAWKATSQNDVGYGAYDLYDLGEFNQKGTVRTKYGTRSQLQAAVTSLKNNGIQVYGDVVMNHKGGADATEMVRAVEVNPNNRNQEVTGEYTIEAWTRFDFPGRGNTHSSFKWRWYHFDGVDWDQSRELNNRIYKFRGHGKAWDWEVDTEFGNYDYLMYTDYDMDHPEVVNELRNWGVWYTNTLGLDGFRIDAVKHIKYSFTRDWINHVRSATGKNMFAVAEFWKNDLGAIENYLQKTNWNHSVFDVPLHYNLYNASQSGGNYDMRNIFNGTVVQRHPSHAVTFVDNHDSQPEEALESFVEPWFKPLAYALTLTREQGYPSVFYGDYYGIPTHGVPAMRSKIDPILEARQKYAYGPQHDYLDHPDVIGWTREGDSSHPKSGLATLITDGPGGSKRMYAGLKNAGETWYDITGNRSDTVKIGSDGWGEFHVNKSSVSIYVQK

SEQ ID NO: 42367 - protein, 480 aa, Bacillus sp.
NGTMMQYFEWYLPNDGNHWNRLNSDASNLKSKGIKAVWIPPAWKGASQNDVGYGAYDLYDLGEFNQRGTVRTKYGTRSQLQAAVTSLKNNGIQVYGDVVMNHKGGADATEMVRAVEVNPNNRNQEVTGEYTIEAYTRFDFPGRGNTHSSFKWRWYHFDGVDFDQSRRLNNRIYKFRGHGKAWDWEVDTEFGNYDYLMYADYDMDHPEVVNELRNWGVWYTNTLGLDGFRIDAVKHIKYSFTRDWINHVRSATGKNMFAVAEFWKNDLGAIENYLQKTNWNHSVFDVPLHYNLYNASKSGGNYDMRNIFNGTVVQRHPSHAVTFVDNHDSQPEEALESFVEEWFKPLAYALTLTREQGYPSVFYGDYYGIPTHGVPAMRSKIDPILEARQKYAYGPQHDYLDHPDVIGWTREGDSSHPKSGLATLITDGPGGSKRMYAGLKNAGETWYDITGNRSDTVKIGSDGWGEFHVNDGSVSIYVQK

SEQ ID NO: 42368 - protein, 480 aa, Bacillus sp.
NGTMMQYFEWYLPNDGNHWNRLNSDASNLKSKGITAVWIPPAWKGASQNDVGYGAYDLYDLGEFNQKGTVRTKYGTRSQLQAAVTSLKNNGIQVYGDVVMNHKGGADLTEMVRAVEVNPNNRNQEVTGEYTIEAWTRFDFPGRGNTHSSFKWRWYHFDGVDFDQSRRLNNRIYKFRGHGKAWDWEVDTEFGNYDYLMYADYDMDHPEVVNELRNWGVWYTNTLGLDGFRIDAVKHIKYSFTRDWINHVRSATGKNMFAVAEFWKNDLGAIENYLQKTNWNHSVFDVPLHYNLYNASKSGGNYDMRNIFNGTVVQRHPSHAVTFVDNHDSQPEEALESFVDEWFKPLAYALTLTREQGYPSVFYGDYYGIPTHGVPAMRSKIDPILEARQKYAYGPQHDYLDHPDVIGWTREGDSSHPKSGLATLITDGPGGSKRMYAGLKNAGETWYDITGNRSDTVKIGSDGWGEFHVNKSSVSIYVQK

SEQ ID NO: 42369 - protein, 480 aa, Bacillus sp.
NGTMMQYFEWYLPNDGNHWNRLNSDASNLKSKGITAVWIPPAWKAASQNDVGYGAYDLYDLGEFNQKGTVRTKYGTRSQLQAAVTSLKNNGIQVYGDVVMNHKGGADATEMVRAVEVNPNNRNQEVTGEYTIEAWTRFDFPGRGNTHSSFKWRWYHFDGVDWDQSRNLNNRIYKFRGHGKAWDWEVDTEFGNYDYLMYTDYDMDHPEVVNELRNWGVWYTNTLGLDGFRIDAVKHIKYSFTRDWINHVRSATGKNMFAVAEFWKNDLGAIENYLQKTNWNHSVFDVPLHYNLYNASKSGGNYDMRNIFNGTVVQRHPSHAVTFVDNHDSQPEEALESFVDEWFKPLAYALTLTREQGYPSVFYGDYYGIPTHGVPAMRSKIDPILEARQKYAYGPQHDYLDHPDVIGWTREGDSSHPKSGLATLITDGPGGSKRMYAGLKNAGETWYDITGNRSDTVKIGSDGWGEFHVNKSSVSIYVQK

SEQ ID NO: 42370 - protein, 480 aa, Bacillus sp.
NGTMMQYFEWYLPNDGNHWNRLNSDASNLKSKGITAVWIPPAWKAVSQNDVGYGAYDLYDLGEFNQKGTVRTKYGTRSQLQAAVTSLKNNGIQVYGDVVMNHKGGADATEMVRAVEVNPNNRNQEVTGEYTIEAWTRFDFPGRGNTHSSFKWRWYHFDGVDFDQSREFTNRIYKFRGHGKAWDWEVDTEFGNYDYLMYADYDYDHPESTNEMRNWGVWYTNTLGLDGFRIDAVKHIKYSFTRDWINHVRIATGKNMFAVAEFWKNDLGAIENYLQKTNWNHSVFDVPLHYNLYNASKSGGNYDMRNIFNGTVVQRHPSHAVTFVDNHDSQPEEALESFVDEWFKPLAYALTLTREQGYPSVFYGDYYGIPTHGVPAMRSKIDPILEARQKYAYGPQHDYLDHPDVIGWTREGDSSHPKSGLATLITDGPGGSKRMYAGLKNAGETWYDITGNRSDTVKIGSDGWGEFHVNDQSVSIYVQK

SEQ ID NO: 42371 - protein, 480 aa, Bacillus sp.
NGTMMQYFEWYLPNDGNHWNRLNSDASNLKSKGITAVWIPPAWKATSQNDVGYGAYDLYDLGEFNQKGTVRTKYGTRSQLQAAVTSLKNNGIQVYGDVVMNHKGGADATEMVRAVEVNPNNRNQEVTGEYTIEAWTRFDFPGRGNTHSSFKWRWYHFDGVDWDQSRELSNRIYKFRGHGKAWDWEVDTEFGNYDYLMYADYDMDHPEVVNELRNWGVWYTNTLGLDGFRIDAVKHIKYSFTRDWINHVRSATGKNMFAVAEFWKNDLGAIENYLQKTNWNHSVFDVPLHYNLYNASKSQGNYDMRNIFNGTVVQANPNHAVTFVDNHDSQPEEALESFVDTWFKPLAYALTLTREQGYPSVFYGDYYGIPTHGVPAMRSKIDPILEARQKYAYGPQHDYLDHPDVIGWTREGDSSHPKSGLATLITDGPGGSKRMYAGLKNAGETWYDITGNRSDTVKIGSDGWGEFHVNGSSVSIYVQK

SEQ ID NO: 42372 - protein, 480 aa, Bacillus sp.
NGTMMQYFEWYLPNDGNHWNRLNSDASNLKSKGITAVWIPPAWKGASQNDVGYGAYDLYDLGEFNQKGTVRTKYGTRSQLQAAVTSLKNNGIQVYGDVVMNHKGGADATEMVRAVEVNPNNRNQEVTGEYTIEAYTRFDFPGRGNTHSSFKWRWYHFDGVDFDQSRDLTNRIYKFRGHGKAWDWEVDTEFGNYDYLMYVDYDMDHPEVVNELRNWGVWYTNTLGLDGFRIDAVKHIKYSFTRDWINHVRNATGKNMFAVAEFWKNDLGAIENYLQKTNWNHSVFDVPLHYNLYNASKSGGNYDMRNIFNGTVVQRHPSHAVTFVDNHDSQPEEALESFVDEWFKPLAYALTLTREQGYPSVFYGDYYGIPTHGVPAMRSKIDPILEARQKYAYGPQHDYLDHPDVIGWTREGDSSHPKSGLATLITDGPGGSKRMYAGLKNAGETWYDITGNRSDTVKIGSDGWGEFHVNDQSVSIYVQK

SEQ ID NO: 42373 - protein, 480 aa, Bacillus sp.
NGTMMQYFEWYLPNDGNHWNRLNSDASNLKSKGITAVWIPPAWKGASQNDVGYGAYDLYDLGEFNQKGTVRTKYGTRSQLQAAVTSLKNNGIQVYGDVVMNHKGGADATEMVPAVEVNPNNRNQEVTGEYTIEAWTRFDFPGRGNTHSSFKWRWYHFDGVDWDQSRELDNRIYKFRGHSKAWDWEVDTEFGNYDYLMYTDYDMDHPEVVNELRNWGVWYTNTLGLDGFRIDAVKHIKYSFTRDWINHVRSATGKNMFAVAEFWKNDLGAIENYLQKTNWNHSVFDVPLHYNLYNASKSQGNYDMRNIFNGTVVQRHPSHAVTFVDNHDSQPEEALESFVDTWFKPLAYALTLTREQGYPSVFYGDYYGIPTHGVPAMRSKIDPILLARQKYAYGPQHDYLDHPDVIGWTREGDSSHPKSGLATLITDGPGGSKRMYAGLKNAGETWYDITGNRSDTVKIGSDGWGEFHVNGSSVSIYVQK

SEQ ID NO: 42374 - protein, 480 aa, Bacillus sp.
NGTMMQYFEWYLPNDGNHWNRLNSDASNLKSKGITAVWIPPAWKATSQNDVGYGAYDLYDLGEFNQKGTVRTKYGTRSQLQAAVTSLKNNGIQVYGDVVMNHKGGADATEMVRAVEVNPNNRNQEVTGEYTIEAWTRFDFPGRGNTHSSFKWRWYHFDGVDWDQSRELNNRIYKFRGHGKAWDWEVDTEFGNYDYLMYTDYDMDHPEVVNELRNWGVWYTNTLGLDGFRIDAVKHIKYSFTRDWINHVRSATGKNMFAVAEFWKNDLGAIENYLQKTNWNHSVFDVPLHYNLYNASKSGGNYDMRNIFNGTVVQRHPSHAVTFVDNHDSQPEEALESFVDEWFKPLAYALTLTREQGYPSVFYGDYYGIPTHGVPAMRSKIDPILEARQKYAYGPQHDYLDHPDVIGWTREGDSSHPKSGLATLITDGPGGSKRMYAGLKNAGETWYDITGNRSDTVKIGSDGWGEFHVNKSSVSIYVQK

SEQ ID NO: 42375 - protein, 480 aa, Bacillus sp.
NGTMMQYFEWYLPNDGNHWNRLNSDASNLKSKGIKAVWIPPAWKGTSQNDVGYGAYDLYDLGEFNQKGTVRTKYGTRSQLQAAVTSLKNNGIQVYGDVVMNHKGGADATEMVRAVEVNPNNRNQEVTGEYTIEAWTRFDFPGRGNTHSSFKWRWYHFDGVDWDQSRNLNNRIYKFRGHGKAWDWEVDTEFGNYDYLMYVDYDMDHPEVVNELRNWGVWYTNTLGLDGFRIDAVKHIKYSFTRDWINHVRSATGKNMFAVAEFWKNDLGAIENYLQKTNWNHSVFDVPLHYNLYNASKSQGNYDMRNIFNGTVVQRHPSHAVTFVDNHDSQPEEALESFVDTWFKPLAYALTLTREQGYPSVFYGDYYGIPTHGVPAMRSKIDPILEARQKYAYGPQHDYLDHPDVIGWTREGDSSHPKSGLATLITDGPGGSKRMYAGLKNAGETWYDITGNRSDTVKIGSDGWGEFHVNGSSVSIYVQK

SEQ ID NO: 42376 - protein, 480 aa, Bacillus sp.
NKTMMQYFEWYLPNDGNHWNRLNSDASNLKSKGITAVWIPPAWKGASQNDVGYGAYDLYDLGEFNQKGTVRTKYGTRSQLQAAVTSLKNNGIQVYGDVVMNHKGGADATEMVRAVEVNPNNRNQEVTGEYTIEAWTRFDFPGRGNTHSSFKWRWYHFDGVDFDQSRRLNNRIYKFRGHGKAWDWEVDTEFGNYDYLMYADYDMDHPEVVNELRNWGVWYTNTLGLDGFRIDAVKHIKYSFTRDWINHVRSATGKNMFAVAEFWKNDLGAIENYLQKTNWNHSVFDVPLHYNLYNASKSGGNYDMRNIFNGTVVQMQPSHAVTFVDNHDSQPEEALESFVEEWFKPLAYALTLTREQGYPSVFYGDYYGIPTHGVPAMRSKIDPILEARQKYAYGPQHDYLDHPDVIGWTREGDSSHPKSGLATLITDGPGGSKRMYAGLKNAGETWYDITGNRSDTVKIGSDGWGEFHVNDGSVSIYVQK

SEQ ID NO: 42377 - protein, 480 aa, Bacillus sp.
NGTMMQYFEWYLPNDGNHWNRLNSDASNLKSKGITAVWIPPAWKAVSQNDVGYGAYDLYDLGEFNQKGTVRTKYGTRSQLQAAVTSLKNNGIQVYGDVVMNHKGGADATEMVRAVEVNPNNRNQEVTGEYTIEAWTRFDFPGRGNTHSSFKWRWYHFDGVDFDQSREFTNRIYKFRGHGKAWDWEVDTEFGNYDYLMYVDYDYDHPETTNEMRNWGVWYTNTLGLDGFRIDAVKHIKYSFTRDWINHVRSATGKNMFAVAEFWKNDLGAIENYLQKTNWNHSVFDVPLHYNLYNASKSGGNYDMRNIFNGTVVQRHPSHAVTFVDNHDSQPEEALESFVEEWFKPLAYALTLTREQGYPSVFYGDYYGIPTHGVPAMRSKIDPILEARQKYAYGPQHDYLDHPDVIGWTREGDSSHPKSGLATLITDGPGGSKRMYAGLKNAGETWYDITGNRSDTVKIGSDGWGEFHVNDGSVSIYVQK

SEQ ID NO: 42378 - protein, 480 aa, Bacillus sp.
NGTMMQYFEWYLPNDGNHWNRLNSDASNLKSKGITAVWIPPAWKGTSQNDVGYGAYDLYDLGEFNQKGTVRTKYGTRSQLQAAVTSLKNNGIQVYGDVVMNHKGGADATEMVRAVEVNPNNRNQEVTGEYTIEAWTRFDFPGRGNTHSSFKWRWYHFDGVDWDQSRNLNNRIYKFRGHGKAWDWEVDTEFGNYDYLMYVDYDYDHPETTNEMRNWGVWYTNTLGLDGFRIDAVKHIKYSFTRDWINHVRSATGKNMFAVAEFWKNDLGAIENYLQKTNWNHSVFDVPLHYNLYNASKSQGNYDMRNIFNGTVVQRHPSHAVTFVDNHDSQPEEALESFVDTWFKPLAYALTLTREQGYPSVFYGDYYGIPTHGVPAMRSKIDPILEARQKYAYGPQHDYLDHPDVIGWTRKGDSSHPKSGLATLITDGPGGSNRMYAGLKNAGETWYDITGNRSDTVKIGSDGWGEFHVNDGSVSIYVQK

SEQ ID NO: 42379 - protein, 480 aa, Bacillus sp.
NGTMMQYFEWYLPNDGNHWNRLNSDASNLKSKGITAVWIPPAWKAVSQNDVGYGAYDLYDLGEFNQKGTVRTKYGTRSQLQAAVTSLKNNGIQVYGDVVMNHKGGADATEMVRAVEVNPNNRNQEVTGEYTIEAWTRFDFPGRGNTHSSFKWRWYHFDGVDWDQSRNLTNRIYKFRGHGKAWDWEVDTEFGNYDYLMYTDYDMDHPEVVNELRNWGVWYTNTLGLDGFRIDAVKHIKYSFTRDWINHVRSATGKNMFAVAEFWKNDLGAIENYLQKTNWNHSVFDVPLHYNLYNASQSGGNYDMRNIFNGTVVQRHPSHAVTFVDNHDSQPEEALESFVEPWFKPLAYALTLTREQGYPSVFYGDYYGIPTHGVPAMRSKIDPILEARQKYAYGPQHDYLDHPDVIGWTREGDSSHPKSGLATLITDGPGGSKRMYAGLKNAGETWYDITGNRSDTVKIGSDGWGEFHVNKSSVSIYVQK

SEQ ID NO: 42380 - protein, 480 aa, Bacillus sp.
NGTMMQYFEWYLPNDGNHWNRLNSDASNLKSKGIKAVWIPPAWKGASQNDVGYGAYDLYDLGEFNQRGTVRTKYGTRSQLQAAVTSLKNNGIQVYGDVVMNHKGGADLTEMVRAVEVNPNNRNQEVTGEYTIEAWTRFDFPGRGNTHSSFKWRWYHFDGVDFDQSRRLNNRIYKFRGHGKAWDWEVDTEFGNYDYLMYADYDMDHPEVVNELRNWGVWYTNTLGLDGFRIDAVKHIKYSFTRDWINHVRSATGKNMFAVAEFWKNDLGAIENYLQKTNWNHSVFDVPLHYNLYNASKSGGNYDMRNIFNGTVVQRHPSHAVTFVDNHDSQPEEALESFVEEWFKPLAYALTLTREQGYPSVFYGDYYGIPTHGVPAMRSKIDPILEARQKYAYGPQHDYLDHPDVIGWTREGDSSHPKSGLATLITDGPGGSKRMYAGLKNAGETWYDITGNRSDTVKIGSDGWGEFHVNDGSVSIYVQK

SEQ ID NO: 42381 - protein, 480 aa, Bacillus sp.
NGTMMQYFEWYLPNDGNHWNRLNSDASNLKSKGIKAVWIPPAWKGASQNDVGYGAYDLYDLGEFNQRGTVRTKYGTRSQLQAAVTSLKNNGIQVYGDVVMNHKGGADATEMVRAVEVNPNNRNQEVTGEYTIEAWTRFDFPGRGNTHSSFKWRWYHFDGVDFDQSRNFQNRIYKFRGHGKAWDWEVDTEFGNYDYLMYADYDMDHPEVVNELRNWGVWYTNTLGLDGFRIDAVKHIKYSFTRDWINHVRSATGKNMFAVAEFWKNDLGAIENYLQKTNWNHSVFDVPLHYNLYNASKSQGNYDMRNIFNGTVVQRHPSHAVTFVDNHDSQPEEALESFVDTWFKPLAYALTLTREQGYPSVFYGDYYGIPTHGVPAMRSKIDPILEARQKYAYGPQHDYLDHPDVIGWTREGDSSHPKSGLATLITDGPGGSKRMYAGLKNAGETWYDITGNRSDTVKIGSDGWGEFHVNGGSVSIYVQK

SEQ ID NO: 42382 - protein, 480 aa, Bacillus sp.
NGTMMQYFEWYLPNDGNHWNRLNSDASNLKSKGITAVWIPPAWKAVSQNDVGYGAYDLYDLGEFNQKGTVRTKYGTRSQLQAAVTSLKNNGIQVYGDVVMNHKGGADATEMVRAVEVNPNNRNQEVTGEYTIEAYTRFDFPGRGNTHSSFKWRWYHFDGVDFDQSREFTNRIYKFRGHGKAWDWEVDTEFGNYDYLMYADYDYDHPESTNEMRNWGVWYTNTLGLDGFRIDAVKHIKYSFTRDWINHVRSATGKNMFAVAEFWKNDLGAIENYLQKTNWNHSVFDVPLHYNLYNASKSGGNYDMRNIFNGTVVQRHPSHAVTFVDNHDSQPEEALESFVEEWFKPLAYALTLTREQGYPSVFYGDYYGIPTHGVPAMRSKIDPILEARQKYAYGPQHDYLDHPDVIGWTREGDSSHPKSGLATLITDGPGGSKRMYAGLKNAGETWYDITGNRSDTVKIGSDGWGEFHVNDGSVSIYVQK

SEQ ID NO: 42383 - protein, 480 aa, Bacillus sp.
NGTMMQYFEWYLPNDGNHWNRLNSDASNLKSKGITAVWIPPAWKGASQNDVGYGAYDLYDLGEFNQKGTVRTKYGTRSQLQAAVTSLKNNGINVYGDVVMNHKGGADLTEMVRAVEVNPNNRNQEVTGEYTIEAWTRFDFPGRGNTHSSFKWRWYHFDGVDWDQSRRLNNRIYKFRGHGKAWDWEVDTEFGNYDYLMYADYDMDHPEVVNELRNWGVWYTNTLGLDGFRIDAVKHIKYSFTRDWINHVRSATGKNMFAVAEFWKNDLGAIENYLQKTNWNHSVFDVPLHYNLYNASKSVGNYDMRNIFNGTVVQAHPMHAVTFVDNHDSQPEEALESFVEEWFKPLAYALTLTREQGYPSVFYGDYYGIPTHGVPAMRSKIDPILEARQKYAYGPQHDYLDHPDVIGWTREGDSSHPKSGLATLITDGPGGSKRMYAGLKNAGETWYDITGNRSDTVKIGSDGWGEFHVNDGSVSIYVQK

SEQ ID NO: 42384 - protein, 480 aa, Bacillus sp.
NGTMMQYFEWYLPNDGNHWNRLNSDASNLKSKGITAVWIPPAWKAASQNDVGYGAYDLYDLGEFNQKGTVRTKYGTRSQLQAAVTSLKNNGIQVYGDVVMNHKGGADATEMVRAVEVNPNNRNQEVTGEYTIEAWTRFDFPGRGNTHSSFKWRWYHFDGVDWDQSRDLQNRIYKFRGHGKAWDWEVDTEFGNYDYLMYADYDMDHPEVVNELRNWGVWYTNTLGLDGFRIDAVKHIKYSFTRDWINHVRSATGKNMFAVAEFWKNDLGAIENYLQKTNWNHSVFDVPLHYNLYNASKSSGNYDMRNIFNGTVVQRHPSHAVTFVDNHDSQPEEALESFVDEWFKPLAYALTLTREQGYPSVFYGDYYGIPTHGVPAMRSKIDPILEARQKYAYGPQHDYLDHPDVIGWTREGDSSHPKSGLATLITDGPGGSKRMYAGLKNAGETWYDITGNRSDTVKIGSDGWGEFHVNKQSVSIYVQK

SEQ ID NO: 42385 - protein, 480 aa, Bacillus sp.
NGTMMQYFEWYLPNDGNHWNRLNSDASNLKSKGITAVWIPPAWKAVSQNDVGYGAYDLYDLGEFNQKGTVRTKYGTRSQLQAAVTSLKNNGIQVYGDVVMNHKGGADATEMVRAVEVNPNNRNQEVTGEYTIEAWTRFDFPGRGNTHSSFKWRWYHFDGVDFDQSREFTNRIYKFRGHGKAWDWEVDTEFGNYDYLMYVDYDMDHPEVVNELRNWGVWYTNTLGLDGFRIDAVKHIKYSFTRDWINHVRIATGKNMFAVAEFWKNDLGAIENYLQKTNWNHSVFDVPLHYNLYNASKSGGNYDMRNIFNGTVVQRHPSHAVTFVDNHDSQPEEALESFVDEWFKPLAYALTLTREQGYPSVFYGDYYGIPTHGVPAMRSKIDPILEARQKYAYGPQHDYLDHPDVIGWTREGDSSHPKSGLATLITDGPGGSKRMYAGLKNAGETWYDITGNRSDTVKIGSDGWGEFHVNDQSVSIYVQK

SEQ ID NO: 42386 - protein, 480 aa, Bacillus sp.
NGTMMQYFEWYLPNDGNHWNRLNSDASNLKSKGITAVWIPPAWKGASQNDVGYGAYDLYDLGEFNQKGTVRTKYGTRSQLQAAVTSLKNNGIQVYGDVVMNHKGGADYTEMVRAVEVNPNNRNQEVTGEYTIEAWTRFDFPGRGNTHSSFKWRWYHFDGVDWDQSERLNNRIYKFRGHGKAWDWEVDTEFGNYDYLMYADYDMDHPEVVNELRNWGVWYTNTLGLDGFRIDAVKHIKYSFTRDWINHVRSATGKNMFAVAEFWKNDLGAIENYLQKTNWNHSVFDVPLHYNLYNASKSGGNYDMRNIFNGTVVQRHPSHAVTFVDNHDSQPEEALESFVEEWFKPLAYALTLTREQGLPSVFYGDYYGIPTHGVPAMRSKIDPILLARQKYAYGPQHDYLDHPDVIGWTREGDSSHPPSGLATLITDGPGGSKRMYAGLKNAGETWYDITGNRSDTVKIGSDGWGEFHVNDGSVSIYVQK

SEQ ID NO: 42387 - protein, 480 aa, Bacillus sp.
NGTMMQYFEWYLPNDGNHWNRLNSDASNLKSKGITAVWIPPAWKGASQNDVGYGAYDLYDLGEFNQKGTVRTKYGTRSQLQAAVTSLKNNGIQVYGDVVMNHKGGADATEMVRAVEVNPNNRNQEVTGEYTIEAYTRFDFPGRGNTHSSFKWRWYHFDGVDWDQSRELDNRIYKFRGHGKAWDWEVDTEFGNYDYLMYTDYDMDHPEVVNELRNWGVWYTNTLGLDGFRIDAVKHIKYSFTRDWINHVRSATGKNMFAVAEFWKNDLGAIENYLQKTNWNHSVFDVPLHYNLYNASKSQGNYDMRNIFNGTVVQRHPSHAVTFVDNHDSQPEEALESFVDTWFKPLAYALTLTREQGYPSVFYGDYYGIPTHGVPAMRSKIDPILEARQKYAYGPQHDYLDHPDVIGWTREGDSSHPKSGLATLITDGPGGSKRMYAGLKNAGETWYDITGNRSDTVKIGSDGWGEFHVNGSSVSIYVQK

SEQ ID NO: 42388 - protein, 480 aa, Bacillus sp.
NGTMMQYFEWYLPNDGNHWNRLNSDASNLKSKGIKAVWIPPAWKGASQNDVGYGAYDLYDLGEFNQRGTVRTKYGTRSQLQAAVTSLKNNGIQVYGDVVMNHKGGADATEMVRAVEVNPNNRNQEVTGEYTIEAWTRFDFPGRGNTHSSFKWRWYHFDGVDFDQSRRLNNRIYKFRGHGKAWDWEVDTEFGNYDYLMYADYDYDHPETTNEMRNWGVWYTNTLGLDGFRIDAVKHIKYSFTRDWINHVRSATGKNMFAVAEFWKNDLGAIENYLQKTNWNHSVFDVPLHYNLYNASKSGGNYDMRNIFNGTVVQRHPSHAVTFVDNHDSQPEEALESFVEEWFKPLAYALTLTREQGYPSVFYGDYYGIPTHGVPAMRSKIDPILEARQKYAYGPQHDYLDHPDVIGWTREGDSSHPKSGLATLITDGPGGSKRMYAGLKNAGETWYDITGNRSDTVKIGSDGWGEFHVNDGSVSIYVQK

SEQ ID NO: 42389 - protein, 480 aa, Bacillus sp.
NGTMMQYFEWYLPNDGNHWNRLNSDASNLKSKGITAVWIPPAWKGASQNDVGYGAYDLYDLGEFNQKGTVRTKYGTRSQLQAAVTSLKNNGIQVYGDVVMNHKGGADATEMVRAVEVNPNNRNQEVTGEYTIEAWTRFDFPGRGNTHSSFKWRWYHFDGVDWDQSRRLNNRIYKFRGHGKAWDWEVDTEFGNYDYLMYADYDMDHPEVVNELRNWGVWYTNTLGLDGFRIDAVKHIKYSFTRDWINHVRSATGKNMFAVAEFWKNDLVAIENYLQKTNWNHSVFDVPLHYNLYNASKSSGNYDMRNIFNGTVVQRHPSHAVTFVDNHDSQPEEALESFVEPWFKPLAYALTLTREQGYPSVFYGDYYGIPTHGVPAMRSKIDPILEARQKYAYGPQHDYLDHPDVIGWTREGDSSHPKSGLATLITDGPGGSKRMYAGLKNAGETWYDITGNRSDTVKIGSDGWGEFHVNGTSVSIYVQK

SEQ ID NO: 42390 - protein, 480 aa, Bacillus sp.
NGTMMQYFEWYLPNDGNHWNRLNSDASNLKSKGITAVWIPPAWKGASQNDVGYGAYDLYDLGEFNQKGTVRTKYGTRSQLQAAVTSLKNNGIQVYGDVVMNHKGGADATEMVRAVEVNPNNRNQEVTGEYTIEAWTRFDFPGRGNTHSSFKWRWYHFDGVDWDQSRRLNNRIYKFRGHGKAWDWEVDTEFGNYDYLMYADYDMDHPEVVNELRNWGVWYTNTLGLDGFRIDAVKHIKYSFTRDWINHVRSATGKNMFAVAEFWKNDLGEIENYLQKTNWNHSVFDVPLHYNLYNASKSQSNYDMRNIFNGTVVQRHPSHAVTFVDNHDSQPEEALESFVDEWFKPLAYALTLTREQGYPSVFYGDYYGIPTHGVPAMRSKIDPILEARQKYAYGPQHDYLDHPDVIGWTREGDSSHPKSGLATLITDGPGGSKRMYAGLKNAGETWYDITGNRSDTVKIGSDGWGEFHVNKQSVSIYVQK

SEQ ID NO: 42391 - protein, 480 aa, Bacillus sp.
NGTMMQYFEWYLPNDGNHWNRLNSDASNLKSKGITAVWIPPAWKGASQNDVGYGAYDLYDLGEFNQKGTVRTKYGTRSQLQAAVTSLKNNGINVYGDVVMNHKGGADATEMVRAVEVNPNNRNQEVTGEYTIEAYTRFDFPGRGNTHSSFKWRWYHFDGVDWDQSRKLNNRIYKFRGHGKAWDWEVDTEFGNYDYLMYVDYDYDHPETTNEMRNWGVWYTNTLGLDGFRIDAVKHIKYSFTRDWINHVRIATGKNMFAVAEFWKNDLGAIENYLQKTNWNHSVFDVPLHYNLYNASKSGGNYDMRNIFNGTVVQAHPMHAVTFVDNHDSQPEEALESFVDEWFKPLAYALTLTREQGYPSVFYGDYYGIPTHGVPAMRSKIDPILEARQKYAYGPQHDYLDHPDVIGWTREGDSSHPKSGLATLITDGPGGSKRMYAGLKNAGETWYDITGNRSDTVKIGSDGWGEFHVNDGSVSIYVQK

SEQ ID NO: 42392 - protein, 480 aa, Bacillus sp.
NGTMMQYFEWYLPNDGNHWNRLNSDASNLKSKGIKAVWIPPAWKAASQNDVGYGAYDLYDLGEFNQKGTVRTKYGTRSQLQAAVTSLKNNGIQVYGDVVMNHKGGADATEMVRAVEVNPNNRNQEVTGEYTIEAWTRFDFPGRGNTHSSFKWRWYHFDGVDFDQSRNLNNRIYKFRGHGKAWDWEVDTEFGNYDYLMYTDYDMDHPEVVNELRNWGVWYTNTLGLDGFRIDAVKHIKYSFTRDWINHVRSATGKNMFAVAEFWKNDLGAIENYLQKTNWNHSVFDVPLHYNLYNASKSGGNYDMRNIFNGTVVQRHPSHAVTFVDNHDSQPEEALESFVEEWFKPLAYALTLTREQGYPSVFYGDYYGIPTHGVPAMRSKIDPILEARQKYAYGPQHDYLDHPDVIGWTREGDSSHPKSGLATLITDGPGGSKRMYAGLKNAGETWYDITGNRSDTVKIGSDGWGEFHVNDGSVSIYVQK

SEQ ID NO: 42393 - protein, 480 aa, Bacillus sp.
NGTMMQYFEWYLPNDGNHWNRLNSDASNLKSKGIKAVWIPPAWKGASQNDVGYGAYDLYDLGEFNQRGTVRTKYGTRSQLQAAVTSLKNNGIQVYGDVVMNHKGGADATEMVRAVEVNPNNRNQEVTGEYTIEAWTRFDFPGRGNTHSSFKWRWYHFDGVDWDQSRNFQNRIYKFRGHGKAWDWEVDTEFGNYDYLMYADYDMDHPEVVNELRNWGVWYTNTLGLDGFRIDAVKHIKYSFTRDWINHVRSATGKNMFAVAEFWKNDLGAIENYLQKTNWNHSVFDVPLHYNLYNASKSQGNYDMRNIFNGTVVQRHPSHAVTFVDNHDSQPEEALESFVDTWFKPLAYALTLTREQGYPSVFYGDYYGIPTHGVPAMRSKIDPILEARQKYAYGPQHDYLDHPDVIGWTREGDSSHPKSGLATLITDGPGGSKRMYAGLKNAGETWYDITGNRSDTVKIGSDGWGEFHVNGSSVSIYVQK

SEQ ID NO: 42394 - protein, 480 aa, Bacillus sp.
NGTMMQYFEWYLPNDGNHWNRLNSDASNLKSKGITAVWIPPAWKATSQNDVGYGAYDLYDLGEFNQKGTVRTKYGTRSQLQSAVTSLKNNGIQVYGDVVMNHKGGADATEMVRAVEVNPNNRNQEVTGEYTIEAWTRFDFPGRGNTHSSFKWRWYHFDGVDWDMSRNTDNRIYKFRGHGKAWDWEVDTEFGNYDYLMYADYDMDHPEVVNELRNWGVWYTNTLGLDGFRIDAVKHIKYSFTRDWINHVRSATGKNMFAVAEFWKNDLGAIENYLQKTNWNHSVFDVPLHYNLYNASKSQGNYDMRNIFNGTVVQRHPSHAVTFVDNHDSQPEEALESFVDTWFKPLAYALTLTREQGYPSVFYGDYYGIPTHGVPAMRSKIDPILEARQKYAYGPQHDYLDHPDVIGWTREGDSSHPKSGLVTLITDGPGGSKRMYAGLKNAGETWYDITGNRSDTVKIGSDGWGEFHVNGSSVSIYVQK

SEQ ID NO: 42395 - protein, 480 aa, Bacillus sp.
NGTMMQYFEWYLPNDGNHWNRLNSDASNLKSKGITAVWIPPAWKAASQNDVGYGAYDLYDLGEFNQQGTVRTKYGTRSQLQAAVTSLKNNGIQVYGDVVMNHKGGADLTEMVRAVEVNPNNRNQEVTGEYTIEAWTRFDFPGRGNTHSSFKWRWYHFDGVDFDQSRRLNNRIYKFRGHGKAWDWEVDTEFGNYDYLMYADYDMDHPEVVNELRNWGVWYTNTLGLDGFRIDAVKHIKYSFTRDWINHVRSATGKNMFAVAEFWKNDLGAIENYLQKTNWNHSVFDVPLHYNLYNASKSGGNYDMRNIFNGTVVQRHPSHAVTFVDNHDSQPEEALESFVEEWFKPLAYALTLTREQGYPSVFYGDYYGIPTHGVPAMRSKIDPILEARQKYAYGPQHDYLDHPDVIGWTREGDSSHPKSGLATLITDGPGGSKRMYAGLKNAGETWYDITGNRSDTVKIGSDGWGEFHVNDGSVSIYVQK

SEQ ID NO: 42396 - protein, 480 aa, Bacillus sp.
NGTMMQYFEWYLPNDGNHWNRLNSDASNLKSKGITAVWIPPAWKGASQNDVGYGAYDLYDLGEFNQKGTVRTKYGTRSQLQAAVTSLKNNGIQVYGDVVMNHKGGADATEMVRAVEVNPNNRNQEVTGEYTIEAWTRFDFPGRGNTHSSFKWRWYHFDGVDWDQSRELNNRIYKFRGHGKAWDWEVDTEFGNYDYLMYTDYDMDHPEVVNELRNWGVWYTNTLGLDGFRIDAVKHIKYSFTRDWINHVRSATGKNMFAVAEFWKNDLGAIENYLQKTNWNHSVFDVPLHYNLYNASKSSGNYDMRNIFNGTVVQRHPSHAVTFVDNHDSQPEEALESFVDEWFKPLAYALTLTREQGYPSVFYGDYYGIPTHGVPAMRSKIDPILEARQKYAYGPQHDYLDHPDVIGWTREGDSSHPKSGLATLITDGPGGSKRMYAGLKNAGETWYDITGNRSDTVKIGSDGWGEFHVNKQSVSIYVQK

SEQ ID NO: 42397 - protein, 480 aa, Bacillus sp.
NGTMMQYFEWYLPNDGNHWNRLNSDASNLKSKGITAVWIPPAWKGASQNDVGYGAYDLYDLGEFNQRGTVRTKYGTRSQLQAAVTSLKNNGIQVYGDVVMNHKGGADLTEMVRAVEVNPNNRNQEVTGEYTIEAWTRFDFPGRGNTHSSFKWRWYHFDGVDFDQSRRLNNRIYKFRGHGKAWDWEVDTEFGNYDYLMYADYDMDHPEVVNELRNWGVWYTNTLGLDGFRIDAVKHIKYSFTRDWINHVRIATGKNMFAVAEFWKNDLGAIENYLQKTNWNHSVFDVPLHYNLYNASKSGGNYDMRNIFNGTVVQRHPSHAVTFVDNHDSQPEEALESFVDEWFKPLAYALTLTREQGYPSVFYGDYYGIPTHGVPAMRSKIDPILEARQKYAYGPQHDYLDHPDVIGWTREGDSSHPKSGLATLITDGPGGSKRMYAGLKNAGETWYDITGNRSDTVKIGSDGWGEFHVNDQSVSIYVQK

SEQ ID NO: 42398 - protein, 480 aa, Bacillus sp.
NGTMMQYFEWYLPNDGNHWNRLNSDASNLKSKGIKAVWIPPAWKAVSQNDVGYGAYDLYDLGEFNQRGTVRTKYGTRSQLQAAVTSLKNNGIQVYGDVVMNHKGGADATEMVRAVEVNPNNRNQEVTGEYTIEAWTRFDFPGRGNTHSSFKWRWYHFDGVDFDQSRDLENRIYKFRGHGKAWDWEVDTEFGNYDYLMYADYDMDHPEVVNELRNWGVWYTNTLGLDGFRIDAVKHIKYSFTRDWINHVRSATGKNMFAVAEFWKNDLGAIENYLQKTNWNHSVFDVPLHYNLYNASKSGGNYDMRNIFNGTVVQRHPSHAVTFVDNHDSQPEEALESFVEEWFKPLAYALTLTREQGYPSVFYGDYYGIPTHGVPAMRSKIDPILEARQKYAYGPQHDYLDHPDVIGWTREGDSSHPKSGLATLITDGPGGSKRMYAGLKNAGETWYDITGNRSDTVKIGSDGWGEFHVNDGSVSIYVQK

SEQ ID NO: 42399 - protein, 480 aa, Bacillus sp.
NGTMMQYFEWYLPNDGNHWNRLNSDASNLKSKGITAVWIPPAWKGASQNDVGYGAYDLYDLGEFNQKGTVRTKYGTRSQLQAAVTSLKNNGIQVYGDVVMNHKGGADATEMVRAVEVNPNNRNQEVTGEYTIEAYTRFDFPGRGNTHSSFKWRWYHFDGVDFDQSRDLTNRIYKFRGHGKAWDWEVDTEFGNYDYLMYVDYDMDHPEVVNELRNWGVWYTNTLGLDGFRIDAVKHIKYSFTRDWINHVRIATGKNMFAVAEFWKNDLGAIENYLQKTNWNHSVFDVPLHYNLYNASKSGGNYDMRNIFNGTVVQRHPSHAVTFVDNHDSQPEEALESFVDPWFKPLAYALTLTREQGYPSVFYGDYYGIPTHGVPAMRSKIDPILEARQKYAYGPQHDYLDHPDVIGWTREGDSSHPKSGLATLITDGPGGSKRMYAGLKNAGETWYDITGNRSDTVKIGSDGWGEFHVNDQSVSIYVQK

SEQ ID NO: 42400 - protein, 480 aa, Bacillus sp.
NGTMMQYFEWYLPNDGNHWNRLNSDASNLKSKGITAVWIPPAWKAVSQNDVGYGAYDLYDLGEFNQKGTVRTKYGTRSQLQAAVTSLKNNGIQVYGDVVMNHKGGADATEMVRAVEVNPNNRNQEVTGEYTIEAWTRFDFPGRGNTHSSFKWRWYHFDGVDWDQSRNLTNRIYKFRGHGKAWDWEVDTEFGNYDYLMYTDYDMDHPEVVNELRNWGVWYTNTLGLDGFRIDAVKHIKYSFTRDWINHVRSATGKNMFAVAEFWKNDLGAIENYLQKTNWNHSVFDVPLHYNLYNASKSGGNYDMRNIFNGTVVQVHPSHAVTFVDNHDSQPEEALESFVEEWFKPLAYALTLTREQGYPSVFYGDYYGIPTHGVPAMRSKIDPILEARQKYAYGPQHDYLDHPDVIGWTREGDSSHPKSGLATLITDGPGGSKRMYAGLKNAGETWYDITGNRSDTVKIGSDGWGEFHVNYGSVSIYVQK

SEQ ID NO: 42401 - protein, 480 aa, Bacillus sp.
NGTMMQYFEWYLPNDGNHWNRLNSDASNLKSKGITAVWIPPAWKAVSQNDVGYGAYDLYDLGEFNQKGTVRTKYGTRSQLQAAVTSLKNNGIQVYGDVVMNHKGGADLTEMVRAVEVNPNNRNQEVTGEYTIEAWTRFDFPGRGNTHSSFKWRWYHFDGVDWDQSREFTNRIYKFRGHGKAWDWEVDTEFGNYDYLMYVDYDMDHPEVVNELRNWGVWYTNTLGLDGFRIDAVKHIKYSFTRDWINHVRSATGKNMFAVAEFWKNDLGAIENYLQKTNWNHSVFDVPLHYNLYNASKSGGNYDMRNIFNGTVVQVHPSHAVTFVDNHDSQPEEALESFVEEWFKPLAYALTLTREQGYPSVFYGDYYGIPTHGVPAMRSKIDPILEARQKYAYGPQHDYLDHPDVIGWTREGDSSHPKSGLATLITDGPGGSKRMYAGLKNAGETWYDITGNRSDTVKIGSDGWGEFHVNDGSVSIYVQK

SEQ ID NO: 42402 - protein, 480 aa, Bacillus sp.
NGTMMQYFEWYLPNDGNHWNRLNSDASNLKSKGITAVWIPPAWKGTSQNDVGYGAYDLYDLGEFNQKGTVRTKYGTRSQLQAAVTSLKNNGIQVYGDVVMNHKGGADATEMVRAVEVNPNNRNQEVTGEYTIEAWTRFDFPGRGNTHSSFKWRWYHFDGVDWDQSRNLNNRIYKFRGHGKAWDWEVDTEFGNYDYLMYVDYDYDHPESTNEMRNWGVWYTNTLGLDGFRIDAVKHIKYSFTRDWINHVRSATGKNMFAVAEFWKNDLGAIENYLQKTNWNHSVFDVPLHYNLYNASKSQGNYDMRNIFNGTVVQRHPSHAVTFVDNHDSQPEEALESFVDTWFKPLAYALTLTREQGYPSVFYGDYYGIPTHGVPAMRSKIDPILEARQKYAYGPQHDYLDHPDVIGWTREGDSSHPKSGLATLITDGPGGSKRMYAGLKNAGETWYDITGNRSDTVKIGSDGWGEFHVNGSSVSIYVQK

SEQ ID NO: 42403 - protein, 480 aa, Bacillus sp.
NGTMMQYFEWYLPNDGNHWNRLNSDASNLKSKGITAVWIPPAWKGASQNDVGYGAYDLYDLGEFNQKGTVRTKYGTRSQLQAAVTSLKNNGIQVYGDVVMNHKGGADATEMVRAVEVNPNNRNQEVTGEYTIEAWTRFDFPGRGNTHSSFKWRWYHFDGVDWDQSRELDNRIYKFRGHGKAWDWEVDTEFGNYDYLMYTDYDYDHPETTNEMRNWGVWYTNTLGLDGFRIDAVKHIKYSFTRDWINHVRSATGKNMFAVAEFWKNDLGAIENYLQKTNWNHSVFDVPLHYNLYNASKSQGNYDMRNIFNGTVVQRHPSHAVTFVDNHDSQPEEALESFVDTWFKPLAYALTLTREQGYPSVFYGDYYGIPTHGVPAMRSKIDPILEARQKYAYGPQHDYLDHPDVIGWTREGDSSHPKSGLATLITDGPGGSKRMYAGLKNAGETWYDITGNRSDTVKIGSDGWGEFHVNGSSVSIYVQK

SEQ ID NO: 42404 - protein, 480 aa, Bacillus sp.
NGTMMQYFEWYLPNDGNHWNRLNSDASNLKSKGITAVWIPPAWKAVSQNDVGYGAYDLYDLGEFNQKGTVRTKYGTRSQLQAAVTSLKNNGIQVYGDVVMNHKGGADATEMVRAVEVNPNNRNQEVTGEYTIEAWTRFDFPGRGNTHSSFKWRWYHFDGVDWDQSRDFQNRIYKFRGHGKAWDWEVDTEFGNYDYLMYTDYDMDHPEVVNELRNWGVWYTNTLGLDGFRIDAVKHIKYSFTRDWINHVRSATGKNMFAVAEFWKNDLGAIENYLQKTNWNHSVFDVPLHYNLYNASKSQGNYDMRNIFNGTVVQRHPSHAVTFVDNHDSQPEEALESFVDTWFKPLAYALTLTREQGYPSVFYGDYYGIPTHGVPAMRSKIDPILEARQKYAYGPQHDYLDHPDVIGWTREGDSSHPKSGLATLITDGPGGSKRMYAGLKNAGETWYDITGNRSDTVKIGSDGWGEFHVNGSSVSIYVQK

SEQ ID NO: 42405 - protein, 480 aa, Bacillus sp.
NGTMMQYFEWYLPNDGNHWNRLNSDASNLKSKGITAVWIPPAWKAASQNDVGYGAYDLYDLGEFNQKGTVRTKYGTRSQLQAAVTSLKNNGIQVYGDVVMNHKGGADATEMVRAVEVNPNNRNQEVTGEYTIEAWTRFDFPGRGNTHSSFKWRWYHFDGVDWDQSRDLDNRIYKFRGHGKAWDWEVDTEFGNYDYLMYADYDMDHPEVVNELRNWGVWYTNTLGLDGFRIDAVKHIKYSFTRDWINHVRSATGKNMFAVAEFWKNDLGAIENYLQKTNWNHSVFDVPLHYNLYNASKSGGNYDMRNIFNGTVVQAHPMHAVTFVDNHDSQPEEALESFVEEWFKPLAYALTLTREQGYPSVFYGDYYGIPTHGVPAMRSKIDPILEARQKYAYGPQHDYLDHPDVIGWTREGDSSHPKSGLATLITDGPGGSKRMYVGLKNAGETWYDITGNRSDTVKIGSDGWGEFHVNYGSVSIYVQK

SEQ ID NO: 42406 - protein, 480 aa, Bacillus sp.
NGTMMQYFEWYLPNDGNHWNRLNSDASNLKSKGITAVWIPPAWKAASQNDVGYGAYDLYDLGEFNQKGTVRTKYGTRSQLQAAVTSLKNNGIQVYGDVVMNHKGGADATEMVRAVEVNPNNRNQEVTGEYTIEAWTRFDFPGRGNTHSSFKWRWYHFDGVDWDQSRNLNNRIYKFRGHGKAWDWEVDTEFGNYDYLMYTDYDMDHPEVVNELRNWGVWYTNTLGLDGFRIDAVKHIKYSFTRDWINHVRSATGKNMFAVAEFWKNDLGAIENYLQKTNWNHSVFDVPLHYNLYNASQSGGNYDMRNIFNGTVVQRHPSHAVTFVDNHDSQPEEALESFVEPWFKPLAYALTLTREQGYPSVFYGDYYGIPTHGVPAMRSKIDPILEARQKYAYGPQHDYLDHPDVIGWTREGDSSHPKSGLATLITDGPGGSKRMYAGLKNAGETWYDITGNRSDTVKIGSDGWGEFHVNKSSVSIYVQK

SEQ ID NO: 42407 - protein, 480 aa, Bacillus sp.
NGTMMQYFEWYLPNDGNHWNRLNSDASNLKSKGITAVWIPPAWKATSQNDVGYGAYDLYDLGEFNQKGTVRTKYGTRSQFQAAVTSLKNNGIQVYGDVVMNHKGGADATEMVRAVEVNPNNRNQEVTGEYTIEAWTRFDFPGRGNTHSSFKWRWYHFDGVDWDQSRELNNRIYKFRGHGKAWDWEVDTEFGNYDYLMYTDYDMDHPEVVNELRNWGVWYTNTLGLDGFRIDAVKHIKYSFTRDWINHVRSATGKNMFAVAEFWKNDLGAIENYLQKTNWNHSVFDVPLHYNLYNASKSGGNYDMRNIFNGTVVQRHPSHAVTFVDNHDSQPEEALESFVDPWFKPLAYALTLTREQGYPSVFYGDYYGIPTHGVPAMRSKIDPILEARQKYAYGPQHDYLDHPDVIGWTREGDSSHPKSGLATLITDGPGGSKRMYAGLKNAGETWYDITGNRSDTVKIGSDGWGEFHVNGGSVSIYVQK

SEQ ID NO: 42408 - protein, 480 aa, Bacillus sp.
NGTMMQYFEWYLPNDGNHWNRLNSDASNLKSKGITAVWIPPAWKAVSQNDVGYGAYDLYDLGEFNQRGTVRTKYGTRSQLQAAVTSLKNNGIQVYGDVVMNHKGGADATEMVRAVEVNPNNRNQEVTGEYTIEAWTRFDFPGRGNTHSSFKWRWYHFDGVDFDQSREFTNRIYKFRGHGKAWDWEVDTEFGNYDYLMYVDYDMDHPEVVNELRNWGVWYTNTLGLDGFRIDAVKHIKYSFTRDWINHVRSATGKNMFAVAEFWKNDLGAIENYLQKTNWNHSVFDVPLHYNLYNASKSGGNYDMRNIFNGTVVQRHPSHAVTFVDNHDSQPEEALESFVEEWFKPLAYALTLTREQGYPSVFYGDYYGIPTHGVPAMRSKIDPILEARQKYAYGPQHDYLDHPDVIGWTREGDSSHPKSGLATLITDGPGGSKRMYAGLKNAGETWYDITGNRSDTVKIGSDGWGEFHVNDGSVSIYVQK

SEQ ID NO: 42409 - protein, 480 aa, Bacillus sp.
NGTMMQYFEWYLPNDGNHWNRLNSDASNLKSKGIKAVWIPPAWKGASQNDVGYGAYDLYDLGEFNQRGTVRTKYGTRSQLQAAVTSLKNNGIQVYGDVVMNHKGGADATEMVRAVEVNPNNRNQEVTGEYTIEAWTRFDFPGRGNTHSSFKWRWYHFDGVDFDQSRRLNNRIYKFRGHGKAWDWEVDTEFGNYDYLMYADIDYDHPESTNEMRNWGVWYTNTLGLDGFRIDAVKHIKYSFTRDWINHVRSATGKNMFAVAEFWKNDLGAIENYLQKTNWNHSVFDVPLHYNLYNASKSGGNYDMRNIFNGTVVQRHPSHAVTFVDNHDSQPEEALESFVEEWFKPLAYALTLTREQGYPSVFYGDYYGIPTHGVPAMRSKIDPILEARQKYAYGPQHDYLDHPDVIGWTREGDSSHPKSGLATLITDGPGGSKRMYAGLKNAGETWYDITGNRSDTVKIGSDGWGEFHVNDGSVSIYVQK

SEQ ID NO: 42410 - protein, 480 aa, Bacillus sp.
NGTMMQYFEWYLPNDGNHWNRLNSDASNLKSKGITAVWIPPAWKGASQNDVGYGAYDLYDLGEFNQKGTVRTKYGTRSQLQAAVTSLKNNGIQVYGDVVMNHKGGADATEMVRAVEVNPNNRNQEVTGEYTIEAWTRFDFPGRGNTHSSFKWRWYHFDGVDWDQSRELDNRIYKFRGHGKAWDWEVDTEFGNYDYLMYTDYDMDHPEVVNELRNWGVWYTNTLGLDGFRIDAVKHIKYSFTRDWINHVRSATGKNMFAVAEFWKNDLGAIENYLQKTNWNHSVFDVPLHYNLYNASKSQGNYDMRNIFNGTVVQAHPNHAVTFVDNHDSQPEEALESFVDTWFKPLAYALTLTREQGYPSVFYGDYYGIPTHGVPAMRSKIDPILEARQKYAYGPQHDYLDHPDVIGWTREGDSSHPKSGLATLITDGPGGSKRMYAGLKNAGETWYDITGNRSDTVKIGSDGWGEFHVNGSSVSIYVQK

SEQ ID NO: 42411 - protein, 480 aa, Bacillus sp.
NKTMMQYFEWYLPNDGNHWNRLNSDASNLKSKGIKAVWIPPAWKGASQNDVGYGAYDLYDLGEFNQRGTVRTKYGTRSQLQAAVTSLKNNGIQVYGDVVMNHKGGADATEMVRAVEVNPNNRNQEVTGEYTIEAWTRFDFPGRGNTHSSFKWRWYHFDGVDFDQSRRLNNRIYKFRGHGKAWDWEVDTEFGNYDYLMYADYDMDHPEVVNELRNWGVWYTNTLGLDGFRIDAVKHIKYSFTRDWINHVRSATGKNMFAVAEFWKNDLGAIENYLQKTNWNHSVFDVPLHYNLYNASKSGGNYDMRNIFNGTVVQRHPSHAVTFVDNHDSQPEEALESFVEEWFKPLAYALTLTREQGYPSVFYGDYYGIPTHGVPAMRSKIDPILEARQKYAYGPQHDYLDHPDVIGWTREGDSSHPKSGLATLITDGPGGSKRMYAGLKNAGETWYDITGNRSDTVKIGSDGWGEFHVNDGSVSIYVQK

SEQ ID NO: 42412 - protein, 480 aa, Bacillus sp.
NGTMMQYFEWYLPNDGNHWNRLNSDASNLKSKGITAVWIPPAWKGTSQNDVGYGAYDLYDLGEFNQKGTVRTKYGTRSQLQAAVTSLKNNGIQVYGDVVMNHKGGADATEMVRAVEVNPNNRNQEVTGEYTIEAWTRFDFPGRGNTHSSFKWRWYHFDGVDFDQSRNLNNRIYKFRGHGKAWDWEVDTEFGNYDYLMYVDYDMDHPEVVNELRNWGVWYTNTLGLDGFRIDAVKHIKYSFTRDWINHVRSATGKNMFAVAEFWKNDLGAIENYLQKTNWNHSVFDVPLHYNLYNASKSQGNYDMRNIFNGTVVQRHPSHAVTFVDNHDSQPEEALESFVDTWFKPLAYALTLTREQGYPSVFYGDYYGIPTHGVPAMRSKIDPILEARQKYAYGPQHDYLDHPDVIGWTREGDSSHPKSGLATLITDGPGGSKRMYAGLKNAGETWYDITGNRSDTVKIGSDGWGEFHVNGSSVSIYVQK

SEQ ID NO: 42413 - protein, 480 aa, Bacillus sp.
NGTMMQYFEWYLPNDGNHWNRLNSDASNLKSKGITAVWIPPAWKAVSQNDVGYGAYDLYDLGEFNQKGTVRTKYGTRSQLQAAVTSLKNNGIQVYGDVVMNHKGGADLTEMVRAVEVNPNNRNQEVTGEYTIEAWTRFDFPGRGNTHSSFKWRWYHFDGVDFDQSRNLTNRIYKFRGHGKAWDWEVDTEFGNYDYLMYTDYDMDHPEVVNELRNWGVWYTNTLGLDGFRIDAVKHIKYSFTRDWINHVRSATGKNMFAVAEFWKNDLGAIENYLQKTNWNHSVFDVPLHYNLYNASKSGGNYDMRNIFNGTVVQRHPSHAVTFVDNHDSQPEEALESFVEEWFKPLAYALTLTREQGYPSVFYGDYYGIPTHGVPAMRSKIDPILEARQKYAYGPQHDYLDHPDVIGWTREGDSSHPKSGLATLITDGPGGSKRMYAGLKNAGETWYDITGNRSDTVKIGSDGWGEFHVNDGSVSIYVQK

SEQ ID NO: 42414 - protein, 480 aa, Bacillus sp.
NGTMMQYFEWYLPNDGNHWNRLNSDASNLKSKGITAVWIPPAWKAASQNDVGYGAYDLYDLGEFNQKGTVRTKYGTRSQLQAAVTSLKNNGIQVYGDVVMNHKGGADATEMVRAVEVNPNNRNQEVTGEYTIEAWTRFDFPGRGNTHSSFKWRWYHFDGVDWDQSRDLQNRIYKFRGHGKAWDWEVDTEFGNYDYLMYVDYDMDHPEVVNELRNWGVWYTNTLGLDGFRIDAVKHIKYSFTRDWINHVRSATGKNMFAVAEFWKNDLGAIENYLQKTNWNHSVFDVPLHYNLYNASKSGGNYDMRNIFNGTVVQRHPSHAVTFVDNHDSQPEEALESFVDEWFKPLAYALTLTREQGYPSVFYGDYYGIPTHGVPAMRSKIDPILEARQKYAYGPQHDYLDHPDVIGWTREGDSSHPKSGLATLITDGPGGSKRMYAGLKNAGETWYDITGNRSDTVKIGSDGWGEFHVNKSSVSIYVQK

SEQ ID NO: 42415 - protein, 480 aa, Bacillus sp.
NGTMMQYFEWYLPNDGNHWNRLNSDASNLKSKGIKAVWIPPAWKAASQNDVGYGAYDLYDLGEFNQKGTVRTKYGTRSQLQAAVTSLKNNGIQVYGDVVMNHKGGADATEMVRAVEVNPNNRNQEVTGEYTIEAWTRFDFPGRGNTHSSFKWRWYHFDGVDFDQSRDLTNRIYKFRGHGKAWDWEVDTEFGNYDYLMYADYDMDHPEVVNELRNWGVWYTNTLGLDGFRIDAVKHIKYSFTRDWINHVRSATGKNMFAVAEFWKNDLGAIENYLQKTNWNHSVFDVPLHYNLYNASKSGGNYDMRNIFNGTVVQRHPSHAVTFVDNHDSQPEEALESFVDPWFKPLAYALTLTREQGYPSVFYGDYYGIPTHGVPAMRSKIDPILEARQKYAYGPQHDYLDHPDVIGWTREGDSSHPKSGLATLITDGPGGSKRMYAGLKNAGETWYDITGNRSDTVKIGSDGWGEFHVNGGSVSIYVQK

SEQ ID NO: 42416 - protein, 480 aa, Bacillus sp.
NGTMMQYFEWYLPNDGNHWNRLNSDASNLKSKGITAVWIPPAWKAVSQNDVGYGAYDLYDLGEFNQKGTVRTKYGTRSQLQAAVTSLKNNGIQVYGDVVMNHKGGADLTEMVRAVEVNPNNRNQEVTGEYTIEAWTRFDFPGRGNTHSSFKWRWYHFDGVDWDQSREFTNRIYKFRGHGKAWDWEVDTEFGNYDYLMYVDYDMDHPEVVNELRNWGVWYTNTLGLDGFRIDAVKHIKYSFTRDWINHVRSATGKNMFAVAEFWKNDLGAIENYLQKTNWNHSVFDVPLHYNLYNASKSGGNYDMRNIFNGTVVQAHPNHAVTFVDNHDSQPEEALESFVEEWFKPLAYALTLTREQGYPSVFYGDYYGIPTHGVPAMRSKIDPILEARQKYAYGPQHDYLDHPDVIGWTREGDSSHPKSGLATLITDGPGGSKRMYAGLKNAGETWYDITGNRSDTVKIGSDGWGEFHVNDGSVSIYVQK

SEQ ID NO: 42417 - protein, 480 aa, Bacillus sp.
NQTMMQYFEWYLPNDGNHWNRLNSDASNLKSKGIKAVWIPPAWKGASQNDVGYGAYDLYDLGEFNQRGTVRTKYGTRSQLQAAVTSLKNNGIQVYGDVVMNHKGGADATEMVRAVEVNPNNRNQEVTGEYTIEAWTRFDFPGRGNTHSSFKWRWYHFDGVDFDQSRRLNNRIYKFRGHGKAWDWEVDTEFGNYDYLMYADYDMDHPEVVNELRNWGVWYTNTLGLDGFRIDAVKHIKYSFTRDWINHVRSATGKNMFAVAEFWKNDLGAIENYLQKTNWNHSVFDVPLHYNLYNASKSGGNYDMRNIFNGTVVQRHPSHAVTFVDNHDSQPEEALESFVEEWFKPLAYALTLTREQGYPSVFYGDYYGIPTHGVPAMRSKIDPILEARQKYAYGPQHDYLDHPDVIGWTREGDSSHPKSGLATLITDGPGGSKRMYAGLKNAGETWYDITGNRSDTVKIGSDGWGEFHVNDGSVSIYVQK

SEQ ID NO: 42418 - protein, 480 aa, Bacillus sp.
NGTMMQYFEWYLPNDGNHWNRLNSDASNLKSKGITAVWIPPAWKAVSQNDVGYGAYDLYDLGEFNQKGTVRTKYGTRSQLQAAVTSLKNNGIQVYGDVVMNHKGGADLTEMVRAVEVNPNNRNQEVTGEYTIEAWTRFDFPGRGNTHSSFKWRWYHFDGVDWDQSREFTNRIYKFRGHGKAWDWEVDTEFGNYDYLMYVDYDMDHPEVVNELRNWGVWYTNTLGLDGFRIDAVKHIKYSFTRDWINHVRSATGKNMFAVAEFWKNDLGAIENYLQKTNWNHSVFDVPLHYNLYNASKSGGNYDMRNIFNGTVVQRHPSHAVTFVDNHDSQPEEALESFVDPWFKPLAYALTLTREQGYPSVFYGDYYGIPTHGVPAMRSKIDPILEARQKYAYGPQHDYLDHPDVIGWTREGDSSHPKSGLATLITDGPGGSKRMYAGLKNAGETWYDITGNRSDTVKIGSDGWGEFHVNGGSVSIYVQK

SEQ ID NO: 42419 - protein, 480 aa, Bacillus sp.
NGTMMQYFEWYLPNDGNHWNRLNSDASNLKSKGITAVWIPPAWKAVSQNDVGYGAYDLYDLGEFNQKGTVRTKYGTRSQLQAAVTSLKNNGIQVYGDVVMNHKGGADATEMVRAVEVNPNNRNQEVTGEYTIEAWTRFDFPGRGNTHSSFKWRWYHFDGVDWDQSRDFNNRIYKFRGHGKAWDWEVDTEFGNYDYLMYVDYDMDHPEVVNELRNWGVWYTNTLGLDGFRIDAVKHIKYSFTRDWINHVRSATGKNMFAVAEFWKNDLGAIENYLQKTNWNHSVFDVPLHYNLYNASQSGGNYDMRNIFNGTVVQRHPSHAVTFVDNHDSQPEEALESFVEEWFKPLAYALTLTREQGYPSVFYGDYYGIPTHGVPAMRSKIDPILEARQKYAYGPQHDYLDHPDVIGWTREGDSSHPKSGLATLITDGPGGSKRMYAGLKNAGETWYDITGNRSDTVKIGSDGWGEFHVNGSSVSIYVQK

SEQ ID NO: 42420 - protein, 480 aa, Bacillus sp.
NGTMMQYFEWYLPNDGNHWNRLNSDASNLKSKGIKAVWIPPAWKGASQNDVGYGAYDLYDLGEFNQRGTVRTKYGTRSQLQAAVTSLKNNGIQVYGDVVMNHKGGADATEMVRAVEVNPNNRNQEVTGEYTIEAWTRFDFPGRGNTHSSFKWRWYHFDGVDFDQSRRLNNRIYKFRGHGKAWDWEVDTEFGNYDYLMYADYDMDHPEVVNELRNWGVWYTNTLGLDGFRIDAVKHIKYSFTRDWINHVRIATGKNMFAVAEFWKNDLGAIENYLQKTNWNHSVFDVPLHYNLYNASKSGGNYDMRNIFNGTVVQRHPSHAVTFVDNHDSQPEEALESFVDEWFKPLAYALTLTREQGYPSVFYGDYYGIPTHGVPAMRSKIDPILEARQKYAYGPQHDYLDHPDVIGWTREGDSSHPKSGLATLITDGPGGSKRMYAGLKNAGETWYDITGNRSDTVKIGSDGWGEFHVNDQSVSIYVQK

SEQ ID NO: 42421 - protein, 480 aa, Bacillus sp.
NGTMMQYFEWYLPNDGNHWNRLNSDASNLKSKGITAVWIPPAWKAASQNDVGYGAYDLYDLGEFNQKGTVRTKYGTRSQLQAAVTSLKNNGIQVYGDVVMNHKGGADATEMVRAVEVNPNNRNQEVTGEYTIEAYTRFDFPGRGNTHSSFKWRWYHFDGVDFDQSRRLDNRIYKFRGHGKAWDWEVDTEFGNYDYLMYTDYDMDHPEVVNELRNWGVWYTNTLGLDGFRIDAVKHIKYSFTRDWINHVRSATGKNMFAVAEFWKNDLGAIENYLQKTNWNHSVFDVPLHYNLYNASKSGGNYDMRNIFNGTVVQRHPSHAVTFVDNHDSQPEEALESFVEEWFKPLAYALTLTREQGYPSVFYGDYYGIPTHGVPAMRSKIDPILEARQKYAYGPQHDYLDHPDVIGWTREGDSSHPKSGLATLITDGPGGSKRMYAGLKNAGETWYDITGNRSDTVKIGSDGWGEFHVNDGSVSIYVQK

SEQ ID NO: 42422 - protein, 480 aa, Bacillus sp.
NGTMMQYFEWYLPNDGNHWNRLNSDASNLKSKGIKAVWIPPAWKGASQNDVGYGAYDLYDLGEFNQKGTVRTKYGTRSQLQAAVTSLKNNGIQVYGDVVMNHKGGADATEMVRAVEVNPNNRNQEVTGEYTIEAWTRFDFPGRGNTHSSFKWRWYHFDGVDWDQSRELDNRIYKFRGHGKAWDWEVDTEFGNYDYLMYTDYDMDHPEVVNELRNWGVWYTNTLGLDGFRIDAVKHIKYSFTRDWINHVRSATGKNMFAVAEFWKNDLGAIENYLQKTNWNHSVFDVPLHYNLYNASKSQGNYDMRNIFNGTVVQRHPSHAVTFVDNHDSQPEEALESFVDTWFKPLAYALTLTREQGYPSVFYGDYYGIPTHGVPAMRSKIDPILEARQKYAYGPQHDYLDHPDVIGWTREGDSSHPKSGLATLITDGPGGSKRMYAGLKNAGETWYDITGNRSDTVKIGSDGWGEFHVNGSSVSIYVQK

SEQ ID NO: 42423 - protein, 480 aa, Bacillus sp.
NGTMMQYFEWYLPNDGNHWNRLNSDASNLKSKGITAVWIPPAWKGASQNDVGYGAYDLYDLGEFNQRGTVRTKYGTRSQLQAAVTSLKNNGINVYGDVVMNHKGGADATEMVRAVEVNPNNRNQEVTGEYTIEAWTRFDFPGRGNTHSSFKWRWYHFDGVDFDQSRRLNNRIYKFRGHGKAWDWEVDTEFGNYDYLMYADYDMDHPEVVNELRNWGVWYTNTLGLDGFRIDAVKHIKYSFTRDWINHVRSATGKNMFAVAEFWKNDLGAIENYLQKTNWNHSVFDVPLHYNLYNASKSGGNYDMRNIFNGTVVQAHPMHAVTFVDNHDSQPEEALESFVEEWFKPLAYALTLTREQGYPSVFYGDYYGIPTHGVPAMRSKIDPILEARQKYAYGPQHDYLDHPDVIGWTREGDSSHPKSGLATLITDGPGGSKRMYAGLKNAGETWYDITGNRSDTVKIGSDGWGEFHVNDGSVSIYVQK

SEQ ID NO: 42424 - protein, 480 aa, Bacillus sp.
NGTMMQYFEWYLPNDGNHWNRLNSDASNLKSKGITAVWIPPAWKAVSQNDVGYGAYDLYDLGEFNQKGTVRTKYGTRSQLQAAVTSLKNNGIQVYGDVVMNHKGGADATEMVRAVEVNPNNRNQEVTGEYTIEAWTRFDFPGRGNTHSSFKWRWYHFDGVDFDQSREFTNRIYKFRGHGKAWDWEVDTEFGNYDYLMYADYDYDHPESTNEMRNWGVWYTNTLGLDGFRIDAVKHIKYSFTRDWINHVRSATGKNMFAVAEFWKNDLGAIENYLQKTNWNHSVFDVPLHYNLYNASKSGGNYDMRNIFNGTVVQRHPSHAVTFVDNHDSQPEEALESFVETWFKPLAYALTLTREQGYPSVFYGDYYGIPTHGVPAMRSKIDPILEARQKYAYGPQHDYLDHPDVIGWTREGDSSHPKSGLATLITDGPGGSKRMYAGLKNAGETWYDITGNRSDTVKIGSDGWGEFHVNKASVSIYVQK

SEQ ID NO: 42425 - protein, 480 aa, Bacillus sp.
NGTMMQYFEWYLPNDGNHWNRLNSDASNLKSKGITAVWIPPAWKAVSQNDVGYGAYDLYDLGEFNQKGTVRTKYGTRSQLQAAVTSLKNNGIQVYGDVVMNHKGGADATEMVRAVEVNPNNRNQEVTGEYTIEAWTRFDFPGRGNTHSSFKWRWYHFDGVDWDQSRDLENRIYKFRGHGKAWDWEVDTEFGNYDYLMYADYDMDHPEVVNELRNWGVWYTNTLGLDGFRIDAVKHIKYSFTRDWINHVRSATGKNMFAVAEFWKNDLGAIENYLQKTNWNHSVFDVPLHYNLYNASKSSGNYDMRNIFNGTVVQRHPSHAVTFVDNHDSQPEEALESFVDEWFKPLAYALTLTREQGYPSVFYGDYYGIPTHGVPAMRSKIDPILEARQKYAYGPQHDYLDHPDVIGWTREGDSSHPKSGLATLITDGPGGSKRMYAGLKNAGETWYDITGNRSDTVKIGSDGWGEFHVNKQSVSIYVQK

SEQ ID NO: 42426 - protein, 480 aa, Bacillus sp.
NGTMMQYFEWYLPNDGNHWNRLNSDASNLKSKGITAVWIPPAWKAVSQNDVGYGAYDLYDLGEFNQKGTVRTKYGTRSQLQAAVTSLKNNGIQVYGDVVMNHKGGADATEMVRAVEVNPNNRNQEVTGEYTIEAWTRFDFPGRGNTHSSFKWRWYHFDGVDWDQSRNLTNRIYKFRGHGKAWDWEVDTEFGNYDYLMYTDYDMDHPEVVNELRNWGVWYTNTLGLDGFRIDAVKHIKYSFTRDWINHVRSATGKNMFAVAEFWKNDLGAIENYLQKTNWNHSVFDVPLHYNLYNASKSGGNYDMRNIFNGTVVQANPNHAVTFVDNHDSQPEEALESFVEEWFKPLAYALTLTREQGYPSVFYGDYYGIPTHGVPAMRSKIDPILEARQKYAYGPQHDYLDHPDVIGWTREGDSSHPKSGLATLITDGPGGSKRMYAGLKNAGETWYDITGNRSDTVKIGSDGWGEFHVNDGSVSIYVQK

SEQ ID NO: 42427 - protein, 480 aa, Bacillus sp.
NGTMMQYFEWYLPNDGNHWNRLNSDASNLKSKGITAVWIPPAWKGTSQNDVGYGAYDLYDLGEFNQRGTVRTKYGTRSQLQAAVTSLKNNGIQVYGDVVMNHKGGADATEMVRAVEVNPNNRNQEVTGEYTIEAWTRFDFPGRGNTHSSFKWRWYHFDGVDWDQSRNLNNRIYKFRGHGKAWDWEVDTEFGNYDYLMYVDYDMDHPEVVNELRNWGVWYTNTLGLDGFRIDAVKHIKYSFTRDWINHVRSATGKNMFAVAEFWKNDLGAIENYLQKTNWNHSVFDVPLHYNLYNASKSQGNYDMRNIFNGTVVQRHPSHAVTFVDNHDSQPEEALESFVDTWFKPLAYALTLTREQGYPSVFYGDYYGIPTHGVPAMRSKIDPILEARQKYAYGPQHDYLDHPDVIGWTREGDSSHPKSGLATLITDGPGGSKRMYAGLKNAGETWYDITGNRSDTVKIGSDGWGEFHVNGSSVSIYVQK

SEQ ID NO: 42428 - protein, 480 aa, Bacillus sp.
NGTMMQYFEWYLPNDGNHWNRLNSDASNLKSKGIKAVWIPPAWKAVSQNDVGYGAYDLYDLGEFNQRGTVRTKYGTRSQLQAAVTSLKNNGIQVYGDVVMNHKGGADATEMVRAVEVNPNNRNQEVTGEYTIEAWTRFDFPGRGNTHSSFKWRWYHFDGVDWDQSRNLTNRIYKFRGHGKAWDWEVDTEFGNYDYLMYTDYDMDHPEVVNELRNWGVWYTNTLGLDGFRIDAVKHIKYSFTRDWINHVRSATGKNMFAVAEFWKNDLGAIENYLQKTNWNHSVFDVPLHYNLYNASKSGGNYDMRNIFNGTVVQRHPSHAVTFVDNHDSQPEEALESFVEEWFKPLAYALTLTREQGYPSVFYGDYYGIPTHGVPAMRSKIDPILEARQKYAYGPQHDYLDHPDVIGWTREGDSSHPKSGLATLITDGPGGSKRMYAGLKNAGETWYDITGNRSDTVKIGSDGWGEFHVNDGSVSIYVQK

SEQ ID NO: 42429 - protein, 480 aa, Bacillus sp.
NGTMMQYFEWYLPNDGNHWNRLNSDASNLKSKGIKAVWIPPAWKGASQNDVGYGAYDLYDLGEFNQRGTVRTKYGTRSQLQAAVTSLKNNGIQVYGDVVMNHKGGADATEMVRAVEVNPNNRNQEVTGEYTIEAWTRFDFPGRGNTHSSFKWRWYHFDGVDFDQSRRLDNRIYKFRGHGKAWDWEVDTEFGNYDYLMYTDYDMDHPEVVNELRNWGVWYTNTLGLDGFRIDAVKHIKYSFTRDWINHVRSATGKNMFAVAEFWKNDLGAIENYLQKTNWNHSVFDVPLHYNLYNASKSGGNYDMRNIFNGTVVQRHPSHAVTFVDNHDSQPEEALESFVEEWFKPLAYALTLTREQGYPSVFYGDYYGIPTHGVPAMRSKIDPILEARQKYAYGPQHDYLDHPDVIGWTREGDSSHPKSGLATLITDGPGGSKRMYAGLKNAGETWYDITGNRSDTVKIGSDGWGEFHVNDGSVSIYVQK

SEQ ID NO: 42430 - protein, 480 aa, Bacillus sp.
NGTMMQYFEWYLPNDGNHWNRLNSDASNLKSKGITAVWIPPAWKAVSQNDVGYGAYDLYDLGEFNQKGTVRTKYGTRSQLQAAVTSLKNNGIQVYGDVVMNHKGGADATEMVRAVEVNPNNRNQEVTGEYTIEAWTRFDFPGRGNTHSSFKWRWYHFDGVDWDQSRNLTNRIYKFRGHGKAWDWEVDTEFGNYDYLMYTDYDMDHPEVVNELRNWGVWYTNTLGLDGFRIDAVKHIKYSFTRDWINHVRSATGKNMFAVAEFWKNDLGAIENYLQKTNWNHSVFDVPLHYNLYNASKSQGNYDMRNIFNGTVVQRHPSHAVTFVDNHDSQPEEALESFVDTWFKPLAYALTLTREQGYPSVFYGDYYGIPTHGVPAMRSKIDPILEARQKYAYGPQHDYLDHPDVIGWTREGDSSHPKSGLATLITDGPGGSKRMYAGLKNAGETWYDITGNRSDTVKIGSDGWGEFHVNGTSVSIYVQK

SEQ ID NO: 42431 - protein, 480 aa, Bacillus sp.
NGTMMQYFEWYLPNDGNHWNRLNSDASNLKSKGIKAVWIPPAWKGASQNDVGYGAYDLYDLGEFNQRGTVRTKYGTRSQLQAAVTSLKNNGIQVYGDVVMNHKGGADATEMVRAVEVNPNNRNQEVTGEYTIEAWTRFDFPGRGNTHSSFKWRWYHFDGVDFDQSRRLNNRIYKFRGHGKAWDWEVDTEFGNYDYLMYADYDMDHPEVVNELRNWGVWYTNTLGLDGFRIDAVKHIKYSFTRDWINHVRSATGKNMFAVAEFWKNDLGAIENYLQKTNWNHSVFDVPLHYNLYNASKSGGNYDMRNIFNGTVVQAHPNHAVTFVDNHDSQPEEALESFVEEWFKPLAYALTLTREQGYPSVFYGDYYGIPTHGVPAMRSKIDPILEARQKYAYGPQHDYLDHPDVIGWTREGDSSHPKSGLATLITDGPGGSKRMYAGLKNAGETWYDITGNRSDTVKIGSDGWGEFHVNDGSVSIYVQK

SEQ ID NO: 42432 - protein, 480 aa, Bacillus sp.
NGTMMQYFEWYLPNDGNHWNRLNSDASNLKSKGITAVWIPPAWKGASQNDVGYGAYDLYDLGEFNQRGTVRTKYGTRSQLQAAVTSLKNNGIQVYGDVVMNHKGGADATEMVRAVEVNPNNRNQEVTGEYTIEAWTRFDFPGRGNTHSSFKWRWYHFDGVDFDQSRRLNNRIYKFRGHGKAWDWEVDTEFGNYDYLMYADYDMDHPEVVNELRNWGVWYTNTLGLDGFRIDAVKHIKYSFTRDWINHVRSATGKNMFAVAEFWKNDLGAIENYLQKTNWNHSVFDVPLHYNLYNASKSGGNYDMRNIFNGTVVQRHPSHAVTFVDNHDSQPEEALESFVETWFKPLAYALTLTREQGYPSVFYGDYYGIPTHGVPAMRSKIDPILEARQKYAYGPQHDYLDHPDVIGWTREGDSSHPKSGLATLITDGPGGSKRMYAGLKNAGETWYDITGNRSDTVKIGSDGWGEFHVNKASVSIFVQK

SEQ ID NO: 42433 - protein, 480 aa, Bacillus sp.
NGTMMQYFEWYLPNDGNHWNRLNSDASNLKSKGITAVWIPPAWKAASQNDVGYGAYDLYDLGEFNQKGTVRTKYGTRSQLQAAVTSLKNNGIQVYGDVVMNHKGGADATEMVRAVEVNPNNRNQEVTGEYTIEAYTRFDFPGRGNTHSSFKWRWYHFDGVDFDQSRNLNNRIYKFRGHGKAWDWEVDTEFGNYDYLMYTDYDMDHPEVVNELRNWGVWYTNTLGLDGFRIDAVKHIKYSFTRDWINHVRSATGKNMFAVAEFWKNDLGAIENYLQKTNWNHSVFDVPLHYNLYNASKSGGNYDMRNIFNGTVVQRHPSHAVTFVDNHDSQPEEALESFVEEWFKPLAYALTLTREQGYPSVFYGDYYGIPTHGVPAMRSKIDPILEARQKYAYGPQHDYLDHPDVIGWTREGDSSHPKSGLATLITDGPGGSKRMYAGLKNAGETWYDITGNRSDTVKIGSDGWGEFHVNDGSVSIYVQK

SEQ ID NO: 42434 - protein, 480 aa, Bacillus sp.
NGTMMQYFEWYLPNDGNHWNRLNSDASNLKSKGIKAVWIPPAWKAASQNDVGYGAYDLYDLGEFNQRGTVRTKYGTRSQLQAAVTSLKNNGIQVYGDVVMNHKGGADATEMVRAVEVNPNNRNQEVTGEYTIEAWTRFDFPGRGNTHSSFKWRWYHFDGVDFDQSRNLSNRIYKFRGHGKAWDWEVDTEFGNYDYLMYTDYDMDHPEVVNELRNWGVWYTNTLGLDGFRIDAVKHIKYSFTRDWINHVRSATGKNMFAVAEFWKNDLGAIENYLQKTNWNHSVFDVPLHYNLYNASKSGGNYDMRNIFNGTVVQRHPSHAVTFVDNHDSQPEEALESFVEEWFKPLAYALTLTREQGYPSVFYGDYYGIPTHGVPAMRSKIDPILEARQKYAYGPQHDYLDHPDVIGWTREGDSSHPKSGLATLITDGPGGSKRMYAGLKNAGETWYDITGNRSDTVKIGSDGWGEFHVNDGSVSIYVQK

SEQ ID NO: 42435 - protein, 480 aa, Bacillus sp.
NGTMMQYFEWYLPNDGNHWNRLNSDASNLKSKGITAVWIPPAWKGTSQNDVGYGAYDLYDLGEFNQKGTVRTKYGTRSQLQAAVTSLKNNGIQVYGDVVMNHKGGADATEMVRAVEVNPNNRNQEVTGEYTIEAWTRFDFPGRGNTHSSFKWRWYHFDGVDWDQSRNLNNRIYKFRGHGKAWDWEVDTEFGNYDYLMYVDYDYDHPETTNEMRNWGVWYTNTLGLDGFRIDAVKHIKYSFTRDWINHVRSATGKNMFAVAEFWKNDLGAIENYLQKTNWNHSVFDVPLHYNLYNASKSQGNYDMRNIFNGTVVQRHPSHAVTFVDNHDSQPEEALESFVDTWFKPLAYALTLTREQGYPSVFYGDYYGIPTHGVPAMRSKIDPILEARQKYAYGPQHDYLDHPDVIGWTREGDSSHPKSGLATLITDGPGGSKRMYAGLKNAGETWYDITGNRSDTVKIGSDGWGEFHVNGSSVSIYVQK

SEQ ID NO: 42436 - protein, 480 aa, Bacillus sp.
NGTMMQYFEWYLPNDGNHWNRLNSDASNLKSKGITAVWIPPAWKAVSQNDVGYGAYDLYDLGEFNQKGTVRTKYGTRSQLQAAVTSLKNNGIQVYGDVVMNHKGGADATEMVRAVEVNPNNRNQEVTGEYTIEAWTRFDFPGRGNTHSSFKWRWYHFDGVDFDQSREFTNRIYKFRGHGKAWDWEVDTEFGNYDYLMYVDYDYDHPESTNEMRNWGVWYTNTLGLDGFRIDAVKHIKYSFTRDWINHVRSATGKNMFAVAEFWKNDLGAIENYLQKTNWNHSVFDVPLHYNLYNASKSGGNYDMRNIFNGTVVQRHPSHAVTFVDNHDSQPEEALESFVEEWFKPLAYALTLTREQGYPSVFYGDYYGIPTHGVPAMRSKIDPILEARQKYAYGPQHDYLDHPDVIGWTREGDSSHPKSGLATLITDGPGGSKRMYAGLKNAGETWYDITGNRSDTVKIGSDGWGEFHVNDGSVSIYVQK

SEQ ID NO: 42437 - protein, 480 aa, Bacillus sp.
NETMMQYFEWYLPNDGNHWNRLNSDASNLKSKGIKAVWIPPAWKGASQNDVGYGAYDLYDLGEFNQRGTVRTKYGTRSQLQAAVTSLKNNGIQVYGDVVMNHKGGADATEMVRAVEVNPNNRNQEVTGEYTIEAWTRFDFPGRGNTHSSFKWRWYHFDGVDFDQSRRLNNRIYKFRGHGKAWDWEVDTEFGNYDYLMYADYDMDHPEVVNELRNWGVWYTNTLGLDGFRIDAVKHIKYSFTRDWINHVRSATGKNMFAVAEFWKNDLGAIENYLQKTNWNHSVFDVPLHYNLYNASKSGGNYDMRNIFNGTVVQRHPSHAVTFVDNHDSQPEEALESFVEEWFKPLAYALTLTREQGYPSVFYGDYYGIPTHGVPAMRSKIDPILEARQKYAYGPQHDYLDHPDVIGWTREGDSSHPKSGLATLITDGPGGSKRMYAGLKNAGETWYDITGNRSDTVKIGSDGWGEFHVNDGSVSIYVQK

SEQ ID NO: 42438 - protein, 480 aa, Bacillus sp.
NGTMMQYFEWYLPNDGNHWNRLNSDASNLKSKGITAVWIPPAWKAASQNDVGYGAYDLYDLGEFNQKGTVRTKYGTRSQLQAAVTSLKNNGIQVYGDVVMNHKGGADATEMVRAVEVNPNNRNQEVTGEYTIEAWTRFDFPGRGNTHSSFKWRWYHFDGVDWDQSRRLDNRIYKFRGHGKAWDWEVDTEFGNYDYLMYTDYDMDHPEVVNELRNWGVWYTNTLGLDGFRIDAVKHIKYSFTRDWINHVRSATGKNMFAVAEFWKNDLGAIENYLQKTNWNHSVFDVPLHYNLYNASKSGGNYDMRNIFNGTVVQRHPSHAVTFVDNHDSQPEEALESFVDEWFKPLAYALTLTREQGYPSVFYGDYYGIPTHGVPAMRSKIDPILEARQKYAYGPQHDYLDHPDVIGWTREGDSSHPKSGLATLITDGPGGSKRMYAGLKNAGETWYDITGNRSDTVKIGSDGWGEFHVNKSSVSIYVQK

SEQ ID NO: 42439 - protein, 480 aa, Bacillus sp.
NGTMMQYFEWYLPNDGNHWNRLNSDASNLKSKGIKAVWIPPAWKGASQNDVGYGAYDLYDLGEFNQRGTVRTKYGTRSQLQAAVTSLKNNGINVYGDVVMNHKGGADATEMVRAVEVNPNNRNQEVTGEYTIEAWTRFDFPGRGNTHSSFKWRWYHFDGVDWDQSRRLNNRIYKFRGHGKAWDWEVDTEFGNYDYLMYADYDMDHPEVVNELRNWGVWYTNTLGLDGFRIDAVKHIKYSFTRDWINHVRSATGKNMFAVAEFWKNDLGAIENYLQKTNWNHSVFDVPLHYNLYNASKSGGNYDMRNIFNGTVVQAHPMHAVTFVDNHDSQPEEALESFVEEWFKPLAYALTLTREQGYPSVFYGDYYGIPTHGVPAMRSKIDPILEARQKYAYGPQHDYLDHPDVIGWTREGDSSHPKSGLATLITDGPGGSKRMYAGLKNAGETWYDITGNRSDTVKIGSDGWGEFHVNDGSVSIYVQK

SEQ ID NO: 42440 - protein, 480 aa, Bacillus sp.
NGTMMQYFEWYLPNDGNHWNRLNSDASNLKSKGITAVWIPPAWKAASQNDVGYGAYDLYDLGEFNQKGTVRTKYGTRSQLQAAVTSLKNNGIQVYGDVVMNHKGGADATEMVRAVEVNPNNRNQEVTGEYTIEAWTRFDFPGRGNTHSSFKWRWYHFDGVDWDQSRNLNNRIYKFRGHGKAWDWEVDTEFGNYDYLMYTDYDMDHPEVVNELRNWGVWYTNTLGLDGFRIDAVKHIKYSFTRDWINHVRSATGKNMFAVAEFWKNDLGAIENYLQKTNWNHSVFDVPLHYNLYNASKSGGNYDMRNIFNGTVVQRHPSHAVTFVDNHDSQPEEALESFVETWFKPLAYALTLTREQGYPSVFYGDYYGIPTHGVPAMRSKIDPILEARQKYAYGPQHDYLDHPDVIGWTREGDSSHPKSGLATLITAGPGGSKRMYAGLKNAGETWYDITGNRSDTVKIGSDGWGEFHVNKASVSIYVQK

SEQ ID NO: 42441 - protein, 480 aa, Bacillus sp.
NGTMMQYFEWYLPNDGNHWNRLNSDASNLKSKGIKAVWIPPAWKGASQNDVGYGAYDLYDLGEFNQRGTVRTKYGTRSQLQAAVTSLKNNGIQVYGDVVMNHKGGADATEMVRAVEVNPNNRNQEVTGEYTIEAWTRFDFPGRGNTHSSFKWRWYHFDGVDFDQSRRLNNRIYKFRGHGKAWDWEVDTEFGNYDYLMYADYDMDHPEVVNELRNWGVWYTNTLGLDGFRIDAVKHIKYSFTRDWINHVRSATGKNMFAVAEFWKNDLGAIENYLQKTNWNHSVFDVPLHYNLYNASQSGGNYDMRNIFNGTVVQRHPSHAVTFVDNHDSQPEEALESFVEPWFKPLAYALTLTREQGYPSVFYGDYYGIPTHGVPAMRSKIDPILEARQKYAYGPQHDYLDHPDVIGWTREGDSSHPKSGLATLITDGPGGSKRMYAGLKNAGETWYDITGNRSDTVKIGSDGWGEFHVNKGSVSIYVQK

SEQ ID NO: 42442 - protein, 480 aa, Bacillus sp.
NGTMMQYFEWYLPNDGNHWNRLNSDASNLKSKGITAVWIPPAWKGASQNDVGYGAYDLYDLGEFNQKGTVRTKYGTRSQLQAAVTSLKNNGIQVYGDVVMNHKGGADATEMVRAVEVNPNNRNQEVTGEYTIEAWTRFDFPGRGNTHSSFKWRWYHFDGVDWDQSRELDNRIYKFRGHGKAWDWEVDTEFGNYDYLMYTDYDYDHPESTNEMRNWGVWYTNTLGLDGFRIDAVKHIKYSFTRDWINHVRSATGKNMFAVAEFWKNDLGAIENYLQKTNWNHSVFDVPLHYNLYNASKSQGNYDMRNIFNGTVVQRHPSHAVTFVDNHDSQPEEALESFVDTWFKPLAYALTLTREQGYPSVFYGDYYGIPTHGVPAMRSKIDPILEARQKYAYGPQHDYLDHPDVIGWTREGDSSHPKSGLATLITDGPGGSKRMYAGLKNAGETWYDITGNRSDTVKIGSDGWGEFHVNGSSVSIYVQK

SEQ ID NO: 42443 - protein, 480 aa, Bacillus sp.
NGTMMQYFEWYLPNDGNHWNRLNSDASNLKSKGITAVWIPPAWKGASQNDVGYGAYDLYDLGEFNQKGTVRTKYGTRSQLQAAVTSLKNNGIQVYGDVVMNHKGGADATEMVRAVEVNPNNRNQEVTGEYTIEAWTRFDFPGRGNTHSSFKWRWYHFDGVDWDQSRRLDNRIYKFRGHGKAWDWEVDTEFGNYDYLMYTDYDMDHPEVVNELRNWGVWYTNTLGLDGFRIDAVKHIKYSFTRDWINHVRSATGKNMFAVAEFWKNDLGAIENYLQKTNWNHSVFDVPLHYNLYNASKSSGNYDMRNIFNGTVVQRHPSHAVTFVDNHDSQPEEALESFVDEWFKPLAYALTLTREQGYPSVFYGDYYGIPTHGVPAMRSKIDPILEARQKYAYGPQHDYLDHPDVIGWTREGDSSHPKSGLATLITDGPGGSKRMYAGLKNAGETWYDITGNRSDTVKIGSDGWGEFHVNKQSVSIYVQK

SEQ ID NO: 42444 - protein, 480 aa, Bacillus sp.
NGTMMQYFEWYLPNDGNHWNRLNSDASNLKSKGITAVWIPPAWKGASQNDVGYGAYDLYDLGEFNQKGTVRTKYGTRSQLQAAVTSLKNNGIQVYGDVVMNHKGGADTTEMVRAVEVNPNNRNQEVTGEYTIEAWTRFDFPGRGNTHSSFKWRWYHFDGVDWDQSRRLNNRIYKFRGHGKAWDWEVDTEFGNYDYLMYADYDMDHPEVVNELRNWGVWYTNTLGLDGFRIDAVKHIKYSFTRDWINHVRSATGKNMFAVAEFWKNDLGAIENYLQKTNWNHSVFDVPLHYNLYNASKSSGNYDMRNIFNGTVVQRHPSHAVTFVDNHDSQPEEALESFVDPWFKPLAYALTLTREQGYPSVFYGDYYGIPTHGVPAMRSKIDPILEARQKYAYGPQHDYLDHPDVIGWTREGDSSHPKSGLATLITDGPGGSKRMYAGLKNAGETWYDITGNRSDTVKIGSDGWGEFHVNGQSVSIYVQK

SEQ ID NO: 42445 - protein, 480 aa, Bacillus sp.
NGTMMQYFEWYLPNDGNHWNRLNSDASNLKSKGITAVWIPPAWKATSQNDVGYGAYDLYDLGEFNQKGTVRTKYGTRSQLQAAVTSLKNNGIQVYGDVVMNHKGGADATEMVRAVEVNPNNRNQEVTGEYTIEAWTRFDFPGRGNTHSSFKWRWYHFDGVDWDQSRELNNRIYKFRGHGKAWDWEVDTEFGNYDYLMYTDYDMDHPEVVNELRNWGVWYTNTLGLDGFRIDAVKHIKYSFTRDWINHVRSATGKNMFAVAEFWKNDLGAIENYLQKTNWNHSVFDVPLHYNLYNASKSGGNYDMRNIFNGTVVQVHPSHAVTFVDNHDSQPEEALESFVEEWFKPLAYALTLTREQGYPSVFYGDYYGIPTHGVPAMRSKIDPILEARQKYAYGPQHDYLDHPDVIGWTREGDSSHPKSGLATLITDGPGGSKRMYAGLKNAGETWYDITGNRSDTVKIGSDGWGEFHVNYGSVSIYVQK

SEQ ID NO: 42446 - protein, 480 aa, Bacillus sp.
NGTMMQYFEWYLPNDGNHWNRLNSDASNLKSKGITAVWIPPAWKAVSQNDVGYGAYDLYDLGEFNQKGTVRTKYGTRSQLQAAVTSLKNNGIQVYGDVVMNHKGGADATEMVRAVEVNPNNRNQEVTGEYTIEAWTRFDFPGRGNTHSSFKWRWYHFDGVDFDQSREFTNRIYKFRGHGKAWDWEVDTEFGNYDYLMYADYDYDHPESTNEMRNWGVWYTNTLGLDGFRIDAVKHIKYSFTRDWINHVRSATGKNMFAVAEFWKNDLGAIENYLQKTNWNHSVFDVPLHYNLYNASKSGGNYDMRNIFNGTVVQRHPSHAVTFVDNHDSQPEEALESFVDPWFKPLAYALTLTREQGYPSVFYGDYYGIPTHGVPAMRSKIDPILEARQKYAYGPQHDYLDHPDVIGWTREGDSSHPKSGLATLITDGPGGSKRMYAGLKNAGETWYDITGNRSDTVKIGSDGWGEFHVNGGSVSIYVQK

SEQ ID NO: 42447 - protein, 480 aa, Bacillus sp.
NGTMMQYFEWYLPNDGNHWNRLNSDASNLKSKGITAVWIPPAWKAASQNDVGYGAYDLYDLGEFNQKGTVRTKYGTRSQLQAAVTSLKNNGIQVYGDVVMNHKGGADATEMVRAVEVNPNNRNQEVTGEYTIEAYTRFDFSGRGNTHSSFKWRWYHFDGVDWDQSRDLDNRIYKFRGHGKAWDWEVDTEFGNYDYLMYADYDMDHPEVVNELRNWGVWYTNTLGLDGFRIDAVKHIKYSFTRDWINHVRSATGKNMFAVAEFWKNDLGAIENYLQKTNWNHSVFDVPLHYNLYNASKSGGNYDMRNIFNGTVVQRHPSHAVTFVDNHDSQPEEALESFVEEWFKPLAYALTLTREQGYPSVFYGDYYGIPTHGVPAMRSKIDPILEARQKYAYGPQHDYLDHPDVIGWTREGDSSHPKSGLATLITDGPGGSKRMYAGLKNAGETWYDITGNRSDTVKIGSDGWGKFHVNDGSVSIYVQK

SEQ ID NO: 42448 - protein, 480 aa, Bacillus sp.
NGTMMQYFEWYLPNDGNHWNRLNSDASNLKSKGITAVWIPPAWKAVSQNDVGYGAYDLYDLGEFNQKGTVRTKYGTRSQLQAAVTSLKNNGIQVYGDVVMNHKGGADLTEMVRAVEVNPNNRNQEVTGEYTIEAWTRFDFPGRGNTHSSFKWRWYHFDGVDWDQSREFTNRIYKFRGHGKAWDWEVDTEFGNYDYLMYVDYDMDHPEVVNELRNWGVWYTNTLGLDGFRIDAVKHIKYSFTRDWINHVRSATGKNMFAVAEFWKNDLGAIENYLQKTNWNHSVFDVPLHYNLYNASKSGGNYDMRNIFNGTVVQRHPSHAVTFVDNHDSQPEEALESFVDEWFKPLAYALTLTREQGYPSVFYGDYYGIPTHGVPAMRSKIDPILEARQKYAYGPQHDYVDHPDVIGWKREGDSSHPKSGLATLITDGPGGSKRMYAGLKNAGETWYDITGNRSDTVKIGSDGWGEFHVNDGSVSIYVQK

SEQ ID NO: 42449 - protein, 480 aa, Bacillus sp.
NGTMMQYFEWYLPNDGNHWNRLNSDASNLKSKGITAVWIPPAWKGASQNDVGYGAYDLYDLGEFNQRGTVRTKYGTRSQLQAAVTSLKNNGIQVYGDVVMNHKGGADLTEMVRAVEVNPNNRNQEVTGEYTIEAWTRFDFPGRGNTHSSFKWRWYHFDGVDFDQSRQLNNRIYKFRGHGKAWDWEVDTEFGNYDYLMYADYDMDHPEVVGELRNWGVWYTNTLGLDGFRIDAVKHIKYSFTRDWINHVRSATGKNMFAVAEFWKNDLGAIENYLQKTNWNHSVFDVPLHYNLYNASKSGGNYDMRNIFNGTVVQRHPSHAVTFVDNHDSQPEEALESFVEEWFKPLAYALTLTREQGLPSVFYGDYYGIPTHGVPAMRSKIDPILEARQKYAYGPQHDYLDHPDVIGWTREGDSSHPKSGLATLITDGPGGSKRMYAGLKNAGETWYDITGNRSDTVKIGSDGWGEFHVNDGSVSIYVQK

SEQ ID NO: 42450 - protein, 480 aa, Bacillus sp.
NGTMMQYFEWYLPNDGNHWNRLNSDASNLKSKGITAVWIPPAWKAASQNDVGYGAYDLYDLGEFNQKGTVRTKYGTRSQLQAAVTSLKNNGIQVYGDVVMNHKGGADATEMVRAVEVNPNNRNQEVTGEYTIEAWTRFDFPGRGNTHSSFKWRWYHFDGVDWDQSRRTNNRIYKFRGHGKAWDWEVDTEFGNYDYLMYTDYDMDHPEVVNELRNWGVWYTNTLGLDGFRIDAVKHIKYSFTRDWINHVRSATGKNMFAVAEFWKNDLGAIENYLQKTNWNHSVFDVPLHYNLYNASQSGGNYDMRNIFNGTVVQRHPSHAVTFVDNHDSQPEEALESFVEPWFKPLAYALTLTREQGYPSVFYGDYYGIPTHGVPAMRSKIDPILEARQKYAYGPQHDYLDHPDVIGWTREGDSSHPKSGLATLITDGPGGSKRMYAGLKNAGETWYDITGNRSDTVKIGSDGWGEFHVNKSSVSIYVQK

SEQ ID NO: 42451 - protein, 480 aa, Bacillus sp.
NGTMMQYFEWYLPNDGNHWNRLNSDASNLKSKGITAVWIPPAWKAVSQNDVGYGAYDLYDLGEFNQKGTVRTKYGTRSQLQAAVTSLKNNGIQVYGDVVMNHKGGADLTEMVRAVEVNPNNRNQEVTGEYTIEAWTRFDFPGRGNTHSSFKWRWYHFDGVDWDQSREFTNRIYKFRGHGKAWDWEVDTEFGNYDYLMYVDYDMDHPEVVNELRNWGVWYTNTLGLDGFRIDAVKHIKYSFTRDWINHVRSATGKNMFAVAEFWKNDLGAIENYLQKTNWNHSVFDVPLHYNLYNASKSGGNYDMRNIFNGTVVQRHPSHAVTFVDNHDSQPEEALESFVETWFKPLAYALTLTREQGYPSVFYGDYYGIPTHGVPAMRSKIDPILEARQKYAYGPQHDYLDHPDVIGWTREGDSSHPKSGLATLITDGPGGSKRMYAGLKNAGETWYDITGNRSDTVKIGSDGWGEFHVNKASVSIYVQK

SEQ ID NO: 42452 - protein, 480 aa, Bacillus sp.
NGTMMQYFEWYLPNDGNHWNRLNSDASNLKSKGITAVWIPPAWKGTSQNDVGYGAYDLYDLGEFNQKGTVRTKYGTRSQLQAAVTSLKNNGIQVYGDVVMNHKGGADATEMVRAVEVNPNNRNQEVTGEYTIEAYTRFDFPGRGNTHSSFKWRWYHFDGVDWDQSRNLNNRIYKFRGHGKAWDWEVDTEFGNYDYLMYVDYDMDHPEVVNELRNWGVWYTNTLGLDGFRIDAVKHIKYSFTRDWINHVRSATGKNMFAVAEFWKNDLGAIENYLQKTNWNHSVFDVPLHYNLYNASKSQGNYDMRNIFNGTVVQRHPSHAVTFVDNHDSQPEEALESFVDTWFKPLAYALTLTREQGYPSVFYGDYYGIPTHGVPAMRSKIDPILEARQKYAYGPQHDYLDHPDVIGWTREGDSSHPKSGLATLITDGPGGSKRMYAGLKNAGETWYDITGNRSDTVKIGSDGWGEFHVNGSSVSIYVQK

SEQ ID NO: 42453 - protein, 480 aa, Bacillus sp.
NGTMMQYFEWYLPNDGNHWNRLNSDASNLKSKGIKAVWIPPAWKAVSQNDVGYGAYDLYDLGEFNQKGTVRTKYGTRSQLQAAVTSLKNNGIQVYGDVVMNHKGGADATEMVRAVEVNPNNRNQEVTGEYTIEAWTRFDFPGRGNTHSSFKWRWYHFDGVDFDQSRNLTNRIYKFRGHGKAWDWEVDTEFGNYDYLMYTDYDMDHPEVVNELRNWGVWYTNTLGLDGFRIDAVKHIKYSFTRDWINHVRSATGKNMFAVAEFWKNDLGAIENYLQKTNWNHSVFDVPLHYNLYNASKSGGNYDMRNIFNGTVVQRHPSHAVTFVDNHDSQPEEALESFVEEWFKPLAYALTLTREQGYPSVFYGDYYGIPTHGVPAMRSKIDPILEARQKYAYGPQHDYLDHPDVIGWTREGDSSHPKSGLATLITDGPGGSKRMYAGLKNAGETWYDITGNRSDTVKIGSDGWGEFHVNDGSVSIYVQK

SEQ ID NO: 42454 - protein, 476 aa, Synthetic construct
NGTMMQYFEWYVPNDGQQWNRLRTDAPYLSSVGINAVWTPPAYKGTSQADVGYGPYDLYDLGEFNQKGTVRTKYGTKGELKSAVNTLHSNGIQVYGDVVMNHKAGADYTENVTAVEVNPSNRYQESGEYNIQAWTGFNFPGRGTTYSNWKWQWFHFDGTDWDQSRSLSRIFKFDGKAWDWPVSSENGNYDYLMYADYDYDHPDVVNEMKKWGVWYANEVGLDGYRLDAVKHIKFSFLKDWVDNARAATGKEMFTVGEYWQNDLGALNNYLAKVNYNQSLFDAPLHYNFYAASTGGGYYDMRNILNNTLVASNPTKAVTLVENHDTQPGQSLESTVQPRFKPLAYAFILTRSGGYPSVFYGDMYGTTTREIPALKSKIEPLLKARKDYAYGTQRDYLDNPDVIGWTREGDSTHPKSGLATVITDGPGGSKRMYVGTSNAGEIWYDLTGNRTDKITIGSDGYATFPVNKESVSVWVQQ

SEQ ID NO: 42455 - protein, 485 aa, Synthetic construct
HXXXXNGTMMQYFEWHLPXDGXXWXKLXXDAXNLXXXGITAIWIPPAWKGTSXXDVGYGXYDLYDLGEFNQKGTVRTKYGTKAQXXXAIXAXXXXGMQVYADVVXXHKGGADATEXVXAVEVNPXXRNQEISGXYXIXAWTKFDFPGRGNTYSXFKWRWYHFDGVDWDXSREXXXRIYKFRGXGKAWDWEVDSENGNYDYLMYADLDMDHPEVVXELKXWGXWYXNTXNIDGFRIDAVKHIKFSFXXDWLSHVRXXTGKXLFXVAEFWXXDIXXLXNYIXKTNXXXSLFDXPLHXXXYXASXSGGXFDMXXLLXXTLMXXXPXXAVTFVDNHDSXPGXALXSFVXXWFKPLAYAXILTRXXGYPXVFYGDYYGIPXHXIPALKAKIDPILXARXXFAYGTQHDYXDHXXIIGWTREGXTXXPXSGLAXIISDGPGGXKWMYVGXNXAGXVFHDITGNKXXTVTINADGWAXFXVNGGSVSIWVXR

SEQ ID NO: 42456 - protein, 480 aa, Bacillus sp.
NGTIMQYFEWNVPNDGQHWNRLHNNAQNLKNAGITAIWIPPAWKGTSQNDVGYGAYDLYDLGEFNQKGTVRTKYGTKAELERAIRSLKANGIQVYGDVVMNHKGGADFTERVQAVEVNPQNRNQEVSGTYEIEAYTGFNFPGRGNQHSSFKWRWYHFDGTDWDQSRQLSNRIYKFRGDGKAWDWEVDTENGNYDYLMYADVDMNHPEVINELNRWGVWYANTLNLDGFRLDAVKHIQFSFMRNWLGHVRGQTGKNLFAVAEYWKNDLGALENYLSKTNWTMSAFDVPLHYNLYQASNSGKNYDMRNLLNGTLVQRHPSHAVTFVDNHDTQPGEALESFVQGWFKPLAYATILTREQGYPQVFYGDYYGIPSDGVPSYRQQIDPLLKARQKYAYGPQHDYLDHPDVIGWTREGDSSHPKSGLATLITDGPGGSKNMYAGLKNAGETWYDITGNRSDTVKIGSDGWGEFHVNKGSVSIYVQK

SEQ ID NO: 42457 - protein, 480 aa, Bacillus sp.
NGTIMQYFEWNVPNDGQHWNRLHNNAQNLKNAGITAIWIPPAWKGTSQNDVGYGAYDLYDLGEFNQKGTVRTKYGTKAELERAIRSLKANGIQVYGDVVMNHKGGADFTERVQAVEVNPQNRNQEVSGTYEIEAYTGFNFPGRGNQHSSFKWRWYHFDGTDWDQSRQLSNRIYKFRGDGKAWDWEVDTENGNYDYLMYADVDMNHPEVINELNRWGVWYANTLNLDGFRLDAVKHIQFSFMRNWLGHVRGQTGKNLFAVAEYWKNDLGALENYLSKTNWTMSAFDVPLHYNLYQASNSGKNYDMRNLLNGTLVQRHPSHAVTFVDNHDTQPGEALESFVQGWFKPLAYATILTREQGYPQVFYGDYYGIPSDGVPSYRQQIDPLLKARQKYAYGPQHDYLDHPDVIGWTREGDSSHPKSGLATLITDGPGGSKRMYAGLKNAGETWYDITGNRSDTVKIGSDGTGEFHVNDKSVSIYVQK

SEQ ID NO: 42458 - protein, 480 aa, Bacillus sp.
NGTIMQYFEWNVPNDGQHWNRLHNNAQNLKNAGITAIWIPPAWKGTSQNDVGYGAYDLYDLGEFNQKGTVRTKYGTKAELERAIRSLKANGIQVYGDVVMNHKGGADFTERVQAVEVNPQNRNQEVSGTYEIEAYTGFNFPGRGNQHSSFKWRWYHFDGTDWDQSRQLSNRIYKFRGDGKAWDWEVDTENGNYDYLMYADVDMNHPEVINELNRWGVWYANTLNLDGFRLDAVKHIQFSFMRNWLGHVRGQTGKNLFAVAEYWKNDLGALENYLSKTNWTMSAFDVPLHYNLYQASNSGKNYDMRNLLNGTLVQRHPSHAVTFVDNHDTQPGEALESFVQGWFKPLAYATILTREQGYPQVFYGDYYGIPSDGVPSYRQQIDPLLKARQKYAYGPQHDYLDHPDVIGWTREGDSSHPKSGLATLITDGPGGSKRMYAGLKNAGETWYDITGNRSDTVKIGSDGTGEFHVNKGSVSIYVQK

SEQ ID NO: 42459 - protein, 480 aa, Bacillus sp.
NGTIMQYFEWNVPNDGQHWNRLHNNAQNLKNAGITAIWIPPAWKGTSQNDVGYGAYDLYDLGEFNQKGTVRTKYGTKAELERAIRSLKANGIQVYGDVVMNHKGGADFTERVQAVEVNPQNRNQEVSGTYEIEAYTGFNFPGRGNQHSSFKWRWYHFDGTDWDQSRQLSNRIYKFRGDGKAWDWEVDTENGNYDYLMYADVDMNHPEVINELNRWGVWYANTLNLDGFRLDAVKHIQFSFMRNWLGHVRGQTGKNLFAVAEYWKNDLGALENYLSKTNWTMSAFDVPLHYNLYQASNSRGNYDMRNLLNGTLVQRHPSHAVTFVDNHDTQPGEALESFVQGWFKPLAYATILTREQGYPQVFYGDYYGIPSDGVPSYRQQIDPLLKARQKYAYGPQHDYLDHPDVIGWTREGDSSHPKSGLATLITDGPGGSKNMYAGLKNAGETWYDITGNRSDTVKIGSDGWGEFHVNDKSVSIYVQK

SEQ ID NO: 42460 - protein, 480 aa, Bacillus sp.
NGTIMQYFEWNVPNDGQHWNRLHNNAQNLKNAGITAIWIPPAWKGTSQNDVGYGAYDLYDLGEFNQKGTVRTKYGTKAELERAIRSLKANGIQVYGDVVMNHKGGADFTERVQAVEVNPQNRNQEVSGTYEIEAYTGFNFPGRGNQHSSFKWRWYHFDGTDWDQSRQLSNRIYKFRGDGKAWDWEVDTENGNYDYLMYADVDMNHPEVINELNRWGVWYANTLNLDGFRLDAVKHIQFSFMRNWLGHVRGQTGKNLFAVAEYWKNDLGALENYLSKTNWTMSAFDVPLHYNLYQASNSGKNYDMRNLLNGTLVQRHPSHAVTFVDNHDTQPGEALESFVQGWFKPLAYATILTREQGYPQVFYGDYYGIPSDGVPSYRQQIDPLLKARQKYAYGPQHDYLDHPDVIGWTREGDSSHPKSGLATLITDGPGGSKNMYAGLKNAGETWYDITGNRSDTVKIGSDGWGEFHVNDKSVSIYVQK

SEQ ID NO: 42461 - protein, 480 aa, Bacillus sp.
NGTIMQYFEWNVPNDGQHWNRLHNNAQNLKNAGITAIWIPPAWKGTSQNDVGYGAYDLYDLGEFNQKGTVRTKYGTKAELERAIRSLKANGIQVYGDVVMNHKGGADFTERVQAVEVNPQNRNQEVSGTYEIEAYTGFNFPGRGNQHSSFKWRWYHFDGTDWDQSRQLSNRIYKFRGDGKAWDWEVDTENGNYDYLMYADVDMNHPEVINELNRWGVWYANTLNLDGFRLDAVKHIQFSFMRNWLGHVRGQTGKNLFAVAEYWKNDLGALENYLSKTNWTMSAFDVPLHYNLYQASNSRGNYDMRNLLNGTLVQRHPSHAVTFVDNHDTQPGEALESFVQGWFKPLAYATILTREQGYPQVFYGDYYGIPSDGVPSYRQQIDPLLKARQKYAYGPQHDYLDHPDVIGWTREGDSSHPKSGLATLITDGPGGSKRMYAGLKNAGETWYDITGNRSDTVKIGSDGTGEFHVNDKSVSIYVQK

SEQ ID NO: 42462 - protein, 480 aa, Bacillus sp.
NGTIMQYFEWNVPNDGQHWNRLHNNAQNLKNAGITAIWIPPAWKGTSQNDVGYGAYDLYDLGEFNQKGTVRTKYGTKAELERAIRSLKANGIQVYGDVVMNHKGGADFTERVQAVEVNPQNRNQEVSGTYEIEAYTGFNFPGRGNQHSSFKWRWYHFDGTDWDQSRQLSNRIYKFRGDGKAWDWEVDTENGNYDYLMYADVDMNHPEVINELNRWGVWYANTLNLDGFRLDAVKHIQFSFMRNWLGHVRGQTGKNLFAVAEYWKNDLGALENYLSKTNWTMSAFDVPLHYNLYQASNSRGNYDMRNLLNGTLVQRHPSHAVTFVDNHDTQPGEALESFVQGWFKPLAYATILTREQGYPQVFYGDYYGIPSDGVPSYRQQIDPLLKARQKYAYGPQHDYLDHPDVIGWTREGDSSHPKSGLATLITDGPGGSKRMYAGLKNAGETWYDITGNRSDTVKIGSDTWGEFHVKDGSVSIYVQK

SEQ ID NO: 42463 - protein, 480 aa, Bacillus sp.
NGTIMQYFEWNVPNDGQHWNRLHNNAQNLKNAGITAIWIPPAWKGTSQNDVGYGAYDLYDLGEFNQKGTVRTKYGTKAELERAIRSLKANGIQVYGDVVMNHKGGADFTERVQAVEVNPQNRNQEVSGTYEIEAYTGFNFPGRGNQHSSFKWRWYHFDGTDWDQSRQLSNRIYKFRGDGKAWDWEVDTENGNYDYLMYADVDMNHPEVINELNRWGVWYANTLNLDGFRLDAVKHIQFSFMRNWLGHVRGQTGKNLFAVAEYWKNDLGALENYLSKTNWTMSAFDVPLHYNLYQASNSRGNYDMRNLLNGTLVQRHPSHAVTFVDNHDTQPGEALESFVQGWFKPLAYATILTREQGYPQVFYGDYYGIPSDGVPSYRQQIDPLLKARQKYAYGPQHDYLDHPDVIGWTREGDSSHPKSGLATLITDGPGGSRRMYAGLKNAGETWYDITGNRSDTVKIGSDGWGEFHVKDGSVSIYVQK

SEQ ID NO: 42464 - protein, 476 aa, Aspergillus terreus NIH2624
TPAEWRSQSIYFLLTDRFGRTDNSTTAACDTSDRVYCGGSWQGIINQLDYIQGMGFTAIWITPVTGQFYENTGDGTSYHGYWQQDIYDLNYNYGTAQDLKNLANALHERGMYLMVDVVANHMGYDGAGNTVDYSVFNPFSSSSYFHPYCLISNYDNQTNVEDCWLGDTTVSLPDLDTTSTAVRNIWYDWVADLVANYSIDGLRVDTVKHVEKDFWPGYNSAAGVYCVGEVYSGDPAYTCPYQNYMDGVLNYPIYYQLLYAFESSSGSISDLYNMISSVASSCKDPTLLGNFIENHDNPRFASYTSDYSQAKNVITFIFLSDGIPIVYAGQEQHYSGGSDPANREATWLSGYSTSATLYTWIATTNQIRSLAISKDAGYVQAKNNPFYSDSNTIAMRKGTTAGAQVITVLSNKGASGSSYTLSLSGTGYSAGATLVETYTCTTVTVDSSGNLPVPMTSGLPRVFVPSSWVNGSALCN

SEQ ID NO: 42465 - protein, 478 aa, Bacillus sp.
NGTMMQYFEWYLPNDGNHWNRLNSDASNLKSKGIKAVWIPPAWKGASQNDVGYGAYDLYDLGEFNQKGTVRTKYGTRSQLQAAVTSLKNNGIQVYGDVVMNHKGGADATEMVRAVEVNPNNRNQEVTGEYTIEAWTRFDFPGRGNTHSSFKWRWYHFDGVDFDQSRKLNNRIYKFRGKAWDWEVDTEFGNYDYLMYVDYDYDHPESTNEMRNWGVWYTNTLGLDGFRIDAVKHIKYSFTRDWINHVRIATGKNMFAVAEFWKNDLGAIENYLQKTNWNHSVFDVPLHYNLYNASKSGGNYDMRNIFNGTVVQAHPSQAVTFVDNHDSQPEEALESFVDEWFKPLAYALTLTREQGYPSVFYGDYYGIPTHGVPAMRSKIDPILEARQKYAYGPQHDYLDHPDVIGWTREGDSSHPKSGLATLITDGPGGSKRMYAGLKNAGETWYDITGNRSDTVKIGSDGWGEFHVNDQSVSIYVQK

SEQ ID NO: 42466 - protein, 478 aa, Bacillus sp.
NGTMMQYFEWYLPNDGNHWNRLNSDASNLKSKGITAVWIPPAWKGTSQNDVGYGAYDLYDLGEFNQKGTVRTKYGTRSQLQAAVTSLKNNGIQVYGDVVMNHKGGADATEMVRAVEVNPNNRNQEVTGEYTIEAWTRFDFPGRGNTHSSFKWRWYHFDGVDWDQSRNLNNRIYKFRGKAWDWEVDTEFGNYDYLMYVDYDMDHPEVVNELRNWGVWYTNTLGLDGFRIDAVKHIKYSFTRDWINHVRSATGKNMFAVAEFWKNDLGAIENYLQKTNWNHSVFDVPLHYNLYNASKSQGNYDMRNIFNGTVVQANPNHAVTFVDNHDSQPEEALESFVDTWFKPLAYALTLTREQGYPSVFYGDYYGIPTHGVPAMRSKIDPILEARQKYAYGPQHDYLDHPDVIGWTREGDSSHPKSGLATLITDGPGGSKRMYAGLKNAGETWYDITGNRSDTVKIGSDGWGEFHVNGSSVSIYVQK

SEQ ID NO: 42467 - protein, 478 aa, Bacillus sp.
NKTMMQYFEWYLPNDGNHWNRLNSDASNLKSKGITAVWIPPAWKGASQNDVGYGAYDLYDLGEFNQRGTVRTKYGTRSQLQAAVTSLKNNGIQVYGDVVMNHKGGADATEMVRAVEVNPNNRNQEVTGEYTIEAWTRFDFPGRGNTHSSFKWRWYHFDGVDFDQSRRLNNRIYKFRGKAWDWEVDTEFGNYDYLMYADYDMDHPEVVNELRNWGVWYTNTLGLDGFRIDAVKHIKYSFTRDWINHVRSATGKNMFAVAEFWKNDLGAIENYLQKTNWNHSVFDVPLHYNLYNASKSGGNYDMRNIFNGTVVQMQPSHAVTFVDNHDSQPEEALESFVEEWFKPLAYALTLTREQGYPSVFYGDYYGIPTHGVPAMRSKIDPILEARQKYAYGPQHDYLDHPDVIGWTREGDSSHPKSGLATLITDGPGGSKRMYAGLKNAGETWYDITGNRSDTVKIGSDGWGEFHVNDGSVSIYVQK

SEQ ID NO: 42468 - protein, 478 aa, Bacillus sp.
NGTMMQYFEWYLPNDGNHWNRLNSDASNLKSKGIKAVWIPPAWKGASQNDVGYGAYDLYDLGEFNQRGTVRTKYGTRSQLQAAVTSLKNNGIQVYGDVVMNHKGGADATEMVRAVEVNPNNRNQEVTGEYTIEAWTRFDFPGRGNTHSSFKWRWYHFDGVDFDQSRRLNNRIYKFRGKAWDWEVDTEFGNYDYLMYADYDYDHPETTNEMRNWGVWYTNTLGLDGFRIDAVKHIKYSFTRDWINHVRSATGKNMFAVAEFWKNDLGAIENYLQKTNWNHSVFDVPLHYNLYNASKSGGNYDMRNIFNGTVVQAHPSQAVTFVDNHDSQPEEALESFVEEWFKPLAYALTLTREQGYPSVFYGDYYGIPTHGVPAMRSKIDPILEARQKYAYGPQHDYLDHPDVIGWTREGDSSHPKSGLATLITDGPGGSKRMYAGLKNAGETWYDITGNRSDTVKIGSDGWGEFHVNDGSVSIYVQK

SEQ ID NO: 42469 - protein, 478 aa, Bacillus sp.
NGTMMQYFEWYLPNDGNHWNRLNSDASNLKSKGIKAVWIPPAWKAASQNDVGYGAYDLYDLGEFNQRGTVRTKYGTRSQLQAAVTSLKNNGIQVYGDVVMNHKGGADATEMVRAVEVNPNNRNQEVTGEYTIEAWTRFDFPGRGNTHSSFKWRWYHFDGVDFDQSRDLTNRIYKFRGKAWDWEVDTEFGNYDYLMYADYDMDHPEVVNELRNWGVWYTNTLGLDGFRIDAVKHIKYSFTRDWINHVRSATGKNMFAVAEFWKNDLGAIENYLQKTNWNHSVFDVPLHYNLYNASKSGGNYDMRNIFNGTVVQRHPSHAVTFVDNHDSQPEEALESFVDEWFKPLAYALTLTREQGYPSVFYGDYYGIPTHGVPAMRSKIDPILEARQKYAYGPQHDYLDHPDVIGWTREGDSSHPKSGLATLITDGPGGSKRMYAGLKNAGETWYDITGNRSDTVKIGSDGWGEFHVNDQSVSIYVQK

SEQ ID NO: 42470 - protein, 478 aa, Bacillus sp.
NGTMMQYFEWYLPNDGNHWNRLNSDASNLKSKGIKAVWIPPAWKGASQNDVGYGAYDLYDLGEFNQRGTVRTKYGTRSQLQAAVTSLKNNGIQVYGDVVMNHKGGADATEMVRAVEVNPNNRNQEVTGEYTIEAWTRFDFPGRGNTHSSFKWRWYHFDGVDFDQSRRLNNRIYKFRGKAWDWEVDTEFGNYDYLMYADYDMDHPEVVNELRNWGVWYTNTLGLDGFRIDAVKHIKYSFTRDWINHVRSATGKNMFAVAEFWKNDLGAIENYLQKTNWNHSVFDVPLHYNLYNASKSGGNYDMRNIFNGTVVQVHPSHAVTFVDNHDSQPEEALESFVEEWFKPLAYALTLTREQGYPSVFYGDYYGIPTHGVPAMRSKIDPILEARQKYAYGPQHDYLDHPDVIGWTREGDSSHPKSGLATLITDGPGGSKRMYAGLKNAGETWYDITGNRSDTVKIGSDGWGEFHVNYGSVSIYVQK

SEQ ID NO: 42471 - protein, 478 aa, Bacillus sp.
NGTMMQYFEWYLPNDGNHWNRLNSDASNLKSKGIKAVWIPPAWKGASQNDVGYGAYDLYDLGEFNQRGTVRTKYGTRSQLQAAVTSLKNNGINVYGDVVMNHKGGADATEMVRAVEVNPNNRNQEVTGEYTIEAWTRFDFPGRGNTHSSFKWRWYHFDGVDFDQSRRLNNRIYKFRGKAWDWEVDTEFGNYDYLMYADYDMDHPEVVNELKNWGVWYTTTLGLDGFRIDAVKHIKYSFTRDWINHVRSATGKNMFAVAEFWKNDLGAIENYLQKTNWNHSVFDVPLHYNLYNASKSGGNYDMRNIFNGTVVQAHPMHAVTFVDNHDSQPEEALESFVEEWFKPLAYALTLTREQGYPSVFYGDYYGIPTHGVPAMRSKIDPILEARQKYAYGPQHDYLDHPDVIGWTREGDSSHPKSGLATLITDGPGGSKRMYAGLKNAGETWYDITGNRSDTVKIGSDGWGEFHVNDGSVSIYVQK

SEQ ID NO: 42472 - protein, 478 aa, Bacillus sp.
NGTMMQYFEWYLPNDGNHWNRLNSDASNLKSKGIKAVWIPPAWKGASQNDVGYGAYDLYDLGEFNQKGTVRTKYGTRSQLQAAVTSLKNNGIQVYGDVVMNHKGGADATEMVRAVEVNPNNRNQEVTGEYTIEAWTRFDFPGRGNTHSSFKWRWYHFDGVDFDQSRELDNRIYKFRGKAWDWEVDTEFGNYDYLMYTDYDMDHPEVVNELRNWGVWYTNTLGLDGFRIDAVKHIKYSFTRDWINHVRSATGKNMFAVAEFWKNDLGAIENYLQKTNWNHSVFDVPLHYNLYNASKSQGNYDMRNIFNGTVVQRHPSHAVTFVDNHDSQPEEALESFVDTWFKPLAYALTLTREQGYPSVFYGDYYGIPTHGVPAMRSKIDPILEARQKYAYGPQHDYLDHPDVIGWTREGDSSHPKSGLATLITDGPGGSKRMYAGLKNAGETWYDITGNRSDTVKIGSDGWGEFHVNGSSVSIYVQK

SEQ ID NO: 42473 - protein, 478 aa, Bacillus sp.
NGTMMQYFEWYLPNDGNHWNRLNSDASNLKSKGITAVWIPPAWKGASQNDVGYGAYDLYDLGEFNQKGTVRTKYGTRSQLQAAVTSLKNNGINVYGDVVMNHKGGADATEMVRAVEVNPNNRNQEVTGEYTIEAYTRFDFPGRGNTHSSFKWRWYHFDGVDWDQSRKLNNRIYKFRGKAWDWEVDTEFGNYDYLMYVDYDYDHPETTNEMRNWGVWYTNTLGLDGFRIDAVKHIKYSFTRDWINHVRIATGKNMFAVAEFWKNDLGAIENYLQKTNWNHSVFDVPLHYNLYNASKSGGNYDMRNIFNGTVVQAHPMHAVTFVDNHDSQPEEALESFVDEWFKPLAYALTLTREQGYPSVFYGDYYGIPTHGVPAMRSKIDPILEARQKYAYGPQHDYLDHPDVIGWTKEGDSSHPKSGLATLITDGPGGSKRMYAGLKNAGETWYDITGNRSDTVKIGSDGWGEFHVNDGSVSIYVQK

SEQ ID NO: 42474 - protein, 478 aa, Bacillus sp.
NGTMMQYFEWYLPNDGNHWNRLNSDASNLKSKGITAVWIPPPWKGASQNDVGYGAYDLYDLGEFNQKGTVRTKYGTRSQLQAAVTSLKNNGIQVYGDVVMNHTGGADPTEMVRAVEVNPNNRNQEVTGEYTIEAWTRFDFPGRGNTHSSFKWRWYHFDGVDWDQSRRLNNRIYKFRGKAWDWEVDTEFGNYDYLMYADYDMDHPEVVNELRNWGVWYTNTLGLDGFRIDAVKHIKYSFTRDWINHVRSATGKNMFAVAEFWKNDLGAIENYLQKTNWNHSVFDVPLHYNLYNASKSGGNYDMRNIFNGTVVQRHPSHAVTFVDNHDSQPEEALESFVEPWFKPLAYALTLTREQGYPSVFYGDYYGIPTHGVPAMRSKIDPILEARQKYAYGPQHDYLDHPDVIGWTREGDSSHPKSGLATLITDGPGGSKRMYAGLKNAGETWYDITGNRSDTVKIGSDGWGEFHVNGSSVSIYVQK

SEQ ID NO: 42475 - protein, 478 aa, Bacillus sp.
NGTMMQYFEWYLPNDGNHWNRLNSDASNLKSKGITAVWIPPAWKGASQNDVGYGAYDLYDLGEFNQKGTVRTKYGTRSQLQAAVTSLKNNGIQVYGDVVMNHEGDTHATEMVRAVEVNPNNRNQEVTGEYTIEAWTRFDFPGRGNTHSSFKWRWYHFDGVDWDQSRRLNNRIYKFRGKAWDWEVDTEFGNYDYLMYADYDMDHPEVVNELRNWGVWYTNTLGLDGFRIDAVKHIKYSFTRDWINHVRSATGKNMFAVAEFWKNDLGAIENYLQKTNWNHSVFDVPLHYNLYNASKSGGNYDMRNIFNGTVVQSHPMHAVTFVDNHDSQPEEALESFVEEWFKPLAYALTLTREQGYPSVFYGDYYGIPTHGVPAMRSKIDPILEARQKYAYGPQHDYLDHPDVIGWTREGDSSHPKSGLATLITDGPGGSKRMYAGLKNAGETWYDITGNRSDTVKIGSDGWGEFHVNDGSVSIYVQK

SEQ ID NO: 42476 - protein, 478 aa, Bacillus sp.
NGTMMQYFEWYLPNDGNHWNRLNSDASNLKSKGIKAVWIPPAWKGASQNDVGYGAYDLYDLGEFNQRGTVRTKYGTRSQLQAAVTSLKNNGIQVYGDVVMNHKGGADATEMVRAVEVNPNNRNQEVTGEYTIEAWTRFDFPGRGNTHSSFKWRWYHFDGVDFDQSRRLNNRIYKFRGKAWDWEVDTEFGNYDYLMYADYDYDHPETTNEMRNWGVWYTNTLGLDGFRIDAVKHIKYSFTRDWINHVRSATGKNMFAVAEFWKNDLGAIENYLQKTNWNHSVFDVPLHYNLYNASKSGGNYDMRNIFNGTVVQAHPNHAVTFVDNHDSQPEEALESFVEEWFKPLAYALTLTREQGYPSVFYGDYYGIPTHGVPAMRSKIDPILEARQKYAYGPQHDYLDHPDVIGWTREGDSSHPKSGLATLITDGPGGSKRMYAGLKNAGETWYDITGNRSDTVKIGSDGWGEFHVNDGSVSIYVQK

SEQ ID NO: 42477 - protein, 478 aa, Bacillus sp.
NGTMMQYFEWYLPNDGNHWNRLNSDASNLKSKGITAVWIPPAWKAASQNDVGYGAYDLYDLGEFNQKGTVRTKYGTRSQLQAAVTSLKNNGIQVYGDVVMNHKGGADATEMVRAVEVNPNNRNQEVTGEYTIEAWTRFDFPGRGNTHSSFKWRWYHFDGVDWDQSRRLDNRIYKFRGKAWDWEVDTEFGNYDYLMYTDYDMDHPEVVNELRNWGVWYTNTLGLDGFRIDAVKHIKYSFTRDWINHVRSATGKNMFAVAEFWKNDLGAIENYLQKTNWNHSVFDVPLHYNLYNASKSSGNYDMRNIFNGTVVQRHPSHAVTFVDNHDSQPEEALESFVDEWFKPLAYALTLTREQGYPSVFYGDYYGIPTHGVPAMRSKIDPILEARQKYAYGPQHDYLDHPDVIGWTREGDSSHPKSGLATLITDGPGGSKRMYAGLKNAGETWYDITGNRSDTVKIGSDGWGEFHVNKQSVSIYVQK

SEQ ID NO: 42478 - protein, 478 aa, Bacillus sp.
NGTMMQYFEWYLPNDGNHWNRLNSDASNLKSKGITAVWIPPAWKAVSQNDVGYGAYDLYDLGEFNQKGTVRTKYGTRSQLQAAVTSLKNNGIQVYGDVVMNHKGGADLTEMVRAVEVNPNNRNQEVTGEYTIEAWTRFDFPGRGNTHSSFKWRWYHFDGVDWDQSREFTNRIYKFRGKAWDWEVDTEFGNYDYLMYVDYDMDHPEVVNELRNWGVWYTNTLGLDGFRIDAVKHIKYSFTRDWINHVRSATGKNMFAVAEFWKNDLGAIENYLQKTNWNHSVFDVPLHYNLYNASKSQGNYDMRNIFNGTVVQRHPSHAVTFVDNHDSQPEEALESFVDTWFKPLAYALTLTREQGYPSVFYGDYYGIPTHGVPAMRSKIDPILEARQKYAYGPQHDYLDHPDVIGWTREGDSSHPKSGLATLITDGPGGSKRMYAGLKNAGETWYDITGNRSDTVKIGSDGWGEFHVNGTSVSIYVQK

SEQ ID NO: 42479 - protein, 478 aa, Bacillus sp.
NGTMMQYFEWYLPNDGNHWNRLNSDASNLKSKGITAVWIPPAWKAVSQNDVGYGAYDLYDLGEFNQKGTVRTKYGTRSQLQAAVTSLKNNGIQVYGDVVMNHKGGADATEMVRAVEVNPNNRNQEVTGEYTIEAWTRFDFPGRGNTHSSFKWRWYHFDGVDFDQSREFTNRIYKFRGKAWDWEVDTEFGNYDYLMYVDYDMDHPEVVNELRNWGVWYTNTLGLDGFRIDAVKHIKYSFTRDWINHVRSATGKNMFAVAEFWKNDLGAIENYLQKTNWNHSVFDVPLHYNLYNASKSGGNYDMRNIFNGTVVQVHPSHAVTFVDNHDSQPEEALESFVEEWFKPLAYALTLTREQGYPSVFYGDYYGIPTHGVPAMRSKIDPILEARQKYAYGPQHDYLDHPDVIGWTREGDSSHPKSGLATLITDGPGGSKRMYAGLKNAGETWYDITGNRSDTVKIGSDGWGEFHVNYGSVSIYVQK

SEQ ID NO: 42480 - protein, 478 aa, Bacillus sp.
NGTMMQYFEWYLPNDGNHWNRLNSDASNLKSKGITAVWIPPAWKAVSQNDVGYGAYDLYDLGEFNQKGTVRTKYGTRSQLQAAVTSLKNNGIQVYGDVVMNHKGGADATEMVRAVEVNPNNRNQEVTGEYTIEAWTRFDFPGRGNTHSSFKWRWYHFDGVDFDQSREFTNRIYKFRGKAWDWEVDTEFGNYDYLMYVDYDMDHPEVVNELRNWGVWYTNTLGLDGFRIDAVKHIKYSFTRDWINHVRSATGKNMFAVAEFWKNDLGAIENYLQKTNWNHSVFDVPLHYNLYNASKSQGNYDMRNIFNGTVVQRHPSHAVTFVDNHDSQPEEALESFVDTWFKPLAYALTLTREQGYPSVFYGDYYGIPTHGVPAMRSKIDPILEARQKYAYGPQHDYLDHPDVIGWTREGDSSHPKSGLATLITDGPGGSKRMYAGLKNAGETWYDITGNRSDTVKIGSDGWGEFHVNGTSVSIYVQK

SEQ ID NO: 42481 - protein, 478 aa, Bacillus sp.
NKTMMQYFEWYLPNDGNHWNRLNSDASNLKSKGIKAVWIPPAWKGASQNDVGYGAYDLYDLGEFNQKGTVRTKYGTRSQLQAAVTSLKNNGIQVYGDVVMNHKGGADATEMVRAVEVNPNNRNQEVTGEYTIEAWTRFDFPGRGNTHSSFKWRWYHFDGVDFDQSRRLNNRIYKFRGKAWDWEVDTEFGNYDYLMYADYDMDHPEVVNELRNWGVWYTNTLGLDGFRIDAVKHIKYSFTRDWINHVRSATGKNMFAVAEFWKNDLGAIENYLQKTNWNHSVFDVPLHYNLYNASKSGGNYDMRNIFNGTVVQMQPSHAVTFVDNHDSQPEEALESFVEEWFKPLAYALTLTREQGYPSVFYGDYYGIPTHGVPAMRSKIDPILEARQKYAYGPQHDYLDHPDVIGWTREGDSSHPKSGLATLITDGPGGSKRMYAGLKNAGETWYDITGNRSDTVKIGSDGWGEFHVNDGSVSIYVQK

SEQ ID NO: 42482 - protein, 478 aa, Bacillus sp.
NGTMMQYFEWYLPNDGNHWNRLNSDASNLKSKGIKAVWIPPAWKGASQNDVGYGAYDLYDLGEFNQRGTVRTKYGTRSQLQAAVTSLKNNGINVYGDVVMNHKGGADATEMVRAVEVNPNNRNQEVTGEYTIEAWTRFDFPGRGNTHSSFKWRWYHFDGVDFDQSRRLNNRIYKFRGKAWDWEVDTEFGNYDYLMYADYDMDHPEVVNELRNWGVWYTNTLGLDGFRIDAVKHIKYSFTRDWINHVRSATGKNMFAVAEFWKNDLGAIENYLQKTNWNHSVFDVPLHYNLYNASKSGGNYDMRNIFNGTVVQAHPMHAVTFVDNHDSQPEEALESFVEEWFKPLAYALTLTREQGYPSVFYGDYYGIPTHGVPAMRSKIDPILEARQKYAYGPQHDYLDHPDVIGWTREGDSSHPKSGLATLITDGPGGSKRMYAGLKNAGETWYDITGNRSDTVKIGSDGWGEFHVNDGSVSIYVQK

SEQ ID NO: 42483 - protein, 478 aa, Bacillus sp.
NGTMMQYFEWYLPNDGNHWNRLNSDASNLKSKGITAVWIPPAWKGASQNDVGYGAYDLYDLGEFNQKGTVRTKYGTRSQLQAAVTSLKNNGIQVYGDVVMNHKGGADATEMVRAVEVNPNNRNQEVTGEYTIEAWTRFDFPGRGNTHSSFKWRWYHFDGVDWDQSRELDNRIYKFRGKAWDWEVDTEFGNYDYLMYTDYDMDHPEVVNELRNWGVWYTNTLGLDGFRIDAVKHIKYSFTRDWINHVRSATGKNMFAVAEFWKNDLGAIENYLQKTNWNHSVFDVPLHYNLYNASKSQGNYDMRNIFNGTVVQANPNHAVTFVDNHDSQPEEALESFVDTWFKPLAYALTLTREQGYPSVFYGDYYGIPTHGVPAMRSKIDPILEARQKYAYGPQHDYLDHPDVIGWTREGDSSHPKSGLATLITDGPGGSKRMYAGLKNAGETWYDITGNRSDTVKIGSDGWGEFHVNGSSVSIYVQK

SEQ ID NO: 42484 - protein, 478 aa, Bacillus sp.
NGTMMQYFEWYLPNDGNHWNRLNSDASNLKSKGITAVWIPPAWKAASQNDVGYGAYDLYDLGEFNQKGTVRTKYGTRSQLQAAVTSLKNNGIQVYGDVVMNHKGGADATEMVRAVEVNPNNRNQEVTGEYTIEAYTRFDFPGRGNTHSSFKWRWYHFDGVDFDQSRDFTNRIYKFRGKAWDWEVDTEFGNYDYLMYADYDMDHPEVVNELRNWGVWYTNTLGLDGFRIDAVKHIKYSFTRDWINHVRSATGKNMFAVAEFWKNDLGAIENYLQKTNWNHSVFDVPLHYNLYNASKSQGNYDMRNIFNGTVVQRHPSHAVTFVDNHDSQPEEALESFVDPWFKPLAYALTLTREQGYPSVFYGDYYGIPTHGVPAMRSKIDPILEARQKYAYGPQHDYLDHPDVIGWTREGDSSHPKSGLATLITDGPGGSKRMYAGLKNAGETWYDITGNRSDTVKIGSDGWGEFHVNGGSVSIYVQK

SEQ ID NO: 42485 - protein, 478 aa, Bacillus sp.
NGTMMQYFEWYLPNDGNHWNRLNSDASNLKSKGIKAVWIPPAWKGASQNDVGYGAYDLYDLGEFNQRGTVRTKYGTRSQLQAAVTSLKNNGIQVYGDVVMNHKGGADATEMVPAVEVNPNNRNQEVTGEYTIEAWTRFDFPGRGNTHSSFKWRWYHFDGVDFDQSRRLNNRIYKFRSKAWDWEVDTEFGNYDYLMYADYDYDHPESTNEMRNWGVWYTNTLGLDGFRIDAVKHIKYSFTRDWINHVRSATGKNMFAVAEFWKNDLGAIENYLQKTNWNHSVFDVPLHYNLYNASKSGGNYDMRNIFNGTVVQRHPSHAVTFVDNHDSQPEEALESFVEEWFKPLAYALTLTREQGYPSVFYGDYYGIPTHGVPAMRSKIDPILEARQKYAYGPQHDYLDHPDVIGWTREGDSSHPKSGLATLITDGPGGSKRMYAGLKNAGETWYDITGNRSDTVKIGSDGWGEFHVNDGSVSIYVQK

SEQ ID NO: 42486 - protein, 478 aa, Bacillus sp.
NGTMMQYFEWYLPNDGNHWNRLNSDASNLKSKGIKAVWIPPAWKAVSQNDVGYGAYDLYDLGEFNQRGTVRTKYGTRSQLQAAVTSLKNNGIQVYGDVVMNHKGGADATEMVRAVEVNPNNRNQEVTGEYTIEAWTRFDFPGRGNTHSSFKWRWYHFDGVDFDQSREFTNRIYKFRGKAWDWEVDTEFGNYDYLMYVDYDMDHPEVVNELRNWGVWYTNTLGLDGFRIDAVKHIKYSFTRDWINHVRSATGKNMFAVAEFWKNDLGAIENYLQKTNWNHSVFDVPLHYNLYNASKSGGNYDMRNIFNGTVVQRHPSHAVTFVDNHDSQPEEALESFVEEWFKPLAYALTLTREQGYPSVFYGDYYGIPTHGVPAMRSKIDPILEARQKYAYGPQHDYLDHPDVIGWTREGDSSHPKSGLATLITDGPGGSKRMYAGLKNAGETWYDITGNRSDTVKIGSDGWGEFHVNDGSVSIYVQK

SEQ ID NO: 42487 - protein, 478 aa, Bacillus sp.
NGTMMQYFEWYLPNDGNHWNRLNSDASNLKSKGITAVWIPPAWKATSQNDVGYGAYDLYDLGEFNQKGTVRTKYGTRSQLQAAVTSLKNNGIQVYGDVVMNHKGGADATEMVRAVEVNPNNRNQEVTGEYTIEAWTRFDFPGRGNTHSSFKWRWYHFDGVDWDQSRELNNRIYKFRGKAWDWEVDTEFGNYDYLMYTDYDMDHPEVVNELRNWGVWYTNTLGLDGFRIDAVKHIKYSFTRDWINHVRSATGKNMFAVAEFWKNDLGAIENYLQKTNWNHSVFDVPLHYNLYNASKSGGNYDMRNIFNGTVVQVHPSHAVTFVDNHDSQPEEALESFVEEWFKPLAYALTLTREQGYPSVFYGDYYGIPTHGVPAMRSKIDPILEARQKYAYGPQHDYLDHPDVIGWTREGDSSHPKSGLATLITDGPGGSKRMYAGLKNAGETWYDITGTRSDTVKIGSDGWGEFHVNYGSVSIYVQK

SEQ ID NO: 42488 - protein, 478 aa, Bacillus sp.
NGTMMQYFEWYLPNDGNHWNRLNSDASNLKSKGIKAVWIPPAWKAASQNDVGYGAYDLYDLGEFNQRGTVRTKYGTRSQLQAAVTSLKNNGIQVYGDVVMNHKGGADATEMVRAVEVNPNNRNQEVTGEYTIEAWTRFDFPGRGNTHSSFKWRWYHFDGVDFDQSRRTNNRIYKFRGKAWDWEVDTEFGNYDYLMYVDYDMDHPEVVNELRNWGVWYTNTLGLDGFRIDAVKHIKYSFTRDWINHVRSATGKNMFAVAEFWKNDLGAIENYLQKTNWNHSVFDVPLHYNLYNASKSGGNYDMRNIFNGTVVQRHPSHAVTFVDNHDSQPEEALESFVEEWFKPLAYALTLTREQGYPSVFYGDYYGIPTHGVPAMRSKIDPILEARQKYAYGPQHDYLDHPDVIGWTREGDSSHPKSGLATLITDGPGGSKRMYAGLKNAGETWYDITGNRSDTVKIGSDGWGEFHVNDGSVSIYVQK

SEQ ID NO: 42489 - protein, 478 aa, Bacillus sp.
NKTMMQYFEWYLPNDGNHWNRLNSDASNLKSKGIKAVWIPPAWKGASQNDVGYGAYDLYDLGEFNQKGTVRTKYGTRSQLQAAVTSLKNNGIQVYGDVVMNHKGGADATEMVRAVEVNPNNRNQEVTGEYTIEAWTRFDFPGRGNTHSSFKWRWYHFDGVDFDQSRRLNNRIYKFRGKAWDWEVDTEFGNYDYLMYADYDMDHPEVVNELRNWGVWYTNTLGLDGFRIDAVKHIKYSFTRDWINHVRSATGKNMFAVAEFWKNDLGAIENYLQKTNWNHSVFDVPLHYNLYNASKSGGNYDMRNIFNGTVVQAHPNHAVTFVDNHDSQPEEALESFVEEWFKPLAYALTLTREQGYSSVFYGDYYGIPTHGVPAMRSKIDPILEARQKYAYGPQHDYLDHPDVIGWTREGDSSHPKSGLATLITDGPGGSKRMYAGLKNAGETWYDITGNRSDTVKIGSDGWGEFHVNDGSVSIYVQK

SEQ ID NO: 42490 - protein, 478 aa, Bacillus sp.
NGTMMQYFEWYLPNDGNHWNRLNSDASNLKSKGIKAVWIPPAWKGASQNDVGYGAYDLYDLGEFNQRGTVRTKYGTRSQLQAAVTSLKNNGIQVYGDVVMNHKGGADATEMVRAVEVNPNNRNQEVTGEYTIEAWTRFDFPGRGNTHSSFKWRWYHFDGVDFDQSRKLNNRIYKFRGKAWDWEVDTEFGNYDYLMYVDYDYDHPESTNEMRNWGVWYTNTLGLDGFRIDAVKHIKYSFTRDWINHVRIATGKNMFAVAEFWKNDLGAIENYLQKTNWNHSVFDVPLHYNLYNASKSGGNYDMRNIFNGTVVQAHPSQAVTFVDNHDSQPEEALESFVDEWFKPLAYALTLTREQGYPSVFYGDYYGIPTHGVPAMRSKIDPILEARQKYAYGPQHDYLDHPDVIGWTREGDSSHPKSGLATLITDGPGGSKRMYAGLKNAGETWYDITGNRSDTVKIGSDGWGEFHVNDGSVSIYVQK

SEQ ID NO: 42491 - protein, 478 aa, Bacillus sp.
NGTMMQYFEWYLPNDGNHWNRLNSDASNLKSKGIKAVWIPPAWKAVSQNDVGYGAYDLYDLGEFNQRGTVRTKYGTRSQLQAAVTSLKNNGIQVYGDVVMNHKGGADATEMVRAVEVNPNNRNQEVTGEYTIEAWTRFDFPGRGNTHSSFKWRWYHFDGVDFDQSREFTNRIYKFRGKAWDWEVDTEFGNYDYLMYADYDYDHPESTNEMRNWGVWYTNTLGLDGFRIDAVKHIKYSFTRDWINHVRSATGKNMFAVAEFWKNDLGAIENYLQKTNWNHSVFDVPLHYNLYNASKSGGNYDMRNIFNGTVVQRHPSHAVTFVDNHDSQPEEALESFVEEWFKPLAYALTLTREQGYPSVFYGDYYGIPTHGVPAMRSKIDPILEARQKYAYGPQHDYLDHPDVIGWTREGDSSHPKSGLATLITDGPGGSKRMYAGLKNAGETWYDITGNRSDTVKIGSDGWGEFHVNDGSVSIYVQK

SEQ ID NO: 42492 - protein, 478 aa, Bacillus sp.
NGTMMQYFEWYLPNDGNHWNRLNSDASNLKSKGIKAVWIPPAWKGASQNDVGYGAYDLYDLGEFNQRGTVRTKYGTRSQLQAAVTSLKNNGIQVYGDVVMNHKGGADATEMVRAVEVNPNNRNQEVTGEYTIEAWTRFDFPGRGNTHSSFKWRWYHFDGVDWDQSRELDNRIYKFRGKAWDWEVDTEFGNYDYLMYTDYDMDHPEVVNELRNWGVWYTNTLGLDGFRIDAVKHIKYSFTRDWINHVRSATGKNMFAVAEFWKNDLGAIENYLQKTNWNHSVFDVPLHYNLYNASKSQGNYDMRNIFNGTVVQRHPSHAVTFVDNHDSQPEEALESFVDTWFKPLAYALTLTREQGYPSVFYGDYYGIPTHGVPAMRSKIDPILEARQKYAYGPQHDYLDHPDVIGWTREGDSSHPKSGLATLITDGPGGSKRMYAGLKNAGETWYDITGNRSDTVKIGSDGWGEFHVNGSSVSIYVQK

SEQ ID NO: 42493 - protein, 478 aa, Bacillus sp.
NGTMMQYFEWYLPNDGNHWNRLNSDASNLKSKGITAVWIPPAWKAASQNDVGYGAYDLYDLGEFNQKGTVRTKYGTRSQLQAAVTSLKNNGIQVYGDVVMNHKGGADATEMVRAVEVNPNNRNQEVTGEYTIEAWTRFDFPGRGNTHSSFKWRWYHFDGVDWDQSRNLNNRIYKFRGKAWDWEVDTEFGNYDYLMYTDYDMDHPEVVNELRNWGVWYTNTLGLDGFRIDAVKHIKYSFTRDWINHVRSATGKNMFAVAEFWKNDLGAIENYLQKTNWNHSVFDVPLHYNLYNASKSSGNYDMRNIFNGTVVQRHPSHAVTFVDNHDSQPEEALESFVDEWFKPLAYALTLTREQGYPSVFYGDYYGIPTHGVPAMRSKIDPILEARQKYAYGPQHDYLDHPDVIGWTREGDSSHPKSGLATLITDGPGGSKRMYAGLKNAGETWYDITGNRSDTVKIGSDGWGEFHVNKQSVSIYVQK

SEQ ID NO: 42494 - protein, 478 aa, Bacillus sp.
NGTMMQYFEWYLPNDGNHWNRLNSDASNLKSKGIKAVWIPPAWKGASQNDVGYGAYDLYDLGEFNQRGTVRTKYGTRSQLQAAVTSLKNNGIQVYGDVVMNHKGGADATEMVRAVEVNPNNRNQEVTGEYTIEAWTRFDFPGRGNTHSSFKWRWYHFDGVDFDQSRNFQNRIYKFRGKAWDWEVDTEFGNYDYLMYADYDMDHPEVVNELRNWGVWYTNTLGLDGFRIDAVKHIKYSFTRDWINHVRSATGKNMFAVAEFWKNDLGAIENYLQKTNWNHSVFDVPLHYNLYNASKSQGNYDMRNIFNGTVVQRHPSHAVTFVDNHDSQPEEALESFVDTWFKPLAYALTLTREQGYPSVFYGDYYGIPTHGVPAMRSKIDPILEARQKYAYGPQHDYLDHPDVIGWTREGDSSHPKSGLATLITDGPGGSKRMYAGLKNAGETWYDITGNRSDTVKIKSDGWGEFHVNGGSVSIYVQK

SEQ ID NO: 42495 - protein, 478 aa, Bacillus sp.
NGTMMQYFEWYLPNDGNHWNRLNSDASNLKSKGIKAVWIPPAWKGTSQNDVGYGAYDLYDLGEFNQKGTVRTKYGTRSQLQAAVTSLKNNGIQVYGDVVMNHKGGADATEMVRAVEVNPNNRNQEVTGEYTIEAWTRFDFPGRGNTHSSFKWRWYHFDGVDFDQSRNLNNRIYKFRGKAWDWEVDTEFGNYDYLMYVDYDMDHPEVVNELRNWGVWYTNTLGLDGFRIDAVKHIKYSFTRDWINHVRSATGKNMFAVAEFWKNDLGAIENYLQKTNWNHSVFDVPLHYNLYNASKSQGNYDMRNIFNGTVVQRHPSHAVTFVDNHDSQPEEALESFVDTWFKPLAYALTLTREQGYPSVFYGDYYGIPTHGVPAMRSKIDPILEARQKYAYGPQHDYLDHPDVIGWTREGDSSHPKSGLATLITDGPGGSKRMYAGLKNAGETWYDITGNRSDTVKIGSDGWGEFHVNGSSVSIYVQK

SEQ ID NO: 42496 - protein, 478 aa, Bacillus sp.
NGTMMQYFEWYLPNDGNHWNRLNSDASNLKSKGIKAVWIPPAWKGASQNDVGYGAYDLYDLGEFNQRGTVRTKYGTRSQLQAAVTSLKNNGIQVYGDVVMNHKGGADATEMVRAVEVNPNNRNQEVTGEYTIEAWTRFDFPGRGNTHSSFKWRWYHFDGVDFDQSRNFQNRIYKFRGKAWDWEVDTEFGNYDYLMYADYDMDHPEVVNELRNWGVWYTNTLGLDGFRIDAVKHIKYSFTRDWINHVRSATGKNMFAVAEFWKNDLGAIENYLQKTNWNHSVFDVPLHYNLYNASKSQGNYDMRNIFNGTVVQRHPSHAVTFVDNHDSQPEEALESFVDTWFKPLAYALTLTREQGYPSVFYGDYYGIPTHGVPAMRSKIDPILEARQKYAYGPQHDYLDHPDVIGWTREGDSSHPKSGLATLITDGPGGSKRMYAGLKNAGETWYDITGNRSDTVKIGSDGWGEFHVNGSSVSIYVQK

SEQ ID NO: 42497 - protein, 478 aa, Bacillus sp.
NGTMMQYFEWYLPNDGNHWNRLNSDASNLKSKGITAVWIPPAWKGASQNDVGYGAYDLYDLGEFNQKGTVRTKYGTRSQLQAAVTSLKNNGINVYGDVVMNHKGGADATEMVRAVEVNPNNRNQEVTGEYTIEAYTRFDFPGRGNTHSSFKWRWYHFDGVDFDQSRKLNNRIYKFRGKAWDWEVDTEFGNYDYLMYVDYDYDHPETTNEMRNWGVWYTNTLGLDGFRIDAVKHIKYSFTRDWINHVRIATGKNMFAVAEFWKNDLGAIENYLQKTNWNHSVFDVPLHYNLYNASKSGGNYDMRNIFNGTVVQAHPMHAVTFVDNHDSQPEEALESFVDEWFKPLAYALTLTREQGYPSVFYGDYYGIPTHGVPAMRSKIDPILEARQKYAYGPQHDYLDHPDVIGWTREGDSSHPKSGLATLITDGPGGSKRMYAGLKNAGETWYDITGNRSDTVKIGSDGWGEFHVNDGSVSIYVQK

SEQ ID NO: 42498 - protein, 478 aa, Bacillus sp.
NGTMMQYFEWYLPNDGNHWNRLNSDASNLKSKGIKAVWIPPAWKGASQNDVGYGAYDLYDLGEFNQRGTVRTKYGTRSQLQAAVTSLKNNGIQVYGDVVMNHKGGADATEMVRAVEVNPNNRNQEVTGEYTIEAWTRFDFPGRGNTHSSFKWRWYHFDGVDFDQSRRLNNRIYKFRGKAWDWEVDTEFGNYDYLMYADYDMDHPEVVNELRNWGVWYTNTLGLDGFRIDAVKHIKYSFTRDWINHVRSATGKNMFAVAEFWKNDLGAIENYLQKTNWNHSVFDVPLHYNLYNASKSGGNYDMRNIFNGTVVQANPSHAVTFVDNHDSQPEEALESFVEEWFKPLAYALTLTREQGYPSVFYGDYYGIPTHGVPAMRSKIDPILEARQKYAYGPQHDYLDHPDVIGWTREGDSSHPKSGLATLITDGPGGSKRMYAGLKNAGETWYDITGNRSDTVKIGSDGWGEFHVNDGSVSIYVQK

SEQ ID NO: 42499 - protein, 478 aa, Bacillus sp.
NGTMMQYFEWYLPNDGNHWNRLNSDASNLKSKGIKAVWIPPAWKGTSQNDVGYGAYDLYDLGEFNQRGTVRTKYGTRSQLQAAVTSLKNNGIQVYGDVVMNHKGGADATEMVRAVEVNPNNRNQEVTGEYTIEAWTRFDFPGRGNTHSSFKWRWYHFDGVDFDQSRNLNNRIYKFRGKAWDWEVDTEFGNYDYLMYVDYDMDHPEVVNELRNWGVWYTNTLGLDGFRIDAVKHIKYSFTRDWINHVRSATGKNMFAVAEFWKNDLGAIENYLQKTNWNHSVFDVPLHYNLYNASKSQGNYDMRNIFNGTVVQRHPSHAVTFVDNHDSQPEEALESFVDTWFKPLAYALTLTREQGYPSVFYGDYYGIPTHGVPAMRSKIDPILEARQKYAYGPQHDYLDHPDVIGWTREGDSSHPKSGLATLITDGPGGSKRMYAGLKNAGETWYDITGNRSDTVKIGSDGWGEFHVNSGSVSIYVQK

SEQ ID NO: 42500 - protein, 478 aa, Bacillus sp.
NGTMMQYFEWYLPNDGNHWNRLNSDASNLKSKGITAVWIPPAWKAVSQNDVGYGAYDLYDLGEFNQKGTVRTKYGTRSQLQAAVTSLKNNGIQVYGDVVMNHKGGADLTEMVRAVEVNPNNRNQEVTGEYTIEAWTRFDFPGRGNTHSSFKWRWYHFDGVDWDQSREFTNRIYKFRGKAWDWEVDTEFGNYDYLMYVDYDMDHPEVVNELRNWGVWYTNTLGLDGFRIDAVKHIKYSFTRDWINHVRSATGKNMFAVAEFWKNDLGAIENYLQKTNWNHSVFDVPLHYNLYNASQSGGNYDMRNIFNGTVVQRHPSHAVTFVDNHDSQPEEALESFVEPWFKPLAYALTLTREQGYPSVFYGDYYGIPTHGVPAMRSKIDPILEARQKYAYGPQHDYLDHPDVIGWTREGDSSHPKSGLATLITDGPGGSKRMYAGLKNAGETWYDITGNRSDTVKIGSDGWGEFHVNKSSVSIYVQK

SEQ ID NO: 42501 - protein, 478 aa, Bacillus sp.
NGTMMQYFEWYLPNDGNHWNRLNSDASNLKSKGITAVWIPPAWKAVSQNDVGYGAYDLYDLGEFNQKGTVRTKYGTRSQLQAAVTSLKNNGIQVYGDVVMNHKGGADATEMVRAVEVNPNNRNQEVTGEYTIEAWTRFDFPGRGNTHSSFKWRWYHFDGVDFDQSREFTNRIYKFRGKAWDWEVDTEFGNYDYLMYVDYDYDHPETTNEMRNWGVWYTNTLGLDGFRIDAVKHIKYSFTRDWINHVRSATGKNMFAVAEFWKNDLGAIENYLQKTNWNHSVFDVPLHYNLYNASKSGGNYDMRNIFNGTVVQAHPNHAVTFVDNHDSQPEEALESFVEEWFKPLAYALTLTREQGYPSVFYGDYYGIPTHGVPAMRSKIDPILEARQKYAYGPQHDYLDHPDVIGWTREGDSSHPKSGLATLITDGPGGSKRMYAGLKNAGETWYDITGNRSDTVKIGSDGWGEFHVNDGSVSIYVQK

SEQ ID NO: 42502 - protein, 478 aa, Bacillus sp.
NGTMMQYFEWYLPNDGNHWNRLNSDASNLKSKGIKAVWIPPAWKGASQNDVGYGAYDLYDLGEFNQKGTVRTKYGTRSQLQAAVTSLKNNGINVYGDVVMNHKGGADATEMVRAVEVNPNNRNQEVTGEYTIEAWTRFDFPGRGNTHSSFKWRWYHFDGVDFDQSRKLNNRIYKFRGKAWDWEVDTEFGNYDYLMYVDYDYDHPETTNEMRNWGVWYTNTLGLDGFRIDAVKHIKYSFTRDWINHVRIATGKNMFAVAEFWKNDLGAIENYLQKTNWNHSVFDVPLHYNLYNASKSGGNYDMRNIFNGTVVQAHPMHAVTFVDNHDSQPEEALESFVDEWFKPLAYALTLTREQGYPSVFYGDYYGIPTHGVPAMRSKIDPILEARQKYAYGPQHDYLDHPDVIGWTREGDSSHPKSGLATLITDGPGGSKRMYAGLKNAGETWYDITGNRSDTVKIGSDGWGEFHVNDGSVSIYVQK

SEQ ID NO: 42503 - protein, 478 aa, Bacillus sp.
NGTMMQYFEWYLPNDGNHWNRLNSDASNLKSKGITAVWIPPAWKATSQNDVGYGAYDLYDLGEFNQKGTVRTKYGTRSQLQAAVTSLKNNGIQVYGDVVMNHKGGADATEMVPAVEVNPNNRNQEVTGEYTIEAWTRFDFPGRGNTHSSFKWRWYHFDGVDWDQSRELSNRIYKFRSKAWDWEVDTEFGNYDYLMYADYDMDHPETTNEMRNWGVWYTNTLGLDGFRIDAVKHIKYSFTRDWINHVRSATGKNMFAVAEFWKNDLGAIENYLQKTNWNHSVFDVPLHYNLYNASKSQGNYDMRNIFNGTVVQRHPSHAVTFVDNHDSQPEEALESFVDTWFKPLAYALTLTREQGYPSVFYGDYYGIPTHGVPAMRSKIDPILEARQKYAYGPQHDYLDHPDVIGWTREGDSSHPKSGLATLITDGPGGSKRMYAGLKNAGETWYDITGNRSDTVKIGSDGWGEFHVNGSSVSIYVQK

SEQ ID NO: 42504 - protein, 478 aa, Bacillus sp.
NGTMMQYFEWYLPNDGNHWNRLNSDASNLKSKGITAVWIPPAWKAVSQNDVGYGAYDLYDLGEFNQKGTVRTKYGTRSQLQAAVTSLKNNGIQVYGDVVMNHKGGADATEMVRAVEVNPNNRNQEVTGEYTIEAWTRFDFPGRGNTHSSFKWRWYHFDGVDFDQSREFTNRIYKFRGKAWDWEVDTEFGNYDYLMYADYDYDHPESTNEMRNWGVWYTNTLGLDGFRIDAVKHIKYSFTRDWINHVRSATGKNMFAVAEFWKNDLGAIENYLQKTNWNHSVFDVPLHYNLYNASKSGGNYDMRNIFNGTVVQRHPSHAVTFVDNHDSQPEEALESFVDEWFKPLAYALTLTREQGYPSVFYGDYYGIPTHGVPAMRSKIDPILEARQKYAYGPQHDYLDHPDVIGWTREGDSSHPKSGLATLITDGPGGSKRMYAGLKNAGETWYDITGNRSDTVKIGSDGWGEFHVNKSSVSIYVQK

SEQ ID NO: 42505 - protein, 478 aa, Geobacillus stearothermophilus
NGTMMQYFEWHLPXDGXXWXKLXXDAXNLXSXGITALWIPPAWKGTSXXDVGYGXYDLYDLGEFNQKGTVRTKYGTKAQXXXAIXAXXXXGIQVYADVVXXHKGGADGTEXVXAVEVNXSXRNQEISGXYXIXAWTKFDFPGRGNTHSXFKWRWYHFDGXDWDXSRXXXXKIYKFRGXGKAWDWEVDXENGNYDYLMYADIDMDHPEVIXELKNWGXWYXNTXNIDGFRIDAVKHIKFSFXXDWLSHVRXXTGKPLFXVAEFWXXDIXXIXNYIXKTXXXXSLFDXPLHXXXYXASXSGGXFDMRXILXXSLMXXXPXXAVTFVDNHDSXPGXALXSFVXXWFKPLAYAXILTRXXGYPXVFYGDYYGIPXHXIPSLKSKIDPLLXARXXYAYGTQHDYXDHXDIIGWTREGXSXXPXSGLAXIISDGPGGXKWMYVGKXXAGXVFXDITGNRSXTVTINADGWGXFXVNGGAVSVWV

SEQ ID NO: 42506 - protein, 482 aa, Synthetic construct
NGTMMQYFEWYLPNDGNHWTRLQNDAANLSSKGVTAVWIPPAYKGTSQNDVGYGAYDLYDLGEFNQKGTVRTKYGTKSFGNDYIAELHKQNIHVYGDVVMNHKGGADFTETVTAVEVDPNNRNRETSGDYQISAWTGFTFPGRGNTYSPFKWNWYHFDGTDWDESRKINRIYKFRGTGKAWDWEVSSENGNYDYLMYADIDYEHPDVINEMKKWGTWYAKELNLDGFTLDAVKHIKHDYLRDWVTHVRNQTGKELFTVAEYWQNDIGQLNNYLAKTNYNQSVFDAPLHYHFHYASNSNGNYDMRNILKGTVMESNPRLAVTLVENHDSQPGQSLESVVSTWFKPLAYAFILTRAEGYPSVFYGDYYGTKGNSNYEIPSLKTQLDPILTARKNYAYGLQRDYIDHWDIIGWTREGEAARDKSGLATLITDGPGGYKWMEVGKQNAGEVWYDITGNRKETVTINNDGWGQFYVNGGSVSIYVQK

SEQ ID NO: 42507 - protein, 482 aa, unidentified
NGTMMQYFEWYLPNDGNHWTRLQNDAANLSSKGVTAVWIPPAYKGTSQNDVGYGAYDLYDLGEFNQKGTVRTKYGTKAQLKSAIAELHKQNIHVYGDVVMNHKGGADFTETVTAVEVDPNNRNRETSGDYQISAWTGFTFPGRGNTYSPFKWNWYHFDGTDWDESRKINRIYKFRGTGKAWDWEVSSENGNYDYLMYADIDYEHPDVINEMKKWGTWYAKELNLDGFTLDAVKHIKHDYLRDWVTHVRNQTGKELFTVAEYWQNDIGQLNNYLAKTNYNQSVFDAPLHYHFHYASNSNGNYDMRNILKGTVMESNPRLAVTLVENHDSQPGQSLESVVSTWFKPLAYAFILTRAEGYPSVFYGDYYGTKGNSNYEIPSLKTQLDPILTARKNYAYGLQRDYIDHWDIIGWTREGEAARDKSGLATLITDGPGGYKWMEVGKQNAGEVWYDITGNRKETVTINNDGWGQFYVNGGSVSIYVQK

SEQ ID NO: 42508 - protein, 483 aa, Synthetic construct
NGTMMQYFEWYVPNDGQQWNRLRTDAPYLSSVGITAVWTPPAYKGTSQADVGYGPYDLYDLGEFNQKGTVRTKYGTKGELKSAVNTLHSNGIQVYGDVVMNHRMGADATETISAVEVNPSNRNQVTSGAYNISAWTDFEFPGRGNTYSSFKWHSYYFDGVDWDQSRQLSGKIYQIQGTGKAWDWEVDSENGNYDYLMGADIDYDHPDVVNEMKKWGVWYANEVGLDGYRLDAVKHIKFSFLKDWVDNARAATGKEMFTVGEYWQNDLGALNNYLAKVNYNQSLFDAPLHYNFYAASTGGGYYDMRNILNNTLVASNPTKAVTLVENHDTQPGQSLESTVQPWFKPLAYAFILTRSGGYPSVFYGDMYGTKGTTTREIPALKSKIEPLLKARKDYAYGTQRDYIDNPDVIGWTREGDSTKAKSGLATVITDGPGGSKRMYVGTSNAGEIWYDLTGNRTDKITIGSDGYATFPVNGGSVSVWVQQ

SEQ ID NO: 42509 - protein, 485 aa, Geobacillus stearothermophilus
NGTMMQYFEWYLPXDGXXWXKLXXDAXNLXSXGITALWIPPAWKGXSXXDVGYGXYDLYDLGEFNQKGTVRTKYGTKAQXXXAIXAXXXXGIQVYADVVXXHKGGADATEXVXAVEVNPXXRNQEISGXYXIXAWTKFDFPGRGNTHSSFKWRWYHFDGVDWDXSRKLXXRIYKFRGXGKAWDWEVDTENGNYDYLMYADIDMDHPEVVXELKNWGXWYXNTXXIDGFRIDAVKHIKFSFXXDWIXHVRSXTGKXLFXVAEFWXXDIXXIXNYIXKTNXXXSLFDXPLHXXXYXASKSGGXFDMRXIXXXTLMXXXPSXAVTFVDNHDSXPXXALXSFVDXWFKPLAYAXXLTRXXGYPXVFYGDYYGIPXHXIPALKSKIDPILXARXXYAYGXQXDYLDHXXIIGWTREGXTXXPXSGLAXIISDGXGGSKWMFVGKNXAGXVFXDITGNRSXTVTINADGWGXFXVNGGSVSIWVXKKTTVS

SEQ ID NO: 42510 - protein, 485 aa, Geobacillus stearothermophilus
NGTMMQYFEWHLPXDGXXWXKLXXDAXNLXSXGITALWIPPAWKGTSXXDVGYGXYDLYDLGEFNQKGTVRTKYGTKAQXXXAIXAXXXXGIQVYADVVXXHKGGADGTEXVXAVEVNXSXRNQEISGXYXIXAWTKFDFPGRGNTHSXFKWRWYHFDGXDWDXSRQXXXKIYKFRGXGKAWDWEVDXENGNYDYLMYADIDMDHPEVIXELKNWGXWYXNTXNIDGFRIDAVKHIKFSFXXDWLSHVRXXTGKPLFXVAEFWXXDIXXIXNYIXKTXXXXSLFDXPLHXXXYXASXSGGXFDMRXILXXSLMXXXPXXAVTFVDNHDSXPGXALXSFVXXWFKPLAYAXILTRXXGYPXVFYGDYYGIPXHXIPSLKSKIDPLLXARXXYAYGTQHDYXDHXDIIGWTREGXSXXPXSGLAXIISDGPGGXKWMYVGKXXAGXVFXDITGNRSXTVTINADGWGXFXVNGGAVSVWVXXKTTVS

SEQ ID NO: 42511 - protein, 485 aa, Bacillus sp. 707
NGTMMQYFEWYLPXDGXXWXKLXXDAXNLXSXGITALWIPPAWKGXSXXDVGYGXYDLYDLGEFNQKGTVRTKYGTKAQXXXAIXAXXXXGIQVYADVVXXHKGGADATEXVXAVEVNPXXRNQEISGXYXIXAWTKFDFPGRGNTHSSFKWRWYHFDGVDWDXSRKLXNRIYKFRGXGKAWDWEVDTENGNYDYLMYADIDMDHPEVVXELKNWGXWYXNTXXIDGFRIDAVKHIKFSFXXDWIXHVRSXTGKXLFXVAEFWXXDIXXIXNYIXKTNXXXSLFDXPLHXXXYXASKSGGXFDMRXIXXXTLMXXXPSXAVTFVDNHDSXPXXALXSFVDXWFKPLAYAXXLTRXXGYPXVFYGDYYGIPXHXIPALKSKIDPILXARXXYAYGXQXDYLDHXXIIGWTREGXTXXPXSGLAXIISDGXGGSKWMFVGKNXAGXVFXDITGNRSXTVTINADGWGXFXVNGGSVSIWVXKKTTVS

SEQ ID NO: 42512 - protein, 483 aa, Synthetic construct
NGTLMQYFEWYMPNDGQHWKRLQNDSAYLAEHGITAVWIPPAYKGTSQADVGYGAYDLYDLGEFHQKGTVRTKYGTKGELQSAIKSLHSRDINVYGDVVINHKGGADATEMVRAVEVNPNNRNQEVTGEYTIEAWTRFDFPGRGNTHSSFKWRWYHFDGVDWDQSRRLNNRIYKFRGHGKAWDWEVDTENGNYDYLMYADIDYDHPDVAAEIKRWGTWYANELQLDGFRLDAVKHIKFSFLRDWVNHVREKTGKEMFTVAEYWSYDLGALENYLNKTNFNHSVFDVPLHYQFHAASTQGGGYDMRKLLNGTVVSKHPLKSVTFVDNHDTQPGQSLESTVQTWFKPLAYAFILTRESGYPQVFYGDMYGTKGDSQREIPALKHKIEPILKARKQYAYGAQHDYFDHHDIVGWTREGDSSVANSGLAALITDGPGGAKRMYVGRQNAGETWHDITGNRSEPVVINSAGWGEFHVNGGSVSIYVQR

SEQ ID NO: 42513 - protein, 478 aa, Bacillus sp.
NETMMQYFEWDLPNDGTLWNRLHNNAQNLKNAGITALWLPPAYKGTSQSDVGYGVYDLYDLGEFNQKGTIRTKYGTKTQLERAIRSLKANGIQVYADVVFNHKAGADGTEFVDAVEVDPSNRNQEVSGTYQIEAWTKFDFPGRGNTYSSFKWRWYHFDGTDWDESRTLQNRIYKFRGKAWDWEVDTENGNYDYLMFADLDMDHPEVVTELQKWGTWYVNTTNIDGFRLDAVKHIKFSFMRDWLTYVRNQTGKNLFAVGEFWKNDLGALENYITKTNGSMSLFDAPLHNEFYTASKSNGYFDMRELLEGTLVQRHPSHAVTYVDNHDTQPEQSLQSWVEEWFKPLAYAFILTRQEGYPCVFYGDYYGIPKYNIPGLKSKIDPLLIARRDYAYGTQRDYIDHQDIIGWTREGIDTKPNSGLAALITDGPGGSKWMYVGKKHAGKVFYDLTGNRSDTVTINADGWGEFKVNGGSVSIWVAK

SEQ ID NO: 42514 - protein, 480 aa, Synthetic construct
NGTMMQYFEWDLPNDGTLWTKVKNEAANLSSLGITALWLPPAYKGTSQSDVGYGVYDLYDLGEFNQKGTVRTKYGTKDQYIQAIQAAKAAGMQVYADVVFNHKGGADATENVLAVEVNPNNRNQEISGDYTIEAWTKFDFPGRGNTYSDFKWRWYHFDGVDWDQSRQFQNRIYKFRGDGKAWDWEVDSENGNYDYLMYADVDMDHPEVVTELKNWGKWYVNTTNVDGFRLDAVKHIKYSFFPDWLASVRSQTGKNLFAVGEFWSYDVNKLHNYITKTNGTMSLFDAPLHNNFYTASKSSGYFDMRYLLNNTLMKDQPVLAVTLVDNHDTQPGQSLQSWVEPWFKPLAYAFILTRQEGYPCVFYGDYYGIPKYNIPGLKSKIDPLLIARRDYAYGTQRDYIDHQDIIGWTREGIDSKPNSGLAALITDGPGGSKWMYVGKKHAGKVFYDLTGNRSDTVTINADGWGEFKVNGGSVSIWVAK

SEQ ID NO: 42515 - protein, 480 aa, Synthetic construct
NGTMMQYFEWDLPNDGTLWTKVKNEAANLSSLGITALWLPPAYKGTSQSDVGYGVYDLYDLGEFNQKGTIRTKYGTKTQYIQAIQAAKAAGMQVYADVVFNHKGGADATENVLAVEVNPNNRNQEISGDYTIEAWTKFDFPGRGNTYSDFKWRWYHFDGVDWDQSRQFQNRIYKFRGDGKAWDWEVDSENGNYDYLMYADVDMDHPEVVAELKNWGKWYVNTTNVDGFRLDAVKHIKYSFFPDWLSYVRNQTGKNLFAVGEFWSYDVNKLHNYITKTNGTMSLFDAPLHNNFYIASKSSGYFDMRYLLNNTLMKDQPALAVTLVDNHDTQPGQSLQSWVEPWFKPLAYAFILTRQEGYPCVFYGDYYGIPKYNIPGLKSKIDPLLIARRDYAYGTQRDYIDHPDIIGWTREGIDAKPNSGLAALITDGPGGSKWMYVGKKHAGKVFYDLTGNRSDTVTINADGWGQFKVNGGSVSIWVAK

SEQ ID NO: 42516 - protein, 480 aa, Synthetic construct
NGTMMQYFEWDLPNDGTLWTKVKNEASSLSALGITALWLPPAYKGTSQADVGYGVYDLYDLGEFNQKGTIRTKYGTKTQYLQAIQAAKSAGMQVYADVVFNHKGGADATENVLAVEVNPNNRNQEISGDYTIEAWTKFDFPGRGNTYSDFKWRWYHFDGVDWDQSRQFQNRIYKFRGDGKAWDWEVDSENGNYDYLMYADVDMDHPEVVAELKNWGKWYVNTTNVDGFRLDAVKHIKYSFFPDWLSYVRNQTGKNLFAVGEFWGYDVNKLHNYITKTNGAMSLFDAPLHNNFYIASKSSGYFDMRYLLNNTLMKDQPALAVTLVDNHDTQPGQSLQSWVEPWFKPLAYAFILTRQEGYPCVFYGDYYGIPKYNIPGLKSKIDPLLIARRDYAYGTQRDYIDHQDIIGWTREGIDAKPNSGLAALITDGPGGSKWMYVGKRHAGKVFYDLTGNRSDTVTINADGWGEFKVNGGSVSIWVAK

SEQ ID NO: 42517 - protein, 480 aa, Geobacillus stearothermophilus
NGTMMQYFEWYLPXDGXXWXKLXXDAXNLXXXGISALWIPPAWKGXSXXDVGYGXYDLYDLGEFNQKGTIRTKYGTKXQXXXAINAXXAXGIQVYADVVXXHKGGADATEXVXAVEVNPXXRNQEISGXYXIXAWTKFDFPGRGNTHSXFKWRWYHFDGVDWDXSRKLXXRIYKFRGXGKAWDWEVDTENGNYDYLMYADIDMDHPEVVXELKNWGXWYXNTXXIDGFRIDAVKHIKFSFXXDWIXHVRSXTGKXLFXVAEFWXXDIXXIXNYIXKTNXXXSLFDXPLHXXXYXASKSGGXFDMRXIXXXTLMXXXPXXAVTFVDNHDSXPXXALXSFVDXWFKPLAYAXXLTRXXGYPXVFYGDYYGIPXHXIPALKSKIDPILXARXXYAYGXQXDYLDHXXIIGWTREGXTXXPXSGLAXIISDGXGGXKWMFVGKNXAGXVFXDITGNRAXTVTINADGWGXFXVNGGSVSIWVXK

SEQ ID NO: 42518 - protein, 477 aa, Bacillus sp.
NETMMQYFEWDLPNDGTLWNRLHNNAQNLKNAGITALWLPPAYKGTSQSDVGYGVYDLYDLGEFNQKGTIRTKYGTKTQYIQAIQAAKAAGMQVYADVVFNHKAGADQTEFVDAVEVDPSNRNQEVSGTYQIEAWTKFDFPGRGNTYSSFKWRWYHFDGTDWDESRKLNRIYKFRGKAWDWEVDTENGNYDYLMFADLDMDHPEVVTELKNWGTWYVNTTNIDGFRLDAVKHIKFSFMRDWLTYVRNQTGKNLFAVGEFWKNDLGALENYITKTNGSMSLFDAPLHNNFYTASKSSGYFDMRNLLNGTLVQRHPSHAVTLVDNHDTQPGQSLQSWVEPWFKPLAYAFILTRQEGYPCVFYGDYYGIPSDGVPGLKSKIDPLLIARRDYAYGTQRDYIDHQDIIGWTREGIDTKPNSGLAALITDGPGGSKWMYVGKKHAGKVFYDLTGNRSDTVTINADGWGEFKVNGGSVSIWVAK

SEQ ID NO: 42519 - protein, 477 aa, Bacillus sp.
NETMMQYFEWDLPNDGTLWNRLHNNAQNLKNAGITALWLPPAYKGTSQSDVGYGVYDLYDLGEFNQKGTIRTKYGTKTQLERAIRSLKANGIQVYADVVFNHKAGADGTEFVDAVEVDPSNRNQEVSGTYQIEAWTKFDFPGRGNTYSSFKWRWYHFDGTDWDESRKLNRIYKFRGKAWDWEVDTENGNYDYLMFADLDMDHPEVVTELKNWGTWYVNTTNIDGFRLDAVKHIKFSFMRDWLTYVRNQTGKNLFAVGEFWKNDLGALENYITKTNGSMSLFDAPLHNNFYTASKSSGYFDMRNLLNGTLVQRHPSHAVTLVDNHDTQPGQSLQSWVEPWFKPLAYAFILTRQEGYPCVFYGDYYGIPKYNIPGLKSKIDPLLIARRDYAYGTQRDYIDHQDIIGWTREGIDTKPNSGLAALITDGPGGSKRMYVGKKHAGKVFYDLTGNRSDTVTINADGNGTFKVNGGSVSIWVAK

SEQ ID NO: 42520 - protein, 477 aa, Bacillus sp.
NETMMQYFEWDLPNDGTLWNRLHNNAQNLKNAGITALWLPPAYKGTSQSDVGYGVYDLYDLGEFNQKGTIRTKYGTKTQLERAIRSLKANGIQVYADVVFNHKAGADGTEFVDAVEVDPSNRNQEVSGTYQIEAWTKFDFPGRGNTYSSFKWRWYHFDGTDWDESRKLNRIYKFRGKAWDWEVDTENGNYDYLMFADLDMDHPEVVTELKNWGTWYVNTTNIDGFRLDAVKHIKFSFMRDWLTYVRNQTGKNLFAVGEFWKNDLGALENYITKTNGSMSLFDAPLHNNFYTASKSSGYFDMRNLLNGTLVQRHPSHAVTLVDNHDTQPGQSLQSWVEPWFKPLAYAFILTRQEGYPCVFYGDYYGIPKYNIPGLKSKIDPLLIARRDYAYGTQRDYIDHQDIIGWTREGIDTKPNSGLAALITDGPGGSKYMYVGKKHAGKVFYDLTGNRSDTVTINADGNGEFKVNGGSVSIWVAK

SEQ ID NO: 42521 - protein, 477 aa, Bacillus sp.
NETMMQYFEWDLPNDGTLWNRLHNNAQNLKNAGITALWLPPAYKGTSQSDVGYGVYDLYDLGEFNQKGTIRTKYGTKTQLERAIRSLKANGIQVYADVVFNHKAGADGTEFVDAVEVDPSNRNQEVSGTYQIEAWTKFDFPGRGNTYSSFKWRWYHFDGTDWDESRKLNRIYKFRGKAWDWEVDTENGNYDYLMFADLDMDHPEVVTELKNWGTWYVNTTNIDGFRLDAVKHIKFSFMRDWLTYVRNQTGKNLFAVGEFWKNDLGALENYITKTNGSMSLFDAPLHNNFYTASKSSGYFDMRNLLNGTLVQRHPSHAVTLVDNHDTQPGQSLQSWVEPWFKPLAYAFILTRQEGYPCVFYGDYYGIPKYNIPGLKSKIDPLLIARRDYAYGTQRDYIDHQDIIGWTREGIDTKPNSGLAALITDGPGGSKTMYVGKKHAGKVFYDLTGNRSDTVTINADGNGTFKVNGGSVSIWVAK

SEQ ID NO: 42522 - protein, 477 aa, Synthetic construct
NGTMMQYFEWYLPNDGNHWNRLNSDASNLKSKGITAVWIPPAWKGASQNDVGYGAYDLYDLGEFNQKGTVRTKYGTRSQLQAAVTSLKNNGIQVYGDVVINHKAGADATEMVRAVEVNPNNRNQEVTGEHTIEAWTRFDFPGRGNTHSSFKWRWYHFDGVDWDESRRLNRIYKFRGKAWDWEVDTENGNYDYLMYADYDYDHPEVVNEIRNWGVWYTNTLGLDGFRLDAVKHIKYSFLRDWVNHVRSATGKNMFTVAEFWKNDLGAIENYLQKTNWNHSVFDVPLHYNLYNASKSGGNYDMRNIFNGTVVQRHPSHAVTFVDNHDSQPEEALESTVETWFKPLAYALTLTREQGYPSVFYGDYYGTPTHGIPALRSKIDPILEARQKYAYGPQHDYLDHPDIIGWTREGDSSHPNSGLATLITDGPGGAKRMYVGAKNAGETWHDITGNRSEPVVINSEGWGEFHVNDGSVSIYVQR

SEQ ID NO: 42523 - protein, 480 aa, Bacillus sp.
NGTMMQYFEWYLPNDGNHWNRLNSDASNLKSKGITAVWIPPAWKGASQNDVGYGAYDLYDLGEFNQKGTVRTKYGTRSQLQAAVTSLKNNGINVYGDVVMNHKGGADATEMVRAVEVNPNNRNQEVTGEYTIEAYTRFDFPGRGNTHSSFKWRWYHFDGVDFDQSRKLNNRIYKFRGHGKAWDWEVDTEFGNYDYLMYVDYDYDHPETTNEMRNWGVWYTNTLGLDGFRIDAVKHIKYSFTRDWINHVRIATGKNMFAVAEFWKNDLGAIENYLQKTNWNHSVFDVPLHYNLYNASKSGGNYDMRNIFNGTVVQAHPMHAVTFVDNHDSQPEEALESFVDEWFKPLAYALTLTREQGYPSVFYGDYYGIPTHGVPAMRSKIDPILEARQKYAYGPQHDYLDHPDVIGWTREGDSSHPKSGLATLITDGPGGSKRMYAGLKNAGETWYDITGNRSDTVKIGSDGWGEFHVNDGSVSIYVQK

SEQ ID NO: 42524 - protein, 480 aa, Bacillus sp.
NGTMMQYFEWYLPNDGNHWNRLNSDASNLKSKGIKAVWIPPAWKGASQNDVGYGAYDLYDLGEFNQKGTVRTKYGTRSQLQAAVTSLKNNGIQVYGDVVMNHKGGADATEMVRAVEVNPNNRNQEVTGEYTIEAWTRFDFPGRGNTHSSFKWRWYHFDGVDFDQSRKLNNRIYKFRGHGKAWDWEVDTEFGNYDYLMYVDYDYDHPESTNEMRNWGVWYTNTLGLDGFRIDAVKHIKYSFTRDWINHVRIATGKNMFAVAEFWKNDLGAIENYLQKTNWNHSVFDVPLHYNLYNASKSGGNYDMRNIFNGTVVQAHPSQAVTFVDNHDSQPEEALESFVDEWFKPLAYALTLTREQGYPSVFYGDYYGIPTHGVPAMRSKIDPILEARQKYAYGPQHDYLDHPDVIGWTREGDSSHPKSGLATLITDGPGGSKRMYAGLKNAGETWYDITGNRSDTVKIGSDGWGEFHVNDQSVSIYVQK

SEQ ID NO: 42525 - protein, 480 aa, Bacillus sp.
NGTMMQYFEWYLPNDGNHWNRLNSDASNLKSKGIKAVWIPPAWKGASQNDVGYGAYDLYDLGEFNQRGTVRTKYGTRSQLQAAVTSLKNNGIQVYGDVVMNHKGGADATEMVRAVEVNPNNRNQEVTGEYTIEAWTRFDFPGRGNTHSSFKWRWYHFDGVDFDQSRRLNNRIYKFRGHGKAWDWEVDTEFGNYDYLMYADYDYDHPETTNEMRNWGVWYTNTLGLDGFRIDAVKHIKYSFTRDWINHVRSATGKNMFAVAEFWKNDLGAIENYLQKTNWNHSVFDVPLHYNLYNASKSGGNYDMRNIFNGTVVQAHPSQAVTFVDNHDSQPEEALESFVEEWFKPLAYALTLTREQGYPSVFYGDYYGIPTHGVPAMRSKIDPILEARQKYAYGPQHDYLDHPDVIGWTREGDSSHPKSGLATLITDGPGGSKRMYAGLKNAGETWYDITGNRSDTVKIGSDGWGEFHVNDGSVSIYVQK

SEQ ID NO: 42526 - protein, 480 aa, Bacillus sp.
NGTMMQYFEWYLPNDGNHWNRLNSDASNLKSKGIKAVWIPPAWKGTSQNDVGYGAYDLYDLGEFNQKGTVRTKYGTRSQLQAAVTSLKNNGIQVYGDVVMNHKGGADATEMVRAVEVNPNNRNQEVTGEYTIEAWTRFDFPGRGNTHSSFKWRWYHFDGVDFDQSRNLNNRIYKFRGHGKAWDWEVDTEFGNYDYLMYVDYDMDHPEVVNELRNWGVWYTNTLGLDGFRIDAVKHIKYSFTRDWINHVRSATGKNMFAVAEFWKNDLGAIENYLQKTNWNHSVFDVPLHYNLYNASKSQGNYDMRNIFNGTVVQRHPSHAVTFVDNHDSQPEEALESFVDTWFKPLAYALTLTREQGYPSVFYGDYYGIPTHGVPAMRSKIDPILEARQKYAYGPQHDYLDHPDVIGWTREGDSSHPKSGLATLITDGPGGSKRMYAGLKNAGETWYDITGNRSDTVKIGSDGWGEFHVNGSSVSIYVQK

SEQ ID NO: 42527 - protein, 480 aa, Bacillus sp.
NKTMMQYFEWYLPNDGNHWNRLNSDASNLKSKGIKAVWIPPAWKGASQNDVGYGAYDLYDLGEFNQKGTVRTKYGTRSQLQAAVTSLKNNGIQVYGDVVMNHKGGADATEMVRAVEVNPNNRNQEVTGEYTIEAWTRFDFPGRGNTHSSFKWRWYHFDGVDFDQSRRLNNRIYKFRGHGKAWDWEVDTEFGNYDYLMYADYDMDHPEVVNELRNWGVWYTNTLGLDGFRIDAVKHIKYSFTRDWINHVRSATGKNMFAVAEFWKNDLGAIENYLQKTNWNHSVFDVPLHYNLYNASKSGGNYDMRNIFNGTVVQMQPSHAVTFVDNHDSQPEEALESFVEEWFKPLAYALTLTREQGYPSVFYGDYYGIPTHGVPAMRSKIDPILEARQKYAYGPQHDYLDHPDVIGWTREGDSSHPKSGLATLITDGPGGSKRMYAGLKNAGETWYDITGNRSDTVKIGSDGWGEFHVNDGSVSIYVQK

SEQ ID NO: 42528 - protein, 480 aa, Bacillus sp.
NGTMMQYFEWYLPNDGNHWNRLNSDASNLKSKGIKAVWIPPAWKGASQNDVGYGAYDLYDLGEFNQRGTVRTKYGTRSQLQAAVTSLKNNGIQVYGDVVMNHKGGADATEMVRAVEVNPNNRNQEVTGEYTIEAWTRFDFPGRGNTHSSFKWRWYHFDGVDFDQSRRLNNRIYKFRGHGKAWDWEVDTEFGNYDYLMYADYDYDHPETTNEMRNWGVWYTNTLGLDGFRIDAVKHIKYSFTRDWINHVRSATGKNMFAVAEFWKNDLGAIENYLQKTNWNHSVFDVPLHYNLYNASKSGGNYDMRNIFNGTVVQAHPNHAVTFVDNHDSQPEEALESFVEEWFKPLAYALTLTREQGYPSVFYGDYYGIPTHGVPAMRSKIDPILEARQKYAYGPQHDYLDHPDVIGWTREGDSSHPKSGLATLITDGPGGSKRMYAGLKNAGETWYDITGNRSDTVKIGSDGWGEFHVNDGSVSIYVQK

SEQ ID NO: 42529 - protein, 480 aa, Bacillus sp.
NGTMMQYFEWYLPNDGNHWNRLNSDASNLKSKGITAVWIPPAWKAVSQNDVGYGAYDLYDLGEFNQKGTVRTKYGTRSQLQAAVTSLKNNGIQVYGDVVMNHKGGADLTEMVRAVEVNPNNRNQEVTGEYTIEAWTRFDFPGRGNTHSSFKWRWYHFDGVDWDQSREFTNRIYKFRGHGKAWDWEVDTEFGNYDYLMYVDYDMDHPEVVNELRNWGVWYTNTLGLDGFRIDAVKHIKYSFTRDWINHVRSATGKNMFAVAEFWKNDLGAIENYLQKTNWNHSVFDVPLHYNLYNASQSGGNYDMRNIFNGTVVQRHPSHAVTFVDNHDSQPEEALESFVEPWFKPLAYALTLTREQGYPSVFYGDYYGIPTHGVPAMRSKIDPILEARQKYAYGPQHDYLDHPDVIGWTREGDSSHPKSGLATLITDGPGGSKRMYAGLKNAGETWYDITGNRSDTVKIGSDGWGEFHVNKSSVSIYVQK

SEQ ID NO: 42530 - protein, 480 aa, Bacillus sp.
NGTMMQYFEWYLPNDGNHWNRLNSDASNLKSKGIKAVWIPPAWKGASQNDVGYGAYDLYDLGEFNQRGTVRTKYGTRSQLQAAVTSLKNNGIQVYGDVVMNHKGGADATEMVRAVEVNPNNRNQEVTGEYTIEAWTRFDFPGRGNTHSSFKWRWYHFDGVDFDQSRRLNNRIYKFRGHGKAWDWEVDTEFGNYDYLMYADYDMDHPEVVNELRNWGVWYTNTLGLDGFRIDAVKHIKYSFTRDWINHVRSATGKNMFAVAEFWKNDLGAIENYLQKTNWNHSVFDVPLHYNLYNASKSGGNYDMRNIFNGTVVQVHPSHAVTFVDNHDSQPEEALESFVEEWFKPLAYALTLTREQGYPSVFYGDYYGIPTHGVPAMRSKIDPILEARQKYAYGPQHDYLDHPDVIGWTREGDSSHPKSGLATLITDGPGGSKRMYAGLKNAGETWYDITGNRSDTVKIGSDGWGEFHVNYGSVSIYVQK

SEQ ID NO: 42531 - protein, 480 aa, Bacillus sp.
NKTMMQYFEWYLPNDGNHWNRLNSDASNLKSKGITAVWIPPAWKGASQNDVGYGAYDLYDLGEFNQRGTVRTKYGTRSQLQAAVTSLKNNGIQVYGDVVMNHKGGADATEMVRAVEVNPNNRNQEVTGEYTIEAWTRFDFPGRGNTHSSFKWRWYHFDGVDFDQSRRLNNRIYKFRGHGKAWDWEVDTEFGNYDYLMYADYDMDHPEVVNELRNWGVWYTNTLGLDGFRIDAVKHIKYSFTRDWINHVRSATGKNMFAVAEFWKNDLGAIENYLQKTNWNHSVFDVPLHYNLYNASKSGGNYDMRNIFNGTVVQMQPSHAVTFVDNHDSQPEEALESFVEEWFKPLAYALTLTREQGYPSVFYGDYYGIPTHGVPAMRSKIDPILEARQKYAYGPQHDYLDHPDVIGWTREGDSSHPKSGLATLITDGPGGSKRMYAGLKNAGETWYDITGNRSDTVKIGSDGWGEFHVNDGSVSIYVQK

SEQ ID NO: 42532 - protein, 480 aa, Bacillus sp.
NGTMMQYFEWYLPNDGNHWNRLNSDASNLKSKGITAVWIPPAWKAASQNDVGYGAYDLYDLGEFNQKGTVRTKYGTRSQLQAAVTSLKNNGIQVYGDVVMNHKGGADATEMVRAVEVNPNNRNQEVTGEYTIEAWTRFDFPGRGNTHSSFKWRWYHFDGVDWDQSRNLNNRIYKFRGHGKAWDWEVDTEFGNYDYLMYTDYDMDHPEVVNELRNWGVWYTNTLGLDGFRIDAVKHIKYSFTRDWINHVRSATGKNMFAVAEFWKNDLGAIENYLQKTNWNHSVFDVPLHYNLYNASKSSGNYDMRNIFNGTVVQRHPSHAVTFVDNHDSQPEEALESFVDEWFKPLAYALTLTREQGYPSVFYGDYYGIPTHGVPAMRSKIDPILEARQKYAYGPQHDYLDHPDVIGWTREGDSSHPKSGLATLITDGPGGSKRMYAGLKNAGETWYDITGNRSDTVKIGSDGWGEFHVNKQSVSIYVQK

SEQ ID NO: 42533 - protein, 480 aa, Bacillus sp.
NGTMMQYFEWYLPNDGNHWNRLNSDASNLKSKGITAVWIPPAWKAASQNDVGYGAYDLYDLGEFNQKGTVRTKYGTRSQLQAAVTSLKNNGIQVYGDVVMNHKGGADATEMVRAVEVNPNNRNQEVTGEYTIEAWTRFDFPGRGNTHSSFKWRWYHFDGVDWDQSRRLDNRIYKFRGHGKAWDWEVDTEFGNYDYLMYTDYDMDHPEVVNELRNWGVWYTNTLGLDGFRIDAVKHIKYSFTRDWINHVRSATGKNMFAVAEFWKNDLGAIENYLQKTNWNHSVFDVPLHYNLYNASKSSGNYDMRNIFNGTVVQRHPSHAVTFVDNHDSQPEEALESFVDEWFKPLAYALTLTREQGYPSVFYGDYYGIPTHGVPAMRSKIDPILEARQKYAYGPQHDYLDHPDVIGWTREGDSSHPKSGLATLITDGPGGSKRMYAGLKNAGETWYDITGNRSDTVKIGSDGWGEFHVNKQSVSIYVQK

SEQ ID NO: 42534 - protein, 480 aa, Bacillus sp.
NGTMMQYFEWYLPNDGNHWNRLNSDASNLKSKGIKAVWIPPAWKAVSQNDVGYGAYDLYDLGEFNQRGTVRTKYGTRSQLQAAVTSLKNNGIQVYGDVVMNHKGGADATEMVRAVEVNPNNRNQEVTGEYTIEAWTRFDFPGRGNTHSSFKWRWYHFDGVDFDQSREFTNRIYKFRGHGKAWDWEVDTEFGNYDYLMYADYDYDHPESTNEMRNWGVWYTNTLGLDGFRIDAVKHIKYSFTRDWINHVRSATGKNMFAVAEFWKNDLGAIENYLQKTNWNHSVFDVPLHYNLYNASKSGGNYDMRNIFNGTVVQRHPSHAVTFVDNHDSQPEEALESFVEEWFKPLAYALTLTREQGYPSVFYGDYYGIPTHGVPAMRSKIDPILEARQKYAYGPQHDYLDHPDVIGWTREGDSSHPKSGLATLITDGPGGSKRMYAGLKNAGETWYDITGNRSDTVKIGSDGWGEFHVNDGSVSIYVQK

SEQ ID NO: 42535 - protein, 480 aa, Bacillus sp.
NGTMMQYFEWYLPNDGNHWNRLNSDASNLKSKGIKAVWIPPAWKGASQNDVGYGAYDLYDLGEFNQRGTVRTKYGTRSQLQAAVTSLKNNGIQVYGDVVMNHKGGADATEMVRAVEVNPNNRNQEVTGEYTIEAWTRFDFPGRGNTHSSFKWRWYHFDGVDWDQSRELDNRIYKFRGHGKAWDWEVDTEFGNYDYLMYTDYDMDHPEVVNELRNWGVWYTNTLGLDGFRIDAVKHIKYSFTRDWINHVRSATGKNMFAVAEFWKNDLGAIENYLQKTNWNHSVFDVPLHYNLYNASKSQGNYDMRNIFNGTVVQRHPSHAVTFVDNHDSQPEEALESFVDTWFKPLAYALTLTREQGYPSVFYGDYYGIPTHGVPAMRSKIDPILEARQKYAYGPQHDYLDHPDVIGWTREGDSSHPKSGLATLITDGPGGSKRMYAGLKNAGETWYDITGNRSDTVKIGSDGWGEFHVNGSSVSIYVQK

SEQ ID NO: 42536 - protein, 480 aa, Bacillus sp.
NGTMMQYFEWYLPNDGNHWNRLNSDASNLKSKGITAVWIPPAWKGASQNDVGYGAYDLYDLGEFNQKGTVRTKYGTRSQLQAAVTSLKNNGIQVYGDVVMNHKGGADATEMVRAVEVNPNNRNQEVTGEYTIEAWTRFDFPGRGNTHSSFKWRWYHFDGVDWDQSRELDNRIYKFRGHGKAWDWEVDTEFGNYDYLMYTDYDMDHPEVVNELRNWGVWYTNTLGLDGFRIDAVKHIKYSFTRDWINHVRSATGKNMFAVAEFWKNDLGAIENYLQKTNWNHSVFDVPLHYNLYNASKSQGNYDMRNIFNGTVVQANPNHAVTFVDNHDSQPEEALESFVDTWFKPLAYALTLTREQGYPSVFYGDYYGIPTHGVPAMRSKIDPILEARQKYAYGPQHDYLDHPDVIGWTREGDSSHPKSGLATLITDGPGGSKRMYAGLKNAGETWYDITGNRSDTVKIGSDGWGEFHVNGSSVSIYVQK

SEQ ID NO: 42537 - protein, 480 aa, Bacillus sp.
NGTMMQYFEWYLPNDGNHWNRLNSDASNLKSKGITAVWIPPAWKGASQNDVGYGAYDLYDLGEFNQKGTVRTKYGTRSQLQAAVTSLKNNGINVYGDVVMNHKGGADATEMVRAVEVNPNNRNQEVTGEYTIEAYTRFDFPGRGNTHSSFKWRWYHFDGVDWDQSRKLNNRIYKFRGHGKAWDWEVDTEFGNYDYLMYVDYDYDHPETTNEMRNWGVWYTNTLGLDGFRIDAVKHIKYSFTRDWINHVRIATGKNMFAVAEFWKNDLGAIENYLQKTNWNHSVFDVPLHYNLYNASKSGGNYDMRNIFNGTVVQAHPMHAVTFVDNHDSQPEEALESFVDEWFKPLAYALTLTREQGYPSVFYGDYYGIPTHGVPAMRSKIDPILEARQKYAYGPQHDYLDHPDVIGWTKEGDSSHPKSGLATLITDGPGGSKRMYAGLKNAGETWYDITGNRSDTVKIGSDGWGEFHVNDGSVSIYVQK

SEQ ID NO: 42538 - protein, 480 aa, Bacillus sp.
NGTMMQYFEWYLPNDGNHWNRLNSDASNLKSKGIKAVWIPPAWKAVSQNDVGYGAYDLYDLGEFNQRGTVRTKYGTRSQLQAAVTSLKNNGIQVYGDVVMNHKGGADATEMVRAVEVNPNNRNQEVTGEYTIEAWTRFDFPGRGNTHSSFKWRWYHFDGVDFDQSREFTNRIYKFRGHGKAWDWEVDTEFGNYDYLMYVDYDMDHPEVVNELRNWGVWYTNTLGLDGFRIDAVKHIKYSFTRDWINHVRSATGKNMFAVAEFWKNDLGAIENYLQKTNWNHSVFDVPLHYNLYNASKSGGNYDMRNIFNGTVVQRHPSHAVTFVDNHDSQPEEALESFVEEWFKPLAYALTLTREQGYPSVFYGDYYGIPTHGVPAMRSKIDPILEARQKYAYGPQHDYLDHPDVIGWTREGDSSHPKSGLATLITDGPGGSKRMYAGLKNAGETWYDITGNRSDTVKIGSDGWGEFHVNDGSVSIYVQK

SEQ ID NO: 42539 - protein, 480 aa, Bacillus sp.
NGTMMQYFEWYLPNDGNHWNRLNSDASNLKSKGIKAVWIPPAWKGASQNDVGYGAYDLYDLGEFNQRGTVRTKYGTRSQLQAAVTSLKNNGIQVYGDVVMNHKGGADATEMVRAVEVNPNNRNQEVTGEYTIEAWTRFDFPGRGNTHSSFKWRWYHFDGVDFDQSRRLNNRIYKFRGHGKAWDWEVDTEFGNYDYLMYADYDMDHPEVVNELRNWGVWYTNTLGLDGFRIDAVKHIKYSFTRDWINHVRSATGKNMFAVAEFWKNDLGAIENYLQKTNWNHSVFDVPLHYNLYNASKSGGNYDMRNIFNGTVVQANPSHAVTFVDNHDSQPEEALESFVEEWFKPLAYALTLTREQGYPSVFYGDYYGIPTHGVPAMRSKIDPILEARQKYAYGPQHDYLDHPDVIGWTREGDSSHPKSGLATLITDGPGGSKRMYAGLKNAGETWYDITGNRSDTVKIGSDGWGEFHVNDGSVSIYVQK

SEQ ID NO: 42540 - protein, 480 aa, Bacillus sp.
NGTMMQYFEWYLPNDGNHWNRLNSDASNLKSKGITAVWIPPAWKATSQNDVGYGAYDLYDLGEFNQKGTVRTKYGTRSQLQAAVTSLKNNGIQVYGDVVMNHKGGADATEMVPAVEVNPNNRNQEVTGEYTIEAWTRFDFPGRGNTHSSFKWRWYHFDGVDWDQSRELSNRIYKFRGHSKAWDWEVDTEFGNYDYLMYADYDMDHPETTNEMRNWGVWYTNTLGLDGFRIDAVKHIKYSFTRDWINHVRSATGKNMFAVAEFWKNDLGAIENYLQKTNWNHSVFDVPLHYNLYNASKSQGNYDMRNIFNGTVVQRHPSHAVTFVDNHDSQPEEALESFVDTWFKPLAYALTLTREQGYPSVFYGDYYGIPTHGVPAMRSKIDPILEARQKYAYGPQHDYLDHPDVIGWTREGDSSHPKSGLATLITDGPGGSKRMYAGLKNAGETWYDITGNRSDTVKIGSDGWGEFHVNGSSVSIYVQK

SEQ ID NO: 42541 - protein, 480 aa, Bacillus sp.
NGTMMQYFEWYLPNDGNHWNRLNSDASNLKSKGIKAVWIPPAWKGASQNDVGYGAYDLYDLGEFNQRGTVRTKYGTRSQLQAAVTSLKNNGIQVYGDVVMNHKGGADATEMVRAVEVNPNNRNQEVTGEYTIEAWTRFDFPGRGNTHSSFKWRWYHFDGVDFDQSRNFQNRIYKFRGHGKAWDWEVDTEFGNYDYLMYADYDMDHPEVVNELRNWGVWYTNTLGLDGFRIDAVKHIKYSFTRDWINHVRSATGKNMFAVAEFWKNDLGAIENYLQKTNWNHSVFDVPLHYNLYNASKSQGNYDMRNIFNGTVVQRHPSHAVTFVDNHDSQPEEALESFVDTWFKPLAYALTLTREQGYPSVFYGDYYGIPTHGVPAMRSKIDPILEARQKYAYGPQHDYLDHPDVIGWTREGDSSHPKSGLATLITDGPGGSKRMYAGLKNAGETWYDITGNRSDTVKIKSDGWGEFHVNGGSVSIYVQK

SEQ ID NO: 42542 - protein, 480 aa, Bacillus sp.
NGTMMQYFEWYLPNDGNHWNRLNSDASNLKSKGIKAVWIPPAWKGASQNDVGYGAYDLYDLGEFNQRGTVRTKYGTRSQLQAAVTSLKNNGINVYGDVVMNHKGGADATEMVRAVEVNPNNRNQEVTGEYTIEAWTRFDFPGRGNTHSSFKWRWYHFDGVDFDQSRRLNNRIYKFRGHGKAWDWEVDTEFGNYDYLMYADYDMDHPEVVNELRNWGVWYTNTLGLDGFRIDAVKHIKYSFTRDWINHVRSATGKNMFAVAEFWKNDLGAIENYLQKTNWNHSVFDVPLHYNLYNASKSGGNYDMRNIFNGTVVQAHPMHAVTFVDNHDSQPEEALESFVEEWFKPLAYALTLTREQGYPSVFYGDYYGIPTHGVPAMRSKIDPILEARQKYAYGPQHDYLDHPDVIGWTREGDSSHPKSGLATLITDGPGGSKRMYAGLKNAGETWYDITGNRSDTVKIGSDGWGEFHVNDGSVSIYVQK

SEQ ID NO: 42543 - protein, 480 aa, Bacillus sp.
NGTMMQYFEWYLPNDGNHWNRLNSDASNLKSKGITAVWIPPAWKAVSQNDVGYGAYDLYDLGEFNQKGTVRTKYGTRSQLQAAVTSLKNNGIQVYGDVVMNHKGGADLTEMVRAVEVNPNNRNQEVTGEYTIEAWTRFDFPGRGNTHSSFKWRWYHFDGVDWDQSREFTNRIYKFRGHGKAWDWEVDTEFGNYDYLMYVDYDMDHPEVVNELRNWGVWYTNTLGLDGFRIDAVKHIKYSFTRDWINHVRSATGKNMFAVAEFWKNDLGAIENYLQKTNWNHSVFDVPLHYNLYNASKSQGNYDMRNIFNGTVVQRHPSHAVTFVDNHDSQPEEALESFVDTWFKPLAYALTLTREQGYPSVFYGDYYGIPTHGVPAMRSKIDPILEARQKYAYGPQHDYLDHPDVIGWTREGDSSHPKSGLATLITDGPGGSKRMYAGLKNAGETWYDITGNRSDTVKIGSDGWGEFHVNGTSVSIYVQK

SEQ ID NO: 42544 - protein, 480 aa, Bacillus sp.
NGTMMQYFEWYLPNDGNHWNRLNSDASNLKSKGITAVWIPPAWKAASQNDVGYGAYDLYDLGEFNQKGTVRTKYGTRSQLQAAVTSLKNNGIQVYGDVVMNHKGGADATEMVRAVEVNPNNRNQEVTGEYTIEAYTRFDFPGRGNTHSSFKWRWYHFDGVDFDQSRDFTNRIYKFRGHGKAWDWEVDTEFGNYDYLMYADYDMDHPEVVNELRNWGVWYTNTLGLDGFRIDAVKHIKYSFTRDWINHVRSATGKNMFAVAEFWKNDLGAIENYLQKTNWNHSVFDVPLHYNLYNASKSQGNYDMRNIFNGTVVQRHPSHAVTFVDNHDSQPEEALESFVDPWFKPLAYALTLTREQGYPSVFYGDYYGIPTHGVPAMRSKIDPILEARQKYAYGPQHDYLDHPDVIGWTREGDSSHPKSGLATLITDGPGGSKRMYAGLKNAGETWYDITGNRSDTVKIGSDGWGEFHVNGGSVSIYVQK

SEQ ID NO: 42545 - protein, 480 aa, Bacillus sp.
NGTMMQYFEWYLPNDGNHWNRLNSDASNLKSKGITAVWIPPAWKAVSQNDVGYGAYDLYDLGEFNQKGTVRTKYGTRSQLQAAVTSLKNNGIQVYGDVVMNHKGGADATEMVRAVEVNPNNRNQEVTGEYTIEAWTRFDFPGRGNTHSSFKWRWYHFDGVDFDQSREFTNRIYKFRGHGKAWDWEVDTEFGNYDYLMYVDYDMDHPEVVNELRNWGVWYTNTLGLDGFRIDAVKHIKYSFTRDWINHVRSATGKNMFAVAEFWKNDLGAIENYLQKTNWNHSVFDVPLHYNLYNASKSGGNYDMRNIFNGTVVQVHPSHAVTFVDNHDSQPEEALESFVEEWFKPLAYALTLTREQGYPSVFYGDYYGIPTHGVPAMRSKIDPILEARQKYAYGPQHDYLDHPDVIGWTREGDSSHPKSGLATLITDGPGGSKRMYAGLKNAGETWYDITGNRSDTVKIGSDGWGEFHVNYGSVSIYVQK

SEQ ID NO: 42546 - protein, 480 aa, Bacillus sp.
NGTMMQYFEWYLPNDGNHWNRLNSDASNLKSKGIKAVWIPPAWKGASQNDVGYGAYDLYDLGEFNQRGTVRTKYGTRSQLQAAVTSLKNNGINVYGDVVMNHKGGADATEMVRAVEVNPNNRNQEVTGEYTIEAWTRFDFPGRGNTHSSFKWRWYHFDGVDFDQSRRLNNRIYKFRGHGKAWDWEVDTEFGNYDYLMYADYDMDHPEVVNELKNWGVWYTTTLGLDGFRIDAVKHIKYSFTRDWINHVRSATGKNMFAVAEFWKNDLGAIENYLQKTNWNHSVFDVPLHYNLYNASKSGGNYDMRNIFNGTVVQAHPMHAVTFVDNHDSQPEEALESFVEEWFKPLAYALTLTREQGYPSVFYGDYYGIPTHGVPAMRSKIDPILEARQKYAYGPQHDYLDHPDVIGWTREGDSSHPKSGLATLITDGPGGSKRMYAGLKNAGETWYDITGNRSDTVKIGSDGWGEFHVNDGSVSIYVQK

SEQ ID NO: 42547 - protein, 480 aa, Bacillus sp.
NGTMMQYFEWYLPNDGNHWNRLNSDASNLKSKGIKAVWIPPAWKGASQNDVGYGAYDLYDLGEFNQRGTVRTKYGTRSQLQAAVTSLKNNGIQVYGDVVMNHKGGADATEMVRAVEVNPNNRNQEVTGEYTIEAWTRFDFPGRGNTHSSFKWRWYHFDGVDFDQSRNFQNRIYKFRGHGKAWDWEVDTEFGNYDYLMYADYDMDHPEVVNELRNWGVWYTNTLGLDGFRIDAVKHIKYSFTRDWINHVRSATGKNMFAVAEFWKNDLGAIENYLQKTNWNHSVFDVPLHYNLYNASKSQGNYDMRNIFNGTVVQRHPSHAVTFVDNHDSQPEEALESFVDTWFKPLAYALTLTREQGYPSVFYGDYYGIPTHGVPAMRSKIDPILEARQKYAYGPQHDYLDHPDVIGWTREGDSSHPKSGLATLITDGPGGSKRMYAGLKNAGETWYDITGNRSDTVKIGSDGWGEFHVNGSSVSIYVQK

SEQ ID NO: 42548 - protein, 480 aa, Bacillus sp.
NGTMMQYFEWYLPNDGNHWNRLNSDASNLKSKGIKAVWIPPAWKAASQNDVGYGAYDLYDLGEFNQRGTVRTKYGTRSQLQAAVTSLKNNGIQVYGDVVMNHKGGADATEMVRAVEVNPNNRNQEVTGEYTIEAWTRFDFPGRGNTHSSFKWRWYHFDGVDFDQSRDLTNRIYKFRGHGKAWDWEVDTEFGNYDYLMYADYDMDHPEVVNELRNWGVWYTNTLGLDGFRIDAVKHIKYSFTRDWINHVRSATGKNMFAVAEFWKNDLGAIENYLQKTNWNHSVFDVPLHYNLYNASKSGGNYDMRNIFNGTVVQRHPSHAVTFVDNHDSQPEEALESFVDEWFKPLAYALTLTREQGYPSVFYGDYYGIPTHGVPAMRSKIDPILEARQKYAYGPQHDYLDHPDVIGWTREGDSSHPKSGLATLITDGPGGSKRMYAGLKNAGETWYDITGNRSDTVKIGSDGWGEFHVNDQSVSIYVQK

SEQ ID NO: 42549 - protein, 480 aa, Bacillus sp.
NGTMMQYFEWYLPNDGNHWNRLNSDASNLKSKGITAVWIPPAWKATSQNDVGYGAYDLYDLGEFNQKGTVRTKYGTRSQLQAAVTSLKNNGIQVYGDVVMNHKGGADATEMVRAVEVNPNNRNQEVTGEYTIEAWTRFDFPGRGNTHSSFKWRWYHFDGVDWDQSRELNNRIYKFRGHGKAWDWEVDTEFGNYDYLMYTDYDMDHPEVVNELRNWGVWYTNTLGLDGFRIDAVKHIKYSFTRDWINHVRSATGKNMFAVAEFWKNDLGAIENYLQKTNWNHSVFDVPLHYNLYNASKSGGNYDMRNIFNGTVVQVHPSHAVTFVDNHDSQPEEALESFVEEWFKPLAYALTLTREQGYPSVFYGDYYGIPTHGVPAMRSKIDPILEARQKYAYGPQHDYLDHPDVIGWTREGDSSHPKSGLATLITDGPGGSKRMYAGLKNAGETWYDITGTRSDTVKIGSDGWGEFHVNYGSVSIYVQK

SEQ ID NO: 42550 - protein, 480 aa, Bacillus sp.
NGTMMQYFEWYLPNDGNHWNRLNSDASNLKSKGIKAVWIPPAWKGASQNDVGYGAYDLYDLGEFNQKGTVRTKYGTRSQLQAAVTSLKNNGIQVYGDVVMNHKGGADATEMVRAVEVNPNNRNQEVTGEYTIEAWTRFDFPGRGNTHSSFKWRWYHFDGVDFDQSRELDNRIYKFRGHGKAWDWEVDTEFGNYDYLMYTDYDMDHPEVVNELRNWGVWYTNTLGLDGFRIDAVKHIKYSFTRDWINHVRSATGKNMFAVAEFWKNDLGAIENYLQKTNWNHSVFDVPLHYNLYNASKSQGNYDMRNIFNGTVVQRHPSHAVTFVDNHDSQPEEALESFVDTWFKPLAYALTLTREQGYPSVFYGDYYGIPTHGVPAMRSKIDPILEARQKYAYGPQHDYLDHPDVIGWTREGDSSHPKSGLATLITDGPGGSKRMYAGLKNAGETWYDITGNRSDTVKIGSDGWGEFHVNGSSVSIYVQK

SEQ ID NO: 42551 - protein, 480 aa, Bacillus sp.
NGTMMQYFEWYLPNDGNHWNRLNSDASNLKSKGITAVWIPPAWKAVSQNDVGYGAYDLYDLGEFNQKGTVRTKYGTRSQLQAAVTSLKNNGIQVYGDVVMNHKGGADATEMVRAVEVNPNNRNQEVTGEYTIEAWTRFDFPGRGNTHSSFKWRWYHFDGVDFDQSREFTNRIYKFRGHGKAWDWEVDTEFGNYDYLMYVDYDMDHPEVVNELRNWGVWYTNTLGLDGFRIDAVKHIKYSFTRDWINHVRSATGKNMFAVAEFWKNDLGAIENYLQKTNWNHSVFDVPLHYNLYNASKSQGNYDMRNIFNGTVVQRHPSHAVTFVDNHDSQPEEALESFVDTWFKPLAYALTLTREQGYPSVFYGDYYGIPTHGVPAMRSKIDPILEARQKYAYGPQHDYLDHPDVIGWTREGDSSHPKSGLATLITDGPGGSKRMYAGLKNAGETWYDITGNRSDTVKIGSDGWGEFHVNGTSVSIYVQK

SEQ ID NO: 42552 - protein, 480 aa, Bacillus sp.
NGTMMQYFEWYLPNDGNHWNRLNSDASNLKSKGITAVWIPPAWKGASQNDVGYGAYDLYDLGEFNQKGTVRTKYGTRSQLQAAVTSLKNNGINVYGDVVMNHKGGADATEMVRAVEVNPNNRNQEVTGEYTIEAYTRFDFPGRGNTHSSFKWRWYHFDGVDWDQSRKLNNRIYKFRGHGKAWDWEVDTEFGNYDYLMYVDYDYDHPETTNEMRNWGVWYTNTLGLDGFRIDAVKHIKYSFTRDWINHVRIATGKNMFAVAEFWKNDLGAIENYLQKTNWNHSVFDVPLHYNLYNASKSGGNYDMRNIFNGTVVQAHPMHAVTFVDNHDSQPEEALESFVDEWFKPLAYALTLTREQGYPSVFYGDYYGIPTHGVPAMRSKIDPILEARQKYAYGPQHDYLDHPDVIGWTREGDSSHPKSGLATLITDGPGGSKRMYAGLKNAGETWYDITGNRSDTVKIGSDGWGEFHINDGSVSIYVQK

SEQ ID NO: 42553 - protein, 480 aa, Bacillus sp.
NGTMMQYFEWYLPNDGNHWNRLNSDASNLKSKGITAVWIPPAWKGTSQNDVGYGAYDLYDLGEFNQKGTVRTKYGTRSQLQAAVTSLKNNGIQVYGDVVMNHKGGADATEMVRAVEVNPNNRNQEVTGEYTIEAWTRFDFPGRGNTHSSFKWRWYHFDGVDWDQSRNLNNRIYKFRGHGKAWDWEVDTEFGNYDYLMYVDYDMDHPEVVNELRNWGVWYTNTLGLDGFRIDAVKHIKYSFTRDWINHVRSATGKNMFAVAEFWKNDLGAIENYLQKTNWNHSVFDVPLHYNLYNASKSQGNYDMRNIFNGTVVQANPNHAVTFVDNHDSQPEEALESFVDTWFKPLAYALTLTREQGYPSVFYGDYYGIPTHGVPAMRSKIDPILEARQKYAYGPQHDYLDHPDVIGWTREGDSSHPKSGLATLITDGPGGSKRMYAGLKNAGETWYDITGNRSDTVKIGSDGWGEFHVNGSSVSIYVQK

SEQ ID NO: 42554 - protein, 480 aa, Bacillus sp.
NGTMMQYFEWYLPNDGNHWNRLNSDASNLKSKGITAVWIPPAWKAVSQNDVGYGAYDLYDLGEFNQKGTVRTKYGTRSQLQAAVTSLKNNGIQVYGDVVMNHKGGADATEMVRAVEVNPNNRNQEVTGEYTIEAWTRFDFPGRGNTHSSFKWRWYHFDGVDFDQSREFTNRIYKFRGHGKAWDWEVDTEFGNYDYLMYVDYDYDHPETTNEMRNWGVWYTNTLGLDGFRIDAVKHIKYSFTRDWINHVRSATGKNMFAVAEFWKNDLGAIENYLQKTNWNHSVFDVPLHYNLYNASKSGGNYDMRNIFNGTVVQAHPNHAVTFVDNHDSQPEEALESFVEEWFKPLAYALTLTREQGYPSVFYGDYYGIPTHGVPAMRSKIDPILEARQKYAYGPQHDYLDHPDVIGWTREGDSSHPKSGLATLITDGPGGSKRMYAGLKNAGETWYDITGNRSDTVKIGSDGWGEFHVNDGSVSIYVQK

SEQ ID NO: 42555 - protein, 480 aa, Bacillus sp.
NGTMMQYFEWYLPNDGNHWNRLNSDASNLKSKGITAVWIPPAWKGASQNDVGYGAYDLYDLGEFNQKGTVRTKYGTRSQLQAAVTSLKNNGIQVYGDVVMNHEGDTHATEMVRAVEVNPNNRNQEVTGEYTIEAWTRFDFPGRGNTHSSFKWRWYHFDGVDWDQSRRLNNRIYKFRGHGKAWDWEVDTEFGNYDYLMYADYDMDHPEVVNELRNWGVWYTNTLGLDGFRIDAVKHIKYSFTRDWINHVRSATGKNMFAVAEFWKNDLGAIENYLQKTNWNHSVFDVPLHYNLYNASKSGGNYDMRNIFNGTVVQSHPMHAVTFVDNHDSQPEEALESFVEEWFKPLAYALTLTREQGYPSVFYGDYYGIPTHGVPAMRSKIDPILEARQKYAYGPQHDYLDHPDVIGWTREGDSSHPKSGLATLITDGPGGSKRMYAGLKNAGETWYDITGNRSDTVKIGSDGWGEFHVNDGSVSIYVQK

SEQ ID NO: 42556 - protein, 480 aa, Homo sapiens
NGTMMQYFEWYLPNDGNHWNRLNSDASNLKSKGITAVWIPPAWKAVSQNDVGYGAYDLYDLGEFNQKGTVRTKYGTRSQLQAAVTSLKNNGIQVYGDVVMNHKGGADATEMVRAVEVNPNNRNQEVTGEYTIEAWTRFDFPGRGNTHSSFKWRWYHFDGVDFDQSREFTNRIYKFRGHGKAWDWEVDTEFGNYDYLMYADYDYDHPESTNEMRNWGVWYTNTLGLDGFRIDAVKHIKYSFTRDWINHVRSATGKNMFAVAEFWKNDLGAIENYLQKTNWNHSVFDVPLHYNLYNASKSGGNYDMRNIFNGTVVQRHPSHAVTFVDNHDSQPEEALESFVDEWFKPLAYALTLTREQGYPSVFYGDYYGIPTHGVPAMRSKIDPILEARQKYAYGPQHDYLDHPDVIGWTREGDSSHPKSGLATLITDGPGGSKRMYAGLKNAGETWYDITGNRSDTVKIGSDGWGEFHVNKSSVSIYVQK

SEQ ID NO: 42557 - protein, 480 aa, Bacillus sp.
NGTMMQYFEWYLPNDGNHWNRLNSDASNLKSKGIKAVWIPPAWKGASQNDVGYGAYDLYDLGEFNQRGTVRTKYGTRSQLQAAVTSLKNNGIQVYGDVVMNHKGGADATEMVPAVEVNPNNRNQEVTGEYTIEAWTRFDFPGRGNTHSSFKWRWYHFDGVDFDQSRRLNNRIYKFRGHSKAWDWEVDTEFGNYDYLMYADYDYDHPESTNEMRNWGVWYTNTLGLDGFRIDAVKHIKYSFTRDWINHVRSATGKNMFAVAEFWKNDLGAIENYLQKTNWNHSVFDVPLHYNLYNASKSGGNYDMRNIFNGTVVQRHPSHAVTFVDNHDSQPEEALESFVEEWFKPLAYALTLTREQGYPSVFYGDYYGIPTHGVPAMRSKIDPILEARQKYAYGPQHDYLDHPDVIGWTREGDSSHPKSGLATLITDGPGGSKRMYAGLKNAGETWYDITGNRSDTVKIGSDGWGEFHVNDGSVSIYVQK

SEQ ID NO: 42558 - protein, 480 aa, Bacillus sp.
NKTMMQYFEWYLPNDGNHWNRLNSDASNLKSKGIKAVWIPPAWKGASQNDVGYGAYDLYDLGEFNQKGTVRTKYGTRSQLQAAVTSLKNNGIQVYGDVVMNHKGGADATEMVRAVEVNPNNRNQEVTGEYTIEAWTRFDFPGRGNTHSSFKWRWYHFDGVDFDQSRRLNNRIYKFRGHGKAWDWEVDTEFGNYDYLMYADYDMDHPEVVNELRNWGVWYTNTLGLDGFRIDAVKHIKYSFTRDWINHVRSATGKNMFAVAEFWKNDLGAIENYLQKTNWNHSVFDVPLHYNLYNASKSGGNYDMRNIFNGTVVQAHPNHAVTFVDNHDSQPEEALESFVEEWFKPLAYALTLTREQGYSSVFYGDYYGIPTHGVPAMRSKIDPILEARQKYAYGPQHDYLDHPDVIGWTREGDSSHPKSGLATLITDGPGGSKRMYAGLKNAGETWYDITGNRSDTVKIGSDGWGEFHVNDGSVSIYVQK

SEQ ID NO: 42559 - protein, 480 aa, Bacillus sp.
NGTMMQYFEWYLPNDGNHWNRLNSDASNLKSKGIKAVWIPPAWKAASQNDVGYGAYDLYDLGEFNQRGTVRTKYGTRSQLQAAVTSLKNNGIQVYGDVVMNHKGGADATEMVRAVEVNPNNRNQEVTGEYTIEAWTRFDFPGRGNTHSSFKWRWYHFDGVDFDQSRRTNNRIYKFRGHGKAWDWEVDTEFGNYDYLMYVDYDMDHPEVVNELRNWGVWYTNTLGLDGFRIDAVKHIKYSFTRDWINHVRSATGKNMFAVAEFWKNDLGAIENYLQKTNWNHSVFDVPLHYNLYNASKSGGNYDMRNIFNGTVVQRHPSHAVTFVDNHDSQPEEALESFVEEWFKPLAYALTLTREQGYPSVFYGDYYGIPTHGVPAMRSKIDPILEARQKYAYGPQHDYLDHPDVIGWTREGDSSHPKSGLATLITDGPGGSKRMYAGLKNAGETWYDITGNRSDTVKIGSDGWGEFHVNDGSVSIYVQK

SEQ ID NO: 42560 - protein, 477 aa, Aspergillus terreus
TPAEWRSQSIYFLLTDRFGRTDNSTTAACDTSDRVYCGGSWQGIINQLDYIQGMGFTAIWITPVTGQFYENTGDGTSYHGYWQQDIYDLNYNYGTAQDLKNLANALHERGMYLMVDVVANHMGYDGAGNTVDYSVFNPFSSSSYFHPYCLISNYDNQTNVEDCWLGDTTVSLPDLDTTSTAVRNIWYDWVADLVANYSIDGLRVDTVKHVEKDFWPGYNSAAGVYCVGEVYSGDPAYTCPYQNYMDGVLNYPIYYQLLYAFESSSGSISDLYNMISSVASSCKDPTLLGNFIENHDNPRFASYTSDYSQAKNVITFIFLSDGIPIVYAGQEQHYSGGSDPANREATWLSGYSTSATLYTWIATTNQIRSLAISKDAGYVQAKNNPFYSDSNTIAMRKGTTAGAQVITVLSNKGASGSSYTLSLSGTGYSAGATLVETYTCTTVTVDSSGNLPVPMTSGLPRVFVPSSWVNGSALCNT

SEQ ID NO: 42561 - protein, 477 aa, unidentified
TPAEWRSQSIYFLLTDRFGRTDNSTTAACDTTDRVYCGGSWQGIINHLDYIQGMGFTAIWITPVTGQFYENTGDGTSYHGYWQQDIYDLNYNYGTAQDLKNLASALHERGMYLMVDVVANHMGYDGAGNTVDYSVFNPFSSSSYFHPYCLISNYDNQTNVEDCWLGDTTVSLPDLDTTSTAVRDIWYDWVADLVANYSIDGLRVDTVKHVEKDFWPDYNSAAGVYCVGEVFSGDPAYTCPYQNYMDGVLNYPIYYQLLYAFESSSGSISDLYNMISSVASSCKDPTLLGNFIENHDNPRFASYTSDYSQAKNVITFIFLSDGIPIVYAGQEQHYSGGSDPANREATWLSGYSTSATLYTWIASTNQIRSLAISKDAGYVQAKNNPFYSDSNTIAMRKGTTAGAQVITVLSNKGASGSSYTLSLSGTGYSAGATLVETYTCTTVTVDSSGNLPVPMTSGLPRVFVPSSWVNGSALCNT

SEQ ID NO: 42562 - protein, 512 aa, Geobacillus stearothermophilus
NGTMMQYFEWYLPXDGXXWXKLXXDAXNLXXXGISALWIPPAWKGXSXXDVGYGXYDLYDLGEFNQKGTIRTKYGTKXQXXXAINAXXAXGIQVYADVVXXHKGGADATEXVXAVEVNPXXRNQEISGXYXIXAWTKFDFPGRGNTHSXFKWRWYHFDGVDWDXSRKLXNRIYKFRGXGKAWDWEVDTENGNYDYLMYADIDMDHPEVVXELKNWGXWYXNTXXIDGFRIDAVKHIKFSFXXDWIXHVRSXTGKXLFXVAEFWXXDIXXIXNYIXKTNXXXSLFDXPLHXXXYXASKSGGXFDMRXIXXXTLMXXXPXXAVTFVDNHDSXPXXALXSFVDXWFKPLAYAXXLTRXXGYPXVFYGDYYGIPXHXIPALKSKIDPILXARXXYAYGXQXDYLDHXXIIGWTREGXTXXPXSGLAXIISDGXGGXKWMFVGKNXAGXVFXDITGNRAXTVTINADGWGXFXVNGGSVSIWVXKKTTVSTIARPITTRPWTGEPVRWTEPRLVATP

SEQ ID NO: 42563 - protein, 478 aa, Bacillus sp.
NGTMMQYFEWYLPNDGNHWNRLNSDASNLKSKGIKAVWIPPAWKGASQNDVGYGAYDLYDLGEFNQRGTVRTKYGTRSQLQAAVTSLKNNGIQVYGDVVMNHKGGADATEMVPAVEVNPNNRNQEVTGEYTIEAWTRFDFPGRGNTHSSFKWRWYHFDGVDFDQSRRLNNRIYKFRSKAWDWEVDTEFGNYDYLMYADYDYDHPETTNEMRNWGVWYTNTLGLDGFRIDAVKHIKYSFTRDWINHVRSATGKNMFAVAEFWKNDLGAIENYLQKTNWNHSVFDVPLHYNLYNASKSGGNYDMRNIFNGTVVQAHPSQAVTFVDNHDSQPEEALESFVEEWFKPLAYALTLTREQGYPSVFYGDYYGIPTHGVPAMRSKIDPILEARQKYAYGPQHDYLDHPDVIGWTREGDSSHPKSGLATLITDGPGGSKRMYAGLKNAGETWYDITGNRSDTVKIGSDGWGEFHVNDGSVSIYVQK

SEQ ID NO: 42564 - protein, 478 aa, Bacillus sp.
NKTMMQYFEWYLPNDGNHWNRLNSDASNLKSKGIKAVWIPPAWKGASQNDVGYGAYDLYDLGEFNQRGTVRTKYGTRSQLQAAVTSLKNNGIQVYGDVVMNHKGGADATEMVRAVEVNPNNRNQEVTGEYTIEAWTRFDFPGRGNTHSSFKWRWYHFDGVDFDQSRRLNNRIYKFRGKAWDWEVDTEFGNYDYLMYADYDMDHPEVVNELRNWGVWYTNTLGLDGFRIDAVKHIKYSFTRDWINHVRSATGKNMFAVAEFWKNDLGAIENYLQKTNWNHSVFDVPLHYNLYNASKSGGNYDMRNIFNGTVVQAHPNHAVTFVDNHDSQPEEALESFVEEWFKPLAYALTLTREQGYSSVFYGDYYGIPTHGVPAMRSKIDPILEARQKYAYGPQHDYLDHPDVIGWTREGDSSHPKSGLATLITDGPGGSKRMYAGLKNAGETWYDITGNRSDTVKIGSDGWGEFHVNDGSVSIYVQK

SEQ ID NO: 42565 - protein, 478 aa, Bacillus sp.
NGTMMQYFEWYLPNDGNHWNRLNSDASNLKSKGIKAVWIPPAWKGASQNDVGYGAYDLYDLGEFNQRGTVRTKYGTRSQLQAAVTSLKNNGIQVYGDVVMNHKGGADATEMVRAVEVNPNNRNQEVTGEYTIEAWTRFDFPGRGNTHSSFKWRWYHFDGVDFDQSRRLNNRIYKFRGKAWDWEVDTEFGNYDYLMYADYDMDHPEVVNELRNWGVWYTNTLGLDGFRIDAVKHIKYSFTRDWINHVRSATGKNMFAVAEFWKNDLGAIENYLQKTNWNHSVFDVPLHYNLYNASKSSGNYDMRNIFNGTVVQRHPSHAVTFVDNHDSQPEEALESFVDEWFKPLAYALTLTREQGYPSVFYGDYYGIPTHGVPAMRSKIDPILEARQKYAYGPQHDYLDHPDVIGWTREGDSSHPKSGLATLITDGPGGSKRMYAGLKNAGETWYDITGNRSDTVKIGSDGWGEFHVNKQSVSIYVQK

SEQ ID NO: 42566 - protein, 478 aa, Bacillus sp.
NGTMMQYFEWYLPNDGNHWNRLNSDASNLKSKGITAVWIPPAWKAVSQNDVGYGAYDLYDLGEFNQKGTVRTKYGTRSQLQAAVTSLKNNGIQVYGDVVMNHKGGADATEMVRAVEVNPNNRNQEVTGEYTIEAYTRFDFSGRGNTHSSFKWRWYHFDGVDFDQSREFTNRIYKFRGKAWDWEVDTEFGNYDYLMYVDYDMDHPEVVNELRNWGVWYTNTLGLDGFRIDAVKHIKYSFTRDWINHVRSATGKNMFAVAEFWKNDLGAIENYLQKTNWNHSVFDVPLHYNLYNASKSGGNYDMRNIFNGTVVQAHPNHAVTFVDNHDSQPEEALESFVEEWFKPLAYALTLTREQGYPSVFYGDYYGIPTHGVPAMRSKIDPILEARQKYAYGPQHDYLDHPDVIGWTREGDSSHPKSGLATLITDGPGGSKRMYAGLKNAGETWYDITGNRSDTVKIGSDGWGEFHVNDGSVSIYVQK

SEQ ID NO: 42567 - protein, 478 aa, Bacillus sp.
NGTMMQYFEWYLPNDGNHWNRLNSDASNLKSKGIKAVWIPPAWKAVSQNDVGYGAYDLYDLGEFNQRGTVRTKYGTRSQLQAAVTSLKNNGIQVYGDVVMNHKGGADATEMVRAVEVNPNNRNQEVTGEYTIEAWTRFDFPGRGNTHSSFKWRWYHFDGVDFDQSREFTNRIYKFRGKAWDWEVDTEFGNYDYLMYVDYDMDHPEVVNELRNWGVWYTNTLGLDGFRIDAVKHIKYSFTRDWINHVRSATGKNMFAVAEFWKNDLGAIENYLQKTNWNHSVFDVPLHYNLYNASKSGGNYDMRNIFNGTVVQAHPNHAVTFVDNHDSQPEEALESFVEEWFKPLAYALTLTREQGYPSVFYGDYYGIPTHGVPAMRSKIDPILEARQKYAYGPQHDYLDHPDVIGWTREGDSSHPKSGLATLITDGPGGSKRMYAGLKNAGETWYDITGNRSDTVKIGSDGWGEFHVNDGSVSIYVQK

SEQ ID NO: 42568 - protein, 478 aa, Bacillus sp.
NGTMMQYFEWYLPNDGNHWNRLNSDASNLKSKGITAVWIPPAWKAASQNDVGYGAYDLYDLGEFNQKGTVRTKYGTRSQLQAAVTSLKNNGIQVYGDVVMNHKGGADATEMVRAVEVNPNNRNQEVTGEYTIEAWTRFDFPGRGNTHSSFKWRWYHFDGVDWDQSRDLQNRIYKFRGKAWDWEVDTEFGNYDYLMYADYDMDHPEVVNELRNWGVWYTNTLGLDGFRIDAVKHIKYSFTRDWINHVRSATGKNMFAVAEFWKNDLGAIENYLQKTNWNHSVFDVPLHYNLYNASKSSGNYDMRNIFNGTVVQRHPSHAVTFVDNHDSQPEEALESFVDEWFKPLAYALTLTREQGYPSVFYGDYYGIPTHGVPAMRSKIDPILEARQKYAYGPQHDYLDHPDVIGWTREGDSSHPKSGLATLITDGPGGSKRMYAGLKNAGETWYDITGNRSDTVKTESDGWGEFHVNKQSVSIYVQK

SEQ ID NO: 42569 - protein, 478 aa, Bacillus sp.
NGTMMQYFEWYLPNDGNHWNRLNSDASNLKSKGIKAVWIPPAWKGASQNDVGYGAYDLYDLGEFNQRGTVRTKYGTRSQLQAAVTSLKNNGIQVYGDVVMNHKGGADATEMVPAVEVNPNNRNQEVTGEYTIEAWTRFDFPGRGNTHSSFKWRWYHFDGVDFDQSRRLNNRIYKFRSKAWDWEVDTEFGNYDYLMYADYDMDHPEVVNELRNWGVWYTNTLGLDGFRIDAVKHIKYSFTRDWINHVRSATGKNMFAVAEFWKNDLGAIENYLQKTNWNHSVFDVPLHYNLYNASKSGGNYDMRNIFNGTVVQANPNHAVTFVDNHDSQPEEALESFVEEWFKPLAYALTLTREQGYPSVFYGDYYGIPTHGVPAMRSKIDPILEARQKYAYGPQHDYLDHPDVIGWTREGDSSHPKSGLATLITDGPGGSKRMYAGLKNAGETWYDITGNRSDTVKIGSDGWGEFHVNDGSVSIYVQK

SEQ ID NO: 42570 - protein, 478 aa, Bacillus sp.
NKTMMQYFEWYLPNDGNHWNRLNSDASNLKSKGIKAVWIPPAWKGASQNDVGYGAYDLYDLGEFNQRGTVRTKYGTRSQLQAAVTSLKNNGIQVYGDVVMNHKGGADATEMVRAVEVNPNNRNQEVTGEYTIEAWTRFDFPGRGNTHSSFKWRWYHFDGVDFDQSRRLNNRIYKFRGKAWDWEVDTEFGNYDYLMYADYDMDHPEVVNELRNWGVWYTNTLGLDGFRIDAVKHIKYSFTRDWINHVRSATGKNMFAVAEFWKNDLGAIENYLQKTNWNHSVFDVPLHYNLYNASKSGGNYDMRNIFNGTVVQMQPSHAVTFVDNHDSQPEEALESFVEEWFKPLAYALTLTREQGYPSVFYGDYYGIPTHGVPAMRSKIDPILEARQKYAYGPQHDYLDHPDVIGWTREGDSSHPKSGLATLITDGPGGSKRMYAGLKNAGETWYDITGNRSDTVKIGSDGWGEFHVNDGSVSIYVQK

SEQ ID NO: 42571 - protein, 486 aa, Penicillium chrysogenum
WLAGLVSTAIAATPAEWRSQSIYFMLTDRFARTDGSTTAACDTADRKYCGGTWQGIIDKLDYIQGMGFTAIWITPVTGQLSGETAYGDPYHGYWQQDIYSLDSNYGTADDLKALAAALHKRDMYLMVDVVANHMGYNGAGADVDYTKFNPFNDAKYFHSYCPITDYNDDTMSQNCWLGDNKVSLPDLNTQSKEVQDLWYDWVGSLVSNYSIDGLRVDTVKHVQKDFWPGYNKAAGVYCVGEILDGDPDYTYPYQEVMDGVLNYPIYYPLLKAFQSSSGSMTDLYNMINTVKSTCKDSTLLGNFLENHDNPRFAHATDDIALAKNAATFTIMADGIPIVYAGQEQHYSGGEDPANREALWLSGYNTDSELYKLIAKANGARNQAIAKSTNYTIYQNHPIYKDESAIAMRKGFVGGQTITVLTNLGAGGKEYSVSIPDTGFKAGAKLTEVVSCTSVTVGDSGEVSVPMASGAPRILLPTSLLEGSALC

SEQ ID NO: 42572 - protein, 482 aa, Bacillus sp. YR288
NGTMMQYFEWYVPNDGQHWNRLRNDAAYLKSIGVSAIWTPPAYKGTSQNDVGYGAYDLYDLGEFNQKGTIRTKYGTKAELKSAVSTLKSNGIQVYGDVVMNHKGGADYTENVTAVEVNPSNRNQETSDEYTIQAWTGFNFPGRGTTHSPFKWQWYHFDGTDWDQSRNASRIFKFRGTGKAWDWEVSSENGNYDYLLYADLDYDHPDVRNEMKNWGVWYANEVGLDGFRLDAVKHIKFQFLGDWVNHVRTKTGKTMFTVAEYWQNDVNAINNYLAKVNYNHSVFDAPLHYNFHYASQSGGNYDMRNLLNGTVVAAHPTKAVTLVENHDTQPGQSLESVVQPWFKPLAYAFILTRAEGLPSIFYGDMYGTKGNSSYEIPALKTKIEPLLKARKDYAYGTQHNYMDHPDVIGWTREGDSTKEKSGLATLVTDGAGGSKWMYVGKQNAGEVWYDITGNRTDKITINTDGWGNFQVNKGSVSVYVQQ

SEQ ID NO: 42573 - protein, 482 aa, Synthetic construct
NGTMMQYFEWYLPNDGNHWTRLQNDAANLSSKGVTAVWIPPAYKGTSQNDVGYGAYDLYDLGEFNQKGTVRTKYGTKAQLKRALAQLHKQNIHVYGDVVMNHKGGADFTETVTAVEVDPNNRNRETSGDYQISAWTGFTFPGRGNTYSPFKWNWYHFDGTDWDESRKINRIYKFRGTGKAWDWEVSSENGNYDYLMYADIDYEHPDVINEMKKWGTWYAKELNLDGFTLDAVKHIKHDYLRDWVTHVRNQTGKELFTVAEYWQNDIGQLNNYLAKTNYNQSVFDAPLHYHFHYASNSNGNYDMRNILKGTVMESNPRLAVTLVENHDSQPGQSLESVVSTWFKPLAYAFILTRAEGYPSVFYGDYYGTKGNSNYEIPSLKTQLDPILTARKNYAYGLQRDYIDHWDIIGWTREGEAARDKSGLATLITDGPGGYKWMEVGKQNAGEVWYDITGNRKETVTINNDGWGQFYVNGGSVSIYVQK

SEQ ID NO: 42574 - protein, 482 aa, Synthetic construct
NGTMMQYFEWYLPNDGNHWTRLQNDAANLSSKGVTAVWIPPAYKGTSQNDVGYGAYDLYDLGEFNQKGTVRTKYGTKAQLKSAIAELHKQNIHVYGDVVMNHKGGADFTETVTAVEVDPNNRNVMTNQEYQISAWTGFTFPGRGNTYSPFKWNWYHFDGTDWDESRKINRIYKFRGTGKAWDWEVSSENGNYDYLMYADIDYEHPDVINEMKKWGTWYAKELNLDGFTLDAVKHIKHDYLRDWVTHVRNQTGKELFTVAEYWQNDIGQLNNYLAKTNYNQSVFDAPLHYHFHYASNSNGNYDMRNILKGTVMESNPRLAVTLVENHDSQPGQSLESVVSTWFKPLAYAFILTRAEGYPSVFYGDYYGTKGNSNYEIPSLKTQLDPILTARKNYAYGLQRDYIDHWDIIGWTREGEAARDKSGLATLITDGPGGYKWMEVGKQNAGEVWYDITGNRKETVTINNDGWGQFYVNGGSVSIYVQK

SEQ ID NO: 42575 - protein, 483 aa, Synthetic construct
NGTLMQYFEWYTPNDGQHWKRLQNDAEHLSDIGITAVWIPPAYKGLSQSDNGYGPYDLYDLGEFQQKGTVRTKYGTKSELQDAIGSLHSRNVQVYGDVVLNHKGGADATENVLAVEVNPNNRNQEISGDYTIEAWTKFDFPGRGNTYSDFKWRWYHFDGVDWDQSRQFQNRIYKFRGDGKAWDWEVDSENGNYDYLMYADVDYDHPDVVAETKKWGIWYANELSLDGFRIDAAKHIKFSFLRDWVQAVRQATGKEMFTVAEYWQNNAGKLENYLNKTSFNQSVFDVPLHFNLQAASSQGGGYDMRRLLDGTVVSRHPEKAVTFVENHDTQPGQSLESTVQTWFKPLAYAFILTRESGYPQVFYGDMYGTKGTSPKEIPSLKDNIEPILKARKEYAYGPQHDYIDHPDVIGWTREGDSSAAKSGLAALITDGPGGSKRMYAGLKNAGETWYDITGNRSDTVKIGSDGWGEFHVNDGSVSIYVQK

SEQ ID NO: 42576 - protein, 477 aa, Bacillus sp.
NETMMQYFEWDLPDDGTLWNRLHNNAQNLKNAGITALWLPPAYKGTSQSDVGYGVYDLYDLGEFNQKGTIRTKYGTKTQLERAIRSLKANGIQVYADVVFNHKAGADGTEFVDAVEVDPSNRNQEVSGTYQIEAWTKFDFPGRGNTYSSFKWRWYHFDGTDWDESRSLNRIYKFRGKAWDWEVDTENGNYDYLMFADLDMDHPEVVTELQNWGTWYVNTTNIDGFRLDAVKHIKFSFMRDWLTYVRNQTGKNLFAVGEFWKDDLGALENYITKTNGSMSLFDAPLHNNFYTASKSDGYFDMRNLLNGTLVERHPSHAVTLVDEHDTQPGESLQSWVEPWFKPLAYAFILTRQEGYPCVFYGDYYGIPKYDIPGLKSKIDPLLIARRDYAYGTQRDYIDHQDIIGWTREGIDTKPNSGLAALITDGPGGSKWMYVGKKHAGKVFYDLTGNRSDTVTINADGWGEFKVNGGSVSIWVAK

SEQ ID NO: 42577 - protein, 477 aa, Bacillus sp.
NETMMQYFEWDLPEDGTLWNRLHNNAQNLKNAGITALWLPPAYKGTSQSDVGYGVYDLYDLGEFNQKGTIRTKYGTKTQLERAIRSLKANGIQVYADVVFNHKAGADGTEFVDAVEVDPSNRNQEVSGTYQIEAWTKFDFPGRGNTYSSFKWRWYHFDGTDWDESRKLNRIYKFRGKAWDWEVDTENGNYDYLMFADLDMDHPEVVTELKNWGTWYVNTTNIDGFRLDAVKHIKFSFMRDWLTYVRNQTGKNLFAVGEFWKEDLGALENYITKTNGSMSLFDAPLHENFYTASKSSGYFDMRELLNGTLVERHPSHAVTLVDEHDTQPGQSLESWVEPWFKPLAYAFILTRQEGYPCVFYGDYYGIPKYEIPGLKSKIDPLLIARRDYAYGTQRDYIDHQDIIGWTREGIDTKPNSGLAALITDGPGGSKWMYVGKKHAGKVFYDLTGNRSDTVTINADGWGEFKVNGGSVSIWVAK

SEQ ID NO: 42578 - protein, 477 aa, Bacillus sp.
NETMMQYFEWDLPNDGTLWNRLHNNAQNLKNAGITALWLPPAYKGTSQSDVGYGVYDLYDLGEFNQKGTIRTKYGTKTQYIQAIQAAKAAGMQVYADVVFNHKAGADGTEFVDAVEVDPSNRNQEVSGTYQIEAWTKFDFPGRGNTYSSFKWRWYHFDGTDWDESRKLNRIYKFRGKAWDWEVDTENGNYDYLMFADLDMDHPEVVTELKNWGTWYVNTTNIDGFRLDAVKHIKFSFMRDWLGHVRGQTGKNLFAVGEFWKNDLGALENYITKTNGSMSLFDAPLHNNFYTASKSSGYFDMRNLLNGTLVQRHPSHAVTLVDNHDTQPGQSLQSWVEPWFKPLAYAFILTRQEGYPCVFYGDYYGIPSDGVPGLKSKIDPLLIARRDYAYGTQRDYIDHQDIIGWTREGIDTKPNSGLAALITDGPGGSKWMYVGKKHAGKVFYDLTGNRSDTVTINADGWGEFKVNGGSVSIWVAK

SEQ ID NO: 42579 - protein, 477 aa, Bacillus sp.
NETMMQYFEWDLPNDGTLWNRLHNNAQNLKNAGITALWLPPAYKGTSQSDVGYGVYDLYDLGEFNQKGTIRTKYGTKTQYIQAIQAAKAAGMQVYADVVFNHKAGADGTEFVDAVEVDPSNRNQEVSGTYQIEAWTKFDFPGRGNTYSSFKWRWYHFDGTDWDESRKLNRIYKFRGKAWDWEVDTENGNYDYLMFADLDMDHPEVVTELKNWGTWYVNTTNIDGFRLDAVKHIKYSFFPDWLTYVRNQTGKNLFAVGEFWKNDLGALENYITKTNGSMSLFDAPLHNNFYTASKSSGYFDMRNLLNGTLVQRHPSHAVTLVDNHDTQPGQSLQSWVEPWFKPLAYAFILTRQEGYPCVFYGDYYGIPKYNIPGLKSKIDPLLIARRDYAYGTQRDYIDHQDIIGWTREGIDTKPNSGLAALITDGPGGSKWMYVGKKHAGKVFYDLTGNRSDTVTINADGWGEFKVNGGSVSIWVAK

SEQ ID NO: 42580 - protein, 477 aa, Synthetic construct
NGTMMQYFEWYLPNDGNHWNRLNSDASNLASKGITAVWIPPAWKGTSQADVGYGAYNLYDLGEFNQKGTVRTKYGTRSQLQAAVTSLKNNGIQVYGDVVINHKAGADATEMVTAVEVNPNNRNQEVTGEHTIEAYTRFDFPGRGNTHSSFKWRWYHFDGVDWDESRSLNRIYKFRGKAWDWPVDTENGNYDYLMYADLDYDHPEVVNEIRNWGVWYTNTLGLDGFRLDAVKHIKFSFLRDWVNHVRSATGKNMFTVAEYWKNDLGAIENYLNFTNWNHSVFDVPLHYNLYAASTSGGNYDMRNIFNGTVVQRHPSHAVTFVDNHDSQPEEALESTVETWFKPLAYALTLTREQGYPSVFYGDYYGTPTHGIPALRSKIDPILEARQKYAYGPQHDYLDHPDIIGWTREGDSSHPNSGLATLITDGPGGAKRMYVGAKNAGETWHDITGNRSEPVVINSEGWGTFHVNKGSVSIYVQR

SEQ ID NO: 42581 - protein, 482 aa, Synthetic construct
NGTLMQYFEWYMPNDGQHWKRLQNDSAYLAEHGITAVWIPPAYKGTSQADVGYGAYDLYDLGEFHQKGTVRTKYGTKGELQSAIKSLHSRDINVYGDVVINHKAGADATEWVDAVEVNPSNRNQEVSGTYKIQAWTKFDFPGRGNTYSSFKWRWYHFDGTDWDQSRQLNRIYKFRGTGKAWDWEVDTENGNYDYLMFADLDYDHPDVAAEIKRWGTWYANELQLDGFRLDAVKHIKFSFLRDWVNHVREKTGKEMFTVAEYWSYDLGALENYLNKTNFNHSVFDVPLHYQFHAASTQGGGYDMRKLLNGTVVSKHPLKSVTFVDNHDTQPGQSLESTVQTWFKPLAYAFILTRESGYPQVFYGDMYGTKGDSQREIPALKHKIEPILKARKQYAYGAQHDYFDHHDIVGWTREGDSSVANSGLAALITDGPGGAKRMYVGRQNAGETWHDITGNRSEPVVINSAGWGEFHVNGGSVSIYVQR

SEQ ID NO: 42582 - protein, 480 aa, Bacillus sp.
NGTMMQYFEWYLPNDGNHWNRLNSDASNLKSKGIKAVWIPPAWKGASQNDVGYGAYDLYDLGEFNQRGTVRTKYGTRSQLQAAVTSLKNNGIQVYGDVVMNHKGGADATEMVPAVEVNPNNRNQEVTGEYTIEAWTRFDFPGRGNTHSSFKWRWYHFDGVDFDQSRRLNNRIYKFRGHSKAWDWEVDTEFGNYDYLMYADYDYDHPETTNEMRNWGVWYTNTLGLDGFRIDAVKHIKYSFTRDWINHVRSATGKNMFAVAEFWKNDLGAIENYLQKTNWNHSVFDVPLHYNLYNASKSGGNYDMRNIFNGTVVQAHPSQAVTFVDNHDSQPEEALESFVEEWFKPLAYALTLTREQGYPSVFYGDYYGIPTHGVPAMRSKIDPILEARQKYAYGPQHDYLDHPDVIGWTREGDSSHPKSGLATLITDGPGGSKRMYAGLKNAGETWYDITGNRSDTVKIGSDGWGEFHVNDGSVSIYVQK

SEQ ID NO: 42583 - protein, 480 aa, Bacillus sp.
NGTMMQYFEWYLPNDGNHWNRLNSDASNLKSKGIKAVWIPPAWKGASQNDVGYGAYDLYDLGEFNQRGTVRTKYGTRSQLQAAVTSLKNNGIQVYGDVVMNHKGGADATEMVRAVEVNPNNRNQEVTGEYTIEAWTRFDFPGRGNTHSSFKWRWYHFDGVDFDQSRKLNNRIYKFRGHGKAWDWEVDTEFGNYDYLMYVDYDYDHPESTNEMRNWGVWYTNTLGLDGFRIDAVKHIKYSFTRDWINHVRIATGKNMFAVAEFWKNDLGAIENYLQKTNWNHSVFDVPLHYNLYNASKSGGNYDMRNIFNGTVVQAHPSQAVTFVDNHDSQPEEALESFVDEWFKPLAYALTLTREQGYPSVFYGDYYGIPTHGVPAMRSKIDPILEARQKYAYGPQHDYLDHPDVIGWTREGDSSHPKSGLATLITDGPGGSKRMYAGLKNAGETWYDITGNRSDTVKIGSDGWGEFHVNDQSVSIYVQK

SEQ ID NO: 42584 - protein, 480 aa, Bacillus sp.
NGTMMQYFEWYLPNDGNHWNRLNSDASNLKSKGIKAVWIPPAWKGASQNDVGYGAYDLYDLGEFNQKGTVRTKYGTRSQLQAAVTSLKNNGINVYGDVVMNHKGGADATEMVRAVEVNPNNRNQEVTGEYTIEAWTRFDFPGRGNTHSSFKWRWYHFDGVDFDQSRKLNNRIYKFRGHGKAWDWEVDTEFGNYDYLMYVDYDYDHPETTNEMRNWGVWYTNTLGLDGFRIDAVKHIKYSFTRDWINHVRIATGKNMFAVAEFWKNDLGAIENYLQKTNWNHSVFDVPLHYNLYNASKSGGNYDMRNIFNGTVVQAHPMHAVTFVDNHDSQPEEALESFVDEWFKPLAYALTLTREQGYPSVFYGDYYGIPTHGVPAMRSKIDPILEARQKYAYGPQHDYLDHPDVIGWTREGDSSHPKSGLATLIPDGPGGSKRMYAGLKNAGETWYDITGNRSDTVKIGSDGWGEFHVNDGSVSIYVQK

SEQ ID NO: 42585 - protein, 480 aa, Bacillus sp.
NGTMMQYFEWYLPNDGNHWNRLNSDASNLKSKGIKAVWIPPAWKAVSQNDVGYGAYDLYDLGEFNQRGTVRTKYGTRSQLQAAVTSLKNNGIQVYGDVVMNHKGGADATEMVRAVEVNPNNRNQEVTGEYTIEAWTRFDFPGRGNTHSSFKWRWYHFDGVDFDQSREFTNRIYKFRGHGKAWDWEVDTEFGNYDYLMYVDYDMDHPEVVNELRNWGVWYTNTLGLDGFRIDAVKHIKYSFTRDWINHVRSATGKNMFAVAEFWKNDLGAIENYLQKTNWNHSVFDVPLHYNLYNASKSGGNYDMRNIFNGTVVQAHPNHAVTFVDNHDSQPEEALESFVEEWFKPLAYALTLTREQGYPSVFYGDYYGIPTHGVPAMRSKIDPILEARQKYAYGPQHDYLDHPDVIGWTREGDSSHPKSGLATLITDGPGGSKRMYAGLKNAGETWYDITGNRSDTVKIGSDGWGEFHVNDGSVSIYVQK

SEQ ID NO: 42586 - protein, 480 aa, Bacillus sp.
NKTMMQYFEWYLPNDGNHWNRLNSDASNLKSKGIKAVWIPPAWKGASQNDVGYGAYDLYDLGEFNQRGTVRTKYGTRSQLQAAVTSLKNNGIQVYGDVVMNHKGGADATEMVRAVEVNPNNRNQEVTGEYTIEAWTRFDFPGRGNTHSSFKWRWYHFDGVDFDQSRRLNNRIYKFRGHGKAWDWEVDTEFGNYDYLMYADYDMDHPEVVNELRNWGVWYTNTLGLDGFRIDAVKHIKYSFTRDWINHVRSATGKNMFAVAEFWKNDLGAIENYLQKTNWNHSVFDVPLHYNLYNASKSGGNYDMRNIFNGTVVQAHPNHAVTFVDNHDSQPEEALESFVEEWFKPLAYALTLTREQGYSSVFYGDYYGIPTHGVPAMRSKIDPILEARQKYAYGPQHDYLDHPDVIGWTREGDSSHPKSGLATLITDGPGGSKRMYAGLKNAGETWYDITGNRSDTVKIGSDGWGEFHVNDGSVSIYVQK

SEQ ID NO: 42587 - protein, 480 aa, Bacillus sp.
NGTMMQYFEWYLPNDGNHWNRLNSDASNLKSKGIKAVWIPPAWKGTSQNDVGYGAYDLYDLGEFNQRGTVRTKYGTRSQLQAAVTSLKNNGIQVYGDVVMNHKGGADATEMVRAVEVNPNNRNQEVTGEYTIEAWTRFDFPGRGNTHSSFKWRWYHFDGVDFDQSRNLNNRIYKFRGHGKAWDWEVDTEFGNYDYLMYVDYDMDHPEVVNELRNWGVWYTNTLGLDGFRIDAVKHIKYSFTRDWINHVRSATGKNMFAVAEFWKNDLGAIENYLQKTNWNHSVFDVPLHYNLYNASKSQGNYDMRNIFNGTVVQRHPSHAVTFVDNHDSQPEEALESFVDTWFKPLAYALTLTREQGYPSVFYGDYYGIPTHGVPAMRSKIDPILEARQKYAYGPQHDYLDHPDVIGWTREGDSSHPKSGLATLITDGPGGSKRMYAGLKNAGETWYDITGNRSDTVKIGSDGWGEFHVNGSSVSIYVQK

SEQ ID NO: 42588 - protein, 480 aa, Bacillus sp.
NGTMMQYFEWYLPNDGNHWNRLNSDASNLKSKGIKAVWIPPAWKGASQNDVGYGAYDLYDLGEFNQRGTVRTKYGTRSQLQAAVTSLKNNGIQVYGDVVMNHKGGADATEMVRAVEVNPNNRNQEVTGEYTIEAWTRFDFPGRGNTHSSFKWRWYHFDGVDFDQSRRLNNRIYKFRGHGKAWDWEVDTEFGNYDYLMYADYDMDHPEVVNELRNWGVWYTNTLGLDGFRIDAVKHIKYSFTRDWINHVRSATGKNMFAVAEFWKNDLGAIENYLQKTNWNHSVFDVPLHYNLYNASKSSGNYDMRNIFNGTVVQRHPSHAVTFVDNHDSQPEEALESFVDEWFKPLAYALTLTREQGYPSVFYGDYYGIPTHGVPAMRSKIDPILEARQKYAYGPQHDYLDHPDVIGWTREGDSSHPKSGLATLITDGPGGSKRMYAGLKNAGETWYDITGNRSDTVKIGSDGWGEFHVNKQSVSIYVQK

SEQ ID NO: 42589 - protein, 480 aa, Bacillus sp.
NGTMMQYFEWYLPNDGNHWNRLNSDASNLKSKGITAVWIPPAWKAVSQNDVGYGAYDLYDLGEFNQKGTVRTKYGTRSQLQAAVTSLKNNGIQVYGDVVMNHKGGADATEMVRAVEVNPNNRNQEVTGEYTIEAYTRFDFSGRGNTHSSFKWRWYHFDGVDFDQSREFTNRIYKFRGHGKAWDWEVDTEFGNYDYLMYVDYDMDHPEVVNELRNWGVWYTNTLGLDGFRIDAVKHIKYSFTRDWINHVRSATGKNMFAVAEFWKNDLGAIENYLQKTNWNHSVFDVPLHYNLYNASKSGGNYDMRNIFNGTVVQAHPNHAVTFVDNHDSQPEEALESFVEEWFKPLAYALTLTREQGYPSVFYGDYYGIPTHGVPAMRSKIDPILEARQKYAYGPQHDYLDHPDVIGWTREGDSSHPKSGLATLITDGPGGSKRMYAGLKNAGETWYDITGNRSDTVKIGSDGWGEFHVNDGSVSIYVQK

SEQ ID NO: 42590 - protein, 480 aa, Bacillus sp.
NGTMMQYFEWYLPNDGNHWNRLNSDASNLKSKGIKAVWIPPAWKGASQNDVGYGAYDLYDLGEFNQRGTVRTKYGTRSQLQAAVTSLKNNGIQVYGDVVMNHKGGADATEMVPAVEVNPNNRNQEVTGEYTIEAWTRFDFPGRGNTHSSFKWRWYHFDGVDFDQSRRLNNRIYKFRGHSKAWDWEVDTEFGNYDYLMYADYDMDHPEVVNELRNWGVWYTNTLGLDGFRIDAVKHIKYSFTRDWINHVRSATGKNMFAVAEFWKNDLGAIENYLQKTNWNHSVFDVPLHYNLYNASKSGGNYDMRNIFNGTVVQANPNHAVTFVDNHDSQPEEALESFVEEWFKPLAYALTLTREQGYPSVFYGDYYGIPTHGVPAMRSKIDPILEARQKYAYGPQHDYLDHPDVIGWTREGDSSHPKSGLATLITDGPGGSKRMYAGLKNAGETWYDITGNRSDTVKIGSDGWGEFHVNDGSVSIYVQK

SEQ ID NO: 42591 - protein, 480 aa, Bacillus sp.
NGTMMQYFEWYLPNDGNHWNRLNSDASNLKSKGITAVWIPPAWKAASQNDVGYGAYDLYDLGEFNQKGTVRTKYGTRSQLQAAVTSLKNNGIQVYGDVVMNHKGGADATEMVRAVEVNPNNRNQEVTGEYTIEAWTRFDFPGRGNTHSSFKWRWYHFDGVDWDQSRDLQNRIYKFRGHGKAWDWEVDTEFGNYDYLMYADYDMDHPEVVNELRNWGVWYTNTLGLDGFRIDAVKHIKYSFTRDWINHVRSATGKNMFAVAEFWKNDLGAIENYLQKTNWNHSVFDVPLHYNLYNASKSSGNYDMRNIFNGTVVQRHPSHAVTFVDNHDSQPEEALESFVDEWFKPLAYALTLTREQGYPSVFYGDYYGIPTHGVPAMRSKIDPILEARQKYAYGPQHDYLDHPDVIGWTREGDSSHPKSGLATLITDGPGGSKRMYAGLKNAGETWYDITGNRSDTVKTESDGWGEFHVNKQSVSIYVQK

SEQ ID NO: 42592 - protein, 480 aa, Bacillus sp.
NKTMMQYFEWYLPNDGNHWNRLNSDASNLKSKGIKAVWIPPAWKGASQNDVGYGAYDLYDLGEFNQRGTVRTKYGTRSQLQAAVTSLKNNGIQVYGDVVMNHKGGADATEMVRAVEVNPNNRNQEVTGEYTIEAWTRFDFPGRGNTHSSFKWRWYHFDGVDFDQSRRLNNRIYKFRGHGKAWDWEVDTEFGNYDYLMYADYDMDHPEVVNELRNWGVWYTNTLGLDGFRIDAVKHIKYSFTRDWINHVRSATGKNMFAVAEFWKNDLGAIENYLQKTNWNHSVFDVPLHYNLYNASKSGGNYDMRNIFNGTVVQMQPSHAVTFVDNHDSQPEEALESFVEEWFKPLAYALTLTREQGYPSVFYGDYYGIPTHGVPAMRSKIDPILEARQKYAYGPQHDYLDHPDVIGWTREGDSSHPKSGLATLITDGPGGSKRMYAGLKNAGETWYDITGNRSDTVKIGSDGWGEFHVNDGSVSIYVQK

SEQ ID NO: 42593 - protein, 478 aa, Aspergillus terreus
TPAEWRSQSIYFLLTDRFGRTDNSTTAACDTSDRVYCGGSWQGIINQLDYIQGMGFTAIWITPVTGQFYENTGDGTSYHGYWQQDIYDLNYNYGTAQDLKNLANALHERGMYLMVDVVANHMGYDGAGNTVDYSVFNPFSSSSYFHPYCLISNYDNQTNVEDCWLGDTTVSLPDLDTTSTAVRNIWYDWVADLVANYSIDGLRVDTVKHVEKDFWPGYNSAAGVYCVGEVYSGDPAYTCPYQNYMDGVLNYPIYYQLLYAFESSSGSISDLYNMISSVASSCKDPTLLGNFIENHDNPRFASYTSDYSQAKNVITFIFLSDGIPIVYAGQEQHYSGGSDPANREATWLSGYSTSATLYTWIATTNQIRSLAISKDAGYVQAKNNPFYSDSNTIAMRKGTTAGAQVITVLSNKGASGSSYTLSLSGTGYSAGVTLVETYTCTTVTVDSSGNLPVPMTSGLPRVFVPSSWVNGSALCNGA

SEQ ID NO: 42594 - protein, 478 aa, Aspergillus sp
TPAQWRSQSIYFLMTDRFGRTDNSTTAACNTADRVYCGGSWQGIINHLDYIQGMGFTAIWITPVTEQFYEDTGDGTSYHGYWQQNIYNVNSNYGTAQDLKNLASALHARGMHLMVDVVANHMGYDGAGNSVDYGVFDPFSSSSYFHPYCLISDYNNQTNVEDCWLGDTTVSLPDLDTTSTDVRNIWYDWVEELVANYSIDGLRVDTVKHVEKDFWPGYNSAAGVYCVGEVFSGDPAYTCPYQNYMDGVLNYPIYYQLLYAFESTSGSMSNLYNMINSVASDCKDPTLLGNFIENHDNPRFASYTSDYSQAKNVISFIFLTDGIPIVYAGQEQHYSGGSDPANREATWLSAYSTGATLYTWIASTNKIRKLAISKDTGYVEAKNNPFYYDSNTIAMRKGTTAGAQVITVLSNKGASGSSYTLSLSGTGYAAGATLVEMYTCTTATVDSSGNLPVLMTSGLPRVFLPSSWVSGSGLCGSA

SEQ ID NO: 42595 - protein, 518 aa, Geobacillus stearothermophilus
AAXXNGTLMQYFEWYLPXDGXXWXKLXNDAXXLAXXGITALWIPPAYKGTSXADVGYGXYDLYDLGEFXQKGTVRTKYGTKAXXXXAIXAXHAXXINVYADVVXXHKGGADATEXVXAVEVXPADRNXXISGXHXIXAWTXFXFPGRGXTYSXFKWXWYHFDGXDWDESRKLXRIYKFXGIGKAWDWEVXXENGNYDYLMYADIDXDHPDVXXEIKXWGXWYXNXXNIDGFRLDAVKHIKFSFXXDWLXHVRXXTGKXLFTVAEYWXXDIXXLXNYIXKTNXXXSLFDXPLHXXFHXASXXGGAFDMRXLLXXTLMXXXPXXAVTFVDNHDTXPGQALXSXVXXWFKPLAYAFILTRXXGYPXVFYGDXYGXXGDSQXXIPALKXKIDPILXARKXYAYGXQHDYXDHXDIIGWTREGXSXXXXSGLAALITDGPGGAKXMYVGKQXAGXXFHDITGNRSDXVXINSDGWGEFXVNGGSVSIWVXRKTTVSTIARPITTRPWTGEFVRWTEPRLVAWP

SEQ ID NO: 42596 - protein, 485 aa, Synthetic construct
HXXXXNGTMMQYFEWYLPXDGXXWXKLXXDAXNLXXXGISALWIPPAWKGXSXXDVGYGXYDLYDLGEFNQKGTIRTKYGTKXQXXXAINAXXAXGIQVYADVVXXHKGGADATEXVXAVEVNPXXRNQEISGXYXIXAWTKFDFPGRGNTHSXFKWRWYHFDGVDWDXSRKLXNRIYKFRGXGKAWDWEVDTENGNYDYLMYADIDMDHPEVVXELKNWGXWYXNTXXIDGFRIDAVKHIKFSFXXDWIXHVRSXTGKXLFXVAEFWXXDIXXIXNYIXKTNXXXSLFDXPLHXXXYXASKSGGXFDMRXIXXXTLMXXXPXXAVTFVDNHDSXPXXALXSFVDXWFKPLAYAXXLTRXXGYPXVFYGDYYGIPXHXIPALKSKIDPILXARXXYAYGXQXDYLDHXXIIGWTREGXTXXPXSGLAXIISDGXGGXKWMFVGKNXAGXVFXDITGNRAXTVTINADGWGXFXVNGGSVSIWVXK

SEQ ID NO: 42597 - protein, 484 aa, Synthetic construct
TNGTMMQYFEWYVPNDGQQWNRLRTDAPYLSSVGITAVWTPPAYKGTSQADVGYGPYDLYDLGEFNQKGTVRTKYGTKGELKSAVNTLHSNGIQVYGDVVMNHKGGADATENVLAVEVNPNNRNQEISGDYTIEAWTKFDFPGRGNTYSDFKWRWYHFDGVDWDQSRQFQNRIYKFRGDGKAWDWEVDSENGNYDYLMYADVDYDHPDVVNEMKKWGVWYANEVGLDGYRLDAVKHIKFSFLKDWVDNARAATGKEMFTVGEYWQNDLGALNNYLAKVNYNQSLFDAPLHYNFYAASTGGGYYDMRNILNNTLVASNPTKAVTLVENHDTQPGQSLESTVQPWFKPLAYAFILTRSGGYPSVFYGDMYGTKGTTTREIPALKSKIEPLLKARKDYAYGTQRDYIDNPDVIGWTREGDSTKAKSGLATVITDGPGGSKRMYVGTSNAGEIWYDLTGNRTDKITIGSDGYATFPVNGGSVSVWVQQ

SEQ ID NO: 42598 - protein, 478 aa, Bacillus sp.
NGTMMQYFEWYLPNDGNHWNRLNSDASNLKSKGITAVWIPPGWKGASQNDVGYGAYDLYDLEEFNQKGTVRTKYGTRSQLQAAVTSLKNNGIQVYGDVVMNHKGGTHATEMVRAVEVNPNNRNQEVTGEYTIEAWTRFDFPGRGNTHSSFKWRWYHFDGVDWDQSRRLNNRIYKFRGKAWDWEVDTEFGNYDYLMYADYDMDHPEVVNELRNWGVWYTNTLGLDGFRIDAVKHIKYSLTRDWINHVRSATGKNMFAVAEFWKNDLGAIENYLQKTNWNHSVFDVPLHYNLYNASKSGGNYDMRNIFNGTVVQRHPSHAVTFVDNHDSQPEEALESFVEPWFKPLAYALTLTREQGYPSVFYGDYYGIPTHGVPAMRSKIDPILEARQKYAYGPQHDYLDHPDVIGWTREGDSSHPKSGLATLITDGPGGSKRMYAGLKNAGETWYDITGNRSDTVKIGSDGWGEFHVNGTSVSIYVQK

SEQ ID NO: 42599 - protein, 478 aa, Bacillus sp.
NGTMMQYFEWYLPNDGNHWNRLNSDASNLKSKGIKAVWIPPAWKGASQNDVGYGAYDLYDLGEFNQRGTVRTKYGTRSQLQAAVTSLKNNGINVYGDVVMNHKGGADATEMVRAVEVNPNNRNQEVTGEYTIEAWTRFDFPGRGNTHSSFKWRWYHFDGVDFDQSRRLNNRIYKFRGKAWDWEVDTEFGNYDYLMYVDYDYDHPETTNEMRNWGVWYTNTLGLDGFRIDAVKHIKYSFTRDWINHVRIATGKNMFAVAEFWKNDLGAIENYLQKTNWNHSVFDVPLHYNLYNASKSGGNYDMRNIFNGTVVQAHPMHAVTFVDNHDSQPEEALESFVEEWFKPLAYALTLTREQGYPSVFYGDYYGIPTHGVPAMRSKIDPILEARQKYAYGPQHDYLDHPDVIGWTREGDSSHPKSGLATLITDGPGGSKRMYAGLKNAGETWYDITGNRSDTVKIGSDGWGEFHVNDGSVSIYVQK

SEQ ID NO: 42600 - protein, 478 aa, Synthetic construct
NGTMMQYFEWYLPNDGTLWTKMGSDASHLKSIGITGVWFPPAYKGQSQSDVGYGVYDMYDLGEFNQKGTVRTKYGTKAQLQSAITSLHNNGIQAYGDVVLNHKAGADGTEFVDAVEVNPSNRNQETSGTYQIQAWTKFDFPGRGNTYSSFKWRWYHFDGTDWDESRKLNRVYKFRGTGKAWDWEVDTENGNYDYLMFADLDYDHPDVQTEVKNWGKWFVNTLNLDGVRLDAVKHIKFDYMSSWLSSVKSTTGKSNLFAVGEYWNTSLGALENYENKTNWSMSLFDVPLHMNFQAAANGGGYYDMRNLLNNTMMKNHPIQAVTFVDNHDTEPGQALQSWVSDWFKPLAYATILTRQEGYPCVFYGDYYGIPSQSVSAKSTWLDKQLSARKSYAYGTQHDYLDNQDVIGWTREGDSAHAGSGLATVMSDGPGGSKTMYVGTAHAGQVFKDITGNRTDTVTINSAGNGTFPCNGGSVSIWV

SEQ ID NO: 42601 - protein, 478 aa, Synthetic construct
NGTMMQYFEWYLPNDGTLWTKMGSDASHLKSIGITGVWFPPAYKGQSQSDVGYGVYDMYDLGEFNQKGTVRTKYGTKAQLQSAITSLHNNGIQAYGDVVLDHKGGADGTEWVDAVEVNPSDRNQEISGTYQIQAWTKFDFPGRGNTYSSFKWRWYHFDGVDWDESRKLSRIYKFRGIGKAWDWEVDTENGNYDYLMYADLDYDHPDVQTEVKNWGKWFVNTLNLDGVRLDAVKHIKFDYMSSWLSSVKSTTGKSNLFAVGEYWNTSLGALENYENKTNWSMSLFDVPLHMNFQAAANGGGYYDMRNLLNNTMMKNHPIQAVTFVDNHDTEPGQALQSWVSDWFKPLAYATILTRQEGYPCVFYGDYYGIPSQSVSAKSTWLDKQLSARKSYAYGTQHDYLDNQDVIGWTREGDSAHAGSGLATVMSDGPGGSKTMYVGTAHAGQVFKDITGNRTDTVTINSAGNGTFPCNGGSVSIWV

SEQ ID NO: 42602 - protein, 482 aa, Synthetic construct
NGTMMQYFEWYLPNDGNHWTRLQNDAANLSSKGVTAVWIPPAYKGTSQNDVGYGAYDLYDLGEFNQKGTVRTKYGTKAQLKSAIIRELAANIHVYGDVVMNHKGGADFTETVTAVEVDPNNRNRETSGDYQISAWTGFTFPGRGNTYSPFKWNWYHFDGTDWDESRKINRIYKFRGTGKAWDWEVSSENGNYDYLMYADIDYEHPDVINEMKKWGTWYAKELNLDGFTLDAVKHIKHDYLRDWVTHVRNQTGKELFTVAEYWQNDIGQLNNYLAKTNYNQSVFDAPLHYHFHYASNSNGNYDMRNILKGTVMESNPRLAVTLVENHDSQPGQSLESVVSTWFKPLAYAFILTRAEGYPSVFYGDYYGTKGNSNYEIPSLKTQLDPILTARKNYAYGLQRDYIDHWDIIGWTREGEAARDKSGLATLITDGPGGYKWMEVGKQNAGEVWYDITGNRKETVTINNDGWGQFYVNGGSVSIYVQK

SEQ ID NO: 42603 - protein, 482 aa, Bacillus sp. 406
NGTMMQYFEWYVPNDGQHWNRLRNDAAYLKSIGVSAVWTPPAYKGTSQNDVGYGAYDLYDLGEFNQKGTIRTKYGTKAELKSAVSTLKSNGIQVYGDVVMNHKGGADYTENVTAVEVNPSNRNQETSDEYTIQAWTGFNFPGRGTTHSPFKWQWYHFDGTDWDQSRNASRIFKFRGTGKAWDWEVSSENGNYDYLMYADLDFDHPDVGNEMKNWGVWYANEVGLDGFRLDAVKHIKHSYLGDWVNHVRTKTGKEMFTVAEYWQNDVNAINNYLAKVNYNHSVFDAPLHYNFHYASQSGGNYDMRNLLNGTVVAAHPTKAVTLVENHDSQPGQSLESVVQPWFKPLAYAFILTRAEGYPSIFYGDMYGTKGNSSYEIPALKTKIEPLLKARKDYAYGTQHNYMDHWDVIGWTREGDSTKEKSGLATLVTDGAGGSKWMYVGKQNAGEVWYDITGNRTDKITINTDGWGNFQVNGGSVSVYGQQ

SEQ ID NO: 42604 - protein, 482 aa, Synthetic construct
NGTMMQYFEWYLPNDGNHWTRLQNDAANLSSKGVTAVWIPPAYKGTSQNDVGYGAYDLYDLGEFNQKGTVRTKYGTKAQLKSAIAELHKQNIHVYGDVVMNHKGGADFTETVTAVEVDPNNRNRETSGDYQISAWTGFTFPGRGNTYSPFKWNWYHFDGTDWDESRKINRIYKFRGTGKAWDWEVSSENGNYDYLMYADIDYEHPDVINEMKKWGTWYAKELNLDGFTLDAVKHIKHDYLRDWVTHVRNQTGKELFTVAEYWQNDIGQLNNYLAKTNYNQSVFDAPLHYHFHRYNLAIGNYDMRNILKGTVMESNPRLAVTLVENHDSQPGQSLESVVSTWFKPLAYAFILTRAEGYPSVFYGDYYGTKGNSNYEIPSLKTQLDPILTARKNYAYGLQRDYIDHWDIIGWTREGEAARDKSGLATLITDGPGGYKWMEVGKQNAGEVWYDITGNRKETVTINNDGWGQFYVNGGSVSIYVQK

SEQ ID NO: 42605 - protein, 481 aa, Bacillus licheniformis
NGTLMQYFEWYTPNDGQHWKRLQNDSAYLAEXGITAVWIPPAYKGTSQADVGYGAYDLYDLGEFHQKGTVRTKYGTKGELQSAIKSLHSRDINVYGDVVINHKGGADATELVRAVEVNPNNRNQEVSGEYTIEAYTYFDFPGRGNTHSNFKWRWYHFDGVDWDQSRRLNNRIYKFRGKAWDWEVDTEFGNYDYLTYADIDYDHPDVAAEIKRWGTWYANELQLDGFRLDAVKHIKFSFLRDWVNHVREKTGKEMFTVAEYWQNDLGALENYLNKTNFNHSVFDVPLHYQFHAASTQGGGYDMRKLLNGTVVSKHPLKSVTFVDNHDTQPGQSLESTVQTWFKPLAYAFILTRESGYPQVFYGDMYGTKGDSQREIPALKHKIEPILKARKQYAYGAQHDYFDHHDIVGWTREGDSSVANSGLFALITDGPGGAKRMYVGRQNAGETWHDITGNRSEPVVINSEGWGEFHVNGGSVSIYVQR

SEQ ID NO: 42606 - protein, 477 aa, Bacillus sp.
NETMMQYFEWDLPNDGTLWTKVKNEAANLSSLGITALWLPPAYKGTSQSDVGYGVYDLYDLGEFNQKGTIRTKYGTKTQYIQAIQAAKAAGMQVYADVVFNHKAGADQTEFVDAVEVDPSNRNQEVSGTYQIEAWTKFDFPGRGNTYSSFKWRWYHFDGTDWDESRKLNRIYKFRGKAWDWEVDTENGNYDYLMFADLDMDHPEVVTELKNWGTWYVNTTNIDGFRLDAVKHIKFSFMRDWLTYVRNQTGKNLFAVGEFWKNDLGALENYITKTNGSMSLFDAPLHNNFYTASKSSGYFDMRNLLNGTLVQRHPSHAVTLVDNHDTQPGEALESFVQGWFKPLAYAFILTRQEGYPCVFYGDYYGIPKYNIPGLKSKIDPLLIARRDYAYGTQRDYIDHQDIIGWTREGIDTKPNSGLAALITDGPGGSKWMYVGKKHAGKVFYDLTGNRSDTVTINADGWGEFKVNGGSVSIWVAK

SEQ ID NO: 42607 - protein, 479 aa, Synthetic construct
NGTMMQYFEWYLPNDGNHWNRLNSDASNLKSKGITAVWIPPAWKGASQNDVGYGAYDLYDLGEFNQKGTVRTKYGTRSQLQAAVTSLKNNGIQVYGDVVMNHKAGADATEDVTAVEVNPANRNQETSEEYQIKAWTDFRFPGRGNTYSDFKWHWYHFDGADWDESRKISRIFKFRGEGKAWDWEVSSENGNYDYLMYADVDMDHPEVVNELRNWGVWYTNTLGLDGFRIDAVKHIKYSFTRDWINHVRSATGKNMFAVAEFWKNDLGAIENYLQKTNWNHSVFDVPLHYNLYNASKSGGNYDMRNIFNGTVVQRHPSHAVTFVDNHDSQPEEALESFVEEWFKPLAYALTLTREQGYPSVFYGDYYGIPTHGVPAMRSKIDPILEARQKYAYGKQNDYLDHHNIIGWTREGNTAHPNSGLATIMSDGAGGSKWMFVGRNKAGQVWSDITGNRTGTVTINADGWGNFSVNGGSVSIWVNK

SEQ ID NO: 42608 - protein, 478 aa, Geobacillus stearothermophilus
LNGTLMQYFEWYTPNDGQHWKRLQNDSAYLAEHGITAVWIPPAYKGTSQADVGYGAYDLYDLGEFHQKGTVRTKYGTKGELQSAIKSLHSRDINVYGDVVINHKGGADATEDVTAVEVDPADRNRVISGEYLIKAWTHFHFPGRGSTYSDFKWHWYHFDGTDWDESRKLNRIYKFQGKAWDWEVSTENGNYDYLMYADIDYDHPDVVAEIKRWGTWYANELQLDGFRLDAVKHIKFSFLRDWVNHVREKTGKEMFTVGEYWSYDINKLHNYITKTNGTMSLFDAPLHNKFYTASKSGGAFDMRTLMTNTLMKDQPTLAVTFVDNHDTEPGQALQSWVDPWFKPLAYAFILTRQEGYPCVFYGDYYGIPQYNIPSLKSKIDPLLIARRDYAYGTQHDYLDHSDIIGWTREGVTEKPGSGLAALITDGPGGSKWMYVGKQHAGKVFYDLTGNRSDTVTINSDGWGEFKVNGGSVSVWVPR

SEQ ID NO: 42609 - protein, 480 aa, Bacillus sp.
NGTMMQYFEWYLPNDGNHWNRLNSDASNLKSKGIKAVWIPPAWKGASQNDVGYGAYDLYDLGEFNQRGTVRTKYGTRSQLQAAVTSLKNNGINVYGDVVMNHKGGADATEMVRAVEVNPNNRNQEVTGEYTIEAWTRFDFPGRGNTHSSFKWRWYHFDGVDFDQSRRLNNRIYKFRGHGKAWDWEVDTEFGNYDYLMYVDYDYDHPETTNEMRNWGVWYTNTLGLDGFRIDAVKHIKYSFTRDWINHVRIATGKNMFAVAEFWKNDLGAIENYLQKTNWNHSVFDVPLHYNLYNASKSGGNYDMRNIFNGTVVQAHPMHAVTFVDNHDSQPEEALESFVEEWFKPLAYALTLTREQGYPSVFYGDYYGIPTHGVPAMRSKIDPILEARQKYAYGPQHDYLDHPDVIGWTREGDSSHPKSGLATLITDGPGGSKRMYAGLKNAGETWYDITGNRSDTVKIGSDGWGEFHVNDGSVSIYVQK

SEQ ID NO: 42610 - protein, 480 aa, Bacillus sp.
NGTMMQYFEWYLPNDGNHWNRLNSDASNLKSKGITAVWIPPGWKGASQNDVGYGAYDLYDLEEFNQKGTVRTKYGTRSQLQAAVTSLKNNGIQVYGDVVMNHKGGTHATEMVRAVEVNPNNRNQEVTGEYTIEAWTRFDFPGRGNTHSSFKWRWYHFDGVDWDQSRRLNNRIYKFRGHGKAWDWEVDTEFGNYDYLMYADYDMDHPEVVNELRNWGVWYTNTLGLDGFRIDAVKHIKYSLTRDWINHVRSATGKNMFAVAEFWKNDLGAIENYLQKTNWNHSVFDVPLHYNLYNASKSGGNYDMRNIFNGTVVQRHPSHAVTFVDNHDSQPEEALESFVEPWFKPLAYALTLTREQGYPSVFYGDYYGIPTHGVPAMRSKIDPILEARQKYAYGPQHDYLDHPDVIGWTREGDSSHPKSGLATLITDGPGGSKRMYAGLKNAGETWYDITGNRSDTVKIGSDGWGEFHVNGTSVSIYVQK

SEQ ID NO: 42611 - protein, 518 aa, Geobacillus stearothermophilus
AAXXNGTLMQYFEWYLPXDGXXWXKLXNDAXXLAXXGITALWIPPAYKGTSXADVGYGXYDLYDLGEFXQKGTVRTKYGTKAXXXXAIXAXHAXXINVYADVVXXHKGGADATEXVXAVEVXPADRNXXISGXHXIXAWTXFXFPGRGXTYSXFKWXWYHFDGXDWDESRKLXRIYKFXGIGKAWDWEVXXENGNYDYLMYADIDXDHPDVXXEIKXWGXWYXNXXNIDGFRLDAVKHIKFSFXXDWLXHVRXXTGKXLFTVAEYWXXDIXXLXNYIXKTNXXXSLFDXPLHXXFHXASXXGGAFDMRXLLXXTLMXXXPXXAVTFVDNHDTXPGQALXSXVXXWFKPLAYAFILTRXXGYPXVFYGDXYGXXGDSQXXIPALKXKIDPILXARKXYAYGXQHDYXDHXDIIGWTREGXSXXXXSGLAALITDGPGGAKXMYVGKQXAGXXFHDITGNRSDXVXINSDGWGEFXVNGGSVSIWVXRKTTVSTIARPITTRPWTGEPVRWTEPRLVAWP

SEQ ID NO: 42612 - protein, 518 aa, Synthetic construct
AAPXNGTLMQYFEWYXPXDGXXWXKLXNDAXXLSXIGITALWIPPAYKGXSXSDXGYGXYDLYDLGEFNQKGTVRTKYGTKAXXXXAIXAXHAXXMQVYADVVXXHKAGADATEXVXAVEVNPAXRNQEXSXXYQIXAWTXFXFPGRGNTYSXFKWXWYHFDGXDWDESRKISRIFKFRGXGKAWDWEVXSENGNYDYLMYADLDXDHPDVVXEXKXWGXWYXNXXXIDGFRIDAXKHIKFSFXXDWLXXVRXXTGKXLFTVAEYWXXXXXKLXNYIXKTXXXXSLFDXPLHXXXXXASXXGGAFDMRXLLXXTLMXXXPXXAVTFVDNHDTXPGQALXSXVXXWFKPLAYAFILTRXXGYPXVFYGDXYGXXXXXPKEIPSLKXXIDPILXARKDYAYGXQHDYIDHXDIIGWTREGXSXXXXSGLAALITDGPGGSKXMYXGXXXAGXXFYDITGNRSDTVXIXSDGWGEFXVNKGSVSIWVXKKTTVSTIARPITTRPWTGEFVRWTEPRLVAWP

SEQ ID NO: 42613 - protein, 518 aa, Geobacillus stearothermophilus
AAPXNGTLMQYFEWYXPXDGXXWXKLXNDAXXLSXIGITALWIPPAYKGXSXSDXGYGXYDLYDLGEFNQKGTVRTKYGTKAXXXXAIXAXHAXXMQVYADVVXXHKAGADATEXVXAVEVNPAXRNQEXSXXYQIXAWTXFXFPGRGNTYSXFKWXWYHFDGXDWDESRKISRIFKFRGXGKAWDWEVXSENGNYDYLMYADLDXDHPDVVXEXKXWGXWYXNXXXIDGFRIDAXKHIKFSFXXDWLXXVRXXTGKXLFTVAEYWXXXXXKLXNYIXKTXXXXSLFDXPLHXXXXXASXXGGAFDMRXLLXXTLMXXXPXXAVTFVDNHDTXPGQALXSXVXXWFKPLAYAFILTRXXGYPXVFYGDXYGXXXXXPKEIPSLKXXIDPILXARKDYAYGXQHDYIDHXDIIGWTREGXSXXXXSGLAALITDGPGGSKXMYXGXXXAGXXFYDITGNRSDTVXIXSDGWGEFXVNXGSVSIWVXKKTTVSTIARPITTRPWTGEFVRWTEPRLVAWP

SEQ ID NO: 42614 - protein, 396 aa, Unidentified
NGTLMQYFEWYAPNDGNHWNRLRTDAENLAQKGITSVWIPPAYKGTTQNDVGYGAYDLYDLGEFNQKGTVRTKYGTKAQLKSAIDALHKKNIDVYGDVVMNHKGGADYTETVTAVEVDPSNRNVEVSGDYEISAWTGFNFPGRGDSYSNFKWKWYHFDGTDWDEGRKLNRIYKFRGIGKAWDWEVSSENGNYDYLMYADLDFDHPDVANEMKKWGTWYANELNLDGFRLDAVKHIDHEYLRDWVNHVRQQTGKEMFAVAEYWQNDIQTLNNYLAKVNYNQSVFDAPLHYNFHYASKGNGNYDMRNILKGTVVANHPTLAVTLVENHDSQPGQSLESVVSPWFKPLAYAFILTRAEGYPSVFYGDYYGTKGNSNYEIPALKDKIDPILTARKNYAYG

SEQ ID NO: 42615 - protein, 482 aa, Bacillus sp.
HHNGTNGTMMQYFEWDLPNDGTLWNRLHNNAQNLKNAGITALWLPPAYKGTSQSDVGYGVYDLYDLGEFNQKGTIRTKYGTKTQYIQAIQAAKAAGMQVYADVVFNHKAGADQTEFVDAVEVDPSNRNQEVSGTYQIEAWTKFDFPGRGNTYSSFKWRWYHFDGTDWDESRKLNRIYKFRGKAWDWEVDTENGNYDYLMFADLDMDHPEVVTELKNWGTWYVNTTNIDGFRLDAVKHIKFSFMRDWLTYVRNQTGKNLFAVGEFWSYDVNKLHNYITKTNGSMSLFDAPLHNNFYTASKSSGNFDMRNLLNGTLVQRHPSHAVTLVDNHDTQPGQSLQSWVEPWFKPLAYAFILTRQEGYPCVFYGDYYGIPSDGVPGLKSKIDPLLIARRDYAYGTQRDYIDHQDIIGWTREGIDTKPNSGLAALITDGPGGSKWMYVGKKHAGKVFYDLTGNRSDTVTINADGWGEFKVNGGSVSIWVAK

SEQ ID NO: 42616 - protein, 482 aa, Bacillus sp. YR288
NGTMMQYFEWYVPNDGQHWNRLRNDAAYLKSIGVSAIWTPPAYKGTSQNDVGYGAYDLYDLGEFNQKGTIRTKYGTKAELKSAVSTLKSNGIQVYGDVVMNHKGGADYTENVTAVEVNPSNRNQETSDEYTIQAWTGFNFPGRGTTHSPFKWQWYHFDGTDWDQSRNASRIFKFRGTGKAWDWPVSSENGNYDYLLYADLDYDHPDVRNEMKNWGVWYANEVGLDGFRLDAVKHIKFQFLGDWVNHVRTKTGKTMFTVAEYWQNDVNAINNYLAKVNYNHSVFDAPLHYNFHYASQSGGNYDMRNLLNGTVVAAHPTKAVTLVENHDSQPGQSLESVVQPWFKPLAYAFILTRAEGLPSIFYGDMYGTKGNSSYEIPALKTKIEPLLKARKDYAYGTQHNYMDHPDVIGWTREGDSTKEKSGLATLVTDGAGGSKWMYVGKQNAGEVWYDITGNRTDKITINTDGWGNFQVNKGSVSVYVQQ

SEQ ID NO: 42617 - protein, 482 aa, Synthetic construct
NGTMMQYFEWYLPNDGNHWTRLQNDAANLSSKGVTAVWIPPAYKGTSQNDVGYGAYDLYDLGEFNQKGTVRTKYGTKAQLKSAIAELHKQNIHVYGDVVMNHKGGADFTETVTAVEVDPNNRNRETSGDYQISAWTGFTFPGRGNTYSPFKWNWYHFDGTDWDPSTEINRIYKFRGTGKAWDWEVSSENGNYDYLMYADIDYEHPDVINEMKKWGTWYAKELNLDGFTLDAVKHIKHDYLRDWVTHVRNQTGKELFTVAEYWQNDIGQLNNYLAKTNYNQSVFDAPLHYHFHYASNSNGNYDMRNILKGTVMESNPRLAVTLVENHDSQPGQSLESVVSTWFKPLAYAFILTRAEGYPSVFYGDYYGTKGNSNYEIPSLKTQLDPILTARKNYAYGLQRDYIDHWDIIGWTREGEAARDKSGLATLITDGPGGYKWMEVGKQNAGEVWYDITGNRKETVTINNDGWGQFYVNGGSVSIYVQK

SEQ ID NO: 42618 - protein, 482 aa, Bacillus sp. YR288
NGTMMQYFEWYVPNDGQHWNRLRNDAAYLKSIGVSAIWTPPAYKGTSQNDVGYGAYDLYDLGEFNQKGTIRTKYGTKAELKSAVSTLKSNGIQVYGDVVMNHKGGADYTENVTAVEVNPSNRYQETSDEYTIQAWTGFNFPGRGTTHSPFKWQWYHFDGTDWDQSRNASRIFKFRGTGKAWDWEVSSENGNYDYLLYADLDYDHPDVRNEMKNWGVWYANEVGLDGFRLDAVKHIKFQFLGDWVNHVRTKTGKTMFTVAEYWQNDVNAINNYLAKVNYNHSVFDAPLHYNFHYASQSGGNYDMRNLLNGTVVAAHPTKAVTLVENHDSQPGQSLESVVQPWFKPLAYAFILTRAEGLPSIFYGDMYGTKGNSSYEIPALKTKIEPLLKARKDYAYGTQHNYMDHPDVIGWTREGDSTKEKSGLATLVTDGAGGSKWMYVGKQNAGEVWYDITGNRTDKITINTDGWGNFQVNKGSVSVYVQQ

SEQ ID NO: 42619 - protein, 482 aa, Bacillus sp. YR288
NRTMMQYFEWYVPNDGQHWNRLRNDAAYLKSIGVSAIWTPPAYKGTSQNDVGYGAYDLYDLGEFNQKGTIRTKYGTKAELKSAVSTLKSNGIQVYGDVVMNHKGGADYTENVTAVEVNPSNRNQETSDEYTIQAWTGFNFPGRGTTHSPFKWQWYHFDGTDWDQSRNASRIFKFRGTGKAWDWEVSSENGNYDYLMYADLDFDHPDVRNEMKNWGVWYANEVGLDGFRLDAVKHIKHSYLGDWVNHVRTKTGKEMWTVAEYWQNDVNAINNYLAKVNYNHWVFDAPLHYNFHYASQSGGNYDMRNLLNGTVVAAHPEKAVTLVENHDSQPGQSLESVVQPWFKPLAYAFILTRAEGYPSIFYGDMYGTKGNSSYEIPALKTKIEPLLKARKDYAYGTQHNYMDHWDVIGWTREGDSTKEKSGLATLVTDGAGGSKRMYVGKQNAGEVWYDITGNRTDKITINTDGWGTFQVNGGSVSVYVQQ

SEQ ID NO: 42620 - protein, 483 aa, Synthetic construct
NGTLMQYFEWYMPNDGQHWKRLQNDSAYLAEHGITAVWIPPAYKGTSQADVGYGAYDLYDLGEFHQKGTVRTKYGTKGELQSAIKSLHSRDINVYGDVVINHKGGADFTERVQAVEVNPQNRNQEVSGTYQIEAWTGFNFPGRGNQHSSFKWRWYHFDGTDWDQSRQLANRIYKFRGDGKAWDWEVDTENGNYDYLMYADVDYDHPDVAAEIKRWGTWYANELQLDGFRLDAVKHIKFSFLRDWVNHVREKTGKEMFTVAEYWSYDLGALENYLNKTNFNHSVFDVPLHYQFHAASTQGGGYDMRKLLNGTVVSKHPLKSVTFVDNHDTQPGQSLESTVQTWFKPLAYAFILTRESGYPQVFYGDMYGTKGDSQREIPALKHKIEPILKARKQYAYGAQHDYFDHHDIVGWTREGDSSVANSGLAALITDGPGGAKRMYVGRQNAGETWHDITGNRSEPVVINSAGWGEFHVNGGSVSIYVQR

SEQ ID NO: 42621 - protein, 482 aa, Synthetic construct
NGTLMQYFEWYMPNDGQHWKRLQNDSAYLAEHGITAVWIPPAYKGTSQADVGYGAYDLYDLGEFHQKGTVRTKYGTKGELQSAIKSLHSRDINVYGDVVIDHKGGADGTEWVDAVEVNPSDRNQEISGTYQIQAWTKFDFPGRGNTYSSFKWRWYHFDGVDWDESRKLSRIYKFRGIGKAWDWEVDTENGNYDYLMYADLDYDHPDVAAEIKRWGTWYANELQLDGFRLDAVKHIKFSFLRDWVNHVREKTGKEMFTVAEYWSYDLGALENYLNKTNFNHSVFDVPLHYQFHAASTQGGGYDMRKLLNGTVVSKHPLKSVTFVDNHDTQPGQSLESTVQTWFKPLAYAFILTRESGYPQVFYGDMYGTKGDSQREIPALKHKIEPILKARKQYAYGAQHDYFDHHDIVGWTREGDSSVANSGLAALITDGPGGAKRMYVGRQNAGETWHDITGNRSEPVVINSAGWGEFHVNGGSVSIYVQR

SEQ ID NO: 42622 - protein, 482 aa, Synthetic construct
NGTLMQYFEWYMPNDGQHWKRLQNDSAYLAEHGITAVWIPPAYKGTSQADVGYGAYDLYDLGEFHQKGTVRTKYGTKGELQSAIKSLHSRDINVYGDVVINHKAGADGTELVDAVEVNPSDRNQEISGTYQIQAWTKFDFPGRGNTYSSFKWRWYHFDGTDWDESRKLNRIYKFRGTGKAWDWEVDTENGNYDYLMYADLDYDHPDVAAEIKRWGTWYANELQLDGFRLDAVKHIKFSFLRDWVNHVREKTGKEMFTVAEYWSYDLGALENYLNKTNFNHSVFDVPLHYQFHAASTQGGGYDMRKLLNGTVVSKHPLKSVTFVDNHDTQPGQSLESTVQTWFKPLAYAFILTRESGYPQVFYGDMYGTKGDSQREIPALKHKIEPILKARKQYAYGAQHDYFDHHDIVGWTREGDSSVANSGLAALITDGPGGAKRMYVGRQNAGETWHDITGNRSEPVVINSAGWGEFHVNGGSVSIYVQR

SEQ ID NO: 42623 - protein, 478 aa, Geobacillus stearothermophilus
LNGTLMQYFEWYTPNDGQHWKRLQNDSAYLAEHGITAVWIPPAYKGTSQADVGYGAYDLYDLGEFHQKGTVRTKYGTKGELQSAIKSLHSRDINVYGDVVINHKGGADATEDVTAVEVDPADRNRVISGEYLIKAWTHFHFPGRGSTYSDFKWHWYHFDGTDWDESRKLNRIYKFQGKAWDWEVSSENGNYDYLMYADIDYDHPDVVAEIKRWGTWYANELQLDGFRLDAVKHIKFSFLRDWVNHVRSQTGKPLFTVGEYWSYDINKLHNYITKTNGTMSLFDAPLHNKFYTASKSGGAFDMRTLMTNTLMKDQPTLAVTFVDNHDTEPGQALQSWVDPWFKPLAYAFILTRQEGYPCVFYGDYYGIPQYNIPSLKSKIDPLLIARRDYAYGTQHDYLDHSDIIGWTREGVTEKPGSGLAALITDGPGGSKWMYVGKQHAGKVFYDLTGNRSDTVTINSDGWGEFKVNGGSVSVWVPR

SEQ ID NO: 42624 - protein, 478 aa, Geobacillus stearothermophilus
LNGTLMQYFEWYTPNDGQHWKRLQNDSAYLAEHGITAVWIPPAYKGTSQADVGYGAYDLYDLGEFHQKGTVRTKYGTKGELQSAIKSLHSRDINVYGDVVINHKGGADATEDVTAVEVDPADRNRVISGEYLIKAWTHFHFPGRGSTYSDFKWHWYHFDGTDWDESRKLNRIYKFQGKAWDWEVSSENGNYDYLMYADIDYDHPDVVAEIKRWGTWYANELQLDGFRLDAVKHIKFSFLRDWVNHVREKTGKPLFTVGEYWSYDINKLHNYITKTNGTMSLFDAPLHNKFYTASKSGGAFDMRTLMTNTLMKDQPTLAVTFVDNHDTEPGQALQSWVDPWFKPLAYAFILTRQEGYPCVFYGDYYGIPQYNIPSLKSKIDPLLIARRDYAYGTQHDYLDHSDIIGWTREGVTEKPGSGLAALITDGPGGSKWMYVGKQHAGKVFYDLTGNRSDTVTINSDGWGEFKVNGGSVSVWVPR

SEQ ID NO: 42625 - protein, 478 aa, Geobacillus stearothermophilus
LNGTLMQYFEWYTPNDGQHWKRLQNDSAYLAEHGITAVWIPPAYKGTSQADVGYGAYDLYDLGEFHQKGTVRTKYGTKGELQSAIKSLHSRDINVYGDVVINHKGGADATEDVTAVEVDPADRNRVISGEYLIKAWTHFHFPGRGSTYSDFKWHWYHFDGTDWDESRKLNRIYKFQGKAWDWEVDTENGNYDYLMYADIDYDHPDVVAEIKRWGTWYANELQLDGFRLDAVKHIKFSFLRDWVNHVREKTGKEMFTVGEYWSYDINKLHNYITKTNGTMSLFDAPLHNKFYTASKSGGAFDMRTLMTNTLMKDQPTLAVTFVDNHDTEPGQALQSWVDPWFKPLAYAFILTRQEGYPCVFYGDYYGIPQYNIPSLKSKIDPLLIARRDYAYGTQHDYLDHSDIIGWTREGVTEKPGSGLAALITDGPGGSKWMYVGKQHAGKVFYDLTGNRSDTVTINSDGWGEFKVNGGSVSVWVPR

SEQ ID NO: 42626 - protein, 479 aa, Synthetic construct
NGTMMQYFEWYLPNDGNHWNRLRSDASNLKDKGISAVWIPPAWKGASQNDVGYGAYDLYDLGEFNQKGTIRTKYGTRNQLQAAVNALKSNGIQVYGDVVMNHKAGADATEDVTAVEVNPANRNQETSEEYQIKAWTDFRFPGRGNTYSDFKWHWYHFDGADWDESRKISRIFKFRGEGKAWDWEVSSENGNYDYLMYADVDMDHPEVVNELRNWGVWYTNTLGLDGFRIDAVKHIKYSFTRDWINHVRSATGKNMFAVAEFWKNDLGAIENYLNKTNWNHSVFDVPLHYNLYNASKSGGNYDMRQIFNGTVVQRHPMHAVTFVDNHDSQPEEALESFVEEWFKPLAYALTLTREQGYPSVFYGDYYGIPTHGVPAMKSKIDPILEARQKYAYGRQNDYLDHHNIIGWTREGNTAHPNSGLATIMSDGAGGNKWMFVGRNKAGQVWTDITGNRAGTVTINADGWGNFSVNGGSVSIWVNK

SEQ ID NO: 42627 - protein, 480 aa, Bacillus sp.
NGTMMQYFEWHLPNDGNHWNRLRDDASNLRNRGITAIWIPPAWKGTSQNDVGYGAYDLYDLGEFNQKGTVRTKYGTRSQLESAIHALKNNGVQVYGDVVMNHKGGADATENVLAVEVNPNNRNQEISGDYTIEAWTKFDFPGRGNTYSDFKWRWYHFDGVDWDQSRQFQNRIYKFRGDGKAWDWEVDSENGNYDYLMYADVDMDHPEVVNELRRWGEWYTNTLNLDGFRIDAVKHIKYSFTRDWLTHVRNATGKEMPAVAEFWKNDLGALENYLNKTNWNHSVFDVPLHYNLYNASNGGGNYDMAKLLNGTVVQKHPMHAVTFVDNHDSQPGESLESFVQEWFKPLAYALILTREQGYPSVFYGDYYGIPTHSVPAMKAKIDPILEARQNFAYGAQHDYFDHHDIVGWTREGDSSVANSGLAALITDGPGGAKRMYVGRQNAGETWHDITGNRSEPVVINSEGWGEFHVNGGSVSIYVQR

SEQ ID NO: 42628 - protein, 478 aa, Synthetic construct
NGTMMQYFEWYLPNDGNHWNRLNSDASNLASKGITAVWIPPAWKGTSQADVGYGAYDLYDLGEFNQKGTVRTKYGTRSQLQAAVTSLKNNGIQVYGDVVMNHKAGADATEMVTAVEVNPNNRNQEVTGEYTIEAYTRFDFPGRGNTHSSFKWRWYHFDGVDWDQSRSLSNRIYKFQGKAWDWPVDTENGNYDYLMYADLDMDHPEVVNELRNWGVWYTNTLGLDGFRLDAVKHIKFSFTRDWINHVRSATGKNMFAVAEYWKNDLGAIENYLNFTNWNHSVFDVPLHYNLYAASTSGGNYDMRNIFNGTVVQKHPSHAVTFVDNHDTQPEESLESFVQPWFKPLAYALILTRESGYPSVFYGDYYGIPTHGVPAMRSKIDPILEARQKYAYGPQHDYLDHHDIVGWTREGDSSHPNSGLATLITDGPGGAKRMYVGRQNAGETWHDITGNRSEPVVINSEGWGEFHVNKGSVSIYVQR

SEQ ID NO: 42629 - protein, 478 aa, Synthetic construct
NGTMMQYFEWYLPNDGTLWTKMGSDASHLKSIGITGVWFPPAYKGQSQSDVGYGVYDMYDLGEFNQKGTVRTKYGTKAQLQSAITSLHNNGIQAYGDVVLNHKAGADATEWVDAVEVNPSNRNQEVSGTYKIQAWTKFDFPGRGNTYSSFKWRWYHFDGTDWDQSRQLNRIYKFRGTGKAWDWEVDTENGNYDYLMFADLDYDHPDVQTEVKNWGKWFVNTLNLDGVRLDAVKHIKFDYMSSWLSSVKSTTGKSNLFAVGEYWNTSLGALENYENKTNWSMSLFDVPLHMNFQAAANGGGYYDMRNLLNNTMMKNHPIQAVTFVDNHDTEPGQALQSWVSDWFKPLAYATILTRQEGYPCVFYGDYYGIPSQSVSAKSTWLDKQLSARKSYAYGTQHDYLDNQDVIGWTREGDSAHAGSGLATVMSDGPGGSKTMYVGTAHAGQVFKDITGNRTDTVTINSAGNGTFPCNGGSVSIWV

SEQ ID NO: 42630 - protein, 482 aa, Bacillus sp. YR288
NGTMMQYFEWYVPNDGQHWNRLRNDAAYLKSIGVNAIWTPPAYKGTSQNDVGYGAYDLYDLGEFNQKGTIRTKYGTKAELKSAVSTLKSNGIQVYGDVVMNHKGGADYTENVTAVEVNPSNRNQETSDEYTIQAWTGFNFPGRGTTHSPFKWQWYHFDGTDWDQSRNASRIFKFRHTGKAWDWEVSSEFGNYDYLLYADLDYDHPDVINEMKNWGVWYANEVGLDGFRLDAVKHIKFQFLGDWVNHVRTKTGKEMFTVAEYWQNDVNAINNYLAKVNYNHSVFDAPLHYNFHYASQSGGNYDMRNLLNGTVVAAHPTKAVTLVENHDSQPGQSLESVVQPWFKPLAYAFILTRAEGYPSIFYGDMYGTKGNSSYEIPALKTKIEPLLKARKDYAYGTQHNYMDHWDVIGWTREGDSTKEKSGLATLVTDGAGGSKWMYVGKQNAGEVWYDITGNRTDKITINTDGWGTFQVNKESVSVYVQQ

SEQ ID NO: 42631 - protein, 482 aa, Bacillus sp. YR288
NRTMMQYFEWYVPNDGQHWNRLRNDAAYLKSIGVSAIWTPPAYKGTSQNDVGYGAYDLYDLGEFNQKGTIRTKYGTKAELKSAVSTLKSNGIQVYGDVVMNHKGGADYTENVTAVEVNPSNRNQETSDEYTIQAWTGFNFPGRGTTHSPFKWQWYHFDGTDWDQSRNASRIFKFRHTGKAWDWEVSSEFGNYDYLLYADLDYDHPDVINEMKNWGVWYANEVGLDGFRLDAVKHIKFQFLGDWVNHVRTKTGKEMFTVAEYWQNDVNAINNYLAKVNYNHWVFDAPLHYNFHYASQSGGNYDMRNLLNGTVVAAHPTKAVTLVENHDSQPGQSLESVVQPWFKPLAYAFILTRAEGYPSIFYGDMYGTKGNSSYEIPALKTKIEPLLKARKDYAYGTQHNYMDHWDVIGWTREGDSTKEKSGLATLVTDGAGGSKRMYVGKQNAGEVWYDITGNRTDKITINTDGWGNFQVNGGSVSVYVQQ

SEQ ID NO: 42632 - protein, 482 aa, Bacillus sp. YR288
NGTMMQYFEWYVPNDGQHWNRLRNDAAYLKSIGVSAIWTPPAYKGTSQNDVGYGAYDLYDLGEFNQKGTIRTKYGTKAELKSAVSTLKSNGIQVYGDVVMNHKGGADYTENVTAVEVNPSNRNQETSDEYTIQAWTGFNFPGRGTTHSPFKWQWYHFDGTDWDQSRNASRIFKFRHTGKAWDWEVSSEFGNYDYLLYADLDYDHPDVINEMKNWGVWYANEVGLDGFRLDAVKHIKFQFLGDWVNHVRTKTGKTMFTVAEYWQNDVNAINNYLAKVNYNHSVFDAPLHYNFHYASQSGGNYDMRNLLNGTVVAAHPTKAVTLVENHDSQPGQSLESVVQPWFKPLAYAFILTRAEGLPSIFYGDMYGTKGNSSYEIPALKTKIEPLLKARKDYAYGTQHNYMDHPDVIGWTREGDSTKEKSGLATLVTDGAGGSKWMYVGKQNAGEVWYDITGNRTDKITINTDGWGNFQVNKGSVSVYVQQ

SEQ ID NO: 42633 - protein, 482 aa, Bacillus sp. YR288
NGTMMQYFEWYVPNDGQHWNRLRNDAAYLKSIGVSAIWTPPAYKGTSQNDVGYGAYDLYDLGEFNQKGTIRTKYGTKAELKSAVSTLKSNGIKVYGDVVMNHKGGADYTENVTAVEVNPSNRNQETSDEYTIQAWTGFNFPGRGTTHSPFKWQWYHFDGTDWDQSRNASRIFKFRGTGKAWDWEVSSENGNYDYLMYADLDFDHPDVRNEMKNWGVWYANEVGLDGFRLDAVKHIKHSYLGDWVNHVRTKTGKEMWTVAEYWQNDVNAINNYLAKVNYNHSVFDAPLHYNFHYASQSGGNYDMRNLLNGTVVAAHPTKAVTLVENHDSQPGQSLESVVQPWFKPLAYAFILTRAEGLPSIFYGDMYGTKGNSSYEIPALKTKIEPLLKARKDYAYGTQHNYMDHWDVIGWTREGDSTKEKSGLATLVTDGAGGSKRMYVGKQNAGEVWYDITGNRTDKITINTDGWGTFQVNGGSVSVYVQQ

SEQ ID NO: 42634 - protein, 482 aa, Bacillus sp. YR288
NRTMMQYFEWYVPNDGQHWNRLRNDAAYLKSIGVSAIWTPPAYKGTSQNDVGYGAYDLYDLGEFNQKGTIRTKYGTKAELKSAVSTLKSNGIKVYGDVVMNHKGGADYTENVTAVEVNPSNRNQETSDEYTIQAWTGFNFPGRGTTHSPFKWQWYHFDGTDWDQSRNASRIFKFRGTGKAWDLEVSSENGNYDYLMYADLDFDHPDVRNEMKNWGVWYANEVGLDGFRLDAVKHIKHSYLGDWVNHVRTKTGKTMFTVAEYWQNDVNAINNYLAKVNYNHSVFDAPLHYNFHYASQSGGNYDMRNLLNGTVVAAHPTKAVTLVENHDSQPGQSLESVVQPWFKPLAYAFILTRAEGYPSIFYGDMYGTKGNSSYEIPALKTKIEPLLKARKDYAYGTQHNYMDHPDVIGWTREGDSTKEKSGLATLVTDGAGGSKRMYVGKQNAGEVWYDITGNRTDKITINTDGWGNFQVNGGSVSVYVQQ

SEQ ID NO: 42635 - protein, 482 aa, Bacillus sp. YR288
NRTMMQYFEWYVPNDGQHWNRLRNDAAYLKSIGVSAIWTPPAYKGTSQNDVGYGAYDLYDLGEFNQKGTIRTKYGTKAELKSAVSTLKSNGIKVYGDVVMNHKGGADYTENVTAVEVNPSNRNQETSDEYTIQAWTGFNFPGRGTTHSPFKWQWYHFDGTDWDQSRNASRIFKFRGTGKAWDWEVSSENGNYDYLMYADLDFDHPDVRNEMKNWGVWYANEVGLDGFRLDAVKHIKHSYLGDWVNHVRTKTGKEMWTVAEYWQNDVNAINNYLAKVNYNHSVFDAPLHYNFHYASQSGGNYDMRNLLNGTVVAAHPTKAVTLVENHDSQPGQSLESVVQPWFKPLAYAFILTRAEGLPSIFYGDMYGTKGNSSYEIPALKTKIEPLLKARKDYAYGTQHNYMDHPDVIGWTREGDSTKEKSGLATLVTDGAGGSKRMYVGKQNAGEVWYDITGNRTDKITINTDGWGNFQVNGGSVSVYVQQ

SEQ ID NO: 42636 - protein, 482 aa, Bacillus sp. YR288
NRTMMQYFEWYVPNDGQHWNRLRNDAAYLKSIGVSAIWTPPAYKGTSQNDVGYGAYDLYDLGEFNQKGTIRTKYGTKAELKSAVSTLKSNGIKVYGDVVMNHKGGADYTENVTAVEVNPSNRNQETSDEYTIQAWTGFNFPGRGTTHSPFKWQWYHFDGTDWDQSRNASRIFKFRGTGKAWDLEVSSENGNYDYLMYADLDFDHPDVRNEMKNWGVWYANEVGLDGFRLDAVKHIKHSYLGDWVNHVRTKTGKTMFTVAEYWQNDVNAINNYLAKVNYNHSVFDAPLHYNFHYASQSGGNYDMRNLLNGTVVAAHPEKAVTLVENHDSQPGQSLESVVQPWFKPLAYAFILTRAEGYPSIFYGDMYGTKGNSSYEIPALKTKIEPLLKARKDYAYGTQHNYMDHWDVIGWTREGDSTKEKSGLATLVTDGAGGSKRMYVGKQNAGEVWYDITGNRTDKITINTDGWGNFQVNGGSVSVYVQQ

SEQ ID NO: 42637 - protein, 485 aa, Synthetic construct
NGTMMQYFEWHLPXDGXXWXKLXXDAXNLXXXGITAIWIPPAWKGTSXXDVGYGXYDLYDLGEFNQKGTVRTKYGTKAQXXXAIXAXXXXGMQVYADVVXXHKGGADATEXVXAVEVNPXXRNQEISGXYXIXAWTKFDFPGRGNTYSXFKWRWYHFDGVDWDXSREXXXRIYKFRGXGKAWDWEVDSENGNYDYLMYADLDMDHPEVVXELKXWGXWYXNTXNIDGFRIDAVKHIKFSFXXDWLSHVRXXTGKXLFXVAEFWXXDIXXLXNYIXKTNXXXSLFDXPLHXXXYXASXSGGXFDMXXLLXXTLMXXXPXXAVTFVDNHDSXPGXALXSFVXXWFKPLAYAXILTRXXGYPXVFYGDYYGIPXHXIPALKAKIDPILXARXXFAYGTQHDYXDHXXIIGWTREGXTXXPXSGLAXIISDGPGGXKWMYVGXNXAGXVFHDITGNKXXTVTINADGWAXFXVNGGSVSIWVXRKTTVS

SEQ ID NO: 42638 - protein, 485 aa, Geobacillus stearothermophilus
NGTMMQYFEWHLPXDGXXWXKLXXDAXNLXXXGITAIWIPPAWKGTSXXDVGYGXYDLYDLGEFNQKGTVRTKYGTKAQXXXAIXAXXXXGMQVYADVVXXHKGGADATEXVXAVEVNPXXRNQEISGXYXIXAWTKFDFPGRGNTYSXFKWRWYHFDGVDWDXSRQXXXRIYKFRGXGKAWDWEVDSENGNYDYLMYADLDMDHPEVVXELKXWGXWYXNTXNIDGFRIDAVKHIKFSFXXDWLSHVRXXTGKXLFXVAEFWXXDIXXLXNYIXKTNXXXSLFDXPLHXXXYXASXSGGXFDMXXLLXXTLMXXXPXXAVTFVDNHDSXPGXALXSFVXXWFKPLAYAXILTRXXGYPXVFYGDYYGIPXHXIPALKAKIDPILXARXXFAYGTQHDYXDHXXIIGWTREGXTXXPXSGLAXIISDGPGGXKWMYVGXNXAGXVFHDITGNKXXTVTINADGWAXFXVNGGSVSIWVXRKTTVS

SEQ ID NO: 42639 - protein, 480 aa, Geobacillus stearothermophilus
NGTMMQYFEWYLPXDGXXWXKLXXDAXNLXSXGITALWIPPAWKGXSXXDVGYGXYDLYDLGEFNQKGTVRTKYGTKAQXXXAIXAXXXXGIQVYADVVXXHKGGADATEXVXAVEVNPXXRNQEISGXYXIXAWTKFDFPGRGNTHSSFKWRWYHFDGVDWDXSRKLXXRIYKFRGXGKAWDWEVDTENGNYDYLMYADIDMDHPEVVXELKNWGXWYXNTXXIDGFRIDAVKHIKFSFXXDWIXHVRSXTGKXLFXVAEFWXXDIXXIXNYIXKTNXXXSLFDXPLHXXXYXASKSGGXFDMRXIXXXTLMXXXPSXAVTFVDNHDSXPXXALXSFVDXWFKPLAYAXXLTRXXGYPXVFYGDYYGIPXHXIPALKSKIDPILXARXXYAYGXQXDYLDHXXIIGWTREGXTXXPXSGLAXIISDGXGGSKWMFVGKNXAGXVFXDITGNRSXTVTINADGWGXFXVNGGSVSIWVXK

SEQ ID NO: 42640 - protein, 394 aa, unidentified
NGTLMQYFEWYAPNDGNHWNRLRTDAENLAQKGITSVWIPPAYKGTTQNDVGYGAYDLYDLGEFNQKGTVRTKYGTKAQLKSAIDALHKKNIDVYGDVVMNHKGGADYTETVTAVEVDPSNRNVEVSGDYEISAWTGFNFPGRGDSYSNFKWKWYHFDGTDWDEGRKLNRIYKFIGKAWDWEVSSENGNYDYLMYADLDFDHPDVANEMKKWGTWYANELNLDGFRLDAVKHIDHEYLRDWVNHVRQQTGKEMFAVAEYWQNDIQTLNNYLAKVNYNQSVFDAPLHYNFHYASKGNGNYDMRNILKGTVVANHPTLAVTLVENHDSQPGQSLESVVSPWFKPLAYAFILTRAEGYPSVFYGDYYGTKGNSNYEIPALKDKIDPILTARKNYAYG

SEQ ID NO: 42641 - protein, 396 aa, Bacillus licheniformis
NGTLMQYFEWYAPNDGNHWKRLHTDAGNLAQKGITSVWIPPAYKGTTQNDVGYGAYDLYDLGEFNQKGTVRTKYGTKAQLKSAIEALHKQNINVYGDVVMNHKGGADYTETVTAVEVDRNNRNIEVSGDYEINAWTGFNFPGRGDTHSNFKWKWYHFDGTDWDEGRKLNRIYKFRGIGKAWDWEVSSENGNYDYLMYADLDFDHPDVANEMKNWGTWYANELNLDGFRLDAVKHIDHEYLRDWVNHVRQQTGKEMFTVAEYWQNDIQTLNNYLAKVNYNQSVFDAPLHYNFHYASKGNGNYDMRNILNGTVMQNHPALAVTLVENHDSQPGQSLESVVSPWFKPLAYAFILTRAEGYPSVFYGDYYGTSGNSSYEIPALKDKIDPILMARKNFAYG

SEQ ID NO: 42642 - protein, 480 aa, Bacillus licheniformis
NGTLMQYFEWYTPNDGQHWKRLQNDSAYLAEHGITAVWIPPAYKGTSQADVGYGAYDLYDLGEFHQKGTVRTKYGTKGELQSAIKSLHSRDINVYGDVVINHKGGADATELVRAVEVNPANRNQEISGEYLIEAYTYFDFPGRGSTHSNFKWRWYHFDGTDWDESRKLNRIYKFRGKAWDWEVSNENGNYDYLTYADIDYDHPDVAAEIKRWGTWYANELQLDGFRLDAVKHIKFSFLRDWVNHVREKTGKEMFTVAEYWQNDLGALENYLNKTNFNHSVFDVPLHYQFHAASTQGGGYDMRKLLNGTVVSKHPLKSVTFVDNHDTQPGQSLESTVQTWFKPLAYAFILTRESGYPQVFYGDMYGTKGDSQREIPALKHKIEPILKARKQYAYGAQHDYFDHHDIVGWTREGDSSVANSGLAALITDGPGGAKRMYVGRQNAGETWHDITGNRSEPVVINSEGWGEFHVNGGSVSIYVQR

SEQ ID NO: 42643 - protein, 482 aa, Synthetic construct
NGTLMQYFEWYMPNDGQHWKRLQNDSAYLAEHGITAVWIPPAYKGTSQADVGYGAYDLYDLGEFHQKGTVRTKYGTKGELQSAIKSLHSRDINVYGDVVINHKAGADSTEWVDAVEVNPSNRNQETSGTYQIQAWTKFDFPGRGNTYSSFKWRWYHFDGTDWDESRKLNRIYKFRGTGKAWDWEVDTENGNYDYLMFADLDYDHPDVAAEIKRWGTWYANELQLDGFRLDAVKHIKFSFLRDWVNHVREKTGKEMFTVAEYWSYDLGALENYLNKTNFNHSVFDVPLHYQFHAASTQGGGYDMRKLLNGTVVSKHPLKSVTFVDNHDTQPGQSLESTVQTWFKPLAYAFILTRESGYPQVFYGDMYGTKGDSQREIPALKHKIEPILKARKQYAYGAQHDYFDHHDIVGWTREGDSSVANSGLAALITDGPGGAKRMYVGRQNAGETWHDITGNRSEPVVINSAGWGEFHVNGGSVSIYVQR

SEQ ID NO: 42644 - protein, 482 aa, Synthetic construct
NGTLMQYFEWYMPNDGQHWKRLQNDSAYLAEHGITAVWIPPAYKGTSQADVGYGAYDLYDLGEFHQKGTVRTKYGTKGELQSAIKSLHSRDINVYGDVVINHKAGADGTEFVDAVEVNPSNRNQETSGTYQIQAWTKFDFPGRGNTYSSFKWRWYHFDGTDWDESRKLNRIYKFRGTGKAWDWEVDTENGNYDYLMFADLDYDHPDVAAEIKRWGTWYANELQLDGFRLDAVKHIKFSFLRDWVNHVREKTGKEMFTVAEYWSYDLGALENYLNKTNFNHSVFDVPLHYQFHAASTQGGGYDMRKLLNGTVVSKHPLKSVTFVDNHDTQPGQSLESTVQTWFKPLAYAFILTRESGYPQVFYGDMYGTKGDSQREIPALKHKIEPILKARKQYAYGAQHDYFDHHDIVGWTREGDSSVANSGLAALITDGPGGAKRMYVGRQNAGETWHDITGNRSEPVVINSAGWGEFHVNGGSVSIYVQR

SEQ ID NO: 42645 - protein, 518 aa, Geobacillus stearothermophilus
AAPXNGTLMQYFEWYXPXDGXXWXKLXNDAXXLSXIGITALWIPPAYKGXSXSDXGYGXYDLYDLGEFNQKGTVRTKYGTKAXXXXAIXAXHAXXMQVYADVVXXHKAGADATEXVXAVEVNPAXRNQEXSXXYQIXAWTXFXFPGRGNTYSXFKWXWYHFDGXDWDESRKISRIFKFRGXGKAWDWEVXSENGNYDYLMYADLDXDHPDVVXEXKXWGXWYXNXXXIDGFRIDAXKHIKFSFXXDWLXXVRXXTGKXLFTVAEYWXXXXXKLXNYIXKTXXXXSLFDXPLHXXXXXASXXGGAFDMRXLLXXTLMXXXPXXAVTFVDNHDTXPGQALXSXVXXWFKPLAYAFILTRXXGYPXVFYGDXYGXXXXXPKEIPSLKXXIDPILXARKDYAYGXQHDYIDHXDIIGWTREGXSXXXXSGLAALITDGPGGSKXMYXGXXXAGXXFYDITGNRSDTVXIXSDGWGEFXVNXGSVSIWVXKKTTVSTIARPITTRPWTGEPVRWTEPRLVATP

SEQ ID NO: 42646 - protein, 473 aa, Aspergillus rolfsii
AQWRSQSIYFLMTDRFGRTDKSVTAPCNTNDRVYCGGTWQGIINQLDYIQGMGFTAIWITPVTEQLPQDTGDGEAYHGYWQQEIYNVNNNYGTAADLKALSQALHSRGMYLMVDVVANHMGYAGAGNTVDYSVFKPFSSSSYFHPYCLISDYSNQTNVEDCWLGDTTVSLPDLDTTLSSVQTIWYNWVSDLVSNYSIDGLRIDTVKHVQKSFWPGYQSAAGVYCVGEVFSGDPAYTCPYQNYLDGVLNYPIYYQLLGAFKSTSGSISSLYNMINSVASDCADPTLLGNFIENHDNPRFASYTSDYSQAKNVISFIFLSDGIPIVYAGQEQHYSGGNDPANREATWLSGYSKNAQLYQHIASTNKIRSLAISKDANYITSKNNAFYTDSNTIAMKKGSSGSQVVTVLSNRGSSGSSYTLSLSGSGYAAGTKLVEMYTCTAVTVDSNGNIAVSMTSGLPRVFMLASSACSLCSSA

SEQ ID NO: 42647 - protein, 480 aa, Cytophaga sp.
NGTLMQYFEWYAPNDGNHWNRLRTDAENLAQKGITSVWIPPAYKGTTQNDVGYGAYDLYDLGEFNQKGTVRTKYGTKAQLKSAIDALHKKNIDVYGDVVMNHKGGADYTETVTAVEVDPSNRNVEVSGDYEISAWTGFNFPGRGDSYSNFKWKWYHFDGTDWDEGRKLNRIYKFIGKAWDWEVSSENGNYDYLMYADLDFDHPDVANEMKKWGTWYANELNLDGFRLDAVKHIDHEYLRDWVNHVRQQTGKEMFAVAEYWQNDIQTLNNYLAKVNYNQSVFDAPLHYNFHYASKGNGNYDMRNILKGTVVANHPTLAVTLVENHDSQPGQSLESVVSPWFKPLAYAFILTRAEGYPSVFYGDYYGTKGNSNYEIPALKDKIDPILTARKNYAYGTQRDYIDNPDVIGWTREGDSTKAKSGLATVITDGPGGSKRMYVGTSNAGEIWYDLTGNRTDKITIGSDGYATFPVNGGSVSVWVQQ

SEQ ID NO: 42648 - protein, 472 aa, Penicillium wotroi
EWRSQSIYFLLTDRFGRTDNSTTATCNVSDRIYCGGSWQGIINHLDYIQDMGFTAIWITPVTEQLSQDTGDGEAYHGYWQQEIYNVNTNYGTASDLLALSEALHSRGMYLMVDVVANHMGYDGAGNTVDYSVFNPFDSSSYFHSYCEISDYSNQTNVEDCWLGDTTVSLPDLDTTLSSVQTIWYDWVAALVSNYSIDGLRVDTVKHVQKSFWPGYNSAAGVYCVGEVFDGDPAYTCPYQDYMDGVLNYPIYYQLLYAFESTSGSISNLYNMISSVASDCSDTTLLGNFIENHDNPRFASYTSDYSQAKNVLSFIFFSDGIPIVYAGQEQHYSGGSDPANREATWLSGYDTSAELYTWIASTNKIRSLAISKDTAYVTSKNDAFYTDSSTIAMKKGSSGSQVITVLSNLGSSGSSYTLTLSGSGYSSGTKLMEMYTCTAVTVDSSGGIAVPMASGLPRVYMLASSACSICSSA

SEQ ID NO: 42649 - protein, 496 aa, Aspergillus terreus
WTFSLLLLLSVFGQATHALTPAEWRSQSIYFLLTDRFGRTDNSTTAACDTTDRVYCGGSWQGIINHLDYIQGMGFTAIWITPVTGQFYENTGDGTSYHGYWQQDIYDLNYNYGTAQDLKNLASALHERGMYLMVDVVANHMGYDGAGNTVDYSVFNPFSSSSYFHPYCLISNYDNQTNVEDCWLGDTTVSLPDLDTTSTAVRDIWYDWVADLVANYSIDGLRVDTVKHVEKDFWPDYNSAAGVYCVGEVFSGDPAYTCPYQNYMDGVLNYPIYYQLLYAFESSSGSISDLYNMISSVASSCKDPTLLGNFIENHDNPRFASYTSDYSQAKNVITFIFLSDGIPIVYAGQEQHYSGGSDPANREATWLSGYSTSATLYTWIASTNQIRSLAISKDAGYVQAKNNPFYSDSNTIAMRKGTTAGAQVITVLSNKGASGSSYTLSLSGTGYSAGATLVETYTCTTVTVDSSGNLPVPMTSGLPRVFVPSSWVNGSALCNT

SEQ ID NO: 42650 - protein, 478 aa, Synthetic construct
NGTMMQYFEWYLPNDGNHWNRLNSDASNLKSKGITAVWIPPAWKGTSQADVGYGAYDLYDLGEFNQKGTVRTKYGTRSQLQAAVTSLKNNGIQVYGDVVMNHKAGADATEMVTAVEVNPNNRNQEVTGDYTIEAYTRFDFPGRGNTHSSFKWRWYHFDGVDWDQSRSLSNRIYKFRGKAWDWPVDTENGNYDYLMYADLDMDHPEVVNELRNWGVWYTNTLGLDGFRIDAVKHIKFSFTRDWINHVRSATGKNMFAVAEYWKNDLGAIENYLNFTNWNHSVFDVPLHYNLYAASNSGGNYDMRNIFNGTVVQKHPSHAVTFVDNHDTQPEESLESFVEEWFKPLAYALTLTREQGYPSVFYGDYYGIPTHGVPAMRSKIDPILEARQKYAYGPQHDYLDHPDIVGWTREGDSSHPNSGLATLITDGPGGAKRMYVGRQNAGETWHDITGNRSEPVVINSEGWGEFHVNKGSVSIYVQR

SEQ ID NO: 42651 - protein, 475 aa, Penicillium sp.
TAAEWRSQSIYFLLTDRFGRTDNSTTATCNVSDRIYCGGSWQGIINHLDYIQGMGFTAIWITPVTEQLSQDTGDGEAYHGYWQQEIYNVNTNYGTAADLLALSKALHSRGMYLMVDVVANHMGYDGAGNTVDYSVFNPFDSSSYFHSYCEITDYSNQTNVEDCWLGDTTVSLPDLNTTLSSVQTIWYDWVAALVSNYSIDGLRIDTVKHVQESFWPEYNSAAGVYCVGEVFDGDPAYTCPYQNYLDGVLNYPIYYQLLYAFESTSGSISDLYNMINSVASDCSDPTLLGNFIENHDNPRFASYTSDYSQAKNVLSFIFFSDGIPIVYAGQEQHYSGGSDPANREATWLSGYDTSAELYTWITSTNKIRSLAVSKDTAYITSKNDAFYTDSNTIAMKKGSGGSQVVTVLSNRGSSGSSYTLTLSGSGYSSGTKLMEMYTCTAVTVDSSGNIAVPMASGLPRVYMLASSACSICSSA

SEQ ID NO: 42652 - protein, 482 aa, Bacillus sp. YR288
NGTMMQYFEWYVPNDGQHWNRLRNDAAYLKSIGVSAIWTPPAYKGTSQNDVGYGAYDLYDLGEFNQKGTIRTKYGTKAELKSAVSTLKSNGIQVYGDVVMNHKGGADYTENVTAVEVNPSNRNQETSDEYTIQAWTGFNFPGRGTTHSPFKWQWYHFDGTDWDQSRNASRIFKFRGTGKAWDWPVSSEFGNYDYLMYADLDFDHPDVINEMKNWGVWYANEVGLDGFRLDAVKHIKHSYLGDWVNHVRTKTGKTMFTVAEYWQNDVNAINNYLAKVNYNHSVFDAPLHYNFHYASQSGGNYDMRNLLNGTVVAAHPTKAVTLVENHDSQPGQSLESVVQPWFKPLAYAFILTRAEGLPSIFYGDMYGTKGNSSYEIPALKTKIEPLLKARKDYAYGTQHNYMDHPDVIGWTREGDSTKEKSGLATLVTDGAGGSKWMYVGKQNAGEVWYDITGNRTDKITINTDGWGNFQVNKGSVSVYVQQ

SEQ ID NO: 42653 - protein, 482 aa, Bacillus sp. YR288
NRTMMQYFEWYVPNDGQHWNRLRNDAAYLKSIGVSAIWTPPAYKGTSQNDVGYGAYDLYDLGEFNQKGTIRTKYGTKAELKSAVSTLKSNGIQVYGDVVMNHKGGADYTENVTAVEVNPSNRNQETSDEYTIQAWTGFNFPGRGTTHSPFKWQWYHFDGTDWDQSRNASRIFKFRGTGKAWDWPVSSEFGNYDYLMYADLDFDHPDVRNEMKNWGVWYANEVGLDGFRLDAVKHIKHSYLGDWVNHVRTKTGKEMFTVAEYWQNDVNAINNYLAKVNYNHWVFDAPLHYNFHYASQSGGNYDMRNLLNGTVVAAHPTKAVTLVENHDSQPGQSLESVVQPWFKPLAYAFILTRAEGYPSIFYGDMYGTKGNSSYEIPALKTKIEPLLKARKDYAYGTQHNYMDHWDVIGWTREGDSTKEKSGLATLVTDGAGGSKRMYVGKQNAGEVWYDITGNRTDKITINTDGWGNFQVNGGSVSVYVQQ

SEQ ID NO: 42654 - protein, 482 aa, Synthetic construct
NGTMMQYFEWYLPNDGNHWTRLQNDAANLSSKGVTAVWIPPAYKGTSQNDVGYGAYDLYDLGEFNQKGTVRTKYGTKAQLKSAIAELHKQNIHVYGDVVMNHKGGADFTETVTAVEVDPNNRNRETSGDYQISAWTGFTFPGRGNTYSPFKWNWYHFDGTDWDESRKINRIYKFRGTGKAWDWEVSSENGNYDYLMYADIDYEHPDVINEMKKWGTWYAKELNLDGFTLDAVKHIKHDYLRDWVTHVRNQTGKELFTVAEYWQNDIGQLNNYLAKTNYNQSVFDAPLHYHFHYASNSNGNYDMRNILKGTVMESNPRLAVTLVENHDSQPGQSLESVVSTWFKPLAYAFILTRAEGYPSVFYGDYYGTKGNSNYEIPSLKTQLDPILTARKNYAYGLQRDYIDHWDIIGCQLFPGAARDKSGLATLITDGPGGYKWMEVGKQNAGEVWYDITGNRKETVTINNDGWGQFYVNGGSVSIYVQK

SEQ ID NO: 42655 - protein, 482 aa, Bacillus sp. YR288
NGTMMQYFEWYVPNDGQHWNRLRNDAAYLKSIGVSAIWTPPAYKGTSQNDVGYGAYDLYDLGEFNQKGTIRTKYGTKAELKSAVSTLKSNGIKVYGDVVMNHKGGADYTENVTAVEVNPSNRNQETSDEYTIQAWTGFNFPGRGTTHSPFKWQWYHFDGTDWDQSRNASRIFKFRGTGKAWDLEVSSENGNYDYLMYADLDFDHPDVRNEMKNWGVWYANEVGLDGFRLDAVKHIKHSYLGDWVNHVRTKTGKTMFTVAEYWQNDVNAINNYLAKVNYNHWVFDAPLHYNFHYASQSGGNYDMRNLLNGTVVAAHPTKAVTLVENHDSQPGQSLESVVQPWFKPLAYAFILTRAEGYPSIFYGDMYGTKGNSSYEIPALKTKIEPLLKARKDYAYGTQHNYMDHWDVIGWTREGDSTKEKSGLATLVTDGAGGSKRMYVGKQNAGEVWYDITGNRTDKITINTDGWGTFQVNGGSVSVYVQQ

SEQ ID NO: 42656 - protein, 482 aa, Bacillus sp. YR288
NGTMMQYFEWYVPNDGQHWNRLRNDAAYLKSIGVSAIWTPPAYKGTSQNDVGYGAYDLYDLGEFNQKGTIRTKYGTKAELKSAVSTLKSNGIKVYGDVVMNHKGGADYTENVTAVEVNPSNRNQETSDEYTIQAWTGFNFPGRGTTHSPFKWQWYHFDGTDWDQSRNASRIFKFRGTGKAWDLEVSSENGNYDYLMYADLDFDHPDVRNEMKNWGVWYANEVGLDGFRLDAVKHIKHSYLGDWVNHVRTKTGKEMWTVAEYWQNDVNAINNYLAKVNYNHSVFDAPLHYNFHYASQSGGNYDMRNLLNGTVVAAHPTKAVTLVENHDSQPGQSLESVVQPWFKPLAYAFILTRAEGLPSIFYGDMYGTKGNSSYEIPALKTKIEPLLKARKDYAYGTQHNYMDHWDVIGWTREGDSTKEKSGLATLVTDGAGGSKRMYVGKQNAGEVWYDITGNRTDKITINTDGWGTFQVNGGSVSVYVQQ

SEQ ID NO: 42657 - protein, 483 aa, Synthetic construct
AATNGTMMQYFEWYVPNDGQQWNRLRTDAPYLSSVGITAVWTPPAYKGTSQADVGYGPYDLYDLGEFNQKGTVRTKYGTKGELKSAVNTLHSNGIQVYGDVVMDHKGGADGTEWVDAVEVNPSDRNQEISGTYQIQAWTKFDFPGRGNTYSSFKWRWYHFDGVDWDESRKLSRIYKFRGIGKAWDWEVDTENGNYDYLMYADLDYDHPDVVNEMKKWGVWYANEVGLDGYRLDAVKHIKFSFLKDWVDNARAATGKEMFTVGEYWQNDLGALNNYLAKVNYNQSLFDAPLHYNFYAASTGGGYYDMRNILNNTLVASNPTKAVTLVENHDTQPGQSLESTVQPWFKPLAYAFILTRSGGYPSVFYGDMYGTKGTTTREIPALKSKIEPLLKARKDYAYGTQRDYIDNPDVIGWTREGDSTKAKSGLATVITDGPGGSKRMYVGTSNAGEIWYDLTGNRTDKITIGSDGYATFPVNGGSVSVWV

SEQ ID NO: 42658 - protein, 477 aa, Bacillus licheniformis
NGTLMQYFEWYMPNDGQHWKRLQNDSAYLAEHGITAVWIPPAYKGTSQADVGYGAYDLYDLGEFHQKGTVRTKYGTKGELQSAIKSLHSRDINVYGDVVINHKGGADATEDVTAVEVDPADRNRVISGEHLIKAWTHFHFPGRGSTYSDFKWHWYHFDGTDWDESRKLNRIYKFQGKAWDWEVSNENGNYDYLMYADIDYDHPDVAAEIKRWGTWYANELQLDGFRLDAVKHIKFSFLRDWVNHVREKTGKEMFTVAEYWQNDLGALENYLNKTNFNHSVFDVPLHYQFHAASTQGGGYDMRKLLNGTVVSKHPLKSVTFVDNHDTQPGQSLESTVQTWFKPLAYAFILTRESGYPQVFYGDMYGIPTHGVPALKHKIEPILKARKQYAYGAQHDYFDHHDIVGWTREGDSSVANSGLAALITDGPGGAKRMYVGRQNAGETWHDITGNRSEPVVINSEGWGEFHVNGGSVSIYVQR

SEQ ID NO: 42659 - protein, 477 aa, Bacillus sp.
NETMMQYFEWDLPNDGTLWTKVKNEAANLSSLGITALWLPPAYKGTSQSDVGYGVYDLYDLGEFNQKGTIRTKYGTKTQLERAIRSLKANGIQVYADVVFNHKAGADQTEFVDAVEVDPSNRNQEVSGTYQIEAWTKFDFPGRGNTYSSFKWRWYHFDGTDWDESRKLNRIYKFRGKAWDWEVDTENGNYDYLMFADLDMDHPEVVTELKNWGTWYVNTTNIDGFRLDAVKHIKFSFMRDWLTYVRNQTGKNLFAVGEFWSYDVNKLHNYITKTNGSMSLFDAPLHNNFYTASKSSGYFDMRNLLNGTLVQRHPSHAVTLVDNHDTQPGEALESFVQGWFKPLAYAFILTRQEGYPCVFYGDYYGIPKYNIPGLKSKIDPLLIARRDYAYGTQRDYIDHQDIIGWTREGIDTKPNSGLAALITDGPGGSKWMYVGKKHAGKVFYDLTGNRSDTVTINADGWGEFKVNGGSVSIWVAK

SEQ ID NO: 42660 - protein, 477 aa, Bacillus sp.
NETMMQYFEWDLPNDGTLWTKVKNEAANLSSLGITALWLPPAYKGTSQSDVGYGVYDLYDLGEFNQKGTIRTKYGTKTQLERAIRSLKANGIQVYADVVFNHKAGADQTEFVDAVEVDPSNRNQETSGTYQIQAWTKFDFPGRGNTYSSFKWRWYHFDGTDWDESRKLNRIYKFRGKAWDWEVDTENGNYDYLMFADLDMDHPEVVTELKNWGTWYVNTTNIDGFRLDAVKHIKFSFMRDWLTYVRNQTGKNLFAVGEFWSYDVNKLHNYITKTNGSMSLFDAPLHNNFYTASKSSGYFDMRNLLNGTLVQRHPSHAVTLVDNHDTQPGEALESFVQGWFKPLAYAFILTRQEGYPCVFYGDYYGIPSDGVPGLKSKIDPLLIARRDYAYGTQRDYIDHQDIIGWTREGIDTKPNSGLAALITDGPGGSKWMYVGKKHAGKVFYDLTGNRSDTVTINADGWGEFKVNGGSVSIWVAK

SEQ ID NO: 42661 - protein, 477 aa, Bacillus sp.
NETMMQYFEWDLPNDGTLWTKVKNEAANLSSLGITALWLPPAYKGTSQSDVGYGVYDLYDLGEFNQKGTIRTKYGTKTQYIQAIQAAKAAGMQVYADVVFNHKAGADQTEFVDAVEVDPSNRNQEVSGTYQIEAWTKFDFPGRGNTYSSFKWRWYHFDGTDWDESRKLNRIYKFRGKAWDWEVDTENGNYDYLMFADLDMDHPEVVTELKNWGTWYVNTTNIDGFRLDAVKHIKFSFMRDWLTYVRNQTGKNLFAVGEFWKNDLGALENYITKTNGSMSLFDAPLHNNFYTASKSSGYFDMRNLLNGTLVQRHPSHAVTLVDNHDTQPGQSLQSWVEPWFKPLAYAFILTRQEGYPCVFYGDYYGIPKYNIPGLKSKIDPLLIARRDYAYGTQRDYIDHQDIIGWTREGIDTKPNSGLAALITDGPGGSKWMYVGKKHAGKVFYDLTGNRSDTVTINADGWGEFKVNGGSVSIWVAK

SEQ ID NO: 42662 - protein, 477 aa, Bacillus sp.
NETMMQYFEWDLPNDGTLWTKVKNEAANLSSLGITALWLPPAYKGTSQSDVGYGVYDLYDLGEFNQKGTIRTKYGTKTQYIQAIQAAKAAGMQVYADVVFNHKAGADQTEFVDAVEVDPSNRNQEVSGTYQIEAWTKFDFPGRGNTYSSFKWRWYHFDGTDWDESRKLNRIYKFRGKAWDWEVDTENGNYDYLMFADLDMDHPEVVTELKNWGTWYVNTTNIDGFRLDAVKHIKYSFFPDWLTYVRNQTGKNLFAVGEFWKNDLGALENYITKTNGSMSLFDAPLHNNFYTASKSSGYFDMRNLLNGTLVQRHPSHAVTLVDNHDTQPGQSLQSWVEPWFKPLAYAFILTRQEGYPCVFYGDYYGIPKYNIPGLKSKIDPLLIARRDYAYGTQRDYIDHQDIIGWTREGIDTKPNSGLAALITDGPGGSKWMYVGKKHAGKVFYDLTGNRSDTVTINADGWGEFKVNGGSVSIWVAK

SEQ ID NO: 42663 - protein, 480 aa, Bacillus licheniformis
NGTLMQYFEWYTPNDGQHWKRLQNDSAYLAEHGITAVWIPPAYKGTSQADVGYGAYDLYDLGEFHQKGTVRTKYGTKGELQSAIKSLHSRDIQVYGDVVINHKGGADATEDVTAVEVDPADRNRVISGEYLIKAWTHFHFPGRGSTYSDFKWHWYHFDGTDWDESRKLNRIYKFQGKAWDWEVSSENGNYDYLMYADIDYDHPDVVAEIKRWGTWYANELQLDGFRLDAVKHIKFSFLRDWVNHVREKTGKEMFTVAEYWQNDLGALENYLNKTNFNHSVFDVPLHYQFHAASTQGGGYDMRKLLNGTVVSKHPLKSVTFVDNHDTQPGQSLESTVQTWFKPLAYAFILTRESGYPQVFYGDMYGTKGDSQREIPALKHKIEPILKARKQYAYGAQHDYFDHHDIVGWTREGDSSVANSGLAALITDGPGGAKRMYVGRQNAGETWHDITGNRSEPVVINSEGWGEFHVNGGSVSIYVQR

SEQ ID NO: 42664 - protein, 480 aa, Bacillus licheniformis
NGTLMQYFEWYTPNDGQHWKRLQNDSAYLAEHGITAVWIPPAYKGTSQADVGYGAYDLYDLGEFHQKGTVRTKYGTKGELQSAIKSLHSRDINVYGDVVINHKGGADATEDVTAVEVDPADRNRVISGEHLIKAYTHFHFPGRGSTYSDFKWHWYHFDGTDWDESRKLNRIYKFQGKAWDWEVSNENGNYDYLTYADIDYDHPDVAAEIKRWGTWYANELQLDGFRLDAVKHIKFSFLRDWVNHVREKTGKEMFTVAEYWQNDLGALENYLNKTNFNHSVFDVPLHYQFHAASTQGGGYDMRKLLNGTVVSKHPLKSVTFVDNHDTQPGQSLESTVQTWFKPLAYAFILTRESGYPQVFYGDMYGTKGDSQREIPALKHKIEPILKARKQYAYGRQNDYFDHHDIVGWTREGNSSHANSGLAALITDGPGGAKWMYVGRQKAGQTWSDITGNRSGPVVINSEGWGNFSVNGGSVSIYVQR

SEQ ID NO: 42665 - protein, 482 aa, Synthetic construct
NGTLMQYFEWYMPNDGQHWKRLQNDSAYLAEHGITAVWIPPAYKGTSQADVGYGAYDLYDLGEFHQKGTVRTKYGTKGELQSAIKSLHSRDINVYGDVVINHKAGADGTEFVDAVEVNPSNRNQETSGTYQIQAWTKFDFPGRGNTYSSFKWRWYHFDGTDWDESRKLNRVYKFRGTGKAWDWEVDTENGNYDYLMFADLDYDHPDVAAEIKRWGTWYANELQLDGFRLDAVKHIKFSFLRDWVNHVREKTGKEMFTVAEYWSYDLGALENYLNKTNFNHSVFDVPLHYQFHAASTQGGGYDMRKLLNGTVVSKHPLKSVTFVDNHDTQPGQSLESTVQTWFKPLAYAFILTRESGYPQVFYGDMYGTKGDSQREIPALKHKIEPILKARKQYAYGAQHDYFDHHDIVGWTREGDSSVANSGLAALITDGPGGAKRMYVGRQNAGETWHDITGNRSEPVVINSAGWGEFHVNGGSVSIYVQR

SEQ ID NO: 42666 - protein, 480 aa, Bacillus licheniformis
NGTLMQYFEWYTPNDGQHWKRLQNDSAYLAEHGITAVWIPPAYKGTSQADVGYGAYDLYDLGEFHQKGTVRTKYGTKGELQSAIKSLHSRDINVYGDVVINHKGGADATEDVTAVEVDPADRNRVISGEYLIKAWTHFHFPGRGSTYSDFKWHWYHFDGTDWDESRKLNRIYKFQGKAWDWEVSSENGNYDYLMYADIDYDHPDVVAEIKRWGTWYANELQLDGFRLDAVKHIKFSFLRDWVNHVREKTGKEMFTVAEYWQNDLGALENYLNKTNFNHSVFDVPLHYQFHAASTQGGGYDMRKLLNGTVVSKHPLKSVTFVDNHDTQPGQSLESTVQTWFKPLAYAFILTRESGYPQVFYGDMYGTKGDSQREIPALKHKIEPILKARKQYAYGAQHDYFDHHDIVGWTREGDSSVANSGLAALITDGPGGAKWMYVGRQNAGETWHDITGNRSEPVVINSEGWGEFHVNGGSVSIYVQR

SEQ ID NO: 42667 - protein, 480 aa, Bacillus licheniformis
NGTLMQYFEWYTPNDGQHWKRLQNDSAYLAEHGITAVWIPPAYKGTSQADVGYGAYDLYDLGEFHQKGTVRTKYGTKGELQSAIKSLHSRDINVYGDVVINHKGGADATEDVTAVEVDPADRNRVISGEYLIKAWTHFHFPGRGNTYSDFKWHWYHFDGTDWDESRKLNRIYKFQGKAWDWEVSSENGNYDYLMYADIDYDHPDVVAEIKRWGTWYANELQLDGFRLDAVKHIKFSFLRDWVNHVREKTGKEMFTVAEYWQNDLGALENYLNKTNFNHSVFDVPLHYQFHAASTQGGGYDMRKLLNGTVVSKHPLKSVTFVDNHDTQPGQSLESTVQTWFKPLAYAFILTRESGYPQVFYGDMYGTKGDSQREIPALKHKIEPILKARKQYAYGAQHDYFDHHDIVGWTREGDSSVANSGLAALITDGPGGAKRMYVGRQNAGETWHDITGNRSEPVVINSEGWGEFHVNGGSVSIYVQR

SEQ ID NO: 42668 - protein, 482 aa, Bacillus licheniformis
NGTLMQYFEWYTPNDGQHWKRLQNDAEHLSDIGITAVWIPPAYKGLSQSDNGYGPYDLYDLGEFQQKGTVRTKYGTKSELQDAIGSLHSRNVQVYGDVVLNHKAGADATEDVTAVEVNPANRNQETSEEYQIKAWTDFRFPGRGNTYSDFKWHWYHFDGADWDESRKISRIFKFRGEGKAWDWEVSSENGNYDYLMYADVDYDHPDVVAETKKWGIWYANELSLDGFRIDAAKHIKFSFLRDWVQAVRQATGKEMFTVAEYWQNDLGALENYLNKTNFNHSVFDVPLHYQFHAASTQGGGYDMRKLLNSTVVSKHPLKAVTFVDNHDTQPGQSLESTVQTWFKPLAYAFILTRESGYPQVFYGDMYGTKGDSQREIPALKHKIEPILKARKQYAYGAQHDYFDHHDIVGWTREGDSSVANSGLAALITDGPGGAKRMYVGRQNAGETWHDITGNRSEPVVINSEGWGEFHVNGGSVSIYVQR

SEQ ID NO: 42669 - protein, 478 aa, Geobacillus stearothermophilus
LNGTLMQYFEWYTPNDGQHWKRLQNDSAYLAEHGITAVWIPPAYKGTSQADVGYGAYDLYDLGEFHQKGTVRTKYGTKGELQSAIKSLHSRDINVYGDVVINHKGGADATEDVTAVEVDPADRNRVISGEYLIKAWTHFHFPGRGSTYSDFKWHWYHFDGTDWDESRKLNRIYKFQGKAWDWEVDTENGNYDYLMYADIDYDHPDVVAEIKRWGTWYANELQLDGFRLDAVKHIKFSFLRDWVNHVREKTGKPLFTVGEYWSYDINKLHNYITKTNGTMSLFDAPLHNKFYTASKSGGAFDMRTLMTNTLMKDQPTLAVTFVDNHDTEPGQALQSWVDPWFKPLAYAFILTRQEGYPCVFYGDYYGIPQYNIPSLKSKIDPLLIARRDYAYGTQHDYLDHSDIIGWTREGVTEKPGSGLAALITDGPGGSKWMYVGKQHAGKVFYDLTGNRSDTVTINSDGWGEFKVNGGSVSVWVPR

SEQ ID NO: 42670 - protein, 478 aa, Geobacillus stearothermophilus
LNGTLMQYFEWYTPNDGQHWKRLQNDSAYLAEHGITAVWIPPAYKGTSQADVGYGAYDLYDLGEFHQKGTVRTKYGTKGELQSAIKSLHSRDINVYGDVVINHKGGADATEDVTAVEVDPADRNRVISGEYLIKAWTHFHFPGRGSTYSDFKWHWYHFDGTDWDESRKLNRIYKFQGKAWDWEVDTENGNYDYLMYADIDYDHPDVVAEIKRWGTWYANELQLDGFRLDAVKHIKFSFLRDWVNHVRSQTGKPLFTVGEYWSYDINKLHNYITKTNGTMSLFDAPLHNKFYTASKSGGAFDMRTLMTNTLMKDQPTLAVTFVDNHDTEPGQALQSWVDPWFKPLAYAFILTRQEGYPCVFYGDYYGIPQYNIPSLKSKIDPLLIARRDYAYGTQHDYLDHSDIIGWTREGVTEKPGSGLAALITDGPGGSKWMYVGKQHAGKVFYDLTGNRSDTVTINSDGWGEFKVNGGSVSVWVPR

SEQ ID NO: 42671 - protein, 479 aa, Synthetic construct
NGTIMQYFEWNVPNDGQHWNRLHNNAQNLKNAGITAIWIPPAWKGTSQNDVGYGAYDLYDLGEFNQKGTVRTKYGTKAELERAIRSLKANGIQVYGDVVMDHKGGADGTEWVDAVEVNPSDRNQEISGTYQIQAWTKFDFPGRGNTYSSFKWRWYHFDGVDWDESRKLSRIYKFRGIGKAWDWEVDTENGNYDYLMYADLDMDHPEVINELNRWGVWYANTLNLDGFRLDAVKHIKFSFMRDWLGHVRGQTGKNLFAVAEYWKNDLGALENYLSKTNWTMSAFDVPLHYNLYQASNSSGNYDMRNLLNGTLVQRHPSHAVTFVDNHDTQPGEALESFVQGWFKPLAYATILTREQGYPQVFYGDYYGIPSDGVPSYRQQIDPLLKARQQYAYGRQHDYFDHWDVIGWTREGNASHPNSGLATIMSDGPGGSKWMYVGRQKAGEVWHDMTGNRSGTVTINQDGWGHFFVNGGSVSVWVKR

SEQ ID NO: 42672 - protein, 490 aa, Synthetic construct
NGTMMQYFEWHLPXDGXXWXKLXXDAXNLXSXGITALWIPPAWKGTSXXDVGYGXYDLYDLGEFNQKGTVRTKYGTKAQXXXAIXAXXXXGIQVYADVVXXHKGGADGTEXVXAVEVNXSXRNQEISGXYXIXAWTKFDFPGRGNTHSXFKWRWYHFDGXDWDXSRQXXXKIYKFRGXGKAWDWEVDXENGNYDYLMYADIDMDHPEVIXELKNWGXWYXNTXNIDGFRIDAVKHIKFSFXXDWLSHVRXXTGKPLFXVAEFWXXDIXXIXNYIXKTXXXXSLFDXPLHXXXYXASXSGGXFDMRXILXXSLMXXXPXXAVTFVDNHDSXPGXALXSFVXXWFKPLAYAXILTRXXGYPXVFYGDYYGIPXHXIPSLKSKIDPLLXARXXYAYGTQHDYXDHXDIIGWTREGXSXXPXSGLAXIISDGPGGXKWMYVGKXXAGXVFXDITGNRSXTVTINADGWGXFXVNGGAVSVWVXXKTTVSTIARP

SEQ ID NO: 42673 - protein, 485 aa, Bacillus sp. 707
HXXXXNGTMMQYFEWYLPXDGXXWXKLXXDAXNLXSXGITALWIPPAWKGXSXXDVGYGXYDLYDLGEFNQKGTVRTKYGTKAQXXXAIXAXXXXGIQVYADVVXXHKGGADATEXVXAVEVNPXXRNQEISGXYXIXAWTKFDFPGRGNTHSSFKWRWYHFDGVDWDXSRKLXNRIYKFRGXGKAWDWEVDTENGNYDYLMYADIDMDHPEVVXELKNWGXWYXNTXXIDGFRIDAVKHIKFSFXXDWIXHVRSXTGKXLFXVAEFWXXDIXXIXNYIXKTNXXXSLFDXPLHXXXYXASKSGGXFDMRXIXXXTLMXXXPSXAVTFVDNHDSXPXXALXSFVDXWFKPLAYAXXLTRXXGYPXVFYGDYYGIPXHXIPALKSKIDPILXARXXYAYGXQXDYLDHXXIIGWTREGXTXXPXSGLAXIISDGXGGSKWMFVGKNXAGXVFXDITGNRSXTVTINADGWGXFXVNGGSVSIWVXK

SEQ ID NO: 42674 - protein, 478 aa, Synthetic construct
NGTMMQYFEWYLPNDGNHWNRLNSDASNLASKGITAVWIPPAWKGTSQADVGYGAYDLYDLGEFNQKGTVRTKYGTRSQLQAAVTSLKNNGIQVYGDVVMNHKAGADATEMVTAVEVNPNNRNQEVTGEYTIEAYTRFDFPGRGNTHSSFKWRWYHFDGVDWDQSRSLSNRIYKFQGKAWDWPVDTENGNYDYLMYADLDMDHPEVVNELRNWGVWYTNTLGLDGFRLDAVKHIKFSFTRDWINHVRSATGKNMFAVAEYWKNDLGAIENYLNFTNWNHSVFDVPLHYNLYAASTSGGNYDMRNIFNGTVVQKHPSHAVTFVDNHDTQPEESLESFVQPWFKPLAYALTLTREQGYPSVFYGDYYGIPTHGVPAMRSKIDPILEARQKYAYGPQHDYLDHHDIVGWTREGDSSHPNSGLATLITDGPGGAKRMYVGRQNAGETWHDITGNRSEPVVINSEGWGEFHVNKGSVSIYVQR

SEQ ID NO: 42675 - protein, 475 aa, Penicillium vasconiae
TAAEWRTQSIYFLLTDRFGRTDNSTTATCSVSDRIYCGGSWQGIINHLDYIQGMGFTAIWITPVTEQLSQDTGDGEAYHGYWQQEIYNVNTNYGTAADLLALSKALHSRGMYLMVDVVANHMGYDGAGNTVDYSVFNPFDSSSYFHSYCEISDYSNQTNVEDCWLGDTTVSLPDLDTTLSSVQTIWYNWVTELVSNYSIDGLRIDTVKHVQKSFWPGYNSAAGVYCVGEVFDGDPAYTCPYQSYLDGVLNYPIYYQLLYAFESTSGSISSLYNMINSVASDCSDPTLLGNFIENHDNPRFASYTSDYSQAKNVISFIFFSDGIPIVYAGQEQHYSGGSDPANREATWLSGYDTTATLYKYITSTNKIRSLAISKDTAYITSKNNAFYTDSNTIAMKKGSSGSQVITVLSNRGSSGSSYTLTLSGSGYSSGTQLMEMYTCTAVTVDSSGNIAVPMASGLPRIYMLASSACSICSSS

SEQ ID NO: 42676 - protein, 482 aa, Bacillus coahuilensis
NGTMMQYFEWYLPNDGQHWNRLNNDAAHLQDLGVTAVWIPPAYKGTSQNDVGYGAYDLYDLGEFNQKGTTRTKYGTKAQLKQAISSLHNRGIQVYGDVVMNHKGGADYTQMVSAVEVDRYNRNQEVTGEYQIQAWTGFNFPGRNNTYSPFKWQWYHFDGTDWDQSRSLNRIYKFRGTGKAWDWEVASEYGNYDYLMYADVDFDHPDVQQEMKNWGTWYANELGLDGFRLDAVKHIKHSYLQDWVTAVRQNTGKEMFTVAEYWQNDLGAIQNYLTKTGYTHSAFDVPLHYNFQQASNSSGSYDMRNLLNGTLMAANPTKAVTIVENHDSQPGQALESTVQSWFKPLAYAFILTRQEGYPALFYGDYYGTKGTTSYEIPALGSKLDPLLQARKSYAYGSQHDYLNHWDIIGWTREGVSSRQKSGLATLITDGPGGNKWMYVGKQNAGETWKDMTGNRSDQVVINQDGWGNFYVNGGSVSVYVQQ

SEQ ID NO: 42677 - protein, 482 aa, Bacillus sp. YR288
NRTMMQYFEWYVPNDGQHWNRLRNDAAYLKSIGVSAIWTPPAYKGTSQNDVGYGAYDLYDLGEFNQKGTIRTKYGTKAELKSAVSTLKSNGIKVYGDVVMNHKGGADYTENVTAVEVNPSNRNQETSDEYTIQAWTGFNFPGRGTTHSPFKWQWYHFDGTDWDQSRNASRIFKFRGTGKAWDWPVSSEFGNYDYLLYADLDFDHPDVRNEMKNWGVWYANEVGLDGFRLDAVKHIKHSFLGDWVNHVRTKTGKEMWTVAEYWQNDVNAINNYLAKVNYNHSVFDAPLHYNFHYASQSGGNYDMRNLLNGTVVAAHPTKAVTLVENHDTQPGQSLESVVQPWFKPLAYAFILTRAEGLPSIFYGDMYGTKGNSSYEIPALKTKIEPLLKARKDYAYGTQHNYMDHWDVIGWTREGDSTKEKSGLATLVTDGAGGSKRMYVGKQNAGEVWYDITGNRTDKITINTDGWGNFQVNGGSVSVYVQQ

SEQ ID NO: 42678 - protein, 485 aa, Synthetic construct
NGTMMQYFEWYLPXDGXXWXKLXXDAXNLXXXGISALWIPPAWKGXSXXDVGYGXYDLYDLGEFNQKGTIRTKYGTKXQXXXAINAXXAXGIQVYADVVXXHKGGADATEXVXAVEVNPXXRNQEISGXYXIXAWTKFDFPGRGNTHSXFKWRWYHFDGVDWDXSRKLXNRIYKFRGXGKAWDWEVDTENGNYDYLMYADIDMDHPEVVXELKNWGXWYXNTXXIDGFRIDAVKHIKFSFXXDWIXHVRSXTGKXLFXVAEFWXXDIXXIXNYIXKTNXXXSLFDXPLHXXXYXASKSGGXFDMRXIXXXTLMXXXPXXAVTFVDNHDSXPXXALXSFVDXWFKPLAYAXXLTRXXGYPXVFYGDYYGIPXHXIPALKSKIDPILXARXXYAYGXQXDYLDHXXIIGWTREGXTXXPXSGLAXIISDGXGGXKWMFVGKNXAGXVFXDITGNRAXTVTINADGWGXFXVNGGSVSIWVXKKTTVS

SEQ ID NO: 42679 - protein, 493 aa, unidentified
SLFLSVSLLGKLALGLTPAEWRSQSIYFLLTDRFGRTDNSTTAACDTSDRVYCGGSWQGIINQLDYIQGMGFTAIWITPVTGQFYENTGDGTSYHGYWQQDIYDLNYNYGTAQDLKNLANALHERGMYLMVDVVANHMGYDGAGNTVDYSVFNPFSSSSYFHPYCLISNYDNQTNVEDCWLGDTTVSLPDLDTTSTAVRNIWYDWVADLVANYSIDGLRVDTVKHVEKDFWPGYNSAAGVYCVGEVYSGDPAYTCPYQNYMDGVLNYPIYYQLLYAFESSSGSISDLYNMISSVASSCKDPTLLGNFIENHDNPRFASYTSDYSQAKNVITFIFLSDGIPIVYAGQEQHYSGGSDPANREATWLSGYSTSATLYTWIATTNQIRSLAISKDAGYVQAKNNPFYSDSNTIAMRKGTTAGAQVITVLSNKGASGSSYTLSLSGTGYSAGVTLVETYTCTTVTVDSSGNLPVPMTSGLPRVFVPSSWVNGSALCNT

SEQ ID NO: 42680 - protein, 477 aa, Bacillus sp.
NETMMQYFEWDLPNDGTLWNRLHNNAQNLKNAGITALWLPPAYKGTSQSDVGYGVYDLYDLGEFNQKGTIRTKYGTKTQYIQAIQAAKAAGMQVYADVVFNHKAGADQTEFVDAVEVDPSNRNQEVSGTYQIEAWTKFDFPGRGNTYSSFKWRWYHFDGTDWDESRKLNRIYKFRGKAWDWEVDTENGNYDYLMFADLDMDHPEVVTELKNWGTWYVNTTNIDGFRLDAVKHIKFSFMRDWLTYVRNQTGKNLFAVGEFWSYDVNKLHNYITKTNGSMSLFDAPLHNNFYTASKSSGYFDMRNLLNGTLVQRHPSHAVTLVDNHDTQPGQSLQSWVEPWFKPLAYAFILTRQEGYPCVFYGDYYGIPSDGVPGLKSKIDPLLIARRDYAYGTQRDYIDHQDIIGWTREGIDTKPNSGLAALITDGPGGSKWMYVGKKHAGKVFYDLTGNRSDTVTINADGWGEFKVNGGSVSIWVAK

SEQ ID NO: 42681 - protein, 480 aa, Bacillus licheniformis
NGTLMQYFEWYTPNDGQHWKRLQNDSAYLAEHGITAVWIPPAYKGTSQADVGYGAYDLYDLGEFHQKGTVRTKYGTKGELQSAIKSLHSRDINVYGDVVINHKGGADATEDVTAVEVDPADRNRVISGEYLIKAWTHFHFPGRGNTYSDFKWHWYHFDGTDWDESRKLNRIYKFQGKAWDWEVSSENGNYDYLMYADIDYDHPDVVAEIKRWGTWYANELQLDGFRLDAVKHIKFSFLRDWVNHVREKTGKEMFTVAEYWQNDLGALENYLNKTNFNHSVFDVPLHYQFHAASTQGGGYDMRKLLNGTVVSKHPLKSVTFVDNHDTQPGQSLESTVQTWFKPLAYAFILTRESGYPQVFYGDMYGTKGDSQREIPALKHKIEPILKARKQYAYGAQHDYFDHHDIVGWTREGDSSVANSDLAALITDGPGGAKRMYVGRQNAGETWHDITGNRSEPVVINSEGWGEFHVNGGSVSIYVQR

SEQ ID NO: 42682 - protein, 482 aa, Unidentified
NGTLMQYFEWYAPNDGNHWNRLRTDAENLAQKGITSVWIPPAYKGTTQNDVGYGAYDLYDLGEFNQKGTVRTKYGTKAQLKSAIDALHKKNIDVYGDVVMNHKGGADYTETVTAVEVDPSNRNVEVSGDYEISAWTGFNFPGRGDSYSNFKWKWYHFDGTDWDEGRKLNRIYKFRGIGKAWDWEVSSENGNYDYLMYADLDFDHPDVANEMKKWGTWYANELNLDGFRLDAVKHIDHEYLRDWVNHVRQQTGKEMFAVAEYWQNDIQTLNNYLAKVNYNQSVFDAPLHYNFHYASKGNGNYDMRNILKGTVVANHPTLAVTLVENHDSQPGQSLESVVSPWFKPLAYAFILTRAEGYPSVFYGDYYGTKGNSNYEIPALKDKIDPILTARKNYAYGTQRDYFDHPDVIGWTREGDSVHANSGLATLISDGPGGAKWMDVGKNNAGEIWYDITGNQTNTVTINKDGWGQFQVSGGSVSIYVQR

SEQ ID NO: 42683 - protein, 480 aa, Synthetic construct
NGTLMQYFEWYMPNDGQHWKRLQNDSAYLAEHGITAVWIPPAYKGTSQADVGYGAYDLYDLGEFHQKGTVRTKYGTKGELQSAIKSLHSRDINVYGDVVINHKGGADATEDVTAVEVDPADRNREISGEYLIKAWTHFHFPGRGSTYSDFKWHWYHFDGTDWDESRKLNRIYKFQGKAWDWEVDNENGNYDYLMYADIDYDHPDVAAEIKRWGTWYANELQLDGFRLDAVKHIKFSFLRDWVNHVREKTGKEMFTVAEYWQNDLGALENYLNKTNFNHSVFDVPLHYQFHAASTQGGGYDMRKLLNGTVVSKHPLKSVTFVDNHDTQPGQSLESTVQTWFKPLAYAFILTRESGYPQVFYGDMYGTKGDSQREIPALKHKIEPILKARKQYAYGAQHDYFDHHDIVGWTREGDSSVANSGLAALITDGPGGAKRMYVGRQNAGETWHDITGNRSEPVVINSEGWGEFHVNGGSVSIYVQR

SEQ ID NO: 42684 - protein, 482 aa, Synthetic construct
NGTLMQYFEWYMPNDGQHWKRLQNDSAYLAEHGITAVWIPPAYKGTSQADVGYGAYDLYDLGEFHQKGTVRTKYGTKGELQSAIKSLHSRDINVYGDVVINHKAGADATEDVTAVEVNPANRNQETSEEYQIKAWTDFRFPGRGNTYSDFKWHWYHFDGADWDESRKISRIFKFRGEGKAWDWEVSSENGNYDYLMYADVDYDHPDVAAEIKRWGTWYANELQLDGFRLDAVKHIKFSFLRDWVNHVREKTGKEMFTVAEYWSYDLGALENYLNKTNFNHSVFDVPLHYQFHAASTQGGGYDMRKLLNGTVVSKHPLKSVTFVDNHDTQPGQSLESTVQTWFKPLAYAFILTRESGYPQVFYGDMYGTKGDSQREIPALKHKIEPILKARKQYAYGAQHDYFDHHDIVGWTREGDSSVANSGLAALITDGPGGAKRMYVGRQNAGETWHDITGNRSEPVVINSAGWGEFHVNGGSVSIYVQR

SEQ ID NO: 42685 - protein, 480 aa, Bacillus licheniformis
NGTLMQYFEWYTPNDGQHWKRLQNDSAYLAEHGITAVWIPPAYKGTSQADVGYGAYDLYDLGEFHQKGTVRTKYGTKGELQSAIKSLHSRDINVYGDVVINHKGGADATEDVTAVEVDPADRNRVISGEYLIKAWTHFHFPGRGSTYSDFKWHWYHFDGTDWDESRKLNRIYKFQGKAWDWEVSSENGNYDYLMYADIDYDHPDVVAEIKRWGTWYANELQLDGFRLDAVKHIKFSFLRDWVNHVREKTGKEMFTVAEYWQNDLGALENYLNKTNFNHSVFDVPLHYQFHAASTQGGGYDMRKLLNGTVVSKHPLKSVTFVDNHDTQPGQSLESTVQTWFKPLAYAFILTRESGYPQVFYGDMYGTKGDSQREIPALKHKIEPILKARKQYAYGAQHDYFDHHDIVGWTREGDSSVANSGLAALITDGPGGAKRMYVGRQNAGETWHDITGNRSEPVVINSEGWGEFHVNGGSVSIYVQR

SEQ ID NO: 42686 - protein, 480 aa, Bacillus licheniformis
NGTLMQYFEWYMPNDGQHWRRLQNDSAYLAEHGITAVWIPPAYKGTSQADVGYGAYDLYDLGEFHQKGTVRTKYGTKGELQSAIKSLHSRDINVYGDVVINHKGGADATEDVTAVEVDPADRNRVISGEHLIKAWTHFHFPGRGSTYSDFKWHWYHFDGTDWDESRKLNRIYKFQGKAWDWEVSNENGNYDYLMYADIDYDHPDVAAEIKRWGTWYANELQLDGFRLDAVKHIKFSFLRDWVNHVREKTGKEMFTVAEYWQNDLGALENYLNKTNFNHSVFDVPLHYQFHAASTQGGGYDMRKLLNGTVVSKHPLKSVTFVDNHDTQPGQSLESTVQTWFKPLAYAFILTRESGYPQVFYGDMYGTKGDSQREIPALKHKIEPILKARKQYAYGAQHDYFDHHDIVGWTREGDSSVANSGLAALITDGPGGAKRMYVGRQKAGQTWHDITGNRSEPVVINSEGWGEFHVNGGSVSIYVKR

SEQ ID NO: 42687 - protein, 482 aa, Bacillus thuringiensis
NGTLMQYFEWYAPNDGNHWNRLRTDAENLAKKGITSVWIPPAYKGTTQNDVGYGAYDLYDLGEFNQKGTVRTKYGTKAQLKSAIDALHKKNIDVYGDVVMNHKGGADYTETVTAVEVDPSNRNIEVSGDYEISAWTGFNFPGRGDSYSNFKWKWYHFDGTDWDEGRKLNRIYKFRGIGKAWDWEVSSENGNYDYLMYADLDFDHPDVANEMKKWGTWYANELNLDGFRLDAVKHIDHEYLRDWVNHVRQQTGKEMFTVAEYWQNDIQTLNNYLAKVNYNQSVFDAPLHYNFHYASTGNGNYDMRNILKGTVVANHPTLAVTLVENHDSQPGQSLESVVSPWFKPLAYAFILTRAEGYPSVFYGDYYGTKGNSNYEIPALKDKIDPILTARKNFAYGTQRDYFDHPDVIGWTREGDSVHANSGLATLISDGPGGAKWMDVGKNNAGEVWYDITGNQTNTVTINKDGWGQFQVSGGSVSIYVQQ

SEQ ID NO: 42688 - protein, 480 aa, Bacillus licheniformis
NGTLMQYFEWYTPNDGQHWKRLQNDSAYLSEHGITAVWIPPAYKGTSQADVGYGAYDLYDLGEFHQKGTVRTKYGTKGELQSAIKSLHSRDINVYGDVVINHKGGADATEDVTAVEVDPADRNRVISGEYLIKAWTHFHFPGRGSTYSDFKWHWYHFDGTDWDESRKLNRIYKFQGKAWDWEVSSENGNYDYLMYADIDYDHPDVVAEIKRWGTWYANELQLDGFRLDAVKHIKFSFLRDWVNHVREKTGKEMFTVAEYWQNDLGALENYLNKTNFNHSVFDVPLHYQFHAASTQGGGYDMRKLLNGTVVSKHPLKSVTFVDNHDTQPGQSLESTVQTWFKPLAYAFILTRESGYPQVFYGDMYGTKGDSQREIPALKHKIEPILKARKQYAYGAQHDYFDHHDIVGWTREGDSSVANSGLAALITDGPGGAKRMYVGRQNAGETWHDITGNRSEPVVINSEGWGEFHVNGGSVSIYVQR

SEQ ID NO: 42689 - protein, 482 aa, Bacillus sp.
NGTLMQYFEWYAPNDGDHWNRLRTDAENLAQKGITSVWIPPAYKGTTQNDVGYGAYDLYDLGEFNQKGTVRTKYGTKAQLKSAIDALHKKNINVYGDVVMNHKGGADYTETVTAVEVDPSNRNIEVSGDYEISAWTGFNFPGRGDSYSNFKWKWYHFDGTDWDEGRKLNRIYKFRGIGKAWDWEVSSENGNYDYLMYADLDFDHPDVANEMKKWGTWYANELNLDGFRLDAVKHIDHEYLRDWVNHVRQQTGKEMFTVAEYWQNDIQTLNNYLAKVNYNQSVFDAPLHYNFHYASTGNGNYDMRNILKGTVVANHPTLAVTLVENHDSQPGQSLESVVSPWFKPLAYAFILTRAEGYPSVFYGDYYGTKGNSNYEIPALKDKIDPILTARKNFAYGTQRDYFDHPDVIGWTREGDSVHANSGLATLISDGPGGSKWMDVGKNNAGEVWYDITGNQTNTVTINKDGWGQFQVSGGSVSIYVQR

SEQ ID NO: 42690 - protein, 480 aa, Bacillus licheniformis
NGTLMQYFEWYTPNDGQHWKRLQNDSAYLAEHGITAVWIPPAYKGTSQADVGYGAYDLYDLGEFHQKGTVRTKYGTKGELQSAIKSLHSRDINVYGDVVINHKGGADATEDVTAVEVDPADRNREISGEYLIKAWTHFHFPGRGSTYSDFKWHWYHFDGTDWDESRKLNRIYKFQGKAWDWEVSSENGNYDYLMYADIDYDHPDVAAEIKRWGTWYANELQLDGFRLDAVKHIKFSFLRDWVNHVREKTGKEMFTVAEYWQNDLGALENYLNKTNFNHSVFDVPLHYQFHAASTQGGGYDMRKLLNGTVVSKHPLKSVTFVDNHDTQPGQSLESTVQTWFKPLAYAFILTRESGYPQVFYGDMYGTKGDSQREIPALKHKIEPILKARKQYAYGAQHDYFDHHDIVGWTREGDSSVANSGLAALITDGPGGAKRMYVGRQNAGETWHDITGNRSEPVVINSEGWGEFHVNGGSVSIYVQR

SEQ ID NO: 42691 - protein, 481 aa, Synthetic construct
NGTLMQYFEWYMPNDGQHWKRLQNDSAYLAEHGITAVWIPPAYKGTSQADVGYGAYDLYDLGEFHQKGTVRTKYGTKGELQSAIKSLHSRDINVYGDVVINHKAGADGTEFVDAVEVDPSNRNQETSGTYQIQAWTKFDFPGRGNTYSSFKWRWYHFDGTDWDESRKLNRIYKFSTGKAWDWEVDTENGNYDYLMFADLDYDHPDVAAEIKRWGTWYANELQLDGFRLDAVKHIKFSFLRDWVNHVREKTGKEMFTVAEYWSYDLGALENYLNKTNFNHSVFDVPLHYQFHAASTQGGGYDMRKLLNGTVVSKHPLKSVTFVDNHDTQPGQSLESTVQTWFKPLAYAFILTRESGYPQVFYGDMYGTKGDSQREIPALKHKIEPILKARKQYAYGAQHDYFDHHDIVGWTREGDSSVANSGLAALITDGPGGAKRMYVGRQNAGETWHDITGNRSEPVVINSAGWGEFHVNGGSVSIYVQR

SEQ ID NO: 42692 - protein, 480 aa, Bacillus licheniformis
NGTLMQYFEWYMPNDGQHWKRLQNDAEHLSDIGITAVWIPPAYKGLSQSDNGYGPYDLYDLGEFQQKGTVRTKYGTKSELQDAIGSLHSRNVQVYGDVVLNHKAGADATEDVTAVEVNPANRNQETSEEYQIKAWTDFRFPGRGNTYSDFKWHWYHFDGTDWDESRKLNRIYKFQGKAWDWEVSNENGNYDYLMYADIDYDHPDVAAEIKRWGTWYANELQLDGFRLDAVKHIKFSFLRDWVNHVREKTGKEMFTVAEYWQNDLGALENYLNKTNFNHSVFDVPLHYQFHAASTQGGGYDMRKLLNSTVVSKHPLKAVTFVDNHDTQPGQSLESTVQTWFKPLAYAFILTRESGYPQVFYGDMYGTKGDSQREIPALKHKIEPILKARKQYAYGAQHDYFDHHDIVGWTREGDSSVANSGLAALITDGPGGAKRMYVGRQNAGETWHDITGNRSEPVVINSEGWGEFHVNGGSVSIYVQR

SEQ ID NO: 42693 - protein, 480 aa, unidentified
NGTLMQYFEWYAPNDGNHWNRLRTDAENLAQKGITSVWIPPAYKGTTQNDVGYGAYDLYDLGEFNQKGAVRTKYGTKAQLKSAIEALHKQNIDVYGDVVMNHKGGADYTETVTAVEVDRNNRNIEVSGDYEINAWTGFNFPGRGDTYSNFKWKWYHFDGTDWDEGRKLNRIYKFRGKAWDWEVSSENGNYDYLMYADLDFDHPDVANEMKNWGTWYANELNLDGFRLDAVKHIDHEYLRDWVNHVRQQTGKEMFTVAEYWQNDIQTLNNYLAKVNYNQSVFDAPLHYNFHYASKGNGNYDMRNILNGTVMQNHPALAVTLVENHDSQPGQSLESVVSPWFKPLAYAFILTRTEGYPSVFYGDYYGTSGNSSYEIPALKDKIDPILTARKNFAYGTQRDYLDHPDVIGWTREGDSVHANSGLATLISDGPGGSKWMDVGKNNAGEVWRDITGNQTNTVTINKDGWGQFHVSGGSVSIYVQQ

SEQ ID NO: 42694 - protein, 480 aa, Bacillus licheniformis
NGTLMQYFEWYTPNDGQHWKRLQNDSAYLAEHGITAVWIPPAYKGTSQADVGYGAYDLYDLGEFHQKGTVRTKYGTKGELQSAIKSLHSRDINVYGDVVINHKGGADATEDVTAVEVDPADRNRVISGEYLIKAWTHFHFPGRGNTYSDFKWHWYHFDGTDWDESRKLNRIYKFQGKAWDWEVSSENGNYDYLMYADIDYDHPDVVAEIKRWGTWYANELQLDGFRLDAVKHIKFSFLRDWVNHVREKTGKEMFTVAEYWQNDLGALENYLNKTNFNHSVFDVPLHYQFHAASTQGGGYDMRKLLNGTVVSKHPLKSVTFVDNHDTQPGQSLESTVQTWFKPLAYAFILTRESGYPQVFYGDMYGTKGDSQREIPALKHKIEPILKARKQYAYGAQHDYFDHHDIVGWTREGDSSVANSGLAALITDGPDGAKRMYVGRQNAGETWHDITGNRSEPVVINSEGWGEFHVNGGSVSIYVQR

SEQ ID NO: 42695 - protein, 480 aa, Bacillus licheniformis
NGTLMQYFEWYTPNDGQHWKRLQNDSAYLAEHGITAVWIPPAYKGTSQADVGYGAYDLYDLGEFHQKGTVRTKYGTKGELQSAIKSLHSRDINVYGDVVINHKGGADATEDVTAVEVDPADRNRVISGEYLIKAWTHFHFPGRGNTYSDFKWHWYHFDGTDWDESRKLNRIYKFQGKAWDWEVSSENGNYDYLMYADIDYDHPDVVAEIKRWGTWYANELQLDGFRLDAVKHIKFSFLRDWVNHVREKTGKEMFTVAEYWQNDLGALENYLNKTNFNHSVFDVPLHYQFHAASTQGGGYDMRKLLNGTVVSKHPLKSVTFVDNHDTQPGQSLESTVQTWFKPLAYAFILTRESGYPQVFYGDMYGTKGDSQREIPSLKHKIEPILKARKQYAYGAQHDYFDHHDIVGWTREGDSSVANSGLAALITDGPGGAKRMYVGRQNAGETWHDITGNRSEPVVINSEGWGEFHVNGGSVSIYVQR

SEQ ID NO: 42696 - protein, 480 aa, Bacillus licheniformis
NGTLMQYFEWYTPNDGQHWKRLQNDSAYLAEHGITAVWIPPAYKGTSQSDVGYGAYDLYDLGEFHQKGTVRTKYGTKGELQSAIKSLHSRDINVYGDVVINHKGGADATEDVTAVEVDPADRNRVISGEYLIKAWTHFHFPGRGSTYSDFKWHWYHFDGTDWDESRKLNRIYKFQGKAWDWEVSSENGNYDYLMYADIDYDHPDVVAEIKRWGTWYANELQLDGFRFDAVKHIKFSFLRDWVNHVREKTGKEMFTVAEYWQNDLGALENYLNKTNFNHSVFDVPLHYQFHAASTQGGGYDMRKLLNGTVVSKHPLKSVTFVDNHDTQPGQSLESTVQTWFKPLAYAFILTRESGYPQVFYGDMYGTKGDSQREIPALKHKIEPILKARKQYAYGAQHDYFDHHDIVGWTREGDSSVANSGLAALITDGPGGAKRMYVGRQNAGETWHDITGNRSEPVVINSEGWGEFHVNGGSVSIYVQR

SEQ ID NO: 42697 - protein, 482 aa, unidentified
NGTLMQYFEWYAPNDGNHWNRLRSDAESLAHKGITSVWIPPAYKGTSQNDVGYGAYDLYDLGEFNQKGTVRTKYGTKAQLKSAIDALHKQNIDVYGDVVMNHKGGADYTETVTAVEVDRNNRNIEVSGDYQISAWTGFNFPGRGDAYSNFKWKWYHFDGTDWDEGRKLNRIYKFRGVDKAWDWEVSSENGNYDYLMYADLDFDHPDVANEMKNWGTWYANELNLDGFRLDAVKHIDHEYLRDWVNHARQQTGKEMFTVAEYWQNDVQALNNYLAKVNYNQSVFDAPLHYNFHYASTGNGNYDMRNILNGTVMKNHPALAVTLVENHDSQPGQSLESVVSPWFKPLAYAFILTRAEGYPSVFYGDYYGTSGNSSYEIPALKDKIDPILTARKNFAYGTQRDYLDHPDVIGWTREGDGVHANSGLATLLSDGPGGSKWMDVGKNNAGEVWYDITGNQTNTVTINKDGWGQFYVSGGSVSIYVQR

SEQ ID NO: 42698 - protein, 480 aa, Bacillus licheniformis
NGTLMQYFEWYTPNDGQHWKRLQNDSAYLAEHGITAVWIPPAYKGTSQADVGYGAYDLYDLGEFHQKGTVRTKYGTKGELQSAIKSLHSRDIQVYGDVVINHKGGADATEDVTAVEVDPADRNRVISGEYLIKAWTHFHFPGRGSTYSDFKWHWYHFDGTDWDESRKLNRIYKFQGKAWDWEVSSENGNYDYLMYADIDYDHPDVVAEIKRWGTWYANELQLDGFRLDAVKHIKFSFLRDWVNHVREKTGKEMFTVAEYWQNDLGALENYLNKTNFNHSVFDVPLHYQFHAASTQGGGYDMRKLLNGTVVSKHPLKSVTFVDNHDTQPGQSLESTVQTWFKPLAYAFILTRESGYPQVFYGDMYGTKGDSQREIPALKHKIEPILKARKQYAYGAQHDYFDHHDIVGWTREGDSSVANSGLAALITDGPGGAKRMYVGRQNAGETWHDITGNRSEPVVINSEGWGEFHVNGGSVSTYVQR

SEQ ID NO: 42699 - protein, 480 aa, Bacillus licheniformis
NGTLMQYFEWYTPNDGQHWKRLQNDSAYLAEHGITAVWIPPAYKGTSQSDVGYGAYDLYDLGEFHQKGTVRTKYGTKGELQSAIKSLHSRDINVYGDVVINHKGGADATEDVTAVEVDPADRNRVISGEYLIKAWTHFHFPGRGSTYSDFKWHWYHFDGTDWDESRKLNRIYKFQGKAWDWEVSSENGNYDYLMYADIDYDHPDVVAEIKRWGTWYANELQLDGFRLDAVKHIKFSFLRDWVNHVREKTGKEMFTVAEYWQNDLGALENYLNKTNFNHSVFDVPLHYQFHAASTQGGGYDMRKLLNGTVVSKHPLKSVTFVDNHDTQPGQSLESTVQTWFKPLAYAFILTRESGYPQVFYGDMYGTKGDSQREIPALKHKIEPILKARKQYAYGAQHDYFDHHDIVGWTREGDSSVANSGLAALITDGPGGAKRMYVGRQNAGETWHDITGNRSEPVVINSEGWGEFHVNGGSVSIYVQR

SEQ ID NO: 42700 - protein, 478 aa, Geobacillus stearothermophilus
LNGTLMQYFEWYTPNDGQHWKRLQNDSAYLAEHGITAVWIPPAYKGTSQADVGYGAYDLYDLGEFHQKGTVRTKYGTKGELQSAIKSLHSRDINVYGDVVINHKGGADATEDVTAVEVDPADRNRVISGEYLIKAWTHFHFPGRGSTYSDFKWHWYHFDGTDWDESRKLNRIYKFQGKAWDWEVSSENGNYDYLMYADIDYDHPDVVAEIKRWGTWYANELQLDGFRLDAVKHIKFSFFPDWLSYVRSQTGKPLFTVGEYWSYDINKLHNYITKTNGTMSLFDAPLHNKFYTASKSGGAFDMRTLMTNTLMKDQPTLAVTFVDNHDTEPGQALQSWVDPWFKPLAYAFILTRQEGYPCVFYGDYYGIPQYNIPSLKSKIDPLLIARRDYAYGTQHDYLDHSDIIGWTREGVTEKPGSGLAALITDGPGGSKWMYVGKQHAGKVFYDLTGNRSDTVTINSDGWGEFKVNGGSVSVWVPR

SEQ ID NO: 42701 - protein, 483 aa, Synthetic construct
GDNGTMMQYFEWYLPNDGTLWTKMGSDASHLKSIGITGVWFPPAYKGQSQSDVGYGVYDMYDLGEFNQKGTVRTKYGTKAQLQSAITSLHNNGIQAYGDVVLNHKGGADATENVLAVEVNPNNRNQEISGDYTIEAWTKFDFPGRGNTYSDFKWRWYHFDGVDWDQSRQFQNRIYKFRGDGKAWDWEVDSENGNYDYLMYADVDYDHPDVQTEVKNWGKWFVNTLNLDGVRLDAVKHIKFDYMSSWLSSVKSTTGKSNLFAVGEYWNTSLGALENYENKTNWSMSLFDVPLHMNFQAAANGGGYYDMRNLLNNTMMKNHPIQAVTFVDNHDTEPGQALQSWVSDWFKPLAYATILTRQEGYPCVFYGDYYGIPSQSVSAKSTWLDKQLSARKSYAYGTQHDYLDNQDVIGWTREGDSAHAGSGLATVMSDGPGGSKTMYVGTAHAGQVFKDITGNRTDTVTINSAGNGTFPCNGGSVSIWVKQ

SEQ ID NO: 42702 - protein, 482 aa, unidentified
AATNGTMFQYFEWYLPNDGTLWDKLGNDAPNLKSIGVTAVWIPPAYKGSSQADVGYGTYDLYDLGEFNQKGTVRTKYGTKSQLISAVDKLHNNGIQVYGDVVLNHKMGADGTETVWAVEVNPSNRNQETSGDYQISAWTKFDFPGRGNTYSSFKWRWYHFDGVDWDQSRSLSRIYKLRGDYKGWDWEVDTENGNYDYLMGADVDMQHPEVVNELNNWGKWFTQTVKLDGYRLDAVKHIKFDFFNTWLDYQRQQSGKELFTVGEYWSDDLGKLQNYISKTGRRMSLFDVPLQRNFYNASNGGGYYDMRNIKSGTLISVDPTKAVTFVDNHDTEPGQSLQRFVQDWFKPLAYTFILTREEGYPCIFYGDYYGIPAKGVSAKKVAIDKIMLARKNYAYGKQNDYLDHWDIIGWTREGDNEHANSGMAALITDGPGGSKWMYVGQKFIGKTFYDITGNRTDTVVINSSGWGEFKVNGGSYSIWVPK

SEQ ID NO: 42703 - protein, 496 aa, Aspergillus terreus NIH2624
WTSSLLLLLSVIGQATHALTPAEWRSQSIYFLLTDRFGRTDNSTTAACDTSDRVYCGGSWQGIINQLDYIQGMGFTAIWITPVTGQFYENTGDGTSYHGYWQQDIYDLNYNYGTAQDLKNLANALHERGMYLMVDVVANHMGYDGAGNTVDYSVFNPFSSSSYFHPYCLISNYDNQTNVEDCWLGDTTVSLPDLDTTSTAVRNIWYDWVADLVANYSIDGLRVDTVKHVEKDFWPGYNSAAGVYCVGEVYSGDPAYTCPYQNYMDGVLNYPIYYQLLYAFESSSGSISDLYNMISSVASSCKDPTLLGNFIENHDNPRFASYTSDYSQAKNVITFIFLSDGIPIVYAGQEQHYSGGSDPANREATWLSGYSTSATLYTWIATTNQIRSLAISKDAGYVQAKNNPFYSDSNTIAMRKGTTAGAQVITVLSNKGASGSSYTLSLSGTGYSAGATLVETYTCTTVTVDSSGNLPVPMTSGLPRVFVPSSWVNGSALCNT

SEQ ID NO: 42704 - protein, 494 aa, unidentified
SLFLSVSLLGKLALGLTPAEWRSQSIYFLLTDRFGRTDNSTTAACDTSDRVYCGGSWQGIINQLDYIQGMGFTAIWITPVTGQFYENTGDGTSYHGYWQQDIYDLNYNYGTAQDLKNLANALHERGMYLMVDVVANHMGYDGAGNTVDYSVFNPFSSSSYFHPYCLISNYDNQTNVEDCWLGDTTVSLPDLDTTSTAVRNIWYDWVADLVANYSIDGLRVDTVKHVEKDFWPGYNSAAGVYCVGEVYSGDPAYTCPYQNYMDGVLNYPIYYQLLYAFESSSGSISDLYNMISSVASSCKDPTLLGNFIENHDNPRFASYTSDYSQAKNVITFIFLSDGIPIVYAGQEQHYSGGSDPANREATWLSGYSTSATLYTWIATTNQIRSLAISKDAGYVQAKNNPFYSDSNTIAMRKGTTAGAQVITVLSNKGASGSSYTLSLSGTGYSAGVTLVETYTCTTVTVDSSGNLPVPMTSGLPRVFVPSSWVNGSALCNGA

SEQ ID NO: 42705 - protein, 494 aa, unidentified
SLFLSVSLLGKLALGLTPAEWRSQSIYFLLTDRFGRTDNSTTAACDTSDRVYCGGSWQGIINQLDYIQGMGFTAIWITPVTGQFYENTGDGTSYHGYWQQDIYDLNYNYGTAQDLKNLANALHERGMYLMVDVVANHMGYDGAGNTVDYSVFNPFSSSSYFHPYCLISNYDNQTNVEDCWLGDTTVSLPDLDTTSTAVRNIWYDWVADLVANYSIDGLRVDTVKHVEKDFWPGYNSAAGVYCVGEVYSGDPAYTCPYQNYMDGVLNYPIYYQLLYAFESSSGSISDLYNMISSVASSCKDPTLLGNFIENHDNPRFASYTSDYSQAKNVITFIFLSDGIPIVYAGQEQHYSGGSDPANREATWLSGYSTSATLYTWIATTNQIRSLAISKDAGYVQAKNNPFYSDSNTIAMRKGTTAGAQVITVLSNKGASGSSYTLSLSGTGYSAGVTLVETYTCTTVTVDSSGNLPVPMTSGLPRVFVPSSWVNGSALCNTT

SEQ ID NO: 42706 - protein, 478 aa, Synthetic construct
NGTMMQYFEWYLPNDGTLWTKMGSDASHLKSIGITGVWFPPAYKGQSQSDVGYGVYDMYDLGEFNQKGTVRTKYGTKAQLQSAITSLHNNGIQAYGDVVLNHKAGADGTELVDAVEVNPSDRNQEISGTYQIQAWTKFDFPGRGNTYSSFKWRWYHFDGTDWDESRKLNRIYKFRGTGKAWDWEVDTENGNYDYLMYADLDYDHPDVQTEVKNWGKWFVNTLNLDGVRLDAVKHIKFDYMSSWLSSVKSTTGKSNLFAVGEYWNTSLGALENYENKTNWSMSLFDVPLHMNFQAAANGGGYYDMRNLLNNTMMKNHPIQAVTFVDNHDTEPGQALQSWVSDWFKPLAYATILTRQEGYPCVFYGDYYGIPSQSVSAKSTWLDKQLSARKSYAYGTQHDYLDNQDVIGWTREGDSAHAGSGLATVMSDGPGGSKTMYVGTAHAGQVFKDITGNRTDTVTINSAGNGTFPCNGGSVSIWV

SEQ ID NO: 42707 - protein, 482 aa, Bacillus sp. YR288
NRTMMQYFEWYVPNDGQHWNRLRNDAAYLKSIGVSAIWTPPAYKGTSQNDVGYGAYDLYDLGEFNQKGTIRTKYGTKAELKSAVSTLKSNGIQVYGDVVMNHKGGADYTENVTAVEVNPSNRNQETSDEYTIQAWTGFNFPGRGTTHSPFKWQWYHFDGTDWDQSRNASRIFKFRGTGKAWDWEVSSENGNYDYLMYADLDFDHPDVRNEMKNWGVWYANEVGLDGFRLDAVKHIKHSYLGDWVNHVRTKTGKTMWTVAEYWQNDVNAINNYLAKVNYNHWVFDAPLHYNFHYASQSGGNYDMRNLLNGTVVAAHPTKAVTLVENHDSQPGQSLESVVQPWFKPLAYAFILTRAEGLPSIFYGDMYGTKGNSSYEIPALKTKIEPLLKARKDYAYGTQHNYMDHWDVIGWTREGDSTKEKSGLATLVTDGAGGSKWMYVGKQNAGEVWYDITGNRTDKITINTDGWGTFQVNGGSVSVYVQQ

SEQ ID NO: 42708 - protein, 483 aa, Bacillus sp. YR288
NRTMMQYFEWYVPNDGQHWNRLRNDAAYLKSIGVSAIWTPPAYKGTSQNDVGYGAYDLYDLGEFNQKGTIRTKYGTKAELKSAVSTLKSNGIKVYGDVVMNHKGGADYTENVTAVEVNPSNRNQETSDEYTIQAWTGFNFPGRGTTHSPFKWQWYHFDGTDWDQSRNASRIFKFRGTGKAWDLEVSSENGNYDYLMYADLDFDHPDVRNEMKNWGVWYANEVGLDGFRLDAVKHIKHSYLGDWVNHVRTKTGKTMFTVAEYWQNDVNAINNYLAKVNYNHWVFDAPLHYNFHYASQSGGNYDMRNLLNGTVVAAHPTKAVTLVENHDSQPGQSLESVVQPWFKPLAYAFILTRAEGYPSIFYGDMYGTKGNSSYEIPALKTKIEPLLKARKDYAYGTQHNYMDHWDVIGWTREGDSTKEKSGLATLVTDGSAGGSKWMYVGKQNAGEVWYDITGNRTDKITINTDGWGNFQVNGGSVSVYVQQ

SEQ ID NO: 42709 - protein, 483 aa, Bacillus sp. YR288
NRTMMQYFEWYVPNDGQHWNRLRNDAAYLKSIGVSAIWTPPAYKGTSQNDVGYGAYDLYDLGEFNQKGTIRTKYGTKAELKSAVSTLKSNGIKVYGDVVMNHKGGADYTENVTAVEVNPSNRNQETSDEYTIQAWTGFNFPGRGTTHSPFKWQWYHFDGTDWDQSRNASRIFKFRGTGKAWDLEVSSENGNYDYLMYADLDFDHPDVRNEMKNWGVWYANEVGLDGFRLDAVKHIKHSYLGDWVNHVRTKTGKEMWTVAEYWQNDVNAINNYLAKVNYNHSVFDAPLHYNFHYASQSGGNYDMRNLLNGTVVAAHPTKAVTLVENHDSQPGQSLESVVQPWFKPLAYAFILTRAEGLPSIFYGDMYGTKGNSSYEIPALKTKIEPLLKARKDYAYGTQHNYMDHWDVIGWTREGDSTKEKSGLATLVTDGSAGGSKWMYVGKQNAGEVWYDITGNRTDKITINTDGWGNFQVNGGSVSVYVQQ

SEQ ID NO: 42710 - protein, 482 aa, Bacillus sp. SG1-1
NGTLMQYFEWYLPNDGEHWNRLNNDAAHLNDIGISAVWIPPAYKGTSQNDVGYGAYDLYDLGEFYQKGTTRTKYGTKQQLQNAISSLHQNGLQVYGDVVMNHKGGADYTQSVTAVEVDPNNRNYETSGDYQIEAWTGFDFPGRNNVHSNFKWQWYHFDGTDWDESRKLSRVYKFRGTGKAWDWEVASEKGNYDYLMYADVDFDHPDVQQEYKNWGTWYANELNLDGFRLDAVKHIKHSYLQDWVSTVRSNTGKELFTVAEYWQNDLSAIENYLSKTGWTHSAFDVPLHYNFHYASNSGGNYDMRNILNGTLVASQPTKAVTIVENHDSQPGQALESTVQPWFKPLAYAFILTRSQGYPTLFYGDYYGTKGNTSYEVPALQSELEPILKARKNYAYGTQHDYLDHWDIIGWTREGNTTRSKSGLATLITDGPGGNKWMYVGKRNAGETWVDTTGNNSTQVVINNDGWGNFHVNGGSVSIYTQQ

SEQ ID NO: 42711 - protein, 482 aa, Bacillus sp. YR288
NRTMMQYFEWYVPNDGQHWNRLRNDAAYLKSIGVSAIWTPPAYKGTSQNDVGYGAYDLYDLGEFNQKGTIRTKYGTKAELKSAVSTLKSNGIKVYGDVVMNHKGGADYTENVTAVEVNPSNRNQETSDEYTIQAWTGFNFPGRGTTHSPFKWQWYHFDGTDWDQSRNASRIFKFRGTGKAWDWPVSSEFGNYDYLLYADLDFDHPDVINEMKNWGVWYANEVGLDGFRLDAVKHIKHSFLGDWVNHVRTKTGKEMWTVAEYWQNDVNAINNYLAKVNYNHSVFDAPLHYNFHYASQSGGNYDMRNLLNGTVVAAHPTKAVTLVENHDSQPGQSLESVVQPWFKPLAYAFILTRAEGLPSIFYGDMYGTKGNSSYEIPALKTKIEPLLKARKDYAYGTQHNYMDHWDVIGWTREGDSTKEKSGLATLVTDGAGGSKRMYVGKQNAGEVWYDITGNRTDKITINTDGWGNFQVNGGSVSVYVQQ

SEQ ID NO: 42712 - protein, 483 aa, Bacillus sp.
NGTMMQYFEWYLPNDGQHWTRLANDANNLSSLGITALWIPPAYKGTSQSDVGYGAYDLYDLGEFNQKGTVRTKYGTKAQLLQAIQALHAAGIQVYGDVVMNHKGGADGTEWVDAVEVNPSDRNQEISGTYQIQAWTKFDFPGRGNTYSSFKWRWYHFDGVDWDESRKLNNRIYKFRGIGKAWDWEVDTENGNYDYLMYADIDMDHPEVVTELKNWGKWYVNTLNLDGFRLDAVKHIKFSFFRDWLSHVRSQTGKPLFTVGEYWSNDIGALENYLTKTNWNMSLFDVPLHYNFYTASKSGGAYDMRTLLTGTLVKDHPTLAVTFVDNHDTQPGQALESWVDPWFKPLAYAFILTREEGYPCVFYGDYYGIPQYNQREIPSLKSKIDPLLIARRDYAYGTQHDYLDHSDIIGWTREGVTSKPNSGLAALITDGPGGSKWMYVGKQHAGKVWYDLTGNRSDTVTINSDGWGEFKVNGGSVSVWVPR

SEQ ID NO: 42713 - protein, 480 aa, Synthetic construct
NGTMMQYFEWYLPDDGTLWTKVANNAQSLANLGITALWLPPAYKGTSSSDVGYGVYDLYDLGEFNQKGTVRTKYGTKTQYIQAIQAAHTAGMQVYADVVFNHKGGADATENVLAVEVNPNNRNQEISGDYTIEAWTKFDFPGRGNTYSDFKWRWYHFDGVDWDQSRQFQNRIYKFRGDGKAWDWEVDSENGNYDYLMYADVDMDHPEVVSELKNWGKWYVTTTNIDGFRLDAVKHIKYSFFPDWLSYVRTQTQKPLFAVGEFWSYDISKLHNYITKTNGSMSLFDAPLHNNFYIASKSGGYFDMRTLLNNTLMKDQPTLAVTLVDNHDTEPGQSLQSWVEPWFKPLAYAFILTRQEGYPCVFYGDYYGIPKYNIPALKSKLDPLLIARRDYAYGTQHDYIDSADIIGWTREGVAEKANSGLAALITDGPGGSKWMYVGKQHAGKTFYDLTGNRSDTVTINADGWGEFKVNGGSVSIWVPK

SEQ ID NO: 42714 - protein, 481 aa, Bacillus licheniformis
NGTLMQYFEWYTPNDGQHWKRLQNDSAYLAEHGITAVWIPPAYKGASQNDVGYGAYDLYDLGEFHQKGTVRTKYGTKGELQSAIKSLHSRDINVYGDVVINHKGGADATEDVTAVEVDPADRNRVISGEHLIKAYTHFHFPGRGSTYSDFKWHWYHFDGVDWDQSRRLNNRIYKFQGKAWDWEVDTEFGNYDYLTYADIDYDHPDVAAEIKRWGTWYANELQLDGFRLDAVKHIKYSFLRDWVNHVREKTGKEMFTVAEFWKNDLGALENYLNKTNFNHSVFDVPLHYQFYAASKQGGGYDMRKLLNGTVVSKHPLKSVTFVDNHDTQPEEALESTVQTWFKPLAYAFILTRESGYPQVFYGDMYGTKGDSQREIPALKHKIEPILKARKQYAYGAQHDYFDHHDIVGWTREGDSSVANSGLAALITDGPGGAKRMYVGRQNAGETWHDITGNRSEPVVINSEGWGEFHVNGGSVSIYVQR

SEQ ID NO: 42715 - protein, 454 aa, Jeotgalibacillus campisalis
NGTMMQYFEWYLPNDGLHWNRLTNDASNLKNLGVTTVWIPPAYKGTSQNDVGYGAYDLYDLGEFNQKGTVRTKYGTRGQLQTAINTLKNQGIGTYGDVVMNHKGGADFTESVQAVEVNPNNRSQETSGEYTISAWTGFNFAGRNNLHSAFKWRWYHFDGTDWDQSRSLNRIYKFRGSGKSWDTEVSNEFGNYDYLMYADVDFDHPEVKAELKNWGKWYVQSLNLDGFRLDAVKHIKHDYIREWLADVRRTTGKELFTVAEYWQNDLGAINNYLAKTGYSHSVFDVPLHYNFQRAANSGGNFDMRTIFNGSVVQQHPTLAVTIVDNHDSQPGQSLESTVDAWFKPLAYAMIMTREQGYPNLFYGDFYGTKGSSNREIPNLSSKLTPILKARKDMAYGTQHDYLNHQDVIGWTREGVTDRSKSGLATILSDGPGGNKWMYVGKRNAGETWRDKTGN

SEQ ID NO: 42716 - protein, 454 aa, Jeotgalibacillus campisalis
NGTMMQYFEWYLPNDGLHWNRLTNDASNLKNLGVTTVWIPPAYKGTSQNDVGYGAYDLYDLGEFNQKGTVRTKYGTRGQLQTAINTLKNQGIGTYGDVVMNHKGGADFTESVQAVEVNPNNRSQETSGEYTISAWTGFNFAGRNNLHSAFKWRWYHFDGTDWDQSRSLNRIYKFRGSGKSWDTEVSNEFGNYDYLMYADVDFDHPEVKAELKNWGKWYVQSLNLDGFRLDAVKHIKHDYIQEWLADVRRTTGKELFTVAEYWQNDLGAINNYLAKTNYSHSVFDVPLHYNFQRAANSGGNFDMRTIFNGSVVQQHPTLAVTIVDNHDSQPGQSLESTVDAWFKPLAYAMIMTREQGYPNLFYGDFYGTKGSSNREIPNLSSKLTPILKARKDMAYGTQHDYLNHQDVIGWTREGVTDRSKSGLATILSDGPGGNKWMYVGKRNAGETWRDKTGN

SEQ ID NO: 42717 - protein, 480 aa, Bacillus amyloliquefaciens
NGTLMQYFEWYTPNDGQHWKRLQNDAEHLSDIGITAVWIPPAYKGTSQADVGYGAYDLYDLGEFHQKGTVRTKYGTKGELQSAIKSLHSRDINVYGDVVINHKGGADATEDVTAVEVDPADRNRVISGEHLIKAWTHFHFPGRGSTYSDFKWHWYHFDGTDWDESRKLNRIYKFQGKAWDWEVSNENGNYDYLMYADIDYDHPDVAAEIKRWGTWYANELQLDGFRLDAVKHIKFSFLRDWVNHVREKTGKEMFTVAEYWQNDLGALENYLNKTNFNHSVFDVPLHYQFHAASTQGGGYDMRKLLNGTVVSKHPLKSVTFVDNHDTQPGQSLESTVQTWFKPLAYAFILTRESGYPQVFYGDMYGTKGDSQREIPALKHKIEPILKARKQYAYGAQHDYFDHHDIVGWTREGDSSVANSGLAALITDGPGGAKRMYVGRQNAGETWHDITGNRSEPVVINSEGWGNFHVNGGSVSIYVQR

SEQ ID NO: 42718 - protein, 477 aa, Bacillus sp.
NETMMQYFEWDLPNDGTLWNRLHNNAQNLKNAGITALWLPPAYKGTSQSDVGYGVYDLYDLGEFNQKGTIRTKYGTKTQYIQAIQAAKAAGMQVYADVVFNHKAGADGTEFVDAVEVDPSNRNQEVSGTYQIEAWTKFDFPGRGNTYSSFKWRWYHFDGTDWDESRKLNRIYKFRGKAWDWEVDTENGNYDYLMFADLDMDHPEVVTELKNWGTWYVNTTNIDGFRLDAVKHIKFSFMRDWLTYVRNQTGKNLFAVGEFWSYDVNKLHNYITKTNGSMSLFDAPLHNNFYTASKSSGYFDMRNLLNGTLVQRHPSHAVTLVDNHDTQPGQSLQSWVEPWFKPLAYAFILTRQEGYPCVFYGDYYGIPKYNIPGLKSKIDPLLIARRDYAYGTQRDYIDHQDIIGWTREGIDTKPNSGLAALITDGPGGSKWMYVGKKHAGKVFYDLTGNRSDTVTINADGWGEFKVNGGSVSIWVAK

SEQ ID NO: 42719 - protein, 477 aa, Bacillus sp.
NETMMQYFEWDLPNDGTLWTKVKNEAANLSSLGITALWLPPAYKGTSQSDVGYGVYDLYDLGEFNQKGTIRTKYGTKTQYIQAIQAAKAAGMQVYADVVFNHKAGADGTEFVDAVEVDPSNRNQEVSGTYQIEAWTKFDFPGRGNTYSSFKWRWYHFDGTDWDESRKLNRIYKFRGKAWDWEVDTENGNYDYLMFADLDMDHPEVVTELKNWGTWYVNTTNIDGFRLDAVKHIKFSFMRDWLTYVRNQTGKNLFAVGEFWSYDVNKLHNYITKTNGSMSLFDAPLHNNFYTASKSSGYFDMRNLLNGTLVQRHPSHAVTLVDNHDTQPGEALESFVQGWFKPLAYAFILTRQEGYPCVFYGDYYGIPSDGVPGLKSKIDPLLIARRDYAYGTQRDYIDHQDIIGWTREGIDTKPNSGLAALITDGPGGSKWMYVGKKHAGKVFYDLTGNRSDTVTINADGWGEFKVNGGSVSIWVAK

SEQ ID NO: 42720 - protein, 477 aa, Bacillus sp.
NETMMQYFEWDLPNDGTLWNRLHNNAQNLKNAGITALWLPPAYKGTSQSDVGYGVYDLYDLGEFNQKGTIRTKYGTKTQYIQAIQAAKAAGMQVYADVVFNHKAGADQTEFVDAVEVDPSNRNQEVSGTYQIEAWTKFDFPGRGNTYSSFKWRWYHFDGTDWDESRKLNRIYKFRGKAWDWEVDTENGNYDYLMFADLDMDHPEVVTELKNWGTWYVNTTNIDGFRLDAVKHIKFSFMRDWLTYVRNQTGKNLFAVGEFWSYDVNKLHNYITKTNGSMSLFDAPLHNNFYTASKSSGYFDMRNLLNGTLVQRHPSHAVTLVDNHDTQPGQSLQSWVEPWFKPLAYAFILTRQEGYPCVFYGDYYGIPKYNIPGLKSKIDPLLIARRDYAYGTQRDYIDHQDIIGWTREGIDTKPNSGLAALITDGPGGSKWMYVGKKHAGKVFYDLTGNRSDTVTINADGWGEFKVNGGSVSIWVAK

SEQ ID NO: 42721 - protein, 477 aa, Bacillus sp.
NETMMQYFEWDLPNDGTLWTKVKNEAANLSSLGITALWLPPAYKGTSQSDVGYGVYDLYDLGEFNQKGTIRTKYGTKTQLERAIRSLKANGIQVYADVVFNHKAGADQTEFVDAVEVDPSNRNQEVSGTYQIEAWTKFDFPGRGNTYSSFKWRWYHFDGTDWDESRKLNRIYKFRGKAWDWEVDTENGNYDYLMFADLDMDHPEVVTELKNWGTWYVNTTNIDGFRLDAVKHIKFSFMRDWLTYVRNQTGKNLFAVGEFWSYDVNKLHNYITKTNGSMSLFDAPLHNNFYTASKSSGYFDMRNLLNGTLVQRHPSHAVTLVDNHDTQPGQSLQSWVEPWFKPLAYAFILTRQEGYPCVFYGDYYGIPSDGVPGLKSKIDPLLIARRDYAYGTQRDYIDHQDIIGWTREGIDTKPNSGLAALITDGPGGSKWMYVGKKHAGKVFYDLTGNRSDTVTINADGWGEFKVNGGSVSIWVAK

SEQ ID NO: 42722 - protein, 480 aa, Bacillus licheniformis
NGTLMQYFEWYMPNDGQHWRRLQNDSAYLAEHGITAVWIPPAYKGTSQADVGYGAYDLYDLGEFHQKGTVRTKYGTKGELQSAIKSLHSRDINVYGDVVINHKGGADATEDVTAVEVDPADRNRVISGEHLIKAWTHFHFPGRGSTYSDFKWHWYHFDGTDWDESRKLNRIYKFQGKAWDWEVSNENGNYDYLMYADIDYDHPDVAAEIKRWGTWYANELQLDGFRLDAVKHIKFSFLRDWVNHVREKTGKEMFTVAEYWQNDLGALENYLNKTNFNHSVFDVPLHYQFHAASTQGGGYDMRKLLNGTVVSKHPLKSVTFVDNHDTQPGQSLESTVQTWFKPLAYAFILTRESGYPQVFYGDMYGTKGDSQREIPALKHKIEPILKARKQYAYGAQHDYFDHHDIVGWTREGDSSVANSGLAALITDGPGGAKRMYVGRQKAGKTWHDITGNRSEPVVINSEGWGEFHVNGGSVSIYVKR

SEQ ID NO: 42723 - protein, 482 aa, Bacillus thuringiensis
NGTLMQYFEWYAPNDGNHWNRLRTDVENLAEKGITSVWIPPAYKGTTQNDVGYGAYDLYDLGEFNQKGTVRTKYGTKAQLKSAIDALHKKNIDVYGDVVMNHKGGADYTETVTAVEVDPSNRNVEVSGDYEISAWTGFNFPGRGDSYSNFKWKWYHFDGTDWDEGRKLNRIYKFRGIGKAWDWEVSSENGNYDYLMYADLDFDHPDVANEMKKWGTWYANELNLDGFRLDAVKHIDHEYLRDWVNHVRQQTGKEMFTVAEYWQNDIQTLNNYLAKVNYNQSVFDAPLHYNFHYASTGNGNYDMRNILKGTVVANHPTLAVTLVENHDSQPGQSLESVVSPWFKPLAYAFILTRAEGYPSVFYGDYYGTKGNSNYEIPALKDKIDPILTARKNFAYGTQRDYFDHPDVIGWTREGDSVHANSGLATLISDGPGGAKWMDVGKNNAGEVWYDITGNQTNTVTINKDGWGQFQVSGGSVSIYVQQ

SEQ ID NO: 42724 - protein, 480 aa, Synthetic construct
NGTLMQYFEWYMPNDGQHWKRLQNDSAYLAEHGITAVWIPPAYKGTSQADVGYGAYDLYDLGEFHQKGTVRTKYGTKGELQSAIKSLHSRDINVYGDVVINHKGGADATEDVTAVEVDPADRNRVISGEYLIKAWTHFHFPGRGSTYSDFKWHWYHFDGTDWDESRKLNRIYKFQGKAWDWEVDNENGNYDYLMYADIDYDHPDVAAEIKRWGTWYANELQLDGFRLDAVKHIKFSFLRDWVNHVREKTGKEMFTVAEYWQNDLGALENYLNKTNFNHSVFDVPLHYQFHAASTQGGGYDMRKLLNGTVVSKHPLKSVTFVDNHDTQPGQSLESTVQTWFKPLAYAFILTRESGYPQVFYGDMYGTKGDSQREIPALKHKIEPILKARKQYAYGAQHDYFDHHDIVGWTREGDSSVANSGLAALITDGPGGAKRMYVGRQNAGETWHDITGNRSEPVVINSEGWGEFHVNGGSVSIYVQR

SEQ ID NO: 42725 - protein, 480 aa, Synthetic construct
NGTLMQYFEWYMPNDGQHWKRLQNDSAYLAEHGITAVWIPPAYKGTSQADVGYGAYDLYDLGEFHQKGTVRTKYGTKGELQSAIKSLHSRDINVYGDVVINHKGGADATEDVTAVEVDPADRNREISGEYLIKAWTHFHFPGRGSIYSDFKWHWYHFDGTDWDESRKLNRIYKFQGKAWDWEVDNENGNYDYLMYADIDYDHPDVAAEIKRWGTWYANELQLDGFRLDAVKHIKFSFLRDWVNHVREKTGKEMFTVAEYWQNDLGALENYLNKTNFNHSVFDVPLHYQFHAASTQGGGYDMRKLLNGTVVSKHPLKSVTFVDNHDTQPGQSLESTVQTWFKPLAYAFILTRESGYPQVFYGDMYGTKGDSQREIPALKHKIEPILKARKQYAYGAQHDYFDHHDIVGWTREGDSSVANSGLAALITDGPGGAKRMYVGRQNAGETWHDITGNRSEPVVINSEGWGEFHVNGGSVSIYVQR

SEQ ID NO: 42726 - protein, 480 aa, Bacillus licheniformis
NGTLMQYFEWYTPNDGQHWKRLQNDSAYLAEHGITAVWIPPAYKGTSQADVGYGAYDLYDLGEFHQKGTVRTKYGTKGELQSAIKSLHSRDINVYGDVVINHKGGADATEDVTAVEVDPADRNRVISGEYLIKAWTHFHFPGRGSTYSDFKWHWYHFDGTDWDESRKLNRIYKFQGKAWDWEVSSENGNYDYLMYADIDYDHPDVVAEIKRWGTWYANELQLDGFRLDAVKHIKFSFLRDWVNHVREKTGKEMFTVAEYWQNDLGALENYLNKTNFNHSVFDVPLHYQFHAASTQGGGYDMRKLLNGTVVSKHPLKSVTFVDNHDTQPGQSLESTVQTWFKPLAYAFILTRESGYPQVFYGDMYGTKGDSQREIPSLKHKIEPILKARKQYAYGAQHDYFDHHDIVGWTREGDSSVANSGLAALITDGPGGAKRMYVGRQNAGETWHDITGNRSEPVVINSEGWGEFHVNGGSVSIYVQR

SEQ ID NO: 42727 - protein, 480 aa, Bacillus licheniformis
NGTLMQYFEWYTPNDGQHWKRLQNNSAYLSEHGITAVWIPPAYKGTSQADVGYGAYDLYDLGEFHQKGTVRTKYGTKGELQSAIKSLHSRDINVYGDVVINHKGGADATEDVTAVEVDPADRNRVISGEYLIKAWTHFHFPGRGSTYSDFKWHWYHFDGTDWDESRKLNRIYKFQGKAWDWEVSSENGNYDYLMYADIDYDHPDVVAEIKRWGTWYANELQLDGFRLDAVKHIKFSFLRDWVNHVREKTGKEMFTVAEYWQNDLGALENYLNKTNFNHSVFDVPLHYQFHAASTQGGGYDMRKLLNGTVVSKHPLKSVTFVDNHDTQPGQSLESTVQTWFKPLAYAFILTRESGYPQVFYGDMYGTKGDSQREIPALKHKIEPILKARKQYAYGAQHDYFDHHDIVGWTREGDSSVANSGLAALITDGPGGAKRMYVGRQNAGETWHDITGNRSEPVVINSEGWGEFHVNGGSVSIYVQR

SEQ ID NO: 42728 - protein, 480 aa, Bacillus licheniformis
NGTLMQYFEWYMPNDGQHWRRLQNDSAYLAEHGITAVWIPPAYKGTSQADVGYGAYDLYDLGEFHQKGTVRTKYGTKGELQSAIKSLHSRDINVYGDVVINHKGGADATEDVTAVEVDPADRNRVISGEHLIKAWTHFHFPGRGSTYSDFKWHWYHFDGTDWDESRKLNRIYKFQGKAWDWEVSNENGNYDYLMYADIDYDHPDVAAEIKRWGTWYANELQLDGFRLDAVKHIKFSFLRDWVNHVREKTGKEMFTVAEYWQNDLGALENYLNKTNFNHSVFDVPLHYQFHAASTQGGGYDMRKLLNGTVVSKHPLKSVTFVDNHDTQPGQSLESTVQTWFKPLAYAFILTRESGYPQVFYGDMYGTKGDSQREIPALKHKIEPILKARKQYAYGAQHDYFDHHDIVGWTREGDSSVANSGLAALITDGPGGAKRMYVGRQNAGQTWHDITGNRSEPVVINSEGWGEFHVNGGSVSIYVKR

SEQ ID NO: 42729 - protein, 480 aa, unidentified
NGTLMQYFEWYAPNDGNHWNRLRTDAENLAQKGITSVWIPPAYKGTTQNDVGYGAYDLYDLGEFNQKGAVRTKYGTKAQLKSAIEALHKQNIDVYGDVVMNHKGGADYTETVTAVEVDRNNRNIEVSGDYEINAWTGFNFPGRGDTYSNFKWKWYHFDGTDWDEGRKLNRIYKFRGKAWDWEVSSENGNYDYLLYADLDFDHPDVANEMKNWGTWYANELNLDGFRLDAVKHIDHEYLRDWVNHVRQQTGKEMFTVAEYWQNDIQTLNNYLAKVNYNQSVFDAPLHYNFHYASKGNGNYDMRNILNGTVMQNHPALAVTLVENHDSQPGQSLESVVSPWFKPLAYAFILTRTEGYPSVFYGDYYGTSGNSSYEIPALKDKIDPILTARKNFAYGTQRDYLDHPDVIGWTREGDSVHANSGLATLISDGPGGSKWMDVGKNNAGEVWRDITGNQTNTVTINKDGWGQFHVSGGSVSIYVQQ

SEQ ID NO: 42730 - protein, 480 aa, Bacillus licheniformis
NGTLMQYFEWYTPNDGQHWKRLQNDSAYLAEHGITAVWIPPAYKGTSQADVGYGAYDLYDLGEFHQKGTVRTKYGTKGELQSAIKSLHSRDINVYGDVVINHKGGADATEDVTAVEVDPADRNRVISGEHLIKAWTHFHFPGRGSTYSDFKWHWYHFDGTDWDESRKLNRIYKFQGKAWDWEVDSENGNYDYLMYADIDYDHPDVAAEIKRWGTWYANELQLDGFRLDAVKHIKFSFLRDWVNHVREKTGKEMFTVAEYWQNDLGALENYLNKTNFNHSVFDVPLHYQFHAASTQGGGYDMRKLLNGTVVSKHPLKSVTFVDNHDTQPGQSLESTVQTWFKPLAYAFILTRESGYPQVFYGDMYGTKGDSQREIPALKHKIEPILKARKQYAYGAQHDYFDHHDIVGWTREGDSSVANSGLAALITDGPGGAKRMYVGRQNAGETWHDITGNRSEPVVINSEGWGEFHVNGGSVSIYVQR

SEQ ID NO: 42731 - protein, 480 aa, Bacillus megaterium
NGTLMQYFEWYAPNDGDHWNRLRTDAENLAQKGITSVWIPPAYKGTTQNDVGYGAYDLYDLGEFNQKGTVRTKYGTKAQLKSAIDALHKKNINVYGDVVMNHKGGADYTETVTAVEVDPSNRNIEVSGDYEISAWTGFNFPGRGDSYSNFKWKWYHFDGTDWDEGRKLNRIYKFIGKAWDWEVSSENGNYDYLMYADLDFDHPDVANEMKKWGTWYANELNLDGFRLDAVKHIDHEYLRDWVNHVRQQTGKEMFTVAEYWQNDIQTLNNYLAKVNYNQSVFDAPLHYNFHYASTGNGNYDMRNILKGTVVANHPTLAVTLVENHDSQPGQSLESVVSPWFKPLAYAFILTRAEGYPSVFYGDYYGTKGNSNYEIPALKDKIDPILTARKNFAYGTQRDYFDHPDVIGWTREGDSVHANSGLATLISDGPGGSKWMDVGKNNAGEVWYDITGNQTNTVTINKDGWGQFQVSGGSVSIYVQR

SEQ ID NO: 42732 - protein, 480 aa, Bacillus licheniformis
NGTLMQYFEWYLPNDGQHWKRLQNDSAYLAEHGITAVWIPPAYKGTSQADVGYGAYDLYDLGEFHQKGTVRTKYGTKGELQSAIKSLHSRDINVYGDVVINHKGGADATEDVTAVEVDPADRNRVISGEHLIKAWTHFHFPGRGSTYSDFKWHWYHFDGTDWDESRKLNRIYKFQGKAWDWEVSSENGNYDYLMYADIDYDHPDVAAEIKRWGTWYANELQLDGFRLDAVKHIKFSFLRDWVNHVREKTGKEMFTVAEYWQNDLGALENYLNKTNFNHSVFDVPLHYQFHAASTQGGGYDMRKLLNGTVVSKHPLKSVTFVDNHDTQPGQSLESTVQTWFKPLAYAFILTRESGYPQVFYGDMYGTKGDSQREIPALKHKIEPILKARKQYAYGAQHDYFDHHDIVGWTREGDSSVANSGLAALITDGPGGAKRMYVGRQNAGETWHDITGNRSEPVVINSEGWGEFHVNGGSVSIYVQR

SEQ ID NO: 42733 - protein, 480 aa, Bacillus amyloliquefaciens
NGTLMQYFEWYMPNDGQHWRRLQNDSAYLAEHGITAVWIPPAYKGTSQADVGYGAYDLYDLGEFHQKGTVRTKYGTKGELQSAIKSLHSRDINVYGDVVINHKGGADATEDVTAVEVDPADRNRVISGEHLIKAWTHFHFPGRGSTYSDFKWHWYHFDGTDWDESRKLNRIYKFQGKAWDWEVSNENGNYDYLMYADIDYDHPDVAAEIKRWGTWYANELQLDGFRLDAVKHIKFSFLRDWVNHVREKTGKEMFTVAEYWQNDLGALENYLNKTNFNHSVFDVPLHYQFHAASTQGGGYDMRKLLNGTVVSKHPLKSVTFVDNHDTQPGQSLESTVQTWFKPLAYAFILTRESGYPQVFYGDMYGTKGDSQREIPALKHKIEPILKARKQYAYGAQHDYFDHHDIVGWTREGDSSVANSGLAALITDGPGGAKWMYVGRQNAGETWHDITGNRSEPVVINSEGWGNFHVNGGSVSIYVQR

SEQ ID NO: 42734 - protein, 480 aa, Bacillus licheniformis
NGTLMQYFEWYTPNDGQHWKRLQNDSAYLAEHGITAVWIPPAYKGTSQADVGYGAYDLYDLGEFHQKGTVRTKYGTKGELQDAIKSLHSRDINVYGDVVINHKGGADATEDVTAVEVDPADRNRVISGEYLIKAWTHFHFPGRGSTYSDFKWHWYHFDGTDWDESRKLNRIYKFQGKAWDWEVSSENGNYDYLMYADIDYDHPDVVAEIKRWGTWYANELQLDGFRLDAVKHIKFSFLRDWVNHVREKTGKEMFTVAEYWQNDLGALENYLNKTNFNHSVFDVPLHYQFHAASTQGGGYDMRKLLNGTVVSKHPLKSVTFVDNHDTQPGQSLESTVQTWFKPLAYAFILTRESGYPQVFYGDMYGTKGDSQREIPALKHKIEPILKARKQYAYGAQHDYFDHHDIVGWTREGDSSVANSGLAALITDGPGGAKRMYVGRQNAGETWHDITGNRSEPVVINSEGWGEFHVNGGSVSIYVQR

SEQ ID NO: 42735 - protein, 480 aa, Bacillus licheniformis
NGTLMQYFEWYMPNDGQHWKRLQNDSAYLAEHGITAVWIPPAYKGTSQADVGYGAYDLYDLGEFHQKGTVRTKYGTKGELQSAIKSLHSRDINVYGDVVINHKGGADATEDVTAVEVDPADRNREISGEALIKAWTHFHFPGRGSTYSDFKWHWYHFDGTDWDESRKLNRIYKFQGKAWDWEVDNENGNYDYLMYADIDYDHPDVAAEIKRWGTWYANELQLDGFRLDAVKHIKFSFLRDWVNHVREKTGKEMFTVAEYWQNDLGALENYLNKTNFNHSVFDVPLHYQFHAASTQGGGYDMRKLLNGTVVSKHPLKSVTFVDNHDTQPGQSLESTVQTWFKPLAYAFILTRESGYPQVFYGDMYGTKGDSQREIPALKHKIEPILKARKQYAYGAQHDYFDHHDIVGWTREGDSSVANSGLAALITDGPGGAKRMYVGRQNAGETWHDITGNRSEPVVINSEGWGEFHVNGGSVSIYVQR

SEQ ID NO: 42736 - protein, 480 aa, Bacillus licheniformis
NGTLMQYFEWYTPNDGQHWKRLQNDSAYLAEHGITAVWIPPAYKGTSQADVGYGAYDLYDLGEFHQKGTVRTKYGTKGELQSAIKSLHSRDINVYGDVVINHKGGADATEDVTAVEVDPADRNRVISGEHLIKAWTHFHFPGRGSTYSDFKWHWYHFDGTDWDESRKLNRIYKFQGKAWDWEVSSENGNYDYLMYADIDYDHPDVVAEIKRWGTWYANELQLDGFRLDAVKHIKFSFLRDWVNHVREKTGKEMFTVAEYWQNDLGALENYLNKTNFNHSVFDVPLHYQFHAASTQGGGYDMRKLLNGTVVSKHPLKSVTFVDNHDTQPGQSLESTVQTWFKPLAYAFILTRESGYPQVFYGDMYGTKGDSQREIPALKHKIEPILKARKQYAYGAQHDYFDHHDIVGWTREGDSSVANSGLAALITDGPGGAKRMYVGRQNAGETWHDITGNRSEPVVINSEGWGEFHVNGGSVSIYVQR

SEQ ID NO: 42737 - protein, 482 aa, Bacillus cereus
NGTLMQYFEWYAPNDGNHWNRLRTDAENLAEKGITSVWIPPAYKGTTQNDVGYGAYDLYDLGEFNQKGTVRTKYGTKAQLKSAIDALHKKNIDVYGDVVMNHKGGADYTETVTAVEVDPSNRNIEVSGDVEISAWTGFNFPGRGDSYSNFKWKWYHFDGTDWDEGRKLNRIYKFRGIGKAWDWEVSSENGNYDYLMYADLDFDHPDVANEMKKWGTWYANELNLDGFRLDAVKHIDHEYLRDWVNHVRQQTGKEMFTVAEYWQNDIQTLNNYLAKVNYNQSVFDAPLHYNFHYASTGNGNYDMRNILKGTVVANHPTLAVTLVENHDSQPGQSLESVVSPWFKPLAYAFILTRAEGYPSVFYGDYYGTKGNSNYEIPALKDKIDPILTARKNFAYGTQRDYFDHPDVIGWTREGDSVHANSGLATLISDGPGGAKWMDVGKNNAGEVWYDITGNQTNTVTINKDGWGQFQVSGGSVSIYVQQ

SEQ ID NO: 42738 - protein, 480 aa, Bacillus licheniformis
NGTLMQYFEWYTPNDGQHWKRLQNDSAYLAEHGITAVWIPPAYKGTSQADVGYGAYDLYDLGEFHQKGTVRTKYGTKGELQSAIKSLHSRDINVYGDVVINHKGGADATEDVTAVEVDPADRNRVISGEYLIKAWTHFHFPGRGSTYSDFKWHWYHFDGTDWDESRKLNRIYKFQGKAWDWEVSSENGNYDYLMYADIDYDHPDVAAEIKRWGTWYANELQLDGFRLDAVKHIKFSFLRDWVNHVREKTGKEMFTVAEYWQNDLGALENYLNKTNFNHSVFDVPLHYQFHAASTQGGGYDMRKLLNGTVVSKHPLKSVTFVDNHDTQPGQSLESTVQTWFKPLAYAFILTRESGYPQVFYGDMYGTKGDSQREIPALKHKIEPILKARKQYAYGAQHDYFDHHDIVGWTREGDSSVANSGLAALITDGPGGAKRMYVGRQNAGETWHDITGNRSEPVVINSEGWGEFHVNGGSVSIYVQR

SEQ ID NO: 42739 - protein, 482 aa, Bacillus megaterium
NGTLMQYFEWYAPNDGDHWNRLRTDAENLAQKGITSVWIPPAYKGTTQNDVGYGAYDLYDLGEFNQKGTVRTKYGTKAQLKSAIDALHKKNINVYGDVVMNHKGGADYTETVTAVEVDPSNRNIEVSGDYEISAWTGFNFPGRGDSYSNFKWKWYHFDGTDWDEGRKLNRIYKFRGIGKAWDWEVSSENGNYDYLLYADLDFDHPDVANEMKKWGTWYANELNLDGFRLDAVKHIDHEYLRDWVNHVRQQTGKEMFTVAEYWQNDIQTLNNYLAKVNYNQSVFDAPLHYNFHYASTGNGNYDMRNILKGTVVANHPTLAVTLVENHDSQPGQSLESVVSPWFKPLAYAFILTRAEGYPSVFYGDYYGTKGNSNYEIPALKDKIDPILTARKNFAYGTQRDYFDHPDVIGWTREGDSVHANSGLATLISDGPGGSKWMDVGKNNAGEVWYDITGNQTNTVTINKDGWGQFQVSGGSVSIYVQR

SEQ ID NO: 42740 - protein, 482 aa, unidentified
NGTLMQYFEWYAPNDGNHWNRLRTDAENLAQKGITSVWIPPAYKGTTQNDVGYGAYDLYDLGEFNQKGTVRTKYGTKAQLKSAIDALHKKNIDVYGDVVMNHKGGADYTETVTAVEVDPSNRNVEVSGDYEISAWTGFNFPGRGDSYSNFKWKMYHFDGTDWDEGRKLNRIYKFRGIGKAWDWEVSSENGNYDYLMYADLDFDHPDVANEMKKWGTWYANELNLDGFRLDAVKHIDHEYLRDWVNHVRQQTGKEMFAVAEYWQNDIQTLNNYLAKVNYNQSVFDAPLHYNFHYASKGNGNYDMRNILKGTVVANHPTLAVTLVENHDSQPGQSLESVVSPWFKPLAYAFILTRAEGYPSVFYGDYYGTKGNSNYEIPALKDKIDPILTARKNYAYGTQRDYFDHPDVIGWTREGDSVHANSGLATLISDGPGGAKWMDVGKNNAGEIWYDITGNQTNTVTINKDGWGQFQVSGGSVSIYVQR

SEQ ID NO: 42741 - protein, 480 aa, unidentified
NGTLMQYFEWYAPNDGNHWNRLRTDAENLAQKGITSVWIPPAYKGTTQNDVGYGAYDLYDLGEFNQKGTVRTKYGTKAQLKSAIDALHKKNIDVYGDVVMNHKGGADYTETVTAVEVDPSNRNVEVSGDYEISAWTGFNFPGRGDSYSNFKWKWYHFDGTDWDEGRKLNRIYKFIGKAWDWEVSSENGNYDYLMYADLDFDHPDVANEMKKWGTWYANELNLDGFRLDAVKHIDHEYLRDWVNHVRQQTGKEMFAVAEYWQNDIQTLNNYLAKVNYNQSVFDAPLHYNFHYASKGNGNYDMRNILKGTVVANHPTLAVTLVENHDSQPGQSLESVVSPWFKPLAYAFILTRAEGYPSVFYGDYYGTKGNSNYEIPALKDKIDPILTARKNYAYGTQRDYFDHPDVIGWTREGDSVHANSGLATLISDGPGGAKWMDVGKNNAGEIWYDITGNQTNTVTINKDGWGQFQVSGGSVSIYVQR

SEQ ID NO: 42742 - protein, 480 aa, Bacillus licheniformis
NGTLMQYFEWYMPNDGQHWKRLQNDSAYLAEHGITAVWIPPAYKGTSQADVGYGAYDLYDLGEFHQKGTVRTKYGTKGELQSAIKSLHSRDINVYGDVVINHKGGADATEDVTAVEVDPANRNRVISGEHRIKAWTHFHFPGRGSTYSDFKWHWYHFDGTDWDESRKLNRIYKFQGKAWDWEVSNENGNYDYLMYADIDYDHPDVAAEIKRWGTWYANELQLDGFRLDAVKHIKFSFLRDWVNHVREKTGKEMFTVAEYWQNDLGALENYLNKTNFNHSVFDVPLHYQFHAASTQGGGYDMRKLLNGTVVSKHPLKAVTFVDNHDTQPGQSLESTVQTWFKPLAYAFILTRESGYPQVFYGDMYGTKGDSQREIPALKHKIEPILKARKQYAYGAQHDYFDHHDIVGWTREGDSSVANSGLAALITDGPGGAKRMYVGRQNAGETWHDITGNRSEPVVINXEGWGEFHVNGGSVSIYVQR

SEQ ID NO: 42743 - protein, 478 aa, Cytophaga sp.
NGTMMQYFEWHLPNDGNHWNRLRDDASNLRNRGITAIWIPPAWKGTSQNDVGYGAYDLYDLGEFNQKGTVRTKYGTRSQLESAIHALKNNGVQVYGDVVMNHKGGADATENVLAVEVNPNNRNQEISGDYTIEAWTKFDFPGRGNTYSDFKWRWYHFDGVDWDQSRQFQNRIYKFRGKAWDWEVDSENGNYDYLMYADVDMDHPEVVNELRRWGEWYTNTLNLDGFRIDAVKHIKYSFTRDWLTHVRNATGKEMFAVAEFWKNDLGALENYLNKTNWNHSVFDVPLHYNLYNASNSGGNYDMAKLLNGTVVQKHPMHAVTFVDNHDSQPGESLESFVQEWFKPLAYALILTREQGYPSVFYGDYYGIPTHSVPAMKAKIDPILEARQNFAYGTQRDYIDNPDVIGWTREGDSTKAKSGLATVITDGPGGSKRMYVGTSNAGEIWYDLTGNRTDKITIGSDGYATFPVNGGSVSVWVQQ

SEQ ID NO: 42744 - protein, 490 aa, Geobacillus stearothermophilus
NGTMMQYFEWYLPXDGXXWXKLXXDAXNLXSXGITALWIPPAWKGXSXXDVGYGXYDLYDLGEFNQKGTVRTKYGTKAQXXXAIXAXXXXGIQVYADVVXXHKGGADATEXVXAVEVNPXXRNQEISGXYXIXAWTKFDFPGRGNTHSSFKWRWYHFDGVDWDXSRKLXXRIYKFRGXGKAWDWEVDTENGNYDYLMYADIDMDHPEVVXELKNWGXWYXNTXXIDGFRIDAVKHIKFSFXXDWIXHVRSXTGKXLFXVAEFWXXDIXXIXNYIXKTNXXXSLFDXPLHXXXYXASKSGGXFDMRXIXXXTLMXXXPSXAVTFVDNHDSXPXXALXSFVDXWFKPLAYAXXLTRXXGYPXVFYGDYYGIPXHXIPALKSKIDPILXARXXYAYGXQXDYLDHXXIIGWTREGXTXXPXSGLAXIISDGXGGSKWMFVGKNXAGXVFXDITGNRSXTVTINADGWGXFXVNGGSVSIWVXKKTTVSTIARP

SEQ ID NO: 42745 - protein, 490 aa, Bacillus sp. 707
NGTMMQYFEWYLPXDGXXWXKLXXDAXNLXSXGITALWIPPAWKGXSXXDVGYGXYDLYDLGEFNQKGTVRTKYGTKAQXXXAIXAXXXXGIQVYADVVXXHKGGADATEXVXAVEVNPXXRNQEISGXYXIXAWTKFDFPGRGNTHSSFKWRWYHFDGVDWDXSRKLXNRIYKFRGXGKAWDWEVDTENGNYDYLMYADIDMDHPEVVXELKNWGXWYXNTXXIDGFRIDAVKHIKFSFXXDWIXHVRSXTGKXLFXVAEFWXXDIXXIXNYIXKTNXXXSLFDXPLHXXXYXASKSGGXFDMRXIXXXTLMXXXPSXAVTFVDNHDSXPXXALXSFVDXWFKPLAYAXXLTRXXGYPXVFYGDYYGIPXHXIPALKSKIDPILXARXXYAYGXQXDYLDHXXIIGWTREGXTXXPXSGLAXIISDGXGGSKWMFVGKNXAGXVFXDITGNRSXTVTINADGWGXFXVNGGSVSIWVXKKTTVSTIARP

SEQ ID NO: 42746 - protein, 479 aa, Bacillus licheniformis
NGTLMQYFEWYMPNDGQHWKRLQNDSAYLAEHGITAVWIPPAYKGTSQADVGYGAYDLYDLGEFHQKGTVRTKYGTKGELQSAIKSLHSRDINVYGDVVINHKGGADATEDVTAVEVDPADRNRVISGEHLIKAWTHFHFPGRGSTYSDFKWHWYHFDGTDWDESRKLNRIYKFQGKAWDWEVSENGNYDYLMYADIDYDHPDVAAEIKRWGTWYANELQLDGFRLDAVKHIKFSFLRDWVNHVREKTGKEMFTVAEYWQNDLGALENYLNKTNFNHSVFDVPLHYQFHAASTQGGGYDMRKLLNGTVVSKHPLKSVTFVDNHDTQPGQSLESTVQTWFKPLAYAFILTRESGYPQVFYGDMYGTKGDSQREIPALKHKIEPILKARKQYAYGAQHDYFDHHDIVGWTREGDSSVANSGLAALITDGPGGAKRMYVGRQNAGETWHDITGNRSEPVVINSEGWGEFHVNGGSVSIYVQR

SEQ ID NO: 42747 - protein, 396 aa, Bacillus amyloliquefaciens
NGTLMQYFEWYTPNDGQHWKRLQNDAEHLSDIGITAVWIPPAYKGLSQSDNGYGPYDLYDLGEFQQKGTVRTKYGTKSELQDAIGSLHSRNVQVYGDVVLNHKAGADATEDVTAVEVNPANRNQETSEEYQIKAWTDFRFPGRGNTYSDFKWHWYHFDGADWDESRKISRIFKFRGEGKAWDWEVSSENGNYDYLMYADVDYDHPDVVAETKKWGIWYANELSLDGFRIDAAKHIKFSFLRDWVQAVRQATGKEMFTVAEYWQNNAGKLENYLNKTSFNQSVFDVPLHFNLQAASSQGGGYDMRRLLDGTVVSRHPEKAVTFVENHDTQPGQSLESTVQTWFKPLAYAFILTRESGYPQVFYGDMYGTKGTSPKEIPSLKDNIEPILKARKEYAYG

SEQ ID NO: 42748 - protein, 394 aa, unidentified
NGTMMQYFEWHLPNDGNHWNRLRDDASNLRNRGITAIWIPPAWKGTSQNDVGYGAYDLYDLGEFNQKGTVRTKYGTRSQLESAIHALKNNGVQVYGDVVMNHKGGADATENVLAVEVNPNNRNQEISGDYTIEAWTKFDFPGRGNTYSDFKWRWYHFDGVDWDQSRQFQNRIYKFRGDGKAWDWEVDSENGNYDYLMYADVDMDHPEVVNELRRWGEWYTNTLNLDGFRIDAVKHIKYSFTRDWLTHVRNATGKEMFAVAEFWKNDLGALENYLNKTNWNHSVFDVPLHYNLYNASNSGGNYDMAKLLNGTVVQKHPMHAVTFVDNHDSQPGESLESFVQEWFKPLAYALILTREQGYPSVFYGDYYGIPTHSVPAMKAKIDPILEARQNFAYG

SEQ ID NO: 42749 - protein, 445 aa, Bacillus sp.
AVWIPPAYKGTSQADVGYGAYDLYDLGEFHQKGTVRTKYGTKGELQSAIKSLHSRDINVYGDVVINHKGGADATEDVTAVEVDPADRNRVISGEHLIKAWTHFHFPGRGSTYSDFKWYWYHFDGTDWDESRKLNRIYKFQGKTWDWEVSNEFGNYDYLMYADIDYDHPDVAAEIKRWGTWYANELQLDGFRLDAVKHIKFSFLRDWVNHVREKTGKEMFTVAEYWDNDLGALENYLNKTNFNHSVFDVPLHYQFHAASTQGGGYDMRKLLNGTVVSKHPLKSVTFVDNHDTQPGQSLESTVQTWFKPLAYAFILTRESGYPQVFYGDMYGTKGDSQREIPALKHKIEPILKARKQYAYGAQHDYFDHHDIVGWTREGDSSVANSGLAALITDGPGGAKRMYVGRQNAGETWHDITGNRSEPVVINSEGWGEFHVNGGSVSIYVQR

SEQ ID NO: 42750 - protein, 454 aa, Jeotgalibacillus campisalis
NGTMMQYFEWYLPNDGLHWNRLTNDASNLKNLGVTTVWIPPAYKGTSQNDVGYGAYDLYDLGEFNQKGTVRTKYGTRGQLQTAINTLKNQGIGTYGDVVMNHKGGADFTESVQAVEVNPNNRSQETSGEYTISAWTGFNFAGRNNLHSAFKWRWYHFDGTDWDQSRSLNRIYKFRGSGKSWDTEVSNEFGNYDYLMYADVDFDHPEVKAELKNWGKWYVQSLNLDGFRLDAVKHIKHDYIQEWLADVRRTTGKELFTVAEYWQNDLGAINNYLAKTKYSHSVFDVPLHYNFQRAANSGGNFDMRTIFNGSVVQQHPTLAVTIVDNHDSQPGQSLESTVDAWFKPLAYAMIMTREQGYPNLFYGDFYGTKGSSNREIPNLSSKLTPILKARKDMAYGTQHDYLNHQDVIGWTREGVTDRSKSGLATILSDGPGGNKWMYVGKRNAGETWRDKTGN

SEQ ID NO: 42751 - protein, 454 aa, Jeotgalibacillus campisalis
NGTMMQYFEWYLPNDGLHWNRLTNDASNLKNLGVTTVWIPPAYKGTSQNDVGYGAYDLYDLGEFNQKGTVRTKYGTRGQLQTAINTLKNQGIGTYGDVVMNHKGGADFTESVQAVEVNPNNRSQETSGEYTISAWTGFNFAGRNNLHSAFKWRWYHFDGTDWDQSRSLNRIYKFRGSGKSWDTEVSNEFGNYDYLMYADVDFDHPEVKAELKNWGKWYVQSLNLDGFRLDAVKHIKHDYIQEWLADVRRTTGKELFTVAEYWQNDLGAINNYLAKTSYSHSVFDVPLHYNFQRAANSGGNFDMRTIFNGSVVQQHPTLAVTIVDNHDSQPGQSLESTVDAWFKPLAYAMIMTREQGYPNLFYGDFYGTKGSSNREIPNLSSKLTPILKARKDMAYGTQHDYLNHQDVIGWTREGVTDRSKSGLATILSDGPGGNKWMYVGKRNAGETWRDKTGN

SEQ ID NO: 42752 - protein, 454 aa, Jeotgalibacillus campisalis
NGTMMQYFEWYLPNDGLHWNRLTNDASNLKNLGVTTVWIPPAYKGTSQNDVGYGAYDLYDLGEFNQKGTVRTKYGTRGQLQTAINTLKNQGIGTYGDVVMNHKGGADFTESVQAVEVNPNNRSQETSGEYTISAWTGFNFAGRNNLHSAFKWRWYHFDGTDWDQSRSLNRIYKFRGSGKSWDTEVSNEFGNYDYLMYADVDFDHPEVKAELKNWGKWYVQSLNLDGFRLDAVKHIKHDYIPEWLADVRRTTGKELFTVAEYWQNDLGAINNYLAKTGYSHSVFDVPLHYNFQRAANSGGNFDMRTIFNGSVVQQHPTLAVTIVDNHDSQPGQSLESTVDAWFKPLAYAMIMTREQGYPNLFYGDFYGTKGSSNREIPNLSSKLTPILKARKDMAYGTQHDYLNHQDVIGWTREGVTDRSKSGLATILSDGPGGNKWMYVGKRNAGETWRDKTGN

SEQ ID NO: 42753 - protein, 454 aa, Jeotgalibacillus campisalis
NGTMMQYFEWYLPNDGLHWNRLTNDASNLKNLGVTTVWIPPAYKGTSQNDVGYGAYDLYDLGEFNQKGTVRTKYGTRGQLQTAINTLKNQGIGTYGDVVMNHKGGADFTESVQAVEVNPNNRSQETSGEYTISAWTGFNFAGRNNLHSAFKWRWYHFDGTDWDQSRSLNRIYKFRGSGKSWDTEVSNEFGNYDYLMYADVDFDHPEVKAELKNWGKWYVQSLNLDGFRLDAVKHIKHDYIQEWLADVRRTTGKELFTVAEYWQNDLGAINNYLAKTDYSHSVFDVPLHYNFQRAANSGGNFDMRTIFNGSVVQQHPTLAVTIVDNHDSQPGQSLESTVDAWFKPLAYAMIMTREQGYPNLFYGDFYGTKGSSNREIPNLSSKLTPILKARKDMAYGTQHDYLNHQDVIGWTREGVTDRSKSGLATILSDGPGGNKWMYVGKRNAGETWRDKTGN

SEQ ID NO: 42754 - protein, 454 aa, Jeotgalibacillus campisalis
NGTMMQYFEWYLPNDGLHWNRLTNDASNLKNLGVTTVWIPPAYKGTSQNDVGYGAYDLYDLGEFNQKGTVRTKYGTRGQLQTAINTLKNQGIGTYGDVVMNHKGGADFTESVQAVEVNPNNRSQETSGEYTISAWTGFNFAGRNNLHSAFKWRWYHFDGTDWDQSRSLNRIYKFRGSGKSWDTEVSNEFGNYDYLMYADVDFDHPEVKAELKNWGKWYVQSLNLDGFRLDAVKHIKHDYIGEWLADVRRTTGKELFTVAEYWQNDLGAINNYLAKTGYSHSVFDVPLHYNFQRAANSGGNFDMRTIFNGSVVQQHPTLAVTIVDNHDSQPGQSLESTVDAWFKPLAYAMIMTREQGYPNLFYGDFYGTKGSSNREIPNLSSKLTPILKARKDMAYGTQHDYLNHQDVIGWTREGVTDRSKSGLATILSDGPGGNKWMYVGKRNAGETWRDKTGN

SEQ ID NO: 42755 - protein, 454 aa, Jeotgalibacillus campisalis
NGTMMQYFEWYLPNDGLHWNRLTNDASNLKNLGVTTVWIPPAYKGTSQNDVGYGAYDLYDLGEFNQKGTVRTKYGTRGQLQTAINTLKNQGIGTYGDVVMNHKGGADFTESVQAVEVNPNNRSQETSGEYTISAWTGFNFAGRNNLHSAFKWRWYHFDGTDWDQSRSLNRIYKFRGSGKSWDTEVSNEFGNYDYLMYADVDFDHPEVKAELKNWGKWYVQSLNLDGFRLDAVKHIKHDYIQEWLADVRRTTGKELFTVAEYWQNDLGAINNYLAKTGYSHSVFDVPLHYNFQRAANSGGNFDMRTIFNGSVVQQHPTLAVTIVDNHDSQPGQSLESTVDAWFKPLAYAMIMTREQGYPNLFYGDFYGTKGSSNREIPNLSSKLTPILKARKDMAYGTQHDYLNHQDVIGWTREGVTDRSKSGLATILSDGPGGNKWMYVGKRNAGETWRDKTGN

SEQ ID NO: 42756 - protein, 480 aa, Bacillus amyloliquefaciens
NGTLMQYFEWYTPNDGQHWKRLQNDAEHLSDIGITAVWIPPAYKGTSQADVGYGAYDLYDLGEFHQKGTVRTKYGTKGELQSAIKSLHSRDINVYGDVVINHKGGADATEDVTAVEVDPADRNRVISGEHLIKAWTHFHFPGRGSTYSDFKWYWYHFDGTDWDESRKLNRIYKFQGKTWDWEVSNEFGNYDYLMYADFDYDHPDVVAEIKRWGTWYANELQLDGFRLDAVKHIKFSFLRDWVNHVREKTGKEMFTVAEYWSNDLGALENYLNKTNFNHSVFDVPLHYQFHAASTQGGGYDMRKLLNGTVVSKHPLKSVTFVDNHDTQPGQSLESTVQTWFKPLAYAFILTRESGYPQVFYGDMYGTKGDSQREIPALKHKIEPILKARKQYAYGAQHDYFDHHDIVGWTREGDSSVANSGLAALITDGPGGAKRMYVGRQNAGETWHDITGNRSEPVVINSEGWGNFHVNGGSVSIYVQR

SEQ ID NO: 42757 - protein, 480 aa, Bacillus amyloliquefaciens
NGTLMQYFEWYTPNDGQHWKRLQNDAEHLSDIGITAVWIPPAYKGTSQADVGYGAYDLYDLGEFHQKGTVRTKYGTKGELQSAIKSLHSRDINVYGDVVINHKGGADATEDVTAVEVDPADRNRVISGEHLIKAWTHFHFPGRGSTYSDFKWYWYHFDGTDWDESRKLNRIYKFQGKTWDWEVSNENGFYDYLMYADIDYDHPDVVAEIKRWGTWYANELQLDGFRLDAVKHIKFSFLRDWVNHVREKTGKEMFTVAEYWSNDLGALENYLNKTNFNHSVFDVPLHYQFHAASTQGGGYDMRKLLNGTVVSKHPLKSVTFVDNHDTQPGQSLESTVQTWFKPLAYAFILTRESGYPQVFYGDMYGTKGDSQREIPALKHKIEPILKARKQYAYGAQHDYFDHHDIVGWTREGDSSVANSGLAALITDGPGGAKRMYVGRQNAGETWHDITGNRSEPVVINSEGWGNFHVNGGSVSIYVQR

SEQ ID NO: 42758 - protein, 480 aa, Bacillus licheniformis
NGTLMQYFEWYTPNDGQHWKRLQNDAEHLSDIGITAVWIPPAYKGTSQADVGYGAYDLYDLGEFHQKGTVRTKYGTKGELQSAIKSLHSRDINVYGDVVINHKGGADATEDVTAVEVDPADRNRVISGEHRIKAWTHFHFPGRGSTYSDFKWHWYHFDGTDWDESRKLNRIYKFQGKAWDWEVSNENGNYDYLMYADIDYDHPDVAAEIKRWGTWYANELQLDGFRLDAVKHIKFSFLRDWVNHVREKTGKEMFTVAEYWQNDLGALENYLNKTNFNHSVFDVPLHYQFHAASTQGGGYDMRKLLNSTVVSKHPLKAVTFVDNHDTQPGQSLESTVQTWFKPLAYAFILTRESGYPQVFYGDMYGTKGDSQREIPALKHKIEPILKARKQYAYGAQHDYFDHHDIVGWTREGDSSVANSGLAALITDGPGGAKRMYVGRQNAGETWHDITGNRSEPVVINSEGWGEFHVNGGSVSIYVQR

SEQ ID NO: 42759 - protein, 480 aa, Bacillus licheniformis
NGTLMQYFEWYTPNDGQHWKRLQNDAEHLSDIGITAVWIPPAYKGTSQADVGYGAYDLYDLGEFHQKGTVRTKYGTKGELQSAIKSLHSRDINVYGDVVINHKGGADATEDVTAVEVDPADRNRVISGEHLIKAWTHFHFPGRGSTYSDFKWHWYHFDGTDWDESRKLNRIYKFQGKAWDWEVSNENGNYDYLMYADIDYDHPDVAAEIKRWGTWYANQLQLDGFRLDAVKHIKFSFLRDWVNHVREKTGKEMFTVAEYWQNDLGALENYLNKTNFNHSVFDVPLHYQFHAASTQGGGYDMRKLLNGTVVSKHPLKSVTFVDNHDTQPGQSLESTVQTWFKPLAYAFILTRESGYPQVFYGDMYGTKGDSQREIPALKHKIEPILKARKQYAYGAQHDYFDHHDIVGWTREGDSSVANSGLAALITDGPGGAKRMYVGRQNAGETWHDITGNRSEPVVINSEGWGEFHVNGGSVSIYVQR

SEQ ID NO: 42760 - protein, 477 aa, Bacillus sp.
NETMMQYFEWDLPNDGTLWTKVKNEAANLSSLGITALWLPPAYKGTSQSDVGYGVYDLYDLGEFNQKGTIRTKYGTKTQYIQAIQAAKAAGMQVYADVVFNHKAGADQTEFVDAVEVDPSNRNQEVSGTYQIEAWTKFDFPGRGNTYSSFKWRWYHFDGTDWDESRKLNRIYKFRGKAWDWEVDTENGNYDYLMFADLDMDHPEVVTELKNWGTWYVNTTNIDGFRLDAVKHIKFSFMRDWLTYVRNQTGKNLFAVGEFWSYDVNKLHNYITKTNGSMSLFDAPLHNNFYTASKSSGYFDMRNLLNGTLVQRHPSHAVTLVDNHDTQPGEALESFVQGWFKPLAYAFILTRQEGYPCVFYGDYYGIPKYNIPGLKSKIDPLLIARRDYAYGTQRDYIDHQDIIGWTREGIDTKPNSGLAALITDGPGGSKWMYVGKKHAGKVFYDLTGNRSDTVTINADGWGEFKVNGGSVSIWVAK

SEQ ID NO: 42761 - protein, 477 aa, Bacillus sp.
NETMMQYFEWDLPNDGTLWNRLHNNAQNLKNAGITALWLPPAYKGTSQSDVGYGVYDLYDLGEFNQKGTIRTKYGTKTQLERAIRSLKANGIQVYADVVFNHKAGADQTEFVDAVEVDPSNRNQEVSGTYQIEAWTKFDFPGRGNTYSSFKWRWYHFDGTDWDESRKLNRIYKFRGKAWDWEVDTENGNYDYLMFADLDMDHPEVVTELKNWGTWYVNTTNIDGFRLDAVKHIKFSFMRDWLTYVRNQTGKNLFAVGEFWSYDVNKLHNYITKTNGSMSLFDAPLHNNFYTASKSSGYFDMRYLLNNTLMKDQPSLAVTLVDNHDTQPGQSLQSWVEPWFKPLAYAFILTRQEGYPCVFYGDYYGIPSDGVPGLKSKIDPLLIARRDYAYGTQRDYIDHQDIIGWTREGIDTKPNSGLAALITDGPGGSKWMYVGKKHAGKVFYDLTGNRSDTVTINADGWGEFKVNGGSVSIWVAK

SEQ ID NO: 42762 - protein, 477 aa, Bacillus sp.
NETMMQYFEWDLPNDGTLWTKVKNEAANLSSLGITALWLPPAYKGTSQSDVGYGVYDLYDLGEFNQKGTIRTKYGTKTQLERAIRSLKANGIQVYADVVFNHKAGADGTEFVDAVEVDPSNRNQEVSGTYQIEAWTKFDFPGRGNTYSSFKWRWYHFDGTDWDESRKLNRIYKFRGKAWDWEVDTENGNYDYLMFADLDMDHPEVVTELKNWGTWYVNTTNIDGFRLDAVKHIKFSFMRDWLTYVRNQTGKNLFAVGEFWSYDVNKLHNYITKTNGSMSLFDAPLHNNFYTASKSSGYFDMRNLLNGTLVQRHPSHAVTLVDNHDTQPGQSLQSWVEPWFKPLAYAFILTRQEGYPCVFYGDYYGIPKYNIPGLKSKIDPLLIARRDYAYGTQRDYIDHQDIIGWTREGIDTKPNSGLAALITDGPGGSKWMYVGKKHAGKVFYDLTGNRSDTVTINADGWGEFKVNGGSVSIWVAK

SEQ ID NO: 42763 - protein, 477 aa, Bacillus sp.
NETMMQYFEWDLPNDGTLWNRLHNNAQNLKNAGITALWLPPAYKGTSQSDVGYGVYDLYDLGEFNQKGTIRTKYGTKTQYIQAIQAAKAAGMQVYADVVFNHKAGADQTEFVDAVEVDPSNRNQEVSGTYQIEAWTKFDFPGRGNTYSSFKWRWYHFDGTDWDESRKLNRIYKFRGKAWDWEVDTENGNYDYLMFADLDMDHPEVVTELKNWGTWYVNTTNIDGFRLDAVKHIKFSFMRDWLTYVRNQTGKNLFAVGEFWSYDVNKLHNYITKTNGSMSLFDAPLHNNFYTASKSSGYFDMRYLLNNTLMKDQPSLAVTLVDNHDTQPGEALESFVQGWFKPLAYAFILTRQEGYPCVFYGDYYGIPSDGVPGLKSKIDPLLIARRDYAYGTQRDYIDHQDIIGWTREGIDTKPNSGLAALITDGPGGSKWMYVGKKHAGKVFYDLTGNRSDTVTINADGWGEFKVNGGSVSIWVAK

SEQ ID NO: 42764 - protein, 481 aa, Bacillus licheniformis
NGTLMQYFEWYTPNDGQHWKRLQNDAEHLSDIGITAAVWIPPAYKGTSQADVGYGAYDLYDLGEFHQKGTVRTKYGTKGELQSAIKSLHSRDINVYGDVVINHKGGADATEDVTAVEVDPADRNRVISGEHLIKAWTHFHFPGRGSTYSDFKWHWYHFDGTDWDESRKLNRIYKFQGKAWDWEVSNENGNYDYLMYADIDYDHPDVAAEIKRWGTWYANELQLDGFRLDAVKHIKFSFLRDWVNHVREKTGKEMFTVAEYWQNDLGALENYLNKTNFNHSVFDVPLHYQFHAASTQGGGYDMRKLLNGTVVSKHPLKSVTFVDNHDTQPGQSLESTVQTWFKPLAYAFILTRESGYPQVFYGDMYGTKGDSQREIPALKHKIEPILKARKQYAYGAQHDYFDHHDIVGWTREGDSSVANSGLAALITDGPGGAKRMYVGRQNAGETWHDITGNRSEPVVINSEGWGEFHVNGGSVSIYVQR

SEQ ID NO: 42765 - protein, 477 aa, Bacillus sp.
NETMMQYFEWDLPNDGTLWTKVKNEAANLSSLGITALWLPPAYKGTSQSDVGYGVYDLYDLGEFNQKGTIRTKYGTKTQLERAIRSLKANGIQVYADVVFNHKAGADQTEFVDAVEVDPSNRNQEVSGTYQIEAWTKFDFPGRGNTYSSFKWRWYHFDGTDWDESRKLNRIYKFRGKAWDWEVDTENGNYDYLMFADLDMDHPEVVTELKNWGTWYVNTTNIDGFRLDAVKHIKFSFMRDWLTYVRNQTGKNLFAVGEFWSYDVNKLHNYITKTNGSMSLFDAPLHNNFYTASKSSGYFDMRNLLNGTLVQRHPSHAVTLVDNHDTQPGQSLQSWVEPWFKPLAYAFILTRQEGYPCVFYGDYYGIPKYNIPGLKSKIDPLLIARRDYAYGTQRDYIDHQDIIGWTREGIDTKPNSGLAALITDGPGGSKWMYVGKKHAGKVFYDLTGNRSDTVTINADGWGEFKVNGGSVSIWVAK

SEQ ID NO: 42766 - protein, 480 aa, Bacillus licheniformis
NGTLMQYFEWYMPNDGQHWKRLQNDSAYLAEHGITAVWIPPAYKGTSQADVGYGAYDLYDLGEFHQKGTVRTKYGTKGELQSAIKSLHSRDINVYGDVVINHKGGADATEDVTAVEVDPADRNRVISGEHLIKAWTHFHFPGRGSTYSDFKWHWYHFDGTDWDESRKLNRIYKFQGKAWDWEVSNENGNYDYLMYADIDYDHPDVAAEIKRWGTWYANELQLDGFRLDAVKHIKFSFLRDWVNHVREKTGKEMFTVAEYWQNDLGALENYLNKTNFNHSVFDVPLHYQFHAASTQGGGYDMRKLLNGTVVSKHPLKSVTFVDNHDTQPGQSLESTVQTWFKPLAYAFILTRESGYPQVFYGDMYGTKGDSQREIPALKHKIEPILKARQQYAYGAQHDYFDHHDIVGWTREGDSSVANSGLAALITDGPGGAKRMYVGRQNAGETWHDITGNRSEPVVINSEGWGEFHVNGGSVSIYVQR

SEQ ID NO: 42767 - protein, 480 aa, Bacillus licheniformis
NGTLMQYFEWYMPNDGQHWKRLQNDSAYLAEHGITAVWIPPAYKGTSQADVGYGAYDLYDLGEFHQKGTVRTKYGTKGELQSAIKSLHSRDINVYGDVVINHKGGADATEDVTAVEVDPADRNRVISGEHTIKAWTHFHFPGRGSTYSDFKWHWYHFDGTDWDESRKLNRIYKFQGKAWDWEVSNENGNYDYLMYADIDYDHPDVAAEIKRWGTWYANELQLDGFRLDAVKHIKFSFLRDWVNHVREKTGKEMFTVAEYWQNDLGALENYLNKTNFNHSVFDVPLHYQFHAASTQGGGYDMRKLLNGTVVSKHPLKSVTFVDNHDTQPGQSLESTVQTWFKPLAYAFILTRESGYPQVFYGDMYGTKGDSQREIPALKHKIEPILKARKQYAYGAQHDYFDHHDIVGWTREGDSSVANSGLAALITDGPGGAKRMYVGRQNAGETWHDITGNRSEPVVINSEGWGEFHVNGGSVSIYVQR

SEQ ID NO: 42768 - protein, 480 aa, Bacillus licheniformis
NGTLMQYFEWYMPNDGQHWKRLQNDSAYLAEHGITAVWIPPAYKGTSQADVGYGAYDLYDLGEFHQKGTVRTKYGTKGELQSAIKSLHSRDINVYGDVVINHKGGADATEDVTAVEVDPADRNRVISGEYLIKAWTHFHFPGRGSTYSDFKWHWYHFDGTDWDESRKLNRIYKFQGKAWDWEVSNENGNYDYLMYADIDYDHPDVAAEIKRWGTWYANELQLDGFRLDAVKHIKFSFLRDWVNHVREKTGKEMFTVAEYWQNDLGALENYLNKTNFNHSVFDVPLHYQFHAASTQGGGYDMRKLLNGTVVSKHPLKSVTFVDNHDTQPGQSLESTVQTWFKPLAYAFILTRESGYPQVFYGDMYGTKGDSQREIPALKHKIEPILKARKQYAYGAQHDYFDHHDIVGWTREGDSSVANSGLAALITDGPGGAKRMYVGRQNAGETWHDITGNRSEPVVINSEGWGEFHVNGGSVSIYVQR

SEQ ID NO: 42769 - protein, 480 aa, Bacillus licheniformis
NGTLMQYFEWYMPNDGQHWKRLQNDSAYLAEHGITAVWIPPAYKGTSQADVGYGAYDLYDLGEFHQKGTVRTKYGTKGELQSAIKSLHSRDINVYGDVVINHKGGADATEDVTAVEVDPADRNRVISGEHLIKAWTHFHFPGRGSTYSDFKWRWYHFDGTDWDESRKLNRIYKFQGKAWDWEVSNENGNYDYLMYADIDYDHPDVAAEIKRWGTWYANELQLDGFRLDAVKHIKFSFLRDWVNHVREKTGKEMFTVAEYWQNDLGALENYLNKTNFNHSVFDVPLHYQFHAASTQGGGYDMRKLLNGTVVSKHPLKSVTFVDNHDTQPGQSLESTVQTWFKPLAYAFILTRESGYPQVFYGDMYGTKGDSQREIPALKHKIEPILKARKQYAYGAQHDYFDHHDIVGWTREGDSSVANSGLAALITDGPGGAKRMYVGRQNAGETWHDITGNRSEPVVINSEGWGEFHVNGGSVSIYVQR

SEQ ID NO: 42770 - protein, 480 aa, Bacillus licheniformis
NGTLMQYFEWYMPNDGQHWKRLQNDSAYLAEHGITAVWIPPAYKGTSQADVGYGAYDLYDLGEFHQKGTVRTKYGTKGELQSAIKSLHSRDINVYGDVVINHKGGADATEDVTAVEVDPADRNRVISGEHLIKAWTHFHFPGRGSTYSDFKWHWYHFDGTDWDESRKLNRIYKFQGKAWDWEVSNENGNYDYLMYADIDYDHPDVAAEIKRWGTWYANELQLDGFRLDAVKHIKFSFLRDWVNHVREKTGKEMFTVAEYWQNDLGALENYLNKTNFNHSVFDVPLHYQFHAASTQGGGYDMRKLLNGTVVSKHPLKSVTFVDNHDTQPGQSLESTVQTWFKPLAYAFILTRESGYPQVFYGDMYGTKGDSQREIPALKHKIEPILEARKQYAYGAQHDYFDHHDIVGWTREGDSSVANSGLAALITDGPGGAKRMYVGRQNAGETWHDITGNRSEPVVINSEGWGEFHVNGGSVSIYVQR

SEQ ID NO: 42771 - protein, 480 aa, Bacillus licheniformis
NGTLMQYFEWYMPNDGQHWKRLQNDSAYLAEHGITAVWIPPAYKGTSQADVGYGAYDLYDLGEFHQKGTVRTKYGTKGELQSAIKSLHSRDINVYGDVVINHKGGADATEDVTAVEVDPADRNRVISGEHLIKAWTHFHFPGRGNTYSDFKWHWYHFDGTDWDESRKLNRIYKFQGKAWDWEVSNENGNYDYLMYADIDYDHPDVAAEIKRWGTWYANELQLDGFRLDAVKHIKFSFLRDWVNHVREKTGKEMFTVAEYWQNDLGALENYLNKTNFNHSVFDVPLHYQFHAASTQGGGYDMRKLLNGTVVSKHPLKSVTFVDNHDTQPGQSLESTVQTWFKPLAYAFILTRESGYPQVFYGDMYGTKGDSQREIPALKHKIEPILKARKQYAYGAQHDYFDHHDIVGWTREGDSSVANSGLAALITDGPGGAKRMYVGRQNAGETWHDITGNRSEPVVINSEGWGEFHVNGGSVSIYVQR

SEQ ID NO: 42772 - protein, 480 aa, Bacillus licheniformis
NGTLMQYFEWYMPNDGQHWKRLQNDSAYLAEHGITAVWIPPAYKGTSQADVGYGAYDLYDLGEFHQKGTVRTKYGTKGELQSAIKSLKSRDINVYGDVVINHKGGADATEDVTAVEVDPADRNRVISGEHLIKAWTHFHFPGRGSTYSDFKWHWYHFDGTDWDESRKLNRIYKFQGKAWDWEVSNENGNYDYLMYADIDYDHPDVAAEIKRWGTWYANELQLDGFRLDAVKHIKFSFLRDWVNHVREKTGKEMFTVAEYWQNDLGALENYLNKTNFNHSVFDVPLHYQFHAASTQGGGYDMRKLLNGTVVSKHPLKSVTFVDNHDTQPGQSLESTVQTWFKPLAYAFILTRESGYPQVFYGDMYGTKGDSQREIPALKHKIEPILKARKQYAYGAQHDYFDHHDIVGWTREGDSSVANSGLAALITDGPGGAKRMYVGRQNAGETWHDITGNRSEPVVINSEGWGEFHVNGGSVSIYVQR

SEQ ID NO: 42773 - protein, 480 aa, Bacillus licheniformis
NGTLMQYFEWYMPNDGQHWKRLQNDSAYLAEHGITAVWIPPAYKGTSQNDVGYGAYDLYDLGEFHQKGTVRTKYGTKGELQSAIKSLHSRDINVYGDVVINHKGGADATEDVTAVEVDPADRNRVISGEHLIKAWTHFHFPGRGSTYSDFKWHWYHFDGTDWDESRKLNRIYKFQGKAWDWEVSNENGNYDYLMYADIDYDHPDVAAEIKRWGTWYANELQLDGFRLDAVKHIKFSFLRDWVNHVREKTGKEMFTVAEYWQNDLGALENYLNKTNFNHSVFDVPLHYQFHAASTQGGGYDMRKLLNGTVVSKHPLKSVTFVDNHDTQPGQSLESTVQTWFKPLAYAFILTRESGYPQVFYGDMYGTKGDSQREIPALKHKIEPILKARKQYAYGAQHDYFDHHDIVGWTREGDSSVANSGLAALITDGPGGAKRMYVGRQNAGETWHDITGNRSEPVVINSEGWGEFHVNGGSVSIYVQR

SEQ ID NO: 42774 - protein, 480 aa, Synthetic construct
NGTLMQYFEWYTPNDGQHWKRLQNDAEHLSDIGITAVWIPPAYKGTSQADVGYGAYDLYDLGEFHQKGTVRTKYGTKGELQSAIKSLHSRDINVYGDVVINHKGGADATEDVTAVEVDPADRNRVISGEHLIKAWTHFHFPGRGSTYSDFKWHWYHFDGTDWDESRKLNRIYKFQGKAWDWEVSNENGNYDYLMYADIDYDHPDVAAEIKRWGTWYANELQLDGFRLDAVKHIKFSFLRDWVNHVREKTGKEMFTVAEYWQNDLGALENYLNKTNFNHSVFDVPLHYQFHAASTQGGGYDMRKLLNGTVVSKHPLKSVTFVDNHDTQPGQSLESTVQTWFKPLAYAFILTRESGYPQVFYGDMYGTKGDSQREIPALKHKIEPILKARKQYAYGAQHDYFDHHDIVGWTREGDSSVANSGLAALITDGPGGAKRMYVGRQNAGETWHDITGNRSEPVVINSEGWGEFHVNGGSVSIYVQR

SEQ ID NO: 42775 - protein, 480 aa, Bacillus licheniformis
NGTLMQYFEWYMPNDGQHWKRLQNDSAYLAEHGITAVWIPPAYKGTSQADVGYGAYDLYDLGEFHQKGTVRTKYGTKGELQSAIKSLHSNDINVYGDVVINHKGGADATEDVTAVEVDPADRNRVISGEHLIKAWTHFHFPGRGSTYSDFKWHWYHFDGTDWDESRKLNRIYKFQGKAWDWEVSNENGNYDYLMYADIDYDHPDVAAEIKRWGTWYANELQLDGFRLDAVKHIKFSFLRDWVNHVREKTGKEMFTVAEYWQNDLGALENYLNKTNFNHSVFDVPLHYQFHAASTQGGGYDMRKLLNGTVVSKHPLKSVTFVDNHDTQPGQSLESTVQTWFKPLAYAFILTRESGYPQVFYGDMYGTKGDSQREIPALKHKIEPILKARKQYAYGAQHDYFDHHDIVGWTREGDSSVANSGLAALITDGPGGAKRMYVGRQNAGETWHDITGNRSEPVVINSEGWGEFHVNGGSVSIYVQR

SEQ ID NO: 42776 - protein, 480 aa, Bacillus licheniformis
NGTLMQYFEWYMPNDGQHWKRLQNDSAYLAEHGITAVWIPPAYKGTSQADVGYGAYDLYDLGEFHQKGTVRTKYGTKGELQSAIKSLHSRDINVYGDVVINHKGGADATEDVTAVEVDPADRNRVISGEHLIKAWTHFHFPGRGSTYSDFKWHWYHFDGTDWDESRKLNRIYKFRGKAWDWEVSNENGNYDYLMYADIDYDHPDVAAEIKRWGTWYANELQLDGFRLDAVKHIKFSFLRDWVNHVREKTGKEMFTVAEYWQNDLGALENYLNKTNFNHSVFDVPLHYQFHAASTQGGGYDMRKLLNGTVVSKHPLKSVTFVDNHDTQPGQSLESTVQTWFKPLAYAFILTRESGYPQVFYGDMYGTKGDSQREIPALKHKIEPILKARKQYAYGAQHDYFDHHDIVGWTREGDSSVANSGLAALITDGPGGAKRMYVGRQNAGETWHDITGNRSEPVVINSEGWGEFHVNGGSVSIYVQR

SEQ ID NO: 42777 - protein, 482 aa, Bacillus anthracis
NGTLMQYFEWYAPSDRNHWNRLRTDAENLAQKGITSVWIPPAYKGTTQNDVGYGAYDLYDLGEFNQKGTVRTKYGTKAQLKSAIEALHKQNIDVYGDVVMNHKGGADYTETVTAVEVDRNNRNVEVSGDYEISAWTGFNFPGRGDNYSNFKWKWYHFDGTDWDEGRKLNRIYKFRGIGKAWDWEVSSENGNYDYLMYADLDFDHPDVANEMKNWGTWYANELNLDGFRLDAVKHIDHEYLRDWVNHVRQQTGKEMFTVAEYWQNDIQTLNNYLAKVNYNQSVFDAPLHYNFHYASKGNGNYDMRNILNGTVMQNHPALAVTLVENHDSQPGQSLESVVSPWFKPLAYAFILTRAEGYPSVFYGDYYGTSGNSSYEIPALKDKIDPILTARKNFAYGTQRDYLDHPDVIGWTREGDSVHANSGLATLISDGPGGSKWMDVGKNNAGEVWHDMTGNQTNTVTINKDGWGQFHVSGGSVSIYVQQ

SEQ ID NO: 42778 - protein, 480 aa, Bacillus subtilis
NGTLMQYFEWYMPNDGQHWKRLQNDSAYLAEHGITAVWIPPAYKGTSQDDVGYGAYDLYDLGEFHQKGTVRTKYGTKGELQSAINSLHSRDINVYGDVVINHKGGADATEDVTAVEVDPADRNRVTSGEQRIKAWTHFQFPGRGSTYSDFKWYWYHFDGTDWDESRKLNRIYKFQGKAWDWEVSNENGNYDYLMYADIDYDHPDVTAEIKRWGTWYANELQLDGFRLDAVKHIKFSFLRDWVNHVREKTGKEMFTVAEYWQNDLGALENYLNKTNFNHSVFDVPLHYQFHAASTQGGGYDMRKLLNGTVVSKHPVKAVTFVDNHDTQPGQSLESTVQTWFKPLAYAFILTREAGYPQIFYGDMYGTKGASQREIPAMKHKIEPILKARKQYAYGAQHDYFDHHNIVGWTREGDSSVANSGLAALITDGPGGTKRMYVGRQNAGETWDDITGNRSDSVVINAEGWGEFHVNGGSVSIYVQR

SEQ ID NO: 42779 - protein, 480 aa, Bacillus licheniformis
NGTLMQYFEWYMPNDGQHWKRLQNDSAYLAEHGITAVWIPPAYKGTSQADVGYGAYDLYDLGEFHQKGTVRTKYGTKGELQSAIKSLHSRDINVYGDVVINHKGGADATEDVTAVEVDPADRNRVISGEHLIKAWTHFHFPGRGSTYSDFKWHWYHFDGTDWDESRKLNRIYKFQGKAWDWEVSNENGNYDYLMYADIDYDHPDVAAEIKRWGTWYANELQLDGFRLDAVKHIKFSFLRDWVNHVREKTGKEMFTVAEYWKNDLGALENYLNKTNFNHSVFDVPLHYQFHAASTQGGGYDMRKLLNGTVVSKHPLKSVTFVDNHDTQPGQSLESTVQTWFKPLAYAFILTRESGYPQVFYGDMYGTKGDSQREIPALKHKIEPILKARKQYAYGAQHDYFDHHDIVGWTREGDSSVANSGLAALITDGPGGAKRMYVGRQNAGETWHDITGNRSEPVVINSEGWGEFHVNGGSVSIYVQR

SEQ ID NO: 42780 - protein, 480 aa, Bacillus licheniformis
NGTLMQYFEWYMPNDGQHWKRLQNDSAYLAEHGITAVWIPPAYKGTSQADVGYGAYDLYDLGEFHQKGTVRTKYGTKGELQSAIKSLHSRDINVYGDVVINHKGGADATEDVTAVEVDPADRNRVISGEHLIKAWTHFHFPGRGSTYSDFKWHWYHFDGTDWDESRKLNRIYKFQGKAWDWEVSNENGNYDYLMYADIDYDHPDVAAEIKRWGTWYANELQLDGFRLDAVKHIKFSFLRDWVNHVREKTGKEMFTVAEYWQNDLGALENYLNKTNFNHSVFDVPLHYQFHAASTQGGGYDMRKLLNGTVVSKHPLKSVTFVDNHDTQPGESLESTVQTWFKPLAYAFILTRESGYPQVFYGDMYGTKGDSQREIPALKHKIEPILKARKQYAYGAQHDYFDHHDIVGWTREGDSSVANSGLAALITDGPGGAKRMYVGRQNAGETWHDITGNRSEPVVINSEGWGEFHVNGGSVSIYVQR

SEQ ID NO: 42781 - protein, 480 aa, Bacillus licheniformis
NGTLMQYFEWYMPNDGQHWKRLQNDSAYLAEHGITAVWIPPAYKGTSQADVGYGAYDLYDLGEFNQKGTVRTKYGTKGELQSAIKSLHSRDINVYGDVVINHKGGADATEDVTAVEVDPADRNRVISGEHLIKAWTHFHFPGRGSTYSDFKWHWYHFDGTDWDESRKLNRIYKFQGKAWDWEVSNENGNYDYLMYADIDYDHPDVAAEIKRWGTWYANELQLDGFRLDAVKHIKFSFLRDWVNHVREKTGKEMFTVAEYWQNDLGALENYLNKTNFNHSVFDVPLHYQFHAASTQGGGYDMRKLLNGTVVSKHPLKSVTFVDNHDTQPGQSLESTVQTWFKPLAYAFILTRESGYPQVFYGDMYGTKGDSQREIPALKHKIEPILKARKQYAYGAQHDYFDHHDIVGWTREGDSSVANSGLAALITDGPGGAKRMYVGRQNAGETWHDITGNRSEPVVINSEGWGEFHVNGGSVSIYVQR

SEQ ID NO: 42782 - protein, 480 aa, Bacillus licheniformis
NGTLMQYFEWYMPNDGQHWKRLQNDSAYLAEHGITAVWIPPAYKGTSQADVGYGAYDLYDLGEFHQKGTVRTKYGTKGELQSAIKSLHSRDINVYGDVVINHKGGADATEDVTAVEVDPADRNRVISGEHLIKAWTHFHFPGRGSTYSDFKWHWYHFDGTDWDESRKLNRIYKFQGKAWDWEVSNENGNYDYLMYADIDYDHPDVAAEIKRWGTWYANELQLDGFRLDAVKHIKFSFLRDWVNHVREKTGKEMFTVAEYWQNDLGALENYLNKTNFNHSVFDVPLHYQFHAASTQGGGYDMRKLLNGTVVSKHPLKSVTFVDNHDTQPGQSLESTVQEWFKPLAYAFILTRESGYPQVFYGDMYGTKGDSQREIPALKHKIEPILKARKQYAYGAQHDYFDHHDIVGWTREGDSSVANSGLAALITDGPGGAKRMYVGRQNAGETWHDITGNRSEPVVINSEGWGEFHVNGGSVSIYVQR

SEQ ID NO: 42783 - protein, 480 aa, Bacillus licheniformis
NGTLMQYFEWYMPNDGQHWKRLQNDSAYLAEHGITAVWIPPAYKGTSQADVGYGAYDLYDLGEFHQKGTVRTKYGTKGELQSAIKSLHSRDINVYGDVVINHKGGADATEDVTAVEVDPADRNRVISGEHLIKAWTHFHFPGRGSTYSDFKWHWYHFDGTDWDESRKLNRIYKFQGKAWDWEVSNENGNYDYLMYADIDYDHPDVAAEIKRWGTWYANELQLDGFRLDAVKHIKFSFLRDWVNHVREKTGKEMFTVAEYWQNDLGALENYLNKTNFNHSVFDVPLHYQFHAASTQGGGYDMRKLLNGTVVSKHPLKSVTFVDNHDTQPGQSLESTVQTWFKPLAYAFILTRESGYPQVFYGDMYGTKGDSQREIPALKHKIEPILKARKQYAYGAQHDYFDHHDIVGWTREGNSSVANSGLAALITDGPGGAKRMYVGRQNAGETWHDITGNRSEPVVINSEGWGEFHVNGGSVSIYVQR

SEQ ID NO: 42784 - protein, 480 aa, Synthetic construct
NGTLMQYFEWYLPNDGQHWKRLQNDSAYLAEHGITAVWIPPAYKGTSQADVGYGAYDLYDLGEFHQKGTVRTKYGTKGELQSAIKSLHSRDINVYGDVVINHKGGADATEDVTAVEVDPADRNRVISGEHLIKAWTHFHFPGRGSTYSDFKWHWYHFDGTDWDESRKLNRIYKFQGKAWDWEVSNENGNYDYLMYADIDYDHPDVAAEIKRWGTWYANELQLDGFRLDAVKHIKFSFLRDWVNHVREKTGKEMFTVAEYWQNDLGALENYLNKTNFNHSVFDVPLHYQFHAASTQGGGYDMRKLLNGTVVSKHPLKSVTFVDNHDTQPGQSLESTVQTWFKPLAYAFILTRESGYPQVFYGDMYGTKGDSQREIPALKHKIEPILKARKQYAYGAQHDYFDHHDIVGWTREGDSSVANSGLAALITDGPGGAKRMYVGRQNAGETWHDITGNRSEPVVINSEGWGEFHVNGGSVSIYVQR

SEQ ID NO: 42785 - protein, 480 aa, Bacillus licheniformis
NGTLMQYFEWYMPNDGQHWRRLQNDSAYLAEHGITAVWIPPAYKGTSQADVGYGAYDLYDLGEFHQKGTVRTKYGTKGELQSAIKSLHSRDINVYGDVVINHKGGADATEDVTAVEVDPADRNRVISGEHLIKAWTHFHFPGRGSTYSDFKWHWYHFDGTDWDESRKLNRIYKFQGKAWDWEVSNENGNYDYLMYADIDYDHPDVAAEIKRWGTWYANELQLDGFRLDAVKHIKFSFLRDWVNHVREKTGKEMFTVAEYWKNDLGALENYLNKTNFNHSVFDVPLHYQFHAASTQGGGYDMRKLLNGTVVSKHPLKSVTFVDNHDTQPGQSLESTVQTWFKPLAYAFILTRESGYPQVFYGDMYGTKGDSQREIPALKHKIEPILKARKQYAYGAQHDYFDHHDIVGWTREGDSSVANSGLAALITDGPGGAKRMYVGRQNAGETWHDITGNRSEPVVINSEGWGEFHVNGGSVSIYVQR

SEQ ID NO: 42786 - protein, 480 aa, Bacillus licheniformis
NGTLMQYFEWYMPNDGQHWKRLQNDSAYLAEHGITAVWIPPAYKGTSQADVGYGAYDLYDLGEFHQKGTVRTKYGTKGELQSAIKSLHSRDINVYGDVVINHKGGADATEDVTAVEVDPADRNRVISGEYLIKAWTHFHFPGRGSTYSDFKWHWYHFDGTDWDESRKLNRIYKFQGKAWDWEVSNENGNYDYLMYADIDYDHPDVAAESKRWGSWYANELQLDGFRLDAVKHIKFSFLRDWVNHVREKTGKEMFTVAEYWQNDLGALENYLNKTNFNHSVFDVPLHYQFHAASTQGGGYDMRKLLNGTVVSKHPLKSVTFVDNHDIQPGQSLESTVQTWFKPLAYAFILTRESGYPQVFYGDMYGTKGDSQREIPALKHKIEPILKARKQYAYGAQHDYFDHHDIVGWTREGDSSVANSGLAALITDGPGGAKRMYVGRQNAGETWHDITGNRSDPVVINSEGWGEFHVNGGSVSIYVQR

SEQ ID NO: 42787 - protein, 480 aa, Bacillus licheniformis
NGTLMQYFEWYMPNDGQHWRRLQNDSAYLAEHGITAVWIPPAYKGTSQADVGYGAYDLYDLGEFHQKGTVRTKYGTKGELQSAIKSLHSRDINVYGDVVINHKGGADATEDVTAVEVDPADRNRVISGEHLIKAWTHFHFPGRGSTYSDFKWHWYHFDGTDWDESRKLNRIYKFQGKAWDWEVSNENGNYDYLMYADIDYDHPEVAAEIKRWGTWYANELQLDGFRLDAVKHIKFSFLRDWVNHVRGKTGKEMFTVAEYWQNDLGALENYLNKTNFNHSVFDVPLHYQFHAASTQGGGYDMRKLLNGTVVSKHPLKSVTFVDNHDTQPGQSLESTVQTWFKPLAYAFILTRESGYPQVFYGDMYGTKGDSQREIPALKHKIEPILKARKQYAYGAQHDYFDHLDIVGWTREGDSSVANSGLAAIITDGPGGAKRMYVGRQNAGETWHDITGNRSEPVVINSEGWGEFHVNGGSVSIYVQR

SEQ ID NO: 42788 - protein, 482 aa, Bacillus sp.
NGTLMQYFEWYAPNDGNHWNRLRTDAENLAQKGITSVWIPPAYKGTTQNDVGYGAYDLYDLGEFNQKGTVRTKYGTKAQLKSAIDALHKKNIDVYGDVVMNHKGGADYTETVTAVEVDPSNRNVEVSGDYEISAWTGFNFPGRGDSYSNFKWKWYHFDGTDWDEGRKLNRIYKFRGIGKAWDWEVSSENGNYDYLMYADLDFDHPDVANEMKKWGTWYANELNLDGFRLDAVKHIDHEYLRDWVNHVRQQTGKEMFAVAEYWQNDIQTLNNYLAKVNYNQSVFDAPLHYNFHYASKGNGNYDMRNILKGTVVANHPTLAVTLVENHDSQPGQSLESVVSPWFKPLAYAFILTRAEGYPSVFYGDYYGTKGNSNYEIPALKDKIDPILTARKNYAYGTQHDYLDNQDVIGWTREGDSAHAGSGLATVMSDGPGGSKTMYVGTAHAGQVFKDITGNRTDTVTINSAGNGTFPCNGGSVSIWVKQ

SEQ ID NO: 42789 - protein, 480 aa, Bacillus licheniformis
NGTLMQYFEWYMPNDGQHWKRLQNDSAYLAEHGITAVWIPPAYKGTSQADVGYGAYDLYDLGEFHQKGTVRTKYGTKGELQSAIKSLHSRDINVYGDVVINHKGGADATEDVTAVEVDPADRNRVISGEHLIKAWTHFHFPGRGSTYSDFKWHWYHFDGTDWDESRKLNRIYKFQGKAWDWEVSNENGNYDYLMYADIDYDHPDVAAEIKRWGTWYANELQLDGFRLDAVKHIKFSFLRDWVNHVREKTGKEMFTVAEYWQNDLGALENYLNKTNFNHSVFDVPLHYQFHAASTQGGGYDMRKLLNGTVVSKHPLHSVTFVDNHDTQPGQSLESTVQTWFKPLAYAFILTRESGYPQVFYGDMYGTKGDSQREIPALKHKIEPILKARKQYAYGAQHDYFDHHDIVGWTREGDSSVANSGLAALITDGPGGAKRMYVGRQNAGETWHDITGNRSEPVVINSEGWGEFHVNGGSVSIYVQR

SEQ ID NO: 42790 - protein, 480 aa, Bacillus licheniformis
NGTLMQYFEWYMPNDGQHWKRLQNDSAYLAEHGITAVWIPPAYKGTSQADVGYGAYDLYDLGEFHQKGTVRTKYGTKGELQSAIKSLHSRDINVYGDVVINHKGGADATEDVTAVEVDPADRNRVISGEHLIKAWTHFHFPGRGSTYSDFKWHWYHFDGVDWDESRKLNRIYKFQGKAWDWEVSNENGNYDYLMYADIDYDHPDVAAEIKRWGTWYANELQLDGFRLDAVKHIKFSFLRDWVNHVREKTGKEMFTVAEYWQNDLGALENYLNKTNFNHSVFDVPLHYQFHAASTQGGGYDMRKLLNGTVVSKHPLKSVTFVDNHDTQPGQSLESTVQTWFKPLAYAFILTRESGYPQVFYGDMYGTKGDSQREIPALKHKIEPILKARKQYAYGAQHDYFDHHDIVGWTREGDSSVANSGLAALITDGPGGAKRMYVGRQNAGETWHDITGNRSEPVVINSEGWGEFHVNGGSVSIYVQR

SEQ ID NO: 42791 - protein, 480 aa, Bacillus licheniformis
NGTLMQYFEWYMPNDGQHWKRLQNDSAYLAEHGITAVWIPPAYKGTSQADVGYGAYDLYDLGEFHQKGTVRTKYGTKGELQSAIKSLHSRDINVYGDVVINHKGGADATEDVTAVEVDPADRNRVISGEHLIEAWTHFHFPGRGSTYSDFKWHWYHFDGTDWDESRKLNRIYKFQGKAWDWEVSNENGNYDYLMYADIDYDHPDVAAEIKRWGTWYANELQLDGFRLDAVKHIKFSFLRDWVNHVREKTGKEMFTVAEYWQNDLGALENYLNKTNFNHSVFDVPLHYQFHAASTQGGGYDMRKLLNGTVVSKHPLKSVTFVDNHDTQPGQSLESTVQTWFKPLAYAFILTRESGYPQVFYGDMYGTKGDSQREIPALKHKIEPILKARKQYAYGAQHDYFDHHDIVGWTREGDSSVANSGLAALITDGPGGAKRMYVGRQNAGETWHDITGNRSEPVVINSEGWGEFHVNGGSVSIYVQR

SEQ ID NO: 42792 - protein, 480 aa, Bacillus licheniformis
NGTLMQYFEWYTPNDGQHWKRLQNDSAYLAEHGITAVWIPPAYKGASQNDVGYGAYDLYDLGEFHQKGTVRTKYGTKGELQSAIKSLHSRDINVYGDVVINHKGGADATEDVTAVEVDPADRNRVISGEHLIKAYTHFHFPGRGSTYSDFKWHWYHFDGTDWDESRKLNRIYKFQGKAWDWEVSNENGNYDYLTYADIDYDHPDVAAEIKRWGTWYANELQLDGFRLDAVKHIKYSFLRDWVNHVREKTGKEMFTVAEFWKNDLGALENYLNKTNFNHSVFDVPLHYQFYAASKQGGGYDMRKLLNGTVVSKHPLKSVTFVDNHDTQPEEALESTVQTWFKPLAYAFILTRESGYPQVFYGDMYGTKGDSQREIPALKHKIEPILKARKQYAYGAQHDYFDHHDIVGWTREGDSSVANSGLAALITDGPGGAKRMYVGRQNAGETWHDITGNRSEPVVINSEGWGEFHVNGGSVSIYVQR

SEQ ID NO: 42793 - protein, 483 aa, Synthetic construct
TNGTMMQYFEWYLPNDGNHWTRLQNDAANLSSKGVTAVWIPPAYKGTSQNDVGYGAYDLYDLGEFNQKGTVRTKYGTKAQLKSAIIRELAANIHVYGDVVMNHKGGADFTETVTAVEVDPNNRNRETSGDYQISAWTGFTFPGRGNTYSPFKWNWYHFDGTDWDESRKINRIYKFRGTGKAWDWEVSSENGNYDYLMYADIDYEHPDVINEMKKWGTWYAKELNLDGFTLDAVKHIKHDYLRDWVTHVRNQTGKELFTVAEYWQNDIGQLNNYLAKTNYNQSVFDAPLHYHFHYASNSNGNYDMRNILKGTVMESNPRLAVTLVENHDSQPGQSLESVVSTWFKPLAYAFILTRAEGYPSVFYGDYYGTKGNSNYEIPSLKTQLDPILTARKNYAYGLQRDYIDHWDIIGWTREGEAARDKSGLATLITDGPGGYKWMEVGKQNAGEVWYDITGNRKETVTINNDGWGQFYVNGGSVSIYVQK

SEQ ID NO: 42794 - protein, 480 aa, Bacillus licheniformis
NGTLMQYFEWYMPNDGQHWKRLQNDSAYLAEHGITAVWIPPAYKGTSQADVGYGAYDLYDLGEFHQKGTVRTKYGTKGELQSAIKSLHSRDINVYGDVVINHKGGADATEDVTAVEVDPADRNQVISGEHLIKAWTHFHFPGRGSTYSDFKWHWYHFDGTDWDESRKLNRIYKFQGKAWDWEVSNENGNYDYLMYADIDYDHPDVAAEIKRWGTWYANELQLDGFRLDAVKHIKFSFLRDWVNHVREKTGKEMFTVAEYWQNDLGALENYLNKTNFNHSVFDVPLHYQFHAASTQGGGYDMRKLLNGTVVSKHPLKSVTFVDNHDTQPGQSLESTVQTWFKPLAYAFILTRESGYPQVFYGDMYGTKGDSQREIPALKHKIEPILKARKQYAYGAQHDYFDHHDIVGWTREGDSSVANSGLAALITDGPGGAKRMYVGRQNAGETWHDITGNRSEPVVINSEGWGEFHVNGGSVSIYVQR

SEQ ID NO: 42795 - protein, 480 aa, Bacillus licheniformis
NGTLMQYFEWYMPNDGQHWKRLQNDSAYLAEHGITAVWIPPAYKGTSQADVGYGAYDLYDLGEFHQKGTVRTKYGTKGELQSAIKSLHSRDINVYGDVVINHKGGADATEDVTAVEVDPADRNRVISGEHLIKAWTHFHFPGRGSTYSDFKWHWYHFDGTDWDQSRKLNRIYKFQGKAWDWEVSNENGNYDYLMYADIDYDHPDVAAEIKRWGTWYANELQLDGFRLDAVKHIKFSFLRDWVNHVREKTGKEMFTVAEYWQNDLGALENYLNKTNFNHSVFDVPLHYQFHAASTQGGGYDMRKLLNGTVVSKHPLKSVTFVDNHDTQPGQSLESTVQTWFKPLAYAFILTRESGYPQVFYGDMYGTKGDSQREIPALKHKIEPILKARKQYAYGAQHDYFDHHDIVGWTREGDSSVANSGLAALITDGPGGAKRMYVGRQNAGETWHDITGNRSEPVVINSEGWGEFHVNGGSVSIYVQR

SEQ ID NO: 42796 - protein, 480 aa, Bacillus megaterium
NGTLMQYFEWYAPNDGDHWNRLRTDAENLAQKGITSVWIPPAYKGTTQNDVGYGAYDLYDLGEFNQKGTVRTKYGTKAQLKSAIDALHKKNINVYGDVVMNHKGGADYTETVTAVEVDPSNRNIEVSGDYEISAWTGFNFPGRGDSYSNFKWKWYHFDGTDWDEGRKLNRIYKFIGKAWDWEVSSENGNYDYLLYADLDFDHPDVANEMKKWGTWYANELNLDGFRLDAVKHIDHEYLRDWVNHVRQQTGKEMFTVAEYWQNDIQTLNNYLAKVNYNQSVFDAPLHYNFHYASTGNGNYDMRNILKGTVVANHPTLAVTLVENHDSQPGQSLESVVSPWFKPLAYAFILTRAEGYPSVFYGDYYGTKGNSNYEIPALKDKIDPILTARKNFAYGTQRDYFDHPDVIGWTREGDSVHANSGLATLISDGPGGSKWMDVGKNNAGEVWYDITGNQTNTVTINKDGWGQFQVSGGSVSIYVQR

SEQ ID NO: 42797 - protein, 480 aa, Bacillus licheniformis
NGTLMQYFEWYMPNDGQHWKRLQNDSAYLAEHGITAVWIPPAYKGTSQADVGYGAYDLYDLGEFHQKGTVRTKYGTKGELQSAIKSLHSRDINVYGDVVINHKGGADATEDVTAVEVDPADRNRVISGEHLIKAWTHFHFPGRGSTYSDFKWHWYHFDGTDWDESRKLNRIYKFQGKAWDWEVSNENGNYDYLMYADIDYDHPDVAAEIKRWGTWYANELQLDGFRLDAVKHIKFSFLRDWVNHVREKTGKEMFTVAEYWQNDLGALENYLNKTNFNHSVFDVPLHYQFHAASTQGGGYDMRKLLNGTVVSKHPLKSVTFVDNHDTQPGQSLESTVQTWFKPLAYAFILTRESGYPQVFYGDMYGTKGDSQREIPALKHKIEPILKARKQYAYGAQHDYFDHHDIVGWTREGDSSVANSGLAALITDGPGGAKRMYVGRQNAGQTWHDITGNRSEPVVINSEGWGEFHVNGGSVSIYVQR

SEQ ID NO: 42798 - protein, 480 aa, Bacillus licheniformis
NGTLMQYFEWYMPNDGQHWRRLQNDSAYLAEHGITAVWIPPAYKGTSQADVGYGAYDLYDLGEFHQKGTVRTKYGTKGELQSAIKSLHSRDINVYGDVVINHKGGADATEDVTAVEVDPADRNRVISGEHLIKAWTHFHFPGRGSTYSDFKWHWYHFDGTDWDESRKLNRIYKFQGKAWDWEVSNENGNYDYLMYADIDYDHPDVAAEIKRWGTWYANELQLDGFRLDAVKHIKFSFLRDWVNHVREKTGKEMFTVAEYWQNDLGALENYLNKTNFNHSVFDVPLHYQFHAASTQGGGYDMRKLLNGTVVSKHPLKSVTFVDNHDTQPGQSLESTVQTWFKPLAYAFILTRESGYPQVFYGDMYGTKGDSQREIPALKHKIEPILKARKQYAYGAQHDYFDHHDIVGWTREGDSSVANSGLAALITDGPGGAKRMYVGRQNAGKTWHDITGNRSEPVVINSEGWGEFHVNGGSVSIYVKR

SEQ ID NO: 42799 - protein, 480 aa, Bacillus licheniformis
NGTLMQYFEWYMPNDGQHWKRLQNDSAYLAEHGITAVWIPPAYKGTSQADVGYGAYDLYDLGEFHQKGTVRTKYGTKGELQSAIKSLHSRDINVYGDVVINHKGGADATEDVTAVEVDPADRNRVISGEHLIKAWTHFDFPGRGSTYSDFKWHWYHFDGTDWDESRKLNRIYKFQGKAWDWEVSNENGNYDYLMYADIDYDHPDVAAEIKRWGTWYANELQLDGFRLDAVKHIKFSFLRDWVNHVREKTGKEMFTVAEYWQNDLGALENYLNKTNFNHSVFDVPLHYQFHAASTQGGGYDMRKLLNGTVVSKHPLKSVTFVDNHDTQPGQSLESTVQTWFKPLAYAFILTRESGYPQVFYGDMYGTKGDSQREIPALKHKIEPILKARKQYAYGAQHDYFDHHDIVGWTREGDSSVANSGLAALITDGPGGAKRMYVGRQNAGETWHDITGNRSEPVVINSEGWGEFHVNGGSVSIYVQR

SEQ ID NO: 42800 - protein, 480 aa, Bacillus licheniformis
NGTLMQYFEWYMPNDGQHWKRLQNDSAYLAEHGITAVWIPPAYKGTSQADVGYGAYDLYDLGEFHQKGTVRTKYGTKGQLQSAIKSLHSRDINVYGDVVINHKGGADATEDVTAVEVDPADRNRVISGEHLIKAWTHFHFPGRGSTYSDFKWHWYHFDGTDWDESRKLNRIYKFQGKAWDWEVSNENGNYDYLMYADIDYDHPDVAAEIKRWGTWYANELQLDGFRLDAVKHIKFSFLRDWVNHVREKTGKEMFTVAEYWQNDLGALENYLNKTNFNHSVFDVPLHYQFHAASTQGGGYDMRKLLNGTVVSKHPLKSVTFVDNHDTQPGQSLESTVQTWFKPLAYAFILTRESGYPQVFYGDMYGTKGDSQREIPALKHKIEPILKARKQYAYGAQHDYFDHHDIVGWTREGDSSVANSGLAALITDGPGGAKRMYVGRQNAGETWHDITGNRSEPVVINSEGWGEFHVNGGSVSIYVQR

SEQ ID NO: 42801 - protein, 480 aa, Bacillus licheniformis
NGTLMQYFEWYMPNDGQHWKRLQNDSAYLAEHGITAVWIPPAYKGTSQADVGYGAYDLYDLGEFHQKGTVRTKYGTKGELQSAIKSLHSRDINVYGDVVINHKGGADATEDVTAVEVDPADRNRVISGEHLIKAWTHFHFPGRGSTYSDFKWHWYHFDGTDWDESRKLNRIYKFQGKAWDWEVSNENGNYDYLMYADIDYDHPDVAAEIKRWGTWYANELQLDGFRLDAVKHIKFSFLRDWVNHVREKTGKEMFTVAEYWQNDLGALENYLNKTNFNHSVFDVPLHYQFHAASTQGGGYDMRKLLNGTVVSKHPLKSVTFVDNHDTQPGQSLESTVQTWFKPLAYAFILTRESGYPQVFYGDMYGTKGDSQREIPALKHKIEPILKARKQYAYGAQHDYFDHHDIVGWTREGDSSVANSGLAALITDGPGGAKRMYVGRQNAGETWHDITGNRSGPVVINSEGWGEFHVNGGSVSIYVQR

SEQ ID NO: 42802 - protein, 480 aa, Bacillus licheniformis
NGTLMQYFEWYMPNDGQHWRRLQNDSAYLAEHGITAVWIPPAYKGTSQADVGYGAYDLYDLGEFHQKGTVRTKYGTKGELQSAIKSLHSRDINVYGDVVINHKGGADATEDVTAVEVDPADRNRVISGEHLIKAWTHFHFPGRGSTYSDFKWHWYHFDGTDWDESRKLNRIYKFQGKAWDWEVSNENGNYDYLMYADIDYDHPVVAAEIKRWGTWYANELQLDGFRLDAVKHIKFSFLRDWVNHVREKTGKEMFTVAEYWQNDLGALENYLNKTNFNHSVFDVPLHYQFHAASTQGGGYDMRKLLNGTVVSKHPMKSVTFVDNHDTQPGQSLESTVQTWFKPLAYAFILTRESGYPQVFYGDMYGTKGDSQREIPALKHKIEPILKARKQYAYGAQHDYFDHHDIVGWTREGDSSVANSGLAALITDGPGGAKRMYVGRQNAGETWHDITGNRSEPVVINSEGWGEFHVNGGSVSIYVQR

SEQ ID NO: 42803 - protein, 480 aa, Bacillus licheniformis
NGTLMQYFEWYMPNDGQHWKRLQNDSAYLAEHGITAVWIPPAYKGTSQADVGYGAYDLYDLGEFHQKGTVRTKYGTKGELQSAIKSLHSRGINVYGDVVINHKGGADATEDVTAVEVDPADRNRVISGEHLIKAWTHFHFPGRGSTYSDFKWHWYHFDGTDWDESRKLNRIYKFQGKAWDWEVSNENGNYDYLMYADIDYDHPDVAAEIKRWGTWYANELQLDGFRLDAVKHIKFSFLRDWVNHVREKTGKEMFTVAEYWQNDLGALENYLNKTNFNHSVFDVPLHYQFHAASTQGGGYDMRKLLNGTVVSKHPLKSVTFVDNHDTQPGQSLESTVQTWFKPLAYAFILTRESGYPQVFYGDMYGTKGDSQREIPALKHKIEPILKARKQYAYGAQHDYFDHHDIVGWTREGDSSVANSGLAALITDGPGGAKRMYVGRQNAGETWHDITGNRSEPVVINSEGWGEFHVNGGSVSIYVQR

SEQ ID NO: 42804 - protein, 480 aa, Bacillus licheniformis
NGTLMQYFEWYMPNDGQHWKRLQNDSAYLAEHGITAVWIPPAYKGTSQADVGYGAYDLYDLGEFHQKGTVRTKYGTKGELQSAIKSLHSRDINVYGDVVINHKGGADATEDVTAVEVDPADRNRVISGEHLIKAWTHFHFPGRGSTYSDFKWHWYHFDGTDWDESRKLNRIYKFQGKAWDWEVSNENGNYDYLMYADIDYDHPDVAAEIKRWGTWYANTLQLDGFRLDAVKHIKFSFLRDWVNHVREKTGKEMFTVAEYWQNDLGALENYLNKTNFNHSVFDVPLHYQFHAASTQGGGYDMRKLLNGTVVSKHPLKSVTFVDNHDTQPGQSLESTVQTWFKPLAYAFILTRESGYPQVFYGDMYGTKGDSQREIPALKHKIEPILKARKQYAYGAQHDYFDHHDIVGWTREGDSSVANSGLAALITDGPGGAKRMYVGRQNAGETWHDITGNRSEPVVINSEGWGEFHVNGGSVSIYVQR

SEQ ID NO: 42805 - protein, 480 aa, Synthetic construct
NGTLMQYFEWYMPNDGQHWKRLQNDSAYLAEHGITAVWIPPAYKGTSQADVGYGAYDLYDLGEFHQKGTVRTKYGTKGELQSAIKSLHSRDINVYGDVVINHKGGADATEDVTAVEVDPADRNRVISGEYLIKAWTHFHFPGRGSTYSDFKWHWYHFDGTDWDESRKLNRIYKFQGKAWDWEVSDENGNYDYLMYADIDYDHPDVAAEIKRWGTWYANELQLDGFRLDAVKHIKFSFLRDWVNHVREKTGKEMFTVAEYWQNDLGALENYLNKTNFNHSVFDVPLHYQFHAASTQGGGYDMRKLLNGTVVSKHPLKSVTFVDNHDTQPGQSLESTVQTWFKPLAYAFILTRESGYPQVFYGDMYGTKGDSQREIPALKHKIEPILKARKQYAYGAQHDYFDHHDIVGWTREGDSSVANSGLAALITDGPGGAKRMYVGRQNAGETWHDITGNRSEPVVINSEGWGEFHVNGGSVSIYVQR

SEQ ID NO: 42806 - protein, 480 aa, Bacillus licheniformis
NGTLMQYFEWYMPNDGQHWKRLQNDSAYLAEHGITAVWIPPAYKGTSQADVGYGAYDLYDLGEFHQKGTVRTKYGTKGELQSAIKSLHSRDINVYGDVVINHKGGADATEDVTAVEVDPADRNRVISGEHLIKAWTHFHFPGRGSTYSDFKWHWYHFDGTDWDESRKLNRIYKFQGKAWDWEVSNENGNYDYLMYADIDYDHPDVAAEIKRWGTWYANELQLDGFRLDAVKHIKFSFLRDWVNHVREKTGKEMFTVAEYWQNDLGALENYLNKTNFNHSVFDVPLHYQFYAASTQGGGYDMRKLLNGTVVSKHPLKSVTFVDNHDTQPGQSLESTVQTWFKPLAYAFILTRESGYPQVFYGDMYGTKGDSQREIPALKHKIEPILKARKQYAYGAQHDYFDHHDIVGWTREGDSSVANSGLAALITDGPGGAKRMYVGRQNAGETWHDITGNRSEPVVINSEGWGEFHVNGGSVSIYVQR

SEQ ID NO: 42807 - protein, 480 aa, Bacillus licheniformis
NGTLMQYFEWYMPNDGQHWKRLQNDSAYLAEHGITAVWIPPAYKGTSQADVGYGAYDLYDLGEFHQKGTVRTKYGTKGELQSAIKSLHSRDINVYGDVVINHKGGADATEDVTAVEVDPNDRNRVISGEHLIKAWTHFHFPGRGSTYSDFKWHWYHFDGTDWDESRKLNRIYKFQGKAWDWEVSNENGNYDYLMYADIDYDHPDVAAEIKRWGTWYANELQLDGFRLDAVKHIKFSFLRDWVNHVREKTGKEMFTVAEYWQNDLGALENYLNKTNFNHSVFDVPLHYQFHAASTQGGGYDMRKLLNGTVVSKHPLKSVTFVDNHDTQPGQSLESTVQTWFKPLAYAFILTRESGYPQVFYGDMYGTKGDSQREIPALKHKIEPILKARKQYAYGAQHDYFDHHDIVGWTREGDSSVANSGLAALITDGPGGAKRMYVGRQNAGETWHDITGNRSEPVVINSEGWGEFHVNGGSVSIYVQR

SEQ ID NO: 42808 - protein, 482 aa, Synthetic construct
NGTLMQYFEWYMPNDGQHWKRLQNDSAYLAEHGITAVWIPPAYKGTSQADVGYGAYDLYDLGEFHQKGTVRTKYGTKGELQSAIKSLHSRDINVYGDVVINHKAGADYTENVTAVEVNPSNRNQETSGEYNIQAWTGFNFPGRGTTYSNFKWQWFHFDGTDWDQSRSLSRIFKFRGTGKAWDWEVSSENGNYDYLMYADIDYDHPDVAAEIKRWGTWYANELQLDGFRLDAVKHIKFSFLRDWVNHVREKTGKEMFTVAEYWSYDLGALENYLNKTNFNHSVFDVPLHYQFHAASTQGGGYDMRKLLNGTVVSKHPLKSVTFVDNHDTQPGQSLESTVQTWFKPLAYAFILTRESGYPQVFYGDMYGTKGDSQREIPALKHKIEPILKARKQYAYGAQHDYFDHHDIVGWTREGDSSVANSGLAALITDGPGGAKRMYVGRQNAGETWHDITGNRSEPVVINSAGWGEFHVNGGSVSIYVQR

SEQ ID NO: 42809 - protein, 480 aa, Bacillus licheniformis
NGTLMQYFEWYMPNDGQHWKRLQNDSAYLAEHGITAVWIPPAYKGTSQADVGYGAYDLYDLGEFHQKGTVRTKYGTKGELQSAIKSLHSRDINVYGDVVINHKGGADATEDVTAVEVDPADRNRVISGEHLIKAWTHFHFPGRGSTYSDFKWHWYHFDGTDWDESRKLNRIYKFQGKAWDWEVSNENGNYDYLMYADIDYDHPDVAAEIKRWGTWYANELQLDGFRLDAVKHIKYSFLRDWVNHVREKTGKEMFTVAEYWQNDLGALENYLNKTNFNHSVFDVPLHYQFHAASTQGGGYDMRKLLNGTVVSKHPLKSVTFVDNHDTQPGQSLESTVQTWFKPLAYAFILTRESGYPQVFYGDMYGTKGDSQREIPALKHKIEPILKARKQYAYGAQHDYFDHHDIVGWTREGDSSVANSGLAALITDGPGGAKRMYVGRQNAGETWHDITGNRSEPVVINSEGWGEFHVNGGSVSIYVQR

SEQ ID NO: 42810 - protein, 480 aa, Bacillus licheniformis
NGTLMQYFEWYMPNDGQHWKRLQNDSAYLAEHGITAVWIPPAYKGTSQADVGYGAYDLYDLGEFHQKGTVRTKYGTKGELQSAIKSLHSRDINVYGDVVINHKGGADATEDVTAVEVDPADRNREISGEHLIKAWTHFHFPGRGSTYSDFKWHWYHFDGTDWDESRKLNRIYKFQGKAWDWEVSNENGNYDYLMYADIDYDHPDVAAEIKRWGTWYANELQLDGFRLDAVKHIKFSFLRDWVNHVREKTGKEMFTVAEYWQNDLGALENYLNKTNFNHSVFDVPLHYQFHAASTQGGGYDMRKLLNGTVVSKHPLKSVTFVDNHDTQPGQSLESTVQTWFKPLAYAFILTRESGYPQVFYGDMYGTKGDSQREIPALKHKIEPILKARKQYAYGAQHDYFDHHDIVGWTREGDSSVANSGLAALITDGPGGAKRMYVGRQNAGETWHDITGNRSEPVVINSEGWGEFHVNGGSVSIYVQR

SEQ ID NO: 42811 - protein, 480 aa, Bacillus licheniformis
NGTLMQYFEWYMPNDGQHWKRLQNDSAYLAEHGITAVWIPPAYKGTSQADVGYGAYDLYDLGEFHQKGTVRTKYGTKGELQSAIKSLHSRDINVYGDVVINHKGGADATEDVTAVEVNPADRNRVISGEHLIKAWTHFHFPGRGSTYSDFKWHWYHFDGTDWDESRKLNRIYKFQGKAWDWEVSNENGNYDYLMYADIDYDHPDVAAEIKRWGTWYANELQLDGFRLDAVKHIKFSFLRDWVNHVREKTGKEMFTVAEYWQNDLGALENYLNKTNFNHSVFDVPLHYQFHAASTQGGGYDMRKLLNGTVVSKHPLKSVTFVDNHDTQPGQSLESTVQTWFKPLAYAFILTRESGYPQVFYGDMYGTKGDSQREIPALKHKIEPILKARKQYAYGAQHDYFDHHDIVGWTREGDSSVANSGLAALITDGPGGAKRMYVGRQNAGETWHDITGNRSEPVVINSEGWGEFHVNGGSVSIYVQR

SEQ ID NO: 42812 - protein, 480 aa, Bacillus sp.
NGTLMQYFEWYMPNDGQHWKRLQNDSAYLAEHGITAVWIPPAYKGTSQADVGYGAYDLYDLGEFHQKGTVRTKYGTKGELQSAIKSLHSRDINVYGDVVINHKGGADATEDVTAVEVDPADRNRVISGEHLIKAWTHFHFPGRGSTYSDFKWHWYHFDGTDWDESRKLNRIYKFQGKAWDWEVSNENGNYDYLMYADIDYDHPDVAAEIKRWGTWYANELQLDGFRLDAVKHIKFSFLRDWVNHVREKTGKEMFTVAEYWQNDLGALENYLNKTNFNHSVFDVPLHYQFHAASTQGGGYDMRKLLNGTVVSKHPLKAVTFVDNHDTQPGQSLESTVQTWFKPLAYAFILTRESGYPQVFYGDMYGTKGDSQREIPALKHKIEPILKARKQYAYGAQHDYFDHHDIVGWTREGDSSVANSGLAALITDGPGGAKRMYVGRQNAGETWHDITGNRSEPVVINSEGWGEFHVNGGSVSIYVQR

SEQ ID NO: 42813 - protein, 480 aa, Bacillus licheniformis
NGTLMQYFEWYMPNDGQHWKRLQNDSAYLAEHGITAVWIPPAYKGTSQADVGYGAYDLYDLGEFHQKGTVRTKYGTKGELQSAIKSLHSRDINVYGDVVINHKGGADATEDVTAVEVDPADRNRVISGEHLIKAWTHFHFPGRGSTYSDFKWHWYHFDGTDWDESRKLNRIYKFQGKAWDWEVSNENGNYDYLMYADIDYDHPDVAAEIKRWGTWYANELQLDGFRLDAVKHIKFSFLRDWVNHVREATGKEMFTVAEYWQNDLGALENYLNKTNFNHSVFDVPLHYQFHAASTQGGGYDMRKLLNGTVVSKHPLKSVTFVDNHDTQPGQSLESTVQTWFKPLAYAFILTRESGYPQVFYGDMYGTKGDSQREIPALKHKIEPILKARKQYAYGAQHDYFDHHDIVGWTREGDSSVANSGLAALITDGPGGAKRMYVGRQNAGETWHDITGNRSEPVVINSEGWGEFHVNGGSVSIYVQR

SEQ ID NO: 42814 - protein, 480 aa, Bacillus licheniformis
NGTLMQYFEWYMPNDGQHWKRLQNDSAYLAEHGITAVWIPPAYKGTSQADVGYGAYDLYDLGEFHQKGTVRTKYGTKGELQSAIKSLHSRDINVYGDVVINHKGGADATEDVTAVEVDPADRNRVISGEHLIKAWTHFHFPGRGSTYSDFKWHWYHFDGTDWDESRKLNRIYKFQGKAWDWEVSNENGNYDYLMYADIDYDHPDVAAEIKRWGTWYANELQLDGFRLDAVKHIKFSFLRDWVNHVREKTGKEMFTVAEYWQNDLGALENYLNKTNFNHSVFDVPLHYQFHAASTQGGGYDMRKLLNGTVVSKHPLKSVTFVDNHDTQPGQSLESTVQTWFKPLAYAFILTRESGYPQVFYGDMYGTKGDSQREIPALKHKIEPILKARKQYAYGAQHDYFDHHDIVGWTREGDSSVANSGLAALITDGPGGAKWMYVGRQNAGETWHDITGNRSEPVVINSEGWGEFHVNGGSVSIYVQR

SEQ ID NO: 42815 - protein, 480 aa, Synthetic construct
NGTLMQYFEWYMPNDGQHWKRLQNDSAYLAEHGITAVWIPPAYKGTSQADVGYGAYDLYDLGEFHQKGTVRTKYGTKGELQSAIKSLHSRDINVYGDVVINHKGGADATEDVTAVEVDPADRNRVISGEYLIKAWTHFHFPGRGSIYSDFKWHWYHFDGTDWDESRKLNRIYKFQGKAWDWEVDNENGNYDYLMYADIDYDHPDVAAEIKRWGTWYANELQLDGFRLDAVKHIKFSFLRDWVNHVREKTGKEMFTVAEYWQNDLGALENYLNKTNFNHSVFDVPLHYQFHAASTQGGGYDMRKLLNGTVVSKHPLKSVTFVDNHDTQPGQSLESTVQTWFKPLAYAFILTRESGYPQVFYGDMYGTKGDSQREIPALKHKIEPILKARKQYAYGAQHDYFDHHDIVGWTREGDSSVANSGLAALITDGPGGAKRMYVGRQNAGETWHDITGNRSEPVVINSEGWGEFHVNGGSVSIYVQR

SEQ ID NO: 42816 - protein, 480 aa, Bacillus licheniformis
NGTLMQYFEWYMPNDGQHWKRLQNDSAYLAEHGITAVWIPPAYKGTSQADVGYGAYDLYDLGEFHQKGTVRTKYGTKGELQSAIKSLHSRDINVYGDVVINHKGGADATEDVTAVEVDPADRNRVISGEHLIKAWTHFHFPGRGSTYSDFKWHWYHFDGTDWDESRKLNRIYKFQGKAWDWEVSNENGNYDYLMYADIDYDHPDVAAEIKRWGTWYANELQLDGFRLDAVKHIKFSFLRDWVNHVREKTGKEMFTVAEFWQNDLGALENYLNKTNFNHSVFDVPLHYQFHAASTQGGGYDMRKLLNGTVVSKHPLKSVTFVDNHDTQPGQSLESTVQTWFKPLAYAFILTRESGYPQVFYGDMYGTKGDSQREIPALKHKIEPILKARKQYAYGAQHDYFDHHDIVGWTREGDSSVANSGLAALITDGPGGAKRMYVGRQNAGETWHDITGNRSEPVVINSEGWGEFHVNGGSVSIYVQR

SEQ ID NO: 42817 - protein, 480 aa, Bacillus licheniformis
NGTLMQYFEWYMPNDGQHWRRLQNDSAYLAEHGITAVWIPPAYKGTSQADVGYGAYDLYDLGEFHQKGTVRTKYGTKGELQSAIKSLHSRDINVYGDVVINHKGGADATEDVTAVEVDPADRNRVISGEHLIKAWTHFHFPGRGSTYSDFKWHWYHFDGTDWDESRKLNRIYKFQGKAWDWEVSNENGNYDYLMYADIDYDHPDVAAEIKRWGTWYANELQLDGFRLDAVKHIKFSFLRDWVNHVREKTGKEMFTVAEYWQNDLGALENYLNKTNFNHSVFDVPLHYQFHAASTQGGGYDMRKLLNGTVVSKHPLKSVTFVDNHDTQPGQSLESTVQTWFKPLAYAFILTRESGYPQVFYGDMYGTKGDSQREIPALKHKIEPILKARKQYAYGAQHDYFDHHDIVGWTREGDSSVANSGLAALITDGPGGAKWMYVGRQNAGETWHDITGNRSEPVVINSEGWGEFHVNGGSVSIYVQR

SEQ ID NO: 42818 - protein, 480 aa, Bacillus licheniformis
NGTLMQYFEWYMPNDGQHWKRLRNDSAYLAEHGITAVWIPPAYKGTSQADVGYGAYDLYDLGEFHQKGTVRTKYGTKGELQSAIKSLHSRDINVYGDVVINHKGGADATEDVTAVEVDPADRNRVISGEHLIKAWTHFHFPGRGSTYSDFKWHWYHFDGTDWDESRKLNRIYKFQGKAWDWEVSNENGNYDYLMYADIDYDHPDVAAEIKRWGTWYANELQLDGFRLDAVKHIKFSFLRDWVNHVREKTGKEMFTVAEYWQNDLGALENYLNKTNFNHSVFDVPLHYQFHAASTQGGGYDMRKLLNGTVVSKHPLKSVTFVDNHDTQPGQSLESTVQTWFKPLAYAFILTRESGYPQVFYGDMYGTKGDSQREIPALKHKIEPILKARKQYAYGAQHDYFDHHDIVGWTREGDSSVANSGLAALITDGPGGAKRMYVGRQNAGETWHDITGNRSEPVVINSEGWGEFHVNGGSVSIYVQR

SEQ ID NO: 42819 - protein, 480 aa, Bacillus licheniformis
NGTLMQYFEWYMPNDGQHWKRLQNDSAYLAEHGITAVWIPPAYKGTSQDDVGYGAYDLYDLGEFHQKGTVRTKYGTKGELQSAINSLHSRGINVYGDVVINHKGGADATEDVTAVEVDPADRNRVTSGEQRIKAWTHFQFPGRGSTYSDFKWHWYHFDGTDWDESRKLNRIYKFQGKAWDWEVSNENGNYDYLMYADIDYDHPDVTAEIKRWGTWYANELQLDGFRLDAVKHIKFSFLRDWVNHVREKTGKEMFTVAEYWQNDLGALENYLNKTNFNHSVFDVPLHYQFHAASTQGGGYDMRKLLNGTVVSKHPVKAVTFVDNHDTQPGQSLESTVQTWFKPLAYAFILTREAGYPQIFYGDMYGTKGASQREIPALKHKIEPILKARIQYAYGAQHDYFDHHDIVGWTREGDSSVANSGLAALITDGPGGTKRMYVGRQNAGETWHDITGNRSDSVVINAEGWGEFHVNGGSVSIYVQR

SEQ ID NO: 42820 - protein, 480 aa, Bacillus licheniformis
NGTLMQYFEWYTPNDGQHWKRLQNDSAYLAEHGITAVWIPPAYKGTSQADVGYGAYDLYDLGEFHQKGTVRTKYGTKGELQSAIKSLHSRDINVYGDVVINHKGGADATEDVTAVEVDPADRNRVISGEYLIKAWTHFHFPGRGSTYSDFKWHWYHFDGTDWDESRKLNRIYKFQGKAWDWEVSSENGNYDYLMYADIDYDHPDVVSEIKRWGTWYANELQLDGFRLDAVKHIKFSFLRDWVNHVREKTGKEMFTVAEYWQNDLGALENYLNKTNFNHSVFDVPLHYQFHAASTQGGGYDMRKLLNGTVVSKHPLKSVAFVDNHDTQPGQSLESTVQTWFKPLAYAFILTRESGYPQVFYGDMYGTKGDSQREIPSLKHKIEPILKARKQYAYGAQHDYFDHHDIVGWTREGDSSVANSGLAALITDGPGGAKRMYVGRQNAGETWHDITGNRSEPVVINSEGWGEFHVNGGSVSIYVQR

SEQ ID NO: 42821 - protein, 480 aa, Bacillus licheniformis
NGTLMQYFEWYTPNDGQHWKRLQNDSAYLAEHGITAVWIPPAYKGTSQADVGYGAYDLYDLGEFHQKGTVRTKYGTKGELQSAIKSLHSRDINVYGDVVINHKGGADATEDVTAVEVDPADRNRVISGEHLIKAWTHFHFPGRGSTYSDFKWHWYHFDGTDWDESRKLNRIYKFQGKAWDWEVSSENGNYDYLMYADIDYDHPDVAAEIKRWGTWYANELQLDGFRLDAVKHIKFSFLRDWVNHVREKTGKEMFTVAEYWQNDLGALENYLNKTNFNHSVFDVPLHYQFHAASTQGGGYDMRKLLNGTVVSKHPLKSVTFVDNHDTQPGQSLESTVQTWFKPLAYAFILTRESGYPQVFYGDMYGTKGDSQREIPALKHKIEPILKARKQYAYGAQHDYFDHHDIVGWTREGDSSVANSGLAALITDGPGGAKRMYVGRQNAGETWHDITGNRSEPVVINSEGWGEFHVNGGSVSIYVQR

SEQ ID NO: 42822 - protein, 480 aa, Bacillus licheniformis
NGTLMQYFEWYTPNDGQHWKRLQNDSAYLAEHGITAVWIPPAYKGTSQADVGYGAYDLYDLGEFHQKGTVRTKYGTKGELQSAIKSLHSRDINVYGDVVINHKGGADATEDVTAVEVDPADRNRVISGEYLIKAWTHFHFPGRGSTYSDFKWHWYHFDGTDWDESRKLNRIYKFQGKAWDWEVSNENGNYDYLMYADIDYDHPDVAAEIKRWGTWYANELQLDGFRLDAVKHIKFSFLRDWVNHVREKTGKEMFTVAEYWQNDLGALENYLNKTNFNHSVFDVPLHYQFHAASTQGGGYDMRKLLNGTVVSKHPLKSVTFVDNHDTQPGQSLESTVQTWFKPLAYAFILTRESGYPQVFYGDMYGTKGDSQREIPALKHKIEPILKARKQYAYGAQHDYFDHHDIVGWTREGDSSVANSGLAALITDGPGGAKRMYVGRQNAGETWHDITGNRSEPVVINSEGWGEFHVNGGSVSIYVQR

SEQ ID NO: 42823 - protein, 480 aa, Bacillus licheniformis
NGTLMQYFEWYMPNDGQHWKRLQNDSAYLAEHGITAVWIPPAYKGTSQADVGYGAYDLYDLGEFHQKGTVRTKYGTKGELQSAIKSLHSRDINVYGDVVINHKGGADATEDVTAVEVDPADRNRVISGEHLIKAWTHFHFPGRGSTYSDFKWHWYHFDGTDWDESRKLNRIYKFQGKAWDWEVSNENGNYDYLMYADIDYDHPDVAAEIKRWGTWYANELQLDGFRLDAVKHIKFSFLRDWVNHVREKTGKEMFTVAEYWQNDLGALENYLNKTNFNHSVFDVPLHYQFHAASTQGGGYDMRKLLNGTVVSKHPLKSVTFVDNHDTQPGQSLESTVQTWFKPLAYAFILTRESGYPQVFYGDMYGTKGDSQREIPALKHKIEPILKARKQYAYGAQHDYFDHHDIVGWTREGDSSVANSGLAALITDGPGGAKRMYVGRQKAGETWHDITGNRSEPVVINSEGWGEFHVNGGSVSIYVQR

SEQ ID NO: 42824 - protein, 480 aa, Bacillus licheniformis
NGTLMQYFEWYMPNDGQHWNRLQNDSAYLAEHGITAVWIPPAYKGTSQADVGYGAYDLYDLGEFHQKGTVRTKYGTKGELQSAIKSLHSRDINVYGDVVINHKGGADATEDVTAVEVDPADRNRVISGEHLIKAWTHFHFPGRGSTYSDFKWHWYHFDGTDWDESRKLNRIYKFQGKAWDWEVSNENGNYDYLMYADIDYDHPDVAAEIKRWGTWYANELQLDGFRLDAVKHIKFSFLRDWVNHVREKTGKEMFTVAEYWQNDLGALENYLNKTNFNHSVFDVPLHYQFHAASTQGGGYDMRKLLNGTVVSKHPLKSVTFVDNHDTQPGQSLESTVQTWFKPLAYAFILTRESGYPQVFYGDMYGTKGDSQREIPALKHKIEPILKARKQYAYGAQHDYFDHHDIVGWTREGDSSVANSGLAALITDGPGGAKRMYVGRQNAGETWHDITGNRSEPVVINSEGWGEFHVNGGSVSIYVQR

SEQ ID NO: 42825 - protein, 480 aa, Bacillus licheniformis
NGTLMQYFEWYMPNDGQHWKRLQNDSAYLAEHGITAVWIPPAYKGTSQADVGYGAYDLYDLGEFHQKGTVRTKYGTKGELQSAIKSLHSRDINVYGDVVINHKGGADATEDVTAVEVDPADRNRVISGEHLIKAWTHFHFPGRGSTYSDFKWHWYHFDGTDWDESRKLNRIYKFQGKAWDWEVSNENGNYDYLMYADIDYDHPDVAAEIKRWGTWYANELQLDGFRLDAVKHIKFSFLRDWVNHVREKTGKEMFTVAEYWQNDLGALENYLNKTNFNHSVFDVPLHYQFHAASTQGGGYDMRKLLNGTVVSKHPLKSVTFVDNHDTQPGQSLESTVQTWFKPLAYAFILTRESGYPQVFYGDMYGTKGDSQREIPALKHKIEPILKARKQYAYGAQHDYFDHHDIVGWTREGDSSHANSGLAALITDGPGGAKRMYVGRQNAGETWHDITGNRSEPVVINSEGWGEFHVNGGSVSIYVQR

SEQ ID NO: 42826 - protein, 480 aa, Bacillus licheniformis
NGTLMQYFEWYMPNDGQHWKRLQNDSAYLAEHGITAVWIPPAYKGTSQADVGYGAYDLYDLGEFHQKGTVRTKYGTKGELQSAIKSLHSRDINVYGDVVINHKGGADATEDVTAVEVDPADRNRVISGEHLIKAWTHFHFPGRGSTYSDFKWHWYHFDGTDWDESRKLNRIYKFQGKAWDWEVSNENGNYDYLMYADIDYDHPDVAAEIKRWGTWYANELQLDGFRLDAVKHIKFSFLRDWVNHVREKTGKEMFTVAEYWQNDLGALENYLNKTNFNHSVFDVPLHYQFHAASTQGGGYDMRKLLNGTVVSKHPLKSVTFVDNHDTQPGQSLESTVQTWFKPLAYAFILTRESGYPQVFYGDMYGTKGDSQREIPALKHKIEPILKARKQYAYGAQHDYFDHHDIVGWTREGDSSVANSGLAALITDGPGGAKRMYVGRQNAGETWHDITGNRSEPVVINSEGWGNFHVNGGSVSIYVQR

SEQ ID NO: 42827 - protein, 480 aa, Synthetic construct
NGTLMQYFEWYMPNDGQHWKRLQNDSAYLAEHGITAVWIPPAYKGTSQADVGYGAYDLYDLGEFHQKGTVRTKYGTKGELQSAIKSLHSRDINVYGDVVINHKGGADATEDVTAVEVDPADRNRVISGEHRIKAWTHFHFPGRGSTYSDFKWHWYHFDGTDWDESRKLNRIYKFQGKAWDWEVSNENGNYDYLMYADIDYDHPDVAAEIKRWGTWYANELQLDGFRLDAVKHIKFSFLRDWVNHVREKTGKEMFTVAEYWQNDLGALENYLNKTNFNHSVFDVPLHYQFHAASTQGGGYDMRKLLNGTVVSKHPLKAVTFVDNHDTQPGQSLESTVQTWFKPLAYAFILTRESGYPQVFYGDMYGTKGDSQREIPALKHKIEPILKARKQYAYGAQHDYFDHHDIVGWTREGDSSVANSGLAALITDGPGGAKRMYVGRQNAGETWHDITGNRSEPVVINSEGWGEFHVNGGSVSIYVQR

SEQ ID NO: 42828 - protein, 480 aa, Bacillus licheniformis
NGTLMQYFEWYMPNDGQHWKRLQNDSAYLAEHGITAVWIPPAYKGTSQADVGYGAYDLYDLGEFHQKGTVRTKYGTKGELQSAIKSLHSRDINVYGDVVINHKGGADATEDVTAVEVDPADRNRVISGEYLIKAWTHFHFPGRGSTYSDFKWHWYHFDGTDWDESRKLNRIYKFQGKAWDWEVSNENGNYDYLMYADIDYDHPDVVAEIKRWGTWYANELQLDGFRLDAVKHIKFSFLRDWVNHVREKTGKEMFTVAEYWQNDLGALENYLNKTNFNHSLFDVPLHYQFHAASTQGGGYDMRKLLNGTVVSKHPLKSVTFVDNHDTQPGQSLESTVQTWFKPLAYAFILTRESGYPQVFYGDMYGTKGDSQREIPALKHKIEPILKARKQYAYGAQHDYFDHHDIVGWTREGDSSVANSGLAALITDGPGGAKRMYVGRQNAGETWHDITGNRSEPVVINSEGWGEFHVNGGSVSIYVQR

SEQ ID NO: 42829 - protein, 480 aa, Bacillus licheniformis
NGTLMQYFEWYMPNDGQHWKRLQNDSAYLAEHGITAVWIPPAYKGTSQADVGYGAYDLYDLGEFHQKGTVRTKYGTKGELQSAIKSLHSRDINVYGDVVINHKGGADATEDVTAVEVDPADRNRVISGEHLIKAWTHFHFPGRGSTYSDFKWHWYHFDGTDWDESRKLNRIYKFQGKAWDWEVSSENGNYDYLMYADIDYDHPDVAAEIKRWGTWYANELQLDGFRLDAVKHIKFSFLRDWVNHVREKTGKEMFTVAEYWQNDLGALENYLNKTNFNHSVFDVPLHYQFHAASTQGGGYDMRKLLNGTVVSKHPLKSVTFVDNHDTQPGQSLESTVQTWFKPLAYAFILTRESGYPQVFYGDMYGTKGDSQREIPALKHKIEPILKARKQYAYGAQHDYFDHHDIVGWTREGDSSVANSGLAALITDGPGGAKRMYVGRQNAGETWHDITGNRSEPVVINSEGWGEFHVNGGSVSIYVQR

SEQ ID NO: 42830 - protein, 480 aa, Synthetic construct
NGTLMQYFEWYMPNDGQHWKRLQNDSAYLAEHGITAVWIPPAYKGTSQADVGYGAYDLYDLGEFHQKGTVRTKYGTKGELQSAIKSLHSRDINVYGDVVINHKGGADATEDVTAVEVDPADRNRVISGEHLIKAWTHFHFPGRGSTYSDFKWHWYHFDGTDWDESRKLNRIYKFQGKAWDWEVDNENGNYDYLMYADIDYDHPDVAAEIKRWGTWYANELQLDGFRLDAVKHIKFSFLRDWVNHVREKTGKEMFTVAEYWQNDLGALENYLNKTNFNHSVFDVPLHYQFHAASTQGGGYDMRKLLNGTVVSKHPLKSVTFVDNHDTQPGQSLESTVQTWFKPLAYAFILTRESGYPQVFYGDMYGTKGDSQREIPALKHKIEPILKARKQYAYGAQHDYFDHHDIVGWTREGDSSVANSGLAALITDGPGGAKRMYVGRQNAGETWHDITGNRSEPVVINSEGWGEFHVNGGSVSIYVQR

SEQ ID NO: 42831 - protein, 480 aa, Bacillus licheniformis
NGTLMQYFEWYMPNDGQHWKRLQNDSAYLAEHGITAVWIPPAYKGTSQADVGYGAYDLYDLGEFHQKGTVRTKYGTKGELQSAIKSLHSRDINVYGDVVINHKGGADATEDVTAVEVDPADRNRVISGEHLIKAWTHFHFPGRGSTYSDFKWHWYHFDGTDWDESRKLNRIYKFQGKAWDWEVSNENGNYDYLMYADIDYDHPDVAAEIKRWGTWYANELQLDGFRLDAVKHIKFSFLRDWVNHVREKTGKEMFTVAEYWQNDLGALENYLNKTNFNHSVFDVPLHYQFHAASTQGGGYDMRKLLNGTVVSKHPLKSVTFVDNHDTQPGQSLESTVQTWFKPLAYAFILTRESGYPQVFYGDMYGTKGDSQREIPALKHKIEPILKARKQYAYGAQHDYFDHHDIVGWTREGDSSVANSGLAALITDGPGGAKRMYVGRQNAGETWHDITGNRSEPVVINSEGWGEFSVNGGSVSIYVQR

SEQ ID NO: 42832 - protein, 480 aa, Bacillus licheniformis
NGTLMQYFEWYMPNDGQHWKRLQNDSAYLAEHGITAVWIPPAYKGTSQADVGYGAYDLYDLGEFHQKGTVRTKYGTKGELQSAIKSLHSRDINVYGDVVINHKGGADATEDVTAVEVDPADRNRVISGEHLIKAWTHFHFPGRGSTYSDFKWHWYHFDGTDWDESRKLNRIYKFQGKAWDWEVSNENGNYDYLMYADIDYDHPDVAAEIRRWGTWYANELQLDGFRLDAVKHIKFSFLRDWVNHVREKTGKEMFTVAEYWQNDLGALENYLNKTNFNHSVFDVPLHYQFHAASTQGGGYDMRKLLNGTVVSKHPLKSVTFVDNHDTQPGQSLESTVQTWFKPLAYAFILTRESGYPQVFYGDMYGTKGDSQREIPALKHKIEPILKARKQYAYGAQHDYFDHHDIVGWTREGDSSVANSGLAALITDGPGGAKRMYVGRQNAGETWHDITGNRSEPVVINSEGWGEFHVNGGSVSIYVQR

SEQ ID NO: 42833 - protein, 480 aa, Bacillus licheniformis
NGTLMQYFEWYMPNDGQHWKRLQNDSAYLAEHGITAVWIPPAYKGTSQADVGYGAYDLYDLGEFHQKGTVRTKYGTKGELQSAIKSLHSRDINVYGDVVINHKGGADATEDVTAVEVDPADRNRVISGEHLIKAWTHFHFPGRGSTYSDFKWHWYHFDGTDWDESRKLNRIYKFQGKAWDWEVSNENGNYDYLMYADIDYDHPDVAAEIKRWGTWYANELQLDGFRLDAVKHIKFSFLRDWVNHVREKTGKEMFTVAEYWQNDLGALENYLNKTNFNHSVFDVPLHYQFHAASTQGGGYDMRKLLNGTVVSKHPLKSVTFVDNHDTQPGQSLESTVQTWFKPLAYAFILTRESGYPQVFYGDYYGTKGDSQREIPALKHKIEPILKARKQYAYGAQHDYFDHHDIVGWTREGDSSVANSGLAALITDGPGGAKRMYVGRQNAGETWHDITGNRSEPVVINSEGWGEFHVNGGSVSIYVQR

SEQ ID NO: 42834 - protein, 480 aa, Bacillus licheniformis
NGTLMQYFEWYMPNDGQHWKRLQNDSAYLAEHGITAVWIPPAYKGTSQADVGYGAYDLYDLGEFHQKGTVRTKYGTKGELQSAIKSLHSRDINVYGDVVINHKGGADATEDVTAVEVDPANRNRVISGEHLIKAWTHFHFPGRGSTYSDFKWHWYHFDGTDWDESRKLNRIYKFQGKAWDWEVSNENGNYDYLMYADIDYDHPDVAAEIKRWGTWYANELQLDGFRLDAVKHIKFSFLRDWVNHVREKTGKEMFTVAEYWQNDLGALENYLNKTNFNHSVFDVPLHYQFHAASTQGGGYDMRKLLNGTVVSKHPLKSVTFVDNHDTQPGQSLESTVQTWFKPLAYAFILTRESGYPQVFYGDMYGTKGDSQREIPALKHKIEPILKARKQYAYGAQHDYFDHHDIVGWTREGDSSVANSGLAALITDGPGGAKRMYVGRQNAGETWHDITGNRSEPVVINSEGWGEFHVNGGSVSIYVQR

SEQ ID NO: 42835 - protein, 478 aa, Geobacillus stearothermophilus
LNGTLMQYFEWYTPNDGQHWKRLQNDSAYLAEHGITAVWIPPAYKGTSQADVGYGAYDLYDLGEFHQKGTVRTKYGTKGELQSAIKSLHSRDINVYGDVVINHKGGADATEDVTAVEVDPADRNRVISGEYLIKAWTHFHFPGRGSTYSDFKWHWYHFDGTDWDESRKLNRIYKFQGKAWDWEVDTENGNYDYLMYADIDYDHPDVVAEIKRWGTWYANELQLDGFRLDAVKHIKFSFFPDWLSYVRSQTGKPLFTVGEYWSYDINKLHNYITKTNGTMSLFDAPLHNKFYTASKSGGAFDMRTLMTNTLMKDQPTLAVTFVDNHDTEPGQALQSWVDPWFKPLAYAFILTRQEGYPCVFYGDYYGIPQYNIPSLKSKIDPLLIARRDYAYGTQHDYLDHSDIIGWTREGVTEKPGSGLAALITDGPGGSKWMYVGKQHAGKVFYDLTGNRSDTVTINSDGWGEFKVNGGSVSVWVPR

SEQ ID NO: 42836 - protein, 478 aa, unidentified
NGTIMQYFEWNVPNDGQHWNRLHNNAQNLKNAGITAIWIPPAWKGTSQNDVGYGAYDLYDLGEFNQKGTVRTKYGTKAELERAIRSLKANGIQVYGDVVMNHKGGADFTERVQAVEVNPQNRNQEVSGTYQIEAWTGFNFPGRGNQHSSFKWRWYHFDGTDWDQSRQLANRIYKFRGKAWDWEVDTENGNYDYLMYADVDMDHPEVINELNRWGVWYANTLNLDGFRLDAVKHIKFSFMRDWLGHVRGQTGKNLFAVAEYWKNDLGALENYLSKTNWTMSAFDVPLHYNLYQASNSSGNYDMRNLLNGTLVQRHPSHAVTFVDNHDTQPGEALESFVQGWFKPLAYATILTREQGYPQVFYGDYYGIPSDGVPSYRQQIDPLLKARQQYAYGAQHDYFDHHDIVGWTREGDSSVANSGLAALITDGPGGAKRMYVGRQNAGETWHDITGNRSEPVVINSEGWGEFHVNGGSVSIYVQR

SEQ ID NO: 42837 - protein, 479 aa, Synthetic construct
NGTIMQYFEWNVPNDGQHWNRLHNNAQNLKNAGITAIWIPPAWKGTSQNDVGYGAYDLYDLGEFNQKGTVRTKYGTKAELERAIRSLKANGIQVYGDVVMNHKAGADATEWVDAVEVNPSNRNQEVSGTYKIQAWTKFDFPGRGNTYSSFKWRWYHFDGTDWDQSRQLNRIYKFRGTGKAWDWEVDTENGNYDYLMFADLDMDHPEVINELNRWGVWYANTLNLDGFRLDAVKHIKFSFMRDWLGHVRGQTGKNLFAVAEYWKNDLGALENYLSKTNWTMSAFDVPLHYNLYQASNSSGNYDMRNLLNGTLVQRHPSHAVTFVDNHDTQPGEALESFVQGWFKPLAYATILTREQGYPQVFYGDYYGIPSDGVPSYRQQIDPLLKARQQYAYGRQHDYFDHWDVIGWTREGNASHPNSGLATIMSDGPGGSKWMYVGRQKAGEVWHDMTGNRSGTVTINQDGWGHFFVNGGSVSVWVKR

SEQ ID NO: 42838 - protein, 476 aa, unidentified
NGTLMQYFEWYMPNDGQHWKRLQNDSAYLAEHGITAVWIPPAYKGTSQADVGYGAYDLYDLGEFHQKGTVRTKYGTKGELQSAIKSLHSRDINVYGDVVINHKGGADATEDVTAVEVDPADRNRVISGEHRIKAWTHFHFPGRGSTYSDFKWHWYHFDGTDWDESRKLNRIYKFQGKAWDWEVSNENGNYDYLMYADIDYDHPDVAAEIKRWGTWYANELQLDGFRLDAVKHIKFSFLRDWVNHVREKTGKEMFTVAEYWQNDLGALENYLNKTNFNHSVFDVPLHYQFHAASTQGGGYDMRKLLNSTVVSKHPLKAVTFVDNHDTQPGQSLESTVQTWFKPLAYAFILTRESGYPQVFYGDMYGTKGDSQREIPALKHKIEPILKARKQYAYGAQHDYFDHHDIVGWTREGDSSVANSGLAALITDGPGGAKRMYVGRQNAGETWHDITGNRSEPVVINSEGWGEFHVNGGSVSI

SEQ ID NO: 42839 - protein, 485 aa, Bacillus licheniformis
NGTNLNGTLMQYFEWYMPNDGQHWKRLQNDSAYLAEHGITAVWIPPAYKGTSQADVGYGAYDLYDLGEFHQKGTVRTKYGTKGELQSAIKSLHSRDINVYGDVVINHKGGADATEDVTAVEVDPADRNRVISGEHLIKAWTHFHFPGRGSTYSDFKWHWYHFDGTDWDESRKLNRIYKFQGKAWDWEVSNENGNYDYLMYADIDYDHPDVAAEIKRWGTWYANELQLDGFRLDAVKHIKFSFLRDWVNHVREKTGKEMFTVAEYWQNDLGALENYLNKTNFNHSVFDVPLHYQFHAASTQGGGYDMRKLLNGTVVSKHPLKSVTFVDNHDTQPGQSLESTVQTWFKPLAYAFILTRESGYPQVFYGDMYGTKGDSQREIPALKHKIEPILKARKQYAYGAQHDYFDHHDIVGWTREGDSSVANSGLAALITDGPGGAKRMYVGRQNAGETWHDITGNRSEPVVINSEGWGEFHVNGGSVSIYVQR

SEQ ID NO: 42840 - protein, 497 aa, Aspergillus sp
WTVSLFPLLSLFGQTAHALTPAQWRSQSIYFLMTDRFGRTDNSTTAACNTADRVYCGGSWQGIINHLDYIQGMGFTAIWITPVTEQFYEDTGDGTSYHGYWQQNIYNVNSNYGTAQDLKNLASALHARGMHLMVDVVANHMGYDGAGNSVDYGVFDPFSSSSYFHPYCLISDYNNQTNVEDCWLGDTTVSLPDLDTTSTDVRNIWYDWVEELVANYSIDGLRVDTVKHVEKDFWPGYNSAAGVYCVGEVFSGDPAYTCPYQNYMDGVLNYPIYYQLLYAFESTSGSMSNLYNMINSVASDCKDPTLLGNFIENHDNPRFASYTSDYSQAKNVISFIFLTDGIPIVYAGQEQHYSGGSDPANREATWLSAYSTGATLYTWIASTNKIRKLAISKDTGYVEAKNNPFYYDSNTIAMRKGTTAGAQVITVLSNKGASGSSYTLSLSGTGYAAGATLVEMYTCTTATVDSSGNLPVLMTSGLPRVFLPSSWVSGSGLCGSA

SEQ ID NO: 42841 - protein, 479 aa, Bacillus licheniformis
NGTLMQYFEWYPNDGQHWKRLQNDSAYLAEHGITAVWIPPAYKGTSQADVGYGAYDLYDLGEFHQKGTVRTKYGTKGELQSAIKSLHSRDINVYGDVVINHKGGADATEDVTAVEVDPADRNRVISGEHLIKAWTHFHFPGRGSTYSDFKWHWYHFDGTDWDESRKLNRIYKFQGKAWDWEVSNENGNYDYLMYADIDYDHPDVAAEIKRWGTWYANELQLDGFRLDAVKHIKFSFLRDWVNHVREKTGKEMFTVAEYWQNDLGALENYLNKTNFNHSVFDVPLHYQFHAASTQGGGYDMRKLLNGTVVSKHPLKSVTFVDNHDTQPGQSLESTVQTWFKPLAYAFILTRESGYPQVFYGDMYGTKGDSQREIPALKHKIEPILKARKQYAYGAQHDYFDHHDIVGWTREGDSSVANSGLAALITDGPGGAKRMYVGRQNAGETWHDITGNRSEPVVINSEGWGEFHVNGGSVSIYVQR

SEQ ID NO: 42842 - protein, 479 aa, Bacillus licheniformis
NGTLMQYFEWYMPNDGQHWKRLQNDSAYLAEHGITAVWIPPAYKGTSQADVGYGAYDLYDLGEFHQKGTVRTKYGTKGELQSAIKSLHSRDINVYGDVVINHKGGADATEDVTAVEVDPADRNRISGEHLIKAWTHFHFPGRGSTYSDFKWHWYHFDGTDWDESRKLNRIYKFQGKAWDWEVSNENGNYDYLMYADIDYDHPDVAAEIKRWGTWYANELQLDGFRLDAVKHIKFSFLRDWVNHVREKTGKEMFTVAEYWQNDLGALENYLNKTNFNHSVFDVPLHYQFHAASTQGGGYDMRKLLNGTVVSKHPLKSVTFVDNHDTQPGQSLESTVQTWFKPLAYAFILTRESGYPQVFYGDMYGTKGDSQREIPALKHKIEPILKARKQYAYGAQHDYFDHHDIVGWTREGDSSVANSGLAALITDGPGGAKRMYVGRQNAGETWHDITGNRSEPVVINSEGWGEFHVNGGSVSIYVQR

SEQ ID NO: 42843 - protein, 479 aa, Bacillus licheniformis
NGTLMQYFEWYMPNDGQHWKRLQNDSAYLAEHGITAVWIPPAYKGTSQADVGYGAYDLYDLGEFHQKGTVRTKYGTKGELQSAIKSLHSRDINVYGDVVINHKGGADATEDVTAVEVDPADRNRVISGEHLIKAWTHFHFPGRGSTYSDFKWHWYHFDGTDWDESRKLNRIYKFQGKAWDWEVNENGNYDYLMYADIDYDHPDVAAEIKRWGTWYANELQLDGFRLDAVKHIKFSFLRDWVNHVREKTGKEMFTVAEYWQNDLGALENYLNKTNFNHSVFDVPLHYQFHAASTQGGGYDMRKLLNGTVVSKHPLKSVTFVDNHDTQPGQSLESTVQTWFKPLAYAFILTRESGYPQVFYGDMYGTKGDSQREIPALKHKIEPILKARKQYAYGAQHDYFDHHDIVGWTREGDSSVANSGLAALITDGPGGAKRMYVGRQNAGETWHDITGNRSEPVVINSEGWGEFHVNGGSVSIYVQR

SEQ ID NO: 42844 - protein, 479 aa, Bacillus licheniformis
NGTLMQYFEWYMPNDGQHWKRLQNDSAYLAEHGITAVWIPPAYKGTSQADVGYGAYDLYDLGEFHQKGTVRTKYGTKGELQSAIKSLHSRDINVYGDVVINHKGGADATEDVTAVEVDPADRNRVISGEHLIKAWTHFHFPGRGSTYSDFKWHWYHFDGTDWDESRKLNRIYKFQGKAWDWEVSNENGNYDYLMYADIDYDHPDVAEIKRWGTWYANELQLDGFRLDAVKHIKFSFLRDWVNHVREKTGKEMFTVAEYWQNDLGALENYLNKTNFNHSVFDVPLHYQFHAASTQGGGYDMRKLLNGTVVSKHPLKSVTFVDNHDTQPGQSLESTVQTWFKPLAYAFILTRESGYPQVFYGDMYGTKGDSQREIPALKHKIEPILKARKQYAYGAQHDYFDHHDIVGWTREGDSSVANSGLAALITDGPGGAKRMYVGRQNAGETWHDITGNRSEPVVINSEGWGEFHVNGGSVSIYVQR

SEQ ID NO: 42845 - protein, 479 aa, Bacillus licheniformis
NGTLMQYFEWYMPNDGQHWKRLQNDSAYLAEHGITAVWIPPAYKGTSQADVGYGAYDLYDLGEFHQKGTVRTKYGTKGELQSAIKSLHSRDINVYGDVVINHKGGADATEDVTAVEVDPADRNRVISGELIKAWTHFHFPGRGSTYSDFKWHWYHFDGTDWDESRKLNRIYKFQGKAWDWEVSNENGNYDYLMYADIDYDHPDVAAEIKRWGTWYANELQLDGFRLDAVKHIKFSFLRDWVNHVREKTGKEMFTVAEYWQNDLGALENYLNKTNFNHSVFDVPLHYQFHAASTQGGGYDMRKLLNGTVVSKHPLKSVTFVDNHDTQPGQSLESTVQTWFKPLAYAFILTRESGYPQVFYGDMYGTKGDSQREIPALKHKIEPILKARKQYAYGAQHDYFDHHDIVGWTREGDSSVANSGLAALITDGPGGAKRMYVGRQNAGETWHDITGNRSEPVVINSEGWGEFHVNGGSVSIYVQR

SEQ ID NO: 42846 - protein, 479 aa, Bacillus licheniformis
GTLMQYFEWYMPNDGQHWKRLQNDSAYLAEHGITAVWIPPAYKGTSQADVGYGAYDLYDLGEFHQKGTVRTKYGTKGELQSAIKSLHSRDINVYGDVVINHKGGADATEDVTAVEVDPADRNRVISGEHRIKAWTHFHFPGRGSTYSDFKWHWYHFDGTDWDESRKLNRIYKFQGKAWDWEVSNENGNYDYLMYADIDYDHPDVAAEIKRWGTWYANELQLDGFRLDAVKHIKFSFLRDWVNHVREKTGKEMFTVAEYWQNDLGALENYLNKTNFNHSVFDVPLHYQFHAASTQGGGYDMRKLLNGTVVSKHPLKAVTFVDNHDTQPGQSLESTVQTWFKPLAYAFILTRESGYPQVFYGDMYGTKGDSQREIPALKHKIEPILKARKQYAYGAQHDYFDHHDIVGWTREGDSSVANSGLAALITDGPGGAKRMYVGRQNAGETWHDITGNRSEPVVINSEGWGEFHVNGGSVSIYVQR

SEQ ID NO: 42847 - protein, 479 aa, Bacillus licheniformis
NGTLMQYFEWYMPNDGHWKRLQNDSAYLAEHGITAVWIPPAYKGTSQADVGYGAYDLYDLGEFHQKGTVRTKYGTKGELQSAIKSLHSRDINVYGDVVINHKGGADATEDVTAVEVDPADRNRVISGEHLIKAWTHFHFPGRGSTYSDFKWHWYHFDGTDWDESRKLNRIYKFQGKAWDWEVSNENGNYDYLMYADIDYDHPDVAAEIKRWGTWYANELQLDGFRLDAVKHIKFSFLRDWVNHVREKTGKEMFTVAEYWQNDLGALENYLNKTNFNHSVFDVPLHYQFHAASTQGGGYDMRKLLNGTVVSKHPLKSVTFVDNHDTQPGQSLESTVQTWFKPLAYAFILTRESGYPQVFYGDMYGTKGDSQREIPALKHKIEPILKARKQYAYGAQHDYFDHHDIVGWTREGDSSVANSGLAALITDGPGGAKRMYVGRQNAGETWHDITGNRSEPVVINSEGWGEFHVNGGSVSIYVQR

SEQ ID NO: 42848 - protein, 480 aa, Bacillus sp.
NGTIMQYFEWNVPNDGQHWNRLHNNAQNLKNAGITAIWIPPAWKGTSQNDVGYGAYDLYDLGEFNQKGTVRTKYGTKAELERAIRSLKANGIQVYGDVVMNHKGGADFTERVQAVEVNPQNRNQEVSGTYQIEAWTGFNFPGRGNQHSSFKWRWYHFDGTDWDQSRQLANRIYKFRGDGKAWDWEVDTENGNYDYLMYADVDMDHPEVINELNRWGVWYANTLNLDGFRLDAVKHIKFSFMRDWLGHVRGQTGKNLFAVAEYWKNDLGALENYLSKTNWTMSAFDVPLHYNLYQASNSSGNYDMRNLLNGTLVQRHPSHAVTFVDNHDTQPGEALESFVQGWFKPLAYATILTREQGYPQVFYGDYYGIPSDGVPSYRQQIDPLLKARQQYAYGAQHDYFDHHDIVGWTREGDSSVANSGLAALITDGPGGAKRMYVGRQNAGETWHDITGNRSEPVVINSEGWGEFHVNGGSVSIYVQR

SEQ ID NO: 42849 - protein, 478 aa, Synthetic construct
NGTMMQYFEWYLPNDGNHWNRLNSDASNLKSKGITAVWIPPAWKGASQNDVGYGAYDLYDLGEFNQKGTVRTKYGTRSQLQAAVTSLKNNGIQVYGDVVMNHKGGADATEMVRAVEVNPNNRNQEVTGEYTIEAWTRFDFPGRGNTHSSFKWRWYHFDGVDWDQSRRLNNRIYKFRGKAWDWEVDTENGNYDYLMYADIDMDHPEVVNELRNWGVWYTNTLGLDGFRIDAVKHIKYSFTRDWINHVRSATGKNMFAVAEFWKNDLGAIENYLQKTNWNHSVFDVPLHYNLYNASKSGGNYDMRNIFNGTVVQRHPSHAVTFVDNHDSQPEEALESFVEEWFKPLAYALTLTREQGYPSVFYGDYYGIPTHGVPAMRSKIDPILEARQKYAYGAQHDYFDHHDIVGWTREGDSSVANSGLAALITDGPGGAKRMYVGRQNAGETWHDITGNRSEPVVINSEGWGEFHVNGGSVSIYVQR

SEQ ID NO: 42850 - protein, 479 aa, Synthetic construct
NGTMMQYFEWYLPNDGTLWTKMGSDASHLKSIGITGVWFPPAYKGQSQSDVGYGVYDMYDLGEFNQKGTVRTKYGTKAQLQSAITSLHNNGIQAYGDVVLNHKGGADATEMVRAVEVNPNNRNQEVSGEYTIEAWTKFDFPGRGNTHSNFKWRWYHFDGVDWDQSRKLNNRIYKFRGDGKGWDWEVDTENGNYDYLMYADIDYDHPDVQTEVKNWGKWFVNTLNLDGVRLDAVKHIKFDYMSSWLSSVKSTTGKSNLFAVGEYWNTSLGALENYENKTNWSMSLFDVPLHMNFQAAANGGGYYDMRNLLNNTMMKNHPIQAVTFVDNHDTEPGQALQSWVSDWFKPLAYATILTRQEGYPCVFYGDYYGIPSQSVSAKSTWLDKQLSARKSYAYGTQHDYLDNQDVIGWTREGDSAHAGSGLATVMSDGPGGSKTMYVGTAHAGQVFKDITGNRTDTVTINSAGNGTFPCNGGSVSIWV

SEQ ID NO: 42851 - protein, 479 aa, Synthetic construct
NGTMMQYFEWYLPNDGTLWTKMGSDASHLKSIGITGVWFPPAYKGQSQSDVGYGVYDMYDLGEFNQKGTVRTKYGTKAQLQSAITSLHNNGIQAYGDVVLNHKGGADATENVLAVEVNPNNRNQEISGDYTIEAWTKFDFPGRGNTYSDFKWRWYHFDGVDWDQSRQFQNRIYKFRGDGKAWDWEVDSENGNYDYLMYADVDYDHPDVQTEVKNWGKWFVNTLNLDGVRLDAVKHIKFDYMSSWLSSVKSTTGKSNLFAVGEYWNTSLGALENYENKTNWSMSLFDVPLHMNFQAAANGGGYYDMRNLLNNTMMKNHPIQAVTFVDNHDTEPGQALQSWVSDWFKPLAYATILTRQEGYPCVFYGDYYGIPSQSVSAKSTWLDKQLSARKSYAYGTQHDYLDNQDVIGWTREGDSAHAGSGLATVMSDGPGGSKTMYVGTAHAGQVFKDITGNRTDTVTINSAGNGTFPCNGGSVSIWV

SEQ ID NO: 42852 - protein, 480 aa, Bacillus licheniformis
NGTLMQYFEWYTPNDGQHWKRLQNDAEHLSDIGITAVWIPPAYKGTSQADVGYGAYDLYDLGEFHQKGTVRTKYGTKGELQSAIKSLHSRDINVYGDVVINHKGGADATEDVTAVEVDPADRNRVISGEHLIKAWTHFHFPGRGSTYSDFKWYWYHFDGTDWDESRKLNRIYKFQGKTWDWEVSNEFGNYDYLMYADIDYDHPDVVAEIKRWGTWYANELQLDGFRLDAVKHIKFSFLRDWVNHVREKTGKEMFTVAEYWSNDLGALENYLNKTNFNHSVFDVPLHYQFHAASTQGGGYDMRKLLNGTVVSKHPLKSVTFVDNHDTQPGQSLESTVQTWFKPLAYAFILTRESGYPQVFYGDMYGTKGDSQREIPALKHKIEPILKARKQYAYGAQHDYFDHHDIVGWTREGDSSVANSGLAALITDGPGGAKRMYVGRQNAGETWHDITGNRSEPVVINSEGWGEFHVNGGSVSIYVQR

SEQ ID NO: 42853 - protein, 480 aa, Bacillus sp.
NGTLMQYFEWYTPNDGQHWKRLQNDAEHLSDIGITAVWIPPAYKGTSQADVGYGAYDLYDLGEFHQKGTVRTKYGTKGELQSAIKSLHSRDINVYGDVVINHKGGADATEDVTAVEVDPADRNRVISGEHLIKAWTHFHFPGRGSTYSDFKWHWYHFDGTDWDESRKLNRIYKFQGKTWDWEVSNEFGNYDYLMYADIDYDHPDVVAEIKRWGTWYANELQLDGFRLDAVKHIKFSFLRDWVNHVREKTGKEMFTVAEYWSNDLGALENYLNKTNFNHSVFDVPLHYQFHAASTQGGGYDMRKLLNGTVVSKHPLKSVTFVDNHDTQPGQSLESTVQTWFKPLAYAFILTRESGYPQVFYGDMYGTKGDSQREIPALKHKIEPILKARKQYAYGAQHDYFDHHDIVGWTREGDSSVANSGLAALITDGPGGAKRMYVGRQNAGETWHDITGNRSEPVVINSEGWGEFHVNGGSVSIYVQR

SEQ ID NO: 42854 - protein, 480 aa, Bacillus amyloliquefaciens
NGTLMQYFEWYTPNDGQHWKRLQNDAEHLSDIGITAVWIPPAYKGTSQADVGYGAYDLYDLGEFHQKGTVRTKYGTKGELQSAIKSLHSRDINVYGDVVINHKGGADATEDVTAVEVDPADRNRVISGEHLIKAWTHFHFPGRGSTYSDFKWYWYHFDGTDWDESRKLNRIYKFQGKTWDWEVSNENGFYDYLMYADIDYDHPDVVAEIKRWGTWYANELQLDGFRLDAVKHIKFSFLRDWVNHVREKTGKEMFTVAEYWSNDLGALENYLNKTNFNHSVFDVPLHYQFHAASTQGGGYDMRKLLNGTVVSKHPLKSVTFVDNHDTQPGQSLESTVQTWFKPLAYAFILTRESGYPQVFYGDMYGTKGDSQREIPALKHKIEPILKARKQYAYGAQHDYFDHHDIVGWTREGDSSVANSGLAALITDGPGGAKRMYVGRQNAGETWHDITGNRSEPVVINSEGWGEFHVNGGSVSIYVQR

SEQ ID NO: 42855 - protein, 480 aa, unidentified
NGTLMQYFEWYTPNDGQHWKRLQNDAEHLSDIGITAVWIPPAYKGTSQADVGYGAYDLYDLGEFHQKGTVRTKYGTKGELQSAIKSLHSRDINVYGDVVINHKGGADATEDVTAVEVDPADRNRVISGEHLIKAWTHFHFPGRGSTYSDFKWYWYHFDGTDWDESRKLNRIYKFQGKTWDWEVSNEFGNYDYLMYADFDYDHPDVVAEIKRWGTWYANELQLDGFRLDAVKHIKFSFLRDWVNHVREKTGKEMFTVAEYWSNDLGALENYLNKTNFNHSVFDVPLHYQFHAASTQGGGYDMRKLLNGTVVSKHPLKSVTFVDNHDTQPGQSLESTVQTWFKPLAYAFILTRESGYPQVFYGDMYGTKGDSQREIPALKHKIEPILKARKQYAYGAQHDYFDHHDIVGWTREGDSSVANSGLAALITDGPGGAKRMYVGRQNAGETWHDITGNRSEPVVINSEGWGEFHVNGGSVSIYVQR

SEQ ID NO: 42856 - protein, 480 aa, Bacillus amyloliquefaciens
NGTLMQYFEWYTPNDGQHWKRLQNDAEHLSDIGITAVWIPPAYKGTSQADVGYGAYDLYDLGEFHQKGTVRTKYGTKGELQSAIKSLHSRDINVYGDVVINHKGGADATEDVTAVEVDPADRNRVISGEHLIKAWTHFHFPGRGSTYSDFKWHWYHFDGTDWDESRKLNRIYRFQGKAWDWEVSNENGNYDYLMYADFDYDNPDVAAEIKRWGTWYANELQLDGFRLDAVKHIKFSFLRDWVNHVREKTGKEMFTVAEYWQNDLGALENYLNKTNFNHSVFDVPLHYQFHAASTQGGGYDMRKLLNGTVVSKHPLKSVTFVDNHDTQPGQSLESTVQTWFKPLAYAFILTRESGYPQVFYGDMYGTKGDSQREIPALKHKIEPILKARKQYAYGAQHDYFDHHDIVGWTREGDTSVQNSGLAALITDGPGGAKRMYVGRQNAGETWHDITGNRSEPVVINSEGWGEFHVNGGSVSIYVQR

SEQ ID NO: 42857 - protein, 477 aa, Bacillus sp.
NETMMQYFEWDLPNDGTLWTKVKNEAANLSSLGITALWLPPAYKGTSQSDVGYGVYDLYDLGEFNQKGTIRTKYGTKTQLERAIRSLKANGIQVYADVVFNHKAGADQTEFVDAVEVDPSNRNQEVSGTYQIEAWTKFDFPGRGNTYSSFKWRWYHFDGTDWDESRKLNRIYKFRGKAWDWEVDTENGNYDYLMFADLDMDHPEVVTELKNWGTWYVNTTNIDGFRLDAVKHIKFSFMRDWLTYVRNQTGKNLFAVGEFWSYDVNKLHNYITKTNGSMSLFDAPLHNNFYTASKSSGYFDMRNLLNGTLVQRHPSLAVTLVDNHDTQPGQSLQSWVEPWFKPLAYAFILTRQEGYPCVFYGDYYGIPKYNIPGLKSKIDPLLIARRDYAYGTQRDYIDHQDIIGWTREGIDTKPNSGLAALITDGPGGSKWMYVGKKHAGKVFYDLTGNRSDTVTINADGWGEFKVNGGSVSIWVAK

SEQ ID NO: 42858 - protein, 477 aa, Bacillus sp.
NETMMQYFEWDLPNDGTLWNRLHNNAQNLKNAGITALWLPPAYKGTSQSDVGYGVYDLYDLGEFNQKGTIRTKYGTKTQYIQAIQAAKAAGMQVYADVVFNHKAGADGTEFVDAVEVDPSNRNQEVSGTYQIEAWTKFDFPGRGNTYSSFKWRWYHFDGTDWDESRKLNRIYKFRGKAWDWEVDTENGNYDYLMFADLDMDHPEVVTELKNWGTWYVNTTNIDGFRLDAVKHIKFSFMRDWLTYVRNQTGKNLFAVGEFWSYDVNKLHNYITKTNGSMSLFDAPLHNNFYTASKSSGYFDMRYLLNNTLMKDQPSLAVTLVDNHDTQPGEALESFVQGWFKPLAYAFILTRQEGYPCVFYGDYYGIPKYNIPGLKSKIDPLLIARRDYAYGTQRDYIDHQDIIGWTREGIDTKPNSGLAALITDGPGGSKWMYVGKKHAGKVFYDLTGNRSDTVTINADGWGEFKVNGGSVSIWVAK

SEQ ID NO: 42859 - protein, 477 aa, Bacillus sp.
NETMMQYFEWDLPNDGTLWNRLHNNAQNLKNAGITALWLPPAYKGTSQSDVGYGVYDLYDLGEFNQKGTIRTKYGTKTQLERAIRSLKANGIQVYADVVFNHKAGADGTEFVDAVEVDPSNRNQEVSGTYQIEAWTKFDFPGRGNTYSSFKWRWYHFDGTDWDESRKLNRIYKFRGKAWDWEVDTENGNYDYLMFADLDMDHPEVVTELKNWGTWYVNTTNIDGFRLDAVKHIKFSFMRDWLTYVRNQTGKNLFAVGEFWSYDVNKLHNYITKTNGSMSLFDAPLHNNFYTASKSSGYFDMRYLLNNTLMKDQPSLAVTLVDNHDTQPGQSLQSWVEPWFKPLAYAFILTRQEGYPCVFYGDYYGIPKYNIPGLKSKIDPLLIARRDYAYGTQRDYIDHQDIIGWTREGIDTKPNSGLAALITDGPGGSKWMYVGKKHAGKVFYDLTGNRSDTVTINADGWGEFKVNGGSVSIWVAK

SEQ ID NO: 42860 - protein, 477 aa, Bacillus sp.
NETMMQYFEWDLPNDGTLWNRLHNNAQNLKNAGITALWLPPAYKGTSQSDVGYGVYDLYDLGEFNQKGTIRTKYGTKTQYIQAIQAAKAAGMQVYADVVFNHKAGADQTEFVDAVEVDPSNRNQEVSGTYQIEAWTKFDFPGRGNTYSSFKWRWYHFDGTDWDESRKLNRIYKFRGKAWDWEVDTENGNYDYLMFADLDMDHPEVVTELKNWGTWYVNTTNIDGFRLDAVKHIKYSFFPDWLTYVRNQTGKNLFAVGEFWSYDVNKLHNYITKTNGSMSLFDAPLHNNFYTASKSSGYFDMRYLLNNTLMKDQPSLAVTLVDNHDTQPGEALESFVQGWFKPLAYAFILTRQEGYPCVFYGDYYGIPKYNIPGLKSKIDPLLIARRDYAYGTQRDYIDHQDIIGWTREGIDTKPNSGLAALITDGPGGSKWMYVGKKHAGKVFYDLTGNRSDTVTINADGWGEFKVNGGSVSIWVAK

SEQ ID NO: 42861 - protein, 480 aa, Bacillus licheniformis
NGTLMQYFEWYMPNDGQHWRRLQNDSAYLAEHGITAVWIPPAYKGTSQADVGYGAYDLYDLGEFHQKGTVRTKYGTKGELQSAIKSLHSRDINVYGDVVINHKGGADATEDVTAVEVDPADRNRVISGEYLIRAWTHFHFPGRGSTYSDFKWHWYHFDGTDWDESRKLNRIYLFQGKAWDWEVSNENGNYDYLMYADYDYDYPDVAAEITRWGTWYANELQLDGFRLDAVKHIKFSFLRDWVNHVREKTGKPMFTVAEYWQNDLGALENYLNKTNFNHSVFDVPLHYQFHAASTQGGGYDMRKLLNGTVVSKHPLKSVTFVDNHDTQPGQSLESTVQTWFKPLAYAFILTRESGYPSVFYGDMYGTKGDSQREIPALKHKIEPILKARKQYAYGAQHDYFDHHDIVGWTREGVSSVANSGLAALITDGPGGAKWMYVGRQNAGETWHDITGNRSEPVVINSEGWGEFHVNGGSVSIYVQR

SEQ ID NO: 42862 - protein, 480 aa, Bacillus licheniformis
NGTLMQYFEWYNPNDGQHWKRLQNDSAYLAEHGITAVWIPPAYKGTSQADVGYGAYDLYDLGEFHQKGTVRTKYGTKGELQSAIKSLHSRDINVYGDVVINHKGGADATEDVTAVEVDPADRNRVISGEHLIKAWTHFHFPGRGSTYSDFKWHWYHFDGTDWDESRKLNRIYKFQGKAWDWEVSNENGNYDYLMYADIDYDHPDVAAEIKRWGTWYANELQLDGFRLDAVKHIKFSFLRDWVNHVREKTGKEMFTVAEYWQNDLGALENYLNKTNFNHSVFDVPLHYQFHAASTQGGGYDMRKLLNGTVVSKHPLKSVTFVDNHDTQPGQSLESTVQTWFKPLAYAFILTRESGYPQVFYGDMYGTKGDSQREIPALKHKIEPILKARKQYAYGAQHDYFDHHDIVGWTREGDSSVANSGLAALITDGPGGAKRMYVGRQNAGETWHDITGNRSEPVVINSEGWGEFHVNGGSVSIYVQR

SEQ ID NO: 42863 - protein, 480 aa, Bacillus licheniformis
NGTLMQYFEWYMPNDGQHWRRLQNDSAYLAEHGITAVWIPPAYKGTSQADVGYGAYDLYDLGEFHQKGTVRTKYGTKGELQSAIKSLHSRDINVYGDVVINHKGGADATEDVYAVEVDPADRNRVISGEHLIKAWTHFHFPGRGSTYSDFKWHWYHFDGTDWDESRKLNRIYKFQGKAWDWEVSNENGNYDYLMYADIDYDHPDVAAEIKRWGTWYANELQLDGFRLDAVKHIKFSFLRDWVNHVREKTGKEMFTVAEYWQNDLGALENYLNKTNFNHSVFDVPLHYQFHAASTQGGGYDMRKLLNGTVVSKHPLKSVTFVDNHDTQPGQSLESTVQTWFKPLAYAFILTRESGYPQVFYGDMYGTKGDSQREIPALKHKIEPILKARKQYAYGAQHDYFDHHDIVGWTREGDSSVANSGLAALITDGPGGAKRMYVGRQNAGETWHDITGNRSEPVVINSEGWGEFHVNGGSVSIYVQR

SEQ ID NO: 42864 - protein, 480 aa, Bacillus licheniformis
NGTLMQYFEWYMPNDGQHWRRLQNDSAYLAEHGITAVWIPPAYKGTSQADVGYGAYDLYDLGEFHQKGTVRTKYGTKGELQSAIKSLHSRDINVYGDVVINHKGGADATEDVTAVEVDPADRNRVISGEHRIKAWTHFHFPGRGSTYSDFKWHWYHFDGTDWDESRKLNRIYKFQGKAWDWEVSNENGNYDYLMYADIDYDHPDVAAEIKRWGTWYANELQLDGFRLDAVKHIKFSFLRDWVNHVREKTGKEMFTVAEYWQNDLGALENYLNKTNFNHSVFDVPLHYQFHAASTQGGGYDMRKLLNSTVVSKHPLKAVTFVDNHDTQPGQSLESTVQTWFKPLAYAFILTRESGYPQVFYGDMYGTKGDSQREIPALKHKIEPILKARKQYAYGAQHDYFDHHDIVGWTREGDSSVANSGLAALITDGPGGAKRMYVGRQNAGETWHDITGNRSEPVVINSEGWGEFHVNGGSVSIYVQR

SEQ ID NO: 42865 - protein, 480 aa, Bacillus cereus
NGTLMQYFEWYMPNDGQHWKRLQNDSAYLAEHGITAVWIPPAYKGTSQADVGYGAYDLYDLGEFHQKGTVRTKYGTKGELQSAIKSLHSRDINVYGDVVINHKGGADATEDVTAVEVDPADRNRVISGEHQIKAWTHFHFPGRGSTYSDFKWHWYHFDGTDWDESRKLNRIYKFQGKAWDWEVSNENGNYDYLMYADIDYDHPDVAAEIKRWGTWYANELQLDGFRLDAVKHIKFSFLRDWVNHVREKTGKEMFTVAEYWQNDLGALETYLNKTNFNHSVFDVPLHYQFHAASTQGGGYDMRKLLNGTVVSKHPLKAVTFVDNHDTQPGQSLESTVQTWFKPLAYAFILTRESGYPQVFYGDMYGTKGDSQREIPALKHKIEPILKARKQYAYGAQHDYFDHHDIVGWTREGDSSVANSGLAALITDGPGGAKRMYVGRQNAGETWHDITGNRSEPVVINSEGWGEFHVNGGSVSIYVQR

SEQ ID NO: 42866 - protein, 480 aa, Bacillus licheniformis
NGTLMQYFEWYMPNDGQHWKRLQNDSAYLAEHGITAVWIPPAYKGTSQADVGYGAYDLYDLGEFHQKGTVRTKYGTKGELQSAIKSLHSRDINVYGDVVINHKGGADATEDVRAVEVDPADRNRVISGEHLIKAWTHFHFPGRGSTYSDFKWHWYHFDGTDWDESRKLNRIYKFQGKAWDWEVSNENGNYDYLMYADIDYDHPDVAAEIKRWGTWYANELQLDGFRLDAVKHIKFSFLRDWVNHVREKTGKEMFTVAEYWQNDLGALENYLNKTNFNHSVFDVPLHYQFHAASTQGGGYDMRKLLNGTVVSKHPLKSVTFVDNHDTQPGQSLESTVQTWFKPLAYAFILTRESGYPQVFYGDMYGTKGDSQREIPALKHKIEPILKARKQYAYGAQHDYFDHHDIVGWTREGDSSVANSGLAALITDGPGGAKRMYVGRQNAGETWHDITGNRSEPVVINSEGWGEFHVNGGSVSIYVQR

SEQ ID NO: 42867 - protein, 480 aa, Bacillus licheniformis
NGTLMQYFEWYKPNDGQHWKRLQNDSAYLAEHGITAVWIPPAYKGTSQADVGYGAYDLYDLGEFHQKGTVRTKYGTKGELQSAIKSLHSRDINVYGDVVINHKGGADATEDVTAVEVDPADRNRVISGEHLIKAWTHFHFPGRGSTYSDFKWHWYHFDGTDWDESRKLNRIYKFQGKAWDWEVSNENGNYDYLMYADIDYDHPDVAAEIKRWGTWYANELQLDGFRLDAVKHIKFSFLRDWVNHVREKTGKEMFTVAEYWQNDLGALENYLNKTNFNHSVFDVPLHYQFHAASTQGGGYDMRKLLNGTVVSKHPLKSVTFVDNHDTQPGQSLESTVQTWFKPLAYAFILTRESGYPQVFYGDMYGTKGDSQREIPALKHKIEPILKARKQYAYGAQHDYFDHHDIVGWTREGDSSVANSGLAALITDGPGGAKRMYVGRQNAGETWHDITGNRSEPVVINSEGWGEFHVNGGSVSIYVQR

SEQ ID NO: 42868 - protein, 480 aa, Bacillus licheniformis
NGTLMQYFEWYMPNDGQHWKRLQNDSAYLAEHGITAVWIPPAYKGTSQADVGYGAYDLYDLGEFHQKGTVRTKYGTKGELQSAIKSLHSRDINVYGDVVINHKGGADATEDVTAVEVDPADRNRVISGEHLIKAWTHFHFPGRGSTYSDFKWHWYHFDGTDWDESRKLNRIYKFQGKAWDWEVSNENGNYDYLMYADIDYDHPDVAAEIKRWGTWYANELQLDGFRLDAVKHIKFSFLRDWVNHVREKTGKEMFTVAEYWQNDLGALENYLNKTNFNHSVFDVPLHYQFHAASKQGGGYDMRKLLNGTVVSKHPLKSVTFVDNHDTQPGQSLESTVQTWFKPLAYAFILTRESGYPQVFYGDMYGTKGDSQREIPALKHKIEPILKARKQYAYGAQHDYFDHHDIVGWTREGDSSVANSGLAALITDGPGGAKRMYVGRQNAGETWHDITGNRSEPVVINSEGWGEFHVNGGSVSIYVQR

SEQ ID NO: 42869 - protein, 482 aa, Bacillus sonorensis L12
NGTLMQYFEWNLPNDGQHWKRLQNDAGYLSDIGITAVWIPPAYKGTSQADVGYGPYDLYDLGEFLQKGTVRTKYGMKTELQSAVGSLHSQNIQVYGDVVLNHKAGADLTEDVTAVEVNPGNRNQEISGEYRIKAWTGFNFPGRGSTYSDFKWHWYHFDGTDWDESRKLNRIYKFRGDGKAWDWEVSSENGNYDYLMYADVDYDHPDVVAEMKRWGTWYAKELQLDGFRLDAVKHIKFSFLSDWLKAVRQSTGKEMFTVAEYWQNNLGEIENYLQKTDFQHSVFDVPLHFNLQAASSHGGSYDMRNLLNGTVVSKHPLKAVTFVDNHDTQPGQSLESTVQTWFKPLAYAFILTREAGYPQVFYGDMYGTKGPTSREIPSLKSKLEPILKARKYFAYGTQHDYFDHPDAIGWTREGDQSVAASGLAALITDGPGGSKRMYVGRQHAGETWHDITGNRSDSVVINSDGWGEFYVNGGSVSIYVQR

SEQ ID NO: 42870 - protein, 480 aa, Bacillus licheniformis
NGTLMQYFEWYMPNDGQHWRRLQNDSAYLAEHGITAVWIPPAYKGTSQADVGYGAYDLYDLGEFHQKGTVRTKYGTKGELQSAIKSLHSRDINVYGDVVINHKGGADATEDVTAVEVDPADRNRVISGEHLIKAWTHFHFPGRGSTYSDFKWHWYHFDGTDWDESRKLNRIYKFQGKAWDWEVSNENGNYDYLMYADIDYDHPDVAAEIKRWGTWYANELQLDGFRLDAVKHIKFSFLRDWVNHVREKTGKEMFTVAEYWQNDLGALENYLNKTNFNHSVFDVPLHYQFQAASTQGGGYDMRKLLNGTVVSKHPLKSVTFVDNHDTQPGQSLESTVQTWFKPLAYAFILTRESGYPQVFYGDMYGTKGDSQREIPALKHKIEPILKARKQYAYGAQHDYFDHHDIVGWTREGDSSVANSGLAALITDGPGGAKRMYVGRQNAGETWHDITGNRSEPVVINSEGWGEFHVNGGSVSIYVQR

SEQ ID NO: 42871 - protein, 480 aa, Bacillus sp. SCSIO 15121
NGTLMQYFEWYMPNDGQHWKRLQNDSAYLAEHGITAVWIPPAYKGTSQDDVGYGAYDLYDLGEFHQKGTVRTKYGTKGELQSAINSLHSRDINVYGDVVINHKGGADATEDVTAVEVDPADRNRVTSGEQRIKAWTHFQFPGRGSTYSDFKWHWYHFDGTDWDESRKLNRIYKFQGKAWDWEVSNENGNYDYLMYADIDYDHPDVTAEIKRWGTWYANELQLDGFRLDAVKHIKFSFLRDWVNHVREKTGKEMFTVAEYWQNDLGALENYLNKTNFNHSVFDVPLHYQFHAASTQGGGYDMRKLLNGTVVSKHPVKAVTFVDNHDTQPGQSLESTVQTWFKPLAYAFILTREAGYPQIFYGDMYGTKGASQREIPALKHKIEPILKARKQYAYGAQHDYFDHHNIVGWTREGDSSVANSGLAALITDGPSGTKRMYVGRQNAGETWHDITGNRSDSVVINAEGWGEFHVNGGSVSIYVQR

SEQ ID NO: 42872 - protein, 482 aa, Bacillus thuringiensis
NGTLMQYFEWYAPSDGNHWNRLRTDAENLAQKGITSVWIPPAYKGTTQNDVGYGAYDLYDLGEFNQKGTVRTKYGTKAQLKSAIEALHKQNIDVYGDVVMNHKGGADYTETVTAVEVDRNNRNVEVSGDYEISAWTGFNFPGRGDNYSNFKWKWYHFDGTDWDEGRKLNRIYKFRGIGKAWDWEVSSENGNYDYLMYADLDFDHPDVANEMKNWGTWYANELNLDGFRLDAVKHIDHEYLRDWVNHVRQQTRKEMFTVAEYWQNDIHTLNNYLAKVNYNQSVFDAPLHYNFHYASKGNGNYDMRNILNGTVMQNHPALAVTLVENHDSQPGQSLESVVSAWFKPLAYGFILTRAEGYPSVFYGDYYGTSGNSSYEIPALKDKIDPILTARKNFAYGTQRDYLDHPDVIGWTREGDSVHANSGLATLISDGPGGSKWMDVGKNNAGEVWHDMTGNQTNTVTINKDGWGQFHVSGGSVSIYVQQ

SEQ ID NO: 42873 - protein, 480 aa, Bacillus licheniformis
NGTLMQYFEWYMPNDGQHWKRLQNDSAYLAEHGITAVWIPPAYKGTSQADVGYGAYDLYDLGEFHQKGTVRTKYGTKGELQSAIKSLHSRDINVYGDVVINHKGGADATEDVTAVEVDPADRNRVISGEHRIKAWTHFHFPGRGSTYSDFKWHWYHFDGTDWDESRKLNRIYKFQGKAWDWEVSNENGNYDYLMYADIDYDHPDVAAEIKRWGTWYANELQLDGFRLDAVKHIKFSFLRDWVNHVREKTGKEMFTVAEYWQNDLGALENYLNKTNFNHSVFDVPLHYQFHAASTQGGGYDMRKLLNSTVVSKHPLKAVTFVDNHDTQPGQSLESTVQTWFKPLAYAFILTRESGYPQVFYGDMYGTKGDSQREIPALKHKIEPILKARKQYAYGAQHDYFDHHDIVGWTREGDSSVANSGLAALITDGPGGAKRMYVGRQNAGETWHDITGNRSEPVVINSEGWGEFHVNGGSVSIYVQR

SEQ ID NO: 42874 - protein, 480 aa, Bacillus licheniformis
NGTLMQYFEWYXPNDGQHWKRLQNDSAYLAEHGITAVWIPPAYKGTSQADVGYGAYDLYDLGEFHQKGTVRTKYGTKGELQSAIKSLHSRDINVYGDVVINHKGGADATEDVTAVEVDPADRNRVISGEHLIKAWTHFHFPGRGSTYSDFKWHWYHFDGTDWDESRKLNRIYKFQGKAWDWEVSNENGNYDYLMYADIDYDHPDVAAEIKRWGTWYANELQLDGFRLDAVKHIKFSFLRDWVNHVREKTGKEMFTVAEYWQNDLGALENYLNKTNFNHSVFDVPLHYQFHAASTQGGGYDMRKLLNGTVVSKHPLKSVTFVDNHDTQPGQSLESTVQTWFKPLAYAFILTRESGYPQVFYGDMYGTKGDSQREIPALKHKIEPILKARKQYAYGAQHDYFDHHDIVGWTREGDSSVANSGLAALITDGPGGAKRMYVGRQNAGETWHDITGNRSEPVVINSEGWGEFHVNGGSVSIYVQR

SEQ ID NO: 42875 - protein, 480 aa, Bacillus licheniformis
NGTLMQYFEWYFPNDGQHWKRLQNDSAYLAEHGITAVWIPPAYKGTSQADVGYGAYDLYDLGEFHQKGTVRTKYGTKGELQSAIKSLHSRDINVYGDVVINHKGGADATEDVTAVEVDPADRNRVISGEHLIKAWTHFHFPGRGSTYSDFKWHWYHFDGTDWDESRKLNRIYKFQGKAWDWEVSNENGNYDYLMYADIDYDHPDVAAEIKRWGTWYANELQLDGFRLDAVKHIKFSFLRDWVNHVREKTGKEMFTVAEYWQNDLGALENYLNKTNFNHSVFDVPLHYQFHAASTQGGGYDMRKLLNGTVVSKHPLKSVTFVDNHDTQPGQSLESTVQTWFKPLAYAFILTRESGYPQVFYGDMYGTKGDSQREIPALKHKIEPILKARKQYAYGAQHDYFDHHDIVGWTREGDSSVANSGLAALITDGPGGAKRMYVGRQNAGETWHDITGNRSEPVVINSEGWGEFHVNGGSVSIYVQR

SEQ ID NO: 42876 - protein, 480 aa, Bacillus licheniformis
NGTLMQYFEWYTPNDGQHWKRLQNDAEHLSDIGITAVWIPPAYKGTSQADVGYGAYDLYDLGEFHQKGTVRTKYGTKGELQSAIKSLHSRDINVYGDVVINHKGGADATEDVTAVEVDPADRNRVISGEHLIKAWTHFHFPGRGSTYSDFKWHWYHFDGTDWDESRKLNRIYKFQGKAWDWEVSNENGNYDYLTYADIDYDHPDVAAEIKRWGTWYANELQLDGFRLDAVKHIKFSFLRDWVNHVREKTGKEMFTVAEYWQNDLGALENYLNKTNFNHSVFDVPLHYQFHAASTQGGGYDMRKLLNGTVVSKHPLKSVTFVDNHDTQPGQSLESTVQTWFKPLAYAFILTRESGYPQVFYGDMYGTKGDSQREIPALKHKIEPILKARKQYAYGAQHDYFDHHDIVGWTREGDSSVANSGLAALITDGPGGAKRMYVGRQNAGETWHDITGNRSEPVVINSEGWGEFHVNGGSVSIYVQR

SEQ ID NO: 42877 - protein, 480 aa, Bacillus licheniformis
NGTLMQYFEWYIPNDGQHWKRLQNDSAYLAEHGITAVWIPPAYKGTSQADVGYGAYDLYDLGEFHQKGTVRTKYGTKGELQSAIKSLHSRDINVYGDVVINHKGGADATEDVTAVEVDPADRNRVISGEHLIKAWTHFHFPGRGSTYSDFKWHWYHFDGTDWDESRKLNRIYKFQGKAWDWEVSNENGNYDYLMYADIDYDHPDVAAEIKRWGTWYANELQLDGFRLDAVKHIKFSFLRDWVNHVREKTGKEMFTVAEYWQNDLGALENYLNKTNFNHSVFDVPLHYQFHAASTQGGGYDMRKLLNGTVVSKHPLKSVTFVDNHDTQPGQSLESTVQTWFKPLAYAFILTRESGYPQVFYGDMYGTKGDSQREIPALKHKIEPILKARKQYAYGAQHDYFDHHDIVGWTREGDSSVANSGLAALITDGPGGAKRMYVGRQNAGETWHDITGNRSEPVVINSEGWGEFHVNGGSVSIYVQR

SEQ ID NO: 42878 - protein, 480 aa, Bacillus licheniformis
NGTLMQYFEWYVPNDGQHWKRLQNDSAYLAEHGITAVWIPPAYKGTSQADVGYGAYDLYDLGEFHQKGTVRTKYGTKGELQSAIKSLHSRDINVYGDVVINHKGGADATEDVTAVEVDPADRNRVISGEHLIKAWTHFHFPGRGSTYSDFKWHWYHFDGTDWDESRKLNRIYKFQGKAWDWEVSNENGNYDYLMYADIDYDHPDVAAEIKRWGTWYANELQLDGFRLDAVKHIKFSFLRDWVNHVREKTGKEMFTVAEYWQNDLGALENYLNKTNFNHSVFDVPLHYQFHAASTQGGGYDMRKLLNGTVVSKHPLKSVTFVDNHDTQPGQSLESTVQTWFKPLAYAFILTRESGYPQVFYGDMYGTKGDSQREIPALKHKIEPILKARKQYAYGAQHDYFDHHDIVGWTREGDSSVANSGLAALITDGPGGAKRMYVGRQNAGETWHDITGNRSEPVVINSEGWGEFHVNGGSVSIYVQR

SEQ ID NO: 42879 - protein, 480 aa, Synthetic construct
NGTLMQYFEWYMPNDGQHWKRLQNDSAYLAEHGITAVWIPPAYKGTSQADVGYGAYDLYDLGEFHQKGTVRTKYGTKGELQSAIKSLHSRDINVYGDVVINHKGGADATEDVTAVEVDPADRNRVISGEYLIKAWTHFHFPGRGSIYSDFKWHWYHFDGTDWDESRKLNRIYKFQGKAWDWEVSDENGNYDYLMYADIDYDHPDVAAEIKRWGTWYANELQLDGFRLDAVKHIKFSFLRDWVNHVREKTGKEMFTVAEYWQNDLGALENYLNKTNFNHSVFDVPLHYQFHAASTQGGGYDMRKLLNGTVVSKHPLKSVTFVDNHDTQPGQSLESTVQTWFKPLAYAFILTRESGYPQVFYGDMYGTKGDSQREIPALKHKIEPILKARKQYAYGAQHDYFDHHDIVGWTREGDSSVANSGLAALITDGPGGAKRMYVGRQNAGETWHDITGNRSEPVVINSEGWGEFHVNGGSVSIYVQR

SEQ ID NO: 42880 - protein, 480 aa, Bacillus licheniformis
NGTLMQYFEWYHPNDGQHWKRLQNDSAYLAEHGITAVWIPPAYKGTSQADVGYGAYDLYDLGEFHQKGTVRTKYGTKGELQSAIKSLHSRDINVYGDVVINHKGGADATEDVTAVEVDPADRNRVISGEHLIKAWTHFHFPGRGSTYSDFKWHWYHFDGTDWDESRKLNRIYKFQGKAWDWEVSNENGNYDYLMYADIDYDHPDVAAEIKRWGTWYANELQLDGFRLDAVKHIKFSFLRDWVNHVREKTGKEMFTVAEYWQNDLGALENYLNKTNFNHSVFDVPLHYQFHAASTQGGGYDMRKLLNGTVVSKHPLKSVTFVDNHDTQPGQSLESTVQTWFKPLAYAFILTRESGYPQVFYGDMYGTKGDSQREIPALKHKIEPILKARKQYAYGAQHDYFDHHDIVGWTREGDSSVANSGLAALITDGPGGAKRMYVGRQNAGETWHDITGNRSEPVVINSEGWGEFHVNGGSVSIYVQR

SEQ ID NO: 42881 - protein, 480 aa, Bacillus licheniformis
NGTLMQYFEWYYPNDGQHWKRLQNDSAYLAEHGITAVWIPPAYKGTSQADVGYGAYDLYDLGEFHQKGTVRTKYGTKGELQSAIKSLHSRDINVYGDVVINHKGGADATEDVTAVEVDPADRNRVISGEHLIKAWTHFHFPGRGSTYSDFKWHWYHFDGTDWDESRKLNRIYKFQGKAWDWEVSNENGNYDYLMYADIDYDHPDVAAEIKRWGTWYANELQLDGFRLDAVKHIKFSFLRDWVNHVREKTGKEMFTVAEYWQNDLGALENYLNKTNFNHSVFDVPLHYQFHAASTQGGGYDMRKLLNGTVVSKHPLKSVTFVDNHDTQPGQSLESTVQTWFKPLAYAFILTRESGYPQVFYGDMYGTKGDSQREIPALKHKIEPILKARKQYAYGAQHDYFDHHDIVGWTREGDSSVANSGLAALITDGPGGAKRMYVGRQNAGETWHDITGNRSEPVVINSEGWGEFHVNGGSVSIYVQR

SEQ ID NO: 42882 - protein, 480 aa, Bacillus licheniformis
NGTLMQYFEWYMPNDGQHWKRLQNDSAYLAEHGITAVWIPPAYKGTSQADVGYGAYDLYDLGEFHQKGTVRTKYGTKGELQSAIKSLHSRDINVYGDVVINHKGGADATEDVTAVEVDPADRNRVISGEYLIKAWTHFHFPGRGSTYSDFKWHWYHFDGTDWDESRKLNRIYKFQGKAWDWEVSNENGNYDYLMYADIDYDHPDVAAEIKRWGTWYANELQLDGFRLDAVKHIKFSFLRDWVNHVREKTGKEMFTVAEYWQNDLGALENYLNKTNFNHSLFDVPLHYQFHAASTQGGGYDMRKLLNGTVVSKHPLKSVTFVDNHDTQPGQSLESTVQTWFKPLAYAFILTRESGYPQVFYGDMYGTKGDSQREIPALKHKIEPILKARKQYAYGAQHDYFDHHDIVGWTREGDSSVANSGLAALITDGPGGAKRMYVGRQNAGETWHDITGNRSEPVVINSEGWGEFHVNGGSVSIYVQR

SEQ ID NO: 42883 - protein, 480 aa, Bacillus licheniformis
NGTLMQYFEWYMPNDGQHWKRLQNDSAYLAEHGITAVWIPPAYKGTSQADVGYGAYDLYDLGEFHQKGTVRTKYGTKGELQSAIKSLHSRDINVYGDVVINHKGGADATEDVTAVEVDPADRNRVISGEHLIKAWTHFHFPGRGSTYSDFKWHWYHFDGTDWDESRKLNRIYKFQGKAWDWEVSNENGNYDYLMYADIDYDHPDVAAEIKRWGTWYANELQLDGFRLDAVKHIKFSFLRDWVNHVREKTGKEMFTVAEYWQNDLGALENYLNKTNFNHSVFDVPLHYQFHAASTQGGGYDMRKLLNGTVVSKHPLKSVTFVDNHDTQPGQSLESTVQTWFKPLAYAFILTRESGYPQVFYGDMYGTKGDSQREIPALKHKIEPILKARKQYAYGAQHDYFDHHDIVGWTREGDSSVANSGLAALITDGPGGAKRMYVGRQNAGETWHDITGNRSEPVVINSEGWGEFHVNGGSVSIYVQR

SEQ ID NO: 42884 - protein, 480 aa, Bacillus licheniformis
NGTLMQYFEWYMPNDGQHWRRLQNDSAYLAEHGITAVWIPPAYKGTSQADVGYGAYDLYDLGEFHQKGTVRTKYGTKGELQSAIKSLHSRDINVYGDVVINHKGGADATEDVTAVEVDPADRNRVISGEHLIKAWTHFHFPGRGSTYSDFKWHWYHFDGTDWDESRKLNRIYKFQGKAWDWEVSNENGNYDYLMYADIDYDHPDVAAEIKRWGTWYANELQLDGFRLDAVKHIKFSFLRDWVNHVREKTGKEMFTVAEYWQNDLGALENYLNKTNFNHSVFDVPLHYQFHAASTQGGGYDMRKLLNGTVVSKHPLKSVTFVDNHDTQPGQSLESTVQTWFKPLAYAFILTRESGYPQVFYGDMYGTKGDSQREIPALKHKIEPILKARKQYAYGAQHDYFDHHDIVGWTREGDSSVANSGLAALITDGPGGAKRMYVGRQNAGETWHDITGNRSEPVVINSEGWGEFHVNGGSVSIYVQR

SEQ ID NO: 42885 - protein, 480 aa, Bacillus licheniformis
NGTLMQYFEWYMPNDGQHWKRLQNDSAYLAEHGITAVWIPPAYKGTSQADVGYGAYDLYDLGEFHQKGTVRTKYGTKGELQSAIKSLHSRDINVYGDVVINHKGGADATEDVTAVEVDPADRNRVISGEXLIKAWTHFHFPGRGSTYSDFKWHWYHFDGTDWDESRKLNRIYKFQGKAWDWEVSNENGNYDYLMYADIDYDHPDVAAESKRWGSWYANELQLDGFRLDAVKHIKFSFLRDWVNHVREKTGKEMFTVAEYWQNDLGALENYLNKTNFNHSVFDVPLHYQFHAASTQGGGYDMRKLLNGTVVSKHPLKSVTFVDNHDIQPGQSLESTVQTWFKPLAYAFILTRESGYPQVFYGDMYGTKGDSQREIPALKHKIEPILKARKQYAYGAQHDYFDHHDIVGWTREGDSSVANSGLAALITDGPGGAKRMYVGRQNAGETWHDITGNRSDPVVINSEGWGEFHVNGGSVSIYVQR

SEQ ID NO: 42886 - protein, 480 aa, Bacillus licheniformis
NGTLMQYFEWYMPNDGQHWRRLQNDSAYLAEHGITAVWIPPAYKGTSQADVGYGAYDLYDLGEFHQKGTVRTKYGTKGELQSAIKSLHSRDINVYGDVVINHKGGADATEDVTAVEVDPADRNRVISGEHLIKAWTHFHFPGRGSTYSDFKWHWYHFDGTDWDESRKLNRIYKFQGKAWDWEVSNENGNYDYLMYADIDYDHPDVAAEIKRWGTWYANELQLDGFRLDAVKHIKFSFLRDWVNHVREKTGKEMFTVAEYWQNDLGALENYLNKTNFNHSVFDVPLHYQFHAASTQGGGYDMRKLLNGTVVSKHPLKSVTFVDNHDTQPGQSLESTVQTWFKPLAYAFILTRESGYPQVFYGDMYGTKGDSQRKIPALKHKIEPILKARKQYAYGAQHDYFDHHDIVGWTREGDSSVANSGLAALITDGPGGAKRMYVGRQNAGETWHDITGNRSEPVVINSEGWGEFHVNGGSVSIYVQR

SEQ ID NO: 42887 - protein, 480 aa, Bacillus licheniformis
NGTLMQYFEWYMPNDGQHWRRLQNDSAYLAEHGITAVWIPPAYKGTSQADVGYGAYDLYDLGEFHQKGTVRTKYGTKGELQSAIKSLHSRDINVYGDVVINHKGGADATEDVQAVEVDPADRNRVISGEHLIKAWTHFHFPGRGSTYSDFKWHWYHFDGTDWDESRKLNRIYKFQGKAWDWEVSNENGNYDYLMYADIDYDHPDVAAEIKRWGTWYANELQLDGFRLDAVKHIKFSFLRDWVNHVREKTGKEMFTVAEYWQNDLGALENYLNKTNFNHSVFDVPLHYQFHAASTQGGGYDMRKLLNGTVVSKHPLKSVTFVDNHDTQPGQSLESTVQTWFKPLAYAFILTRESGYPQVFYGDMYGTKGDSQREIPALKHKIEPILKARKQYAYGAQHDYFDHHDIVGWTREGDSSVANSGLAALITDGPGGAKRMYVGRQNAGETWHDITGNRSEPVVINSEGWGEFHVNGGSVSIYVQR

SEQ ID NO: 42888 - protein, 480 aa, Bacillus licheniformis
NGTLMQYFEWYDPNDGQHWKRLQNDSAYLAEHGITAVWIPPAYKGTSQADVGYGAYDLYDLGEFHQKGTVRTKYGTKGELQSAIKSLHSRDINVYGDVVINHKGGADATEDVTAVEVDPADRNRVISGEHLIKAWTHFHFPGRGSTYSDFKWHWYHFDGTDWDESRKLNRIYKFQGKAWDWEVSNENGNYDYLMYADIDYDHPDVAAEIKRWGTWYANELQLDGFRLDAVKHIKFSFLRDWVNHVREKTGKEMFTVAEYWQNDLGALENYLNKTNFNHSVFDVPLHYQFHAASTQGGGYDMRKLLNGTVVSKHPLKSVTFVDNHDTQPGQSLESTVQTWFKPLAYAFILTRESGYPQVFYGDMYGTKGDSQREIPALKHKIEPILKARKQYAYGAQHDYFDHHDIVGWTREGDSSVANSGLAALITDGPGGAKRMYVGRQNAGETWHDITGNRSEPVVINSEGWGEFHVNGGSVSIYVQR

SEQ ID NO: 42889 - protein, 480 aa, Bacillus licheniformis
NGTLMQYFEWYMPNDGQHWKRLQNDSAYLAEHGITAVWIPPAYKGTSQADVGYGAYDLYDLGEFHQKGTVRTKYGTKGELQSAIKSLHSRDINVYGDVVINHKGGADATEDVTAVEVDPADRNRVISGEHLIKAWTHFHFPGRGSTYSDFKWHWYHFDGTDWDESRKLNRIYKFQGKAWDWEVSNENGNYDYLMYADIDYDHPDVAAEIKRWGTWYANELQLDGFRLDAVKHIKFSFLRDWVNHVREKTGKEMFTVAEYWQNDLGALENYLNKTNFNHSVFDVPLHYQFHAASTQGGGYDMRKLLNGTVVSKHPLKSVTFVDNHDTQPGQSLESTVQTWFKPLAYAFILTRESGYPQVFYGDMYGTKGDSQREIPALKHKIEPILKARKKYAYGAQHDYFDHHDIVGWTREGDSSVANSGLAALITDGPGGAKRMYVGRQNAGETWHDITGNRSEPVVINSEGWGEFHVNGGSVSIYVQR

SEQ ID NO: 42890 - protein, 480 aa, Bacillus licheniformis
NGTLMQYFEWYEPNDGQHWKRLQNDSAYLAEHGITAVWIPPAYKGTSQADVGYGAYDLYDLGEFHQKGTVRTKYGTKGELQSAIKSLHSRDINVYGDVVINHKGGADATEDVTAVEVDPADRNRVISGEHLIKAWTHFHFPGRGSTYSDFKWHWYHFDGTDWDESRKLNRIYKFQGKAWDWEVSNENGNYDYLMYADIDYDHPDVAAEIKRWGTWYANELQLDGFRLDAVKHIKFSFLRDWVNHVREKTGKEMFTVAEYWQNDLGALENYLNKTNFNHSVFDVPLHYQFHAASTQGGGYDMRKLLNGTVVSKHPLKSVTFVDNHDTQPGQSLESTVQTWFKPLAYAFILTRESGYPQVFYGDMYGTKGDSQREIPALKHKIEPILKARKQYAYGAQHDYFDHHDIVGWTREGDSSVANSGLAALITDGPGGAKRMYVGRQNAGETWHDITGNRSEPVVINSEGWGEFHVNGGSVSIYVQR

SEQ ID NO: 42891 - protein, 480 aa, Bacillus licheniformis
NGTLMQYFEWYMPNDGQHWRRLQNDSAYLAEHGITAVWIPPAYKGTSQADVGYGAYDLYDLGEFHQKGTVRTKYGTKGELQSAIKSLHSRDINVYGDVVINHKGGADATEDVTAVEVDPADRNRVISGEHLIKAWTHFHFPGRGSTYSDFKWHWYHFDGTDWDESRKLNRIYKFQGKAWDWEVSNENGNYDYLMYADIDYDHPDVAAEIKRWGTWYANELQLDGFRLDAVKHIKFSFLRDWVNHVREKTGKEMFTVAEYWXNDLGALENYLNKTNFNHSVFDVPLHYQFHAASTQGGGYDMRKLLNGTVVSKHPLKSVTFVDNHDTQPGQSLESTVQTWFKPLAYAFILTRESGYPQVFYGDMYGTKGDSQREIPALKHKIEPILKARKQYAYGAQHDYFDHHDIVGWTREGDSSVANSGLAALITDGPGGAKRMYVGRQNAGETWHDITGNRSEPVVINSEGWGEFHVNGGSVSIYVQR

SEQ ID NO: 42892 - protein, 480 aa, Bacillus licheniformis
NGTLMQYFEWYMPNDGQHWRRLQNDSAYLAEHGITAVWIPPAYKGTSQADVGYGAYDLYDLGEFHQKGTVRTKYGTKGELQSAIKSLHSRDINVYGDVVINHKGGADATEDVEAVEVDPADRNRVISGEHLIKAWTHFHFPGRGSTYSDFKWHWYHFDGTDWDESRKLNRIYKFQGKAWDWEVSNENGNYDYLMYADIDYDHPDVAAEIKRWGTWYANELQLDGFRLDAVKHIKFSFLRDWVNHVREKTGKEMFTVAEYWQNDLGALENYLNKTNFNHSVFDVPLHYQFHAASTQGGGYDMRKLLNGTVVSKHPLKSVTFVDNHDTQPGQSLESTVQTWFKPLAYAFILTRESGYPQVFYGDMYGTKGDSQREIPALKHKIEPILKARKQYAYGAQHDYFDHHDIVGWTREGDSSVANSGLAALITDGPGGAKRMYVGRQNAGETWHDITGNRSEPVVINSEGWGEFHVNGGSVSIYVQR

SEQ ID NO: 42893 - protein, 480 aa, Synthetic construct
NGTLMQYFEWYMPNDGQHWKRLQNDSAYLAEHGITAVWIPPAYKGTSQADVGYGAYDLYDLGEFHQKGTVRTKYGTKGELQSAIKSLHSRDINVYGDVVIDHKGGADATEDVTAVEVDPADRNRVISGEYLIKAWTHFHFPGRGSTYSDFKWHWYHFDGTDWDESRKLNRIYKFQGKAWDWEVSNENGNYDYLMYADIDYDHPDVAAEIKRWGTWYANELQLDGFRLDAVKHIKFSFLRDWVNHVREKTGKEMFTVAEYWQNDLGALENYLNKTNFNHSVFDVPLHYQFHAASTQGGGYDMRKLLNGTVVSKHPLKSVTFVDNHDTQPGQSLESTVQTWFKPLAYAFILTRESGYPQVFYGDMYGTKGDSQREIPALKHKIEPILKARKQYAYGAQHDYFDHHDIVGWTREGDSSVANSGLAALITDGPGGAKRMYVGRQNAGETWHDITGNRSEPVVINSEGWGEFHVNGGSVSIYVQR

SEQ ID NO: 42894 - protein, 480 aa, Bacillus pumilus
NGTLMQYFEWHMPNDGQHWKRLQNDSAYLAEHGITAVWIPPAYKGTSQADVGYGAYDLYDLGEFHQKGTVRTKYGTKGELQSAIKSLHSRDINVYGDVVINHKGGADATEDVTAVEVDPADRNRVISGERRIKAWTHFHFPGRGSTYSDFKWHWYHFDGTDWDESRKLNRIYKFQGKAWDWEVSXENGNYDYLMYADIDYDHPDVAAEIKRWGTWYANELQLDGFRLDAVKHIKFSFLRDWVNHVREKTGKEMFTVAEYWPNDLGALENYLNKTNFNHSVFDVPLHYQFHAASTQGGGYDMRKLLNSTVVSKHPLKAVTFVDNHDTQPGQSLESTVQTWFKPLAYAFILTRESGYPQVFYGDMYGTKGDSQREIPALKHKIEPILKARKQYAHGAQHDYFDHHDIVGWTREGDSSVANSGLAALITDGPGGAKRMYVGRQNAGETWHDITGNRSEPVVINSEGWGEFHVNGGSVSIYVQR

SEQ ID NO: 42895 - protein, 480 aa, Bacillus licheniformis
NGTLMQYFEWYSPNDGQHWKRLQNDSAYLAEHGITAVWIPPAYKGTSQADVGYGAYDLYDLGEFHQKGTVRTKYGTKGELQSAIKSLHSRDINVYGDVVINHKGGADATEDVTAVEVDPADRNRVISGEHLIKAWTHFHFPGRGSTYSDFKWHWYHFDGTDWDESRKLNRIYKFQGKAWDWEVSNENGNYDYLMYADIDYDHPDVAAEIKRWGTWYANELQLDGFRLDAVKHIKFSFLRDWVNHVREKTGKEMFTVAEYWQNDLGALENYLNKTNFNHSVFDVPLHYQFHAASTQGGGYDMRKLLNGTVVSKHPLKSVTFVDNHDTQPGQSLESTVQTWFKPLAYAFILTRESGYPQVFYGDMYGTKGDSQREIPALKHKIEPILKARKQYAYGAQHDYFDHHDIVGWTREGDSSVANSGLAALITDGPGGAKRMYVGRQNAGETWHDITGNRSEPVVINSEGWGEFHVNGGSVSIYVQR

SEQ ID NO: 42896 - protein, 480 aa, Alicyclobacillus
NGTLMQYFEWYAPNDGNHWNRLRTDAENLAQKGITSVWIPPAYKGTTQNDVGYGAYDLYDLGEFNQKGTVRTKYGTKAQLKSAIDALHKKNIDVYGDVVMNHKGGADYTETVTAVEVDPSNRNVEVSGDYEISAWTGFNFPGRGDSYSNFKWKWYHFDGTDWDEGRKLNRIYKFIGKAWDWEVSSENGNYDYLMYADLDFDHPDVANEMKKWGTWYANELNLDGFRLDAVKHIDHEYLRDWVNHVRQQTGKEMFAVAEYWQNDIQTLNNYLAKVNYNQSVFDAPLHYNFHYASKGNGNYDMRNILKGTVVANHPTLAVTLVENHDSQPGQSLESVVSPWFKPLAYAFILTRAEGYPSVFYGDYYGTKGNSNYEIPALKDKIDPILTARKNYAYGTQHDYLDNQDVIGWTREGDSAHAGSGLATVMSDGPGGSKTMYVGTAHAGQVFKDITGNRTDTVTINSAGNGTFPCNGGSVSIWVKQ

SEQ ID NO: 42897 - protein, 480 aa, Bacillus licheniformis
NGTLMQYFEWYMPNDGQHWRRLQNDSAYLAEHGITAVWIPPAYKGTSQADVGYGAYDLYDLGEFHQKGTVRTKYGTKGELQSAIKSLHSRDINVYGDVVINHKGGADATEDVTAVEVDPADRNRVISGEHLIKAWTHFHFPGRGSTYSDFKWHWYHFDGTDWDESRKLNRIYKFQGKAWDWEVSNENGNYDYLMYADIDYDHPDVAAEIKRWGTWYANELQLDGFRLDAVKHIKFSFLRDWVNHVREKTGKEMFTVAEYWQNDLGALENYLNKTNFNHSVFDVPLHYQFHAASTQGGGYDMRKLLNGTVVSKHPLKSVTFVDNHDTQPGQSLESTVQTWFKPLAYAFILTRESGYPQVFYGDMYGTKGDSRREIPALKHKIVPILKARKRYAYGAQHDYFDHHDIVGWTREGDSSVANSGLAALITDGPGGAKRMYVGRQNAGETWHDITGNRSEPVVINSEGWGEFHVNGGSVSIYVQR

SEQ ID NO: 42898 - protein, 480 aa, Bacillus licheniformis
NGTLMQYFEWYMPNDGQHWKRLQNDSAYLAEHGITAVWIPPAYKGTSQADVGYGAYDLYDLGEFHQKGTVRTKYSTKGELQSAIKSLHSRDINVYGDVVINHKGGADATEDVTAVEVDPADRNRVISGEHRIKAWTHFHFPGRGSTYSDFKWHWYHFDGTDWDESRKLNRIYKFQGKAWDWEVSNENGNYDYLMYADIDYDHPDVAAEIKRWGTWYANELQLDGFRLDAVKHIKFSFLRDWVNHVREKTGKEMFTVAEYWQNDLGALENYLNKTNFNHSVFDVPLHYQFHAASTQGGGYDMRKLLNGTVVSKHPLKAVTFVDNHDTQPGQSLESTVQTWFKPLAYAFILTRESGYPQVFYGDMYGTKGDSQREIPALKHKIEPILKARKQYAYGAQHDYFDHHDIVGWTREGDSSVANSGLAALITDGPGGAKRMYVGRQNAGETWHDITGNRSEPVVINSEGWGEFHVNGGSVSIYVQR

SEQ ID NO: 42899 - protein, 480 aa, Bacillus licheniformis
NGTLMQYFEWYMPNDGQHWRRLQNDSAYLAEHGITAVWIPPAYKGTSQADVGYGAYDLYDLGEFHQKGTVRTKYGTKGELQSAIKSLHSRDINVYGDVVINHKGGADATEDVTAVEVDPADRNRVISGEHLIKAWTHFHFPGRGSTYSDFKWHWYHFDGTDWDESRKLNRIYKFQGKAWDWEVSNENGNYDYLMYADIDYDHPDVAAEIKRWGTWYANELQLDGFRLDAVKHIKFSFLRDWVNHVREKTGKEMFTVAEYWQNDLGALENYLNKTNFNHSVFDVPLHYQFHAASTQGGGYDMRKLLNGTVVSKHPLKSVTFVDNHDTQPGQSLESTVQTWFKPLAYAFILTREAGYPQVFYGDMYGTKGDSQREIPALKHKIEPILKARKQYAYGAQHDYFDHHDIVGWTREGDSSVANSGLAALITDGPGGAKRMYVGRQNAGETWHDITGNRSEPVVINSEGWGEFHVNGGSVSIYVQR

SEQ ID NO: 42900 - protein, 480 aa, Bacillus subtilis
NGTLMQYFEWYMPNDGQHWKRLQNDSAYLAEHGITAVWIPPAYKGTSQADVGYGAYDLYDLGEFHQKGTVRTKYGTKGELQSAIKSLHSRDINVYGDVVINHKGGADATEDVTAVEVDPADRNRVISGEHRIKAWTHFHFPGRGSTYSDFKWHWYHFDGTDWDESRKLNRIYKFQGEAWDWEVSNENGNYDYLMYADIDYDHPDVAAEIKRWGTWYANELQLDGFRLDAVKHIKFSFLRDWVNHVREKTGKEMFTVAEYWQNDLGALENYLNKTNFNHSVFDVPLHYQFHAASTQGGGYDMRKLLNGTVVSKHPLKAVTFVDNHDTQPGQSLESTVQTWFKPLAYAFILTRESGYPQVFYGDMYGTKGDPQREIPALKHKIEPILKARKQYAYGAQHDYFDHHDIVGWTREGDSSVANSGLAALITDGPGGAKRMYVGRQNAGETWHDITGNRSEPVVINSEGWGEFHVNGGSVSIYVQR

SEQ ID NO: 42901 - protein, 480 aa, Bacillus licheniformis
NGTLMQYFEWYMPNDGQHWKRLQNDSAYLAEHGITAVWIPPAYKGTSQADVGYGAYDLYDLGEFHQKGTVRTKYGTKGELQSAIKSLHSRDINVYGDVVINHKGGADATEDVTAVEVDPADRNRVISGEHLIKAWTHFHFPGRGSTYSDFKWHWYHFDGTDWDESRRLNRIYKFQGKAWDWEVSNENGNYDYLMYADIDYDHPDVAAEIKRWGTWYANELQLDGFRLDAVKHIKFSFLRDWVNHVREKTGKEMFTVAEYWQNDLGALENYLNKTNFNHSVFDVPLHYQFHAASTQGGGYDMRKLLNGTVVSKHPLKSVTFVDNHDTQPGQSLESTVQTWFKPLAYAFILTRESGYPQVFYGDMYGTKGDSQREIPALKHKIEPILKARKQYAYGAQHDYFDHHDIVGWTREGDSSVANSGLAALITDGPGGAKRMYVGRQNAGETWHDITGNRSEPVVINSEGWGEFHVNGGSVSIYVQR

SEQ ID NO: 42902 - protein, 480 aa, Bacillus licheniformis
NGTLMQYFEWYMPNDGQHWKRLQNDSAYLAEHGITAVWIPPAYKGTSQADVGYGAYDLYDLGEFHQKGTVRTKYGTKGELQSAIKSLHSRDINVYGDVVINHKGGADATEDVTAVEVDPADRNRVISGEHLIKAWTHFHFPGRGSTYSDFKWHWYHFDGTDWDESRKLNRIYKFQGKAWDWEVSNENGNYDYLMYADIDYDHPDVAAEIKRWGTWYANELQLDGFRLDAVKHIKFSFLRDWVNHVRSKTGKEMFTVAEYWQNDLGALENYLNKTNFNHSVFDVPLHYQFHAASTQGGGYDMRKLLNGTVVSKHPLKSVTFVDNHDTQPGQSLESTVQTWFKPLAYAFILTRESGYPQVFYGDMYGTKGDSQREIPALKHKIEPILKARKQYAYGAQHDYFDHHDIVGWTREGDSSVANSGLAALITDGPGGAKRMYVGRQNAGETWHDITGNRSEPVVINSEGWGEFHVNGGSVSIYVQR

SEQ ID NO: 42903 - protein, 480 aa, Bacillus licheniformis
NGTLMQYFEWYMPNDGQHWKRLQNDSAYLAEHGITAVWIPPAYKGTSQADVGYGAYDLYDLGEFHQKGTVRTKYGTKGELQSAIKSLHSRDINVYGDVVINHKGGADATEDVTAVEVDPADRNRVISGEHLIKAWTHFHFPGRGSTYSDFKWHWYHFDGTDWDESRKLNRIYKFQGKAWDWEVSNENGNYDYLMYADIDYDHPDVAAEIKRWGTWYANELQLDGFRLDAVKHIKFSFLRDWVNHVREKTGKEMFTVAEYWQNDLGALENYLNKTNFNHSVFDVPLHYQFHAASTQGGGYDMRKLLNGTVVSKHPLKSVTFVDNHDTQPGQSLESTVQTWFKPLAYAFILTRESGYPQVFYGDAYGTKGDSQREIPALKHKIEPILKARKQYAYGAQHDYFDHHDIVGWTREGDSSVANSGLAALITDGPGGAKRMYVGRQNAGETWHDITGNRSEPVVINSEGWGEFHVNGGSVSIYVQR

SEQ ID NO: 42904 - protein, 480 aa, Bacillus licheniformis
NGTLMQYFEWYMPNDGQHWRRLQNDSAYLAEHGITAVWIPPAYKGTSQADVGYGAYNLYDLGEFHQKGTVRTKYGTKGELQSAIKSLHSRDINVYGDVVINHKGGADATEDVTAVEVDPADRNRVISGEHLIKAWTHFHFPGRGSTYSDFKWHWYHFDGTDWDESRKLNRIYKFQGKAWDWEVSNENGNYDYLMYADIDYDHPVVAAEIKRWGTWYANELQLDGFRLDAVKHIKFSFLRDWVNHVREKTGKEMFTVAEYWQNDLGALENYLNKTNFNHSVFDVPLHYQFHAASTQGGGYDMRKLLNGTVVSKHPMKSVTFVDNHDTQPGQSLESTVQTWFKPLAYAFILTRESGYPQVFYGDMYGTKGDSQREIPALKHKIEPILKARKQYAYGAQHDYFDHHDIVGWTREGDSSVANSGLAALITDGPGGAKRMYVGRQNAGETWHDITGNRSEPVVINSEGWGEFHVNGGSVSIYVQR

SEQ ID NO: 42905 - protein, 480 aa, Bacillus licheniformis
NGTLMQYFEWYAPNDGQHWKRLQNDSAYLAEHGITAVWIPPAYKGTSQADVGYGAYDLYDLGEFHQKGTVRTKYGTKGELQSAIKSLHSRDINVYGDVVINHKGGADATEDVTAVEVDPADRNRVISGEHLIKAWTHFHFPGRGSTYSDFKWHWYHFDGTDWDESRKLNRIYKFQGKAWDWEVSNENGNYDYLMYADIDYDHPDVAAEIKRWGTWYANELQLDGFRLDAVKHIKFSFLRDWVNHVREKTGKEMFTVAEYWQNDLGALENYLNKTNFNHSVFDVPLHYQFHAASTQGGGYDMRKLLNGTVVSKHPLKSVTFVDNHDTQPGQSLESTVQTWFKPLAYAFILTRESGYPQVFYGDMYGTKGDSQREIPALKHKIEPILKARKQYAYGAQHDYFDHHDIVGWTREGDSSVANSGLAALITDGPGGAKRMYVGRQNAGETWHDITGNRSEPVVINSEGWGEFHVNGGSVSIYVQR

SEQ ID NO: 42906 - protein, 480 aa, Bacillus licheniformis
NGTLMQYFEWYMPNDGQHWRRLQNDSAYLAEHGITAVWIPPAYKGTSQADVGYGAYDLYDLGEFHQKGTVRTKYGTKGELQSAIKSLHSRDINVYGDVVINHKGGADATEDVTAVEVDPADRNRVISGEYLIRAWTHFHFPGRGSTYSDFKWHWYHFDGTDWDESRKLNRIYLFQGKAWDWPVSNENGNYDYLMYADYDYDYPDVAAEITRWGTWYANELQLDGFRLDAVKHIKFSFLRDWVNHVREKTGKEMFTVAEYWQNDLGALENYLNKTNFNHSVFDVPLHYQFHAASTQGGGYDMRKLLNGTVVSKHPLKSVTFVDNHDTQPGQSLESTVQTWFKPLAYAFILTRESGYPSVFYGDMYGTKGDSQREIPALKHKIEPILKARKQYAYGAQHDYFDHHDIVGWTREGVSSVANSGLAALITDGPGGAKWMYVGRQNAGETWHDITGNRSEPVVINSEGWGEFHVNGGSVSIYVQR

SEQ ID NO: 42907 - protein, 480 aa, Bacillus licheniformis
NGTLMQYFEWYPPNDGQHWKRLQNDSAYLAEHGITAVWIPPAYKGTSQADVGYGAYDLYDLGEFHQKGTVRTKYGTKGELQSAIKSLHSRDINVYGDVVINHKGGADATEDVTAVEVDPADRNRVISGEHLIKAWTHFHFPGRGSTYSDFKWHWYHFDGTDWDESRKLNRIYKFQGKAWDWEVSNENGNYDYLMYADIDYDHPDVAAEIKRWGTWYANELQLDGFRLDAVKHIKFSFLRDWVNHVREKTGKEMFTVAEYWQNDLGALENYLNKTNFNHSVFDVPLHYQFHAASTQGGGYDMRKLLNGTVVSKHPLKSVTFVDNHDTQPGQSLESTVQTWFKPLAYAFILTRESGYPQVFYGDMYGTKGDSQREIPALKHKIEPILKARKQYAYGAQHDYFDHHDIVGWTREGDSSVANSGLAALITDGPGGAKRMYVGRQNAGETWHDITGNRSEPVVINSEGWGEFHVNGGSVSIYVQR

SEQ ID NO: 42908 - protein, 482 aa, Bacillus sp. CGMCC 1.16541
NGTMMQYFEWYLPNDGQHWNRLRTDATYLKSIGVSAVWTPPAYKGTSQNDVGYGAYDLYDLGEFNQKGTVRTKYGTKAELKSAVSTLKANGIQVYGDVVMNHKGGADYTENVTAVEVNPSNRNQETSGDYMIQAWTGFNFPGRGNTHSSFKWKWYHFDGTDWDQSRNASRIFKFRGTGKAWDWEVSTENGNYDYLMYADVDFEHPDVANEMKNWGVWYANEVGLDGFRLDAVKHIKHNYLGDWVNHVRTRTGKEMFTVAEYWQNDVNAINNYLAKVNYNHSVFDAPLHYNFHYASQSGGNYDMRNLLNGTVVATHPTKAVTLVENHDSQPGQSLESVVQSWFKPLAYAFILTRAQGYPSVFYGDMYGTNGNSSYEIPALKTKLEPLLKARKDYAYGTQHNYMDHWDVIGWTREGDGTKAKSGLATLITDGPGGSKWMYVGKQNAGEVWGDLTGNRGDKVTINADGWGQFYVNGGSVSVYVQQ

SEQ ID NO: 42909 - protein, 480 aa, Bacillus licheniformis
NGTLMQYFEWYMPNDGQHWKRLQNDSAYLKEHGITAVWIPPAYKGTSQADVGYGAYDLYDLGEFHQKGTVRTKYGTKGELQSAIKSLHSRDINVYGDVVINHKGGADATEDVTAVEVDPADRNRVISGEHLIKAWTHFHFPGRGSTYSDFKWHWYHFDGTDWDESRKLNRIYKFQGKAWDWEVSNENGNYDYLMYADIDYDHPDVAAEIKRWGTWYANELQLDGFRLDAVKHIKFSFLRDWVNHVREKTGKEMFTVAEYWQNDLGALENYLNKTNFNHSVFDVPLHYQFHAASTQGGGYDMRKLLNGTVVSKHPLKSVTFVDNHDTQPGQSLESTVQTWFKPLAYAFILTRESGYPQVFYGDMYGTKGDSQREIPALKHKIEPILKARKQYAYGAQHDYFDHHDIVGWTREGDSSVANSGLAALITDGPGGAKRMYVGRQNAGETWHDITGNRSEPVVINSEGWGEFHVNGGSVSIYVQR

SEQ ID NO: 42910 - protein, 480 aa, Bacillus licheniformis
NGTLMQYFEWYMPNDGQHWRRLQNDSAYLAEHGITAVWIPPAYKGTSQADVGYGAYDLYDLGEFHQKGTVRTKYGTKGELQSAIKSLHSRDINVYGDVVINHKGGADATEDVTAVEVDPADRNRVISGAHLIKAWTHFHFPGRGSTYSDFKWHWYHFDGTDWDESRKLNRIYKFQGKAWDWEVSNENGNYDYLMYADIDYDHPVVAAEIKRWGTWYANELQLDGFRLDAVKHIKFSFLRDWVNHVREKTGKEMFTVAEYWQNDLGALENYLNKTNFNHSVFDVPLHYQFHAASTQGGGYDMRKLLNGTVVSKHPLKSVTFVDNHDTQPGQSLESTVQTWFKPLAYAFILTRESGYPQVFYGDMYGTKGDSQREIPALKHKIEPILKARKQYAYGAQHDYFDHHDIVGWTREGDSSVANSGLAALITDGPGGAKRMYVGRQNAGETWHDITGNRSEPVVINSEGWGEFHVNGGSVSIYVQR

SEQ ID NO: 42911 - protein, 480 aa, Bacillus sp.
NGTLMQYFEWYMPNDGQHWKRLQNDSAYLAEHGITAVWIPPAYKGTSQADVGYGAYDLYDLGEFHQKGTVRTKYGTKGELQSAIKSLHSRDINVYGDVVINHKGGADTTEDVTAVEVDPADRNRVISGEYLIKAWTHFHFPGRGSTYSDFKWHWYHFDGTDWDESRKLNRIYKFQGKAWDWEVSNENGNYDYLMYADIDYDHPDVAAEIKRWGTWYANELQLDGFRLDAVKHIKFSFLRDWVNHVREKTGKEMFTVAEYWQNDLGALENYLNKTNFNHSVFDVPLHYQFHAASTQGGGYDMRKLLNGTVVSKHPLKSVTFVDNHDTQPGQSLESTVQTWFKPLAYAFILTRESGYPQVFYGDMYGTKGDSQREIPALKHKIEPILKARKQYAYGAQHDYFDHHDIVGWTREGDSSVANSGLAALITDGPGGAKRMYVGRQNAGETWHDITGNRSEPVVINSEGWGEFHVNGGSVSIYVQR

SEQ ID NO: 42912 - protein, 480 aa, Bacillus licheniformis
NGTLMQYFEWYMPNDGQHWRRLQNDSAYLAEHGITAVWIPPAYKGTSQADVGYGAYDLYDLGEFHQKGTVRTKYGTKGELQSAIKSLHSRDINVYGDVVINHKGGADATEDVTAVEVDPADRNRVISGEHLIKAWTHFHFPGRGSTYSDFKWHWYHFDGTDWDESRKLNRIYKFQGKAWDWEVSNENGNYDYLMYADIDYDHPDVAAEIKRWGTWYANELQLDGFRLDAVKHIKFSFLRDWVNHVREKTGKEMFTVAEYWQNDLGALENYLNKTNFNHSVFDVPLHYQFHAASTQGGGYDMRKLLNGTVVSKHPLKSVTFVDNHDTQPGLSLESTVQTWFKPLAYAFILTRESGYPQVFYGDMYGTKGDSQREIPALKHKIEPILKARKQYAYGAQHDYFDHHDIVGWTREGDSSVANSGLAALITDGPGGAKRMYVGRQNAGETWHDITGNRSEPVVINSEGWGEFHVNGGSVSIYVQR

SEQ ID NO: 42913 - protein, 480 aa, Bacillus licheniformis
NGTLMQYFEWYMPNDGQHWKRLQNDSAYLAEHGITAVWIPPAYKGTSQADVGYGAYDLYDLGEFHQKGTVRTKYGTKGELQSAIKSLHSRDINVYGDVVINHKGGADATEDVTAVEVDPADRNRVISGEHLIKAWTYFHFPGRGSTYSDFKWHWYHFDGTDWDESRKLNRIYKFQGKAWDWEVSNENGNYDYLMYADIDYDHPDVAAEIKRWGTWYANELQLDGFRLDAVKHIKFSFLRDWVNHVREKTGKEMFTVAEYWQNDLGALENYLNKTNFNHSVFDVPLHYQFHAASTQGGGYDMRKLLNGTVVSKHPLKSVTFVDNHDTQPGQSLESTVQTWFKPLAYAFILTRESGYPQVFYGDMYGTKGDSQREIPALKHKIEPILKARKQYAYGAQHDYFDHHDIVGWTREGDSSVANSGLAALITDGPGGAKRMYVGRQNAGETWHDITGNRSEPVVINSEGWGEFHVNGGSVSIYVQR

SEQ ID NO: 42914 - protein, 480 aa, Bacillus licheniformis
NGTLMQYFEWYRPNDGQHWKRLQNDSAYLAEHGITAVWIPPAYKGTSQADVGYGAYDLYDLGEFHQKGTVRTKYGTKGELQSAIKSLHSRDINVYGDVVINHKGGADATEDVTAVEVDPADRNRVISGEHLIKAWTHFHFPGRGSTYSDFKWHWYHFDGTDWDESRKLNRIYKFQGKAWDWEVSNENGNYDYLMYADIDYDHPDVAAEIKRWGTWYANELQLDGFRLDAVKHIKFSFLRDWVNHVREKTGKEMFTVAEYWQNDLGALENYLNKTNFNHSVFDVPLHYQFHAASTQGGGYDMRKLLNGTVVSKHPLKSVTFVDNHDTQPGQSLESTVQTWFKPLAYAFILTRESGYPQVFYGDMYGTKGDSQREIPALKHKIEPILKARKQYAYGAQHDYFDHHDIVGWTREGDSSVANSGLAALITDGPGGAKRMYVGRQNAGETWHDITGNRSEPVVINSEGWGEFHVNGGSVSIYVQR

SEQ ID NO: 42915 - protein, 480 aa, Bacillus licheniformis
NGTLMQYFEWYMPNDGQHWKRLQNDSAYLAEHGITAVWIPPAYKGTSQADVGYGAYDLYDLGEFHQKGTVRTKYGTKGELQSAIKSLHSRDINVYGDVVINHKGGADATEDVTAVEVDPADRNRVISGEHLIKAWTHFHFPGRGSTYSDFKWHWYHFDGTDWDESRKLNRIYKFQGKAWDWEVSNENGNYDYLMYADIDYDHPDVAAEIKRWGTWYANELQLDGFRLDAVKHIKFSFLRDWVNHVREKTGKEMFTVAEYWQNDLGALENYLNKTNFNHSVFDVPLHYQFHAASTQGGGYDMQKLLNGTVVSKHPLKSVTFVDNHDTQPGQSLESTVQTWFKPLAYAFILTRESGYPQVFYGDMYGTKGDSQREIPALKHKIEPILKARKQYAYGAQHDYFDHHDIVGWTREGDSSVANSGLAALITDGPGGAKRMYVGRQNAGETWHDITGNRSEPVVINSEGWGEFHVNGGSVSIYVQR

SEQ ID NO: 42916 - protein, 480 aa, Bacillus licheniformis
NGTLMQYFEWYTPNDGQHWKRLQNDSAYLAEHGITAVWIPPAYKGTSQADVGYGAYDLYDLGEFHQKGTVRTKYGTKGELQSAIKSLHSRDINVYGDVVINHKGGADATEDVTAVEVDPADRNRVISGEHLIKAWTHFHFPGRGSTYSDFKWHWYHFDGTDWDESRKLNRIYKFQGKAWDWEVSNENGNYDYLMYADIDYDHPDVAAEIKRWGTWYANELQLDGFRLDAVKHIKFSFLRDWVNHVREKTGKEMFTVAEYWQNDLGALENYLNKTNFNHSVFDVPLHYQFHAASTQGGGYDMRKLLNGTVVSKHPLKSVTFVDNHDTQPGQSLESTVQTWFKPLAYAFILTRESGYPQVFYGDMYGTKGDSQREIPALKHKIEPILKARKQYAYGAQHDYFDHHDIVGWTREGDSSVANSGLAALITDGPGGAKRMYVGRQNAGETWHDITGNRSEPVVINSEGWGEFHVNGGSVSIYVQR

SEQ ID NO: 42917 - protein, 480 aa, Bacillus licheniformis
NGTLMQYFEWYMPNDGQHWRRLQNDSAYLAEHGITAVWIPPAYKGTSQADVGYGAYDLYDLGEFHQKGTVRTKYGTKGELQSAIKSLHSRDINVYGDVVINHKGGADATEDVTAVEVDPADRNRVISGEHLIKAWTHFHFPGRGSTYSDFKWHWYHFDGTDWDESRKLNRIYKFQGKAWDWEVSNENGNYDYLMYADIDYDHPDVAAEIKRWGTWYANELQLDGFRLDAVKHIKFSFLRDWVNHVREKTGKEMFTVAEYWQNDLGALENYLNKTNFNHSVFDVPLHYQFHAASTQGGGYDMRKLLNGTVVSKHPLKSVTFVDNHDTQPGQSLESTVQTWFKPLAYAFILTRESGYPQVFYGDMYGTKGDSQREIPALKHKIEPILKARKQYAYGAQHDYFDHHDIVGWTREGDSSVXNSGLAALITDGPGGAKRMYVGRQNAGETWHDITGNRSEPVVINSEGWGEFHVNGGSVSIYVQR

SEQ ID NO: 42918 - protein, 480 aa, Bacillus licheniformis
NGTLMQYFEWYMPNDGQHWKRLQNDSAYLAEHGITAVWIPPAYKGTSQADVGYGAYDLYDLGEFHQKGTVRTKYGTKGELQSAIKSLHSRDINVYGDVVINHKGGADATEDVTAVEVDPADRNRVISGEHLIKAWTHFHFPGRGSTYSDFKWHWYHFDGTDWDESRKLNRIYKFQGKAWDWEVSTENGNYDYLMYADIDYDHPDVAAEIKRWGTWYANELQLDGFRLDAVKHIKFSFLRDWVNHVREKTGKEMFTVAEYWQNDLGALENYLNKTNFNHSVFDVPLHYQFHAASTQGGGYDMRKLLNGTVVSKHPLKSVTFVDNHDTQPGQSLESTVQTWFKPLAYAFILTRESGYPQVFYGDMYGTKGDSQREIPALKHKIEPILKARKQYAYGAQHDYFDHHDIVGWTREGDSSVANSGLAALITDGPGGAKRMYVGRQNAGETWHDITGNRSEPVVINSEGWGEFHVNGGSVSIYVQR

SEQ ID NO: 42919 - protein, 480 aa, Bacillus licheniformis
NGTLMQYFEWYGPNDGQHWKRLQNDSAYLAEHGITAVWIPPAYKGTSQADVGYGAYDLYDLGEFHQKGTVRTKYGTKGELQSAIKSLHSRDINVYGDVVINHKGGADATEDVTAVEVDPADRNRVISGEHLIKAWTHFHFPGRGSTYSDFKWHWYHFDGTDWDESRKLNRIYKFQGKAWDWEVSNENGNYDYLMYADIDYDHPDVAAEIKRWGTWYANELQLDGFRLDAVKHIKFSFLRDWVNHVREKTGKEMFTVAEYWQNDLGALENYLNKTNFNHSVFDVPLHYQFHAASTQGGGYDMRKLLNGTVVSKHPLKSVTFVDNHDTQPGQSLESTVQTWFKPLAYAFILTRESGYPQVFYGDMYGTKGDSQREIPALKHKIEPILKARKQYAYGAQHDYFDHHDIVGWTREGDSSVANSGLAALITDGPGGAKRMYVGRQNAGETWHDITGNRSEPVVINSEGWGEFHVNGGSVSIYVQR

SEQ ID NO: 42920 - protein, 480 aa, Bacillus licheniformis
NGTLMQYFEWYQPNDGQHWKRLQNDSAYLAEHGITAVWIPPAYKGTSQADVGYGAYDLYDLGEFHQKGTVRTKYGTKGELQSAIKSLHSRDINVYGDVVINHKGGADATEDVTAVEVDPADRNRVISGEHLIKAWTHFHFPGRGSTYSDFKWHWYHFDGTDWDESRKLNRIYKFQGKAWDWEVSNENGNYDYLMYADIDYDHPDVAAEIKRWGTWYANELQLDGFRLDAVKHIKFSFLRDWVNHVREKTGKEMFTVAEYWQNDLGALENYLNKTNFNHSVFDVPLHYQFHAASTQGGGYDMRKLLNGTVVSKHPLKSVTFVDNHDTQPGQSLESTVQTWFKPLAYAFILTRESGYPQVFYGDMYGTKGDSQREIPALKHKIEPILKARKQYAYGAQHDYFDHHDIVGWTREGDSSVANSGLAALITDGPGGAKRMYVGRQNAGETWHDITGNRSEPVVINSEGWGEFHVNGGSVSIYVQR

SEQ ID NO: 42921 - protein, 480 aa, Bacillus licheniformis
NGTLMQYFEWYWPNDGQHWKRLQNDSAYLAEHGITAVWIPPAYKGTSQADVGYGAYDLYDLGEFHQKGTVRTKYGTKGELQSAIKSLHSRDINVYGDVVINHKGGADATEDVTAVEVDPADRNRVISGEHLIKAWTHFHFPGRGSTYSDFKWHWYHFDGTDWDESRKLNRIYKFQGKAWDWEVSNENGNYDYLMYADIDYDHPDVAAEIKRWGTWYANELQLDGFRLDAVKHIKFSFLRDWVNHVREKTGKEMFTVAEYWQNDLGALENYLNKTNFNHSVFDVPLHYQFHAASTQGGGYDMRKLLNGTVVSKHPLKSVTFVDNHDTQPGQSLESTVQTWFKPLAYAFILTRESGYPQVFYGDMYGTKGDSQREIPALKHKIEPILKARKQYAYGAQHDYFDHHDIVGWTREGDSSVANSGLAALITDGPGGAKRMYVGRQNAGETWHDITGNRSEPVVINSEGWGEFHVNGGSVSIYVQR

SEQ ID NO: 42922 - protein, 480 aa, Bacillus licheniformis
NGTLMQYFEWYMPNDGQHWKRLQNDSAYLAEHGITAVWIPPAYKGTSQADVGYGAYDLYDLGEFHQKGTVRTKYGTKGELQSAINSLHSRDINVYGDVVINHKGGADATEDVTAVEVDPADRNRVISGEHLIKAWTHFHFPGRGSTYSDFKWHWYHFDGTDWDESRKLNRIYKFQGKAWDWEVSNENGNYDYLMYADIDYDHPDVAAEIKRWGTWYANELQLDGFRLDAVKHIKFSFLRDWVNHVREKTGKEMFTVAEYWQNDLGALENYLNKTNFNHSVFDVPLHYQFHAASTQGGGYDMRKLLNGTVVSKHPLKSVTFVDNHDTQPGQSLESTVQTWFKPLAYAFILTRESGYPQVFYGDMYGTKGDSQREIPALKHKIEPILKARKQYAYGAQHDYFDHHDIVGWTREGDSSVANSGLAALITDGPGGAKRMYVGRQNAGETWHDITGNRSEPVVINSEGWGEFHVNGGSVSIYVQR

SEQ ID NO: 42923 - protein, 480 aa, Bacillus licheniformis
NGTLMQYFEWYMPNDGQHWKRLQNDSAYLAEHGITAVWIPPAYKGTSQADVGYGAYDLYDLGEFHQKGTVRTKYGTKGELQSAIKSLHSRDINVYGDVVINHKGGADATEDVTAVEVDPADRNRVISGEHLIKAWTHFHFPGRGSTYSDFKWHWYHFDGTDWDESRKLNRIYKFQGKAWDWEVSNENGNYDYLMYADIDYDHPDVVAEIKRWGTWYANELQLDGFRLDAVKHIKFSFLRDWVNHVREKTGKEMFTVAEYWQNDLGALENYLNKTNFNHSLFDVPLHYQFHAASTQGGGYDMRKLLNGTVVSKHPLKSVTFVDNHDTQPGQSLESTVQTWFKPLAYAFILTRESGYPQVFYGDMYGTKGDSQREIPALKHKIEPILKARKQYAYGAQHDYFDHHDIVGWTREGDSSVANSGLAALITDGPGGAKRMYVGRQNAGETWHDITGNRSEPVVINSEGWGEFHVNGGSVSIYVQR

SEQ ID NO: 42924 - protein, 480 aa, Bacillus licheniformis
NGTLMQYFEWYMPNDGQHWRRLQNDSAYLAEHGITAVWIPPAYKGTSQADVGYGAYDLYDLGEFHQKGTVRTKYGTKGELQSAIKSLHSRDINVYGDVVINHKGGADATEDVTAVEVDPADRNRVISGEHLIKAWTHFHFPGRGSTYSDFKWHWYHFDGTDWDESRKLNRIYLFQGKAWDWPVSNENGNYDYLMYADIDYDHPDVAAEIKRWGTWYANELQLDGFRLDAVKHIKFSFLRDWVNHVREKTGKEMFTVAEYWQNDLGALENYLNKTNFNHSVFDVPLHYQFHAASTQGGGYDMRKLLNGTVVSKHPLKSVTFVDNHDTQPGQSLESTVQTWFKPLAYAFILTRESGYPSVFYGDMYGTKGDSQREIPALKHKIEPILKARKQYAYGAQHDYFDHHDIVGWTREGDSSVANSGLAALITDGPGGAKWMYVGRQNAGETWHDITGNRSEPVVINSEGWGEFHVNGGSVSIYVQR

SEQ ID NO: 42925 - protein, 480 aa, Bacillus licheniformis
NGTLMQYFEWYMPNDGQHWRRLQNDSAYLAEHGITAVWIPPAYKGTSQADVGYGAYDLYDLGEFHQKGTVRTKYGTKGELQSAIKSLHSRDINVYGDVVINHKGGADATEDVTAVEVDPTDRNRVISGEHLIKAWTHFHFPGRGSTYSDFKWHWYHFDGTDWDESRKLNRIYKFQGKAWDWEVSNENGNYDYLMYADIDYDHPDVAAEIKRWGTWYANELQLDGFRLDAVKHIKFSFLRDWVNHVREKTGKEMFTVAEYWQNDLGALENYLNKTNFNHSVFDVPLHYQFHAASTQGGGYDMRKLLNGTVVSKHPLKSVTFVDNHDTQPGQSLESTVQTWFKPLAYAFILTRESGYPQVFYGDMYGTKGDSQREIPALKHKIEPILKARKQYAYGAQHDYFDHHDIVGWTREGDSSVANSGLAALITDGPGGAKRMYVGRQNAGETWHDITGNRSEPVVINSEGWGEFHVNGGSVSIYVQR

SEQ ID NO: 42926 - protein, 480 aa, Bacillus licheniformis
NGTLMQYFEWYMPNDGQHWKRLQNDSAYLAEHGITAVWIPPAYKGTSQADVGYGAYDLYDLGEFHQKGTVRTKYGTKGELQSAIKSLHSRDINVYGDVVINHKGGADATEDVTAVEVDPADRNRVISGEHLIKAWTHFHFPGRGSTYSDFKWHWYHFDGTDWDESRKLNRIYKFQGKAWDWEVSNENGNYDYLMYADIDYDHPDVAAEIKRWGTWYANELQLDGFRLDAVKHIKFSFLRDWVNHVREKTGKEMFTVAEYWQNDLGALENYLNKTNFNHSVFDVPLHYQFHAASTQGGGYDMRKLLNGTVVSKHPLKSVTFVDNHDTQPGQSLESTVQTWFKPLAYAFILTRESGYPQVFYGDMYGTKGDSQREIPALKHKIEPILKARKQYAYGRQHDYFDHHDIVGWTREGDSSVANSGLAALITDGPGGAKRMYVGRQNAGETWHDITGNRSEPVVINSEGWGEFHVNGGSVSIYVQR

SEQ ID NO: 42927 - protein, 480 aa, Bacillus licheniformis
NGTLMQYFEWYMPNDGQHWRRLQNDSAYLAEHGITAVWIPPAYKGTSQADVGYGAYDLYDLGEFHQKGTVRTKYGTKGELQSAIKSLHSRDINVYGDVVINHKGGADATEDVDAVEVDPADRNRVISGEHLIKAWTHFHFPGRGSTYSDFKWHWYHFDGTDWDESRKLNRIYKFQGKAWDWEVSNENGNYDYLMYADIDYDHPDVAAEIKRWGTWYANELQLDGFRLDAVKHIKFSFLRDWVNHVREKTGKEMFTVAEYWQNDLGALENYLNKTNFNHSVFDVPLHYQFHAASTQGGGYDMRKLLNGTVVSKHPLKSVTFVDNHDTQPGQSLESTVQTWFKPLAYAFILTRESGYPQVFYGDMYGTKGDSQREIPALKHKIEPILKARKQYAYGAQHDYFDHHDIVGWTREGDSSVANSGLAALITDGPGGAKRMYVGRQNAGETWHDITGNRSEPVVINSEGWGEFHVNGGSVSIYVQR

SEQ ID NO: 42928 - protein, 480 aa, Bacillus sp.
NGTLMQYFEWYMPNDGQHWKRLQNDSAYLAEHGITAVWIPPAYKGTSQADVGYGAYDLYDLGEFHQKGTVRTKYGTKGELQSAIKSLHSRDINVYGDVVINHKGGADATEDVTAVEVDPADRNRVISGEYLIKAWTHFHFPGRGSIYSDFKWHWYHFDGTDWDESRKLNRIYKFQGKAWDWEVSNENGNYDYLMYADIDYDHPDVAAEIKRWGTWYANELQLDGFRLDAVKHIKFSFLRDWVNHVREKTGKEMFTVAEYWQNDLGALENYLNKTNFNHSVFDVPLHYQFHAASTQGGGYDMRKLLNGTVVSKHPLKSVTFVDNHDTQPGQSLESTVQTWFKPLAYAFILTRESGYPQVFYGDMYGTKGDSQREIPALKHKIEPILKARKQYAYGAQHDYFDHHDIVGWTREGDSSVANSGLAALITDGPGGAKRMYVGRQNAGETWHDITGNRSEPVVINSEGWGEFHVNGGSVSIYVQR

SEQ ID NO: 42929 - protein, 480 aa, Bacillus licheniformis
NGTLMQYFEWYMPNDGQHWKRLQNDSAYLAEHGITAVWIPPAYKGTSQADVGYGAYDLYDLGEFHQKGTVRTKYGTKGELQSAIKSLHSRDINVYGDVVINHKGGADATELVTAVEVDPADRNRVISGEHLIKAWTHFHFPGRGSTYSDFKWHWYHFDGTDWDESRKLNRIYKFQGKAWDWEVSNENGNYDYLMYADIDYDHPDVAAEIKRWGTWYANELQLDGFRLDAVKHIKFSFLRDWVNHVREKTGKEMFTVAEYWQNDLGALENYLNKTNFNHSVFDVPLHYQFHAASTQGGGYDMRKLLNGTVVSKHPLKSVTFVDNHDTQPGQSLESTVQTWFKPLAYAFILTRESGYPQVFYGDMYGTKGDSQREIPALKHKIEPILKARKQYAYGAQHDYFDHHDIVGWTREGDSSVANSGLAALITDGPGGAKRMYVGRQNAGETWHDITGNRSEPVVINSEGWGEFHVNGGSVSIYVQR

SEQ ID NO: 42930 - protein, 480 aa, Bacillus licheniformis
NGTLMQYFEWYMPNDGQHWRRLQNDSAYLAEHGITAVWIPPAYKGTSQADVGYGAYDLYDLGEFHQKGTVRTKYGTKGELQSAIKSLHSRDINVYGDVVINHKGGADATEDVTAVEVDPADRNRVISGEHLIKAWTHFHFPGRGSTYSDFKWHWYHFDGTDWDESRKLNRIYKFQGKAWDWEVSNEFGNYDYLMYADIDYDHPDVVAEIKRWGTWYANELQLDGFRLDAVKHIKFSFLRDWVNHVREKTGKEMFTVAEYWSNDLGALENYLNKTNFNHSVFDVPLHYQFHAASTQGGGYDMRKLLNGTVVSKHPLKSVTFVDNHDTQPGQSLESTVQTWFKPLAYAFILTRESGYPQVFYGDMYGTKGDSQREIPALKHKIEPILKARKQYAYGAQHDYFDHHDIVGWTREGDSSVANSGLAALITDGPGGAKRMYVGRQNAGETWHDITGNRSEPVVINSEGWGEFHVNGGSVSIYVQR

SEQ ID NO: 42931 - protein, 480 aa, Bacillus sp.
NGTMMQYFEWYLPNDGNHWNRLNSDASNLKSKGITAVWIPPAWKGASQNDVGYGAYDLYDLGEFNQKGTVRTKYGTRSQLQAAVTSLKNNGIQVYGDVVMNHKGGADATEMVRAVEVNPNNRNQEVTGEYTIEAWTRFDFPGRGNTHSSFKWRWYHFDGVDWDQSRRLNNRIYKFRGHGKAWDWEVDTENGNYDYLMYADIDMDHPEVVNELRNWGVWYTNTLGLDGFRIDAVKHIKYSFTRDWINHVRSATGKNMFAVAEFWKNDLGAIENYLQKTNWNHSVFDVPLHYNLYNASKSGGNYDMRNIFNGTVVQRHPSHAVTFVDNHDSQPEEALESFVEEWFKPLAYALTLTREQGYPSVFYGDYYGIPTHGVPAMRSKIDPILEARQKYAYGAQHDYFDHHDIVGWTREGDSSVANSGLAALITDGPGGAKRMYVGRQNAGETWHDITGNRSEPVVINSEGWGEFHVNGGSVSIYVQR

SEQ ID NO: 42932 - protein, 477 aa, Unidentified
TPAEWRKQSIYFLLTDRFGRADNSTTAACDVTERIYCGGSWQGIINHLDYIQGMGFTAIWISPVTEQLPQNTGEGEAYHGYWQQEIYTVNSNFGTSDDLLALSKALHDRGMYLMVDVVANHMGYDGDGDSVDYSVFNPFNSSSYFHPYCLITDYSNQTDVEDCWLGDTTVSLPDLNTTETVVRTIWYDWVADLVSNYSIDGLRIDTVKHVEKSFWPGYNSAAGVYCVGEVLDGDPSYTCPYQDYLDGVLNYPIYYQLLYAFESSSGSISNLYNMINSVASECSDPTLLGNFIENHDNPRFASYTSDYSLAKNVIAFIFFSDGIPIVYAGQEQHYNGGNDPYNREATWLSGYSTTAELYTFIATTNAIRSLAISVDSEYLTYKNDPFYYDSNTLAMRKGSDGLQVITVLSNLGADGSSYTLTLSGSGYSSGTELVEAYTCTTVTVDSNGDIPVPMESGLPRVFLPASSFSGSSLCSSS

SEQ ID NO: 42933 - protein, 454 aa, Jeotgalibacillus campisalis
NPTMMQYFEWYLPNDGLHWNRLTNDASNLKNLGVTTVWIPPAYKGTSQNDVGYGAYDLYDLGEFNQKGTVRTKYGTRGQLQTAINTLKNQGIGTYGDVVMNHKGGADFTESVQAVEVNPNNRSQETSGEYTISAWTGFNFAGRNNLHSAFKWRWYHFDGTDWDQSRSLNRIYKFRGSGKSWDTEVSNEFGNYDYLMYADVDFDHPEVKAELKNWGKWYVQSLNLDGFRLDAVKHIKHDYIQEWLADVRRTTGKELFTVAEYWQNDLGAINNYLAKTGYSHSVFDVPLHYNFQRAANSGGNFDMRTIFNGSVVQQHPTLAVTIVDNHDSQPGQSLESTVDAWFKPLAYAMIMTREQGYPNLFYGDFYGTKGSSNREIPNLSSKLTPILKARKDMAYGTQHDYLNHQDVIGWTREGVTDRSKSGLATILSDGPGGNKWMYVGKRNAGETWRDKTGN

SEQ ID NO: 42934 - protein, 454 aa, Jeotgalibacillus campisalis
NNTMMQYFEWYLPNDGLHWNRLTNDASNLKNLGVTTVWIPPAYKGTSQNDVGYGAYDLYDLGEFNQKGTVRTKYGTRGQLQTAINTLKNQGIGTYGDVVMNHKGGADFTESVQAVEVNPNNRSQETSGEYTISAWTGFNFAGRNNLHSAFKWRWYHFDGTDWDQSRSLNRIYKFRGSGKSWDTEVSNEFGNYDYLMYADVDFDHPEVKAELKNWGKWYVQSLNLDGFRLDAVKHIKHDYIQEWLADVRRTTGKELFTVAEYWQNDLGAINNYLAKTGYSHSVFDVPLHYNFQRAANSGGNFDMRTIFNGSVVQQHPTLAVTIVDNHDSQPGQSLESTVDAWFKPLAYAMIMTREQGYPNLFYGDFYGTKGSSNREIPNLSSKLTPILKARKDMAYGTQHDYLNHQDVIGWTREGVTDRSKSGLATILSDGPGGNKWMYVGKRNAGETWRDKTGN

SEQ ID NO: 42935 - protein, 454 aa, Jeotgalibacillus campisalis
NGTMMQYFEWYLPNDGLHWNRLTNDASNLKNLGVTTVWIPPAYKGTSQNDVGYGAYDLYDLGEFNQKGTVRTKYGTRGQLQTAINTLKNQGIGTYGDVVMNHKGGADFTESVQAVEVNPNNRSQETSGEYTISAWTGFNFAGRNNLHSAFKWRWYHFDGTDWDQSRSLKRIYKFRGSGKSWDTEVSNEFGNYDYLMYADVDFDHPEVKAELKNWGKWYVQSLNLDGFRLDAVKHIKHDYIQEWLADVRRTTGKELFTVAEYWQNDLGAINNYLAKTGYSHSVFDVPLHYNFQRAANSGGNFDMRTIFNGSVVQQHPTLAVTIVDNHDSQPGQSLESTVDAWFKPLAYAMIMTREQGYPNLFYGDFYGTKGSSNREIPNLSSKLTPILKARKDMAYGTQHDYLNHQDVIGWTREGVTDRSKSGLATILSDGPGGNKWMYVGKRNAGETWRDKTGN

SEQ ID NO: 42936 - protein, 454 aa, Jeotgalibacillus campisalis
NGTMMQYFEWYLPNDGLHWNRLTNDASNLKALGVTTVWIPPAYKGTSQNDVGYGAYDLYDLGEFNQKGTVRTKYGTRGQLQTAINTLKNQGIGTYGDVVMNHKGGADFTESVQAVEVNPNNRSQETSGEYTISAWTGFNFAGRNNLHSAFKWRWYHFDGTDWDQSRSLNRIYKFRGSGKSWDTEVSNEFGNYDYLMYADVDFDHPEVKAELKNWGKWYVQSLNLDGFRLDAVKHIKHDYIQEWLADVRRTTGKELFTVAEYWQNDLGAINNYLAKTGYSHSVFDVPLHYNFQRAANSGGNFDMRTIFNGSVVQQHPTLAVTIVDNHDSQPGQSLESTVDAWFKPLAYAMIMTREQGYPNLFYGDFYGTKGSSNREIPNLSSKLTPILKARKDMAYGTQHDYLNHQDVIGWTREGVTDRSKSGLATILSDGPGGNKWMYVGKRNAGETWRDKTGN

SEQ ID NO: 42937 - protein, 454 aa, Jeotgalibacillus campisalis
NGTMMQYFEWYLPNDGLHWNRLTNDASNLKSLGVTTVWIPPAYKGTSQNDVGYGAYDLYDLGEFNQKGTVRTKYGTRGQLQTAINTLKNQGIGTYGDVVMNHKGGADFTESVQAVEVNPNNRSQETSGEYTISAWTGFNFAGRNNLHSAFKWRWYHFDGTDWDQSRSLNRIYKFRGSGKSWDTEVSNEFGNYDYLMYADVDFDHPEVKAELKNWGKWYVQSLNLDGFRLDAVKHIKHDYIQEWLADVRRTTGKELFTVAEYWQNDLGAINNYLAKTGYSHSVFDVPLHYNFQRAANSGGNFDMRTIFNGSVVQQHPTLAVTIVDNHDSQPGQSLESTVDAWFKPLAYAMIMTREQGYPNLFYGDFYGTKGSSNREIPNLSSKLTPILKARKDMAYGTQHDYLNHQDVIGWTREGVTDRSKSGLATILSDGPGGNKWMYVGKRNAGETWRDKTGN

SEQ ID NO: 42938 - protein, 454 aa, Jeotgalibacillus campisalis
NSTMMQYFEWYLPNDGLHWNRLTNDASNLKNLGVTTVWIPPAYKGTSQNDVGYGAYDLYDLGEFNQKGTVRTKYGTRGQLQTAINTLKNQGIGTYGDVVMNHKGGADFTESVQAVEVNPNNRSQETSGEYTISAWTGFNFAGRNNLHSAFKWRWYHFDGTDWDQSRSLNRIYKFRGSGKSWDTEVSNEFGNYDYLMYADVDFDHPEVKAELKNWGKWYVQSLNLDGFRLDAVKHIKHDYIQEWLADVRRTTGKELFTVAEYWQNDLGAINNYLAKTGYSHSVFDVPLHYNFQRAANSGGNFDMRTIFNGSVVQQHPTLAVTIVDNHDSQPGQSLESTVDAWFKPLAYAMIMTREQGYPNLFYGDFYGTKGSSNREIPNLSSKLTPILKARKDMAYGTQHDYLNHQDVIGWTREGVTDRSKSGLATILSDGPGGNKWMYVGKRNAGETWRDKTGN

SEQ ID NO: 42939 - protein, 454 aa, Jeotgalibacillus campisalis
NMTMMQYFEWYLPNDGLHWNRLTNDASNLKNLGVTTVWIPPAYKGTSQNDVGYGAYDLYDLGEFNQKGTVRTKYGTRGQLQTAINTLKNQGIGTYGDVVMNHKGGADFTESVQAVEVNPNNRSQETSGEYTISAWTGFNFAGRNNLHSAFKWRWYHFDGTDWDQSRSLNRIYKFRGSGKSWDTEVSNEFGNYDYLMYADVDFDHPEVKAELKNWGKWYVQSLNLDGFRLDAVKHIKHDYIQEWLADVRRTTGKELFTVAEYWQNDLGAINNYLAKTGYSHSVFDVPLHYNFQRAANSGGNFDMRTIFNGSVVQQHPTLAVTIVDNHDSQPGQSLESTVDAWFKPLAYAMIMTREQGYPNLFYGDFYGTKGSSNREIPNLSSKLTPILKARKDMAYGTQHDYLNHQDVIGWTREGVTDRSKSGLATILSDGPGGNKWMYVGKRNAGETWRDKTGN

SEQ ID NO: 42940 - protein, 454 aa, Jeotgalibacillus campisalis
NFTMMQYFEWYLPNDGLHWNRLTNDASNLKNLGVTTVWIPPAYKGTSQNDVGYGAYDLYDLGEFNQKGTVRTKYGTRGQLQTAINTLKNQGIGTYGDVVMNHKGGADFTESVQAVEVNPNNRSQETSGEYTISAWTGFNFAGRNNLHSAFKWRWYHFDGTDWDQSRSLNRIYKFRGSGKSWDTEVSNEFGNYDYLMYADVDFDHPEVKAELKNWGKWYVQSLNLDGFRLDAVKHIKHDYIQEWLADVRRTTGKELFTVAEYWQNDLGAINNYLAKTGYSHSVFDVPLHYNFQRAANSGGNFDMRTIFNGSVVQQHPTLAVTIVDNHDSQPGQSLESTVDAWFKPLAYAMIMTREQGYPNLFYGDFYGTKGSSNREIPNLSSKLTPILKARKDMAYGTQHDYLNHQDVIGWTREGVTDRSKSGLATILSDGPGGNKWMYVGKRNAGETWRDKTGN

SEQ ID NO: 42941 - protein, 454 aa, Jeotgalibacillus campisalis
NGTMMQYFEWYLPNDGLHWNRLTNDASNLKNLGVTTVWIPPAYKGTSQNDVGYGAYDLYDLGEFNQKGTVRTKYGTRGQLQTAINTLKNQGIGTYGDVVMNHKGGADFTESVQAVEVNPNNRSQETSGEYTISAWTGFNFAGRNNLHSAFKWRWYHFDGTDWDQSRSLSRIYKFRGSGKSWDTEVSNEFGNYDYLMYADVDFDHPEVKAELKNWGKWYVQSLNLDGFRLDAVKHIKHDYIQEWLADVRRTTGKELFTVAEYWQNDLGAINNYLAKTGYSHSVFDVPLHYNFQRAANSGGNFDMRTIFNGSVVQQHPTLAVTIVDNHDSQPGQSLESTVDAWFKPLAYAMIMTREQGYPNLFYGDFYGTKGSSNREIPNLSSKLTPILKARKDMAYGTQHDYLNHQDVIGWTREGVTDRSKSGLATILSDGPGGNKWMYVGKRNAGETWRDKTGN

SEQ ID NO: 42942 - protein, 483 aa, Bacillus licheniformis
DGLNGTLMQYFEWYTPNDGQHWKRLQNDAEHLSDIGITAVWIPPAYKGTSQADVGYGAYDLYDLGEFHQKGTVRTKYGTKGELQSAIKSLHSRDINVYGDVVINHKGGADATEDVTAVEVDPADRNRVISGEHLIKAWTHFHFPGRGSTYSDFKWHWYHFDGTDWDESRKLNRIYKFQGKAWDWEVSNENGNYDYLMYADIDYDHPDVAAEIKRWGTWYANELQLDGFRLDAVKHIKFSFLRDWVNHVREKTGKEMFTVAEYWQNDLGALENYLNKTNFNHSVFDVPLHYQFHAASTQGGGYDMRKLLNGTVVSKHPLKSVTFVDNHDTQPGQSLESTVQTWFKPLAYAFILTRESGYPQVFYGDMYGTKGDSQREIPALKHKIEPILKARKQYAYGAQHDYFDHHDIVGWTREGDSSVANSGLAALITDGPGGAKRMYVGRQNAGETWHDITGNRSEPVVINSEGWGEFHVNGGSVSIYVQR

SEQ ID NO: 42943 - protein, 473 aa, Penicillium sp.
AEWRSQSIYFLLTDRFGRTDNSTTAACNVSDRVYCGGSWQGIINHLDYIQGMGFTAIWITPVTEQLSQDTGDGEAYHGYWQQEIYNVNTNYGTAADLLALSKALHSRGMYLMVDVVANHMGYDGAGNTVDYSVFNPFDSSSYFHSYCEISDYSDQTNVEDCWLGDTTVSLPDLDTTLTSVQTIWYNWVTELVSNYSIDGLRIDTVKHVQKSFWPGYNSAAGVYCVGEVFDGDPAYTCPYQSYLDGVLNYPIYYQLLYAFESTSGSISGLYNMINSVASDCSDPTLLGNFIENHDNPRFASYTSDYSQAKNVISFIFFSDGIPIVYAGQEQHYSGGSDPANREATWLSGYDKTAQLYTYITTTNKIRALAISKDSAYISSKNNAFYTDSNTIAMKKGSSGSQVITVLSNRGSSGSSYTLTLSGSGYSSGTKLMEMYTCTAVTVDSSGNIAVPMASGLPRVYMLASSACSICSSA

SEQ ID NO: 42944 - protein, 479 aa, unidentified
NGTLMQYFEWYTPNDGQHWKRLQNDAEHLSDIGITAVWIPPAYKGTSQADVGYGAYDLYDLGEFHQKGTVRTKYGTKGELQSAIKSLHSRDINVYGDVVINHKGGADATEDVTAVEVDPADRNRVISGEHLIKAWTHFHFPGRGSTYSDFKWYWYHFDGTDWDESRKLNRIYKFQGKTWDWEVSNEFGNYDYLMYADIDYDHPDVVAEIKRWGTWYANELQLDGFRLDAVKHIKFSFLRDWVNHVREKTGKEMFTVAEYWSNDLGALENYLNKTNFNHSVFDVPLHYQFHAASTQGGGYDMRKLLNGTVVSKHPLKSVTFVDNHDTQPGQSLESTVQTWFKPLAYAFILTRESGYPQVFYGDMYGTKGDSQREIPALKHKIEPILKARKQYAYGAQHDYFDHHDIVGWTREGDSSVANSGLAALITDGPGGAKRMYVGRQNAGETWHDITGNRSEPVVINSEGWGEFHVNGGSVSIYVQ

SEQ ID NO: 42945 - protein, 479 aa, Bacillus licheniformis
NGTLMQYFEWYMPNDGQHWKRLQNDSAYLAEHGITAVWIPPAYKGTSQADVGYGAYDLYDLGEFHQKGTVRTKYGTKGELQSAIKSLHSRDINVYGDVVINHKGGADATEDVTAVEVDPADRNRVISGEHLIKATHFHFPGRGSTYSDFKWHWYHFDGTDWDESRKLNRIYKFQGKAWDWEVSNENGNYDYLMYADIDYDHPDVAAEIKRWGTWYANELQLDGFRLDAVKHIKFSFLRDWVNHVREKTGKEMFTVAEYWQNDLGALENYLNKTNFNHSVFDVPLHYQFHAASTQGGGYDMRKLLNGTVVSKHPLKSVTFVDNHDTQPGQSLESTVQTWFKPLAYAFILTRESGYPQVFYGDMYGTKGDSQREIPALKHKIEPILKARKQYAYGAQHDYFDHHDIVGWTREGDSSVANSGLAALITDGPGGAKRMYVGRQNAGETWHDITGNRSEPVVINSEGWGEFHVNGGSVSIYVQR

SEQ ID NO: 42946 - protein, 479 aa, Bacillus licheniformis
NGTLMQYFEWYMPNDGQHWKRLQNDSAYLAEHGITAVWIPPAYKGTSQADVGYGAYDLYDLGEFHQKGTVRTKYGTKGELQSAIKSLHSRDINVYGDVVINHKGGADATEDVTAVEVDPADRNRVISGEHLIKAWTHFHFPGRGSTYSDFKWHWYHFDGTDWDESRKLNRIYKFQGKAWDWEVSNENGNYDYLYADIDYDHPDVAAEIKRWGTWYANELQLDGFRLDAVKHIKFSFLRDWVNHVREKTGKEMFTVAEYWQNDLGALENYLNKTNFNHSVFDVPLHYQFHAASTQGGGYDMRKLLNGTVVSKHPLKSVTFVDNHDTQPGQSLESTVQTWFKPLAYAFILTRESGYPQVFYGDMYGTKGDSQREIPALKHKIEPILKARKQYAYGAQHDYFDHHDIVGWTREGDSSVANSGLAALITDGPGGAKRMYVGRQNAGETWHDITGNRSEPVVINSEGWGEFHVNGGSVSIYVQR

SEQ ID NO: 42947 - protein, 480 aa, Synthetic construct
VNGTMMQYFEWDLPNDGTLWTKVKNEAANLSSLGITALWLPPAYKGTSQSDVGYGVYDLYDLGEFNQKGTVRTKYGTKDQYIQAIQAAKAAGMQVYADVVFNHKAGADATEDVTAVEVNPANRNQETSEEYQIKAWTDFRFPGRGNTYSDFKWHWYHFDGADWDESRKISRIFKFRGEGKAWDWEVSSENGNYDYLMYADVDMDHPEVVTELKNWGKWYVNTTNVDGFRLDAVKHIKYSFFPDWLASVRSQTGKNLFAVGEFWSYDVNKLHNYITKTNGTMSLFDAPLHNNFYTASKSSGYFDMRYLLNNTLMKDQPVLAVTLVDNHDTQPGQSLQSWVEPWFKPLAYAFILTRQEGYPCVFYGDYYGIPKYNIPGLKSKIDPLLIARRDYAYGTQRDYIDHQDIIGWTREGIDSKPNSGLAALITDGPGGSKWMYVGKKHAGKVFYDLTGNRSDTVTINADGWGEFKVNGGSVSIWVAK

SEQ ID NO: 42948 - protein, 456 aa, Jeotgalibacillus campisalis
NGTMMQYFEWYLPNDGLHWNRLTNDASNLKNLGVTTVWIPPAYKGTSQNDVGYGAYDLYDLGEFNQKGTVRTKYGTRGQLQTAINTLKNQGIGTYGDVVMNHKGGADFTESVQAVEVNPNNRSQETSGEYTISAWTGFNFAGRNNLHSAFKWRWYHFDGTDWDQSRSLNRIYKFRGSGKSWDTEVSNEFGNYDYLMYADVDFDHPEVKAELKNWGKWYVQSLNLDGFRLDAVKHIKHDYIQEWLADVRRTTGKELFTVAEYWQNDLGAINNYLAKTNYSHSVFDVPLHYNFQRAANSGGNFDMRTIFNGSVVQQHPTLAVTIVDNHDSQPGQSLESTVDAWFKPLAYAMIMTREQGYPNLFYGDFYGTKGSSNREIPNLSSKLTPILKARKDMAYGTQHDYLNHQDVIGWTREGVTDRSKSGLATILSDGPGGNKWMYVGKRNAGETWRDKTGNSS

SEQ ID NO: 42949 - protein, 456 aa, Jeotgalibacillus campisalis
NGTMMQYFEWYLPNDGLHWNRLTNDASNLKNLGVTTVWIPPAYKGTSQNDVGYGAYDLYDLGEFNQKGTVRTKYGTRGQLQTAINTLKNQGIGTYGDVVMNHKGGADFTESVQAVEVNPNNRSQETSGEYTISAWTGFNFAGRNNLHSAFKWRWYHFDGTDWDQSRSLNRIYKFRGSGKSWDTEVSNEFGNYDYLMYADVDFDHPEVKAELKNWGKWYVQSLNLDGFRLDAVKHIKHDYIREWLADVRRTTGKELFTVAEYWQNDLGAINNYLAKTGYSHSVFDVPLHYNFQRAANSGGNFDMRTIFNGSVVQQHPTLAVTIVDNHDSQPGQSLESTVDAWFKPLAYAMIMTREQGYPNLFYGDFYGTKGSSNREIPNLSSKLTPILKARKDMAYGTQHDYLNHQDVIGWTREGVTDRSKSGLATILSDGPGGNKWMYVGKRNAGETWRDKTGNSS

SEQ ID NO: 42950 - protein, 478 aa, Cytophaga sp.
NGTMMQYFEWYLPNDGNHWNRLNSDASNLKSKGITAVWIPPAWKGASQNDVGYGAYDLYDLGEFNQKGTVRTKYGTRSQLQAAVTSLKNNGIQVYGDVVMNHKGGADATEMVRAVEVNPNNRNQEVTGEYTIEAWTRFDFPGRGNTHSSFKWRWYHFDGVDWDQSRRLNNRIYKFRGKAWDWEVDTENGNYDYLMYADIDMDHPEVVNELRNWGVWYTNTLGLDGFRIDAVKHIKYSFTRDWINHVRSATGKNMFAVAEFWKNDLGAIENYLQKTNWNHSVFDVPLHYNLYNASKSGGNYDMRNIFNGTVVQRHPSHAVTFVDNHDSQPEEALESFVEEWFKPLAYALTLTREQGYPSVFYGDYYGIPTHGVPAMRSKIDPILEARQKYAYGTQHDYIDNPDIIGWTREGDSTKAKSGLATIITDGAGGSKRMYVGTSNAGETWYDLTGNRSDTVTIGSDGYATFPVNGGSVSVWVQK

SEQ ID NO: 42951 - protein, 478 aa, unidentified
NGTMMQYFEWYLPNDGNHWNRLRSDASNLKDKGISAVWIPPAWKGASQNDVGYGAYDLYDLGEFNQKGTIRTKYGTRNQLQAAVNALKSNGIQVYGDVVMNHKGGADATEMVKAVEVNPNNRNQEVSGEYTIEAWTKFDFPGRGNTHSNFKWRWYHFDGVDWDQSRKLNNRIYKFRGKGWDWEVDTEFGNYDYLMYADIDMDHPEVVNELRNWGVWYTNTLGLDGFRIDAVKHIKYSFTRDWINHVRSATGKNMFAVAEFWKNDLGAIENYLNKTNWNHSVFDVPLHYNLYNASKSGGNYDMRQIFNGTVVQKHPMHAVTFVDNHDSQPEEALESFVEEWFKPLAYALTLTREQGYPSVFYGDYYGIPTHGVPAMKSKIDPILEARQKYAYGRQHDYFDHHDIVGWTREGDSSVANSGLAALITDGPGGAKRMYVGRQNAGETWHDITGNRSEPVVINSEGWGEFHVNGGSVSIYVQR

SEQ ID NO: 42952 - protein, 477 aa, Synthetic construct
NGTMMQYFEWYLPNDGTLWTKMGSDASHLKSIGITGVWFPPAYKGQSQSDVGYGVYDMYDLGEFNQKGTVRTKYGTKAQLQSAITSLHNNGIQAYGDVVLNHKAGADGTEFVDAVEVDPSNRNQETSGTYQIQAWTKFDFPGRGNTYSSFKWRWYHFDGTDWDESRKLNRIYKFSTGKAWDWEVDTENGNYDYLMFADLDYDHPDVQTEVKNWGKWFVNTLNLDGVRLDAVKHIKFDYMSSWLSSVKSTTGKSNLFAVGEYWNTSLGALENYENKTNWSMSLFDVPLHMNFQAAANGGGYYDMRNLLNNTMMKNHPIQAVTFVDNHDTEPGQALQSWVSDWFKPLAYATILTRQEGYPCVFYGDYYGIPSQSVSAKSTWLDKQLSARKSYAYGTQHDYLDNQDVIGWTREGDSAHAGSGLATVMSDGPGGSKTMYVGTAHAGQVFKDITGNRTDTVTINSAGNGTFPCNGGSVSIWV

SEQ ID NO: 42953 - protein, 478 aa, Synthetic construct
NGTMMQYFEWYLPNDGTLWTKMGSDASHLKSIGITGVWFPPAYKGQSQSDVGYGVYDMYDLGEFNQKGTVRTKYGTKAQLQSAITSLHNNGIQAYGDVVLNHKAGADGTEFVDAVEVNPSNRNQETSGTYQIQAWTKFDFPGRGNTYSSFKWRWYHFDGTDWDESRKLNRIYKFRGTGKAWDWEVDTENGNYDYLMFADLDYDHPDVQTEVKNWGKWFVNTLNLDGVRLDAVKHIKFDYMSSWLSSVKSTTGKSNLFAVGEYWNTSLGALENYENKTNWSMSLFDVPLHMNFQAAANGGGYYDMRNLLNNTMMKNHPIQAVTFVDNHDTEPGQALQSWVSDWFKPLAYATILTRQEGYPCVFYGDYYGIPSQSVSAKSTWLDKQLSARKSYAYGTQHDYLDNQDVIGWTREGDSAHAGSGLATVMSDGPGGSKTMYVGTAHAGQVFKDITGNRTDTVTINSAGNGTFPCNGGSVSIWV

SEQ ID NO: 42954 - protein, 478 aa, Synthetic construct
NGTMMQYFEWYLPNDGTLWTKMGSDASHLKSIGITGVWFPPAYKGQSQSDVGYGVYDMYDLGEFNQKGTVRTKYGTKAQLQSAITSLHNNGIQAYGDVVLNHKAGADSTEWVDAVEVNPSNRNQETSGTYQIQAWTKFDFPGRGNTYSSFKWRWYHFDGTDWDESRKLNRIYKFRGTGKAWDWEVDTENGNYDYLMFADLDYDHPDVQTEVKNWGKWFVNTLNLDGVRLDAVKHIKFDYMSSWLSSVKSTTGKSNLFAVGEYWNTSLGALENYENKTNWSMSLFDVPLHMNFQAAANGGGYYDMRNLLNNTMMKNHPIQAVTFVDNHDTEPGQALQSWVSDWFKPLAYATILTRQEGYPCVFYGDYYGIPSQSVSAKSTWLDKQLSARKSYAYGTQHDYLDNQDVIGWTREGDSAHAGSGLATVMSDGPGGSKTMYVGTAHAGQVFKDITGNRTDTVTINSAGNGTFPCNGGSVSIWV

SEQ ID NO: 42955 - protein, 479 aa, Synthetic construct
NGTMMQYFEWYLPNDGTLWTKMGSDASHLKSIGITGVWFPPAYKGQSQSDVGYGVYDMYDLGEFNQKGTVRTKYGTKAQLQSAITSLHNNGIQAYGDVVLNHKGGADATEMVRAVEVNPNNRNQEVTGEYTIEAWTRFDFPGRGNTHSSFKWRWYHFDGVDWDQSRRLNNRIYKFRGHGKAWDWEVDTENGNYDYLMYADIDYDHPDVQTEVKNWGKWFVNTLNLDGVRLDAVKHIKFDYMSSWLSSVKSTTGKSNLFAVGEYWNTSLGALENYENKTNWSMSLFDVPLHMNFQAAANGGGYYDMRNLLNNTMMKNHPIQAVTFVDNHDTEPGQALQSWVSDWFKPLAYATILTRQEGYPCVFYGDYYGIPSQSVSAKSTWLDKQLSARKSYAYGTQHDYLDNQDVIGWTREGDSAHAGSGLATVMSDGPGGSKTMYVGTAHAGQVFKDITGNRTDTVTINSAGNGTFPCNGGSVSIWV

SEQ ID NO: 42956 - protein, 475 aa, Penicillium antarcticum
TPAEWRSQSIYFMLTDRFGRSDNSTTAACNVSDRTYCGGTWQGIINHLDYIQGMGFTAIWITPVTEQLPQDTGDGEAYHGYWQQNIYEVDSNLGTAADLLALSEALHARGMYLMVDVVANHMGYAGAGSSVEYSVFHPFSSSSYFHSYCLISNYDDQSNVEDCWLGDTIVSLPDVDTTQTAVQTLWYDWIGDLVSNYSIDGLRIDTVKHVQKSFWPGYNDAAGVYCVGEIFDGDPAYTCDYQNYMDGVLNYPIYYQLLYAFQSSSGSISDLYDMINSVKSDCADPTLLGNFIENHDNPRFASYTSDYSQAKNVISFLFLSDGIPIIYSGQEQHYSGGADPANREATWLSGYSTTAELYKYIATTNRIRKAAVSADSSYITTKNVPFYQDSHTLAMKKGSSASPVITVLSNYGSSGSSYTLSLSGSGYSSGTNLMEMYTCTSVTVDSSGNIAVPMASGLPRVLMLASSASSICASS

SEQ ID NO: 42957 - protein, 480 aa, Synthetic construct
NGTMMQYFEWYLPDDGTLWTKVANEANNLSSLGITALWLPPAYKGTSRSDVGYGVYDLYDLGEFNQKGAVRTKYGTKAQYLQAIQAAHAAGMQVYADVVFNHKGGADATENVLAVEVNPNNRNQEISGDYTIEAWTKFDFPGRGNTYSDFKWRWYHFDGVDWDQSRQFQNRIYKFRGDGKAWDWEVDSENGNYDYLMYADVDMDHPEVVTELKNWGKWYVNTTNIDGFRLDAVKHIKFSFFPDWLSYVRSQTGKPLFTVGEYWSYDINKLHNYIMKTNGTMSLFDAPLHNKFYTASKSGGTFDMRTLMTNTLMKDQPTLAVTFVDNHDTEPGQALQSWVDPWFKPLAYAFILTRQEGYPCVFYGDYYGIPQYNIPSLKSKIDPLLIARRDYAYGTQHDYLDHSDIIGWTREGVTEKPGSGLAALITDGPGGSKWMYVGKQHAGKVFYDLTGNRSDTVTINSDGWGEFKVNGGSVSVWVPR

SEQ ID NO: 42958 - protein, 480 aa, Synthetic construct
NGTMMQYFEWDLPNDGTLWTKVKNEATNLFSLGITALWLPPAYKGTSQSDVGYGVYDLYDLGEFNQKGTIRTKYGTKTQYIQAIQAAKAAGMQVYADVVFNHKGGADATEMVRAVEVNPNNRNQEVSGEYTIEAWTKFDFPGRGNTHSNFKWRWYHFDGVDWDQSRKLNNRIYKFRGDGKGWDWEVDTENGNYDYLMYADIDMDHPEVVTELKNWGTWYVNTTNIDGFRLDAVKHIKYSFFPDWLTYVRNQTGKNLFAVGEFWSYDVNKLHNYITKTNGSMSLFDAPLHNNFYTASKSSGYFDMRYLLNNTLMKDQPSLAVTLVDNHDTQPGQSLQSWVEPWFKPLAYAFILTRQEGYPCVFYGDYYGIPKYNIPGLKSKIDPLLIARRDYAYGTQRDYIDHQDIIGWTREGIDTKPNSGLAALITDGPGGSKWMYVGKKHAGKVFYDLTGNRSDTVTINADGWGEFKVNGGSVSIWVAK

SEQ ID NO: 42959 - protein, 481 aa, Bacillus licheniformis
NGTLMQYFEWYMPNDGQHWKRLQNDSAYLAEHGITAVWIPPAYKGTSQADVGYGAYDLYDLGEFHQKGTVRTKYGTKGELQSAIKSLHSRDINVYGDVVINHKGGADATEDVTAVEVDPADRNRVISGEHLIKAWTHFHFPGRGSTYSDFKWHWYHFDGTDWDESRKLNNRIYKFQGKAWDWEVSNENGNYDYLMYADIDYDHPDVAAEIKRWGTWYANELQLDGFRLDAVKHIKFSFLRDWVNHVREKTGKEMFTVAEYWQNDLGALENYLNKTNFNHSVFDVPLHYQFHAASTQGGGYDMRKLLNGTVVSKHPLKSVTFVDNHDTQPGQSLESTVQTWFKPLAYAFILTRESGYPQVFYGDMYGTKGDSQREIPALKHKIEPILKARKQYAYGAQHDYFDHHDIVGWTREGDSSVANSGLAALITDGPGGAKRMYVGRQNAGETWHDITGNRSEPVVINSEGWGEFHVNGGSVSIYVQR

SEQ ID NO: 42960 - protein, 481 aa, Bacillus licheniformis
NGTLMQYFEWYTPNDGQHWKRLQNDSAYLAEHGITAVWIPPAYKGTSQADVGYGAYDLYDLGEFHQKGTVRTKYGTKGELQSAIKSLHSRDINVYGDVVINHKGGADATEDVTAVEVDPADRNRVISGEHLIKAYTHFHFPGRGSTYSDFKWHWYHFDGVDWDQSRRLNNRIYKFQGKAWDWEVDTEFGNYDYLTYADIDYDHPDVAAEIKRWGTWYANELQLDGFRLDAVKHIKFSFLRDWVNHVREKTGKEMFTVAEYWQNDLGALENYLNKTNFNHSVFDVPLHYQFHAASTQGGGYDMRKLLNGTVVSKHPLKSVTFVDNHDTQPGQSLESTVQTWFKPLAYAFILTRESGYPQVFYGDMYGTKGDSQREIPALKHKIEPILKARKQYAYGAQHDYFDHHDIVGWTREGDSSVANSGLAALITDGPGGAKRMYVGRQNAGETWHDITGNRSEPVVINSEGWGEFHVNGGSVSIYVQR

SEQ ID NO: 42961 - protein, 483 aa, unidentified
TNGTMMQYFEWYLPNDGNHWTRLQNDAANLSSKGVTAVWIPPAYKGTSQNDVGYGAYDLYDLGEFNQKGTVRTKYGTKAQLKSAIAELHKQNIHVYGDVVMNHKGGADFTETVTAVEVDPNNRNRETSGDYQISAWTGFTFPGRGNTYSPFKWNWYHFDGTDWDESRKINRIYKFRGTGKAWDWEVSSENGNYDYLMYADIDYEHPDVINEMKKWGTWYAKELNLDGFTLDAVKHIKHDYLRDWVTHVRNQTGKELFTVAEYWQNDIGQLNNYLAKTNYNQSVFDAPLHYHFHYASNSNGNYDMRNILKGTVMESNPRLAVTLVENHDSQPGQSLESVVSTWFKPLAYAFILTRAEGYPSVFYGDYYGTKGNSNYEIPSLKTQLDPILTARKNYAYGLQRDYIDHWDIIGWTREGEAARDKSGLATLITDGPGGYKWMEVGKQNAGEVWYDITGNRKETVTINNDGWGQFYVNGGSVSIYVQK

SEQ ID NO: 42962 - protein, 483 aa, Synthetic construct
AATNGTMMQYFEWYVPNDGQQWNRLRTDAPYLSSVGITAVWTPPAYKGTSQADVGYGPYDLYDLGEFNQKGTVRTKYGTKGELKSAVNTLHSNGIQVYGDVVMNHKAGADGTELVDAVEVNPSDRNQEISGTYQIQAWTKFDFPGRGNTYSSFKWRWYHFDGTDWDESRKLNRIYKFRGTGKAWDWEVDTENGNYDYLMYADLDYDHPDVVNEMKKWGVWYANEVGLDGYRLDAVKHIKFSFLKDWVDNARAATGKEMFTVGEYWQNDLGALNNYLAKVNYNQSLFDAPLHYNFYAASTGGGYYDMRNILNNTLVASNPTKAVTLVENHDTQPGQSLESTVQPWFKPLAYAFILTRSGGYPSVFYGDMYGTKGTTTREIPALKSKIEPLLKARKDYAYGTQRDYIDNPDVIGWTREGDSTKAKSGLATVITDGPGGSKRMYVGTSNAGEIWYDLTGNRTDKITIGSDGYATFPVNGGSVSVWV

SEQ ID NO: 42963 - protein, 460 aa, Bacillus licheniformis
RLQNDSAYLAEHGITAVWIPPAYKGTSQADVGYGAYDLYDLGEFHQKGTVRTKYGTKGELQSAIKSLHSRDINVYGDVVINHKGGADATEDVTAVEVDPADRNRVISGEHRIKAWTHFHFPGRGSTYSDFKWHWYHFDGTDWDESRKLNRIYKFQGKAWDWEVSNINGNYDYLMYADIDYDHPDVAAEIKRWGTWYANELQLDGFRLDAVKHIKFSFLRDWVNHVREKTGKEMFTVAEYWQNDLGALENYLNKTNFNHSVFDVPLHYQFHAASTQGGGYDMRKLLNGTVVSKHPLKAVTFVDNHDTQPGQSLESTVQTWFKPLAYAFILTRESGYPQVFYGDMYGTKGDSQREIPALKHKIEPILKARKQYAYGAQHDYFDHHDIVGWTREGDSSVANSGLAALITDGPGGAKRMYVGRQNAGETWHDITGNRSEPVVINSEGWGEFHVNGGSVSIYVQR

SEQ ID NO: 42964 - protein, 488 aa, Rasamsonia emersonii CBS 393.64
LFLLGNAVLALTPAEWRKQSIYFLLTDRFGRADNSTTAACDVTERIYCGGSWQGIINHLDYIQGMGFTAIWISPVTEQLPQNTGEGEAYHGYWQQEIYTVNSNFGTSDDLLALSKALHDRGMYLMVDVVANHMGYDGDGDSVDYSVFNPFNSSSYFHPYCLITDYSNQTDVEDCWLGDTTVSLPDLNTTETVVRTIWYDWVADLVSNYSIDGLRIDTVKHVEKSFWPGYNSAAGVYCVGEVLDGDPSYTCPYQDYLDGVLNYPIYYQLLYAFESSSGSISNLYNMINSVASECSDPTLLGNFIENHDNPRFASYTSDYSLAKNVIAFIFFSDGIPIVYAGQEQHYNGGNDPYNREATWLSGYSTTAELYTFIATTNAIRSLAISVDSEYLTYKNDPFYYDSNTLAMRKGSDGLQVITVLSNLGADGSSYTLTLSGSGYSSGTELVEAYTCTTVTVDSNGDIPVPMESGLPRVFLPASSFSGSSLCSSS

SEQ ID NO: 42965 - protein, 477 aa, Bacillus sp. (in: firmicutes)
NGTIMQYFEWNVPNDGQHWNRLHNNAQNLKNAGITAIWIPPAWKGTSQSDTGYGAYDLYDLGEFNQKGTVRTKYGTKAELERAIRSLKANGIQVYGDVVMNHKAGADFTERVQAVEVNPQNRNQEVSGTYQIEAWTGFNFPGRGNQHSSFKWRWYHFDGTDWDESRKLNRIYKFRGKAWDWEVDTEFGNYDYLMYADLDMDHPEVINELNRWGVWYANTLNLDGFRLDAVKHIKFSFMRDWLGHVRGQTGKNLFAVAEYWKNDLGALENYLSKTNWTMSAFDVPLHYNLYQASNSSGNYDMRNLLNGTLVQRHPSHAVTFVDNHDTQPGEALESFVQGWFKPLAYATILTREQGYPCVFYGDYYGIPSDGVPSYRQQIDPLLAARQQYAYGRQHDYFDHWDVIGWTREGNASHPNSGLATIMSDGPGGSKWMYVGRQKAGEVWHDMTGNRSGTVTINQDGWGHFFVNGGSVSVWVKR

SEQ ID NO: 42966 - protein, 477 aa, Bacillus sp. (in: firmicutes)
NGTIMQYFEWYVPNDGQHWNRLHNNAQNLKNAGITAIWIPPAWKGTSQSDTGYGAYDLYDLGEFNQKGTVRTKYGTKAELERAIRSLKANGIQVYGDVVMNHKAGADFTERVQAVEVNPQNRNQEVSGTYQIEAWTGFNFPGRGNQHSSFKWRWYHFDGTDWDESRKLNRIYKFRGKAWDWEVDTEFGNYDYLMYADLDMDHPEVINELNRWGVWYANTLNLDGFRLDAVKHIKFSFMRDWLGHVRGQTGKNLFAVAEYWKNDLGALENYLSKTNWTMSAFDVPLHYNLYQASNSSGNYDMRNLLNGTLVQRHPSHAVTFVDNHDTQPGEALESFVQGWFKPLAYATILTREQGYPQVFYGDYYGIPSDGVPSYRQQIDPLLAARQQYAYGRQHDYFDHWDVIGWTREGNASHPNSGLATIMSDGPGGSKWMYVGRQKAGEVWHDMTGNRSGTVTINQDGWGHFFVNGGSVSVWVKR

SEQ ID NO: 42967 - protein, 477 aa, Bacillus sp. (in: firmicutes)
NGTIMQYFEWNVPNDGQHWNRLHNNAQNLKNAGITAIWIPPAWKGTSQSDTGYGAYDLYDLGEFNQKGTVRTKYGTKAQLERAIRSLKANGIQVYGDVVMNHKAGADFTERVQAVEVNPQNRNQEVSGTYQIEAWTGFNFPGRGNQHSSFKWRWYHFDGTDWDESRKLNRIYKFRGKAWDWEVDTEFGNYDYLMYADLDMDHPEVINELNRWGVWYANTLNLDGFRLDAVKHIKFSFMRDWLGHVRGQTGKNLFAVAEYWKNDLGALENYLSKTNWTMSAFDVPLHYNLYQASNSSGNYDMRNLLNGTLVQRHPSHAVTFVDNHDTQPGEALESFVQGWFKPLAYATILTREQGYPQVFYGDYYGIPSDGVPSYRQQIDPLLAARQQYAYGRQHDYFDHWDVIGWTREGNASHPNSGLATIMSDGPGGSKWMYVGRQKAGEVWHDMTGNRSGTVTINQDGWGHFFVNGGSVSVWVKR

SEQ ID NO: 42968 - protein, 477 aa, Bacillus sp. (in: firmicutes)
NGTIMQYFEWNVPNDGQHWNRLHNNAQNLKNAGITAIWIPPAWKGTSQSDTGYGAYDLYDLGEFNQKGTVRTKYGTKAELERAIRSLKANGIQVYGDVVMNHKAGADFTERVQAVEVNPQNRNQEVSGTYQIEAWTGFNFPGRGNQHSSFKWRWYHFDGTDWDESRKLNRIYKFRGKAWDWEVDTEFGNYDYLMYADLDMDHPEVINELNRWGVWYANTLNLDGFRLDAVKHIKFSFMRDWLGHVRGQTGKNLFAVAEYWKNDLGALENYLSKTNWTMSAFDVPLHYNLYQASKSSGNYDMRNLLNGTLVQRHPSHAVTFVDNHDTQPGEALESFVQGWFKPLAYATILTREQGYPQVFYGDYYGIPSDGVPSYRQQIDPLLAARQQYAYGRQHDYFDHWDVIGWTREGNASHPNSGLATIMSDGPGGSKWMYVGRQKAGEVWHDMTGNRSGTVTINQDGWGHFFVNGGSVSVWVKR

SEQ ID NO: 42969 - protein, 477 aa, Bacillus sp. (in: firmicutes)
NGTIMQYFEWNVPNDGQHWNRLHNNAQNLKNAGITAIWIPPAWKGTSQSDTGYGAYDLYDLGEFNQKGTVRTKYGTKAELLRAIRSLKANGIQVYGDVVMNHKAGADFTERVQAVEVNPQNRNQEVSGTYQIEAWTGFNFPGRGNQHSSFKWRWYHFDGTDWDESRKLNRIYKFRGKAWDWEVDTEFGNYDYLMYADLDMDHPEVINELNRWGVWYANTLNLDGFRLDAVKHIKFSFMRDWLGHVRGQTGKNLFAVAEYWKNDLGALENYLSKTNWTMSAFDVPLHYNLYQASNSSGNYDMRNLLNGTLVQRHPSHAVTFVDNHDTQPGEALESFVQGWFKPLAYATILTREQGYPQVFYGDYYGIPSDGVPSYRQQIDPLLAARQQYAYGRQHDYFDHWDVIGWTREGNASHPNSGLATIMSDGPGGSKWMYVGRQKAGEVWHDMTGNRSGTVTINQDGWGHFFVNGGSVSVWVKR

SEQ ID NO: 42970 - protein, 477 aa, Bacillus sp. (in: firmicutes)
NGTIMQYFEWNVPNDGQHWNRLHNNAQNLKNAGITAIWIPPAWKGTSQSDTGYGAYDLYDLGEFNQKGTVRTKYGTKAELERAIRSLKANGIQVYGDVVMNHKAGADFTERVQAVEVNPQNRNQEVSGTYQIEAWTGFNFPGRGNQHSSFKWRWYHFDGTDWDESRKLNRIYKFRGKAWDWEVDTEFGNYDYLMYADLDMDHPEVINELNRWGVWYANTLNLDGFRLDAVKHIKFSFMRDWLGHVRGQTGKNLFAVAEYWKNDLGALENYLSKTNWTMSAFDAPLHYNLYQASNSSGNYDMRNLLNGTLVQRHPSHAVTFVDNHDTQPGEALESFVQGWFKPLAYATILTREQGYPQVFYGDYYGIPSDGVPSYRQQIDPLLAARQQYAYGRQHDYFDHWDVIGWTREGNASHPNSGLATIMSDGPGGSKWMYVGRQKAGEVWHDMTGNRSGTVTINQDGWGHFFVNGGSVSVWVKR

SEQ ID NO: 42971 - protein, 477 aa, Bacillus sp. (in: firmicutes)
NGTIMQYFEWNVPDDGQHWNRLHNNAQNLKNAGITAIWIPPAWKGTSQSDTGYGAYDLYDLGEFNQKGTVRTKYGTKAELERAIRSLKANGIQVYGDVVMNHKAGADFTERVQAVEVNPQNRNQEVSGTYQIEAWTGFNFPGRGNQHSSFKWRWYHFDGTDWDESRKLNRIYKFRGKAWDWEVDTEFGNYDYLMYADLDMDHPEVINELNRWGVWYANTLNLDGFRLDAVKHIKFSFMRDWLGHVRGQTGKNLFAVAEYWKNDLGALENYLSKTNWTMSAFDVPLHYNLYQASNSSGNYDMRNLLNGTLVQRHPSHAVTFVDNHDTQPGEALESFVQGWFKPLAYATILTREQGYPQVFYGDYYGIPSDGVPSYRQQIDPLLAARQQYAYGRQHDYFDHWDVIGWTREGNASHPNSGLATIMSDGPGGSKWMYVGRQKAGEVWHDMTGNRSGTVTINQDGWGHFFVNGGSVSVWVKR

SEQ ID NO: 42972 - protein, 477 aa, Bacillus sp. (in: firmicutes)
NGTIMQYFEWNVPNDGQHWTRLHNNAQNLKNAGITAIWIPPAWKGTSQSDTGYGAYDLYDLGEFNQKGTVRTKYGTKAELERAIRSLKANGIQVYGDVVMNHKAGADFTERVQAVEVNPQNRNQEVSGTYQIEAWTGFNFPGRGNQHSSFKWRWYHFDGTDWDESRKLNRIYKFRGKAWDWEVDTEFGNYDYLMYADLDMDHPEVINELNRWGVWYANTLNLDGFRLDAVKHIKFSFMRDWLGHVRGQTGKNLFAVAEYWKNDLGALENYLSKTNWTMSAFDVPLHYNLYQASNSSGNYDMRNLLNGTLVQRHPSHAVTFVDNHDTQPGEALESFVQGWFKPLAYATILTREQGYPQVFYGDYYGIPSDGVPSYRQQIDPLLAARQQYAYGRQHDYFDHWDVIGWTREGNASHPNSGLATIMSDGPGGSKWMYVGRQKAGEVWHDMTGNRSGTVTINQDGWGHFFVNGGSVSVWVKR

SEQ ID NO: 42973 - protein, 477 aa, Bacillus sp. (in: firmicutes)
NGTIMQYFEWNVPNDGQHWNRLHNNAQNLKNAGITAIWIPPAWKGTSQSDTGYGAYDLYDLGEFNQKGTVRTKYGTKAELERAIRSLKANGIQVYGDVVMNHKAGADFTERVQAVEVNPQNRNQEVSGTYQIEAWTGFNFPGRGNQHSSFKWRWYHFDGTDWDESRKLNRIYKFRGKAWDWEVDTEFGNYDYLMYADLDMDHPEVINELNRWGVWYANTLNLDGFRLDAVKHIKFSFMRDWLGHVRGQTGKNLFAVAEYWKNDLGALENYLSKTNWTMSAFDVPLHYNLYQASNSSGNYDMRNLLNNTLVQRHPSHAVTFVDNHDTQPGEALESFVQGWFKPLAYATILTREQGYPQVFYGDYYGIPSDGVPSYRQLIDPLLAARQQYAYGRQHDYFDHWDVIGWTREGNASHPNSGLATIMSDGPGGSKWMYVGRQKAGEVWHDMTGNRSGTVTINQDGWGHFFVNGGSVSVWVKR

SEQ ID NO: 42974 - protein, 477 aa, Bacillus sp. (in: firmicutes)
NGTIMQYFEWNVPNDGQHWNRLHNNAQNLKNAGITAIWIPPAWKGTSQSDTGYGAYDLYDLGEFNQKGTVRTKYGTKAELERAIRSLKANGIQVYGDVVMNHKAGADFTERVQAVEVNPQNRNQEVSGTYQIEAWTGFNFPGRGNQHSSFKWRWYHFDGTDWDESRKLNRIYKFRGKAWDWEVDTEFGNYDYLMYADLDMDHPEVINELNRWGVWYANTLNLDGFRLDAVKHIKFSFMRDWLGHVRGQTGKNLFAVAEYWKNDIGALENYLSKTNWTMSAFDVPLHYNLYQASNSSGNYDMRNLLNGTLVQRHPSHAVTFVDNHDTQPGEALESFVQGWFKPLAYATILTREQGYPQVFYGDYYGIPSDGVPSYRQQIDPLLAARQQYAYGRQHDYFDHWDVIGWTREGNASHPNSGLATIMSDGPGGSKWMYVGRQKAGEVWHDMTGNRSGTVTINQDGWGHFFVNGGSVSVWVKR

SEQ ID NO: 42975 - protein, 480 aa, Bacillus licheniformis
NGTLMQYFEWYTPNDGQHWKRLQNDAEHLSDIGITAVWIPPAYKGLSQSDNGYGPYDLYDLGEFQQKGTVRTKYGTKSELQDAIGSLHSRNVQVYGDVVLNHKAGADATEDVTAVEVDPADRNRVISGEHRIKAWTHFHFPGRGSTYSDFKWHWYHFDGTDWDESRKLNRIYKFQGKAWDWEVSNENGNYDYLMYADIDYDHPDVAAEIKRWGTWYANELQLDGFRLDAVKHIKFSFLRDWVNHVREKTGKEMFTVAEYWQNDLGALENYLNKTNFNHSVFDVPLHYQFHAASTQGGGYDMRKLLNSTVVSKHPLKAVTFVDNHDTQPGQSLESTVQTWFKPLAYAFILTRESGYPQVFYGDMYGTKGDSQREIPALKHKIEPILKARKQYAYGAQHDYFDHHDIVGWTREGDSSVANSGLAALITDGPGGAKRMYVGRQNAGETWHDITGNRSEPVVINSEGWGEFHVNGGSVSIYVQR

SEQ ID NO: 42976 - protein, 480 aa, Bacillus amyloliquefaciens
NGTLMQYFEWYTPNDGQHWKRLQNDAEHLSDIGITAVWIPPAYKGTSQADVGYGAYDLYDLGEFHQKGTVRTKYGTKGELQSAIKSLHSRDINVYGDVVINHKGGADATEDVTAVEVDPADRNRVISGEHLIKAWTHFHFPGRGSTYSDFKWHWYHFDGTDWDESRKLNRIYRFQGKAWDWEVSNENGNYDYLMYADFDYDNPDVAAEIKRWGTWYANELQLDGFRLDAVKHIKFSFLRDWVNHVREKTGKEMFTVAEYWQNDLGALENYLNKTNFNHSVFDVPLHYQFHAASTQGGGYDMRKLLNGTVVSKHPLKSVTFVDNHDTQPGQSLESTVQTWFKPLAYAFILTRESGYPQVFYGDMYGTKGDSQRKIPALKHKIEPILKARKQYAYGAQHDYFDHHDIVGWTREGDSSVRNSGLAALITDGPGGAKRMYVGRQNAGETWHDITGNRSEPVVINSEGWGEFHVNGGSVSIYVQR

SEQ ID NO: 42977 - protein, 480 aa, Bacillus licheniformis
NGTLMQYFEWYTPNDGQHWKRLQNDAEHLSDIGITAVWIPPAYKGTSQADVGYGAYDLYDLGEFHQKGTVRTKYGTKGELQSAIKSLHSRDINVYGDVVINHKGGADATEDVTAVEVDPADRNRVISGEHLIKAWTHFHFPGRGSTYSDFKWHWYHFDGTDWDESRKLNRIYRFQGKAWDWEVSNENGNYDYLMYADFDYDNPDVAAEIKRWGTWYANELQLDGFRLDAVKHIKFSFLRDWVNHVREKTGKEMFTVAEYWQNDLGALENYLNKTNFNHSVFDVPLHYQFHAASTQGGGYDMRKLLNGTVVSKHPLKSVTFVDNHDTQPGQSLESTVQTWFKPLAYAFILTRESGYPQVFYGDMYGTKGDSQREIPALKHKIEPILKARKQYAYGAQHDYFDHHDIVGWTREGDSSVANSGLAALITDGPGGAKRMYVGRQNAGETWHDITGNRSEPVVINSEGWGEFHVNGGSVSIYVQR

SEQ ID NO: 42978 - protein, 480 aa, Bacillus amyloliquefaciens
NGTLMQYFEWYTPNDGQHWKRLQNDAEHLSDIGITAVWIPPAYKGTSQADVGYGAYDLYDLGEFHQKGTVRTKYGTKGELQSAIKSLHSRDINVYGDVVINHKGGADATEDVTAVEVDPADRNRVISGEHLIKAWTHFHFPGRGSTYSDFKWHWYHFDGTDWDESRKLNRIYRFQGKAWDWEVSNENGNYDYLMYADFDYDNPDVAAEIKRWGTWYANELQLDGFRLDAVKHIKFSFLRDWVNHVREKTGKEMFTVAEYWQNDLGALENYLNKTNFNHSVFDVPLHYQFHAASTQGGGYDMRKLLNGTVVSKHPLKSVTFVDNHDTQPGQSLESTVQTWFKPLAYAFILTRESGYPQVFYGDMYGTKGDSQRKIPALKHKIEPILKARKQYAYGAQHDYFDHHDIVGWTREGDSSVQNSGLAALITDGPGGAKRMYVGRQNAGETWHDITGNRSEPVVINSEGWGEFHVNGGSVSIYVQR

SEQ ID NO: 42979 - protein, 477 aa, Bacillus sp.
NETMMQYFEWDLPNDGTLWNRLHNNAQNLKNAGITALWLPPAYKGTSQSDVGYGVYDLYDLGEFNQKGTIRTKYGTKTQLERAIRSLKANGIQVYADVVFNHKAGADGTEFVDAVEVDPSNRNQETSGTYQIQAWTKFDFPGRGNTYSSFKWRWYHFDGTDWDESRKLNRIYKFRGKAWDWEVDTENGNYDYLMFADLDMDHPEVVTELKNWGTWYVNTTNIDGFRLDAVKHIKFSFMRDWLTYVRNQTGKNLFAVGEFWSYDVNKLHNYITKTNGSMSLFDAPLHNNFYTASKSSGYFDMRYLLNNTLMKDQPSLAVTLVDNHDTQPGQSLQSWVEPWFKPLAYAFILTRQEGYPCVFYGDYYGIPKYNIPGLKSKIDPLLIARRDYAYGTQRDYIDHQDIIGWTREGIDTKPNSGLAALITDGPGGSKWMYVGKKHAGKVFYDLTGNRSDTVTINADGWGEFKVNGGSVSIWVAK

SEQ ID NO: 42980 - protein, 477 aa, Bacillus sp.
NETMMQYFEWDLPNDGTLWTKVKNEAANLSSLGITALWLPPAYKGTSQSDVGYGVYDLYDLGEFNQKGTIRTKYGTKTQYIQAIQAAKAAGMQVYADVVFNHKAGADQTEFVDAVEVDPSNRNQEVSGTYQIEAWTKFDFPGRGNTYSSFKWRWYHFDGTDWDESRKLNRIYKFRGKAWDWEVDTENGNYDYLMFADLDMDHPEVVTELKNWGTWYVNTTNIDGFRLDAVKHIKFSFMRDWLTYVRNQTGKNLFAVGEFWSYDVNKLHNYITKTNGSMSLFDAPLHNNFYTASKSSGYFDMRNLLNGTLVQRHPSHAVTLVDNHDTQPGQSLQSWVEPWFKPLAYAFILTRQEGYPCVFYGDYYGIPSDGVPGLKSKIDPLLIARRDYAYGTQRDYIDHQDIIGWTREGIDTKPNSGLAALITDGPGGSKWMYVGKKHAGKVFYDLTGNRSDTVTINADGWGEFKVNGGSVSIWVAK

SEQ ID NO: 42981 - protein, 477 aa, Bacillus sp.
NETMMQYFEWDLPNDGTLWTKVKNEAANLSSLGITALWLPPAYKGTSQSDVGYGVYDLYDLGEFNQKGTIRTKYGTKTQYIQAIQAAKAAGMQVYADVVFNHKAGADGTEFVDAVEVDPSNRNQEVSGTYQIEAWTKFDFPGRGNTYSSFKWRWYHFDGTDWDESRKLNRIYKFRGKAWDWEVDTENGNYDYLMFADLDMDHPEVVTELKNWGTWYVNTTNIDGFRLDAVKHIKFSFMRDWLTYVRNQTGKNLFAVGEFWSYDVNKLHNYITKTNGSMSLFDAPLHNNFYTASKSSGYFDMRNLLNGTLVQRHPSHAVTLVDNHDTQPGQSLQSWVEPWFKPLAYAFILTRQEGYPCVFYGDYYGIPSDGVPGLKSKIDPLLIARRDYAYGTQRDYIDHQDIIGWTREGIDTKPNSGLAALITDGPGGSKWMYVGKKHAGKVFYDLTGNRSDTVTINADGWGEFKVNGGSVSIWVAK

SEQ ID NO: 42982 - protein, 477 aa, Bacillus sp.
NETMMQYFEWDLPNDGTLWTKVKNEAANLSSLGITALWLPPAYKGTSQSDVGYGVYDLYDLGEFNQKGTIRTKYGTKTQLERAIRSLKANGIQVYADVVFNHKAGADGTEFVDAVEVDPSNRNQEVSGTYQIEAWTKFDFPGRGNTYSSFKWRWYHFDGTDWDESRKLNRIYKFRGKAWDWEVDTENGNYDYLMFADLDMDHPEVVTELKNWGTWYVNTTNIDGFRLDAVKHIKFSFMRDWLTYVRNQTGKNLFAVGEFWSYDVNKLHNYITKTNGSMSLFDAPLHNNFYTASKSSGYFDMRYLLNNTLMKDQPSLAVTLVDNHDTQPGEALESFVQGWFKPLAYAFILTRQEGYPCVFYGDYYGIPKYNIPGLKSKIDPLLIARRDYAYGTQRDYIDHQDIIGWTREGIDTKPNSGLAALITDGPGGSKWMYVGKKHAGKVFYDLTGNRSDTVTINADGWGEFKVNGGSVSIWVAK

SEQ ID NO: 42983 - protein, 480 aa, Bacillus licheniformis
NGTLMQYFEWYMPNDGQHWRRLQNDSAYLAEHGITAVWIPPAYKGTSQADVGYGAYDLYDLGEFHQKGTVRTKYGTKGELQSAIKSLHSRDINVYGDVVINHKGGADATEDVTAVEVDPADRNRVISGEHLIKAWTHFHFPGRGSTYSDFKWHWYHFDGTDWDESRKLNRIYKFQGKAWDWEVSNENGNYDYLMYADIDYDHPDVAAEIKRWGTWYANELQLDGFRLDAVKHIKFSFLRDWVNHVREKTGKEMFTVAEYWQXDLGALENYLNKTNFNHSVFDVPLHYQFHAASTQGGGYDMRKLLNGTVVSKHPLKSVTFVDNHDTQPGQSLESTVQTWFKPLAYAFILTRESGYPQVFYGDMYGTKGDSQREIPALKHKIEPILKARKQYAYGAQHDYFDHHDIVGWTREGDSSVANSGLAALITDGPGGAKRMYVGRQNAGETWHDITGNRSEPVVINSEGWGEFHVNGGSVSIYVQR

SEQ ID NO: 42984 - protein, 480 aa, Synthetic construct
NGTLMQYFEWYMPNDGQHWRRLQNDSAYLAEHGITAVWIPPAYKGTSQADVGYGAYDLYDLGEFHQKGTVRTKYGTKGELQSAIKSLHSRDINVYGDVVINHKGGADATEDVTAVEVDPADRNRVISGEHLIKAWTHFHFPGRGSTYSDFKWHWYHFDGTDWDESRKLNRIYKFQGKAWDWEVSNENGNYDYLMYADIDYDHPDVAAEIKRWGTWYANELQLDGFRLDAVKHIKFSFLRDWVNHVREKTGKEMFTVAEYWQNDLGALENYLNKTNFNHSVFDVPLHYQFHAASTQGGGYDMRKLLNGTVVSKHPLKSVTFVDNHDTQPGQSLESTVQTWFKPLAYAFILTRESGYPQVFYGDMYGTKGDSQREIPALKHKIEPILKARKQYAYGAQHDYFDHHDIVGWTREGDSSVANSGLAALITDGPGGAKRMYVGRQNAGETWHDITGNRSEPVVINSEGWGEFHVIGGSVSIYVQR

SEQ ID NO: 42985 - protein, 480 aa, Bacillus sp. SCSIO 15121
NGTLMQYFEWYMPNDGQHWKRLQNDSAYLAEHGITAVWIPPAYKGTSQDDVGYGAYDLYDLGEFHQKGTVRTKYGTKGELQSAINSLHSRDINVYGDVVINHKGGADATEDVTAVEVDPADRNRVTSGEQRIKAWTHFQFPGRGSTYSDFKWHWYHFDGTDWDESRKLNRIYLFQGKAWDWEVSNENGNYDYLMYADIDYDHPDVTAEIKRWGTWYANELQLDGFRLDAVKHIKFSFLRDWVNHVREKTGKEMFTVAEYWQNDLGALENYLNKTNFNHSVFDVPLHYQFHAASTQGGGYDMRKLLNGTVVSKHPVKAVTFVDNHDTQPGQSLESTVQTWFKPLAYAFILTREAGYPQIFYGDMYGTKGASQREIPALKHKIEPILKARKQYAYGAQHDYFDHHNIVGWTREGDSSVANSGLAALITDGPSGTKRMYVGRQNAGETWHDITGNRSDSVVINAEGWGEFHVNGGSVSIYVQR

SEQ ID NO: 42986 - protein, 480 aa, Bacillus licheniformis
NGTLMQYFEWYMPNDGQHWRRLQNDSAYLAEHGITAVWIPPAYKGTSQADVGYGAYDLYDLGEFHQKGTVRTKYGTKGELQSAIKSLHSRDINVYGDVVINHKGGADATEDVTAVEVDPADRNRVISGEHLIKAWTHFHFPGRGSTYSDFKWHWYHFDGTDWDESRKLNRIYKFQGKAWDWEVSNENGNYDYLMYADIDYDHPDVAAEIKRWGTWYANELQLDGFRLDAVKHIKFFFLRDWVNHVREKTGKEMFTVAEYWQNDLGALENYLNKTNFNHSVFDVPLHYQFHAASTQGGGYDMRKLLNGTVVSKHPLKSVTFVDNHDTQPGQSLESTVQTWFKPLAYAFILTRESGYPQVFYGDMYGTKGDSQREIPALKHKIEPILKARKQYAYGAQHDYFDHHDIVGWTREGDSSVANSGLAALITDGPGGAKRMYVGRQNAGETWHDITGNRSEPVVINSEGWGEFHVNGGSVSIYVQR

SEQ ID NO: 42987 - protein, 480 aa, Bacillus licheniformis
NGTLMQYFEWYMPNDGQHWKRLQNDSAYLAEHGITAVWIPPAYKGTSQADVGYGAYDLYDLGEFHQKGTVRTKYGTKGELQSAIKSLHSRDINVYGDVVINHKGGADATEDVTAVEVDPADRNRVISGEHLIKAWTHFHFPGRGSTYSDFKWHWYHFDGTDWDESRKLNRIYKFQGKAWDWEVSNENGNYDYLYYADIDYDHPDVAAEIKRWGTWYANELQLDGFRLDAVKHIKFSFLRDWVNHVREKTGKEMFTVAEYWQNDLGALENYLNKTNFNHSVFDVPLHYQFHAASTQGGGYDMRKLLNGTVVSKHPLKSVTFVDNHDTQPGQSLESTVQTWFKPLAYAFILTRESGYPQVFYGDMYGTKGDSQREIPALKHKIEPILKARKQYAYGAQHDYFDHHDIVGWTREGDSSVANSGLAALITDGPGGAKRMYVGRQNAGETWHDITGNRSEPVVINSEGWGEFHVNGGSVSIYVQR

SEQ ID NO: 42988 - protein, 480 aa, Bacillus licheniformis
NGTLMQYFEWYMPNDGQHWKRLQNDSAYLAEHGITAVWIPPAYKGTSQADVGYGAYDLYDLGEFHQKGTVRTKYGTKGELQSAIKSLHSRDINVYGDVVINHKGGADATEDVTAVEVDPADRNRVISGEHLIKAWTHFHFPGRGSTYSDFKWHWYHFDGTDWDESRKLNRIYKFQGKAWDWEVSNEFGNYDYLMYADIDYDHPDVAAEIKRWGTWYANELQLDGFRLDAVKHIKFSFLRDWVNHVREKTGKEMFTVAEYWQNDLGALENYLNKTNFNHSVFDVPLHYQFHAASTQGGGYDMRKLLNGTVVSKHPLKSVTFVDNHDTQPGQSLESTVQTWFKPLAYAFILTRESGYPQVFYGDMYGTKGDSQREIPALKHKIEPILKARKQYAYGAQHDYFDHHDIVGWTREGDSSVANSGLAALITDGPGGAKRMYVGRQNAGETWHDITGNRSEPVVINSEGWGEFHVNGGSVSIYVQR

SEQ ID NO: 42989 - protein, 480 aa, Bacillus licheniformis
NGTLMQYFEWYMPNDGQHWKRLQNDSAYLAEHGITAVWIPPAYKGTSQADVGYGAYDLYDLGEFHQKGTVRTKYGTKGELQSAIKSLHSRDINVYGDVVINHKGGADATEDVTAVEVDPADRNRVISGEHLIKAFTHFHFPGRGSTYSDFKWHWYHFDGTDWDESRKLNRIYKFQGKAWDWEVSNENGNYDYLMYADIDYDHPDVAAEIKRWGTWYANELQLDGFRLDAVKHIKFSFLRDWVNHVREKTGKEMFTVAEYWQNDLGALENYLNKTNFNHSVFDVPLHYQFHAASTQGGGYDMRKLLNGTVVSKHPLKSVTFVDNHDTQPGQSLESTVQTWFKPLAYAFILTRESGYPQVFYGDMYGTKGDSQREIPALKHKIEPILKARKQYAYGAQHDYFDHHDIVGWTREGDSSVANSGLAALITDGPGGAKRMYVGRQNAGETWHDITGNRSEPVVINSEGWGEFHVNGGSVSIYVQR

SEQ ID NO: 42990 - protein, 480 aa, Bacillus licheniformis
NGTLMQYFEWYMPNDGQHWKRLQNDSAYLAEHGITAVWIPPAYKGTSQADVGYGAYDLYDLGEFHQKGTVRTKYGTKGELQSAIKSLHSRDINVYGDVVINHKGGADATEDVTAVEVDPADRNRVISGEHLIKAYTHFHFPGRGSTYSDFKWHWYHFDGTDWDESRKLNRIYKFQGKAWDWEVSNENGNYDYLMYADIDYDHPDVAAEIKRWGTWYANELQLDGFRLDAVKHIKFSFLRDWVNHVREKTGKEMFTVAEYWQNDLGALENYLNKTNFNHSVFDVPLHYQFHAASTQGGGYDMRKLLNGTVVSKHPLKSVTFVDNHDTQPGQSLESTVQTWFKPLAYAFILTRESGYPQVFYGDMYGTKGDSQREIPALKHKIEPILKARKQYAYGAQHDYFDHHDIVGWTREGDSSVANSGLAALITDGPGGAKRMYVGRQNAGETWHDITGNRSEPVVINSEGWGEFHVNGGSVSIYVQR

SEQ ID NO: 42991 - protein, 480 aa, Bacillus licheniformis
NGTLMQYFEWYMPNDGQHWRRLQNDSAYLAEHGITAVWIPPAYKGTSQADVGYGAYDLYDLGEFHQKGTVRTKYGTKGELQSAIKSLHSRDINVYGDVVINHKGGADATEDVTAVEVDPADRNRVISGEHLIKAWTHFHFPGRGSTYSDFKWHWYHFDGTDWDESRKLNRIYKFQGKAWDWPVSNENGNYDYLMYADYDYDHPDVAAEIKRWGTWYANELQLDGFRLDAVKHIKFSFLRDWVNHVREKTGKEMFTVAEYWQNDLGALENYLNKTNFNHSVFDVPLHYQFHAASTQGGGYDMRKLLNGTVVSKHPLKSVTFVDNHDTQPGQSLESTVQTWFKPLAYAFILTRESGYPQVFYGDMYGTKGDSQREIPALKHKIEPILKARKQYAYGAQHDYFDHHDIVGWTREGDSSVANSGLAALITDGPGGAKRMYVGRQNAGETWHDITGNRSEPVVINSEGWGEFHVNGGSVSIYVQR

SEQ ID NO: 42992 - protein, 480 aa, Synthetic construct
NGTLMQYFEWYMPNDGQHWRRLQNDSAYLAEHGITAVWIPPAYKGTSQADVGYGAYDLYDLGEFHQKGTVRTKYGTKGELQSAIKSLHSRDINVYGDVVINHKGGADATEDVTAVEVDPADRNRVISGEHLIKAWTHFHFPGRGSTYSDFKWHWYHFDGTDWDESRKLNRIYKFQGKAWDWEVSNENGNYDYLMYADIDYDHPDVAAEIKRWGTWYANELQLDGFRLDAVKHIKFSFLRDWVNHVREKTGKEMFTVAEYWQNDLGALENYLNKTNFNHSVFDVPLHYQFHAASTQGGGYDMRKLLVGTVVSKHPLKSVTFVDNHDTQPGQSLESTVQTWFKPLAYAFILTRESGYPQVFYGDMYGTKGDSQREIPALKHKIEPILKARKQYAYGAQHDYFDHHDIVGWTREGDSSVANSGLAALITDGPGGAKRMYVGRQNAGETWHDITGNRSEPVVINSEGWGEFHVNGGSVSIYVQR

SEQ ID NO: 42993 - protein, 480 aa, Bacillus licheniformis
NGTLMQYFEWYMPNDGQHWRRLQNDSAYLAEHGITAVWIPPAYKGTSQADVGYGAYDLYDLGEFHQKGTVRTKYGTKGELQSAIKSLHSRDINVYGDVVINHKGGADATEDVTAVEVDPADRNRVISGEHLIKAWTHFHFPGRGSTYSDFKWHWYHFDGTDWDESRKLNRIYLFQGKAWDWPVSNENGNYDYLMYADYDYDYPDVAAEITRWGTWYANELQLDGFRLDAVKHIKFSFLRDWVNHVREKTGKEMFTVAEYWQNDLGALENYLNKTNFNHSVFDVPLHYQFHAASTQGGGYDMRKLLNGTVVSKHPLQSVTFVDNHDTQPGQSLESTVQTWFKPLAYAFILTRESGYPSVFYGDMYGTKGDSQREIPALKHKIEPILKARKQYAYGAQHDYFDHHDIVGWTREGVSSVANSGLAALITDGPGGAKWMYVGRQNAGETWHDITGNRSEPVVINSEGWGEFHVNGGSVSIYVQR

SEQ ID NO: 42994 - protein, 480 aa, unidentified
NGTLMQYFEWYAPNDGNHWKRLHTDAGNLAQKGITSVWIPPAYKGTTQNDVGYGAYDLYDLGEFNQKGTVRTKYGTKAQLKSAIEALHKQNINVYGDVVMNHKGGADYTETVTAVEVDRNNRNIEVSGDYEINAWTGFNFPGRGDTHSNFKWKWYHFDGTDWDEGRKLNRIYKFRGKAWDWEVSSENGNYDYLMYADLDFDHPDVANEMKNWGTWYANELNLDGFRLDAVKHIDHEYLRDWVNHVRQQTGKEMFTVAEYWQNDIQTLNNYLAKVNYNQSVFDAPLHYNFHYASKGNGNYDMRNILNGTVMQNHPALAVTLVENHDSQPGQSLESVVSPWFKPLAYAFILTRAEGYPSVFYGDYYGTSGNSSYEIPALKDKIDPILMARKNFAYGTQRDYLDHPDVIGWTREGDGVHADSGLATLISDGPGGSKWMEVGKNNAGEVWYDMTGNQTNTVTINKDGWGQFHVSGGSVSIYVQQ

SEQ ID NO: 42995 - protein, 480 aa, Bacillus licheniformis
NGTLMQYFEWYMPNDGQHWRRLQNDSAYLAEHGITAVWIPPAYKGTSQADVGYGAYDLYDLGEFHQKGTVRTKYGTKGELQSAIKSLHSRDINVYGDVVINHKGGADATEDVTAVEVDPADRNRVISGEHLIKAWTHFHFPGRGSTYSDFKWHWYHFDGTDWDESRKLNRIYKFQGKAWDWEVSNENGNYDYLMYADIDYDHPDVAAEIKRWGTWYANELQLDGFRLDAVKHIKFYFLRDWVNHVREKTGKEMFTVAEYWQNDLGALENYLNKTNFNHSVFDVPLHYQFHAASTQGGGYDMRKLLNGTVVSKHPLKSVTFVDNHDTQPGQSLESTVQTWFKPLAYAFILTRESGYPQVFYGDMYGTKGDSQREIPALKHKIEPILKARKQYAYGAQHDYFDHHDIVGWTREGDSSVANSGLAALITDGPGGAKRMYVGRQNAGETWHDITGNRSEPVVINSEGWGEFHVNGGSVSIYVQR

SEQ ID NO: 42996 - protein, 480 aa, Bacillus licheniformis
NGTLMQYFEWYMPNDGQHWRRLQNDSAYLAEHGITAVWIPPAYKGTSQADVGYGAYDLYDLGEFHQKGTVRTKYGTKGELQSAIKSLHSRDINVYGDVVINHKGGADATEDVTAVEVDPADRNRVISGEHLIKAWTHFHFPGRGSTYSDFKWHWYHFDGTDWDESRKLNRIYKFQGKAWDWEVSNENGNYDYLMYADIDYDHPDVAAEIKRWGTWYANELQLDGFRLDAVKHIKFSFLRDWVNHVREKTGKEMFTVAEYWQNDLGALENYLNKTNFNHSVFDVPLHYQFHAASTQGGGYDMRKLLNGTVVSKHPLKSVTFVDNHDTQPGQSLESTVQTWFKPLAYAFILTRESGFPQVFYGDMYGTKGDSQREIPALKHKIEPILKARKQYAYGAQHDYFDHHDIVGWTREGDSSVANSGLAALITDGPGGAKRMYVGRQNAGETWHDITGNRSEPVVINSEGWGEFHVNGGSVSIYVQR

SEQ ID NO: 42997 - protein, 480 aa, Bacillus licheniformis
NGTLMQYFEWYMPNDGQHWKRLQNDSAYLAEHGITAVWIPPAYKGTSQADVGYGAYDLYDLGEFHQKGTVRTKYGTKGELQSAIKSLHSRDINVYGDVVINHKGGADATEDVTAVEVDPADRNRVISGEHLIKAWTHFHFPGRGSTYSDFKWHWYHFDGTDWDESRKLNRIYKFQGKAWDWEVSNENGNYDYLMYADIDYDHPDVAAEIKRWGTWYANELQLDGFRLDAVKHIKFSFLRDWVNHVREKTGKEMFTVAEYWQNDLGALENYLNKTNFNHSVFDVPLHYQFHAASTQGGGYDMRKLLNGTVVSKHPLKSVTFVDNHDTQPGQSLESTVQTWFKPLAYAFILTRESGYPQVFYGDMYGTKGDSQREIPALKHKIEPILKARKQYAYGAQNDYFDHHDIVGWTREGDSSVANSGLAALITDGPGGAKRMYVGRQNAGETWHDITGNRSEPVVINSEGWGEFHVNGGSVSIYVQR

SEQ ID NO: 42998 - protein, 480 aa, Bacillus licheniformis
NGTLMQYFEWYMPNDGQHWRRLQNDSAYLAEHGITAVWIPPAYKGTSQADVGYGAYDLYDLGEFHQKGTVRTKYGTKGELQSAIKSLHSRDINVYGDVVINHKGGADATEDVTAVEVDPADRNRVISGEHLIKAWTHFHFPGRGSTYSDFKWHWYHFDGTDWDESRKLNRIYRFQGKAWDWEVSNENGNYDYLMYADFDYDNPDVAAEIKRWGTWYANELQLDGFRLDAVKHIKFSFLRDWVNHVREKTGKEMFTVAEYWQNDLGALENYLNKTNFNHSVFDVPLHYQFHAASTQGGGYDMRKLLNGTVVSKHPLKSVTFVDNHDTQPGQSLESTVQTWFKPLAYAFILTRESGYPQVFYGDMYGTKGDSQREIPALKHKIEPILKARKQYAYGAQHDYFDHHDIVGWTREGDTSVQNSGLAALITDGPGGAKRMYVGRQNAGETWHDITGNRSEPVVINSEGWGEFHVNGGSVSIYVQR

SEQ ID NO: 42999 - protein, 480 aa, Bacillus licheniformis
NGTLMQYFEWYMPNDGQHWKRLQNDSAYLAEHGITAVWIPPAYKGTSQADVGYGAYDLYDLGEFHQKGTVRTKYGTKGELQSAIKSLHSRDINVYGDVVINHKGGADATEDVTAVEVDPADRNRVISGEHLIKACTHFHFPGRGSTYSDFKWHWYHFDGTDWDESRKLNRIYKFQGKAWDWEVSNENGNYDYLMYADIDYDHPDVAAEIKRWGTWYANELQLDGFRLDAVKHIKFSFLRDWVNHVREKTGKEMFTVAEYWQNDLGALENYLNKTNFNHSVFDVPLHYQFHAASTQGGGYDMRKLLNGTVVSKHPLKSVTFVDNHDTQPGQSLESTVQTWFKPLAYAFILTRESGYPQVFYGDMYGTKGDSQREIPALKHKIEPILKARKQYAYGAQHDYFDHHDIVGWTREGDSSVANSGLAALITDGPGGAKRMYVGRQNAGETWHDITGNRSEPVVINSEGWGEFHVNGGSVSIYVQR

SEQ ID NO: 43000 - protein, 480 aa, Bacillus licheniformis
NGTLMQYFEWYMPNDGQHWKRLQNDSAYLAEHGITAVWIPPAYKGTSQADVGYGAYDLYDLGEFHQKGTVRTKYGTKGELQSAIKSLHSRDINVYGDVVINHKGGADATEDVTAVEVDPADRNRVISGEHLIKAWTHFHFPGRGSTYSDFKWHWYHFDGTDWDESRKLNRIYKFQGKAWDWEVSNENGNYDYLEYADIDYDHPDVAAEIKRWGTWYANELQLDGFRLDAVKHIKFSFLRDWVNHVREKTGKEMFTVAEYWQNDLGALENYLNKTNFNHSVFDVPLHYQFHAASTQGGGYDMRKLLNGTVVSKHPLKSVTFVDNHDTQPGQSLESTVQTWFKPLAYAFILTRESGYPQVFYGDMYGTKGDSQREIPALKHKIEPILKARKQYAYGAQHDYFDHHDIVGWTREGDSSVANSGLAALITDGPGGAKRMYVGRQNAGETWHDITGNRSEPVVINSEGWGEFHVNGGSVSIYVQR

SEQ ID NO: 43001 - protein, 480 aa, Bacillus licheniformis
NGTLMQYFEWYMPNDGQHWRRLQNDSAYLAEHGITAVWIPPAYKGTSQADVGYGAYDLYDLGEFHQKGTVRTKYGTKGELQSAIKSLHSRDINVYGDVVINHKGGADATEDVTAVEVDPADRNRVISGEHLIKAWTHFHFPGRGSTYSDFKWHWYHFDGTDWDESRKLNRIYKFQGKAWDWEVSNENGNYDYLMYADIDYDHPDVAAEIKRWGTWYANELQLDGFRLDAVKHIKFQFLRDWVNHVREKTGKEMFTVAEYWQNDLGALENYLNKTNFNHSVFDVPLHYQFHAASTQGGGYDMRKLLNGTVVSKHPLKSVTFVDNHDTQPGQSLESTVQTWFKPLAYAFILTRESGYPQVFYGDMYGTKGDSQREIPALKHKIEPILKARKQYAYGAQHDYFDHHDIVGWTREGDSSVANSGLAALITDGPGGAKRMYVGRQNAGETWHDITGNRSEPVVINSEGWGEFHVNGGSVSIYVQR

SEQ ID NO: 43002 - protein, 482 aa, Bacillus sp. YR288
NGTMMQYFEWYVPNDGQHWNRLRNDAAYLKSIGVSAIWTPPAYKGTSQNDVGYGAYDLYDLGEFNQKGTIRTKYGTKAELKSAVSTLKSNGIQVYGDVVMNHKGGADYTENVTAVEVNPSNRNQETSDEYTIQAWTGFNFPGRGTTHSPFKWQWYHFDGTDWDQSRNASRIFKFRGTGKAWDWEVSSENGNYDYLMYADLDFDHPDVRNEMKNWGVWYANEVGLDGFRLDAVKHIKHSFLWDWVNHVRTKTGKEMFTVAEYWQNDVNAINNYLAKVNYNHSVFDAPLHYNFHYASQSGGNYDMRNLLNGTVVAAHPTKAVTLVENHDSQPGQSLESVVQPWFKPLAYAFILTRAEGYPSIFYGDMYGTKGNSSYEIPALKTKIEPLLKARKDYAYGTQHNYMDHWDVIGWTREGDSTKEKSGLATLVTDGAGGSKWMYVGKQNAGEVWYDITGNRTDKITINTDGWGNFQVNGGSVSVYVQQ

SEQ ID NO: 43003 - protein, 480 aa, Synthetic construct
NGTLMQYFEWYMPNDGQHWRRLQNDSAYLAEHGITAVWIPPAYKGTSQADVGYGAYDLYDLGEFHQKGTVRTKYGTKGELQSAIKSLHSRDINVYGDVVINHKGGADATEDVTAVEVDPADRNRVISGEHLIKAWTHFHFPGRGSTYSDFKWHWYHFDGTDWDESRKLNRIYKFQGKAWDWEVSNENGNYDYLMYADIDYDHPDVAAEIKRWGTWYANELQLDGFRLDAVKHIKFSFLRDWVNHVREKTGKEMFTVAEYWQNDLGALENYLNKTNFNHSVFDVPLHYQFHAASTQGGGYDMRKLLNGTVVSKHPLKSVTFVDNHDTQPGQSLESTVQTWFKPLAYAFILTRESGYPQVFYGDMYGTKGDSQREIPALKHKIEPILKARKQYAYGAQHDYFDHHDIVGWTREGDSSVANSGLAALITDGPGGAKRMYVGRQNAGETWHDITGNRSEPVVINSEGWGEFHVHGGSVSIYVQR

SEQ ID NO: 43004 - protein, 480 aa, Bacillus licheniformis
NGTLMQYFEWYMPNDGQHWRRLQNDSAYLAEHGITAVWIPPAYKGTSQADVGYGAYDLYDLGEFHQKGTVRTKYGTKGELQSAIKSLHSRDINVYGDVVINHKGGADATEDVTAVEVDPADRNRVISGEHLIKAWTHFHFPGRGSTYSDFKWHWYHFDGTDWDESRKLNRIYKFQGKAWDWEVSNENGNYDYLMYADIDYDHPDVAAEIKRWGTWYANELQLDGFRLDAVKHIKFSFLRDWVNHVREKTGKEMFTVAEYWQNDLGALENYLNKTNFNHSVFDVPLHYQFHAASTQGGGYDMRKLLNGTVVSKHPLKSVTFVDNHDTQPGQSXESTVQTWFKPLAYAFILTRESGYPQVFYGDMYGTKGDSQREIPALKHKIEPILKARKQYAYGAQHDYFDHHDIVGWTREGDSSVANSGLAALITDGPGGAKRMYVGRQNAGETWHDITGNRSEPVVINSEGWGEFHVNGGSVSIYVQR

SEQ ID NO: 43005 - protein, 480 aa, Bacillus licheniformis
NGTLMQYFEWYMPNDGQHWKRLQNDSAYLAEHGITAVWIPPAYKGTSQADVGYGAYDLYDLGEFHQKGTVRTKYGTKGELQSAIKSLHSRDINVYGDVVINHKGGADATEDVTAVEVDPADRNRVISGEHLIKAWTHFHFPGRGSTHSDFKWHWYHFDGTDWDESRKLNRIYKFQGKAWDWEVSNENGNYDYLMYADIDYDHPDVAAEIKRWGTWYANELQLDGFRLDAVKHIKFSFLRDWVNHVREKTGKEMFTVAEYWQNDLGALENYLNKTNFNHSVFDVPLHYQFHAASTQGGGYDMRKLLNGTVVSKHPLKSVTFVDNHDTQPGQSLESTVQTWFKPLAYAFILTRESGYPQVFYGDMYGTKGDSQREIPALKHKIEPILKARKQYAYGAQHDYFDHHDIVGWTREGDSSVANSGLAALITDGPGGAKRMYVGRQNAGETWHDITGNRSEPVVINSEGWGEFHVNGGSVSIYVQR

SEQ ID NO: 43006 - protein, 480 aa, Synthetic construct
NGTLMQYFEWYMPNDGQHWRRLQNDSAYLAEHGITAVWIPPAYKGTSQADVGYGAYDLYDLGEFHQKGTVRTKYGTKGELQSAIKSLHSRDINVYGDVVINHKGGADATEDVTAVEVDPADRNRVISGEHLIKAWTHFHFPGRGSTYSDFKWHWYHFDGTDWDESRKLNRIYKFQGKAWDWEVSNENGNYDYLMYADIDYDHPDVAAEIKRWGTWYANELQLDGFRLDAVKHIKFSFLRDWVNHVREKTGKEMFTVAEYWQNDLGALENYLNKTNFNHSVFDVPLHYQFHAASTQGGGYDMRKLLFGTVVSKHPLKSVTFVDNHDTQPGQSLESTVQTWFKPLAYAFILTRESGYPQVFYGDMYGTKGDSQREIPALKHKIEPILKARKQYAYGAQHDYFDHHDIVGWTREGDSSVANSGLAALITDGPGGAKRMYVGRQNAGETWHDITGNRSEPVVINSEGWGEFHVNGGSVSIYVQR

SEQ ID NO: 43007 - protein, 480 aa, Bacillus licheniformis
NGTLMQYFEWYMPNDGQHWKRLQNDSAYLAEHGITAVWIPPAYKGTSQADVGYGAYDLYDLGEFHQKGTVRTKYGTKGELQSAIKSLHSRDINVYGDVVINHKGGADATEDVTAVEVDPADRNRVISGEHLIKAWTHFHFPGRGSTYSDFKWHWYHFDGTDWDESRKLNRIYKFQGKAWDWEVSNENGNYDYLMYADIDYDHPDVAAEIKRWGTWYANELQLDGFRLDAVKHIKFSFLRDWVNHVREKTGKEMFTVAEYWQNDLGALENYLNKTNFNHSVFDVPLHYQFHAASTQGGGYDMRNLLNGTVVSKHPLKSVTFVDNHDTQPGQSLESTVQTWFKPLAYAFILTRESGYPQVFYGDMYGTKGDSQREIPALKHKIEPILKARKQYAYGAQHDYFDHHDIVGWTREGDSSVANSGLAALITDGPGGAKRMYVGRQNAGETWHDITGNRSEPVVINSEGWGEFHVNGGSVSIYVQR

SEQ ID NO: 43008 - protein, 480 aa, Bacillus licheniformis
NGTLMQYFEWYMPNDGQHWKRLQNDSAYLAEHGITAVWIPPAYKGTSQADVGYGAYDLYDLGEFHQKGTVRTKYGTKGELQSAIKSLHSRDINVYGDVVINHKGGADATEDVTAVEVDPADRNRVISGEHLIKAWTHFHFPGRGSTYSDFKWHWYHFDGTDWDESRKLNRIYKFQGKAWDWEVSNENGNYDYLMYADIDYDHPDVAAEIKRWGTWYANELQLDGFRLDAVKHIKFSFLRDWVNHVREKTGKEMFTVAEYWQNDLGALENYLNKTDYNHSVFDVPLHYQFHAASTQGGGYDMRKLLNGTVVSKHPLKSVTFVDNHDTQPGQSLESTVQTWFKPLAYAFILTRESGYPQVFYGDMYGTKGDSQREIPALKHKIEPILKARKQYAYGAQHDYFDHHDIVGWTREGDSSVANSGLAALITDGPGGAKRMYVGRQNAGETWHDITGNRSEPVVINSEGWGEFHVNGGSVSIYVQR

SEQ ID NO: 43009 - protein, 480 aa, Bacillus licheniformis
NGTLMQYFEWYMPNDGQHWKRLQNDSAYLAEHGITAVWIPPAYKGTSQADVGYGAYDLYDLGEFHQKGTVRTKYGTKGELQSAIKSLHSRDINVYGDVVINHKGGADATEDVTAVEVDPADRNRVISGEHLIKAWTHFHFPGRGSTYSDFKWHWYHFDGTDWDESRKLNRIYKFQGKAWDWEVSNENGNYDYLMYADIDYDHPDVAAEIKRWGTWYANELQLDGFRLDAVKHIKFSFLRDWVNHVREKTGKEAFTVAEYWQNDLGALENYLNKTNFNHSVFDVPLHYQFHAASTQGGGYDMRKLLNGTVVSKHPLKSVTFVDNHDTQPGQSLESTVQTWFKPLAYAFILTRESGYPQVFYGDMYGTKGDSQREIPALKHKIEPILKARKQYAYGAQHDYFDHHDIVGWTREGDSSVANSGLAALITDGPGGAKRMYVGRQNAGETWHDITGNRSEPVVINSEGWGEFHVNGGSVSIYVQR

SEQ ID NO: 43010 - protein, 480 aa, Bacillus licheniformis
NGTLMQYFEWYMPNDGQHWKRLQNDSAYLAEHGITAVWIPPAYKGTSQADVGYGAYDLYDLGEFHQKGTVRTKYGTKGELQSAIKSLHSRDINVYGDVVINHKGGADATEDVTAVEVDPADRNRVISGEHLIKAWTHFHFPGRGSTYSDFKWHWYHFDGTDWDESRKLNRIYKFQGKAWDWEVSNENGNYDYLMYADIDYDHPDVAAEIKRWGTWYANELQLDGFRLDAVKHIKFSFLRDWVNHVREKTGKEMFTVAEYWQNDLGALENYLNKTNFNHSVFDVPLHYQFHAASTQGGGYDMRKLLNGTVVSKHPLKSVTFVDNHDTQPGQSLESTVETWFKPLAYAFILTRESGYPQVFYGDMYGTKGDSQREIPALKHKIEPILKARKQYAYGAQHDYFDHHDIVGWTREGDSSVANSGLAALITDGPGGAKRMYVGRQNAGETWHDITGNRSEPVVINSEGWGEFHVNGGSVSIYVQR

SEQ ID NO: 43011 - protein, 480 aa, Bacillus licheniformis
NGTLMQYFEWYMPNDGQHWKRLQNDSAYLAEHGITAVWIPPAYKGTSQADVGYGAYDLYDLGEFHQKGTVRTKYGTKGELQSAIKSLHSRDINVYGDVVINHKGGADATEDVTAVEVDPADRNRVISGEHLIKAHTHFHFPGRGSTYSDFKWHWYHFDGTDWDESRKLNRIYKFQGKAWDWEVSNENGNYDYLMYADIDYDHPDVAAEIKRWGTWYANELQLDGFRLDAVKHIKFSFLRDWVNHVREKTGKEMFTVAEYWQNDLGALENYLNKTNFNHSVFDVPLHYQFHAASTQGGGYDMRKLLNGTVVSKHPLKSVTFVDNHDTQPGQSLESTVQTWFKPLAYAFILTRESGYPQVFYGDMYGTKGDSQREIPALKHKIEPILKARKQYAYGAQHDYFDHHDIVGWTREGDSSVANSGLAALITDGPGGAKRMYVGRQNAGETWHDITGNRSEPVVINSEGWGEFHVNGGSVSIYVQR

SEQ ID NO: 43012 - protein, 480 aa, Bacillus licheniformis
NGTLMQYFEWYMPNDGQHWRRLQNDSAYLAEHGITAVWIPPAYKGISQADVGYGAYDLYDLGEFHQKGTVRTKYGTKGELQSAIKSLHSRDINVYGDVVINHKGGADATEDVTAVEVDPADRNRVISGEHLIKAWTHFHFPGRGSTYSDFKWHWYHFDGTDWDESRKLNRIYKFQGKAWDWEVSNENGNYDYLMYADFDYDHPDVAAEIKRWGTWYANELQLDGFRLDAVKHIKFSFLRDWVNHVREKTGKEMFTVAEYWQNDLGALENYLNKTNFNHSVFDVPLHYQFHAASTQGGGYDMRKLLNGTVVSKHPLKSVTFVDNHDTQPGQSLESTVQTWFKPLAYAFILTRESGYPQVFYGDMYGTKGDSQREIPALKHKIEPILKARKQYAYGAQHDYFDHHDIVGWTREGDSSVANSGLAALITDGPGGAKRMYVGRQNAGETWHDITGNRSEPVVINSEGWGEFHVNGGSVSIYVQR

SEQ ID NO: 43013 - protein, 480 aa, Bacillus licheniformis
NGTLMQYFEWYMPNDGQHWRRLQNDSAYLAEHGITAVWIPPAYKGTSQADVGYGAYDLYDLGEFHQKGTVRTKYGTKGELQSAIKSLHSRDINVYGDVVINHKGGADATEDVTAVEVDPADRNRVISGEHLIKAWTHFHFPGRGSTYSDFKWHWYHFDGTDWDESRKLNRIYKFQGKAWDWEVSNENGNYDYLMYADIDYDHPDVAAEIKRWGTWYANELQLDGFRLDAVKHIKFSFLRDWVNHVREKTGKEMFTVAEYXQNDLGALENYLNKTNFNHSVFDVPLHYQFHAASTQGGGYDMRKLLNGTVVSKHPLKSVTFVDNHDTQPGQSLESTVQTWFKPLAYAFILTRESGYPQVFYGDMYGTKGDSQREIPALKHKIEPILKARKQYAYGAQHDYFDHHDIVGWTREGDSSVANSGLAALITDGPGGAKRMYVGRQNAGETWHDITGNRSEPVVINSEGWGEFHVNGGSVSIYVQR

SEQ ID NO: 43014 - protein, 480 aa, Bacillus licheniformis
NGTLMQYFEWYMPNDGQHWKRLQNDSAYLAEHGITAVWIPPAYKGTSQADVGYGAYDLYDLGEFHQKGTVRTKYGTKGELQSAIKSLHSRDINVYGDVVINHKGGADATEDVTAVEVDPADRNRVISGEHLIKAWTHFHFPGRGSTYSDFKWHWYHFDGTDWDESRKLNRIYKFQGKAWDWEVSNENGNYDYLDYADIDYDHPDVAAEIKRWGTWYANELQLDGFRLDAVKHIKFSFLRDWVNHVREKTGKEMFTVAEYWQNDLGALENYLNKTNFNHSVFDVPLHYQFHAASTQGGGYDMRKLLNGTVVSKHPLKSVTFVDNHDTQPGQSLESTVQTWFKPLAYAFILTRESGYPQVFYGDMYGTKGDSQREIPALKHKIEPILKARKQYAYGAQHDYFDHHDIVGWTREGDSSVANSGLAALITDGPGGAKRMYVGRQNAGETWHDITGNRSEPVVINSEGWGEFHVNGGSVSIYVQR

SEQ ID NO: 43015 - protein, 480 aa, Bacillus sp.
NGTLMQYFEWYMPNDGQHWKRLQNDSAYLAEHGITAVWIPPAYKGTSQADVGYGAYDLYDLGEFHQKGTVRTKYGTKGELQSAIKSLHSRDINVYGDVVINHKGGADTTEDVTAVEVDPADRNRVISGEYLIKAWTHFHFPGRGSIYSDFKWHWYHFDGTDWDESRKLNRIYKFQGKAWDWEVSNENGNYDYLMYADIDYDHPDVAAEIKRWGTWYANELQLDGFRLDAVKHIKFSFLRDWVNHVREKTGKEMFTVAEYWQNDLGALENYLNKTNFNHSVFDVPLHYQFHAASTQGGGYDMRKLLNGTVVSKHPLKSVTFVDNHDTQPGQSLESTVQTWFKPLAYAFILTRESGYPQVFYGDMYGTKGDSQREIPALKHKIEPILKARKQYAYGAQHDYFDHHDIVGWTREGDSSVANSGLAALITDGPGGAKRMYVGRQNAGETWHDITGNRSEPVVINSEGWGEFHVNGGSVSIYVQR

SEQ ID NO: 43016 - protein, 480 aa, Synthetic construct
NGTLMQYFEWYMPNDGQHWRRLQNDSAYLAEHGITAVWIPPAYKGTSQADVGYGAYDLYDLGEFHQKGTVRTKYGTKGELQSAIKSLHSRDINVYGDVVINHKGGADATEDVTAVEVDPADRNRVISGEHLIKAWTHFHFPGRGSTYSDFKWHWYHFDGTDWDESRKLNRIYKFQGKAWDWEVSNENGNYDYLMYADIDYDHPDVAAEIKRWGTWYANELQLDGFRLDAVKHIKFSFLRDWVNHVREKTGKEMFTVAEYWQNDLGALENYLNKTNFNHSVFDVPLHYQFHAASTQGGGYDMRKLLWGTVVSKHPLKSVTFVDNHDTQPGQSLESTVQTWFKPLAYAFILTRESGYPQVFYGDMYGTKGDSQREIPALKHKIEPILKARKQYAYGAQHDYFDHHDIVGWTREGDSSVANSGLAALITDGPGGAKRMYVGRQNAGETWHDITGNRSEPVVINSEGWGEFHVNGGSVSIYVQR

SEQ ID NO: 43017 - protein, 480 aa, Bacillus licheniformis
NGTLMQYFEWYMPNDGQHWKRLQNDSAYLAEHGITAVWIPPAYKGTSQADVGYGAYDLYDLGEFHQKGTVRTKYGTKGELQSAIKSLHSRDINVYGDVVINHKGGADATEDVTAVEVDPADRNRVISGEHLIKAWTHFHFPGRGSTYSDFKWHWYHFDGTDWDESRKLNRIYKFQGKAWDWEVSNENGNYDYLMYADIDYDHPDVAAEIKRWGTWYANELQLDGFRLDAVKHIKFQFLRDWVNHVREKTGKEMFTVAEYWQNDLGALENYLNKTNFNHSVFDVPLHYQFHAASTQGGGYDMRKLLNGTVVSKHPLKSVTFVDNHDTQPGQSLESTVQTWFKPLAYAFILTRESGYPQVFYGDMYGTKGDSQREIPALKHKIEPILKARKQYAYGAQHDYFDHHDIVGWTREGDSSVANSGLAALITDGPGGAKRMYVGRQNAGETWHDITGNRSEPVVINSEGWGEFHVNGGSVSIYVQR

SEQ ID NO: 43018 - protein, 480 aa, Bacillus licheniformis
NGTLMQYFEWYMPNDGQHWRRLQNDSAYLAEHGITAVWIPPAYKGTSQADVGYGAYDLYDLGEFHQKGTVRTKYGTKGELQSAIKSLHSRDINVYGDVVINHKGGADATEDVTAVEVDPADRNRVISGEHLIKAWTHFHFPGRGSTYSDFKWHWYHFDGTDWDESRKLNRIYKFQGKAWDWPVSNENGNYDYLMYADIDYDHPDVAAEIKRWGTWYANELQLDGFRLDAVKHIKFSFLRDWVNHVREKTGKEMFTVAEYWQNDLGALENYLNKTNFNHSVFDVPLHYQFHAASTQGGGYDMRKLLNGTVVSKHPLKSVTFVDNHDTQPGQSLESTVQTWFKPLAYAFILTRESGYPQVFYGDMYGTKGDSQREIPALKHKIEPILKARKQYAYGAQHDYFDHHDIVGWTREGDSSVANSGLAALITDGPGGAKRMYVGRQNAGETWHDITGNRSEPVVINSEGWGEFHVNGGSVSIYVQR

SEQ ID NO: 43019 - protein, 480 aa, Bacillus licheniformis
NGTLMQYFEWYMPNDGQHWKRLQNDSAYLAEHGITAVWIPPAYKGTSQADVGYGAYDLYDLGEFHQKGTVRTKYGTKGELQSAIKSLHSRDINVYGDVVINHKGGADATEDVTAVEVDPADRNRVISGEHLIKAXTHFHFPGRGSTYSDFKWHWYHFDGTDWDESRKLNRIYKFQGKAWDWEVSNENGNYDYLMYADIDYDHPDVAAEIKRWGTWYANELQLDGFRLDAVKHIKFSFLRDWVNHVREKTGKEMFTVAEYWQNDLGALENYLNKTNFNHSVFDVPLHYQFHAASTQGGGYDMRKLLNGTVVSKHPLKSVTFVDNHDTQPGQSLESTVQTWFKPLAYAFILTRESGYPQVFYGDMYGTKGDSQREIPALKHKIEPILKARKQYAYGAQHDYFDHHDIVGWTREGDSSVANSGLAALITDGPGGAKRMYVGRQNAGETWHDITGNRSEPVVINSEGWGEFHVNGGSVSIYVQR

SEQ ID NO: 43020 - protein, 480 aa, Synthetic construct
NGTLMQYFEWYMPNDGQHWRRLQNDSAYLAEHGITAVWIPPAYKGTSQADVGYGAYDLYDLGEFHQKGTVRTKYGTKGELQSAIKSLHSRDINVYGDVVINHKGGADATEDVTAVEVDPADRNRVISGEHLIKAWTHFHFPGRGSTYSDFKWHWYHFDGTDWDESRKLNRIYKFQGKAWDWEVSNENGNYDYLMYADIDYDHPDVAAEIKRWGTWYANELQLDGFRLDAVKHIKFSFLRDWVNHVREKTGKEMFTVAEYWQNDLGALENYLNKTNFNHSVFDVPLHYQFHAASTQGGGYDMRKLLNGTVVSKHPLKSVTFVDNHDTQPGQSLESTVQTWFKPLAYAFILTRESGYPQVFYGDMYGTKGDSQREIPALKHKIEPILKARKQYAYGAQHDYFDHHDIVGWTREGDSSVANSGLAALITDGPGGAKRMYVGRQNAGETWHDITGNRSEPVVINSEGWGEFHVEGGSVSIYVQR

SEQ ID NO: 43021 - protein, 480 aa, Bacillus licheniformis
NGTLMQYFEWYMPNDGQHWRRLQNDSAYLAEHGITAVWIPPAYKGTSQADVGYGAYDLYDLGEFHQKGTVRTKYGTKGELQSAIKSLHSRDINVYGDVVINHKGGADATEDVTAVEVDPADRNRVISGEHLIKAWTHFHFPGRGSTYSDFKWHWYHFDGTDWDESRKLNRIYKFQGKAWDWEVSNENGNYDYLMYADIDYDHPDVAAEIKRWGTWYANELQLDGFRLDAVXHIKFSFLRDWVNHVREKTGKEMFTVAEYWQNDLGALENYLNKTNFNHSVFDVPLHYQFHAASTQGGGYDMRKLLNGTVVSKHPLKSVTFVDNHDTQPGQSLESTVQTWFKPLAYAFILTRESGYPQVFYGDMYGTKGDSQREIPALKHKIEPILKARKQYAYGAQHDYFDHHDIVGWTREGDSSVANSGLAALITDGPGGAKRMYVGRQNAGETWHDITGNRSEPVVINSEGWGEFHVNGGSVSIYVQR

SEQ ID NO: 43022 - protein, 484 aa, Bacillus licheniformis
NGTLMQYFEWYMPNDGQHWRRLQNDSAYLAEHGITAVWIPPAYKGTSQADVGYGAYDLYDLGEFHQKGTVRTKYGTKGELQSAIKSLHSRDINVYGDVVINHKGGADATEDVTAVEVDPADRNRVISGEHLIKAWTHFHFPGRGSTYSDFKWHWYHFDGTDWDESRKLNRIYKFQGKAWDWEVSNENGNYDYLMYADIDYDHPDVAAEIKRWGTWYANELQLDGFRLDAVKHIKFSFLRDWVNHVREKTGKEMFTVAEYGASTVQNDLGALENYLNKTNFNHSVFDVPLHYQFHAASTQGGGYDMRKLLNGTVVSKHPLKSVTFVDNHDTQPGQSLESTVQTWFKPLAYAFILTRESGYPQVFYGDMYGTKGDSQREIPALKHKIEPILKARKQYAYGAQHDYFDHHDIVGWTREGDSSVANSGLAALITDGPGGAKRMYVGRQNAGETWHDITGNRSEPVVINSEGWGEFHVNGGSVSIYVQR

SEQ ID NO: 43023 - protein, 480 aa, Bacillus licheniformis
NGTLMQYFEWYMPNDGQHWRRLQNDSAYLAEHGITAVWIPPAYKGTSQADVGYGAYDLYDLGEFHQKGTVRTKYGTKGELQSAIKSLHSRDINVYGDVVINHKGGADATEDVTAVEVDPADRNRVISGEHLIKAWTHFHFPGRGSTYSDFKWHWYHFDGTDWDESRRLNRIYLFQGKAWDWEVSNENGNYDYLMYADYDYDYPDVAAEITRWGTWYANELQLDGFRLDAVKHIKFSFLRDWVNHVREKTGKPMFTVAEYWQNDLGALENYLNKTNFNHSVFDVPLHYQFHAASTQGGGYDMRKLLNGTVVSKHPLKSVTFVDNHDTQPGQSLESTVQTWFKPLAYAFILTRESGYPSVFYGDMYGTKGDSQREIPALKHKIEPILKARKQYAYGAQHDYFDHHDIVGWTREGVSSVANSGLAALITDGPGGAKWMYVGRQNAGETWHDITGNRSEPVVINSEGWGEFHVNGGSVSIYVQR

SEQ ID NO: 43024 - protein, 480 aa, Bacillus licheniformis
NGTLMQYFEWYMPNDGQHWKRLQNDSAYLAEHGITAVWIPPAYKGTSQADVGYGAYDLYDLGEFHQKGTVRTKYGTKGELQSAIKSLHSRDINVYGDVVINHKGGADATEDVTAVEVDPADRNRVISGEHLIKALTHFHFPGRGSTYSDFKWHWYHFDGTDWDESRKLNRIYKFQGKAWDWEVSNENGNYDYLMYADIDYDHPDVAAEIKRWGTWYANELQLDGFRLDAVKHIKFSFLRDWVNHVREKTGKEMFTVAEYWQNDLGALENYLNKTNFNHSVFDVPLHYQFHAASTQGGGYDMRKLLNGTVVSKHPLKSVTFVDNHDTQPGQSLESTVQTWFKPLAYAFILTRESGYPQVFYGDMYGTKGDSQREIPALKHKIEPILKARKQYAYGAQHDYFDHHDIVGWTREGDSSVANSGLAALITDGPGGAKRMYVGRQNAGETWHDITGNRSEPVVINSEGWGEFHVNGGSVSIYVQR

SEQ ID NO: 43025 - protein, 480 aa, Synthetic construct
NGTLMQYFEWYMPNDGQHWKRLQNDSAYLAEHGITAVWIPPAYKGTSQADVGYGAYDLYDLGEFHQKGTVRTKYGTKGELQSAIKSLHSRDINVYGDVVIDHKGGADATEDVTAVEVDPADRNRVISGEYLIKAWTHFHFPGRGSIYSDFKWHWYHFDGTDWDESRKLNRIYKFQGKAWDWEVSNENGNYDYLMYADIDYDHPDVAAEIKRWGTWYANELQLDGFRLDAVKHIKFSFLRDWVNHVREKTGKEMFTVAEYWQNDLGALENYLNKTNFNHSVFDVPLHYQFHAASTQGGGYDMRKLLNGTVVSKHPLKSVTFVDNHDTQPGQSLESTVQTWFKPLAYAFILTRESGYPQVFYGDMYGTKGDSQREIPALKHKIEPILKARKQYAYGAQHDYFDHHDIVGWTREGDSSVANSGLAALITDGPGGAKRMYVGRQNAGETWHDITGNRSEPVVINSEGWGEFHVNGGSVSIYVQR

SEQ ID NO: 43026 - protein, 484 aa, Bacillus licheniformis
NGTLMQYFEWYMPNDGQHWRRLQNDSAYLAEHGITAVWIPPAYKGTSQADVGYGAYDLYDLGEFHQKGTVRTKYGTKGELQSAIKSLHSRDINVYGDVVINHKGGADATEDVTAVEVDPADRNRVISGEHLIKAWTHFHFPGRGSTYSDFKWHWYHFDGTDWDESRKLNRIYKFQGKAWDWEVSNGASTVNGNYDYLMYADIDYDHPDVAAEIKRWGTWYANELQLDGFRLDAVKHIKFSFLRDWVNHVREKTGKEMFTVAEYWQNDLGALENYLNKTNFNHSVFDVPLHYQFHAASTQGGGYDMRKLLNGTVVSKHPLKSVTFVDNHDTQPGQSLESTVQTWFKPLAYAFILTRESGYPQVFYGDMYGTKGDSQREIPALKHKIEPILKARKQYAYGAQHDYFDHHDIVGWTREGDSSVANSGLAALITDGPGGAKRMYVGRQNAGETWHDITGNRSEPVVINSEGWGEFHVNGGSVSIYVQR

SEQ ID NO: 43027 - protein, 480 aa, Bacillus licheniformis
NGTLMQYFEWYMPNDGQHWKRLQNDSAYLAEHGITAVWIPPAYKGTSQADVGYGAYDLYDLGEFHQKGTVRTKYGTKGELQSAIKSLHSRDINVYGDVVINHKGGADATEDVTAVEVDPADRNRVISGEHLIKAWTHFHFPGRGSTYSDFKWHWYHFDGTDWDESRKLNRIYKFQGKAWDWEVSNENGNYDYLSYADIDYDHPDVAAEIKRWGTWYANELQLDGFRLDAVKHIKFSFLRDWVNHVREKTGKEMFTVAEYWQNDLGALENYLNKTNFNHSVFDVPLHYQFHAASTQGGGYDMRKLLNGTVVSKHPLKSVTFVDNHDTQPGQSLESTVQTWFKPLAYAFILTRESGYPQVFYGDMYGTKGDSQREIPALKHKIEPILKARKQYAYGAQHDYFDHHDIVGWTREGDSSVANSGLAALITDGPGGAKRMYVGRQNAGETWHDITGNRSEPVVINSEGWGEFHVNGGSVSIYVQR

SEQ ID NO: 43028 - protein, 480 aa, Bacillus licheniformis
NGTLMQYFEWYMPNDGQHWRRLQNDSAYLAEHGITAVWIPPAYKGTSQADVGYGAYDLYDLGEFHQKGTVRTKYGTKGELQSAIKSLHSRDINVYGDVVINHKGGADATEDVTAVEVDPADRNRVISGEHLIKAWTHFHFPGRGSTYSDFKWHWYHFDGTDWDESRKLNRIYLFQGKAWDWEVSNENGNYDYLMYADYDYDYPDVAAEITRWGTWYANELQLDGFRLDAVKHIKFSFLRDWVNHVREKTGKPMFTVAEYWQNDLGALENYLNKTNFNHSVFDVPLHYQFHAASTQGGGYDMRKLLNGTVVSKHPLQSVTFVDNHDTQPGQSLESTVQTWFKPLAYAFILTRESGYPSVFYGDMYGTKGDSQREIPALKHKIEPILKARKQYAYGAQHDYFDHHDIVGWTREGVSSVANSGLAALITDGPGGAKWMYVGRQNAGETWHDITGNRSEPVVINSEGWGEFHVNGGSVSIYVQR

SEQ ID NO: 43029 - protein, 480 aa, Synthetic construct
NGTLMQYFEWYMPNDGQHWRRLQNDSAYLAEHGITAVWIPPAYKGTSQADVGYGAYDLYDLGEFHQKGTVRTKYGTKGELQSAIKSLHSRDINVYGDVVINHKGGADATEDVTAVEVDPADRNRVISGEHLIKAWTHFHFPGRGSTYSDFKWHWYHFDGTDWDESRKLNRIYKFQGKAWDWEVSNENGNYDYLMYADIDYDHPDVAAEIKRWGTWYANELQLDGFRLDAVKHIKFSFLRDWVNHVREKTGKEMFTVAEYWQNDLGALENYLNKTNFNHSVFDVPLHYQFHAASTQGGGYDMRKLLPGTVVSKHPLKSVTFVDNHDTQPGQSLESTVQTWFKPLAYAFILTRESGYPQVFYGDMYGTKGDSQREIPALKHKIEPILKARKQYAYGAQHDYFDHHDIVGWTREGDSSVANSGLAALITDGPGGAKRMYVGRQNAGETWHDITGNRSEPVVINSEGWGEFHVNGGSVSIYVQR

SEQ ID NO: 43030 - protein, 480 aa, Synthetic construct
NGTLMQYFEWYMPNDGQHWKRLQNDSAYLAEHGITAVWIPPAYKGTSQADVGYGAYDLYDLGEFHQKGTVRTKYGTKGELQSAIKSLHSRDINVYGDVVINHKGGADATEDVTAVEVDPADRNRVISGEHLIKAWTHFHFPGRGSTYSDFKWHWYHFDGTDWDESRKLNRIYKFQGKAWDWEVSNENGNYDYLTYADIDYDHPDVAAEIKRWGTWYANELQLDGFRLDAVKHIKFSFLRDWVNHVREKTGKEMFTVAEYWQNDLGALENYLNKTNFNHSVFDVPLHYQFHAASTQGGGYDMRKLLNGTVVSKHPLKSVTFVDNHDTQPGQSLESTVQTWFKPLAYAFILTRESGYPQVFYGDMYGTKGDSQREIPALKHKIEPILKARKQYAYGAQHDYFDHHDIVGWTREGDSSVANSGLAALITDGPGGAKRMYVGRQNAGETWHDITGNRSEPVVINSEGWGEFHVNGGSVSIYVQR

SEQ ID NO: 43031 - protein, 482 aa, unidentified
NGTLMQYFEWYAPNDGNHWKRLHTDAGNLAQKGITSVWIPPAYKGTTQNDVGYGAYDLYDLGEFNQKGTVRTKYGTKAQLKSAIEALHKQNINVYGDVVMNHKGGADYTETVTAVEVDRNNRNIEVSGDYEINAWTGFNFPGRGDTHSNFKWKWYHFDGTDWDEGRKLNRIYKFRGIGKAWDWEVSSENGNYDYLMYADLDFDHPDVANEMKNWGTWYANELNLDGFRLDAVKHIDHEYLRDWVNHVRQQTGKEMFTVAEYWQNDIQTLNNYLAKVNYNQSVFDAPLHYNFHYASKGNGNYDMRNILNGTVMQNHPALAVTLVENHDSQPGQSLESVVSPWFKPLAYAFILTRAEGYPSVFYGDYYGTSGNSSYEIPALKDKIDPILMARKNFAYGTQRDYLDHPDVIGWTREGDGVHADSGLATLISDGPGGSKWMEVGKNNAGEVWYDMTGNQTNTVTINKDGWGQFHVSGGSVSIYVQQ

SEQ ID NO: 43032 - protein, 480 aa, Bacillus licheniformis
NGTLMQYFEWYMPNDGQHWRRLQNDSAYLAEHGITAVWIPPAYKGTSQADVGYGAYDLYDLGEFHQKGTVRTKYGTKGELQSAIKSLHSRDINVYGDVVINHKGGADATEDVTAVEVDPADRNRVISGEHLIRAWTHFHFPGRGSTYSDFKWHWYHFDGTDWDESRKLNRIYLFQGKAWDWEVSNENGNYDYLMYADYDYDYPDVAAEITRWGTWYANELQLDGFRLDAVKHIKFSFLRDWVNHVREKTGKPMFTVAEYWQNDLGALENYLNKTNFNHSVFDVPLHYQFHAASTQGGGYDMRKLLNGTVVSKHPLKSVTFVDNHDTQPGQSLESTVQTWFKPLAYAFILTRESGYPSVFYGDMYGTKGDSQREIPALKHKIEPILKARKQYAYGAQHDYFDHHDIVGWTREGVSSVANSGLAALITDGPGGAKWMYVGRQNAGETWHDITGNRSEPVVINSEGWGEFHVNGGSVSIYVQR

SEQ ID NO: 43033 - protein, 480 aa, Bacillus licheniformis
NGTLMQYFEWYMPNDGQHWKRLQNDSAYLAEHGITAVWIPPAYKGTSQADVGYGAYDLYDLGEFHQKGTVRTKYGTKGELQSAIKSLHSRDINVYGDVVINHKGGADATEDVTAVEVDPADRNRVISGEHLIKAWTHFHFPGRGSTYSNFKWHWYHFDGTDWDESRKLNRIYKFQGKAWDWEVSNENGNYDYLMYADIDYDHPDVAAEIKRWGTWYANELQLDGFRLDAVKHIKFSFLRDWVNHVREKTGKEMFTVAEYWQNDLGALENYLNKTNFNHSVFDVPLHYQFHAASTQGGGYDMRKLLNGTVVSKHPLKSVTFVDNHDTQPGQSLESTVQTWFKPLAYAFILTRESGYPQVFYGDMYGTKGDSQREIPALKHKIEPILKARKQYAYGAQHDYFDHHDIVGWTREGDSSVANSGLAALITDGPGGAKRMYVGRQNAGETWHDITGNRSEPVVINSEGWGEFHVNGGSVSIYVQR

SEQ ID NO: 43034 - protein, 480 aa, Bacillus licheniformis
NGTLMQYFEWYTPNDGQHWKRLQNDSAYLAEHGITAVWIPPAYKGTSQADVGYGAYDLYDLGEFHQKGTVRTKYGTKGELQSAIKSLHSRDINVYGDVVINHKGGADATEDVTAVEVDPADRNRVISGEHLIKAWTHFHFPGRGSTYSDFKWHWYHFDGTDWDESRKLNRIYKFQGKAWDWEVSNENGNYDYLTYADIDYDHPDVAAEIKRWGTWYANELQLDGFRLDAVKHIKFSFLRDWVNHVREKTGKEMFTVAEYWQNDLGALENYLNKTNFNHSVFDVPLHYQFHAASTQGGGYDMRKLLNGTVVSKHPLKSVTFVDNHDTQPGQSLESTVQTWFKPLAYAFILTRESGYPQVFYGDMYGTKGDSQREIPALKHKIEPILKARKQYAYGAQHDYFDHHDIVGWTREGDSSVANSGLAALITDGPGGAKRMYVGRQNAGETWHDITGNRSEPVVINSEGWGEFHVNGGSVSIYVQR

SEQ ID NO: 43035 - protein, 480 aa, Bacillus licheniformis
NGTLMQYFEWYMPNDGQHWKRLQNDSAYLAEHGITAVWIPPAYKGTSQADVGYGAYDLYDLGEFHQKGTVRTKYGTKGELQSAIKSLHSRDINVYGDVVINHKGGADATEDVTAVEVDPADRNRVISGEHLIKAWTHFHFPGRGSTYSDFKWHWYHFDGTDWDESRKLNRIYKFQGKAWDWEVSNENGNYDYLKYADIDYDHPDVAAEIKRWGTWYANELQLDGFRLDAVKHIKFSFLRDWVNHVREKTGKEMFTVAEYWQNDLGALENYLNKTNFNHSVFDVPLHYQFHAASTQGGGYDMRKLLNGTVVSKHPLKSVTFVDNHDTQPGQSLESTVQTWFKPLAYAFILTRESGYPQVFYGDMYGTKGDSQREIPALKHKIEPILKARKQYAYGAQHDYFDHHDIVGWTREGDSSVANSGLAALITDGPGGAKRMYVGRQNAGETWHDITGNRSEPVVINSEGWGEFHVNGGSVSIYVQR

SEQ ID NO: 43036 - protein, 480 aa, Synthetic construct
NGTLMQYFEWYMPNDGQHWRRLQNDSAYLAEHGITAVWIPPAYKGTSQADVGYGAYDLYDLGEFHQKGTVRTKYGTKGELQSAIKSLHSRDINVYGDVVINHKGGADATEDVTAVEVDPADRNRVISGEHLIKAWTHFHFPGRGSTYSDFKWHWYHFDGTDWDESRKLNRIYKFQGKAWDWEVSNENGNYDYLMYADIDYDHPDVAAEIKRWGTWYANELQLDGFRLDAVKHIKFSFLRDWVNHVREKTGKEMFTVAEYWQNDLGALENYLNKTNFNHSVFDVPLHYQFHAASTQGGGYDMRKLLNGTVVSKHPLKSVTFVDNHDTQPGQSLESTVQTWFKPLAYAFILTRESGYPQVFYGDMYGTKGDSQREIPALKHKIEPILKARKQYAYGAQHDYFDHHDIVGWTREGDSSVANSGLAALITDGPGGAKRMYVGRQNAGETWHDITGNRSEPVVINSEGWGEFHVFGGSVSIYVQR

SEQ ID NO: 43037 - protein, 482 aa, Bacillus sp. YR288
NGTMMQYFEWYVPNDGQHWNRLRNDAAYLKSIGVSAIWTPPAYKGTSQNDVGYGAYDLYDLGEFNQKGTIRTKYGTKAELKSAVSTLKSNGIQVYGDVVMNHKGGADYTENVTAVEVNPSNRNQETSDEYTIQAWTGFNFPGRGTTHSPFKWQWYHFDGTDWDQSRNASRIFKFRGTGKAWDWEVSSENGNYDYLMYADLDFDHPDVRNEMKNWGVWYANEVGLDGFRLDAVKHIKFSFLWDWVNHVRTKTGKEMFTVAEYWQNDVNAINNYLAKVNYNHSVFDAPLHYNFHYASQSGGNYDMRNLLNGTVVAAHPTKAVTLVENHDSQPGQSLESVVQPWFKPLAYAFILTRAEGYPSIFYGDMYGTKGNSSYEIPALKTKIEPLLKARKDYAYGTQHNYMDHWDVIGWTREGDSTKEKSGLATLVTDGAGGSKWMYVGKQNAGEVWYDITGNRTDKITINTDGWGNFQVNGGSVSVYVQQ

SEQ ID NO: 43038 - protein, 480 aa, Bacillus licheniformis
NGTLMQYFEWYMPNDGQHWRRLQNDSAYLAEHGITAVWIPPAYKGTSQADVGYGAYDLYDLGEFHQKGTVRTKYGTKGELQSAIKSLHSRDINVYGDVVINHKGGADATEDVTAVEVDPADRNRVISGEHLIKAWTHFHFPGRGSTYSDFKWHWYHFDGTDWDESRKLNRIYLFQGKAWDWPVSNENGNYDYLMYADYDYDYPDVAAEITRWGTWYANELQLDGFRLDAVKHIKFSFLRDWVNHVREKTGKEMFTVAEYWQNDLGALENYLNKTNFNHSVFDVPLHYQFHAASTQGGGYDMRKLLNGTVVSKHPLKSVTFVDNHDTQPGQSLESTVQTWFKPLAYAFILTRESGYPSVFYGDMYGTKGDSQREIPALKHKIEPILKARVQYAYGAQHDYFDHHDIVGWTREGVSSVANSGLAALITDGPGGAKWMYVGRQNAGETWHDITGNRSEPVVINSEGWGEFHVNGGSVSIYVQR

SEQ ID NO: 43039 - protein, 480 aa, Bacillus licheniformis
NGTLMQYFEWYMPNDGQHWRRLQNDSAYLAEHGITAVWIPPAYKGTSQADVGYGAYDLYDLGEFHQKGTVRTKYGTKGELQSAIKSLHSRDINVYGDVVINHKGGADATEDVTAVEVDPADRNRVISGEHLIKAWTHFHFPGRGSTYSDFKWHWYHFDGTDWDESRKLNRIYLFQGKAWDWPVSNENGNYDYLMYADYDYDYPDVAAEITRWGTWYANELQLDGFRLDAVKHIKFSFLRDWVNHVREKTGKEMFTVAEYWQNDLGALENYLNKTNFNHSVFDVPLHYQFHAASTQGGGYDMRKLLNGTVVSKHPLKSVTFVDNHDTQPGQSLESTVQTWFKPLAYAFILTRESGYPSVFYGDMYGTKGDSQREIPALKHKIEPILKARVDYAYGAQHDYFDHHDIVGWTREGVSSVANSGLAALITDGPGGAKWMYVGRQNAGETWHDITGNRSEPVVINSEGWGEFHVNGGSVSIYVQR

SEQ ID NO: 43040 - protein, 480 aa, Bacillus licheniformis
NGTLMQYFEWYMPNDGQHWKRLQNDSAYLAEHGITAVWIPPAYKGASQADVGYGAYDLYDLGEFHQKGTVRTKYGTKGELQSAIKSLHSRDINVYGDVVINHKGGADATEDVTAVEVDPADRNRVISGEHLIKAWTHFHFPGRGSTYSDFKWHWYHFDGTDWDESRKLNRIYKFQGKAWDWEVSNENGNYDYLMYADIDYDHPDVAAEIKRWGTWYANELQLDGFRLDAVKHIKFSFLRDWVNHVREKTGKEMFTVAEYWQNDLGALENYLNKTNFNHSVFDVPLHYQFHAASTQGGGYDMRKLLNGTVVSKHPLKSVTFVDNHDTQPGQSLESTVQTWFKPLAYAFILTRESGYPQVFYGDMYGTKGDSQREIPALKHKIEPILKARKQYAYGAQHDYFDHHDIVGWTREGDSSVANSGLAALITDGPGGAKRMYVGRQNAGETWHDITGNRSEPVVINSEGWGEFHVNGGSVSIYVQR

SEQ ID NO: 43041 - protein, 480 aa, Synthetic construct
NGTLMQYFEWYMPNDGQHWRRLQNDSAYLAEHGITAVWIPPAYKGTSQADVGYGAYDLYDLGEFHQKGTVRTKYGTKGELQSAIKSLHSRDINVYGDVVINHKGGADATEDVTAVEVDPADRNRVISGEHLIKAWTHFHFPGRGSTYSDFKWHWYHFDGTDWDESRKLNRIYKFQGKAWDWEVSNENGNYDYLMYADIDYDHPDVAAEIKRWGTWYANELQLDGFRLDAVKHIKFSFLRDWVNHVREKTGKEMFTVAEYWQNDLGALENYLNKTNFNHSVFDVPLHYQFHAASTQGGGYDMRKLLYGTVVSKHPLKSVTFVDNHDTQPGQSLESTVQTWFKPLAYAFILTRESGYPQVFYGDMYGTKGDSQREIPALKHKIEPILKARKQYAYGAQHDYFDHHDIVGWTREGDSSVANSGLAALITDGPGGAKRMYVGRQNAGETWHDITGNRSEPVVINSEGWGEFHVNGGSVSIYVQR

SEQ ID NO: 43042 - protein, 482 aa, Bacillus sp. YR288
NGTMMQYFEWYVPNDGQHWNRLRNDAAYLKSIGVSAIWTPPAYKGTSQNDVGYGAYDLYDLGEFNQKGTIRTKYGTKAELKSAVSTLKSNGIQVYGDVVMNHKGGADYTENVTAVEVNPSNRNQETSDEYTIQAWTGFNFPGRGTTHSPFKWQWYHFDGTDWDQSRNASRIFKFRGTGKAWDWEVSSENGNYDYLMYADLDFDHPDVVNEMKNWGVWYANEVGLDGFRLDAVKHIKHSYLGDWVNHVRTKTGKEMFTVAEYWQNDVNAINNYLAKVNYNHSVFDAPLHYNFHYASQSGGNYDMRNLLNGTVVAAHPTKAVTLVENHDSQPGQSLESVVQPWFKPLAYAFILTRAEGYPSIFYGDMYGTKGNSSYEIPALKTKIEPLLKARKDYAYGTQHNYMDHWDVIGWTREGDSTKEKSGLATLVTDGAGGSKWMYVGKQNAGEVWYDITGNRTDKITINTDGWGNFQVNGGSVSVYVQQ

SEQ ID NO: 43043 - protein, 480 aa, Bacillus licheniformis
NGTLMQYFEWYMPNDGQHWKRLQNDSAYLAEHGITAVWIPPAYKGTSQADVGYGAYDLYDLGEFHQKGTVRTKYGTKGELQSAIKSLHSRDINVYGDVVINHKGGADATEDVTAVEVDPADRNRVISGEHLIKAWTHFHFPGRGSTYSDFKWHWYHFDGTDWDESRKLNRIYKFQGKAWDWEVSNENGNYDYLMYADIDYDHPDVAAEIKRWGTWYANELQLDGFRLDAVKHIKFSFLRDWVNHVREKTGKEMFTVAEYWQNDLGALENYLNKTNFNHSVFDVPLHYQFHAASTQGGGYDLRKLLNGTVVSKHPLKSVTFVDNHDTQPGQSLESTVQTWFKPLAYAFILTRESGYPQVFYGDMYGTKGDSQREIPALKHKIEPILKARKQYAYGAQHDYFDHHDIVGWTREGDSSVANSGLAALITDGPGGAKRMYVGRQNAGETWHDITGNRSEPVVINSEGWGEFHVNGGSVSIYVQR

SEQ ID NO: 43044 - protein, 480 aa, Bacillus licheniformis
NGTLMQYFEWYMPNDGQHWKRLQNDSAYLAEHGITAVWIPPAYKGTSQADVGYGAYDLYDLGEFHQKGTVRTKYGTKGELQSAIKSLHSRDINVYGDVVINHKGGADATEDVTAVEVDPADRNRVISGEHLIKAWTHFHFPGRGSTYSDFKWHWYHFDGTDWDESRKLNRIYKFQGKAWDWEVSNENGNYDYLVYADIDYDHPDVAAEIKRWGTWYANELQLDGFRLDAVKHIKFSFLRDWVNHVREKTGKEMFTVAEYWQNDLGALENYLNKTNFNHSVFDVPLHYQFHAASTQGGGYDMRKLLNGTVVSKHPLKSVTFVDNHDTQPGQSLESTVQTWFKPLAYAFILTRESGYPQVFYGDMYGTKGDSQREIPALKHKIEPILKARKQYAYGAQHDYFDHHDIVGWTREGDSSVANSGLAALITDGPGGAKRMYVGRQNAGETWHDITGNRSEPVVINSEGWGEFHVNGGSVSIYVQR

SEQ ID NO: 43045 - protein, 480 aa, Synthetic construct
NGTLMQYFEWYMPNDGQHWRRLQNDSAYLAEHGITAVWIPPAYKGTSQADVGYGAYDLYDLGEFHQKGTVRTKYGTKGELQSAIKSLHSRDINVYGDVVINHKGGADATEDVTAVEVDPADRNRVISGEHLIKAWTHFHFPGRGSTYSDFKWHWYHFDGTDWDESRKLNRIYKFQGKAWDWEVSNENGNYDYLMYADIDYDHPDVAAEIKRWGTWYANELQLDGFRLDAVKHIKFSFLRDWVNHVREKTGKEMFTVAEYWQNDLGALENYLNKTNFNHSVFDVPLHYQFHAASTQGGGYDMRKLLNGTVVSKHPLKSVTFVDNHDTQPGQSLESTVQTWFKPLAYAFILTRESGYPQVFYGDMYGTKGDSQREIPALKHKIEPILKARKQYAYGAQHDYFDHHDIVGWTREGDSSVANSGLAALITDGPGGAKRMYVGRQNAGETWHDITGNRSEPVVINSEGWGEFHVTGGSVSIYVQR

SEQ ID NO: 43046 - protein, 480 aa, Bacillus licheniformis
NGTLMQYFEWYMPNDGQHWRRLQNDSAYLAEHGITAVWIPPAYKGTSQADVGYGAYDLYDLGEFHQKGTVRTKYGTKGELQSAIKSLHSRDINVYGDVVINHKGGADATEDVTAVEVDPADRNRVISGEHLIKAWTHFHFPGRGSTYSDFKWHWYHFDGTDWDESRKLNRIYKFQGKAWDWEVSNENGNYDYLMYADIDYDHPDVAAEIKRWGTWYANELQLDGFRLDAVKHIKFWFLRDWVNHVREKTGKEMFTVAEYWQNDLGALENYLNKTNFNHSVFDVPLHYQFHAASTQGGGYDMRKLLNGTVVSKHPLKSVTFVDNHDTQPGQSLESTVQTWFKPLAYAFILTRESGYPQVFYGDMYGTKGDSQREIPALKHKIEPILKARKQYAYGAQHDYFDHHDIVGWTREGDSSVANSGLAALITDGPGGAKRMYVGRQNAGETWHDITGNRSEPVVINSEGWGEFHVNGGSVSIYVQR

SEQ ID NO: 43047 - protein, 480 aa, Bacillus licheniformis
NGTLMQYFEWYMPNDGQHWRRLQNDSAYLAEHGITAVWIPPAYKGTSQADVGYGAYDLYDLGEFHQKGTVRTKYGTKGELQSAIKSLHSRDINVYGDVVINHKGGADATEDVTAVEVDPADRNRVISGEHLIKAWTHFHFPGRGSTYSDFKWHWYHFDGTDWDESRRLNRIYLFQGKAWDWPVSNENGNYDYLMYADYDYDYPDVAAEITRWGTWYANELQLDGFRLDAVKHIKFSFLRDWVNHVREKTGKEMFTVAEYWQNDLGALENYLNKTNFNHSVFDVPLHYQFHAASTQGGGYDMRKLLNGTVVSKHPLKSVTFVDNHDTQPGQSLESTVQTWFKPLAYAFILTRESGYPSVFYGDMYGTKGDSQREIPALKHKIEPILKARKQYAYGAQHDYFDHHDIVGWTREGVSSVANSGLAALITDGPGGAKWMYVGRQNAGETWHDITGNRSEPVVINSEGWGEFHVNGGSVSIYVQR

SEQ ID NO: 43048 - protein, 480 aa, Bacillus licheniformis
NGTLMQYFEWYMPNDGQHWRRLQNDSAYLAEHGITAVWIPPAYKGTSQADVGYGAYDLYDLGEFHQKGTVRTKYGTKGELQSAIKSLHSRDINVYGDVVINHKGGADATEDVTAVEVDPADRNRVISGEHLIKAWTHFHFPGRGSTYSDFKWHWYHFDGTDWDESRKLNRIYKFQGKAWDWEVSNENGNYDYLMYADIDYDHPDVAAEIKRWGTWYANELQLDGFRLDAVKHIKFSFLRDWVNHVREKTGKEMFTVAEYWQNDLGALENYLNWTNFNHSVFDVPLHYQFHAASTQGGGYDMRKLLNGTVVSKHPLKSVTFVDNHDTQPGQSLESTVQTWFKPLAYAFILTRESGYPQVFYGDMYGTKGDSQREIPALKHKIEPILKARKQYAYGAQHDYFDHHDIVGWTREGDSSVANSGLAALITDGPGGAKRMYVGRQNAGETWHDITGNRSEPVVINSEGWGEFHVNGGSVSIYVQR

SEQ ID NO: 43049 - protein, 480 aa, Synthetic construct
NGTLMQYFEWYMPNDGQHWRRLQNDSAYLAEHGITAVWIPPAYKGTSQADVGYGAYDLYDLGEFHQKGTVRTKYGTKGELQSAIKSLHSRDINVYGDVVINHKGGADATEDVTAVEVDPADRNRVISGEHLIKAWTHFHFPGRGSTYSDFKWHWYHFDGTDWDESRKLNRIYKFQGKAWDWEVSNENGNYDYLMYADIDYDHPDVAAEIKRWGTWYANELQLDGFRLDAVKHIKFSFLRDWVNHVREKTGKEMFTVAEYWQNDLGALENYLNKTNFNHSVFDVPLHYQFHAASTQGGGYDMRKLLRGTVVSKHPLKSVTFVDNHDTQPGQSLESTVQTWFKPLAYAFILTRESGYPQVFYGDMYGTKGDSQREIPALKHKIEPILKARKQYAYGAQHDYFDHHDIVGWTREGDSSVANSGLAALITDGPGGAKRMYVGRQNAGETWHDITGNRSEPVVINSEGWGEFHVNGGSVSIYVQR

SEQ ID NO: 43050 - protein, 480 aa, Synthetic construct
NGTLMQYFEWYMPNDGQHWRRLQNDSAYLAEHGITAVWIPPAYKGTSQADVGYGAYDLYDLGEFHQKGTVRTKYGTKGELQSAIKSLHSRDINVYGDVVINHKGGADATEDVTAVEVDPADRNRVISGEHLIKAWTHFHFPGRGSTYSDFKWHWYHFDGTDWDESRKLNRIYKFQGKAWDWEVSNENGNYDYLMYADIDYDHPDVAAEIKRWGTWYANELQLDGFRLDAVKHIKFSFLRDWVNHVREKTGKEMFTVAEYWQNDLGALENYLNKTNFNHSVFDVPLHYQFHAASTQGGGYDMRKLLHGTVVSKHPLKSVTFVDNHDTQPGQSLESTVQTWFKPLAYAFILTRESGYPQVFYGDMYGTKGDSQREIPALKHKIEPILKARKQYAYGAQHDYFDHHDIVGWTREGDSSVANSGLAALITDGPGGAKRMYVGRQNAGETWHDITGNRSEPVVINSEGWGEFHVNGGSVSIYVQR

SEQ ID NO: 43051 - protein, 482 aa, Bacillus sp. YR288
NGTMMQYFEWYVPNDGQHWNRLRNDAAYLKSIGVSAIWTPPAYKGTSQNDVGYGAYDLYDLGEFNQKGTIRTKYGTKAELKSAVSTLKSNGIQVYGDVVMNHKGGADYTENVTAVEVNPSNRNQETSDEYTIQAWTGFNFPGRGTTHSPFKWQWYHFDGTDWDQSRNASRIFKFRGTGKAWDWEVSSENGNYDYLMYADLDFDHPDVRNEMKNWGVWYANEVGLDGFRLDAVKHIKFSFLGDWVNHVRTKTGKEMFTVAEYWQNDVNAINNYLAKVNYNHSVFDAPLHYNFHYASQSGGNYDMRNLLNGTVVAAHPTKAVTLVENHDSQPGQSLESVVQPWFKPLAYAFILTRAEGYPSIFYGDMYGTKGNSSYEIPALKTKIEPLLKARKDYAYGTQHNYMDHWDVIGWTREGDSTKEKSGLATLVTDGAGGSKWMYVGKQNAGEVWYDITGNRTDKITINTDGWGNFQVNGGSVSVYVQQ

SEQ ID NO: 43052 - protein, 480 aa, Bacillus licheniformis
NGTLMQYFEWYMPNDGQHWKRLQNDSAYLAEHGITAVWIPPAYKGTSQADVGYGAYDLYDLGEFHQKGTVRTKYGTKGELQSAIKSLHSRDINVYGDVVINHKGGADATEDVTAVEVDPADRNRVISGEHLIKAWTHFHFPGRGSTYSDFKWHWYHFDGTDWDESRKLNRIYKFQGKAWDWEVSNENGNYDYLXYADIDYDHPDVAAEIKRWGTWYANELQLDGFRLDAVKHIKFSFLRDWVNHVREKTGKEMFTVAEYWQNDLGALENYLNKTNFNHSVFDVPLHYQFHAASTQGGGYDMRKLLNGTVVSKHPLKSVTFVDNHDTQPGQSLESTVQTWFKPLAYAFILTRESGYPQVFYGDMYGTKGDSQREIPALKHKIEPILKARKQYAYGAQHDYFDHHDIVGWTREGDSSVANSGLAALITDGPGGAKRMYVGRQNAGETWHDITGNRSEPVVINSEGWGEFHVNGGSVSIYVQR

SEQ ID NO: 43053 - protein, 480 aa, Bacillus licheniformis
NGTLMQYFEWYMPNDGQHWRRLQNDSAYLAEHGITAVWIPPAYKGTSQADVGYGAYDLYDLGEFHQKGTVRTKYGTKGELQSAIKSLHSRDINVYGDVVINHKGGADATEDVTAVEVDPADRNRVISGEHLIKAWTHFHFPGRGSTYSDFKWHWYHFDGTDWDESRSLNRIYLFQGKAWDWEVSNENGNYDYLMYADYDYDYPDVAAEITRWGTWYANELQLDGFRLDAVKHIKFSFLRDWVNHVREKTGKPMFTVAEYWQNDLGALENYLNKTNFNHSVFDVPLHYQFHAASTQGGGYDMRKLLNGTVVSKHPLKSVTFVDNHDTQPGQSLESTVQTWFKPLAYAFILTRESGYPSVFYGDMYGTKGDSQREIPALKHKIEPILKARKQYAYGAQHDYFDHHDIVGWTREGVSSVANSGLAALITDGPGGAKWMYVGRQNAGETWHDITGNRSEPVVINSEGWGEFHVNGGSVSIYVQR

SEQ ID NO: 43054 - protein, 480 aa, Bacillus licheniformis
NGTLMQYFEWYMPNDGQHWKRLQNDSAYLAEHGITAVWIPPAYKGTSQADVGYGAYDLYDLGEFHQKGTVRTKYGTKGELQSAIKSLHSRDINVYGDVVINHKGGADATEDVTAVEVDPADRNRVISGEHLIKAATHFHFPGRGSTYSDFKWHWYHFDGTDWDESRKLNRIYKFQGKAWDWEVSNENGNYDYLMYADIDYDHPDVAAEIKRWGTWYANELQLDGFRLDAVKHIKFSFLRDWVNHVREKTGKEMFTVAEYWQNDLGALENYLNKTNFNHSVFDVPLHYQFHAASTQGGGYDMRKLLNGTVVSKHPLKSVTFVDNHDTQPGQSLESTVQTWFKPLAYAFILTRESGYPQVFYGDMYGTKGDSQREIPALKHKIEPILKARKQYAYGAQHDYFDHHDIVGWTREGDSSVANSGLAALITDGPGGAKRMYVGRQNAGETWHDITGNRSEPVVINSEGWGEFHVNGGSVSIYVQR

SEQ ID NO: 43055 - protein, 480 aa, Bacillus sp.
NGTLMQYFEWYMPNDGQHWKRLQNDSAYLAEHGITAVWIPPAYKGTSQADVGYGAYDLYDLGEFHQKGTVRTKYGTKGELQSAIKSLHSRDINVYGDVVINHKGGADTTEDVTAVEVDPADRNRVISGEHLIKAWTHFHFPGRGSTYSDFKWHWYHFDGTDWDESRKLNRIYKFQGKAWDWEVSNENGNYDYLMYADIDYDHPDVAAEIKRWGTWYANELQLDGFRLDAVKHIKFSFLRDWVNHVREKTGKEMFTVAEYWQNDLGALENYLNKTNFNHSVFDVPLHYQFHAASTQGGGYDMRKLLNGTVVSKHPLKSVTFVDNHDTQPGQSLESTVQTWFKPLAYAFILTRESGYPQVFYGDMYGTKGDSQREIPALKHKIEPILKARKQYAYGAQHDYFDHHDIVGWTREGDSSVANSGLAALITDGPGGAKRMYVGRQNAGETWHDITGNRSEPVVINSEGWGEFHVNGGSVSIYVQR

SEQ ID NO: 43056 - protein, 482 aa, Bacillus sp.
NGTLMQYFEWYAPNDGNHWNRLRTDAENLAQKGITSVWIPPAYKGTTQNDVGYGAYDLYDLGEFNQKGTVRTKYGTKAQLKSAIDALHKKNIDVYGDVVMNHKGGADYTETVTAVEVDPSNRNVEVSGDYEISAWTGFNFPGRGDSYSNFKWKWYHFDGTDWDEGRKLNRIYKFRGIGKAWDWEVSSENGNYDYLMYADLDFDHPDVANEMKKWGTWYANELNLDGFRLDAVKHIDHEYLRDWVNHVRQQTGKEMFAVAEYWQNDIQTLNNYLAKVNYNQSVFDAPLHYNFHYASKGNGNYDMRNILKGTVVANHPTLAVTLVENHDSQPGQSLESVVSPWFKPLAYAFILTRAEGYPSVFYGDYYGTKGNSNYEIPALKDKIDPILTARKNYAYGAQHDYFDHHDIVGWTREGDSSVANSGLAALITDGPGGAKRMYVGRQNAGETWHDITGNRSEPVVINSEGWGEFHVNGGSVSIYVQR

SEQ ID NO: 43057 - protein, 480 aa, Bacillus licheniformis
NGTLMQYFEWYMPNDGQHWKRLQNDSAYLAEHGITAVWIPPAYKGTSQADVGYGAYDLYDLGEFHQKGTVRTKYGTKGELQSAIKSLHSRDINVYGDVVINHKGGADATEDVTAVEVDPADRNRVISGEHLIKAWTHFHFPGRGSTYSDFKWHWYHFDGTDWDESRKLNRIYKFQGKAWDWEVSNENGNYDYLQYADIDYDHPDVAAEIKRWGTWYANELQLDGFRLDAVKHIKFSFLRDWVNHVREKTGKEMFTVAEYWQNDLGALENYLNKTNFNHSVFDVPLHYQFHAASTQGGGYDMRKLLNGTVVSKHPLKSVTFVDNHDTQPGQSLESTVQTWFKPLAYAFILTRESGYPQVFYGDMYGTKGDSQREIPALKHKIEPILKARKQYAYGAQHDYFDHHDIVGWTREGDSSVANSGLAALITDGPGGAKRMYVGRQNAGETWHDITGNRSEPVVINSEGWGEFHVNGGSVSIYVQR

SEQ ID NO: 43058 - protein, 480 aa, Bacillus licheniformis
NGTLMQYFEWYMPNDGQHWKRLQNDSAYLAEHGITAVWIPPAYKGTSQADVGYGAYDLYDLGEFHQKGTVRTKYGTKGELQSAIKSLHSRDINVYGDVVINHKGGADATEDVTAVEVDPADRNRVISGEHLIKAWTHFHFPGRGSTYSDFKWHWYHFDGTDWDESRKLNRIYKFQGKAWDWEVSNENGNYDYLMYADIDYDHPDVAAEIKRWGTWYANELQLDGFRLDAVKHIKFAFLRDWVNHVREKTGKEMFTVAEYWQNDLGALENYLNKTNFNHSVFDVPLHYQFHAASTQGGGYDMRKLLNGTVVSKHPLKSVTFVDNHDTQPGQSLESTVQTWFKPLAYAFILTRESGYPQVFYGDMYGTKGDSQREIPALKHKIEPILKARKQYAYGAQHDYFDHHDIVGWTREGDSSVANSGLAALITDGPGGAKRMYVGRQNAGETWHDITGNRSEPVVINSEGWGEFHVNGGSVSIYVQR

SEQ ID NO: 43059 - protein, 480 aa, Bacillus licheniformis
NGTLMQYFEWYMPNDGQHWKRLQNDSAYLAEHGITAVWIPPAYKGTSQADVGYGAYDLYDLGEFHQKGTVRTKYGTKGELQSAIKSLHSRDINVYGDVVINHKGGADATEDVTAVEVDPADRNRVISGEHLIKAWTHFHFPGRGSTYSDFKWHWYHFDGTDWDESRKLNRIYKFQGKAWDWEVSNENGNYDYLMYADIDYDHPDVAAEIKNWGTWYANELQLDGFRLDAVKHIKFSFLRDWVNHVREKTGKEMFTVAEYWQNDLGALENYLNKTNFNHSVFDVPLHYQFHAASTQGGGYDMRKLLNGTVVSKHPLKSVTFVDNHDTQPGQSLESTVQTWFKPLAYAFILTRESGYPQVFYGDMYGTKGDSQREIPALKHKIEPILKARKQYAYGAQHDYFDHHDIVGWTREGDSSVANSGLAALITDGPGGAKRMYVGRQNAGETWHDITGNRSEPVVINSEGWGEFHVNGGSVSIYVQR

SEQ ID NO: 43060 - protein, 480 aa, Bacillus licheniformis
NGTLMQYFEWYMPNDGQHWKRLQNDSAYLAEHGITAVWIPPAYKGTSQADVGYGAYDLYDLGEFHQKGTVRTKYSTKGELQSAIKSLHSRDINVYGDVVINHKGGADATEDVTAVEVDPADRNRVISGEHLIKAWTHFHFPGRGSTYSDFKWHWYHFDGTDWDESRKLNRIYKFQGKAWDWEVSNENGNYDYLMYADIDYDHPDVAAEIKRWGTWYANELQLDGFRLDAVKHIKFSFLRDWVNHVREKTGKEMFTVAEYWQNDLGALENYLNKTNFNHSVFDVPLHYQFHAASTQGGGYDMRKLLNGTVVSKHPLKSVTFVDNHDTQPGQSLESTVQTWFKPLAYAFILTRESGYPQVFYGDMYGTKGDSQREIPALKHKIEPILKARKQYAYGAQHDYFDHHDIVGWTREGDSSVANSGLAALITDGPGGAKRMYVGRQNAGETWHDITGNRSEPVVINSEGWGEFHVNGGSVSIYVQR

SEQ ID NO: 43061 - protein, 480 aa, Bacillus licheniformis
NGTLMQYFEWYMPNDGQHWKRLQNDSAYLAEHGITAVWIPPAYKGTSQADVGYGAYDLYDLGEFHQKGTVRTKYGTKGELQSAIKSLHSRDINVYGDVVINHKGGADATEDVTAVEVDPADRNRVISGEHLIKAWTHFHFPGRGSTYSDFKWHWYHFDGTDWDESRKLNRIYKFQGKAWDWEVSNENGNYDYLHYADIDYDHPDVAAEIKRWGTWYANELQLDGFRLDAVKHIKFSFLRDWVNHVREKTGKEMFTVAEYWQNDLGALENYLNKTNFNHSVFDVPLHYQFHAASTQGGGYDMRKLLNGTVVSKHPLKSVTFVDNHDTQPGQSLESTVQTWFKPLAYAFILTRESGYPQVFYGDMYGTKGDSQREIPALKHKIEPILKARKQYAYGAQHDYFDHHDIVGWTREGDSSVANSGLAALITDGPGGAKRMYVGRQNAGETWHDITGNRSEPVVINSEGWGEFHVNGGSVSIYVQR

SEQ ID NO: 43062 - protein, 480 aa, Bacillus licheniformis
NGTLMQYFEWYMPNDGQHWKRLQNDSAYLAEHGITAVWIPPAYKGTSQADVGYGAYDLYDLGEFHQKGTVRTKYGTKGELQSAIKSLHSRDINVYGDVVINHKGGADATEDVTAVEVDPADRNRVISGEHRIKAWTHFHFPGRGSTYSDFKWHWYHFDGTDWDESRKLNRIYKFQGKAWDWEVSNENGNYDYLMYADIDYDHPDVAAEIKRWGTWYANELQLDGFRLDAVKHIKFSFLRDWVNHVREKTGKEMFTVAEYWQNDLGALENYLNKTNFNHSVFDVPLHYQFHAASTQGGGYDMRKLLNSTVVSMHPLKAVTFVDNHDTQPGQSLESTVQTWFKPLAYAFILTRESGYPQVFYGDMYGTKGDSQREIPALKHKIEPILKARKQYAYGAQHDYFDHHDIVGWTREGDSSVANSGLAALITDGPGGAKRMYVGRQNAGETWHDITGNRSEPVVINSEGWGEFHVNGGSVSIYVQR

SEQ ID NO: 43063 - protein, 480 aa, Bacillus licheniformis
NGTLMQYFEWYMPNDGQHWRRLQNDSAYLAEHGITAVWIPPAYKGTSQADVGYGAYDLYDLGEFHQKGTVRTKYGTKGELQSAIKSLHSRDINVYGDVVINHKGGADATEDVTAVEVDPADRNRVISGEHLIKAWTHFHFPGRGSTYSDFKWHWYHFDGTDWDESRKLNRIYKFQGKAWDWEVSNENGNYDYLMYADIDYDHPDVAAEIKRWGTWYANELQLDGFRLDAVKHIKFSFLRDWVNHVREKTGKEMFTVAEYWQNDLGALENYLNITNFNHSVFDVPLHYQFHAASTQGGGYDMRKLLNGTVVSKHPLKSVTFVDNHDTQPGQSLESTVQTWFKPLAYAFILTRESGYPQVFYGDMYGTKGDSQREIPALKHKIEPILKARKQYAYGAQHDYFDHHDIVGWTREGDSSVANSGLAALITDGPGGAKRMYVGRQNAGETWHDITGNRSEPVVINSEGWGEFHVNGGSVSIYVQR

SEQ ID NO: 43064 - protein, 480 aa, Synthetic construct
NGTLMQYFEWYMPNDGQHWRRLQNDSAYLAEHGITAVWIPPAYKGTSQADVGYGAYDLYDLGEFHQKGTVRTKYGTKGELQSAIKSLHSRDINVYGDVVINHKGGADATEDVTAVEVDPADRNRVISGEHLIKAWTHFHFPGRGSTYSDFKWHWYHFDGTDWDESRKLNRIYKFQGKAWDWEVSNENGNYDYLMYADIDYDHPDVAAEIKRWGTWYANELQLDGFRLDAVKHIKFSFLRDWVNHVREKTGKEMFTVAEYWQNDLGALENYLNKTNFNHSVFDVPLHYQFHAASTQGGGYDMRKLLAGTVVSKHPLKSVTFVDNHDTQPGQSLESTVQTWFKPLAYAFILTRESGYPQVFYGDMYGTKGDSQREIPALKHKIEPILKARKQYAYGAQHDYFDHHDIVGWTREGDSSVANSGLAALITDGPGGAKRMYVGRQNAGETWHDITGNRSEPVVINSEGWGEFHVNGGSVSIYVQR

SEQ ID NO: 43065 - protein, 480 aa, Bacillus licheniformis
NGTLMQYFEWYMPNDGQHWRRLQNDSAYLAEHGITAVWIPPAYKGTSQADVGYGAYDLYDLGEFHQKGTVRTKYGTKGELQSAIKSLHSRDINVYGDVVINHKGGADATEDVTAVEVDPADRNRVISGEHLIRAWTHFHFPGRGSTYSDFKWHWYHFDGTDWDESRKLNRIYLFQGKAWDWPVSNENGNYDYLMYADYDYDYPDVAAEITRWGTWYANELQLDGFRLDAVKHIKFSFLRDWVNHVREKTGKEMFTVAEYWQNDLGALENYLNKTNFNHSVFDVPLHYQFHAASTQGGGYDMRKLLNGTVVSKHPLKSVTFVDNHDTQPGQSLESTVQTWFKPLAYAFILTRESGYPSVFYGDMYGTKGDSQREIPALKHKIEPILKARKQYAYGAQHDYFDHHDIVGWTREGVSSVANSGLAALITDGPGGAKWMYVGRQNAGETWHDITGNRSEPVVINSEGWGEFHVNGGSVSIYVQR

SEQ ID NO: 43066 - protein, 480 aa, Bacillus licheniformis
NGTLMQYFEWYMPNDGQHWRRLQNDSAYLAEHGITAVWIPPAYKGTSQADVGYGAYDLYDLGEFHQKGTVRTKYGTKGELQSAIKSLHSRDINVYGDVVINHKGGADATEDVDAVEVDPADRNRVISGEHLIKAWTHFHFPGRGSTYSDFKWHWYHFDGTDWDESRKLNRIYKFQGKAWDWEVSNENGNYDYDMYADIDYDHPDVAAEIKRWGTWYANELQLDGFRLDAVKHIKFSFLRDWVNHVREKTGKEMFTVAEYWQNDLGALENYLNKTNFNHSVFDVPLHYQFHAASTQGGGYDMRKLLNGTVVSKHPLKSVTFVDNHDTQPGQSLESTVQTWFKPLAYAFILTRESGYPQVFYGDMYGTKGDSQREIPALKHKIEPILKARKQYAYGAQHDYFDHHDIVGWTREGDSSVANSGLAALITDGPGGAKRMYVGRQNAGETWHDITGNRSEPVVINSEGWGEFHVNGGSVSIYVQR

SEQ ID NO: 43067 - protein, 480 aa, Bacillus licheniformis
NGTLMQYFEWYMPNDGQHWRRLQNDSAYLAEHGITAVWIPPAYKGTSQADVGYGAYDLYDLGEFHQKGTVRTKYGTKGELQSAIKSLHSRDINVYGDVVINHKGGADATEDVTAVEVDPADRNRVISGEHLIKAWTHFHFPGRGSTYSDFKWHWYHFDGTDWDESRKLNRIYLFQGKAWDWPVSNENGNYDYLMYADYDYDYPDVAAEITRWGTWYANELQLDGFRLDAVKHIKFSFLRDWVNHVREKTGKEMFTVAEYWQNDLGALENYLNKTNFNHSVFDVPLHYQFHAASTQGGGYDMRKLLNGTVVSKHPLLSVTFVDNHDTQPGQSLESTVQTWFKPLAYAFILTRESGYPSVFYGDMYGTKGDSQREIPALKHKIEPILKARKQYAYGAQHDYFDHHDIVGWTREGVSSVANSGLAALITDGPGGAKWMYVGRQNAGETWHDITGNRSEPVVINSEGWGEFHVNGGSVSIYVQR

SEQ ID NO: 43068 - protein, 480 aa, Bacillus licheniformis
NGTLMQYFEWYMPNDGQHWRRLQNDSAYLAEHGITAVWIPPAYKGTSQADVGYGAYDLYDLGEFHQKGTVRTKYGTKGELQSAIKSLHSRDINVYGDVVINHKGGADATEDVTAVEVDPADRNRVISGEHLIKAWTHFHFPGRGSTYSDFKWHWYHFDGTDWDESRKLNRIYKFQGKAWDWEVSNENGNYDYLMYADIDYDHPDVAAEIKRWGTWYANELQLDGFRLDAVKHIKFSFLRDWVNHVREKTGKEMFTVAEYWQNDLGALENYLNLTNFNHSVFDVPLHYQFHAASTQGGGYDMRKLLNGTVVSKHPLKSVTFVDNHDTQPGQSLESTVQTWFKPLAYAFILTRESGYPQVFYGDMYGTKGDSQREIPALKHKIEPILKARKQYAYGAQHDYFDHHDIVGWTREGDSSVANSGLAALITDGPGGAKRMYVGRQNAGETWHDITGNRSEPVVINSEGWGEFHVNGGSVSIYVQR

SEQ ID NO: 43069 - protein, 480 aa, Synthetic construct
NGTLMQYFEWYMPNDGQHWRRLQNDSAYLAEHGITAVWIPPAYKGTSQADVGYGAYDLYDLGEFHQKGTVRTKYGTKGELQSAIKSLHSRDINVYGDVVINHKGGADATEDVTAVEVDPADRNRVISGEHLIKAWTHFHFPGRGSTYSDFKWHWYHFDGTDWDESRKLNRIYKFQGKAWDWEVSNENGNYDYLMYADIDYDHPDVAAEIKRWGTWYANELQLDGFRLDAVKHIKFSFLRDWVNHVREKTGKEMFTVAEYWQNDLGALENYLNKTNFNHSVFDVPLHYQFHAASTQGGGYDMRKLLKGTVVSKHPLKSVTFVDNHDTQPGQSLESTVQTWFKPLAYAFILTRESGYPQVFYGDMYGTKGDSQREIPALKHKIEPILKARKQYAYGAQHDYFDHHDIVGWTREGDSSVANSGLAALITDGPGGAKRMYVGRQNAGETWHDITGNRSEPVVINSEGWGEFHVNGGSVSIYVQR

SEQ ID NO: 43070 - protein, 480 aa, Bacillus licheniformis
NGTLMQYFEWYMPNDGQHWKRLQNDSAYLAEHGITAVWIPPAYKGTSQADVGYGAYDLYDLGEFHQKGTVRTKYGTKGELQSAIKSLHSRDINVYGDVVINHKGGADATEDVTAVEVDPADRNRVISGEHRIKAWTHFHFPGRGSTYSDFKWHWYHFDGTGWDESRKLNRIYKFQGKAWDWEVSNENGNYDYLMYADIDYDHPDVAAKIKRWGTWYANELQLDGFRLDAVKHIKFSFLRDWVNHVREKTGKEMFTVAEYWQNDLGALENYLNKTNFNHSVFDVPLHYQFHAASTQGGGYDMRKLLNGTVVSKHPLKAVTFVDNHDTQPGQSLESTVQTWFKPLAYAFILTRESGYPQVFYGDMYGTKGDSQREIPALKHKIEPILKARKQYAYGAQHDYFDHHDIVGWTREGDSSVANSGLAALITDGPGGAKRMYVGRQNAGETWHDITGNRSEPVVINSEGWGEFHVNGGSVSIYVQR

SEQ ID NO: 43071 - protein, 480 aa, Bacillus licheniformis
NGTLMQYFEWYMPNDGQHWRRLQNDSAYLAEHGITAVWIPPAYKGTSQADVGYGAYDLYDLGEFHQKGTVRTKYGTKGELQSAIKSLHSRDINVYGDVVINHKGGADATEDVTAVEVDPADRNRVISGEHLIKAWTHFHFPGRGSTYSDFKWHWYHFDGTDWDESRKLNRIYLFQGKAWDWEVSNENGNYDYLMYADYDYDYPDVAAEITRWGTWYANELQLDGFRLDAVKHIKFSFLRDWVNHVREQTGKPMFTVAEYWQNDLGALENYLNKTNFNHSVFDVPLHYQFHAASTQGGGYDMRKLLNGTVVSKHPLKSVTFVDNHDTQPGQSLESTVQTWFKPLAYAFILTRESGYPSVFYGDMYGTKGDSQREIPALKHKIEPILKARKQYAYGAQHDYFDHHDIVGWTREGVSSVANSGLAALITDGPGGAKWMYVGRQNAGETWHDITGNRSEPVVINSEGWGEFHVNGGSVSIYVQR

SEQ ID NO: 43072 - protein, 480 aa, Bacillus licheniformis
NGTLMQYFEWYMPNDGQHWRRLQNDSAYLAEHGITAVWIPPAYKGTSQADVGYGAYDLYDLGEFHQKGTVRTKYGTKGELQSAIKSLHSRDINVYGDVVINHKGGADATEDVTAVEVDPADRNRVISGEHLIKAWTHFHFPGRGSTYSDFKWYWYHFDGTDWDESRKLNRIYKFQGKTWDWEVSNEFGNYDYLMYADIDYDHPDVVAEIKRWGTWYANELQLDGFRLDAVKHIKFSFLRDWVNHVREKTGKEMFTVAEYWSNDLGALENYLNKTNFNHSVFDVPLHYQFHAASTQGGGYDMRKLLNGTVVSKHPLKSVTFVDNHDTQPGQSLESTVQTWFKPLAYAFILTRESGYPQVFYGDMYGTKGDSQREIPALKHKIEPILKARKQYAYGAQHDYFDHHDIVGWTREGDSSVANSGLAALITDGPGGAKRMYVGRQNAGETWHDITGNRSEPVVINSEGWGEFHVNGGSVSIYVQR

SEQ ID NO: 43073 - protein, 480 aa, Synthetic construct
NGTLMQYFEWYMPNDGQHWRRLQNDSAYLAEHGITAVWIPPAYKGTSQADVGYGAYDLYDLGEFHQKGTVRTKYGTKGELQSAIKSLHSRDINVYGDVVINHKGGADATEDVTAVEVDPADRNRVISGEHLIKAWTHFHFPGRGSTYSDFKWHWYHFDGTDWDESRKLNRIYKFQGKAWDWEVSNENGNYDYLMYADIDYDHPDVAAEIKRWGTWYANELQLDGFRLDAVKHIKFSFLRDWVNHVREKTGKEMFTVAEYWQNDLGALENYLNKTNFNHSVFDVPLHYQFHAASTQGGGYDMRKLLNGTVVSKHPLKSVTFVDNHDTQPGQSLESTVQTWFKPLAYAFILTRESGYPQVFYGDMYGTKGDSQREIPALKHKIEPILKARKQYAYGAQHDYFDHHDIVGWTREGDSSVANSGLAALITDGPGGAKRMYVGRQNAGETWHDITGNRSEPVVINSEGWGEFHVGGGSVSIYVQR

SEQ ID NO: 43074 - protein, 480 aa, Bacillus licheniformis
NGTLMQYFEWYMPNDGQHWKRLQNDSAYLAEHGITAVWIPPAYKGTSQADVGYGAYDLYDLGEFHQKGTVRTKYGTKGELQSAIKSLHSRDINVYGDVVINHKGGADATEDVTAVEVDPADRNRVISGEHLIKAWTHFHFPGRGSTYSDFKWHWYHFDGTDWDESRKLNRIYKFQGKAWDWEVSNENGNYDYLFYADIDYDHPDVAAEIKRWGTWYANELQLDGFRLDAVKHIKFSFLRDWVNHVREKTGKEMFTVAEYWQNDLGALENYLNKTNFNHSVFDVPLHYQFHAASTQGGGYDMRKLLNGTVVSKHPLKSVTFVDNHDTQPGQSLESTVQTWFKPLAYAFILTRESGYPQVFYGDMYGTKGDSQREIPALKHKIEPILKARKQYAYGAQHDYFDHHDIVGWTREGDSSVANSGLAALITDGPGGAKRMYVGRQNAGETWHDITGNRSEPVVINSEGWGEFHVNGGSVSIYVQR

SEQ ID NO: 43075 - protein, 480 aa, Synthetic construct
NGTLMQYFEWYMPNDGQHWRRLQNDSAYLAEHGITAVWIPPAYKGTSQADVGYGAYDLYDLGEFHQKGTVRTKYGTKGELQSAIKSLHSRDINVYGDVVINHKGGADATEDVTAVEVDPADRNRVISGEHLIKAWTHFHFPGRGSTYSDFKWHWYHFDGTDWDESRKLNRIYKFQGKAWDWEVSNENGNYDYLMYADIDYDHPDVAAEIKRWGTWYANELQLDGFRLDAVKHIKFSFLRDWVNHVREKTGKEMFTVAEYWQNDLGALENYLNKTNFNHSVFDVPLHYQFHAASTQGGGYDMRKLLGGTVVSKHPLKSVTFVDNHDTQPGQSLESTVQTWFKPLAYAFILTRESGYPQVFYGDMYGTKGDSQREIPALKHKIEPILKARKQYAYGAQHDYFDHHDIVGWTREGDSSVANSGLAALITDGPGGAKRMYVGRQNAGETWHDITGNRSEPVVINSEGWGEFHVNGGSVSIYVQR

SEQ ID NO: 43076 - protein, 480 aa, Synthetic construct
NGTLMQYFEWYMPNDGQHWRRLQNDSAYLAEHGITAVWIPPAYKGTSQADVGYGAYDLYDLGEFHQKGTVRTKYGTKGELQSAIKSLHSRDINVYGDVVINHKGGADATEDVTAVEVDPADRNRVISGEHLIKAWTHFHFPGRGSTYSDFKWHWYHFDGTDWDESRKLNRIYKFQGKAWDWEVSNENGNYDYLMYADIDYDHPDVAAEIKRWGTWYANELQLDGFRLDAVKHIKFSFLRDWVNHVREKTGKEMFTVAEYWQNDLGALENYLNKTNFNHSVFDVPLHYQFHAASTQGGGYDMRKLLNGTVVSKHPLKSVTFVDNHDTQPGQSLESTVQTWFKPLAYAFILTRESGYPQVFYGDMYGTKGDSQREIPALKHKIEPILKARKQYAYGAQHDYFDHHDIVGWTREGDSSVANSGLAALITDGPGGAKRMYVGRQNAGETWHDITGNRSEPVVINSEGWGEFHVWGGSVSIYVQR

SEQ ID NO: 43077 - protein, 480 aa, Bacillus licheniformis
NGTLMQYFEWYMPNDGQHWKRLQNDSAYLAEHGITAVWIPPAYKGTSQADVGYGAYDLYDLGEFHQKGTVRTKYGTKGELQSAIKSLHSRDINVYGDVVINHKGGADATEDVTAVEVDPADRNRVISGEHLIKAWTHFHFPGRGSTYSDFKWHWYHFDGTDWDESRKLNRIYKFQGKAWDWEVSNENGNYDYLGYADIDYDHPDVAAEIKRWGTWYANELQLDGFRLDAVKHIKFSFLRDWVNHVREKTGKEMFTVAEYWQNDLGALENYLNKTNFNHSVFDVPLHYQFHAASTQGGGYDMRKLLNGTVVSKHPLKSVTFVDNHDTQPGQSLESTVQTWFKPLAYAFILTRESGYPQVFYGDMYGTKGDSQREIPALKHKIEPILKARKQYAYGAQHDYFDHHDIVGWTREGDSSVANSGLAALITDGPGGAKRMYVGRQNAGETWHDITGNRSEPVVINSEGWGEFHVNGGSVSIYVQR

SEQ ID NO: 43078 - protein, 482 aa, Bacillus sp. YR288
NGTMMQYFEWYVPNDGQHWNRLRNDAAYLKSIGVSAIWTPPAYKGTSQNDVGYGAYDLYDLGEFNQKGTIRTKYGTKAELKSAVSTLKSNGIQVYGDVVMNHKGGADYTENVTAVEVNPSNRNQETSDEYTIQAWTGFNFPGRGTTHSPFKWQWYHFDGTDWDQSRNASRIFKFRGTGKAWDWEVSSENGNYDYLMYADLDFDHPDVRNEMKNWGVWYANEVGLDGFRLDAVKHIKHSFLGDWVNHVRTKTGKEMFTVAEYWQNDVNAINNYLAKVNYNHSVFDAPLHYNFHYASQSGGNYDMRNLLNGTVVAAHPTKAVTLVENHDSQPGQSLESVVQPWFKPLAYAFILTRAEGYPSIFYGDMYGTKGNSSYEIPALKTKIEPLLKARKDYAYGTQHNYMDHWDVIGWTREGDSTKEKSGLATLVTDGAGGSKWMYVGKQNAGEVWYDITGNRTDKITINTDGWGNFQVNGGSVSVYVQQ

SEQ ID NO: 43079 - protein, 480 aa, Bacillus licheniformis
NGTLMQYFEWYMPNDGQHWKRLQNDSAYLAEHGITAVWIPPAYKGTSQADVGYGAYDLYDLGEFHQKGTVRTKYGTKGELQSAIKSLHSRDINVYGDVVINHKGGADATEDVTAVEVDPADRNRVISGEHLIKAWTHFHFPGRGSTYSDFKWHWYHFDGTDWDESRKLNRIYKFQGKGWDWEVSNENGNYDYLMYADIDYDHPDVAAEIKRWGTWYANELQLDGFRLDAVKHIKFSFLRDWVNHVREKTGKEMFTVAEYWQNDLGALENYLNKTNFNHSVFDVPLHYQFHAASTQGGGYDMRKLLNGTVVSKHPLKSVTFVDNHDTQPGQSLESTVQTWFKPLAYAFILTRESGYPQVFYGDMYGTKGDSQREIPALKHKIEPILKARKQYAYGAQHDYFDHHDIVGWTREGDSSVANSGLAALITDGPGGAKRMYVGRQNAGETWHDITGNRSEPVVINSEGWGEFHVNGGSVSIYVQR

SEQ ID NO: 43080 - protein, 480 aa, Synthetic construct
NGTLMQYFEWYMPNDGQHWRRLQNDSAYLAEHGITAVWIPPAYKGTSQADVGYGAYDLYDLGEFHQKGTVRTKYGTKGELQSAIKSLHSRDINVYGDVVINHKGGADATEDVTAVEVDPADRNRVISGEHLIKAWTHFHFPGRGSTYSDFKWHWYHFDGTDWDESRKLNRIYKFQGKAWDWEVSNENGNYDYLMYADIDYDHPDVAAEIKRWGTWYANELQLDGFRLDAVKHIKFSFLRDWVNHVREKTGKEMFTVAEYWQNDLGALENYLNKTNFNHSVFDVPLHYQFHAASTQGGGYDMRKLLNGTVVSKHPLKSVTFVDNHDTQPGQSLESTVQTWFKPLAYAFILTRESGYPQVFYGDMYGTKGDSQREIPALKHKIEPILKARKQYAYGAQHDYFDHHDIVGWTREGDSSVANSGLAALITDGPGGAKRMYVGRQNAGETWHDITGNRSEPVVINSEGWGEFHVSGGSVSIYVQR

SEQ ID NO: 43081 - protein, 480 aa, Bacillus licheniformis
NGTLMQYFEWYMPNDGQHWKRLQNDSAYLAEHGITAVWIPPAYKGTSQADVGYGAYDLYDLGEFHQKGTVRTKYGTKGELQSAIKSLHSRDINVYGDVVINHKGGADATEDVTAVEVDPADRNRVISGEHLIKAWTHFHFPGRGSTYSDFKWHWYHFDGTDWDESRKLNRIYKFQGKAWDWEVSNENGNYDYLPYADIDYDHPDVAAEIKRWGTWYANELQLDGFRLDAVKHIKFSFLRDWVNHVREKTGKEMFTVAEYWQNDLGALENYLNKTNFNHSVFDVPLHYQFHAASTQGGGYDMRKLLNGTVVSKHPLKSVTFVDNHDTQPGQSLESTVQTWFKPLAYAFILTRESGYPQVFYGDMYGTKGDSQREIPALKHKIEPILKARKQYAYGAQHDYFDHHDIVGWTREGDSSVANSGLAALITDGPGGAKRMYVGRQNAGETWHDITGNRSEPVVINSEGWGEFHVNGGSVSIYVQR

SEQ ID NO: 43082 - protein, 480 aa, Bacillus licheniformis
NGTLMQYFEWYMPNDGQHWKRLQNDSAYLAEHGITAVWIPPAYKGTSQADVGYGAYDLYDLGEFHQKGTVRTKYGTKGELQSAIKSLHSRDINVYGDVVINHKGGADATEDVTAVEVDPADRNRVISGEHLIKAWTHFHFPGRGSTYSDFKWHWYHFDGTDWDESRKLNRIYKFQGKAWDWEVSNENGNYDYLMYADIDYDHPDVAAEIKRWGTWYANELQLDGFRLDAVKHIKFSFLRDWVNHVREKTGKEMFTVAEYWQNDLGALENYLNKTNFNHSVFDVPLHYQFHAASTQGGGYDMRKLLNGTVVSKHPLKSVTFVDNHDTQPGQALESTVQTWFKPLAYAFILTRESGYPQVFYGDMYGTKGDSQREIPALKHKIEPILKARKQYAYGAQHDYFDHHDIVGWTREGDSSVANSGLAALITDGPGGAKRMYVGRQNAGETWHDITGNRSEPVVINSEGWGEFHVNGGSVSIYVQR

SEQ ID NO: 43083 - protein, 480 aa, Anoxybacillus flavithermus
NGTLMQYFEWYTPNDGQHWKRLQNDAEHLSDIGITAVWIPPAYKGTSQADVGYGAYDLYDLGEFHQKGTVRTKYGTKGELQSAIKSLHSRDINVYGDVVINHKGGADATEDVTAVEVDPADRNRVISGEHLIKAWTHFHFPGRGSTYSDFKWYWYHFDGTDWDESRKLNRIYKFQGKTWDWEVSNEFGNYDYLMYADFDYDHPDVVAEIKRWGTWYANELQLDGFRLDAVKHIKFSFLRDWVNHVREKTGKEMFTVAEYWSNDLGALENYLNKTNFNHSVFDVPLHYQFHAASTQGGGYDMRKLLNGTVVSKHPLKSVTFVDNHDTQPGQSLESTVQTWFKPLAYAFILTRESGYPQVFYGDMYGTKGDSQREIPALKHKIEPILKARKQYAYGAQHDYFDHHDIVGWTREGDSSVANSGLAALITDGPGGAKRMYVGRQNAGETWHDITGNRSEPVVINSEGWGEFHVNGGSVSIYVPK

SEQ ID NO: 43084 - protein, 480 aa, Synthetic construct
NGTLMQYFEWYMPNDGQHWRRLQNDSAYLAEHGITAVWIPPAYKGTSQADVGYGAYDLYDLGEFHQKGTVRTKYGTKGELQSAIKSLHSRDINVYGDVVINHKGGADATEDVTAVEVDPADRNRVISGEHLIKAWTHFHFPGRGSTYSDFKWHWYHFDGTDWDESRKLNRIYKFQGKAWDWEVSNENGNYDYLMYADIDYDHPDVAAEIKRWGTWYANELQLDGFRLDAVKHIKFSFLRDWVNHVREKTGKEMFTVAEYWQNDLGALENYLNKTNFNHSVFDVPLHYQFHAASTQGGGYDMRKLLLGTVVSKHPLKSVTFVDNHDTQPGQSLESTVQTWFKPLAYAFILTRESGYPQVFYGDMYGTKGDSQREIPALKHKIEPILKARKQYAYGAQHDYFDHHDIVGWTREGDSSVANSGLAALITDGPGGAKRMYVGRQNAGETWHDITGNRSEPVVINSEGWGEFHVNGGSVSIYVQR

SEQ ID NO: 43085 - protein, 482 aa, Bacillus sp. YR288
NGTMMQYFEWYVPNDGQHWNRLRNDAAYLKSIGVSAIWTPPAYKGTSQNDVGYGAYDLYDLGEFNQKGTIRTKYGTKAELKSAVSTLKSNGIQVYGDVVMNHKGGADYTENVTAVEVNPSNRYQEISDEYTIQAWTGFNFPGRGTTHSPFKWQWYHFDGTDWDQSRNASRIFKFRGTGKAWDWEVSSENGNYDYLMYADLDFDHPDVRNEMKNWGVWYANEVGLDGFRLDAVKHIKFSFLWDWVNHVRTKTGKEMFTVAEYWQNDVNAINNYLAKVNYNHSVFDAPLHYNFHYASQSGGNYDMRNLLNGTVVAAHPTKAVTLVENHDSQPGQSLESVVQPWFKPLAYAFILTRAEGYPSIFYGDMYGTKGNSSYEIPALKTKIEPLLKARKDYAYGTQHNYMDHWDVIGWTREGDSTKEKSGLATLVTDGAGGSKWMYVGKQNAGEVWYDITGNRTDKITINTDGWGNFQVNGGSVSVYVQQ

SEQ ID NO: 43086 - protein, 480 aa, Bacillus licheniformis
NGTLMQYFEWYMPNDGQHWKRLQNDSAYLAEHGITAVWIPPAYKGTSQADVGYGAYDLYDLGEFHQKGTVRTKYGTKGELQSAIKSLHSRDINVYGDVVINHKGGADATEDVTAVEVDPADRNRVISGEHLIKAWTHFHFPGRGSTYSDFKWHWYHFDGTDWDESRKLNRIYKFQGKAWDWEVSNENGNYDYLLYADIDYDHPDVAAEIKRWGTWYANELQLDGFRLDAVKHIKFSFLRDWVNHVREKTGKEMFTVAEYWQNDLGALENYLNKTNFNHSVFDVPLHYQFHAASTQGGGYDMRKLLNGTVVSKHPLKSVTFVDNHDTQPGQSLESTVQTWFKPLAYAFILTRESGYPQVFYGDMYGTKGDSQREIPALKHKIEPILKARKQYAYGAQHDYFDHHDIVGWTREGDSSVANSGLAALITDGPGGAKRMYVGRQNAGETWHDITGNRSEPVVINSEGWGEFHVNGGSVSIYVQR

SEQ ID NO: 43087 - protein, 480 aa, Bacillus licheniformis
NGTLAQYFEWYMPNDGQHWKRLQNDSAYLAEHGITAVWIPPAYKGTSQADVGYGAYDLYDLGEFHQKGTVRTKYGTKGELQSAIKSLHSRDINVYGDVVINHKGGADATEDVTAVEVDPADRNRVISGEHLIKAWTHFHFPGRGSTYSDFKWHWYHFDGTDWDESRKLNRIYKFQGKAWDWEVSNENGNYDYLMYADIDYDHPDVAAEIKRWGTWYANELQLDGFRLDAVKHIKFSFLRDWVNHVREKTGKEMFTVAEYWQNDLGALENYLNKTNFNHSVFDVPLHYQFHAASTQGGGYDMRKLLNGTVVSKHPLKSVTFVDNHDTQPGQSLESTVQTWFKPLAYAFILTRESGYPQVFYGDMYGTKGDSQREIPALKHKIEPILKARKQYAYGAQHDYFDHHDIVGWTREGDSSVANSGLAALITDGPGGAKRMYVGRQNAGETWHDITGNRSEPVVINSEGWGEFHVNGGSVSIYVQR

SEQ ID NO: 43088 - protein, 480 aa, Bacillus licheniformis
NGTLMQYFEWYMPNDGQHWRRLQNDSAYLAEHGITAVWIPPAYKGTSQADVGYGAYDLYDLGEFHQKGTVRTKYGTKGELQSAIKSLHSRDINVYGDVVINHKGGADATEDVTAVEVDPADRNRVISGEHLIKAWTHFHFPGRGSTYSDFKWHWYHFDGTDWDESRKLNRIYKFQGKAWDWEVSNENGNYDYLMYADIDYDHPDVAAEIKRWGTWYANELQLDGFRLDAVKHIKFHFLRDWVNHVREKTGKEMFTVAEYWQNDLGALENYLNKTNFNHSVFDVPLHYQFHAASTQGGGYDMRKLLNGTVVSKHPLKSVTFVDNHDTQPGQSLESTVQTWFKPLAYAFILTRESGYPQVFYGDMYGTKGDSQREIPALKHKIEPILKARKQYAYGAQHDYFDHHDIVGWTREGDSSVANSGLAALITDGPGGAKRMYVGRQNAGETWHDITGNRSEPVVINSEGWGEFHVNGGSVSIYVQR

SEQ ID NO: 43089 - protein, 480 aa, Bacillus licheniformis
NGTLMQYFEWYMPNDGQHWKRLQNDSAYLAEHGITAVWIPPAYKGTSQADVGYGAYDLYDLGEFHQKGTVRTKYGTKGELQSAIKSLHSRDINVYGDVVINHKGGADATEDVTAVEVDPADRNRVVSGEHLIKAWTHFHFPGRGSTYSDFKWHWYHFDGTDWDESRKLNRIYKFQGKAWDWEVSNENGNYDYLMYADIDYDHPDVAAEIKRWGTWYANELQLDGFRLDAVKHIKFSFLRDWVNHVREKTGKEMFTVAEYWQNDLGALENYLNKTNFNHSVFDVPLHYQFHAASTQGGGYDMRKLLNGTVVSKHPLKSVTFVDNHDTQPGQSLESTVQTWFKPLAYAFILTRESGYPQVFYGDMYGTKGDSQREIPALKHKIEPILKARKQYAYGAQHDYFDHHDIVGWTREGDSSVANSGLAALITDGPGGAKRMYVGRQNAGETWHDITGNRSEPVVINSEGWGEFHVNGGSVSIYVQR

SEQ ID NO: 43090 - protein, 482 aa, Bacillus sp. YR288
NGTMMQYFEWYVPNDGQHWNRLRNDAAYLKSIGVSAIWTPPAYKGTSQNDVGYGAYDLYDLGEFNQKGTIRTKYGTKAELKSAVSTLKSNGIQVYGDVVMNHKGGADYTENVTAVEVNPSNRNQEISDEYTIQAWTGFNFPGRGTTHSPFKWQWYHFDGTDWDQSRNASRIFKFRGTGKAWDWEVSSENGNYDYLMYADLDFDHPDVRNEMKNWGVWYANEVGLDGFRLDAVKHIKHSYLGDWVNHVRTKTGKEMFTVAEYWQNDVNAINNYLAKVNYNHSVFDAPLHYNFHYASQSGGNYDMRNLLNGTVVAAHPTKAVTLVENHDSQPGQSLESVVQPWFKPLAYAFILTRAEGYPSIFYGDMYGTKGNSSYEIPALKTKIEPLLKARKDYAYGTQHNYMDHWDVIGWTREGDSTKEKSGLATLVTDGAGGSKWMYVGKQNAGEVWYDITGNRTDKITINTDGWGNFQVNGGSVSVYVQQ

SEQ ID NO: 43091 - protein, 480 aa, Bacillus licheniformis
NGTLMQYFEWYMPNDGQHWRRLQNDSAYLAEHGITAVWIPPAYKGTSQADVGYGAYDLYDLGEFHQKGTVRTKYGTKGELQSAIKSLHSRDINVYGDVVINHKGGADATEDVTAVEVDPADRNRVISGEHLIKAWTHFHFPGRGSTYSDFKWHWYHFDGTDWDESRKLNRIYKFQGKAWDWEVSNENGNYDYLMYADIDYDHPDVAAEIKRWGTWYANELQLDGFRLDAVKHIKFSFLRDWVNHVREKTGKEMFTVAEYWQNDLGALENYLNKTNFNHSVFDVPLHXQFHAASTQGGGYDMRKLLNGTVVSKHPLKSVTFVDNHDTQPGQSLESTVQTWFKPLAYAFILTRESGYPQVFYGDMYGTKGDSQREIPALKHKIEPILKARKQYAYGAQHDYFDHHDIVGWTREGDSSVANSGLAALITDGPGGAKRMYVGRQNAGETWHDITGNRSEPVVINSEGWGEFHVNGGSVSIYVQR

SEQ ID NO: 43092 - protein, 480 aa, Bacillus licheniformis
NGTLMQYFEWYMPNDGQHWKRLQNDSAYLAEHGITAVWIPPAYKGTSQADVGYGAYDLYDLGEFHQKGTVRTKYGTKGELQSAIKSLHSRDINVYGDVVINHKGGADATEDVTAVEVDPADRNRVISGEHLIKAWTHFHFPGRGSTYSDFKWHWYHFDGTDWDESRKLNRIYKFQGKAWDWEVSNENGNYDYLMYADIDYDHPDVAAEIKRWGTWYANELQLDGFRLDAVKHIKFSFLRDWVNHVREKTGKEMFTVAEYWQNDLGALENYLNKTNFNHSVFDVPLHYQFHAASTQGGGYDMRKLLNGTVVSKHPLKSVTFVDNHDTQPGQSLESTVQTWFKPLAYAFILTRESGYPQVFYGDMYGTKGDSQREIPALKHKIEPILKARKQYAYGAQHDYFDHHDIVGWTREGDSSVANSGLAALITDGPGGAKRMYVGRQNAGETWSDITGNRSEPVVINSEGWGEFHVNGGSVSIYVQR

SEQ ID NO: 43093 - protein, 480 aa, Synthetic construct
NGTLMQYFEWYMPNDGQHWRRLQNDSAYLAEHGITAVWIPPAYKGTSQADVGYGAYDLYDLGEFHQKGTVRTKYGTKGELQSAIKSLHSRDINVYGDVVINHKGGADATEDVTAVEVDPADRNRVISGEHLIKAWTHFHFPGRGSTYSDFKWHWYHFDGTDWDESRKLNRIYKFQGKAWDWEVSNENGNYDYLMYADIDYDHPDVAAEIKRWGTWYANELQLDGFRLDAVKHIKFSFLRDWVNHVREKTGKEMFTVAEYWQNDLGALENYLNKTNFNHSVFDVPLHYQFHAASTQGGGYDMRKLLNGTVVSKHPLKSVTFVDNHDTQPGQSLESTVQTWFKPLAYAFILTRESGYPQVFYGDMYGTKGDSQREIPALKHKIEPILKARKQYAYGAQHDYFDHHDIVGWTREGDSSVANSGLAALITDGPGGAKRMYVGRQNAGETWHDITGNRSEPVVINSEGWGEFHVAGGSVSIYVQR

SEQ ID NO: 43094 - protein, 482 aa, Bacillus sonorensis
NGTLMQYFEWNLPNDGQHWKRLQNDAGYLSDIGITAVWIPPAYKGTSQADVGYGPYDLYDLGEFLQKGTVRTKYGMKTELQSAVGSLHSQNIQVYGDVVLNHKAGADLTEDVTAVEVNPGNRNQEISGEYRIKAWTGFNFPGRGSTYSDFKWHWYHFDGTDWDESRKLNRIYKFRGDGKAWDWEVSSENGNYDYLMYADVDYDHPDVVAEMKRWGTWYAKELQLDGFRLDAVKHIKFSFLSDWLKAVRQSTGKEMFTVAEYWQNNLGEIENYLQKTDFQHSVFDVPLHFNLQAASSHGGSYDMRNLLNGTVVSKHPLKAVTFVDNHDTQPGQSLESTVQTWFKPLAYAFILTREAGYPQVFYGDMYGTKGPTSREIPSLKSKLEPILKARKYYAYGTQHDYFDHPDAIGWTREGDQSVAASGLAALITDGPGGSKRMYVGRQHAGETWHDITGNRSDSVVINSDGWGEFYVNGGSVSIYVQR

SEQ ID NO: 43095 - protein, 480 aa, Synthetic construct
NGTLMQYFEWYMPNDGQHWRRLQNDSAYLAEHGITAVWIPPAYKGTSQADVGYGAYDLYDLGEFHQKGTVRTKYGTKGELQSAIKSLHSRDINVYGDVVINHKGGADATEDVTAVEVDPADRNRVISGEHLIKAWTHFHFPGRGSTYSDFKWHWYHFDGTDWDESRKLNRIYKFQGKAWDWEVSNENGNYDYLMYADIDYDHPDVAAEIKRWGTWYANELQLDGFRLDAVKHIKFSFLRDWVNHVREKTGKEMFTVAEYWQNDLGALENYLNKTNFNHSVFDVPLHYQFHAASTQGGGYDMRKLLDGTVVSKHPLKSVTFVDNHDTQPGQSLESTVQTWFKPLAYAFILTRESGYPQVFYGDMYGTKGDSQREIPALKHKIEPILKARKQYAYGAQHDYFDHHDIVGWTREGDSSVANSGLAALITDGPGGAKRMYVGRQNAGETWHDITGNRSEPVVINSEGWGEFHVNGGSVSIYVQR

SEQ ID NO: 43096 - protein, 480 aa, Bacillus licheniformis
NGTLMQYFEWYMPNDGQHWRRLQNDSAYLAEHGITAVWIPPAYKGTSQADVGYGAYDLYDLGEFHQKGTVRTKYGTKGELQSAIKSLHSRDINVYGDVVINHKGGADATEDVTAVEVDPADRNRVISGEHLIKAWTHFHFPGRGSTYSDFKWHWYHFDGTDWDESRKLNRIYKFQGKAWDWEVSNENGNYDYLMYADIDYDHPDVAAEIKRWYTWYANELQLDGFRLDAVKHIKFSFLRDWVNHVREKTGKEMFTVAEYWQNDLGALENYLNKTNFNHSVFDVPLHYQFHAASTQGGGYDMRKLLNGTVVSKHPLKSVTFVDNHDTQPGQSLESTVQTWFKPLAYAFILTRESGYPQVFYGDMYGTKGDSQREIPALKHKIEPILKARKQYAYGAQHDYFDHHDIVGWTREGDSSVANSGLAALITDGPGGAKRMYVGRQNAGETWHDITGNRSEPVVINSEGWGEFHVNGGSVSIYVQR

SEQ ID NO: 43097 - protein, 480 aa, Bacillus licheniformis
NGTLMQYFEWYMPNDGQHWKRLQNDSAYLAEHGITAVWIPPAYKGTSQADVGYGAYDLYDLGEFHQKGTVRTKYGTKGELQSAIKSLHSRDINVYGDVVINHKGGADATEDVTAVEVDPADRNRVISGEHLIKAWTHFHFPGRGSTYSDFKWHWYHFDGTDWDESRKLNRIYKFQGKAWDWEVSNENGNYDYLCYADIDYDHPDVAAEIKRWGTWYANELQLDGFRLDAVKHIKFSFLRDWVNHVREKTGKEMFTVAEYWQNDLGALENYLNKTNFNHSVFDVPLHYQFHAASTQGGGYDMRKLLNGTVVSKHPLKSVTFVDNHDTQPGQSLESTVQTWFKPLAYAFILTRESGYPQVFYGDMYGTKGDSQREIPALKHKIEPILKARKQYAYGAQHDYFDHHDIVGWTREGDSSVANSGLAALITDGPGGAKRMYVGRQNAGETWHDITGNRSEPVVINSEGWGEFHVNGGSVSIYVQR

SEQ ID NO: 43098 - protein, 480 aa, Bacillus licheniformis
NGTLMQYFEWYMPNDGQHWRRLQNDSAYLAEHGITAVWIPPAYKGTSQADVGYGAYDLYDLGEFHQKGTVRTKYGTKGELQSAIKSLHSRDINVYGDVVINHKGGADATEDVTAVEVDPADRNRVISGEHLIKAWTHFHFPGRGSTYSDFKWHWYHFDGTDWDESRKLNRIYKFQGKAWDWEVSNENGNYDYDMYADIDYDHPDVAAEIKRWGTWYANELQLDGFRLDAVKHIKFSFLRDWVNHVREKTGKEMFTVAEYWQNDLGALENYLNKTNFNHSVFDVPLHYQFHAASTQGGGYDMRKLLNGTVVSKHPLKSVTFVDNHDTQPGQSLESTVQTWFKPLAYAFILTRESGYPQVFYGDMYGTKGDSQREIPALKHKIEPILKARKQYAYGAQHDYFDHHDIVGWTREGDSSVANSGLAALITDGPGGAKRMYVGRQNAGETWHDITGNRSEPVVINSEGWGEFHVNGGSVSIYVQR

SEQ ID NO: 43099 - protein, 480 aa, Synthetic construct
NGTLMQYFEWYMPNDGQHWRRLQNDSAYLAEHGITAVWIPPAYKGTSQADVGYGAYDLYDLGEFHQKGTVRTKYGTKGELQSAIKSLHSRDINVYGDVVINHKGGADATEDVTAVEVDPADRNRVISGEHLIKAWTHFHFPGRGSTYSDFKWHWYHFDGTDWDESRKLNRIYKFQGKAWDWEVSNENGNYDYLMYADIDYDHPDVAAEIKRWGTWYANELQLDGFRLDAVKHIKFSFLRDWVNHVREKTGKEMFTVAEYWQNDLGALENYLNKTNFNHSVFDVPLHYQFHAASTQGGGYDMRKLLEGTVVSKHPLKSVTFVDNHDTQPGQSLESTVQTWFKPLAYAFILTRESGYPQVFYGDMYGTKGDSQREIPALKHKIEPILKARKQYAYGAQHDYFDHHDIVGWTREGDSSVANSGLAALITDGPGGAKRMYVGRQNAGETWHDITGNRSEPVVINSEGWGEFHVNGGSVSIYVQR

SEQ ID NO: 43100 - protein, 480 aa, Synthetic construct
NGTLMQYFEWYMPNDGQHWRRLQNDSAYLAEHGITAVWIPPAYKGTSQADVGYGAYDLYDLGEFHQKGTVRTKYGTKGELQSAIKSLHSRDINVYGDVVINHKGGADATEDVTAVEVDPADRNRVISGEHLIKAWTHFHFPGRGSTYSDFKWHWYHFDGTDWDESRKLNRIYKFQGKAWDWEVSNENGNYDYLMYADIDYDHPDVAAEIKRWGTWYANELQLDGFRLDAVKHIKFSFLRDWVNHVREKTGKEMFTVAEYWQNDLGALENYLNKTNFNHSVFDVPLHYQFHAASTQGGGYDMRKLLSGTVVSKHPLKSVTFVDNHDTQPGQSLESTVQTWFKPLAYAFILTRESGYPQVFYGDMYGTKGDSQREIPALKHKIEPILKARKQYAYGAQHDYFDHHDIVGWTREGDSSVANSGLAALITDGPGGAKRMYVGRQNAGETWHDITGNRSEPVVINSEGWGEFHVNGGSVSIYVQR

SEQ ID NO: 43101 - protein, 480 aa, Bacillus licheniformis
NGTLMQYFEWYMPNDGQHWRRLQNDSAYLAEHGITAVWIPPAYKGTSQADVGYGAYDLYDLGEFHQKGTVRTKYGTKGELQSAIKSLHSRDINVYGDVVINHKGGADATEDVTAVEVDPADRNRVISGEHLIKAWTHFHFPGRGSTYSDFKWHWYHFDGTDWDESRKLNRIYKFQGKAWDWEVSNENGNYDYLMYADIDYDHPDVAAEIKRWGTWYANELQLDGFRLDAVKHIKFSFLRDWVNHVREKTGKEMFTVAEYWQNDLGALENYLNYTNFNHSVFDVPLHYQFHAASTQGGGYDMRKLLNGTVVSKHPLKSVTFVDNHDTQPGQSLESTVQTWFKPLAYAFILTRESGYPQVFYGDMYGTKGDSQREIPALKHKIEPILKARKQYAYGAQHDYFDHHDIVGWTREGDSSVANSGLAALITDGPGGAKRMYVGRQNAGETWHDITGNRSEPVVINSEGWGEFHVNGGSVSIYVQR

SEQ ID NO: 43102 - protein, 482 aa, Bacillus sp. YR288
NGTMMQYFEWYVPNDGQHWNRLRNDAAYLKSIGVSAIWTPPAYKGTSQNDVGYGAYDLYDLGEFNQKGTIRTKYGTKAELKSAVSTLKSNGIQVYGDVVMNHKGGADYTENVTAVEVNPSNRNQETSDEYTIQAWTGFNFPGRGTTHSPFKWQWYHFDGTDWDQSRNASRIFKFRGTGKAWDWEVSSENGNYDYLMYADLDYDHPDVRNEMKNWGVWYANEVGLDGFRLDAVKHIKFSFLGDWVNHVRTKTGKEMFTVAEYWQNDVNAINNYLAKVNYNHSVFDAPLHYNFHYASQSGGNYDMRNLLNGTVVAAHPTKAVTLVENHDSQPGQSLESVVQPWFKPLAYAFILTRAEGYPSIFYGDMYGTKGNSSYEIPALKTKIEPLLKARKDYAYGTQHNYMDHWDVIGWTREGDSTKEKSGLATLVTDGAGGSKWMYVGKQNAGEVWYDITGNRTDKITINTDGWGNFQVNGGSVSVYVQQ

SEQ ID NO: 43103 - protein, 482 aa, Bacillus sp. YR288
NGTMMQYFEWYVPNDGQHWNRLRNDAAYLKSIGVSAIWTPPAYKGTSQNDVGYGAYDLYDLGEFNQKGTIRTKYGTKAELKSAVSTLKSNGIQVYGDVVMNHKGGADYTENVTAVEVNPSNRNQETSDEYTIQAWTGFNFPGRGTTHSPFKWQWYHFDGTDWDQSRNASRIFKFRGTGKAWDWEVSSENGNYDYLMYADLDFDHPDVINEMKNWGVWYANEVGLDGFRLDAVKHIKHSFLGDWVNHVRTKTGKEMFTVAEYWQNDVNAINNYLAKVNYNHSVFDAPLHYNFHYASQSGGNYDMRNLLNGTVVAAHPTKAVTLVENHDSQPGQSLESVVQPWFKPLAYAFILTRAEGYPSIFYGDMYGTKGNSSYEIPALKTKIEPLLKARKDYAYGTQHNYMDHWDVIGWTREGDSTKEKSGLATLVTDGAGGSKWMYVGKQNAGEVWYDITGNRTDKITINTDGWGNFQVNGGSVSVYVQQ

SEQ ID NO: 43104 - protein, 480 aa, Bacillus licheniformis
NGTLMQYFEWYMPNDGQHWRRLQNDSAYLAEHGITAVWIPPAYKGTSQADVGYGAYDLYDLGEFHQKGTVRTKYGTKGELQSAIKSLHSRDINVYGDVVINHKGGADATEDVTAVEVDPADRNRVISGEHLIKAWTHFHFPGRGSTYSDFKWHWYHFDGTDWDESRSLNRIYLFQGKAWDWPVSNENGNYDYLMYADYDYDYPDVAAEITRWGTWYANELQLDGFRLDAVKHIKFSFLRDWVNHVREKTGKEMFTVAEYWQNDLGALENYLNKTNFNHSVFDVPLHYQFHAASTQGGGYDMRKLLNGTVVSKHPLKSVTFVDNHDTQPGQSLESTVQTWFKPLAYAFILTRESGYPSVFYGDMYGTKGDSQREIPALKHKIEPILKARKQYAYGAQHDYFDHHDIVGWTREGVSSVANSGLAALITDGPGGAKWMYVGRQNAGETWHDITGNRSEPVVINSEGWGEFHVNGGSVSIYVQR

SEQ ID NO: 43105 - protein, 482 aa, Bacillus sp. YR288
NGTMMQYFEWYVPNDGQHWNRLRNDAAYLKSIGVSAIWTPPAYKGTSQNDVGYGAYDLYDLGEFNQKGTIRTKYGTKAELKSAVSTLKSNGIQVYGDVVMNHKGGADYTENVTAVEVNPSNRNQETSDEYTIQAWTGFNFPGRGTTHSPFKWQWYHFDGTDWDQSRNASRIFKFRGTGKAWDWEVSSENGNYDYLMYADLDFDHPDVRNEMKNWGVWYANEVGLDGFRLDAVKHIKHSYLGDWVNHVRTKTGKEMFTVAEYWQNDVNAINNYLAKVNYNHSVFDAPLHYNFHYASQSGGNYDMRNLLNGTVVAAHPTKAVTLVENHDSQPGQSLESVVQPWFKPLAYAFILTRAEGYPSIFYGDMYGTKGNSSYEIPALKTKIEPLLKARKDYAYGTQHNYMDHWDVIGWTREGDSTKEKSGLATLMTDGAGGSKWMYVGKQNAGEVWYDITGNRTDKITINTDGWGNFQVNGGSVSVYVQQ

SEQ ID NO: 43106 - protein, 480 aa, Bacillus licheniformis
NGTLMQYFEWYMPNDGQHWRRLQNDSAYLAEHGITAVWIPPAYKGTSQADVGYGAYDLYDLGEFHQKGTVRTKYGTKGELQSAIKSLHSRDINVYGDVVINHKGGADATEDVTAVEVDPADRNRVISGEHLIKAWTHFHFPGRGSTYSDFKWHWYHFDGTDWDESRKLNRIYKFQGKAWDWEVSNENGNYDYLMYADIDYDHPDVAAEIKRWGTWYANELQLDGFRLDAVKHIKFSFLRDWVNHVREKTGKEMFTVAEYWQNDLGALENYLNFTNFNHSVFDVPLHYQFHAASTQGGGYDMRKLLNGTVVSKHPLKSVTFVDNHDTQPGQSLESTVQTWFKPLAYAFILTRESGYPQVFYGDMYGTKGDSQREIPALKHKIEPILKARKQYAYGAQHDYFDHHDIVGWTREGDSSVANSGLAALITDGPGGAKRMYVGRQNAGETWHDITGNRSEPVVINSEGWGEFHVNGGSVSIYVQR

SEQ ID NO: 43107 - protein, 480 aa, Synthetic construct
NGTLMQYFEWYMPNDGQHWRRLQNDSAYLAEHGITAVWIPPAYKGTSQADVGYGAYDLYDLGEFHQKGTVRTKYGTKGELQSAIKSLHSRDINVYGDVVINHKGGADATEDVTAVEVDPADRNRVISGEHLIKAWTHFHFPGRGSTYSDFKWHWYHFDGTDWDESRKLNRIYKFQGKAWDWEVSNENGNYDYLMYADIDYDHPDVAAEIKRWGTWYANELQLDGFRLDAVKHIKFSFLRDWVNHVREKTGKEMFTVAEYWQNDLGALENYLNKTNFNHSVFDVPLHYQFHAASTQGGGYDMRKLLNGTVVSKHPLKSVTFVDNHDTQPGQSLESTVQTWFKPLAYAFILTRESGYPQVFYGDMYGTKGDSQREIPALKHKIEPILKARKQYAYGAQHDYFDHHDIVGWTREGDSSVANSGLAALITDGPGGAKRMYVGRQNAGETWHDITGNRSEPVVINSEGWGEFHVYGGSVSIYVQR

SEQ ID NO: 43108 - protein, 480 aa, Bacillus licheniformis
NGTLMQYFEWYMPNDGQHWKRLQNDSAYLAEHGITAVWIPPAYKGTSQADVGYGAYDLYDLGEFHQKGTVRTKYGTKGELQSAIKSLHSRDINVYGDVVINHKGGADATEDVTAVEVDPADRNRVISGEXLIKAWTHFHFPGRGSTYSDFKWHWYHFDGTDWDESRKLNRIYKFQGKAWDWEVSNENGNYDYLMYADIDYDHPDVAAEIKRWGTWYANELQLDGFRLDAVKHIKFSFLRDWVNHVREKTGKEMFTVAEYWQNDLGALENYLNKTNFNHSLFDVPLHYQFHAASTQGGGYDMRKLLNGTVVSKHPLKSVTFVDNHDTQPGQSLESTVQTWFKPLAYAFILTRESGYPQVFYGDMYGTKGDSQREIPALKHKIEPILKARKQYAYGAQHDYFDHHDIVGWTREGDSSVANSGLAALITDGPGGAKRMYVGRQNAGETWHDITGNRSEPVVINSEGWGEFHVNGGSVSIYVQR

SEQ ID NO: 43109 - protein, 480 aa, Bacillus licheniformis
NGTLMQYFEWYMPNDGQHWKRLQNDSAYLAEHGITAVWIPPAYKGTSQADVGYGAYDLYDLGEFHQKGTVRTKYGTKGELQSAIKSLHSRDINVYGDVVINHKGGADATEDVTAVEVDPADRNRVISGEHLIKAWTHFHFPGRGSTYSDFKWHWYHFDGTDWDESRKLNRIYKFQGKAWDWEVSNENGNYDYLRYADIDYDHPDVAAEIKRWGTWYANELQLDGFRLDAVKHIKFSFLRDWVNHVREKTGKEMFTVAEYWQNDLGALENYLNKTNFNHSVFDVPLHYQFHAASTQGGGYDMRKLLNGTVVSKHPLKSVTFVDNHDTQPGQSLESTVQTWFKPLAYAFILTRESGYPQVFYGDMYGTKGDSQREIPALKHKIEPILKARKQYAYGAQHDYFDHHDIVGWTREGDSSVANSGLAALITDGPGGAKRMYVGRQNAGETWHDITGNRSEPVVINSEGWGEFHVNGGSVSIYVQR

SEQ ID NO: 43110 - protein, 480 aa, Synthetic construct
NGTLMQYFEWYMPNDGQHWRRLQNDSAYLAEHGITAVWIPPAYKGTSQADVGYGAYDLYDLGEFHQKGTVRTKYGTKGELQSAIKSLHSRDINVYGDVVINHKGGADATEDVTAVEVDPADRNRVISGEHLIKAWTHFHFPGRGSTYSDFKWHWYHFDGTDWDESRKLNRIYKFQGKAWDWEVSNENGNYDYLMYADIDYDHPDVAAEIKRWGTWYANELQLDGFRLDAVKHIKFSFLRDWVNHVREKTGKEMFTVAEYWQNDLGALENYLNKTNFNHSVFDVPLHYQFHAASTQGGGYDMRKLLIGTVVSKHPLKSVTFVDNHDTQPGQSLESTVQTWFKPLAYAFILTRESGYPQVFYGDMYGTKGDSQREIPALKHKIEPILKARKQYAYGAQHDYFDHHDIVGWTREGDSSVANSGLAALITDGPGGAKRMYVGRQNAGETWHDITGNRSEPVVINSEGWGEFHVNGGSVSIYVQR

SEQ ID NO: 43111 - protein, 480 aa, Bacillus licheniformis
NGTLMQYFEWYMPNDGQHWRRLQNDSAYLAEHGITAVWIPPAYKGTSQADVGYGAYDLYDLGEFHQKGTVRTKYGTKGELQSAIKSLHSRDINVYGDVVINHKGGADATEDVTAVEVDPADRNRVISGEHLIKAWTHFHFPGRGSTYSDFKWHWYHFDGTDWDESRKLNRIYLFQGKAWDWPVSNENGNYDYLMYADYDYDYPDVAAEITRWGTWYANELQLDGFRLDAVKHIKFSFLRDWVNHVREQTGKEMFTVAEYWQNDLGALENYLNKTNFNHSVFDVPLHYQFHAASTQGGGYDMRKLLNGTVVSKHPLKSVTFVDNHDTQPGQSLESTVQTWFKPLAYAFILTRESGYPSVFYGDMYGTKGDSQREIPALKHKIEPILKARKQYAYGAQHDYFDHHDIVGWTREGVSSVANSGLAALITDGPGGAKWMYVGRQNAGETWHDITGNRSEPVVINSEGWGEFHVNGGSVSIYVQR

SEQ ID NO: 43112 - protein, 480 aa, Synthetic construct
NGTLMQYFEWYMPNDGQHWRRLQNDSAYLAEHGITAVWIPPAYKGTSQADVGYGAYDLYDLGEFHQKGTVRTKYGTKGELQSAIKSLHSRDINVYGDVVINHKGGADATEDVTAVEVDPADRNRVISGEHLIKAWTHFHFPGRGSTYSDFKWHWYHFDGTDWDESRKLNRIYKFQGKAWDWEVSNENGNYDYLMYADIDYDHPDVAAEIKRWGTWYANELQLDGFRLDAVKHIKFSFLRDWVNHVREKTGKEMFTVAEYWQNDLGALENYLNKTNFNHSVFDVPLHYQFHAASTQGGGYDMRKLLNGTVVSKHPLKSVTFVDNHDTQPGQSLESTVQTWFKPLAYAFILTRESGYPQVFYGDMYGTKGDSQREIPALKHKIEPILKARKQYAYGAQHDYFDHHDIVGWTREGDSSVANSGLAALITDGPGGAKRMYVGRQNAGETWHDITGNRSEPVVINSEGWGEFHVVGGSVSIYVQR

SEQ ID NO: 43113 - protein, 480 aa, Bacillus sp. SCSIO 15121
NGTLMQYFEWYMPNDGQHWKRLQNDSAYLAEHGITAVWIPPAYKGTSQDDVGYGAYDLYDLGEFHQKGTVRTKYGTKGELQSAINSLHSRDINVYGDVVINHKGGADATEDVTAVEVDPADRNRVTSGEQRIKAWTHFQFPGRGSTYSDFKWHWEHFDGTDWDESRKLNRIYKFQGKAWDWEVSNENGNYDYLMYADIDYDHPDVTAEIKRWGTWYANELQLDGFRLDAVKHIKFSFLRDWVNHVREKTGKEMFTVAEYWQNDLGALENYLNKTNFNHSVFDVPLHYQFHAASTQGGGYDMRKLLNGTVVSKHPVKAVTFVDNHDTQPGQSLESTVQTWFKPLAYAFILTREAGYPQIFYGDMYGTKGASQREIPALKHKIEPILKARKQYAYGAQHDYFDHHNIVGWTREGDSSVANSGLAALITDGPSGTKRMYVGRQNAGETWHDITGNRSDSVVINAEGWGEFHVNGGSVSIYVQR

SEQ ID NO: 43114 - protein, 480 aa, Synthetic construct
NGTLMQYFEWYMPNDGQHWRRLQNDSAYLAEHGITAVWIPPAYKGTSQADVGYGAYDLYDLGEFHQKGTVRTKYGTKGELQSAIKSLHSRDINVYGDVVINHKGGADATEDVTAVEVDPADRNRVISGEHLIKAWTHFHFPGRGSTYSDFKWHWYHFDGTDWDESRKLNRIYKFQGKAWDWEVSNENGNYDYLMYADIDYDHPDVAAEIKRWGTWYANELQLDGFRLDAVKHIKFSFLRDWVNHVREKTGKEMFTVAEYWQNDLGALENYLNKTNFNHSVFDVPLHYQFHAASTQGGGYDMRKLLNGTVVSKHPLKSVTFVDNHDTQPGQSLESTVQTWFKPLAYAFILTRESGYPQVFYGDMYGTKGDSQREIPALKHKIEPILKARKQYAYGAQHDYFDHHDIVGWTREGDSSVANSGLAALITDGPGGAKRMYVGRQNAGETWHDITGNRSEPVVINSEGWGEFHVKGGSVSIYVQR

SEQ ID NO: 43115 - protein, 480 aa, Bacillus sp.
NGTLMQYFEWYMPNDGQHWRRLQNDSAYLAEHGITAVWIPPAYKGTSQADVGYGAYDLYDLGEFHQKGTVRTKYGTKGELQSAIKSLHSRDINVYGDVVINHKGGADATEDVTAVEVDPADRNRVISGEHLIKAWTHFHFPGRGSTYSDFKWHWYHFDGTDWDESRKLNRIYKFQGKAWDWEVSNEFGNYDYLMYADIDYDHPDVAAEIKRWGTWYANELQLDGFRLDAVKHIKFSFLRDWVNHVREKTGKEMFTVAEYWSNDLGALENYLNKTNFNHSVFDVPLHYQFHAASTQGGGYDMRKLLNGTVVSKHPLKSVTFVDNHDTQPGQSLESTVQTWFKPLAYAFILTRESGYPQVFYGDMYGTKGDSQREIPALKHKIEPILKARKQYAYGAQHDYFDHHDIVGWTREGDSSVANSGLAALITDGPGGAKRMYVGRQNAGETWHDITGNRSEPVVINSEGWGEFHVNGGSVSIYVQR

SEQ ID NO: 43116 - protein, 480 aa, Bacillus licheniformis
NGTLMQYFEWYMPNDGQHWKRLQNDSAYLAEHGITAVWIPPAYKGTSQADVGYGAYDLYDLGEFHQKGTVRTKYGTKGELQSAIKSLHSRDINVYGDVVINHKGGADATEDVTAVEVDPADRNRVISGEHLIKAWTHFHFPGRGSTYSDFKWHWYHFDGTDWDESRKLNRIYKFQGKAWDWEVSNENGNYDYLWYADIDYDHPDVAAEIKRWGTWYANELQLDGFRLDAVKHIKFSFLRDWVNHVREKTGKEMFTVAEYWQNDLGALENYLNKTNFNHSVFDVPLHYQFHAASTQGGGYDMRKLLNGTVVSKHPLKSVTFVDNHDTQPGQSLESTVQTWFKPLAYAFILTRESGYPQVFYGDMYGTKGDSQREIPALKHKIEPILKARKQYAYGAQHDYFDHHDIVGWTREGDSSVANSGLAALITDGPGGAKRMYVGRQNAGETWHDITGNRSEPVVINSEGWGEFHVNGGSVSIYVQR

SEQ ID NO: 43117 - protein, 480 aa, Bacillus licheniformis
NGTLMQYFEWYMPNDGQHWRRLQNDSAYLAEHGITAVWIPPAYKGTSQADVGYGAYDLYDLGEFHQKGTVRTKYGTKGELQSAIKSLHSRDINVYGDVVINHKGGADATEDVTAVEVDPADRNRVISGEHLIKAWTHFHFPGRGSTYSDFKWHWYHFDGTDWDESRKLNRIYKFQGKAWDWEVSNENGNYDYLMYADFDYDNPDVAAEIKRWGTWYANELQLDGFRLDAVKHIKFSFLRDWVNHVREKTGKEMFTVAEYWQNDLGALENYLNKTNFNHSVFDVPLHYQFHAASTQGGGYDMRKLLNGTVVSKHPLKSVTFVDNHDTQPGQSLESTVQTWFKPLAYAFILTRESGYPQVFYGDMYGTKGDSQRKIPALKHKIEPILKARKQYAYGAQHDYFDHHDIVGWTREGDSSVRNSGLAALITDGPGGAKRMYVGRQNAGETWHDITGNRSEPVVINSEGWGEFHVNGGSVSIYVQR

SEQ ID NO: 43118 - protein, 482 aa, Bacillus sp. YR288
NGTMMQYFEWYVPNDGQHWNRLRNDAAYLKSIGVSAIWTPPAYKGTSQNDVGYGAYDLYDLGEFNQKGTIRTKYGTKAELKSAVSTLKSNGIQVYGDVVMNHKGGADYTENVTAVEVNPSNRNQETSDEYTIQAWTWFNFPGRGTTHSPFKWQWYHFDGTDWDQSRNASRIFKFRGTGKAWDWEVSSENGNYDYLMYADYDFDHPDVRNEMKNWGVWYANEVGLDGFRLDAVKHIKHSFLWDWVNHVRTKTGKEMFTVAEYWQNDVNAINNYLAKVNYNHSVFDAPLHYNFHYASQSGGNYDMRNLLNGTVVAAHPTKAVTLVENHDSQPGQSLESVVQPWFKPLAYAFILTRAEGYPSIFYGDMYGTKGNSSYEIPALKTKIEPLLKARKDYAYGTQHNYMDHWDVIGWTREGDSTKEKSGLATLVTDGAGGSKWMYVGKQNAGEVWYDITGNRTDKITINTDGWGNFQVNGGSVSVYVQQ

SEQ ID NO: 43119 - protein, 480 aa, Bacillus licheniformis
NGTLMQYFEWYMPNDGQHWRRLQNDSAYLAEHGITAVWIPPAYKGTSQADVGYGAYDLYDLGEFHQKGTVRTKYGTKGELQSAIKSLHSRDINVYGDVVINHKGGADATEDVTAVEVDPADRNRVISGEHLIKAWTHFHFPGRGSTYSDFKWHWYHFDGTDWDESRKLNRIYKFQGKAWDWEVSNENGNYDYLMYADIDYDHPDVAAEIKRWGTWYANELQLDGFRLDAVKHIKFSFLRDWVNHVREKTGKEMFTVAEYWQNDLGALENYLNHTNFNHSVFDVPLHYQFHAASTQGGGYDMRKLLNGTVVSKHPLKSVTFVDNHDTQPGQSLESTVQTWFKPLAYAFILTRESGYPQVFYGDMYGTKGDSQREIPALKHKIEPILKARKQYAYGAQHDYFDHHDIVGWTREGDSSVANSGLAALITDGPGGAKRMYVGRQNAGETWHDITGNRSEPVVINSEGWGEFHVNGGSVSIYVQR

SEQ ID NO: 43120 - protein, 480 aa, Bacillus licheniformis
NGTLMQYFEWYMPNDGQHWKRLQNDSAYLAEHGITAVWIPPAYKGTSQADVGYGAYDLYDLGEFHQKGTVRTKYGTKGELQSAIKSLHSRDINVYGDVVINHKGGADATEDVTAVEVDPADRNRVISGEHLIKAWTHFHFPGRGSTYSDFKWHWYHFDGTDWDESRKLNRIYKFQGKAWDWEVSNENGNYDYLIYADIDYDHPDVAAEIKRWGTWYANELQLDGFRLDAVKHIKFSFLRDWVNHVREKTGKEMFTVAEYWQNDLGALENYLNKTNFNHSVFDVPLHYQFHAASTQGGGYDMRKLLNGTVVSKHPLKSVTFVDNHDTQPGQSLESTVQTWFKPLAYAFILTRESGYPQVFYGDMYGTKGDSQREIPALKHKIEPILKARKQYAYGAQHDYFDHHDIVGWTREGDSSVANSGLAALITDGPGGAKRMYVGRQNAGETWHDITGNRSEPVVINSEGWGEFHVNGGSVSIYVQR

SEQ ID NO: 43121 - protein, 480 aa, Bacillus licheniformis
NGTLMQYFEWYMPNDGQHWKRLQNDSAYLAEHGITAVWIPPAYKGTSQADVGYGAYDLYDLGEFHQKGTVRTKYGTKGELQSAIKSLHSRDINVYGDVVINHKGGADATEDVTAVEVDPADRNRVISGEHLIKAWTHFHFPGRGSTYSDFKWHWYHFDGTDWDESRKLNRIYKFQGKAWDWEVSNENGNYDYLNYADIDYDHPDVAAEIKRWGTWYANELQLDGFRLDAVKHIKFSFLRDWVNHVREKTGKEMFTVAEYWQNDLGALENYLNKTNFNHSVFDVPLHYQFHAASTQGGGYDMRKLLNGTVVSKHPLKSVTFVDNHDTQPGQSLESTVQTWFKPLAYAFILTRESGYPQVFYGDMYGTKGDSQREIPALKHKIEPILKARKQYAYGAQHDYFDHHDIVGWTREGDSSVANSGLAALITDGPGGAKRMYVGRQNAGETWHDITGNRSEPVVINSEGWGEFHVNGGSVSIYVQR

SEQ ID NO: 43122 - protein, 480 aa, Synthetic construct
NGTLMQYFEWYMPNDGQHWRRLQNDSAYLAEHGITAVWIPPAYKGTSQADVGYGAYDLYDLGEFHQKGTVRTKYGTKGELQSAIKSLHSRDINVYGDVVINHKGGADATEDVTAVEVDPADRNRVISGEHLIKAWTHFHFPGRGSTYSDFKWHWYHFDGTDWDESRKLNRIYKFQGKAWDWEVSNENGNYDYLMYADIDYDHPDVAAEIKRWGTWYANELQLDGFRLDAVKHIKFSFLRDWVNHVREKTGKEMFTVAEYWQNDLGALENYLNKTNFNHSVFDVPLHYQFHAASTQGGGYDMRKLLNGTVVSKHPLKSVTFVDNHDTQPGQSLESTVQTWFKPLAYAFILTRESGYPQVFYGDMYGTKGDSQREIPALKHKIEPILKARKQYAYGAQHDYFDHHDIVGWTREGDSSVANSGLAALITDGPGGAKRMYVGRQNAGETWHDITGNRSEPVVINSEGWGEFHVPGGSVSIYVQR

SEQ ID NO: 43123 - protein, 480 aa, Synthetic construct
NGTLMQYFEWYMPNDGQHWRRLQNDSAYLAEHGITAVWIPPAYKGTSQADVGYGAYDLYDLGEFHQKGTVRTKYGTKGELQSAIKSLHSRDINVYGDVVINHKGGADATEDVTAVEVDPADRNRVISGEHLIKAWTHFHFPGRGSTYSDFKWHWYHFDGTDWDESRKLNRIYKFQGKAWDWEVSNENGNYDYLMYADIDYDHPDVAAEIKRWGTWYANELQLDGFRLDAVKHIKFSFLRDWVNHVREKTGKEMFTVAEYWQNDLGALENYLNKTNFNHSVFDVPLHYQFHAASTQGGGYDMRKLLTGTVVSKHPLKSVTFVDNHDTQPGQSLESTVQTWFKPLAYAFILTRESGYPQVFYGDMYGTKGDSQREIPALKHKIEPILKARKQYAYGAQHDYFDHHDIVGWTREGDSSVANSGLAALITDGPGGAKRMYVGRQNAGETWHDITGNRSEPVVINSEGWGEFHVNGGSVSIYVQR

SEQ ID NO: 43124 - protein, 480 aa, Synthetic construct
NGTLMQYFEWYMPNDGQHWRRLQNDSAYLAEHGITAVWIPPAYKGTSQADVGYGAYDLYDLGEFHQKGTVRTKYGTKGELQSAIKSLHSRDINVYGDVVINHKGGADATEDVTAVEVDPADRNRVISGEHLIKAWTHFHFPGRGSTYSDFKWHWYHFDGTDWDESRKLNRIYKFQGKAWDWEVSNENGNYDYLMYADIDYDHPDVAAEIKRWGTWYANELQLDGFRLDAVKHIKFSFLRDWVNHVREKTGKEMFTVAEYWQNDLGALENYLNKTNFNHSVFDVPLHYQFHAASTQGGGYDMRKLLNGTVVSKHPLKSVTFVDNHDTQPGQSLESTVQTWFKPLAYAFILTRESGYPQVFYGDMYGTKGDSQREIPALKHKIEPILKARKQYAYGAQHDYFDHHDIVGWTREGDSSVANSGLAALITDGPGGAKRMYVGRQNAGETWHDITGNRSEPVVINSEGWGEFHVLGGSVSIYVQR

SEQ ID NO: 43125 - protein, 480 aa, Bacillus licheniformis
NGTLMQYFEWYSPNDGQHWKRLQNDSAYLAEHGITAVWIPPAYKGTSQADVGYGAYDLYDLGEFHQKGTVRTKYGTKGELQSAIKSLHSRDINVYGDVVINHKGGADATEDVTAVEVDPADRNRVISGEHLIKAWTHFHFPGRGSTYSDFKWHWYHFDGTDWDESRKLNRIYKFQGKAWDWEVSNENGNYDYLTYADIDYDHPDVAAEIKRWGTWYANELQLDGFRLDAVKHIKFSFLRDWVNHVREKTGKEMFTVAEYWQNDLGALENYLNKTNFNHSVFDVPLHYQFHAASTQGGGYDMRKLLNGTVVSKHPLKSVTFVDNHDTQPGQSLESTVQTWFKPLAYAFILTRESGYPQVFYGDMYGTKGDSQREIPALKHKIEPILKARKQYAYGAQHDYFDHHDIVGWTREGDSSVANSGLAALITDGPGGAKRMYVGRQNAGETWHDITGNRSEPVVINSEGWGEFHVNGGSVSIYVQR

SEQ ID NO: 43126 - protein, 480 aa, Bacillus licheniformis
NGTLMQYFEWYMPNDGQHWKRLQNDSAYLAEHGITAVWIPPAYKGTSQADVGYGAYDLYDLGEFHQKGTVRTKYGTKGELQSAIKSLHSRDINVYGDVVINHKGGADATEDVTAVEVDPADRNRVISGEHLIKAWTHFHFPGRGSTYSDFKWHWYHFDGTDWDESRKLNRIYKFQGKAWDWEVSNENGNYDYLAYADIDYDHPDVAAEIKRWGTWYANELQLDGFRLDAVKHIKFSFLRDWVNHVREKTGKEMFTVAEYWQNDLGALENYLNKTNFNHSVFDVPLHYQFHAASTQGGGYDMRKLLNGTVVSKHPLKSVTFVDNHDTQPGQSLESTVQTWFKPLAYAFILTRESGYPQVFYGDMYGTKGDSQREIPALKHKIEPILKARKQYAYGAQHDYFDHHDIVGWTREGDSSVANSGLAALITDGPGGAKRMYVGRQNAGETWHDITGNRSEPVVINSEGWGEFHVNGGSVSIYVQR

SEQ ID NO: 43127 - protein, 480 aa, Bacillus licheniformis
NGTLMQYFEWYMPNDGQHWRRLQNDSAYLAEHGITAVWIPPAYKGTSQADVGYGAYDLYDLGEFHQKGTVRTKYGTKGELQSAIKSLHSRDINVYGDVVINHKGGADATEDVTAVEVDPADRNRVISGEHLIKAWTHFHFPGRGSTYSDFKWHWYHFDGTDWDESRKLNRIYLFQGKAWDWEVSNENGNYDYLMYADYDYDYPDVAAEITRWGTWYANELQLDGFRLDAVKHIKFSFLRDWVNHVREKTGKPMFTVAEYWQNDLGALENYLNKTNFNHSVFDVPLHYQFHAASTQGGGYDMRKLLNGTVVSKHPLKSVTFVDNHDTQPGQSLESTVQTWFKPLAYAFILTRESGYPSVFYGDMYGTKGDSQREIPALKHKIEPILKARVDYAYGAQHDYFDHHDIVGWTREGVSSVANSGLAALITDGPGGAKWMYVGRQNAGETWHDITGNRSEPVVINSEGWGEFHVNGGSVSIYVQR

SEQ ID NO: 43128 - protein, 480 aa, Synthetic construct
NGTLMQYFEWYMPNDGQHWRRLQNDSAYLAEHGITAVWIPPAYKGTSQADVGYGAYDLYDLGEFHQKGTVRTKYGTKGELQSAIKSLHSRDINVYGDVVINHKGGADATEDVTAVEVDPADRNRVISGEHLIKAWTHFHFPGRGSTYSDFKWHWYHFDGTDWDESRKLNRIYKFQGKAWDWEVSNENGNYDYLMYADIDYDHPDVAAEIKRWGTWYANELQLDGFRLDAVKHIKFSFLRDWVNHVREKTGKEMFTVAEYWQNDLGALENYLNKTNFNHSVFDVPLHYQFHAASTQGGGYDMRKLLNGTVVSKHPLKSVTFVDNHDTQPGQSLESTVQTWFKPLAYAFILTRESGYPQVFYGDMYGTKGDSQREIPALKHKIEPILKARKQYAYGAQHDYFDHHDIVGWTREGDSSVANSGLAALITDGPGGAKRMYVGRQNAGETWHDITGNRSEPVVINSEGWGEFHVDGGSVSIYVQR

SEQ ID NO: 43129 - protein, 480 aa, Synthetic construct
NGTLMQYFEWYMPNDGQHWKRLQNDSAYLAEHGITAVWIPPAYKGTSQADVGYGAYDLYDLGEFHQKGTVRTKYGTKGELQSAIKSLHSRDINVYGDVVIDHKGGADATEDVTAVEVDPADRNRVISGEHLIKAWTHFHFPGRGSTYSDFKWHWYHFDGTDWDESRKLNRIYKFQGKAWDWEVSNENGNYDYLMYADIDYDHPDVAAEIKRWGTWYANELQLDGFRLDAVKHIKFSFLRDWVNHVREKTGKEMFTVAEYWQNDLGALENYLNKTNFNHSVFDVPLHYQFHAASTQGGGYDMRKLLNGTVVSKHPLKSVTFVDNHDTQPGQSLESTVQTWFKPLAYAFILTRESGYPQVFYGDMYGTKGDSQREIPALKHKIEPILKARKQYAYGAQHDYFDHHDIVGWTREGDSSVANSGLAALITDGPGGAKRMYVGRQNAGETWHDITGNRSEPVVINSEGWGEFHVNGGSVSIYVQR

SEQ ID NO: 43130 - protein, 480 aa, Synthetic construct
NGTLMQYFEWYMPNDGQHWRRLQNDSAYLAEHGITAVWIPPAYKGTSQADVGYGAYDLYDLGEFHQKGTVRTKYGTKGELQSAIKSLHSRDINVYGDVVINHKGGADATEDVTAVEVDPADRNRVISGEHLIKAWTHFHFPGRGSTYSDFKWHWYHFDGTDWDESRKLNRIYKFQGKAWDWEVSNENGNYDYLMYADIDYDHPDVAAEIKRWGTWYANELQLDGFRLDAVKHIKFSFLRDWVNHVREKTGKEMFTVAEYWQNDLGALENYLNKTNFNHSVFDVPLHYQFHAASTQGGGYDMRKLLNGTVVSKHPLKSVTFVDNHDTQPGQSLESTVQTWFKPLAYAFILTRESGYPQVFYGDMYGTKGDSQREIPALKHKIEPILKARKQYAYGAQHDYFDHHDIVGWTREGDSSVANSGLAALITDGPGGAKRMYVGRQNAGETWHDITGNRSEPVVINSEGWGEFHVRGGSVSIYVQR

SEQ ID NO: 43131 - protein, 480 aa, Bacillus licheniformis
NGTLMQYFEWYMPNDGQHWRRLQNDSAYLAEHGITAVWIPPAYKGTSQADVGYGAYDLYDLGEFHQKGTVRTKYGTKGELQSAIKSLHSRDINVYGDVVINHKGGADATEDVTAVEVDPADRNRVISGEHLIKAWTHFHFPGRGSTYSDFKWHWYHFDGTDWDESRKLNRIYLFQGKAWDWPVSNENGNYDYLMYADYDYDYPDVAAEITRWGTWYANELQLDGFRLDAVKHIKFSFLRDWVNHVREKTGKEMFTVAEYWQNDLGALENYLNKTNFNHSVFDVPLHYQFHAASTQGGGYDMRKLLNGTVVSKHPLKSVTFVDNHDTQPGQSLESTVQTWFKPLAYAFILTRESGYPSVFYGDMYGTKGDSQREIPALKHKIEPILKARKQYAYGAQHDYFDHHDIVGWTREGVSSVANSGLAALITDGPGGAKWMYVGRQNAGETWHDITGNRSEPVVINSEGWGEFHVNGGSVSIYVQR

SEQ ID NO: 43132 - protein, 480 aa, Bacillus licheniformis
NGTLMQYFEWYMPNDGQHWKRLQNDSAYLAEHGITAVWIPPAYKGTSQADVGYGAYDLYDLGEFHQKGTVRTKYGTKGELQSAIKSLHSRDINVYGDVVINHKGGADATEDVTAVEVDPADRNRVISGEHLIKAWTHFHFPGRGSTYSDFKWHWYHFDGTDWDESRKLNRIYKFQGKAWDWEVSNENGNYDYLMYADIDYDHPDVAAEIKRWGTWYANELQLDGFRLDAVKHIKFSFLRDWVNHVREKTGKEMFTVAEYWQNDLGALENYLNKTNFNHSVFDVPLHYQFHAASTQGGGYDMRKLLNGTVVSKRPLKSVTFVDNHDTQPGQSLESTVQTWFKPLAYAFILTRESGYPQVFYGDMYGTKGDSQREIPALKHKIEPILKARKQYAYGAQHDYFDHHDIVGWTREGDSSVANSGLAALITDGPGGAKRMYVGRQNAGETWHDITGNRSEPVVINSEGWGEFHVNGGSVSIYVQR

SEQ ID NO: 43133 - protein, 484 aa, Bacillus licheniformis
NGTLMQYFEWYMPNDGQHWRRLQNDSAYLAEHGITAVWIPPAYKGTSQADVGYGAYDLYDLGEFHQKGTVRTKYGTKGELQSAIKSLHSRDINVYGDVVINHKGGADATEDVTAVEVDPADRNRVISGEHLIKAWTHFHFPGRGSTYSDFKWHWYHFDGTDWDESRKLNRIYKFQGKAWDWEVSNENGNYDYLMYADIDYDHPDVAAEIKRWGTWYANELQLDGFRLDAVKHIKFSFLRDWVNHVREKTGKEMFTVAEYWQNDLGALENYLNKTNFNHSVFDVPLHYQFHAASTQGGGYDMRKLLNGTVVSKHPLKSVTFVDNHDTQPGQSGASTVESTVQTWFKPLAYAFILTRESGYPQVFYGDMYGTKGDSQREIPALKHKIEPILKARKQYAYGAQHDYFDHHDIVGWTREGDSSVANSGLAALITDGPGGAKRMYVGRQNAGETWHDITGNRSEPVVINSEGWGEFHVNGGSVSIYVQR

SEQ ID NO: 43134 - protein, 480 aa, Bacillus licheniformis
NGTLMQYFEWYMPNDGQHWKRLQNDSAYLAEHGITAVWIPPAYKGTSQADVGYGAYDLYDLGEFHQKGTVRTKYGTKGELQSAIKSLHSRDINVYGDVVINHKGGADATEDVTAVEVDPADRNRVISGEHLIKAWTHFHFPGRGSTYSDFKWHWYHFDGTDWDESRKLNRIYKFQGKAWDWEVSNENGNYDYLMYADIDYDHPDVAAEIKRWGTWYANELQLDGFRLDAVKHIKFSFLRDWVNHVREKTGKNMFTVAEYWQNDLGALENYLNKTNFNHSVFDVPLHYQFHAASTQGGGYDMRKLLNGTVVSKHPLKSVTFVDNHDTQPGQSLESTVQTWFKPLAYAFILTRESGYPQVFYGDMYGTKGDSQREIPALKHKIEPILKARKQYAYGAQHDYFDHHDIVGWTREGDSSVANSGLAALITDGPGGAKRMYVGRQNAGETWHDITGNRSEPVVINSEGWGEFHVNGGSVSIYVQR

SEQ ID NO: 43135 - protein, 480 aa, Bacillus licheniformis
NGTLMQYFEWYMPNDGQHWRRLQNDSAYLAEHGITAVWIPPAYKGTSQADVGYGAYDLYDLGEFHQKGTVRTKYGTKGELQSAIKSLHSRDINVYGDVVINHKGGADATEDVTAVEVDPADRNRVISGEHLIKAWTHFHFPGRGSTYSDFKWHWYHFDGTDWDESRKLNRIYKFQGKAWDWEVSNENGNYDYLMYADIDYDHPDVAAEIKRWGTWYANELQLDGFRLDAVKHIKFSFLRDWVNHVREKTGKEMFTVAEYWQNDLGALENYLNKTNFNHSVFDXPLHYQFHAASTQGGGYDMRKLLNGTVVSKHPLKSVTFVDNHDTQPGQSLESTVQTWFKPLAYAFILTRESGYPQVFYGDMYGTKGDSQREIPALKHKIEPILKARKQYAYGAQHDYFDHHDIVGWTREGDSSVANSGLAALITDGPGGAKRMYVGRQNAGETWHDITGNRSEPVVINSEGWGEFHVNGGSVSIYVQR

SEQ ID NO: 43136 - protein, 482 aa, Bacillus sp. YR288
NGTMMQYFEWYVPNDGQHWNRLRNDAAYLKSIGVSAIWTPPAYKGTSQNDVGYGAYDLYDLGEFNQKGTIRTKYGTKAELKSAVSTLKSNGIQVYGDVVMNHKGGADYTENVTAVEVNPSNRNQETSDEYTIQAWTGFNFPGRGTTHSPFKWQWYHFDGTDWDQSRNASRIFKFRGTGKAWDWEVSSENGNYDYLMYADLDFDHPDVRNEMKNWGVWYANEVGLDGFRLDAVKHIKHSYLGDWVNHVRTKTGKEMFTVAEYWQNDVNAINNYLAKVNYNHSVFDAPLHYNFYYASQSGGNYDMRNLLNGTVVAAHPTKAVTLVENHDSQPGQSLESVVQPWFKPLAYAFILTRAEGYPSIFYGDMYGTKGNSSYEIPALKTKIEPLLKARKDYAYGTQHNYMDHWDVIGWTREGDSTKEKSGLATLVTDGAGGSKWMYVGKQNAGEVWYDITGNRTDKITINTDGWGNFQVNGGSVSVYVQQ

SEQ ID NO: 43137 - protein, 480 aa, Bacillus sp.
NGTLMQYFEWYMPNDGQHWKRLQNDSAYLAEHGITAVWIPPAYKGTSQADVGYGAYDLYDLGEFHQKGTVRTKYGTKGELQSAIKSLHSRDINVYGDVVINHKGGADATEDVTAVEVDPADRNRVISGEHLIKAWTHFHFPGRGSIYSDFKWHWYHFDGTDWDESRKLNRIYKFQGKAWDWEVSNENGNYDYLMYADIDYDHPDVAAEIKRWGTWYANELQLDGFRLDAVKHIKFSFLRDWVNHVREKTGKEMFTVAEYWQNDLGALENYLNKTNFNHSVFDVPLHYQFHAASTQGGGYDMRKLLNGTVVSKHPLKSVTFVDNHDTQPGQSLESTVQTWFKPLAYAFILTRESGYPQVFYGDMYGTKGDSQREIPALKHKIEPILKARKQYAYGAQHDYFDHHDIVGWTREGDSSVANSGLAALITDGPGGAKRMYVGRQNAGETWHDITGNRSEPVVINSEGWGEFHVNGGSVSIYVQR

SEQ ID NO: 43138 - protein, 480 aa, Bacillus licheniformis
NGTLMQYFEWYMPNDGQHWRRLQNDSAYLAEHGITAVWIPPAYKGTSQADVGYGAYDLYDLGEFHQKGTVRTKYGTKGELQSAIKSLHSRDINVYGDVVINHKGGADATEDVTAVEVDPADRNRVISGEHLIKAWTHFHFPGRGSTYSDFKWHWYHFDGTDWDESRKLNRIYLFQGKAWDWEVSNENGNYDYLMYADYDYDYPDVAAEITRWGTWYANELQLDGFRLDAVKHIKFSFLRDWVNHVREKTGKPMFTVAEYWQNDLGALENYLNKTNFNHSVFDVPLHYQFHAASTQGGGYDMRKLLNGTVVSKHPLKSVTFVDNHDTQPGQSLESTVQTWFKPLAYAFILTRESGYPSVFYGDMYGTKGDSQREIPALKHKIEPILKARVQYAYGAQHDYFDHHDIVGWTREGVSSVANSGLAALITDGPGGAKWMYVGRQNAGETWHDITGNRSEPVVINSEGWGEFHVNGGSVSIYVQR

SEQ ID NO: 43139 - protein, 480 aa, Bacillus licheniformis
NGTLMQYFEWYMPNDGQHWKRLQNDSAYLAEHGITAVWIPPAYKGTSQADVGYGAYDLYDLGEFHQKGTVRTKYGTKGELQSAIKSLHSRDINVYGDVVINHKGGADATEDVTAVEVDPADRNRVISGEHLIKAWTHFHFPGRGSTYSDFKWHWYHFDGTDWDESRKLNRIYKFQGKAWDWEVSNENGNYDYLMYADIDYDHPDVAAEIKRWGTWYANELQLDGFRLDAVKHIKFSFLRDWVNHVREKTGKEMFTVAEYWQNDLGALENYLNKTNFNHSVFDVPLHYQFHAASTQGGGYDMRKLLNGTVVSKHPLKSVTFVDNHDTQPGQSLESTVQTWFKPLAYAFILTRESGYPQVFYGDMYGTKGDSQREIPALKHKIEPILKARKQYAYGAQHDYFDHHDIVGWTREGDSSVANSGLAALITDGPGGAKRAYVGRQNAGETWHDITGNRSEPVVINSEGWGEFHVNGGSVSIYVQR

SEQ ID NO: 43140 - protein, 480 aa, Bacillus licheniformis
NGTLMQYFEWYMPNDGQHWKRLQNDSAYLAEHGITAVWIPPAYKGTSQADVGYGAYDLYDLGEFHQKGTVRTKYGTKGELQSAIKSLHSRDINVYGDVVINHKGGADATEDVTAVEVDPADRNRVISGEHLIKAWTHFHFPGRGSTYSDFKWHWYHFDGTDWDESRKLNRIYKFQGKAWDWEVSNENGNYDYLMYADIDYDHPDVAAEIKRWGTWYANELQLDGFRLDAVKHIKFSFLRDWVNHVREKTGKEMFTVAEYWQNDLGALENYLNKTNFNHSVFDVPLHYQFHAASTQGGGYDMRKLLNGTVVSKHPLKSVIFVDNHDTQPGQSLESTVQTWFKPLAYAFILTRESGYPQVFYGDMYGTKGDSQREIPALKHKIEPILKARKQYAYGAQHDYFDHHDIVGWTREGDSSVANSGLAALITDGPGGAKRMYVGRQNAGETWHDITGNRSEPVVINSEGWGEFHVNGGSVSIYVQR

SEQ ID NO: 43141 - protein, 482 aa, unidentified
NGTMMQYFEWYLPNDGQHWNKMNNDAAYLSSIGITALWIPPAYKGTSQADVGYGAYDLYDLGEFNQKGTVRTKYGTKGELVSAITSLHNRGINVYGDVVMNHKGGADFTETVTAVEVNPNNRNQETSGDYQIQAYTGFNFPGRGNTYSSFKWNWYHFDGTDYDQSRNLNRIYKFRGTGKAWDWEVSSEYGNYDYLLYADIDYDHPDVVNEMKKWGTWYANELKLDGFRIDAAKHIKHSFLGDWVTSVRTSTGKEMFTVAEYWQNNLGALQNYLNKTGYNQSVFDVPLHYNFQAASSQSGYYDMRNLLNGTVTSTNPTKSVTFVDNHDTQPGQALESTVQSWFKPLAYAFILTRESGYPNVFYGDLYGTKGTSGREIPALKTKIEPLLKARKDFAYGTQRDYIDNQDVIGWTREGNTSKAKSGLAALITDGPGGAKRMYVGTQNAGEVWYDITGNRTDKVTIGSDGWAAFNVNGGSVSVYVQQ

SEQ ID NO: 43142 - protein, 480 aa, Bacillus licheniformis
NGTLMQYFEWYMPNDGQHWKRLQNDSAYLAEHGITAVWIPPAYKGTSQADVGYGAYDLYDLGEFHQKGTVRTKYGTKGELQSAIKSLHSRDINVYGDVVINHKGGADATEDVTAVEVDPADRNRVISGEHLIKAWTHFHFPGRGSTYSDFKWHWYHFDGTDWDESRKLNRIYKFQGKAWDWEVSNENGNYDYLMYADIDYDHPDVAAEIKRWGTWYANELQLDGFRLDAVKHIKFSFLRDWVNHVREKTGKEMFTVAEYWQNDLGALENYLNKTNFNHSVFDVPLHYQFHAASTQGGGYDMRKLLNGTVVSKHPLKSVTFVDNHDTQPEQSLESTVQTWFKPLAYAFILTRESGYPQVFYGDMYGTKGDSQREIPALKHKIEPILKARKQYAYGAQHDYFDHHDIVGWTREGDSSVANSGLAALITDGPGGAKRMYVGRQNAGETWHDITGNRSEPVVINSEGWGEFHVNGGSVSIYVQR

SEQ ID NO: 43143 - protein, 480 aa, Bacillus licheniformis
NGTLMQYFEWYMPNDGQHWKRLQNDSAYLAEHGITAVWIPPAYKGTSQADVGYGAYDLYDLGEFHQKGTVRTKYGTKGELQSAIKSLHSRDINVYGDVVINHKGGADATEDVTAVEVDPADRNRVISGEYLIKAWTHFHFPGRGSTYSDFKWYWYHFDGTDWDESRKLNRIYKFQGKYWDWEVSNENGNYDYLMYADIDYDHPDVVAEIKRWGTWYANELQLDGFRLDAVKHIKFSFLRDWVNHVREKTGKEMFTVAEYWQNDLGALENYLNKTNFNHSVFDVPLHYQFYAASTQGGGYDMRKLLNDTVVSKHPLKSVTFVDNHDTQPGQSLESTVQTWFKPLAYAFILTRESGYPQVFYGDMYGTKGDSQREIPALKHKIEPILKARKQYAYGAQHDYFDHHDIVGWTREGDSSVANSGLAALITDGPGGAKRMYVGRQNAGETWYDITGNRSEPVVINSEGWGEFHVNDGSVSIYVQR

SEQ ID NO: 43144 - protein, 482 aa, Bacillus sp. YR288
NGTMMQYFEWYVPNDGQHWNRLRNDAAYLKSIGVSAIWTPPAYKGTSQNDVGYGAYDLYDLGEFNQKGTIRTKYGTKAELKSAVSTLKSNGIQVYGDVVMNHKGGADYTENVTAVEVNPSNRNQETSDEYTIQAWTGFNFPGRGTTHSPFKWQWYHFDGTDWDQSRNASRIFKFRGTGKAWDWEVSSENGNYDYLMYADLDFDHPDVRNEMKNWGVWYANEVGLDGFRLDAVKHIKHSYLRDWVNHVRTKTGKEMFTVAEYWQNDVNAINNYLAKVNYNHSVFDAPLHYNFHYASQSGGNYDMRNLLNGTVVAAHPTKAVTLVENHDSQPGQSLESVVQPWFKPLAYAFILTRAEGYPSIFYGDMYGTKGNSSYEIPALKTKIEPLLKARKDYAYGTQHNYMDHWDVIGWTREGDSTKEKSGLATLVTDGAGGSKWMYVGKQNAGEVWYDITGNRTDKITINTDGWGNFQVNGGSVSVYVQQ

SEQ ID NO: 43145 - protein, 480 aa, Bacillus licheniformis
NGTLMQYFEWYMPNDGQHWRRLQNDSAYLAEHGITAVWIPPAYKGTSQADVGYGAYDLYDLGEFHQKGTVRTKYGTKGELQSAIKSLHSRDINVYGDVVINHKGGADATEDVTAVEVDPADRNRVISGEHLIKAWTHFHFPGRGSTYSDFKWHWYHFDGTDWDESRKLNRIYLFQGKAWDWEVSNENGNYDYLMYADYDYDYPDVAAEITRWGTWYANELQLDGFRLDAVKHIKFSFLRDWVNHVREKTGKPMFTVAEYWQNDLGALENYLNKTNFNHSVFDVPLHYQFHAASTQGGGYDMRKLLNGTVVSKHPLLSVTFVDNHDTQPGQSLESTVQTWFKPLAYAFILTRESGYPSVFYGDMYGTKGDSQREIPALKHKIEPILKARKQYAYGAQHDYFDHHDIVGWTREGVSSVANSGLAALITDGPGGAKWMYVGRQNAGETWHDITGNRSEPVVINSEGWGEFHVNGGSVSIYVQR

SEQ ID NO: 43146 - protein, 480 aa, Bacillus sp.
NGTMMQYFEWYLPNDGNHWNRLRSDASNLKDKGISAVWIPPAWKGASQNDVGYGAYDLYDLGEFNQKGTIRTKYGTRNQLQAAVNALKSNGIQVYGDVVMNHKGGADATEMVKAVEVNPNNRNQEVSGEYTIEAWTKFDFPGRGNTHSNFKWRWYHFDGVDWDQSRKLNNRIYKFRGDGKGWDWEVDTEFGNYDYLMYADIDMDHPEVVNELRNWGVWYTNTLGLDGFRIDAVKHIKYSFTRDWINHVRSATGKNMFAVAEFWKNDLGAIENYLNKTNWNHSVFDVPLHYNLYNASKSGGNYDMRQIFNGTVVQKHPMHAVTFVDNHDSQPEEALESFVEEWFKPLAYALTLTREQGYPSVFYGDYYGIPTHGVPAMKSKIDPILEARQKYAYGRQHDYFDHHDIVGWTREGDSSVANSGLAALITDGPGGAKRMYVGRQNAGETWHDITGNRSEPVVINSEGWGEFHVNGGSVSIYVQR

SEQ ID NO: 43147 - protein, 479 aa, Synthetic construct
NGTIMQYFEWNVPNDGQHWNRLHNNAQNLKNAGITAIWIPPAWKGTSQNDVGYGAYDLYDLGEFNQKGTVRTKYGTKAELERAIRSLKANGIQVYGDVVMNHKAGADGTELVDAVEVNPSDRNQEISGTYQIQAWTKFDFPGRGNTYSSFKWRWYHFDGTDWDESRKLNRIYKFRGTGKAWDWEVDTENGNYDYLMYADLDMDHPEVINELNRWGVWYANTLNLDGFRLDAVKHIKFSFMRDWLGHVRGQTGKNLFAVAEYWKNDLGALENYLSKTNWTMSAFDVPLHYNLYQASNSSGNYDMRNLLNGTLVQRHPSHAVTFVDNHDTQPGEALESFVQGWFKPLAYATILTREQGYPQVFYGDYYGIPSDGVPSYRQQIDPLLKARQQYAYGRQHDYFDHWDVIGWTREGNASHPNSGLATIMSDGPGGSKWMYVGRQKAGEVWHDMTGNRSGTVTINQDGWGHFFVNGGSVSVWVKR

SEQ ID NO: 43148 - protein, 477 aa, Penicillium sclerotiorum
TPAEWRSQSIYFLLTDRFARTDGSTTATCDVSDRIYCGGSWQGIINQLDYIQGMGFTAIWITPVTEQLSQDTGDGEAYHGYWQQKIYDVNTNYGTAADLLALSEALHARDMYLMVDVVANHMGYDGAGSSVDYSVFDPFDSSSYFHSYCLISNYDNQTNVEDCWLGDTTVSLPDLNTELSSVETIWYDWIADLVSNYSIDGLRIDTVKHVQESFWPGYNDAAGVYCVGEVFDGDPAYTCPYQNYLDGVLNYPIYYQLLYAFEDSSGSISDLYNMINSVASDCADPTLLGNFIENHDNPRFASYTDDYSQAKNVISFIFLSDGIPIVYAGQEQHYSGGADPYNREATWLSGYSTTAELYEYIATTNKIRSLAISSDSSYITSENDAFYQDSHTLAMKKGSSGSQVITVLSNYGASGSSYTLTLSGSGYSSGTQLMELYTCTSVTVDSSGNIAVPMASGLPRVFMLASAVSSSSICGGS

SEQ ID NO: 43149 - protein, 454 aa, Jeotgalibacillus campisalis
NSTMMQYFEWYLPNDGLHWNRLTNDASNLKALGVTTVWIPPAYKGTSQNDVGYGAYDLYDLGEFNQKGTVRTKYGTRGQLQTAINTLKNQGIGTYGDVVMNHKGGADFTESVQAVEVNPNNRSQETSGEYTISAWTGFNFAGRNNLHSAFKWRWYHFDGTDWDQSRSLKRIYKFRGSGKSWDTEVSNEFGNYDYLMYADVDFDHPEVKAELKNWGKWYVQSLNLDGFRLDAVKHIKHDYIPEWLADVRRTTGKELFTVAEYWQNDLGAINNYLAKTNYSHSVFDVPLHYNFQRAANSGGNFDMRTIFNGSVVQQHPTLAVTIVDNHDSQPGQSLESTVDAWFKPLAYAMIMTREQGYPNLFYGDFYGTKGSSNREIPNLSSKLTPILKARKDMAYGTQHDYLNHQDVIGWTREGVTDRSKSGLATILSDGPGGNKWMYVGKRNAGETWRDKTGN

SEQ ID NO: 43150 - protein, 454 aa, Jeotgalibacillus campisalis
NPTMMQYFEWYLPNDGLHWNRLTNDASNLKALGVTTVWIPPAYKGTSQNDVGYGAYDLYDLGEFNQKGTVRTKYGTRGQLQTAINTLKNQGIGTYGDVVMNHKGGADFTESVQAVEVNPNNRSQETSGEYTISAWTGFNFAGRNNLHSAFKWRWYHFDGTDWDQSRSLKRIYKFRGSGKSWDTEVSNEFGNYDYLMYADVDFDHPEVKAELKNWGKWYVQSLNLDGFRLDAVKHIKHDYIREWLADVRRTTGKELFTVAEYWQNDLGAINNYLAKTKYSHSVFDVPLHYNFQRAANSGGNFDMRTIFNGSVVQQHPTLAVTIVDNHDSQPGQSLESTVDAWFKPLAYAMIMTREQGYPNLFYGDFYGTKGSSNREIPNLSSKLTPILKARKDMAYGTQHDYLNHQDVIGWTREGVTDRSKSGLATILSDGPGGNKWMYVGKRNAGETWRDKTGN

SEQ ID NO: 43151 - protein, 454 aa, Jeotgalibacillus campisalis
NFTMMQYFEWYLPNDGLHWNRLTNDASNLKSLGVTTVWIPPAYKGTSQNDVGYGAYDLYDLGEFNQKGTVRTKYGTRGQLQTAINTLKNQGIGTYGDVVMNHKGGADFTESVQAVEVNPNNRSQETSGEYTISAWTGFNFAGRNNLHSAFKWRWYHFDGTDWDQSRSLKRIYKFRGSGKSWDTEVSNEFGNYDYLMYADVDFDHPEVKAELKNWGKWYVQSLNLDGFRLDAVKHIKHDYIGEWLADVRRTTGKELFTVAEYWQNDLGAINNYLAKTNYSHSVFDVPLHYNFQRAANSGGNFDMRTIFNGSVVQQHPTLAVTIVDNHDSQPGQSLESTVDAWFKPLAYAMIMTREQGYPNLFYGDFYGTKGSSNREIPNLSSKLTPILKARKDMAYGTQHDYLNHQDVIGWTREGVTDRSKSGLATILSDGPGGNKWMYVGKRNAGETWRDKTGN

SEQ ID NO: 43152 - protein, 479 aa, unidentified
GTLMQYFEWYMPNDGQHWKRLQNDSAYLAEHGITAVWIPPAYKGTSQADVGYGAYDLYDLGEFHQKGTVRTKYGTKGELQSAIKSLHSRDINVYGDVVITNKGGADATEDVTAVEVDPADRNRVISGEHRIKAWTHFHFPGRGSTYSDFKWHWYHFDGTDWDESRKLNRIYKFQGKAWDWEVSNENGNYDYLMYADIDYDHPDVAAEIKRWGTWYANELQLDGFRLDAVKHIKFSFLRDWVNHVREKTGKEMFTVAEYWQNDLGALENYLNKTNFNHSVFDVPLHYQFHAASTQGGGYDMGKLLNGTVVSKHPLKAVTFVDNHDTQPGQSLESTVQTWFKPLAYAFILTRESGYPSGFYGDMYGTKGASQREIPALKHKIEPILKARKQYAYGAQHDYFDHHDIVGWTREGDSSVANSGLAALITDGPGGAKRMYVGRQNAGETWHDITGNRSEPVVINSEGWGEFHVNGGSVSIYVQR

SEQ ID NO: 43153 - protein, 480 aa, Synthetic construct
VNGTMMQYFEWDLPNDGTLWTKVKNEAANLSSLGITALWLPPAYKGTSQSDVGYGVYDLYDLGEFNQKGTIRTKYGTKTQYIQAIQAAKAAGMQVYADVVFNHKAGADATEDVTAVEVNPANRNQETSEEYQIKAWTDFRFPGRGNTYSDFKWHWYHFDGADWDESRKISRIFKFRGEGKAWDWEVSSENGNYDYLMYADVDMDHPEVVAELKNWGKWYVNTTNVDGFRLDAVKHIKYSFFPDWLSYVRNQTGKNLFAVGEFWSYDVNKLHNYITKTNGTMSLFDAPLHNNFYIASKSSGYFDMRYLLNNTLMKDQPALAVTLVDNHDTQPGQSLQSWVEPWFKPLAYAFILTRQEGYPCVFYGDYYGIPKYNIPGLKSKIDPLLIARRDYAYGTQRDYIDHPDIIGWTREGIDAKPNSGLAALITDGPGGSKWMYVGKKHAGKVFYDLTGNRSDTVTINADGWGQFKVNGGSVSIWVAK

SEQ ID NO: 43154 - protein, 483 aa, Synthetic construct
NGTMMQYFEWYLPNDGQHWXRLXNDAXNLSSXGITALWIPPAYKGTSQSDVGYGAYDLYDLGEFNQKGTVRTKYGTKAQLXXAIXALHAXGIQVYGDVVMNHKGGADGTEXVXAVEVNPSDRNQEISGXYXIXAWTKFDFPGRGNTYSXFKWRWYHFDGVDWDESRKLNNRIYKFRGXGKAWDWEVDTENGNYDYLMYADIDMDHPEVVXELKNWGXWYXNTLNLDGFRLDAVKHIKFSFXXDWLSHVRSXTGKXLFTVGEYWXXDIGALENYLXKTNWXMSLFDVPLHYNFYXASKSGGAYDMRXLLXGTLVXXHPXXAVTFVDNHDTQPGQALESWVDXWFKPLAYAFILTREXGYPXVFYGDYYGIPQYNXXEIPSLKSKIDPLLXARRXYAYGTQHDYLDHXDIIGWTREGXTSKPNSGLAALITDGPGGSKWMYVGKQXAGXVWYDLTGNRSDTVTINSDGWGEFXVNGGSVSVWVXR

SEQ ID NO: 43155 - protein, 456 aa, Jeotgalibacillus campisalis
NGTMMQYFEWYLPNDGLHWNRLTNDASNLKNLGVTTVWIPPAYKGTSQNDVGYGAYDLYDLGEFNQKGTVRTKYGTRGQLQTAINTLKNQGIGTYGDVVMNHKGGADFTESVQAVEVNPNNRSQETSGEYTISAWTGFNFAGRNNLHSAFKWRWYHFDGTDWDQSRSLNRIYKFRGSGKSWDTEVSNEFGNYDYLMYADVDFDHPEVKAELKNWGKWYVQSLNLDGFRLDAVKHIKHDYIQEWLADVRRTTGKELFTVAEYWQNDLGAINNYLAKTDYSHSVFDVPLHYNFQRAANSGGNFDMRTIFNGSVVQQHPTLAVTIVDNHDSQPGQSLESTVDAWFKPLAYAMIMTREQGYPNLFYGDFYGTKGSSNREIPNLSSKLTPILKARKDMAYGTQHDYLNHQDVIGWTREGVTDRSKSGLATILSDGPGGNKWMYVGKRNAGETWRDKTGNSS

SEQ ID NO: 43156 - protein, 456 aa, Jeotgalibacillus campisalis
NGTMMQYFEWYLPNDGLHWNRLTNDASNLKNLGVTTVWIPPAYKGTSQNDVGYGAYDLYDLGEFNQKGTVRTKYGTRGQLQTAINTLKNQGIGTYGDVVMNHKGGADFTESVQAVEVNPNNRSQETSGEYTISAWTGFNFAGRNNLHSAFKWRWYHFDGTDWDQSRSLNRIYKFRGSGKSWDTEVSNEFGNYDYLMYADVDFDHPEVKAELKNWGKWYVQSLNLDGFRLDAVKHIKHDYIQEWLADVRRTTGKELFTVAEYWQNDLGAINNYLAKTSYSHSVFDVPLHYNFQRAANSGGNFDMRTIFNGSVVQQHPTLAVTIVDNHDSQPGQSLESTVDAWFKPLAYAMIMTREQGYPNLFYGDFYGTKGSSNREIPNLSSKLTPILKARKDMAYGTQHDYLNHQDVIGWTREGVTDRSKSGLATILSDGPGGNKWMYVGKRNAGETWRDKTGNSS

SEQ ID NO: 43157 - protein, 456 aa, Jeotgalibacillus campisalis
NGTMMQYFEWYLPNDGLHWNRLTNDASNLKNLGVTTVWIPPAYKGTSQNDVGYGAYDLYDLGEFNQKGTVRTKYGTRGQLQTAINTLKNQGIGTYGDVVMNHKGGADFTESVQAVEVNPNNRSQETSGEYTISAWTGFNFAGRNNLHSAFKWRWYHFDGTDWDQSRSLNRIYKFRGSGKSWDTEVSNEFGNYDYLMYADVDFDHPEVKAELKNWGKWYVQSLNLDGFRLDAVKHIKHDYIGEWLADVRRTTGKELFTVAEYWQNDLGAINNYLAKTGYSHSVFDVPLHYNFQRAANSGGNFDMRTIFNGSVVQQHPTLAVTIVDNHDSQPGQSLESTVDAWFKPLAYAMIMTREQGYPNLFYGDFYGTKGSSNREIPNLSSKLTPILKARKDMAYGTQHDYLNHQDVIGWTREGVTDRSKSGLATILSDGPGGNKWMYVGKRNAGETWRDKTGNSS

SEQ ID NO: 43158 - protein, 456 aa, Jeotgalibacillus campisalis
NGTMMQYFEWYLPNDGLHWNRLTNDASNLKNLGVTTVWIPPAYKGTSQNDVGYGAYDLYDLGEFNQKGTVRTKYGTRGQLQTAINTLKNQGIGTYGDVVMNHKGGADFTESVQAVEVNPNNRSQETSGEYTISAWTGFNFAGRNNLHSAFKWRWYHFDGTDWDQSRSLNRIYKFRGSGKSWDTEVSNEFGNYDYLMYADVDFDHPEVKAELKNWGKWYVQSLNLDGFRLDAVKHIKHDYIPEWLADVRRTTGKELFTVAEYWQNDLGAINNYLAKTGYSHSVFDVPLHYNFQRAANSGGNFDMRTIFNGSVVQQHPTLAVTIVDNHDSQPGQSLESTVDAWFKPLAYAMIMTREQGYPNLFYGDFYGTKGSSNREIPNLSSKLTPILKARKDMAYGTQHDYLNHQDVIGWTREGVTDRSKSGLATILSDGPGGNKWMYVGKRNAGETWRDKTGNSS

SEQ ID NO: 43159 - protein, 456 aa, Jeotgalibacillus campisalis
NGTMMQYFEWYLPNDGLHWNRLTNDASNLKSLGVTTVWIPPAYKGTSQNDVGYGAYDLYDLGEFNQKGTVRTKYGTRGQLQTAINTLKNQGIGTYGDVVMNHKGGADFTESVQAVEVNPNNRSQETSGEYTISAWTGFNFAGRNNLHSAFKWRWYHFDGTDWDQSRSLNRIYKFRGSGKSWDTEVSNEFGNYDYLMYADVDFDHPEVKAELKNWGKWYVQSLNLDGFRLDAVKHIKHDYIQEWLADVRRTTGKELFTVAEYWQNDLGAINNYLAKTGYSHSVFDVPLHYNFQRAANSGGNFDMRTIFNGSVVQQHPTLAVTIVDNHDSQPGQSLESTVDAWFKPLAYAMIMTREQGYPNLFYGDFYGTKGSSNREIPNLSSKLTPILKARKDMAYGTQHDYLNHQDVIGWTREGVTDRSKSGLATILSDGPGGNKWMYVGKRNAGETWRDKTGNSS

SEQ ID NO: 43160 - protein, 456 aa, Jeotgalibacillus campisalis
NGTMMQYFEWYLPNDGLHWNRLTNDASNLKALGVTTVWIPPAYKGTSQNDVGYGAYDLYDLGEFNQKGTVRTKYGTRGQLQTAINTLKNQGIGTYGDVVMNHKGGADFTESVQAVEVNPNNRSQETSGEYTISAWTGFNFAGRNNLHSAFKWRWYHFDGTDWDQSRSLNRIYKFRGSGKSWDTEVSNEFGNYDYLMYADVDFDHPEVKAELKNWGKWYVQSLNLDGFRLDAVKHIKHDYIQEWLADVRRTTGKELFTVAEYWQNDLGAINNYLAKTGYSHSVFDVPLHYNFQRAANSGGNFDMRTIFNGSVVQQHPTLAVTIVDNHDSQPGQSLESTVDAWFKPLAYAMIMTREQGYPNLFYGDFYGTKGSSNREIPNLSSKLTPILKARKDMAYGTQHDYLNHQDVIGWTREGVTDRSKSGLATILSDGPGGNKWMYVGKRNAGETWRDKTGNSS

SEQ ID NO: 43161 - protein, 456 aa, Jeotgalibacillus campisalis
NGTMMQYFEWYLPNDGLHWNRLTNDASNLKNLGVTTVWIPPAYKGTSQNDVGYGAYDLYDLGEFNQKGTVRTKYGTRGQLQTAINTLKNQGIGTYGDVVMNHKGGADFTESVQAVEVNPNNRSQETSGEYTISAWTGFNFAGRNNLHSAFKWRWYHFDGTDWDQSRSLNRIYKFRGSGKSWDTEVSNEFGNYDYLMYADVDFDHPEVKAELKNWGKWYVQSLNLDGFRLDAVKHIKHDYIQEWLADVRRTTGKELFTVAEYWQNDLGAINNYLAKTGYSHSVFDVPLHYNFQRAANSGGNFDMRTIFNGSVVQQHPTLAVTIVDNHDSQPGQSLESTVDAWFKPLAYAMIMTREQGYPNLFYGDFYGTKGSSNREIPNLSSKLTPILKARKDMAYGTQHDYLNHQDVIGWTREGVTDRSKSGLATILSDGPGGNKWMYVGKRNAGETWRDKTGNSS

SEQ ID NO: 43162 - protein, 456 aa, Jeotgalibacillus campisalis
NGTMMQYFEWYLPNDGLHWNRLTNDASNLKNLGVTTVWIPPAYKGTSQNDVGYGAYDLYDLGEFNQKGTVRTKYGTRGQLQTAINTLKNQGIGTYGDVVMNHKGGADFTESVQAVEVNPNNRSQETSGEYTISAWTGFNFAGRNNLHSAFKWRWYHFDGTDWDQSRSLNRIYKFRGSGKSWDTEVSNEFGNYDYLMYADVDFDHPEVKAELKNWGKWYVQSLNLDGFRLDAVKHIKHDYIQEWLADVRRTTGKELFTVAEYWQNDLGAINNYLAKTKYSHSVFDVPLHYNFQRAANSGGNFDMRTIFNGSVVQQHPTLAVTIVDNHDSQPGQSLESTVDAWFKPLAYAMIMTREQGYPNLFYGDFYGTKGSSNREIPNLSSKLTPILKARKDMAYGTQHDYLNHQDVIGWTREGVTDRSKSGLATILSDGPGGNKWMYVGKRNAGETWRDKTGNSS

SEQ ID NO: 43163 - protein, 478 aa, Synthetic construct
NGTMMQYFEWYLPNDGNHWNRLRSDASNLKDKGISAVWIPPAWKGTSQADVGYGAYDLYDLGEFNQKGTIRTKYGTRNQLQAAVNALKSNGIQVYGDVVMNHKAGADATEMVNAVEVNPNNRNQEVSGDYTIEAYTKFDFPGRGNTHSNFKWRWYHFDGVDWDQSRSLNNRIYKFRGKGWDWPVDTEFGNYDYLMYADLDMDHPEVVNELRNWGVWYTNTLGLDGFRIDAVKHIKFSFTRDWINHVRSATGKNMFAVAEYWKNDLGAIENYLNFTNWNHSVFDVPLHYNLYSASNSGGNYDMRQIFNGTVVQKHPMHAVTFVDNHDTQPEESLESFVEEWFKPLAYALILTRESGYPSVFYGDYYGIPTHGVPAMKSKIDPILEARQKYAYGRQHDYLDHHDIVGWTREGDSSHPNSGLATLITDGPGGAKRMYVGRQNAGETWHDITGNRSEPVVINSEGWGTFHVNKGSVSIYVQR

SEQ ID NO: 43164 - protein, 483 aa, Synthetic construct
TNGTMMQYFEWYLPNDGNHWTRLQNDAANLSSKGVTAVWIPPAYKGTSQNDVGYGAYDLYDLGEFNQKGTVRTKYGTKAQLKSAIAELHKQNIHVYGDVVMNHKGGADFTETVTAVEVDPNNRNRETSGDYQISAWTGFTFPGRGNTYSPFKWNWYHFDGTDWDPSTEINRIYKFRGTGKAWDWEVSSENGNYDYLMYADIDYEHPDVINEMKKWGTWYAKELNLDGFTLDAVKHIKHDYLRDWVTHVRNQTGKELFTVAEYWQNDIGQLNNYLAKTNYNQSVFDAPLHYHFHYASNSNGNYDMRNILKGTVMESNPRLAVTLVENHDSQPGQSLESVVSTWFKPLAYAFILTRAEGYPSVFYGDYYGTKGNSNYEIPSLKTQLDPILTARKNYAYGLQRDYIDHWDIIGWTREGEAARDKSGLATLITDGPGGYKWMEVGKQNAGEVWYDITGNRKETVTINNDGWGQFYVNGGSVSIYVQK

SEQ ID NO: 43165 - protein, 480 aa, Bacillus sp.
NGTMMQYFEWYLPDDGTLWTKLANDANNLSSLGITALWIPPAWKGTSRSDVGYGVYDLYDLGEFNQKGTVRTKYGTKAQYLQAIQAAHAAGIQVYADVVFDHKGGADATEWVDAVEVNPSDRNQEISGTYQIQAWTKFDFPGRGNTHSSFKWRWYHFDGVDWDESRKLSNRIYKFRGIGKAWDWEVDTENGNYDYLMYADIDMDHPEVVTELKNWGKWYVNTTNIDGFRIDAVKHIKFSFFPDWISHVRSQTGKPLFTVAEFWSYDINKIHNYITKTNGTMSLFDAPLHNKFYTASKSGGAFDMRTIMTNTLMKDQPSLAVTFVDNHDSEPGQALQSFVDPWFKPLAYAFILTRQEGYPCVFYGDYYGIPQHNIPALKSKIDPILIARRDYAYGTQHDYLDHSDIIGWTREGVTEKPGSGLAAIISDGPGGSKWMFVGKNHAGKVFYDITGNRSDTVTINADGWGEFKVNGGSVSIWVPK

SEQ ID NO: 43166 - protein, 480 aa, Synthetic construct
NETMMQYFEWDLPNDGTLWTKVKNEAANLSSLGITALWLPPAYKGTSQSDVGYGVYDLYDLGEFNQKGTIRTKYGTKTQYIQAIQAAKAAGMQVYADVVFNHKGGADATEMVRAVEVNPNNRNQEVSGEYTIEAWTKFDFPGRGNTHSNFKWRWYHFDGVDWDQSRKLNNRIYKFRGDGKGWDWEVDTENGNYDYLMYADIDMDHPEVVTELKNWGTWYVNTTNIDGFRLDAVKHIKYSFFPDWLTYVRNQTGKNLFAVGEFWSYDVNKLHNYITKTNGSMSLFDAPLHNNFYTASKSSGYFDMRYLLNNTLMKDQPSLAVTLVDNHDTQPGQSLQSWVEPWFKPLAYAFILTRQEGYPCVFYGDYYGIPKYNIPGLKSKIDPLLIARRDYAYGTQRDYIDHQDIIGWTREGIDTKPNSGLAALITDGPGGSKWMYVGKKHAGKVFYDLTGNRSDTVTINADGWGEFKVNGGSVSIWVAK

SEQ ID NO: 43167 - protein, 480 aa, Synthetic construct
NGTMMQYFEWDLPNDGTLWTKVKNEATNLFSLGITALWLPPAYKGTSQSDVGYGVYDLYDLGEFNQKGTIRTKYGTKTQYIQAIQAAKAAGMQVYADVVFNHKGGADATEMVRAVEVNPNNRNQEVTGEYTIEAWTRFDFPGRGNTHSSFKWRWYHFDGVDWDQSRRLNNRIYKFRGHGKAWDWEVDTENGNYDYLMYADIDMDHPEVVTELKNWGTWYVNTTNIDGFRLDAVKHIKYSFFPDWLTYVRNQTGKNLFAVGEFWSYDVNKLHNYITKTNGSMSLFDAPLHNNFYTASKSSGYFDMRYLLNNTLMKDQPSLAVTLVDNHDTQPGQSLQSWVEPWFKPLAYAFILTRQEGYPCVFYGDYYGIPKYNIPGLKSKIDPLLIARRDYAYGTQRDYIDHQDIIGWTREGIDTKPNSGLAALITDGPGGSKWMYVGKKHAGKVFYDLTGNRSDTVTINADGWGEFKVNGGSVSIWVAK

SEQ ID NO: 43168 - protein, 480 aa, Synthetic construct
NGTMMQYFEWYLPNDGTLWTKMGSDASHLKSIGITGVWFPPAYKGQSQSDVGYGVYDMYDLGEFNQKGTVRTKYGTKAQLQSAITSLHNNGIQAYGDVVLNHKAGADATEDVTAVEVNPANRNQETSEEYQIKAWTDFRFPGRGNTYSDFKWHWYHFDGADWDESRKISRIFKFRGEGKAWDWEVSSENGNYDYLMYADVDYDHPDVQTEVKNWGKWFVNTLNLDGVRLDAVKHIKFDYMSSWLSSVKSTTGKSNLFAVGEYWNTSLGALENYENKTNWSMSLFDVPLHMNFQAAANGGGYYDMRNLLNNTMMKNHPIQAVTFVDNHDTEPGQALQSWVSDWFKPLAYATILTRQEGYPCVFYGDYYGIPSQSVSAKSTWLDKQLSARKSYAYGTQHDYLDNQDVIGWTREGDSAHAGSGLATVMSDGPGGSKTMYVGTAHAGQVFKDITGNRTDTVTINSAGNGTFPCNGGSVSIWVKQ

SEQ ID NO: 43169 - protein, 479 aa, Bacillus sp. 406
NGTMMQYFEWYVPNDGQHWNRLRNDAAYLKSIGVSAVWTPPAYKGTSQNDVGYGAYDLYDLGEFNQKGTIRTKYGTKAELKSAVSTLKSNGIQVYGDVVMNHKGGADYTENVTAVEVNPSNRNQETSDEYTIQAWTGFNFPGRGTTHSPFKWQWYHFDGTDWDQSRNASRIFKFRGTGKAWDWEVSSENGNYDYLMYADLDFDHPDVGNEMKNWGVWYANEVGLDGFRLDAVKHIKHSYLGDWVNHVRTKTGKEMFTVAEYWQNDVNAINNYLAKVNYNHSVFDAPLHYNFHYASQSGGNYDMRNLLNGTVVAAHPTKAVTLVENHDSQPGQSLESVVQPWFKPLAYAFILTRAEGYPSIFYGDMYGTKGNSSYEIPALKTKIEPLLKARKDYAYGTQHNYMDHWDVIGWTREGDSTKEKSGLATLVTDGAGGSKWMYVGKQNAGEVWYDITGNRTDKITINTDGWGNFQVNGGSVSVY

SEQ ID NO: 43170 - protein, 477 aa, Bacillus sp. (in: firmicutes)
NGTIMQYFEWNVPNDGQHWNRLHNNAQNLKNAGITAIWIPPAWKGTSQSDTGYGAYDLYDLGEFNQKGTVRTKYGTKAELERAIRSLKANGIQVYGDVVMNHKAGADFTERVQAVEVNPQNRNQEVSGTYQIEAWTGFNFPGRGNQHSSFKWRWYHFDGTDWDESRKLNRIYKFRGKAWDWEVDTEFGNYDYLMYADLDMDHPEVINELNRWGVWYANTLNLDGFRLDAVKHIKFSFMRDWLGHVRGQTGKNLFAVAEYWKNDLGALENYLSKTNWTMSAFDVPLHYNLYQASHSSGNYDMRNLLNGTLVQRHPSHAVTFVDNHDTQPGEALESFVQGWFKPLAYATILTREQGYPQVFYGDYYGIPSDGVPSYRQQIDPLLAARQQYAYGRQHDYFDHWDVIGWTREGNASHPNSGLATIMSDGPGGSKWMYVGRQKAGEVWHDMTGNRSGTVTINQDGWGHFFVNGGSVSVWVKR

SEQ ID NO: 43171 - protein, 477 aa, Bacillus sp. (in: firmicutes)
NGTIMQYFEWNVPNDGQHWNRLHNNAQNLKNAGITAIWIPPAWKGTSQSDTGYGAYDLYDLGEFNQKGTVRTKYGTKAELERAIRSLKANGIQVYGDVVMNHKAGADFTERVQAVEVNPQNRNQEVSGTYQIEAWTGFNFPGRGNQHSSFKWRWYHFDGTDWDESRKLNRIYKFRGKAWDWEVDTEFGNYDYLMYADLDMDHPEVINELNRWGVWYANTLNLDGFRLDAVKHIKFSFMRDWLGHVRGQTGKNLFAVAEYWKNDLGALENYLSKTNWTMSAFDVPLHYNLYQASNSSGNYDMRNLLNGTLVQRHPSHAVTFVDNHDTQPGEALESFVQGWFKPLAYATILTREQGYPQVFYGDYYGIPSDGVPSYRQQIDPLLAARQQYAYGRQHDYFDHWDVIGWTREGNASHPNSGLATIMSDGPGGSKWMYVGRQKAGEVWHDMTGNRSGTVTINQDGWGHFFVNGGSVSVWVKR

SEQ ID NO: 43172 - protein, 477 aa, Bacillus sp. (in: firmicutes)
NGTIMQYFEWNVPNDGQHWNRLHNNAQNLKNAGITAIWIPPAWKGTSQSDTGYGAYDLYDLGEFNQKGTVRTKYGTKAELERAIHSLKANGIQVYGDVVMNHKAGADFTERVQAVEVNPQNRNQEVSGTYQIEAWTGFNFPGRGNQHSSFKWRWYHFDGTDWDESRKLNRIYKFRGKAWDWEVDTEFGNYDYLMYADLDMDHPEVINELNRWGVWYANTLNLDGFRLDAVKHIKFSFMRDWLGHVRGQTGKNLFAVAEYWKNDLGALENYLSKTNWTMSAFDVPLHYNLYQASNSSGNYDMRNLLNGTLVQRHPSHAVTFVDNHDTQPGEALESFVQGWFKPLAYATILTREQGYPQVFYGDYYGIPSDGVPSYRQQIDPLLAARQQYAYGRQHDYFDHWDVIGWTREGNASHPNSGLATIMSDGPGGSKWMYVGRQKAGEVWHDMTGNRSGTVTINQDGWGHFFVNGGSVSVWVKR

SEQ ID NO: 43173 - protein, 477 aa, Bacillus sp. (in: firmicutes)
NGTIMQYFEWNVPNDGQHWNRLHNNAQNLKNAGITAIWIPPAWKGTSQSDTGYGAYDLYDLGEFNQKGTVRTKYGTKAELERAIRSLKANGIQVYGDVVMNHKAGADFTERVQAVEVNPQNRNQEVSGTYQIEAWTGFNFPGRGNQHSSFKWRWYHFDGTDWDESRKLNRIYKFRGKAWDWEVDTEFGNYDYLMYADLDMDHPEVINELNRWGVWYANTLNLDGFRLDAVKHIKFSFMRDWLGHVRGQTGKNLFAVAEYWKNDLGSLENYLSKTNWTMSAFDVPLHYNLYQASNSSGNYDMRNLLNGTLVQRHPSHAVTFVDNHDTQPGEALESFVQGWFKPLAYATILTREQGYPQVFYGDYYGIPSDGVPSYRQQIDPLLAARQQYAYGRQHDYFDHWDVIGWTREGNASHPNSGLATIMSDGPGGSKWMYVGRQKAGEVWHDMTGNRSGTVTINQDGWGHFFVNGGSVSVWVKR

SEQ ID NO: 43174 - protein, 477 aa, Bacillus sp. (in: firmicutes)
NGTIMQYFEWNVPNDGQHWNRLHNNAQNLKNAGITAIWIPPAWKGTSQSDTGYGAYDLYDLGEFNQKGTVRTKYGTKAELERAINSLKANGIQVYGDVVMNHKAGADFTERVQAVEVNPQNRNQEVSGTYQIEAWTGFNFPGRGNQHSSFKWRWYHFDGTDWDESRKLNRIYKFRGKAWDWEVDTEFGNYDYLMYADLDMDHPEVINELNRWGVWYANTLNLDGFRLDAVKHIKFSFMRDWLGHVRGQTGKNLFAVAEYWKNDLGALENYLSKTNWTMSAFDVPLHYNLYQASNSSGNYDMRNLLNGTLVQRHPSHAVTFVDNHDTQPGEALESFVQGWFKPLAYATILTREQGYPQVFYGDYYGIPSDGVPSYRQQIDPLLAARQQYAYGRQHDYFDHWDVIGWTREGNASHPNSGLATIMSDGPGGSKWMYVGRQKAGEVWHDMTGNRSGTVTINQDGWGHFFVNGGSVSVWVKR

SEQ ID NO: 43175 - protein, 477 aa, Bacillus sp. (in: firmicutes)
NGTMMQYFEWNVPNDGQHWNRLHNNAQNLKNAGITAIWIPPAWKGTSQSDTGYGAYDLYDLGEFNQKGTVRTKYGTKAELERAIRSLKANGIQVYGDVVMNHKAGADFTERVQAVEVNPQNRNQEVSGTYQIEAWTGFNFPGRGNQHSSFKWRWYHFDGTDWDESRKLNRIYKFRGKAWDWEVDTEFGNYDYLLYADLDMDHPEVINELNRWGVWYANTLNLDGFRLDAVKHIKFSFMRDWLGHVRGQTGKNLFAVAEYWKNDLGALENYLSKTNWTMSAFDVPLHYNLYQASNSSGNYDMRNLLNGTLVQRHPSHAVTFVDNHDTQPGEALESFVQGWFKPLAYATILTREQGYPQVFYGDYYGIPSDGVPSYRQQIDPLLAARQQYAYGRQHDYFDHWDVIGWTREGNASHPNSGLATIMSDGPGGSKWMYVGRQKAGEVWHDMTGNRSGTVTINQDGWGHFFVNGGSVSVWVKR

SEQ ID NO: 43176 - protein, 477 aa, Bacillus sp. (in: firmicutes)
NGTIMQYFEWNVPNDGQHWNRLHNNAQNLKNAGITAIWIPPAWKGTSQSDTGYGAYDLYDLGEFNQKGTVRTKYGTKAELERAIRSLKANGIQVYGDVVMNHKAGADFTERVQAVEVNPQNRNQEVSGTYQIEAWTGFNFPGRGNQHSSFKWRWYHFDGTDWDESRKLNRIYKFRGKAWDWEVDTEFGNYDYLMYADLDMDHPEVINELNRWGVWYANTLNLDGFRLDAVKHIKFSFMRDWLGHVRGQTGKNLFAVAEYWKNDLGALENYLSKTNWTMSAFDVPLHYNLYQASNSSGQYDMRNLLNGTLVQRHPSHAVTFVDNHDTQPGEALESFVQGWFKPLAYATILTREQGYPQVFYGDYYGIPSDGVPSYRQQIDPLLAARQQYAYGRQHDYFDHWDVIGWTREGNASHPNSGLATIMSDGPGGSKWMYVGRQKAGEVWHDMTGNRSGTVTINQDGWGHFFVNGGSVSVWVKR

SEQ ID NO: 43177 - protein, 477 aa, Bacillus sp. (in: firmicutes)
NGTIMQYFEWNVPNDGQHWNRLHNNAQNLKNAGITAIWIPPAWKGTSQSDTGYGAYDLYDLGEFNQKGTVRTKYGTKAELERAIRSLKANGIQVYGDVVMNHKAGADFTERVQAVEVNPQNRNQEVSGTYQIEAWTGFNFPGRGNQHSSFKWRWYHFDGTDWDESRKLNRIYKFRGKAWDWEVDTEFGNYDYLMYADLDMDHPEVINELNRWGVWYANTLNLDGFRLDAVKHIKFSFMRDWLGHVRGQTGKNLFAVAEYWKNDLGALENYLSKTNWTMSAFDVPLHYNLYQASNSSGRYDMRNLLNGTLVQRHPSHAVTFVDNHDTQPGEALESFVQGWFKPLAYATILTREQGYPQVFYGDYYGIPSDGVPSYRQLIDPLLAARQQYAYGRQHDYFDHWDVIGWTREGNASHPNSGLATIMSDGPGGSKWMYVGRQKAGEVWHDMTGNRSGTVTINQDGWGHFFVNGGSVSVWVKR

SEQ ID NO: 43178 - protein, 477 aa, Bacillus sp. (in: firmicutes)
NGTIMQYFEWNVPNDGQHWNRLHNNAQNLKNAGITAIWIPPAWKGTSQSDTGYGAYDLYDLGEFNQKGTVRTKYGTKAELERAIRSLKANGIQVYGDVVMNHKAGADFTERVQAVEVNPQNRNQEVSGTYQIEAWTGFNFPGRGNQHSSFKWRWYHFDGTDWDESRSLSRIYKFRGKAWDWEVDTEFGNYDYLMYADLDMDHPEVINELNRWGVWYANTLNLDGFRLDAVKHIKFSFMRDWLGHVRGQTGKNLFAVAEYWKNDLGALENYLSKTNWTMSAFDVPLHYNLYQASNSSGNYDMRNLLNGTLVQRHPSHAVTFVDNHDTQPGEALESFVQGWFKPLAYATILTREQGYPQVFYGDYYGIPSDGVPSYRQQIDPLLAARQQYAYGRQHDYFDHWDVIGWTREGNASHPNSGLATIMSDGPGGSKWMYVGRQKAGEVWHDMTGNRSGTVTINQDGWGHFFVNGGSVSVWVKR

SEQ ID NO: 43179 - protein, 477 aa, Bacillus sp. (in: firmicutes)
NGTIMQYFEWNVPNDGQHWNRLHNNAQNLKNAGITAIWIPPAWKGTSQSDTGYGAYDLYDLGEFNQKGTVRTKYGTKAELERAIRSLKANGIQVYGDVVMNHKAGADFTERVQAVEVNPQNRNQEVSGTYQIEAWTGFNFPGRGNQHSSFKWRWYHFDGTDWDESRKLNRIYKFRGKAWDWEVDTEFGNYDYLMYADLDMDHPEVINELNRWGVWYANTLNLDGFRLDAVKHIKFSFMRDWLGHVRGQTGKNLFAVAEYWKNDLGALENYLSKTNWTMSAFDVPLHYNLYQASNSSGRYDMRNLLNGTLVQRHPSHAVTFVDNHDTQPGEALESFVQGWFKPLAYATILTREQGYPQVFYGDYYGIPSDGVPSYRQQIDPLLAARQQYAYGRQHDYFDHWDVIGWTREGNASHPNSGLATIMSDGPGGSKWMYVGRQKAGEVWHDMTGNRSGTVTINQDGWGHFFVNGGSVSVWVKR

SEQ ID NO: 43180 - protein, 477 aa, Bacillus sp. (in: firmicutes)
NGTIMQYFEWNVPNDGQHWNRLHNNAQNLKNAGITAIWIPPAWKGTSQSDTGYGAYDLYDLGEFNQKGTVRTKYGTKAELERAIRSLKANGIQVYGDVVMNHKAGADFTERVQAVEVNPQNRNQEVSGTYQIEAWTGFNFPGRGNQHSSFKWRWYHFDGTDWDESRKLNRIYKFRGKAWDWEVDTEFGNYDYLMYADLDMDHPEVINELNRWGVWYANTLNLDGFRLDAVKHIKFSFLRDWLGHVRGQTGKNLFAVAEYWKNDLGALENYLSKTNWTMSAFDVPLHYNLYQASNSSGNYDMRNLLNGTLVQRHPSHAVTFVDNHDTQPGEALESFVQGWFKPLAYATILTREQGYPQVFYGDYYGIPSDGVPSYRQQIDPLLAARQQYAYGRQHDYFDHWDVIGWTREGNASHPNSGLATIMSDGPGGSKWMYVGRQKAGEVWHDMTGNRSGTVTINQDGWGHFFVNGGSVSVWVKR

SEQ ID NO: 43181 - protein, 477 aa, Bacillus sp. (in: firmicutes)
NGTIMQYFEWNVPNDGQHWNRLHNNAQNLKNAGITAIWIPPAWKGTSQSDTGYGAYDLYDLGEFNQKGTVRTKYGTKAELERAIRSLKANGIQVYGDVVMNHKAGADFTENVQAVEVNPQNRNQEVSGTYQIEAWTGFNFPGRGNQHSSFKWRWYHFDGTDWDESRKLNRIYKFRGKAWDWEVDTEFGNYDYLMYADLDMDHPEVINELNRWGVWYANTLNLDGFRLDAVKHIKFSFMRDWLGHVRGQTGKNLFAVAEYWKNDLGALENYLSKTNWTMSAFDVPLHYNLYQASNSSGNYDMRNLLNGTLVQRHPSHAVTFVDNHDTQPGEALESFVQGWFKPLAYATILTREQGYPQVFYGDYYGIPSDGVPSYRQQIDPLLAARQQYAYGRQHDYFDHWDVIGWTREGNASHPNSGLATIMSDGPGGSKWMYVGRQKAGEVWHDMTGNRSGTVTINQDGWGHFFVNGGSVSVWVKR

SEQ ID NO: 43182 - protein, 477 aa, Bacillus sp. (in: firmicutes)
NGTIMQYFEWNVPNDGQHWNRLHNNAQNLKNAGITAIWIPPAWKGTSQSDTGYGAYDLYDLGEFNQKGTVRTKYGTKAELERAIRSLKANGIQVYGDVVMNHKAGADFTERVQAVEVNPQNRNQEVSGTYQIEAWTGFNFPGRGNQHSSFKWRWYHFDGTDWDESRKLNRIYKFRGKAWDWEVDTEFGNYDYLMYADLDMDHPEVINELNRWGVWYANTLNLDGFRLDAVKHIKFSFMRDWLGHVRGQTGKNLFAVAEYWKNDLGALENYLSKTNWTMSAFDVPLHYNLYYASNSSGNYDMRNLLNGTLVQRHPSHAVTFVDNHDTQPGEALESFVQGWFKPLAYATILTREQGYPQVFYGDYYGIPSDGVPSYRQQIDPLLAARQQYAYGRQHDYFDHWDVIGWTREGNASHPNSGLATIMSDGPGGSKWMYVGRQKAGEVWHDMTGNRSGTVTINQDGWGHFFVNGGSVSVWVKR

SEQ ID NO: 43183 - protein, 477 aa, Bacillus sp. (in: firmicutes)
NGTIMQYFEWNVPNDGQHWNRLHNNAQNLKNAGITAIWIPPAWKGTSQSDVGYGAYDLYDLGEFNQKGTVRTKYGTKAELERAIRSLKANGIQVYGDVVMNHKAGADFTERVQAVEVNPQNRNQEVSGTYQIEAWTGFNFPGRGNQHSSFKWRWYHFDGTDWDESRKLNRIYKFRGKAWDWEVDTEFGNYDYLMYADLDMDHPEVINELNRWGVWYANTLNLDGFRLDAVKHIKFSFMRDWLGHVRGQTGKNLFAVAEYWKNDLGALENYLSKTNWTMSAFDVPIHYNLYQASNSSGNYDMRNLLNGTLVQRHPSHAVTFVDNHDTQPGEALESFVQGWFKPLAYATILTREQGYPQVFYGDYYGIPSDGVPSYRQQIDPLLAARQQYAYGRQHDYFDHWDVIGWTREGNASHPNSGLATIMSDGPGGSKWMYVGRQKAGEVWHDMTGNRSGTVTINQDGWGHFFVNGGSVSVWVKR

SEQ ID NO: 43184 - protein, 477 aa, Bacillus sp. (in: firmicutes)
NGTIMQYFEWNVPNDGQHWNRLHNNAQNLKNAGITAIWIPPAWKGTSQSDTGYGAYDLYDLGEFNQKGTVRTKYGTKAELERAIRSLKANGIQVYGDVVMNHKAGADFTERVQAVEVNPQNRNQEVSGTYQIEAWTGFNFPGRGNQHSSFKWRWYHFDGTDWDESRKLNRIYKFRGKAWDWEVDTEFGNYDYLMYADLDMDHPEVINELNRWGVWYANTLNLDGFRLDAVKHIKFSFMRDWLGHVRGQTGKNLFAVAEYWKNDLGALENYLSKTNWTMSAFDVPLHYNLYQASNSSGNYDMRNLLNGTLVQRHPSHAVTFVDNHDTQPGEALESFVQGWFKPLAYATILTREQGYPSVFYGDYYGIPSDGVPSYRQQIDPLLAARQQYAYGRQHDYFDHWDVIGWTREGNASHPNSGLATIMSDGPGGSKWMYVGRQKAGEVWHDMTGNRSGTVTINQDGWGHFFVNGGSVSVWVKR

SEQ ID NO: 43185 - protein, 477 aa, Bacillus sp. (in: firmicutes)
NGTIMQYFEWNVPNDGQHWNRLHNNAQNLKNAGITAIWIPPAWKGTSQSDTGYGAYDLYDLGEFNQKGTVRTKYGTKAELERAIQSLKANGIQVYGDVVMNHKAGADFTERVQAVEVNPQNRNQEVSGTYQIEAWTGFNFPGRGNQHSSFKWRWYHFDGTDWDESRKLNRIYKFRGKAWDWEVDTEFGNYDYLMYADLDMDHPEVINELNRWGVWYANTLNLDGFRLDAVKHIKFSFMRDWLGHVRGQTGKNLFAVAVYWKNDLGALENYLSKTNWTMSAFDVPLHYNLYQASNSSGNYDMRNLLNGTLVQRHPSHAVTFVDNHDTQPGEALESFVQGWFKPLAYATILTREQGYPQVFYGDYYGIPSDGVPSYRQLIDPLLAARQQYAYGRQHDYFDHWDVIGWTREGNASHPNSGLATIMSDGPGGSKWMYVGRQKAGEVWHDMTGNRSGTVTINQDGWGHFFVNGGSVSVWVKR

SEQ ID NO: 43186 - protein, 477 aa, Bacillus sp. (in: firmicutes)
NGTIMQYFEWNVPNDGQHWNRLHNNAQNLKNAGITAIWIPPAWKGTSQSDTGYGAYDLYDLGEFNQKGTVRTKYGTKAELERAIRSLKANGIQVYGDVVMNHKAGADFTERVQAVEVNPGNRNQEVSGTYQIEAWTGFNFPGRGNQHSSFKWRWYHFDGTDWDESRKLNRIYKFRGKAWDWEVDTEFGNYDYLMYADLDMDHPEVINELNRWGVWYANTLNLDGFRLDAVKHIKFSFMRDWLGHVRGQTGKNLFAVAEYWKNDLGALENYLSKTNWTMSAFDVPLHYNLYQASNSSGNYDMRNLLNGTLVQRHPSHAVTFVDNHDTQPGEALESFVQGWFKPLAYATILTREQGYPQVFYGDYYGIPSDGVPSYRQQIDPLLAARQQYAYGRQHDYFDHWDVIGWTREGNASHPNSGLATIMSDGPGGSKWMYVGRQKAGEVWHDMTGNRSGTVTINQDGWGHFFVNGGSVSVWVKR

SEQ ID NO: 43187 - protein, 477 aa, Bacillus sp. (in: firmicutes)
NGTIMQYFEWNVPNDGQHWNRLHNNAQNLKNAGITAIWIPPAWKGTSQSDTGYGAYDLYDLGEFNQKGTVRTKYGTKAELERAIRSLKANGIQVYGDVVMNHKAGADFTERVQAVEVNPQNRNQEVSGTYQIEAWTGFNFPGRGNQHSSFKWRWYHFDGTDWDESRKLNRIYKFRGKAWDWEVDTEFGNYDYLMYADLDMDHPEVINELNRWGVWYANTLNLDGFRLDAVKHIKFSFMRDWLGHVRGQTGKNLFAVAEYWKNDLGALENYLSKTNWTMSAFDVPLHYNLYQASQSSGNYDMRNLLNGTLVQRHPSHAVTFVDNHDTQPGEALESFVQGWFKPLAYATILTREQGYPQVFYGDYYGIPSDGVPSYRQLIDPLLAARQQYAYGRQHDYFDHWDVIGWTREGNASHPNSGLATIMSDGPGGSKWMYVGRQKAGEVWHDMTGNRSGTVTINQDGWGHFFVNGGSVSVWVKR

SEQ ID NO: 43188 - protein, 477 aa, Bacillus sp. (in: firmicutes)
NGTIMQYFEWNVPNDGQHWNRLHNNAQNLKNAGITAIWIPPAWKGTSQSDTGYGAYDLYDLGEFNQKGTVRTKYGTKAELERAIRSLKANGIQVYGDVVMNHKAGADFTERVNAVEVNPQNRNQEVSGTYQIEAWTGFNFPGRGNQHSSFKWRWYHFDGTDWDESRKLNRIYKFRGKAWDWEVDTEFGNYDYLMYADLDMDHPEVINELNRWGVWYANTLNLDGFRLDAVKHIKFSFMRDWLGHVRGQTGKNLFAVAEYWKNDLGALENYLSKTNWTMSAFDVPLHYNLYQASNSSGNYDMRNLLNGTLVQRHPSHAVTFVDNHDTQPGEALESFVQGWFKPLAYATILTREQGYPQVFYGDYYGIPSDGVPSYRQQIDPLLAARQQYAYGRQHDYFDHWDVIGWTREGNASHPNSGLATIMSDGPGGSKWMYVGRQKAGEVWHDMTGNRSGTVTINQDGWGHFFVNGGSVSVWVKR

SEQ ID NO: 43189 - protein, 477 aa, Bacillus sp. (in: firmicutes)
NGTIMQYFEWNVPNDGQHWNRLHNNAQNLKNAGITAIWIPPAWKGTSQSDTGYGAYDLYDLGEFNQKGTVRTKYGTKAELERAIRSLKANGIQVYGDVVMNHKAGADFTEDVTAVEVNPQNRNQEVSGTYQIEAWTGFNFPGRGNQHSSFKWRWYHFDGTDWDESRKLNRIYKFRGKAWDWEVDTEFGNYDYLMYADLDMDHPEVINELNRWGVWYANTLNLDGFRLDAVKHIKFSFMRDWLGHVRGQTGKNLFAVAEYWKNDLGALENYLSKTNWTMSAFDVPLHYNLYQASNSSGNYDMRNLLNGTLVQRHPSHAVTFVDNHDTQPGEALESFVQGWFKPLAYATILTREQGYPQVFYGDYYGIPSDGVPSYRQQIDPLLAARQQYAYGRQHDYFDHWDVIGWTREGNASHPNSGLATIMSDGPGGSKWMYVGRQKAGEVWHDMTGNRSGTVTINQDGWGHFFVNGGSVSVWVKR

SEQ ID NO: 43190 - protein, 477 aa, Bacillus sp. (in: firmicutes)
NGTMMQYFEWNVPNDGQHWNRLHNNAQNLKNAGITAIWIPPAWKGTSQSDTGYGAYDLYDLGEFNQKGTVRTKYGTKAELERAIRSLKANGIQVYGDVVMNHKAGADFTERVQAVEVNPQNRNQEVSGTYQIEAWTGFNFPGRGNQHSSFKWRWYHFDGTDWDESRKLNRIYKFRGKAWDWEVDTEFGNYDYLLYADLDMDHPEVINELNRWGVWYANTLNLDGFRLDAVKHIKFSFMRDWLGHVRGQTGKNLFAVAEYWKNDLGALENYLSKTNWTMSAFDVPLHYNLYQASNSSGNYDMRNLLNGTLVQRHPSHAVTFVDNHDTQPGEALESFVQGWFKPLAYATILTREQGYPSVFYGDYYGIPSDGVPSYRQQIDPLLAARQQYAYGRQHDYFDHWDVIGWTREGNASHPNSGLATIMSDGPGGSKWMYVGRQKAGEVWHDMTGNRSGTVTINQDGWGHFFVNGGSVSVWVKR

SEQ ID NO: 43191 - protein, 477 aa, Bacillus sp. (in: firmicutes)
NGTIMQYFEWNVPNDGQHWNRLHNNAQNLKNAGITAIWIPPAWKGTSQSDTGYGAYDLYDLGEFNQKGTVRTKYGTKAELERAIRSLKANGIQVYGDVVMNHKAGADFTERVQAVEVNPQNRNQEVSGTYQIEAWTGFNFPGRGNQHSSFKWRWYHFDGTDWDESRKLNRIYKFRGKAWDWEVDTEFGNYDYLMYADLDMDHPEVINELNRWGVWYANTLNLDGFRLDAVKHIKFSFMRDWLGHVRGQTGKNLFAVAEYWKNDLGALENYLSKTNWTMSAFDVPLHYNLYQASNSSGNYDMRNLLNGTLVQRHPSHAVTFVDNHDTQPGEALESFVQGWFKPLAYATILTREQGYPEVFYGDYYGIPSDGVPSYRQQIDPLLAARQQYAYGRQHDYFDHWDVIGWTREGNASHPNSGLATIMSDGPGGSKWMYVGRQKAGEVWHDMTGNRSGTVTINQDGWGHFFVNGGSVSVWVKR

SEQ ID NO: 43192 - protein, 477 aa, Bacillus sp. (in: firmicutes)
NGTIMQYFEWNVPNDGQHWNRLHNNAQNLKNAGITAIWIPPAWKGTSQSDTGYGSYDLYDLGEFNQKGTVRTKYGTKAELERAIRSLKANGIQVYGDVVMNHKAGADFTERVQAVEVNPQNRNQEVSGTYQIEAWTGFNFPGRGNQHSSFKWRWYHFDGTDWDESRKLNRIYKFRGKAWDWEVDTEFGNYDYLMYADLDMDHPEVINELNRWGVWYANTLNLDGFRLDAVKHIKFSFMRDWLGHVRGQTGKNLFAVAEYWKNDLGALENYLSKTNWTMSAFDVPLHYNLYQASNSSGNYDMRNLLNGTLVQRHPSHAVTFVDNHDTQPGEALESFVQGWFKPLAYATILTREQGYPQVFYGDYYGIPSDGVPSYRQQIDPLLAARQQYAYGRQHDYFDHWDVIGWTREGNASHPNSGLATIMSDGPGGSKWMYVGRQKAGEVWHDMTGNRSGTVTINQDGWGHFFVNGGSVSVWVKR

SEQ ID NO: 43193 - protein, 477 aa, Bacillus sp. (in: firmicutes)
NGTIMQYFEWNVPNDGQHWNRLHNNAQNLKNAGITAIWIPPAWKGTSQSDTGYGAYDLYDLGEFNQKGTVRTKYGTKAELERAIRSLKANGIQVYGDVVMNHKAGADFTERVQAVEVNPQNRNQEVSGTYQIEAWTGFNFPGRGNQHSSFKWRWYHFDGTDWDESRKLNRIYKFRGKAWDWEVDTEFGNYDYLMYADLDMDHPEVINELNRWGVWYANTLNLDGFRLDAVKHIKFSFMRDWLGHVRGQTGKNLFAVAEYWKNDLGALENYLSKTNWTMSAFDVPLHYNLYQASNSSGNYDMRKLLNGTLVQRHPSHAVTFVDNHDTQPGEALESFVQGWFKPLAYATILTREQGYPQVFYGDYYGIPSDGVPSYRQQIDPLLAARQQYAYGRQHDYFDHWDVIGWTREGNASHPNSGLATIMSDGPGGSKWMYVGRQKAGEVWHDMTGNRSGTVTINQDGWGHFFVNGGSVSVWVKR

SEQ ID NO: 43194 - protein, 477 aa, Bacillus sp. (in: firmicutes)
NGTIMQYFEWNVPNDGQHWNRLHNNAQNLKNAGITAIWIPPAWKGTSQSDTGYGAYDLYDLGEFNQKGTVRTKYGTKAELERAIRSLKANGIQVYGDVVMNHKAGADFTERVQAVEVNPQNRNQEVSGTYQIEAWTGFNFPGRGNQHSSFKWRWYHFDGTDWDESRKLNRIYKFRGKAWDWEVDTEFGNYDYLMYADLDMDHPEVINELNRWGVWYANTLNLDGFRLDAVKHIKFSFMRDWLGHVRGQTGKNLFAVAEYWKNDLGALENYLSKTNWTMSAFDVPLHYNLYNASNSSGNYDMRNLLNGTLVQRHPSHAVTFVDNHDTQPGEALESFVQGWFKPLAYATILTREQGYPQVFYGDYYGIPSDGVPSYRQQIDPLLAARQQYAYGRQHDYFDHWDVIGWTREGNASHPNSGLATIMSDGPGGSKWMYVGRQKAGEVWHDMTGNRSGTVTINQDGWGHFFVNGGSVSVWVKR

SEQ ID NO: 43195 - protein, 477 aa, Bacillus sp. (in: firmicutes)
NGTIMQYFEWHVPNDGQHWNRLHNNAQNLKNAGITAIWIPPAWKGTSQSDTGYGAYDLYDLGEFNQKGTVRTKYGTKAELERAIRSLKANGIQVYGDVVMNHKAGADFTERVQAVEVNPQNRNQEVSGTYQIEAWTGFNFPGRGNQHSSFKWRWYHFDGTDWDESRKLNRIYKFRGKAWDWEVDTEFGNYDYLMYADLDMDHPEVINELNRWGVWYANTLNLDGFRLDAVKHIKFSFMRDWLGHVRGQTGKNLFAVAEYWKNDLGALENYLSKTNWTMSAFDVPLHYNLYQASNSSGNYDMRNLLNGTLVQRHPSHAVTFVDNHDTQPGEALESFVQGWFKPLAYATILTREQGYPQVFYGDYYGIPSDGVPSYRQLIDPLLAARQQYAYGRQHDYFDHWDVIGWTREGNASHPNSGLATIMSDGPGGSKWMYVGRQKAGEVWHDMTGNRSGTVTINQDGWGHFFVNGGSVSVWVKR

SEQ ID NO: 43196 - protein, 477 aa, Bacillus sp. (in: firmicutes)
NGTIMQYFEWNVPNDGQHWNRLHNNAQNLKNAGITAIWIPPAWKGTSQSDTGYGAYDLYDLGEFNQKGTVRTKYGTKAELERAIRSLKANGIQVYGDVVMNHKAGADFTERVQAVEVNPQNRNQEVSGTYQIEAWTGFNFPGRGNQHSSFKWRWYHFDGTDWDESRKLNRIYKFRGKAWDWEVDTEFGNYDYLMYADLDMDHPEVINELNRWGVWYANTLNLDGFRLDAVKHIKFSFMRDWLGHVRGQTGKNLFAVAEYWKNDLGALENYLSKTNWTMSAFDVPLHYNLYQASNSSGNYDMRNLLNGTLVQRHPSHAVTFVDNHDTQPGEALESFVQGWFKPLAYATILTREQGYPHVFYGDYYGIPSDGVPSYRQQIDPLLAARQQYAYGRQHDYFDHWDVIGWTREGNASHPNSGLATIMSDGPGGSKWMYVGRQKAGEVWHDMTGNRSGTVTINQDGWGHFFVNGGSVSVWVKR

SEQ ID NO: 43197 - protein, 477 aa, Bacillus sp. (in: firmicutes)
NGTIMQYFEWNVPNDGQHWNRLHNNAQNLKNAGITAIWIPPAWKGTSQSDTGYGAYDLYDLGEFNQKGTVRTKYGTKAELERAIRSLKANGIQVYGDVVMNHKAGADFTERVQAVEVNPQNRNQEVSGTYQIEAWTGFNFPGRGNQHSSFKWRWYHFDGTDWDESRNLSRIYKFRGKAWDWEVDTEFGNYDYLMYADLDMDHPEVINELNRWGVWYANTLNLDGFRLDAVKHIKFSFMRDWLGHVRGQTGKNLFAVAEYWKNDLGALENYLSKTNWTMSAFDVPLHYNLYQASNSSGNYDMRNLLNGTLVQRHPSHAVTFVDNHDTQPGEALESFVQGWFKPLAYATILTREQGYPQVFYGDYYGIPSDGVPSYRQQIDPLLAARQQYAYGRQHDYFDHWDVIGWTREGNASHPNSGLATIMFDGPGGSKWMYVGRQKAGEVWHDMTGNRSGTVTINQDGWGHFFVNGGSVSVWVKR

SEQ ID NO: 43198 - protein, 477 aa, Bacillus sp. (in: firmicutes)
NGTIMQYFEWNVPNDGQHWNRLHNNAQNLKNAGITAIWIPPAWKGTSQSDTGYGAYDLYDLGEFNQKGTVRTKYGTKAELERAIRSLKANGIQVYGDVVMNHKAGADATEDVTAVEVNPQNRNQEVSGTYQIEAWTGFNFPGRGNQHSSFKWRWYHFDGTDWDESRKLNRIYKFRGKAWDWEVDTEFGNYDYLMYADLDMDHPEVINELNRWGVWYANTLNLDGFRLDAVKHIKFSFMRDWLGHVRGQTGKNLFAVAEYWKNDLGALENYLSKTNWTMSAFDVPLHYNLYQASNSSGNYDMRNLLNGTLVQRHPSHAVTFVDNHDTQPGEALESFVQGWFKPLAYATILTREQGYPQVFYGDYYGIPSDGVPSYRQQIDPLLAARQQYAYGRQHDYFDHWDVIGWTREGNASHPNSGLATIMSDGPGGSKWMYVGRQKAGEVWHDMTGNRSGTVTINQDGWGHFFVNGGSVSVWVKR

SEQ ID NO: 43199 - protein, 477 aa, Bacillus sp. (in: firmicutes)
NGTIMQYFEWNVPNDGQHWNRLHNNAQNLKNAGITAIWIPPAWKGTSQSDTGYGAYDLYDLGEFNQKGTVRTKYGTKAELERAIRSLKANGIQVYGDVVMNHKAGADFTERVQAVEVNPQNRNQEVSGTYQIEAWTGFNFPGRGNQHSSFKWRWYHFDGTDWDESRKLNRIYKFRGKAWDWEVDTEFGNYDYLMYADLDMDHPEVINELNRWGVWYANTLNLDGFRLDAVKHIKFSFMRDWLGHVRGQTGKNLFAVAEYWMNDLGALENYLSKTNWTMSAFDVPLHYNLYQASNSSGNYDMRNLLNGTLVQRHPSHAVTFVDNHDTQPGEALESFVQGWFKPLAYATILTREQGYPQVFYGDYYGIPSDGVPSYRQQIDPLLAARQQYAYGRQHDYFDHWDVIGWTREGNASHPNSGLATIMSDGPGGSKWMYVGRQKAGEVWHDMTGNRSGTVTINQDGWGHFFVNGGSVSVWVKR

SEQ ID NO: 43200 - protein, 477 aa, Bacillus sp. (in: firmicutes)
NGTIMQYFEWNVPNDGQHWNRLHNNAQNLKNAGITAIWIPPAWKGTSQSDTGYGAYDLYDLGEFNQKGTVRTKYGTKAELERAIRSLKANGIQVYGDVVMNHKAGADFTEFVQAVEVNPQNRNQEVSGTYQIEAWTGFNFPGRGNQHSSFKWRWYHFDGTDWDESRKLNRIYKFRGKAWDWEVDTEFGNYDYLMYADLDMDHPEVINELNRWGVWYANTLNLDGFRLDAVKHIKFSFMRDWLGHVRGQTGKNLFAVAEYWKNDLGALENYLSKTNWTMSAFDVPLHYNLYQASNSSGNYDMRNLLNGTLVQRHPSHAVTFVDNHDTQPGEALESFVQGWFKPLAYATILTREQGYPQVFYGDYYGIPSDGVPSYRQQIDPLLAARQQYAYGRQHDYFDHWDVIGWTREGNASHPNSGLATIMSDGPGGSKWMYVGRQKAGEVWHDMTGNRSGTVTINQDGWGHFFVNGGSVSVWVKR

SEQ ID NO: 43201 - protein, 477 aa, Bacillus sp. (in: firmicutes)
NGTIMQYFEWNVPNDGQHWKRLHNNAQNLKNAGITAIWIPPAWKGTSQSDTGYGAYDLYDLGEFNQKGTVRTKYGTKAELERAIRSLKANGIQVYGDVVMNHKAGADFTERVQAVEVNPQNRNQEVSGTYQIEAWTGFNFPGRGNQHSSFKWRWYHFDGTDWDESRKLNRIYKFRGKAWDWEVDTEFGNYDYLMYADLDMDHPEVINELNRWGVWYANTLNLDGFRLDAVKHIKFSFMRDWLGHVRGQTGKNLFAVAEYWKNDLGALENYLSKTNWTMSAFDVPLHYNLYQASNSSGNYDMRNLLNGTLVQRHPSHAVTFVDNHDTQPGEALESFVQGWFKPLAYATILTREQGYPQVFYGDYYGIPSDGVPSYRQQIDPLLAARQQYAYGRQHDYFDHWDVIGWTREGNASHPNSGLATIMSDGPGGSKWMYVGRQKAGEVWHDMTGNRSGTVTINQDGWGHFFVNGGSVSVWVKR

SEQ ID NO: 43202 - protein, 477 aa, Bacillus sp. (in: firmicutes)
NGTIMQYFEWNVPNDGQHWNRLHNNAQNLKNAGITAIWIPPAWKGTSQSDTGYGAYDLYDLGEFNQKGTVRTKYGTKAELERAIRSLKANGIQVYGDVVMNHKAGADFTERVQAVEVNPQNRNQEVSGTYQIEAWTGFNFPGRGNQHSSFKWRWYHFDGTDWDESRKLNRIYKFRGKAWDWEVDTEFGNYDYLMYADLDMDHPEVINELNRWGVWYANTLNLDGFRLDAVKHIKFSFMRDWLGHVRGQTGKNLFAVAEYWKNDLGALENYLSKTNWTMSAFDVPLHYNLYQASNSSGNYDMRNLLNGTLVQRHPSHAVTFVDNHDTQPGEALESFVQGWFKPLAYATILTREQGYPAVFYGDYYGIPSDGVPSYRQQIDPLLAARQQYAYGRQHDYFDHWDVIGWTREGNASHPNSGLATIMSDGPGGSKWMYVGRQKAGEVWHDMTGNRSGTVTINQDGWGHFFVNGGSVSVWVKR

SEQ ID NO: 43203 - protein, 477 aa, Bacillus sp. (in: firmicutes)
NGTIMQYFEWYVPNDGQHWNRLHNNAQNLKNAGITAIWIPPAWKGTSQSDTGYGAYDLYDLGEFNQKGTVRTKYGTKAELERAIRSLKANGIQVYGDVVMNHKAGADFTERVQAVEVNPQNRNQEVSGTYQIEAWTGFNFPGRGNQHSSFKWRWYHFDGTDWDESRKLNRIYKFRGKAWDWEVDTEFGNYDYLLYADLDMDHPEVINELNRWGVWYANTLNLDGFRLDAVKHIKFSFMRDWLGHVRGQTGKNLFAVAEYWKNDLGALENYLSKTNWTMSAFDVPLHYNLYQASNSSGNYDMRNLLNGTLVQRHPSHAVTFVDNHDTQPGEALESFVQGWFKPLAYATILTREQGYPQVFYGDYYGIPSDGVPSYRQQIDPLLAARQQYAYGRQHDYFDHWDVIGWTREGNASHPNSGLATIMSDGPGGSKWMYVGRQKAGEVWHDMTGNRSGTVTINQDGWGHFFVNGGSVSVWVKR

SEQ ID NO: 43204 - protein, 477 aa, Bacillus sp. (in: firmicutes)
NGTIMQYFEWNVPNDGQHWNRLHNNAQNLKNAGITAIWIPPAWKGTSQSDTGYGAYDLYDLGEFNQKGTVRTKYGTKAELERAIRSLKANGIQVYGDVVMNHKAGADFTERVQAVEVNPQNRNQEVSGTYQIEAWTGFNFPGRGNQHSSFKWRWYHFDGTDWDESRKLNRIYKFRGKAWDWEVDTEFGNYDYLMYADLDMDHPEVINELNRWGVWYANTLNLDGFRLDAVKHIKFSFMRDWLGHVRGQTGKNLFAVAEYWKNDLGALENYLSKTNWTMSAFDVPLHYNLYQASNSSGKYDMRNLLNGTLVQRHPSHAVTFVDNHDTQPGEALESFVQGWFKPLAYATILTREQGYPQVFYGDYYGIPSDGVPSYRQQIDPLLAARQQYAYGRQHDYFDHWDVIGWTREGNASHPNSGLATIMSDGPGGSKWMYVGRQKAGEVWHDMTGNRSGTVTINQDGWGHFFVNGGSVSVWVKR

SEQ ID NO: 43205 - protein, 477 aa, Bacillus sp. (in: firmicutes)
NGTIMQYFEWNVPNDGQHWNRLHNNAQNLKNAGITAIWIPPAWKGTSQSDTGYGAYDLYDLGEFNQKGTVRTKYGTKAELERAIRSLKANGIQVYGDVVMNHKAGADFTEHVQAVEVNPQNRNQEVSGTYQIEAWTGFNFPGRGNQHSSFKWRWYHFDGTDWDESRKLNRIYKFRGKAWDWEVDTEFGNYDYLMYADLDMDHPEVINELNRWGVWYANTLNLDGFRLDAVKHIKFSFMRDWLGHVRGQTGKNLFAVAEYWKNDLGALENYLSKTNWTMSAFDVPLHYNLYQASNSSGNYDMRNLLQGTLVQRHPSHAVTFVDNHDTQPGEALESFVQGWFKPLAYATILTREQGYPQVFYGDYYGIPSDGVPSYRQLIDPLLAARQQYAYGRQHDYFDHWDVIGWTREGNASHPNSGLATIMSDGPGGSKWMYVGRQKAGEVWHDMTGNRSGTVTINQDGWGHFFVNGGSVSVWVKR

SEQ ID NO: 43206 - protein, 477 aa, Bacillus sp. (in: firmicutes)
NGTIMQYFEWNVPNDGQHWNRLHNNAQNLKNAGITAIWIPPAWKGTSQSDTGYGAYDLYDLGEFNQKGTVRTKYGTKAELERAIRSLKANGIQVYGDVVMNHKAGADFTERVQAVEVNPQNRNQEVSGTYQIEAWTHFHFPGRGNQHSSFKWRWYHFDGTDWDESRKLNRIYKFRGKAWDWEVDTEFGNYDYLMYADLDMDHPEVINELNRWGVWYANTLNLDGFRLDAVKHIKFSFMRDWLGHVRGQTGKNLFAVAEYWKNDLGALENYLSKTNWTMSAFDVPLHYNLYQASNSSGNYDMRNLLNGTLVQRHPSHAVTFVDNHDTQPGEALESFVQGWFKPLAYATILTREQGYPQVFYGDYYGIPSDGVPSYRQQIDPLLAARQQYAYGRQHDYFDHWDVIGWTREGNASHPNSGLATIMSDGPGGSKWMYVGRQKAGEVWHDMTGNRSGTVTINQDGWGHFFVNGGSVSVWVKR

SEQ ID NO: 43207 - protein, 477 aa, Bacillus sp. (in: firmicutes)
NGTIMQYFEWNVPNDGQHWNRLHNNAQNLKNAGITAIWIPPAWKGTSQSDTGYGAYDLYDLGEFNQKGTVRTKYGTKAELERAIRSLKANGIQVYGDVVMNHKAGADFTERVQAVEVNPQNRNQEVSGTYQIEAWTGFNFPGRGNQHSSFKWRWYHFDGTDWDESRKLNRIYKFRGKAWDWEVDTEFGNYDYLMYADLDMDHPEVINELNRWGVWYANTLNLDGFRLDAVKHIKFSFMRDWLGHVRGQTGKNLFAVAEYWKNDLGALENYLSKTNWTMSAFDVPLHYNLYQASNSSGNYDMRRLLNGTLVQRHPSHAVTFVDNHDTQPGEALESFVQGWFKPLAYATILTREQGYPQVFYGDYYGIPSDGVPSYRQQIDPLLAARQQYAYGRQHDYFDHWDVIGWTREGNASHPNSGLATIMSDGPGGSKWMYVGRQKAGEVWHDMTGNRSGTVTINQDGWGHFFVNGGSVSVWVKR

SEQ ID NO: 43208 - protein, 477 aa, Bacillus sp. (in: firmicutes)
NGTIMQYFEWNVPNDGQHWNRLHNNAQNLKNAGITAIWIPPAWKGTSQSDTGYGAYDLYDLGEFNQKGTVRTKYGTKAELERAIRSLKANGIQVYGDVVMNHKAGADFTERVQAVEVNPQNRNQEVSGTYQIEAWTGFNFPGRGNQHSSFKWRWYHFDGTDWDESRKLNRIYKFRGKAWDWEVDTEFGNYDYLMYADLDMDHPEVINELNRWGVWYANTLNLDGFRLDAVKHIKFSFMRDWLGHVRGQTGKNLFAVAEYWKNDLGALENYLSKTNWTMSAFDVPLHYNLYQASNSSGNYDMRNLLNGTLVQRHPSHAVTFVDNHDTQPGEALESFVQGWFKPLAYATILTREQGYPQVFYGDYYGIPSHGVPSYRQQIDPLLAARQQYAYGRQHDYFDHWDVIGWTREGNASHPNSGLATIMSDGPGGSKWMYVGRQKAGEVWHDMTGNRSGTVTINQDGWGHFFVNGGSVSVWVKR

SEQ ID NO: 43209 - protein, 477 aa, Bacillus sp. (in: firmicutes)
NGTIMQYFEWNVPNDGQHWNRLHNNAQNLKNAGITAIWIPPAWKGTSQSDTGYGAYDLYDLGEFNQKGTVRTKYGTKAELERAIRSLKANGIQVYGDVVMNHKAGADFTERVQAVEVNPQNRNQEVSGTYQIEAWTGFNFPGRGNQHSSFKWRWYHFDGTDWDESRKLNRIYKFRGKAWDWEVDTEFGNYDYLMYADLDMDHPEVINELNRWGVWYANTLNLDGFRLDAVKHIKFSFMRDWLGHVRGQTGKNLFAVAEYWKNDLGALENYLSKTNWTMSAFDVPLHYNLYQASNSSGHYDMRNLLNGTLVQRHPSHAVTFVDNHDTQPGEALESFVQGWFKPLAYATILTREQGYPQVFYGDYYGIPSDGVPSYRQQIDPLLAARQQYAYGRQHDYFDHWDVIGWTREGNASHPNSGLATIMSDGPGGSKWMYVGRQKAGEVWHDMTGNRSGTVTINQDGWGHFFVNGGSVSVWVKR

SEQ ID NO: 43210 - protein, 477 aa, Bacillus sp. (in: firmicutes)
NGTIMQYFEWNVPNDGQHWMRLHNNAQNLKNAGITAIWIPPAWKGTSQSDTGYGAYDLYDLGEFNQKGTVRTKYGTKAELERAIRSLKANGIQVYGDVVMNHKAGADFTERVQAVEVNPQNRNQEVSGTYQIEAWTGFNFPGRGNQHSSFKWRWYHFDGTDWDESRKLNRIYKFRGKAWDWEVDTEFGNYDYLMYADLDMDHPEVINELNRWGVWYANTLNLDGFRLDAVKHIKFSFMRDWLGHVRGQTGKNLFAVAEYWKNDLGALENYLSKTNWTMSAFDVPLHYNLYQASNSSGNYDMRNLLNGTLVQRHPSHAVTFVDNHDTQPGEALESFVQGWFKPLAYATILTREQGYPQVFYGDYYGIPSDGVPSYRQQIDPLLAARQQYAYGRQHDYFDHWDVIGWTREGNASHPNSGLATIMSDGPGGSKWMYVGRQKAGEVWHDMTGNRSGTVTINQDGWGHFFVNGGSVSVWVKR

SEQ ID NO: 43211 - protein, 480 aa, Bacillus amyloliquefaciens
NGTLMQYFEWYTPNDGQHWKRLQNDAEHLSDIGITAVWIPPAYKGTSQADVGYGAYDLYDLGEFHQKGTVRTKYGTKGELQSAIKSLHSRDINVYGDVVINHKGGADATEDVTAVEVDPADRNRVISGEHLIKAWTHFHFPGRGSTYSDFKWHWYHFDGTDWDESRKLNRIYRFQGKAWDWEVSNENGNYDYLMYADFDYDNPDVAAEIKRWGTWYANELQLDGFRLDAVKHIKFSFLRDWVNHVREKTGKEMFTVAEYWQNDLGALENYLNKTNFNHSVFDVPLHYQFHAASTQGGGYDMRKLLNGTVVSKHPLKSVTFVDNHDTQPGQSLESTVQTWFKPLAYAFILTREAGFPQVFYGDMYGTKGDSQREIPALKHKIEPILKARKQYAYGAQHDYFDHHDIVGWTREGDSSVANSGLAALITDGPGGAKRMYVGRQNAGETWHDITGNRSEPVVINSEGWGEFHVNGGSVSIYVQR

SEQ ID NO: 43212 - protein, 480 aa, Bacillus licheniformis
NGTLMQYFEWYTPNDGQHWKRLQNDAEHLSDIGITAVWIPPAYKGLSQSDNGYGPYDLYDLGEFQQKGTVRTKYGTKGELQSAIKSLHSRDINVYGDVVINHKGGADATEDVTAVEVDPADRNRVISGEHRIKAWTHFHFPGRGSTYSDFKWHWYHFDGTDWDESRKLNRIYKFQGKAWDWEVSNENGNYDYLMYADIDYDHPDVAAEIKRWGTWYANELQLDGFRLDAVKHIKFSFLRDWVNHVREKTGKEMFTVAEYWQNDLGALENYLNKTNFNHSVFDVPLHYQFHAASTQGGGYDMRKLLNSTVVSKHPLKAVTFVDNHDTQPGQSLESTVQTWFKPLAYAFILTRESGYPQVFYGDMYGTKGDSQREIPALKHKIEPILKARKQYAYGAQHDYFDHHDIVGWTREGDSSVANSGLAALITDGPGGAKRMYVGRQNAGETWHDITGNRSEPVVINSEGWGEFHVNGGSVSIYVQR

SEQ ID NO: 43213 - protein, 480 aa, Bacillus amyloliquefaciens
NGTLMQYFEWYTPNDGQHWKRLQNDAEHLSDIGITAVWIPPAYKAISQADVGYGAYDLYDLGEFHQKGTVRTKYGTKGELQSAIKSLHSRDINVYGDVVINHKAGADATEDVTAVEVDPADRNRVISGEYLIKAWTHFHFPGRGSTYSDFKWYWYHFDGTDWDESRKLNRIYLFQGKTWDWEVSNEFGNYDYLMYADYDYDYPDVVAEITRWGTWYANELQLDGFRLDAVKHIKFSFLRDWVNHVREKTGKEMFTVAEYWSNDLGALENYLNKTNFNHSVFDVPLHYQFHAASTQGGGYDMRKLLNGTVVSKHPLKSVTFVDNHDTQPGQSLESTVQTWFKPLAYAFILTRESGYPSVFYGDMYGTKGDSQREIPALKHKIEPILKARKQYAYGAQHDYFDHHDIVGWTREGVSSVANSGLAALITDGPGGAKWMYVGRQNAGETWHDITGNRSEPVVINSEGWGEFHVNGGSVSIYVQR

SEQ ID NO: 43214 - protein, 478 aa, Bacillus sp. (in: firmicutes)
NGTIMQYFEWNVPNDGQHWNRLHNNAQNLKNAGITAIWIPPAWKGTSQSDTGYGAYDLYDLGEFNQKGTVRTKYGTKAELERAIRSLKANGIQVYGDVVMNHKAGADFTERVQAVEVNPQNRNQEVSGTYQIEAWTGFNFPGRGNQHSSFKWRWYHFDGTDWDESRKLNRIYKFRGHKAWDWEVDTEFGNYDYLMYADLDMDHPEVINELNRWGVWYANTLNLDGFRLDAVKHIKFSFMRDWLGHVRGQTGKNLFAVAEYWKNDLGALENYLSKTNWTMSAFDVPLHYNLYQASNSSGNYDMRNLLNGTLVQRHPSHAVTFVDNHDTQPGEALESFVQGWFKPLAYATILTREQGYPQVFYGDYYGIPSDGVPSYRQQIDPLLAARQQYAYGRQHDYFDHWDVIGWTREGNASHPNSGLATIMSDGPGGSKWMYVGRQKAGEVWHDMTGNRSGTVTINQDGWGHFFVNGGSVSVWVKR

SEQ ID NO: 43215 - protein, 478 aa, Bacillus sp. (in: firmicutes)
NGTIMQYFEWNVPNDGQHWNRLHNNAQNLKNAGITAIWIPPAWKGTSQSDTGYGAYDLYDLGEFNQKGTVRTKYGTKAELERAIRSLKANGIQVYGDVVMNHKAGADFTERVQAVEVNPQNRNQEVSGTYQIEAWTGFNFPGRGNQHSSFKWRWYHFDGTDWDESRKLNRIYKFRGKKAWDWEVDTEFGNYDYLMYADLDMDHPEVINELNRWGVWYANTLNLDGFRLDAVKHIKFSFMRDWLGHVRGQTGKNLFAVAEYWKNDLGALENYLSKTNWTMSAFDVPLHYNLYQASNSSGNYDMRNLLNGTLVQRHPSHAVTFVDNHDTQPGEALESFVQGWFKPLAYATILTREQGYPQVFYGDYYGIPSDGVPSYRQQIDPLLAARQQYAYGRQHDYFDHWDVIGWTREGNASHPNSGLATIMSDGPGGSKWMYVGRQKAGEVWHDMTGNRSGTVTINQDGWGHFFVNGGSVSVWVKR

SEQ ID NO: 43216 - protein, 477 aa, Bacillus sp. (in: firmicutes)
NGTIMQYFEWHVPNDGQHWNRLHNNAQNLKNAGITAIWIPPAWKGTSQSDTGYGAYDLYDLGEFNQKGTVRTKYGTKAELERAIRSLKANGIQVYGDVVMNHKAGADFTERVQAVEVNPQNRNQEVSGTYQIEAWTGFNFPGRGNQHSSFKWRWYHFDGTDWDESRKLNRIYKFRGKAWDWEVDTEFGNYDYLMYADLDMDHPEVINELNRWGVWYANTLNLDGFRLDAVKHIKFSFMRDWLGHVRGQTGKNLFAVAEYWKNDLGALENYLSKTNWTMSAFDVPLHYNLYQASNSSGNYDMRNLLNGTLVQRHPSHAVTFVDNHDTQPGEALESFVQGWFKPLAYATILTREQGYPQVFYGDYYGIPSDGVPSYRQQIDPLLAARQQYAYGRQHDYFDHWDVIGWTREGNASHPNSGLATIMSDGPGGSKWMYVGRQKAGEVWHDMTGNRSGTVTINQDGWGHFFVNGGSVSVWVKR

SEQ ID NO: 43217 - protein, 477 aa, Bacillus sp.
NETMMQYFEWDLPNDGTLWTKVKNEAANLSSLGITALWLPPAYKGTSQSDVGYGVYDLYDLGEFNQKGTIRTKYGTKTQLERAIRSLKANGIQVYADVVFNHKAGADGTEFVDAVEVDPSNRNQEVSGTYQIEAWTKFDFPGRGNTYSSFKWRWYHFDGTDWDESRKLNRIYKFRGKAWDWEVDTENGNYDYLMFADLDMDHPEVVTELKNWGTWYVNTTNIDGFRLDAVKHIKYSFFPDWLGHVRGQTGKNLFAVGEFWSYDVNKLHNYITKTNGSMSLFDAPLHNNFYTASKSSGYFDMRYLLNNTLMKDQPSLAVTLVDNHDTQPGEALESFVQGWFKPLAYAFILTRQEGYPCVFYGDYYGIPKYNIPGLKSKIDPLLIARRDYAYGTQRDYIDHQDIIGWTREGIDTKPNSGLAALITDGPGGSKWMYVGKKHAGKVFYDLTGNRSDTVTINADGWGEFKVNGGSVSIWVAK

SEQ ID NO: 43218 - protein, 477 aa, Bacillus sp.
NETMMQYFEWDLPNDGTLWTKVKNEAANLSSLGITALWLPPAYKGTSQSDVGYGVYDLYDLGEFNQKGTIRTKYGTKTQYIQAIQAAKAAGMQVYADVVFNHKAGADQTEFVDAVEVDPSNRNQEVSGTYQIEAWTKFDFPGRGNTYSSFKWRWYHFDGTDWDESRKLNRIYKFRGKAWDWEVDTENGNYDYLMFADLDMDHPEVVTELKNWGTWYVNTTNIDGFRLDAVKHIKFSFMRDWLTYVRNQTGKNLFAVGEFWSYDVNKLHNYITKTNGSMSLFDAPLHNNFYTASKSSGYFDMRNLLNGTLVQRHPSHAVTLVDNHDTQPGQSLQSWVEPWFKPLAYAFILTRQEGYPCVFYGDYYGIPKYNIPGLKSKIDPLLIARRDYAYGTQRDYIDHQDIIGWTREGIDTKPNSGLAALITDGPGGSKWMYVGKKHAGKVFYDLTGNRSDTVTINADGWGEFKVNGGSVSIWVAK

SEQ ID NO: 43219 - protein, 477 aa, Bacillus sp.
NETMMQYFEWDLPNDGTLWTKVKNEAANLSSLGITALWLPPAYKGTSQSDVGYGVYDLYDLGEFNQKGTIRTKYGTKTQYIQAIQAAKAAGMQVYADVVFNHKAGADQTEFVDAVEVDPSNRNQEVSGTYQIEAWTKFDFPGRGNTYSSFKWRWYHFDGTDWDESRKLNRIYKFRGKAWDWEVDTENGNYDYLMFADLDMDHPEVVTELKNWGTWYVNTTNIDGFRLDAVKHIKFSFMRDWLTYVRNQTGKNLFAVGEFWSYDVNKLHNYITKTNGSMSLFDAPLHNNFYTASKSSGYFDMRYLLNGTLVQRHPSHAVTLVDNHDTQPGQSLQSWVEPWFKPLAYAFILTRQEGYPCVFYGDYYGIPKYNIPGLKSKIDPLLIARRDYAYGTQRDYIDHQDIIGWTREGIDTKPNSGLAALITDGPGGSKWMYVGKKHAGKVFYDLTGNRSDTVTINADGWGEFKVNGGSVSIWVAK

SEQ ID NO: 43220 - protein, 477 aa, Bacillus sp.
NETMMQYFEWDLPNDGTLWNRLHNNAQNLKNAGITALWLPPAYKGTSQSDVGYGVYDLYDLGEFNQKGTIRTKYGTKTQYIQAIQAAKAAGMQVYADVVFNHKAGADQTEFVDAVEVDPSNRNQEVSGTYQIEAWTKFDFPGRGNTYSSFKWRWYHFDGTDWDESRKLNRIYKFRGKAWDWEVDTENGNYDYLMFADLDMDHPEVVTELKNWGTWYVNTTNIDGFRLDAVKHIKFSFMRDWLTYVRNQTGKNLFAVGEFWSYDVNKLHNYITKTNGSMSLFDAPLHNNFYTASKSSGYFDMRYLLNNTLMKDQPSLAVTLVDNHDTQPGQSLQSWVEPWFKPLAYAFILTRQEGYPCVFYGDYYGIPSDGVPGLKSKIDPLLIARRDYAYGTQRDYIDHQDIIGWTREGIDTKPNSGLAALITDGPGGSKWMYVGKKHAGKVFYDLTGNRSDTVTINADGWGEFKVNGGSVSIWVAK

SEQ ID NO: 43221 - protein, 477 aa, Bacillus sp.
NETMMQYFEWDLPNDGTLWTKVKNEAANLSSLGITALWLPPAYKGTSQSDVGYGVYDLYDLGEFNQKGTIRTKYGTKTQYIQAIQAAKAAGMQVYADVVFNHKAGADGTEFVDAVEVDPSNRNQEVSGTYQIEAWTKFDFPGRGNTYSSFKWRWYHFDGTDWDESRKLNRIYKFRGKAWDWEVDTENGNYDYLMFADLDMDHPEVVTELKNWGTWYVNTTNIDGFRLDAVKHIKFSFMRDWLTYVRNQTGKNLFAVGEFWSYDVNKLHNYITKTNGSMSLFDAPLHNNFYTASKSSGYFDMRNLLNGTLVQRHPSHAVTLVDNHDTQPGQSLQSWVEPWFKPLAYAFILTRQEGYPCVFYGDYYGIPKYNIPGLKSKIDPLLIARRDYAYGTQRDYIDHQDIIGWTREGIDTKPNSGLAALITDGPGGSKWMYVGKKHAGKVFYDLTGNRSDTVTINADGWGEFKVNGGSVSIWVAK

SEQ ID NO: 43222 - protein, 480 aa, Bacillus amyloliquefaciens
NGTLMQYFEWYTPNDGQHWKRLQNDAEHLSDIGITAVWIPPAYKAISQADVGYGAYDLYDLGEFHQKGTVRTKYGTKGELQSAIKSLHSRDINVYGDVVINHKAGADATEDVTAVEVDPADRNRVISGEYLIKAWTHFHFPGRGSTYSDFKWYWYHFDGTDWDESRKLNRIYLFQGKTWDWPVSNEFGNYDYLMYADFDYDHPDVVAEIKRWGTWYANELQLDGFRLDAVKHIKFSFLRDWVNHVREKTGKEMFTVAEYWSNDLGALENYLNKTNFNHSVFDVPLHYQFHAASTQGGGYDMRKLLNGTVVSKHPLKSVTFVDNHDTQPGQSLESTVQTWFKPLAYAFILTRESGYPSVFYGDMYGTKGDSQREIPALKHKIEPILKARKQYAYGAQHDYFDHHDIVGWTREGDSSVANSGLAALITDGPGGAKWMYVGRQNAGETWHDITGNRSEPVVINSEGWGEFHVNGGSVSIYVQR

SEQ ID NO: 43223 - protein, 478 aa, Bacillus sp. (in: firmicutes)
NGTMMQYFEWNVPNDGQHWNRLHNNAQNLKNAGITAIWIPPAWKGTSQNDVGYGAYDLYDLGEFNQKGTVRTKYGTKAELERAIRSLKANGIQVYGDVVMNHKGGADFTERVQAVEVNPQNRNQEVSGTYQIEAWTGFNFPGRGNQHSSFKWRWYHFDGTDWDQSRQLANRIYKFRGKAWDWEVDTEFGNYDYLMYADVDMDHPEVINELNRWGVWYANTLNLDGFRLDAVKHIKFSFMRDWLGHVRGQTGKNLFAVAEYWQNDLGKLENYLSKTNWTMSAFDVPLHYNLYQASNSSGNYDMRNLLNGTLVQRHPSHAVTFVDNHDTQPGEALESFVQGWFKPLAYATILTREQGYPSVFYGDYYGIPSDGVPSYRQQIDPLLKARQQYAYGRQHDYFDHWDVIGWTREGNASHPNSGLATIMSDGPGGSKWMYVGRQKAGEVWHDMTGNRSGTVTINQDGWGHFFVNGGSVSVWVKR

SEQ ID NO: 43224 - protein, 478 aa, Bacillus sp. (in: firmicutes)
NGTMMQYFEWNVPNDGQHWNRLHNNAQNLKNAGITAIWIPPAWKGTSQNDVGYGAYDLYDLGEFNQKGTVRTKYGTKAELERAIRSLKANGIQVYGDVVMNHKGGADFTERVQAVEVNPQNRNQEVSGTYQIEAWTGFNFPGRGNQHSSFKWRWYHFDGTDWDQSRQLANRIYKFRGKAWDWEVDTEFGNYDYLMYADVDMDHPEVINELNRWGVWYANTLNLDGFRLDAVKHIKFSFMRDWLGHVRGQTGKNLFAVAEYWKNDLGALENYLSKTNWTMSAFDVPLHYNLYQASNSSGNYDMRNLLNGTLVQRHPSHAVTFVDNHDTQPGEALESFVQGWFKPLAYATILTREQGYPCVFYGDYYGIPSDGVPSYRQQIDPLLKARQQYAYGRQHDYFDHWDVIGWTREGNASHPNSGLATIMSDGPGGSKWMYVGRQKAGEVWHDMTGNRSGTVTINQDGWGHFFVNGGSVSVWVKR

SEQ ID NO: 43225 - protein, 478 aa, Bacillus sp. (in: firmicutes)
NGTMMQYFEWNVPNDGQHWNRLHNNAQNLKNAGITAIWIPPAWKGTSQNDVGYGAYDLYDLGEFNQKGTVRTKYGTKAELERAIRSLKANGIQVYGDVVMNHKGGADFTERVQAVEVNPQNRNQEVSGTYQIEAWTGFNFPGRGNQHSSFKWRWYHFDGTDWDQSRQLANRIYKFRGKAWDWEVDTEFGNYDYLMYADVDMDHPEVINELNRWGVWYANTLNLDGFRLDAVKHIKFSFMRDWLGHVRGQTGKNLFAVAEYWKNDLGALENYLSKTNWTMSAFDAPLHYNLYQASNSSGNYDMRNLLNGTLVQRHPSHAVTFVDNHDTQPGEALESFVQGWFKPLAYATILTREQGYPSVFYGDYYGIPSDGVPSYRQQIDPLLKARQQYAYGRQHDYFDHWDVIGWTREGNASHPNSGLATIMSDGPGGSKWMYVGRQKAGEVWHDMTGNRSGTVTINQDGWGHFFVNGGSVSVWVKR

SEQ ID NO: 43226 - protein, 480 aa, Bacillus licheniformis
NGTLMQYFEWYMPNDGQHWRRLQNDSAYLAEHGITAVWIPPAYKAISQADVGYGAYDLYDLGEFHQKGTVRTKYGTKGELQSAIKSLHSRDINVYGDVVINHKGGADATEDVTAVEVDPADRNRVISGEHLIKAWTHFHFPGRGSTYSDFKWHWYHFDGTDWDESRKLNRIYKFQGKAWDWEVSNENGNYDYLMYADIDYDHPDVAAEIKRWGTWYANELQLDGFRLDAVKHIKFSFLRDWVNHVREKTGKEMFTVAEYWQNDLGALENYLNKTNFNHSVFDVPLHYQFHAASTQGGGYDMRKLLNGTVVSKHPLKSVTFVDNHDTQPGQSLESTVQTWFKPLAYAFILTRESGYPQVFYGDMYGTKGDSQREIPALKHKIEPILKARKQYAYGAQHDYFDHHDIVGWTREGDSSVANSGLAALITDGPGGAKRMYVGRQNAGETWHDITGNRSEPVVINSEGWGEFHVNGGSVSIYVQR

SEQ ID NO: 43227 - protein, 482 aa, Bacillus sp. YR288
NGTMMQYFEWYVPNDGQHWNRLRNDAAYLKSIGVSAIWTPPAYKGTSQNDVGYGAYDLYDLGEFNQKGTIRTKYGTKAELKSAVSTLKSNGIQVYGDVVMNHKGGADYTENVTAVEVNPSNRNQETSDEYTIQAWTWFNFPGRGTTHSPFKWQWYHFDGTDWDQSRNASRIFKFRGTGKAWDWEVSSENGNYDYLMYADLDFDHPDVRNEMKNWGVWYANEVGLDGFRLDAVKHIKHSYLGDWVNHVRTKTGKEMFTVAEYWQNDVNAINNYLAKVNYNHSVFDAPLHYNFHYASQSGGNYDMRNLLNGTVVAAHPTKAVTLVENHDSQPGQSLESVVQPWFKPLAYAFILTRAEGYPSIFYGDMYGTKGNSSYEIPALKTKIEPLLKARKDYAYGTQHNYMDHWDVIGWTREGDSTKEKSGLATLVTDGAGGSKWMYVGKQNAGEVWYDITGNRTDKITINTDGWGNFQVNGGSVSVYVQQ

SEQ ID NO: 43228 - protein, 482 aa, Bacillus sp. YR288
NGTMMQYFEWYVPNDGQHWNRLRNDAAYLKSIGVSAIWTPPAYKGTSQNDVGYGAYDLYDLGEFNQKGTIRTKYGTKAELKSAVSTLKSNGIQVYGDVVMNHKGGADYTENVTAVEVNPSNRNQETSDEYTIQAWTGFNFPGRGTTHSPFKWQWYHFDGTDWDQSRNASRIFKFRGTGKAWDWEVSSENGNYDYLMYADLDFDHPDVLNEMKNWGVWYANEVGLDGFRLDAVKHIKHSYLGDWVNHVRTKTGKEMFTVAEYWQNDVNAINNYLAKVNYNHSVFDAPLHYNFHYASQSGGNYDMRNLLNGTVVAAHPTKAVTLVENHDSQPGQSLESVVQPWFKPLAYAFILTRAEGYPSIFYGDMYGTKGNSSYEIPALKTKIEPLLKARKDYAYGTQHNYMDHWDVIGWTREGDSTKEKSGLATLVTDGAGGSKWMYVGKQNAGEVWYDITGNRTDKITINTDGWGNFQVNGGSVSVYVQQ

SEQ ID NO: 43229 - protein, 480 aa, Bacillus licheniformis
NGTLMQYFEWYMPNDGQHWRRLQNDSAYLAEHGITAVWIPPAYKGTSQADVGYGAYDLYDLGEFHQKGTVRTKYGTKGELQSAIKSLHSRDINVYGDVVINHKGGADATEDVTAVEVDPADRNRVISGEHLIKAWTHFHFPGRGSTYSDFKWHWYHFDGTDWDESRKLNRIYKFQGKAWDWEVSNENGNYDYLMYADIDYDHPDVAAEIKRWGTWYANELQLDGFRLDAVKHIKFSFLRDWVNHVREKTGKEMFTVAEYWQNDLGALENYLNKTNFNHSVFDVPLHYQFHAASTQGGGYDMRKLLNGTVVSKHPLKSVTFVDNHDTQPGQSLESTVQTWFKPLAYAFILTRESGYPQVFYGDMYGTKGDSQREIPALKHKIEPILKARKQYAYGAQHDYFDHWDIVGWTREGDSSVANSGLAALITNGPGGAKRMYVGRQNAGETWHDITGNRSEPVVINSEGWGEFHVNGGSVSIYVQR

SEQ ID NO: 43230 - protein, 480 aa, Bacillus licheniformis
NGTLMQYFEWYMPNDGQHWRRLQNDSAYLAEHGITAVWIPPAYKGTSQADVGYGAYDLYDLGEFHQKGTVRTKYGTKGELQSAIKSLHSRDINVYGDVVINHKGGADATEDVTAVEVDPADRNRVISGEHLIKAWTHFHFPGRGSTYSDFAWHWYHFDGTDWDESRKLNRIYLFQGKAWDWEVSNENGNYDYLMYADYDYDYPDVAAEITRWGTWYANELQLDGFRLDAVKHIKFSFLRDWVNHVREKTGKPMFTVAEYWQNDLGALENYLNKTNFNHSVFDVPLHYQFHAASTQGGGYDMRKLLNGTVVSKHPLKSVTFVDNHDTQPGQSLESTVQTWFKPLAYAFILTRESGYPSVFYGDMYGTKGDSQREIPALKHKIEPILKARKQYAYGAQHDYFDHHDIVGWTREGVSSVANSGLAALITDGPGGAKWMYVGRQNAGETWHDITGNRSEPVVINSEGWGEFHVNGGSVSIYVQR

SEQ ID NO: 43231 - protein, 480 aa, Bacillus licheniformis
NGTLMQYFEWYMPNDGQHWRRLQNDSAYLAEHGITAVWIPPAYKGTSQADVGYGAYDLYDLGEFHQKGTVRTKYGTKGELQSAIKSLHSRDINVYGDVVINHKGGADATEDVTAVEVDPADRNRVISGEHLIKAWTHFHFPGRGSTYSDFKWHWYHFDGTDWDESRKLNRIYKFQGKAWDWPVSNENGNYDYLMYADYDYDHPDVAAEIKRWGTWYANELQLDGFRLDAVKHIKFSFLRDWVNHVREKTGKEMFTVAEYWQNDLGALENYLNHTNFNHSVFDVPLHYQFHAASTQGGGYDMRKLLNGTVVSKHPLKSVTFVDNHDTQPGQSLESTVQTWFKPLAYAFILTRESGYPQVFYGDMYGTKGDSQREIPALKHKIEPILKARKQYAYGAQHDYFDHHDIVGWTREGDSSVANSGLAALITDGPGGAKRMYVGRQNAGETWHDITGNRSEPVVINSEGWGEFHVNGGSVSIYVQR

SEQ ID NO: 43232 - protein, 482 aa, Bacillus sp. YR288
NGTMMQYFEWYVPNDGQHWNRLRNDAAYLKSIGVSAIWTPPAYKGTSQNDVGYGAYDLYDLGEFNQKGTIRTKYGTKAELKSAVSTLKSNGIQVYGDVVMNHKGGADYTENVTAVEVNPSNRYQEISDEYTIQAWTGFNFPGRGTTHSPFKWQWYHFDGTDWDQSRNASRIFKFRGTGKAWDWEVSSENGNYDYLMYADLDFDHPDVRNEMKNWGVWYANEVGLDGFRLDAVKHIKHSYLGDWVNHVRTKTGKEMFTVAEYWQNDVNAINNYLAKVNYNHSVFDAPLHYNFHYASQSGGNYDMRNLLNGTVVAAHPTKAVTLVENHDSQPGQSLESVVQPWFKPLAYAFILTRAEGYPSIFYGDMYGTKGNSSYEIPALKTKIEPLLKARKDYAYGTQHNYMDHWDVIGWTREGDSTKEKSGLATLVTDGAGGSKWMYVGKQNAGEVWYDITGNRTDKITINTDGWGNFQVNGGSVSVYVQQ

SEQ ID NO: 43233 - protein, 482 aa, Bacillus sp. YR288
NGTMMQYFEWYVPNDGQHWNRLRNDAAYLKSIGVSAIWTPPAYKGTSQNDVGYGAYDLYDLGEFNQKGTIRTKYGTKAELKSAVSTLKSNGIQVYGDVVMNHKGGADYTENVTAVEVNPSNRNQETSDEYTIQAWTGFNFPGRGTTHSPFKWQWYHFDGTDWDQSRNASRIFKFRGTGKAWDWEVSSENGNYDYLMYADLDYDHPDVRNEMKNWGVWYANEVGLDGFRLDAVKHIKFSYLGDWVNHVRTKTGKEMFTVAEYWQNDVNAINNYLAKVNYNHSVFDAPLHYNFHYASQSGGNYDMRNLLNGTVVAAHPTKAVTLVENHDSQPGQSLESVVQPWFKPLAYAFILTRAEGYPSIFYGDMYGTKGNSSYEIPALKTKIEPLLKARKDYAYGTQHNYMDHWDVIGWTREGDSTKEKSGLATLVTDGAGGSKWMYVGKQNAGEVWYDITGNRTDKITINTDGWGNFQVNGGSVSVYVQQ

SEQ ID NO: 43234 - protein, 480 aa, Bacillus licheniformis
NGTLMQYFEWYMPNDGQHWKRLQNDSAYLAEHGITAVWIPPAYKGTSQADVGYGAYDLYDLGEFHQKGTVRTKYGTKGELQSAIKSLHSRDINVYGDVVINHKGGADATEDVTAVEVDPADRNRVISGEYLIKAWTHFHFPGRGSTYSDFKWYWYHFDGTDWDESRKLNRIYKFQGKYWDWEVSNENGNYDYLMYADIDYDHPDVVAEIKRWGTWYANELQLDGNRLDAVKHIKFSFLRDWVNHVREKTGKEMFTVAEYWQNDLGALENYLNKTNFNHSVFDVPLHYQFYAASTQGGGYDMRKLLNDTVVSKHPLKSVTFVDNHDTQPGQSLESTVQTWFKPLAYAFILTRESGYPQVFYGDMYGTKGDSQREIPALKHKIEPILKARKQYAYGAQHDYFDHHDIVGWTREGDSSVANSGLAALITDGPGGAKRMYVGRQNAGETWYDITGNRSEPVVINSEGWGEFHVNDGSVSIYVQR

SEQ ID NO: 43235 - protein, 482 aa, Bacillus sp. YR288
NGTMMQYFEWYVPNDGQHWNRLRNDAAYLKSIGVSAIWTPPAYKGTSQNDVGYGAYDLYDLGEFNQKGTIRTKYGTKAELKSAVSTLKSNGIQVYGDVVMNHKGGADYTENVTAVEVNPSNRNQETSDEYTIQAWTGFNFPGRGTTHSPFKWQWYHFDGTDWDQSRNASRIFKFRGTGKAWDWEVSSENGNYDYLMYADLDFDHPDVRNEMKNWGVWYANEVGLDGFRLDAVKHIKHSYLGDWVNHVRTKTGKEMFTVAEYWQNDVNAINNYLAKVNYNHSVFDAPLHYNFHYASQSGGNYDMRNLLNGTVVAAHPDKAVTLVENHDSQPGQSLESVVQPWFKPLAYAFILTRAEGYPSIFYGDMYGTKGNSSYEIPALKTKIEPLLKARKDYAYGTQHNYMDHWDVIGWTREGDSTKEKSGLATLVTDGAGGSKWMYVGKQNAGEVWYDITGNRTDKITINTDGWGNFQVNGGSVSVYVQQ

SEQ ID NO: 43236 - protein, 480 aa, Bacillus licheniformis
NGTLMQYFEWYMPNDGQHWRRLQNDSAYLAEHGITAVWIPPAYKGTSQADVGYGAYDLYDLGEFHQKGTVRTKYGTKGELQSAIKSLHSRDINVYGDVVINHKGGADATEDVTAVEVDPADRNRVISGEHLIKAWTHFHFPGRGSTYSDFKWHWYHFDGTDWDESRKLNRIYLFQGKAWDWEVSNENGNYDYLMYADYDYDYPDVAAEITRWGTWYANELQLDGFRLDAVKHIKFSFLRDWVNHVREKTGKPMFTVAEYWQNDLGALENYLNKTNFNHSVFDVPLHYQFHAASTQGGGYDMRKLLNGTVVSAHPLKSVTFVDNHDTQPGQSLESTVQTWFKPLAYAFILTRESGYPSVFYGDMYGTKGDSQREIPALKHKIEPILKARKQYAYGAQHDYFDHHDIVGWTREGVSSVANSGLAALITDGPGGAKWMYVGRQNAGETWHDITGNRSEPVVINSEGWGEFHVNGGSVSIYVQR

SEQ ID NO: 43237 - protein, 480 aa, Bacillus licheniformis
NGTLMQYFEWYMPNDGQHWRRLQNDSAYLAEHGITAVWIPPAYKGTSQADVGYGAYDLYDLGEFHQKGTVRTKYGTKGELQSAIKSLHSRDINVYGDVVINHKGGADATEDVTAVEVDPADRNRVISGEHLIKAWTHFHFPGRGSTYSDFKWHWYHFDGTDWDESRKLNRIYLFQGKAWDWPVSNENGNYDYLMYADIDYDHPDVAAEIKRWGTWYANELQLDGFRLDAVKHIKFSFLRDWVNHVREKTGKEMFTVAEYWQNDLGALENYLNKTNFNHSVFDVPLHYQFHAASTQGGGYDMRKLLNGTVVSKHPLKSVTFVDNHDTQPGQSLESTVQTWFKPLAYAFILTRESGYPQVFYGDMYGTKGDSQVEIPALKHKIEPILKARKQYAYGAQHDYFDHHDIVGWTREGDSSVANSGLAALITDGPGGAKRMYVGRQNAGETWHDITGNRSEPVVINSEGWGEFHVNGGSVSIYVQR

SEQ ID NO: 43238 - protein, 482 aa, Bacillus sonorensis
NGTLMQYFEWNLPNDGQHWKRLQNDAGYLSDIGITAVWIPPAYKGTSQADVGYGPYDLYDLGEFLQKGTVRTKYGMKTELQSAVGSLHSQNIQVYGDVVLNHKAGADLTEDVTAVEVNPGNRNQEISGEYRIKAWTGFNFPGRGSTYSDFKWHWYHFDGTDWDESRKLNRIYKFRGDGKAWDWEVSSENGNYDYLMYADVDYDHPDVVAEMKRWGTWYAKELQLDGFRLDAVKHIKFQFFPDWLSYVRSQTGKEMFTVAEYWQNNLGEIENYLQKTDFQHSVFDVPLHFNLQAASSHGGSYDMRNLLNGTVVSKHPLKAVTFVDNHDTQPGQSLESTVQTWFKPLAYAFILTREAGYPQVFYGDMYGTKGPTSREIPSLKSKCEPILKARKYYAYGTQHDYFDHPDAIGWTREGDQSVAASGLAALITDGPGGSKRMYVGRQHAGETWHDITGNRSDSVVINSDGWGEFYVNGGSVSIYVQR

SEQ ID NO: 43239 - protein, 480 aa, Bacillus licheniformis
NGTLMQYFEWYMPNDGQHWRRLQNDSAYLAEHGITAVWIPPAYKGTSQADVGYGAYDLYDLGEFHQKGTVRTKYGTKGELQSAIKSLHSRDINVYGDVVINHKGGADATEDVTAVEVDPADRNRVISGEHLIKAWTHFHFPGRGSTYSDFKWHWYHFDGTDWDESRKLNRIYLFQGKAWDWEVSNENGNYDYLMYADYDYDYPDVAAEITRWGTWYANELQLDGFRLDAVKHIKFSFLRDWVNHVREKTGKPMFTVAEYWQNDLGALENYLNKTNFNHSVFDVPLHYQFHAASTQGGGYDMRKLLNGTVVSSHPLKSVTFVDNHDTQPGQSLESTVQTWFKPLAYAFILTRESGYPSVFYGDMYGTKGDSQREIPALKHKIEPILKARKQYAYGAQHDYFDHHDIVGWTREGVSSVANSGLAALITDGPGGAKWMYVGRQNAGETWHDITGNRSEPVVINSEGWGEFHVNGGSVSIYVQR

SEQ ID NO: 43240 - protein, 482 aa, Bacillus sp. YR288
NGTMMQYFEWYVPNDGQHWNRLRNDAAYLKSIGVNAIWTPPAYKGTSQNDVGYGAYDLYDLGEFNQKGTIRTKYGTKAELKSAVSTLKSNGIQVYGDVVMNHKGGADYTENVTAVEVNPSNRNQETSDEYTIQAWTGFNFPGRGTTHSPFKWQWYHFDGTDWDQSRNASRIFKFRGTGKAWDWEVSSENGNYDYLMYADLDFDHPDVRNEMKNWGVWYANEVGLDGFRLDAVKHIKHSYLGDWVNHVRTKTGKEMFTVAEYWQNDVNAINNYLAKVNYNHSVFDAPLHYNFHYASQSGGNYDMRNLLNGTVVAAHPEKAVTLVENHDSQPGQSLESVVQPWFKPLAYAFILTRAEGYPSIFYGDMYGTKGNSSYEIPALKTKIEPLLKARKDYAYGTQHNYMDHWDVIGWTREGDSTKEKSGLATLVTDGAGGSKWMYVGKQNAGEVWYDITGNRTDKITINTDGWGNFQVNGGSVSVYVQQ

SEQ ID NO: 43241 - protein, 480 aa, Bacillus licheniformis
NGTLMQYFEWYMPNDGQHWRRLQNDSAYLAEHGITAVWIPPAYKGTSQADVGYGAYDLYDLGEFHQKGTVRTKYGTKGELQSAIKSLHSRDINVYGDVVINHKGGADATEDVTAVEVDPADRNRVISGEHLIKAWTHFHFPGRGSTYSDFKWHWYHFDGTDWDESRKLNRIYLFQGKAWDWPVSNENGNYDYLMYADYDYDYPDVAAEITRWGTWYANELQLDGFRLDAVKHIKFSFLRDWVNHVREKTGKEMFTVAEYWQNDLGALENYLNKTNFNHSVFDVPLHYQFHAASTQGGGYDMRKLLNGTVVSYHPLKSVTFVDNHDTQPGQSLESTVQTWFKPLAYAFILTRESGYPSVFYGDMYGTKGDSQREIPALKHKIEPILKARKQYAYGAQHDYFDHHDIVGWTREGVSSVANSGLAALITDGPGGAKWMYVGRQNAGETWHDITGNRSEPVVINSEGWGEFHVNGGSVSIYVQR

SEQ ID NO: 43242 - protein, 482 aa, Bacillus sp. YR288
NGTMMQYFEWYVPNDGQHWNRLRNDAAYLKSIGVSAIWTPPAYKGTSQNDVGYGAYDLYDLGEFNQKGTIRTKYGTKAELKSAVSTLKSNGIQVYGDVVMNHKGGADYTENVTAVEVNPSNRNQETSDEYTIQAWTGFNFPGRGTTHSPFKWQWYHFDGTDWDQSRNASRIFKFRGTGKAWDWEVSSENGNYDYLMYADLDFDHPDVRNEMKNWGVWYANEVGLDGFRLDAVKHIKFQFLGDWVNHVRTKTGKEMFTVAEYWQNDVNAINNYLAKVNYNHSVFDAPLHYNFHYASQSGGNYDMRNLLNGTVVAAHPTKAVTLVENHDSQPGQSLESVVQPWFKPLAYAFILTRAEGYPSIFYGDMYGTKGNSSYEIPALKTKIEPLLKARKDYAYGTQHNYMDHWDVIGWTREGDSTKEKSGLATLVTDGAGGSKWMYVGKQNAGEVWYDITGNRTDKITINTDGWGNFQVNGGSVSVYVQQ

SEQ ID NO: 43243 - protein, 480 aa, Bacillus licheniformis
NGTLMQYFEWYMPNDGQHWRRLQNDSAYLAEHGITAVWIPPAYKGTSQADVGYGAYDLYDLGEFHQKGTVRTKYGTKGELQSAIKSLHSRDINVYGDVVINHKGGADATEDVTAVEVDPADRNRVISGEHLIKAWTHFHFPGRGSTYSDFKWHWYHFDGTDWDESRKLNRIYLFQGKAWDWEVSNENGNYDYLMYADYDYDYPDVAAEITRWGTWYANELQLDGFRLDAVTHIKFSFLRDWVNHVREKTGKPMFTVAEYWQNDLGALENYLNKTNFNHSVFDVPLHYQFHAASTQGGGYDMRKLLNGTVVSKHPLKSVTFVDNHDTQPGQSLESTVQTWFKPLAYAFILTRESGYPSVFYGDMYGTKGDSQREIPALKHKIEPILKARKQYAYGAQHDYFDHHDIVGWTREGVSSVANSGLAALITDGPGGAKWMYVGRQNAGETWHDITGNRSEPVVINSEGWGEFHVNGGSVSIYVQR

SEQ ID NO: 43244 - protein, 480 aa, unidentified
NGTLMQYFEWYMPNDGQHWKRLQNDSAYLAEHGITAVWIPPAYKGTSQDDVGYGAYDLYDLGEFHQKGTVRTKYGTKGELQSAINSLHSRDINVYGDVVINHKGGADATEDVTAVEVDPADRNRVTSGEQRIKAWTHFQFPGRGSTYSDFKWHWYHFDGTDWDESRKLNRIYKFQGKAWDWEVSNVNGNYDYLMYADIDYDHPDATAEIKRWGTWYANELQLDGFRLDAVKHIKFSFLRDWVNHVREKTGKEMFTVAEYWQNDLGALENYLNKTNFNHSVFDVPLHYQFHAASTQGGGYDMRKLLNGTVVSKHPVKAVTFVDNHDTQPGQSLESTVQTWFKPLAYAFILTREAGYPQIFYGDMYGTKGASQREIPALKHKIEPILKARIQYAYGAQHDYFDHHDIVGWTREGDSSVANSGLAALITDGPGGTKRMYVGRQNAGETWHDITGNRSDSVVINAEGWGEFHVNGGSVSIYVQR

SEQ ID NO: 43245 - protein, 480 aa, Bacillus licheniformis
NGTLMQYFEWYMPNDGQHWRRLQNDSAYLAEHGITAVWIPPAYKGTSQADVGYGAYDLYDLGEFHQKGTVRTKYGTKGELQSAIKSLHSRDINVYGDVVINHKGGADATEDVTAVEVDPADRNRVISGEHLIKAWTHFHFPGRGSTYSDFKWHWYHFDGTDWDESRKLNRIYKFQGKAWDWPVSNENGNYDYLMYADYDYDHPDVAAEIKRWGTWYANELQLDGFRLDAVKHIKFSFLRDWVNHVREKTGKEMFTVAEYWQNDLGALENYLNWTNFNHSVFDVPLHYQFHAASTQGGGYDMRKLLNGTVVSKHPLKSVTFVDNHDTQPGQSLESTVQTWFKPLAYAFILTRESGYPQVFYGDMYGTKGDSQREIPALKHKIEPILKARKQYAYGAQHDYFDHHDIVGWTREGDSSVANSGLAALITDGPGGAKRMYVGRQNAGETWHDITGNRSEPVVINSEGWGEFHVNGGSVSIYVQR

SEQ ID NO: 43246 - protein, 480 aa, Bacillus licheniformis
NGTLMQYFEWYMPNDGQHWRRLQNDSAYLAEHGITAVWIPPAYKGTSQADVGYGAYDLYDLGEFHQKGTVRTKYGTKGELQSAIKSLHSRDINVYGDVVINHKGGADATEDVTAVEVDPADRNRVISGEHLIKAWTHFHFPGRGSTYSDFKWHWYHFDGTDWDESRKLNRIYLFQGKAWDWEVSNENGNYDYLMYADYDYDYPDVAAEITRWGTWYANELQLDGFRLDAVKHIRFSFLRDWVNHVREKTGKPMFTVAEYWQNDLGALENYLNKTNFNHSVFDVPLHYQFHAASTQGGGYDMRKLLNGTVVSKHPLKSVTFVDNHDTQPGQSLESTVQTWFKPLAYAFILTRESGYPSVFYGDMYGTKGDSQREIPALKHKIEPILKARKQYAYGAQHDYFDHHDIVGWTREGVSSVANSGLAALITDGPGGAKWMYVGRQNAGETWHDITGNRSEPVVINSEGWGEFHVNGGSVSIYVQR

SEQ ID NO: 43247 - protein, 480 aa, Bacillus licheniformis
NGTLMQYFEWYMPNDGQHWRRLQNDSAYLAEHGITAVWIPPAYKGTSQADVGYGAYDLYDLGEFHQKGTVRTKYGTKGELQSAIKSLHSRDINVYGDVVINHKGGADATEDVTAVEVDPADRNRVISGEHLIKAWTHFHFPGRGSTYSDFKWHWYHFDGTDWDESRKLNRIYLFQGKAWDWPVSNENGNYDYLMYADYDYDYPDVAAEITRWGTWYANELQLDGFRLDAVKHIKFSFLRDWVNHVREKTGKEMFTVAEYWQNDLGALENYLNKTNFNHSVFDVPLHYQFHAASTQGGGYDMRKLLNGTVVSPHPLKSVTFVDNHDTQPGQSLESTVQTWFKPLAYAFILTRESGYPSVFYGDMYGTKGDSQREIPALKHKIEPILKARKQYAYGAQHDYFDHHDIVGWTREGVSSVANSGLAALITDGPGGAKWMYVGRQNAGETWHDITGNRSEPVVINSEGWGEFHVNGGSVSIYVQR

SEQ ID NO: 43248 - protein, 480 aa, Bacillus licheniformis
NGTLMQYFEWYMPNDGQHWRRLQNDSAYLAEHGITAVWIPPAYKGTSQADVGYGAYDLYDLGEFHQKGTVRTKYGTKGELQSAIKSLHSRDINVYGDVVINHKGGADATEDVTAVEVDPADRNRVISGEHLIKAWTHFHFPGRGSTYSDFHWHWYHFDGTDWDESRKLNRIYLFQGKAWDWEVSNENGNYDYLMYADYDYDYPDVAAEITRWGTWYANELQLDGFRLDAVKHIKFSFLRDWVNHVREKTGKPMFTVAEYWQNDLGALENYLNKTNFNHSVFDVPLHYQFHAASTQGGGYDMRKLLNGTVVSKHPLKSVTFVDNHDTQPGQSLESTVQTWFKPLAYAFILTRESGYPSVFYGDMYGTKGDSQREIPALKHKIEPILKARKQYAYGAQHDYFDHHDIVGWTREGVSSVANSGLAALITDGPGGAKWMYVGRQNAGETWHDITGNRSEPVVINSEGWGEFHVNGGSVSIYVQR

SEQ ID NO: 43249 - protein, 480 aa, Bacillus licheniformis
NGTLMQYFEWYMPNDGQHWRRLQNDSAYLAEHGITAVWIPPAYKGTSQADVGYGAYDLYDLGEFHQKGTVRTKYGTKGELQSAIKSLHSRDINVYGDVVINHKGGADATEDVTAVEVDPADRNRVISGEHLIKAWTHFHFPGRGSTYSDFKWHWYHFDGTDWDESRKLNRIYKFQGKAWDWPVSNENGNYDYLMYADIDYDHPDVAAEIKRWGTWYANELQLDGFRLDAVKHIKFSFLRDWVNHVREKTGKEMFTVAEYWQNDLGALENYLNYTNFNHSVFDVPLHYQFHAASTQGGGYDMRKLLNGTVVSKHPLKSVTFVDNHDTQPGQSLESTVQTWFKPLAYAFILTRESGYPQVFYGDMYGTKGDSQREIPALKHKIEPILKARKQYAYGAQHDYFDHHDIVGWTREGDSSVANSGLAALITDGPGGAKRMYVGRQNAGETWHDITGNRSEPVVINSEGWGEFHVNGGSVSIYVQR

SEQ ID NO: 43250 - protein, 480 aa, Bacillus licheniformis
NGTLMQYFEWYTPNDGQHWKRLQNDAEHLSDIGITAVWIPPAYKAISQADVGYGAYDLYDLGEFHQKGTVRTKYGTKGELQSAIKSLHSRDINVYGDVVINHKAGADATEDVTAVEVDPADRNRVISGEHLIKAWTHFHFPGRGSTYSDFKWYWYHFDGTDWDESRKLNRIYKFQGKTWDWEVSNEFGNYDYLMYADFDYDHPDVVAEIKRWGTWYANELQLDGFRLDAVKHIKFSFLRDWVNHVREKTGKEMFTVAEYWSNDLGALENYLNKTNFNHSVFDVPLHYQFHAASTQGGGYDMRKLLNGTVVSKHPLKSVTFVDNHDTQPGQSLESTVQTWFKPLAYAFILTRESGYPQVFYGDMYGTKGDSQREIPALKHKIEPILKARKQYAYGAQHDYFDHHDIVGWTREGDSSVANSGLAALITDGPGGAKRMYVGRNHAGETWHDITGNRSEPVVINSEGWGEFHVNGGSVSIYVQR

SEQ ID NO: 43251 - protein, 482 aa, Bacillus sp. YR288
NGTMMQYFEWYVPNDGQHWNRLRNDAAYLKSIGVSAIWTPPAYKGTSQNDVGYGAYDLYDLGEFNQKGTIRTKYGTKAELKSAVSTLKSNGIQVYGDVVMNHKGGADYTENVTAVEVNPSNRNQETSDEYTIQAWTGFNFPGRGTTHSPFKWQWYHFDGTDWDQSRNASRIFKFRGTGKAWDWEVSSENGNYDYLMYADLDFDHPDVRNEMKNWGVWYANEVGLDGFRLDAVKHIKHSYLWDWVNHVRTKTGKEMFTVAEYWQNDVNAINNYLAKVNYNHSVFDAPLHYNFHYASQSGGNYDMRNLLNGTVVAAHPTKAVTLVENHDSQPGQSLESVVQPWFKPLAYAFILTRAEGYPSIFYGDMYGTKGNSSYEIPALKTKIEPLLKARKDYAYGTQHNYMDHWDVIGWTREGDSTKEKSGLATLVTDGAGGSKWMYVGKQNAGEVWYDITGNRTDKITINTDGWGNFQVNGGSVSVYVQQ

SEQ ID NO: 43252 - protein, 480 aa, Bacillus licheniformis
NGTLMQYFEWYMPNDGQHWRRLQNDSAYLAEHGITAVWIPPAYKGTSQADVGYGAYDLYDLGEFHQKGTVRTKYGTKGELQSAIKSLHSRDINVYGDVVINHKGGADATEDVTAVEVDPADRNRVISGEHLIKAWTHFHFPGRGSTYSDFKWHWYHFDGTDWDESRKLNRIYLFQGKAWDWEVSNENGNYDYLMYADYDYDYPDVAAEITRWGTWYANELQLDGFRLDAVKHIKFSFLRDWVNHVREKTGKPMFTVAEYWQNDLGALENYLNKTNFNHSVFDVPLHYQFHAASTQGGGYDMRKLLNGTVVSYHPLKSVTFVDNHDTQPGQSLESTVQTWFKPLAYAFILTRESGYPSVFYGDMYGTKGDSQREIPALKHKIEPILKARKQYAYGAQHDYFDHHDIVGWTREGVSSVANSGLAALITDGPGGAKWMYVGRQNAGETWHDITGNRSEPVVINSEGWGEFHVNGGSVSIYVQR

SEQ ID NO: 43253 - protein, 480 aa, Bacillus licheniformis
NGTLMQYFEWYMPNDGQHWRRLQNDSAYLAEHGITAVWIPPAYKGTSQADVGYGAYDLYDLGEFHQKGTVRTKYGTKGELQSAIKSLHSRDINVYGDVVINHKGGADATEDVTAVEVDPADRNRVISGEHLIKAWTHFHFPGRGSTYSDFKWHWYHFDGTDWDESRKLNRIYLFQGKAWDWPVSNENGNYDYLMYADYDYDYPDVAAEITRWGTWYANELQLDGFRLDAVKHIKFSFLRDWVNHVREKTGKEMFTVAEYWQNDLGALENYLNKTNFNHSVFDVPLHYQFHAASTQGGGYDMRKLLNGTVVSEHPLKSVTFVDNHDTQPGQSLESTVQTWFKPLAYAFILTRESGYPSVFYGDMYGTKGDSQREIPALKHKIEPILKARKQYAYGAQHDYFDHHDIVGWTREGVSSVANSGLAALITDGPGGAKWMYVGRQNAGETWHDITGNRSEPVVINSEGWGEFHVNGGSVSIYVQR

SEQ ID NO: 43254 - protein, 482 aa, Bacillus sp. YR288
NGTMMQYFEWYVPNDGQHWNRLRNDAAYLKSIGVSAIWTPPAYKGTSQNDVGYGAYDLYDLGEFNQKGTIRTKYGTKAELKSAVSTLKSNGIQVYGDVVMNHKGGADYTENVTAVEVNPSNRNQETSDEYTIQAWTFFNFPGRGTTHSPFKWQWYHFDGTDWDQSRNASRIFKFRGTGKAWDWEVSSENGNYDYLMYADLDFDHPDVRNEMKNWGVWYANEVGLDGFRLDAVKHIKHSYLGDWVNHVRTKTGKEMFTVAEYWQNDVNAINNYLAKVNYNHSVFDAPLHYNFHYASQSGGNYDMRNLLNGTVVAAHPTKAVTLVENHDSQPGQSLESVVQPWFKPLAYAFILTRAEGYPSIFYGDMYGTKGNSSYEIPALKTKIEPLLKARKDYAYGTQHNYMDHWDVIGWTREGDSTKEKSGLATLVTDGAGGSKWMYVGKQNAGEVWYDITGNRTDKITINTDGWGNFQVNGGSVSVYVQQ

SEQ ID NO: 43255 - protein, 482 aa, Bacillus sp. YR288
NGTMMQYFEWYVPNDGQHWNRLRNDAAYLKSIGVSAIWTPPAYKGTSQNDVGYGAYDLYDLGEFNQKGTIRTKYGTKAELKSAVSTLKSNGIQVYGDVVMNHKGGADYTENVTAVEVNPSNRNQETSDEYTIQAWTGFNFPGRGTTHSPFKWQWYHFDGTDWDQSRNASRIFKFRGTGKAWDWPVSSENGNYDYLMYADLDFDHPDVRNEMKNWGVWYANEVGLDGFRLDAVKHIKFSFLGDWVNHVRTKTGKEMFTVAEYWQNDVNAINNYLAKVNYNHSVFDAPLHYNFHYASQSGGNYDMRNLLNGTVVAAHPTKAVTLVENHDSQPGQSLESVVQPWFKPLAYAFILTRAEGYPSIFYGDMYGTKGNSSYEIPALKTKIEPLLKARKDYAYGTQHNYMDHWDVIGWTREGDSTKEKSGLATLVTDGAGGSKWMYVGKQNAGEVWYDITGNRTDKITINTDGWGNFQVNGGSVSVYVQQ

SEQ ID NO: 43256 - protein, 480 aa, Bacillus licheniformis
NGTLMQYFEWYMPNDGQHWRRLQNDSAYLAEHGITAVWIPPAYKGTSQADVGYGAYDLYDLGEFHQKGTVRTKYGTKGELQSAIKSLHSRDINVYGDVVINHKGGADATEDVTAVEVDPADRNRVISGEHLIKAWTHFHFPGRGSTYSDFKWHWYHFDGTDWDESRKLNRIYKFQGKAWDWEVSNENGNYDYLMYADIDYDHPDVAAEIKRWGTWYANELQLDGFRLDAVKHIPFWFLRDWVNHVREKTGKEMFTVAEYWQNDLGALENYLNKTNFNHSVFDVPLHYQFHAASTQGGGYDMRKLLNGTVVSKHPLKSVTFVDNHDTQPGQSLESTVQTWFKPLAYAFILTRESGYPQVFYGDMYGTKGDSQREIPALKHKIEPILKARKQYAYGAQHDYFDHHDIVGWTREGDSSVANSGLAALITDGPGGAKRMYVGRQNAGETWHDITGNRSEPVVINSEGWGEFHVNGGSVSIYVQR

SEQ ID NO: 43257 - protein, 480 aa, Bacillus licheniformis
NGTLMQYFEWYMPNDGQHWRRLQNDSAYLAEHGITAVWIPPAYKGTSQADVGYGAYDLYDLGEFHQKGTVRTKYGTKGELQSAIKSLHSRDINVYGDVVINHKGGADATEDVTAVEVDPADRNRVISGEHLIKAWTHFHFPGRGSTYSDFKWHWYHFDGTDWDESRKLNRIYLFQGKAWDWEVSNENGNYDYLMYADYDYDYPDVAAEITRWGTWYANELQLDGFRLDAVKHIKFSFLRDWVNHVREKTGKPMFTVAEYWQNDLGALENYLNKTNFNHSVFDVPLHYQFHAASTQGGGYDMRKLLNGTVVSQHPLKSVTFVDNHDTQPGQSLESTVQTWFKPLAYAFILTRESGYPSVFYGDMYGTKGDSQREIPALKHKIEPILKARKQYAYGAQHDYFDHHDIVGWTREGVSSVANSGLAALITDGPGGAKWMYVGRQNAGETWHDITGNRSEPVVINSEGWGEFHVNGGSVSIYVQR

SEQ ID NO: 43258 - protein, 480 aa, Bacillus licheniformis
NGTLMQYFEWYMPNDGQHWRRLQNDSAYLAEHGITAVWIPPAYKGTSQADVGYGAYDLYDLGEFHQKGTVRTKYGTKGELQSAIKSLHSRDINVYGDVVINHKGGADATEDVTAVEVDPADRNRVISGEHLIKAWTHFHFPGRGSTYSDFSWHWYHFDGTDWDESRKLNRIYLFQGKAWDWEVSNENGNYDYLMYADYDYDYPDVAAEITRWGTWYANELQLDGFRLDAVKHIKFSFLRDWVNHVREKTGKPMFTVAEYWQNDLGALENYLNKTNFNHSVFDVPLHYQFHAASTQGGGYDMRKLLNGTVVSKHPLKSVTFVDNHDTQPGQSLESTVQTWFKPLAYAFILTRESGYPSVFYGDMYGTKGDSQREIPALKHKIEPILKARKQYAYGAQHDYFDHHDIVGWTREGVSSVANSGLAALITDGPGGAKWMYVGRQNAGETWHDITGNRSEPVVINSEGWGEFHVNGGSVSIYVQR

SEQ ID NO: 43259 - protein, 480 aa, Bacillus licheniformis
NGTLMQYFEWYMPNDGQHWRRLQNDSAYLAEHGITAVWIPPAYKGTSQADVGYGAYDLYDLGEFHQKGTVRTKYGTKGELQSAIKSLHSRDINVYGDVVINHKGGADATEDVTAVEVDPADRNRVISGEHLIKAWTHFHFPGRGSTYSDFKWHWYHFDGTDWDESRKLNRIYKFQGKAWDWPVSNENGNYDYLMYADIDYDHPDVAAEIKRWGTWYANELQLDGFRLDAVKHIKFQFLRDWVNHVREKTGKEMFTVAEYWQNDLGALENYLNKTNFNHSVFDVPLHYQFHAASTQGGGYDMRKLLNGTVVSKHPLKSVTFVDNHDTQPGQSLESTVQTWFKPLAYAFILTRESGYPQVFYGDMYGTKGDSQREIPALKHKIEPILKARKQYAYGAQHDYFDHHDIVGWTREGDSSVANSGLAALITDGPGGAKRMYVGRQNAGETWHDITGNRSEPVVINSEGWGEFHVNGGSVSIYVQR

SEQ ID NO: 43260 - protein, 480 aa, Bacillus licheniformis
NGTLMQYFEWYMPNDGQHWRRLQNDSAYLAEHGITAVWIPPAYKGTSQADVGYGAYDLYDLGEFHQKGTVRTKYGTKGELQSAIKSLHSRDINVYGDVVINHKGGADATEDVTAVEVDPADRNRVISGEHLIKAWTHFHFPGRGSTYSDFKWHWYHFDGTDWDESRKLNRIYKFQGKAWDWPVSNENGNYDYLMYADYDYDHPDVAAEIKRWGTWYANELQLDGFRLDAVKHIKFYFLRDWVNHVREKTGKEMFTVAEYWQNDLGALENYLNKTNFNHSVFDVPLHYQFHAASTQGGGYDMRKLLNGTVVSKHPLKSVTFVDNHDTQPGQSLESTVQTWFKPLAYAFILTRESGYPQVFYGDMYGTKGDSQREIPALKHKIEPILKARKQYAYGAQHDYFDHHDIVGWTREGDSSVANSGLAALITDGPGGAKRMYVGRQNAGETWHDITGNRSEPVVINSEGWGEFHVNGGSVSIYVQR

SEQ ID NO: 43261 - protein, 480 aa, unidentified
NGTLMQYFEWYAPNDGNHWNRLRTDAENLAQKGITSVWIPPAYKGTTQNDVGYGAYDLYDLGEFNQKGTVRTKYGTKAQLKSAIDALHKKNIDVYGDVVMNHKGGADYTETVTAVEVDPSNRNVEVSGDYEISAWTGFNFPGRGDSYSNFKWKWYHFDGTDWDEGRKLNRIYKFIGKAWDWEVSSENGNYDYLMYADLDFDHPDVANEMKKWGTWYANELNLDGFRLDAVKHIDHEYLRDWVNHVRQQTGKEMFAVAEYWQNDIQTLNNYLAKVNYNQSVFDAPLHYNFHYASKGNGNYDMRNILKGTVVANHPTLAVTLVENHDSQPGQSLESVVSPWFKPLAYAFILTRAEGYPSVFYGDYYGTKGNSNYEIPALKDKIDPILTARKNYAYGAQHDYFDHHDIVGWTREGDSSVANSGLAALITDGPGGAKRMYVGRQNAGETWHDITGNRSEPVVINSEGWGEFHVNGGSVSIYVQR

SEQ ID NO: 43262 - protein, 480 aa, Bacillus licheniformis
NGTLMQYFEWYMPNDGQHWRRLQNDSAYLAEHGITAVWIPPAYKGTSQADVGYGAYDLYDLGEFHQKGTVRTKYGTKGELQSAIKSLHSRDINVYGDVVINHKGGADATEDVTAVEVDPADRNRVISGEHLIKAWTHFHFPGRGSTYSDFKWHWYHFDGTDWDESRKLNRIYLFQGKAWDWPVSNENGNYDYLMYADYDYDYPDVAAEITRWGTWYANELQLDGFRLDAVKHIKFSFLRDWVNHVREKTGKEMFTVAEYWQNDLGALENYLNKTNFNHSVFDVPLHYQFHAASTQGGGYDMRKLLNGTVVSFHPLKSVTFVDNHDTQPGQSLESTVQTWFKPLAYAFILTRESGYPSVFYGDMYGTKGDSQREIPALKHKIEPILKARKQYAYGAQHDYFDHHDIVGWTREGVSSVANSGLAALITDGPGGAKWMYVGRQNAGETWHDITGNRSEPVVINSEGWGEFHVNGGSVSIYVQR

SEQ ID NO: 43263 - protein, 480 aa, Bacillus licheniformis
NGTLMQYFEWYMPNDGQHWRRLQNDSAYLAEHGITAVWIPPAYKGTSQADVGYGAYDLYDLGEFHQKGTVRTKYGTKGELQSAIKSLHSRDINVYGDVVINHKGGADATEDVTAVEVDPADRNRVISGEHLIKAWTHFHFPGRGSTYSDFKWHWYHFDGTDWDESRKLNRIYLFQGKAWDWEVSNENGNYDYLMYADYDYDYPDVAAEITRWGTWYANELQLDGFRLDAVKHIKFSFLRDWVNHVREKTGKPMFTVAEYWQNDLGALENYLNKTNFNHSVFDVPLHYQFHAASTQGGGYDMRKLLNGTVVSLHPLKSVTFVDNHDTQPGQSLESTVQTWFKPLAYAFILTRESGYPSVFYGDMYGTKGDSQREIPALKHKIEPILKARKQYAYGAQHDYFDHHDIVGWTREGVSSVANSGLAALITDGPGGAKWMYVGRQNAGETWHDITGNRSEPVVINSEGWGEFHVNGGSVSIYVQR

SEQ ID NO: 43264 - protein, 480 aa, Bacillus licheniformis
NGTLMQYFEWYMPNDGQHWRRLQNDSAYLAEHGITAVWIPPAYKGTSQADVGYGAYDLYDLGEFHQKGTVRTKYGTKGELQSAIKSLHSRDINVYGDVVINHKGGADATEDVTAVEVDPADRNRVISGEHLIKAWTHFHFPGRGSTYSDFKWHWYHFDGTDWDESRKLNRIYLFQGKAWDWPVSNENGNYDYLMYADYDYDYPDVAAEITRWGTWYANELQLDGFRLDAVKHIKFSFLRDWVNHVREKTGKEMFTVAEYWQNDLGALENYLNKTNFNHSVFDVPLHYQFHAASTQGGGYDMRKLLNGTVVSSHPLKSVTFVDNHDTQPGQSLESTVQTWFKPLAYAFILTRESGYPSVFYGDMYGTKGDSQREIPALKHKIEPILKARKQYAYGAQHDYFDHHDIVGWTREGVSSVANSGLAALITDGPGGAKWMYVGRQNAGETWHDITGNRSEPVVINSEGWGEFHVNGGSVSIYVQR

SEQ ID NO: 43265 - protein, 480 aa, Bacillus licheniformis
NGTLMQYFEWYMPNDGQHWRRLQNDSAYLAEHGITAVWIPPAYKGTSQADVGYGAYDLYDLGEFHQKGTVRTKYGTKGELQSAIKSLHSRDINVYGDVVINHKGGADATEDVTAVEVDPADRNRVISGEHLIKAWTHFHFPGRGSTYSDFKWHWYHFDGTDWDESRKLNRIYLFQGKAWDWPVSNENGNYDYLMYADIDYDHPDVAAEIKRWGTWYANELQLDGFRLDAVKHIKFSFDRDWVNHVREKTGKEMFTVAEYWQNDLGALENYLNKTNFNHSVFDVPLHYQFHAASTQGGGYDMRKLLNGTVVSKHPLKSVTFVDNHDTQPGQSLESTVQTWFKPLAYAFILTRESGYPQVFYGDMYGTKGDSQREIPALKHKIEPILKARKQYAYGAQHDYFDHHDIVGWTREGDSSVANSGLAALITDGPGGAKRMYVGRQNAGETWHDITGNRSEPVVINSEGWGEFHVNGGSVSIYVQR

SEQ ID NO: 43266 - protein, 482 aa, Bacillus sp. YR288
NGTMMQYFEWYVPNDGQHWNRLRNDAAYLKSIGVSAIWTPPAYKGTSQNDVGYGAYDLYDLGEFNQKGTIRTKYGTKAELKSAVSTLKSNGIQVYGDVVMNHKGGADYTENVTAVEVNPSNRNQETSDEYTIQAWTGFNFPGRGTTHSPFKWQWYHFDGTDWDQSRNASRIFKFRGTGKAWDWEVSSENGNYDYLMYADLDFDHPDVINEMKNWGVWYANEVGLDGFRLDAVKHIKHSYLGDWVNHVRTKTGKEMFTVAEYWQNDVNAINNYLAKVNYNHSVFDAPLHYNFHYASQSGGNYDMRNLLNGTVVAAHPTKAVTLVENHDSQPGQSLESVVQPWFKPLAYAFILTRAEGYPSIFYGDMYGTKGNSSYEIPALKTKIEPLLKARKDYAYGTQHNYMDHWDVIGWTREGDSTKEKSGLATLVTDGAGGSKWMYVGKQNAGEVWYDITGNRTDKITINTDGWGNFQVNGGSVSVYVQQ

SEQ ID NO: 43267 - protein, 482 aa, Bacillus sp. YR288
NGTMMQYFEWYVPNDGQHWNRLRNDAAYLKSIGVNAIWTPPAYKGTSQNDVGYGAYDLYDLGEFNQKGTIRTKYGTKAELKSAVSTLKSNGIQVYGDVVMNHKGGADYTENVTAVEVNPSNRNQETSDEYTIQAWTGFNFPGRGTTHSPFKWQWYHFDGTDWDQSRNASRIFKFRGTGKAWDWEVSSENGNYDYLMYADLDFDHPDVRNEMKNWGVWYANEVGLDGFRLDAVKHIKHSYLGDWVNHVRTKTGKEMFTVAEYWQNDVNAINNYLAKVNYNHSVFDAPLHYNFHYASQSGGNYDMRNLLNGTVVAAHPDKAVTLVENHDSQPGQSLESVVQPWFKPLAYAFILTRAEGYPSIFYGDMYGTKGNSSYEIPALKTKIEPLLKARKDYAYGTQHNYMDHWDVIGWTREGDSTKEKSGLATLVTDGAGGSKWMYVGKQNAGEVWYDITGNRTDKITINTDGWGNFQVNGGSVSVYVQQ

SEQ ID NO: 43268 - protein, 480 aa, Bacillus licheniformis
NGTLMQYFEWYMPNDGQHWRRLQNDSAYLAEHGITAVWIPPAYKGTSQADVGYGAYDLYDLGEFHQKGTVRTKYGTKGELQSAIKSLHSRDINVYGDVVINHKGGADATEDVTAVEVDPADRNRVISGEHLIKAWTHFHFPGRGSTYSDFKWHWYHFDGTDWDESRKLNRIYLFQGKAWDWEVSNENGNYDYLMYADYDYDYPDVAAEITRWGTWYANELQLDGFRLDAVKHIKFSFLRDWVNHVREKTGKPMFTVAEYWQNDLGALENYLNKTNFNHSVFDVPLHYQFHAASTQGGGYDMRKLLNGTVVSCHPLKSVTFVDNHDTQPGQSLESTVQTWFKPLAYAFILTRESGYPSVFYGDMYGTKGDSQREIPALKHKIEPILKARKQYAYGAQHDYFDHHDIVGWTREGVSSVANSGLAALITDGPGGAKWMYVGRQNAGETWHDITGNRSEPVVINSEGWGEFHVNGGSVSIYVQR

SEQ ID NO: 43269 - protein, 480 aa, Bacillus licheniformis
NGTLMQYFEWYMPNDGQHWRRLQNDSAYLAEHGITAVWIPPAYKGTSQADVGYGAYDLYDLGEFHQKGTVRTKYGTKGELQSAIKSLHSRDINVYGDVVINHKGGADATEDVTAVEVDPADRNRVISGEHLIKAWTHFHFPGRGSTYSDFKWHWYHFDGTDWDESRKLNRIYKFQGKAWDWPVSNENGNYDYLMYADYDYDHPDVAAEIKRWGTWYANELQLDGFRLDAVKHIKFSFLRDWVNHVREKTGKEMFTVAEYWQNDLGALENYLNFTNFNHSVFDVPLHYQFHAASTQGGGYDMRKLLNGTVVSKHPLKSVTFVDNHDTQPGQSLESTVQTWFKPLAYAFILTRESGYPQVFYGDMYGTKGDSQREIPALKHKIEPILKARKQYAYGAQHDYFDHHDIVGWTREGDSSVANSGLAALITDGPGGAKRMYVGRQNAGETWHDITGNRSEPVVINSEGWGEFHVNGGSVSIYVQR

SEQ ID NO: 43270 - protein, 480 aa, Bacillus licheniformis
NGTLMQYFEWYMPNDGQHWRRLQNDSAYLAEHGITAVWIPPAYKGTSQADVGYGAYDLYDLGEFHQKGTVRTKYGTKGELQSAIKSLHSRDINVYGDVVINHKGGADATEDVTAVEVDPADRNRVISGEHLIKAWTHFHFPGRGSTYSDFKWHWYHFDGTDWDESRKLNRIYLFQGKAWDWPVSNENGNYDYLMYADYDYDYPDVAAEITRWGTWYANELQLDGFRLDAVKHIKFSFLRDWVNHVREKTGKEMFTVAEYWQNDLGALENYLNKTNFNHSVFDVPLHYQFHAASTQGGGYDMRKLLNGTVVSVHPLKSVTFVDNHDTQPGQSLESTVQTWFKPLAYAFILTRESGYPSVFYGDMYGTKGDSQREIPALKHKIEPILKARKQYAYGAQHDYFDHHDIVGWTREGVSSVANSGLAALITDGPGGAKWMYVGRQNAGETWHDITGNRSEPVVINSEGWGEFHVNGGSVSIYVQR

SEQ ID NO: 43271 - protein, 482 aa, Bacillus sp. YR288
NGTMMQYFEWYVPNDGQHWNRLRNDAAYLKSIGVSAIWTPPAYKGTSQNDVGYGAYDLYDLGEFNQKGTIRTKYGTKAELKSAVSTLKSNGIQVYGDVVMNHKGGADYTENVTAVEVNPSNRNQETSDEYTIQAWTGFNFPGRGTTHSPFKWQWYHFDGTDWDQSRNASRIFKFRGTGKAWDWEVSSENGNYDYLMYADLDFDHPDVRNEMKNWGVWYANEVGLDGFRLDAVKHIKHSYLGDWVNHVRTKTGKEMFTVAEYWQNDVNAINNYLAKVNYNHSVFDAPLHYNFHAASQSGGNYDMRNLLNGTVVAAHPTKAVTLVENHDSQPGQSLESVVQPWFKPLAYAFILTRAEGYPSIFYGDMYGTKGNSSYEIPALKTKIEPLLKARKDYAYGTQHNYMDHWDVIGWTREGDSTKEKSGLATLVTDGAGGSKWMYVGKQNAGEVWYDITGNRTDKITINTDGWGNFQVNGGSVSVYVQQ

SEQ ID NO: 43272 - protein, 480 aa, Bacillus licheniformis
NGTLMQYFEWYMPNDGQHWRRLQNDSAYLAEHGITAVWIPPAYKGTSQADVGYGAYDLYDLGEFHQKGTVRTKYGTKGELQSAIKSLHSRDINVYGDVVINHKGGADATEDVTAVEVDPADRNRVISGEHLIKAWTHFHFPGRGSTYSDFKWHWYHFDGTDWDESRKLNRIYKFQGKAWDWPVSNENGNYDYLMYADIDYDHPDVAAEIKRWGTWYANELQLDGFRLDAVKHIKFWFLRDWVNHVREKTGKEMFTVAEYWQNDLGALENYLNKTNFNHSVFDVPLHYQFHAASTQGGGYDMRKLLNGTVVSKHPLKSVTFVDNHDTQPGQSLESTVQTWFKPLAYAFILTRESGYPQVFYGDMYGTKGDSQREIPALKHKIEPILKARKQYAYGAQHDYFDHHDIVGWTREGDSSVANSGLAALITDGPGGAKRMYVGRQNAGETWHDITGNRSEPVVINSEGWGEFHVNGGSVSIYVQR

SEQ ID NO: 43273 - protein, 482 aa, Bacillus sp. YR288
NGTMMQYFEWYVPNDGQHWNRLRNDAAYLKSIGVSAIWTPPAYKGTSQNDVGYGAYDLYDLGEFNQKGTIRTKYGTKAELKSAVSTLKSNGIQVYGDVVMNHKGGADYTENVTAVEVNPSNRNQETSDEYTIQAWTGFNFPGRGTTHSPFKWQWYHFDGTDWDQSRNASRIFKFRGTGKAWDWEVSSENGNYDYLMYADLDFDHPDVRNEMKNWGVWYANEVGLDGFRLDAVKHIKFQFLWDWVNHVRTKTGKEMFTVAEYWQNDVNAINNYLAKVNYNHSVFDAPLHYNFHYASQSGGNYDMRNLLNGTVVAAHPTKAVTLVENHDSQPGQSLESVVQPWFKPLAYAFILTRAEGYPSIFYGDMYGTKGNSSYEIPALKTKIEPLLKARKDYAYGTQHNYMDHWDVIGWTREGDSTKEKSGLATLVTDGAGGSKWMYVGKQNAGEVWYDITGNRTDKITINTDGWGNFQVNGGSVSVYVQQ

SEQ ID NO: 43274 - protein, 482 aa, Bacillus sp. YR288
NGTMMQYFEWYVPNDGQHWNRLRNDAAYLKSIGVSAIWTPPAYKGTSQNDVGYGAYDLYDLGEFNQKGTIRTKYGTKAELKSAVSTLKSNGIQVYGDVVMNHKGGADYTENVTAVEVNPSNRNQETSDEYTIQAWTGFNFPGRGTTHSPFKWQWYHFDGTDWDQSRNASRIFKFRGTGKAWDWEVSSENGNYDYLMYADLDFDHPDVRNEMKNWGVWYANEVGLDGFRLDAVKHIKFSYLWDWVNHVRTKTGKEMFTVAEYWQNDVNAINNYLAKVNYNHSVFDAPLHYNFHYASQSGGNYDMRNLLNGTVVAAHPTKAVTLVENHDSQPGQSLESVVQPWFKPLAYAFILTRAEGYPSIFYGDMYGTKGNSSYEIPALKTKIEPLLKARKDYAYGTQHNYMDHWDVIGWTREGDSTKEKSGLATLVTDGAGGSKWMYVGKQNAGEVWYDITGNRTDKITINTDGWGNFQVNGGSVSVYVQQ

SEQ ID NO: 43275 - protein, 480 aa, Bacillus licheniformis
NGTLMQYFEWYMPNDGQHWRRLQNDSAYLAEHGITAVWIPPAYKGISQADVGYGAYDLYDLGEFHQKGTVRTKYGTKGELQSAIKSLHSRDINVYGDVVINHKAGADATEDVTAVEVDPADRNRVISGEHLIKAWTHFHFPGRGSTYSDFKWHWYHFDGTDWDESRKLNRIYKFQGKAWDWEVSNENGNYDYLMYADIDYDHPDVAAEIKRWGTWYANELQLDGFRLDAVKHIKFSFLRDWVNHVREKTGKEMFTVAEYWQNDLGALENYLNKTNFNHSVFDVPLHYQFHAASTQGGGYDMRKLLNGTVVSKHPLKSVTFVDNHDTQPGQSLESTVQTWFKPLAYAFILTRESGYPQVFYGDMYGTKGDSQREIPALKHKIEPILKARKQYAYGAQHDYFDHHDIVGWTREGDSSVANSGLAALITDGPGGAKRMYVGRQNAGETWHDITGNRSEPVVINSEGWGEFHVNGGSVSIYVQR

SEQ ID NO: 43276 - protein, 480 aa, Bacillus licheniformis
NGTLMQYFEWYMPNDGQHWRRLQNDSAYLAEHGITAVWIPPAYKGTSQADVGYGAYDLYDLGEFHQKGTVRTKYGTKGELQSAIKSLHSRDINVYGDVVINHKGGADATEDVTAVEVDPADRNRVISGEHLIKAWTHFHFPGRGSTYSDFKWHWYHFDGTDWDESRKLNRIYKFQGKAWDWPVSNENGNYDYLMYADYDYDHPDVAAEIKRWGTWYANELQLDGFRLDAVKHIKFSFLRDWVNHVREKTGKEMFTVAEYWQNDLGALENYLNLTNFNHSVFDVPLHYQFHAASTQGGGYDMRKLLNGTVVSKHPLKSVTFVDNHDTQPGQSLESTVQTWFKPLAYAFILTRESGYPQVFYGDMYGTKGDSQREIPALKHKIEPILKARKQYAYGAQHDYFDHHDIVGWTREGDSSVANSGLAALITDGPGGAKRMYVGRQNAGETWHDITGNRSEPVVINSEGWGEFHVNGGSVSIYVQR

SEQ ID NO: 43277 - protein, 480 aa, Bacillus sp.
NGTLMQYFEWYMPNDGQHWKRLQNDSAYLAEHGITAVWIPPAYKGTSQADVGYGAYDLYDLGEFHQKGTVRTKYGTKGELQSAIKSLHSRDINVYGDVVINHKGGADTTEDVTAVEVDPADRNRVISGEHLIKAWTHFHFPGRGSIYSDFKWHWYHFDGTDWDESRKLNRIYKFQGKAWDWEVSNENGNYDYLMYADIDYDHPDVAAEIKRWGTWYANELQLDGFRLDAVKHIKFSFLRDWVNHVREKTGKEMFTVAEYWQNDLGALENYLNKTNFNHSVFDVPLHYQFHAASTQGGGYDMRKLLNGTVVSKHPLKSVTFVDNHDTQPGQSLESTVQTWFKPLAYAFILTRESGYPQVFYGDMYGTKGDSQREIPALKHKIEPILKARKQYAYGAQHDYFDHHDIVGWTREGDSSVANSGLAALITDGPGGAKRMYVGRQNAGETWHDITGNRSEPVVINSEGWGEFHVNGGSVSIYVQR

SEQ ID NO: 43278 - protein, 480 aa, Bacillus licheniformis
NGTLMQYFEWYMPNDGQHWRRLQNDSAYLAEHGITAVWIPPAYKGTSQADVGYGAYDLYDLGEFHQKGTVRTKYGTKGELQSAIKSLHSRDINVYGDVVINHKGGADATEDVTAVEVDPADRNRVISGEHLIKAWTHFHFPGRGSTYSDFKWHWYHFDGTDWDESRKLNRIYLFQGKAWDWPVSNENGNYDYLMYADIDYDHPDVAAEIKRWGTWYANELQLDGFRLDAVKHIKFSFLRDWVNHVREKTGKEMFTVAEYWQNDLGALENYLNKTNFNHSVFDVPLHYQFHAASTQGGGYDMRKLLNGTVVSKHPLKSVTFVDNHDTQPGQSLESTVQTWFKPLAYAFILTRESGYPQVFYGDMYGTKGDSQREIPALKHKIEPILKARKQYAYGAQHDYFDHHDIVGWTREGDSSVANSGLAALITDGPGGAKRMYVGRQNAGETWHDITGNRSEPVVINSEGWGEFHVNGGSVSIYVQR

SEQ ID NO: 43279 - protein, 480 aa, Bacillus licheniformis
NGTLMQYFEWYMPNDGQHWRRLQNDSAYLAEHGITAVWIPPAYKGTSQADVGYGAYDLYDLGEFHQKGTVRTKYGTKGELQSAIKSLHSRDINVYGDVVINHKGGADATEDVTAVEVDPADRNRVISGEHLIKAWTHFHFPGRGSTYSDFKWHWYHFDGTDWDESRKLNRIYLFQGKAWDWEVSNENGNYDYLMYADYDYDYPDVAAEITRWGTWYANELQLDGFRLDAVKHIKFSFLRDWVNHVREKTGKPMFTVAEYWQNDLGALENYLNKTNFNHSVFDVPLHYQFHAASTQGGGYDMRKLLNGTVVSIHPLKSVTFVDNHDTQPGQSLESTVQTWFKPLAYAFILTRESGYPSVFYGDMYGTKGDSQREIPALKHKIEPILKARKQYAYGAQHDYFDHHDIVGWTREGVSSVANSGLAALITDGPGGAKWMYVGRQNAGETWHDITGNRSEPVVINSEGWGEFHVNGGSVSIYVQR

SEQ ID NO: 43280 - protein, 482 aa, Bacillus sp. YR288
NGTMMQYFEWYVPNDGQHWNRLRNDAAYLKSIGVSAIWTPPAYKGTSQNDVGYGAYDLYDLGEFNQKGTIRTKYGTKAELKSAVSTLKSNGIQVYGDVVMNHKGGADYTENVTAVEVNPSNRNQETSDEYTIQAWTGFNFPGRGTTHSPFKWQWYHFDGTDWDQSRNASRIFKFRGTGKAWDWEVSSENGNYDYLMYADLDYDHPDVRNEMKNWGVWYANEVGLDGFRLDAVKHIKFQFLGDWVNHVRTKTGKEMFTVAEYWQNDVNAINNYLAKVNYNHSVFDAPLHYNFHYASQSGGNYDMRNLLNGTVVAAHPTKAVTLVENHDSQPGQSLESVVQPWFKPLAYAFILTRAEGYPSIFYGDMYGTKGNSSYEIPALKTKIEPLLKARKDYAYGTQHNYMDHWDVIGWTREGDSTKEKSGLATLVTDGAGGSKWMYVGKQNAGEVWYDITGNRTDKITINTDGWGNFQVNGGSVSVYVQQ

SEQ ID NO: 43281 - protein, 480 aa, Bacillus licheniformis
NGTLMQYFEWYMPNDGQHWRRLQNDSAYLAEHGITAVWIPPAYKGTSQADVGYGAYDLYDLGEFHQKGTVRTKYGTKGELQSAIKSLHSRDINVYGDVVINHKGGADATEDVTAVEVDPADRNRVISGEHLIKAWTHFHFPGRGSTYSDFKWHWYHFDGTDWDESRKLNRIYLFQGKAWDWEVSNENGNYDYLMYADYDYDYPDVAAEITRWGTWYANELQLDGFRLDAVKHIKFSFLRDWVNHVREKTGKPMFTVAEYWQNDLGALENYLNKTNFNHSVFDVPLHYQFHAASTQGGGYDMRKLLNGTVVSGHPLKSVTFVDNHDTQPGQSLESTVQTWFKPLAYAFILTRESGYPSVFYGDMYGTKGDSQREIPALKHKIEPILKARKQYAYGAQHDYFDHHDIVGWTREGVSSVANSGLAALITDGPGGAKWMYVGRQNAGETWHDITGNRSEPVVINSEGWGEFHVNGGSVSIYVQR

SEQ ID NO: 43282 - protein, 480 aa, Bacillus licheniformis
NGTLMQYFEWYMPNDGQHWRRLQNDSAYLAEHGITAVWIPPAYKGTSQADVGYGAYDLYDLGEFHQKGTVRTKYGTKGELQSAIKSLHSRDINVYGDVVINHKGGADATEDVTAVEVDPADRNRVISGEHLIKAWTHFHFPGRGSTYSDFKWHWYHFDGTDWDESRKLNRIYKFQGKAWDWPVSNENGNYDYLMYADIDYDHPDVAAEIKRWGTWYANELQLDGFRLDAVKHIKFSFLRDWVNHVREKTGKEMFTVAEYWQNDLGALENYLNHTNFNHSVFDVPLHYQFHAASTQGGGYDMRKLLNGTVVSKHPLKSVTFVDNHDTQPGQSLESTVQTWFKPLAYAFILTRESGYPQVFYGDMYGTKGDSQREIPALKHKIEPILKARKQYAYGAQHDYFDHHDIVGWTREGDSSVANSGLAALITDGPGGAKRMYVGRQNAGETWHDITGNRSEPVVINSEGWGEFHVNGGSVSIYVQR

SEQ ID NO: 43283 - protein, 482 aa, Bacillus sp. YR288
NGTMMQYFEWYVPNDGQHWNRLRNDAAYLKSIGVSAIWTPPAYKGTSQNDVGYGAYDLYDLGEFNQKGTIRTKYGTKAELKSAVSTLKSNGIQVYGDVVMNHKGGADYTENVTAVEVNPSNRNQETSDEYTIQAWTGFNFPGRGTTHSPFKWQWYHFDGTDWDQSRNASRIFKFRGTGKAWDWEVSSENGNYDYLMYADLDFDHPDVINEMKNWGVWYANEVGLDGFRLDAVKHIKFSYLGDWVNHVRTKTGKEMFTVAEYWQNDVNAINNYLAKVNYNHSVFDAPLHYNFHYASQSGGNYDMRNLLNGTVVAAHPTKAVTLVENHDSQPGQSLESVVQPWFKPLAYAFILTRAEGYPSIFYGDMYGTKGNSSYEIPALKTKIEPLLKARKDYAYGTQHNYMDHWDVIGWTREGDSTKEKSGLATLVTDGAGGSKWMYVGKQNAGEVWYDITGNRTDKITINTDGWGNFQVNGGSVSVYVQQ

SEQ ID NO: 43284 - protein, 482 aa, Bacillus sp. YR288
NGTMMQYFEWYVPNDGQHWNRLRNDAAYLKSIGVSAIWTPPAYKGTSQNDVGYGAYDLYDLGEFNQKGTIRTKYGTKAELKSAVSTLKSNGIQVYGDVVMNHKGGADYTENVTAVEVNPSNRNQETSDEYTIQAWTGFNFPGRGTTHSPFKWQWYHFDGTDWDQSRNASRIFKFRHTGKAWDWEVSSENGNYDYLMYADLDYDHPDVRNEMKNWGVWYANEVGLDGFRLDAVKHIKFQFLGDWVNHVRTKTGKEMFTVAEYWQNDVNAINNYLAKVNYNHSVFDAPLHYNFHYASQSGGNYDMRNLLNGTVVAAHPTKAVTLVENHDSQPGQSLESVVQPWFKPLAYAFILTRAEGYPSIFYGDMYGTKGNSSYEIPALKTKIEPLLKARKDYAYGTQHNYMDHWDVIGWTREGDSTKEKSGLATLVTDGAGGSKWMYVGKQNAGEVWYDITGNRTDKITINTDGWGNFQVNGGSVSVYVQQ

SEQ ID NO: 43285 - protein, 482 aa, Bacillus sp. YR288
NGTMMQYFEWYVPNDGQHWNRLRNDAAYLKSIGVSAIWTPPAYKGTSQNDVGYGAYDLYDLGEFNQKGTIRTKYGTKAELKSAVSTLKSNGIQVYGDVVMNHKGGADYTENVTAVEVNPSNRNQETSDEYTIQAWTYFNFPGRGTTHSPFKWQWYHFDGTDWDQSRNASRIFKFRGTGKAWDWEVSSENGNYDYLMYADLDFDHPDVRNEMKNWGVWYANEVGLDGFRLDAVKHIKHSYLGDWVNHVRTKTGKEMFTVAEYWQNDVNAINNYLAKVNYNHSVFDAPLHYNFHYASQSGGNYDMRNLLNGTVVAAHPTKAVTLVENHDSQPGQSLESVVQPWFKPLAYAFILTRAEGYPSIFYGDMYGTKGNSSYEIPALKTKIEPLLKARKDYAYGTQHNYMDHWDVIGWTREGDSTKEKSGLATLVTDGAGGSKWMYVGKQNAGEVWYDITGNRTDKITINTDGWGNFQVNGGSVSVYVQQ

SEQ ID NO: 43286 - protein, 482 aa, Bacillus sp. YR288
NGTMMQYFEWYVPNDGQHWNRLRNDAAYLKSIGVSAIWTPPAYKGTSQNDVGYGAYDLYDLGEFNQKGTIRTKYGTKAELKSAVSTLKSNGIQVYGDVVMNHKGGADYTENVTAVEVNPSNRNQETSDEYTIQAWTGFNFPGRGTTHSPFKWQWYHFDGTDWDQSRNASRIFKFRGTGKAWDWEVSSENGNYDYLMYADLDFDHPDVRNEMKNWGVWYANEVGLDGFRLDAVKHIKHQFLWDWVNHVRTKTGKEMFTVAEYWQNDVNAINNYLAKVNYNHSVFDAPLHYNFHYASQSGGNYDMRNLLNGTVVAAHPTKAVTLVENHDSQPGQSLESVVQPWFKPLAYAFILTRAEGYPSIFYGDMYGTKGNSSYEIPALKTKIEPLLKARKDYAYGTQHNYMDHWDVIGWTREGDSTKEKSGLATLVTDGAGGSKWMYVGKQNAGEVWYDITGNRTDKITINTDGWGNFQVNGGSVSVYVQQ

SEQ ID NO: 43287 - protein, 480 aa, Bacillus licheniformis
NGTLMQYFEWYMPNDGQHWRRLQNDSAYLAEHGITAVWIPPAYKGTSQADVGYGAYDLYDLGEFHQKGTVRTKYGTKGELQSAIKSLHSRDINVYGDVVINHKGGADATEDVTAVEVDPADRNRVISGEHLIKAWTHFHFPGRGSTYSDFKWHWYHFDGTDWDESRKLNRIYKFQGKAWDWPVSNENGNYDYLMYADYDYDHPDVAAEIKRWGTWYANELQLDGFRLDAVKHIKFQFLRDWVNHVREKTGKEMFTVAEYWQNDLGALENYLNKTNFNHSVFDVPLHYQFHAASTQGGGYDMRKLLNGTVVSKHPLKSVTFVDNHDTQPGQSLESTVQTWFKPLAYAFILTRESGYPQVFYGDMYGTKGDSQREIPALKHKIEPILKARKQYAYGAQHDYFDHHDIVGWTREGDSSVANSGLAALITDGPGGAKRMYVGRQNAGETWHDITGNRSEPVVINSEGWGEFHVNGGSVSIYVQR

SEQ ID NO: 43288 - protein, 480 aa, Bacillus licheniformis
NGTLMQYFEWYMPNDGQHWRRLQNDSAYLAEHGITAVWIPPAYKGTSQADVGYGAYDLYDLGEFHQKGTVRTKYGTKGELQSAIKSLHSRDINVYGDVVINHKGGADATEDVTAVEVDPADRNRVISGEHLIKAWTHFHFPGRGSTYSDFKWHWYHFDGTDWDESRKLNRIYLFQGKAWDWEVSNENGNYDYLMYADYDYDYPDVAAEITRWGTWYANELQLDGFRLDAVKHIKFSFLRDWVNHVREKTGKPMFTVAEYWQNDLGALENYLNKTNFNHSVFDVPLHYQFHAASTQGGGYDMRKLLNGTVVSPHPLKSVTFVDNHDTQPGQSLESTVQTWFKPLAYAFILTRESGYPSVFYGDMYGTKGDSQREIPALKHKIEPILKARKQYAYGAQHDYFDHHDIVGWTREGVSSVANSGLAALITDGPGGAKWMYVGRQNAGETWHDITGNRSEPVVINSEGWGEFHVNGGSVSIYVQR

SEQ ID NO: 43289 - protein, 480 aa, Bacillus licheniformis
NGTLMQYFEWYMPNDGQHWRRLQNDSAYLAEHGITAVWIPPAYKGISQADVGYGAYDLYDLGEFHQKGTVRTKYGTKGELQSAIKSLHSRDINVYGDVVINHKGGADATEDVTAVEVDPADRNRVISGVHLIKAWTHFHFPGRGSTYSDFKWHWYHFDGTDWDESRKLNRIYKFQGKAWDWEVSNENGNYDYLMYADIDYDHPDVAAEIKRWGTWYANELQLDGFRLDAVKHIKFSFLRDWVNHVREKTGKEMFTVAEYWQNDLGALENYLNKTNFNHSVFDVPLHYQFHAASTQGGGYDMRKLLNGTVVSKHPLKSVTFVDNHDTQPGQSLESTVQTWFKPLAYAFILTRESGYPQVFYGDMYGTKGDSQREIPALKHKIEPILKARKQYAYGAQHDYFDHHDIVGWTREGDSSVANSGLAALITDGPGGAKRMYAGRQNAGETWHDITGNRSEPVVINSEGWGEFHVNGGSVSIYVQR

SEQ ID NO: 43290 - protein, 482 aa, Bacillus sp. YR288
NGTMMQYFEWYVPNDGQHWNRLRNDAAYLKSIGVSAIWTPPAYKGTSQNDVGYGAYDLYDLGEFNQKGTIRTKYGTKAELKSAVSTLKSNGIQVYGDVVMNHKGGADYTENVTAVEVNPSNRNQETSDEYTIQAWTGFNFPGRGTTHSPFKWQWYHFDGTDWDQSRNASRIFKFRGTGKAWDWEVSSENGNYDYLMYADMDFDHPDVRNEMKNWGVWYANEVGLDGFRLDAVKHIKHSYLGDWVNHVRTKTGKEMFTVAEYWQNDVNAINNYLAKVNYNHSVFDAPLHYNFHYASQSGGNYDMRNLLNGTVVAAHPTKAVTLVENHDSQPGQSLESVVQPWFKPLAYAFILTRAEGYPSIFYGDMYGTKGNSSYEIPALKTKIEPLLKARKDYAYGTQHNYMDHWDVIGWTREGDSTKEKSGLATLVTDGAGGSKWMYVGKQNAGEVWYDITGNRTDKITINTDGWGNFQVNGGSVSVYVQQ

SEQ ID NO: 43291 - protein, 480 aa, Bacillus licheniformis
NGTLMQYFEWYMPNDGQHWRRLQNDSAYLAEHGITAVWIPPAYKGTSQADVGYGAYDLYDLGEFHQKGTVRTKYGTKGELQSAIKSLHSRDINVYGDVVINHKGGADATEDVTAVEVDPADRNRVISGEHLIKAWTHFHFPGRGSTYSDFAWHWYHFDGTDWDESRKLNRIYLFQGKAWDWPVSNENGNYDYLMYADYDYDYPDVAAEITRWGTWYANELQLDGFRLDAVKHIKFSFLRDWVNHVREKTGKEMFTVAEYWQNDLGALENYLNKTNFNHSVFDVPLHYQFHAASTQGGGYDMRKLLNGTVVSKHPLKSVTFVDNHDTQPGQSLESTVQTWFKPLAYAFILTRESGYPSVFYGDMYGTKGDSQREIPALKHKIEPILKARKQYAYGAQHDYFDHHDIVGWTREGVSSVANSGLAALITDGPGGAKWMYVGRQNAGETWHDITGNRSEPVVINSEGWGEFHVNGGSVSIYVQR

SEQ ID NO: 43292 - protein, 482 aa, Bacillus sp. YR288
NGTMMQYFEWYVPNDGQHWNRLRNDAAYLKSIGVSAIWTPPAYKGTSQNDVGYGAYDLYDLGEFNQKGTIRTKYGTKAELKSAVSTLKSNGIQVYGDVVMNHKGGADYTENVTAVEVNPSNRNQETSDEYTIQAWTGFNFPGRGTTHSPFKWQWYHFDGTDWDQSRNASRIFKFRGTGKAWDWPVSSENGNYDYLMYADLDYDHPDVRNEMKNWGVWYANEVGLDGFRLDAVKHIKFSFLGDWVNHVRTKTGKEMFTVAEYWQNDVNAINNYLAKVNYNHSVFDAPLHYNFHYASQSGGNYDMRNLLNGTVVAAHPTKAVTLVENHDSQPGQSLESVVQPWFKPLAYAFILTRAEGYPSIFYGDMYGTKGNSSYEIPALKTKIEPLLKARKDYAYGTQHNYMDHWDVIGWTREGDSTKEKSGLATLVTDGAGGSKWMYVGKQNAGEVWYDITGNRTDKITINTDGWGNFQVNGGSVSVYVQQ

SEQ ID NO: 43293 - protein, 482 aa, Bacillus sp. YR288
NGTMMQYFEWYVPNDGQHWNRLRNDAAYLKSIGVSAIWTPPAYKGTSQNDVGYGAYDLYDLGEFNQKGTIRTKYGTKAELKSAVSTLKSNGIQVYGDVVMNHKGGADYTENVTAVEVNPSNRNQETSDEYTIQAWTGFNFPGRGTTHSPFKWQWYHFDGTDWDQSRNASRIFKFRGTGKAWDWEVSSENGNYDYLMYADLDFDHPDVRNEMKNWGVWYANEVGLDGFRLDAVKHIKHSYLKDWVNHVRTKTGKEMFTVAEYWQNDVNAINNYLAKVNYNHSVFDAPLHYNFHYASQSGGNYDMRNLLNGTVVAAHPTKAVTLVENHDSQPGQSLESVVQPWFKPLAYAFILTRAEGYPSIFYGDMYGTKGNSSYEIPALKTKIEPLLKARKDYAYGTQHNYMDHWDVIGWTREGDSTKEKSGLATLVTDGAGGSKWMYVGKQNAGEVWYDITGNRTDKITINTDGWGNFQVNGGSVSVYVQQ

SEQ ID NO: 43294 - protein, 480 aa, Bacillus licheniformis
NGTLMQYFEWYMPNDGQHWRRLQNDSAYLAEHGITAVWIPPAYKGTSQADVGYGAYDLYDLGEFHQKGTVRTKYGTKGELQSAIKSLHSRDINVYGDVVINHKGGADATEDVTAVEVDPADRNRVISGEHLIKAWTHFHFPGRGSTYSDFKWHWYHFDGTDWDESRKLNRIYKFQGKAWDWPVSNENGNYDYLMYADYDYDHPDVAAEIKRWGTWYANELQLDGFRLDAVKHIKFSFLRDWVNHVREKTGKEMFTVAEYWQNDLGALENYLNITNFNHSVFDVPLHYQFHAASTQGGGYDMRKLLNGTVVSKHPLKSVTFVDNHDTQPGQSLESTVQTWFKPLAYAFILTRESGYPQVFYGDMYGTKGDSQREIPALKHKIEPILKARKQYAYGAQHDYFDHHDIVGWTREGDSSVANSGLAALITDGPGGAKRMYVGRQNAGETWHDITGNRSEPVVINSEGWGEFHVNGGSVSIYVQR

SEQ ID NO: 43295 - protein, 480 aa, Bacillus licheniformis
NGTLMQYFEWYMPNDGQHWRRLQNDSAYLAEHGITAVWIPPAYKGTSQADVGYGAYDLYDLGEFHQKGTVRTKYGTKGELQSAIKSLHSRDINVYGDVVINHKGGADATEDVTAVEVDPADRNRVISGEHLIKAWTHFHFPGRGSTYSDFKWHWYHFDGTDWDESRKLNRIYKFQGKAWDWPVSNENGNYDYLMYADYDYDHPDVAAEIKRWGTWYANELQLDGFRLDAVKHIKFFFLRDWVNHVREKTGKEMFTVAEYWQNDLGALENYLNKTNFNHSVFDVPLHYQFHAASTQGGGYDMRKLLNGTVVSKHPLKSVTFVDNHDTQPGQSLESTVQTWFKPLAYAFILTRESGYPQVFYGDMYGTKGDSQREIPALKHKIEPILKARKQYAYGAQHDYFDHHDIVGWTREGDSSVANSGLAALITDGPGGAKRMYVGRQNAGETWHDITGNRSEPVVINSEGWGEFHVNGGSVSIYVQR

SEQ ID NO: 43296 - protein, 480 aa, Bacillus licheniformis
NGTLMQYFEWYMPNDGQHWRRLQNDSAYLAEHGITAVWIPPAYKGTSQADVGYGAYDLYDLGEFHQKGTVRTKYGTKGELQSAIKSLHSRDINVYGDVVINHKGGADATEDVTAVEVDPADRNRVISGEHLIKAWTHFHFPGRGSTYSDFKWHWYHFDGTDWDESRKLNRIYKFQGKAWDWPVSNENGNYDYLMYADYDYDHPDVAAEIKRWGTWYANELQLDGFRLDAVKHIKFSFLRDWVNHVREKTGKEMFTVAEYWQNDLGALENYLNYTNFNHSVFDVPLHYQFHAASTQGGGYDMRKLLNGTVVSKHPLKSVTFVDNHDTQPGQSLESTVQTWFKPLAYAFILTRESGYPQVFYGDMYGTKGDSQREIPALKHKIEPILKARKQYAYGAQHDYFDHHDIVGWTREGDSSVANSGLAALITDGPGGAKRMYVGRQNAGETWHDITGNRSEPVVINSEGWGEFHVNGGSVSIYVQR

SEQ ID NO: 43297 - protein, 480 aa, Bacillus licheniformis
NGTLMQYFEWYMPNDGQHWRRLQNDSAYLAEHGITAVWIPPAYKGTSQADVGYGAYDLYDLGEFHQKGTVRTKYGTKGELQSAIKSLHSRDINVYGDVVINHKGGADATEDVTAVEVDPADRNRVISGEHLIKAWTHFHFPGRGSTYSDFKWHWYHFDGTDWDESRKLNRIYLFQGKAWDWEVSNENGNYDYLMYADYDYDYPDVAAEITRWGTWYANELQLDGFRLDAVKHIKFSFLRDWVNHVREKTGKPMFTVAEYWQNDLGALENYLNKTNFNHSVFDVPLHYQFHAASTQGGGYDMRKLLNGTVVSHHPLKSVTFVDNHDTQPGQSLESTVQTWFKPLAYAFILTRESGYPSVFYGDMYGTKGDSQREIPALKHKIEPILKARKQYAYGAQHDYFDHHDIVGWTREGVSSVANSGLAALITDGPGGAKWMYVGRQNAGETWHDITGNRSEPVVINSEGWGEFHVNGGSVSIYVQR

SEQ ID NO: 43298 - protein, 480 aa, Bacillus licheniformis
NGTLMQYFEWYMPNDGQHWRRLQNDSAYLAEHGITAVWIPPAYKGTSQADVGYGAYDLYDLGEFHQKGTVRTKYGTKGELQSAIKSLHSRDINVYGDVVINHKGGADATEDVTAVEVDPADRNRVISGEHLIKAWTHFHFPGRGSTYSDFKWHWYHFDGTDWDESRKLNRIYLFQGKAWDWEVSNENGNYDYLMYADYDYDYPDVAAEITRWGTWYANELQLDGFRLDAVKHIKFSFLRDWVNHVREKTGKPMFTVAEYWQNDLGALENYLNKTNFNHSVFDVPLHYQFHAASTQGGGYDMRMLLNGTVVSKHPLKSVTFVDNHDTQPGQSLESTVQTWFKPLAYAFILTRESGYPSVFYGDMYGTKGDSQREIPALKHKIEPILKARKQYAYGAQHDYFDHHDIVGWTREGVSSVANSGLAALITDGPGGAKWMYVGRQNAGETWHDITGNRSEPVVINSEGWGEFHVNGGSVSIYVQR

SEQ ID NO: 43299 - protein, 482 aa, Bacillus sp. YR288
NGTMMQYFEWYVPNDGQHWNRLRNDAAYLKSIGVSAIWTPPAYKGTSQNDVGYGAYDLYDLGEFNQKGTIRTKYGTKAELKSAVSTLKSNGIQVYGDVVMNHKGGADYTENVTAVEVNPSNRNQETSDEYTIQAWTGFNFPGRGTTHSPFKWQWYHFDGTDWDQSRNASRIFKFRHTGKAWDWEVSSENGNYDYLMYADLDYDHPDVINEMKNWGVWYANEVGLDGFRLDAVKHIKFQFLGDWVNHVRTKTGKEMFTVAEYWQNDVNAINNYLAKVNYNHSVFDAPLHYNFHYASQSGGNYDMRNLLNGTVVAAHPTKAVTLVENHDSQPGQSLESVVQPWFKPLAYAFILTRAEGYPSIFYGDMYGTKGNSSYEIPALKTKIEPLLKARKDYAYGTQHNYMDHWDVIGWTREGDSTKEKSGLATLVTDGAGGSKWMYVGKQNAGEVWYDITGNRTDKITINTDGWGNFQVNGGSVSVYVQQ

SEQ ID NO: 43300 - protein, 480 aa, Bacillus licheniformis
NGTLMQYFEWYMPNDGQHWRRLQNDSAYLAEHGITAVWIPPAYKGTSQADVGYGAYDLYDLGEFHQKGTVRTKYGTKGELQSAIKSLHSRDINVYGDVVINHKGGADATEDVTAVEVDPADRNRVISGEHLIKAWTHFHFPGRGSTYSDFKWHWYHFDGTDWDESRKLNRIYLFQGKAWDWPVSNENGNYDYLMYADYDYDYPDVAAEITRWGTWYANELQLDGFRLDAVKHIKFSFLRDWVNHVREKTGKEMFTVAEYWQNDLGALENYLNKTNFNHSVFDVPLHYQFHAASTQGGGYDMRKLLNGTVVSIHPLKSVTFVDNHDTQPGQSLESTVQTWFKPLAYAFILTRESGYPSVFYGDMYGTKGDSQREIPALKHKIEPILKARKQYAYGAQHDYFDHHDIVGWTREGVSSVANSGLAALITDGPGGAKWMYVGRQNAGETWHDITGNRSEPVVINSEGWGEFHVNGGSVSIYVQR

SEQ ID NO: 43301 - protein, 482 aa, Bacillus sp. YR288
NGTMMQYFEWYVPNDGQHWNRLRNDAAYLKSIGVSAIWTPPAYKGTSQNDVGYGAYDLYDLGEFNQKGTIRTKYGTKAELKSAVSTLKSNGIQVYGDVVMNHKGGADYTENVTAVEVNPSNRNQETSDEYTIQAWTGFNFPGRGTTHSPFKWQWYHFDGTDWDQSRNASRIFKFRGTGKAWDWEVSSENGNYDYLMYADLDFDHPDVRNEMFNWGVWYANEVGLDGFRLDAVKHIKHSYLGDWVNHVRTKTGKEMFTVAEYWQNDVNAINNYLAKVNYNHSVFDAPLHYNFHYASQSGGNYDMRNLLNGTVVAAHPTKAVTLVENHDSQPGQSLESVVQPWFKPLAYAFILTRAEGYPSIFYGDMYGTKGNSSYEIPALKTKIEPLLKARKDYAYGTQHNYMDHWDVIGWTREGDSTKEKSGLATLVTDGAGGSKWMYVGKQNAGEVWYDITGNRTDKITINTDGWGNFQVNGGSVSVYVQQ

SEQ ID NO: 43302 - protein, 480 aa, Bacillus licheniformis
NGTLMQYFEWYMPNDGQHWRRLQNDSAYLAEHGITAVWIPPAYKGTSQADVGYGAYDLYDLGEFHQKGTVRTKYGTKGELQSAIKSLHSRDINVYGDVVINHKGGADATEDVTAVEVDPADRNRVISGEHLIKAWTHFHFPGRGSTYSDFKWHWYHFDGTDWDESRKLNRIYLFQGKAWDWPVSNENGNYDYLMYADYDYDYPDVAAEITRWGTWYANELQLDGFRLDAVKHIKFSFLRDWVNHVREKTGKEMFTVAEYWQNDLGALENYLNKTNFNHSVFDVPLHYQFHAASTQGGGYDMRKLLNGTVVSLHPLKSVTFVDNHDTQPGQSLESTVQTWFKPLAYAFILTRESGYPSVFYGDMYGTKGDSQREIPALKHKIEPILKARKQYAYGAQHDYFDHHDIVGWTREGVSSVANSGLAALITDGPGGAKWMYVGRQNAGETWHDITGNRSEPVVINSEGWGEFHVNGGSVSIYVQR

SEQ ID NO: 43303 - protein, 480 aa, Bacillus licheniformis
NGTLMQYFEWYMPNDGQHWRRLQNDSAYLAEHGITAVWIPPAYKGTSQADVGYGAYDLYDLGEFHQKGTVRTKYGTKGELQSAIKSLHSRDINVYGDVVINHKGGADATEDVTAVEVDPADRNRVISGEHLIKAWTHFHFPGRGSTYSDFKWHWYHFDGTDWDESRKLNRIYLFQGKAWDWPVSNENGNYDYLMYADYDYDYPDVAAEITRWGTWYANELQLDGFRLDAVKHIKFSFLRDWVNHVREKTGKEMFTVAEYWQNDLGALENYLNKTNFNHSVFDVPLHYQFHAASTQGGGYDMRKLLNGTVVSQHPLKSVTFVDNHDTQPGQSLESTVQTWFKPLAYAFILTRESGYPSVFYGDMYGTKGDSQREIPALKHKIEPILKARKQYAYGAQHDYFDHHDIVGWTREGVSSVANSGLAALITDGPGGAKWMYVGRQNAGETWHDITGNRSEPVVINSEGWGEFHVNGGSVSIYVQR

SEQ ID NO: 43304 - protein, 480 aa, unidentified
NGTLMQYFEWYAPNDGNHWKRLHTDAGNLAQKGITSVWIPPAYKGTTQNDVGYGAYDLYDLGEFNQKGTVRTKYGTKAQLKSAIEALHKQNINVYGDVVMNHKGGADYTETVTAVEVDRNNRNIEVSGDYEINAWTGFNFPGRGDTHSNFKWKWYHFDGTDWDEGRKLNRIYKFRGKAWDWEVSSENGNYDYLLYADLDFDHPDVANEMKNWGTWYANELNLDGFRLDAVKHIDHEYLRDWVNHVRQQTGKEMFTVAEYWQNDIQTLNNYLAKVNYNQSVFDAPLHYNFHYASKGNGNYDMRNILNGTVMQNHPALAVTLVENHDSQPGQSLESVVSPWFKPLAYAFILTRAEGYPSVFYGDYYGTSGNSSYEIPALKDKIDPILMARKNFAYGTQRDYLDHPDVIGWTREGDGVHADSGLATLISDGPGGSKWMEVGKNNAGEVWYDMTGNQTNTVTINKDGWGQFHVSGGSVSIYVQQ

SEQ ID NO: 43305 - protein, 480 aa, Bacillus licheniformis
NGTLMQYFEWYMPNDGQHWRRLQNDSAYLAEHGITAVWIPPAYKGISQADVGYGAYDLYDLGEFHQKGTVRTKYGTKGELQSAIKSLHSRDINVYGDVVINHKAGADATEDVTAVEVDPADRNRVISGEHLIKAWTHFHFPGRGSTYSDFKWHWYHFDGTDWDESRKLNRIYKFQGKAWDWEVSNENGNYDYLMYADFDYDHPDVAAEIKRWGTWYANELQLDGFRLDAVKHIKFSFLRDWVNHVREKTGKEMFTVAEYWQNDLGALENYLNKTNFNHSVFDVPLHYQFHAASTQGGGYDMRKLLNGTVVSKHPLKSVTFVDNHDTQPGQSLESTVQTWFKPLAYAFILTRESGYPQVFYGDMYGTKGDSQREIPALKHKIEPILKARKQYAYGAQHDYFDHHDIVGWTREGDSSVANSGLAALITDGPGGAKRMYVGRQNAGETWHDITGNRSEPVVINSEGWGEFHVNGGSVSIYVQR

SEQ ID NO: 43306 - protein, 480 aa, Bacillus licheniformis
NGTLMQYFEWYMPNDGQHWRRLQNDSAYLAEHGITAVWIPPAYKGTSQADVGYGAYDLYDLGEFHQKGTVRTKYGTKGELQSAIKSLHSRDINVYGDVVINHKGGADATEDVTAVEVDPADRNRVISGEHLIKAWTHFHFPGRGSTYSDFKWHWYHFDGTDWDESRKLNRIYKFQGKAWDWPVSNENGNYDYLMYADIDYDHPDVAAEIKRWGTWYANELQLDGFRLDAVKHIKFSFLRDWVNHVREKTGKEMFTVAEYWQNDLGALENYLNFTNFNHSVFDVPLHYQFHAASTQGGGYDMRKLLNGTVVSKHPLKSVTFVDNHDTQPGQSLESTVQTWFKPLAYAFILTRESGYPQVFYGDMYGTKGDSQREIPALKHKIEPILKARKQYAYGAQHDYFDHHDIVGWTREGDSSVANSGLAALITDGPGGAKRMYVGRQNAGETWHDITGNRSEPVVINSEGWGEFHVNGGSVSIYVQR

SEQ ID NO: 43307 - protein, 480 aa, Bacillus licheniformis
NGTLMQYFEWYMPNDGQHWRRLQNDSAYLAEHGITAVWIPPAYKGTSQADVGYGAYDLYDLGEFHQKGTVRTKYGTKGELQSAIKSLHSRDINVYGDVVINHKGGADATEDVTAVEVDPADRNRVISGEHLIKAWTHFHFPGRGSTYSDFKWHWYHFDGTDWDESRKLNRIYRFQGKAWDWEVSNENGNYDYLMYADFDYDNPDVAAEIKRWGTWYANELQLDGFRLDAVKHIKFSFLRDWVNHVREKTGKEMFTVAEYWQNDLGALENYLNKTNFNHSVFDVPLHYQFHAASTQGGGYDMRKLLNGTVVSKHPLKSVTFVDNHDTQPGQSLESTVQTWFKPLAYAFILTRESGYPQVFYGDMYGTKGDSQRKIPALKHKIEPILKARKQYAYGAQHDYFDHHDIVGWTREGDSSVRNSGLAALITDGPGGAKRMYVGRQNAGETWHDITGNRSEPVVINSEGWGEFHVNGGSVSIYVQR

SEQ ID NO: 43308 - protein, 480 aa, Bacillus licheniformis
NGTLMQYFEWYMPNDGQHWRRLQNDSAYLAEHGITAVWIPPAYKGTSQADVGYGAYDLYDLGEFHQKGTVRTKYGTKGELQSAIKSLHSRDINVYGDVVINHKGGADATEDVTAVEVDPADRNRVISGEHLIKAWTHFHFPGRGSTYSDFKWHWYHFDGTDWDESRKLNRIYLFQGKAWDWPVSNENGNYDYLMYADYDYDYPDVAAEITRWGTWYANELQLDGFRLDAVKHIKFSFLRDWVNHVREKTGKEMFTVAEYWQNDLGALENYLNKTNFNHSVFDVPLHYQFHAASTQGGGYDMRKLLNGTVVSAHPLKSVTFVDNHDTQPGQSLESTVQTWFKPLAYAFILTRESGYPSVFYGDMYGTKGDSQREIPALKHKIEPILKARKQYAYGAQHDYFDHHDIVGWTREGVSSVANSGLAALITDGPGGAKWMYVGRQNAGETWHDITGNRSEPVVINSEGWGEFHVNGGSVSIYVQR

SEQ ID NO: 43309 - protein, 480 aa, Bacillus licheniformis
NGTLMQYFEWYMPNDGQHWRRLQNDSAYLAEHGITAVWIPPAYKGTSQADVGYGAYDLYDLGEFHQKGTVRTKYGTKGELQSAIKSLHSRDINVYGDVVINHKGGADATEDVTAVEVDPADRNRVISGEHLIKAWTHFHFPGRGSTYSDFKWHWYHFDGTDWDESRKLNRIYLFQGKAWDWEVSNENGNYDYLMYADYDYDYPDVAAEITRWGTWYANELQLDGFRLDAVKHIKFSFLRDWVNHVREKTGKPMFTVAEYWQNDLGALENYLNKTNFNHSVFDVPLHYQFHAASTQGGGYDMRKLLNGTVVSVHPLKSVTFVDNHDTQPGQSLESTVQTWFKPLAYAFILTRESGYPSVFYGDMYGTKGDSQREIPALKHKIEPILKARKQYAYGAQHDYFDHHDIVGWTREGVSSVANSGLAALITDGPGGAKWMYVGRQNAGETWHDITGNRSEPVVINSEGWGEFHVNGGSVSIYVQR

SEQ ID NO: 43310 - protein, 482 aa, Bacillus sp. YR288
NGTMMQYFEWYVPNDGQHWNRLRNDAAYLKSIGVNAIWTPPAYKGTSQNDVGYGAYDLYDLGEFNQKGTIRTKYGTKAELKSAVSTLKSNGIQVYGDVVMNHKGGADYTENVTAVEVNPSNRNQETSDEYTIQAWTGFNFPGRGTTHSPFKWQWYHFDGTDWDQSRNASRIFKFRGTGKAWDWEVSSENGNYDYLMYADLDFDHPDVRNEMKNWGVWYANEVGLDGFRLDAVKHIKHSYLGDWVNHVRTKTGKEMFTVAEYWQNDVNAINNYLAKVNYNHSVFDAPLHYNFHYASQSGGNYDMRNLLNGTVVAAHPTKAVTLVENHDSQPGQSLESVVQPWFKPLAYAFILTRAEGYPSIFYGDMYGTKGNSSYEIPALKTKIEPLLKARKDYAYGTQHNYMDHWDVIGWTREGDSTKEKSGLATLVTDGAGGSKWMYVGKQNAGEVWYDITGNRTDKITINTDGWGNFQVNGGSVSVYVQQ

SEQ ID NO: 43311 - protein, 480 aa, Bacillus licheniformis
NGTLMQYFEWYMPNDGQHWRRLQNDSAYLAEHGITAVWIPPAYKGTSQADVGYGAYDLYDLGEFHQKGTVRTKYGTKGELQSAIKSLHSRDINVYGDVVINHKGGADATEDVTAVEVDPADRNRVISGEHLIKAWTHFHFPGRGSTYSDFKWHWYHFDGTDWDESRKLNRIYLFQGKAWDWPVSNENGNYDYLMYADYDYDYPDVAAEITRWGTWYANELQLDGFRLDAVKHIKFSFLRDWVNHVREKTGKEMFTVAEYWQNDLGALENYLNKTNFNHSVFDVPLHYQFHAASTQGGGYDMRKLLNGTVVSCHPLKSVTFVDNHDTQPGQSLESTVQTWFKPLAYAFILTRESGYPSVFYGDMYGTKGDSQREIPALKHKIEPILKARKQYAYGAQHDYFDHHDIVGWTREGVSSVANSGLAALITDGPGGAKWMYVGRQNAGETWHDITGNRSEPVVINSEGWGEFHVNGGSVSIYVQR

SEQ ID NO: 43312 - protein, 480 aa, Bacillus licheniformis
NGTLMQYFEWYMPNDGQHWRRLQNDSAYLAEHGITAVWIPPAYKGTSQADVGYGAYDLYDLGEFHQKGTVRTKYGTKGELQSAIKSLHSRDINVYGDVVINHKGGADATEDVTAVEVDPADRNRVISGEHLIKAWTHFHFPGRGSTYSDFKWHWYHFDGTDWDESRKLNRIYLFQGKAWDWPVSNENGNYDYLMYADYDYDYPDVAAEITRWGTWYANELQLDGFRLDAVKHIKFSFLRDWVNHVREKTGKEMFTVAEYWQNDLGALENYLNKTNFNHSVFDVPLHYQFHAASTQGGGYDMRMLLNGTVVSKHPLKSVTFVDNHDTQPGQSLESTVQTWFKPLAYAFILTRESGYPSVFYGDMYGTKGDSQREIPALKHKIEPILKARKQYAYGAQHDYFDHHDIVGWTREGVSSVANSGLAALITDGPGGAKWMYVGRQNAGETWHDITGNRSEPVVINSEGWGEFHVNGGSVSIYVQR

SEQ ID NO: 43313 - protein, 482 aa, Bacillus sp. YR288
NGTMMQYFEWYVPNDGQHWNRLRNDAAYLKSIGVSAIWTPPAYKGTSQNDVGYGAYDLYDLGEFNQKGTIRTKYGTKAELKSAVSTLKSNGIQVYGDVVMNHKGGADYTENVTAVEVNPSNRNQETSDEYTIQAWTGFNFPGRGTTHSPFKWQWYHFDGTDWDQSRNASRIFKFRGTGKAWDWEVSSEFGNYDYLMYADLDYDHPDVRNEMKNWGVWYANEVGLDGFRLDAVKHIKFSFLGDWVNHVRTKTGKEMFTVAEYWQNDVNAINNYLAKVNYNHSVFDAPLHYNFHYASQSGGNYDMRNLLNGTVVAAHPTKAVTLVENHDSQPGQSLESVVQPWFKPLAYAFILTRAEGYPSIFYGDMYGTKGNSSYEIPALKTKIEPLLKARKDYAYGTQHNYMDHWDVIGWTREGDSTKEKSGLATLVTDGAGGSKWMYVGKQNAGEVWYDITGNRTDKITINTDGWGNFQVNGGSVSVYVQQ

SEQ ID NO: 43314 - protein, 482 aa, Bacillus sp. YR288
NGTMMQYFEWYVPNDGQHWNRLRNDAAYLKSIGVSAIWTPPAYKGTSQNDVGYGAYDLYDLGEFNQKGTIRTKYGTKAELKSAVSTLKSNGIQVYGDVVMNHKGGADYTENVTAVEVNPSNRNQETSDEYTIQAWTGFNFPGRGTTHSPFKWQWYHFDGTDWDQSRNASRIFKFRGTGKAWDWEVSSENGNYDYLMYADYDYDHPDVRNEMKNWGVWYANEVGLDGFRLDAVKHIKHSYLGDWVNHVRTKTGKEMFTVAEYWQNDVNAINNYLAKVNYNHSVFDAPLHYNFHYASQSGGNYDMRNLLNGTVVAAHPTKAVTLVENHDSQPGQSLESVVQPWFKPLAYAFILTRAEGYPSIFYGDMYGTKGNSSYEIPALKTKIEPLLKARKDYAYGTQHNYMDHWDVIGWTREGDSTKEKSGLATLVTDGAGGSKWMYVGKQNAGEVWYDITGNRTDKITINTDGWGNFQVNGGSVSVYVQQ

SEQ ID NO: 43315 - protein, 483 aa, Bacillus sp. YR288
NGTMMQYFEWYVPNDGQHWNRLRNDAAYLKSIGVSAIWTPPAYKGTSQNDVGYGAYDLYDLGEFNQKGTIRTKYGTKAELKSAVSTLKSNGIQVYGDVVMNHKGGADYTENVTAVEVNPSNRNQETSDEYTIQAWTGFNFPGRGTTHSPFKWQWYHFDGTDWDQSRNASRIFKFRGTGKAWDWEVSSENGNYDYLMYADLDFDHPDVRNEMKNWGVWYANEVGLDGFRLDAVKHIKHSYLGDWVNHVRTKTGKEMFTVAEYWQNDVNAINNYLAKVNYNHSVFDAPLHYNFHYASQSGGNYDMRNLLNGTVVAAHPTKAVTLVENHDSQPGQSLESVVQPWFKPLAYAFILTRAEGYPSIFYGDMYGTKGNSSYEIPALKTKIEPLLKARKDYAYGTQHNYMDHWDVIGWTREGDSTKEKSGLATLVTDGSAGGSKWMYVGKQNAGEVWYDITGNRTDKITINTDGWGNFQVNGGSVSVYVQQ

SEQ ID NO: 43316 - protein, 482 aa, Bacillus sp. YR288
NGTMMQYFEWYVPNDGQHWNRLRNDAAYLKSIGVSAIWTPPAYKGTSQNDVGYGAYDLYDLGEFNQKGTIRTKYGTKAELKSAVSTLKSNGIQVYGDVVMNHKGGADYTENVTAVEVNPSNRNQETSDEYTIQAWTGFNFPGRGTTHSPFKWQWYHFDGTDWDQSRNASRIFKFRGTGKAWDWEVSSENGNYDYLMYADLDFDHPDVRNEMKNWGVWYANEVGLDGFRLDAVKHIKFSFLGDWVNHVRTKTGKEMFTVAEYWQNDVNAINNYLAKVNYNHSVFDAPLHYNFHYASQSGGNYDMRNLLNGTVVAAHPTKAVTLVENHDTQPGQSLESVVQPWFKPLAYAFILTRAEGYPSIFYGDMYGTKGNSSYEIPALKTKIEPLLKARKDYAYGTQHNYMDHWDVIGWTREGDSTKEKSGLATLVTDGAGGSKWMYVGKQNAGEVWYDITGNRTDKITINTDGWGNFQVNGGSVSVYVQQ

SEQ ID NO: 43317 - protein, 480 aa, Bacillus licheniformis
NGTLMQYFEWYMPNDGQHWRRLQNDSAYLAEHGITAVWIPPAYKGTSQADVGYGAYDLYDLGEFHQKGTVRTKYGTKGELQSAIKSLHSRDINVYGDVVINHKGGADATEDVTAVEVDPADRNRVISGEHLIKAWTHFHFPGRGSTYSDFKWHWYHFDGTDWDESRKLNRIYKFQGKAWDWPVSNENGNYDYLMYADIDYDHPDVAAEIKRWGTWYANELQLDGFRLDAVKHIKFSFLRDWVNHVREKTGKEMFTVAEYWQNDLGALENYLNLTNFNHSVFDVPLHYQFHAASTQGGGYDMRKLLNGTVVSKHPLKSVTFVDNHDTQPGQSLESTVQTWFKPLAYAFILTRESGYPQVFYGDMYGTKGDSQREIPALKHKIEPILKARKQYAYGAQHDYFDHHDIVGWTREGDSSVANSGLAALITDGPGGAKRMYVGRQNAGETWHDITGNRSEPVVINSEGWGEFHVNGGSVSIYVQR

SEQ ID NO: 43318 - protein, 480 aa, Bacillus licheniformis
NGTLMQYFEWYMPNDGQHWRRLQNDSAYLAEHGITAVWIPPAYKGTSQADVGYGAYDLYDLGEFHQKGTVRTKYGTKGELQSAIKSLHSRDINVYGDVVINHKGGADATEDVTAVEVDPADRNRVISGEHLIKAWTHFHFPGRGSTYSDFKWHWYHFDGTDWDESRKLNRIYKFQGKAWDWPVSNENGNYDYLMYADIDYDHPDVAAEIKRWGTWYANELQLDGFRLDAVKHIKFFFLRDWVNHVREKTGKEMFTVAEYWQNDLGALENYLNKTNFNHSVFDVPLHYQFHAASTQGGGYDMRKLLNGTVVSKHPLKSVTFVDNHDTQPGQSLESTVQTWFKPLAYAFILTRESGYPQVFYGDMYGTKGDSQREIPALKHKIEPILKARKQYAYGAQHDYFDHHDIVGWTREGDSSVANSGLAALITDGPGGAKRMYVGRQNAGETWHDITGNRSEPVVINSEGWGEFHVNGGSVSIYVQR

SEQ ID NO: 43319 - protein, 482 aa, Bacillus sp. YR288
NGTMMQYFEWYVPNDGQHWNRLRNDAAYLKSIGVSAIWTPPAYKGTSQNDVGYGAYDLYDLGEFNQKGTIRTKYGTKAELKSAVSTLKSNGIQVYGDVVMNHKGGADYTENVTAVEVNPSNRNQETSDEYTIQAWTGFNFPGRGTTHSPFKWQWYHFDGTDWDQSRNASRIFKFRGTGKAWDWEVSSENGNYDYLMYADLDFDHPDVRNEMKNWGVWYANEVGLDGFRLDAVKHIKHSYLGDWVNHVRTKTGKEMFTVAEYWQNDVNAINNYLAKVNYNHSVFDAPLHYNFHYASQSGGNYDMRNLLNGTVVAAHPTKAVTLVENHDSQPGQSLESVVQPWFKPLAYAFILTRAEGYPSIFYGDMYGTKGNSSYEIPALKTKIEPLLKARKDYAYGTQHNYMDHWDVIGWTREGDSTKEKSGLATLVTDGAGGSKWMYVGKQNAGEVWYDITGNRTDKITINTDGWGNFQVNGGSVSVYVQQ

SEQ ID NO: 43320 - protein, 480 aa, Bacillus licheniformis
NGTLMQYFEWYMPNDGQHWRRLQNDSAYLAEHGITAVWIPPAYKGTSQADVGYGAYDLYDLGEFHQKGTVRTKYGTKGELQSAIKSLHSRDINVYGDVVINHKGGADATEDVTAVEVDPADRNRVISGEHLIKAWTHFHFPGRGSTYSDFKWHWYHFDGTDWDESRKLNRIYKFQGKAWDWPVSNENGNYDYLMYADIDYDHPDVAAEIKRWGTWYANELQLDGFRLDAVKHIKFHFLRDWVNHVREKTGKEMFTVAEYWQNDLGALENYLNKTNFNHSVFDVPLHYQFHAASTQGGGYDMRKLLNGTVVSKHPLKSVTFVDNHDTQPGQSLESTVQTWFKPLAYAFILTRESGYPQVFYGDMYGTKGDSQREIPALKHKIEPILKARKQYAYGAQHDYFDHHDIVGWTREGDSSVANSGLAALITDGPGGAKRMYVGRQNAGETWHDITGNRSEPVVINSEGWGEFHVNGGSVSIYVQR

SEQ ID NO: 43321 - protein, 482 aa, Bacillus sp. YR288
NGTMMQYFEWYVPNDGQHWNRLRNDAAYLKSIGVNAIWTPPAYKGTSQNDVGYGAYDLYDLGEFNQKGTIRTKYGTKAELKSAVSTLKSNGIQVYGDVVMNHKGGADYTENVTAVEVNPSNRNQETSDEYTIQAWTGFNFPGRGTTHSPFKWQWYHFDGTDWDQSRNASRIFKFRGTGKAWDWEVSSENGNYDYLMYADLDFDHPDVRNEMKNWGVWYANEVGLDGFRLDAVKHIKHSYLGDWVNHVRTKTGKEMFTVAEYWQNDVNAINNYLAKVNYNHSVFDAPLHYNFHYASQSGGNYDMRNLLNGTVVAAHPTKAVTLVENHDSQPGQSLESVVQPWFKPLAYAFILTRAEGYPSIFYGDMYGTKGNSSYEIPALKTKIEPLLKARKDYAYGTQHNYMDHPDVIGWTREGDSTKEKSGLATLVTDGAGGSKWMYVGKQNAGEVWYDITGNRTDKITINTDGWGNFQVNGGSVSVYVQQ

SEQ ID NO: 43322 - protein, 480 aa, Bacillus licheniformis
NGTLMQYFEWYMPNDGQHWRRLQNDSAYLAEHGITAVWIPPAYKGTSQADVGYGAYDLYDLGEFHQKGTVRTKYGTKGELQSAIKSLHSRDINVYGDVVINHKGGADATEDVTAVEVDPADRNRVISGEHLIKAWTHFHFPGRGSTYSDFKWHWYHFDGTDWDESRKLNRIYLFQGKAWDWPVSNENGNYDYLMYADYDYDYPDVAAEITRWGTWYANELQLDGFRLDAVKHIKFSFLRDWVNHVREKTGKEMFTVAEYWQNDLGALENYLNKTNFNHSVFDVPLHYQFHAASTQGGGYDMRKLLNGTVVSTHPLKSVTFVDNHDTQPGQSLESTVQTWFKPLAYAFILTRESGYPSVFYGDMYGTKGDSQREIPALKHKIEPILKARKQYAYGAQHDYFDHHDIVGWTREGVSSVANSGLAALITDGPGGAKWMYVGRQNAGETWHDITGNRSEPVVINSEGWGEFHVNGGSVSIYVQR

SEQ ID NO: 43323 - protein, 480 aa, Bacillus licheniformis
NGTLMQYFEWYTPNDGQHWKRLQNDSAYLAEHGITAVWIPPAYKGTSQADVGYGAYDLYDLGEFHQKGTVRTKYGTKGELQSAIKSLHSRDINVYGDVVINHKGGADATEDVTAVEVDPADRNRVISGEHLIKAYTHFHFPGRGSTYSDFKWHWYHFDGTDWDESRKLNRIYKFQGKAWDWEVSNENGNYDYLTYADIDYDHPDVAAEIKRWGTWYANELQLDGFRLDAVKHIKFSFLRDWVNHVREKTGKEMFTVAEYWQNDLGALENYLNKTNFNHSVFDVPLHYQFHAASTQGGGYDMRKLLNGTVVSKHPLKSVTFVDNHDTQPGQSLESTVQTWFKPLAYAFILTRESGYPQVFYGDMYGTKGDSQREIPALKHKIEPILKARKQYAYGAQHDYFDHHDIVGWTREGDSSVANSGLAALITDGPGGAKRMYVGRQNAGETWHDITGNRSEPVVINSEGWGEFHVNGGSVSIYVQR

SEQ ID NO: 43324 - protein, 480 aa, Bacillus licheniformis
NGTLMQYFEWYMPNDGQHWKRLQNDSAYLAEHGITAVWIPPAYKGTSQADVGYGAYDLYDLGEFHQKGTVRTKYGTKGELQSAIKSLHSRDINVYGDVVINHKGGADATEDVTAVEVDPADRNRVISGEHLIKAYTHFHFPGRGSTYSDFKWHWYHFDGTDWDESRKLNRIYKFQGKAWDWEVSNENGNYDYLTYADIDYDHPDVAAEIKRWGTWYANELQLDGFRLDAVKHIKFSFLRDWVNHVREKTGKEMFTVAEYWQNDLGALENYLNKTNFNHSVFDVPLHYQFHAASTQGGGYDMRKLLNGTVVSKHPLKSVTFVDNHDTQPGQSLESTVQTWFKPLAYAFILTRESGYPQVFYGDMYGTKGDSQREIPALKHKIEPILKARKQYAYGAQHDYFDHHDIVGWTREGDSSVANSGLAALITDGPGGAKRMYVGRQNAGETWHDITGNRSEPVVINSEGWGEFHVNGGSVSIYVQR

SEQ ID NO: 43325 - protein, 480 aa, Bacillus licheniformis
NGTLMQYFEWYMPNDGQHWRRLQNDSAYLAEHGITAVWIPPAYKGTSQADVGYGAYDLYDLGEFHQKGTVRTKYGTKGELQSAIKSLHSRDINVYGDVVINHKGGADATEDVTAVEVDPADRNRVISGEHLIKAWTHFHFPGRGSTYSDFKWHWYHFDGTDWDESRKLNRIYLFQGKAWDWPVSNENGNYDYLMYADYDYDYPDVAAEITRWGTWYANELQLDGFRLDAVKHIKFSFLRDWVNHVREKTGKEMFTVAEYWQNDLGALENYLNKTNFNHSVFDVPLHYQFHAASTQGGGYDMRKLLNGTVVSHHPLKSVTFVDNHDTQPGQSLESTVQTWFKPLAYAFILTRESGYPSVFYGDMYGTKGDSQREIPALKHKIEPILKARKQYAYGAQHDYFDHHDIVGWTREGVSSVANSGLAALITDGPGGAKWMYVGRQNAGETWHDITGNRSEPVVINSEGWGEFHVNGGSVSIYVQR

SEQ ID NO: 43326 - protein, 480 aa, Bacillus licheniformis
NGTLMQYFEWYMPNDGQHWRRLQNDSAYLAEHGITAVWIPPAYKGTSQADVGYGAYDLYDLGEFHQKGTVRTKYGTKGELQSAIKSLHSRDINVYGDVVINHKGGADATEDVTAVEVDPADRNRVISGEHLIKAWTHFHFPGRGSTYSDFKWHWYHFDGTDWDESRKLNRIYLFQGKAWDWEVSNENGNYDYLMYADYDYDYPDVAAEITRWGTWYANELQLDGFRLDAVKHIKFSFLRDWVNHVREKTGKPMFTVAEYWQNDLGALENYLNKTNFNHSVFDVPLHYQFHAASTQGGGYDMRKLLNGTVVSTHPLKSVTFVDNHDTQPGQSLESTVQTWFKPLAYAFILTRESGYPSVFYGDMYGTKGDSQREIPALKHKIEPILKARKQYAYGAQHDYFDHHDIVGWTREGVSSVANSGLAALITDGPGGAKWMYVGRQNAGETWHDITGNRSEPVVINSEGWGEFHVNGGSVSIYVQR

SEQ ID NO: 43327 - protein, 480 aa, Bacillus sp. SCSIO 15121
NGTLMQYFEWYMPNDGQHWKRLQNDSAYLAEHGITAVWIPPAYKGTSQDDVGYGAYDLYDLGEFHQKGTVRTKYGTKGELQSAINSLHSRDINVYGDVVINHKGGADATEDVTAVEVDPADRNRVTSGEQRIKAWTHFQFPGRGSTYSDFKWHWEHFDGTDWDESRKLNRIYLFQGKAWDWEVSNENGNYDYLMYADIDYDHPDVTAEIKRWGTWYANELQLDGFRLDAVKHIKFSFLRDWVNHVREKTGKEMFTVAEYWQNDLGALENYLNKTNFNHSVFDVPLHYQFHAASTQGGGYDMRKLLNGTVVSKHPVKAVTFVDNHDTQPGQSLESTVQTWFKPLAYAFILTREAGYPQIFYGDMYGTKGASQREIPALKHKIEPILKARKQYAYGAQHDYFDHHNIVGWTREGDSSVANSGLAALITDGPSGTKRMYVGRQNAGETWHDITGNRSDSVVINAEGWGEFHVNGGSVSIYVQR

SEQ ID NO: 43328 - protein, 480 aa, Bacillus licheniformis
NGTLMQYFEWYMPNDGQHWRRLQNDSAYLAEHGITAVWIPPAYKGTSQADVGYGAYDLYDLGEFHQKGTVRTKYGTKGELQSAIKSLHSRDINVYGDVVINHKGGADATEDVTAVEVDPADRNRVISGEHLIKAWTHFHFPGRGSTYSDFKWHWYHFDGTDWDESRKLNRIYKFQGQAWDWEVSNENGNYDYLMYADIDYDHPVVAAEIKRWGTWYANELQLDGFRLDAVKHIKFSFLRDWVNHVREKTGKEMFTVAEYWQNDLGALENYLNKTNFSHSVFDVPLHYQFHAASTQGGGYDMRKLLNGTVVSKHPLKSVTFVDNHDTQPGQSLESTVQTWFKPLAYAFILTRESGYPQVFYGDMYGTKGDSQREIPALKHKIEPILKARKQYAYGAQHDYFDHHDIVGWTREGDSSVANSGLAALITDGPGGAKRMYVGRQNAGETWHDITGNRSEPVVINSEGWGEFHVNGGSVSIYVQR

SEQ ID NO: 43329 - protein, 482 aa, Bacillus sp. YR288
NGTMMQYFEWYVPNDGQHWNRLRNDAAYLKSIGVSAIWTPPAYKGTSQNDVGYGAYDLYDLGEFNQKGTIRTKYGTKAELKSAVSTLKSNGIQVYGDVVMNHKGGADYTENVTAVEVNPSNRNQETSDEYTIQAWTGFNFPGRGTTHSPFKWQWYHFDGTDWDQSRNASRIFKFRGTGKAWDWEVSSENGNYDYLMYADLDFDHPDVRNEMKNWGVWYANEVGLDGFRLDAVKHIKHSYLGDWVNHVRTKTGKEMFTVAEYWQNDVNAINNYLAKVNYNHSVFDAPLHYNFHYASQSGGNYDMRNLLNGTVVAAHPTKAVTLVENHDSQPGQSLESVVQPWFKPLAYAFILTRAEGYPSIFYGDMYGTKGNSSYEIPALKTKIEPLLKARKDYAYGTQHNYMDHWDVIGWTREGDSTKEKSGLATLVTDGVGGSKWMYVGKQNAGEVWYDITGNRTDKITINTDGWGNFQVNGGSVSVYVQQ

SEQ ID NO: 43330 - protein, 482 aa, Synthetic construct
NGTLMQYFEWYAPNDGNHWNRLRYDAESLAHKGITSVWIPPAYKGTSQNDVGYGAYDLYDLGEFNQKGTVRTKYGTKAQLKSAIDALHKQNIDVYGDVVMNHKGGADYTETVTAVEVDRNNRNIEVSGDYEISAWTGFNFPGRRDAYSNFKWKWYHFDGTDWDEGRKLNRIYKFRGIGKAWDWEVSSENGNYDYLMYADLDFDHPDVANEMKSWGTWYANELNLDGFRLDAVKHIDHEYLRDWVNHVRQQTGKEMFTVAEYWQNDIQTLNNYLAKVNYNQSVFDAPLHYNFHYASTGNGNYDMRNILNGTVMKNHPALAVTLVENHDSQPGQSLESVVSPWFKPLAYAFILTRAEGYPSVFYGDYYGTSGNSSYEIPALKDKIDPILTARKNFAYGTQRDYLDHPDVIGWTREGDSVHAKSGLAALISDGPGGSKWMDVGKNNAGEVWYDITGNQTNTVTINKDGSGQFHVSGGSVSIYVQQ

SEQ ID NO: 43331 - protein, 480 aa, Bacillus licheniformis
NGTLMQYFEWYXPNDGQHWKRLQNDSAYLAEHGITAVWIPPAYKGTSQADVGYGAYDLYDLGEFHQKGTVRTKYGTKGELQSAIKSLHSRDINVYGDVVINHKGGADATEDVTAVEVDPADRNRVISGEHLIKAXTHFHFPGRGSTYSDFKWHWYHFDGTDWDESRKLNRIYKFQGKAWDWEVSNENGNYDYLXYADIDYDHPDVAAEIKRWGTWYANELQLDGFRLDAVKHIKFSFLRDWVNHVREKTGKEMFTVAEYWQNDLGALENYLNKTNFNHSVFDVPLHYQFHAASTQGGGYDMRKLLNGTVVSKHPLKSVTFVDNHDTQPGQSLESTVQTWFKPLAYAFILTRESGYPQVFYGDMYGTKGDSQREIPALKHKIEPILKARKQYAYGAQHDYFDHHDIVGWTREGDSSVANSGLAALITDGPGGAKRMYVGRQNAGETWHDITGNRSEPVVINSEGWGEFHVNGGSVSIYVQR

SEQ ID NO: 43332 - protein, 480 aa, Bacillus licheniformis
NGTLMQYFEWYMPNDGQHWRRLQNDSAYLAEHGITAVWIPPAYKGTSQADVGYGAYDLYDLGEFHQKGTVRTKYGTKGELQSAIKSLHSRDINVYGDVVINHKGGADATEDVTAVEVDPADRNRVISGEHLIKAWTHFHFPGRGSTYSDFKWHWYHFDGTDWDESRKLNRIYKFQGKAWDWPVSNENGNYDYLMYADIDYDHPDVAAEIKRWGTWYANELQLDGFRLDAVKHIKFYFLRDWVNHVREKTGKEMFTVAEYWQNDLGALENYLNKTNFNHSVFDVPLHYQFHAASTQGGGYDMRKLLNGTVVSKHPLKSVTFVDNHDTQPGQSLESTVQTWFKPLAYAFILTRESGYPQVFYGDMYGTKGDSQREIPALKHKIEPILKARKQYAYGAQHDYFDHHDIVGWTREGDSSVANSGLAALITDGPGGAKRMYVGRQNAGETWHDITGNRSEPVVINSEGWGEFHVNGGSVSIYVQR

SEQ ID NO: 43333 - protein, 482 aa, Bacillus sp. YR288
NGTMMQYFEWYVPNDGQHWNRLRNDAAYLKSIGVSAIWTPPAYKGTSQNDVGYGAYDLYDLGEFNQKGTIRTKYGTKAELKSAVSTLKSNGIQVYGDVVMNHKGGADYTENVTAVEVNPSNRNQEISDEYTIQAWTGFNFPGRGTTHSPFKWQWYHFDGTDWDQSRNASRIFKFRGTGKAWDWPVSSENGNYDYLMYADLDFDHPDVRNEMKNWGVWYANEVGLDGFRLDAVKHIKHSYLGDWVNHVRTKTGKEMFTVAEYWQNDVNAINNYLAKVNYNHSVFDAPLHYNFHYASQSGGNYDMRNLLNGTVVAAHPTKAVTLVENHDSQPGQSLESVVQPWFKPLAYAFILTRAEGYPSIFYGDMYGTKGNSSYEIPALKTKIEPLLKARKDYAYGTQHNYMDHWDVIGWTREGDSTKEKSGLATLVTDGAGGSKWMYVGKQNAGEVWYDITGNRTDKITINTDGWGNFQVNGGSVSVYVQQ

SEQ ID NO: 43334 - protein, 482 aa, Bacillus sp. YR288
NGTMMQYFEWYVPNDGQHWNRLRNDAAYLKSIGVSAIWTPPAYKGTSQNDVGYGAYDLYDLGEFNQKGTIRTKYGTKAELKSAVSTLKSNGIQVYGDVVMNHKGGADYTENVTAVEVNPSNRNQETSDEYTIQAWTGFNFPGRGTTHSPFKWQWYHFDGTDWDQSRNASRIFKFRGTGKAWDWEVSSENGNYDYLMYADFDFDHPDVRNEMKNWGVWYANEVGLDGFRLDAVKHIKHSYLGDWVNHVRTKTGKEMFTVAEYWQNDVNAINNYLAKVNYNHSVFDAPLHYNFHYASQSGGNYDMRNLLNGTVVAAHPTKAVTLVENHDSQPGQSLESVVQPWFKPLAYAFILTRAEGYPSIFYGDMYGTKGNSSYEIPALKTKIEPLLKARKDYAYGTQHNYMDHWDVIGWTREGDSTKEKSGLATLVTDGAGGSKWMYVGKQNAGEVWYDITGNRTDKITINTDGWGNFQVNGGSVSVYVQQ

SEQ ID NO: 43335 - protein, 480 aa, Bacillus licheniformis
NGTLMQYFEWYMPNDGQHWRRLQNDSAYLAEHGITAVWIPPAYKGTSQADVGYGAYDLYDLGEFHQKGTVRTKYGTKGELQSAIKSLHSRDINVYGDVVINHKGGADATEDVTAVEVDPADRNRVISGEHLIKAWTHFHFPGRGSTYSDFKWHWYHFDGTDWDESRKLNRIYLFQGKAWDWPVSNENGNYDYLMYADYDYDYPDVAAEITRWGTWYANELQLDGFRLDAVKHIKFSFLRDWVNHVREKTGKEMFTVAEYWQNDLGALENYLNKTNFNHSVFDVPLHYQFHAASTQGGGYDMRKLLNGTVVSMHPLKSVTFVDNHDTQPGQSLESTVQTWFKPLAYAFILTRESGYPSVFYGDMYGTKGDSQREIPALKHKIEPILKARKQYAYGAQHDYFDHHDIVGWTREGVSSVANSGLAALITDGPGGAKWMYVGRQNAGETWHDITGNRSEPVVINSEGWGEFHVNGGSVSIYVQR

SEQ ID NO: 43336 - protein, 482 aa, Bacillus sp. YR288
NGTMMQYFEWYVPNDGQHWNRLRNDAAYLKSIGVSAIWTPPAYKGTSQNDVGYGAYDLYDLGEFNQKGTIRTKYGTKAELKSAVSTLKSNGIQVYGDVVMNHKGGADYTENVTAVEVNPSNRYQETSDEYTIQAWTGFNFPGRGTTHSPFKWQWYHFDGTDWDQSRNASRIFKFRGTGKAWDWEVSSENGNYDYLMYADLDYDHPDVRNEMKNWGVWYANEVGLDGFRLDAVKHIKHSFLGDWVNHVRTKTGKEMFTVAEYWQNDVNAINNYLAKVNYNHSVFDFPLHYNFHYASQSGGNYDMRNLLNGTVVAAHPTKAVTLVENHDSQPGQSLESVVQPWFKPLAYAFILTRAEGYPSIFYGDMYGTKGNSSYEIPALKTKIEPLLKARKDYAYGTQHNYMDHWDVIGWTREGDSTKEKSGLATLVTDGAGGSKWMYVGKQNAGEVWYDITGNRTDKITINTDGWGNFQVNGGSVSVYVQQ

SEQ ID NO: 43337 - protein, 482 aa, Bacillus sp. YR288
NGTMMQYFEWYVPNDGQHWNRLRNDAAYLKSIGVSAIWTPPAYKGTSQNDVGYGAYDLYDLGEFNQKGTIRTKYGTKAELKSAVSTLKSNGIQVYGDVVMNHKGGADYTENVTAVEVNPSNRNQETSDEYTIQAWTGFNFPGRGTTHSPFKWQWYHFDGTDWDQSRNASRIFKFRGTGKAWDWEVSSENGNYDYLMYADLDFDHPDVRNEMKNWGVWYANEVGLDGFRLDAVKHIKHSYLGDWVNHVRTKTGKEMFTVAEYWQNDVNAINNYLAKVNYNHSVFDAPLHYNFHYASQSGGNYDMRNLLNGTVVAAHPEKAVTLVENHDSQPGQSLESVVQPWFKPLAYAFILTRAEGYPSIFYGDMYGTKGNSSYEIPALKTKIEPLLKARKDYAYGTQHNYMDHWDVIGWTREGDSTKEKSGLATLVTDGAGGSKWMYVGKQNAGEVWYDITGNRTDKITINTDGWGNFQVNGGSVSVYVQQ

SEQ ID NO: 43338 - protein, 480 aa, Bacillus licheniformis
NGTLMQYFEWYMPNDGQHWKRLQNDSAYLAEHGITAVWIPPAYKGTSQADVGYGAYDLYDLGEFHQKGTVRTKYGTKGELQSAIKSLHSRDINVYGDVVINHKGGADATEDVTAVEVDPADRNRVISGEHLIKAWTHFHFPGAGSTYSDFKWHWYHFDGTDWDESRKLNRIYKFQGKAWDWEVSNENGNYDYLMYADIDYDHPDVAAEIKRWGTWYANELQLDGNRLDAVKHIKFSFLRDWVNHVREKTGKEMFTVAEYWQNDLGALENYLNKTNFNHSVFDVPLHYQFHAASTQGGGYDMRKLLNGTVVSKHPLKSVTFVDNHDTQPGQSLESTVQTWFKPLAYAFILTRESGYPQVFYGDMYGTKGDSQREIPALKHKIEPILKARKQYAYGAQHDYFDHHDIVGWTREGDSSVANSGLAALITDGPGGAKRMYVGRQNAGETWHDITGNRSEPVVINSEGWGEFHVNGGSVSIYVQR

SEQ ID NO: 43339 - protein, 482 aa, Bacillus sonorensis
NGTLMQYFEWNLPNDGQHWKRLQNDAGYLSDIGITAVWIPPAYKGTSQADVGYGPYDLYDLGEFLQKGTVRTKYGMKTELQSAVGSLHSQNIQVYGDVVLNHKAGADLTEDVTAVEVNPGNRNQEISGEYRIKAWTGFNFPGRGSTYSDFKWHWYHFDGTDWDESRKLNRIYKFRGDGKAWDWEVSSENGNYDYLMYADVDYDHPDVVAEMKRWGTWYAKELQLDGFRLDAVKHIKFSFFPDWLKYVRSQTGKEMFTVAEYWQNNLGEIENYLQKTDFQHSVFDVPLHFNLQAASSHGGSYDMRNLLNGTVVSKHPLKAVTFVDNHGTQPGQSLESTVQTWFKPLAYAFILTREAGYPQVFYGDMYGTKGPTSREIPSLKSKCEPILKARKYYAYGTQHDYFDHPDAIGWTREGDQSVAASGLAALITDGPGGSKRMYVGRQHAGETWHDITGNRSDSVVINSDGWGEFYVNGGSVSIYVQR

SEQ ID NO: 43340 - protein, 482 aa, Bacillus sonorensis
NGTLMQYFEWNLPNDGQHWKRLQNDAGYLSDIGITAVWIPPAYKGTSQADVGYGPYDLYDLGEFLQKGTVRTKYGMKTELQSRVGSLHSQNIQVYGDVVLNHKAGADLTEDVTAVEVNPGNRNQEISGEYRIKAWTGFNFPGRGSTYSDFKWHWYHFDGTDWDESRKLNRIYKFRGDGKAWDWEVSSENGNYDYLMYADVDYDHPDVVAEMKRWGTWYAKELQLDGFRLDAVKHIKFSFFSDWLSYVRSQTGKEMFTVAEYWQNNLGEIENYLQKTDFQHSVFDVPLHFNLQAASSHGGSYDMRNLLNGTVVSKHPLKAVTFVDNHDTQPGQSLESTVQTWFKPLAYAFILTREAGYPQVFYGDMYGTKGPTSREIPSLKSKCEPILKARKYYAYGTQHDYFDHPDAIGWTREGDQSVAASGLAALITDGPGGSKRMYVGRQHAGETWHDITGNRSDSVVINSDGWGEFYVNGGSVSIYVQR

SEQ ID NO: 43341 - protein, 480 aa, Bacillus licheniformis
NGTLMQYFEWYMPNDGQHWRRLQNDSAYLAEHGITAVWIPPAYKGTSQADVGYGAYDLYDLGEFHQKGTVRTKYGTKGELQSAIKSLHSRDINVYGDVVINHKGGADATEDVGAVEVDPADRNRVISGEHLIKAWTHFHFPGRGSTYSDFKWHWYHFDGTDWDESRKLNRIYLFQGKAWDWPVSNENGNYDYLMYADIDYDHPDVAAEIKRWGTWYANELQLDGFRLDAVKHIKFSFLRDWVNHVREKTGKEMFTVAEYWQNDLGALENYLNKTNFNHSVFDVPLHYQFHAASTQGGGYDMRKLLNGTVVSKHPLKSVTFVDNHDTQPGQSLESTVQTWFKPLAYAFILTRESGYPQVFYGDMYGTKGDSQREIPALKHKIEPILKARKQYAYGAQHDYFDHHDIVGWTREGDSSVANSGLAALITDGPGGAKRMYVGRQNAGETWHDITGNRSEPVVINSEGWGEFHVNGGSVSIYVQR

SEQ ID NO: 43342 - protein, 480 aa, Bacillus licheniformis
NGTLMQYFEWYMPNDGQHWRRLQNDSAYLAEHGITAVWIPPAYKGTSQADVGYGAYDLYDLGEFHQKGTVRTKYGTKGELQSAIKSLHSRDINVYGDVVINHKGGADATEDVTAVEVDPADRNRVISGEHLIKAWTHFHFPGRGSTYSDFKWHWYHFDGTDWDESRKLNRIYLFQGKAWDWEVSNENGNYDYLMYADYDYDYPDVAAEITRWGTWYANELQLDGFRLDAVKHIKFSFLRDWVNHVREKTGKPMFTVAEYWQNDLGALENYLNKTNFNHSVFDVPLHYQFHAASTQGGGYDMRKLLNGTVVSMHPLKSVTFVDNHDTQPGQSLESTVQTWFKPLAYAFILTRESGYPSVFYGDMYGTKGDSQREIPALKHKIEPILKARKQYAYGAQHDYFDHHDIVGWTREGVSSVANSGLAALITDGPGGAKWMYVGRQNAGETWHDITGNRSEPVVINSEGWGEFHVNGGSVSIYVQR

SEQ ID NO: 43343 - protein, 480 aa, Bacillus licheniformis
NGTLMQYFEWYMPNDGQHWRRLQNDSAYLAEHGITAVWIPPAYKGTSQADVGYGAYDLYDLGEFHQKGTVRTKYGTKGELQSAIKSLHSRDINVYGDVVINHKGGADATEDVTAVEVDPADRNRVISGEHLIKAWTHFHFPGRGSTYSDFKWHWYHFDGTDWDESRKLNRIYLFQGKAWDWEVSNENGNYDYLMYADYDYDYPDVAAEITRWGTWYANELQLDGFRLDAVKHIKFSFLRDWVNHVREKTGKPMFTVAEYWQNDLGALENYLNKTNFNHSVFDVPLHYQFHAASTQGGGYDMRKLLNGTVVSNHPLKSVTFVDNHDTQPGQSLESTVQTWFKPLAYAFILTRESGYPSVFYGDMYGTKGDSQREIPALKHKIEPILKARKQYAYGAQHDYFDHHDIVGWTREGVSSVANSGLAALITDGPGGAKWMYVGRQNAGETWHDITGNRSEPVVINSEGWGEFHVNGGSVSIYVQR

SEQ ID NO: 43344 - protein, 482 aa, Bacillus sp. YR288
NGTMMQYFEWYVPNDGQHWNRLRNDAAYLKSIGVSAIWTPPAYKGTSQNDVGYGAYDLYDLGEFNQKGTIRTKYGTKAELKSAVSTLKSNGIQVYGDVVMNHKGGADYTENVTAVEVNPSNRNQETSDEYTIQAWTGFNFPGRGTTHSPFKWQWYHFDGTDWDQSRNASRIFKFRGTGKAWDWEVSSENGNYDYLMYADLDFDHPDVRNEMKNWGVWYANEVGLDGFRLDAVKHIKHQFLGDWVNHVRTKTGKEMFTVAEYWQNDVNAINNYLAKVNYNHSVFDAPLHYNFHYASQSGGNYDMRNLLNGTVVAAHPTKAVTLVENHDSQPGQSLESVVQPWFKPLAYAFILTRAEGYPSIFYGDMYGTKGNSSYEIPALKTKIEPLLKARKDYAYGTQHNYMDHWDVIGWTREGDSTKEKSGLATLVTDGAGGSKWMYVGKQNAGEVWYDITGNRTDKITINTDGWGNFQVNGGSVSVYVQQ

SEQ ID NO: 43345 - protein, 482 aa, Bacillus sp. YR288
NGTMMQYFEWYVPNDGQHWNRLRNDAAYLKSIGVSAIWTPPAYKGTSQNDVGYGAYDLYDLGEFNQKGTIRTKYGTKAELKSAVSTLKSNGIQVYGDVVMNHKGGADYTENVTAVEVNPSNRNQETSDEYTIQAWTGFNFPGRGTTHSPFKWQWYHFDGTDWDQSRNASRIFKFRGTGKAWDWEVSSENGNYDYLMYADLDFDHPDVRNEMKNWGVWYANEVGLDGFRLDAVKHIKFSYLGDWVNHVRTKTGKEMFTVAEYWQNDVNAINNYLAKVNYNHSVFDAPLHYNFHYASQSGGNYDMRNLLNGTVVAAHPTKAVTLVENHDSQPGQSLESVVQPWFKPLAYAFILTRAEGYPSIFYGDMYGTKGNSSYEIPALKTKIEPLLKARKDYAYGTQHNYMDHWDVIGWTREGDSTKEKSGLATLVTDGAGGSKWMYVGKQNAGEVWYDITGNRTDKITINTDGWGNFQVNGGSVSVYVQQ

SEQ ID NO: 43346 - protein, 482 aa, Bacillus sp. YR288
NGTMMQYFEWYVPNDGQHWNRLRNDAAYLKSIGVSAIWTPPAYKGTSQNDVGYGAYDLYDLGEFNQKGTIRTKYGTKAELKSAVSTLKSNGIQVYGDVVMNHKGGADYTENVTAVEVNPSNRNQETSDEYTIQAWTGFNFPGRGTTHSPFKWQWYHFDGTDWDQSRNASRIFKFRHTGKAWDWEVSSENGNYDYLMYADLDFDHPDVRNEMKNWGVWYANEVGLDGFRLDAVKHIKHSYLGDWVNHVRTKTGKEMFTVAEYWQNDVNAINNYLAKVNYNHSVFDAPLHYNFHYASQSGGNYDMRNLLNGTVVAAHPTKAVTLVENHDSQPGQSLESVVQPWFKPLAYAFILTRAEGYPSIFYGDMYGTKGNSSYEIPALKTKIEPLLKARKDYAYGTQHNYMDHWDVIGWTREGDSTKEKSGLATLVTDGAGGSKWMYVGKQNAGEVWYDITGNRTDKITINTDGWGNFQVNGGSVSVYVQQ

SEQ ID NO: 43347 - protein, 480 aa, Bacillus licheniformis
NGTLMQYFEWYMPNDGQHWRRLQNDSAYLAEHGITAVWIPPAYKGTSQADVGYGAYDLYDLGEFHQKGTVRTKYGTKGELQSAIKSLHSRDINVYGDVVINHKGGADATEDVTAVEVDPADRNRVISGEHLIKAWTHFHFPGRGSTYSDFKWHWYHFDGTDWDESRKLNRIYLFQGKAWDWEVSNENGNYDYLMYADYDYDYPDVAAEITRWGTWYANELQLDGFRLDAVKHIKFSFLRDWVNHVREKTGKPMFTVAEYWQNDLGALENYLNKTNFNHSVFDVPLHYQFHAASTQGGGYDMRKLLNGTVVSEHPLKSVTFVDNHDTQPGQSLESTVQTWFKPLAYAFILTRESGYPSVFYGDMYGTKGDSQREIPALKHKIEPILKARKQYAYGAQHDYFDHHDIVGWTREGVSSVANSGLAALITDGPGGAKWMYVGRQNAGETWHDITGNRSEPVVINSEGWGEFHVNGGSVSIYVQR

SEQ ID NO: 43348 - protein, 480 aa, Bacillus licheniformis
NGTLMQYFEWYMPNDGQHWRRLQNDSAYLAEHGITAVWIPPAYKGTSQADVGYGAYDLYDLGEFHQKGTVRTKYGTKGELQSAIKSLHSRDINVYGDVVINHKGGADATEDVTAVEVDPADRNRVISGEHLIKAWTHFHFPGRGSTYSDFKWHWYHFDGTDWDESRKLNRIYLFQGKAWDWPVSNENGNYDYLMYADYDYDYPDVAAEITRWGTWYANELQLDGFRLDAVKHIKFSFLRDWVNHVREKTGKEMFTVAEYWQNDLGALENYLNKTNFNHSVFDVPLHYQFHAASTQGGGYDMRKLLNGTVVSGHPLKSVTFVDNHDTQPGQSLESTVQTWFKPLAYAFILTRESGYPSVFYGDMYGTKGDSQREIPALKHKIEPILKARKQYAYGAQHDYFDHHDIVGWTREGVSSVANSGLAALITDGPGGAKWMYVGRQNAGETWHDITGNRSEPVVINSEGWGEFHVNGGSVSIYVQR

SEQ ID NO: 43349 - protein, 480 aa, Bacillus licheniformis
NGTLMQYFEWYMPNDGQHWRRLQNDSAYLAEHGITAVWIPPAYKGTSQADVGYGAYDLYDLGEFHQKGTVRTKYGTKGELQSAIKSLHSRDINVYGDVVINHKGGADATEDVTAVEVDPADRNRVISGEHLIKAWTHFHFPGRGSTYSDFKWHWYHFDGTDWDESRKLNRIYRFQGKAWDWEVSNENGNYDYLMYADFDYDNPDVAAEIKRWGTWYANELQLDGFRLDAVKHIKFSFLRDWVNHVREKTGKEMFTVAEYWQNDLGALENYLNKTNFNHSVFDVPLHYQFHAASTQGGGYDMRKLLNGTVVSKHPLKSVTFVDNHDTQPGQSLESTVQTWFKPLAYAFILTRESGYPQVFYGDMYGTKGDSQREIPALKHKIEPILKARKQYAYGAQHDYFDHHDIVGWTREGDSSVANSGLAALITDGPGGAKRMYVGRQNAGETWHDITGNRSEPVVINSEGWGEFHVNGGSVSIYVQR

SEQ ID NO: 43350 - protein, 482 aa, Bacillus sp. YR288
NGTMMQYFEWYVPNDGQHWNRLRNDAAYLKSIGVSAIWTPPAYKGTSQNDVGYGAYDLYDLGEFNQKGTIRTKYGTKAELKSAVSTLKSNGIQVYGDVVMNHKGGADYTENVTAVEVNPSNRNQETSDEYTIQAWTGFNFPGRGTTHSPFKWQWYHFDGTDWDQSRNASRIFKFRGTGKAWDWEVSSENGNYDYLMYADLDFDHPDVRNEMKNWGVWYANEVGLDGFRLDAVKHIKHSYLGDWVNHVRTKTGKEMFTVAEYWQNDVNAINNYLAKVNYNHSVFDAPLHYNFHYASQSGGNYDMRNLLNGTVVAAHPTKAVTLVENHDSQPGQSLESVVQPWFKPLAYAFILTRAEGYPSIFYGDMYGTKGNSSYEIPALKTKIEPLLKARKDYAYGTQHNYMDHWDVIGWTREGDSTKEKSGLATVVTDGAGGSKWMYVGKQNAGEVWYDITGNRTDKITINTDGWGNFQVNGGSVSVYVQQ

SEQ ID NO: 43351 - protein, 480 aa, Bacillus licheniformis
NGTLMQYFEWYMPNDGQHWRRLQNDSAYLAEHGITAVWIPPAYKGTSQADVGYGAYDLYDLGEFHQKGTVRTKYGTKGELQSAIKSLHSRDINVYGDVVINHKGGADATEDVTAVEVDPADRNRVISGEHLIKAWTHFHFPGRGSTYSDFKWHWYHFDGTDWDESRKLNRIYLFQGKAWDWPVSNENGNYDYLMYADYDYDYPDVAAEITRWGTWYANELQLDGFRLDAVKHIKFSFLRDWVNHVREKTGKEMFTVAEYWQNDLGALENYLNKTNFNHSVFDVPLHYQFHAASTQGGGYDMRKLLNGTVVSNHPLKSVTFVDNHDTQPGQSLESTVQTWFKPLAYAFILTRESGYPSVFYGDMYGTKGDSQREIPALKHKIEPILKARKQYAYGAQHDYFDHHDIVGWTREGVSSVANSGLAALITDGPGGAKWMYVGRQNAGETWHDITGNRSEPVVINSEGWGEFHVNGGSVSIYVQR

SEQ ID NO: 43352 - protein, 482 aa, Bacillus sp. YR288
NGTMMQYFEWYVPNDGQHWNRLRNDAAYLKSIGVSAIWTPPAYKGTSQNDVGYGAYDLYDLGEFNQKGTIRTKYGTKAELKSAVSTLKSNGIQVYGDVVMNHKGGADYTENVTAVEVNPSNRNQETSDEYTIQAWTGFNFPGRGTTHSPFKWQWYHFDGTDWDQSRNASRIFKFRGTGKAWDWEVSSENGNYDYLMYADLDFDHPDVRNEMKNWGVWYANEVGLDGFRLDAVKHIKHSYLGDWVNHVRTKTGKEMFTVAEYWQNDVNAINNYLAKVNYNHSVFDFPLHYNFHYASQSGGNYDMRNLLNGTVVAAHPTKAVTLVENHDSQPGQSLESVVQPWFKPLAYAFILTRAEGYPSIFYGDMYGTKGNSSYEIPALKTKIEPLLKARKDYAYGTQHNYMDHWDVIGWTREGDSTKEKSGLATLVTDGAGGSKWMYVGKQNAGEVWYDITGNRTDKITINTDGWGNFQVNGGSVSVYVQQ

SEQ ID NO: 43353 - protein, 482 aa, Bacillus sp. YR288
NGTMMQYFEWYVPNDGQHWNRLRNDAAYLKSIGVSAIWTPPAYKGTSQNDVGYGAYDLYDLGEFNQKGTIRTKYGTKAELKSAVSTLKSNGIQVYGDVVMNHKGGADYTENVTAVEVNPSNRNQETSDEYTIQAWTGFNFPGRGTTHSPFKWQWYHFDGTDWDQSRNASRIFKFRGTGKAWDWEVSSENGNYDYLMYADLDFDHPDVINEMKNWGVWYANEVGLDGFRLDAVKHIKFQFLGDWVNHVRTKTGKEMFTVAEYWQNDVNAINNYLAKVNYNHSVFDAPLHYNFHYASQSGGNYDMRNLLNGTVVAAHPTKAVTLVENHDSQPGQSLESVVQPWFKPLAYAFILTRAEGYPSIFYGDMYGTKGNSSYEIPALKTKIEPLLKARKDYAYGTQHNYMDHWDVIGWTREGDSTKEKSGLATLVTDGAGGSKWMYVGKQNAGEVWYDITGNRTDKITINTDGWGNFQVNGGSVSVYVQQ

SEQ ID NO: 43354 - protein, 480 aa, Bacillus licheniformis
NGTLMQYFEWYMPNDGQHWRRLQNDSAYLAEHGITAVWIPPAYKGTSQADVGYGAYDLYDLGEFHQKGTVRTKYGTKGELQSAIKSLHSRDINVYGDVVINHKGGADATEDVTAVEVDPADRNRVISGEHLIKAWTHFHFPGRGSTYSDFSWHWYHFDGTDWDESRKLNRIYLFQGKAWDWPVSNENGNYDYLMYADYDYDYPDVAAEITRWGTWYANELQLDGFRLDAVKHIKFSFLRDWVNHVREKTGKEMFTVAEYWQNDLGALENYLNKTNFNHSVFDVPLHYQFHAASTQGGGYDMRKLLNGTVVSKHPLKSVTFVDNHDTQPGQSLESTVQTWFKPLAYAFILTRESGYPSVFYGDMYGTKGDSQREIPALKHKIEPILKARKQYAYGAQHDYFDHHDIVGWTREGVSSVANSGLAALITDGPGGAKWMYVGRQNAGETWHDITGNRSEPVVINSEGWGEFHVNGGSVSIYVQR

SEQ ID NO: 43355 - protein, 480 aa, Bacillus licheniformis
NGTLMQYFEWYMPNDGQHWRRLQNDSAYLAEHGITAVWIPPAYKAISQADVGYGAYDLYDLGEFHQKGTVRTKYGTKGELQSAIKSLHSRDINVYGDVVINHKGGADATEDVTAVEVDPADRNRVISGEHLIKAWTHFHFPGRGSTYSDFKWHWYHFDGTDWDESRKLNRIYKFQGKAWDWEVSNENGNYDYLMYADFDYDHPDVAAEIKRWGTWYANELQLDGFRLDAVKHIKFSFLRDWVNHVREKTGKEMFTVAEYWQNDLGALENYLNKTNFNHSVFDVPLHYQFHAASTQGGGYDMRKLLNGTVVSKHPLKSVTFVDNHDTQPGQSLESTVQTWFKPLAYAFILTRESGYPQVFYGDMYGTKGDSQREIPALKHKIEPILKARKQYAYGAQHDYFDHHDIVGWTREGDSSVANSGLAALITDGPGGAKRMYVGRQNAGETWHDITGNRSEPVVINSEGWGEFHVNGGSVSIYVQR

SEQ ID NO: 43356 - protein, 480 aa, Bacillus licheniformis
NGTLMQYFEWYMPNDGQHWRRLQNDSAYLAEHGITAVWIPPAYKGTSQADVGYGAYDLYDLGEFHQKGTVRTKYGTKGELQSAIKSLHSRDINVYGDVVINHKGGADATEDVTAVEVDPADRNRVISGEHLIKAWTHFHFPGRGSTYSDFKWHWYHFDGTDWDESRKLNRIYLFQGKAWDWPVSNENGNYDYLMYADIDYDHPDVAAEIKRWGTWYANELQLDGFRLDAVKHIKFSFLRDWVNHVREKTGKEMFTVAEYWQNDLGALENYLNKTNFNHSVFDVPLHYQFHAASTQGGGYDMRKLLNGTVVSKHPLKSVTFVDNHDTQPGQSLESTVQTWFKPLAYAFILTRESGYPQVFYGDMYGTKGDSQGEIPALKHKIEPILKARKQYAYGAQHDYFDHHDIVGWTREGDSSVANSGLAALITDGPGGAKRMYVGRQNAGETWHDITGNRSEPVVINSEGWGEFHVNGGSVSIYVQR

SEQ ID NO: 43357 - protein, 480 aa, Bacillus licheniformis
NGTLMQYFEWYMPNDGQHWRRLQNDSAYLAEHGITAVWIPPAYKGTSQADVGYGAYDLYDLGEFHQKGTVRTKYGTKGELQSAIKSLHSRDINVYGDVVINHKGGADATEDVTAVEVDPADRNRVISGEHLIKAWTHFHFPGRGSTYSDFKWHWYHFDGTDWDESRKLNRIYLFQGKAWDWEVSNENGNYDYLMYADYDYDYPDVAAEITRWGTWYANELQLDGFRLDAVKHIKFSFLRDWVNHVREKTGKPMFTVAEYWQNDLGALENYLNKTNFNHSVFDVPLHYQFHAASTQGGGYDMRKLLNGTVVSWHPLKSVTFVDNHDTQPGQSLESTVQTWFKPLAYAFILTRESGYPSVFYGDMYGTKGDSQREIPALKHKIEPILKARKQYAYGAQHDYFDHHDIVGWTREGVSSVANSGLAALITDGPGGAKWMYVGRQNAGETWHDITGNRSEPVVINSEGWGEFHVNGGSVSIYVQR

SEQ ID NO: 43358 - protein, 482 aa, Bacillus sp. YR288
NGTMMQYFEWYVPNDGQHWNRLRNDAAYLKSIGVSAIWTPPAYKGTSQNDVGYGAYDLYDLGEFNQKGTIRTKYGTKAELKSAVSTLKSNGIQVYGDVVMNHKGGADYTENVTAVEVNPSNRNQETSDEYTIQAWTGFNFPGRGTTHSPFKWQWYHFDGTDWDQSRNASRIFKFRDTGKAWDWEVSSENGNYDYLMYADLDFDHPDVRNEMKNWGVWYANEVGLDGFRLDAVKHIKHSYLGDWVNHVRTKTGKEMFTVAEYWQNDVNAINNYLAKVNYNHSVFDAPLHYNFHYASQSGGNYDMRNLLNGTVVAAHPTKAVTLVENHDSQPGQSLESVVQPWFKPLAYAFILTRAEGYPSIFYGDMYGTKGNSSYEIPALKTKIEPLLKARKDYAYGTQHNYMDHWDVIGWTREGDSTKEKSGLATLVTDGAGGSKWMYVGKQNAGEVWYDITGNRTDKITINTDGWGNFQVNGGSVSVYVQQ

SEQ ID NO: 43359 - protein, 482 aa, Bacillus sp. YR288
NGTMMQYFEWYVPNDGQHWNRLRNDAAYLKSIGVSAIWTPPAYKGTSQNDVGYGAYDLYDLGEFNQKGTIRTKYGTKAELKSAVSTLKSNGIQVYGDVVMNHKGGADYTENVTAVEVNPSNRNQETSDEYTIQAWTGFNFPGRGTTHSPFKWQWYHFDGTDWDQSRNASRIFKFRGTGKAWDWEVSSENGNYDYLMYADLDFDHPDVRNEMKNWGVWYANEVGLDGFRLDAVKHIKHSYLGDWVNHVRTKTGKEMFTVAEYWQNDVNAINNYLAKVNYNHSVFDAPLHYNFHYASQSGGNYDMRNLLNGTVVAAHPTKAVTLVENHDSQPGQSLESVVQPWFKPLAYAFILTRAEGYPSIFYGDMYGTKGNSSYEIPALKTKIEPLLKARKDYAYGTQHNYMDHPDVIGWTREGDSTKEKSGLATLVTDGAGGSKWMYVGKQNAGEVWYDITGNRTDKITINTDGWGNFQVNGGSVSVYVQQ

SEQ ID NO: 43360 - protein, 480 aa, Bacillus licheniformis
NGTLMQYFEWYMPNDGQHWRRLQNDSAYLAEHGITAVWIPPAYKGTSQADVGYGAYDLYDLGEFHQKGTVRTKYGTKGELQSAIKSLHSRDINVYGDVVINHKGGADATEDVTAVEVDPADRNRVISGEHLIKAWTHFHFPGRGSTYSDFKWHWYHFDGTDWDESRKLNRIYKFQGKAWDWPVSNENGNYDYLMYADIDYDHPDVAAEIKRWGTWYANELQLDGFRLDAVKHIKFSFLRDWVNHVREKTGKEMFTVAEYWQNDLGALENYLNWTNFNHSVFDVPLHYQFHAASTQGGGYDMRKLLNGTVVSKHPLKSVTFVDNHDTQPGQSLESTVQTWFKPLAYAFILTRESGYPQVFYGDMYGTKGDSQREIPALKHKIEPILKARKQYAYGAQHDYFDHHDIVGWTREGDSSVANSGLAALITDGPGGAKRMYVGRQNAGETWHDITGNRSEPVVINSEGWGEFHVNGGSVSIYVQR

SEQ ID NO: 43361 - protein, 482 aa, Bacillus sp. YR288
NGTMMQYFEWYVPNDGQHWNRLRNDAAYLKSIGVSAIWTPPAYKGTSQNDVGYGAYDLYDLGEFNQKGTIRTKYGTKAELKSAVSTLKSNGIQVYGDVVMNHKGGADYTENVTAVEVNPSNRYQEISDEYTIQAWTGFNFPGRGTTHSPFKWQWYHFDGTDWDQSRNASRIFKFRGTGKAWDWEVSSENGNYDYLMYADYDYDHPDVRNEMKNWGVWYANEVGLDGFRLDAVKHIKHSYLGDWVNHVRTKTGKEMFTVAEYWQNDVNAINNYLAKVNYNHSVFDAPLHYNFHYASQSGGNYDMRNLLNGTVVAAHPTKAVTLVENHDSQPGQSLESVVQPWFKPLAYAFILTRAEGYPSIFYGDMYGTKGNSSYEIPALKTKIEPLLKARKDYAYGTQHNYMDHWDVIGWTREGDSTKEKSGLATLVTDGAGGSKWMYVGKQNAGEVWYDITGNRTDKITINTDGWGNFQVNGGSVSVYVQQ

SEQ ID NO: 43362 - protein, 480 aa, Bacillus licheniformis
NGTLMQYFEWYMPNDGQHWRRLQNDSAYLAEHGITAVWIPPAYKGTSQADVGYGAYDLYDLGEFHQKGTVRTKYGTKGELQSAIKSLHSRDINVYGDVVINHKGGADATEDVTAVEVDPADRNRVISGEHLIKAWTHFHFPGRGSTYSDFKWHWYHFDGTDWDESRKLNRIYLFQGKAWDWEVSNENGNYDYLMYADYDYDYPDVAAEITRWGTWYANELQLDGFRLDAVKHIKFSFLRDWVNHVREKTGKPMFTVAEYWQNDLGALENYLNKTNFNHSVFDVPLHYQFHAASTQGGGYDMRKLLNGTVVSFHPLKSVTFVDNHDTQPGQSLESTVQTWFKPLAYAFILTRESGYPSVFYGDMYGTKGDSQREIPALKHKIEPILKARKQYAYGAQHDYFDHHDIVGWTREGVSSVANSGLAALITDGPGGAKWMYVGRQNAGETWHDITGNRSEPVVINSEGWGEFHVNGGSVSIYVQR

SEQ ID NO: 43363 - protein, 482 aa, Bacillus sp. YR288
NGTMMQYFEWYVPNDGQHWNRLRNDAAYLKSIGVSAIWTPPAYKGTSQNDVGYGAYDLYDLGEFNQKGTIRTKYGTKAELKSAVSTLKSNGIQVYGDVVMNHKGGADYTENVTAVEVNPSNRNQETSDEYTIQAWTGFNFPGRGTTHSPFKWQWYHFDGTDWDQSRNASRIFKFRGTGKAWDWEVSSENGNYDYLMYADLDYDHPDVINEMKNWGVWYANEVGLDGFRLDAVKHIKFQFLGDWVNHVRTKTGKEMFTVAEYWQNDVNAINNYLAKVNYNHSVFDAPLHYNFHYASQSGGNYDMRNLLNGTVVAAHPTKAVTLVENHDSQPGQSLESVVQPWFKPLAYAFILTRAEGYPSIFYGDMYGTKGNSSYEIPALKTKIEPLLKARKDYAYGTQHNYMDHWDVIGWTREGDSTKEKSGLATLVTDGAGGSKWMYVGKQNAGEVWYDITGNRTDKITINTDGWGNFQVNGGSVSVYVQQ

SEQ ID NO: 43364 - protein, 480 aa, Bacillus licheniformis
NGTLMQYFEWYMPNDGQHWRRLQNDSAYLAEHGITAVWIPPAYKGTSQADVGYGAYDLYDLGEFHQKGTVRTKYGTKGELQSAIKSLHSRDINVYGDVVINHKGGADATEDVTAVEVDPADRNRVISGEHLIKAWTHFHFPGRGSTYSDFKWHWYHFDGTDWDESRKLNRIYKFQGKAWDWPVSNENGNYDYLMYADIDYDHPDVAAEIKRWGTWYANELQLDGFRLDAVKHIKFSFLRDWVNHVREKTGKEMFTVAEYWQNDLGALENYLNITNFNHSVFDVPLHYQFHAASTQGGGYDMRKLLNGTVVSKHPLKSVTFVDNHDTQPGQSLESTVQTWFKPLAYAFILTRESGYPQVFYGDMYGTKGDSQREIPALKHKIEPILKARKQYAYGAQHDYFDHHDIVGWTREGDSSVANSGLAALITDGPGGAKRMYVGRQNAGETWHDITGNRSEPVVINSEGWGEFHVNGGSVSIYVQR

SEQ ID NO: 43365 - protein, 480 aa, Bacillus licheniformis
NGTLMQYFEWYSPNDGQHWKRLQNDSAYLAEHGITAVWIPPAYKGTSQADVGYGAYDLYDLGEFHQKGTVRTKYGTKGELQSAIKSLHSRDINVYGDVVINHKGGADATEDVTAVEVDPADRNRVISGEHLIKAYTHFHFPGRGSTYSDFKWHWYHFDGTDWDESRKLNRIYKFQGKAWDWEVSNENGNYDYLTYADIDYDHPDVAAEIKRWGTWYANELQLDGFRLDAVKHIKFSFLRDWVNHVREKTGKEMFTVAEYWQNDLGALENYLNKTNFNHSVFDVPLHYQFHAASTQGGGYDMRKLLNGTVVSKHPLKSVTFVDNHDTQPGQSLESTVQTWFKPLAYAFILTRESGYPQVFYGDMYGTKGDSQREIPALKHKIEPILKARKQYAYGAQHDYFDHHDIVGWTREGDSSVANSGLAALITDGPGGAKRMYVGRQNAGETWHDITGNRSEPVVINSEGWGEFHVNGGSVSIYVQR

SEQ ID NO: 43366 - protein, 482 aa, Bacillus sp. YR288
NGTMMQYFEWYVPNDGQHWNRLRNDAAYLKSIGVSAIWTPPAYKGTSQNDVGYGAYDLYDLGEFNQKGTIRTKYGTKAELKSAVSTLKSNGIQVYGDVVMNHKGGADYTENVTAVEVNPSNRNQETSDEYTIQAWTGFNFPGRGTTHSPFKWQWYHFDGTDWDQSRNASRIFKFRGTGKAWDWPVSSENGNYDYLMYADLDFDHPDVRNEMKNWGVWYANEVGLDGFRLDAVKHIKHSFLGDWVNHVRTKTGKEMFTVAEYWQNDVNAINNYLAKVNYNHSVFDAPLHYNFHYASQSGGNYDMRNLLNGTVVAAHPTKAVTLVENHDSQPGQSLESVVQPWFKPLAYAFILTRAEGYPSIFYGDMYGTKGNSSYEIPALKTKIEPLLKARKDYAYGTQHNYMDHWDVIGWTREGDSTKEKSGLATLVTDGAGGSKWMYVGKQNAGEVWYDITGNRTDKITINTDGWGNFQVNGGSVSVYVQQ

SEQ ID NO: 43367 - protein, 480 aa, Bacillus licheniformis
NGTLMQYFEWYMPNDGQHWRRLQNDSAYLAEHGITAVWIPPAYKGTSQADVGYGAYDLYDLGEFHQKGTVRTKYGTKGELQSAIKSLHSRDINVYGDVVINHKGGADATEDVTAVEVDPADRNRVISGEHLIKAWTHFHFPGRGSTYSDFHWHWYHFDGTDWDESRKLNRIYLFQGKAWDWPVSNENGNYDYLMYADYDYDYPDVAAEITRWGTWYANELQLDGFRLDAVKHIKFSFLRDWVNHVREKTGKEMFTVAEYWQNDLGALENYLNKTNFNHSVFDVPLHYQFHAASTQGGGYDMRKLLNGTVVSKHPLKSVTFVDNHDTQPGQSLESTVQTWFKPLAYAFILTRESGYPSVFYGDMYGTKGDSQREIPALKHKIEPILKARKQYAYGAQHDYFDHHDIVGWTREGVSSVANSGLAALITDGPGGAKWMYVGRQNAGETWHDITGNRSEPVVINSEGWGEFHVNGGSVSIYVQR

SEQ ID NO: 43368 - protein, 482 aa, Bacillus sp. YR288
NGTMMQYFEWYVPNDGQHWNRLRNDAAYLKSIGVSAIWTPPAYKGTSQNDVGYGAYDLYDLGEFNQKGTIRTKYGTKAELKSAVSTLKSNGIQVYGDVVMNHKGGADYTENVTAVEVNPSNRNQETSDEYTIQAWTGFNFPGRGTTHSPFKWQWYHFDGTDWDQSRNASRIFKFRGTGKAWDWEVSSENGNYDYLMYADLDFDHPDVRNEMKNWGVWYANEVGLDGFRLDAVKHIKHSYLLDWVNHVRTKTGKEMFTVAEYWQNDVNAINNYLAKVNYNHSVFDAPLHYNFHYASQSGGNYDMRNLLNGTVVAAHPTKAVTLVENHDSQPGQSLESVVQPWFKPLAYAFILTRAEGYPSIFYGDMYGTKGNSSYEIPALKTKIEPLLKARKDYAYGTQHNYMDHWDVIGWTREGDSTKEKSGLATLVTDGAGGSKWMYVGKQNAGEVWYDITGNRTDKITINTDGWGNFQVNGGSVSVYVQQ

SEQ ID NO: 43369 - protein, 480 aa, Bacillus licheniformis
NGTLMQYFEWYMPNDGQHWRRLQNDSAYLAEHGITAVWIPPAYKGTSQADVGYGAYDLYDLGEFHQKGTVRTKYGTKGELQSAIKSLHSRDINVYGDVVINHKGGADATEDVTAVEVDPADRNRVISGEHLIKAWTHFHFPGRGSTYSDFKWHWYHFDGTDWDESRKLNRIYLFQGKAWDWPVSNENGNYDYLMYADYDYDYPDVAAEITRWGTWYANELQLDGFRLDAVKHIKFSFLRDWVNHVREKTGKEMFTVAEYWQNDLGALENYLNKTNFNHSVFDVPLHYQFHAASTQGGGYDMRKLLNGTVVSWHPLKSVTFVDNHDTQPGQSLESTVQTWFKPLAYAFILTRESGYPSVFYGDMYGTKGDSQREIPALKHKIEPILKARKQYAYGAQHDYFDHHDIVGWTREGVSSVANSGLAALITDGPGGAKWMYVGRQNAGETWHDITGNRSEPVVINSEGWGEFHVNGGSVSIYVQR

SEQ ID NO: 43370 - protein, 482 aa, Bacillus sp. YR288
NGTMMQYFEWYVPNDGQHWNRLRNDAAYLKSIGVSAIWTPPAYKGTSQNDVGYGAYDLYDLGEFNQKGTIRTKYGTKAELKSAVSTLKSNGIQVYGDVVMNHKGGADYTENVTAVEVNPSNRNQETSDEYTIQAWTGFNFPGRGTTHSPFKWQWYHFDGTDWDQSRNASRIFKFRGTGKAWDWEVSSENGNYDYLMYADYDFDHPDVINEMKNWGVWYANEVGLDGFRLDAVKHIKHSFLGDWVNHVRTKTGKEMFTVAEYWQNDVNAINNYLAKVNYNQSVFDAPLHYNFHYASQSGGNYDMRNLLNGTVVAAHPTKAVTLVENHDSQPGQSLESVVQPWFKPLAYAFILTRAEGYPSIFYGDMYGTKGNSSYEIPALKTKIEPLLKARKDYAYGTQHNYMDHWDVIGWTREGDSTKEKSGLATLVTDGAGGSKWMYVGKQNAGEVWYDITGNRTDKITINTDGWGNFQVNGGSVSVYVQQ

SEQ ID NO: 43371 - protein, 482 aa, Bacillus sp. YR288
NGTMMQYFEWYVPNDGQHWNRLRNDAAYLKSIGVSAIWTPPAYKGTSQNDVGYGAYDLYDLGEFNQKGTIRTKYGTKAELKSAVSTLKSNGIQVYGDVVMNHKGGADYTENVTAVEVNPSNRNQETSDEYTIQAWTGFNFPGRGTTHSPFKWQWYHFDGTDWDQSRNASRIFKFRGTGKAWDWEVSSENGNYDYLMYADYDFDHPDVRNEMKNWGVWYANEVGLDGFRLDAVKHIKHSYLGDWVNHVRTKTGKEMFTVAEYWQNDVNAINNYLAKVNYNHSVFDAPLHYNFHYASQSGGNYDMRNLLNGTVVAAHPTKAVTLVENHDSQPGQSLESVVQPWFKPLAYAFILTRAEGYPSIFYGDMYGTKGNSSYEIPALKTKIEPLLKARKDYAYGTQHNYMDHWDVIGWTREGDSTKEKSGLATLVTDGAGGSKWMYVGKQNAGEVWYDITGNRTDKITINTDGWGNFQVNGGSVSVYVQQ

SEQ ID NO: 43372 - protein, 480 aa, Synthetic construct
NGTLMQYFEWYMPNDGQHWRRLQNDSAYLAEHGITAVWIPPAYKGTSQADVGYGAYDLYDLGEFHQKGTVRTKYGTKGELQSAIKSLHSRDINVYGDVVINHKGGADATEDVTAVEVDPADRNRVISGEHLIKAWTHFHFPGRGSTYSDFKWHWYHFDGTDWDESRKLNRIYKFQGKAWDWEVSNENGNYDYLMYADIDYDHPDVAAEIKRWGTWYANELQLDGFRLDAVKHIKFSFLRDWVNHVREKTGKEMFTVAEYWQNDLGALENYLNKTNFNHSVFDVPLHYQFHAASTQGGGYDMRKLLXGTVVSKHPLKSVTFVDNHDTQPGQSLESTVQTWFKPLAYAFILTRESGYPQVFYGDMYGTKGDSQREIPALKHKIEPILKARKQYAYGAQHDYFDHHDIVGWTREGDSSVANSGLAALITDGPGGAKRMYVGRQNAGETWHDITGNRSEPVVINSEGWGEFHVXGGSVSIYVQR

SEQ ID NO: 43373 - protein, 478 aa, Cytophaga sp.
NGTMMQYFEWHLPNDGNHWNRLRDDASNLRNRGITAIWIPPAWKGTSQNDVGYGAYDLYDLGEFNQKGTVRTKYGTRSQLESAIHALKNNGVQVYGDVVMNHKGGADATENVLAVEVNPNNRNQEISGDYTIEAYTKFDFPGRGNTYSDFKWRWYHFDGVDWDQSRQFQNRIYKFRGKAWDWEVDSEFGNYDYLMYADYDMDHPEVVNELRRWGEWYTNTLNLDGFRIDAVKHIKFSFTRDWLTHVRNATGKGMFAVAEFWKNDLGALENYLNKTNWNHSVFDVPLHYNLYNASNSRGNYDMAKLLNGTVVQKHPMHAVTFVDNHDSQPGESLESFVQEWFKPLAYALILTREQGYPSVFYGDYYGIPTHSVPAMKAKIDPILEARQNFAYGTQRDYIDNPDVIGWTREGDSTKAKSGLATVITDGPGGSKRMYVGTSNAGEIWYDLTGNRTDKITIGSDGYATFPVNGGSVSVWVQQ

SEQ ID NO: 43374 - protein, 454 aa, Jeotgalibacillus campisalis
NMTMMQYFEWYLPNDGLHWNRLTNDASNLKALGVTTVWIPPAYKGTSQNDVGYGAYDLYDLGEFNQKGTVRTKYGTRGQLQTAINTLKNQGIGTYGDVVMNHKGGADFTESVQAVEVNPNNRSQETSGEYTISAWTGFNFAGRNNLHSAFKWRWYHFDGTDWDQSRSLKRIYKFRGSGKSWDTEVSNEFGNYDYLMYADVDFDHPEVKAELKNWGKWYVQSLNLDGFRLDAVKHIKHDYIGEWLADVRRTTGKELFTVAEYWQNDLGAINNYLAKTSYSHSVFDVPLHYNFQRAANSGGNFDMRTIFNGSVVQQHPTLAVTIVDNHDSQPGQSLESTVDAWFKPLAYAMIMTREQGYPNLFYGDFYGTKGSSNREIPNLSSKLTPILKARKDMAYGTQHDYLNHQDVIGWTREGVTDRSKSGLATILSDGPGGNKWMYVGKRNAGETWRDKTGN

SEQ ID NO: 43375 - protein, 454 aa, Jeotgalibacillus campisalis
NNTMMQYFEWYLPNDGLHWNRLTNDASNLKSLGVTTVWIPPAYKGTSQNDVGYGAYDLYDLGEFNQKGTVRTKYGTRGQLQTAINTLKNQGIGTYGDVVMNHKGGADFTESVQAVEVNPNNRSQETSGEYTISAWTGFNFAGRNNLHSAFKWRWYHFDGTDWDQSRSLKRIYKFRGSGKSWDTEVSNEFGNYDYLMYADVDFDHPEVKAELKNWGKWYVQSLNLDGFRLDAVKHIKHDYIPEWLADVRRTTGKELFTVAEYWQNDLGAINNYLAKTSYSHSVFDVPLHYNFQRAANSGGNFDMRTIFNGSVVQQHPTLAVTIVDNHDSQPGQSLESTVDAWFKPLAYAMIMTREQGYPNLFYGDFYGTKGSSNREIPNLSSKLTPILKARKDMAYGTQHDYLNHQDVIGWTREGVTDRSKSGLATILSDGPGGNKWMYVGKRNAGETWRDKTGN

SEQ ID NO: 43376 - protein, 454 aa, Jeotgalibacillus campisalis
NSTMMQYFEWYLPNDGLHWNRLTNDASNLKALGVTTVWIPPAYKGTSQNDVGYGAYDLYDLGEFNQKGTVRTKYGTRGQLQTAINTLKNQGIGTYGDVVMNHKGGADFTESVQAVEVNPNNRSQETSGEYTISAWTGFNFAGRNNLHSAFKWRWYHFDGTDWDQSRSLSRIYKFRGSGKSWDTEVSNEFGNYDYLMYADVDFDHPEVKAELKNWGKWYVQSLNLDGFRLDAVKHIKHDYIPEWLADVRRTTGKELFTVAEYWQNDLGAINNYLAKTKYSHSVFDVPLHYNFQRAANSGGNFDMRTIFNGSVVQQHPTLAVTIVDNHDSQPGQSLESTVDAWFKPLAYAMIMTREQGYPNLFYGDFYGTKGSSNREIPNLSSKLTPILKARKDMAYGTQHDYLNHQDVIGWTREGVTDRSKSGLATILSDGPGGNKWMYVGKRNAGETWRDKTGN

SEQ ID NO: 43377 - protein, 454 aa, Jeotgalibacillus campisalis
NMTMMQYFEWYLPNDGLHWNRLTNDASNLKSLGVTTVWIPPAYKGTSQNDVGYGAYDLYDLGEFNQKGTVRTKYGTRGQLQTAINTLKNQGIGTYGDVVMNHKGGADFTESVQAVEVNPNNRSQETSGEYTISAWTGFNFAGRNNLHSAFKWRWYHFDGTDWDQSRSLSRIYKFRGSGKSWDTEVSNEFGNYDYLMYADVDFDHPEVKAELKNWGKWYVQSLNLDGFRLDAVKHIKHDYIPEWLADVRRTTGKELFTVAEYWQNDLGAINNYLAKTDYSHSVFDVPLHYNFQRAANSGGNFDMRTIFNGSVVQQHPTLAVTIVDNHDSQPGQSLESTVDAWFKPLAYAMIMTREQGYPNLFYGDFYGTKGSSNREIPNLSSKLTPILKARKDMAYGTQHDYLNHQDVIGWTREGVTDRSKSGLATILSDGPGGNKWMYVGKRNAGETWRDKTGN

SEQ ID NO: 43378 - protein, 454 aa, Jeotgalibacillus campisalis
NPTMMQYFEWYLPNDGLHWNRLTNDASNLKALGVTTVWIPPAYKGTSQNDVGYGAYDLYDLGEFNQKGTVRTKYGTRGQLQTAINTLKNQGIGTYGDVVMNHKGGADFTESVQAVEVNPNNRSQETSGEYTISAWTGFNFAGRNNLHSAFKWRWYHFDGTDWDQSRSLKRIYKFRGSGKSWDTEVSNEFGNYDYLMYADVDFDHPEVKAELKNWGKWYVQSLNLDGFRLDAVKHIKHDYIGEWLADVRRTTGKELFTVAEYWQNDLGAINNYLAKTSYSHSVFDVPLHYNFQRAANSGGNFDMRTIFNGSVVQQHPTLAVTIVDNHDSQPGQSLESTVDAWFKPLAYAMIMTREQGYPNLFYGDFYGTKGSSNREIPNLSSKLTPILKARKDMAYGTQHDYLNHQDVIGWTREGVTDRSKSGLATILSDGPGGNKWMYVGKRNAGETWRDKTGN

SEQ ID NO: 43379 - protein, 490 aa, Penicillium oxalicum
LGLAALFLAQTVAGLTAAQWRSQSIYFLMTDRFGRTDKSVTAPCNTNDRVYCGGTWQGIINQLDYIQGMGFTAIWITPVTEQLPQDTGDGEAYHGYWQQEIYNVNNNYGTAADLKALSQALHSRGMYLMVDVVANHMGYAGAGNTVDYSVFKPFSSSSYFHPYCLISDYSNQTNVEDCWLGDTTVSLPDLDTTLSSVQTIWYNWVSDLVSNYSIDGLRIDTVKHVQKSFWPGYQSAAGVYCVGEVFSGDPAYTCPYQNYLDGVLNYPIYYQLLGAFKSTSGSISSLYNMINSVASDCADPTLLGNFIENHDNPRFASYTSDYSQAKNVISFIFLSDGIPIVYAGQEQHYSGGNDPANREATWLSGYSKNAQLYQHIASTNKIRSLAISKDANYITSKNNAFYTDSNTIAMKKGSSGSQVVTVLSNRGSSGSSYTLSLSGSGYAAGTKLVEMYTCTAVTVDSNGNIAVSMTSGLPRVFMLASSACSLCSSA

SEQ ID NO: 43380 - protein, 483 aa, Penicillium sclerotiorum
AQALSLTPAEWRSQSIYFLLTDRFARTDGSTTATCDVSDRIYCGGSWQGIINQLDYIQGMGFTAIWITPVTEQLSQDTGDGEAYHGYWQQKIYDVNTNYGTAADLLALSEALHARDMYLMVDVVANHMGYDGAGSSVDYSVFDPFDSSSYFHSYCLISNYDNQTNVEDCWLGDTTVSLPDLNTELSSVETIWYDWIADLVSNYSIDGLRIDTVKHVQESFWPGYNDAAGVYCVGEVFDGDPAYTCPYQNYLDGVLNYPIYYQLLYAFEDSSGSISDLYNMINSVASDCADPTLLGNFIENHDNPRFASYTDDYSQAKNVISFIFLSDGIPIVYAGQEQHYSGGADPYNREATWLSGYSTTAELYEYIATTNKIRSLAISSDSSYITSENDAFYQDSHTLAMKKGSSGSQVITVLSNYGASGSSYTLTLSGSGYSSGTQLMELYTCTSVTVDSSGNIAVPMASGLPRVFMLASAVSSSSICGGS

SEQ ID NO: 43381 - protein, 480 aa, Synthetic construct
VNGTMMQYFEWDLPNDGTLWTKVKNEASSLSALGITALWLPPAYKGTSQADVGYGVYDLYDLGEFNQKGTIRTKYGTKTQYLQAIQAAKSAGMQVYADVVFNHKAGADATEDVTAVEVNPANRNQETSEEYQIKAWTDFRFPGRGNTYSDFKWHWYHFDGADWDESRKISRIFKFRGEGKAWDWEVSSENGNYDYLMYADVDMDHPEVVAELKNWGKWYVNTTNVDGFRLDAVKHIKYSFFPDWLSYVRNQTGKNLFAVGEFWGYDVNKLHNYITKTNGAMSLFDAPLHNNFYIASKSSGYFDMRYLLNNTLMKDQPALAVTLVDNHDTQPGQSLQSWVEPWFKPLAYAFILTRQEGYPCVFYGDYYGIPKYNIPGLKSKIDPLLIARRDYAYGTQRDYIDHQDIIGWTREGIDAKPNSGLAALITDGPGGSKWMYVGKRHAGKVFYDLTGNRSDTVTINADGWGEFKVNGGSVSIWVAK

SEQ ID NO: 43382 - protein, 480 aa, Synthetic construct
NGTLMQYFEWYLPNDGNHWNRLNSDASNLASKGITAVWIPPAYKGTSQADVGYGAYDLYDLGEFNQKGTVRTKYGTRSQLQAAVTSLKNNGIQVYGDVVINHKAGADATEMVTAVEVNPNNRNQEVTGEYTIEAYTRFDFPGRGNTHSSFKWRWYHFDGVDWDQSRSLNNRIYKFQGHGKAWPWEVDTENGNYDYLMYLDIDMDHPEVVNELRNWGVWYTNTLGLDGLRIDAVKHFKYLFTRDWINHVRSATGKNMFAVYEFWKNDLGAIENNFQKTNWNHSVFDVPLHYNAYNTSKSGGNYDMRNIFNGTVKQRHPSHAVTFVDNTDSQPSEALESQPEEWFKPLAYALTLTREQGYPSVFYGDYYGIPTIGVLAMRSKIDPILEARQKYAYGPQHDYLDHIDVIGWTREGDSSHPKSGLATLITDGPGGSKRMYAGLKNAGETWYDITGNRSDTVKIGSDGWGEFHKNDGSVSIYVQK

SEQ ID NO: 43383 - protein, 485 aa, Bacillus licheniformis DSM 13 = ATCC 14580
HMANLNGTLMQYFEWYMPNDGQHWKRLQNDSAYLAEHGITAVWIPPAYKGTSQADVGYGAYDLYDLGEFHQKGTVRTKYGTKGELQSAIKSLHSRDINVYGDVVINHKGGADATEDVTAVEVDPADRNRVISGEHPIKAWTHFHFPGRGSTYSDFKWHWYHFDGTDWDESRKLNRIYKFQGKAWDWEVSNENGNYDYLMYADIDYDHPDVAAEIKRWGTWYANELQLDGFRLDAVKHIKFSFLRDWVNHVREKTGKEMFTVAEYWQNDLGALENYLNKTNFNHSVFDVPLHYQFHAASTQGGGYDMRKLLNGTVVSKHPLKSVTFVDNHDTQPGQSLESTVQTWFKPLAYAFILTRESGYPQVFYGDMYGTKGDSQREIPALKHKIEPILKARKQYAYGAQHDYFDHHDIVGWTREGDSSVANSGLAALITDGPGGAKRMYVGRQNAGETWHDITGNRSEPVVINSEGWGEFHVNGGSVSIYVQR

SEQ ID NO: 43384 - protein, 483 aa, Geobacillus stearothermophilus
NGTMMQYFEWYLPNDGQHWXRLXNDAXNLSSXGITALWIPPAYKGTSQSDVGYGAYDLYDLGEFNQKGTVRTKYGTKAQLXXAIXALHAXGIQVYGDVVMNHKGGADGTEXVXAVEVNPSDRNQEISGXYXIXAWTKFDFPGRGNTYSXFKWRWYHFDGVDWDESRKLNXRIYKFRGXGKAWDWEVDTENGNYDYLMYADIDMDHPEVVXELKNWGXWYXNTLNLDGFRLDAVKHIKFSFXXDWLSHVRSXTGKXLFTVGEYWXXDIGALENYLXKTNWXMSLFDVPLHYNFYXASKSGGAYDMRXLLXGTLVXXHPXXAVTFVDNHDTQPGQALESWVDXWFKPLAYAFILTREXGYPXVFYGDYYGIPQYNXXXIPSLKSKIDPLLXARRXYAYGTQHDYLDHXDIIGWTREGXTSKPNSGLAALITDGPGGSKWMYVGKQXAGXVWYDLTGNRSDTVTINSDGWGEFXVNGGSVSVWVXR

SEQ ID NO: 43385 - protein, 476 aa, Bacillus sp.
NGTIMQYFEWNVPNDGQHWNRLHNNAQNLKNAGITAIWIPPAWKGTSQSDTGYGAYDLYDLGEFNQKGTVRTKYGTKAELERAIRSLKANGIQVYGDVVMNHKAGADFTERVQAVEVNPQNRNQEVSGTYQIEAWTGFNFPGRGNQHSSFKWRWYHFDGTDWDQSRQLSNRIYKFRGKAWDWEVDTEFGNYDYLMYADLDMDHPEVINELNRWGVWYANTLNLDGFRLDAVKHIKFSFMRDWLGHVRGQTGKNLFAVAEYWKNDLGALENYLSKTNWTMSAFDAPLHNNLYTASNSSGNYDMRNLLNGTLVQRHPSHAVTFVDNHDTQPGEALESFVQGWFKPLAYATILTREQGYPQVFYGDYYGIPSDGVPSYRQQIDPLLAARQQYAYGTQHDYLDNQDVIGWTREGDSAHAGSGLATVMSDGPGGSKTMYVGTAHAGQVFKDITGNRTDTVTINSAGNGTFPCNKGSVSIWV

SEQ ID NO: 43386 - protein, 477 aa, Synthetic construct
NGTMMQYFEWYLPNDGNHWNRLNSDASNLKSKGITAVWIPPAWKGASQNDVGYGAYDLYDLGEFNQKGTVRTKYGTRSQLQAAVTSLKNNGIQVYGDVVMDHKGGADGTEWVDAVEVNPSDRNQEISGTYQIQAWTKFDFPGRGNTYSSFKWRWYHFDGVDWDESRKLSRIYKFRGIGKAWDWEVDTENGNYDYLMYADLDMDHPEVVNELRNWGVWYTNTLGLDGFRIDAVKHIKYSFTRDWINHVRSATGKNMFAVAEFWKNDLGAIENYLQKTNWNHSVFDVPLHYNLYNASKSGGNYDMRNIFNGTVVQRHPSHAVTFVDNHDSQPEEALESFVEEWFKPLAYALTLTREQGYPSVFYGDYYGIPTHGVPAMRSKIDPILEARQKYAYGKQNDYLDHHNIIGWTREGNTAHPNSGLATIMSDGAGGSKWMFVGRNKAGQVWSDITGNRTGTVTINADGWGNFSVNGGSVSIWV

SEQ ID NO: 43387 - protein, 456 aa, Jeotgalibacillus campisalis
NPTMMQYFEWYLPNDGLHWNRLTNDASNLKNLGVTTVWIPPAYKGTSQNDVGYGAYDLYDLGEFNQKGTVRTKYGTRGQLQTAINTLKNQGIGTYGDVVMNHKGGADFTESVQAVEVNPNNRSQETSGEYTISAWTGFNFAGRNNLHSAFKWRWYHFDGTDWDQSRSLNRIYKFRGSGKSWDTEVSNEFGNYDYLMYADVDFDHPEVKAELKNWGKWYVQSLNLDGFRLDAVKHIKHDYIQEWLADVRRTTGKELFTVAEYWQNDLGAINNYLAKTGYSHSVFDVPLHYNFQRAANSGGNFDMRTIFNGSVVQQHPTLAVTIVDNHDSQPGQSLESTVDAWFKPLAYAMIMTREQGYPNLFYGDFYGTKGSSNREIPNLSSKLTPILKARKDMAYGTQHDYLNHQDVIGWTREGVTDRSKSGLATILSDGPGGNKWMYVGKRNAGETWRDKTGNSS

SEQ ID NO: 43388 - protein, 456 aa, Jeotgalibacillus campisalis
NFTMMQYFEWYLPNDGLHWNRLTNDASNLKNLGVTTVWIPPAYKGTSQNDVGYGAYDLYDLGEFNQKGTVRTKYGTRGQLQTAINTLKNQGIGTYGDVVMNHKGGADFTESVQAVEVNPNNRSQETSGEYTISAWTGFNFAGRNNLHSAFKWRWYHFDGTDWDQSRSLNRIYKFRGSGKSWDTEVSNEFGNYDYLMYADVDFDHPEVKAELKNWGKWYVQSLNLDGFRLDAVKHIKHDYIQEWLADVRRTTGKELFTVAEYWQNDLGAINNYLAKTGYSHSVFDVPLHYNFQRAANSGGNFDMRTIFNGSVVQQHPTLAVTIVDNHDSQPGQSLESTVDAWFKPLAYAMIMTREQGYPNLFYGDFYGTKGSSNREIPNLSSKLTPILKARKDMAYGTQHDYLNHQDVIGWTREGVTDRSKSGLATILSDGPGGNKWMYVGKRNAGETWRDKTGNSS

SEQ ID NO: 43389 - protein, 456 aa, Jeotgalibacillus campisalis
NPTMMQYFEWYLPNDGLHWNRLTNDASNLKALGVTTVWIPPAYKGTSQNDVGYGAYDLYDLGEFNQKGTVRTKYGTRGQLQTAINTLKNQGIGTYGDVVMNHKGGADFTESVQAVEVNPNNRSQETSGEYTISAWTGFNFAGRNNLHSAFKWRWYHFDGTDWDQSRSLKRIYKFRGSGKSWDTEVSNEFGNYDYLMYADVDFDHPEVKAELKNWGKWYVQSLNLDGFRLDAVKHIKHDYIREWLADVRRTTGKELFTVAEYWQNDLGAINNYLAKTKYSHSVFDVPLHYNFQRAANSGGNFDMRTIFNGSVVQQHPTLAVTIVDNHDSQPGQSLESTVDAWFKPLAYAMIMTREQGYPNLFYGDFYGTKGSSNREIPNLSSKLTPILKARKDMAYGTQHDYLNHQDVIGWTREGVTDRSKSGLATILSDGPGGNKWMYVGKRNAGETWRDKTGNSS

SEQ ID NO: 43390 - protein, 456 aa, Jeotgalibacillus campisalis
NSTMMQYFEWYLPNDGLHWNRLTNDASNLKNLGVTTVWIPPAYKGTSQNDVGYGAYDLYDLGEFNQKGTVRTKYGTRGQLQTAINTLKNQGIGTYGDVVMNHKGGADFTESVQAVEVNPNNRSQETSGEYTISAWTGFNFAGRNNLHSAFKWRWYHFDGTDWDQSRSLNRIYKFRGSGKSWDTEVSNEFGNYDYLMYADVDFDHPEVKAELKNWGKWYVQSLNLDGFRLDAVKHIKHDYIQEWLADVRRTTGKELFTVAEYWQNDLGAINNYLAKTGYSHSVFDVPLHYNFQRAANSGGNFDMRTIFNGSVVQQHPTLAVTIVDNHDSQPGQSLESTVDAWFKPLAYAMIMTREQGYPNLFYGDFYGTKGSSNREIPNLSSKLTPILKARKDMAYGTQHDYLNHQDVIGWTREGVTDRSKSGLATILSDGPGGNKWMYVGKRNAGETWRDKTGNSS

SEQ ID NO: 43391 - protein, 456 aa, Jeotgalibacillus campisalis
NGTMMQYFEWYLPNDGLHWNRLTNDASNLKNLGVTTVWIPPAYKGTSQNDVGYGAYDLYDLGEFNQKGTVRTKYGTRGQLQTAINTLKNQGIGTYGDVVMNHKGGADFTESVQAVEVNPNNRSQETSGEYTISAWTGFNFAGRNNLHSAFKWRWYHFDGTDWDQSRSLSRIYKFRGSGKSWDTEVSNEFGNYDYLMYADVDFDHPEVKAELKNWGKWYVQSLNLDGFRLDAVKHIKHDYIQEWLADVRRTTGKELFTVAEYWQNDLGAINNYLAKTGYSHSVFDVPLHYNFQRAANSGGNFDMRTIFNGSVVQQHPTLAVTIVDNHDSQPGQSLESTVDAWFKPLAYAMIMTREQGYPNLFYGDFYGTKGSSNREIPNLSSKLTPILKARKDMAYGTQHDYLNHQDVIGWTREGVTDRSKSGLATILSDGPGGNKWMYVGKRNAGETWRDKTGNSS

SEQ ID NO: 43392 - protein, 456 aa, Jeotgalibacillus campisalis
NGTMMQYFEWYLPNDGLHWNRLTNDASNLKNLGVTTVWIPPAYKGTSQNDVGYGAYDLYDLGEFNQKGTVRTKYGTRGQLQTAINTLKNQGIGTYGDVVMNHKGGADFTESVQAVEVNPNNRSQETSGEYTISAWTGFNFAGRNNLHSAFKWRWYHFDGTDWDQSRSLKRIYKFRGSGKSWDTEVSNEFGNYDYLMYADVDFDHPEVKAELKNWGKWYVQSLNLDGFRLDAVKHIKHDYIQEWLADVRRTTGKELFTVAEYWQNDLGAINNYLAKTGYSHSVFDVPLHYNFQRAANSGGNFDMRTIFNGSVVQQHPTLAVTIVDNHDSQPGQSLESTVDAWFKPLAYAMIMTREQGYPNLFYGDFYGTKGSSNREIPNLSSKLTPILKARKDMAYGTQHDYLNHQDVIGWTREGVTDRSKSGLATILSDGPGGNKWMYVGKRNAGETWRDKTGNSS

SEQ ID NO: 43393 - protein, 456 aa, Jeotgalibacillus campisalis
NFTMMQYFEWYLPNDGLHWNRLTNDASNLKSLGVTTVWIPPAYKGTSQNDVGYGAYDLYDLGEFNQKGTVRTKYGTRGQLQTAINTLKNQGIGTYGDVVMNHKGGADFTESVQAVEVNPNNRSQETSGEYTISAWTGFNFAGRNNLHSAFKWRWYHFDGTDWDQSRSLKRIYKFRGSGKSWDTEVSNEFGNYDYLMYADVDFDHPEVKAELKNWGKWYVQSLNLDGFRLDAVKHIKHDYIGEWLADVRRTTGKELFTVAEYWQNDLGAINNYLAKTNYSHSVFDVPLHYNFQRAANSGGNFDMRTIFNGSVVQQHPTLAVTIVDNHDSQPGQSLESTVDAWFKPLAYAMIMTREQGYPNLFYGDFYGTKGSSNREIPNLSSKLTPILKARKDMAYGTQHDYLNHQDVIGWTREGVTDRSKSGLATILSDGPGGNKWMYVGKRNAGETWRDKTGNSS

SEQ ID NO: 43394 - protein, 456 aa, Jeotgalibacillus campisalis
NMTMMQYFEWYLPNDGLHWNRLTNDASNLKNLGVTTVWIPPAYKGTSQNDVGYGAYDLYDLGEFNQKGTVRTKYGTRGQLQTAINTLKNQGIGTYGDVVMNHKGGADFTESVQAVEVNPNNRSQETSGEYTISAWTGFNFAGRNNLHSAFKWRWYHFDGTDWDQSRSLNRIYKFRGSGKSWDTEVSNEFGNYDYLMYADVDFDHPEVKAELKNWGKWYVQSLNLDGFRLDAVKHIKHDYIQEWLADVRRTTGKELFTVAEYWQNDLGAINNYLAKTGYSHSVFDVPLHYNFQRAANSGGNFDMRTIFNGSVVQQHPTLAVTIVDNHDSQPGQSLESTVDAWFKPLAYAMIMTREQGYPNLFYGDFYGTKGSSNREIPNLSSKLTPILKARKDMAYGTQHDYLNHQDVIGWTREGVTDRSKSGLATILSDGPGGNKWMYVGKRNAGETWRDKTGNSS

SEQ ID NO: 43395 - protein, 456 aa, Jeotgalibacillus campisalis
NNTMMQYFEWYLPNDGLHWNRLTNDASNLKNLGVTTVWIPPAYKGTSQNDVGYGAYDLYDLGEFNQKGTVRTKYGTRGQLQTAINTLKNQGIGTYGDVVMNHKGGADFTESVQAVEVNPNNRSQETSGEYTISAWTGFNFAGRNNLHSAFKWRWYHFDGTDWDQSRSLNRIYKFRGSGKSWDTEVSNEFGNYDYLMYADVDFDHPEVKAELKNWGKWYVQSLNLDGFRLDAVKHIKHDYIQEWLADVRRTTGKELFTVAEYWQNDLGAINNYLAKTGYSHSVFDVPLHYNFQRAANSGGNFDMRTIFNGSVVQQHPTLAVTIVDNHDSQPGQSLESTVDAWFKPLAYAMIMTREQGYPNLFYGDFYGTKGSSNREIPNLSSKLTPILKARKDMAYGTQHDYLNHQDVIGWTREGVTDRSKSGLATILSDGPGGNKWMYVGKRNAGETWRDKTGNSS

SEQ ID NO: 43396 - protein, 456 aa, Jeotgalibacillus campisalis
NSTMMQYFEWYLPNDGLHWNRLTNDASNLKALGVTTVWIPPAYKGTSQNDVGYGAYDLYDLGEFNQKGTVRTKYGTRGQLQTAINTLKNQGIGTYGDVVMNHKGGADFTESVQAVEVNPNNRSQETSGEYTISAWTGFNFAGRNNLHSAFKWRWYHFDGTDWDQSRSLKRIYKFRGSGKSWDTEVSNEFGNYDYLMYADVDFDHPEVKAELKNWGKWYVQSLNLDGFRLDAVKHIKHDYIPEWLADVRRTTGKELFTVAEYWQNDLGAINNYLAKTNYSHSVFDVPLHYNFQRAANSGGNFDMRTIFNGSVVQQHPTLAVTIVDNHDSQPGQSLESTVDAWFKPLAYAMIMTREQGYPNLFYGDFYGTKGSSNREIPNLSSKLTPILKARKDMAYGTQHDYLNHQDVIGWTREGVTDRSKSGLATILSDGPGGNKWMYVGKRNAGETWRDKTGNSS

SEQ ID NO: 43397 - protein, 480 aa, Synthetic construct
NGTMMQYFEWDLPNDGTLWTKVKNEAANLSSLGITALWLPPAYKGTSQSDVGYGVYDLYDLGEFNQKGTIRTKYGTKTQYIQAIQAAKAAGMQVYADVVFNHKGGADATEMVRAVEVNPNNRNQEVSGEYTIEAWTKFDFPGRGNTHSNFKWRWYHFDGVDWDQSRKLNNRIYKFRGDGKGWDWEVDTENGNYDYLMYADIDMDHPEVVAELKNWGKWYVNTTNVDGFRLDAVKHIKYSFFPDWLSYVRNQTGKNLFAVGEFWSYDVNKLHNYITKTNGTMSLFDAPLHNNFYIASKSSGYFDMRYLLNNTLMKDQPALAVTLVDNHDTQPGQSLQSWVEPWFKPLAYAFILTRQEGYPCVFYGDYYGIPKYNIPGLKSKIDPLLIARRDYAYGTQRDYIDHPDIIGWTREGIDAKPNSGLAALITDGPGGSKWMYVGKKHAGKVFYDLTGNRSDTVTINADGWGQFKVNGGSVSIWVAK

SEQ ID NO: 43398 - protein, 480 aa, Synthetic construct
NGTMMQYFEWDLPNDGTLWTKVKNEASSLSALGITALWLPPAYKGTSQADVGYGVYDLYDLGEFNQKGTIRTKYGTKTQYLQAIQAAKSAGMQVYADVVFNHKGGADATEMVRAVEVNPNNRNQEVSGEYTIEAWTKFDFPGRGNTHSNFKWRWYHFDGVDWDQSRKLNNRIYKFRGDGKGWDWEVDTENGNYDYLMYADIDMDHPEVVAELKNWGKWYVNTTNVDGFRLDAVKHIKYSFFPDWLSYVRNQTGKNLFAVGEFWGYDVNKLHNYITKTNGAMSLFDAPLHNNFYIASKSSGYFDMRYLLNNTLMKDQPALAVTLVDNHDTQPGQSLQSWVEPWFKPLAYAFILTRQEGYPCVFYGDYYGIPKYNIPGLKSKIDPLLIARRDYAYGTQRDYIDHQDIIGWTREGIDAKPNSGLAALITDGPGGSKWMYVGKRHAGKVFYDLTGNRSDTVTINADGWGEFKVNGGSVSIWVAK

SEQ ID NO: 43399 - protein, 480 aa, Synthetic construct
NETMMQYFEWDLPNDGTLWTKVKNEAANLSSLGITALWLPPAYKGTSQSDVGYGVYDLYDLGEFNQKGTIRTKYGTKTQYIQAIQAAKAAGMQVYADVVFNHKGGADATEMVRAVEVNPNNRNQEVTGEYTIEAWTRFDFPGRGNTHSSFKWRWYHFDGVDWDQSRRLNNRIYKFRGHGKAWDWEVDTENGNYDYLMYADIDMDHPEVVTELKNWGTWYVNTTNIDGFRLDAVKHIKYSFFPDWLTYVRNQTGKNLFAVGEFWSYDVNKLHNYITKTNGSMSLFDAPLHNNFYTASKSSGYFDMRYLLNNTLMKDQPSLAVTLVDNHDTQPGQSLQSWVEPWFKPLAYAFILTRQEGYPCVFYGDYYGIPKYNIPGLKSKIDPLLIARRDYAYGTQRDYIDHQDIIGWTREGIDTKPNSGLAALITDGPGGSKWMYVGKKHAGKVFYDLTGNRSDTVTINADGWGEFKVNGGSVSIWVAK

SEQ ID NO: 43400 - protein, 483 aa, Synthetic construct
TNGTMMQYFEWYLPNDGNHWTRLQNDAANLSSKGVTAVWIPPAYKGTSQNDVGYGAYDLYDLGEFNQKGTVRTKYGTKAQLKRALAQLHKQNIHVYGDVVMNHKGGADFTETVTAVEVDPNNRNRETSGDYQISAWTGFTFPGRGNTYSPFKWNWYHFDGTDWDESRKINRIYKFRGTGKAWDWEVSSENGNYDYLMYADIDYEHPDVINEMKKWGTWYAKELNLDGFTLDAVKHIKHDYLRDWVTHVRNQTGKELFTVAEYWQNDIGQLNNYLAKTNYNQSVFDAPLHYHFHYASNSNGNYDMRNILKGTVMESNPRLAVTLVENHDSQPGQSLESVVSTWFKPLAYAFILTRAEGYPSVFYGDYYGTKGNSNYEIPSLKTQLDPILTARKNYAYGLQRDYIDHWDIIGWTREGEAARDKSGLATLITDGPGGYKWMEVGKQNAGEVWYDITGNRKETVTINNDGWGQFYVNGGSVSIYVQK

SEQ ID NO: 43401 - protein, 480 aa, Synthetic construct
NGTMMQYFEWDLPNDGTLWTKVKNEAANLSSLGITALWLPPAYKGTSQSDVGYGVYDLYDLGEFNQKGTVRTKYGTKDQYIQAIQAAKAAGMQVYADVVFNHKGGADATEMVRAVEVNPNNRNQEVSGEYTIEAWTKFDFPGRGNTHSNFKWRWYHFDGVDWDQSRKLNNRIYKFRGDGKGWDWEVDTENGNYDYLMYADIDMDHPEVVTELKNWGKWYVNTTNVDGFRLDAVKHIKYSFFPDWLASVRSQTGKNLFAVGEFWSYDVNKLHNYITKTNGTMSLFDAPLHNNFYTASKSSGYFDMRYLLNNTLMKDQPVLAVTLVDNHDTQPGQSLQSWVEPWFKPLAYAFILTRQEGYPCVFYGDYYGIPKYNIPGLKSKIDPLLIARRDYAYGTQRDYIDHQDIIGWTREGIDSKPNSGLAALITDGPGGSKWMYVGKKHAGKVFYDLTGNRSDTVTINADGWGEFKVNGGSVSIWVAK

SEQ ID NO: 43402 - protein, 477 aa, Bacillus licheniformis
NGTLMQYFEWYMPNDGQHWRRLQNDSAYLAEHGITAVWIPPAYKGTSQADVGYGAYDLYDLGEFHQKGTVRTKYGTKGELQSAIKSLHSRDINVYGDWINHKGGADATEDVTAVEVDPADRNRVISGEHLIKAWTHFHFPGRGSTYSDFKWHWYHFDGTDWDESRKLNRIYKFQGKAWDWEVSNENGNYDYLMYADIDYDHPDVAAEIKRWGTWYANELQLDGFRLDAVKHIKFSFLRDWVNHVREKTGKEMFTVAEYWQNDLGALENYLNKTNFNHSVFDVPLHYQFHAASTQGGGYDMRKLLNGTWSKHPLKSVTFVDNHDTQPGQSLESTVQTWFKPLAYAFILTRESGYPQVFYGDMYGTKGDSQREIPALKHKIEPILKARKQYAYGAQHDYFDHHDIVGWTREGDSSVANSGLAALITDGPGGAKRMYVGRQNAGETWHDITGNRSEPWINSEGWGEFHVNGGSVSIYVQR

SEQ ID NO: 43403 - protein, 479 aa, Jeotgalibacillus campisalis
NPTMMQYFEWYLPNDGLHWNRLTNDASNLKALGVTTVWIPPAYKGTSQNDVGYGAYDLYDLGEFNQKGTVRTKYGTRGQLQTAINTLKNQGIGTYGDVVMNHKGGADFTESVQAVEVNPNNRSQETSGEYTISAWTGFNFAGRNNLHSAFKWRWYHFDGTDWDQSRSLKRIYKFRGSGKSWDTEVSNEFGNYDYLMYADVDFDHPEVKAELKNWGKWYVQSLNLDGFRLDAVKHIKHDYIREWLADVRRTTGKELFTVAEYWQNDLGAINNYLAKTKYSHSVFDVPLHYNFQRAANSGGNFDMRTIFNGSVVQQHPTLAVTIVDNHDSQPGQSLESTVDAWFKPLAYAMIMTREQGYPNLFYGDFYGTKGSSNREIPNLSSKLTPILKARKDMAYGTQHDYLNHQDVIGWTREGVTDRSKSGLATILSDGPGGNKWMYVGKRNAGETWRDKTGNSSNAVTINSDGWGQFFVNGGSVSIY

SEQ ID NO: 43404 - protein, 479 aa, Jeotgalibacillus campisalis
NSTMMQYFEWYLPNDGLHWNRLTNDASNLKALGVTTVWIPPAYKGTSQNDVGYGAYDLYDLGEFNQKGTVRTKYGTRGQLQTAINTLKNQGIGTYGDVVMNHKGGADFTESVQAVEVNPNNRSQETSGEYTISAWTGFNFAGRNNLHSAFKWRWYHFDGTDWDQSRSLKRIYKFRGSGKSWDTEVSNEFGNYDYLMYADVDFDHPEVKAELKNWGKWYVQSLNLDGFRLDAVKHIKHDYIPEWLADVRRTTGKELFTVAEYWQNDLGAINNYLAKTNYSHSVFDVPLHYNFQRAANSGGNFDMRTIFNGSVVQQHPTLAVTIVDNHDSQPGQSLESTVDAWFKPLAYAMIMTREQGYPNLFYGDFYGTKGSSNREIPNLSSKLTPILKARKDMAYGTQHDYLNHQDVIGWTREGVTDRSKSGLATILSDGPGGNKWMYVGKRNAGETWRDKTGNSSNAVTINSDGWGQFFVNGGSVSIY

SEQ ID NO: 43405 - protein, 479 aa, Jeotgalibacillus campisalis
NFTMMQYFEWYLPNDGLHWNRLTNDASNLKSLGVTTVWIPPAYKGTSQNDVGYGAYDLYDLGEFNQKGTVRTKYGTRGQLQTAINTLKNQGIGTYGDVVMNHKGGADFTESVQAVEVNPNNRSQETSGEYTISAWTGFNFAGRNNLHSAFKWRWYHFDGTDWDQSRSLKRIYKFRGSGKSWDTEVSNEFGNYDYLMYADVDFDHPEVKAELKNWGKWYVQSLNLDGFRLDAVKHIKHDYIGEWLADVRRTTGKELFTVAEYWQNDLGAINNYLAKTNYSHSVFDVPLHYNFQRAANSGGNFDMRTIFNGSVVQQHPTLAVTIVDNHDSQPGQSLESTVDAWFKPLAYAMIMTREQGYPNLFYGDFYGTKGSSNREIPNLSSKLTPILKARKDMAYGTQHDYLNHQDVIGWTREGVTDRSKSGLATILSDGPGGNKWMYVGKRNAGETWRDKTGNSSNAVTINSDGWGQFFVNGGSVSIY

SEQ ID NO: 43406 - protein, 474 aa, Penicillium canescens
TPAEWRSQSIYFMLTDRFGRSDNSTTAACNVSDRTYCGGTWQGIINHLDYIQGMGFTAIWITPVTEQLPQDTGDGEAYHGYWQQNIYEIDSKLGTAADLLALSKALHARGMYLMVDVVANHMGYAGSGNSVDYSVFNPFSSSSYFHSYCLISNYDDQSNVENCWLGDTIVSLPDLDTTQTAVQTIWYDWIADLVSNYSIDGLRIDTVKHVQKSFWPGYNDAAGVYCVGEIFDGDPAYTCDYQNYMDGVLNYPIYYQLLYAFQSSSGSISDLYNMINSVKSDCADSTLLGNFIENHDNPRFASYTSDYSQAKNVISFLFLSDGIPIIYSGQEQHYSGGADPANREATWLSGYSTTAELYKYIATTNKIRKLAVSDSSYLTTKNVPFYQDSHTLAMKKGSSASPVITVLSNYGSSGSSYTLSLSGSGYSSGTKLMEMYTCTSVTVDSSGNIAVPMASGLPRVLMLASSANSLCGSS

SEQ ID NO: 43407 - protein, 397 aa, Cytophaga sp.
TNGTMMQYFEWYVPNDGQQWNRLRTDAPYLSSVGITAVWTPPAYKGTSQADVGYGPYDLYDLGEFNQKGTVRTKYGTKGELKSAVNTLHSNGIQVYGDVVMNHKAGADYTENVTAVEVNPSNRNQETSGEYNIQAWTGFNFPGRGTTYSNFKWQWFHFDGTDWDQSRSLSRIFKFRGTGKAWDWEVSSENGNYDYLMYADIDYDHPDVVNEMKKWGVWYANEVGLDGYRLDAVKHIKFSFLKDWVDNARAATGKEMFTVGEYWQNDLGALNNYLAKVNYNQSLFDAPLHYNFYAASTGGGYYDMRNILNNTLVASNPTKAVTLVENHDTQPGQSLESTVQPWFKPLAYAFILTRSGGYPSVFYGDMYGTKGTTTREIPALKSKIEPLLKARKDYAYG

SEQ ID NO: 43408 - protein, 477 aa, Bacillus sp. (in: firmicutes)
NGTIMQYFEWNVPNDGQHWNRLHNNAQNLKNAGITAIWIPPAWKGTSQSDTGYGAYDLYDLGEFNQKGTVRTKYGTKAELERAIRSLKANGIQVYGDVVMNHKAGADFTERVQAVEVNPQNRNQEVSGTYQIEAWTGFNFPGRGNQHSSFKWRWYHFDGTDWDESRKLNRIYKFRGKAWDWEVDTENGNYDYLMYADLDMDHPEVINELNRWGVWYANTLNLDGFRLDAVKHIKFSFMRDWLGHVRGQTGKNLFAVAEYWKNDLGALENYLSKTNWTMSAFDVPLHYNLYQASNSSGNYDMRNLLNGTLVQRHPSHAVTFVDNHDTQPGEALESFVQGWFKPLAYATILTREQGYPQVFYGDYYGIPSDGVPSYRQQIDPLLAARQQYAYGRQHDYFDHWDVIGWTREGNASHPNSGLATIMSDGPGGSKWMYVGRQKAGEVWHDMTGNRSGTVTINQDGWGHFFVNGGSVSVWVKR

SEQ ID NO: 43409 - protein, 477 aa, Bacillus sp. (in: firmicutes)
NGTIMQYFEWNVPNDGQHWNRLHNNAQNLKNAGITAIWIPPAWKGTSQSDTGYGAYDLYDLGEFNQKGTVRTKYGTKAELERAIRSLKANGIQVYGDVVMNHKAGADFTERVQAVEVNPQNRNQEVSGTYQIEAWTGFNFPGRGNQHSSFKWRWYHFDGTDWDESRKLNRIYKFRGKAWDWEVDTEFGNYDYLMYADLDMDHPEVINELNRWGVWYANTLNLDGFRLDAVKHIKFSFMRDWLGHVRGQTGKNLFAVAEYWKNDLGALENYLSKTNWTMSAFDVPLHYNLEQASKGSGNYDMRNLLNGTLVQRHPSHAVTFVDNHDTQPGEALESFVQGWFKPLAYATILTREQGYPQVFYGDYYGIPSDGVPSYRQQIDPLLAARQQYAYGRQHDYFDHWDVIGWTREGNASHPNSGLATIMSDGPGGSKWMYVGRQKAGEVWHDMTGNRSGTVTINQDGWGHFFVNGGSVSVWVKR

SEQ ID NO: 43410 - protein, 477 aa, Bacillus sp. (in: firmicutes)
NGTIMQYFEWNVPNDGQHWNRLHNNAQNLKNAGITAIWIPPAWKGTSQSDTGYGAYDLYDLGEFNQKGTVRTKYGTKAELERAIRSLKANGIQVYGDVVMNHKAGADFTERVQAVEVNPQNRNQEVSGTYQIEAWTGFNFPGRGNQHSSFKWCWYHFDGTDWDESRKLNRIYKFRGKAWDWEVDTEFGNYDYLMYADLDMDHPEVINELNRWGVWYANTLNLDGFRLDAVKHIKFSFMRDWLGHVRGQTGKNLFAVAEYWKNDLGALENYLSKTNWTMSAFDVPLHYNLYQASNSSGNYDMRNLLNGTLVQRHPSHAVTFVDNHDTQPGEALESFVQGWFKPLAYATILTREQGYPQVFYGDYYGIPSDGVPSYRQQIDPLLAARQQYAYGRQHDYFDHWDVIGWTREGNASHPNSGLATIMSDGPGGSKWMYVGRQKAGEVWHDMTGNRSGTVTINQDGWGHFFVNGGSVSVWVKR

SEQ ID NO: 43411 - protein, 477 aa, Bacillus sp. (in: firmicutes)
NGTIMQYFEWNVPNDGQHWNRLHNNAQNLKNAGITAIWIPPAWKGTSQSDTGYGAYDLYDLGEFNQKGTVRTKYGTKAELERAIRSLKANGIQVYGDVVMNHKAGADFTERVQAVEVNPQNRNQEVSGTYQIEAWTGFNFPGRGNQHSSFKWRWYHFDGTDWDESRKLNRIYKFRGKAWDWEVDTEFGNYDYLMYADLDMDHPEVINELNRWGVWYANTLNLDGFRLDAVKHIKFSFMRDWLGHVRGQTGKNLFAVAEYWKNDLGALENYLSKTNWTMSAFDVPLHYNLYQASNSSGNYDMRNLLNGTLVQRHPSHAVTFVDNHDTQPGEALESFVQGWFKPLAYATILTREQGYPQVFYGDYYGIPSDGVPSYRQQIDPLLAARQQYAYGRQHDYFDHWDVIGWTREGNASHPNSGLATIMSDGPGGSKWMYVGRQKAGEVWHDMTGNRSGTVTINQDGWGHFFVNKGSVSVWVKR

SEQ ID NO: 43412 - protein, 477 aa, Bacillus sp. (in: firmicutes)
NGTIMQYFEWNVPNDGQHWNRLHNNAQNLKNAGITAIYIPPAWKGTSQSDTGYGAYDLYDLGEFNQKGTVRTKYGTKAELERAIRSLKANGIQVYGDVVMNHKAGADFTERVQAVEVNPQNRNQEVSGTYQIEAWTGFNFPGRGNQHSSFKWRWYHFDGTDWDESRKLNRIYKFRGKAWDWEVDTEFGNYDYLMYADLDMDHPEVINELNRWGVWYANTLNLDGFRLDAVKHIKFSFMRDWLGHVRGQTGKNLFAVAEYWKNDLGALENYLSKTNWTMSAFDVPLHYNLYQASNSSGNYDMRNLLNGTLVQRHPSHAVTFVDNHDTQPGEALESFVQGWFKPLAYATILTREQGYPQVFYGDYYGIPSDGVPSYRQQIDPLLAARQQYAYGRQHDYFDHWDVIGWTREGNASHPNSGLATIMSDGPGGSKWMYVGRQKAGEVWHDMTGNRSGTVTINQDGWGHFFVNGGSVSVWVKR

SEQ ID NO: 43413 - protein, 477 aa, Bacillus sp. (in: firmicutes)
NGTIMQYFEWNVPNDGQHWNRLHNNAQNLKNAGITAIWIPPAWKGTSQSDTGYGAYDLYDLGEFNQKGTVRTKYGTKAELERAIRSLKANGIQVYGDVVMNHKAGADFTERVQAVEVNPQNRNQEVSGTYQIEAWTGFNFPGRGNQHSSFKWRWYHFDGTDWDESRKLNRIYKFRGKAWDWEVDTEDGNYDYLMYADLDMDHPEVINELNRWGVWYANTLNLDGFRLDAVKHIKFSFMRDWLGHVRGQTGKNLFAVAEYWKNDLGALENYLSKTNWTMSAFDVPLHYNLYQASNSSGNYDMRNLLNGTLVQRHPSHAVTFVDNHDTQPGEALESFVQGWFKPLAYATILTREQGYPQVFYGDYYGIPSDGVPSYRQQIDPLLAARQQYAYGRQHDYFDHWDVIGWTREGNASHPNSGLATIMSDGPGGSKWMYVGRQKAGEVWHDMTGNRSGTVTINQDGWGHFFVNGGSVSVWVKR

SEQ ID NO: 43414 - protein, 477 aa, Bacillus sp. (in: firmicutes)
NGTIMQYFEWNVPNDGQHWNRLHNNAQNLKNAGITAIWIPPAWKGTSQSDTGYGAYDLYDLGEFNQKGTVRTKYGTKAELERAIRSLKANGIQVYGDVVMNHKAGADFTERVQAVEVNPQNFNQEVSGTYQIEAWTGFNFPGRGNQHSSFKWRWYHFDGTDWDESRKLNRIYKFRGKAWDWEVDTEFGNYDYLMYADLDMDHPEVINELNRWGVWYANTLNLDGFRLDAVKHIKFSFMRDWLGHVRGQTGKNLFAVAEYWKNDLGALENYLSKTNWTMSAFDVPLHYNLYQASNSSGNYDMRNLLNGTLVQRHPSHAVTFVDNHDTQPGEALESFVQGWFKPLAYATILTREQGYPQVFYGDYYGIPSDGVPSYRQQIDPLLAARQQYAYGRQHDYFDHWDVIGWTREGNASHPNSGLATIMSDGPGGSKWMYVGRQKAGEVWHDMTGNRSGTVTINQDGWGHFFVNGGSVSVWVKR

SEQ ID NO: 43415 - protein, 477 aa, Bacillus sp. (in: firmicutes)
NGTIMQYFEWNVPNDGQHWNRLHNNAQNLKNAGITAIWIPPAWKGTSQSDTGYGAYDLYDLGEFNQKGTVRTKYGTKAELERAIRSLKANGIQVYGDVVMNHKAGADFTERVQAVEVNPQNRNQEVSGTYQIEAWTGFNFPGRGNQHSSFKWRWYHFDGTDWDESRNKSRIYKFRGKAWDWEVDTEFGNYDYLMYADLDMDHPEVINELNRWGVWYANTLNLDGFRLDAVKHIKFSFMRDWLGHVRGQTGKNLFAVAEYWKNDLGALENYLSKTNWTMSAFDVPLHYNLYQASNSSGNYDMRNLLNGTLVQRHPSHAVTFVDNHDTQPGEALESFVQGWFKPLAYATILTREQGYPQVFYGDYYGIPSDGVPSYRQQIDPLLAARQQYAYGRQHDYFDHWDVIGWTREGNASHPNSGLATIMSDGPGGSKWMYVGRQKAGEVWHDMTGNRSGTVTINQDGWGHFFVNGGSVSVWVKR

SEQ ID NO: 43416 - protein, 477 aa, Bacillus sp. (in: firmicutes)
NGTIMQYFEWNVPNDGQHWNRLHNNAQNLKNAGITAIWIPPAWKGTSQNDVGFGAYDLYDLGEFNQKGTVRTKYGTKAELERAIRSLKANGIQVYGDVVMNHKAGADFTERVQAVEVNPQNRNQEVSGTYQIEAWTGFNFPGRGNQHSSFKWRWYHFDGTDWDESRKLNRIYKFRGKAWDWEVDTEFGNYDYLMYADLDMDHPEVINELNRWGVWYANTLNLDGFRLDAVKHIKFSFMRDWLGHVRGQTGKNLFAVAEYWKNDLGALENYLSKTNWTMSAFDVPLHYNLYQASNSSGNYDMRNLLNGTLVQRHPSHAVTFVDNHDTQPGEALESFVQGWFKPLAYATILTREQGYPQVFYGDYYGIPSDGVPSYRQQIDPLLAARQQYAYGRQHDYFDHWDVIGWTREGNASHPNSGLATIMSDGPGGSKWMYVGRQKAGEVWHDMTGNRSGTVTINQDGWGHFFVNGGSVSVWVKR

SEQ ID NO: 43417 - protein, 477 aa, Bacillus sp. (in: firmicutes)
NGTIMQYFEWNVPNDGQHWNRLHNNAQNLKNAGITAIWIPPAWKGTSQSDTGYGAYDFYDLGEFNQKGTVRTKYGTKAELERAIRSLKANGIQVYGDVVMNHKAGADFTERVQAVEVNPQNRNQEVSGTYQIEAWTGFNFPGRGNQHSSFKWRWYHFDGTDWDESRKLNRIYKFRGKAWDWEVDTEFGNYDYLMYADLDMDHPEVINELNRWGVWYANTLNLDGFRLDAVKHIKFSFMRDWLGHVRGQTGKNLFAVAEYWKNDLGALENYLSKTNWTMSAFDVPLHYNLYQASNSSGNYDMRNLLNGTLVQRHPSHAVTFVDNHDTQPGEALESFVQGWFKPLAYATILTREQGYPQVFYGDYYGIPSDGVPSYRQQIDPLLAARQQYAYGRQHDYFDHWDVIGWTREGNASHPNSGLATIMSDGPGGSKWMYVGRQKAGEVWHDMTGNRSGTVTINQDGWGHFFVNGGSVSVWVKR

SEQ ID NO: 43418 - protein, 477 aa, Bacillus sp. (in: firmicutes)
NGTIMQYFEWNVPNDGQHWNRLHNNAQNLKNAGITAIWIPPAWKGTSQSDTGYGAYDLYDLGEFNQKGTVRTKYGTKAELERAIRSLKANGIQVYGDVVMNHKAGADFTERVQAVEVNPQNRNQEVSGTYQIEAWTGFNFPGRGNQHSSFKWRWYHFDGTDWDESRKLNRIYKFRGKAWDWEVDTEFGNYDYLLYADLDMDHPEVINELNRWGVWYANTLNLDGFRLDAVKHIKFSFMRDWLGHVRGQTGKNLFAVAEYWKNDLGALENYLSKTNWTMSAFDVPLHYNLYQASNSSGNYDMRNLLNGTLVQSHPSHAVTFVDNHDTQPGEALESFVQGWFKPLAYATILTREQGYPQVFYGDYYGIPSDGVPSYRQQIDPLLAARQQYAYGRQHDYFDHWDVIGWTREGNASHPNSGLATIMSDGPGGSKWMYVGRQKAGEVWHDMTGNRSGTVTINQDGWGHFFVNGGSVSVWVKR

SEQ ID NO: 43419 - protein, 477 aa, Bacillus sp. (in: firmicutes)
NGTIMQYFEWNVPNDGQHWNRLHNNAQNLKNAGITAIWIPPAWKGTSQSDTGYGAYDLYDLGEFNQKGTVRTKYGTKAELERAIRSLKANGIQVYGDVVMNHKAGADFTERVQAVEVNPQNRNQEVSGTYQIEAWTGFNFPGRGNQHSSFKWRWYHFDGTDWDESRKLNRIYKFRGKAWDWEVDTEFGNYDYLMYADLDMDHPEVINELNRWGVWYANTLNLDGFRLDAVKHIKFSFMRDWLGHVRGQTGKNLFAVAEYWKNDLGALENYLSKTNWTMSAFDVPLHYNLYQASNSSGNYDMRNLLNGTLVQRHPSHAVTFVDNHDTQPDEALESFVQGWFKPLAYATILTREQGYPQVFYGDYYGIPSDGVPSYRQQIDPLLAARQQYAYGRQHDYFDHWDVIGWTREGNASHPNSGLATIMSDGPGGSKWMYVGRQKAGEVWHDMTGNRSGTVTINQDGWGHFFVNGGSVSVWVKR

SEQ ID NO: 43420 - protein, 477 aa, Bacillus sp. (in: firmicutes)
NGTIMQYFEWNVPNDGQHWNRLHNNAQNLKNAGITAIWIPPAWKGTSQSDTGYGAYDLYDLGEFNQKGTVRTKYGTKAELERAIRSLKANGIQVYGDVVMNHKAGADFTERVQAVEVNPQNRNQEVSGPYQIEAWTGFNFPGRGNQHSSFKWRWYHFDGTDWDESRKLNRIYKFRGKAWDWEVDTEFGNYDYLMYADLDMDHPEVINELNRWGVWYANTLNLDGFRLDAVKHIKFSFMRDWLGHVRGQTGKNLFAVAEYWKNDLGALENYLSKTNWTMSAFDVPLHYNLYQASNSSGNYDMRNLLNGTLVQRHPSHAVTFVDNHDTQPGEALESFVQGWFKPLAYATILTREQGYPQVFYGDYYGIPSDGVPSYRQQIDPLLAARQQYAYGRQHDYFDHWDVIGWTREGNASHPNSGLATIMSDGPGGSKWMYVGRQKAGEVWHDMTGNRSGTVTINQDGWGHFFVNGGSVSVWVKR

SEQ ID NO: 43421 - protein, 477 aa, Bacillus sp. (in: firmicutes)
NGTIMQYFEWNVPNDGQHWNRLHNNAQNLKNAGITAIWIPPAWKGTSQSDTGYGAYDLYDLGEFNQKGTVRTKYGTKAELERAIRSLKANGIQVYGDVVMNHKAGADFTERVQAVEVNPQNRNQEVSGTYQIEAWTGFNFPGRGNQHSSFKWSWYHFDGTDWDESRKLNRIYKFRGKAWDWEVDTEFGNYDYLMYADLDMDHPEVINELNRWGVWYANTLNLDGFRLDAVKHIKFSFMRDWLGHVRGQTGKNLFAVAEYWKNDLGALENYLSKTNWTMSAFDVPLHYNLYQASNSSGNYDMRNLLNGTLVQRHPSHAVTFVDNHDTQPGEALESFVQGWFKPLAYATILTREQGYPQVFYGDYYGIPSDGVPSYRQQIDPLLAARQQYAYGRQHDYFDHWDVIGWTREGNASHPNSGLATIMSDGPGGSKWMYVGRQKAGEVWHDMTGNRSGTVTINQDGWGHFFVNGGSVSVWVKR

SEQ ID NO: 43422 - protein, 477 aa, Bacillus sp. (in: firmicutes)
NGTIMQYFEWNVPNDGQHWNRLHNNAQNLKNAGITAIWIPPAWKGTSQSDTGYGAYDLYDLGEFNQKGTVRTKYGTKAELERAIRSLKANGIQVYGDVVMNHKAGADFTERVQAVEVNPQNRNQEVSGTYQIEAWTGFNFPGRGNQHSSFKWRWHHFDGTDWDESRKLNRIYKFRGKAWDWEVDTEFGNYDYLMYADLDMDHPEVINELNRWGVWYANTLNLDGFRLDAVKHIKFSFMRDWLGHVRGQTGKNLFAVAEYWKNDLGALENYLSKTNWTMSAFDVPLHYNLYQASNSSGNYDMRNLLNGTLVQRHPSHAVTFVDNHDTQPGEALESFVQGWFKPLAYATILTREQGYPQVFYGDYYGIPSDGVPSYRQQIDPLLAARQQYAYGRQHDYFDHWDVIGWTREGNASHPNSGLATIMSDGPGGSKWMYVGRQKAGEVWHDMTGNRSGTVTINQDGWGHFFVNGGSVSVWVKR

SEQ ID NO: 43423 - protein, 477 aa, Bacillus sp. (in: firmicutes)
NGTIMQYFEWNVPNDGQHWNRLHNNAQNLKNAGITAIWIPPAWKGTSQSDTGYGAYDLYDLGEFNQKGTVRTKYGTKAELERAIRSLKANGIQVYGDVVMNHKAGADFTERVQAVEVNPQNRNQEVSGTYQIEAWTGFNFPGRGNQHSSFKWRWYHFDGTDWDESRKLNRIYKFRGKHWDWEVDTEFGNYDYLMYADLDMDHPEVINELNRWGVWYANTLNLDGFRLDAVKHIKFSFMRDWLGHVRGQTGKNLFAVAEYWKNDLGALENYLSKTNWTMSAFDVPLHYNLYQASNSSGNYDMRNLLNGTLVQRHPSHAVTFVDNHDTQPGEALESFVQGWFKPLAYATILTREQGYPQVFYGDYYGIPSDGVPSYRQQIDPLLAARQQYAYGRQHDYFDHWDVIGWTREGNASHPNSGLATIMSDGPGGSKWMYVGRQKAGEVWHDMTGNRSGTVTINQDGWGHFFVNGGSVSVWVKR

SEQ ID NO: 43424 - protein, 477 aa, Bacillus sp. (in: firmicutes)
NGTIMQYFEWNVPNDGQHWNRLHNNAQNLKNAGITAIWIPPAWKGTSQSDTGYGAYDLYDLGEFNQKGTVRTKYGTKAELERAIRSLKANGIQVYGDVVMNHKAGADFTERVQAVEVNPQNRNQEVSGTYQIEAWTGFNFPGRGNQHSSFKWRWYHFDGTDWDESRKLNRIYKFRGKAWDWEVDTEFGNYDYLMYADLDMDHPEVINELNRWGVWYANKLNLDGFRLDAVKHIKFSFMRDWLGHVRGQTGKNLFAVAEYWRNDLGALENYLSKTNWTMSAFDVPLHYNLYQASNSSGNYDMRNLLNGTLVQRHPSHAVTFVDNHDTQPGEALESFVQGWFKPLAYATILTREQGYPQVFYGDYYGIPSDGVPSYRQQIDPLLAARQQYAYGRQHDYFDHWDVIGWTREGNASHPNSGLATIMSDGPGGSKWMYVGRQKAGEVWHDMTGNRSGTVTINQDGWGHFFVNGGSVSVWVKR

SEQ ID NO: 43425 - protein, 477 aa, Bacillus sp. (in: firmicutes)
NGTIMQYFEWNVPNDGQHWNRLHNNAQNLKNAGITAIWIPPAWKGTSQSDTGYGAYDLYDLGEFNQKGTVRTKYGTKAELERAIRSLKANGIQVYGDVVMNHKAGADFTERVQAVEVNPQNRNQEVSGTYQIEAWTGFNFPGRGNQHSSFKWHWYHFDGTDWDESRKLNRIYKFRGKAWDWEVDTEFGNYDYLMYADLDMDHPEVINELNRWGVWYANTLNLDGFRLDAVKHIKFSFMRDWLGHVRGQTGKNLFAVAEYWKNDLGALENYLSKTNWTMSAFDVPLHYNLYQASNSSGNYDMRNLLNGTLVQRHPSHAVTFVDNHDTQPGEALESFVQGWFKPLAYATILTREQGYPQVFYGDYYGIPSDGVPSYRQQIDPLLAARQQYAYGRQHDYFDHWDVIGWTREGNASHPNSGLATIMSDGPGGSKWMYVGRQKAGEVWHDMTGNRSGTVTINQDGWGHFFVNGGSVSVWVKR

SEQ ID NO: 43426 - protein, 477 aa, Bacillus sp. (in: firmicutes)
NGTIMQYFEWNVPNDGQHWNRLHNNAQNLKNAGITAIWIPPAWKGTSQSDTGYGAYDLYDLGEFNQKGTVRTKYGTKAELERAIRSLKANGIQVYGDVVMNHKAGADFTERVQAVEVNPQNRNQEVSGTYQIEAWTGFNFPGRGNQHSSFKWRWYHFDGTDWDESRKLNRIYKFRGKAWDWEVDTEFGNYDYLMYADLDMDHPEVINELNRWGVWYANTLNLDGFRLDAVKHIKFSFMRDWLGHVRGQTGKNLFAVAEYWKNDLGAVENYLSKTNWTMSAFDVPLHYNLYQASNSSGNYDMRNLLNGTLVQRHPSHAVTFVDNHDTQPGEALESFVQGWFKPLAYATILTREQGYPQVFYGDYYGIPSDGVPSYRQQIDPLLAARQQYAYGRQHDYFDHWDVIGWTREGNASHPNSGLATIMSDGPGGSKWMYVGRQKAGEVWHDMTGNRSGTVTINQDGWGHFFVNGGSVSVWVKR

SEQ ID NO: 43427 - protein, 477 aa, Bacillus sp. (in: firmicutes)
NGTIMQYFEWNVPNDGQHWNRLHNNAQNLKNAGITAIWIPPAWKGTSQSDTGYGAYDLYDLGEFNQKGTVRTKYGAKAELERAIRSLKANGIQVYGDVVMNHKAGADFTERVQAVEVNPQNRNQEVSGTYQIEAWTGFNFPGRGNQHSSFKWRWYHFDGTDWDESRKLNRIYKFRGKAWDWEVDTEFGNYDYLMYADLDMDHPEVINELNRWGVWYANTLNLDGFRLDAVKHIKFSFMRDWLGHVRGQTGKNLFAVAEYWKNDLGALENYLSKTNWTMSAFDVPLHYNLYQASNSSGNYDMRNLLNGTLVQRHPSHAVTFVDNHDTQPGEALESFVQGWFKPLAYATILTREQGYPQVFYGDYYGIPSDGVPSYRQQIDPLLAARQQYAYGRQHDYFDHWDVIGWTREGNASHPNSGLATIMSDGPGGSKWMYVGRQKAGEVWHDMTGNRSGTVTINQDGWGHFFVNGGSVSVWVKR

SEQ ID NO: 43428 - protein, 477 aa, Bacillus sp. (in: firmicutes)
NGTIMQYFEWNVPNDGQHWNRLHNNAQNLKNAGITAIWIPPAWKGTSQSDTGYGAYDLYDLGEFNQKGTVRTKYGTKAELERAIRSLKANGIQVYGDVVMNHKAGADFTERVQAVEVNPQNRNQEVSGTYQIEAWTGFNFPGRGNQHSSFKWRWYHFDGTDWDESRKLNRIYKFRGKAWDWEVDTEFGNYDYLLYADLDMDHPEVINELNRWGVWYANTLNLDGFRLDAVKHIKFSFMRDWLGHVRGQTGKNLFAVAEYWKNDLGALENYLSKTNYTMSAFDVPLHYNLYQASNSSGNYDMRNLLNGTLVQRHPSHAVTFVDNHDTQPGEALESFVQGWFKPLAYATILTREQGYPQVFYGDYYGIPSDGVPSYRQQIDPLLAARQQYAYGRQHDYFDHWDVIGWTREGNASHPNSGLATIMSDGPGGSKWMYVGRQKAGEVWHDMTGNRSGTVTINQDGWGHFFVNGGSVSVWVKR

SEQ ID NO: 43429 - protein, 477 aa, Bacillus sp. (in: firmicutes)
NGTIMQYFEWNVPNDGQHWNRLHNNAQNLKNAGITAIWIPPAWKGTSQSDTGYGAYDLYDLGEFNQKGTVRTKYGTKAELERAIRSLKANGIQVYGDVVMNHKAGADFTERVQAVEVNPQNNNQEVSGTYQIEAWTGFNFPGRGNQHSSFKWRWYHFDGTDWDESRKLNRIYKFRGKAWDWEVDTEFGNYDYLMYADLDMDHPEVINELNRWGVWYANTLNLDGFRLDAVKHIKFSFMRDWLGHVRGQTGKNLFAVAEYWKNDLGALENYLSKTNWTMSAFDVPLHYNLYQASNSSGNYDMRNLLNGTLVQRHPSHAVTFVDNHDTQPGEALESFVQGWFKPLAYATILTREQGYPQVFYGDYYGIPSDGVPSYRQQIDPLLAARQQYAYGRQHDYFDHWDVIGWTREGNASHPNSGLATIMSDGPGGSKWMYVGRQKAGEVWHDMTGNRSGTVTINQDGWGHFFVNGGSVSVWVKR

SEQ ID NO: 43430 - protein, 477 aa, Bacillus sp. (in: firmicutes)
NGTIMQYFEWNVPNDGQHWNRLHNNAQNLKNAGITAIWIPPAWKGTSQSDTGYGAYDLYDLGEFNQKGTVRTKYGTKAELERAIRSLKANGIQVYGDVVMNHKAGADFTERVQAVEVNPQNRNQEVSGTYQIEAWTGFNFPGRGNQHSSFKWRWYHFDGTDWDESRKLNRIYKFRGKEWDWEVDTEFGNYDYLMYADLDMDHPEVINELNRWGVWYANTLNLDGFRLDAVKHIKFSFMRDWLGHVRGQTGKNLFAVAEYWKNDLGALENYLSKTNWTMSAFDVPLHYNLYQASNSSGNYDMRNLLNGTLVQRHPSHAVTFVDNHDTQPGEALESFVQGWFKPLAYATILTREQGYPQVFYGDYYGIPSDGVPSYRQQIDPLLAARQQYAYGRQHDYFDHWDVIGWTREGNASHPNSGLATIMSDGPGGSKWMYVGRQKAGEVWHDMTGNRSGTVTINQDGWGHFFVNGGSVSVWVKR

SEQ ID NO: 43431 - protein, 477 aa, Bacillus sp. (in: firmicutes)
NGTIMQYFEWNVPNDGQHWNRLHNNAQNLKNAGITAIWIPPAWKGTSQSDTGYGAYDLYDLGEFNQKGTVRTKYGTKAELERAIRSLKANGIQVYGDVVMNHKAGADFTERVQAVEVNPQNRNQEVSGTYQIEAWTGFNFPGRGNQHSSFKWRWYHFDGTDWDESRKLNRIYKFRGKAWDWEVDTEHGNYDYLMYADLDMDHPEVINELNRWGVWYANTLNLDGFRLDAVKHIKFSFMRDWLGHVRGQTGKNLFAVAEYWKNDLGALENYLSKTNWTMSAFDVPLHYNLYQASNSSGNYDMRNLLNGTLVQRHPSHAVTFVDNHDTQPGEALESFVQGWFKPLAYATILTREQGYPQVFYGDYYGIPSDGVPSYRQQIDPLLAARQQYAYGRQHDYFDHWDVIGWTREGNASHPNSGLATIMSDGPGGSKWMYVGRQKAGEVWHDMTGNRSGTVTINQDGWGHFFVNGGSVSVWVKR

SEQ ID NO: 43432 - protein, 477 aa, Bacillus sp. (in: firmicutes)
NGTIMQYFEWNVPNDGQHWNRLHNNAQNLKNAGITAIWIPPAWKGTSQSDTGYGAYDLYDLGEFNQKGTVRTKYGTKAELERAIRSLKANGIQVYGDVVMNHKAGADFTERVQAVEVNPQNRNQEVSGTYQIEAWTGFNFPGRGNQHSSFKWRWYHFDGTDWDESLKLNRIYKFRGKAWDWEVDTEFGNYDYLMYADLDMDHPEVINELNRWGVWYANTLNLDGFRLDAVKHIKFSFMRDWLGHVRGQTGKNLFAVAEYWKNDLGALENYLSKTNWTMSAFDVPLHYNLYQASNSSGNYDMRNLLNGTLVQRHPSHAVTFVDNHDTQPGEALESFVQGWFKPLAYATILTREQGYPQVFYGDYYGIPSDGVPSYRQQIDPLLAARQQYAYGRQHDYFDHWDVIGWTREGNASHPNSGLATIMSDGPGGSKWMYVGRQKAGEVWHDMTGNRSGTVTINQDGWGHFFVNGGSVSVWVKR

SEQ ID NO: 43433 - protein, 477 aa, Bacillus sp. (in: firmicutes)
NGTIMQYFEWNVPNDGQHWNRLHNNAQNLKNAGITAIWIPPAWKGTSQSDIGYGAYDLYDLGEFNQKGTVRTKYGTKAELERAIRSLKANGIQVYGDVVMNHKAGADFTERVQAVEVNPQNANQEVSGTYQIEAWTGFNFPGRGNQHSSFKWRWYHFDGTDWDESRKLNRIYKFRGKAWDWEVDTEFGNYDYLMYADLDMDHPEVINELNRWGVWYANTLNLDGFRLDAVKHIKFSFMRDWLGHVRGQTGKNLFAVAEYWKNDLGALENYLSKTNWTMSAFDVPLHYNLYQASNSSGNYDMRNLLNGTLVQRHPSHAVTFVDNHDTQPGEALESFVQGWFKPLAYATILTREQGYPQVFYGDYYGIPSDGVPSYRQLIDPLLAARQQYAYGRQHDYFDHWDVIGWTREGNASHPNSGLATIMSDGPGGSKWMYVGRQKAGEVWHDMTGNRSGTVTINQDGWGHFFVNGGSVSVWVKR

SEQ ID NO: 43434 - protein, 477 aa, Bacillus sp. (in: firmicutes)
NGTIMQYFEWNVPNDGQHWNRLHNNAQNLKNAGITAIWIPPAWKGTSQSDTGYGAYDLYDLGEFNQKGTVRTKYGTKAELERAIRSLKANGIQVYGDVVMNHKAGADFTERVQAVEVNPQNRNQEVSGTYQIEAWTGFNFPGRGNQHSSFKWRWYHFDGTDWDESYKLNRIYKFRGKAWDWEVDTEFGNYDYLMYADLDMDHPEVINELNRWGVWYANTLNLDGFRLDAVKHIKFSFMRDWLGHVRGQTGKNLFAVAEYWKNDLGALENYLSKTNWTMSAFDVPLHYNLYQASNSSGNYDMRNLLNGTLVQRHPSHAVTFVDNHDTQPGEALESFVQGWFKPLAYATILTREQGYPQVFYGDYYGIPSDGVPSYRQQIDPLLAARQQYAYGRQHDYFDHWDVIGWTREGNASHPNSGLATIMSDGPGGSKWMYVGRQKAGEVWHDMTGNRSGTVTINQDGWGHFFVNGGSVSVWVKR

SEQ ID NO: 43435 - protein, 477 aa, Bacillus sp. (in: firmicutes)
NGTIMQYFEWNVPNDGQHWNRLHNNAQNLKNAGITAIWIPPAWKGTSQSDTGYGAYDLYDLGEFNQKGTVRTKYGTKAELERAIRSLKANGIQVYGDVVMNHKAGADFTERVQAVEVNPQNRNQEVSGTYQIEAWTGFNFPGRGNQHSSFKWKWYHFDGTDWDESRKLNRIYKFRGKAWDWEVDTEFGNYDYLMYADLDMDHPEVINELNRWGVWYANTLNLDGFRLDAVKHIKFSFMRDWLGHVRGQTGKNLFAVAEYWKNDLGALENYLSKTNWTMSAFDVPLHYNLYQASNSSGNYDMRNLLNGTLVQRHPSHAVTFVDNHDTQPGEALESFVQGWFKPLAYATILTREQGYPQVFYGDYYGIPSDGVPSYRQQIDPLLAARQQYAYGRQHDYFDHWDVIGWTREGNASHPNSGLATIMSDGPGGSKWMYVGRQKAGEVWHDMTGNRSGTVTINQDGWGHFFVNGGSVSVWVKR

SEQ ID NO: 43436 - protein, 477 aa, Bacillus sp. (in: firmicutes)
NGTIMQYFEWNVPNDGQHWNRLHNNAQNLKNAGITAIWIPPAWKGTSQSDTGYGAYDLYDLGEFNQKGTVRTKYGTKAELERAIRSLKANGIQVYGDVVMNHKAGADFTERVQAVEVNPQNRNQEVSGTYQIEAWTGFNFPGRGNQHSSFKWRWYHFDGTDWDESRKLNRIYKFSGKAWDWEVDTEFGNYDYLMYADLDMDHPEVINELNRWGVWYANTLNLDGFRLDAVKHIKFSFMRDWLGHVRGQTGKNLFAVAEYWKNDLGALENYLSKTNWTMSAFDVPLHYNLYQASNSSGNYDMRNLLNGTLVQRHPSHAVTFVDNHDTQPGEALESFVQGWFKPLAYATILTREQGYPQVFYGDYYGIPSDGVPSYRQQIDPLLAARQQYAYGRQHDYFDHWDVIGWTREGNASHPNSGLATIMSDGPGGSKWMYVGRQKAGEVWHDMTGNRSGTVTINQDGWGHFFVNGGSVSVWVKR

SEQ ID NO: 43437 - protein, 477 aa, Bacillus sp. (in: firmicutes)
NGTIMQYFEWNVPNDGQHWNRLHNNAQNLKNAGITAIWIPPAWKGTSQSDTGYGAYDLYDLGEFNQKGTVRTKYGTKAELERAIRSLKANGIQVYGDVVMNHKAGADFTERVQAVEVNPQNLNQEVSGTYQIEAWTGFNFPGRGNQHSSFKWRWYHFDGTDWDESRKLNRIYKFRGKAWDWEVDTEFGNYDYLMYADLDMDHPEVINELNRWGVWYANTLNLDGFRLDAVKHIKFSFMRDWLGHVRGQTGKNLFAVAEYWKNDLGALENYLSKTNWTMSAFDVPLHYNLYQASNSSGNYDMRNLLNGTLVQRHPSHAVTFVDNHDTQPGEALESFVQGWFKPLAYATILTREQGYPQVFYGDYYGIPSDGVPSYRQQIDPLLAARQQYAYGRQHDYFDHWDVIGWTREGNASHPNSGLATIMSDGPGGSKWMYVGRQKAGEVWHDMTGNRSGTVTINQDGWGHFFVNGGSVSVWVKR

SEQ ID NO: 43438 - protein, 477 aa, Bacillus sp. (in: firmicutes)
NGTIMQYFEWNVPNDGQHWNRLHNNAQNLKNAGITAIWIPPAWKGTSQSDTGYGAYDLYDLGEFNQKGTVRTKYGTKAELERAIRSLKANGIQVYGDVVMNHKAGADFTERVQAVEVNPQNRNQEVSGTYQIEAWTGFNFPGRGNQHSSFKWRWYHFDGTDWDESRKLNRIYKFRGKAWDWEVDTEFGNYDYLLYADLDMDHPEVINELNRWGVWYANTLNLDGFRLDAVKHIKFSFMRDWLGHVRGQTGKNLFAVAEYWKNDLGALENYLSKTNWTMSAFDVPLHYNLYQASNSSGNYDMRNLLNGTLVQRHPSHAVTFVDNHDTQPGEALESFVQGWFKPLAYATILTREQGYPQVFYGDYYGIPSDGVPSYRQQIDPLLAARQQYAYGRQHDYFDHWDVIGWTREGNASHPNSGLATIMSDGPGGSKWMYVGRQKAGEVWHDMTGNRSGTVTINQDGWGHFFVNGGSVSVWVKR

SEQ ID NO: 43439 - protein, 477 aa, Bacillus sp. (in: firmicutes)
NGTIMQYFEWNVPNDGQHWNRLHNNAQNLKNAGITAIWIPPAWKGTSQSDTGYGAYDLYDLGEFNQKGTVRTKYGTKAELERAIRSLKANGIQVYGDVVMNHKAGADFTERVQAVEVNPQNRNQEVSGTYQIEAWTGFNFPGRGNQHSSFKWRWYHFDGTDWDESRKLNRIYKFRGKAWDWEVDTEFGNYDYLMYADLDMDHPEVINELNRWGVWYANTLNLDGFRLDAVKHIKFSFMRDWLGHVRGQTGKNLFAVAEYWKNDLGALENYLSKTNWTMSAFDVPLHYNLYQASNSSGNYDMRNLLNGTLVQRHPSHAVTFVDNHDTQPEEALESFVQGWFKPLAYATILTREQGYPQVFYGDYYGIPSDGVPSYRQQIDPLLAARQQYAYGRQHDYFDHWDVIGWTREGNASHPNSGLATIMSDGPGGSKWMYVGRQKAGEVWHDMTGNRSGTVTINQDGWGHFFVNGGSVSVWVKR

SEQ ID NO: 43440 - protein, 477 aa, Bacillus sp. (in: firmicutes)
NGTIMQYFEWNVPNDGQHWNRLHNNAQNLKNAGITAIWIPPAWKGTSQSDTGYGAYDLYDLGEFNQKGTVRTKYGTKAELERAIRSLKANGIQVYGDVVMNHKAGADFTERVQAVEVNPQNTNQEVSGTYQIEAWTGFNFPGRGNQHSSFKWRWYHFDGTDWDESRKLNRIYKFRGKAWDWEVDTEFGNYDYLMYADLDMDHPEVINELNRWGVWYANTLNLDGFRLDAVKHIKFSFMRDWLGHVRGQTGKNLFAVAEYWKNDLGALENYLSKTNWTMSAFDVPLHYNLYQASNSSGNYDMRNLLNGTLVQRHPSHAVTFVDNHDTQPGEALESFVQGWFKPLAYATILTREQGYPQVFYGDYYGIPSDGVPSYRQQIDPLLAARQQYAYGRQHDYFDHWDVIGWTREGNASHPNSGLATIMSDGPGGSKWMYVGRQKAGEVWHDMTGNRSGTVTINQDGWGHFFVNGGSVSVWVKR

SEQ ID NO: 43441 - protein, 477 aa, Bacillus sp. (in: firmicutes)
NGTIMQYFEWNVPNDGQHWNRLHNNAQNLKNAGITAIWIPPAWKGTSQSDTGYGAYDLYDLGEFNQKGTVRTKYGTKAELERAIRSLKANGIQVYGDVVMNHKAGADFTERVQAVEVNPQNRNQEVSGTYQIEAWTGFNFPGRGNQHSSFKWRWYHFDGTDWDESRKLNRIYKFRGKAWDWEVDTEFGNYDYLMYADLDMNHPEVINELNRWGVWYANTLNLDGFRLDAVKHIKFSFMRDWLGHVRGQTGKNLFAVAEYWKNDLGALENYLSKTNWTMSAFDVPLHYNLYQASNSSGNYDMRNLLNGTLVQRHPSHAVTFVDNHDTQPGEALESFVQGWFKPLAYATILTREQGYPQVFYGDYYGIPSDGVPSYRQQIDPLLAARQQYAYGRQHDYFDHWDVIGWTREGNASHPNSGLATIMSDGPGGSKWMYVGRQKAGEVWHDMTGNRSGTVTINQDGWGHFFVNGGSVSVWVKR

SEQ ID NO: 43442 - protein, 477 aa, Bacillus sp. (in: firmicutes)
NGTIMQYFEWNVPNDGQHWNRLHNNAQNLKNAGITAIWIPPAWKGTSQSDTGYGAYDLYDLGEFNQKGTVRTKYGTKAELERAIRSLKANGIQVYGDVVMNHKAGADFTERVQAVEVNPQNRNQEVSGTYQIEAWTGFNFPGRGNQHSSFKWRWYHFDGTDWDESRKLNRIYKFRGKAWDWEVDTEFGNYDYLMYADLDMDHPEVINELNRWGVWYANTLNLDGFRLDAAKHIKFSFMRDWLGHVRGQTGKNLFAVAEYWKNDLGALENYLSKTNWTMSAFDVPLHYNLYQASNSSGNYDMRNLLNGTLVQRHPSHAVTFVDNHDTQPGEALESFVQGWFKPLAYATILTREQGYPQVFYGDYYGIPSDGVPSYRQQIDPLLAARQQYAYGRQHDYFDHWDVIGWTREGNASHPNSGLATIMSDGPGGSKWMYVGRQKAGEVWHDMTGNRSGTVTINQDGWGHFFVNGGSVSVWVKR

SEQ ID NO: 43443 - protein, 477 aa, Bacillus sp. (in: firmicutes)
NGTIMQYFEWNVPNDGQHWNRLHNNAQNLKNAGITAIWIPPAWKGTSQNDVGYAAYDLYDLGEFNQKGTVRTKYGTKAELERAIRSLKANGIQVYGDVVMNHKAGADFTERVQAVEVNPQNRNQEVSGTYQIEAWTGFNFPGRGNQHSSFKWRWYHFDGTDWDESRKLNRIYKFRGKAWDWEVDTEFGNYDYLMYADLDMDHPEVINELNRWGVWYANTLNLDGFRLDAVKHIKFSFMRDWLGHVRGQTGKNLFAVAEYWKNDLGALENYLSKTNWTMSAFDVPLHYNLYQASNSSGNYDMRNLLNGTLVQRHPSHAVTFVDNHDTQPGEALESFVQGWFKPLAYATILTREQGYPQVFYGDYYGIPSDGVPSYRQQIDPLLAARQQYAYGRQHDYFDHWDVIGWTREGNASHPNSGLATIMSDGPGGSKWMYVGRQKAGEVWHDMTGNRSGTVTINQDGWGHFFVNGGSVSVWVKR

SEQ ID NO: 43444 - protein, 477 aa, Bacillus sp. (in: firmicutes)
NGTIMQYFEWNVPNDGQHWNRLHNNAQNLKNAGITAIWIPPAWKGTSQSDTGYGAYDLYDLGEFNQKGTVRTKYGTKAELERAIRSLKANGIQVYGDVVMNHKAGADFTERVQAVEVNPQNRNQEVSGTYQIEAWTGFNFPGRGNQHSSFKWRWYHFDGTDWDESRKLNRIYKFRGKAWDWEVDTEFGNYDYLMYADLDMDHPEVINELNRWGVWYANTLNLDGFRLDAVKHIKFSFMRDWLGHVRGQTGKNLFAVAEYWKNDLGAIENYLSKTNWTMSAFDVPLHYNLYQASNSSGNYDMRNLLNGTLVQRHPSHAVTFVDNHDTQPGEALESFVQGWFKPLAYATILTREQGYPQVFYGDYYGIPSDGVPSYRQQIDPLLAARQQYAYGRQHDYFDHWDVIGWTREGNASHPNSGLATIMSDGPGGSKWMYVGRQKAGEVWHDMTGNRSGTVTINQDGWGHFFVNGGSVSVWVKR

SEQ ID NO: 43445 - protein, 477 aa, Bacillus sp. (in: firmicutes)
NGTIMQYFEWNVPNDGQHWNRLHNNAQNLKNAGITAIWIPPAWKGTSQSDTGYGAYDLYDLGEFNQKGTVRTKYGTKAELERAIRSLKANGIQVYGDVVMNHKAGADFTERVQAVEVNPQNRNQEVSGTYQIEAWTGFNFPGRGNQHSSFKWRWYHFDGTDWDESRKLNRIYKFRGKAWDWEVDTEFGNYDYLMYADLDMDHPEVINELNRWGVWYANTLNLDGFRLDAVKHIKFSFMRDWLGHVRGQTGKNLFAVAEYWKNDLGALENYLSKTNWTMSAFDVPVHYNLYQASNSSGNYDMRNLLNGTLVQRHPSHAVTFVDNHDTQPGEALESFVQGWFKPLAYATILTREQGYPQVFYGDYYGIPSDGVPSYRQQIDPLLAARQQYAYGRQHDYFDHWDVIGWTREGNASHPNSGLATIMSDGPGGSKWMYVGRQKAGEVWHDMTGNRSGTVTINQDGWGHFFVNGGSVSVWVKR

SEQ ID NO: 43446 - protein, 477 aa, Bacillus sp. (in: firmicutes)
NGTIMQYFEWNVPNDGQHWNRLHNNAQNLKNAGITAIWIPPAWKGTSQSDTGYGAYDLYDLGEFNQKGTVRTKYGTKAELERAIRSLKANGIQVYGDVVMNHKAGADFTERVQAVEVNPQNRNQEVSGTYQIEAWTGFNFPGRGNQHSSFKWRWYHFDGTDWDESRKLNRIYKFRGKAWDWEVDTEFGNYDYLLYADLDMDHPEVINELNRWGVWYANTLNLDGFRLDAVKHIKFSFMRDWLGHVRGQTGKNLFAVAEYWKNDLGALENYLSKTNWTMSAFDVPLHYNLYQASNSSGNYDMRNLLNGTLVQRHPSHAVTFVDNHDTQPGEALESFVQGWFKPLAYATILTREQGYPSVFYGDYYGIPSDGVPSYRQQIDPLLAARQQYAYGRQHDYFDHWDVIGWTREGNASHPNSGLATIMSDGPGGSKWMYVGRQKAGEVWHDMTGNRSGTVTINQDGWGHFFVNGGSVSVWVKR

SEQ ID NO: 43447 - protein, 480 aa, Bacillus amyloliquefaciens
NGTLMQYFEWYTPNDGQHWKRLQNDAEHLSDIGITAVWIPPAYKAISQADVGYGAYDLYDLGEFHQKGTVRTKYGTKGELQSAIKSLHSRDINVYGDVVINHKAGADATEDVTAVEVDPADRNRVISGEHLIKAWTHFHFPGRGSTYSDFKWYWYHFDGTDWDESRKLNRIYKFQGKTWDWEVSNEFGNYDYLMYADFDYDHPDVVAEIKRWGTWYANELQLDGFRLDAVKHIKFSFLRDWVNHVREKTGKEMFTVAEYWSNDLGALENYLNKTNFNHSVFDVPLHYQFHAASTQGGGYDMRKLLNGTVVSKHPLKSVTFVDNHDTQPGQSLESTVQTWFKPLAYAFILTRESGYPQVFYGDMYGTKGDSQREIPALKHKIEPILKARKQYAYGAQHDYFDHHDIVGWTREGDSSVANSGLAALITDGPGGAKRMYVGRQNAGETWHDITGNRSEPVVINSEGWGEFHVNGGSVSIYVQR

SEQ ID NO: 43448 - protein, 480 aa, Bacillus amyloliquefaciens
NGTLMQYFEWYTPNDGQHWKRLQNDAEHLSDIGITAVWIPPAYKAISQADVGYGAYDLYDLGEFHQKGTVRTKYGTKGELQSAIKSLHSRDINVYGDVVINHKAGADATEDVTAVEVDPADRNRVISGEHLIKAWTHFHFPGRGSTYSDFKWYWYHFDGTDWDESRKLNRIYLFQGKTWDWEVSNEFGNYDYLMYADYDYDYPDVVAEITRWGTWYANELQLDGFRLDAVKHIKFSFLRDWVNHVREKTGKEMFTVAEYWSNDLGALENYLNKTNFNHSVFDVPLHYQFHAASTQGGGYDMRKLLNGTVVSKHPWKSVTFVDNHDTQPGQSLESTVQTWFKPLAYAFILTRESGYPSVFYGDMYGTKGDSQREIPALKHKIEPILKARKQYAYGAQHDYFDHHDIVGWTREGVSSVANSGLAALITDGPGGAKWMYVGRQNAGETWHDITGNRSEPVVINSEGWGEFHVNGGSVSIYVQR

SEQ ID NO: 43449 - protein, 480 aa, Bacillus licheniformis
NGTLMQYFEWYTPNDGQHWKRLQNDAEHLSDIGITAVWIPPAYKAISQADVGYGAYDLYDLGEFHQKGTVRTKYGTKGELQSAIKSLHSRDINVYGDVVINHKAGADATEDVTAVEVDPADRNRVISGEYLIRAWTHFHFPGRGSTYSDFKWYWYHFDGTDWDESRKLNRIYLFQGKTWDWEVSNEFGNYDYLMYADYDYDYPDVVAEITRWGTWYANELQLDGFRLDAVKHIKFSFLRDWVNHVREKTGKPMFTVAEYWSNDLGALENYLNKTNFNHSVFDVPLHYQFHAASTQGGGYDMRKLLNGTVVSKHPLKSVTFVDNHDTQPGQSLESTVQTWFKPLAYAFILTRESGYPSVFYGDMYGTKGDSQREIPALKHKIEPILKARKQYAYGAQHDYFDHHDIVGWTREGVSSVANSGLAALITDGPGGAKWMYVGRQNAGETWHDITGNRSEPVVINSEGWGEFHVNGGSVSIYVQR

SEQ ID NO: 43450 - protein, 480 aa, Bacillus amyloliquefaciens
NGTLMQYFEWYTPNDGQHWKRLQNDAEHLSDIGITAVWIPPAYKAISQADVGYGAYDLYDLGEFHQKGTVRTKYGTKGELQSAIKSLHSRDINVYGDVVINHKAGADATEDVTAVEVDPADRNRVISGEHLIKAWTHFHFPGRGSTYSDFKWWWYHFDGTDWDESRKLNRIYLFQGKTWDWPVSNEFGNYDYLMYADFDYDHPDVVAEIKRWGTWYANELQLDGFRLDAVKHIKFSFLRDWVNHVREKTGKEMFTVAEYWSNDLGALENYLNKTNFNHSVFDVPLHYQFHAASTQGGGYDMRKLLNGTVVSKHPLKSVTFVDNHDTQPGQSLESTVQTWFKPLAYAFILTRESGYPSVFYGDMYGTKGDSQREIPALKHKIEPILKARKQYAYGAQHDYFDHHDIVGWTREGDSSVANSGLAALITDGPGGAKWMYVGRQNAGETWHDITGNRSEPVVINSEGWGEFHVNGGSVSIYVQR

SEQ ID NO: 43451 - protein, 480 aa, Bacillus amyloliquefaciens
NGTLMQYFEWYTPNDGQHWKRLQNDAEHLSDIGITAVWIPPAYKAISQADVGYGAYDLYDLGEFHQKGTVRTKYGTKGELQSAIKSLHSRDINVYGDVVINHKAGADATEDVTAVEVDPADRNRVISGEHLIKAWTHFWFPGRGSTYSDFKWYWYHFDGTDWDESRKLNRIYLFQGKTWDWEVSNEFGNYDYLMYADYDYDYPDVVAEITRWGTWYANELQLDGFRLDAVKHIKFSFLRDWVNHVREKTGKEMFTVAEYWSNDLGALENYLNKTNFNHSVFDVPLHYQFHAASTQGGGYDMRKLLNGTVVSKHPLKSVTFVDNHDTQPGQSLESTVQTWFKPLAYAFILTRESGYPSVFYGDMYGTKGDSQREIPALKHKIEPILKARKQYAYGAQHDYFDHHDIVGWTREGVSSVANSGLAALITDGPGGAKWMYVGRQNAGETWHDITGNRSEPVVINSEGWGEFHVNGGSVSIYVQR

SEQ ID NO: 43452 - protein, 480 aa, Bacillus amyloliquefaciens
NGTLMQYFEWYTPNDGQHWKRLQNDAEHLSDIGITAVWIPPAYKAISQADVGYGAYDLYDLGEFHQKGTVRTKYGTKGELQSAIKSLHSRDINVYGDVVINHKAGADATEDVTAVEVDPADRNRVISGEHLIKAWTHFHFPGRGSTYSDFKWWWYHFDGTDWDESRKLNRIYLFQGKTWDWEVSNEFGNYDYLMYADYDYDYPDVVAEITRWGTWYANELQLDGFRLDAVKHIKFSFLRDWVNHVREKTGKEMFTVAEYWSNDLGALENYLNKTNFNHSVFDVPLHYQFHAASTQGGGYDMRKLLNGTVVSKHPLKSVTFVDNHDTQPGQSLESTVQTWFKPLAYAFILTRESGYPSVFYGDMYGTKGDSQREIPALKHKIEPILKARKQYAYGAQHDYFDHHDIVGWTREGVSSVANSGLAALITDGPGGAKWMYVGRQNAGETWHDITGNRSEPVVINSEGWGEFHVNGGSVSIYVQR

SEQ ID NO: 43453 - protein, 480 aa, Bacillus amyloliquefaciens
NGTLMQYFEWYTPNDGQHWKRLQNDAEHLSDIGITAVWIPPAYKAISQADVGYGAYDLYDLGEFHQKGTVRTKYGTKGELQSAIKSLHSRDINVYGDVVINHKAGADATEDVTAVEVDPADRNRVISGEHLIKAWTHFHFPGRGSTYSDFKWYWYHFDGTDWDESRKLNRIYLFQGKTWDWEVSNEFGNYDYLMYADYDYDYPDVVAEIKRWGTWYANELQLDGFRLDAVKHIKFSFLRDWVNHVREKTGKEMFTVAEYWSNDLGALENYLNKTNFNHSVFDVPLHYQFHAASTQGGGYDMRKLLNGTVVSKHPLKSVTFVDNHDTQPGQSLESTVQTWFKPLAYAFILTRESGYPSVFYGDMYGTKGDSQREIPALKHKIEPILKARKQYAYGAQHDYFDHHDIVGWTREGVSSVANSGLAALITDGPGGAKWMYVGRQNAGETWHDITGNRSEPVVINSEGWGEFHVNGGSVSIYVQR

SEQ ID NO: 43454 - protein, 480 aa, Bacillus amyloliquefaciens
NGTLMQYFEWYTPNDGQHWKRLQNDAEHLSDIGITAVWIPPAYKAISQADVGYGAYDLYDLGEFWQKGTVRTKYGTKGELQSAIKSLHSRDINVYGDVVINHKAGADATEDVTAVEVDPADRNRVISGEHLIKAWTHFHFPGRGSTYSDFKWYWYHFDGTDWDESRKLNRIYLFQGKTWDWEVSNEFGNYDYLMYADYDYDYPDVVAEITRWGTWYANELQLDGFRLDAVKHIKFSFLRDWVNHVREKTGKEMFTVAEYWSNDLGALENYLNKTNFNHSVFDVPLHYQFHAASTQGGGYDMRKLLNGTVVSKHPLKSVTFVDNHDTQPGQSLESTVQTWFKPLAYAFILTRESGYPSVFYGDMYGTKGDSQREIPALKHKIEPILKARKQYAYGAQHDYFDHHDIVGWTREGVSSVANSGLAALITDGPGGAKWMYVGRQNAGETWHDITGNRSEPVVINSEGWGEFHVNGGSVSIYVQR

SEQ ID NO: 43455 - protein, 480 aa, Bacillus amyloliquefaciens
NGTLMQYFEWYTPNDGQHWKRLQNDAEHLSDIGITAVWIPPAYKAISQADVGYGAYDLYDLGEFHQKGTVRTKYGTKGELQSAIKSLHSRDINVYGDVVINHKAGADATEDVTAVEVDPADRNRVISGEHLIKAWTHFHFPGRGSTYSDFKWYWYHFDGTDWDESRKLNRIYLFQGKTWDWEVSNEFGNYDYLMYADYDYDYPDVVAEITRWGTWYANELQLDGFRLDAVKHIKFSFLRDWVNHVREKTGKEMFTVAEYWSNDLGALENYLNKTNFNHSVFDVPLHYQFHAASTQGGGYDMRKLLNGTVVSKHPLKSVTFVDNHDTQPGQSLESTVQTWFKPLAYAFILTRESGYPSVFYGDMYGTKGDSQREIPALKHKIEPILKARKQYAYGAQHDYFDHHDIVGWTREGDSSVANSGLAALITDGPGGAKWMYVGRQNAGETWHDITGNRSEPVVINSEGWGEFHVNGGSVSIYVQR

SEQ ID NO: 43456 - protein, 478 aa, Bacillus sp. (in: firmicutes)
NGTIMQYFEWNVPNDGQHWNRLHNNAQNLKNAGITAIWIPPAWKGTSQSDTGYGAYDLYDLGEFNQKGTVRTKYGTKAELERAIRSLKANGIQVYGDVVMNHKAGADFTERVQAVEVNPQNRNQEVSGTYQIEAWTGFNFPGRGNQHSSFKWRWYHFDGTDWDESRKLNRIYKFRGKKAWDWEVDTEFGNYDYLMYADLDMDHPEVINELNRWGVWYANNLNLDGFRLDAVKHIKFSFMRDWLGHVRGQTGKNLFAVAEYWKNDLGALENYLSKTNWTMSAFDVPLHYNLYQASNSSGNYDMRNLLNGTLVQRHPSHAVTFVDNHDTQPGEALESFVQGWFKPLAYATILTREQGYPQVFYGDYYGIPSDGVPSYRQQIDPLLAARQQYAYGRQHDYFDHWDVIGWTREGNASHPNSGLATIMSDGPGGSKWMYVGRQKAGEVWHDMTGNRSGTVTINQDGWGHFFVNGGSVSVWVKR

SEQ ID NO: 43457 - protein, 480 aa, Bacillus amyloliquefaciens
NGTLMQYFEWYTPNDGQHWKRLQNDAEHLSDIGITAVWIPPAYKAISQADVGYGAYDLYDLGEFHQKGTVRTKYGTKGELQSAIKSLHSRDINVYGDVVINHKAGADATEDVTAVEVDPADRNRVISGEHLIKAWTHFHFPGRGSTYSDFKWYWYHFDGTDWDESRKLNRIYLFQGKTWDWEVSNEFGNYDYLMYADYDYDYPDVVAEITRWGTWYANELQLDGFRLDAVKHIKFSFLRDWVNHVREKTGKEMFTVAEYWSNDLGALENYLNKTNFNHSVFDVPLHYQFHAASTQGGGYDMRKLLNGTVVSKHPLKSVTFVDNHDTQPGQSLESTVQTWFKPLAYAFILTRESGYPSVFYGDMYGTKGDSQREIPALKHKIEPILKARKQYAYGAQHDYFDHHDIVGWTREGVSSVANSGLAALITDGPGGAKWMYVGRQNAGETWHDITGNRSEPVVINSEGWGEFHVNGGSVSIYVQR

SEQ ID NO: 43458 - protein, 480 aa, Bacillus licheniformis
NGTLMQYFEWYTPNDGQHWKRLQNDAEHLSDIGITAVWIPPAYKAISQADVGYGAYDLYDLGEFHQKGTVRTKYGTKGELQSAIKSLHSRDINVYGDVVINHKAGADATEDVTAVEVDPADRNRVISGEHLIKAWTHFHFPGRGSTYSDFKWYWYHFDGTDWDESRKLNRIYLFQGKTWDWPVSNEFGNYDYLMYADFDYDHPDVVAEIKRWGTWYANELQLDGFRLDAVKHIKFSFLRDWVNHVREKTGKEMFTVAEYWSNDLGALENYLNKTNFNHSVFDVPLHYQFHAASTQGGGYDMRKLLNGTVVSKHPLKSVTFVDNHDTQPGQSLESTVQTWFKPLAYAFILTRESGYPSVFYGDMYGTKGDSQREIPALKHKIEPILKARKQYAYGAQHDYFDHHDIVGWTREGDSSVANSGLAALITDGPGGAKWMYVGRQNAGETWHDITGNRSEPVVINSEGWGEFHVNGGSVSIYVQR

SEQ ID NO: 43459 - protein, 480 aa, Bacillus amyloliquefaciens
NGTLMQYFEWYTPNDGQHWKRLQNDAEHLSDIGITAVWIPPAYKAISQADVGYGAYDLYDLGEFHQKGTVRTKYGTKGELQSAIKSLHSRDINVYGDVVINHKAGADATEDVTAVEVDPADRNRVISGEHLIKAWTHFWFPGRGSTYSDFKWYWYHFDGTDWDESRKLNRIYLFQGKTWDWPVSNEFGNYDYLMYADFDYDHPDVVAEIKRWGTWYANELQLDGFRLDAVKHIKFSFLRDWVNHVREKTGKEMFTVAEYWSNDLGALENYLNKTNFNHSVFDVPLHYQFHAASTQGGGYDMRKLLNGTVVSKHPLKSVTFVDNHDTQPGQSLESTVQTWFKPLAYAFILTRESGYPSVFYGDMYGTKGDSQREIPALKHKIEPILKARKQYAYGAQHDYFDHHDIVGWTREGDSSVANSGLAALITDGPGGAKWMYVGRQNAGETWHDITGNRSEPVVINSEGWGEFHVNGGSVSIYVQR

SEQ ID NO: 43460 - protein, 477 aa, Bacillus sp.
NETMMQYFEWDLPNDGTLWTKVKNEAANLSSLGITALWLPPAYKGTSQSDVGYGVYDLYDLGEFNQKGTIRTKYGTKTQLERAIRSLKANGIQVYADVVFNHKAGADGTEFVDAVEVDPSNRNQEVSGTYQIEAWTKFDFPGRGNTYSSFKWRWYHFDGTDWDESRKLNRIYKFRGKAWDWEVDTENGNYDYLMFADLDMDHPEVVTELKNWGTWYVNTTNIDGFRLDAVKHIKFSFMRDWLTYVRNQTGKNLFAVGEFWSYDVNKLHNYITKTNGSMSLFDAPLHNNFYTASKSSGYFDMRYLLNNTLMKDQPSLAVTLVDNHDTQPGQSLQSWVEPWFKPLAYAFILTRQEGYPCVFYGDYYGIPSDGVPGLKSKIDPLLIARRDYAYGTQRDYIDHQDIIGWTREGIDTKPNSGLAALITDGPGGSKWMYVGKKHAGKVFYDLTGNRSDTVTINADGWGEFKVNGGSVSIWVAK

SEQ ID NO: 43461 - protein, 477 aa, Bacillus sp.
NETMMQYFEWDLPNDGTLWNRLHNNAQNLKNAGITALWLPPAYKGTSQSDVGYGVYDLYDLGEFNQKGTIRTKYGTKTQYIQAIQAAKAAGMQVYADVVFNHKAGADQTEFVDAVEVDPSNRNQEVSGTYQIEAWTKFDFPGRGNTYSSFKWRWYHFDGTDWDESRKLNRIYKFRGKAWDWEVDTENGNYDYLMFADLDMDHPEVVTELKNWGTWYVNTTNIDGFRLDAVKHIKFSFMRDWLTYVRNQTGKNLFAVGEFWSYDVNKLHNYITKTNGSMSLFDAPLHNNFYTASKSSGYFDMRYLLNNTLMKDQPSLAVTLVDNHDTQPGQSLQSWVEPWFKPLAYAFILTRQEGYPCVFYGDYYGIPKYNIPGLKSKIDPLLIARRDYAYGTQRDYIDHQDIIGWTREGIDTKPNSGLAALITDGPGGSKWMYVGKKHAGKVFYDLTGNRSDTVTINADGWGEFKVNGGSVSIWVAK

SEQ ID NO: 43462 - protein, 477 aa, Bacillus sp.
NETMMQYFEWDLPNDGTLWTKVKNEAANLSSLGITALWLPPAYKGTSQSDVGYGVYDLYDLGEFNQKGTIRTKYGTKTQYIQAIQAAKAAGMQVYADVVFNHKAGADQTEFVDAVEVDPSNRNQEVSGTYQIEAWTKFDFPGRGNTYSSFKWRWYHFDGTDWDESRKLNRIYKFRGKAWDWEVDTENGNYDYLMFADLDMDHPEVVTELKNWGTWYVNTTNIDGFRLDAVKHIKFSFMRDWLTYVRNQTGKNLFAVGEFWSYDVNKLHNYITKTNGSMSLFDAPLHNNFYTASKSSGYFDMRYLLNNTLMKDQPSLAVTLVDNHDTQPGEALESFVQGWFKPLAYAFILTRQEGYPCVFYGDYYGIPSDGVPGLKSKIDPLLIARRDYAYGTQRDYIDHQDIIGWTREGIDTKPNSGLAALITDGPGGSKWMYVGKKHAGKVFYDLTGNRSDTVTINADGWGEFKVNGGSVSIWVAK

SEQ ID NO: 43463 - protein, 477 aa, Bacillus sp.
NETMMQYFEWDLPNDGTLWNRLHNNAQNLKNAGITALWLPPAYKGTSQSDVGYGVYDLYDLGEFNQKGTIRTKYGTKTQYIQAIQAAKAAGMQVYADVVFNHKAGADGTEFVDAVEVDPSNRNQEVSGTYQIEAWTKFDFPGRGNTYSSFKWRWYHFDGTDWDESRKLNRIYKFRGKAWDWEVDTENGNYDYLMFADLDMDHPEVVTELKNWGTWYVNTTNIDGFRLDAVKHIKFSFMRDWLTYVRNQTGKNLFAVGEFWSYDVNKLHNYITKTNGSMSLFDAPLHNNFYTASKSSGYFDMRYLLNNTLMKDQPSLAVTLVDNHDTQPGQSLQSWVEPWFKPLAYAFILTRQEGYPCVFYGDYYGIPKYNIPGLKSKIDPLLIARRDYAYGTQRDYIDHQDIIGWTREGIDTKPNSGLAALITDGPGGSKWMYVGKKHAGKVFYDLTGNRSDTVTINADGWGEFKVNGGSVSIWVAK

SEQ ID NO: 43464 - protein, 478 aa, unidentified
INETMMQYFEWDLPNDGTLWTKVKNEAANLSSLGITALWLPPAYKGTSQSDVGYGVYDLYDLGEFNQKGTIRTKYGTKTQYIQAIQAAKAAGMQVYADVVFNHKAGADGTEFVDAVEVDPSNRNQETSGTYQIQAWTKFDFPGRGNTYSSFKWRWYHFDGTDWDESRKLNRIYKFTGKAWDWEVDTENGNYDYLLFADLDMDHPEVVTELKNWGTWYVNTTNIDGFRLDAVKHIKYQFFPDWLTYVRNQTGKNLFAVGEFWSYDVNKLHNYITKTNGSMSLFDAPLHNNFYTASKSSGYFDMRYLLNNTLMKDQPSLAVTLVDNHDTQPGQSLQSWVEPWFKPLAYAFILTRQEGYPCVFYGDYYGIPKYNIPGLKSKIDPLLIARRDYAYGPQHDYIDHPDVIGWTREGDSSAAKSGLAALITDGPGGSKRMYAGLKNAGETWYDITGNRSDTVKIGSDGWGEFHVNDGSVSIYVQK

SEQ ID NO: 43465 - protein, 478 aa, Bacillus sp. (in: firmicutes)
NGTMMQYFEWNVPNDGQHWNRLHNNAQNLKNAGITAIWIPPAWKGTSQNDVGYGAYDLYDLGEFNQKGTVRTKYGTKAELERAIRSLKANGIQVYGDVVMNHKGGADFTERVQAVEVNPQNRNQEVSGTYQIEAWTGFNFPGRGNQHSSFKWRWYHFDGTDWDQSRQLANRIYKFRGKAWDWEVDTEFGNYDYLMYADLDMNHPEVINELNRWGVWYANTLNLDGFRLDAVKHIKFSFMRDWLGHVRGQTGKNLFAVAEYWKNDLGALENYLSKTNWTMSAFDVPLHYNLYQASNSSGNYDMRNLLNGTLVQRHPSHAVTFVDNHDTQPGEALESFVQGWFKPLAYATILTREQGYPSVFYGDYYGIPSDGVPSYRQQIDPLLKARQQYAYGRQHDYFDHWDVIGWTREGNASHPNSGLATIMSDGPGGSKWMYVGRQKAGEVWHDMTGNRSGTVTINQDGWGHFFVNGGSVSVWVKR

SEQ ID NO: 43466 - protein, 478 aa, Bacillus sp. (in: firmicutes)
NGTMMQYFEWNVPNDGQHWNRLHNNAQNLKNAGITAIWIPPAWKGTSQNDVGYGAYDLYDLGEFNQKGTVRTKYGTKAELERAIRSLKANGIQVYGDVVMNHKGGADFTERVQAVEVNPQNRNQEVSGTYQIEAWTGFNFPGRGNQHSSFKWRWYHFDGTDWDQSRQLANRIYKFRGKAWDWEVDTEFGNYDYLMYADVDMDHPEVINELNRWGVWYANTLNLDGFRLDAVKHIKFSFMRDWLGHVRGQTGKNLFAVAEYWKGDLGALENYLSKTNWTMSAFDVPLHYNLYQASNSSGNYDMRNLLNGTLVQRHPSHAVTFVDNHDTQPGEALESFVQGWFKPLAYATILTREQGYPSVFYGDYYGIPSDGVPSYRQQIDPLLKARQQYAYGRQHDYFDHWDVIGWTREGNASHPNSGLATIMSDGPGGSKWMYVGRQKAGEVWHDMTGNRSGTVTINQDGWGHFFVNGGSVSVWVKR

SEQ ID NO: 43467 - protein, 478 aa, Bacillus sp. (in: firmicutes)
NGTMMQYFEWNVPNDGQHWNRLHNNAQNLKNAGITAIWIPPAWKGTSQNDVGYGAYDLYDLGEFNQKGTVRTKYGTKAELERAIRSLKANGIQVYGDVVMNHKGGADFTERVQAVEVNPQNRNQEVSGTYQIEAWTGFNFPGRGNQHSSFKWRWYHFDGTDWDQSRQLANRIYKFRGKAWDWEVDTEFGNYDYLMYADVDMDHPEVINELNRWGVWYANTLNLDGFRLDAVKHIKFSFMRDWLGHVRGQTGKNLFAVAEYWKNDLGALENYLSKTNWTMSAFDVPLHYNLYQASNSSGNYDMRNLLNGTLVQRHPSHAVTFVDNHDTQPGEALESFVQGWFKPLAYATILTREQGYPQVFYGDYYGIPSDGVPSYRQQIDPLLKARQQYAYGRQHDYFDHWDVIGWTREGNASHPNSGLATIMSDGPGGSKWMYVGRQKAGEVWHDMTGNRSGTVTINQDGWGHFFVNGGSVSVWVKR

SEQ ID NO: 43468 - protein, 478 aa, Bacillus sp. (in: firmicutes)
NGTMMQYFEWNVPNDGQHWNRLHNNAQNLKNAGITAIWIPPAWKGTSQNDVGYGAYDLYDLGEFNQKGTVRTKYGTKAELERAIRSLKANGIQVYGDVVMNHKGGADFTERVQAVEVNPQNRNQEVSGTYQIEAWTGFNFPGRGNQHSSFKWRWYHFDGTDWDQSRQLANRIYKFRGKAWDWEVDTEFGNYDYLMYADVDMDHPEVINELNRWGVWYANTLNLDGFRLDAVKHIKFSFMRDWLGHVRGQTGKNLFAVAEYWKPDLGALENYLSKTNWTMSAFDVPLHYNLYQASNSSGNYDMRNLLNGTLVQRHPSHAVTFVDNHDTQPGEALESFVQGWFKPLAYATILTREQGYPSVFYGDYYGIPSDGVPSYRQQIDPLLKARQQYAYGRQHDYFDHWDVIGWTREGNASHPNSGLATIMSDGPGGSKWMYVGRQKAGEVWHDMTGNRSGTVTINQDGWGHFFVNGGSVSVWVKR

SEQ ID NO: 43469 - protein, 478 aa, Bacillus sp. (in: firmicutes)
NGTMMQYFEWNVPNDGQHWNRLHNNAQNLKNAGITAIWIPPAWKGTSQNDVGYGAYDLYDLGEFNQKGTVRTKYGTKAELERAIRSLKANGIQVYGDVVMNHKGGADFTERVQAVEVNPQNRNQEVSGTYQIEAWTGFNFPGRGNQHSSFKWRWYHFDGTDWDQSRQLANRIYKFRGKAWDWEVDTEFGNYDYLMYADVDMDHPEVINELNRWGVWYANTLNLDGFRLDAVKHIKFSFMRDWLGHVRGQTGKNLFAVAEYWKNDLGALENYLSKTNWTMSAFDVPLHYNLYQASNSSGNYDMRNLLNGTLVQRHPSHAVTFVDNHDTQPGEALESFVQGWFKPLAYATILTREQGYPSVFYGDYYGIPSDGVPSYRQQIDPLLKARQQYAYGRQHDYFDHWDVIGWTREGNASHPNSGLATIMSDGPGGSKWMYVGRQKAGEVWHDMTGNRSGTVTINQDGWGHFFVNGGSVSVWVKR

SEQ ID NO: 43470 - protein, 478 aa, Bacillus sp. (in: firmicutes)
NGTIMQYFEWNVPNDGQHWNRLHNNAQNLKNAGITAIWIPPAWKGTSQNDVGYGAYDLYDLGEFNQKGTVRTKYGTKAELERAIRSLKANGIQVYGDVVMNHKGGADFTERVQAVEVNPQNRNQEVSGTYQIEAWTGFNFPGRGNQHSSFKWRWYHFDGTDWDQSRQLANRIYKFRGKAWDWEVDTEFGNYDYLMYADVDMDHPEVINELNRWGVWYANTLNLDGFRLDAVKHIKFSFMRDWLGHVRGQTGKNLFAVAEYWKNDLGALENYLSKTNWTMSAFDVPLHYNLYQASNSSGNYDMRNLLNGTLVQRHPSHAVTFVDNHDTQPGEALESFVQGWFKPLAYATILTREQGYPCVFYGDYYGIPSDGVPSYRQQIDPLLKARQQYAYGRQHDYFDHWDVIGWTREGNASHPNSGLATIMSDGPGGSKWMYVGRQKAGEVWHDMTGNRSGTVTINQDGWGHFFVNGGSVSVWVKR

SEQ ID NO: 43471 - protein, 478 aa, Bacillus sp. (in: firmicutes)
NGTIMQYFEWNVPNDGQHWNRLHNNAQNLKNAGITAIWIPPAWKGTSQNDVGYGAYDLYDLGEFNQKGTVRTKYGTKAELERAIRSLKANGIQVYGDVVMNHKGGADFTERVQAVEVNPQNRNQEVSGTYQIEAWTGFNFPGRGNQHSSFKWRWYHFDGTDWDQSRQLANRIYKFRGKAWDWEVDTENGNYDYLMYADVDMDHPEVINELNRWGVWYANTLNLDGFRLDAVKHIKFSFMRDWLGHVRGQTGKNLFAIGEYWKNDLGALENYLSKTNWTMSAFDAPLHYNLYQASNSSGNYDMRNLLNGTLVQRHPSHAVTFVDNHDTQPGEALESFVQGWFKPLAYATILTREQGYPCVFYGDYYGIPSDGVPSYRQQIDPLLKARQQYAYGRQHDYFDHWDVIGWTREGNASHPNSGLATIMSDGPGGSKWMYVGRQKAGEVWHDMTGNRSGTVTINQDGWGHFFVNGGSVSVWVKR

SEQ ID NO: 43472 - protein, 480 aa, Bacillus licheniformis
NGTLMQYFEWYMPNDGQHWRRLQNDSAYLAEHGITAVWIPPAYKAISQADVGYGAYDLYDLGEFHQKGTVRTKYGTKGELQSAIKSLHSRDINVYGDVVINHKAGADATEDVTAVEVDPADRNRVISGEHLIKAWTHFHFPGRGSTYSDFKWHWYHFDGTDWDESRKLNRIYKFQGKAWDWEVSNENGNYDYLMYADFDYDHPDVAAEIKRWGTWYANELQLDGFRLDAVKHIKFSFLRDWVNHVREKTGKEMFTVAEYWQNDLGALENYLNKTNFNHSVFDVPLHYQFHAASTQGGGYDMRKLLNGTVVSKHPLKSVTFVDNHDTQPGQSLESTVQTWFKPLAYAFILTRESGYPQVFYGDMYGTKGDSQREIPALKHKIEPILKARKQYAYGAQHDYFDHHDIVGWTREGDSSVANSGLAALITDGPGGAKRMYVGRQNAGETWHDITGNRSEPVVINSEGWGEFHVNGGSVSIYVQR

SEQ ID NO: 43473 - protein, 482 aa, Bacillus sp. YR288
NGTMMQYFEWYVPNDGQHWNRLRNDAAYLKSIGVSAIWTPPAYKGTSQNDVGYGAYDLYDLGEFNQKGTIRTKYGTKAELKSAVSTLKSNGIQVYGDVVMNHKGGADYTENVTAVEVNPSNRNQETSDEYTIQAWTGFNFPGRGTTHSPFKWQWYHFDGTDWDQSRNASRIFKFRGTGKAWDWEVSSENGNYDYLIYADLDFDHPDVRNEMKNWGVWYANEVGLDGFRLDAVKHIKHSYLGDWVNHVRTKTGKEMFTVAEYWQNDVNAINNYLAKVNYNHSVFDAPLHYNFHYASQSGGNYDMRNLLNGTVVAAHPTKAVTLVENHDSQPGQSLESVVQPWFKPLAYAFILTRAEGYPSIFYGDMYGTKGNSSYEIPALKTKIEPLLKARKDYAYGTQHNYMDHWDVIGWTREGDSTKEKSGLATLVTDGAGGSKWMYVGKQNAGEVWYDITGNRTDKITINTDGWGNFQVNGGSVSVYVQQ

SEQ ID NO: 43474 - protein, 482 aa, Bacillus sp. YR288
NGTMMQYFEWYVPNDGQHWNRLRNDAAYLKSIGVSAIWTPPAYKGTSQNDVGYGAYDLYDLGEFNQKGTIRTKYGTKAELKSAVSTLKSNGIQVYGDVVMNHKGGADYTENVTAVEVNPSNRNQETSDEYTIQAWTGFNFPGRGTTHSPWKWQWYHFDGTDWDQSRNASRIFKFRGTGKAWDWEVSSENGNYDYLMYADLDFDHPDVRNEMKNWGVWYANEVGLDGFRLDAVKHIKHSYLGDWVNHVRTKTGKEMFTVAEYWQNDVNAINNYLAKVNYNHSVFDAPLHYNFHYASQSGGNYDMRNLLNGTVVAAHPTKAVTLVENHDSQPGQSLESVVQPWFKPLAYAFILTRAEGYPSIFYGDMYGTKGNSSYEIPALKTKIEPLLKARKDYAYGTQHNYMDHWDVIGWTREGDSTKEKSGLATLVTDGAGGSKWMYVGKQNAGEVWYDITGNRTDKITINTDGWGNFQVNGGSVSVYVQQ

SEQ ID NO: 43475 - protein, 482 aa, Bacillus sp. YR288
NGTMMQYFEWYVPNDGQHWNRLRNDAAYLKSIGVSAIWTPPAYKGTSQNDVGYGAYDLYDLGEFNQKGTIRTKYGTKAELKSAVSTLKSNGIQVYGDVVMNHKGGADYTENVTAVEVNPSNRNQETSDEYTIQAWTGFNFPGRGTTHSPFKWQWYHFDGTDWDQSRNASRIFKFRGTGKAWDWEVSSENGNYDYLMYADLDFDHPDVRNEMKNWGVWYANEVGLDGFRLDAVKHIKHSYLGDWVNHVRTKTGKEMFTVAEYWQNDVNAINNYLAKVNYNHSVFDAPLHYNFHYASQSGGSYDMRNLLNGTVVAAHPTKAVTLVENHDSQPGQSLESVVQPWFKPLAYAFILTRAEGYPSIFYGDMYGTKGNSSYEIPALKTKIEPLLKARKDYAYGTQHNYMDHWDVIGWTREGDSTKEKSGLATLVTDGAGGSKWMYVGKQNAGEVWYDITGNRTDKITINTDGWGNFQVNGGSVSVYVQQ

SEQ ID NO: 43476 - protein, 480 aa, Bacillus licheniformis
NGTLMQYFEWYMPNDGQHWRRLQNDSAYLAEHGITAVWIPPAYKGTSQADVGYGAYDLYDLGEFHQKGTVRTKYGTKGELQSAIKSLHSRDINVYGDVVINHKGGADATEDVTAVEVDPADRNRVISGEHLIKAWTHFHFPGRGSTYSDFKWHWYHFDGTDWDESRKLNRIYKFQGKAWDWPVSNENGNYDYLMYADIDYDHPDVAAEIKRWGTWYANELQLDGFRLDAVKHIKFYFLRDWVNHVREKTGKEMFTVAEYWQNDLGALENYLNYTNFNHSVFDVPLHYQFHAASTQGGGYDMRKLLNGTVVSKHPLKSVTFVDNHDTQPGQSLESTVQTWFKPLAYAFILTRESGYPQVFYGDMYGTKGDSQREIPALKHKIEPILKARKQYAYGAQHDYFDHHDIVGWTREGDSSVANSGLAALITDGPGGAKRMYVGRQNAGETWHDITGNRSEPVVINSEGWGEFHVNGGSVSIYVQR

SEQ ID NO: 43477 - protein, 482 aa, Bacillus sp. YR288
NGTMMQYFEWYVPNDGQHWNRLRNDAAYLKSIGVSAIWTPPAYKGTSQNDVGYGAYDLYDLGEFNQKGTIRTKYGTKAELKSAVSTLKSNGIQVYGDVVMNHKGGADYTENVTAVEVNPSNRNQETSDEYTIQAWTGFNFPGRGTTHSPFKWQWYHFDGTDWDQSRNASRIFKFRHTGKAWDWEVSSENGNYDYLLYADLDYDHPDVINEMKNWGVWYANEVGLDGFRLDAVKHIKFQFLGDWVNHVRTKTGKEMFTVAEYWQNDVNAINNYLAKVNYNHSVFDAPLHYNFHYASQSGGNYDMRNLLNGTVVAAHPTKAVTLVENHDSQPGQSLESVVQPWFKPLAYAFILTRAEGYPSIFYGDMYGTKGNSSYEIPALKTKIEPLLKARKDYAYGTQHNYMDHWDVIGWTREGDSTKEKSGLATLVTDGAGGSKWMYVGKQNAGEVWYDITGNRTDKITINTDGWGNFQVNGGSVSVYVQQ

SEQ ID NO: 43478 - protein, 480 aa, Bacillus licheniformis
NGTLMQYFEWYMPNDGQHWRRLQNDSAYLAEHGITAVWIPPAYKGTSQADVGYGAYDLYDLGEFHQKGTVRTKYGTKGELQSAIKSLHSRDINVYGDVVINHKGGADATEDVTAVEVDPADRNRVISGEHLIKAWTHFHFPGRGSTYSDFKWHWYHFDGTDWDESRKLNRIYKFQGKAWDWPVSNENGNYDYLMYADIDYDHPDVAAEIKRWGTWYANELQLDGFRLDAVKHIKFYFLRDWVNHVREKTGKEMFTVAEYWQNDLGALENYLNHTNFNHSVFDVPLHYQFHAASTQGGGYDMRKLLNGTVVSKHPLKSVTFVDNHDTQPGQSLESTVQTWFKPLAYAFILTRESGYPQVFYGDMYGTKGDSQREIPALKHKIEPILKARKQYAYGAQHDYFDHHDIVGWTREGDSSVANSGLAALITDGPGGAKRMYVGRQNAGETWHDITGNRSEPVVINSEGWGEFHVNGGSVSIYVQR

SEQ ID NO: 43479 - protein, 482 aa, Bacillus sp. YR288
NGTMMQYFEWYVPNDGQHWNRLRNDAAYLKSIGVSAIWTPPAYKGTSQNDVGYGAYDLYDLGEFNQKGTIRTKYGTKAELKSAVSTLKSNGIQVYGDVVMNHKGGADYTENVTAVEVNPSNRNQETSDEYTIQAWTGFNFPGRGTTHSPFKWQWYHFDGTDWDQSRNASRIFKFRGTGKAWDWPVSSEFGNYDYLMYADLDYDHPDVRNEMKNWGVWYANEVGLDGFRLDAVKHIKFSFLGDWVNHVRTKTGKEMFTVAEYWQNDVNAINNYLAKVNYNHSVFDAPLHYNFHYASQSGGNYDMRNLLNGTVVAAHPTKAVTLVENHDSQPGQSLESVVQPWFKPLAYAFILTRAEGYPSIFYGDMYGTKGNSSYEIPALKTKIEPLLKARKDYAYGTQHNYMDHWDVIGWTREGDSTKEKSGLATLVTDGAGGSKWMYVGKQNAGEVWYDITGNRTDKITINTDGWGNFQVNGGSVSVYVQQ

SEQ ID NO: 43480 - protein, 482 aa, Bacillus sp. YR288
NGTMMQYFEWYVPNDGQHWNRLRNDAAYLKSIGVSAIWTPPAYKGTSQNDVGYGAYDLYDLGEFNQKGTIRTKYGTKAELKSAVSTLKSNGIQVYGDVVMNHKGGADYTENVTAVEVNPSNRNQETSDEYTIQAWTGFNFPGRGTTHSPFKWQWYHFDGTDWDQSRNASRIFKFRGTGKAWDWEVSSENGNYDYLMYADLDFDHPDVRNEMKNWGVWYANEVGLDGFRLDAVKHIKHSYLGDWVNHVRTKTGKEMFTVAEYWQNDVNAINNYLAKVNYNHWVFDAPLHYNFHYASQSGGNYDMRNLLNGTVVAAHPEKAVTLVENHDSQPGQSLESVVQPWFKPLAYAFILTRAEGYPSIFYGDMYGTKGNSSYEIPALKTKIEPLLKARKDYAYGTQHNYMDHWDVIGWTREGDSTKEKSGLATLVTDGAGGSKWMYVGKQNAGEVWYDITGNRTDKITINTDGWGNFQVNGGSVSVYVQQ

SEQ ID NO: 43481 - protein, 482 aa, Bacillus sp. YR288
NGTMMQYFEWYVPNDGQHWNRLRNDAAYLKSIGVSAIWTPPAYKGTSQNDVGYGAYDLYDLGEFNQKGTIRTKYGTKAELKSAVSTLKSNGIQVYGDVVMNHKGGADYTENVTAVEVNPSNRNQETSDEYTIQAWTGFNFPGRGTTHSPFKWQWYHFDGTDWDQSRNASRIFKFRGTGKAWDWEVSSENGNYDYLMYADLDFDHPDVRNEMKNWGVWYANEVGLDGFRLDAVKHIKHSYLGDWVNHVRTKTGKEMFTVAEYWQNDVNAINNYLAKVNYNHSVFDAPLHYNFHYASQSGGNYDMRNLLNGTVVAAHPTKAVTLVENHDSQPGQSLESVVQPWFKPLAYAFILTRAEGLPSIFYGDMYGTKGNSSYEIPALKTKIEPLLKARKDYAYGTQHNYMDHWDVIGWTREGDSTKEKSGLATLVTDGAGGSKWMYVGKQNAGEVWYDITGNRTDKITINTDGWGNFQVNGGSVSVYVQQ

SEQ ID NO: 43482 - protein, 482 aa, Bacillus sp. YR288
NGTMMQYFEWYVPNDGQHWNRLRNDAAYLKSIGVSAIWTPPAYKGTSQNDVGYGAYDLYDLGEFNQKGTIRTKYGTKAELKSAVSTLKSNGIQVYGDVVMNHKGGADYTENVTAVEVNPSNRNQETSDEYTIQAWTGFNFPGRGTTHSPFKWQWYHFDGTDWDQSRNASRIFKFRGTGKAWDWEVSSENGNYDYLAYADLDFDHPDVRNEMKNWGVWYANEVGLDGFRLDAVKHIKHSYLGDWVNHVRTKTGKEMFTVAEYWQNDVNAINNYLAKVNYNHSVFDAPLHYNFHYASQSGGNYDMRNLLNGTVVAAHPTKAVTLVENHDSQPGQSLESVVQPWFKPLAYAFILTRAEGYPSIFYGDMYGTKGNSSYEIPALKTKIEPLLKARKDYAYGTQHNYMDHWDVIGWTREGDSTKEKSGLATLVTDGAGGSKWMYVGKQNAGEVWYDITGNRTDKITINTDGWGNFQVNGGSVSVYVQQ

SEQ ID NO: 43483 - protein, 482 aa, Bacillus sp. YR288
NGTMMQYFEWYVPNDGQHWNRLRNDAAYLKSIGVSAIWTPPAYKGTSQNDVGYGAYDLYDLGEFNQKGTIRTKYGTKAELKSAVSTLKSNGIQVYGDVVMNHKGGADYTENVTAVEVNPSNRNQETSDEYTIQAWTGFNFPGRGTTHSPFKWQWYHFDGTDWDQSRNASRIFKFRGTGKAWDWEVSSENGNYDYLMYADLDFDHPDVINEMKNWGVWYANEVGLDGFRLDAVKHIKFQYLGDWVNHVRTKTGKEMFTVAEYWQNDVNAINNYLAKVNYNHSVFDAPLHYNFHYASQSGGNYDMRNLLNGTVVAAHPTKAVTLVENHDSQPGQSLESVVQPWFKPLAYAFILTRAEGYPSIFYGDMYGTKGNSSYEIPALKTKIEPLLKARKDYAYGTQHNYMDHWDVIGWTREGDSTKEKSGLATLVTDGAGGSKWMYVGKQNAGEVWYDITGNRTDKITINTDGWGNFQVNGGSVSVYVQQ

SEQ ID NO: 43484 - protein, 482 aa, Bacillus sp. YR288
NGTMMQYFEWYVPNDGQHWNRLRNDAAYLKSIGVSAIWTPPAYKGTSQNDVGYGAYDLYDLGEFNQKGTIRTKYGTKAELKSAVSTLKSNGIQVYGDVVMNHKGGADYTENVTAVEVNPSNRNQETSDEYTIQAWTGFNFPGRGTTHSPFKWQWYHFDGTDWDQSRNASRIFKFRGTGKAWDWPVSSENGNYDYLMYADLDFDHPDVRNEMKNWGVWYANEVGLDGFRLDAVKHIKHSYLWDWVNHVRTKTGKEMFTVAEYWQNDVNAINNYLAKVNYNHSVFDAPLHYNFHYASQSGGNYDMRNLLNGTVVAAHPTKAVTLVENHDSQPGQSLESVVQPWFKPLAYAFILTRAEGYPSIFYGDMYGTKGNSSYEIPALKTKIEPLLKARKDYAYGTQHNYMDHWDVIGWTREGDSTKEKSGLATLVTDGAGGSKWMYVGKQNAGEVWYDITGNRTDKITINTDGWGNFQVNGGSVSVYVQQ

SEQ ID NO: 43485 - protein, 482 aa, Bacillus sp. YR288
NGTMMQYFEWYVPNDGQHWNRLRNDAAYLKSIGVSAIWTPPAYKGTSQNDVGYGAYDLYDLGEFNQKGTIRTKYGTKAELKSAVSTLKSNGIQVYGDVVMNHKGGADYTENVTAVEVNPSNRNQETSDEYTIQAWTGFNFPGRGTTHSPFKWQWYHFDGTDWDQSRNASRIFKFRGTGKAWDWEVSSENGNYDYLMYADLDFDHPDVRNEMKNWGVWYANEVGLDGFRLDAVKHIKHSYLGDWVNHVRTKTGKEMFTVAEYWQNDVNAINNYLAKVNYNHSVFDAPLHYNFHYASQSGGDYDMRNLLNGTVVAAHPTKAVTLVENHDSQPGQSLESVVQPWFKPLAYAFILTRAEGYPSIFYGDMYGTKGNSSYEIPALKTKIEPLLKARKDYAYGTQHNYMDHWDVIGWTREGDSTKEKSGLATLVTDGAGGSKWMYVGKQNAGEVWYDITGNRTDKITINTDGWGNFQVNGGSVSVYVQQ

SEQ ID NO: 43486 - protein, 482 aa, Bacillus sp. YR288
NGTMMQYFEWYVPNDGQHWNRLRNDAAYLKSIGVSAIWTPPAYKGTSQNDVGYGAYDLYDLGEFNQKGTIRTKYGTKAELKSAVSTLKSNGIQVYGDVVMNHKGGADYTENVTAVEVNPSNRNQETSDEYTIQAWTGFNFPGRGTTHSPFKWQWYHFDGTDWDQSRNASRIFKFRHTGKAWDWEVSSEFGNYDYLMYADLDYDHPDVINEMKNWGVWYANEVGLDGFRLDAVKHIKFQFLGDWVNHVRTKTGKEMFTVAEYWQNDVNAINNYLAKVNYNHSVFDAPLHYNFHYASQSGGNYDMRNLLNGTVVAAHPTKAVTLVENHDSQPGQSLESVVQPWFKPLAYAFILTRAEGYPSIFYGDMYGTKGNSSYEIPALKTKIEPLLKARKDYAYGTQHNYMDHWDVIGWTREGDSTKEKSGLATLVTDGAGGSKWMYVGKQNAGEVWYDITGNRTDKITINTDGWGNFQVNGGSVSVYVQQ

SEQ ID NO: 43487 - protein, 482 aa, Bacillus sp. YR288
NGTMMQYFEWYVPNDGQHWNRLRNDAAYLKSIGVSAIWTPPAYKGTSQNDVGYGAYDLYDLGEFNQKGTIRTKYGTKAELKSAVSTLKSNGIQVYGDVVMNHKGGADYTENVTAVEVNPSNRNQETSDEYTIQAWTGFNFPGRGTTHSPFKWQWYHFDGTDWDQSRNASRIFKFRGTGKAWDWEVSSENGNYDYLMYADLDFDHPDVRNEMKNWGVWYANEVGLDGFRLDAVKHIKHSYLGDWVNHVRTKTGKEMFTVAEYWQNDVNAINNYLAKVNYNHSVFDAPLHYNFHYASQSGGNYDMRNLLNGTVVAAHPTKAVTLVENHDSQPGQSLESVVQPWFKPLAYAFILTRAEGYPSIFYGDMYGTKGNSSYEIPALKTKIEPLLKARKDYAYGTQHNYMDHWDVIGWTREGDSTKEKSGLATLVTDGAGGSKWMYVGKQNAGEVWYDITGNRTDKITINTDGWGNFQVNPGSVSVYVQQ

SEQ ID NO: 43488 - protein, 482 aa, Bacillus sp. YR288
NPTMMQYFEWYVPNDGQHWNRLRNDAAYLKSIGVSAIWTPPAYKGTSQNDVGYGAYDLYDLGEFNQKGTIRTKYGTKAELKSAVSTLKSNGIQVYGDVVMNHKGGADYTENVTAVEVNPSNRNQETSDEYTIQAWTGFNFPGRGTTHSPFKWQWYHFDGTDWDQSRNASRIFKFRGTGKAWDWEVSSENGNYDYLMYADLDFDHPDVRNEMKNWGVWYANEVGLDGFRLDAVKHIKHSYLGDWVNHVRTKTGKEMFTVAEYWQNDVNAINNYLAKVNYNHSVFDAPLHYNFHYASQSGGNYDMRNLLNGTVVAAHPTKAVTLVENHDSQPGQSLESVVQPWFKPLAYAFILTRAEGYPSIFYGDMYGTKGNSSYEIPALKTKIEPLLKARKDYAYGTQHNYMDHWDVIGWTREGDSTKEKSGLATLVTDGAGGSKWMYVGKQNAGEVWYDITGNRTDKITINTDGWGNFQVNGGSVSVYVQQ

SEQ ID NO: 43489 - protein, 482 aa, Bacillus sp. YR288
NGTMMQYFEWYVPNDGQHWNRLRNDAAYLKSIGVSAIWTPPAYKGTSQNDVGYGAYDLYDLGEFNQKGTIRTKYGTKAELKSAVSTLKSNGIKVYGDVVMNHKGGADYTENVTAVEVNPSNRNQETSDEYTIQAWTGFNFPGRGTTHSPFKWQWYHFDGTDWDQSRNASRIFKFRGTGKAWDWEVSSENGNYDYLMYADLDFDHPDVRNEMKNWGVWYANEVGLDGFRLDAVKHIKHSYLGDWVNHVRTKTGKEMFTVAEYWQNDVNAINNYLAKVNYNHSVFDAPLHYNFHYASQSGGNYDMRNLLNGTVVAAHPTKAVTLVENHDSQPGQSLESVVQPWFKPLAYAFILTRAEGYPSIFYGDMYGTKGNSSYEIPALKTKIEPLLKARKDYAYGTQHNYMDHPDVIGWTREGDSTKEKSGLATLVTDGAGGSKWMYVGKQNAGEVWYDITGNRTDKITINTDGWGNFQVNGGSVSVYVQQ

SEQ ID NO: 43490 - protein, 480 aa, Bacillus sp. YR288
NGTMMQYFEWYVPNDGQHWNRLRNDAAYLKSIGVSAIWTPPAYKGTSQNDVGYGAYDLYDLGEFNQKGTIRTKYGTKAELKSAVSTLKSNGIQVYGDVVMNHKGGADYTENVTAVEVNPSNRNQETSDEYTIQAWTGFNFPGRGTTHSPFKWQWYHFDGTDWDQSRNASRIFKFGGKAWDWEVSSENGNYDYLMYADLDFDHPDVRNEMKNWGVWYANEVGLDGFRLDAVKHIKHSYLGDWVNHVRTKTGKEMFTVAEYWQNDVNAINNYLAKVNYNHSVFDAPLHYNFHYASQSGGNYDMRNLLNGTVVAAHPTKAVTLVENHDSQPGQSLESVVQPWFKPLAYAFILTRAEGYPSIFYGDMYGTKGNSSYEIPALKTKIEPLLKARKDYAYGTQHNYMDHWDVIGWTREGDSTKEKSGLATLVTDGAGGSKWMYVGKQNAGEVWYDITGNRTDKITINTDGWGNFQVNGGSVSVYVQQ

SEQ ID NO: 43491 - protein, 482 aa, Bacillus sp. YR288
NGTMMQYFEWYVPNDGQHWNRLRNDAAYLKSIGVSAIWTPPAYKGTSQNDVGYGAYDLYDLGEFNQKGTIRTKYGTKAELKSAVSTLKSNGIQVYGDVVMNHKGGADYTENVTAVEVNPSNRNQETSDEYTIQAWTGFNFPGRGTTHSPFKWQWYHFDGTDWDQSRNASRIFKFRGTGKAWDWEVSSEFGNYDYLMYADLDYDHPDVRNEMKNWGVWYANEVGLDGFRLDAVKHIKHSYLGDWVNHVRTKTGKEMFTVAEYWQNDVNAINNYLAKVNYNHSVFDAPLHYNFHYASQSGGNYDMRNLLNGTVVAAHPTKAVTLVENHDSQPGQSLESVVQPWFKPLAYAFILTRAEGYPSIFYGDMYGTKGNSSYEIPALKTKIEPLLKARKDYAYGTQHNYMDHWDVIGWTREGDSTKEKSGLATLVTDGAGGSKWMYVGKQNAGEVWYDITGNRTDKITINTDGWGNFQVNGGSVSVYVQQ

SEQ ID NO: 43492 - protein, 482 aa, Bacillus sp. YR288
NGTMMQYFEWYVPNDGQHWNRLRNDAAYLKSIGVSAIWTPPAYKGTSQNDVGYGAYDLYDLGEFNQKGTIRTKYGTKAELKSAVSTLKSNGIQVYGDVVMNHKGGADYTENVTAVEVNPSNRNQETSDEYTIQAWTGFNFPGRGTTHSPFKWQWYHFDGTDWDQSRNASRIFKFRGTGKAWDWEVSSENGNYDYLMYADLDFDHPDVRNEMKNWGVWYANEVGLDGFRLDAVKHIKHSYLGDWVNHVRTKTGKEMFTVAEYWQNDVNAINNYLAKVNYNHSVFDAPLHYNFHYASQSGGNYDMRNLLNGTVVAAHPTKAVTLVENHDSQPGQSLESVVQPWFKPLAYAFILTRAEGMPSIFYGDMYGTKGNSSYEIPALKTKIEPLLKARKDYAYGTQHNYMDHWDVIGWTREGDSTKEKSGLATLVTDGAGGSKWMYVGKQNAGEVWYDITGNRTDKITINTDGWGNFQVNGGSVSVYVQQ

SEQ ID NO: 43493 - protein, 482 aa, Bacillus sp. YR288
NRTMMQYFEWYVPNDGQHWNRLRNDAAYLKSIGVNAIWTPPAYKGTSQNDVGYGAYDLYDLGEFNQKGTIRTKYGTKAELKSAVSTLKSNGIQVYGDVVMNHKGGADYTENVTAVEVNPSNRNQETSDEYTIQAWTGFNFPGRGTTHSPFKWQWYHFDGTDWDQSRNASRIFKFRGTGKAWDWEVSSENGNYDYLMYADLDFDHPDVRNEMKNWGVWYANEVGLDGFRLDAVKHIKHSYLGDWVNHVRTKTGKEMFTVAEYWQNDVNAINNYLAKVNYNHSVFDAPLHYNFHYASQSGGNYDMRNLLNGTVVAAHPTKAVTLVENHDSQPGQSLESVVQPWFKPLAYAFILTRAEGYPSIFYGDMYGTKGNSSYEIPALKTKIEPLLKARKDYAYGTQHNYMDHWDVIGWTREGDSTKEKSGLATLVTDGAGGSKWMYVGKQNAGEVWYDITGNRTDKITINTDGWGNFQVNGGSVSVYVQQ

SEQ ID NO: 43494 - protein, 482 aa, Bacillus sp. YR288
NGTMMQYFEWYVPNDGQHWNRLRNDAAYLKSIGVSAIWTPPAYKGTSQNDVGYGAYDLYDLGEFNQKGTIRTKYGTKAELKSAVSTLKSNGIQVYGDVVMNHKGGADYTENVTAVEVNPSNRNQETSDEYTIQAWTGFNFPGRGTTHSPFKWQWYHFDGTDWDQSRNASRIFKFRGTGKAWDWEVSSENGNYDYLMYADLDFDHPDVRNEMKNWGVWYANEVGLDGFRLDAVKHIKFAYLGDWVNHVRTKTGKEMFTVAEYWQNDVNAINNYLAKVNYNHSVFDAPLHYNFHYASQSGGNYDMRNLLNGTVVAAHPTKAVTLVENHDSQPGQSLESVVQPWFKPLAYAFILTRAEGYPSIFYGDMYGTKGNSSYEIPALKTKIEPLLKARKDYAYGTQHNYMDHWDVIGWTREGDSTKEKSGLATLVTDGAGGSKWMYVGKQNAGEVWYDITGNRTDKITINTDGWGNFQVNGGSVSVYVQQ

SEQ ID NO: 43495 - protein, 482 aa, Bacillus sp. YR288
NGTMMQYFEWYVPNDGQHWNRLRNDAAYLKSIGVSAIWTPPAYKGTSQNDVGYGAYDLYDLGEFNQKGTIRTKYGTKAELKSAVSTLKSNGIQVYGDVVMNHKGGADYTENVTAVEVNPSNRNQETSDEYTIQAWTGFNFPGRGTTHSPFKWQWYHFDGTDWDQSRNASRIFKFRGTGKAWDWEVSSENGNYDYLLYADLDFDHPDVRNEMKNWGVWYANEVGLDGFRLDAVKHIKHSYLGDWVNHVRTKTGKEMFTVAEYWQNDVNAINNYLAKVNYNHSVFDAPLHYNFHYASQSGGNYDMRNLLNGTVVAAHPTKAVTLVENHDSQPGQSLESVVQPWFKPLAYAFILTRAEGYPSIFYGDMYGTKGNSSYEIPALKTKIEPLLKARKDYAYGTQHNYMDHWDVIGWTREGDSTKEKSGLATLVTDGAGGSKWMYVGKQNAGEVWYDITGNRTDKITINTDGWGNFQVNGGSVSVYVQQ

SEQ ID NO: 43496 - protein, 482 aa, Bacillus sp. YR288
NETMMQYFEWYVPNDGQHWNRLRNDAAYLKSIGVSAIWTPPAYKGTSQNDVGYGAYDLYDLGEFNQKGTIRTKYGTKAELKSAVSTLKSNGIQVYGDVVMNHKGGADYTENVTAVEVNPSNRNQETSDEYTIQAWTGFNFPGRGTTHSPFKWQWYHFDGTDWDQSRNASRIFKFRGTGKAWDWEVSSENGNYDYLMYADLDFDHPDVRNEMKNWGVWYANEVGLDGFRLDAVKHIKHSYLGDWVNHVRTKTGKEMFTVAEYWQNDVNAINNYLAKVNYNHSVFDAPLHYNFHYASQSGGNYDMRNLLNGTVVAAHPTKAVTLVENHDSQPGQSLESVVQPWFKPLAYAFILTRAEGYPSIFYGDMYGTKGNSSYEIPALKTKIEPLLKARKDYAYGTQHNYMDHWDVIGWTREGDSTKEKSGLATLVTDGAGGSKWMYVGKQNAGEVWYDITGNRTDKITINTDGWGNFQVNGGSVSVYVQQ

SEQ ID NO: 43497 - protein, 482 aa, Bacillus sp. YR288
NGTMMQYFEWYVPNDGQHWNRLRNDAAYLKSIGVSAIWTPPAYKGTSQNDVGYGAYDLYDLGEFNQKGTIRTKYGTKAELKSAVSTLKSNGIQVYGDVVMNHKGGADYTENVTAVEVNPSNRNQETSDEYTIQAWTGFNFPGRGTTHSPFKWQWYHFDGTDWDQSRNASRIFKFRGTGKAWDWEVSSEFGNYDYLMYADLDYDHPDVRNEMKNWGVWYANEVGLDGFRLDAVKHIKFQFLGDWVNHVRTKTGKEMFTVAEYWQNDVNAINNYLAKVNYNHSVFDAPLHYNFHYASQSGGNYDMRNLLNGTVVAAHPTKAVTLVENHDSQPGQSLESVVQPWFKPLAYAFILTRAEGYPSIFYGDMYGTKGNSSYEIPALKTKIEPLLKARKDYAYGTQHNYMDHWDVIGWTREGDSTKEKSGLATLVTDGAGGSKWMYVGKQNAGEVWYDITGNRTDKITINTDGWGNFQVNGGSVSVYVQQ

SEQ ID NO: 43498 - protein, 482 aa, Bacillus sp. YR288
NGTMMQYFEWYVPNDGQHWNRLRNDAAYLKSIGVSAIWTPPAYKGTSQNDVGYGAYDLYDLGEFNQKGTIRTKYGTKAELKSAVSTLKSNGIQVYGDVVMNHKGGADYTENVTAVEVNPSNRNQETSDEYTIQAWTGFNFPGRGTTHSPFKWQWYHFDGTDWDQSRNASRIFKFRGTGKAWDWEVSSENGNYDYLMYADLDFDHPDVRNEMKNWGVWYANEVGLDGFRLDAVKHIKHSYLGDWVNHVRTKTGKTMFTVAEYWQNDVNAINNYLAKVNYNHSVFDAPLHYNFHYASQSGGNYDMRNLLNGTVVAAHPTKAVTLVENHDSQPGQSLESVVQPWFKPLAYAFILTRAEGYPSIFYGDMYGTKGNSSYEIPALKTKIEPLLKARKDYAYGTQHNYMDHWDVIGWTREGDSTKEKSGLATLVTDGAGGSKWMYVGKQNAGEVWYDITGNRTDKITINTDGWGNFQVNGGSVSVYVQQ

SEQ ID NO: 43499 - protein, 483 aa, Bacillus sp. YR288
NGTMMQYFEWYVPNDGQHWNRLRNDAAYLKSIGVSAIWTPPAYKGTSQNDVGYGAYDLYDLGEFNQKGTIRTKYGTKAELKSAVSTLKSNGIKVYGDVVMNHKGGADYTENVTAVEVNPSNRNQETSDEYTIQAWTGFNFPGRGTTHSPFKWQWYHFDGTDWDQSRNASRIFKFRGTGKAWDWEVSSENGNYDYLMYADLDFDHPDVRNEMKNWGVWYANEVGLDGFRLDAVKHIKHSYLGDWVNHVRTKTGKEMFTVAEYWQNDVNAINNYLAKVNYNHSVFDAPLHYNFHYASQSGGNYDMRNLLNGTVVAAHPTKAVTLVENHDSQPGQSLESVVQPWFKPLAYAFILTRAEGYPSIFYGDMYGTKGNSSYEIPALKTKIEPLLKARKDYAYGTQHNYMDHPDVIGWTREGDSTKEKSGLATLVTDGSAGGSKWMYVGKQNAGEVWYDITGNRTDKITINTDGWGNFQVNGGSVSVYVQQ

SEQ ID NO: 43500 - protein, 480 aa, Bacillus licheniformis
NGTLMQYFEWYMPNDGQHWRRLQNDSAYLAEHGITAVWIPPAYKGTSQADVGYGAYDLYDLGEFHQKGTVRTKYGTKGELQSAIKSLHSRDINVYGDVVINHKGGADATEDVTAVEVDPADRNRVISGEHLIKAWTHFHFPGRGSTYSDFKWHWYHFDGTDWDESRKLNRIYLFQGKAWDWPVSNENGNYDYLMYADYDYDYPDVAAEITRWGTWYANELQLDGFRLDAVKHIRFSFLRDWVNHVREKTGKEMFTVAEYWQNDLGALENYLNKTNFNHSVFDVPLHYQFHAASTQGGGYDMRKLLNGTVVSMHPLKSVTFVDNHDTQPGQSLESTVQTWFKPLAYAFILTRESGYPSVFYGDMYGTKGDSQREIPALKHKIEPILKARKQYAYGAQHDYFDHHDIVGWTREGVSSVANSGLAALITDGPGGAKWMYVGRQNAGETWHDITGNRSEPVVINSEGWGEFHVNGGSVSIYVQR

SEQ ID NO: 43501 - protein, 480 aa, Bacillus licheniformis
NGTLMQYFEWYMPNDGQHWRRLQNDSAYLAEHGITAVWIPPAYKGTSQADVGYGAYDLYDLGEFHQKGTVRTKYGTKGELQSAIKSLHSRDINVYGDVVINHKGGADATEDVTAVEVDPADRNRVISGEHLIKAWTHFHFPGRGSTYSDFKWHWYHFDGTDWDESRKLNRIYKFQGKAWDWPVSNENGNYDYLMYADIDYDHPDVAAEIKRWGTWYANELQLDGFRLDAVKHIKFYFLRDWVNHVREKTGKEMFTVAEYWQNDLGALENYLNLTNFNHSVFDVPLHYQFHAASTQGGGYDMRKLLNGTVVSKHPLKSVTFVDNHDTQPGQSLESTVQTWFKPLAYAFILTRESGYPQVFYGDMYGTKGDSQREIPALKHKIEPILKARKQYAYGAQHDYFDHHDIVGWTREGDSSVANSGLAALITDGPGGAKRMYVGRQNAGETWHDITGNRSEPVVINSEGWGEFHVNGGSVSIYVQR

SEQ ID NO: 43502 - protein, 482 aa, Bacillus sp. YR288
NGTMMQYFEWYVPNDGQHWNRLRNDAAYLKSIGVSAIWTPPAYKGTSQNDVGYGAYDLYDLGEFNQKGTIRTKYGTKAELKSAVSTLKSNGIQVYGDVVMNHKGGADYTENVTAVEVNPSNRNQETSDEYTIQAWTGFNFPGRGTTHSPFKWQWYHFDGTDWDQSRNASRIFKFRGTGKAWDWEVSSENGNYDYLMYADLDFDHPDVRNEMKNWGVWYANEVGLDGFRLDAVKHIKHSYLGDWVNHVRTKTGKEMFTVAEYWQNDVNAINNYLAKVNYNHSVFDAPLHYNFHYASQSGGNYDMRNLLNGTVVAAHPTKAVTLVENHDTQPGQSLESVVQPWFKPLAYAFILTRAEGYPSIFYGDMYGTKGNSSYEIPALKTKIEPLLKARKDYAYGTQHNYMDHWDVIGWTREGDSTKEKSGLATLVTDGAGGSKWMYVGKQNAGEVWYDITGNRTDKITINTDGWGNFQVNGGSVSVYVQQ

SEQ ID NO: 43503 - protein, 482 aa, Bacillus sp. YR288
NGTMMQYFEWYVPNDGQHWNRLRNDAAYLKSIGVSAIWTPPAYKGTSQNDVGYGAYDLYDLGEFNQKGTIRTKYGTKAELKSAVSTLKSNGIQVYGDVVMNHKGGADYTENVTAVEVNPSNRNQETSDEYTIQAWTGFNFPGRGTTHSPFKWQWYHFDGTDWDQSRNASRIFKFRGTGKAWDWEVSSENGNYDYLSYADLDFDHPDVRNEMKNWGVWYANEVGLDGFRLDAVKHIKHSYLGDWVNHVRTKTGKEMFTVAEYWQNDVNAINNYLAKVNYNHSVFDAPLHYNFHYASQSGGNYDMRNLLNGTVVAAHPTKAVTLVENHDSQPGQSLESVVQPWFKPLAYAFILTRAEGYPSIFYGDMYGTKGNSSYEIPALKTKIEPLLKARKDYAYGTQHNYMDHWDVIGWTREGDSTKEKSGLATLVTDGAGGSKWMYVGKQNAGEVWYDITGNRTDKITINTDGWGNFQVNGGSVSVYVQQ

SEQ ID NO: 43504 - protein, 482 aa, Bacillus sp. YR288
NGTMMQYFEWYVPNDGQHWNRLRNDAAYLKSIGVSAIWTPPAYKGTSQNDVGYGAYDLYDLGEFNQKGTIRTKYGTKAELKSAVSTLKSNGIQVYGDVVMNHKGGADYTENVTAVEVNPSNRNQETSDEYTIQAWTGFNFPGRGTTHSPFKWQWYHFDGTDWDQSRNASRIFKFRGTGKAWDWEVSSEFGNYDYLMYADLDFDHPDVRNEMKNWGVWYANEVGLDGFRLDAVKHIKFSYLGDWVNHVRTKTGKEMFTVAEYWQNDVNAINNYLAKVNYNHSVFDAPLHYNFHYASQSGGNYDMRNLLNGTVVAAHPTKAVTLVENHDSQPGQSLESVVQPWFKPLAYAFILTRAEGYPSIFYGDMYGTKGNSSYEIPALKTKIEPLLKARKDYAYGTQHNYMDHWDVIGWTREGDSTKEKSGLATLVTDGAGGSKWMYVGKQNAGEVWYDITGNRTDKITINTDGWGNFQVNGGSVSVYVQQ

SEQ ID NO: 43505 - protein, 482 aa, Bacillus sp. YR288
NGTMMQYFEWYVPNDGQHWNRLRNDAAYLKSIGVSAIWTPPAYKGTSQNDVGYGAYDLYDLGEFNQKGTIRTKYGTKAELKSAVSTLKSNGIQVYGDVVMNHKGGADYTENVTAVEVNPSNRNQETSDEYTIQAWTGFNFPGRGTTHSPFKWQWYHFDGTDWDQSRNASRIFKFRDTGKAWDWPVSSENGNYDYLMYADLDFDHPDVINEMKNWGVWYANEVGLDGFRLDAVKHIKFSYLGDWVNHVRTKTGKEMFTVAEYWQNDVNAINNYLAKVNYNHSVFDAPLHYNFHYASQSGGNYDMRNLLNGTVVAAHPTKAVTLVENHDSQPGQSLESVVQPWFKPLAYAFILTRAEGYPSIFYGDMYGTKGNSSYEIPALKTKIEPLLKARKDYAYGTQHNYMDHWDVIGWTREGDSTKEKSGLATLVTDGAGGSKWMYVGKQNAGEVWYDITGNRTDKITINTDGWGNFQVNGGSVSVYVQQ

SEQ ID NO: 43506 - protein, 482 aa, Bacillus sp. YR288
NGTMMQYFEWYVPNDGQHWNRLRNDAAYLKSIGVSAIWTPPAYKGTSQNDVGYGAYDLYDLGEFNQKGTIRTKYGTKAELKSAVSTLKSNGIQVYGDVVMNHKGGADYTENVTAVEVNPSNRNQETSDEYTIQAWTGFNFPGRGTTHSPFKWQWYHFDGTDWDQSRNASRIFKFRGTGKAWDWEVSSENGNYDYLMYADLDYDHPDVRNEMKNWGVWYANEVGLDGFRLDAVKHIKFDYLGDWVNHVRTKTGKEMFTVAEYWQNDVNAINNYLAKVNYNHSVFDAPLHYNFHYASQSGGNYDMRNLLNGTVVAAHPTKAVTLVENHDSQPGQSLESVVQPWFKPLAYAFILTRAEGYPSIFYGDMYGTKGNSSYEIPALKTKIEPLLKARKDYAYGTQHNYMDHWDVIGWTREGDSTKEKSGLATLVTDGAGGSKWMYVGKQNAGEVWYDITGNRTDKITINTDGWGNFQVNGGSVSVYVQQ

SEQ ID NO: 43507 - protein, 482 aa, Bacillus sp. YR288
NGTMMQYFEWYVPNDGQHWNRLRNDAAYLKSIGVSAIWTPPAYKGTSQNDVGYGAYDLYDLGEFNQKGTIRTKYGTKAELKSAVSTLKSNGIQVYGDVVMNHKGGADYTENVTAVEVNPSNRNQETSDEYTIQAWTGFNFPGRGTTHSPFKWQWYHFDGTDWDQSRNASRIFKFRGTGKAWDWEVSSENGNYDYLMYADLDFTHPDVRNEMKNWGVWYANEVGLDGFRLDAVKHIKHSYLGDWVNHVRTKTGKEMFTVAEYWQNDVNAINNYLAKVNYNHSVFDAPLHYNFHYASQSGGNYDMRNLLNGTVVAAHPTKAVTLVENHDSQPGQSLESVVQPWFKPLAYAFILTRAEGYPSIFYGDMYGTKGNSSYEIPALKTKIEPLLKARKDYAYGTQHNYMDHWDVIGWTREGDSTKEKSGLATLVTDGAGGSKWMYVGKQNAGEVWYDITGNRTDKITINTDGWGNFQVNGGSVSVYVQQ

SEQ ID NO: 43508 - protein, 482 aa, Bacillus sp. YR288
NGTMMQYFEWYVPNDGQHWNRLRNDAAYLKSIGVSAIWTPPAYKGTSQNDVGYGAYDLYDLGEFNQKGTIRTKYGTKAELKSAVSTLKSNGIQVYGDVVMNHKGGADYTENVTAVEVNPSNRNQETSDEYTIQAWTGFNFPGRGTTHSPFKWQWYHFDGTDWDQSRNASRIFKFRGTGKAWDWEVSSEFGNYDYLMYADLDFDHPDVINEMKNWGVWYANEVGLDGFRLDAVKHIKHSYLGDWVNHVRTKTGKEMFTVAEYWQNDVNAINNYLAKVNYNHSVFDAPLHYNFHYASQSGGNYDMRNLLNGTVVAAHPTKAVTLVENHDSQPGQSLESVVQPWFKPLAYAFILTRAEGYPSIFYGDMYGTKGNSSYEIPALKTKIEPLLKARKDYAYGTQHNYMDHWDVIGWTREGDSTKEKSGLATLVTDGAGGSKWMYVGKQNAGEVWYDITGNRTDKITINTDGWGNFQVNGGSVSVYVQQ

SEQ ID NO: 43509 - protein, 482 aa, Bacillus sp. YR288
NGTMMQYFEWYVPNDGQHWNRLRNDAAYLKSIGVNAIWTPPAYKGTSQNDVGYGAYDLYDLGEFNQKGTIRTKYGTKAELKSAVSTLKSNGIQVYGDVVMNHKGGADYTENVTAVEVNPSNRNQETSDEYTIQAWTGFNFPGRGTTHSPFKWQWYHFDGTDWDQSRNASRIFKFRGTGKAWDWEVSSENGNYDYLMYADLDFDHPDVRNEMKNWGVWYANEVGLDGFRLDAVKHIKHSYLGDWVNHVRTKTGKEMFTVAEYWQNDVNAINNYLAKVNYNHSVFDAPLHYNFHYASQSGGNYDMRNLLNGTVVAAHPTKAVTLVENHDSQPGQSLESVVQPWFKPLAYAFILTRAEGYPSIFYGDMYGTKGNSSYEIPALKTKIEPLLKARKDYAYGTQHNYMDHWDVIGWTREGDSTKEKSGLATLVTDGAGGSKWMYVGKQNAGEVWYDITGNRTDKITINTDGWGNFQVNAGSVSVYVQQ

SEQ ID NO: 43510 - protein, 480 aa, Bacillus licheniformis
NGTLMQYFEWYMPNDGQHWRRLQNDSAYLAEHGITAVWIPPAYKGTSQADVGYGAYDLYDLGEFHQKGTVRTKYGTKGELQSAIKSLHSRDINVYGDVVINHKGGADATEDVTAVEVDPADRNRVISGEHLIKAWTHFHFPGRGSTYSDFKWHWYHFDGTDWDESRKLNRIYRFQGKAWDWEVSNENGNYDYLMYADFDYDNPDVAAEIKRWGTWYANELQLDGFRLDAVKHIKFSFLRDWVNHVREKTGKEMFTVAEYWQNDLGALENYLNKTNFNHSVFDVPLHYQFHAASTQGGGYDMRKLLNGTVVSKHPLKSVTFVDNHDTQPGQSLESTVQTWFKPLAYAFILTREAGFPQVFYGDMYGTKGDSQREIPALKHKIEPILKARKQYAYGAQHDYFDHHDIVGWTREGDSSVANSGLAALITDGPGGAKRMYVGRQNAGETWHDITGNRSEPVVINSEGWGEFHVNGGSVSIYVQR

SEQ ID NO: 43511 - protein, 482 aa, Bacillus sp. YR288
NGTMMQYFEWYVPNDGQHWNRLRNDAAYLKSIGVSAIWTPPAYKGTSQNDVGYGAYDLYDLGEFNQKGTIRTKYGTKAELKSAVSTLKSNGIQVYGDVVMNHKGGADYTENVTAVEVNPSNRNQETSDEYTIQAWTGFNFPGRGTTHSPFKWQWYHFDGTDWDQSRNASRIFKFRGTGKAWDWEVSSENGNYDYLMYADLDFDHPDVRNEMKNWGVWYANEVGLDGFRLDAVKHIKHSYLGDWVNHVRTKTGKEMFTVAEYWQNDVNAINNYLAKVNYNHSVFDAPLHYNFHYASQSGGAYDMRNLLNGTVVAAHPTKAVTLVENHDSQPGQSLESVVQPWFKPLAYAFILTRAEGYPSIFYGDMYGTKGNSSYEIPALKTKIEPLLKARKDYAYGTQHNYMDHWDVIGWTREGDSTKEKSGLATLVTDGAGGSKWMYVGKQNAGEVWYDITGNRTDKITINTDGWGNFQVNGGSVSVYVQQ

SEQ ID NO: 43512 - protein, 482 aa, Bacillus sp. YR288
NGTMMQYFEWYVPNDGQHWNRLRNDAAYLKSIGVSAIWTPPAYKGTSQNDVGYGAYDLYDLGEFNQKGTIRTKYGTKAELKSAVSTLKSNGIQVYGDVVMNHKGGADYTENVTAVEVNPSNRYQETSDEYTIQAWTGFNFPGRGTTHSPFKWQWYHFDGTDWDQSRNASRIFKFRGTGKAWDWEVSSENGNYDYLMYADLDFDHPDVINEMKNWGVWYANEVGLDGFRLDAVKHIKHSYLGDWVNHVRTKTGKEMFTVAEYWQNDVNAINNYLAKVNYNHSVFDAPLHYNFHYASQSGGNYDMRNLLNGTVVAAHPTKAVTLVENHDSQPGQSLESVVQPWFKPLAYAFILTRAEGYPSIFYGDMYGTKGNSSYEIPALKTKIEPLLKARKDYAYGTQHNYMDHWDVIGWTREGDSTKEKSGLATLVTDGAGGSKWMYVGKQNAGEVWYDITGNRTDKITINTDGWGNFQVNGGSVSVYVQQ

SEQ ID NO: 43513 - protein, 482 aa, Bacillus sp. YR288
NGTMMQYFEWYVPNDGQHWNRLRNDAAYLKSIGVSAIWTPPAYKGTSQNDVGYGAYDLYDLGEFNQKGTIRTKYGTKAELKSAVSTLKSNGIQVYGDVVMNHKGGADYTENVTAVEVNPSNRNQETSDEYTIQAWTGFNFPGRGTTHSPFKWQWYHFDGTDWDQSRNASRIFKFRGTGKAWDWEVSSENGNYDYLMYADLDFDHPDVINEMKNWGVWYANEVGLDGFRLDAVKHIKHQYLGDWVNHVRTKTGKEMFTVAEYWQNDVNAINNYLAKVNYNHSVFDAPLHYNFHYASQSGGNYDMRNLLNGTVVAAHPTKAVTLVENHDSQPGQSLESVVQPWFKPLAYAFILTRAEGYPSIFYGDMYGTKGNSSYEIPALKTKIEPLLKARKDYAYGTQHNYMDHWDVIGWTREGDSTKEKSGLATLVTDGAGGSKWMYVGKQNAGEVWYDITGNRTDKITINTDGWGNFQVNGGSVSVYVQQ

SEQ ID NO: 43514 - protein, 482 aa, Bacillus sp. YR288
NGTMMQYFEWYVPNDGQHWNRLRNDAAYLKSIGVSAIWTPPAYKGTSQNDVGYGAYDLYDLGEFNQKGTIRTKYGTKAELKSAVSTLKSNGIQVYGDVVMNHKGGADYTENVTAVEVNPSNRNQETSDEYTIQAWTGFNFPGRGTTHSPFKWQWYHFDGTDWDQSRNASRIFKFRGTGKAWDWEVSSEFGNYDYLMYADLDFDHPDVRNEMKNWGVWYANEVGLDGFRLDAVKHIKHSYLGDWVNHVRTKTGKEMFTVAEYWQNDVNAINNYLAKVNYNHSVFDAPLHYNFHYASQSGGNYDMRNLLNGTVVAAHPTKAVTLVENHDSQPGQSLESVVQPWFKPLAYAFILTRAEGYPSIFYGDMYGTKGNSSYEIPALKTKIEPLLKARKDYAYGTQHNYMDHWDVIGWTREGDSTKEKSGLATLVTDGAGGSKWMYVGKQNAGEVWYDITGNRTDKITINTDGWGNFQVNGGSVSVYVQQ

SEQ ID NO: 43515 - protein, 482 aa, Bacillus sp. YR288
NGTMMQYFEWYVPNDGQHWNRLRNDAAYLKSIGVSAIWTPPAYKGTSQNDVGYGAYDLYDLGEFNQKGTIRTKYGTKAELKSAVSTLKSNGIQVYGDVVMNHKGGADYTENVTAVEVNPSNRNQETSDEYTIQAWTGFNFPGRGTTHSPFKWQWYHFDGTDWDQSRNASRIFKFRGTGKAWDWEVSSENGNYDYLMYADLDFDHPDVRNEMKNWGVWYANEVGLDGFRLDAVKHIKFQYLGDWVNHVRTKTGKEMFTVAEYWQNDVNAINNYLAKVNYNHSVFDAPLHYNFHYASQSGGNYDMRNLLNGTVVAAHPTKAVTLVENHDSQPGQSLESVVQPWFKPLAYAFILTRAEGYPSIFYGDMYGTKGNSSYEIPALKTKIEPLLKARKDYAYGTQHNYMDHWDVIGWTREGDSTKEKSGLATLVTDGAGGSKWMYVGKQNAGEVWYDITGNRTDKITINTDGWGNFQVNGGSVSVYVQQ

SEQ ID NO: 43516 - protein, 482 aa, Bacillus sp. YR288
NGTMMQYFEWYVPNDGQHWNRLRNDAAYLKSIGVSAIWTPPAYKGTSQNDVGYGAYDLYDLGEFNQKGTIRTKYGTKAELKSAVSTLKSNGIQVYGDVVMNHKGGADYTENVTAVEVNPSNRNQETSDEYTIQAWTGFNFPGRGTTHSPFKWQWYHFDGTDWDQSRNASRIFKFRGTGKAWDWEVSSENGNYDYLMYADLDYDHPDVRNEMKNWGVWYANEVGLDGFRLDAVKHIKFAYLGDWVNHVRTKTGKEMFTVAEYWQNDVNAINNYLAKVNYNHSVFDAPLHYNFHYASQSGGNYDMRNLLNGTVVAAHPTKAVTLVENHDSQPGQSLESVVQPWFKPLAYAFILTRAEGYPSIFYGDMYGTKGNSSYEIPALKTKIEPLLKARKDYAYGTQHNYMDHWDVIGWTREGDSTKEKSGLATLVTDGAGGSKWMYVGKQNAGEVWYDITGNRTDKITINTDGWGNFQVNGGSVSVYVQQ

SEQ ID NO: 43517 - protein, 482 aa, Bacillus sp. YR288
NGTMMQYFEWYVPNDGQHWNRLRNDAAYLKSIGVSAIWTPPAYKGTSQNDVGYGAYDLYDLGEFNQKGTIRTKYGTKAELKSAVSTLKSNGIQVYGDVVMNHKGGADYTENVTAVEVNPSNRNQETSDEYTIQAWTGFNFPGRGTTHSPFKWQWYHFDGTDWDQSRNASRIFKFRGTGKAWDWEVSSENGNYDYLMYADLDFDHPDVRNEMKNWGVWYANEVGLDGFRLDAVKHIKHSYLGDWVNHVRTKTGKEMFTVAEYWQNDVNAINNYLAKVNYNQSVFDFPLHYNFHYASQSGGNYDMRNLLNGTVVAAHPTKAVTLVENHDSQPGQSLESVVQPWFKPLAYAFILTRAEGYPSIFYGDMYGTKGNSSYEIPALKTKIEPLLKARKDYAYGTQHNYMDHWDVIGWTREGDSTKEKSGLATLVTDGAGGSKWMYVGKQNAGEVWYDITGNRTDKITINTDGWGNFQVNGGSVSVYVQQ

SEQ ID NO: 43518 - protein, 482 aa, Bacillus sp. YR288
NGTMMQYFEWYVPNDGQHWNRLRNDAAYLKSIGVSAIWTPPAYKGQSQNDVGYGAYDLYDLGEFNQKGTIRTKYGTKAELKSAVSTLKSNGIQVYGDVVMNHKGGADYTENVTAVEVNPSNRNQETSDEYTIQAWTGFNFPGRGTTHSPFKWQWYHFDGTDWDQSRNASRIFKFRGTGKAWDWEVSSENGNYDYLMYADLDFDHPDVRNEMKNWGVWYANEVGLDGFRLDAVKHIKHSYLGDWVNHVRTKTGKEMFTVAEYWQNDVNAINNYLAKVNYNHSVFDAPLHYNFHYASQSGGNYDMRNLLNGTVVAAHPTKAVTLVENHDSQPGQSLESVVQPWFKPLAYAFILTRAEGYPSIFYGDMYGTKGNSSYEIPALKTKIEPLLKARKDYAYGTQHNYMDHWDVIGWTREGDSTKEKSGLATLVTDGAGGSKWMYVGKQNAGEVWYDITGNRTDKITINTDGWGNFQVNGGSVSVYVQQ

SEQ ID NO: 43519 - protein, 482 aa, Bacillus sp. YR288
NGTMMQYFEWYVPNDGQHWNRLRNDAAYLKSIGVSAIWTPPAYKGTSQNDVGYGAYDLYDLGEFNQKGTIRTKYGTKAELKSAVSTLKSNGIQVYGDVVMNHKGGADYTENVTAVEVNPSNRYQEISDEYTIQAWTWFNFPGRGTTHSPFKWQWYHFDGTDWDQSRNASRIFKFRGTGKAWDWPVSSENGNYDYLMYADLDFDHPDVRNEMKNWGVWYANEVGLDGFRLDAVKHIKHSYLGDWVNHVRTKTGKEMFTVAEYWQNDVNAINNYLAKVNYNHSVFDAPLHYNFHYASQSGGNYDMRNLLNGTVVAAHPTKAVTLVENHDSQPGQSLESVVQPWFKPLAYAFILTRAEGYPSIFYGDMYGTKGNSSYEIPALKTKIEPLLKARKDYAYGTQHNYMDHWDVIGWTREGDSTKEKSGLATLVTDGAGGSKWMYVGKQNAGEVWYDITGNRTDKITINTDGWGNFQVNGGSVSVYVQQ

SEQ ID NO: 43520 - protein, 482 aa, Bacillus sp. YR288
NGTMMQYFEWYVPNDGQHWNRLRNDAAYLKSIGVSAIWTPPAYKGTSQNDVGYGAYDLYDLGEFNQKGTIRTKYGTKAELKSAVSTLKSNGIQVYGDVVMNHKGGADYTENVTAVEVNPSNRYQETSDEYTIQAWTGFNFPGRGTTHSPFKWQWYHFDGTDWDQSRNASRIFKFRGTGKAWDWEVSSENGNYDYLMYADLDFDHPDVRNEMKNWGVWYANEVGLDGFRLDAVKHIKHSYLGDWVNHVRTKTGKEMFTVAEYWQNDVNAINNYLAKVNYNHSVFDAPLHYNFHYASQSGGNYDMRNLLNGTVVAAHPTKAVTLVENHDSQPGQSLESVVQPWFKPLAYAFILTRAEGYPSIFYGDMYGTKGNSSYEIPALKTKIEPLLKARKDYAYGTQHNYMDHWDVIGWTREGDSTKEKSGLATLVTDGAGGSKWMYVGKQNAGEVWYDITGNRTDKITINTDGWGNFQVNGGSVSVYVQQ

SEQ ID NO: 43521 - protein, 480 aa, Bacillus licheniformis
NGTLMQYFEWYMPNDGQHWRRLQNDSAYLAEHGITAVWIPPAYKAISQADVGYGAYDLYDLGEFHQKGTVRTKYGTKGELQSAIKSLHSRDINVYGDVVINHKAGADATEDVTAVEVDPADRNRVISGEHLIKAWTHFHFPGRGSTYSDFKWHWYHFDGTDWDESRKLNRIYKFQGKAWDWEVSNENGNYDYLMYADIDYDHPDVAAEIKRWGTWYANELQLDGFRLDAVKHIKFSFLRDWVNHVREKTGKEMFTVAEYWQNDLGALENYLNKTNFNHSVFDVPLHYQFHAASTQGGGYDMRKLLNGTVVSKHPLKSVTFVDNHDTQPGQSLESTVQTWFKPLAYAFILTRESGYPQVFYGDMYGTKGDSQREIPALKHKIEPILKARKQYAYGAQHDYFDHHDIVGWTREGDSSVANSGLAALITDGPGGAKRMYVGRQNAGETWHDITGNRSEPVVINSEGWGEFHVNGGSVSIYVQR

SEQ ID NO: 43522 - protein, 482 aa, Bacillus sp. YR288
NGTMMQYFEWYVPNDGQHWNRLRNDAAYLKSIGVSAIWTPPAYKGTSQNDVGYGAYDLYDLGEFNQKGTIRTKYGTKAELKSAVSTLKSNGIQVYGDVVMNHKGGADYTENVTAVEVNPSNRNQETSDEYTIQAWTGFNFPGRGTTHSPFKWQWYHFDGTDWDQSRNASRIFKFRGTGKAWDLEVSSENGNYDYLMYADLDFDHPDVRNEMKNWGVWYANEVGLDGFRLDAVKHIKHSYLGDWVNHVRTKTGKEMFTVAEYWQNDVNAINNYLAKVNYNHSVFDAPLHYNFHYASQSGGNYDMRNLLNGTVVAAHPTKAVTLVENHDSQPGQSLESVVQPWFKPLAYAFILTRAEGYPSIFYGDMYGTKGNSSYEIPALKTKIEPLLKARKDYAYGTQHNYMDHWDVIGWTREGDSTKEKSGLATLVTDGAGGSKWMYVGKQNAGEVWYDITGNRTDKITINTDGWGNFQVNGGSVSVYVQQ

SEQ ID NO: 43523 - protein, 482 aa, Bacillus sp. YR288
NGTMMQYFEWYVPNDGQHWNRLRNDAAYLKSIGVSAIWTPPAYKGTSQNDVGYGAYDLYDLGEFNQKGTIRTKYGTKAELKSAVSTLKSNGIQVYGDVVMNHKGGADYTENVTAVEVNPSNRNQETSDEYTIQAWTGFNFPGRGTTHSPFKWQWYHFDGTDWDQSRNASRIFKFRGTGKAWDWPVSSENGNYDYLMYADLDFDHPDVRNEMKNWGVWYANEVGLDGFRLDAVKHIKHQFLGDWVNHVRTKTGKEMFTVAEYWQNDVNAINNYLAKVNYNHSVFDAPLHYNFHYASQSGGNYDMRNLLNGTVVAAHPTKAVTLVENHDSQPGQSLESVVQPWFKPLAYAFILTRAEGYPSIFYGDMYGTKGNSSYEIPALKTKIEPLLKARKDYAYGTQHNYMDHWDVIGWTREGDSTKEKSGLATLVTDGAGGSKWMYVGKQNAGEVWYDITGNRTDKITINTDGWGNFQVNGGSVSVYVQQ

SEQ ID NO: 43524 - protein, 482 aa, Bacillus sp. YR288
NGTMMQYFEWYVPNDGQHWNRLRNDAAYLKSIGVSAIWTPPAYKGTSQNDVGYGAYDLYDLGEFNQKGTIRTKYGTKAELKSAVSTLKSNGIQVYGDVVMNHKGGADYTENVTAVEVNPSNRNQETSDEYTIQAWTGFNFPGRGTTHSPFKWQWYHFDGTDWDQSRNASRIFKFRGTGKAWDWEVSSENGNYDYLMYADLDFDHPDVRNEMKNWGVWYANEVGLDGFRLDAVKHIKFQYLWDWVNHVRTKTGKEMFTVAEYWQNDVNAINNYLAKVNYNHSVFDAPLHYNFHYASQSGGNYDMRNLLNGTVVAAHPTKAVTLVENHDSQPGQSLESVVQPWFKPLAYAFILTRAEGYPSIFYGDMYGTKGNSSYEIPALKTKIEPLLKARKDYAYGTQHNYMDHWDVIGWTREGDSTKEKSGLATLVTDGAGGSKWMYVGKQNAGEVWYDITGNRTDKITINTDGWGNFQVNGGSVSVYVQQ

SEQ ID NO: 43525 - protein, 482 aa, Bacillus sp. YR288
NGTMMQYFEWYVPNDGQHWNRLRNDAAYLKSIGVSAIWTPPAYKGTSQNDVGYGAYDLYDLGEFNQKGTIRTKYGTKAELKSAVSTLKSNGIQVYGDVVMNHKGGADYTENVTAVEVNPSNRNQETSDEYTIQAWTGFNFPGRGTTHSPFKWQWYHFDGTDWDQSRNASRIFKFRGTGKAWDWPVSSENGNYDYLMYADLDFDHPDVRNEMKNWGVWYANEVGLDGFRLDAVKHIKHSYLGDWVNHVRTKTGKEMFTVAEYWQNDVNAINNYLAKVNYNHSVFDAPLHYNFHYASQSGGNYDMRNLLNGTVVAAHPTKAVTLVENHDSQPGQSLESVVQPWFKPLAYAFILTRAEGYPSIFYGDMYGTKGNSSYEIPALKTKIEPLLKARKDYAYGTQHNYMDHWDVIGWTREGDSTKEKSGLATLVTDGAGGSKWMYVGKQNAGEVWYDITGNRTDKITINTDGWGNFQVNGGSVSVYVQQ

SEQ ID NO: 43526 - protein, 482 aa, Bacillus sp. YR288
NGTMMQYFEWYVPNDGQHWNRLRNDAAYLKSIGVSAIWTPPAYKGTSQNDVGYGAYDLYDLGEFNQKGTIRTKYGTKAELKSAVSTLKSNGIQVYGDVVMNHKGGADYTENVTAVEVNPSNRNQETSDEYTIQAWTGFNFPGRGTTHSPFKWQWYHFDGTDWDQSRNASRIFKFRGTGKAWDWEVSSENGNYDYLMYADLDFDHPDVRNEMKNWGVWYANEVGLDGFRLDAVKHIKHSYLGDWVNHVRTKTGKEMFTVAEYWQNDVNAINNYLAKVNYNHSVFDAPLHYNFHYASQSGGNYDMRNLLNGTVVAAHPTKAVTLVENHDSQPGQSLESVVQPWFKPLAYAFILTRAEGYPSIFYGDMYGTKGNSSYEIPALKTKIEPLLKARKDYAYGTQHNYMDHWDVIGWTREGDSTKEKSGLATLVTDGAGGSKWMYVGKQNAGEVWYDITGNRTDKITINTDGWGNFQVNKGSVSVYVQQ

SEQ ID NO: 43527 - protein, 482 aa, Bacillus sp. YR288
NGTMMQYFEWYVPNDGQHWNRLRNDAAYLKSIGVNAIWTPPAYKGTSQNDVGYGAYDLYDLGEFNQKGTIRTKYGTKAELKSAVSTLKSNGIQVYGDVVMNHKGGADYTENVTAVEVNPSNRNQETSDEYTIQAWTGFNFPGRGTTHSPFKWQWYHFDGTDWDQSRNASRIFKFRGTGKAWDWEVSSENGNYDYLMYADLDFDHPDVRNEMKNWGVWYANEVGLDGFRLDAVKHIKHSYLGDWVNHVRTKTGKEMFTVAEYWQNDVNAINNYLAKVNYNHWVFDAPLHYNFHYASQSGGNYDMRNLLNGTVVAAHPTKAVTLVENHDSQPGQSLESVVQPWFKPLAYAFILTRAEGYPSIFYGDMYGTKGNSSYEIPALKTKIEPLLKARKDYAYGTQHNYMDHWDVIGWTREGDSTKEKSGLATLVTDGAGGSKWMYVGKQNAGEVWYDITGNRTDKITINTDGWGNFQVNGGSVSVYVQQ

SEQ ID NO: 43528 - protein, 482 aa, Bacillus sp. YR288
NGTMMQYFEWYVPNDGQHWNRLRNDAAYLKSIGVSAIWTPPAYKGTSQNDVGYGAYDLYDLGEFNQKGTIRTKYGTKAELKSAVSTLKSNGIQVYGDVVMNHKGGADYTENVTAVEVNPSNRYQEISDEYTIQAWTGFNFPGRGTTHSPFKWQWYHFDGTDWDQSRNASRIFKFRGTGKAWDWEVSSENGNYDYLMYADLDFDHPDVRNEMKNWGVWYANEVGLDGFRLDAVKHIKHSYLGDWVNHVRTKTGKEMFTVAEYWQNDVNAINNYLAKVNYNQSVFDFPLHYNFHYASQSGGNYDMRNLLNGTVVAAHPTKAVTLVENHDSQPGQSLESVVQPWFKPLAYAFILTRAEGYPSIFYGDMYGTKGNSSYEIPALKTKIEPLLKARKDYAYGTQHNYMDHWDVIGWTREGDSTKEKSGLATLVTDGAGGSKWMYVGKQNAGEVWYDITGNRTDKITINTDGWGNFQVNGGSVSVYVQQ

SEQ ID NO: 43529 - protein, 482 aa, Bacillus sp. YR288
NGTMMQYFEWYVPNDGQHWNRLRNDAAYLKSIGVNAIWTPPAYKGTSQNDVGYGAYDLYDLGEFNQKGTIRTKYGTKAELKSAVSTLKSNGIQVYGDVVMNHKGGADYTENVTAVEVNPSNRNQETSDEYTIQAWTGFNFPGRGTTHSPFKWQWYHFDGTDWDQSRNASRIFKFRGTGKAWDWEVSSENGNYDYLMYADLDFDHPDVRNEMKNWGVWYANEVGLDGFRLDAVKHIKHSYLGDWVNHVRTKTGKEMFTVAEYWQNDVNAINNYLAKVNYNHSVFDAPLHYNFHYASQSGGNYDMRNLLNGTVVAAHPTKAVTLVENHDSQPGQSLESVVQPWFKPLAYAFILTRAEGLPSIFYGDMYGTKGNSSYEIPALKTKIEPLLKARKDYAYGTQHNYMDHWDVIGWTREGDSTKEKSGLATLVTDGAGGSKWMYVGKQNAGEVWYDITGNRTDKITINTDGWGNFQVNGGSVSVYVQQ

SEQ ID NO: 43530 - protein, 482 aa, Bacillus sp. YR288
NGTMMQYFEWYVPNDGQHWNRLRNDAAYLKSIGVSAIWTPPAYKGTSQNDVGYGAYDLYDLGEFNQKGTIRTKYGTKAELKSAVSTLKSNGIQVYGDVVMNHKGGADYTENVTAVEVNPSNRNQETSDEYTIQAWTGFNFPGRGTTHSPFKWQWYHFDGTDWDQSRNASRIFKFRGTGKAWDWEVSSENGNYDYLTYADLDFDHPDVRNEMKNWGVWYANEVGLDGFRLDAVKHIKHSYLGDWVNHVRTKTGKEMFTVAEYWQNDVNAINNYLAKVNYNHSVFDAPLHYNFHYASQSGGNYDMRNLLNGTVVAAHPTKAVTLVENHDSQPGQSLESVVQPWFKPLAYAFILTRAEGYPSIFYGDMYGTKGNSSYEIPALKTKIEPLLKARKDYAYGTQHNYMDHWDVIGWTREGDSTKEKSGLATLVTDGAGGSKWMYVGKQNAGEVWYDITGNRTDKITINTDGWGNFQVNGGSVSVYVQQ

SEQ ID NO: 43531 - protein, 483 aa, Bacillus sp. YR288
NGTMMQYFEWYVPNDGQHWNRLRNDAAYLKSIGVSAIWTPPAYKGTSQNDVGYGAYDLYDLGEFNQKGTIRTKYGTKAELKSAVSTLKSNGIQVYGDVVMNHKGGADYTENVTAVEVNPSNRNQETSDEYTIQAWTGFNFPGRGTTHSPFKWQWYHFDGTDWDQSRNASRIFKFRGTGKAWDWEVSSENGNYDYLMYADLDFDHPDVRNEMKNWGVWYANEVGLDGFRLDAVKHIKHSYLGDWVNHVRTKTGKEMFTVAEYWQNDVNAINNYLAKVNYNHSVFDAPLHYNFHYASQSGGNYDMRNLLNGTVVAAHPEKAVTLVENHDSQPGQSLESVVQPWFKPLAYAFILTRAEGLPSIFYGDMYGTKGNSSYEIPALKTKIEPLLKARKDYAYGTQHNYMDHWDVIGWTREGDSTKEKSGLATLVTDGSAGGSKWMYVGKQNAGEVWYDITGNRTDKITINTDGWGNFQVNGGSVSVYVQQ

SEQ ID NO: 43532 - protein, 480 aa, Bacillus licheniformis
NGTLMQYFEWYTPNDGQHWKKLQNDAEHLSDIGITAVWIPPAYKGTSQADIGYGAYDLYDLGEFHQKGTVRTKYGTKGELQSAIKSLHSRDINVYGDVVINHKGGADATEDVTAVEVDPADRNRVISGEILIKAWTHFHFPGRGSTYSDFKWYWYHFDGTDWDESRKLNRIYKFQGKTWDWEVDNEFGNYDYLMYADIDYDYPYVVSEIKRWGTWYANELQLDGFRLDAVKHIKFSFLRDWVNHVREKTGKEMFTVAEYWSYDLGALENYLNKTNFNHSVFDVPLHYQFHAASTQGGGYDMRKLLNGTVVSKHPLKSVTFVDNHDTQPGQSLESTVQTWFKPLAYAFILTRESGYPQVFYGDMYGTKGDSQREIPALKHKIEPILKARKQYAYGAQHDYFDHHDIVGWTREGDSSVANSGLAALITDGPGGAKRMYVGRQNAGETWHDITGNRSEPVVINSEGWGEFHVNGGSVSIYVQR

SEQ ID NO: 43533 - protein, 482 aa, Bacillus sp. YR288
NGTMMQYFEWYVPNDGQHWNRLRNDAAYLKSIGVSAIWTPPAYKGTSQNDVGYGAYDLYDLGEFNQKGTIRTKYGTKAELKSAVSTLKSNGIQVYGDVVMNHKGGADYTENVTAVEVNPSNRNQETSDEYTIQAWTGFNFPGRGTTHSPFKWQWYHFDGTDWDQSRNASRIFKFRGTGKAWDWEVSSENGNYDYLMYADLDFDHPDVRNEMKNWGVWYANEVGLDGFRLDAVKHIKHSYLGDWVNHVRTKTGKEMFTVAEYWQNDVNAINNYLAKVNYNHSVFDAPLHYNFHYASQSGGNYDMRNLLNGTVVAAHPTKAVTLVENHDSQPGQSLESVVQPWFKPIAYAFILTRAEGYPSIFYGDMYGTKGNSSYEIPALKTKIEPLLKARKDYAYGTQHNYMDHWDVIGWTREGDSTKEKSGLATLVTDGAGGSKWMYVGKQNAGEVWYDITGNRTDKITINTDGWGNFQVNGGSVSVYVQQ

SEQ ID NO: 43534 - protein, 482 aa, Bacillus sp. YR288
NGTMMQYFEWYVPNDGQHWNRLRNDAAYLKSIGVNAIWTPPAYKGTSQNDVGYGAYDLYDLGEFNQKGTIRTKYGTKAELKSAVSTLKSNGIQVYGDVVMNHKGGADYTENVTAVEVNPSNRNQETSDEYTIQAWTGFNFPGRGTTHSPFKWQWYHFDGTDWDQSRNASRIFKFRGTGKAWDWEVSSENGNYDYLMYADLDFDHPDVRNEMKNWGVWYANEVGLDGFRLDAVKHIKHSYLGDWVNHVRTKTGKEMFTVAEYWQNDVNAINNYLAKVNYNHSVFDAPLHYNFHYASQSGGNYDMRNLLNGTVVAAHPTKAVTLVENHDSQPGQSLESVVQPWFKPLAYAFILTRAEGYPSIFYGDMYGTKGNSSYEIPALKTKIEPLLKARKDYAYGTQHNYMDHWDVIGWTREGDSTKEKSGLATLVTDGAGGSKWMYVGKQNAGEVWYDITGNRTDKITINTDGWGTFQVNGGSVSVYVQQ

SEQ ID NO: 43535 - protein, 480 aa, Bacillus licheniformis
NGTLMQYFEWYMPNDGQHWKRLQNDSAYLAEHGITAVWIPPAYKAISQADVGYGAYDLYDLGEFHQKGTVRTKYGTKGELQSAIKSLHSRDINVYGDVVINHKAGADATEDVTAVEVDPADRNRVISGEHLIKAWTHFHFPGRGSTYSDFKWYWYHFDGTDWDESRKLNRIYKFQGKTWDWEVSFENGNYDYLMYADFDYDHPDVVAEIKRWGTWYANELQLDGFRLDAVKHIKFSFLRDWVNHVREKTGKEMFTVAEYWSNDLGALENYLNKTNFNHSVFDVPLHYQFHAASTQGGGYDMRKLLNGTVVSKHPLKSVTFVDNHDTQPGQSLESTVQTWFKPLAYAFILTRESGYPQVFYGDMYGTKGDSQREIPALKHKIEPILKARKQYAYGAQHDYFDHHDIVGWTREGDSSVANSGLAALITDGPGGAKRMYVGRQNAGETWHDITGNRSEPVVINSEGWGEFHVNGGSVSIYVQR

SEQ ID NO: 43536 - protein, 482 aa, Bacillus sp. YR288
NGTMMQYFEWYVPNDGQHWNRLRNDAAYLKSIGVSAIWTPPAYKGTSQNDVGYGAYDLYDLGEFNQKGTIRTKYGTKAELKSAVSTLKSNGIQVYGDVVMNHKGGADYTENVTAVEVNPSNRNQETSDEYTIQAWTGFNFPGRGTTHSPFKWQWYHFDGTDWDQSRNASRIFKFRGTGKAWDWEVSSENGNYDYLMYADLDFDHPDVRNEMKNWGVWYANEVGLDGFRLDAVKHIKHSYLGDWVNHVRTKTGKEMFTVAEYWQNDVNAINNYLAKVNYNHSVFDAPLHYNFHYASQSGGGYDMRNLLNGTVVAAHPTKAVTLVENHDSQPGQSLESVVQPWFKPLAYAFILTRAEGYPSIFYGDMYGTKGNSSYEIPALKTKIEPLLKARKDYAYGTQHNYMDHWDVIGWTREGDSTKEKSGLATLVTDGAGGSKWMYVGKQNAGEVWYDITGNRTDKITINTDGWGNFQVNGGSVSVYVQQ

SEQ ID NO: 43537 - protein, 482 aa, Bacillus sp. YR288
NGTMMQYFEWYVPNDGQHWNRLRNDAAYLKSIGVSAIWTPPAYKGTSQNDVGYGAYDLYDLGEFNQKGTIRTKYGTKAELKSAVSTLKSNGIQVYGDVVMNHKGGADYTENVTAVEVNPSNRNQETSDEYTIQAWTGFNFPGRGTTHSPFKWQWYHFDGTDWDQSRNASRIFKFRGTGKAWDWEVSSENGNYDYLMYADLDFDHPDVRNEMKNWGVWYANEVGLDGFRLDAVKHIKHSYLGDWVNHVRTKTGKEMFTVAEYWQNDVNAINNYLAKVNYNHSVFDAPLHYNFHYASQSGGNYDMRNLLNGTVVAAHPTKAVTLVENHDSQPGQSLESVVQPWFKPLAYAFILTRAEGCPSIFYGDMYGTKGNSSYEIPALKTKIEPLLKARKDYAYGTQHNYMDHWDVIGWTREGDSTKEKSGLATLVTDGAGGSKWMYVGKQNAGEVWYDITGNRTDKITINTDGWGNFQVNGGSVSVYVQQ

SEQ ID NO: 43538 - protein, 482 aa, Bacillus sp. YR288
NGTMMQYFEWYVPNDGQHWNRLRNDAAYLKSIGVSAIWTPPAYKGTSQNDVGYGAYDLYDLGEFNQKGTIRTKYGTKAELKSAVSTLKSNGIQVYGDVVMNHKGGADYTENVTAVEVNPSNRNQETSDEYTIQAWTGFNFPGRGTTHSPFKWQWYHFDGTDWDQSRNASRIFKFRGTGKAWDWEVSSENGNYDYLMYADLDFDHPDVRNEMKNWGVWYANEVGLDGFRLDAVKHIKHSYLGDWVNHVRTKTGKEMFTVAEYWQNDVNAINNYLAKVNYNHSVFDAPLHYNFHYASQSGGRYDMRNLLNGTVVAAHPTKAVTLVENHDSQPGQSLESVVQPWFKPLAYAFILTRAEGYPSIFYGDMYGTKGNSSYEIPALKTKIEPLLKARKDYAYGTQHNYMDHWDVIGWTREGDSTKEKSGLATLVTDGAGGSKWMYVGKQNAGEVWYDITGNRTDKITINTDGWGNFQVNGGSVSVYVQQ

SEQ ID NO: 43539 - protein, 480 aa, Bacillus licheniformis
NGTLMQYFEWYMPNDGQHWKRLQNDSAYLAEHGITAVWIPPAYKGTSQADVGYGAYDLYDLGEFHQKGTVRTKYGTKGELQSAIKSLHSRDINVYGDVVINHKGGADATEDVTAVEVDPADRNRVISGEHLIKAWTHFHFPGRGSTYSDFKWHWYHFDGTAGDESRKLNRIYKFQGKAWDWEVSNENGNYDYLMYADIDYDHPDVAAEIKRWGTWYANELQLDGFRLDAVKHIKFSFLRDWVNHVREKTGKEMFTVAEYWQNDLGALENYLNKTNFNHSLFDVPLHYQFHAASTQGGGYDMRKLLNGTVVSKHPLKSVTFVDNHDTQPGQSLESTVQTWFKPLAYAFILTRESGYPQVFYGDMYGTKGDSQREIPALKHKIEPILKARKQYAYGAQHDYFDHHDIVGWTREGDSSVANSGLAALITDGPGGAKRMYVGRQNAGETWHDITGNRSEPVVINSEGWGEFHVNGGSVSIYVQR

SEQ ID NO: 43540 - protein, 482 aa, Bacillus sp. YR288
NGTMMQYFEWYVPNDGQHWNRLRNDAAYLKSIGVSAIWTPPAYKGTSQNDVGYGAYDLYDLGEFNQKGTIRTKYGTKAELKSAVSTLKSNGIQVYGDVVMNHKGGADYTENVTAVEVNPSNRNQETSDEYTIQAWTGFNFPGRGTTHSPFKWQWYHFDGTDWDQSRNASRIFKFRGTGKAWDWEVSSENGNYDYLVYADLDFDHPDVRNEMKNWGVWYANEVGLDGFRLDAVKHIKHSYLGDWVNHVRTKTGKEMFTVAEYWQNDVNAINNYLAKVNYNHSVFDAPLHYNFHYASQSGGNYDMRNLLNGTVVAAHPTKAVTLVENHDSQPGQSLESVVQPWFKPLAYAFILTRAEGYPSIFYGDMYGTKGNSSYEIPALKTKIEPLLKARKDYAYGTQHNYMDHWDVIGWTREGDSTKEKSGLATLVTDGAGGSKWMYVGKQNAGEVWYDITGNRTDKITINTDGWGNFQVNGGSVSVYVQQ

SEQ ID NO: 43541 - protein, 480 aa, Bacillus licheniformis
NGTLMQYFEWYMPNDGQHWRRLQNDSAYLAEHGITAVWIPPAYKGHSQADVGYGAYDLYDLGEFHQKGTVRTKYGTKGELQSAIKSLHSRDINVYGDVVINHKGGADATEDVTAVEVDPADRNRVISGEHLIKAWTHFHFPGRGSTYSDFKWHWYHFDGTDWDESRKLNRIYLFQGKAWDWPVSNENGNYDYLMYADIDYDHPDVAAEIKRWGTWYANELQLDGFRLDAVKHIKFSFLRDWVNHVREKTGKEMFTVAEYWQNDLGALENYLNKTNFNHSVFDVPLHYQFHAASTQGGGYDMRKLLNGTVVSKHPLKSVTFVDNHDTQPGQSLESTVQTWFKPLAYAFILTRESGYPQVFYGDMYGTKGDSQREIPALKHKIEPILKARKQYAYGAQHDYFDHHDIVGWTREGDSSVANSGLAALITDGPGGAKRMYVGRQNAGETWHDITGNRSEPVVINSEGWGEFHVNGGSVSIYVQR

SEQ ID NO: 43542 - protein, 482 aa, Bacillus sp. YR288
NGTMMQYFEWYVPNDGQHWNRLRNDAAYLKSIGVSAIWTPPAYKGTSQNDVGYGAYDLYDLGEFNQKGTIRTKYGTKAELKSAVSTLKSNGIQVYGDVVMNHKGGADYTENVTAVEVNPSNRNQETSDEYTIQAWTGFNFPGRGTTHSPFKWQWYHFDGTDWDQSRNASRIFKFRGTGKAWDWEVSSENGNYDYLMYADLDFDHPDVRNEMKNWGVWYANEVGLDGFRLDAVKHIKHQYLGDWVNHVRTKTGKEMFTVAEYWQNDVNAINNYLAKVNYNHSVFDAPLHYNFHYASQSGGNYDMRNLLNGTVVAAHPTKAVTLVENHDSQPGQSLESVVQPWFKPLAYAFILTRAEGYPSIFYGDMYGTKGNSSYEIPALKTKIEPLLKARKDYAYGTQHNYMDHWDVIGWTREGDSTKEKSGLATLVTDGAGGSKWMYVGKQNAGEVWYDITGNRTDKITINTDGWGNFQVNGGSVSVYVQQ

SEQ ID NO: 43543 - protein, 482 aa, Bacillus sp. YR288
NGTMMQYFEWYVPNDGQHWNRLRNDAAYLKSIGVSAIWTPPAYKGTSQNDVGYGAYDLYDLGEFNQKGTIRTKYGTKAELKSAVSTLKSNGIQVYGDVVMNHKGGADYTENVTAVEVNPSNRNQETSDEYTIQAWTGFNFPGRGTTHSPFKWQWYHFDGTDWDQSRNASRIFKFRGTGKAWDWEVSSENGNYDYLMYADLDYDHPDVRNEMKNWGVWYANEVGLDGFRLDAVKHIKFQYLGDWVNHVRTKTGKEMFTVAEYWQNDVNAINNYLAKVNYNHSVFDAPLHYNFHYASQSGGNYDMRNLLNGTVVAAHPTKAVTLVENHDSQPGQSLESVVQPWFKPLAYAFILTRAEGYPSIFYGDMYGTKGNSSYEIPALKTKIEPLLKARKDYAYGTQHNYMDHWDVIGWTREGDSTKEKSGLATLVTDGAGGSKWMYVGKQNAGEVWYDITGNRTDKITINTDGWGNFQVNGGSVSVYVQQ

SEQ ID NO: 43544 - protein, 482 aa, Bacillus sp. YR288
NGTMMQYFEWYVPNDGQHWNRLRNDAAYLKSIGVSAIWTPPAYKGTSQNDVGYGAYDLYDLGEFNQKGTIRTKYGTKAELKSAVSTLKSNGIQVYGDVVMNHKGGADYTENVTAVEVNPSNRNQETSDEYTIQAWTGFNFPGRGTTHSPFKWQWYHFDGTDWDQSRNASRIFKFRGTGKAWDWEVSSENGNYDYLMYADLDFDHPDVRNEMKNWGVWYANEVGLDGFRLDAVKHIKHFYLWDWVNHVRTKTGKEMFTVAEYWQNDVNAINNYLAKVNYNHSVFDAPLHYNFHYASQSGGNYDMRNLLNGTVVAAHPTKAVTLVENHDSQPGQSLESVVQPWFKPLAYAFILTRAEGYPSIFYGDMYGTKGNSSYEIPALKTKIEPLLKARKDYAYGTQHNYMDHWDVIGWTREGDSTKEKSGLATLVTDGAGGSKWMYVGKQNAGEVWYDITGNRTDKITINTDGWGNFQVNGGSVSVYVQQ

SEQ ID NO: 43545 - protein, 482 aa, Bacillus sp. YR288
NGTMMQYFEWYVPNDGQHWNRLRNDAAYLKSIGVSAIWTPPAYKGTSQNDVGYGAYDLYDLGEFNQKGTIRTKYGTKAELKSAVSTLKSNGIQVYGDVVMNHKGGADYTENVTAVEVNPSNRNQETSDEYTIQAWTGFNFPGRGTTHSPFKWQWYHFDGTDWDQSRNASRIFKFRGTGKAWDWEVSSENGNYDYLMYADLDFDHPDVRNEMKNWGVWYANEVGLDGFRLDAVKHIKHSYLGDWVNHVRTKTGKEMFTVAEYWQNDVNAINNYLAKVNYNHWVFDAPLHYNFHYASQSGGNYDMRNLLNGTVVAAHPTKAVTLVENHDSQPGQSLESVVQPWFKPLAYAFILTRAEGYPSIFYGDMYGTKGNSSYEIPALKTKIEPLLKARKDYAYGTQHNYMDHWDVIGWTREGDSTKEKSGLATLVTDGAGGSKWMYVGKQNAGEVWYDITGNRTDKITINTDGWGNFQVNGGSVSVYVQQ

SEQ ID NO: 43546 - protein, 482 aa, Bacillus sp. YR288
NGTMMQYFEWYVPNDGQHWNRLRNDAAYLKSIGVSAIWTPPAYKGTSQNDVGYGAYDLYDLGEFNQKGTIRTKYGTKAELKSAVSTLKSNGIQVYGDVVMNHKGGADYTENVTAVEVNPSNRYQEISDEYTIQAWTGFNFPGRGTTHSPFKWQWYHFDGTDWDQSRNASRIFKFRGTGKAWDWPVSSENGNYDYLMYADLDFDHPDVRNEMKNWGVWYANEVGLDGFRLDAVKHIKHSYLGDWVNHVRTKTGKEMFTVAEYWQNDVNAINNYLAKVNYNHSVFDAPLHYNFHYASQSGGNYDMRNLLNGTVVAAHPTKAVTLVENHDSQPGQSLESVVQPWFKPLAYAFILTRAEGYPSIFYGDMYGTKGNSSYEIPALKTKIEPLLKARKDYAYGTQHNYMDHWDVIGWTREGDSTKEKSGLATLVTDGAGGSKWMYVGKQNAGEVWYDITGNRTDKITINTDGWGNFQVNGGSVSVYVQQ

SEQ ID NO: 43547 - protein, 482 aa, Bacillus sp. YR288
NGTMMQYFEWYVPNDGQHWNRLRNDAAYLKSIGVSAIWTPPAYKGTSQNDVGYGAYDLYDLGEFNQKGTIRTKYGTKAELKSAVSTLKSNGIQVYGDVVMNHKGGADYTENVTAVEVNPSNRNQETSDEYTIQAWTGFNFPGRGTTHSPFKWQWYHFDGTDWDQSRNASRIFKFRGTGKAWDWPVSSENGNYDYLMYADYDFDHPDVRNEMKNWGVWYANEVGLDGFRLDAVKHIKHSYLGDWVNHVRTKTGKEMFTVAEYWQNDVNAINNYLAKVNYNHSVFDAPLHYNFHYASQSGGNYDMRNLLNGTVVAAHPTKAVTLVENHDSQPGQSLESVVQPWFKPLAYAFILTRAEGYPSIFYGDMYGTKGNSSYEIPALKTKIEPLLKARKDYAYGTQHNYMDHWDVIGWTREGDSTKEKSGLATLVTDGAGGSKWMYVGKQNAGEVWYDITGNRTDKITINTDGWGNFQVNGGSVSVYVQQ

SEQ ID NO: 43548 - protein, 482 aa, Bacillus sp. YR288
NGTMMQYFEWYVPNDGQHWNRLRNDAAYLKSIGVSAIWTPPAYKGTSQNDVGYGAYDLYDLGEFNQKGTIRTKYGTKAELKSAVSTLKSNGIQVYGDVVMNHKGGADYTENVTAVEVNPSNRNQETSDEYTIQAWTGFNFPGRGTTHSPFKWQWYHFDGTDWDQSRNASRIFKFRGTGKAWDWEVSSENGNYDYLMYADLDFEHPDVRNEMKNWGVWYANEVGLDGFRLDAVKHIKHSYLGDWVNHVRTKTGKEMFTVAEYWQNDVNAINNYLAKVNYNHSVFDAPLHYNFHYASQSGGNYDMRNLLNGTVVAAHPTKAVTLVENHDSQPGQSLESVVQPWFKPLAYAFILTRAEGYPSIFYGDMYGTKGNSSYEIPALKTKIEPLLKARKDYAYGTQHNYMDHWDVIGWTREGDSTKEKSGLATLVTDGAGGSKWMYVGKQNAGEVWYDITGNRTDKITINTDGWGNFQVNGGSVSVYVQQ

SEQ ID NO: 43549 - protein, 483 aa, Bacillus sp. YR288
NGTMMQYFEWYVPNDGQHWNRLRNDAAYLKSIGVSAIWTPPAYKGTSQNDVGYGAYDLYDLGEFNQKGTIRTKYGTKAELKSAVSTLKSNGIQVYGDVVMNHKGGADYTENVTAVEVNPSNRNQETSDEYTIQAWTGFNFPGRGTTHSPFKWQWYHFDGTDWDQSRNASRIFKFRGTGKAWDWEVSSENGNYDYLMYADLDFDHPDVRNEMKNWGVWYANEVGLDGFRLDAVKHIKHSYLGDWVNHVRTKTGKEMFTVAEYWQNDVNAINNYLAKVNYNHWVFDAPLHYNFHYASQSGGNYDMRNLLNGTVVAAHPTKAVTLVENHDSQPGQSLESVVQPWFKPLAYAFILTRAEGYPSIFYGDMYGTKGNSSYEIPALKTKIEPLLKARKDYAYGTQHNYMDHPDVIGWTREGDSTKEKSGLATLVTDGSAGGSKWMYVGKQNAGEVWYDITGNRTDKITINTDGWGNFQVNGGSVSVYVQQ

SEQ ID NO: 43550 - protein, 482 aa, Bacillus sp. YR288
NGTMMQYFEWYVPNDGQHWNRLRNDAAYLKSIGVSAIWTPPAYKGTSQNDVGYGAYDLYDLGEFNQKGTIRTKYGTKAELKSAVSTLKSNGIQVYGDVVMNHKGGADYTENVTAVEVNPSNRYQETSDEYTIQAWTGFNFPGRGTTHSPFKWQWYHFDGTDWDQSRNASRIFKFRGTGKAWDWEVSSENGNYDYLMYADLDFDHPDVRNEMKNWGVWYANEVGLDGFRLDAVKHIKFSYLGDWVNHVRTKTGKEMFTVAEYWQNDVNAINNYLAKVNYNHSVFDAPLHYNFHYASQSGGNYDMRNLLNGTVVAAHPTKAVTLVENHDSQPGQSLESVVQPWFKPLAYAFILTRAEGYPSIFYGDMYGTKGNSSYEIPALKTKIEPLLKARKDYAYGTQHNYMDHWDVIGWTREGDSTKEKSGLATLVTDGAGGSKWMYVGKQNAGEVWYDITGNRTDKITINTDGWGNFQVNGGSVSVYVQQ

SEQ ID NO: 43551 - protein, 480 aa, Bacillus licheniformis
NGTLMQYFEWYMPNDGQHWRRLQNDSAYLAEHGITAVWIPPAYKGTSQADVGYGAYDLYDLGEFHQKGTVRTKYGTKGELQSAIKSLHSRDINVYGDVVINHKGGADATEDVTAVEVDPADRNRVISGEHLIKAWTHFHFPGRGSTYSDFKWHWYHFDGTDWDESRKLNRIYLFQGKAWDWPVSNENGNYDYLMYADYDYDYPDVAAEITRWGTWYANELQLDGFRLDAVTHIKFSFLRDWVNHVREKTGKEMFTVAEYWQNDLGALENYLNKTNFNHSVFDVPLHYQFHAASTQGGGYDMRKLLNGTVVSMHPLKSVTFVDNHDTQPGQSLESTVQTWFKPLAYAFILTRESGYPSVFYGDMYGTKGDSQREIPALKHKIEPILKARKQYAYGAQHDYFDHHDIVGWTREGVSSVANSGLAALITDGPGGAKWMYVGRQNAGETWHDITGNRSEPVVINSEGWGEFHVNGGSVSIYVQR

SEQ ID NO: 43552 - protein, 480 aa, Bacillus licheniformis
NGTLMQYFEWYMPNDGQHWRRLQNDSAYLAEHGITAVWIPPAYKGTSQADVGYGAYDLYDLGEFHQKGTVRTKYGTKGELQSAIKSLHSRDINVYGDVVINHKGGADATEDVTAVEVDPADRNRVISGEHLIKAWTHFHFPGRGSTYSDFKWHWYHFDGTDWDESRKLNRIYKFQGKAWDWPVSNENGNYDYLMYADIDYDHPDVAAEIKRWGTWYANELQLDGFRLDAVKHIKFYFLRDWVNHVREKTGKEMFTVAEYWQNDLGALENYLNFTNFNHSVFDVPLHYQFHAASTQGGGYDMRKLLNGTVVSKHPLKSVTFVDNHDTQPGQSLESTVQTWFKPLAYAFILTRESGYPQVFYGDMYGTKGDSQREIPALKHKIEPILKARKQYAYGAQHDYFDHHDIVGWTREGDSSVANSGLAALITDGPGGAKRMYVGRQNAGETWHDITGNRSEPVVINSEGWGEFHVNGGSVSIYVQR

SEQ ID NO: 43553 - protein, 482 aa, Bacillus sp. YR288
NGTMMQYFEWYVPNDGQHWNRLRNDAAYLKSIGVSAIWTPPAYKGTSQNDVGYGAYDLYDLGEFNQKGTIRTKYGTKAELKSAVSTLKSNGIQVYGDVVMNHKGGADYTENVTAVEVNPSNRNQETSDEYTIQAWTGFNFPGRGTTHSPFKWQWYHFDGTDWDQSRNASRIFKFRGTGKAWDWEVSSENGNYDYLMYADLDFDHPDVRNEMKNWGVWYANEVGLDGFRLDAVKHIKHAYLGDWVNHVRTKTGKEMFTVAEYWQNDVNAINNYLAKVNYNHSVFDAPLHYNFHYASQSGGNYDMRNLLNGTVVAAHPTKAVTLVENHDSQPGQSLESVVQPWFKPLAYAFILTRAEGYPSIFYGDMYGTKGNSSYEIPALKTKIEPLLKARKDYAYGTQHNYMDHWDVIGWTREGDSTKEKSGLATLVTDGAGGSKWMYVGKQNAGEVWYDITGNRTDKITINTDGWGNFQVNGGSVSVYVQQ

SEQ ID NO: 43554 - protein, 482 aa, Bacillus sp. YR288
NGTMMQYFEWYVPNDGQHWNRLRNDAAYLKSIGVSAIWTPPAYKGTSQNDVGYGAYDLYDLGEFNQKGTIRTKYGTKAELKSAVSTLKSNGIQVYGDVVMNHKGGADYTENVTAVEVNPSNRNQETSDEYTIQAWTGFNFPGRGTTHSPFKWQWYHFDGTDWDQSRNASRIFKFRGTGKAWDWEVSSENGNYDYLMYADLDFDHPDVRNEMKNWGVWYANEVGLDGFRLDAVKHIKHSYLGDWVNHVRTKTGKEMFTVAEYWQNDVNAINNYLAKVNYNQSVFDAPLHYNFHYASQSGGNYDMRNLLNGTVVAAHPTKAVTLVENHDSQPGQSLESVVQPWFKPLAYAFILTRAEGYPSIFYGDMYGTKGNSSYEIPALKTKIEPLLKARKDYAYGTQHNYMDHWDVIGWTREGDSTKEKSGLATLVTDGAGGSKWMYVGKQNAGEVWYDITGNRTDKITINTDGWGNFQVNGGSVSVYVQQ

SEQ ID NO: 43555 - protein, 482 aa, Bacillus sp. YR288
NGTMMQYFEWYVPNDGQHWNRLRNDAAYLKSIGVSAIWTPPAYKGTSQNDVGYGAYDLYDLGEFNQKGTIRTKYGTKAELKSAVSTLKSNGIQVYGDVVMNHKGGADYTENVTAVEVNPSNRNQETSDEYTIQAWTGFNFPGRGTTHSPFKWQWYHFDGTDWDQSRNASRIFKFRGTGKAWDWEVSSENGNYDYLMYADLDFDHPDVRNEMKNWGVWYANEVGLDGFRLDAVKHIKHSYLGDWVNHVRTKTGKEMFTVAEYWQNDVNAINNYLAKVNYNHSVFDAPLHYNFHYASQSGGNYDMRNLLNGTVVAAHPTKAVTLVENHDSQPGQSLESVVQPWFKPLAYAFILTRAEGYPSIFYGDMYGTKGNSSYEIPALKTKIEPLLKARKDYAYGTQHNYMDHWDVIGWTREGDSTKEKSGLATLVTDGAGGSKWMYVGKQNAGEVWYDITGNRTDKITINTDGWGNFQVNGESVSVYVQQ

SEQ ID NO: 43556 - protein, 482 aa, Bacillus sp. YR288
NGTMMQYFEWYVPNDGQHWNRLRNDAAYLKSIGVSAIWTPPAYKGTSQNDVGYGAYDLYDLGEFNQKGTIRTKYGTKAELKSAVSTLKSNGIQVYGDVVMNHKGGADYTENVTAVEVNPSNRNQETSDEYTIQAWTGFNFPGRGTTHSPFKWQWYHFDGTDWDQSRNASRIFKFRGTGKAWDWEVSSENGNYDYLMYADLDFDHPDVRNEMKNWGVWYANEVGLDGFRLDAVKHIKHSYLGDWVNHVRTKTGKEMFTVAEYWQNDVNAINNYLAKVNYNHSVFDAPLHYNFHYASQSGGNYDMRNLLNGTVVAAHPTKAVTLVENHDSQPGQSLESVVQPWFKPLAYAFILTRAEGYPSIFYGDMYGTKGNSSYEIPALKTKIEPLLKARKDYAYGTQHNYMDHWDVIGWTREGDSTKEKSGLATLVTDGAGGSKWMYVGKQNAGEVWYDITGNRTDKITINTDGWGNFQVNAGSVSVYVQQ

SEQ ID NO: 43557 - protein, 480 aa, Bacillus licheniformis
NGTLMQYFEWYMPNDGQHWRRLQNDSAYLAEHGITAVWIPPAYKGISQADVGYGAYDLYDLGEFHQKGTVRTKYGTKGELQSAIKSLHSRDINVYGDVVINHKGGADATEDVTAVEVDPADRNRVISGEHLIKAWTHFHFPGRGSTYSDFKWHWYHFDGTDWDESRKLNRIYRFQGKAWDWEVSNENGNYDYLMYADIDYDHPVVAAEIKRWGTWYANELQLDGFRLDAVKHIKFSFLRDWVNHVREKTGKEMFTVAEYWQNDLGALENYLNKTNFNHSVFDVPLHYQFHAASTQGGGYDMRKLLNGTVVSKHPLKSVTFVDNHDTQPGQSLESTVQTWFKPLAYAFILTRESGYPQVFYGDMYGTKGDSQREIPALKHKIEPILKARKQYAYGAQHDFFDHHDIVGWTREGDSSVANSGLAALITDGPGGAKRMYVGRQNAGETWHDITGNRSEPVVINSEGWGEFHVNGGSVSIYVQR

SEQ ID NO: 43558 - protein, 482 aa, Bacillus sp. YR288
NGTMMQYFEWYVPNDGQHWNRLRNDAAYLKSIGVSAIWTPPAYKGTSQNDVGYGAYDLYDLGEFNQKGTIRTKYGTKAELKSAVSTLKSNGIQVYGDVVMNHKGGADYTENVTAVEVNPSNRNQETSDEYTIQAWTGFNFPGRGTTHSPFKWQWYHFDGTDWDQSRNASRIFKFRGTGKAWDWEVSSENGNYDYLMGADLDFDHPDVRNEMKNWGVWYANEVGLDGFRLDAVKHIKHSYLGDWVNHVRTKTGKEMFTVAEYWQNDVNAINNYLAKVNYNHSVFDAPLHYNFHYASQSGGNYDMRNLLNGTVVAAHPTKAVTLVENHDSQPGQSLESVVQPWFKPLAYAFILTRAEGYPSIFYGDMYGTKGNSSYEIPALKTKIEPLLKARKDYAYGTQHNYMDHWDVIGWTREGDSTKEKSGLATLVTDGAGGSKWMYVGKQNAGEVWYDITGNRTDKITINTDGWGNFQVNGGSVSVYVQQ

SEQ ID NO: 43559 - protein, 480 aa, Bacillus licheniformis
NGTLMQYFEWYMPNDGQHWRRLQNDSAYLAEHGITAVWIPPAYKGTSQADVGYGAYDLYDLGEFHQKGTVRTKYGTKGELQSAIKSLHSRDINVYGDVVINHKGGADATEDVTAVEVDPADRNRVISGEHLIKAWTHFHFPGRGSTYSDFKWHWYHFDGTDWDESRKLNRIYKFQGKAWDWPVSNENGNYDYLMYADIDYDHPDVAAEIKRWGTWYANELQLDGFRLDAVKHIKFYFLRDWVNHVREKTGKEMFTVAEYWQNDLGALENYLNITNFNHSVFDVPLHYQFHAASTQGGGYDMRKLLNGTVVSKHPLKSVTFVDNHDTQPGQSLESTVQTWFKPLAYAFILTRESGYPQVFYGDMYGTKGDSQREIPALKHKIEPILKARKQYAYGAQHDYFDHHDIVGWTREGDSSVANSGLAALITDGPGGAKRMYVGRQNAGETWHDITGNRSEPVVINSEGWGEFHVNGGSVSIYVQR

SEQ ID NO: 43560 - protein, 482 aa, Bacillus sp. YR288
NGTMMQYFEWYVPNDGQHWNRLRNDAAYLKSIGVSAIWTPPAYKGTSQNDVGYGAYDLYDLGEFNQKGTIRTKYGTKAELKSAVSTLKSNGIQVYGDVVMNHKGGADYTENVTAVEVNPSNRNQETSDEYTIQAWTGFNFPGRGTTHSPFKWQWYHFDGTDWDQSRNASRIFKFRGTGKAWDWEVSSENGNYDYLMYADLDFRHPDVRNEMKNWGVWYANEVGLDGFRLDAVKHIKHSYLGDWVNHVRTKTGKEMFTVAEYWQNDVNAINNYLAKVNYNHSVFDAPLHYNFHYASQSGGNYDMRNLLNGTVVAAHPTKAVTLVENHDSQPGQSLESVVQPWFKPLAYAFILTRAEGYPSIFYGDMYGTKGNSSYEIPALKTKIEPLLKARKDYAYGTQHNYMDHWDVIGWTREGDSTKEKSGLATLVTDGAGGSKWMYVGKQNAGEVWYDITGNRTDKITINTDGWGNFQVNGGSVSVYVQQ

SEQ ID NO: 43561 - protein, 482 aa, Bacillus sp. YR288
NGTMMQYFEWYVPNDGQHWNRLRNDAAYLKSIGVNAIWTPPAYKGTSQNDVGYGAYDLYDLGEFNQKGTIRTKYGTKAELKSAVSTLKSNGIQVYGDVVMNHKGGADYTENVTAVEVNPSNRNQETSDEYTIQAWTGFNFPGRGTTHSPFKWQWYHFDGTDWDQSRNASRIFKFRGTGKAWDWEVSSENGNYDYLMYADLDFDHPDVRNEMKNWGVWYANEVGLDGFRLDAVKHIKHSYLGDWVNHVRTKTGKEMWTVAEYWQNDVNAINNYLAKVNYNHSVFDAPLHYNFHYASQSGGNYDMRNLLNGTVVAAHPTKAVTLVENHDSQPGQSLESVVQPWFKPLAYAFILTRAEGYPSIFYGDMYGTKGNSSYEIPALKTKIEPLLKARKDYAYGTQHNYMDHWDVIGWTREGDSTKEKSGLATLVTDGAGGSKWMYVGKQNAGEVWYDITGNRTDKITINTDGWGNFQVNGGSVSVYVQQ

SEQ ID NO: 43562 - protein, 480 aa, Bacillus licheniformis
NGTLMQYFEWYMPNDGQHWRRLQNDSAYLAEHGITAVWIPPAYKGTSQADVGYGAYDLYDLGEFHQKGTVRTKYGTKGELQSAIKSLHSRDINVYGDVVINHKGGADATEDVTAVEVDPADRNRVISGEHLIKAWTHFHFPGRGSTYSDFKWHWYHFDGTDWDESRKLNRIYKFQGKAWDWPVSNENGNYDYLMYADIDYDHPDVAAEIKRWGTWYANELQLDGFRLDAVKHIKFFFLRDWVNHVREKTGKEMFTVAEYWQNDLGALENYLNWTNFNHSVFDVPLHYQFHAASTQGGGYDMRKLLNGTVVSKHPLKSVTFVDNHDTQPGQSLESTVQTWFKPLAYAFILTRESGYPQVFYGDMYGTKGDSQREIPALKHKIEPILKARKQYAYGAQHDYFDHHDIVGWTREGDSSVANSGLAALITDGPGGAKRMYVGRQNAGETWHDITGNRSEPVVINSEGWGEFHVNGGSVSIYVQR

SEQ ID NO: 43563 - protein, 482 aa, Bacillus sp. YR288
NGTMMQYFEWYVPNDGQHWNRLRNDAAYLKSIGVSAIWTPPAYKGTSQNDVGYGAYDLYDLGEFNQKGTIRTKYGTKAELKSAVSTLKSNGIQVYGDVVMNHKGGADYTENVTAVEVNPSNRNQETSDEYTIQAWTGFNFPGRGTTHSPFKWQWYHFDGTDWDQSRNASRIFKFRGTGKAWDWEVSSENGNYDYLMYADLDFDHPDVRNEMKNWGVWYANEVGLDGFRLDAVKHIKHDYLGDWVNHVRTKTGKEMFTVAEYWQNDVNAINNYLAKVNYNHSVFDAPLHYNFHYASQSGGNYDMRNLLNGTVVAAHPTKAVTLVENHDSQPGQSLESVVQPWFKPLAYAFILTRAEGYPSIFYGDMYGTKGNSSYEIPALKTKIEPLLKARKDYAYGTQHNYMDHWDVIGWTREGDSTKEKSGLATLVTDGAGGSKWMYVGKQNAGEVWYDITGNRTDKITINTDGWGNFQVNGGSVSVYVQQ

SEQ ID NO: 43564 - protein, 482 aa, Bacillus sp. YR288
NGTMMQYFEWYVPNDGQHWNRLRNDAAYLKSIGVSAIWTPPAYKGTSQNDVGYGAYDLYDLGEFNQKGTIRTKYGTKAELKSAVSTLKSNGIQVYGDVVMNHKGGADYTENVTAVEVNPSNRNQETSDEYTIQAWTGFNFPGRGTTHSPFKWQWYHFDGTDWDQSRNASRIFKFRGTGKAWDWEVSSENGNYDYLMYADLDFDHPDVRNEMKNWGVWYANEVGLDGFRLDAVKHIKHSYLGDWVNHVRTKTGKEMFTVAEYWQNDVNAINNYLAKVNYNHSVFDAPLHYNFHYASQSGGNYDMRNLLNGTVVAAHPTKAVTLVENHDSQPGQSLESVVQPWFKPLAYAFILTRAEGYPSIFYGDMYGTKGNSSYEIPALKTKIEPLLKARKDYAYGTQHNYMDHWDVIGWTREGDSTKEKSGLATLVTDGAGGSKWMYVGKQNAGEVWYDITGNRTDKITINTDGWGNFQVNFGSVSVYVQQ

SEQ ID NO: 43565 - protein, 482 aa, Bacillus sp. YR288
NGTMMQYFEWYVPNDGQHWNRLRNDAAYLKSIGVSAIWTPPAYKGTSQNDVGYGAYDLYDLGEFNQKGTIRTKYGTKAELKSAVSTLKSNGIQVYGDVVMNHKGGADYTENVTAVEVNPSNRNQETSDEYTIQAWTGFNFPGRGTTHSPFKWQWYHFDGTDWDESRNASRIFKFRGTGKAWDWEVSSENGNYDYLMYADLDFDHPDVRNEMKNWGVWYANEVGLDGFRLDAVKHIKHSYLGDWVNHVRTKTGKEMFTVAEYWQNDVNAINNYLAKVNYNHSVFDAPLHYNFHYASQSGGNYDMRNLLNGTVVAAHPTKAVTLVENHDSQPGQSLESVVQPWFKPLAYAFILTRAEGYPSIFYGDMYGTKGNSSYEIPALKTKIEPLLKARKDYAYGTQHNYMDHWDVIGWTREGDSTKEKSGLATLVTDGAGGSKWMYVGKQNAGEVWYDITGNRTDKITINTDGWGNFQVNGGSVSVYVQQ

SEQ ID NO: 43566 - protein, 482 aa, Bacillus sp. YR288
NGTMMQYFEWYVPNDGQHWNRLRNDAAYLKSIGVSAIWTPPAYKGTSQNDVGYGAYDLYDLGEFNQKGTIRTKYGTKAELKSAVSTLKSNGIRVYGDVVMNHKGGADYTENVTAVEVNPSNRNQETSDEYTIQAWTGFNFPGRGTTHSPFKWQWYHFDGTDWDQSRNASRIFKFRGTGKAWDWEVSSENGNYDYLMYADLDFDHPDVRNEMKNWGVWYANEVGLDGFRLDAVKHIKHSYLGDWVNHVRTKTGKEMFTVAEYWQNDVNAINNYLAKVNYNHSVFDAPLHYNFHYASQSGGNYDMRNLLNGTVVAAHPTKAVTLVENHDSQPGQSLESVVQPWFKPLAYAFILTRAEGYPSIFYGDMYGTKGNSSYEIPALKTKIEPLLKARKDYAYGTQHNYMDHWDVIGWTREGDSTKEKSGLATLVTDGAGGSKWMYVGKQNAGEVWYDITGNRTDKITINTDGWGNFQVNGGSVSVYVQQ

SEQ ID NO: 43567 - protein, 482 aa, Bacillus sp. YR288
NGTMMQYFEWYVPNDGQHWNRLRNDAAYLKSIGVSAIWTPPAYKGTSQNDVGYGAYDLYDLGEFNQKGTIRTKYGTKAELKSAVSTLKSNGIQVYGDVVMNHKGGADYTENVTAVEVNPSNRNQETSDEYTIQAWTGFNFPGRGTTHSPFKWQWYHFDGTDWDQSRNASRIFKFRGTGKAWDWEVSSENGNYDYLQYADLDFDHPDVRNEMKNWGVWYANEVGLDGFRLDAVKHIKHSYLGDWVNHVRTKTGKEMFTVAEYWQNDVNAINNYLAKVNYNHSVFDAPLHYNFHYASQSGGNYDMRNLLNGTVVAAHPTKAVTLVENHDSQPGQSLESVVQPWFKPLAYAFILTRAEGYPSIFYGDMYGTKGNSSYEIPALKTKIEPLLKARKDYAYGTQHNYMDHWDVIGWTREGDSTKEKSGLATLVTDGAGGSKWMYVGKQNAGEVWYDITGNRTDKITINTDGWGNFQVNGGSVSVYVQQ

SEQ ID NO: 43568 - protein, 480 aa, Bacillus licheniformis
NGTLMQYFEWYMPNDGQHWRRLQNDSAYLAEHGITAVWIPPAYKGGSQADVGYGAYDLYDLGEFHQKGTVRTKYGTKGELQSAIKSLHSRDINVYGDVVINHKGGADATEDVTAVEVDPADRNRVISGEHLIKAWTHFHFPGRGSTYSDFKWHWYHFDGTDWDESRKLNRIYLFQGKAWDWPVSNENGNYDYLMYADIDYDHPDVAAEIKRWGTWYANELQLDGFRLDAVKHIKFSFLRDWVNHVREKTGKEMFTVAEYWQNDLGALENYLNKTNFNHSVFDVPLHYQFHAASTQGGGYDMRKLLNGTVVSKHPLKSVTFVDNHDTQPGQSLESTVQTWFKPLAYAFILTRESGYPQVFYGDMYGTKGDSQREIPALKHKIEPILKARKQYAYGAQHDYFDHHDIVGWTREGDSSVANSGLAALITDGPGGAKRMYVGRQNAGETWHDITGNRSEPVVINSEGWGEFHVNGGSVSIYVQR

SEQ ID NO: 43569 - protein, 482 aa, Bacillus sp. YR288
NGTMMQYFEWYVPNDGQHWNRLRNDAAYLKSIGVSAIWTPPAYKGTSQNDVGYGAYDLYDLGEFNQKGTIRTKYGTKAELKSAVSTLKSNGIQVYGDVVMNHKGGADYTENVTAVEVNPSNRNQETSDEYTIQAWTWFNFPGRGTTHSPFKWQWYHFDGTDWDQSRNASRIFKFRGTGKAWDWPVSSENGNYDYLMYADLDFDHPDVRNEMKNWGVWYANEVGLDGFRLDAVKHIKHSYLGDWVNHVRTKTGKEMFTVAEYWQNDVNAINNYLAKVNYNHSVFDAPLHYNFHYASQSGGNYDMRNLLNGTVVAAHPTKAVTLVENHDSQPGQSLESVVQPWFKPLAYAFILTRAEGYPSIFYGDMYGTKGNSSYEIPALKTKIEPLLKARKDYAYGTQHNYMDHWDVIGWTREGDSTKEKSGLATLVTDGAGGSKWMYVGKQNAGEVWYDITGNRTDKITINTDGWGNFQVNGGSVSVYVQQ

SEQ ID NO: 43570 - protein, 482 aa, Bacillus sp. YR288
NGTMMQYFEWYVPNDGQHWNRLRNDAAYLKSIGVSAIWTPPAYKGTSQNDVGYGAYDLYDLGEFNQKGTIRTKYGTKAELKSAVSTLKSNGIQVYGDVVMNHKGGADYTENVTAVEVNPSNRNQETSDEYTIQAWTGFNFPGRGTTHSPFKWQWYHFDGTDWDQSRNASRIFKFRGTGKAWDWEVSSENGNYDYLMYADLDFDHPDVRNEMKNWGVWYANEVGLDGFRLDAVKHIKHSYLGDWVNHVRTKTGKEMFTVAEYWQNDVNAINNYLAKVNYNHSVFDAPLHYNFHYASQSGGEYDMRNLLNGTVVAAHPTKAVTLVENHDSQPGQSLESVVQPWFKPLAYAFILTRAEGYPSIFYGDMYGTKGNSSYEIPALKTKIEPLLKARKDYAYGTQHNYMDHWDVIGWTREGDSTKEKSGLATLVTDGAGGSKWMYVGKQNAGEVWYDITGNRTDKITINTDGWGNFQVNGGSVSVYVQQ

SEQ ID NO: 43571 - protein, 482 aa, Bacillus sp. YR288
NGTMMQYFEWYVPNDGQHWNRLRNDAAYLKSIGVNAIWTPPAYKGTSQNDVGYGAYDLYDLGEFNQKGTIRTKYGTKAELKSAVSTLKSNGIQVYGDVVMNHKGGADYTENVTAVEVNPSNRNQETSDEYTIQAWTGFNFPGRGTTHSPFKWQWYHFDGTDWDQSRNASRIFKFRGTGKAWDWEVSSENGNYDYLMYADLDFDHPDVRNEMKNWGVWYANEVGLDGFRLDAVKHIKHSYLGDWVNHVRTKTGKEMFTVAEYWQNDVNAINNYLAKVNYNHSVFDAPLHYNFHYASQSGGNYDMRNLLNGTVVAAHPTKAVTLVENHDSQPGQSLESVVQPWFKPLAYAFILTRAEGYPSIFYGDMYGTKGNSSYEIPALKTKIEPLLKARKDYAYGTQHNYMDHWDVIGWTREGDSTKEKSGLATLVTDGAGGSKWMYVGKQNAGEVWYDITGNRTDKITINTDGWGNFQVNEGSVSVYVQQ

SEQ ID NO: 43572 - protein, 482 aa, Bacillus sp. YR288
NGTMMQYFEWYVPNDGQHWNRLRNDAAYLKSIGVSAIWTPPAYKGTSQNDVGYGAYDLYDLGEFNQKGTIRTKYGTKAELKSAVSTLKSNGIQVYGDVVMNHKGGADYTENVTAVEVNPSNRNQEISDEYTIQAWTGFNFPGRGTTHSPFKWQWYHFDGTDWDQSRNASRIFKFRGTGKAWDWPVSSENGNYDYLMYADLDFDHPDVRNEMKNWGVWYANEVGLDGFRLDAVKHIKHSYLWDWVNHVRTKTGKEMFTVAEYWQNDVNAINNYLAKVNYNHSVFDAPLHYNFHYASQSGGNYDMRNLLNGTVVAAHPTKAVTLVENHDTQPGQSLESVVQPWFKPLAYAFILTRAEGYPSIFYGDMYGTKGNSSYEIPALKTKIEPLLKARKDYAYGTQHNYMDHWDVIGWTREGDSTKEKSGLATLVTDGAGGSKWMYVGKQNAGEVWYDITGNRTDKITINTDGWGNFQVNGGSVSVYVQQ

SEQ ID NO: 43573 - protein, 482 aa, Bacillus sp. YR288
NGTMMQYFEWYVPNDGQHWNRLRNDAAYLKSIGVSAIWTPPAYKGTSQNDVGYGAYDLYDLGEFNQKGTIRTKYGTKAELKSAVSTLKSNGIQVYGDVVMNHKGGADYTENVTAVEVNPSNRNQETSDEYTIQAWTGFNFPGRGTTHSPFKWQWYHFDGTDWDQSRNASRIFKFRGTGKAWDWPVSSENGNYDYLMYADLDYDHPDVRNEMKNWGVWYANEVGLDGFRLDAVKHIKHSYLGDWVNHVRTKTGKEMFTVAEYWQNDVNAINNYLAKVNYNHSVFDAPLHYNFHYASQSGGNYDMRNLLNGTVVAAHPTKAVTLVENHDSQPGQSLESVVQPWFKPLAYAFILTRAEGYPSIFYGDMYGTKGNSSYEIPALKTKIEPLLKARKDYAYGTQHNYMDHWDVIGWTREGDSTKEKSGLATLVTDGAGGSKWMYVGKQNAGEVWYDITGNRTDKITINTDGWGNFQVNGGSVSVYVQQ

SEQ ID NO: 43574 - protein, 480 aa, Bacillus licheniformis
NGTLMQYFEWYMPNDGQHWRRLQNDSAYLAEHGITAVWIPPAYKGTSQADVGYGAYDLYDLGEFHQKGTVRTKYGTKGELQSAIKSLHSRDINVYGDVVINHKGGADATEDVTAVEVDPADRNRVISGEHLIKAWTHFHFPGRGSTYSDFKWHWYHFDGTDWDESRKLNRIYKFQGKAWDWPVSNENGNYDYLMYADIDYDHPDVAAEIKRWGTWYANELQLDGFRLDAVKHIKFHFLRDWVNHVREKTGKEMFTVAEYWQNDLGALENYLNWTNFNHSVFDVPLHYQFHAASTQGGGYDMRKLLNGTVVSKHPLKSVTFVDNHDTQPGQSLESTVQTWFKPLAYAFILTRESGYPQVFYGDMYGTKGDSQREIPALKHKIEPILKARKQYAYGAQHDYFDHHDIVGWTREGDSSVANSGLAALITDGPGGAKRMYVGRQNAGETWHDITGNRSEPVVINSEGWGEFHVNGGSVSIYVQR

SEQ ID NO: 43575 - protein, 482 aa, Bacillus sp. YR288
NGTMMQYFEWYVPNDGQHWNRLRNDAAYLKSIGVSAIWTPPAYKGTSQNDVGYGAYDLYDLGEFNQKGTIRTKYGTKAELKSAVSTLKSNGIQVYGDVVMNHKGGADYTENVTAVEVNPSNRNQETSDEYTIQAWTGFNFPGRGTTHSPFKWQWYHFDGTDWDQSRNASRIFKFRGTGKAWDWEVSSENGNYDYLMYADLDFDHPDVRNEMKNWGVWYANEVGLDGFRLDAVKHIKHSYLGDWVNHVRTKTGKEMFTVAEYWQNDVNAINNYLAKVNYNHSVFDAPLHYNFHYASQSGGNYDMRNLLNGTVVAAHPTKAVTLVENHDSQPGQSLESVVQPWFKPLAYAFILTRAEGYPSIFYGDMYGTKGNSSYEIPALKTKIEPLLKARKDYAYGTQHNYMDHWDVIGWTREGDSTKEKSGLATLVTDGAGGSKWMYVGKQNAGEVWYDITGNRTDKITINTDGWGNFQVNEGSVSVYVQQ

SEQ ID NO: 43576 - protein, 483 aa, Bacillus sp. YR288
NGTMMQYFEWYVPNDGQHWNRLRNDAAYLKSIGVSAIWTPPAYKGTSQNDVGYGAYDLYDLGEFNQKGTIRTKYGTKAELKSAVSTLKSNGIQVYGDVVMNHKGGADYTENVTAVEVNPSNRNQETSDEYTIQAWTGFNFPGRGTTHSPFKWQWYHFDGTDWDQSRNASRIFKFRGTGKAWDWEVSSENGNYDYLMYADLDFDHPDVRNEMKNWGVWYANEVGLDGFRLDAVKHIKHSYLGDWVNHVRTKTGKEMFTVAEYWQNDVNAINNYLAKVNYNHSVFDAPLHYNFHYASQSGGNYDMRNLLNGTVVAAHPEKAVTLVENHDSQPGQSLESVVQPWFKPLAYAFILTRAEGYPSIFYGDMYGTKGNSSYEIPALKTKIEPLLKARKDYAYGTQHNYMDHWDVIGWTREGDSTKEKSGLATLVTDGSAGGSKWMYVGKQNAGEVWYDITGNRTDKITINTDGWGTFQVNGGSVSVYVQQ

SEQ ID NO: 43577 - protein, 482 aa, Bacillus sp. YR288
NGTMMQYFEWYVPNDGQHWNRLRNDAAYLKSIGVSAIWTPPAYKGTSQNDVGYGAYDLYDLGEFNQKGTIRTKYGTKAELKSAVSTLKSNGIQVYGDVVMNHKGGADYTENVTAVEVNPSNRNQETSDEYTIQAWTGFNFPGRGTTHSPFKWQWYHFDGTDWDQSRNASRIFKFRGTGKAWDWPVSSENGNYDYLMYADLDFDHPDVRNEMKNWGVWYANEVGLDGFRLDAVKHIKFSYLGDWVNHVRTKTGKEMFTVAEYWQNDVNAINNYLAKVNYNHSVFDAPLHYNFHYASQSGGNYDMRNLLNGTVVAAHPTKAVTLVENHDSQPGQSLESVVQPWFKPLAYAFILTRAEGYPSIFYGDMYGTKGNSSYEIPALKTKIEPLLKARKDYAYGTQHNYMDHWDVIGWTREGDSTKEKSGLATLVTDGAGGSKWMYVGKQNAGEVWYDITGNRTDKITINTDGWGNFQVNGGSVSVYVQQ

SEQ ID NO: 43578 - protein, 482 aa, Bacillus sp. YR288
NGTMMQYFEWYVPNDGQHWNRLRNDAAYLKSIGVSAIWTPPAYKGTSQNDVGYGAYDLYDLGEFNQKGTIRTKYGTKAELKSAVSTLKSNGIQVYGDVVMNHKGGADYTENVTAVEVNPSNRNQETSDEYTIQAWTGFNFPGRGTTHSPFKWQWYHFDGTDWDQSRNASRIFKFRGTGKAWDWPVSSENGNYDYLMYADLDFDHPDVINEMKNWGVWYANEVGLDGFRLDAVKHIKHSYLGDWVNHVRTKTGKEMFTVAEYWQNDVNAINNYLAKVNYNHSVFDAPLHYNFHYASQSGGNYDMRNLLNGTVVAAHPTKAVTLVENHDSQPGQSLESVVQPWFKPLAYAFILTRAEGYPSIFYGDMYGTKGNSSYEIPALKTKIEPLLKARKDYAYGTQHNYMDHWDVIGWTREGDSTKEKSGLATLVTDGAGGSKWMYVGKQNAGEVWYDITGNRTDKITINTDGWGNFQVNGGSVSVYVQQ

SEQ ID NO: 43579 - protein, 482 aa, Bacillus sp. YR288
NGTMMQYFEWYVPNDGQHWNRLRNDAAYLKSIGVSAIWTPPAYKGTSQNDVGYGAYDLYDLGEFNQKGTIRTKYGTKAELKSAVSTLKSNGIQVYGDVVMNHKGGADYTENVTAVEVNPSNRNQETSDEYTIQAWTGFNFPGRGTTHSPFKWQWYHFDGTDWDQSRNASRIFKFRGTGKAWDWPVSSEFGNYDYLMYADLDYDHPDVRNEMKNWGVWYANEVGLDGFRLDAVKHIKHSFLGDWVNHVRTKTGKEMFTVAEYWQNDVNAINNYLAKVNYNHSVFDAPLHYNFHYASQSGGNYDMRNLLNGTVVAAHPTKAVTLVENHDSQPGQSLESVVQPWFKPLAYAFILTRAEGYPSIFYGDMYGTKGNSSYEIPALKTKIEPLLKARKDYAYGTQHNYMDHWDVIGWTREGDSTKEKSGLATLVTDGAGGSKWMYVGKQNAGEVWYDITGNRTDKITINTDGWGNFQVNGGSVSVYVQQ

SEQ ID NO: 43580 - protein, 482 aa, Bacillus sp. YR288
NKTMMQYFEWYVPNDGQHWNRLRNDAAYLKSIGVSAIWTPPAYKGTSQNDVGYGAYDLYDLGEFNQKGTIRTKYGTKAELKSAVSTLKSNGIQVYGDVVMNHKGGADYTENVTAVEVNPSNRNQETSDEYTIQAWTGFNFPGRGTTHSPFKWQWYHFDGTDWDQSRNASRIFKFRGTGKAWDWEVSSENGNYDYLMYADLDFDHPDVRNEMKNWGVWYANEVGLDGFRLDAVKHIKHSYLGDWVNHVRTKTGKEMFTVAEYWQNDVNAINNYLAKVNYNHSVFDAPLHYNFHYASQSGGNYDMRNLLNGTVVAAHPTKAVTLVENHDSQPGQSLESVVQPWFKPLAYAFILTRAEGYPSIFYGDMYGTKGNSSYEIPALKTKIEPLLKARKDYAYGTQHNYMDHWDVIGWTREGDSTKEKSGLATLVTDGAGGSKWMYVGKQNAGEVWYDITGNRTDKITINTDGWGNFQVNGGSVSVYVQQ

SEQ ID NO: 43581 - protein, 482 aa, Bacillus sp. YR288
NGTMMQYFEWYVPNDGQHWNRLRNDAAYLKSIGVSAIWTPPAYKGTSQNDVGYGAYDLYDLGEFNQKGTIRTKYGTKAELKSAVSTLKSNGIKVYGDVVMNHKGGADYTENVTAVEVNPSNRNQETSDEYTIQAWTGFNFPGRGTTHSPFKWQWYHFDGTDWDQSRNASRIFKFRGTGKAWDWEVSSENGNYDYLMYADLDFDHPDVRNEMKNWGVWYANEVGLDGFRLDAVKHIKHSYLGDWVNHVRTKTGKEMFTVAEYWQNDVNAINNYLAKVNYNHSVFDAPLHYNFHYASQSGGNYDMRNLLNGTVVAAHPTKAVTLVENHDSQPGQSLESVVQPWFKPLAYAFILTRAEGYPSIFYGDMYGTKGNSSYEIPALKTKIEPLLKARKDYAYGTQHNYMDHWDVIGWTREGDSTKEKSGLATLVTDGAGGSKWMYVGKQNAGEVWYDITGNRTDKITINTDGWGNFQVNGGSVSVYVQQ

SEQ ID NO: 43582 - protein, 482 aa, Bacillus sp. YR288
NGTMMQYFEWYVPNDGQHWNRLRNDAAYLKSIGVSAIWTPPAYKGTSQNDVGYGAYDLYDLGEFNQKGTIRTKYGTKAELKSAVSTLKSNGIQVYGDVVMNHKGGADYTENVTAVEVNPSNRNQETSDEYTIQAWTGFNFPGRGTTHSPFKWQWYHFDGTDWDQSRNASRIFKFRGTGKAWDWEVSSENGNYDYLMYADLDFNHPDVRNEMKNWGVWYANEVGLDGFRLDAVKHIKHSYLGDWVNHVRTKTGKEMFTVAEYWQNDVNAINNYLAKVNYNHSVFDAPLHYNFHYASQSGGNYDMRNLLNGTVVAAHPTKAVTLVENHDSQPGQSLESVVQPWFKPLAYAFILTRAEGYPSIFYGDMYGTKGNSSYEIPALKTKIEPLLKARKDYAYGTQHNYMDHWDVIGWTREGDSTKEKSGLATLVTDGAGGSKWMYVGKQNAGEVWYDITGNRTDKITINTDGWGNFQVNGGSVSVYVQQ

SEQ ID NO: 43583 - protein, 482 aa, Bacillus sp. YR288
NGTMMQYFEWYVPNDGQHWNRLRNDAAYLKSIGVSAIWTPPAYKGTSQNDVGYGAYDLYDLGEFNQKGTIRTKYGTKAELKSAVSTLKSNGIQVYGDVVMNHKGGADYTENVTAVEVNPSNRNQETSDEYTIQAWTGFNFPGRGTTHSPFKWQWYHFDGTDWDQSRNASRIFKFRGTGKAWDWEVSSEEGNYDYLMYADLDYDHPDVINEMKNWGVWYANEVGLDGFRLDAVKHIKFQFLGDWVNHVRTKTGKEMFTVAEYWQNDVNAINNYLAKVNYNHSVFDAPLHYNFHYASQSGGNYDMRNLLNGTVVAAHPTKAVTLVENHDSQPGQSLESVVQPWFKPLAYAFILTRAEGYPSIFYGDMYGTKGNSSYEIPALKTKIEPLLKARKDYAYGTQHNYMDHWDVIGWTREGDSTKEKSGLATLVTDGAGGSKWMYVGKQNAGEVWYDITGNRTDKITINTDGWGNFQVNGGSVSVYVQQ

SEQ ID NO: 43584 - protein, 482 aa, Bacillus sp. YR288
NGTMMQYFEWYVPNDGQHWNRLRNDAAYLKSIGVSAIWTPPAYKGTSQNDVGYGAYDLYDLGEFNQKGTIRTKYGTKAELKSAVSTLKSNGIQVYGDVVMNHKGGADYTENVTAVEVNPSNRNQETSDEYTIQAWTGFNFPGRGTTHSPFKWQWYHFDGTDWDQSRNASRIFKFRGTGKAWDWPVSSEFGNYDYLMYADLDFDHPDVRNEMKNWGVWYANEVGLDGFRLDAVKHIKHSFLGDWVNHVRTKTGKEMFTVAEYWQNDVNAINNYLAKVNYNHSVFDAPLHYNFHYASQSGGNYDMRNLLNGTVVAAHPTKAVTLVENHDSQPGQSLESVVQPWFKPLAYAFILTRAEGYPSIFYGDMYGTKGNSSYEIPALKTKIEPLLKARKDYAYGTQHNYMDHWDVIGWTREGDSTKEKSGLATLVTDGAGGSKWMYVGKQNAGEVWYDITGNRTDKITINTDGWGNFQVNGGSVSVYVQQ

SEQ ID NO: 43585 - protein, 482 aa, Bacillus sp. YR288
NGTMMQYFEWYVPNDGQHWNRLRNDAAYLKSIGVSAIWTPPAYKGTSQNDVGYGAYDLYDLGEFNQKGTIRTKYGTKAELKSAVSTLKSNGIQVYGDVVMNHKGGADYTENVTAVEVNPSNRNQETSDEYTIQAWTGFNFPGRGTTHSPFKWQWYHFDGTDWDQSRNASRIFKFRGTGKAWDWEVSSENGNYDYLMYADLDFGHPDVRNEMKNWGVWYANEVGLDGFRLDAVKHIKHSYLGDWVNHVRTKTGKEMFTVAEYWQNDVNAINNYLAKVNYNHSVFDAPLHYNFHYASQSGGNYDMRNLLNGTVVAAHPTKAVTLVENHDSQPGQSLESVVQPWFKPLAYAFILTRAEGYPSIFYGDMYGTKGNSSYEIPALKTKIEPLLKARKDYAYGTQHNYMDHWDVIGWTREGDSTKEKSGLATLVTDGAGGSKWMYVGKQNAGEVWYDITGNRTDKITINTDGWGNFQVNGGSVSVYVQQ

SEQ ID NO: 43586 - protein, 482 aa, Bacillus sp. YR288
NDTMMQYFEWYVPNDGQHWNRLRNDAAYLKSIGVSAIWTPPAYKGTSQNDVGYGAYDLYDLGEFNQKGTIRTKYGTKAELKSAVSTLKSNGIQVYGDVVMNHKGGADYTENVTAVEVNPSNRNQETSDEYTIQAWTGFNFPGRGTTHSPFKWQWYHFDGTDWDQSRNASRIFKFRGTGKAWDWEVSSENGNYDYLMYADLDFDHPDVRNEMKNWGVWYANEVGLDGFRLDAVKHIKHSYLGDWVNHVRTKTGKEMFTVAEYWQNDVNAINNYLAKVNYNHSVFDAPLHYNFHYASQSGGNYDMRNLLNGTVVAAHPTKAVTLVENHDSQPGQSLESVVQPWFKPLAYAFILTRAEGYPSIFYGDMYGTKGNSSYEIPALKTKIEPLLKARKDYAYGTQHNYMDHWDVIGWTREGDSTKEKSGLATLVTDGAGGSKWMYVGKQNAGEVWYDITGNRTDKITINTDGWGNFQVNGGSVSVYVQQ

SEQ ID NO: 43587 - protein, 482 aa, Bacillus sp. YR288
NRTMMQYFEWYVPNDGQHWNRLRNDAAYLKSIGVSAIWTPPAYKGTSQNDVGYGAYDLYDLGEFNQKGTIRTKYGTKAELKSAVSTLKSNGIQVYGDVVMNHKGGADYTENVTAVEVNPSNRNQETSDEYTIQAWTGFNFPGRGTTHSPFKWQWYHFDGTDWDQSRNASRIFKFRGTGKAWDWEVSSENGNYDYLMYADLDFDHPDVRNEMKNWGVWYANEVGLDGFRLDAVKHIKHSYLGDWVNHVRTKTGKEMFTVAEYWQNDVNAINNYLAKVNYNHSVFDAPLHYNFHYASQSGGNYDMRNLLNGTVVAAHPTKAVTLVENHDSQPGQSLESVVQPWFKPLAYAFILTRAEGYPSIFYGDMYGTKGNSSYEIPALKTKIEPLLKARKDYAYGTQHNYMDHWDVIGWTREGDSTKEKSGLATLVTDGAGGSKWMYVGKQNAGEVWYDITGNRTDKITINTDGWGNFQVNGGSVSVYVQQ

SEQ ID NO: 43588 - protein, 480 aa, Bacillus licheniformis
NGTLMQYFEWYMPNDGQHWRRLQNDSAYLAEHGITAVWIPPAYKGTSQADVGYGAYDLYDLGEFHQKGTVRTKYGTKGELQSAIKSLHSRDINVYGDVVINHKGGADATEDVTAVEVDPADRNRVISGEHLIKAWTHFHFPGRGSTYSDFKWHWYHFDGTDWDESRKLNRIYKFQGKAWDWPVSNENGNYDYLMYADIDYDHPDVAAEIKRWGTWYANELQLDGFRLDAVKHIKFYFLRDWVNHVREKTGKEMFTVAEYWQNDLGALENYLNWTNFNHSVFDVPLHYQFHAASTQGGGYDMRKLLNGTVVSKHPLKSVTFVDNHDTQPGQSLESTVQTWFKPLAYAFILTRESGYPQVFYGDMYGTKGDSQREIPALKHKIEPILKARKQYAYGAQHDYFDHHDIVGWTREGDSSVANSGLAALITDGPGGAKRMYVGRQNAGETWHDITGNRSEPVVINSEGWGEFHVNGGSVSIYVQR

SEQ ID NO: 43589 - protein, 482 aa, Bacillus sp. YR288
NGTMMQYFEWYVPNDGQHWNRLRNDAAYLKSIGVSAIWTPPAYKGTSQNDVGYGAYDLYDLGEFNQKGTIRTKYGTKAELKSAVSTLKSNGIQVYGDVVMNHKGGADYTENVTAVEVNPSNRNQETSDEYTIQAWTGFNFPGRGTTHSPFKWQWYHFDGTDWDQSRNASRIFKFRGTGKAWDWEVSSEFGNYDYLMYADLDFDHPDVINEMKNWGVWYANEVGLDGFRLDAVKHIKFQFLGDWVNHVRTKTGKEMFTVAEYWQNDVNAINNYLAKVNYNHSVFDAPLHYNFHYASQSGGNYDMRNLLNGTVVAAHPTKAVTLVENHDSQPGQSLESVVQPWFKPLAYAFILTRAEGYPSIFYGDMYGTKGNSSYEIPALKTKIEPLLKARKDYAYGTQHNYMDHWDVIGWTREGDSTKEKSGLATLVTDGAGGSKWMYVGKQNAGEVWYDITGNRTDKITINTDGWGNFQVNGGSVSVYVQQ

SEQ ID NO: 43590 - protein, 482 aa, Bacillus sp. YR288
NGTMMQYFEWYVPNDGQHWNRLRNDAAYLKSIGVSAIWTPPAYKGTSQNDVGYGAYDLYDLGEFNQKGTIRTKYGTKAELKSAVSTLKSNGIQVYGDVVMNHKGGADYTENVTAVEVNPSNRNQETSDEYTIQAWTGFNFPGRGTTHSPFKWQWYHFDGTDWDQSRNASRIFKFRGTGKAWDWEVSSENGNYDYLMYADLDFDHPDVRNEMKNWGVWYANEVGLDGFRLDAVKHIKHSYLGDWVNHVRTKTGKEMWTVAEYWQNDVNAINNYLAKVNYNHSVFDAPLHYNFHYASQSGGNYDMRNLLNGTVVAAHPTKAVTLVENHDSQPGQSLESVVQPWFKPLAYAFILTRAEGYPSIFYGDMYGTKGNSSYEIPALKTKIEPLLKARKDYAYGTQHNYMDHWDVIGWTREGDSTKEKSGLATLVTDGAGGSKWMYVGKQNAGEVWYDITGNRTDKITINTDGWGNFQVNGGSVSVYVQQ

SEQ ID NO: 43591 - protein, 482 aa, Bacillus sp. YR288
NGTMMQYFEWYVPNDGQHWNRLRNDAAYLKSIGVSAIWTPPAYKGTSQNDVGYGAYDLYDLGEFNQKGTIRTKYGTKAELKSAVSTLKSNGIQVYGDVVMNHKGGADYTENVTAVEVNPSNRNQETSDEYTIQAWTGFNFPGRGTTHSPFKWQWYHFDGTDWDQSRNASRIFKFRGTGKAWDWEVSSENGNYDYLLYADLDYDHPDVINEMKNWGVWYANEVGLDGFRLDAVKHIKFQFLGDWVNHVRTKTGKEMFTVAEYWQNDVNAINNYLAKVNYNHSVFDAPLHYNFHYASQSGGNYDMRNLLNGTVVAAHPTKAVTLVENHDSQPGQSLESVVQPWFKPLAYAFILTRAEGYPSIFYGDMYGTKGNSSYEIPALKTKIEPLLKARKDYAYGTQHNYMDHWDVIGWTREGDSTKEKSGLATLVTDGAGGSKWMYVGKQNAGEVWYDITGNRTDKITINTDGWGNFQVNGGSVSVYVQQ

SEQ ID NO: 43592 - protein, 482 aa, Bacillus sp. YR288
NGTMMQYFEWYVPNDGQHWNRLRNDAAYLKSIGVNAIWTPPAYKGTSQNDVGYGAYDLYDLGEFNQKGTIRTKYGTKAELKSAVSTLKSNGIQVYGDVVMNHKGGADYTENVTAVEVNPSNRNQETSDEYTIQAWTGFNFPGRGTTHSPFKWQWYHFDGTDWDQSRNASRIFKFRGTGKAWDWEVSSENGNYDYLMYADLDFDHPDVRNEMKNWGVWYANEVGLDGFRLDAVKHIKHSYLGDWVNHVRTKTGKTMFTVAEYWQNDVNAINNYLAKVNYNHSVFDAPLHYNFHYASQSGGNYDMRNLLNGTVVAAHPTKAVTLVENHDSQPGQSLESVVQPWFKPLAYAFILTRAEGYPSIFYGDMYGTKGNSSYEIPALKTKIEPLLKARKDYAYGTQHNYMDHWDVIGWTREGDSTKEKSGLATLVTDGAGGSKWMYVGKQNAGEVWYDITGNRTDKITINTDGWGNFQVNGGSVSVYVQQ

SEQ ID NO: 43593 - protein, 482 aa, Bacillus sp. YR288
NGTMMQYFEWYVPNDGQHWNRLRNDAAYLKSIGVSAIWTPPAYKGTSQNDVGYGAYDLYDLGEFNQKGTIRTKYGTKAELKSAVSTLKSNGIQVYGDVVMNHKGGADYTENVTAVEVNPSNRNQETSDEYTIQAWTGFNFPGRGTTHSPFKWQWYHFDGTDWDQSRNASRIFKFRGTGKAWDWEVSSENGNYDYLMYADLDFDHPDVRNEMKNWGVWYANEVGLDGFRLDAVKHIKHSYLGDWVNHVRTKTGKEMFTVAEYWQNDVNAINNYLAKVNYNHSVFDAPLHYNFHYASQSGGNYDMRNLLNGTVVAAHPTKAVTLVENHDSQPGQSLESVVQPWFKPLAYAFILTRAEGYPSIFYGDMYGTKGNSSYEIPALKTKIEPLLKARKDYAYGTQHNYMDHWDVIGWTREGDSTKEKSGLATLVTDGAGGSKRMYVGKQNAGEVWYDITGNRTDKITINTDGWGNFQVNGGSVSVYVQQ

SEQ ID NO: 43594 - protein, 482 aa, Bacillus sp. YR288
NGTMMQYFEWYVPNDGQHWNRLRNDAAYLKSIGVSAIWTPPAYKGTSQNDVGYGAYDLYDLGEFNQKGTIRTKYGTKAELKSAVSTLKSNGIQVYGDVVMNHKGGADYTENVTAVEVNPSNRNQETSDEYTIQAWTGFNFPGRGTTHSPFKWQWYHFDGTDWDQSRNASRIFKFRGTGKAWDWEVSSENGNYDYLNYADLDFDHPDVRNEMKNWGVWYANEVGLDGFRLDAVKHIKHSYLGDWVNHVRTKTGKEMFTVAEYWQNDVNAINNYLAKVNYNHSVFDAPLHYNFHYASQSGGNYDMRNLLNGTVVAAHPTKAVTLVENHDSQPGQSLESVVQPWFKPLAYAFILTRAEGYPSIFYGDMYGTKGNSSYEIPALKTKIEPLLKARKDYAYGTQHNYMDHWDVIGWTREGDSTKEKSGLATLVTDGAGGSKWMYVGKQNAGEVWYDITGNRTDKITINTDGWGNFQVNGGSVSVYVQQ

SEQ ID NO: 43595 - protein, 482 aa, Bacillus sp. YR288
NGTMMQYFEWYVPNDGQHWNRLRNDAAYLKSIGVSAIWTPPAYKGTSQNDVGYGAYDLYDLGEFNQKGTIRTKYGTKAELKSAVSTLKSNGIQVYGDVVMNHKGGADYTENVTAVEVNPSNRNQETSDEYTIQAWTGFNFPGRGTTHSPFKWQWYHFDGTDWDQSRNASRIFKFRGTGKAWDWEVSSENGNYDYLMYADLDFDHPDVRNEMKNWGVWYANEVGLDGFRLDAVKHIKHSYLGDWVNHVRTKTGKEMFTVAEYWQNDVNAINNYLAKVNYNHSVFDAPLHYNFHYASQSGGNYDMRNLLNGTVVAAHPTKAVTLVENHDSQPGQSLESVVQPWFKPLAYAFILTRAEGYPSIFYGDMYGTKGNSSYEIPALKTKIEPLLKARKDYAYGTQHNYMDHWDVIGWTREGDSTKEKSGLATLVTDGAGGSKWMYVGKQNAGEVWYDITGNRTDKITINTDGWGNFQVNSGSVSVYVQQ

SEQ ID NO: 43596 - protein, 482 aa, Bacillus sp. YR288
NGTMMQYFEWYVPNDGQHWNRLRNDAAYLKSIGVSAIWTPPAYKGTSQNDVGYGAYDLYDLGEFNQKGTIRTKYGTKAELKSAVSTLKSNGIQVYGDVVMNHKGGADYTENVTAVEVNPSNRNQETSDEYTIQAWTGFNFPGRGTTHSPFKWQWYHFDGTDWDQSRNASRIFKFRGTGKAWDWEVSSENGNYDYLMYADLDFDHPDVRNEMKNWGVWYANEVGLDGFRLDAVKHIKHSYLGDWVNHVRTKTGKEMFTVAEYWQNDVNAINNYLAKVNYNHSVFDAPLHYNFHYASQSGGNYDMRNLLNGTVVAAHPTKAVTLVENHDSQPGQSLESVVQPWFKPLAYAFILTRAEGVPSIFYGDMYGTKGNSSYEIPALKTKIEPLLKARKDYAYGTQHNYMDHWDVIGWTREGDSTKEKSGLATLVTDGAGGSKWMYVGKQNAGEVWYDITGNRTDKITINTDGWGNFQVNGGSVSVYVQQ

SEQ ID NO: 43597 - protein, 482 aa, Bacillus sp. YR288
NGTMMQYFEWYVPNDGQHWNRLRNDAAYLKSIGVSAIWTPPAYKGTSQNDVGYGAYDLYDLGEFNQKGTIRTKYGTKAELKSAVSTLKSNGIQVYGDVVMNHKGGADYTENVTAVEVNPSNRNQETSDEYTIQAWTGFNFPGRGTTHSPFKWQWYHFDGTDWDQSRNASRIFKFRGTGKAWDWEVSSENGNYDYLMYADLDFDHPDVRNEMKNWGVWYANEVGLDGFRLDAVKHIKHSYLGDWVNHVRTKTGKEMFTVAEYWQNDVNAINNYLAKVNYNHWVFDAPLHYNFHYASQSGGNYDMRNLLNGTVVAAHPEKAVTLVENHDSQPGQSLESVVQPWFKPLAYAFILTRAEGYPSIFYGDMYGTKGNSSYEIPALKTKIEPLLKARKDYAYGTQHNYMDHWDVIGWTREGDSTKEKSGLATLVTDGVGGSKWMYVGKQNAGEVWYDITGNRTDKITINTDGWGNFQVNGGSVSVYVQQ

SEQ ID NO: 43598 - protein, 482 aa, Bacillus sp. YR288
NGTMMQYFEWYVPNDGQHWNRLRNDAAYLKSIGVSAIWTPPAYKGTSQNDVGYGAYDLYDLGEFNQKGTIRTKYGTKAELKSAVSTLKSNGIQVYGDVVMNHKGGADYTENVTAVEVNPSNRNQETSDEYTIQAWTGFNFPGRGTTHSPFKWQWYHFDGTDWDQSRNASRIFKFRGTGKAWDWEVSSENGNYDYLMYADLDYDHPDVRNEMKNWGVWYANEVGLDGFRLDAVKHIKHQYLGDWVNHVRTKTGKEMFTVAEYWQNDVNAINNYLAKVNYNHSVFDAPLHYNFHYASQSGGNYDMRNLLNGTVVAAHPTKAVTLVENHDSQPGQSLESVVQPWFKPLAYAFILTRAEGYPSIFYGDMYGTKGNSSYEIPALKTKIEPLLKARKDYAYGTQHNYMDHWDVIGWTREGDSTKEKSGLATLVTDGAGGSKWMYVGKQNAGEVWYDITGNRTDKITINTDGWGNFQVNGGSVSVYVQQ

SEQ ID NO: 43599 - protein, 482 aa, Bacillus sp. YR288
NGTMMQYFEWYVPNDGQHWNRLRNDAAYLKSIGVSAIWTPPAYKGTSQNDVGYGAYDLYDLGEFNQKGTIRTKYGTKAELKSAVSTLKSNGIQVYGDVVMNHKGGADYTENVTAVEVNPSNRNQETSDEYTIQAWTGFNFPGRGTTHSPFKWQWYHFDGTDWDQSRNASRIFKFRGTGKAWDWEVSSENGNYDYLMYADLDFDHPDVRNEMKNWGVWYANEVGLDGFRLDAVKHIKHSYLGDWVNHVRTKTGKEMFTVAEYWQNDVNAINNYLAKVNYNHSVFDAPLHYNFHYASQSGGNYDMRNLLNGTVVAAHPTKAVTLVENHDSQPGQSLESVVQPWFKPLAYAFILTRAEGYPSIFYGDMYGTKGNSSYEIPALKTKIEPLLKARKDYAYGTQHNYMDHWDVIGWTREGDSTKEKSGLATLVTDGAGGSKWMYVGKQNAGEVWYDITGNRTDKITINTDGWGTFQVNGGSVSVYVQQ

SEQ ID NO: 43600 - protein, 482 aa, Bacillus sp. YR288
NGTMMQYFEWYVPNDGQHWNRLRNDAAYLKSIGVSAIWTPPAYKGTSQNDVGYGAYDLYDLGEFNQKGTIRTKYGTKAELKSAVSTLKSNGIQVYGDVVMNHKGGADYTENVTAVEVNPSNRNQETSDEYTIQAWTGFNFPGRGTTHSPFKWQWYHFDGTDWDQSRNASRIFKFRGTGKAWDWEVSSENGNYDYLMYADLDFDHPDVRNEMKNWGVWYANEVGLDGFRLDAVKHIKHSYLGDWVNHVRTKTGKEMFTVAEYWQNDVNAINNYLAKVNYNHSVFDAPLHYNFHYASQSGGNYDMRNLLNGTVVAAHPTKAVTLVENHDSQPGQSLESVVQPWFKPLAYAFILTRAEGYPSIFYGDMYGTKGNSSYEIPALKTKIEPLLKARKDYAYGTQHNYMDHWDVIGWTREGDSTKEKSGLATLVTDGAGGSKWMYVGKQNAGEVWYDITGNRTDKITINTDGWGNFQVNRGSVSVYVQQ
